United States Patent Application Publication US 2005/0244851 A1 - sequence listing, part 34

SEQ ID NO: 1312074 - DNA, 25 bp, Homo sapien
aagatgatgcgaagagagagtggga

SEQ ID NO: 1312075 - DNA, 25 bp, Homo sapien
tggccacaggcaagccggggagaga

SEQ ID NO: 1312076 - DNA, 25 bp, Homo sapien
aaccttgcgcacatcttgatcttgg

SEQ ID NO: 1312077 - DNA, 25 bp, Homo sapien
cactcactgataatagcccagtgcc

SEQ ID NO: 1312078 - DNA, 25 bp, Homo sapien
actcactgataatagcccagtgccc

SEQ ID NO: 1312079 - DNA, 25 bp, Homo sapien
ctcactgataatagcccagtgccca

SEQ ID NO: 1312080 - DNA, 25 bp, Homo sapien
tgcagagagatctcagacgcagatt

SEQ ID NO: 1312081 - DNA, 25 bp, Homo sapien
agacgcagattctggacacccctgt

SEQ ID NO: 1312082 - DNA, 25 bp, Homo sapien
tacaatgatcaagcaactgccactc

SEQ ID NO: 1312083 - DNA, 25 bp, Homo sapien
cacaccagctatacaatgatcaagc

SEQ ID NO: 1312084 - DNA, 25 bp, Homo sapien
aatagatctgtagagggttcccaga

SEQ ID NO: 1312085 - DNA, 25 bp, Homo sapien
gattctgggacctcactcctcagtg

SEQ ID NO: 1312086 - DNA, 25 bp, Homo sapien
tctgtagagggttcccagagagcca

SEQ ID NO: 1312087 - DNA, 25 bp, Homo sapien
gccacctctgtccagtgaacaagtt

SEQ ID NO: 1312088 - DNA, 25 bp, Homo sapien
taccctggacaccgaagtcctgcca

SEQ ID NO: 1312089 - DNA, 25 bp, Homo sapien
acaccgaagtcctgccaacacagcc

SEQ ID NO: 1312090 - DNA, 25 bp, Homo sapien
ctaccctggacaccgaagtcctgcc

SEQ ID NO: 1312091 - DNA, 25 bp, Homo sapien
ctggacaccgaagtcctgccaacac

SEQ ID NO: 1312092 - DNA, 25 bp, Homo sapien
cctgactaaggtggtagcaacatct

SEQ ID NO: 1312093 - DNA, 25 bp, Homo sapien
taaaaggaatgcacacgagggcctc

SEQ ID NO: 1312094 - DNA, 25 bp, Homo sapien
ggacttttggcctcaccctgaactg

SEQ ID NO: 1312095 - DNA, 25 bp, Homo sapien
tacgaaagctctggcatactgggcc

SEQ ID NO: 1312096 - DNA, 25 bp, Homo sapien
ctctggcccagcccccgacgcctga

SEQ ID NO: 1312097 - DNA, 25 bp, Homo sapien
gcccagcccccgacgcctgagccac

SEQ ID NO: 1312098 - DNA, 25 bp, Homo sapien
ggcccagcccccgacgcctgagcca

SEQ ID NO: 1312099 - DNA, 25 bp, Homo sapien
ctggcccagcccccgacgcctgagc

SEQ ID NO: 1312100 - DNA, 25 bp, Homo sapien
cacgctgtctgactggtcaatgggt

SEQ ID NO: 1312101 - DNA, 25 bp, Homo sapien
ccacgctgtctgactggtcaatggg

SEQ ID NO: 1312102 - DNA, 25 bp, Homo sapien
aagagatgcctaggctcaccaggtc

SEQ ID NO: 1312103 - DNA, 25 bp, Homo sapien
gctgaggagggcctctcgatgttca

SEQ ID NO: 1312104 - DNA, 25 bp, Homo sapien
tgttcagccaaagagatgcctaggc

SEQ ID NO: 1312105 - DNA, 25 bp, Homo sapien
cctgcagggcgctgatcccgctgag

SEQ ID NO: 1312106 - DNA, 25 bp, Homo sapien
ttgtagcggcacaggtccagggcct

SEQ ID NO: 1312107 - DNA, 25 bp, Homo sapien
gaagctgtccttgtagcggcacagg

SEQ ID NO: 1312108 - DNA, 25 bp, Homo sapien
ccatagccagcagccgcgaagctgt

SEQ ID NO: 1312109 - DNA, 25 bp, Homo sapien
ggagaaggcacggtccgctagtggg

SEQ ID NO: 1312110 - DNA, 25 bp, Homo sapien
tgtgctcaaccgacagctgggatct

SEQ ID NO: 1312111 - DNA, 25 bp, Homo sapien
cagaggagctgtgctcaaccgacag

SEQ ID NO: 1312112 - DNA, 25 bp, Homo sapien
gagctgtgctcaaccgacagctggg

SEQ ID NO: 1312113 - DNA, 25 bp, Homo sapien
gctcaaccgacagctgggatctggg

SEQ ID NO: 1312114 - DNA, 25 bp, Homo sapien
cactgtgcattcgtgaagaagcgag

SEQ ID NO: 1312115 - DNA, 25 bp, Homo sapien
cattcgtgaagaagcgagggcttca

SEQ ID NO: 1312116 - DNA, 25 bp, Homo sapien
tgagcactgtgcattcgtgaagaag

SEQ ID NO: 1312117 - DNA, 25 bp, Homo sapien
tgcattcgtgaagaagcgagggctt

SEQ ID NO: 1312118 - DNA, 25 bp, Homo sapien
tgggtcctgcaccatcttgctcagg

SEQ ID NO: 1312119 - DNA, 25 bp, Homo sapien
gctctgggtcctgcaccatcttgct

SEQ ID NO: 1312120 - DNA, 25 bp, Homo sapien
atgctgtggatctgggagaacctgg

SEQ ID NO: 1312121 - DNA, 25 bp, Homo sapien
tctgggtcctgcaccatcttgctca

SEQ ID NO: 1312122 - DNA, 25 bp, Homo sapien
cttctgccagcagtcgagcattagt

SEQ ID NO: 1312123 - DNA, 25 bp, Homo sapien
cattagtcggtgcagaaggttagga

SEQ ID NO: 1312124 - DNA, 25 bp, Homo sapien
cagcagtcgagcattagtcggtgca

SEQ ID NO: 1312125 - DNA, 25 bp, Homo sapien
tcgagcattagtcggtgcagaaggt

SEQ ID NO: 1312126 - DNA, 25 bp, Homo sapien
agtaaggccgctccccaaaggccat

SEQ ID NO: 1312127 - DNA, 25 bp, Homo sapien
aagtgtctcgggagcggcccatagc

SEQ ID NO: 1312128 - DNA, 25 bp, Homo sapien
aaactgaagtgtctcgggagcggcc

SEQ ID NO: 1312129 - DNA, 25 bp, Homo sapien
gaagtggccaaactgaagtgtctcg

SEQ ID NO: 1312130 - DNA, 25 bp, Homo sapien
ccgcccgaagccagagatcttgcag

SEQ ID NO: 1312131 - DNA, 25 bp, Homo sapien
gatcttgcagacaaggtcgctgctg

SEQ ID NO: 1312132 - DNA, 25 bp, Homo sapien
tgtagacagcctctgatcggtcccg

SEQ ID NO: 1312133 - DNA, 25 bp, Homo sapien
tgctgaccagcacatggcgagctgc

SEQ ID NO: 1312134 - DNA, 25 bp, Homo sapien
gaggccagggctgtgcgcttggatc

SEQ ID NO: 1312135 - DNA, 25 bp, Homo sapien
ggccagggctgtgcgcttggatccc

SEQ ID NO: 1312136 - DNA, 25 bp, Homo sapien
agggagaagactgaggccagggctg

SEQ ID NO: 1312137 - DNA, 25 bp, Homo sapien
ctgtggagggagaagactgaggcca

SEQ ID NO: 1312138 - DNA, 25 bp, Homo sapien
taaagtggtcattggcagccccagg

SEQ ID NO: 1312139 - DNA, 25 bp, Homo sapien
cctgcccgctttacagaataaagtg

SEQ ID NO: 1312140 - DNA, 25 bp, Homo sapien
cccctgcccgctttacagaataaag

SEQ ID NO: 1312141 - DNA, 25 bp, Homo sapien
ggacccctgcccgctttacagaata

SEQ ID NO: 1312142 - DNA, 25 bp, Homo sapien
actcggtgacaatcatcaaggtgct

SEQ ID NO: 1312143 - DNA, 25 bp, Homo sapien
tactcggtgacaatcatcaaggtgc

SEQ ID NO: 1312144 - DNA, 25 bp, Homo sapien
ctcggtgacaatcatcaaggtgctt

SEQ ID NO: 1312145 - DNA, 25 bp, Homo sapien
gtactcggtgacaatcatcaaggtg

SEQ ID NO: 1312146 - DNA, 25 bp, Homo sapien
aacacacatgctaagttgtccactc

SEQ ID NO: 1312147 - DNA, 25 bp, Homo sapien
actccgcacgcacacaagtttcccc

SEQ ID NO: 1312148 - DNA, 25 bp, Homo sapien
gctccctaatctcgccatcctcctg

SEQ ID NO: 1312149 - DNA, 25 bp, Homo sapien
gaaccagcaccaagctccctaatct

SEQ ID NO: 1312150 - DNA, 25 bp, Homo sapien
atatgcacggctacgagcagctcct

SEQ ID NO: 1312151 - DNA, 25 bp, Homo sapien
ctctgtgagtcggaggcgctgtccc

SEQ ID NO: 1312152 - DNA, 25 bp, Homo sapien
gaggcgctgtccctcagcatatgca

SEQ ID NO: 1312153 - DNA, 25 bp, Homo sapien
cgatgtggctatggtcaaactggcc

SEQ ID NO: 1312154 - DNA, 25 bp, Homo sapien
tggggaaacagcacctcagataccg

SEQ ID NO: 1312155 - DNA, 25 bp, Homo sapien
gggaaacagcacctcagataccgcc

SEQ ID NO: 1312156 - DNA, 25 bp, Homo sapien
gataccgccagaggccactgccctg

SEQ ID NO: 1312157 - DNA, 25 bp, Homo sapien
acagcacctcagataccgccagagg

SEQ ID NO: 1312158 - DNA, 25 bp, Homo sapien
tgtgacctcgaattccatctctttc

SEQ ID NO: 1312159 - DNA, 25 bp, Homo sapien
aaagtgactccagatcatggactgt

SEQ ID NO: 1312160 - DNA, 25 bp, Homo sapien
ttccagcttaaatcctggtaaactg

SEQ ID NO: 1312161 - DNA, 25 bp, Homo sapien
taaactgagtaccagcagtgtgacc

SEQ ID NO: 1312162 - DNA, 25 bp, Homo sapien
tcctccaaggctcctctccagcgtg

SEQ ID NO: 1312163 - DNA, 25 bp, Homo sapien
cctccaaggctcctctccagcgtga

SEQ ID NO: 1312164 - DNA, 25 bp, Homo sapien
ctcctccaaggctcctctccagcgt

SEQ ID NO: 1312165 - DNA, 25 bp, Homo sapien
ctccaaggctcctctccagcgtgac

SEQ ID NO: 1312166 - DNA, 25 bp, Homo sapien
tcgcatccagttccttggcgaacag

SEQ ID NO: 1312167 - DNA, 25 bp, Homo sapien
gcttttcgcatccagttccttggcg

SEQ ID NO: 1312168 - DNA, 25 bp, Homo sapien
atccagttccttggcgaacagatgc

SEQ ID NO: 1312169 - DNA, 25 bp, Homo sapien
gggtccaggaatgtgcgacgtgttg

SEQ ID NO: 1312170 - DNA, 25 bp, Homo sapien
tcctcctttgccatagctgcagggc

SEQ ID NO: 1312171 - DNA, 25 bp, Homo sapien
aatacagctcctcttcatcatgggc

SEQ ID NO: 1312172 - DNA, 25 bp, Homo sapien
gcatcccctcctcctttgccatagc

SEQ ID NO: 1312173 - DNA, 25 bp, Homo sapien
ggaaatacagctcctcttcatcatg

SEQ ID NO: 1312174 - DNA, 25 bp, Homo sapien
agtgctggcaaaggagaaaggtgct

SEQ ID NO: 1312175 - DNA, 25 bp, Homo sapien
tgctggcaaaggagaaaggtgctgt

SEQ ID NO: 1312176 - DNA, 25 bp, Homo sapien
gctggcaaaggagaaaggtgctgta

SEQ ID NO: 1312177 - DNA, 25 bp, Homo sapien
cagtgctggcaaaggagaaaggtgc

SEQ ID NO: 1312178 - DNA, 25 bp, Homo sapien
ttgggacacgggacagacaggcctg

SEQ ID NO: 1312179 - DNA, 25 bp, Homo sapien
caggcctgacctgatccaaggtcat

SEQ ID NO: 1312180 - DNA, 25 bp, Homo sapien
atccaaggtcattgtggagggcttc

SEQ ID NO: 1312181 - DNA, 25 bp, Homo sapien
gacctgatccaaggtcattgtggag

SEQ ID NO: 1312182 - DNA, 25 bp, Homo sapien
ccaggacgaggagggccgagatggt

SEQ ID NO: 1312183 - DNA, 25 bp, Homo sapien
caaatggccagcacactcatcacgg

SEQ ID NO: 1312184 - DNA, 25 bp, Homo sapien
acactcatcacggagcccaggacga

SEQ ID NO: 1312185 - DNA, 25 bp, Homo sapien
tcactacggtgacgacaatggcggg

SEQ ID NO: 1312186 - DNA, 25 bp, Homo sapien
tcaccatggagtaagtctgctcact

SEQ ID NO: 1312187 - DNA, 25 bp, Homo sapien
ccccagggtctgtacttcaatgctg

SEQ ID NO: 1312188 - DNA, 25 bp, Homo sapien
aagcggcccggatctgaaagacgta

SEQ ID NO: 1312189 - DNA, 25 bp, Homo sapien
aagacgtagcgggtagccggcttca

SEQ ID NO: 1312190 - DNA, 25 bp, Homo sapien
aagtgaagcccaccagcgccagatc

SEQ ID NO: 1312191 - DNA, 25 bp, Homo sapien
gaagtgaagcccaccagcgccagat

SEQ ID NO: 1312192 - DNA, 25 bp, Homo sapien
ctggagagagatcaagaagtgaagc

SEQ ID NO: 1312193 - DNA, 25 bp, Homo sapien
gcagggatgggctcccgccacgaca

SEQ ID NO: 1312194 - DNA, 25 bp, Homo sapien
cgccacgacagggacacgctctggg

SEQ ID NO: 1312195 - DNA, 25 bp, Homo sapien
gtactccgtgtcattggccccaggg

SEQ ID NO: 1312196 - DNA, 25 bp, Homo sapien
cgtagtatcggatctcgtactccgt

SEQ ID NO: 1312197 - DNA, 25 bp, Homo sapien
cttcattgtcccatagagggaaaag

SEQ ID NO: 1312198 - DNA, 25 bp, Homo sapien
cttttcttcattgtcccatagaggg

SEQ ID NO: 1312199 - DNA, 25 bp, Homo sapien
ttcttcattgtcccatagagggaaa

SEQ ID NO: 1312200 - DNA, 25 bp, Homo sapien
tcttcattgtcccatagagggaaaa

SEQ ID NO: 1312201 - DNA, 25 bp, Homo sapien
gtggagatgaacaaagaaatctata

SEQ ID NO: 1312202 - DNA, 25 bp, Homo sapien
cagttagttgtaaacaatactgcac

SEQ ID NO: 1312203 - DNA, 25 bp, Homo sapien
ggagatgaacaaagaaatctataac

SEQ ID NO: 1312204 - DNA, 25 bp, Homo sapien
tgctatcaagcgaggcagtgggagt

SEQ ID NO: 1312205 - DNA, 25 bp, Homo sapien
ggcggggtgcgtgtacagaggatgg

SEQ ID NO: 1312206 - DNA, 25 bp, Homo sapien
actcgggagggcgactgacgctggg

SEQ ID NO: 1312207 - DNA, 25 bp, Homo sapien
gtgactttgtgtcccggagaggggc

SEQ ID NO: 1312208 - DNA, 25 bp, Homo sapien
agtccctctcgcacactcgggaggg

SEQ ID NO: 1312209 - DNA, 25 bp, Homo sapien
ctgcgcgtaggtggttcccgcggcg

SEQ ID NO: 1312210 - DNA, 25 bp, Homo sapien
tgcgcgtaggtggttcccgcggcgg

SEQ ID NO: 1312211 - DNA, 25 bp, Homo sapien
tgcctggcgcggtaggaaggccacg

SEQ ID NO: 1312212 - DNA, 25 bp, Homo sapien
agtaggtgacgtccgagcggcctcc

SEQ ID NO: 1312213 - DNA, 25 bp, Homo sapien
agcgcagtcgcagcaccagcggcga

SEQ ID NO: 1312214 - DNA, 25 bp, Homo sapien
ggcgagcggctcaggctgtactgca

SEQ ID NO: 1312215 - DNA, 25 bp, Homo sapien
ggtcggtgggtgagcgcgcatagct

SEQ ID NO: 1312216 - DNA, 25 bp, Homo sapien
gggtgcaggaagccgagggcgggtc

SEQ ID NO: 1312217 - DNA, 25 bp, Homo sapien
gtcggtgggtgagcgcgcatagctg

SEQ ID NO: 1312218 - DNA, 25 bp, Homo sapien
agccgagggcgggtcggtgggtgag

SEQ ID NO: 1312219 - DNA, 25 bp, Homo sapien
tggaaactccacaagacttcagggc

SEQ ID NO: 1312220 - DNA, 25 bp, Homo sapien
tagagttcttccttatgcactgagg

SEQ ID NO: 1312221 - DNA, 25 bp, Homo sapien
catagaatgtgagttgggcaagcct

SEQ ID NO: 1312222 - DNA, 25 bp, Homo sapien
attggccctgactggactcactgga

SEQ ID NO: 1312223 - DNA, 25 bp, Homo sapien
ccacggcccccagccaactggatac

SEQ ID NO: 1312224 - DNA, 25 bp, Homo sapien
cccacggcccccagccaactggata

SEQ ID NO: 1312225 - DNA, 25 bp, Homo sapien
gatgggacggtcgtgttcatccacg

SEQ ID NO: 1312226 - DNA, 25 bp, Homo sapien
gaactgcagttccacgaagatgcgc

SEQ ID NO: 1312227 - DNA, 25 bp, Homo sapien
tgcttgtagtagacgcgcaccgaga

SEQ ID NO: 1312228 - DNA, 25 bp, Homo sapien
cacacttggtacgtgcggatgggac

SEQ ID NO: 1312229 - DNA, 25 bp, Homo sapien
ggacaagagtaaaggggtgggcagc

SEQ ID NO: 1312230 - DNA, 25 bp, Homo sapien
aaggggtgggcagcccagagccaaa

SEQ ID NO: 1312231 - DNA, 25 bp, Homo sapien
gacaagagtaaaggggtgggcagcc

SEQ ID NO: 1312232 - DNA, 25 bp, Homo sapien
gggtgggcagcccagagccaaagtg

SEQ ID NO: 1312233 - DNA, 25 bp, Homo sapien
cccattacttggcagtgcagtccag

SEQ ID NO: 1312234 - DNA, 25 bp, Homo sapien
cggctttccgagatccgcgcaactg

SEQ ID NO: 1312235 - DNA, 25 bp, Homo sapien
tccagaggcgtcagcgactgtgggc

SEQ ID NO: 1312236 - DNA, 25 bp, Homo sapien
ggcaggaccgccgacggctttccga

SEQ ID NO: 1312237 - DNA, 25 bp, Homo sapien
aactgacagcacatcggaatcgcga

SEQ ID NO: 1312238 - DNA, 25 bp, Homo sapien
aagacgcgggctccagtatcgccga

SEQ ID NO: 1312239 - DNA, 25 bp, Homo sapien
tgcacaatcagaggcaagacgcggg

SEQ ID NO: 1312240 - DNA, 25 bp, Homo sapien
tatgacgcctctggattcaactgag

SEQ ID NO: 1312241 - DNA, 25 bp, Homo sapien
tcaactgagcgtatagctcccctaa

SEQ ID NO: 1312242 - DNA, 25 bp, Homo sapien
agttccatgatcagcacgtcgggca

SEQ ID NO: 1312243 - DNA, 25 bp, Homo sapien
gtctcctagcccctgtagtccgggc

SEQ ID NO: 1312244 - DNA, 25 bp, Homo sapien
ctgcggacagttccatgatcagcac

SEQ ID NO: 1312245 - DNA, 25 bp, Homo sapien
tctgttggccacactgtggtctcct

SEQ ID NO: 1312246 - DNA, 25 bp, Homo sapien
tccgcatctccctgtctccactctt

SEQ ID NO: 1312247 - DNA, 25 bp, Homo sapien
cgcatctccctgtctccactcttca

SEQ ID NO: 1312248 - DNA, 25 bp, Homo sapien
gcatctccctgtctccactcttcat

SEQ ID NO: 1312249 - DNA, 25 bp, Homo sapien
ctccgcatctccctgtctccactct

SEQ ID NO: 1312250 - DNA, 25 bp, Homo sapien
aggccgccagggtcccaaaagcagc

SEQ ID NO: 1312251 - DNA, 25 bp, Homo sapien
aaagcagcgcgagacagagctgcat

SEQ ID NO: 1312252 - DNA, 25 bp, Homo sapien
gtcccaaaagcagcgcgagacagag

SEQ ID NO: 1312253 - DNA, 25 bp, Homo sapien
aggaagaggcgcagcgggtgtggac

SEQ ID NO: 1312254 - DNA, 25 bp, Homo sapien
cagaccgagctgtcagtccggcggc

SEQ ID NO: 1312255 - DNA, 25 bp, Homo sapien
gccagcctagcaccgctgagcaatg

SEQ ID NO: 1312256 - DNA, 25 bp, Homo sapien
ctcaagccgcgccagcctagcaccg

SEQ ID NO: 1312257 - DNA, 25 bp, Homo sapien
ggtccgcagaccgagctgtcagtcc

SEQ ID NO: 1312258 - DNA, 25 bp, Homo sapien
caggtaaacaagttaataccagtat

SEQ ID NO: 1312259 - DNA, 25 bp, Homo sapien
cctttcagtgtttcaggtaaacaag

SEQ ID NO: 1312260 - DNA, 25 bp, Homo sapien
aatcacatagatgtatggtagagga

SEQ ID NO: 1312261 - DNA, 25 bp, Homo sapien
ttcctggaacatatatataaagaaa

SEQ ID NO: 1312262 - DNA, 25 bp, Homo sapien
ttctttctgatgtatataatatgaa

SEQ ID NO: 1312263 - DNA, 25 bp, Homo sapien
tctttctgatgtatataatatgaat

SEQ ID NO: 1312264 - DNA, 25 bp, Homo sapien
tttctttctgatgtatataatatga

SEQ ID NO: 1312265 - DNA, 25 bp, Homo sapien
ttttagagttttcagcaatggctcc

SEQ ID NO: 1312266 - DNA, 25 bp, Homo sapien
tcccattcttcgttgttcataacaa

SEQ ID NO: 1312267 - DNA, 25 bp, Homo sapien
caaagtcaaagtctagctgaaggag

SEQ ID NO: 1312268 - DNA, 25 bp, Homo sapien
taatacaagtctcaaatccactgat

SEQ ID NO: 1312269 - DNA, 25 bp, Homo sapien
tcggccatcagtatgtagacgagtg

SEQ ID NO: 1312270 - DNA, 25 bp, Homo sapien
gccatcagtatgtagacgagtggag

SEQ ID NO: 1312271 - DNA, 25 bp, Homo sapien
catcagtatgtagacgagtggagga

SEQ ID NO: 1312272 - DNA, 25 bp, Homo sapien
cggccatcagtatgtagacgagtgg

SEQ ID NO: 1312273 - DNA, 25 bp, Homo sapien
accagtgacaaggtgcttgctcatg

SEQ ID NO: 1312274 - DNA, 25 bp, Homo sapien
gacaaggtgcttgctcatgtaagtc

SEQ ID NO: 1312275 - DNA, 25 bp, Homo sapien
ttgctcatgtaagtcttgcaattcc

SEQ ID NO: 1312276 - DNA, 25 bp, Homo sapien
ggtgcttgctcatgtaagtcttgca

SEQ ID NO: 1312277 - DNA, 25 bp, Homo sapien
acattagccctgagggtagcggcca

SEQ ID NO: 1312278 - DNA, 25 bp, Homo sapien
tacaacattagccctgagggtagcg

SEQ ID NO: 1312279 - DNA, 25 bp, Homo sapien
aacattagccctgagggtagcggcc

SEQ ID NO: 1312280 - DNA, 25 bp, Homo sapien
caacattagccctgagggtagcggc

SEQ ID NO: 1312281 - DNA, 25 bp, Homo sapien
acatatgcagcgtcccaaacgatgc

SEQ ID NO: 1312282 - DNA, 25 bp, Homo sapien
aacgatgcaacccatgccgccagag

SEQ ID NO: 1312283 - DNA, 25 bp, Homo sapien
gccatactgctgtagtggtagcacc

SEQ ID NO: 1312284 - DNA, 25 bp, Homo sapien
gtagtggtagcaccgtaccatccca

SEQ ID NO: 1312285 - DNA, 25 bp, Homo sapien
ctccagtgaagactctggcgtagtc

SEQ ID NO: 1312286 - DNA, 25 bp, Homo sapien
tccagtgaagactctggcgtagtcg

SEQ ID NO: 1312287 - DNA, 25 bp, Homo sapien
cagtgaagactctggcgtagtcgcc

SEQ ID NO: 1312288 - DNA, 25 bp, Homo sapien
ccagtgaagactctggcgtagtcgc

SEQ ID NO: 1312289 - DNA, 25 bp, Homo sapien
gaccccgaagtgctgcgggagcata

SEQ ID NO: 1312290 - DNA, 25 bp, Homo sapien
ccagctcaaggaagccgccatcggt

SEQ ID NO: 1312291 - DNA, 25 bp, Homo sapien
atatgacccagctcaaggaagccgc

SEQ ID NO: 1312292 - DNA, 25 bp, Homo sapien
gcgggagcatatgacccagctcaag

SEQ ID NO: 1312293 - DNA, 25 bp, Homo sapien
acccacctggcatggctgatgataa

SEQ ID NO: 1312294 - DNA, 25 bp, Homo sapien
tgataacggggagccctcagatgac

SEQ ID NO: 1312295 - DNA, 25 bp, Homo sapien
gagccctcagatgacctggtgcccg

SEQ ID NO: 1312296 - DNA, 25 bp, Homo sapien
acctggcatggctgatgataacggg

SEQ ID NO: 1312297 - DNA, 25 bp, Homo sapien
gaagaacttttgtgatgccaacaac

SEQ ID NO: 1312298 - DNA, 25 bp, Homo sapien
tgtacacctactttgcctccaatgg

SEQ ID NO: 1312299 - DNA, 25 bp, Homo sapien
ccacgatatcctggccgccggattt

SEQ ID NO: 1312300 - DNA, 25 bp, Homo sapien
ggatttgacggcatgtacacctact

SEQ ID NO: 1312301 - DNA, 25 bp, Homo sapien
acaccagcattcggccctggaacaa

SEQ ID NO: 1312302 - DNA, 25 bp, Homo sapien
gctgggcggagcacttcatcaaaga

SEQ ID NO: 1312303 - DNA, 25 bp, Homo sapien
acagtgaggcccgagatcgtttcca

SEQ ID NO: 1312304 - DNA, 25 bp, Homo sapien
caatacgcgcaacagggtcaatggc

SEQ ID NO: 1312305 - DNA, 25 bp, Homo sapien
tcaatggcaagtactatgagacggc

SEQ ID NO: 1312306 - DNA, 25 bp, Homo sapien
tgactgaacttagcccagggcagct

SEQ ID NO: 1312307 - DNA, 25 bp, Homo sapien
gttcagctgaggttgtagccactca

SEQ ID NO: 1312308 - DNA, 25 bp, Homo sapien
acagagcccgttcctcaggcgagtg

SEQ ID NO: 1312309 - DNA, 25 bp, Homo sapien
tcactcgttcccaggtcagaggtca

SEQ ID NO: 1312310 - DNA, 25 bp, Homo sapien
tgtgtagtggccacccagtcaccac

SEQ ID NO: 1312311 - DNA, 25 bp, Homo sapien
ggctcgcatgcaccctgctcccttc

SEQ ID NO: 1312312 - DNA, 25 bp, Homo sapien
tgggctcgcatgcaccctgctccct

SEQ ID NO: 1312313 - DNA, 25 bp, Homo sapien
ggtctgggctcgcatgcaccctgct

SEQ ID NO: 1312314 - DNA, 25 bp, Homo sapien
tcgcatgcaccctgctcccttctgc

SEQ ID NO: 1312315 - DNA, 25 bp, Homo sapien
gctccagagcctaatttttcccaga

SEQ ID NO: 1312316 - DNA, 25 bp, Homo sapien
cctttagctgcctgaactgactgag

SEQ ID NO: 1312317 - DNA, 25 bp, Homo sapien
tgaggcccactcactagagccatgt

SEQ ID NO: 1312318 - DNA, 25 bp, Homo sapien
tctaggtttaagctcctcccagtag

SEQ ID NO: 1312319 - DNA, 25 bp, Homo sapien
ccctggctataaaggatagtggagg

SEQ ID NO: 1312320 - DNA, 25 bp, Homo sapien
aaagactgctctccctgcgagcaat

SEQ ID NO: 1312321 - DNA, 25 bp, Homo sapien
tctagcttcaggagcctttggtcac

SEQ ID NO: 1312322 - DNA, 25 bp, Homo sapien
caaaaggctgcggagaacactggat

SEQ ID NO: 1312323 - DNA, 25 bp, Homo sapien
tgcaaatgaggccttgacagtcgtc

SEQ ID NO: 1312324 - DNA, 25 bp, Homo sapien
ccaggtgcaaggctaaaccagcagc

SEQ ID NO: 1312325 - DNA, 25 bp, Homo sapien
caagggcttggtctacagtgctcag

SEQ ID NO: 1312326 - DNA, 25 bp, Homo sapien
ttaaaagtcaggctagtgccctagc

SEQ ID NO: 1312327 - DNA, 25 bp, Homo sapien
gcagtccgtacttctgttggaggat

SEQ ID NO: 1312328 - DNA, 25 bp, Homo sapien
tgtgaggggagcagtccgtacttct

SEQ ID NO: 1312329 - DNA, 25 bp, Homo sapien
gggagcagtccgtacttctgttgga

SEQ ID NO: 1312330 - DNA, 25 bp, Homo sapien
caggtaggacgcatgtgaggggagc

SEQ ID NO: 1312331 - DNA, 25 bp, Homo sapien
ggctagccttgttaagccctgttca

SEQ ID NO: 1312332 - DNA, 25 bp, Homo sapien
ctggtgagcagggacatcgaaactg

SEQ ID NO: 1312333 - DNA, 25 bp, Homo sapien
ggaaacaggacagttaccagtctga

SEQ ID NO: 1312334 - DNA, 25 bp, Homo sapien
tcaacccttgatgaaaccttttgaa

SEQ ID NO: 1312335 - DNA, 25 bp, Homo sapien
acagttgagccaaggcgacactcgg

SEQ ID NO: 1312336 - DNA, 25 bp, Homo sapien
tttgtcccccatcaataaccaagga

SEQ ID NO: 1312337 - DNA, 25 bp, Homo sapien
tcaataaccaaggacaactgaggcc

SEQ ID NO: 1312338 - DNA, 25 bp, Homo sapien
gacaaatcaaccacagttgagccaa

SEQ ID NO: 1312339 - DNA, 25 bp, Homo sapien
catgatcaggaatccgaatgcctac

SEQ ID NO: 1312340 - DNA, 25 bp, Homo sapien
aaacatctgagccaagtcttgcata

SEQ ID NO: 1312341 - DNA, 25 bp, Homo sapien
agagcaagcggaccctcaaacatct

SEQ ID NO: 1312342 - DNA, 25 bp, Homo sapien
actagtgagagcaagcggaccctca

SEQ ID NO: 1312343 - DNA, 25 bp, Homo sapien
cttgttgagctcctccgagcgttcc

SEQ ID NO: 1312344 - DNA, 25 bp, Homo sapien
aggagcccctcaggtactctcacac

SEQ ID NO: 1312345 - DNA, 25 bp, Homo sapien
ctcaggtactctcacacggcagtat

SEQ ID NO: 1312346 - DNA, 25 bp, Homo sapien
gagcccctcaggtactctcacacgg

SEQ ID NO: 1312347 - DNA, 25 bp, Homo sapien
ccctcaggtactctcacacggcagt

SEQ ID NO: 1312348 - DNA, 25 bp, Homo sapien
tcgctgcgacccttgaggcggtaca

SEQ ID NO: 1312349 - DNA, 25 bp, Homo sapien
aggccaggccgtacagcgtatcggt

SEQ ID NO: 1312350 - DNA, 25 bp, Homo sapien
gtacacagcgcgcagagccgccgag

SEQ ID NO: 1312351 - DNA, 25 bp, Homo sapien
ggccgaggcatacggccagaggctt

SEQ ID NO: 1312352 - DNA, 25 bp, Homo sapien
gaggcgaccgctccgggagccagca

SEQ ID NO: 1312353 - DNA, 25 bp, Homo sapien
cgaccgctccgggagccagcaggcc

SEQ ID NO: 1312354 - DNA, 25 bp, Homo sapien
cggaagaggcgaccgctccgggagc

SEQ ID NO: 1312355 - DNA, 25 bp, Homo sapien
cgggcggaagaggcgaccgctccgg

SEQ ID NO: 1312356 - DNA, 25 bp, Homo sapien
ccccctgcaccgacgcgccggagac

SEQ ID NO: 1312357 - DNA, 25 bp, Homo sapien
cccctgcaccgacgcgccggagaca

SEQ ID NO: 1312358 - DNA, 25 bp, Homo sapien
ccctgcaccgacgcgccggagacat

SEQ ID NO: 1312359 - DNA, 25 bp, Homo sapien
gccaagccctagcttaccctggagg

SEQ ID NO: 1312360 - DNA, 25 bp, Homo sapien
cagcctgcgaggagatgttacggca

SEQ ID NO: 1312361 - DNA, 25 bp, Homo sapien
tagaacgtctcagccaaacctggag

SEQ ID NO: 1312362 - DNA, 25 bp, Homo sapien
gctttccaaaggatgctggcgatgg

SEQ ID NO: 1312363 - DNA, 25 bp, Homo sapien
acgttttcacatcgctcagtggaag

SEQ ID NO: 1312364 - DNA, 25 bp, Homo sapien
ctttggaagtactgaacctgtaacg

SEQ ID NO: 1312365 - DNA, 25 bp, Homo sapien
tgagcaattaagcaaacaccattat

SEQ ID NO: 1312366 - DNA, 25 bp, Homo sapien
taagcaaacaccattatttcacatt

SEQ ID NO: 1312367 - DNA, 25 bp, Homo sapien
tcttgcctttcctggctagaagatc

SEQ ID NO: 1312368 - DNA, 25 bp, Homo sapien
cctttcctggctagaagatctgagc

SEQ ID NO: 1312369 - DNA, 25 bp, Homo sapien
cggccaatgattagtgtatgtcaaa

SEQ ID NO: 1312370 - DNA, 25 bp, Homo sapien
tgtcaccaagaccccggccaatgat

SEQ ID NO: 1312371 - DNA, 25 bp, Homo sapien
acgaaggatgtagactgttgagtca

SEQ ID NO: 1312372 - DNA, 25 bp, Homo sapien
aacgaaggatgtagactgttgagtc

SEQ ID NO: 1312373 - DNA, 25 bp, Homo sapien
aaacttgtctattctatagcctgag

SEQ ID NO: 1312374 - DNA, 25 bp, Homo sapien
aatgaaggctggaggcctttttgct

SEQ ID NO: 1312375 - DNA, 25 bp, Homo sapien
gcagaactatttgcatattggatct

SEQ ID NO: 1312376 - DNA, 25 bp, Homo sapien
taaggaaccaacacaggtagtatgg

SEQ ID NO: 1312377 - DNA, 25 bp, Homo sapien
tgagaaatattgttgcagttccaca

SEQ ID NO: 1312378 - DNA, 25 bp, Homo sapien
gctgattgagcggaaaaacgctgcc

SEQ ID NO: 1312379 - DNA, 25 bp, Homo sapien
gaaggtgccaggtttctacctagga

SEQ ID NO: 1312380 - DNA, 25 bp, Homo sapien
gggccacatgggacaacgaccatca

SEQ ID NO: 1312381 - DNA, 25 bp, Homo sapien
gaagccccttgccttttactcagag

SEQ ID NO: 1312382 - DNA, 25 bp, Homo sapien
gatctaccaactatcccagaggtga

SEQ ID NO: 1312383 - DNA, 25 bp, Homo sapien
gaagttgtaaacagcaagggcccta

SEQ ID NO: 1312384 - DNA, 25 bp, Homo sapien
gaaagaaagactgcctatcctggga

SEQ ID NO: 1312385 - DNA, 25 bp, Homo sapien
tgaggtcaatggtcaacagaagcca

SEQ ID NO: 1312386 - DNA, 25 bp, Homo sapien
ccaaggacaactcatgctcagcagt

SEQ ID NO: 1312387 - DNA, 25 bp, Homo sapien
caattattctggctagggtcctgga

SEQ ID NO: 1312388 - DNA, 25 bp, Homo sapien
gtcctggaatgagaaattggctgct

SEQ ID NO: 1312389 - DNA, 25 bp, Homo sapien
ggttcttcccacctgttatagaaga

SEQ ID NO: 1312390 - DNA, 25 bp, Homo sapien
gggcctgtatcgacatccagaggca

SEQ ID NO: 1312391 - DNA, 25 bp, Homo sapien
tttctctaggctatcaagtagtggg

SEQ ID NO: 1312392 - DNA, 25 bp, Homo sapien
atttttaagcaaccatttgccttgg

SEQ ID NO: 1312393 - DNA, 25 bp, Homo sapien
taactggcttcagagctagctggcc

SEQ ID NO: 1312394 - DNA, 25 bp, Homo sapien
tgaactctgagataagcccaaggaa

SEQ ID NO: 1312395 - DNA, 25 bp, Homo sapien
taagggaatgaagtgcctgcatggc

SEQ ID NO: 1312396 - DNA, 25 bp, Homo sapien
caggcgcttcgatcgcaccttgtga

SEQ ID NO: 1312397 - DNA, 25 bp, Homo sapien
tctagtcccagagtagacagggctc

SEQ ID NO: 1312398 - DNA, 25 bp, Homo sapien
aattgtcgcgtaccctggccaggta

SEQ ID NO: 1312399 - DNA, 25 bp, Homo sapien
tgtacactgcgctatcatcacaggg

SEQ ID NO: 1312400 - DNA, 25 bp, Homo sapien
aagactctatcgtaggcagggcacc

SEQ ID NO: 1312401 - DNA, 25 bp, Homo sapien
ggccctggcaacttcgtggaggaac

SEQ ID NO: 1312402 - DNA, 25 bp, Homo sapien
cgtggaggaacatcctggtttgtga

SEQ ID NO: 1312403 - DNA, 25 bp, Homo sapien
tgtccagctggacggtcacatctga

SEQ ID NO: 1312404 - DNA, 25 bp, Homo sapien
caaagggcagttggaatacgaggct

SEQ ID NO: 1312405 - DNA, 25 bp, Homo sapien
aaacagtgataacctcatagagctg

SEQ ID NO: 1312406 - DNA, 25 bp, Homo sapien
tgagaaaagcctgatttaggcccgg

SEQ ID NO: 1312407 - DNA, 25 bp, Homo sapien
aaagcctgatttaggcccggtgcgg

SEQ ID NO: 1312408 - DNA, 25 bp, Homo sapien
aaatggagatgcaaacagtgataac

SEQ ID NO: 1312409 - DNA, 25 bp, Homo sapien
caaggatgtagagttcaccatctgg

SEQ ID NO: 1312410 - DNA, 25 bp, Homo sapien
atgtagagttcaccatctggggaca

SEQ ID NO: 1312411 - DNA, 25 bp, Homo sapien
ggatgtagagttcaccatctgggga

SEQ ID NO: 1312412 - DNA, 25 bp, Homo sapien
aaggatgtagagttcaccatctggg

SEQ ID NO: 1312413 - DNA, 25 bp, Homo sapien
gactggcactatctggtccagagag

SEQ ID NO: 1312414 - DNA, 25 bp, Homo sapien
ttcttccagcgtaaaatcccgcgag

SEQ ID NO: 1312415 - DNA, 25 bp, Homo sapien
gagagacatcgtccccggtaatggc

SEQ ID NO: 1312416 - DNA, 25 bp, Homo sapien
cggtaatggccatcctccggtgcgt

SEQ ID NO: 1312417 - DNA, 25 bp, Homo sapien
caaatcgaggagtaaaacaacttgc

SEQ ID NO: 1312418 - DNA, 25 bp, Homo sapien
tcaagatcatgtggttccaccaggt

SEQ ID NO: 1312419 - DNA, 25 bp, Homo sapien
tactctttaatatggacaaatcgag

SEQ ID NO: 1312420 - DNA, 25 bp, Homo sapien
tggcctaactcactttactctttaa

SEQ ID NO: 1312421 - DNA, 25 bp, Homo sapien
gtagcgcacgagtcccaggaggcgg

SEQ ID NO: 1312422 - DNA, 25 bp, Homo sapien
ccgccgtgctccaggcggtagcgca

SEQ ID NO: 1312423 - DNA, 25 bp, Homo sapien
cctcacacagcacaccttgcaccgc

SEQ ID NO: 1312424 - DNA, 25 bp, Homo sapien
tctgccggctgtccccctcacacag

SEQ ID NO: 1312425 - DNA, 25 bp, Homo sapien
cagtattccccctcagccagcgtct

SEQ ID NO: 1312426 - DNA, 25 bp, Homo sapien
cagcgtctcctggattgccacagac

SEQ ID NO: 1312427 - DNA, 25 bp, Homo sapien
gcgtctcctggattgccacagactg

SEQ ID NO: 1312428 - DNA, 25 bp, Homo sapien
gcagtattccccctcagccagcgtc

SEQ ID NO: 1312429 - DNA, 25 bp, Homo sapien
ctggcccctgctgagcgcacacacc

SEQ ID NO: 1312430 - DNA, 25 bp, Homo sapien
gctggcccctgctgagcgcacacac

SEQ ID NO: 1312431 - DNA, 25 bp, Homo sapien
cagggcgcacgggactccgctgccc

SEQ ID NO: 1312432 - DNA, 25 bp, Homo sapien
ctgaaggcttgtagatcctacaggg

SEQ ID NO: 1312433 - DNA, 25 bp, Homo sapien
gcttgtagatcctacagggtcttct

SEQ ID NO: 1312434 - DNA, 25 bp, Homo sapien
gaaggcttgtagatcctacagggtc

SEQ ID NO: 1312435 - DNA, 25 bp, Homo sapien
aaggcttgtagatcctacagggtct

SEQ ID NO: 1312436 - DNA, 25 bp, Homo sapien
agctttcggccctttgaaacagtca

SEQ ID NO: 1312437 - DNA, 25 bp, Homo sapien
cacagctttcggccctttgaaacag

SEQ ID NO: 1312438 - DNA, 25 bp, Homo sapien
tggccacagctttcggccctttgaa

SEQ ID NO: 1312439 - DNA, 25 bp, Homo sapien
catggccacagctttcggccctttg

SEQ ID NO: 1312440 - DNA, 25 bp, Homo sapien
cattgagcacgaaacagagtggccc

SEQ ID NO: 1312441 - DNA, 25 bp, Homo sapien
gctgcaccaggccatgtagtgggaa

SEQ ID NO: 1312442 - DNA, 25 bp, Homo sapien
cagacaagggctaggaccggtttca

SEQ ID NO: 1312443 - DNA, 25 bp, Homo sapien
tagtgggaagcgttgagttgaatca

SEQ ID NO: 1312444 - DNA, 25 bp, Homo sapien
ccaggttctgggctaccagtaaggc

SEQ ID NO: 1312445 - DNA, 25 bp, Homo sapien
ggtcaactgactgcttgccaggttc

SEQ ID NO: 1312446 - DNA, 25 bp, Homo sapien
gggtcaactgactgcttgccaggtt

SEQ ID NO: 1312447 - DNA, 25 bp, Homo sapien
tgggctaccagtaaggccagcagga

SEQ ID NO: 1312448 - DNA, 25 bp, Homo sapien
cagctctgtggctaccattggccac

SEQ ID NO: 1312449 - DNA, 25 bp, Homo sapien
gctctgtggctaccattggccacat

SEQ ID NO: 1312450 - DNA, 25 bp, Homo sapien
tctgtggctaccattggccacatac

SEQ ID NO: 1312451 - DNA, 25 bp, Homo sapien
tgtggctaccattggccacatacat

SEQ ID NO: 1312452 - DNA, 25 bp, Homo sapien
taatgggaggactcttctggatgag

SEQ ID NO: 1312453 - DNA, 25 bp, Homo sapien
ggtcacaggttcattcccaccctga

SEQ ID NO: 1312454 - DNA, 25 bp, Homo sapien
tggagagggtcacaggttcattccc

SEQ ID NO: 1312455 - DNA, 25 bp, Homo sapien
ctgtaatgggaggactcttctggat

SEQ ID NO: 1312456 - DNA, 25 bp, Homo sapien
ggatgaggagaaaggttgctatcat

SEQ ID NO: 1312457 - DNA, 25 bp, Homo sapien
ctgaaggatgaggagaaaggttgct

SEQ ID NO: 1312458 - DNA, 25 bp, Homo sapien
aaggatgaggagaaaggttgctatc

SEQ ID NO: 1312459 - DNA, 25 bp, Homo sapien
tgaaggatgaggagaaaggttgcta

SEQ ID NO: 1312460 - DNA, 25 bp, Homo sapien
tagtccttagtagcaaccctggctc

SEQ ID NO: 1312461 - DNA, 25 bp, Homo sapien
ggcaaaccttggtgcgacacttagt

SEQ ID NO: 1312462 - DNA, 25 bp, Homo sapien
gcgttaagacctgaagcactgagtt

SEQ ID NO: 1312463 - DNA, 25 bp, Homo sapien
tgaagtcactgtcggtcctagttcc

SEQ ID NO: 1312464 - DNA, 25 bp, Homo sapien
tgtttctacaagatgcatgctagac

SEQ ID NO: 1312465 - DNA, 25 bp, Homo sapien
catgctagaccatgagactacatag

SEQ ID NO: 1312466 - DNA, 25 bp, Homo sapien
gataaaacacatctcaaccctgcaa

SEQ ID NO: 1312467 - DNA, 25 bp, Homo sapien
tgcaatctgccagcatgccttgttt

SEQ ID NO: 1312468 - DNA, 25 bp, Homo sapien
tttcagatcctcgtatgtcttctta

SEQ ID NO: 1312469 - DNA, 25 bp, Homo sapien
gatcctcgtatgtcttcttattcac

SEQ ID NO: 1312470 - DNA, 25 bp, Homo sapien
gtccttgtcttttcagatcctcgta

SEQ ID NO: 1312471 - DNA, 25 bp, Homo sapien
tcttttcagatcctcgtatgtcttc

SEQ ID NO: 1312472 - DNA, 25 bp, Homo sapien
ctgccatcgttctgaagccttctgc

SEQ ID NO: 1312473 - DNA, 25 bp, Homo sapien
cagtgtcaggctgccatcgttctga

SEQ ID NO: 1312474 - DNA, 25 bp, Homo sapien
tcaggctgccatcgttctgaagcct

SEQ ID NO: 1312475 - DNA, 25 bp, Homo sapien
ctcagtgtcaggctgccatcgttct

SEQ ID NO: 1312476 - DNA, 25 bp, Homo sapien
tagcttcagaaggagtgatcagaca

SEQ ID NO: 1312477 - DNA, 25 bp, Homo sapien
aagacctccgaaaacagagaaactg

SEQ ID NO: 1312478 - DNA, 25 bp, Homo sapien
tgatcagacaagtatacacaagaaa

SEQ ID NO: 1312479 - DNA, 25 bp, Homo sapien
ctcttgaaggaggttaatgtggaac

SEQ ID NO: 1312480 - DNA, 25 bp, Homo sapien
gtttgggatgcccaaacacctcatg

SEQ ID NO: 1312481 - DNA, 25 bp, Homo sapien
gtcacattagcaaagtgagcagtgt

SEQ ID NO: 1312482 - DNA, 25 bp, Homo sapien
agcagtgtttgggatgcccaaacac

SEQ ID NO: 1312483 - DNA, 25 bp, Homo sapien
ggatgcccaaacacctcatgccatg

SEQ ID NO: 1312484 - DNA, 25 bp, Homo sapien
caattcccaggaaaaatggctctga

SEQ ID NO: 1312485 - DNA, 25 bp, Homo sapien
caggaaaaatggctctgaattcctt

SEQ ID NO: 1312486 - DNA, 25 bp, Homo sapien
ttcaattcccaggaaaaatggctct

SEQ ID NO: 1312487 - DNA, 25 bp, Homo sapien
ggaaaaatggctctgaattccttac

SEQ ID NO: 1312488 - DNA, 25 bp, Homo sapien
gctggaaggctttgggccctcggta

SEQ ID NO: 1312489 - DNA, 25 bp, Homo sapien
gccctcggtaggtgtagtttccaca

SEQ ID NO: 1312490 - DNA, 25 bp, Homo sapien
tttaggccatgaagcttatacagcc

SEQ ID NO: 1312491 - DNA, 25 bp, Homo sapien
tagtttccacaaatctcacagttgt

SEQ ID NO: 1312492 - DNA, 25 bp, Homo sapien
tggcttgcttgcgctgtacattttc

SEQ ID NO: 1312493 - DNA, 25 bp, Homo sapien
gtcctggcttgcttgcgctgtacat

SEQ ID NO: 1312494 - DNA, 25 bp, Homo sapien
tcctggcttgcttgcgctgtacatt

SEQ ID NO: 1312495 - DNA, 25 bp, Homo sapien
cctggcttgcttgcgctgtacattt

SEQ ID NO: 1312496 - DNA, 25 bp, Homo sapien
catattcatagatctgggcttctag

SEQ ID NO: 1312497 - DNA, 25 bp, Homo sapien
cccgagaatctctacatattcatag

SEQ ID NO: 1312498 - DNA, 25 bp, Homo sapien
ctacatattcatagatctgggcttc

SEQ ID NO: 1312499 - DNA, 25 bp, Homo sapien
aatctctacatattcatagatctgg

SEQ ID NO: 1312500 - DNA, 25 bp, Homo sapien
tgccctttgacttgggatttttggc

SEQ ID NO: 1312501 - DNA, 25 bp, Homo sapien
tactgaatagtctctgggctcgctc

SEQ ID NO: 1312502 - DNA, 25 bp, Homo sapien
cagggactttcctttggtactgaat

SEQ ID NO: 1312503 - DNA, 25 bp, Homo sapien
gaggtatcaagtgactccagggact

SEQ ID NO: 1312504 - DNA, 25 bp, Homo sapien
gagacaggacggcaaaggattttag

SEQ ID NO: 1312505 - DNA, 25 bp, Homo sapien
gactgtgcaaacacacagtaaatcg

SEQ ID NO: 1312506 - DNA, 25 bp, Homo sapien
atggaatcagagctacttagaagac

SEQ ID NO: 1312507 - DNA, 25 bp, Homo sapien
cacagtaaatcgatagttttgatag

SEQ ID NO: 1312508 - DNA, 25 bp, Homo sapien
cgccacatttcaagcctaaagctaa

SEQ ID NO: 1312509 - DNA, 25 bp, Homo sapien
ccgccacatttcaagcctaaagcta

SEQ ID NO: 1312510 - DNA, 25 bp, Homo sapien
ctgtggcaggaccacacatttcaca

SEQ ID NO: 1312511 - DNA, 25 bp, Homo sapien
actactactgctgaaggaaacatac

SEQ ID NO: 1312512 - DNA, 25 bp, Homo sapien
agacagagagaacactactactgct

SEQ ID NO: 1312513 - DNA, 25 bp, Homo sapien
acactactactgctgaaggaaacat

SEQ ID NO: 1312514 - DNA, 25 bp, Homo sapien
tagacagagagaacactactactgc

SEQ ID NO: 1312515 - DNA, 25 bp, Homo sapien
tccagcatgggtcagggcactgctt

SEQ ID NO: 1312516 - DNA, 25 bp, Homo sapien
cagcatgggtcagggcactgcttgt

SEQ ID NO: 1312517 - DNA, 25 bp, Homo sapien
gcatgggtcagggcactgcttgtct

SEQ ID NO: 1312518 - DNA, 25 bp, Homo sapien
atgggtcagggcactgcttgtctct

SEQ ID NO: 1312519 - DNA, 25 bp, Homo sapien
gcttcactctatctgtgtaatcctg

SEQ ID NO: 1312520 - DNA, 25 bp, Homo sapien
cggccatccaggaaaggtcccattc

SEQ ID NO: 1312521 - DNA, 25 bp, Homo sapien
ctatctgtgtaatcctgaaggtact

SEQ ID NO: 1312522 - DNA, 25 bp, Homo sapien
caaactcagcctgaatcttcccaaa

SEQ ID NO: 1312523 - DNA, 25 bp, Homo sapien
caatgcagacaaagcaaaaagggtt

SEQ ID NO: 1312524 - DNA, 25 bp, Homo sapien
tacagaggaacacacaatgcagaca

SEQ ID NO: 1312525 - DNA, 25 bp, Homo sapien
gaacacacaatgcagacaaagcaaa

SEQ ID NO: 1312526 - DNA, 25 bp, Homo sapien
gcagacaaagcaaaaagggtttcta

SEQ ID NO: 1312527 - DNA, 25 bp, Homo sapien
agatgtgcccacagacacacctttg

SEQ ID NO: 1312528 - DNA, 25 bp, Homo sapien
tatgccttcatgtatgccttccagg

SEQ ID NO: 1312529 - DNA, 25 bp, Homo sapien
tatgggcataagatggaagatgtgc

SEQ ID NO: 1312530 - DNA, 25 bp, Homo sapien
cacgtccagactatcgcaaaggttt

SEQ ID NO: 1312531 - DNA, 25 bp, Homo sapien
gacaggtatgtgatataatccagct

SEQ ID NO: 1312532 - DNA, 25 bp, Homo sapien
ctttaggaatgtcaaataattggtc

SEQ ID NO: 1312533 - DNA, 25 bp, Homo sapien
agatggacaggtatgtgatataatc

SEQ ID NO: 1312534 - DNA, 25 bp, Homo sapien
tctttaggaatgtcaaataattggt

SEQ ID NO: 1312535 - DNA, 25 bp, Homo sapien
tagcctcaaatactcagaaggctaa

SEQ ID NO: 1312536 - DNA, 25 bp, Homo sapien
ttttggcaaaggtaaaatatgcttg

SEQ ID NO: 1312537 - DNA, 25 bp, Homo sapien
tatgcacctgtagcctcaaatactc

SEQ ID NO: 1312538 - DNA, 25 bp, Homo sapien
gctgtattgataatggactgggtac

SEQ ID NO: 1312539 - DNA, 25 bp, Homo sapien
gccttcaggttaatgtacttgaggt

SEQ ID NO: 1312540 - DNA, 25 bp, Homo sapien
gaggtaacagtcatggagatcgaga

SEQ ID NO: 1312541 - DNA, 25 bp, Homo sapien
ggttaatgtacttgaggtaacagtc

SEQ ID NO: 1312542 - DNA, 25 bp, Homo sapien
gagatcgagataacgaccatatccc

SEQ ID NO: 1312543 - DNA, 25 bp, Homo sapien
tctcgagccttcaggagttcctcaa

SEQ ID NO: 1312544 - DNA, 25 bp, Homo sapien
ggagttcctcaaattccactgacat

SEQ ID NO: 1312545 - DNA, 25 bp, Homo sapien
attccactgacattggcacacagat

SEQ ID NO: 1312546 - DNA, 25 bp, Homo sapien
tcttcacttggattctctcgagcct

SEQ ID NO: 1312547 - DNA, 25 bp, Homo sapien
cctccgcgctatgtattgcaataaa

SEQ ID NO: 1312548 - DNA, 25 bp, Homo sapien
tcattaccttttgaccatggctgga

SEQ ID NO: 1312549 - DNA, 25 bp, Homo sapien
cttgggcatccttctaatcagttat

SEQ ID NO: 1312550 - DNA, 25 bp, Homo sapien
ctcccttggttagcagaagacctca

SEQ ID NO: 1312551 - DNA, 25 bp, Homo sapien
taacagttgacaccatgactgcctt

SEQ ID NO: 1312552 - DNA, 25 bp, Homo sapien
caacaccacctggagtggtcatgtg

SEQ ID NO: 1312553 - DNA, 25 bp, Homo sapien
cttattataagtgagctccagggca

SEQ ID NO: 1312554 - DNA, 25 bp, Homo sapien
tgcacctggctaccagcctttcaaa

SEQ ID NO: 1312555 - DNA, 25 bp, Homo sapien
tatttgcttgagtctattatagaat

SEQ ID NO: 1312556 - DNA, 25 bp, Homo sapien
gaattcagcaaactcattgggtcct

SEQ ID NO: 1312557 - DNA, 25 bp, Homo sapien
ctcattgggtcctgaaatggcattg

SEQ ID NO: 1312558 - DNA, 25 bp, Homo sapien
ctcatttgggtgcttccggtggaat

SEQ ID NO: 1312559 - DNA, 25 bp, Homo sapien
ccttatcatcatacaaatccctcag

SEQ ID NO: 1312560 - DNA, 25 bp, Homo sapien
tatcatcatacaaatccctcaggtt

SEQ ID NO: 1312561 - DNA, 25 bp, Homo sapien
tcatcatacaaatccctcaggttcc

SEQ ID NO: 1312562 - DNA, 25 bp, Homo sapien
catccttatcatcatacaaatccct

SEQ ID NO: 1312563 - DNA, 25 bp, Homo sapien
gtcatggactcttcataactattgt

SEQ ID NO: 1312564 - DNA, 25 bp, Homo sapien
gggcacgtgtaagccggccgcggtg

SEQ ID NO: 1312565 - DNA, 25 bp, Homo sapien
gctatgcacctgagtcatggactct

SEQ ID NO: 1312566 - DNA, 25 bp, Homo sapien
gatacaggatgctgtaagaatgggc

SEQ ID NO: 1312567 - DNA, 25 bp, Homo sapien
cttgcatggcccgagtgcggtgatc

SEQ ID NO: 1312568 - DNA, 25 bp, Homo sapien
gatcagaattgatctggtcccggag

SEQ ID NO: 1312569 - DNA, 25 bp, Homo sapien
cccgagtgcggtgatcagaattgat

SEQ ID NO: 1312570 - DNA, 25 bp, Homo sapien
ggtgatcagaattgatctggtcccg

SEQ ID NO: 1312571 - DNA, 25 bp, Homo sapien
caaacggtgacacaaacgccgttag

SEQ ID NO: 1312572 - DNA, 25 bp, Homo sapien
gaggaggttaccaagaccggagctc

SEQ ID NO: 1312573 - DNA, 25 bp, Homo sapien
cagcttttaccagctgaggcagaaa

SEQ ID NO: 1312574 - DNA, 25 bp, Homo sapien
gttaccaagaccggagctcggagag

SEQ ID NO: 1312575 - DNA, 25 bp, Homo sapien
gaggttaccaagaccggagctcgga

SEQ ID NO: 1312576 - DNA, 25 bp, Homo sapien
ggacttcttggtgagcatctcttta

SEQ ID NO: 1312577 - DNA, 25 bp, Homo sapien
tagccatgacgtccatgagccgttc

SEQ ID NO: 1312578 - DNA, 25 bp, Homo sapien
tctcctcatgatagcgccgctgctg

SEQ ID NO: 1312579 - DNA, 25 bp, Homo sapien
tcttggtgagcatctctttagccat

SEQ ID NO: 1312580 - DNA, 25 bp, Homo sapien
tcagaggttcgagacgaccaggctg

SEQ ID NO: 1312581 - DNA, 25 bp, Homo sapien
gaaacgacttgtctatcggcagcga

SEQ ID NO: 1312582 - DNA, 25 bp, Homo sapien
aaaattcacatgtgaggccgggcgc

SEQ ID NO: 1312583 - DNA, 25 bp, Homo sapien
gaaaccggaacttgaggacgcagct

SEQ ID NO: 1312584 - DNA, 25 bp, Homo sapien
tgtatttcttgaatacgagatgcca

SEQ ID NO: 1312585 - DNA, 25 bp, Homo sapien
tacgagatgccatcaaatgtaaaac

SEQ ID NO: 1312586 - DNA, 25 bp, Homo sapien
cacacctttgattatatgtctgggt

SEQ ID NO: 1312587 - DNA, 25 bp, Homo sapien
aattaaacaatgacacacctttgat

SEQ ID NO: 1312588 - DNA, 25 bp, Homo sapien
cacttcctgttaggtgggtggaccg

SEQ ID NO: 1312589 - DNA, 25 bp, Homo sapien
caaacaattttgtagctgcacatct

SEQ ID NO: 1312590 - DNA, 25 bp, Homo sapien
catcctccagtcactgtgtctcaaa

SEQ ID NO: 1312591 - DNA, 25 bp, Homo sapien
gtgtctcaaacctgatgccttcctg

SEQ ID NO: 1312592 - DNA, 25 bp, Homo sapien
gaatcggatccagatgttcccgcgg

SEQ ID NO: 1312593 - DNA, 25 bp, Homo sapien
tttggcaaaaaacgtgcggccgcga

SEQ ID NO: 1312594 - DNA, 25 bp, Homo sapien
gggcgtgacccattcatgccgggaa

SEQ ID NO: 1312595 - DNA, 25 bp, Homo sapien
gttcccgcggcgtgtgcagctgcat

SEQ ID NO: 1312596 - DNA, 25 bp, Homo sapien
aatgagaagacactcggtggcgacc

SEQ ID NO: 1312597 - DNA, 25 bp, Homo sapien
gggatgagccaatctcacccctctg

SEQ ID NO: 1312598 - DNA, 25 bp, Homo sapien
ccatctatgggcaaaatggagctga

SEQ ID NO: 1312599 - DNA, 25 bp, Homo sapien
ggcacccataggagacctgaaacct

SEQ ID NO: 1312600 - DNA, 25 bp, Homo sapien
gcacttggtctccatccggtacgaa

SEQ ID NO: 1312601 - DNA, 25 bp, Homo sapien
gccagtgtcggtcttcaaaggacac

SEQ ID NO: 1312602 - DNA, 25 bp, Homo sapien
ggacacatacttgcctccaccgagt

SEQ ID NO: 1312603 - DNA, 25 bp, Homo sapien
cagggaggtagagcagcgggcgcag

SEQ ID NO: 1312604 - DNA, 25 bp, Homo sapien
gcaccctacccactccgttctttga

SEQ ID NO: 1312605 - DNA, 25 bp, Homo sapien
tgcaccctacccactccgttctttg

SEQ ID NO: 1312606 - DNA, 25 bp, Homo sapien
gatgccacggctgatcacggtatgt

SEQ ID NO: 1312607 - DNA, 25 bp, Homo sapien
agaccagacattctcgatgccacgg

SEQ ID NO: 1312608 - DNA, 25 bp, Homo sapien
gcacttaggtgcaaagagttctcca

SEQ ID NO: 1312609 - DNA, 25 bp, Homo sapien
ttcatcccgggaggtgaactgctgc

SEQ ID NO: 1312610 - DNA, 25 bp, Homo sapien
ggcctccatattccagcttccggga

SEQ ID NO: 1312611 - DNA, 25 bp, Homo sapien
ctgcacaggaagcagtgctcatgcc

SEQ ID NO: 1312612 - DNA, 25 bp, Homo sapien
ttgtcgggcacaaaagaacgggagc

SEQ ID NO: 1312613 - DNA, 25 bp, Homo sapien
cagtagtgagcacccttgtcgggca

SEQ ID NO: 1312614 - DNA, 25 bp, Homo sapien
gttcggtacatgctaagccctcgca

SEQ ID NO: 1312615 - DNA, 25 bp, Homo sapien
taagtatctgcccacacaaagttct

SEQ ID NO: 1312616 - DNA, 25 bp, Homo sapien
catgtaccaggcaagtaagtatctg

SEQ ID NO: 1312617 - DNA, 25 bp, Homo sapien
gattttagcactcacatgggacccc

SEQ ID NO: 1312618 - DNA, 25 bp, Homo sapien
gcaaagaccctacgcagatgccagt

SEQ ID NO: 1312619 - DNA, 25 bp, Homo sapien
gatgccagttctcacacaagatgag

SEQ ID NO: 1312620 - DNA, 25 bp, Homo sapien
gagtataccaggcaaacagatcccg

SEQ ID NO: 1312621 - DNA, 25 bp, Homo sapien
caatctgcctgtacatagtagcccc

SEQ ID NO: 1312622 - DNA, 25 bp, Homo sapien
cggaagcagccctcgtggaaatggc

SEQ ID NO: 1312623 - DNA, 25 bp, Homo sapien
cgaggaaaacgcactgcagtagcag

SEQ ID NO: 1312624 - DNA, 25 bp, Homo sapien
gttcatcggctagtgagcgctggca

SEQ ID NO: 1312625 - DNA, 25 bp, Homo sapien
acaagcggagcactgcgaggaaaac

SEQ ID NO: 1312626 - DNA, 25 bp, Homo sapien
cgagtcatgcccgataagctgctgg

SEQ ID NO: 1312627 - DNA, 25 bp, Homo sapien
gactcgttgcattttgcacagtcaa

SEQ ID NO: 1312628 - DNA, 25 bp, Homo sapien
tacttgcgtccatacagggactcgt

SEQ ID NO: 1312629 - DNA, 25 bp, Homo sapien
ggcaaaggtattgtcatagcagggc

SEQ ID NO: 1312630 - DNA, 25 bp, Homo sapien
cgccgcgtccctcggcggctcctac

SEQ ID NO: 1312631 - DNA, 25 bp, Homo sapien
gggagcgcgcggcgcaggcggggcc

SEQ ID NO: 1312632 - DNA, 25 bp, Homo sapien
cggggagcgcgcggcgcaggcgggg

SEQ ID NO: 1312633 - DNA, 25 bp, Homo sapien
ggcgccgcgtccctcggcggctcct

SEQ ID NO: 1312634 - DNA, 25 bp, Homo sapien
gacggaccgtgtgggcgagtgggag

SEQ ID NO: 1312635 - DNA, 25 bp, Homo sapien
cccgaggaagtgagcgcgggcccgc

SEQ ID NO: 1312636 - DNA, 25 bp, Homo sapien
ctgccgactgcagacggaccgtgtg

SEQ ID NO: 1312637 - DNA, 25 bp, Homo sapien
tgccggcgaggctgccgactgcaga

SEQ ID NO: 1312638 - DNA, 25 bp, Homo sapien
tctgagtggtaagattttcaggcac

SEQ ID NO: 1312639 - DNA, 25 bp, Homo sapien
tcacacaaaggttgaagcagcttag

SEQ ID NO: 1312640 - DNA, 25 bp, Homo sapien
gaccccactgatctttgaggagtca

SEQ ID NO: 1312641 - DNA, 25 bp, Homo sapien
gacccttctgttgccgactcttctg

SEQ ID NO: 1312642 - DNA, 25 bp, Homo sapien
ggtgaactccccagctatttataaa

SEQ ID NO: 1312643 - DNA, 25 bp, Homo sapien
tctgttgtcgttttctagtaacttc

SEQ ID NO: 1312644 - DNA, 25 bp, Homo sapien
aacgttgacgtgttatagataagcc

SEQ ID NO: 1312645 - DNA, 25 bp, Homo sapien
tttcagagtcgtcgaaaacgttgac

SEQ ID NO: 1312646 - DNA, 25 bp, Homo sapien
acagtaatatatgctagagtaaacg

SEQ ID NO: 1312647 - DNA, 25 bp, Homo sapien
tctttcccagtttgttacatcacaa

SEQ ID NO: 1312648 - DNA, 25 bp, Homo sapien
aatatatgctagagtaaacgttaaa

SEQ ID NO: 1312649 - DNA, 25 bp, Homo sapien
gctctttcccagtttgttacatcac

SEQ ID NO: 1312650 - DNA, 25 bp, Homo sapien
gcctgtttcctcagggtgtacccag

SEQ ID NO: 1312651 - DNA, 25 bp, Homo sapien
tgtacaagcctagactagaagcctg

SEQ ID NO: 1312652 - DNA, 25 bp, Homo sapien
gtgtacccagtggaatttaaatcag

SEQ ID NO: 1312653 - DNA, 25 bp, Homo sapien
actgtgagcttcctgtacaagccta

SEQ ID NO: 1312654 - DNA, 25 bp, Homo sapien
ggtctccctccgtgcagctttaagc

SEQ ID NO: 1312655 - DNA, 25 bp, Homo sapien
gctttaagcatctgtttgtcgctca

SEQ ID NO: 1312656 - DNA, 25 bp, Homo sapien
ggaaggcagccaacagatgcagact

SEQ ID NO: 1312657 - DNA, 25 bp, Homo sapien
gcagttagagctgcacgtcctccag

SEQ ID NO: 1312658 - DNA, 25 bp, Homo sapien
tcatcagcatcagtgaactgcgtcc

SEQ ID NO: 1312659 - DNA, 25 bp, Homo sapien
agcggccttcattagcggaggagct

SEQ ID NO: 1312660 - DNA, 25 bp, Homo sapien
gcagcggccttcattagcggaggag

SEQ ID NO: 1312661 - DNA, 25 bp, Homo sapien
aggcagcggccttcattagcggagg

SEQ ID NO: 1312662 - DNA, 25 bp, Homo sapien
agagttgcagctgtttagctccctt

SEQ ID NO: 1312663 - DNA, 25 bp, Homo sapien
gtttagctcccttatcaatcttctc

SEQ ID NO: 1312664 - DNA, 25 bp, Homo sapien
agcccacggctttgtgtgcatcttg

SEQ ID NO: 1312665 - DNA, 25 bp, Homo sapien
ggcccgtgggcagtaaccacgagcc

SEQ ID NO: 1312666 - DNA, 25 bp, Homo sapien
ccaggagattcttgcgtaggtgcac

SEQ ID NO: 1312667 - DNA, 25 bp, Homo sapien
ttgcgtaggtgcacgatccttccct

SEQ ID NO: 1312668 - DNA, 25 bp, Homo sapien
caatggagcctgtgttgtggtccag

SEQ ID NO: 1312669 - DNA, 25 bp, Homo sapien
tgctgacgtgcaagatgaccttcag

SEQ ID NO: 1312670 - DNA, 25 bp, Homo sapien
gcgcttcggccctctgctgtgctct

SEQ ID NO: 1312671 - DNA, 25 bp, Homo sapien
tgccccagtgctgacgtgcaagatg

SEQ ID NO: 1312672 - DNA, 25 bp, Homo sapien
ttttctctgccacgtgtaggagcat

SEQ ID NO: 1312673 - DNA, 25 bp, Homo sapien
tcttttctctgccacgtgtaggagc

SEQ ID NO: 1312674 - DNA, 25 bp, Homo sapien
ttctcttttctctgccacgtgtagg

SEQ ID NO: 1312675 - DNA, 25 bp, Homo sapien
tctcttttctctgccacgtgtagga

SEQ ID NO: 1312676 - DNA, 25 bp, Homo sapien
cagggcagagcaggccccagctgtg

SEQ ID NO: 1312677 - DNA, 25 bp, Homo sapien
aggccccagctgtgcccagattctg

SEQ ID NO: 1312678 - DNA, 25 bp, Homo sapien
agagcaggccccagctgtgcccaga

SEQ ID NO: 1312679 - DNA, 25 bp, Homo sapien
gggtggccagggcagagcaggcccc

SEQ ID NO: 1312680 - DNA, 25 bp, Homo sapien
cctcttgtagaggattaagcagaca

SEQ ID NO: 1312681 - DNA, 25 bp, Homo sapien
ggtgaaaggcctcatcttcccggtg

SEQ ID NO: 1312682 - DNA, 25 bp, Homo sapien
caatcaatcaattggtgtcagctgc

SEQ ID NO: 1312683 - DNA, 25 bp, Homo sapien
tgacttgcttaaataataaacccac

SEQ ID NO: 1312684 - DNA, 25 bp, Homo sapien
ttgttcttggtggagtaggaaatga

SEQ ID NO: 1312685 - DNA, 25 bp, Homo sapien
tttgttcttggtggagtaggaaatg

SEQ ID NO: 1312686 - DNA, 25 bp, Homo sapien
gttcttggtggagtaggaaatgaga

SEQ ID NO: 1312687 - DNA, 25 bp, Homo sapien
tcttggtggagtaggaaatgagagg

SEQ ID NO: 1312688 - DNA, 25 bp, Homo sapien
gagaatgcaccgaaacattgtttca

SEQ ID NO: 1312689 - DNA, 25 bp, Homo sapien
aaatatctttttcggattagtcagt

SEQ ID NO: 1312690 - DNA, 25 bp, Homo sapien
tcttctccccgccagtgtgtacata

SEQ ID NO: 1312691 - DNA, 25 bp, Homo sapien
catatctcacatatttacatggttc

SEQ ID NO: 1312692 - DNA, 25 bp, Homo sapien
tcccggcctcccctggcatcccgca

SEQ ID NO: 1312693 - DNA, 25 bp, Homo sapien
ggcctcccctggcatcccgcatccc

SEQ ID NO: 1312694 - DNA, 25 bp, Homo sapien
tctctcccggcctcccctggcatcc

SEQ ID NO: 1312695 - DNA, 25 bp, Homo sapien
ccggcctcccctggcatcccgcatc

SEQ ID NO: 1312696 - DNA, 25 bp, Homo sapien
cgtgtagcgaataaagtgacagccc

SEQ ID NO: 1312697 - DNA, 25 bp, Homo sapien
ttttatacacagacgcggctctcgc

SEQ ID NO: 1312698 - DNA, 25 bp, Homo sapien
caagtttcgtttggtgtggccagga

SEQ ID NO: 1312699 - DNA, 25 bp, Homo sapien
gccgagaggctccacgaataaataa

SEQ ID NO: 1312700 - DNA, 25 bp, Homo sapien
tgtaaaatccaaagcaaccgaacaa

SEQ ID NO: 1312701 - DNA, 25 bp, Homo sapien
gggtggcgatgcgccgcccccgcca

SEQ ID NO: 1312702 - DNA, 25 bp, Homo sapien
agggtggcgatgcgccgcccccgcc

SEQ ID NO: 1312703 - DNA, 25 bp, Homo sapien
tcgtccatgggcgggtggcccgcgc

SEQ ID NO: 1312704 - DNA, 25 bp, Homo sapien
atcgtccatgggcgggtggcccgcg

SEQ ID NO: 1312705 - DNA, 25 bp, Homo sapien
ccgcgccggccgcaggggtcatgcg

SEQ ID NO: 1312706 - DNA, 25 bp, Homo sapien
ctgccgctggacgagtcggtctcct

SEQ ID NO: 1312707 - DNA, 25 bp, Homo sapien
caggctgtctgccaagccggtgatc

SEQ ID NO: 1312708 - DNA, 25 bp, Homo sapien
tccaggtcgtccgagctgggcgcat

SEQ ID NO: 1312709 - DNA, 25 bp, Homo sapien
gagaaagtggctctcgagcgcgcct

SEQ ID NO: 1312710 - DNA, 25 bp, Homo sapien
catcctcgtgcagcgcgtggtgcag

SEQ ID NO: 1312711 - DNA, 25 bp, Homo sapien
acggctccagctgcgcctcgtggcc

SEQ ID NO: 1312712 - DNA, 25 bp, Homo sapien
atgtccgtgtgcgtgtccgtgggcg

SEQ ID NO: 1312713 - DNA, 25 bp, Homo sapien
agctgcgcctcgtggccatcctcgt

SEQ ID NO: 1312714 - DNA, 25 bp, Homo sapien
gccccgggcgagggcgacatggccg

SEQ ID NO: 1312715 - DNA, 25 bp, Homo sapien
ggcccaagtggtgcgctgtgctgcc

SEQ ID NO: 1312716 - DNA, 25 bp, Homo sapien
gggcgagggcgacatggccgggccc

SEQ ID NO: 1312717 - DNA, 25 bp, Homo sapien
gcccaagtggtgcgctgtgctgccc

SEQ ID NO: 1312718 - DNA, 25 bp, Homo sapien
ccagagctctccattgggcgtcgct

SEQ ID NO: 1312719 - DNA, 25 bp, Homo sapien
cagccactcgtggtgcatcagcttc

SEQ ID NO: 1312720 - DNA, 25 bp, Homo sapien
ccttgccgtgttctaggtgcgggcc

SEQ ID NO: 1312721 - DNA, 25 bp, Homo sapien
gcttctgcacttcgcggtacgcggc

SEQ ID NO: 1312722 - DNA, 25 bp, Homo sapien
gggcgcggccgccacgtggggagtg

SEQ ID NO: 1312723 - DNA, 25 bp, Homo sapien
tgggaccgcaccccctctcgtcctg

SEQ ID NO: 1312724 - DNA, 25 bp, Homo sapien
ctgggaccgcaccccctctcgtcct

SEQ ID NO: 1312725 - DNA, 25 bp, Homo sapien
tggcacaacatctgtctgggcctgg

SEQ ID NO: 1312726 - DNA, 25 bp, Homo sapien
gctgagcccagcacattatctggcc

SEQ ID NO: 1312727 - DNA, 25 bp, Homo sapien
gctcaggacatgtgtttgaacctgg

SEQ ID NO: 1312728 - DNA, 25 bp, Homo sapien
gtgtttgaacctggcacaacatctg

SEQ ID NO: 1312729 - DNA, 25 bp, Homo sapien
ctgggtacctcgagcactggacaaa

SEQ ID NO: 1312730 - DNA, 25 bp, Homo sapien
gttgctctgggtacctcgagcactg

SEQ ID NO: 1312731 - DNA, 25 bp, Homo sapien
gggtacctcgagcactggacaaagc

SEQ ID NO: 1312732 - DNA, 25 bp, Homo sapien
ctctgggtacctcgagcactggaca

SEQ ID NO: 1312733 - DNA, 25 bp, Homo sapien
caggtttgtagagagctccttgtga

SEQ ID NO: 1312734 - DNA, 25 bp, Homo sapien
accctggttagtggggaatcttgca

SEQ ID NO: 1312735 - DNA, 25 bp, Homo sapien
cctggcttgggcaccctggttagtg

SEQ ID NO: 1312736 - DNA, 25 bp, Homo sapien
gtttgtagagagctccttgtgaagt

SEQ ID NO: 1312737 - DNA, 25 bp, Homo sapien
gggctttgcactgctccaggggcag

SEQ ID NO: 1312738 - DNA, 25 bp, Homo sapien
ctgtggagtgtgccaatgtggtcgc

SEQ ID NO: 1312739 - DNA, 25 bp, Homo sapien
tggagtgtgccaatgtggtcgccag

SEQ ID NO: 1312740 - DNA, 25 bp, Homo sapien
ggagtgtgccaatgtggtcgccagg

SEQ ID NO: 1312741 - DNA, 25 bp, Homo sapien
agccaattacttaccatggccttcc

SEQ ID NO: 1312742 - DNA, 25 bp, Homo sapien
tcttgcttccttacagatcttccct

SEQ ID NO: 1312743 - DNA, 25 bp, Homo sapien
cttccagaccctttgaaggtgattc

SEQ ID NO: 1312744 - DNA, 25 bp, Homo sapien
gataaaagccaattacttaccatgg

SEQ ID NO: 1312745 - DNA, 25 bp, Homo sapien
tctctaatccctcgggcagaacatt

SEQ ID NO: 1312746 - DNA, 25 bp, Homo sapien
cctttgcagggagtgatttgccatc

SEQ ID NO: 1312747 - DNA, 25 bp, Homo sapien
tatgttctagccacaccgtaactcc

SEQ ID NO: 1312748 - DNA, 25 bp, Homo sapien
gattctgatttctgctaagatgtcc

SEQ ID NO: 1312749 - DNA, 25 bp, Homo sapien
tcacatagcaggagggcatagactg

SEQ ID NO: 1312750 - DNA, 25 bp, Homo sapien
gtgatttgtctgaagtcacatagca

SEQ ID NO: 1312751 - DNA, 25 bp, Homo sapien
gacaccaaagattgggttgttcctc

SEQ ID NO: 1312752 - DNA, 25 bp, Homo sapien
gaagggaaacgacagcaaatagagg

SEQ ID NO: 1312753 - DNA, 25 bp, Homo sapien
cagtgacatgtagaaatggttgata

SEQ ID NO: 1312754 - DNA, 25 bp, Homo sapien
acactgattctgagcctgcggccag

SEQ ID NO: 1312755 - DNA, 25 bp, Homo sapien
cttgttaaagcgagagcacgtttga

SEQ ID NO: 1312756 - DNA, 25 bp, Homo sapien
tgataaaactgtgagggaacgtctg

SEQ ID NO: 1312757 - DNA, 25 bp, Homo sapien
agagaagtctaagtccagggaggac

SEQ ID NO: 1312758 - DNA, 25 bp, Homo sapien
gaggagagaagtctaagtccaggga

SEQ ID NO: 1312759 - DNA, 25 bp, Homo sapien
gggaggacaggtctggacagtccat

SEQ ID NO: 1312760 - DNA, 25 bp, Homo sapien
ccagggaggacaggtctggacagtc

SEQ ID NO: 1312761 - DNA, 25 bp, Homo sapien
accatcgtagttatcactgtcatca

SEQ ID NO: 1312762 - DNA, 25 bp, Homo sapien
catcaccatcgtagttatcactgtc

SEQ ID NO: 1312763 - DNA, 25 bp, Homo sapien
tcaccatcgtagttatcactgtcat

SEQ ID NO: 1312764 - DNA, 25 bp, Homo sapien
caccatcgtagttatcactgtcatc

SEQ ID NO: 1312765 - DNA, 25 bp, Homo sapien
caggggatattgttgcccattacat

SEQ ID NO: 1312766 - DNA, 25 bp, Homo sapien
cgggaacaggggatattgttgccca

SEQ ID NO: 1312767 - DNA, 25 bp, Homo sapien
aacaggggatattgttgcccattac

SEQ ID NO: 1312768 - DNA, 25 bp, Homo sapien
tcagcgggaacaggggatattgttg

SEQ ID NO: 1312769 - DNA, 25 bp, Homo sapien
atgtccactgtggaatggccgctgc

SEQ ID NO: 1312770 - DNA, 25 bp, Homo sapien
tgtgcagctgctccacggcccatgt

SEQ ID NO: 1312771 - DNA, 25 bp, Homo sapien
ccacggcccatgtccactgtggaat

SEQ ID NO: 1312772 - DNA, 25 bp, Homo sapien
tccactgtggaatggccgctgccat

SEQ ID NO: 1312773 - DNA, 25 bp, Homo sapien
gatgtgacttgtactgctacactga

SEQ ID NO: 1312774 - DNA, 25 bp, Homo sapien
gacttgtactgctacactgacaatg

SEQ ID NO: 1312775 - DNA, 25 bp, Homo sapien
tacactgacaatgtaacgaagcatt

SEQ ID NO: 1312776 - DNA, 25 bp, Homo sapien
ctagaccccgacaaagatgtgactt

SEQ ID NO: 1312777 - DNA, 25 bp, Homo sapien
ggagatcagtagctggccagcccat

SEQ ID NO: 1312778 - DNA, 25 bp, Homo sapien
acggccacagggagatcagtagctg

SEQ ID NO: 1312779 - DNA, 25 bp, Homo sapien
cctttgaaatgcctgtggatatgtg

SEQ ID NO: 1312780 - DNA, 25 bp, Homo sapien
cagggagatcagtagctggccagcc

SEQ ID NO: 1312781 - DNA, 25 bp, Homo sapien
tctgcctatttccacactgcacgtg

SEQ ID NO: 1312782 - DNA, 25 bp, Homo sapien
tatttccacactgcacgtgggtctc

SEQ ID NO: 1312783 - DNA, 25 bp, Homo sapien
agtgaggtctgcctatttccacact

SEQ ID NO: 1312784 - DNA, 25 bp, Homo sapien
ctgtagtgaggtctgcctatttcca

SEQ ID NO: 1312785 - DNA, 25 bp, Homo sapien
gaaagcaccaagaatcttgaggcag

SEQ ID NO: 1312786 - DNA, 25 bp, Homo sapien
aaagcaccaagaatcttgaggcaga

SEQ ID NO: 1312787 - DNA, 25 bp, Homo sapien
agaaagcaccaagaatcttgaggca

SEQ ID NO: 1312788 - DNA, 25 bp, Homo sapien
cagaaagcaccaagaatcttgaggc

SEQ ID NO: 1312789 - DNA, 25 bp, Homo sapien
tggcaacccaagtgcaggtacagtg

SEQ ID NO: 1312790 - DNA, 25 bp, Homo sapien
gcaacccaagtgcaggtacagtggg

SEQ ID NO: 1312791 - DNA, 25 bp, Homo sapien
ggcttggcaacccaagtgcaggtac

SEQ ID NO: 1312792 - DNA, 25 bp, Homo sapien
ttggcaacccaagtgcaggtacagt

SEQ ID NO: 1312793 - DNA, 25 bp, Homo sapien
gacatgcgtattctctggaccctgg

SEQ ID NO: 1312794 - DNA, 25 bp, Homo sapien
tggagacagtgacatgcgtattctc

SEQ ID NO: 1312795 - DNA, 25 bp, Homo sapien
gatgagcccttcagtgggcagtgag

SEQ ID NO: 1312796 - DNA, 25 bp, Homo sapien
tgaggacccgggttactggttgatg

SEQ ID NO: 1312797 - DNA, 25 bp, Homo sapien
tggaggccttcaagaaggacagggt

SEQ ID NO: 1312798 - DNA, 25 bp, Homo sapien
aggccttcaagaaggacagggtcat

SEQ ID NO: 1312799 - DNA, 25 bp, Homo sapien
gaggccttcaagaaggacagggtca

SEQ ID NO: 1312800 - DNA, 25 bp, Homo sapien
ggaggccttcaagaaggacagggtc

SEQ ID NO: 1312801 - DNA, 25 bp, Homo sapien
ctcctgccaagttccaccgcaagtc

SEQ ID NO: 1312802 - DNA, 25 bp, Homo sapien
ctccttcttcaaaggatttgttaat

SEQ ID NO: 1312803 - DNA, 25 bp, Homo sapien
aagttccaccgcaagtcacttccag

SEQ ID NO: 1312804 - DNA, 25 bp, Homo sapien
tccttcttcaaaggatttgttaata

SEQ ID NO: 1312805 - DNA, 25 bp, Homo sapien
atgggcgtgtgctcgtcgctgtcgc

SEQ ID NO: 1312806 - DNA, 25 bp, Homo sapien
agagccggatgccagcgcccttcct

SEQ ID NO: 1312807 - DNA, 25 bp, Homo sapien
tggagacaacaaatggctccctgct

SEQ ID NO: 1312808 - DNA, 25 bp, Homo sapien
tcgctgtcgccgtgctctcgtctcc

SEQ ID NO: 1312809 - DNA, 25 bp, Homo sapien
tgtattgctgtgtacggcagccagg

SEQ ID NO: 1312810 - DNA, 25 bp, Homo sapien
cctcagaacctgtggcctagcttgt

SEQ ID NO: 1312811 - DNA, 25 bp, Homo sapien
cccatagtggtactcctccctcaga

SEQ ID NO: 1312812 - DNA, 25 bp, Homo sapien
ccaggcggacttggaatgcttgaaa

SEQ ID NO: 1312813 - DNA, 25 bp, Homo sapien
tgtgtacgtctattaagtgaattgt

SEQ ID NO: 1312814 - DNA, 25 bp, Homo sapien
cgtgtgtaaatacgggtgttcctgg

SEQ ID NO: 1312815 - DNA, 25 bp, Homo sapien
gggcccagacgtgtatgcgagtgtg

SEQ ID NO: 1312816 - DNA, 25 bp, Homo sapien
taagtgaattgtaggtgtgtgtaaa

SEQ ID NO: 1312817 - DNA, 25 bp, Homo sapien
ctcctgaagccaggattgagtctgc

SEQ ID NO: 1312818 - DNA, 25 bp, Homo sapien
ggaggtgtttgtgcatatttttgca

SEQ ID NO: 1312819 - DNA, 25 bp, Homo sapien
ggttgggggaggtgtttgtgcatat

SEQ ID NO: 1312820 - DNA, 25 bp, Homo sapien
ttctcctcctgcacactggagggtg

SEQ ID NO: 1312821 - DNA, 25 bp, Homo sapien
ttgtgcatatttttgcagggctgtc

SEQ ID NO: 1312822 - DNA, 25 bp, Homo sapien
ggatgacaacacctggtggcctggt

SEQ ID NO: 1312823 - DNA, 25 bp, Homo sapien
gtggcctggttgtgttctcttggtt

SEQ ID NO: 1312824 - DNA, 25 bp, Homo sapien
tggatgacaacacctggtggcctgg

SEQ ID NO: 1312825 - DNA, 25 bp, Homo sapien
ctggtggcctggttgtgttctcttg

SEQ ID NO: 1312826 - DNA, 25 bp, Homo sapien
caggctaagcaagctctgagctcca

SEQ ID NO: 1312827 - DNA, 25 bp, Homo sapien
ttccaccgcaggctaagcaagctct

SEQ ID NO: 1312828 - DNA, 25 bp, Homo sapien
taagatccttaattaaaccagagct

SEQ ID NO: 1312829 - DNA, 25 bp, Homo sapien
gagagaattctctcctaagatcctt

SEQ ID NO: 1312830 - DNA, 25 bp, Homo sapien
ctggcagcagcctggatgactttgg

SEQ ID NO: 1312831 - DNA, 25 bp, Homo sapien
ccaaccccaactcagagagtttgct

SEQ ID NO: 1312832 - DNA, 25 bp, Homo sapien
cagcctggatgactttggtgtagtt

SEQ ID NO: 1312833 - DNA, 25 bp, Homo sapien
ccaactcagagagtttgctggcagc

SEQ ID NO: 1312834 - DNA, 25 bp, Homo sapien
ctcgagtcggtgtgaaagcagcgct

SEQ ID NO: 1312835 - DNA, 25 bp, Homo sapien
aaaaaggattccctgctgggtgcaa

SEQ ID NO: 1312836 - DNA, 25 bp, Homo sapien
catatgtctgattccgaagcaggga

SEQ ID NO: 1312837 - DNA, 25 bp, Homo sapien
gcaatcaagatccataaactcgcgg

SEQ ID NO: 1312838 - DNA, 25 bp, Homo sapien
tgctctcgcagatgcatccgaaggg

SEQ ID NO: 1312839 - DNA, 25 bp, Homo sapien
cgccttgcggctcgagtcagtgtga

SEQ ID NO: 1312840 - DNA, 25 bp, Homo sapien
cactggctctgtaatgacccggcat

SEQ ID NO: 1312841 - DNA, 25 bp, Homo sapien
gtcagtgtgaatcgagccccagtca

SEQ ID NO: 1312842 - DNA, 25 bp, Homo sapien
tggctggttggctgctaagggagct

SEQ ID NO: 1312843 - DNA, 25 bp, Homo sapien
ggttggctgctaagggagctgtcct

SEQ ID NO: 1312844 - DNA, 25 bp, Homo sapien
ctgctaagggagctgtcctgttctt

SEQ ID NO: 1312845 - DNA, 25 bp, Homo sapien
ggctgctaagggagctgtcctgttc

SEQ ID NO: 1312846 - DNA, 25 bp, Homo sapien
caccctccaaaccagataggatgct

SEQ ID NO: 1312847 - DNA, 25 bp, Homo sapien
tcagtctttgcaggaatgtctttct

SEQ ID NO: 1312848 - DNA, 25 bp, Homo sapien
ccagataggatgctccttgagggca

SEQ ID NO: 1312849 - DNA, 25 bp, Homo sapien
cctgtgaacctgtgtacctgagtgg

SEQ ID NO: 1312850 - DNA, 25 bp, Homo sapien
caagatagtcaatagtgtcattttc

SEQ ID NO: 1312851 - DNA, 25 bp, Homo sapien
aatagtgtcattttcattcatatca

SEQ ID NO: 1312852 - DNA, 25 bp, Homo sapien
tcaatagtgtcattttcattcatat

SEQ ID NO: 1312853 - DNA, 25 bp, Homo sapien
tagtgtcattttcattcatatcatt

SEQ ID NO: 1312854 - DNA, 25 bp, Homo sapien
aaaagccctttatgggatttgcctg

SEQ ID NO: 1312855 - DNA, 25 bp, Homo sapien
tgtgcttgcacaatttagcagtttt

SEQ ID NO: 1312856 - DNA, 25 bp, Homo sapien
ctcagagaacgcattccaaagccat

SEQ ID NO: 1312857 - DNA, 25 bp, Homo sapien
ccaagagcaggcagcagtacttgct

SEQ ID NO: 1312858 - DNA, 25 bp, Homo sapien
gaccccagaggaggagcataagttg

SEQ ID NO: 1312859 - DNA, 25 bp, Homo sapien
ccccagaggaggagcataagttgtg

SEQ ID NO: 1312860 - DNA, 25 bp, Homo sapien
ccacagctttgccttcagggcagga

SEQ ID NO: 1312861 - DNA, 25 bp, Homo sapien
gcaggaccccagaggaggagcataa

SEQ ID NO: 1312862 - DNA, 25 bp, Homo sapien
gactttccaggtatacaggaagagg

SEQ ID NO: 1312863 - DNA, 25 bp, Homo sapien
tgggctctccttgctttgggttgct

SEQ ID NO: 1312864 - DNA, 25 bp, Homo sapien
gctgccaggattcttatcagacttg

SEQ ID NO: 1312865 - DNA, 25 bp, Homo sapien
tccagctgggaaatcttgactttcc

SEQ ID NO: 1312866 - DNA, 25 bp, Homo sapien
ttgctgaataagctgccgacatgta

SEQ ID NO: 1312867 - DNA, 25 bp, Homo sapien
tccaggagtaaatagctcattcacc

SEQ ID NO: 1312868 - DNA, 25 bp, Homo sapien
tgccgacatgtaccaggaggaacca

SEQ ID NO: 1312869 - DNA, 25 bp, Homo sapien
ccaaaattgctgaataagctgccga

SEQ ID NO: 1312870 - DNA, 25 bp, Homo sapien
ttatgggacagtggcatcaatctcc

SEQ ID NO: 1312871 - DNA, 25 bp, Homo sapien
aaactgatagaaagctaaccttgtt

SEQ ID NO: 1312872 - DNA, 25 bp, Homo sapien
tattgattgctttctgtaatcgagc

SEQ ID NO: 1312873 - DNA, 25 bp, Homo sapien
caaatgattcttccaactaaactga

SEQ ID NO: 1312874 - DNA, 25 bp, Homo sapien
gagtccaagaaggtcgcttggcctg

SEQ ID NO: 1312875 - DNA, 25 bp, Homo sapien
gatatagagtccaagaaggtcgctt

SEQ ID NO: 1312876 - DNA, 25 bp, Homo sapien
ccctttcccgatatagagtccaaga

SEQ ID NO: 1312877 - DNA, 25 bp, Homo sapien
tgggatggtgccacccctttcccga

SEQ ID NO: 1312878 - DNA, 25 bp, Homo sapien
agacctactggcgaggacgaagccc

SEQ ID NO: 1312879 - DNA, 25 bp, Homo sapien
catgccagccagacctactggcgag

SEQ ID NO: 1312880 - DNA, 25 bp, Homo sapien
agcatcgatatacccagcccatggc

SEQ ID NO: 1312881 - DNA, 25 bp, Homo sapien
ggcagctgagcatcgatatacccag

SEQ ID NO: 1312882 - DNA, 25 bp, Homo sapien
ttgtttgcctttgcagagtctctga

SEQ ID NO: 1312883 - DNA, 25 bp, Homo sapien
tgtttgcctttgcagagtctctgag

SEQ ID NO: 1312884 - DNA, 25 bp, Homo sapien
acatggacccagatttttcaactgt

SEQ ID NO: 1312885 - DNA, 25 bp, Homo sapien
tcacatggacccagatttttcaact

SEQ ID NO: 1312886 - DNA, 25 bp, Homo sapien
tgtcctcgcttcgtgtgccgacacg

SEQ ID NO: 1312887 - DNA, 25 bp, Homo sapien
acacgtgtgtcctcgcttcgtgtgc

SEQ ID NO: 1312888 - DNA, 25 bp, Homo sapien
ctcgcttcgtgtgccgacacgtgtg

SEQ ID NO: 1312889 - DNA, 25 bp, Homo sapien
cttcgtgtgccgacacgtgtgcaca

SEQ ID NO: 1312890 - DNA, 25 bp, Homo sapien
tcggcagaggaaggcgatagatgtc

SEQ ID NO: 1312891 - DNA, 25 bp, Homo sapien
tcatatgttgttgggggcaaggcct

SEQ ID NO: 1312892 - DNA, 25 bp, Homo sapien
gatagatgtcggcaaggctgacttt

SEQ ID NO: 1312893 - DNA, 25 bp, Homo sapien
gcaaggccttttatcagcatctggg

SEQ ID NO: 1312894 - DNA, 25 bp, Homo sapien
taaactgcaatttcataaatgcttg

SEQ ID NO: 1312895 - DNA, 25 bp, Homo sapien
ataaatgcttgatgcatatgtgcaa

SEQ ID NO: 1312896 - DNA, 25 bp, Homo sapien
aaatgcttgatgcatatgtgcaagc

SEQ ID NO: 1312897 - DNA, 25 bp, Homo sapien
aaactgcaatttcataaatgcttga

SEQ ID NO: 1312898 - DNA, 25 bp, Homo sapien
tgggaccaggctggtggactgtccc

SEQ ID NO: 1312899 - DNA, 25 bp, Homo sapien
ctgactctggttccttgggagaaga

SEQ ID NO: 1312900 - DNA, 25 bp, Homo sapien
ttctgactctggttccttgggagaa

SEQ ID NO: 1312901 - DNA, 25 bp, Homo sapien
accaggctggtggactgtccctgag

SEQ ID NO: 1312902 - DNA, 25 bp, Homo sapien
cattctatgatcctctgctcgtctc

SEQ ID NO: 1312903 - DNA, 25 bp, Homo sapien
tcccattctatgatcctctgctcgt

SEQ ID NO: 1312904 - DNA, 25 bp, Homo sapien
cagaagcttttctggctgatctctc

SEQ ID NO: 1312905 - DNA, 25 bp, Homo sapien
cttccagaagcttttctggctgatc

SEQ ID NO: 1312906 - DNA, 25 bp, Homo sapien
tccaagtgtttactaaaagcggcaa

SEQ ID NO: 1312907 - DNA, 25 bp, Homo sapien
tgtttactaaaagcggcaatagcct

SEQ ID NO: 1312908 - DNA, 25 bp, Homo sapien
agcggcaatagcctgtgatcgtcaa

SEQ ID NO: 1312909 - DNA, 25 bp, Homo sapien
tagcctgtgatcgtcaaaatttgaa

SEQ ID NO: 1312910 - DNA, 25 bp, Homo sapien
cctgagcacagcggctgcttggcat

SEQ ID NO: 1312911 - DNA, 25 bp, Homo sapien
cacagcggctgcttggcatgttcct

SEQ ID NO: 1312912 - DNA, 25 bp, Homo sapien
gcatgttccttccttcacccttcca

SEQ ID NO: 1312913 - DNA, 25 bp, Homo sapien
catgttccttccttcacccttccag

SEQ ID NO: 1312914 - DNA, 25 bp, Homo sapien
ccagccatttataacgtcacggtga

SEQ ID NO: 1312915 - DNA, 25 bp, Homo sapien
aatttcgctgcatatgtcactgagg

SEQ ID NO: 1312916 - DNA, 25 bp, Homo sapien
aattatggcccgagcaaatggctgc

SEQ ID NO: 1312917 - DNA, 25 bp, Homo sapien
cactgagggagagtgcaagtcctcc

SEQ ID NO: 1312918 - DNA, 25 bp, Homo sapien
caagtcagagttaggagcaggagcc

SEQ ID NO: 1312919 - DNA, 25 bp, Homo sapien
gaacttcccagagagctatccagtg

SEQ ID NO: 1312920 - DNA, 25 bp, Homo sapien
tgccctctagaaccgaaagtctgga

SEQ ID NO: 1312921 - DNA, 25 bp, Homo sapien
tgagctcattcggtcactaccaggg

SEQ ID NO: 1312922 - DNA, 25 bp, Homo sapien
aatgctctacatagctgccaggatg

SEQ ID NO: 1312923 - DNA, 25 bp, Homo sapien
gctgtccctgctgcggtacttgacc

SEQ ID NO: 1312924 - DNA, 25 bp, Homo sapien
ggtacttgacccctatagtaatgct

SEQ ID NO: 1312925 - DNA, 25 bp, Homo sapien
ctggactcttgcagtagcctactaa

SEQ ID NO: 1312926 - DNA, 25 bp, Homo sapien
tttaaaagtgcaccccgacattctg

SEQ ID NO: 1312927 - DNA, 25 bp, Homo sapien
gatgactgaaccatatcctgaggca

SEQ ID NO: 1312928 - DNA, 25 bp, Homo sapien
catactggagtttcttgagccttgt

SEQ ID NO: 1312929 - DNA, 25 bp, Homo sapien
gaagaacacgctggccatttcaatg

SEQ ID NO: 1312930 - DNA, 25 bp, Homo sapien
ctgtaagagtaagggaattaatcaa

SEQ ID NO: 1312931 - DNA, 25 bp, Homo sapien
gagtaagggaattaatcaaatgatt

SEQ ID NO: 1312932 - DNA, 25 bp, Homo sapien
taagagtaagggaattaatcaaatg

SEQ ID NO: 1312933 - DNA, 25 bp, Homo sapien
agagtaagggaattaatcaaatgat

SEQ ID NO: 1312934 - DNA, 25 bp, Homo sapien
ggttacaactctacagaaactcgcg

SEQ ID NO: 1312935 - DNA, 25 bp, Homo sapien
gaaactcgcgtctgcgtggacagga

SEQ ID NO: 1312936 - DNA, 25 bp, Homo sapien
gggctgagatctgggacatctcaaa

SEQ ID NO: 1312937 - DNA, 25 bp, Homo sapien
caagaagtgactggtggttagggcg

SEQ ID NO: 1312938 - DNA, 25 bp, Homo sapien
aagtggctttccgtctcactgagag

SEQ ID NO: 1312939 - DNA, 25 bp, Homo sapien
tacaggaaacaatagcagctagccg

SEQ ID NO: 1312940 - DNA, 25 bp, Homo sapien
ggctgtgtcttcataaacaaccgtg

SEQ ID NO: 1312941 - DNA, 25 bp, Homo sapien
acaaaacaagggcaagggtcacgca

SEQ ID NO: 1312942 - DNA, 25 bp, Homo sapien
ggcaaaaagaaggatgactttctga

SEQ ID NO: 1312943 - DNA, 25 bp, Homo sapien
gaagtcttgggcaaaaagaaggatg

SEQ ID NO: 1312944 - DNA, 25 bp, Homo sapien
tacgaagtaggaagtccaggtagga

SEQ ID NO: 1312945 - DNA, 25 bp, Homo sapien
caggtaggaggaagtcttgggcaaa

SEQ ID NO: 1312946 - DNA, 25 bp, Homo sapien
gcctttgaattaagcatctcgccat

SEQ ID NO: 1312947 - DNA, 25 bp, Homo sapien
tcgccatagtcattggacaaggagc

SEQ ID NO: 1312948 - DNA, 25 bp, Homo sapien
tataatgccattagcaacgctttcg

SEQ ID NO: 1312949 - DNA, 25 bp, Homo sapien
tcctgttgacagagcgcctttgaat

SEQ ID NO: 1312950 - DNA, 25 bp, Homo sapien
taggatttgaaggacactagccgtg

SEQ ID NO: 1312951 - DNA, 25 bp, Homo sapien
tgaaggacactagccgtggctccag

SEQ ID NO: 1312952 - DNA, 25 bp, Homo sapien
tgtaggatttgaaggacactagccg

SEQ ID NO: 1312953 - DNA, 25 bp, Homo sapien
gatttgaaggacactagccgtggct

SEQ ID NO: 1312954 - DNA, 25 bp, Homo sapien
ccttggatgtgggaggtctgagtca

SEQ ID NO: 1312955 - DNA, 25 bp, Homo sapien
gctgcccagatgtttaaacctttca

SEQ ID NO: 1312956 - DNA, 25 bp, Homo sapien
gccaggggctatggactgggccagg

SEQ ID NO: 1312957 - DNA, 25 bp, Homo sapien
ttccttgtcatcattcaaagccggg

SEQ ID NO: 1312958 - DNA, 25 bp, Homo sapien
tgagcaggccctgaaatattagtgg

SEQ ID NO: 1312959 - DNA, 25 bp, Homo sapien
tatcagttctcccatgtacgtacgc

SEQ ID NO: 1312960 - DNA, 25 bp, Homo sapien
gttctcccatgtacgtacgcatctc

SEQ ID NO: 1312961 - DNA, 25 bp, Homo sapien
tcccatgtacgtacgcatctccttt

SEQ ID NO: 1312962 - DNA, 25 bp, Homo sapien
tgtacgtacgcatctcctttccttc

SEQ ID NO: 1312963 - DNA, 25 bp, Homo sapien
ccagggtccaagtggtatatgcttg

SEQ ID NO: 1312964 - DNA, 25 bp, Homo sapien
tcagcctgcaaaaggccagggtcca

SEQ ID NO: 1312965 - DNA, 25 bp, Homo sapien
tcccagagggtgcagtagctgctct

SEQ ID NO: 1312966 - DNA, 25 bp, Homo sapien
taggaccagatccacatagccactt

SEQ ID NO: 1312967 - DNA, 25 bp, Homo sapien
gtgaggaatgcttaagtggcatagc

SEQ ID NO: 1312968 - DNA, 25 bp, Homo sapien
tctggctttcaaagcgaaactttgg

SEQ ID NO: 1312969 - DNA, 25 bp, Homo sapien
gagcccttggtaaaaccagagtcca

SEQ ID NO: 1312970 - DNA, 25 bp, Homo sapien
ttcaaagcgaaactttggccagagg

SEQ ID NO: 1312971 - DNA, 25 bp, Homo sapien
ggaagcaccaagaaaggtcagaccc

SEQ ID NO: 1312972 - DNA, 25 bp, Homo sapien
ttcatggcccataggaagcaccaag

SEQ ID NO: 1312973 - DNA, 25 bp, Homo sapien
gctcatcaccagattgaatgtgttc

SEQ ID NO: 1312974 - DNA, 25 bp, Homo sapien
tgtagcagcatgctcatcaccagat

SEQ ID NO: 1312975 - DNA, 25 bp, Homo sapien
gcaggtgttcttaagccatctggca

SEQ ID NO: 1312976 - DNA, 25 bp, Homo sapien
gattgatcagccaagctgatctctg

SEQ ID NO: 1312977 - DNA, 25 bp, Homo sapien
aaagaagcaggtgttcttaagccat

SEQ ID NO: 1312978 - DNA, 25 bp, Homo sapien
tccttggaacgaaaatctgattgat

SEQ ID NO: 1312979 - DNA, 25 bp, Homo sapien
gctgcttgcggtgactaatcagaag

SEQ ID NO: 1312980 - DNA, 25 bp, Homo sapien
tcagaaggttaaatactcctcctgc

SEQ ID NO: 1312981 - DNA, 25 bp, Homo sapien
ttagtgtccatagaactgacaggta

SEQ ID NO: 1312982 - DNA, 25 bp, Homo sapien
ggtttctgtcattgtgctgcttgcg

SEQ ID NO: 1312983 - DNA, 25 bp, Homo sapien
aagtgtaggatctcacaattctgga

SEQ ID NO: 1312984 - DNA, 25 bp, Homo sapien
tccttgagcttgtggccttatcgca

SEQ ID NO: 1312985 - DNA, 25 bp, Homo sapien
caaggtgtaggcaggatcatgcttc

SEQ ID NO: 1312986 - DNA, 25 bp, Homo sapien
tggcttgaaacaacgaaagtgtagg

SEQ ID NO: 1312987 - DNA, 25 bp, Homo sapien
ctgctctcttcccataagaggaagc

SEQ ID NO: 1312988 - DNA, 25 bp, Homo sapien
cctgtctgcagtgctaacagcagct

SEQ ID NO: 1312989 - DNA, 25 bp, Homo sapien
gctgctctcttcccataagaggaag

SEQ ID NO: 1312990 - DNA, 25 bp, Homo sapien
tgtctgcagtgctaacagcagctga

SEQ ID NO: 1312991 - DNA, 25 bp, Homo sapien
taatagaattactccccgacatgag

SEQ ID NO: 1312992 - DNA, 25 bp, Homo sapien
tagtctaacaatccatgtgtggcct

SEQ ID NO: 1312993 - DNA, 25 bp, Homo sapien
cctggaatcaattattgctccaggg

SEQ ID NO: 1312994 - DNA, 25 bp, Homo sapien
tcccagctctatggatgtagcttct

SEQ ID NO: 1312995 - DNA, 25 bp, Homo sapien
actctgtctctgttttgcggctctg

SEQ ID NO: 1312996 - DNA, 25 bp, Homo sapien
gcttggcaacacaggcatactctgt

SEQ ID NO: 1312997 - DNA, 25 bp, Homo sapien
gacccaaatggtctactcacctttg

SEQ ID NO: 1312998 - DNA, 25 bp, Homo sapien
tgcggctctgatcgaagactaaagt

SEQ ID NO: 1312999 - DNA, 25 bp, Homo sapien
taggagcaccctctaaggccttctg

SEQ ID NO: 1313000 - DNA, 25 bp, Homo sapien
agcaccctctaaggccttctggctg

SEQ ID NO: 1313001 - DNA, 25 bp, Homo sapien
tgagaactcctcttaggagcaccct

SEQ ID NO: 1313002 - DNA, 25 bp, Homo sapien
ctgtggctgagaactcctcttagga

SEQ ID NO: 1313003 - DNA, 25 bp, Homo sapien
ccttctccagtgtctgacatctgct

SEQ ID NO: 1313004 - DNA, 25 bp, Homo sapien
cagcagggccccttctccagtgtct

SEQ ID NO: 1313005 - DNA, 25 bp, Homo sapien
agcagggccccttctccagtgtctg

SEQ ID NO: 1313006 - DNA, 25 bp, Homo sapien
ctccagtgtctgacatctgctccat

SEQ ID NO: 1313007 - DNA, 25 bp, Homo sapien
ccttgcttcaataactcggacagta

SEQ ID NO: 1313008 - DNA, 25 bp, Homo sapien
gcttcaataactcggacagtaccct

SEQ ID NO: 1313009 - DNA, 25 bp, Homo sapien
aataactcggacagtaccctgagct

SEQ ID NO: 1313010 - DNA, 25 bp, Homo sapien
actcggacagtaccctgagcttcct

SEQ ID NO: 1313011 - DNA, 25 bp, Homo sapien
cactttttgggtatcagcctaatca

SEQ ID NO: 1313012 - DNA, 25 bp, Homo sapien
aaagccactctttccaatactggag

SEQ ID NO: 1313013 - DNA, 25 bp, Homo sapien
taccaaatccaacctgtgcaaaacg

SEQ ID NO: 1313014 - DNA, 25 bp, Homo sapien
gataagtggtaagccagtcccaact

SEQ ID NO: 1313015 - DNA, 25 bp, Homo sapien
taaagataaagcacaagccctaaag

SEQ ID NO: 1313016 - DNA, 25 bp, Homo sapien
cattcattccctctttcaatggaat

SEQ ID NO: 1313017 - DNA, 25 bp, Homo sapien
agtagtttgcaaaatctgggttcct

SEQ ID NO: 1313018 - DNA, 25 bp, Homo sapien
gactgttccaggctctaaaactaca

SEQ ID NO: 1313019 - DNA, 25 bp, Homo sapien
cctggtgcgggtcttgtcaatctga

SEQ ID NO: 1313020 - DNA, 25 bp, Homo sapien
gagcaacccgtgcttttgaaaaatg

SEQ ID NO: 1313021 - DNA, 25 bp, Homo sapien
ggtggcattaccactatcagggacg

SEQ ID NO: 1313022 - DNA, 25 bp, Homo sapien
attctttccgcggatggccacggct

SEQ ID NO: 1313023 - DNA, 25 bp, Homo sapien
cttctcaatgtgagcacattcacag

SEQ ID NO: 1313024 - DNA, 25 bp, Homo sapien
tcttctcaatgtgagcacattcaca

SEQ ID NO: 1313025 - DNA, 25 bp, Homo sapien
gcttctcctctgctgtgggagcata

SEQ ID NO: 1313026 - DNA, 25 bp, Homo sapien
tgcttctcctctgctgtgggagcat

SEQ ID NO: 1313027 - DNA, 25 bp, Homo sapien
ttctcctctgctgtgggagcatagc

SEQ ID NO: 1313028 - DNA, 25 bp, Homo sapien
ctcctctgctgtgggagcatagctg

SEQ ID NO: 1313029 - DNA, 25 bp, Homo sapien
tcactctggaaacacagtccctggg

SEQ ID NO: 1313030 - DNA, 25 bp, Homo sapien
cagaataggagacttgagtgggcct

SEQ ID NO: 1313031 - DNA, 25 bp, Homo sapien
gaaaggccctcacagaataggagac

SEQ ID NO: 1313032 - DNA, 25 bp, Homo sapien
ggccctcacagaataggagacttga

SEQ ID NO: 1313033 - DNA, 25 bp, Homo sapien
gagtgggcctgttctggtctcggtg

SEQ ID NO: 1313034 - DNA, 25 bp, Homo sapien
cgagcatggacactgacataccaga

SEQ ID NO: 1313035 - DNA, 25 bp, Homo sapien
ccgagcatggacactgacataccag

SEQ ID NO: 1313036 - DNA, 25 bp, Homo sapien
tggtaaatgcaggcccctgcccctg

SEQ ID NO: 1313037 - DNA, 25 bp, Homo sapien
ctggtaaatgcaggcccctgcccct

SEQ ID NO: 1313038 - DNA, 25 bp, Homo sapien
cctacagaactccagggagtagcct

SEQ ID NO: 1313039 - DNA, 25 bp, Homo sapien
tccaaataaataaggtggctccatt

SEQ ID NO: 1313040 - DNA, 25 bp, Homo sapien
tggctccattgcacgcaggatgtga

SEQ ID NO: 1313041 - DNA, 25 bp, Homo sapien
ctgctgtggaagtcgtattgtcaca

SEQ ID NO: 1313042 - DNA, 25 bp, Homo sapien
tctcaatcttccatcccctccagtg

SEQ ID NO: 1313043 - DNA, 25 bp, Homo sapien
tccagtgctggccacacacaacagc

SEQ ID NO: 1313044 - DNA, 25 bp, Homo sapien
agtgctggccacacacaacagccag

SEQ ID NO: 1313045 - DNA, 25 bp, Homo sapien
tgctggccacacacaacagccaggg

SEQ ID NO: 1313046 - DNA, 25 bp, Homo sapien
aacttcttatcaggcaagggccagg

SEQ ID NO: 1313047 - DNA, 25 bp, Homo sapien
ttcttatcaggcaagggccaggtca

SEQ ID NO: 1313048 - DNA, 25 bp, Homo sapien
aggaacttcttatcaggcaagggcc

SEQ ID NO: 1313049 - DNA, 25 bp, Homo sapien
cttatcaggcaagggccaggtcagt

SEQ ID NO: 1313050 - DNA, 25 bp, Homo sapien
gctgccaggaagaggctccaatctc

SEQ ID NO: 1313051 - DNA, 25 bp, Homo sapien
ctgccaggaagaggctccaatctcc

SEQ ID NO: 1313052 - DNA, 25 bp, Homo sapien
cagctgccaggaagaggctccaatc

SEQ ID NO: 1313053 - DNA, 25 bp, Homo sapien
gccaggaagaggctccaatctccac

SEQ ID NO: 1313054 - DNA, 25 bp, Homo sapien
cctccacccctccagtggttgctcc

SEQ ID NO: 1313055 - DNA, 25 bp, Homo sapien
cagatgatttcatgggtctcctcca

SEQ ID NO: 1313056 - DNA, 25 bp, Homo sapien
ggcactgggccagatgatttcatgg

SEQ ID NO: 1313057 - DNA, 25 bp, Homo sapien
catcctggtggcattgaagagggca

SEQ ID NO: 1313058 - DNA, 25 bp, Homo sapien
acaatggaagtgggtggcccctgaa

SEQ ID NO: 1313059 - DNA, 25 bp, Homo sapien
ataacaatggaagtgggtggcccct

SEQ ID NO: 1313060 - DNA, 25 bp, Homo sapien
taacaatggaagtgggtggcccctg

SEQ ID NO: 1313061 - DNA, 25 bp, Homo sapien
aacaatggaagtgggtggcccctga

SEQ ID NO: 1313062 - DNA, 25 bp, Homo sapien
gaggcactcggatcatagatgcagt

SEQ ID NO: 1313063 - DNA, 25 bp, Homo sapien
caaccctggtgaggacatgccttgg

SEQ ID NO: 1313064 - DNA, 25 bp, Homo sapien
caagggcaccttgaggagtgaagta

SEQ ID NO: 1313065 - DNA, 25 bp, Homo sapien
taataactgagccaactccctcgag

SEQ ID NO: 1313066 - DNA, 25 bp, Homo sapien
gggctgagggaggactctgtgactc

SEQ ID NO: 1313067 - DNA, 25 bp, Homo sapien
tgtgactcagttcctggacatagga

SEQ ID NO: 1313068 - DNA, 25 bp, Homo sapien
gagggtcatctctttagttgcagct

SEQ ID NO: 1313069 - DNA, 25 bp, Homo sapien
cagaattcccgctgccttagcaact

SEQ ID NO: 1313070 - DNA, 25 bp, Homo sapien
caggtgtccctaagggcatcagtga

SEQ ID NO: 1313071 - DNA, 25 bp, Homo sapien
agccaatactcttatagccgcagcc

SEQ ID NO: 1313072 - DNA, 25 bp, Homo sapien
taagggcatcagtgaaagtcacagc

SEQ ID NO: 1313073 - DNA, 25 bp, Homo sapien
aatactcttatagccgcagccacaa

SEQ ID NO: 1313074 - DNA, 25 bp, Homo sapien
tgtctctctaataaatagaacatga

SEQ ID NO: 1313075 - DNA, 25 bp, Homo sapien
ataaatagaacatgagcagctgctc

SEQ ID NO: 1313076 - DNA, 25 bp, Homo sapien
taataaatagaacatgagcagctgc

SEQ ID NO: 1313077 - DNA, 25 bp, Homo sapien
tctaataaatagaacatgagcagct

SEQ ID NO: 1313078 - DNA, 25 bp, Homo sapien
ggcgccctggtcagacccgcttctt

SEQ ID NO: 1313079 - DNA, 25 bp, Homo sapien
cacgcaggcgccctggtcagacccg

SEQ ID NO: 1313080 - DNA, 25 bp, Homo sapien
cctctccacgcaggcgccctggtca

SEQ ID NO: 1313081 - DNA, 25 bp, Homo sapien
tgccattcctctccacgcaggcgcc

SEQ ID NO: 1313082 - DNA, 25 bp, Homo sapien
ggttgattagcatattgttgtaagg

SEQ ID NO: 1313083 - DNA, 25 bp, Homo sapien
taaatcagtggccatgctcctagag

SEQ ID NO: 1313084 - DNA, 25 bp, Homo sapien
tcctagagatgcgacagaggcagct

SEQ ID NO: 1313085 - DNA, 25 bp, Homo sapien
gtaatcctttttcctattgatggta

SEQ ID NO: 1313086 - DNA, 25 bp, Homo sapien
cagcttcgtgttgctcggtgcgcag

SEQ ID NO: 1313087 - DNA, 25 bp, Homo sapien
gttggatcgtgcgaggccgccacca

SEQ ID NO: 1313088 - DNA, 25 bp, Homo sapien
ggtacgattcttccgcttgcagctt

SEQ ID NO: 1313089 - DNA, 25 bp, Homo sapien
gtgcgcagggcaacgtcagagcacc

SEQ ID NO: 1313090 - DNA, 25 bp, Homo sapien
gcttccagtactggcagttcttaac

SEQ ID NO: 1313091 - DNA, 25 bp, Homo sapien
cctggcatatggatgggatctcagc

SEQ ID NO: 1313092 - DNA, 25 bp, Homo sapien
tactggcagttcttaacattcacag

SEQ ID NO: 1313093 - DNA, 25 bp, Homo sapien
ttaaaacctggcatatggatgggat

SEQ ID NO: 1313094 - DNA, 25 bp, Homo sapien
ttttcatctgctggggcaagagtca

SEQ ID NO: 1313095 - DNA, 25 bp, Homo sapien
cagagatttgccaatagtcactttt

SEQ ID NO: 1313096 - DNA, 25 bp, Homo sapien
tttcatctgctggggcaagagtcat

SEQ ID NO: 1313097 - DNA, 25 bp, Homo sapien
gtcagagatttgccaatagtcactt

SEQ ID NO: 1313098 - DNA, 25 bp, Homo sapien
catatagatgttttgtaatagatgc

SEQ ID NO: 1313099 - DNA, 25 bp, Homo sapien
gatgctgcattgattatgttaagtt

SEQ ID NO: 1313100 - DNA, 25 bp, Homo sapien
tgtaatagatgctgcattgattatg

SEQ ID NO: 1313101 - DNA, 25 bp, Homo sapien
tagatgttttgtaatagatgctgca

SEQ ID NO: 1313102 - DNA, 25 bp, Homo sapien
tttctcactacacactggatgtcat

SEQ ID NO: 1313103 - DNA, 25 bp, Homo sapien
acagcccagcacctcgagggtttca

SEQ ID NO: 1313104 - DNA, 25 bp, Homo sapien
tacacggacacatcccggagttgtc

SEQ ID NO: 1313105 - DNA, 25 bp, Homo sapien
cacctcgagggtttcacagatctct

SEQ ID NO: 1313106 - DNA, 25 bp, Homo sapien
tgctgccgtagcctttgtcatagtt

SEQ ID NO: 1313107 - DNA, 25 bp, Homo sapien
tgaccccagtcgtgtgcaggcctgt

SEQ ID NO: 1313108 - DNA, 25 bp, Homo sapien
tctgaccccagtcgtgtgcaggcct

SEQ ID NO: 1313109 - DNA, 25 bp, Homo sapien
cccattgcactctttccggctgctg

SEQ ID NO: 1313110 - DNA, 25 bp, Homo sapien
ccttttgtgcaaaccctactcccat

SEQ ID NO: 1313111 - DNA, 25 bp, Homo sapien
tcccatctataagggtgtgctctgg

SEQ ID NO: 1313112 - DNA, 25 bp, Homo sapien
ccatctataagggtgtgctctggcc

SEQ ID NO: 1313113 - DNA, 25 bp, Homo sapien
ctactcccatctataagggtgtgct

SEQ ID NO: 1313114 - DNA, 25 bp, Homo sapien
cactcagccattgccagtggaactc

SEQ ID NO: 1313115 - DNA, 25 bp, Homo sapien
caccactcagccattgccagtggaa

SEQ ID NO: 1313116 - DNA, 25 bp, Homo sapien
gccattgccagtggaactccagcat

SEQ ID NO: 1313117 - DNA, 25 bp, Homo sapien
ctcagccattgccagtggaactcca

SEQ ID NO: 1313118 - DNA, 25 bp, Homo sapien
ttctcttagcattcgtgaccaaagg

SEQ ID NO: 1313119 - DNA, 25 bp, Homo sapien
cctggtttggcacaaattctcttag

SEQ ID NO: 1313120 - DNA, 25 bp, Homo sapien
caaaggagactcctccaaaccattt

SEQ ID NO: 1313121 - DNA, 25 bp, Homo sapien
ctaactccctggtttggcacaaatt

SEQ ID NO: 1313122 - DNA, 25 bp, Homo sapien
ccttgttcctctgcaattcccactc

SEQ ID NO: 1313123 - DNA, 25 bp, Homo sapien
gcttccatccccacaccgatgcatg

SEQ ID NO: 1313124 - DNA, 25 bp, Homo sapien
tccatccccacaccgatgcatgaag

SEQ ID NO: 1313125 - DNA, 25 bp, Homo sapien
ttgttcctctgcaattcccactctg

SEQ ID NO: 1313126 - DNA, 25 bp, Homo sapien
tttctccttgttgcttttcaatgct

SEQ ID NO: 1313127 - DNA, 25 bp, Homo sapien
tatttttctccttgttgcttttcaa

SEQ ID NO: 1313128 - DNA, 25 bp, Homo sapien
tttttctccttgttgcttttcaatg

SEQ ID NO: 1313129 - DNA, 25 bp, Homo sapien
ttatttttctccttgttgcttttca

SEQ ID NO: 1313130 - DNA, 25 bp, Homo sapien
ccattctcgcttctgagataataag

SEQ ID NO: 1313131 - DNA, 25 bp, Homo sapien
gctccacctgaaacccaaggagcat

SEQ ID NO: 1313132 - DNA, 25 bp, Homo sapien
tccattctcgcttctgagataataa

SEQ ID NO: 1313133 - DNA, 25 bp, Homo sapien
cctgaaacccaaggagcatcatttt

SEQ ID NO: 1313134 - DNA, 25 bp, Homo sapien
gctgctgctaatgatcagtgactga

SEQ ID NO: 1313135 - DNA, 25 bp, Homo sapien
ctgctgctgctaatgatcagtgact

SEQ ID NO: 1313136 - DNA, 25 bp, Homo sapien
tgctgctgctaatgatcagtgactg

SEQ ID NO: 1313137 - DNA, 25 bp, Homo sapien
catctgcatcttgtagcccggtggt

SEQ ID NO: 1313138 - DNA, 25 bp, Homo sapien
cagggctgcatcaaaccatctgcat

SEQ ID NO: 1313139 - DNA, 25 bp, Homo sapien
agatgaggacccgaggctatggacc

SEQ ID NO: 1313140 - DNA, 25 bp, Homo sapien
gccatgctgcgccttcgtgaaagat

SEQ ID NO: 1313141 - DNA, 25 bp, Homo sapien
cttcaagaattctggtggaagctgc

SEQ ID NO: 1313142 - DNA, 25 bp, Homo sapien
ctcttcaagaattctggtggaagct

SEQ ID NO: 1313143 - DNA, 25 bp, Homo sapien
tcttcaagaattctggtggaagctg

SEQ ID NO: 1313144 - DNA, 25 bp, Homo sapien
ttcagaaccatattgaatgttgctc

SEQ ID NO: 1313145 - DNA, 25 bp, Homo sapien
ttcaaagtctatcaggctccaagat

SEQ ID NO: 1313146 - DNA, 25 bp, Homo sapien
tattgaatgttgctctcatgctaaa

SEQ ID NO: 1313147 - DNA, 25 bp, Homo sapien
aggctccaagattttgaggttggtt

SEQ ID NO: 1313148 - DNA, 25 bp, Homo sapien
tattagaatcctgttgacttggtga

SEQ ID NO: 1313149 - DNA, 25 bp, Homo sapien
caaagagctttggttggatcaggga

SEQ ID NO: 1313150 - DNA, 25 bp, Homo sapien
tcctgttgacttggtgatggccaga

SEQ ID NO: 1313151 - DNA, 25 bp, Homo sapien
tgctgagtccaatttacaaagagct

SEQ ID NO: 1313152 - DNA, 25 bp, Homo sapien
tggggaacacttcgagacctgcctg

SEQ ID NO: 1313153 - DNA, 25 bp, Homo sapien
gctggggaacacttcgagacctgcc

SEQ ID NO: 1313154 - DNA, 25 bp, Homo sapien
ttggctggggaacacttcgagacct

SEQ ID NO: 1313155 - DNA, 25 bp, Homo sapien
tggctggggaacacttcgagacctg

SEQ ID NO: 1313156 - DNA, 25 bp, Homo sapien
cctcaggtgaatactgaaagctgaa

SEQ ID NO: 1313157 - DNA, 25 bp, Homo sapien
tgcaaatcagttttacagcctcagg

SEQ ID NO: 1313158 - DNA, 25 bp, Homo sapien
gcagtccatggaggtaaagaccccc

SEQ ID NO: 1313159 - DNA, 25 bp, Homo sapien
aatagcctccaagtataagttgcaa

SEQ ID NO: 1313160 - DNA, 25 bp, Homo sapien
ttttctgatgtttttgacacccgcg

SEQ ID NO: 1313161 - DNA, 25 bp, Homo sapien
acacccgcgtgtggagttctccggc

SEQ ID NO: 1313162 - DNA, 25 bp, Homo sapien
gttctccggcgttcacagcttccag

SEQ ID NO: 1313163 - DNA, 25 bp, Homo sapien
tcaaggtgtctctgctgttattatt

SEQ ID NO: 1313164 - DNA, 25 bp, Homo sapien
gagctgctgttcgtgcggctgctgg

SEQ ID NO: 1313165 - DNA, 25 bp, Homo sapien
caagtttactgaggcaccactgtgt

SEQ ID NO: 1313166 - DNA, 25 bp, Homo sapien
atgaataatatatggagctgctgtt

SEQ ID NO: 1313167 - DNA, 25 bp, Homo sapien
gcacttggggatagacggcaaaata

SEQ ID NO: 1313168 - DNA, 25 bp, Homo sapien
gctgagtgaatttgacacccgggct

SEQ ID NO: 1313169 - DNA, 25 bp, Homo sapien
gaatcttgatccactcgactggcag

SEQ ID NO: 1313170 - DNA, 25 bp, Homo sapien
cctggtccttctggtagtgagatga

SEQ ID NO: 1313171 - DNA, 25 bp, Homo sapien
ggcagagatgcctcgtaattatcta

SEQ ID NO: 1313172 - DNA, 25 bp, Homo sapien
cattcactatgccttgaatagtctt

SEQ ID NO: 1313173 - DNA, 25 bp, Homo sapien
tctgtgccacattcactatgccttg

SEQ ID NO: 1313174 - DNA, 25 bp, Homo sapien
attcactatgccttgaatagtcttc

SEQ ID NO: 1313175 - DNA, 25 bp, Homo sapien
acctctgtgccacattcactatgcc

SEQ ID NO: 1313176 - DNA, 25 bp, Homo sapien
ctatgaaggtaaacaacccctgaca

SEQ ID NO: 1313177 - DNA, 25 bp, Homo sapien
cagctaaagacaagggtacaaggta

SEQ ID NO: 1313178 - DNA, 25 bp, Homo sapien
aattaccaacgaccagaatcacctg

SEQ ID NO: 1313179 - DNA, 25 bp, Homo sapien
tcacatgtctttggacgggtcagga

SEQ ID NO: 1313180 - DNA, 25 bp, Homo sapien
taaaaatccaacacagctgatgtcc

SEQ ID NO: 1313181 - DNA, 25 bp, Homo sapien
cataaaaatccaacacagctgatgt

SEQ ID NO: 1313182 - DNA, 25 bp, Homo sapien
tccataaaaatccaacacagctgat

SEQ ID NO: 1313183 - DNA, 25 bp, Homo sapien
tcatccataaaaatccaacacagct

SEQ ID NO: 1313184 - DNA, 25 bp, Homo sapien
gagcaagcatcaactaactgggcag

SEQ ID NO: 1313185 - DNA, 25 bp, Homo sapien
tattcaaggagcttgcacgctgagg

SEQ ID NO: 1313186 - DNA, 25 bp, Homo sapien
tggtcaacaacctcacacctgatgg

SEQ ID NO: 1313187 - DNA, 25 bp, Homo sapien
tcttggctacaacaatcgaagcgtg

SEQ ID NO: 1313188 - DNA, 25 bp, Homo sapien
gaaagaataaaccatgggtcttgtc

SEQ ID NO: 1313189 - DNA, 25 bp, Homo sapien
agaataaaccatgggtcttgtcctt

SEQ ID NO: 1313190 - DNA, 25 bp, Homo sapien
ggttctggggatgcaagaaagaata

SEQ ID NO: 1313191 - DNA, 25 bp, Homo sapien
gcaagaaagaataaaccatgggtct

SEQ ID NO: 1313192 - DNA, 25 bp, Homo sapien
aaagccccaatagggtgttgtggct

SEQ ID NO: 1313193 - DNA, 25 bp, Homo sapien
tgtggctggaagccatagtcatggc

SEQ ID NO: 1313194 - DNA, 25 bp, Homo sapien
agaatctttctcagggtctagctgt

SEQ ID NO: 1313195 - DNA, 25 bp, Homo sapien
tgtttcccatccaaagccccaatag

SEQ ID NO: 1313196 - DNA, 25 bp, Homo sapien
cagctttattgctgcgtgagattaa

SEQ ID NO: 1313197 - DNA, 25 bp, Homo sapien
gcaggaagcttcctaggcaaacagc

SEQ ID NO: 1313198 - DNA, 25 bp, Homo sapien
taacccagactgtagtaatttgtaa

SEQ ID NO: 1313199 - DNA, 25 bp, Homo sapien
gggacttcaacttgaaatctgctat

SEQ ID NO: 1313200 - DNA, 25 bp, Homo sapien
ctgtagcaggatgactcgcagacct

SEQ ID NO: 1313201 - DNA, 25 bp, Homo sapien
gactggttcaggctgagtctccggc

SEQ ID NO: 1313202 - DNA, 25 bp, Homo sapien
gttctgaatggtgctacacggctgt

SEQ ID NO: 1313203 - DNA, 25 bp, Homo sapien
ggtgctacacggctgttctacggga

SEQ ID NO: 1313204 - DNA, 25 bp, Homo sapien
acaagccctgtctttgatggaaact

SEQ ID NO: 1313205 - DNA, 25 bp, Homo sapien
aaggaacagcagttgtaataggcat

SEQ ID NO: 1313206 - DNA, 25 bp, Homo sapien
ggccagacagacagccttcctggga

SEQ ID NO: 1313207 - DNA, 25 bp, Homo sapien
tagcctgctggctcacattggccca

SEQ ID NO: 1313208 - DNA, 25 bp, Homo sapien
taaggtcttctcgaggtatctgagc

SEQ ID NO: 1313209 - DNA, 25 bp, Homo sapien
tacaacaatgattctggactcagct

SEQ ID NO: 1313210 - DNA, 25 bp, Homo sapien
gaagacaggtcttttacaacaatga

SEQ ID NO: 1313211 - DNA, 25 bp, Homo sapien
cagctgtcgaagaaaaacggatggt

SEQ ID NO: 1313212 - DNA, 25 bp, Homo sapien
catcttgatcaaattagcccggaag

SEQ ID NO: 1313213 - DNA, 25 bp, Homo sapien
catgctcttctcatttggagggaca

SEQ ID NO: 1313214 - DNA, 25 bp, Homo sapien
gggctcagccatgcagcaacgatga

SEQ ID NO: 1313215 - DNA, 25 bp, Homo sapien
gatactagcggtattgcagacaggg

SEQ ID NO: 1313216 - DNA, 25 bp, Homo sapien
gcttcctaaaattgaacccatggtg

SEQ ID NO: 1313217 - DNA, 25 bp, Homo sapien
gacgtttctgctgtggagttgccat

SEQ ID NO: 1313218 - DNA, 25 bp, Homo sapien
gaattaatcacccaattcccttcga

SEQ ID NO: 1313219 - DNA, 25 bp, Homo sapien
gaaacagctcacatgacgtttctgc

SEQ ID NO: 1313220 - DNA, 25 bp, Homo sapien
tggaattaatcacccaattcccttc

SEQ ID NO: 1313221 - DNA, 25 bp, Homo sapien
tttcaagaggttctcgggccttctg

SEQ ID NO: 1313222 - DNA, 25 bp, Homo sapien
cgcatgtacaacaagttttgccctg

SEQ ID NO: 1313223 - DNA, 25 bp, Homo sapien
ctgttgcatacgcatgtacaacaag

SEQ ID NO: 1313224 - DNA, 25 bp, Homo sapien
tgccctgaatttcaagaggttctcg

SEQ ID NO: 1313225 - DNA, 25 bp, Homo sapien
tgctcatgtcctgggaccgctgagc

SEQ ID NO: 1313226 - DNA, 25 bp, Homo sapien
ctgggccagagtctgtgcaggccgg

SEQ ID NO: 1313227 - DNA, 25 bp, Homo sapien
caggccgggatagggcctcctccaa

SEQ ID NO: 1313228 - DNA, 25 bp, Homo sapien
tgtgcaggccgggatagggcctcct

SEQ ID NO: 1313229 - DNA, 25 bp, Homo sapien
cagagtctgtgcaggccgggatagg

SEQ ID NO: 1313230 - DNA, 25 bp, Homo sapien
cttcagcaggatttgcaagttggaa

SEQ ID NO: 1313231 - DNA, 25 bp, Homo sapien
caggatttgcaagttggaaagcatc

SEQ ID NO: 1313232 - DNA, 25 bp, Homo sapien
cacatgtgttatcttcagcaggatt

SEQ ID NO: 1313233 - DNA, 25 bp, Homo sapien
cagcaggatttgcaagttggaaagc

SEQ ID NO: 1313234 - DNA, 25 bp, Homo sapien
taaatgtatacagcgagtgagcctc

SEQ ID NO: 1313235 - DNA, 25 bp, Homo sapien
cattgtgcccgcagacagttgtgga

SEQ ID NO: 1313236 - DNA, 25 bp, Homo sapien
agtgagcctcctcgggaacacagga

SEQ ID NO: 1313237 - DNA, 25 bp, Homo sapien
ggaacggagcgcttctgctgacagc

SEQ ID NO: 1313238 - DNA, 25 bp, Homo sapien
acagacagagcaacccttcattccg

SEQ ID NO: 1313239 - DNA, 25 bp, Homo sapien
agagcaacccttcattccggtcaca

SEQ ID NO: 1313240 - DNA, 25 bp, Homo sapien
ctttgctgggtcagccgccgtgact

SEQ ID NO: 1313241 - DNA, 25 bp, Homo sapien
cgccgtgactcagtgttcgcgcccc

SEQ ID NO: 1313242 - DNA, 25 bp, Homo sapien
cagcccggtgcgcttcggcgcccgc

SEQ ID NO: 1313243 - DNA, 25 bp, Homo sapien
cccggtgcgcttcggcgcccgctga

SEQ ID NO: 1313244 - DNA, 25 bp, Homo sapien
cgcgcagcccggtgcgcttcggcgc

SEQ ID NO: 1313245 - DNA, 25 bp, Homo sapien
cctcccgctgtggccgctggcgccg

SEQ ID NO: 1313246 - DNA, 25 bp, Homo sapien
cgcgggccaccggcggtaataatga

SEQ ID NO: 1313247 - DNA, 25 bp, Homo sapien
gggccaccggcggtaataatgaggc

SEQ ID NO: 1313248 - DNA, 25 bp, Homo sapien
ccaccggcggtaataatgaggcaca

SEQ ID NO: 1313249 - DNA, 25 bp, Homo sapien
ccgcgggccaccggcggtaataatg

SEQ ID NO: 1313250 - DNA, 25 bp, Homo sapien
gtgttcttttgtgctcattttccag

SEQ ID NO: 1313251 - DNA, 25 bp, Homo sapien
ttttccagcccgaatgctcggcaca

SEQ ID NO: 1313252 - DNA, 25 bp, Homo sapien
gcgggcgccgcattagcatctccga

SEQ ID NO: 1313253 - DNA, 25 bp, Homo sapien
ctccgaagccttcctgtgtgttctt

SEQ ID NO: 1313254 - DNA, 25 bp, Homo sapien
cagccagatctctcgggggttgttg

SEQ ID NO: 1313255 - DNA, 25 bp, Homo sapien
ccagccagatctctcgggggttgtt

SEQ ID NO: 1313256 - DNA, 25 bp, Homo sapien
ggtgacatggagatcatcagcacag

SEQ ID NO: 1313257 - DNA, 25 bp, Homo sapien
acatggagatcatcagcacaggaag

SEQ ID NO: 1313258 - DNA, 25 bp, Homo sapien
tgacatggagatcatcagcacagga

SEQ ID NO: 1313259 - DNA, 25 bp, Homo sapien
gaagggtgacatggagatcatcagc

SEQ ID NO: 1313260 - DNA, 25 bp, Homo sapien
tcagaggcggcttgttcgcccagag

SEQ ID NO: 1313261 - DNA, 25 bp, Homo sapien
gaacacgctgcaaactgcttggcta

SEQ ID NO: 1313262 - DNA, 25 bp, Homo sapien
gacgccgccgacacaagtttttcca

SEQ ID NO: 1313263 - DNA, 25 bp, Homo sapien
tctccggctgccaataaagacggct

SEQ ID NO: 1313264 - DNA, 25 bp, Homo sapien
tgacctgtacggcccagaccgggga

SEQ ID NO: 1313265 - DNA, 25 bp, Homo sapien
tgtacggcccagaccggggaagaca

SEQ ID NO: 1313266 - DNA, 25 bp, Homo sapien
ctgacctgtacggcccagaccgggg

SEQ ID NO: 1313267 - DNA, 25 bp, Homo sapien
aaatgaggatccacgcacagcctgt

SEQ ID NO: 1313268 - DNA, 25 bp, Homo sapien
taagaataggcctttggtcccatat

SEQ ID NO: 1313269 - DNA, 25 bp, Homo sapien
tttgtactgagacatagctggctgc

SEQ ID NO: 1313270 - DNA, 25 bp, Homo sapien
cacttctagagtcagggacctggac

SEQ ID NO: 1313271 - DNA, 25 bp, Homo sapien
agatacttgtggaggggctagaacc

SEQ ID NO: 1313272 - DNA, 25 bp, Homo sapien
gctgatgcggtagatacttgtggag

SEQ ID NO: 1313273 - DNA, 25 bp, Homo sapien
caagacagagctagggttcgttcac

SEQ ID NO: 1313274 - DNA, 25 bp, Homo sapien
cctgcatgcccgttggggctgatgc

SEQ ID NO: 1313275 - DNA, 25 bp, Homo sapien
ttacggccaatgaggacgtgactca

SEQ ID NO: 1313276 - DNA, 25 bp, Homo sapien
ctttacggccaatgaggacgtgact

SEQ ID NO: 1313277 - DNA, 25 bp, Homo sapien
tttacggccaatgaggacgtgactc

SEQ ID NO: 1313278 - DNA, 25 bp, Homo sapien
tacggccaatgaggacgtgactcat

SEQ ID NO: 1313279 - DNA, 25 bp, Homo sapien
cttcctcagccctgttccaaaagct

SEQ ID NO: 1313280 - DNA, 25 bp, Homo sapien
gcttcctcagccctgttccaaaagc

SEQ ID NO: 1313281 - DNA, 25 bp, Homo sapien
ggcttcctcagccctgttccaaaag

SEQ ID NO: 1313282 - DNA, 25 bp, Homo sapien
atccctctgcacctgtttccaaaat

SEQ ID NO: 1313283 - DNA, 25 bp, Homo sapien
ttatccctctgcacctgtttccaaa

SEQ ID NO: 1313284 - DNA, 25 bp, Homo sapien
tatccctctgcacctgtttccaaaa

SEQ ID NO: 1313285 - DNA, 25 bp, Homo sapien
ctttggaatatatgtctactgggca

SEQ ID NO: 1313286 - DNA, 25 bp, Homo sapien
aaacagtggcacttatgtactcaag

SEQ ID NO: 1313287 - DNA, 25 bp, Homo sapien
gaagcactccaagtcacactgttag

SEQ ID NO: 1313288 - DNA, 25 bp, Homo sapien
tggtccatgtaaatactcaagtcag

SEQ ID NO: 1313289 - DNA, 25 bp, Homo sapien
tggaaagggtatcaaccatcaacaa

SEQ ID NO: 1313290 - DNA, 25 bp, Homo sapien
aagggtatcaaccatcaacaaaagc

SEQ ID NO: 1313291 - DNA, 25 bp, Homo sapien
tcaatggaaagggtatcaaccatca

SEQ ID NO: 1313292 - DNA, 25 bp, Homo sapien
aaatcaatggaaagggtatcaacca

SEQ ID NO: 1313293 - DNA, 25 bp, Homo sapien
gagggaactaatgcaaccaccgttg

SEQ ID NO: 1313294 - DNA, 25 bp, Homo sapien
tatcctaggcaaagaaagtaccaca

SEQ ID NO: 1313295 - DNA, 25 bp, Homo sapien
caatgccttagggtcactcgtggtc

SEQ ID NO: 1313296 - DNA, 25 bp, Homo sapien
caacattccctggtaaggatgggta

SEQ ID NO: 1313297 - DNA, 25 bp, Homo sapien
tagtggaacaggcaccagattccca

SEQ ID NO: 1313298 - DNA, 25 bp, Homo sapien
agtggaacaggcaccagattcccac

SEQ ID NO: 1313299 - DNA, 25 bp, Homo sapien
cagagccccgacgctgggattcaga

SEQ ID NO: 1313300 - DNA, 25 bp, Homo sapien
cacagagccccgacgctgggattca

SEQ ID NO: 1313301 - DNA, 25 bp, Homo sapien
acagagccccgacgctgggattcag

SEQ ID NO: 1313302 - DNA, 25 bp, Homo sapien
ggcacagagccccgacgctgggatt

SEQ ID NO: 1313303 - DNA, 25 bp, Homo sapien
cattgtgtgtcagcgctttcagact

SEQ ID NO: 1313304 - DNA, 25 bp, Homo sapien
tttcagactggaggcactagtctgg

SEQ ID NO: 1313305 - DNA, 25 bp, Homo sapien
ctttcagactggaggcactagtctg

SEQ ID NO: 1313306 - DNA, 25 bp, Homo sapien
ctagatggcgtttcgtggcgtgcca

SEQ ID NO: 1313307 - DNA, 25 bp, Homo sapien
cggaaacagtggaagttgtagtcta

SEQ ID NO: 1313308 - DNA, 25 bp, Homo sapien
tcatgaatagcttttcggaaacagt

SEQ ID NO: 1313309 - DNA, 25 bp, Homo sapien
tcaaaaacctcatgaatagcttttc

SEQ ID NO: 1313310 - DNA, 25 bp, Homo sapien
agcttttcggaaacagtggaagttg

SEQ ID NO: 1313311 - DNA, 25 bp, Homo sapien
gattgcaattagaccatcaccttgg

SEQ ID NO: 1313312 - DNA, 25 bp, Homo sapien
cagacaggatatgctagctgaggca

SEQ ID NO: 1313313 - DNA, 25 bp, Homo sapien
gaaacagcagatatggtccatgact

SEQ ID NO: 1313314 - DNA, 25 bp, Homo sapien
tattacacagcacgatagagggtac

SEQ ID NO: 1313315 - DNA, 25 bp, Homo sapien
cagtgccaaaaatttagtcacctcc

SEQ ID NO: 1313316 - DNA, 25 bp, Homo sapien
tcagcttgataattgccatagattc

SEQ ID NO: 1313317 - DNA, 25 bp, Homo sapien
ttcccttagaatgcagaccagtgcc

SEQ ID NO: 1313318 - DNA, 25 bp, Homo sapien
aggacagttgtattattcagcttga

SEQ ID NO: 1313319 - DNA, 25 bp, Homo sapien
tcacttagatgagctccttcgaggc

SEQ ID NO: 1313320 - DNA, 25 bp, Homo sapien
gactgtgttctgtaaacccagctga

SEQ ID NO: 1313321 - DNA, 25 bp, Homo sapien
cgttaccaacatctcaccaggtggg

SEQ ID NO: 1313322 - DNA, 25 bp, Homo sapien
cattgaaaagatacagaggccaggc

SEQ ID NO: 1313323 - DNA, 25 bp, Homo sapien
gaatccctaattccacaaagcctga

SEQ ID NO: 1313324 - DNA, 25 bp, Homo sapien
cataaatttctatagcgagtttggc

SEQ ID NO: 1313325 - DNA, 25 bp, Homo sapien
tgaggttaaatcaggaaccagaact

SEQ ID NO: 1313326 - DNA, 25 bp, Homo sapien
ccaaagttttcaccagtcctctggc

SEQ ID NO: 1313327 - DNA, 25 bp, Homo sapien
agttaatagttttccgcctgtctga

SEQ ID NO: 1313328 - DNA, 25 bp, Homo sapien
ttccgcctgtctgagatattgcagg

SEQ ID NO: 1313329 - DNA, 25 bp, Homo sapien
tcaagttaatagttttccgcctgtc

SEQ ID NO: 1313330 - DNA, 25 bp, Homo sapien
cctgtctgagatattgcaggaatat

SEQ ID NO: 1313331 - DNA, 25 bp, Homo sapien
catgtcacagcaaagttcataagat

SEQ ID NO: 1313332 - DNA, 25 bp, Homo sapien
ttcataagattgcatatccacaggg

SEQ ID NO: 1313333 - DNA, 25 bp, Homo sapien
tccacaggggaactgtctgttgcaa

SEQ ID NO: 1313334 - DNA, 25 bp, Homo sapien
caagacacatcaattacaacatcga

SEQ ID NO: 1313335 - DNA, 25 bp, Homo sapien
ccttactaaaggcttcaaatattga

SEQ ID NO: 1313336 - DNA, 25 bp, Homo sapien
tggaatgagtttctgcaccacctta

SEQ ID NO: 1313337 - DNA, 25 bp, Homo sapien
gaatggtcatagatactagtcagat

SEQ ID NO: 1313338 - DNA, 25 bp, Homo sapien
ataggttttccaaggtcggcagttg

SEQ ID NO: 1313339 - DNA, 25 bp, Homo sapien
ttgtctaccatacccatcactcaag

SEQ ID NO: 1313340 - DNA, 25 bp, Homo sapien
ctttatcttgtctaccatacccatc

SEQ ID NO: 1313341 - DNA, 25 bp, Homo sapien
aaaacacaacatagcttgattaatt

SEQ ID NO: 1313342 - DNA, 25 bp, Homo sapien
gaaaaataccttatgttctatgaca

SEQ ID NO: 1313343 - DNA, 25 bp, Homo sapien
gaaagtgcactctctgtataaggct

SEQ ID NO: 1313344 - DNA, 25 bp, Homo sapien
gggcacacaggtagcagaaagctat

SEQ ID NO: 1313345 - DNA, 25 bp, Homo sapien
gacagcctggaattcaacaacaaga

SEQ ID NO: 1313346 - DNA, 25 bp, Homo sapien
taagactcaagctaaagacttccac

SEQ ID NO: 1313347 - DNA, 25 bp, Homo sapien
catgtctgggttaactttgtaggct

SEQ ID NO: 1313348 - DNA, 25 bp, Homo sapien
tcttgttaaagcctccatgtagtca

SEQ ID NO: 1313349 - DNA, 25 bp, Homo sapien
tcattggccctttgatgaatgtccc

SEQ ID NO: 1313350 - DNA, 25 bp, Homo sapien
atcatcagacagaccatcaactttg

SEQ ID NO: 1313351 - DNA, 25 bp, Homo sapien
actgttagggaatctactgccaaag

SEQ ID NO: 1313352 - DNA, 25 bp, Homo sapien
gcactctgcaactgcatctcttaca

SEQ ID NO: 1313353 - DNA, 25 bp, Homo sapien
gagataagctgcaaccacatgacaa

SEQ ID NO: 1313354 - DNA, 25 bp, Homo sapien
gaggagtaaacacattactgactac

SEQ ID NO: 1313355 - DNA, 25 bp, Homo sapien
agtccatttgcccaggaaaatccca

SEQ ID NO: 1313356 - DNA, 25 bp, Homo sapien
aaagagggtctcgttgggtgacatc

SEQ ID NO: 1313357 - DNA, 25 bp, Homo sapien
gacgtatatcaatgctcctgttccc

SEQ ID NO: 1313358 - DNA, 25 bp, Homo sapien
tggaaattcacaaaggagctattgg

SEQ ID NO: 1313359 - DNA, 25 bp, Homo sapien
tggatggaggacttgccgctgcgcc

SEQ ID NO: 1313360 - DNA, 25 bp, Homo sapien
ggaggacttgccgctgcgccggagt

SEQ ID NO: 1313361 - DNA, 25 bp, Homo sapien
gatggaggacttgccgctgcgccgg

SEQ ID NO: 1313362 - DNA, 25 bp, Homo sapien
aggacttgccgctgcgccggagtcc

SEQ ID NO: 1313363 - DNA, 25 bp, Homo sapien
gaatcctcggcttggagctgtcagc

SEQ ID NO: 1313364 - DNA, 25 bp, Homo sapien
gagcagaatcctcggcttggagctg

SEQ ID NO: 1313365 - DNA, 25 bp, Homo sapien
atcctcggcttggagctgtcagcgc

SEQ ID NO: 1313366 - DNA, 25 bp, Homo sapien
cagaatcctcggcttggagctgtca

SEQ ID NO: 1313367 - DNA, 25 bp, Homo sapien
gccgcgccgtaactgccggcgaggg

SEQ ID NO: 1313368 - DNA, 25 bp, Homo sapien
tcctttggaaacgaatcggccgcgc

SEQ ID NO: 1313369 - DNA, 25 bp, Homo sapien
gtctcctccgccccgtactgcaggg

SEQ ID NO: 1313370 - DNA, 25 bp, Homo sapien
taactgccggcgaggggcgtctcct

SEQ ID NO: 1313371 - DNA, 25 bp, Homo sapien
gcccgcgccctgacaggccaggcca

SEQ ID NO: 1313372 - DNA, 25 bp, Homo sapien
tacaaccaacttgtgagataggcaa

SEQ ID NO: 1313373 - DNA, 25 bp, Homo sapien
tgaagaggacctctagaggctaagc

SEQ ID NO: 1313374 - DNA, 25 bp, Homo sapien
taataggagcttaactggtgggatc

SEQ ID NO: 1313375 - DNA, 25 bp, Homo sapien
ggatggtaccaaagacagtcacagt

SEQ ID NO: 1313376 - DNA, 25 bp, Homo sapien
catctcagcttgtgtgtgaacccag

SEQ ID NO: 1313377 - DNA, 25 bp, Homo sapien
tagtctccaacaggtgccaaggctt

SEQ ID NO: 1313378 - DNA, 25 bp, Homo sapien
tgggaacccgtacaaaagcatcttg

SEQ ID NO: 1313379 - DNA, 25 bp, Homo sapien
taggacccactaaagctcagaggaa

SEQ ID NO: 1313380 - DNA, 25 bp, Homo sapien
attaaaagagttctatagcatctgt

SEQ ID NO: 1313381 - DNA, 25 bp, Homo sapien
atattaaaagagttctatagcatct

SEQ ID NO: 1313382 - DNA, 25 bp, Homo sapien
catattaaaagagttctatagcatc

SEQ ID NO: 1313383 - DNA, 25 bp, Homo sapien
tattaaaagagttctatagcatctg

SEQ ID NO: 1313384 - DNA, 25 bp, Homo sapien
cctcctgaggtggttcatactgagc

SEQ ID NO: 1313385 - DNA, 25 bp, Homo sapien
cttctcctcctgaggtggttcatac

SEQ ID NO: 1313386 - DNA, 25 bp, Homo sapien
cctgaggtggttcatactgagcaag

SEQ ID NO: 1313387 - DNA, 25 bp, Homo sapien
ctcctcctgaggtggttcatactga

SEQ ID NO: 1313388 - DNA, 25 bp, Homo sapien
ttcttctacaatagcttcatacttc

SEQ ID NO: 1313389 - DNA, 25 bp, Homo sapien
acttctctttcatttcggccagttc

SEQ ID NO: 1313390 - DNA, 25 bp, Homo sapien
tcggccagttctaggcgaagcagct

SEQ ID NO: 1313391 - DNA, 25 bp, Homo sapien
cttctacaatagcttcatacttctc

SEQ ID NO: 1313392 - DNA, 25 bp, Homo sapien
aagcactgttaggtttctctggttc

SEQ ID NO: 1313393 - DNA, 25 bp, Homo sapien
caaagcactgttaggtttctctggt

SEQ ID NO: 1313394 - DNA, 25 bp, Homo sapien
ccaaagcactgttaggtttctctgg

SEQ ID NO: 1313395 - DNA, 25 bp, Homo sapien
tccaaagcactgttaggtttctctg

SEQ ID NO: 1313396 - DNA, 25 bp, Homo sapien
cccagtgagttgagtgacacatagc

SEQ ID NO: 1313397 - DNA, 25 bp, Homo sapien
tacacccttgaatatcccagtgagt

SEQ ID NO: 1313398 - DNA, 25 bp, Homo sapien
gtaaccaccttgatatgccctcgag

SEQ ID NO: 1313399 - DNA, 25 bp, Homo sapien
gaagccacgaatgaagagatacagc

SEQ ID NO: 1313400 - DNA, 25 bp, Homo sapien
ttgaagagactttgcaacagctgca

SEQ ID NO: 1313401 - DNA, 25 bp, Homo sapien
caagagtttcactcccggtgcggag

SEQ ID NO: 1313402 - DNA, 25 bp, Homo sapien
gatctgaaggtccttggcaaacatg

SEQ ID NO: 1313403 - DNA, 25 bp, Homo sapien
tcatagcccacttggaaattcggtc

SEQ ID NO: 1313404 - DNA, 25 bp, Homo sapien
ccgaggcccacctcgctggaccccg

SEQ ID NO: 1313405 - DNA, 25 bp, Homo sapien
ctggaccccggacgggccccatctg

SEQ ID NO: 1313406 - DNA, 25 bp, Homo sapien
gccaggtccctgctgaaccccgagg

SEQ ID NO: 1313407 - DNA, 25 bp, Homo sapien
tgctgaaccccgaggcccacctcgc

SEQ ID NO: 1313408 - DNA, 25 bp, Homo sapien
acgacgagggcacgaggtaccctct

SEQ ID NO: 1313409 - DNA, 25 bp, Homo sapien
agggcacgaggtaccctctcctagc

SEQ ID NO: 1313410 - DNA, 25 bp, Homo sapien
gggagcacgacgagggcacgaggta

SEQ ID NO: 1313411 - DNA, 25 bp, Homo sapien
gcacgacgagggcacgaggtaccct

SEQ ID NO: 1313412 - DNA, 25 bp, Homo sapien
ggtcagcgtgtccagcacccccgac

SEQ ID NO: 1313413 - DNA, 25 bp, Homo sapien
ccttggtcagcgtgtccagcacccc

SEQ ID NO: 1313414 - DNA, 25 bp, Homo sapien
ttggtcagcgtgtccagcacccccg

SEQ ID NO: 1313415 - DNA, 25 bp, Homo sapien
cagcacccccgacttctccaagtac

SEQ ID NO: 1313416 - DNA, 25 bp, Homo sapien
actgctcacgcttcgagtcggcggc

SEQ ID NO: 1313417 - DNA, 25 bp, Homo sapien
gaactgctcacgcttcgagtcggcg

SEQ ID NO: 1313418 - DNA, 25 bp, Homo sapien
ctccggaactgctcacgcttcgagt

SEQ ID NO: 1313419 - DNA, 25 bp, Homo sapien
cggaactgctcacgcttcgagtcgg

SEQ ID NO: 1313420 - DNA, 25 bp, Homo sapien
ccgcctccgcctcactacctcgggg

SEQ ID NO: 1313421 - DNA, 25 bp, Homo sapien
tccgcctcactacctcggggccctc

SEQ ID NO: 1313422 - DNA, 25 bp, Homo sapien
ggcgctgggagtccggcaaccccgc

SEQ ID NO: 1313423 - DNA, 25 bp, Homo sapien
aagagacaccgggggtcagtggcca

SEQ ID NO: 1313424 - DNA, 25 bp, Homo sapien
agagccgaccagcggcttgctaccg

SEQ ID NO: 1313425 - DNA, 25 bp, Homo sapien
agcggcttgctaccgcccgcatgcc

SEQ ID NO: 1313426 - DNA, 25 bp, Homo sapien
gaccagcggcttgctaccgcccgca

SEQ ID NO: 1313427 - DNA, 25 bp, Homo sapien
ccagagccgaccagcggcttgctac

SEQ ID NO: 1313428 - DNA, 25 bp, Homo sapien
gcagcggcgtagctggcgccggaga

SEQ ID NO: 1313429 - DNA, 25 bp, Homo sapien
acagcggcagcggcgtagctggcgc

SEQ ID NO: 1313430 - DNA, 25 bp, Homo sapien
agcggcgtagctggcgccggagacc

SEQ ID NO: 1313431 - DNA, 25 bp, Homo sapien
agcggcagcggcgtagctggcgccg

SEQ ID NO: 1313432 - DNA, 25 bp, Homo sapien
ctggcgggttgggagcagcactgct

SEQ ID NO: 1313433 - DNA, 25 bp, Homo sapien
gcctgcgcacttgcaaaccaccggc

SEQ ID NO: 1313434 - DNA, 25 bp, Homo sapien
acttgcaaaccaccggccgggatcg

SEQ ID NO: 1313435 - DNA, 25 bp, Homo sapien
tgcgcacttgcaaaccaccggccgg

SEQ ID NO: 1313436 - DNA, 25 bp, Homo sapien
cgcgcctgcgcacttgcaaaccacc

SEQ ID NO: 1313437 - DNA, 25 bp, Homo sapien
agggaggctgcgtatgcccgcccct

SEQ ID NO: 1313438 - DNA, 25 bp, Homo sapien
tttgcaggaggtgagattttggtac

SEQ ID NO: 1313439 - DNA, 25 bp, Homo sapien
tctgcatccccagtagcaggctgag

SEQ ID NO: 1313440 - DNA, 25 bp, Homo sapien
gttttcatggcgaccaggacgctct

SEQ ID NO: 1313441 - DNA, 25 bp, Homo sapien
gaaactgtggtgacccataggtgct

SEQ ID NO: 1313442 - DNA, 25 bp, Homo sapien
ctattgcgagagaaaggaccgccgc

SEQ ID NO: 1313443 - DNA, 25 bp, Homo sapien
tagcgagcgcatctttttcatctgg

SEQ ID NO: 1313444 - DNA, 25 bp, Homo sapien
agggcccgggagcattgagactatt

SEQ ID NO: 1313445 - DNA, 25 bp, Homo sapien
tatgaactggtgaaggaaagccacg

SEQ ID NO: 1313446 - DNA, 25 bp, Homo sapien
caacacccctgtagggtgggtattg

SEQ ID NO: 1313447 - DNA, 25 bp, Homo sapien
tccgggcaatgaatcacgatgctat

SEQ ID NO: 1313448 - DNA, 25 bp, Homo sapien
tagagtcgagtccaatccgggcaat

SEQ ID NO: 1313449 - DNA, 25 bp, Homo sapien
catcaggatgccagtctagaaggaa

SEQ ID NO: 1313450 - DNA, 25 bp, Homo sapien
tataatgtctaaaagccaaccgctg

SEQ ID NO: 1313451 - DNA, 25 bp, Homo sapien
caagaaccatttcctaaggctgtgg

SEQ ID NO: 1313452 - DNA, 25 bp, Homo sapien
taacagctggtctttagagctgccc

SEQ ID NO: 1313453 - DNA, 25 bp, Homo sapien
gacactacgtgatttggaggacaaa

SEQ ID NO: 1313454 - DNA, 25 bp, Homo sapien
tctgaagatctgtgggaacccgcct

SEQ ID NO: 1313455 - DNA, 25 bp, Homo sapien
caggattattacaggttctgaccaa

SEQ ID NO: 1313456 - DNA, 25 bp, Homo sapien
caatgagattgttcgttagggacac

SEQ ID NO: 1313457 - DNA, 25 bp, Homo sapien
catgtagctctaagccaccgcggtt

SEQ ID NO: 1313458 - DNA, 25 bp, Homo sapien
ggtttccaatcgcagttagctggca

SEQ ID NO: 1313459 - DNA, 25 bp, Homo sapien
tatagcaacacctggaatagaacgg

SEQ ID NO: 1313460 - DNA, 25 bp, Homo sapien
tctgtagaggaaccccatgtagctc

SEQ ID NO: 1313461 - DNA, 25 bp, Homo sapien
ctaagtgtggaaatctcattagaaa

SEQ ID NO: 1313462 - DNA, 25 bp, Homo sapien
ctcatcatttacactatgattgtca

SEQ ID NO: 1313463 - DNA, 25 bp, Homo sapien
tgttgaaaatgactacaactagtac

SEQ ID NO: 1313464 - DNA, 25 bp, Homo sapien
gactacaactagtactaagtgtgga

SEQ ID NO: 1313465 - DNA, 25 bp, Homo sapien
gaatttaaactagggtacactgcag

SEQ ID NO: 1313466 - DNA, 25 bp, Homo sapien
taaatagcggctctaagtgaaatcc

SEQ ID NO: 1313467 - DNA, 25 bp, Homo sapien
gaatccaacttcaaccacagagcga

SEQ ID NO: 1313468 - DNA, 25 bp, Homo sapien
cgattatatttggacacgggtggcc

SEQ ID NO: 1313469 - DNA, 25 bp, Homo sapien
tctcagtcggtacaatgcatggccc

SEQ ID NO: 1313470 - DNA, 25 bp, Homo sapien
cctccagttctactcttaactgagc

SEQ ID NO: 1313471 - DNA, 25 bp, Homo sapien
ttcctcaagaactctcagtcggtac

SEQ ID NO: 1313472 - DNA, 25 bp, Homo sapien
tcggtacaatgcatggcccatgtag

SEQ ID NO: 1313473 - DNA, 25 bp, Homo sapien
gctacacccagaacaagcattcgaa

SEQ ID NO: 1313474 - DNA, 25 bp, Homo sapien
cagcctggttgttctgtattgcaga

SEQ ID NO: 1313475 - DNA, 25 bp, Homo sapien
tgcagaacccagtatctaatgaggg

SEQ ID NO: 1313476 - DNA, 25 bp, Homo sapien
aggcctggtcgtagcatacatttct

SEQ ID NO: 1313477 - DNA, 25 bp, Homo sapien
ttagtcagccatcttagctctgatc

SEQ ID NO: 1313478 - DNA, 25 bp, Homo sapien
ccatcttagctctgatccacatcaa

SEQ ID NO: 1313479 - DNA, 25 bp, Homo sapien
ccacatcaaataagaggcagataaa

SEQ ID NO: 1313480 - DNA, 25 bp, Homo sapien
catcaaataagaggcagataaattc

SEQ ID NO: 1313481 - DNA, 25 bp, Homo sapien
tatgtcacttctatatgctggttgc

SEQ ID NO: 1313482 - DNA, 25 bp, Homo sapien
tataacaatatgtcacttctatatg

SEQ ID NO: 1313483 - DNA, 25 bp, Homo sapien
cacttctatatgctggttgctttac

SEQ ID NO: 1313484 - DNA, 25 bp, Homo sapien
caatatgtcacttctatatgctggt

SEQ ID NO: 1313485 - DNA, 25 bp, Homo sapien
tcttaataagctaaaacagagagat

SEQ ID NO: 1313486 - DNA, 25 bp, Homo sapien
taataagctaaaacagagagattaa

SEQ ID NO: 1313487 - DNA, 25 bp, Homo sapien
cttaataagctaaaacagagagatt

SEQ ID NO: 1313488 - DNA, 25 bp, Homo sapien
ataagctaaaacagagagattaaca

SEQ ID NO: 1313489 - DNA, 25 bp, Homo sapien
tgtccctttgctggtatagagcaga

SEQ ID NO: 1313490 - DNA, 25 bp, Homo sapien
gtaaatctgagaagcaaaccatgtt

SEQ ID NO: 1313491 - DNA, 25 bp, Homo sapien
tgtagtgagtgagtcatccatcaac

SEQ ID NO: 1313492 - DNA, 25 bp, Homo sapien
ctatctgtgctagccaataaggcag

SEQ ID NO: 1313493 - DNA, 25 bp, Homo sapien
aataccatatgcctgggaaagaccc

SEQ ID NO: 1313494 - DNA, 25 bp, Homo sapien
gtaagtctgttttatagaataccat

SEQ ID NO: 1313495 - DNA, 25 bp, Homo sapien
tagaataccatatgcctgggaaaga

SEQ ID NO: 1313496 - DNA, 25 bp, Homo sapien
agagtaagtctgttttatagaatac

SEQ ID NO: 1313497 - DNA, 25 bp, Homo sapien
tctacattaagaagccccttcctta

SEQ ID NO: 1313498 - DNA, 25 bp, Homo sapien
tctttgcaactgatgagtttaatgc

SEQ ID NO: 1313499 - DNA, 25 bp, Homo sapien
aattgttagccttttctgagacttc

SEQ ID NO: 1313500 - DNA, 25 bp, Homo sapien
tccttttataggcaatctttgcaac

SEQ ID NO: 1313501 - DNA, 25 bp, Homo sapien
tcagtttgctggagataggaaaatg

SEQ ID NO: 1313502 - DNA, 25 bp, Homo sapien
gcagcaattgctatccaaaaccttg

SEQ ID NO: 1313503 - DNA, 25 bp, Homo sapien
taagacacaagctaaatatgcagca

SEQ ID NO: 1313504 - DNA, 25 bp, Homo sapien
gctaaacaccgtgtagccaatggac

SEQ ID NO: 1313505 - DNA, 25 bp, Homo sapien
acaggaaaatccattctctcctgtt

SEQ ID NO: 1313506 - DNA, 25 bp, Homo sapien
agaaccttctatagagagcaaatcc

SEQ ID NO: 1313507 - DNA, 25 bp, Homo sapien
caaagaaccttctatagagagcaaa

SEQ ID NO: 1313508 - DNA, 25 bp, Homo sapien
aaccttctatagagagcaaatccca

SEQ ID NO: 1313509 - DNA, 25 bp, Homo sapien
ggaacaaagaaccttctatagagag

SEQ ID NO: 1313510 - DNA, 25 bp, Homo sapien
tgaaaattccaaaggcaggaatcat

SEQ ID NO: 1313511 - DNA, 25 bp, Homo sapien
ctgaaaattccaaaggcaggaatca

SEQ ID NO: 1313512 - DNA, 25 bp, Homo sapien
tcagagcatagactcctcctgaagc

SEQ ID NO: 1313513 - DNA, 25 bp, Homo sapien
caagatatctgagtgggtcaaagat

SEQ ID NO: 1313514 - DNA, 25 bp, Homo sapien
cctcccatcagagcatagactcctc

SEQ ID NO: 1313515 - DNA, 25 bp, Homo sapien
cccacaagatatctgagtgggtcaa

SEQ ID NO: 1313516 - DNA, 25 bp, Homo sapien
aggaacccaggcagatctcagcaaa

SEQ ID NO: 1313517 - DNA, 25 bp, Homo sapien
gcaaggaaattacccaagccaagga

SEQ ID NO: 1313518 - DNA, 25 bp, Homo sapien
gattacagaatacagcgcatgaagc

SEQ ID NO: 1313519 - DNA, 25 bp, Homo sapien
ccagagaagggactcagacgacaac

SEQ ID NO: 1313520 - DNA, 25 bp, Homo sapien
ggagggccccaaggactgataagcc

SEQ ID NO: 1313521 - DNA, 25 bp, Homo sapien
tgccctgcgacttttctctaggtcc

SEQ ID NO: 1313522 - DNA, 25 bp, Homo sapien
tcatggccagggtgataatgatggc

SEQ ID NO: 1313523 - DNA, 25 bp, Homo sapien
gccaacagccgagagctgagctgct

SEQ ID NO: 1313524 - DNA, 25 bp, Homo sapien
actggaaaatgccataattaatggg

SEQ ID NO: 1313525 - DNA, 25 bp, Homo sapien
gggcaatgctcagagtacacaaaag

SEQ ID NO: 1313526 - DNA, 25 bp, Homo sapien
cacaaaagggtccagtggtgggaat

SEQ ID NO: 1313527 - DNA, 25 bp, Homo sapien
actgctttcaagtaacataactgag

SEQ ID NO: 1313528 - DNA, 25 bp, Homo sapien
ccaaatggacctaattgacatgtat

SEQ ID NO: 1313529 - DNA, 25 bp, Homo sapien
aatgtacaaagaacacttaccaaca

SEQ ID NO: 1313530 - DNA, 25 bp, Homo sapien
agacaaacaacacaatcaaccaaat

SEQ ID NO: 1313531 - DNA, 25 bp, Homo sapien
ttctacccaacaacaactgatctca

SEQ ID NO: 1313532 - DNA, 25 bp, Homo sapien
aagattccccaagatgtgctgaact

SEQ ID NO: 1313533 - DNA, 25 bp, Homo sapien
tcactcctgccaggtacaccagccc

SEQ ID NO: 1313534 - DNA, 25 bp, Homo sapien
caagctgcatacaaagattccccaa

SEQ ID NO: 1313535 - DNA, 25 bp, Homo sapien
tgcatacaaagattccccaagatgt

SEQ ID NO: 1313536 - DNA, 25 bp, Homo sapien
gcagttggtgattttgcccctgatt

SEQ ID NO: 1313537 - DNA, 25 bp, Homo sapien
tagccactaagcaaaagtgtcatcc

SEQ ID NO: 1313538 - DNA, 25 bp, Homo sapien
aagcctctgagccatgtgtcctgat

SEQ ID NO: 1313539 - DNA, 25 bp, Homo sapien
tcttaaagtccttgtgtgcgggagc

SEQ ID NO: 1313540 - DNA, 25 bp, Homo sapien
cacaagagtccaccggataggtggg

SEQ ID NO: 1313541 - DNA, 25 bp, Homo sapien
gaccacaagagtccaccggataggt

SEQ ID NO: 1313542 - DNA, 25 bp, Homo sapien
gagaccacaagagtccaccggatag

SEQ ID NO: 1313543 - DNA, 25 bp, Homo sapien
ctgagaccacaagagtccaccggat

SEQ ID NO: 1313544 - DNA, 25 bp, Homo sapien
gatataatcacctctgataccaggg

SEQ ID NO: 1313545 - DNA, 25 bp, Homo sapien
acaatgatataatcacctctgatac

SEQ ID NO: 1313546 - DNA, 25 bp, Homo sapien
ataccaggggcttaactatcattgc

SEQ ID NO: 1313547 - DNA, 25 bp, Homo sapien
atgatataatcacctctgataccag

SEQ ID NO: 1313548 - DNA, 25 bp, Homo sapien
tctccaagatgcctgtgtccaacgt

SEQ ID NO: 1313549 - DNA, 25 bp, Homo sapien
tgaggcttccacacagcatagtaaa

SEQ ID NO: 1313550 - DNA, 25 bp, Homo sapien
cgtgatccactgtttctgaggcttc

SEQ ID NO: 1313551 - DNA, 25 bp, Homo sapien
tgtatgagataaacctccaggcttc

SEQ ID NO: 1313552 - DNA, 25 bp, Homo sapien
ggagcagacatgagtattaaccaca

SEQ ID NO: 1313553 - DNA, 25 bp, Homo sapien
gagcagacatgagtattaaccacac

SEQ ID NO: 1313554 - DNA, 25 bp, Homo sapien
gggagcagacatgagtattaaccac

SEQ ID NO: 1313555 - DNA, 25 bp, Homo sapien
gccactgaaattgcagccacagctg

SEQ ID NO: 1313556 - DNA, 25 bp, Homo sapien
atttgtctgacaaatgaaactccac

SEQ ID NO: 1313557 - DNA, 25 bp, Homo sapien
ccacagctgggcagatttgtctgac

SEQ ID NO: 1313558 - DNA, 25 bp, Homo sapien
ctaaaatgaaaggaagccactgaaa

SEQ ID NO: 1313559 - DNA, 25 bp, Homo sapien
accgtgagtatagggaaagcctcaa

SEQ ID NO: 1313560 - DNA, 25 bp, Homo sapien
gagtatagggaaagcctcaaaggca

SEQ ID NO: 1313561 - DNA, 25 bp, Homo sapien
gggttggcagtgaccgtgagtatag

SEQ ID NO: 1313562 - DNA, 25 bp, Homo sapien
cagtgaccgtgagtatagggaaagc

SEQ ID NO: 1313563 - DNA, 25 bp, Homo sapien
ggtgcccaccccgctccccattcac

SEQ ID NO: 1313564 - DNA, 25 bp, Homo sapien
cggtgcccaccccgctccccattca

SEQ ID NO: 1313565 - DNA, 25 bp, Homo sapien
gctctctccaagtatgttcctcggg

SEQ ID NO: 1313566 - DNA, 25 bp, Homo sapien
tactcttggcccgatctttacctcc

SEQ ID NO: 1313567 - DNA, 25 bp, Homo sapien
ctcgggacttttcgggcagcatcca

SEQ ID NO: 1313568 - DNA, 25 bp, Homo sapien
gagacaatcctgtggacctttttac

SEQ ID NO: 1313569 - DNA, 25 bp, Homo sapien
tctccatctccagatcatgaacagc

SEQ ID NO: 1313570 - DNA, 25 bp, Homo sapien
ccatctccagatcatgaacagcagc

SEQ ID NO: 1313571 - DNA, 25 bp, Homo sapien
atctccagatcatgaacagcagcca

SEQ ID NO: 1313572 - DNA, 25 bp, Homo sapien
gctctccatctccagatcatgaaca

SEQ ID NO: 1313573 - DNA, 25 bp, Homo sapien
cagaaggacatgaatcccagggaac

SEQ ID NO: 1313574 - DNA, 25 bp, Homo sapien
cagcaggtggccctaggtcctcagg

SEQ ID NO: 1313575 - DNA, 25 bp, Homo sapien
ctggcgcaacgactgctttccaagg

SEQ ID NO: 1313576 - DNA, 25 bp, Homo sapien
ggctgtctggcgcaacgactgcttt

SEQ ID NO: 1313577 - DNA, 25 bp, Homo sapien
ctcttttttgaaaggcctcgcatac

SEQ ID NO: 1313578 - DNA, 25 bp, Homo sapien
tatctgcagcaagttgctgcccact

SEQ ID NO: 1313579 - DNA, 25 bp, Homo sapien
ctcttatctgcagcaagttgctgcc

SEQ ID NO: 1313580 - DNA, 25 bp, Homo sapien
tacacagatcaaaactgggtggcac

SEQ ID NO: 1313581 - DNA, 25 bp, Homo sapien
tcacctatctggctctgtgatggaa

SEQ ID NO: 1313582 - DNA, 25 bp, Homo sapien
gggcagcaggaaacggatcccacta

SEQ ID NO: 1313583 - DNA, 25 bp, Homo sapien
cagtggcagcagtatccagtgtcca

SEQ ID NO: 1313584 - DNA, 25 bp, Homo sapien
tctttacagtggttgcagcagtggc

SEQ ID NO: 1313585 - DNA, 25 bp, Homo sapien
gccctccggtccttgcgttccaggc

SEQ ID NO: 1313586 - DNA, 25 bp, Homo sapien
acgccctccggtccttgcgttccag

SEQ ID NO: 1313587 - DNA, 25 bp, Homo sapien
tgggccaaggggttgcccgctgccc

SEQ ID NO: 1313588 - DNA, 25 bp, Homo sapien
tgccctgaagatcccgctctgccag

SEQ ID NO: 1313589 - DNA, 25 bp, Homo sapien
gtggaaaaggacaagtaaatctata

SEQ ID NO: 1313590 - DNA, 25 bp, Homo sapien
ggagatagggtttcatcatactggt

SEQ ID NO: 1313591 - DNA, 25 bp, Homo sapien
gccttagcctcccagaacgctggga

SEQ ID NO: 1313592 - DNA, 25 bp, Homo sapien
tgccttagcctcccagaacgctggg

SEQ ID NO: 1313593 - DNA, 25 bp, Homo sapien
tagtggagatagggtttcatcatac

SEQ ID NO: 1313594 - DNA, 25 bp, Homo sapien
gattgagacctacatgccaaaggga

SEQ ID NO: 1313595 - DNA, 25 bp, Homo sapien
caagtaaagggaactctgtctggtt

SEQ ID NO: 1313596 - DNA, 25 bp, Homo sapien
tcttgggcagtatgagactcacccc

SEQ ID NO: 1313597 - DNA, 25 bp, Homo sapien
taccctaggttgtgaaattgcgaaa

SEQ ID NO: 1313598 - DNA, 25 bp, Homo sapien
gttgccccgtttggagtgcatgcag

SEQ ID NO: 1313599 - DNA, 25 bp, Homo sapien
tatgatgataaagcgaaggtctgcg

SEQ ID NO: 1313600 - DNA, 25 bp, Homo sapien
aaggtctgcggtcctatatctacag

SEQ ID NO: 1313601 - DNA, 25 bp, Homo sapien
cattgacacatggactctgcctggg

SEQ ID NO: 1313602 - DNA, 25 bp, Homo sapien
aacaaactggagacgggccattgac

SEQ ID NO: 1313603 - DNA, 25 bp, Homo sapien
ccaggagcatcagggttggcttggg

SEQ ID NO: 1313604 - DNA, 25 bp, Homo sapien
ccggcagcactgctacttgggagga

SEQ ID NO: 1313605 - DNA, 25 bp, Homo sapien
cttgggagcatgagaggtgagccca

SEQ ID NO: 1313606 - DNA, 25 bp, Homo sapien
gccccggcagcactgctacttggga

SEQ ID NO: 1313607 - DNA, 25 bp, Homo sapien
tccaaagtaaggtaatattcagaga

SEQ ID NO: 1313608 - DNA, 25 bp, Homo sapien
ttccaaagtaaggtaatattcagag

SEQ ID NO: 1313609 - DNA, 25 bp, Homo sapien
tctggaaaggaaagttctattaata

SEQ ID NO: 1313610 - DNA, 25 bp, Homo sapien
tttgaaaaattctgagtttaattca

SEQ ID NO: 1313611 - DNA, 25 bp, Homo sapien
gagcgtacagcgcacatcaggcaga

SEQ ID NO: 1313612 - DNA, 25 bp, Homo sapien
ttccattctgagtcgcaacccaggt

SEQ ID NO: 1313613 - DNA, 25 bp, Homo sapien
agagtcagcagagccgagcgtacag

SEQ ID NO: 1313614 - DNA, 25 bp, Homo sapien
tgaacatcaactactgagacagctg

SEQ ID NO: 1313615 - DNA, 25 bp, Homo sapien
tccagcgcactccatgaatattggg

SEQ ID NO: 1313616 - DNA, 25 bp, Homo sapien
taattctggagggtctatcccctac

SEQ ID NO: 1313617 - DNA, 25 bp, Homo sapien
tcaaatgatgttgggagctctgtcc

SEQ ID NO: 1313618 - DNA, 25 bp, Homo sapien
ggcgggcacaacgtgtcacctacat

SEQ ID NO: 1313619 - DNA, 25 bp, Homo sapien
tattgccatgttcgccacagtgtgc

SEQ ID NO: 1313620 - DNA, 25 bp, Homo sapien
cacagtgtgccttgttttgcgctcc

SEQ ID NO: 1313621 - DNA, 25 bp, Homo sapien
gaagctggactcttatcagataaac

SEQ ID NO: 1313622 - DNA, 25 bp, Homo sapien
tcagatgtgatagtgtccttcagag

SEQ ID NO: 1313623 - DNA, 25 bp, Homo sapien
aatggtctaggccttggcatgagta

SEQ ID NO: 1313624 - DNA, 25 bp, Homo sapien
gcattggaaggaatggtctaggcct

SEQ ID NO: 1313625 - DNA, 25 bp, Homo sapien
catgagtatgtggtcgtgaaggcat

SEQ ID NO: 1313626 - DNA, 25 bp, Homo sapien
aaagcagtgaggcattggaaggaat

SEQ ID NO: 1313627 - DNA, 25 bp, Homo sapien
caggggcctccctaacctctctgtt

SEQ ID NO: 1313628 - DNA, 25 bp, Homo sapien
ggcctccctaacctctctgttgttc

SEQ ID NO: 1313629 - DNA, 25 bp, Homo sapien
ttgtgcaggggcctccctaacctct

SEQ ID NO: 1313630 - DNA, 25 bp, Homo sapien
ccttgtgcaggggcctccctaacct

SEQ ID NO: 1313631 - DNA, 25 bp, Homo sapien
tttgggatgctgatggatcacaagg

SEQ ID NO: 1313632 - DNA, 25 bp, Homo sapien
tacttaagagttctgccatagggcc

SEQ ID NO: 1313633 - DNA, 25 bp, Homo sapien
tgagtctccctttgatacttaagag

SEQ ID NO: 1313634 - DNA, 25 bp, Homo sapien
ctggtcttaagcagtgccccctgag

SEQ ID NO: 1313635 - DNA, 25 bp, Homo sapien
tgatccatctggagtgagagcagag

SEQ ID NO: 1313636 - DNA, 25 bp, Homo sapien
tggcctgttcctgatccatctggag

SEQ ID NO: 1313637 - DNA, 25 bp, Homo sapien
gatccatctggagtgagagcagaga

SEQ ID NO: 1313638 - DNA, 25 bp, Homo sapien
tagccatctgtaagggtaaatatag

SEQ ID NO: 1313639 - DNA, 25 bp, Homo sapien
ctgtaagggtaaatatagtggcatc

SEQ ID NO: 1313640 - DNA, 25 bp, Homo sapien
attttagccatctgtaagggtaaat

SEQ ID NO: 1313641 - DNA, 25 bp, Homo sapien
agtacattcacttgattgttgtgca

SEQ ID NO: 1313642 - DNA, 25 bp, Homo sapien
agaggaaggtgcctgtgctctctgt

SEQ ID NO: 1313643 - DNA, 25 bp, Homo sapien
agatagaggaaggtgcctgtgctct

SEQ ID NO: 1313644 - DNA, 25 bp, Homo sapien
ctgagaacttgagggagatagagga

SEQ ID NO: 1313645 - DNA, 25 bp, Homo sapien
gtttgccaaagagataactgactcc

SEQ ID NO: 1313646 - DNA, 25 bp, Homo sapien
tggccctgctcagcttccaaaatca

SEQ ID NO: 1313647 - DNA, 25 bp, Homo sapien
ggcctggccctgctcagcttccaaa

SEQ ID NO: 1313648 - DNA, 25 bp, Homo sapien
caaaatcagacgagatcaggcgtgt

SEQ ID NO: 1313649 - DNA, 25 bp, Homo sapien
tccaaaatcagacgagatcaggcgt

SEQ ID NO: 1313650 - DNA, 25 bp, Homo sapien
tcttcagatgtgtttttcctagtgt

SEQ ID NO: 1313651 - DNA, 25 bp, Homo sapien
cttcagatgtgtttttcctagtgta

SEQ ID NO: 1313652 - DNA, 25 bp, Homo sapien
ttcagatgtgtttttcctagtgtat

SEQ ID NO: 1313653 - DNA, 25 bp, Homo sapien
tgtctcaataccacattgccaaacc

SEQ ID NO: 1313654 - DNA, 25 bp, Homo sapien
taccacattgccaaaccttagaggc

SEQ ID NO: 1313655 - DNA, 25 bp, Homo sapien
cacattgccaaaccttagaggcaga

SEQ ID NO: 1313656 - DNA, 25 bp, Homo sapien
tcaataccacattgccaaaccttag

SEQ ID NO: 1313657 - DNA, 25 bp, Homo sapien
gtactttgctttctccccgcaagag

SEQ ID NO: 1313658 - DNA, 25 bp, Homo sapien
caagaggttccctaatgcttctgtg

SEQ ID NO: 1313659 - DNA, 25 bp, Homo sapien
tctccccgcaagaggttccctaatg

SEQ ID NO: 1313660 - DNA, 25 bp, Homo sapien
tcatacatcctcatgtactttgctt

SEQ ID NO: 1313661 - DNA, 25 bp, Homo sapien
gagcaggtaactaactggtacccag

SEQ ID NO: 1313662 - DNA, 25 bp, Homo sapien
gagttgctggtgttctatactggaa

SEQ ID NO: 1313663 - DNA, 25 bp, Homo sapien
tctatactggaagaggcatgccaga

SEQ ID NO: 1313664 - DNA, 25 bp, Homo sapien
agttattctttaaatctactgtggg

SEQ ID NO: 1313665 - DNA, 25 bp, Homo sapien
tcagtggaaggggtcgtgcgatgtc

SEQ ID NO: 1313666 - DNA, 25 bp, Homo sapien
aggaggaagggtcagtcagtggaag

SEQ ID NO: 1313667 - DNA, 25 bp, Homo sapien
cctccaggtatagatttgggttgga

SEQ ID NO: 1313668 - DNA, 25 bp, Homo sapien
cctcctccaggtatagatttgggtt

SEQ ID NO: 1313669 - DNA, 25 bp, Homo sapien
ctgccagttggacatcacagaataa

SEQ ID NO: 1313670 - DNA, 25 bp, Homo sapien
tggacatcacagaataaagtttttc

SEQ ID NO: 1313671 - DNA, 25 bp, Homo sapien
catcacagaataaagtttttccacc

SEQ ID NO: 1313672 - DNA, 25 bp, Homo sapien
tgccagttggacatcacagaataaa

SEQ ID NO: 1313673 - DNA, 25 bp, Homo sapien
tgagctcaggcagtttacccgcctt

SEQ ID NO: 1313674 - DNA, 25 bp, Homo sapien
gagctcaggcagtttacccgccttg

SEQ ID NO: 1313675 - DNA, 25 bp, Homo sapien
cccgccttggcctcctaaagtgcta

SEQ ID NO: 1313676 - DNA, 25 bp, Homo sapien
ctgagctcaggcagtttacccgcct

SEQ ID NO: 1313677 - DNA, 25 bp, Homo sapien
gaaaggtcttgatttggcccatacc

SEQ ID NO: 1313678 - DNA, 25 bp, Homo sapien
gccactacctagttgtctttcagct

SEQ ID NO: 1313679 - DNA, 25 bp, Homo sapien
caatgcttccccttacctataggat

SEQ ID NO: 1313680 - DNA, 25 bp, Homo sapien
ttttaaggttagatagagtcactcc

SEQ ID NO: 1313681 - DNA, 25 bp, Homo sapien
gagtcaataggcagaagttacaagg

SEQ ID NO: 1313682 - DNA, 25 bp, Homo sapien
aaggtccataccttagtgctgtagt

SEQ ID NO: 1313683 - DNA, 25 bp, Homo sapien
gattcaaggccgaaaagaaggatgt

SEQ ID NO: 1313684 - DNA, 25 bp, Homo sapien
aagggatttgtgtgtcagcagagaa

SEQ ID NO: 1313685 - DNA, 25 bp, Homo sapien
gtacagatttccactactgcagtag

SEQ ID NO: 1313686 - DNA, 25 bp, Homo sapien
gattgagctcttggtccatgcagtc

SEQ ID NO: 1313687 - DNA, 25 bp, Homo sapien
cctgccctactgcaatgggagtaaa

SEQ ID NO: 1313688 - DNA, 25 bp, Homo sapien
ttactcccaaatggcaacaagtgtt

SEQ ID NO: 1313689 - DNA, 25 bp, Homo sapien
ctcccgggttccagctattcgcctg

SEQ ID NO: 1313690 - DNA, 25 bp, Homo sapien
cctcccgggttccagctattcgcct

SEQ ID NO: 1313691 - DNA, 25 bp, Homo sapien
gcgcccgcccccaccacgcccagct

SEQ ID NO: 1313692 - DNA, 25 bp, Homo sapien
ggcgcccgcccccaccacgcccagc

SEQ ID NO: 1313693 - DNA, 25 bp, Homo sapien
tcctgctaactggttgaccctctcc

SEQ ID NO: 1313694 - DNA, 25 bp, Homo sapien
ttcctgctaactggttgaccctctc

SEQ ID NO: 1313695 - DNA, 25 bp, Homo sapien
cctgctaactggttgaccctctcca

SEQ ID NO: 1313696 - DNA, 25 bp, Homo sapien
taagcagtactattggttttgacaa

SEQ ID NO: 1313697 - DNA, 25 bp, Homo sapien
agtggagtgcatggtcttagcacat

SEQ ID NO: 1313698 - DNA, 25 bp, Homo sapien
tgcatggtcttagcacatggcagcc

SEQ ID NO: 1313699 - DNA, 25 bp, Homo sapien
tttcttgtttagatgtatagtgcca

SEQ ID NO: 1313700 - DNA, 25 bp, Homo sapien
gagcgaggttgagtgtatttttaca

SEQ ID NO: 1313701 - DNA, 25 bp, Homo sapien
tttttctggtgtgattggtaaaaca

SEQ ID NO: 1313702 - DNA, 25 bp, Homo sapien
tatttctcttatgagcgaggttgag

SEQ ID NO: 1313703 - DNA, 25 bp, Homo sapien
cagattgtgcttttgacttatggtg

SEQ ID NO: 1313704 - DNA, 25 bp, Homo sapien
ctggcccacaactattttgtttttg

SEQ ID NO: 1313705 - DNA, 25 bp, Homo sapien
cagtggactggtgttgacaaggcaa

SEQ ID NO: 1313706 - DNA, 25 bp, Homo sapien
cactgatcggctgggctcttgcaga

SEQ ID NO: 1313707 - DNA, 25 bp, Homo sapien
ggctgggactggacactgatcggct

SEQ ID NO: 1313708 - DNA, 25 bp, Homo sapien
tcttgcagagtgtgttcatcaacag

SEQ ID NO: 1313709 - DNA, 25 bp, Homo sapien
cagaagacttgatctaaggcccagc

SEQ ID NO: 1313710 - DNA, 25 bp, Homo sapien
tagggatcatcattctccagaagac

SEQ ID NO: 1313711 - DNA, 25 bp, Homo sapien
tcattctccagaagacttgatctaa

SEQ ID NO: 1313712 - DNA, 25 bp, Homo sapien
taaggcccagcaccagattattttc

SEQ ID NO: 1313713 - DNA, 25 bp, Homo sapien
cttctctctggtcagttgtgaagcc

SEQ ID NO: 1313714 - DNA, 25 bp, Homo sapien
ggtcagttgtgaagcccaaatattc

SEQ ID NO: 1313715 - DNA, 25 bp, Homo sapien
tctggtcagttgtgaagcccaaata

SEQ ID NO: 1313716 - DNA, 25 bp, Homo sapien
agttgtgaagcccaaatattcttcc

SEQ ID NO: 1313717 - DNA, 25 bp, Homo sapien
gaaatacccatgcttttcatctggt

SEQ ID NO: 1313718 - DNA, 25 bp, Homo sapien
gattgtgagcgacttttctctagtg

SEQ ID NO: 1313719 - DNA, 25 bp, Homo sapien
tctggtccaaggaggctcaggtttc

SEQ ID NO: 1313720 - DNA, 25 bp, Homo sapien
gacgacgggattgtgagcgactttt

SEQ ID NO: 1313721 - DNA, 25 bp, Homo sapien
tttgcagctacagcgcagggttggc

SEQ ID NO: 1313722 - DNA, 25 bp, Homo sapien
caagctggccccgaatgaaggactt

SEQ ID NO: 1313723 - DNA, 25 bp, Homo sapien
cccagctagggaggacgaatggcta

SEQ ID NO: 1313724 - DNA, 25 bp, Homo sapien
taaagttgcaggaatatccgccgac

SEQ ID NO: 1313725 - DNA, 25 bp, Homo sapien
tactgttcccaaggatatacccctg

SEQ ID NO: 1313726 - DNA, 25 bp, Homo sapien
tcggtgaggtggcaaacagaactgc

SEQ ID NO: 1313727 - DNA, 25 bp, Homo sapien
tgggtactattgatgcagaacagct

SEQ ID NO: 1313728 - DNA, 25 bp, Homo sapien
gatttgttgccctgatgacccacag

SEQ ID NO: 1313729 - DNA, 25 bp, Homo sapien
tatctcctaaatgcctgagctagca

SEQ ID NO: 1313730 - DNA, 25 bp, Homo sapien
cagattcttattatgtgcacagcag

SEQ ID NO: 1313731 - DNA, 25 bp, Homo sapien
ccaggcacgccaatatttaacataa

SEQ ID NO: 1313732 - DNA, 25 bp, Homo sapien
ttccaacggaaacccataagatagc

SEQ ID NO: 1313733 - DNA, 25 bp, Homo sapien
tgaatgatgccttggatcggctgga

SEQ ID NO: 1313734 - DNA, 25 bp, Homo sapien
tgttagcactggagcggcaaaggaa

SEQ ID NO: 1313735 - DNA, 25 bp, Homo sapien
tgctgagtggccttccctgaaacaa

SEQ ID NO: 1313736 - DNA, 25 bp, Homo sapien
tcatcagctcactaaggtaggacag

SEQ ID NO: 1313737 - DNA, 25 bp, Homo sapien
tgcagggcagcatactcatcctggt

SEQ ID NO: 1313738 - DNA, 25 bp, Homo sapien
ttaagggttgaaatggactgggcat

SEQ ID NO: 1313739 - DNA, 25 bp, Homo sapien
gcctggaatctagggaaatggtcta

SEQ ID NO: 1313740 - DNA, 25 bp, Homo sapien
tagctcaggctagatggattactca

SEQ ID NO: 1313741 - DNA, 25 bp, Homo sapien
atccagagaaaaccctttgcagtga

SEQ ID NO: 1313742 - DNA, 25 bp, Homo sapien
agagcactgctcttgggtggaatcc

SEQ ID NO: 1313743 - DNA, 25 bp, Homo sapien
ggaatcctccatatctctcagaacc

SEQ ID NO: 1313744 - DNA, 25 bp, Homo sapien
ccaggacaggacgtgtattctcttt

SEQ ID NO: 1313745 - DNA, 25 bp, Homo sapien
caagggataggctcgttggtgacat

SEQ ID NO: 1313746 - DNA, 25 bp, Homo sapien
gaggaatgaattccacgagcctgtt

SEQ ID NO: 1313747 - DNA, 25 bp, Homo sapien
aacacgtgctcgtcctttaatggag

SEQ ID NO: 1313748 - DNA, 25 bp, Homo sapien
tctgcgcggtgcagggttgtaaacc

SEQ ID NO: 1313749 - DNA, 25 bp, Homo sapien
acactcagaacatgccttggcgtgg

SEQ ID NO: 1313750 - DNA, 25 bp, Homo sapien
tgtaccccctaacgatgtgcgagca

SEQ ID NO: 1313751 - DNA, 25 bp, Homo sapien
ggtatgtaccccctaacgatgtgcg

SEQ ID NO: 1313752 - DNA, 25 bp, Homo sapien
cagaacatgccttggcgtggcaagt

SEQ ID NO: 1313753 - DNA, 25 bp, Homo sapien
aaggactcgcgggaatcgcgccgcc

SEQ ID NO: 1313754 - DNA, 25 bp, Homo sapien
tgagccggggcaaggactcgcggga

SEQ ID NO: 1313755 - DNA, 25 bp, Homo sapien
gagctcgccggtcgcccctgcgctg

SEQ ID NO: 1313756 - DNA, 25 bp, Homo sapien
gggcggcacagacggctgagccggg

SEQ ID NO: 1313757 - DNA, 25 bp, Homo sapien
gcctcgaagcgttggcgtctgcgtc

SEQ ID NO: 1313758 - DNA, 25 bp, Homo sapien
ggattggctgacagtcccagccctc

SEQ ID NO: 1313759 - DNA, 25 bp, Homo sapien
aacggcggcgacagacggattggct

SEQ ID NO: 1313760 - DNA, 25 bp, Homo sapien
cacagccggactggtgggaacggcg

SEQ ID NO: 1313761 - DNA, 25 bp, Homo sapien
accctggtaccccatagtagctgca

SEQ ID NO: 1313762 - DNA, 25 bp, Homo sapien
ggcaggtctgccgtcggcacgagct

SEQ ID NO: 1313763 - DNA, 25 bp, Homo sapien
aaatgtgctcatcagggcatccccc

SEQ ID NO: 1313764 - DNA, 25 bp, Homo sapien
ggtaccccatagtagctgcacacag

SEQ ID NO: 1313765 - DNA, 25 bp, Homo sapien
tggactcctgcatgaacgccaccaa

SEQ ID NO: 1313766 - DNA, 25 bp, Homo sapien
gcacatggatgggactcaccttctc

SEQ ID NO: 1313767 - DNA, 25 bp, Homo sapien
tcagcctattactgtgagggggagt

SEQ ID NO: 1313768 - DNA, 25 bp, Homo sapien
aggactgggtcatcgccccccaagg

SEQ ID NO: 1313769 - DNA, 25 bp, Homo sapien
gctttttcccgcagtttctctcttg

SEQ ID NO: 1313770 - DNA, 25 bp, Homo sapien
ctagaatcccagttcctggtattgc

SEQ ID NO: 1313771 - DNA, 25 bp, Homo sapien
cttaggaggttcaacggtgatgcct

SEQ ID NO: 1313772 - DNA, 25 bp, Homo sapien
gttcaacggtgatgccttgatcagg

SEQ ID NO: 1313773 - DNA, 25 bp, Homo sapien
ggtattgcacagccttatgttttcc

SEQ ID NO: 1313774 - DNA, 25 bp, Homo sapien
ttttattccaagcaaccccagaggc

SEQ ID NO: 1313775 - DNA, 25 bp, Homo sapien
cagaaggagcaagtgcaaggcccta

SEQ ID NO: 1313776 - DNA, 25 bp, Homo sapien
tgggcacagaagcaaaccaaccgtg

SEQ ID NO: 1313777 - DNA, 25 bp, Homo sapien
gagtgagtgctcacagcctacaggg

SEQ ID NO: 1313778 - DNA, 25 bp, Homo sapien
gcaggtgatggcagctcgactgggc

SEQ ID NO: 1313779 - DNA, 25 bp, Homo sapien
tcccaggcgggagctatgatgtcag

SEQ ID NO: 1313780 - DNA, 25 bp, Homo sapien
gaattctatgttccactgaggcctc

SEQ ID NO: 1313781 - DNA, 25 bp, Homo sapien
ctgaggcctcattagacccccaagt

SEQ ID NO: 1313782 - DNA, 25 bp, Homo sapien
gcacaaacctggccatgaggttctc

SEQ ID NO: 1313783 - DNA, 25 bp, Homo sapien
gctataagaagacagtggtccttcc

SEQ ID NO: 1313784 - DNA, 25 bp, Homo sapien
ctataagaagacagtggtccttcca

SEQ ID NO: 1313785 - DNA, 25 bp, Homo sapien
tataagaagacagtggtccttccag

SEQ ID NO: 1313786 - DNA, 25 bp, Homo sapien
ggaggccactggcctcatgcccctg

SEQ ID NO: 1313787 - DNA, 25 bp, Homo sapien
taattcttattattgtgctgctccc

SEQ ID NO: 1313788 - DNA, 25 bp, Homo sapien
tcttattattgtgctgctcccatgt

SEQ ID NO: 1313789 - DNA, 25 bp, Homo sapien
ctgatgaagccaaacgcagtcccca

SEQ ID NO: 1313790 - DNA, 25 bp, Homo sapien
ttcccaggtacaacactggccattt

SEQ ID NO: 1313791 - DNA, 25 bp, Homo sapien
tggacatccccacgaagccactggg

SEQ ID NO: 1313792 - DNA, 25 bp, Homo sapien
catttctgggcaaaattggacacgc

SEQ ID NO: 1313793 - DNA, 25 bp, Homo sapien
ggtccagggtgcagttagcatatta

SEQ ID NO: 1313794 - DNA, 25 bp, Homo sapien
ttgttaatttgaccacatcatgtac

SEQ ID NO: 1313795 - DNA, 25 bp, Homo sapien
ctctgcctcttgttaatttgaccac

SEQ ID NO: 1313796 - DNA, 25 bp, Homo sapien
cttgttaatttgaccacatcatgta

SEQ ID NO: 1313797 - DNA, 25 bp, Homo sapien
gcctcttgttaatttgaccacatca

SEQ ID NO: 1313798 - DNA, 25 bp, Homo sapien
cttcctccgtagaagagggtgctgg

SEQ ID NO: 1313799 - DNA, 25 bp, Homo sapien
gacacttagtgccatgcctgcgcag

SEQ ID NO: 1313800 - DNA, 25 bp, Homo sapien
tgagggccaaatgtgccatgggaca

SEQ ID NO: 1313801 - DNA, 25 bp, Homo sapien
ttccttcctccgtagaagagggtgc

SEQ ID NO: 1313802 - DNA, 25 bp, Homo sapien
catactccccacagttgccaatgat

SEQ ID NO: 1313803 - DNA, 25 bp, Homo sapien
acatactccccacagttgccaatga

SEQ ID NO: 1313804 - DNA, 25 bp, Homo sapien
tcacacatactccccacagttgcca

SEQ ID NO: 1313805 - DNA, 25 bp, Homo sapien
acacatactccccacagttgccaat

SEQ ID NO: 1313806 - DNA, 25 bp, Homo sapien
caaacactcatcatgaaggctttct

SEQ ID NO: 1313807 - DNA, 25 bp, Homo sapien
acaaacactcatcatgaaggctttc

SEQ ID NO: 1313808 - DNA, 25 bp, Homo sapien
gtttgaagataaagttttcatcatc

SEQ ID NO: 1313809 - DNA, 25 bp, Homo sapien
aatttcttcttgtagatggacttac

SEQ ID NO: 1313810 - DNA, 25 bp, Homo sapien
ctgtgtgtttgaagataaagttttc

SEQ ID NO: 1313811 - DNA, 25 bp, Homo sapien
ctggtcctgtgtgtttgaagataaa

SEQ ID NO: 1313812 - DNA, 25 bp, Homo sapien
tggtgccaccgtggtttgtgaaatc

SEQ ID NO: 1313813 - DNA, 25 bp, Homo sapien
ctggtgccaccgtggtttgtgaaat

SEQ ID NO: 1313814 - DNA, 25 bp, Homo sapien
tgggggataatgcggtggaagctgc

SEQ ID NO: 1313815 - DNA, 25 bp, Homo sapien
ctgggggataatgcggtggaagctg

SEQ ID NO: 1313816 - DNA, 25 bp, Homo sapien
ggataatgcggtggaagctgcttcc

SEQ ID NO: 1313817 - DNA, 25 bp, Homo sapien
ggggataatgcggtggaagctgctt

SEQ ID NO: 1313818 - DNA, 25 bp, Homo sapien
ttaaatgggtgcacatgtagagaaa

SEQ ID NO: 1313819 - DNA, 25 bp, Homo sapien
aatgggtgcacatgtagagaaaatt

SEQ ID NO: 1313820 - DNA, 25 bp, Homo sapien
ctttaaatgggtgcacatgtagaga

SEQ ID NO: 1313821 - DNA, 25 bp, Homo sapien
taaatgggtgcacatgtagagaaaa

SEQ ID NO: 1313822 - DNA, 25 bp, Homo sapien
agccggcttgttcccaatcttgatg

SEQ ID NO: 1313823 - DNA, 25 bp, Homo sapien
cggcttgttcccaatcttgatgtcc

SEQ ID NO: 1313824 - DNA, 25 bp, Homo sapien
gccagccggcttgttcccaatcttg

SEQ ID NO: 1313825 - DNA, 25 bp, Homo sapien
cagccggcttgttcccaatcttgat

SEQ ID NO: 1313826 - DNA, 25 bp, Homo sapien
tgaggatttgactaggcctttttta

SEQ ID NO: 1313827 - DNA, 25 bp, Homo sapien
taggagtgcgagtattctacacacc

SEQ ID NO: 1313828 - DNA, 25 bp, Homo sapien
tggatgcccagtgacgggagacctc

SEQ ID NO: 1313829 - DNA, 25 bp, Homo sapien
gaaattgctagagagctccctgatg

SEQ ID NO: 1313830 - DNA, 25 bp, Homo sapien
tccctgatgccccaagtaggagtgc

SEQ ID NO: 1313831 - DNA, 25 bp, Homo sapien
ttccttctcctgccccgcagtccca

SEQ ID NO: 1313832 - DNA, 25 bp, Homo sapien
cgcagtcccagaacagcgcttttct

SEQ ID NO: 1313833 - DNA, 25 bp, Homo sapien
ccagaacagcgcttttcttgcccat

SEQ ID NO: 1313834 - DNA, 25 bp, Homo sapien
agtcccagaacagcgcttttcttgc

SEQ ID NO: 1313835 - DNA, 25 bp, Homo sapien
tgaactgtgtaacgctgaacaaagt

SEQ ID NO: 1313836 - DNA, 25 bp, Homo sapien
tcagctccaccattatgaactgtgt

SEQ ID NO: 1313837 - DNA, 25 bp, Homo sapien
cagatcctggagctctacagcctta

SEQ ID NO: 1313838 - DNA, 25 bp, Homo sapien
tcaatataatgccaggacagagggt

SEQ ID NO: 1313839 - DNA, 25 bp, Homo sapien
caaagactaggaggatagcggatgc

SEQ ID NO: 1313840 - DNA, 25 bp, Homo sapien
gctaaggataggaggaaaacaggcc

SEQ ID NO: 1313841 - DNA, 25 bp, Homo sapien
gaagggacctctacatgattctgcc

SEQ ID NO: 1313842 - DNA, 25 bp, Homo sapien
cagtgagggatctaagctggcacca

SEQ ID NO: 1313843 - DNA, 25 bp, Homo sapien
tccacccagtcttcatctgaccaaa

SEQ ID NO: 1313844 - DNA, 25 bp, Homo sapien
ttcccagcaaacttctccacccagt

SEQ ID NO: 1313845 - DNA, 25 bp, Homo sapien
tctccacccagtcttcatctgacca

SEQ ID NO: 1313846 - DNA, 25 bp, Homo sapien
tctttatcctcttcccagcaaactt

SEQ ID NO: 1313847 - DNA, 25 bp, Homo sapien
tggccaaattgacagaaattgtcca

SEQ ID NO: 1313848 - DNA, 25 bp, Homo sapien
acagaaattgtccacccaaagagct

SEQ ID NO: 1313849 - DNA, 25 bp, Homo sapien
ttggccaaattgacagaaattgtcc

SEQ ID NO: 1313850 - DNA, 25 bp, Homo sapien
caaaatggtcaagagattggccaac

SEQ ID NO: 1313851 - DNA, 25 bp, Homo sapien
agcaattatttagctcaaaggatac

SEQ ID NO: 1313852 - DNA, 25 bp, Homo sapien
aacagactgtggcactttggaagcc

SEQ ID NO: 1313853 - DNA, 25 bp, Homo sapien
tcagactgtggaatgatttggccca

SEQ ID NO: 1313854 - DNA, 25 bp, Homo sapien
atgttgttgacagctgctgcaacat

SEQ ID NO: 1313855 - DNA, 25 bp, Homo sapien
tgttgttgacagctgctgcaacatc

SEQ ID NO: 1313856 - DNA, 25 bp, Homo sapien
catgttgttgacagctgctgcaaca

SEQ ID NO: 1313857 - DNA, 25 bp, Homo sapien
aattcaacaaaagagaatccttggt

SEQ ID NO: 1313858 - DNA, 25 bp, Homo sapien
caaattcaacaaaagagaatccttg

SEQ ID NO: 1313859 - DNA, 25 bp, Homo sapien
ttcaacaaaagagaatccttggtgc

SEQ ID NO: 1313860 - DNA, 25 bp, Homo sapien
ctctgccaactcaaattcaacaaaa

SEQ ID NO: 1313861 - DNA, 25 bp, Homo sapien
gagtttgtgtccacacagaaagtca

SEQ ID NO: 1313862 - DNA, 25 bp, Homo sapien
gaagaccgcttgagctatgatcaat

SEQ ID NO: 1313863 - DNA, 25 bp, Homo sapien
tgtaagatatgaagaggccaggtgc

SEQ ID NO: 1313864 - DNA, 25 bp, Homo sapien
tagcagaactgggtctaaaattcct

SEQ ID NO: 1313865 - DNA, 25 bp, Homo sapien
ctttgtgaaccctctcggcggccgc

SEQ ID NO: 1313866 - DNA, 25 bp, Homo sapien
cctttgtgaaccctctcggcggccg

SEQ ID NO: 1313867 - DNA, 25 bp, Homo sapien
ttgtgaaccctctcggcggccgcca

SEQ ID NO: 1313868 - DNA, 25 bp, Homo sapien
tttgtgaaccctctcggcggccgcc

SEQ ID NO: 1313869 - DNA, 25 bp, Homo sapien
tcatagagtaaaactgtggtcagag

SEQ ID NO: 1313870 - DNA, 25 bp, Homo sapien
ttcaaaccttgagttgaattccata

SEQ ID NO: 1313871 - DNA, 25 bp, Homo sapien
gacttgggtacatcaaataaaacca

SEQ ID NO: 1313872 - DNA, 25 bp, Homo sapien
gacaagagggtcatgactatgccaa

SEQ ID NO: 1313873 - DNA, 25 bp, Homo sapien
tattcccagagctaagcagtgagca

SEQ ID NO: 1313874 - DNA, 25 bp, Homo sapien
agtccacagtcctcatgataagaag

SEQ ID NO: 1313875 - DNA, 25 bp, Homo sapien
ttaccactagatgacaaggctcctg

SEQ ID NO: 1313876 - DNA, 25 bp, Homo sapien
aggtagcagcagcaacagcgcccac

SEQ ID NO: 1313877 - DNA, 25 bp, Homo sapien
taagaggtagcagcagcaacagcgc

SEQ ID NO: 1313878 - DNA, 25 bp, Homo sapien
agaggtagcagcagcaacagcgccc

SEQ ID NO: 1313879 - DNA, 25 bp, Homo sapien
ctaagaggtagcagcagcaacagcg

SEQ ID NO: 1313880 - DNA, 25 bp, Homo sapien
gatgagcctgtagaactgctacagc

SEQ ID NO: 1313881 - DNA, 25 bp, Homo sapien
catgatgagcctgtagaactgctac

SEQ ID NO: 1313882 - DNA, 25 bp, Homo sapien
tctttcttggcatgatgagcctgta

SEQ ID NO: 1313883 - DNA, 25 bp, Homo sapien
agcctgtagaactgctacagcttca

SEQ ID NO: 1313884 - DNA, 25 bp, Homo sapien
tggtggaccaaagccaactgtacag

SEQ ID NO: 1313885 - DNA, 25 bp, Homo sapien
agatgatccctaggcttctggtgct

SEQ ID NO: 1313886 - DNA, 25 bp, Homo sapien
gaactgaagctgcagggtctgagcc

SEQ ID NO: 1313887 - DNA, 25 bp, Homo sapien
cagtgcccagacctagtggtggacc

SEQ ID NO: 1313888 - DNA, 25 bp, Homo sapien
cccagccagatttgaatgcattgtt

SEQ ID NO: 1313889 - DNA, 25 bp, Homo sapien
gcagctcagagttgtctatctccag

SEQ ID NO: 1313890 - DNA, 25 bp, Homo sapien
gactctaacatgtgcagcagctcag

SEQ ID NO: 1313891 - DNA, 25 bp, Homo sapien
ttggatgagtgggaacaagcgttct

SEQ ID NO: 1313892 - DNA, 25 bp, Homo sapien
tcttctgcaagcaagtgggtcactc

SEQ ID NO: 1313893 - DNA, 25 bp, Homo sapien
cctcttcttctgcaagcaagtgggt

SEQ ID NO: 1313894 - DNA, 25 bp, Homo sapien
ttctgcaagcaagtgggtcactcac

SEQ ID NO: 1313895 - DNA, 25 bp, Homo sapien
tcttcttctgcaagcaagtgggtca

SEQ ID NO: 1313896 - DNA, 25 bp, Homo sapien
tgcccctgcacatggaccgcaggct

SEQ ID NO: 1313897 - DNA, 25 bp, Homo sapien
gggtgctgcagccagcatggaggca

SEQ ID NO: 1313898 - DNA, 25 bp, Homo sapien
ggctcctgcccctgcacatggaccg

SEQ ID NO: 1313899 - DNA, 25 bp, Homo sapien
gcttctgttcctgggggggtgctgc

SEQ ID NO: 1313900 - DNA, 25 bp, Homo sapien
cctttagggtaaatctcagtgcaga

SEQ ID NO: 1313901 - DNA, 25 bp, Homo sapien
catagcgtcataacacagagcaggc

SEQ ID NO: 1313902 - DNA, 25 bp, Homo sapien
ttagcactgaggaaaggacaacacc

SEQ ID NO: 1313903 - DNA, 25 bp, Homo sapien
gcttaaaaacggtcaacatgcaacg

SEQ ID NO: 1313904 - DNA, 25 bp, Homo sapien
acagcagcgcgtggcgctaagttct

SEQ ID NO: 1313905 - DNA, 25 bp, Homo sapien
agcaacagcagcgcgtggcgctaag

SEQ ID NO: 1313906 - DNA, 25 bp, Homo sapien
agcagcgcgtggcgctaagttctgc

SEQ ID NO: 1313907 - DNA, 25 bp, Homo sapien
caacagcagcgcgtggcgctaagtt

SEQ ID NO: 1313908 - DNA, 25 bp, Homo sapien
acaattaaagcccatcagtctgggc

SEQ ID NO: 1313909 - DNA, 25 bp, Homo sapien
tacaattaaagcccatcagtctggg

SEQ ID NO: 1313910 - DNA, 25 bp, Homo sapien
atacaattaaagcccatcagtctgg

SEQ ID NO: 1313911 - DNA, 25 bp, Homo sapien
tcaaatcccatctttcccccttctg

SEQ ID NO: 1313912 - DNA, 25 bp, Homo sapien
aaatcccatctttcccccttctgtg

SEQ ID NO: 1313913 - DNA, 25 bp, Homo sapien
caaatcccatctttcccccttctgt

SEQ ID NO: 1313914 - DNA, 25 bp, Homo sapien
tgtcagtcagcccttgctgggcggc

SEQ ID NO: 1313915 - DNA, 25 bp, Homo sapien
accaaagtccatagccaagcggtcc

SEQ ID NO: 1313916 - DNA, 25 bp, Homo sapien
agtcagcccttgctgggcggcacca

SEQ ID NO: 1313917 - DNA, 25 bp, Homo sapien
tagccaagcggtccgggcactcaga

SEQ ID NO: 1313918 - DNA, 25 bp, Homo sapien
atcagtgttggcggcagatgtccaa

SEQ ID NO: 1313919 - DNA, 25 bp, Homo sapien
aatgcacatcagtgttggcggcaga

SEQ ID NO: 1313920 - DNA, 25 bp, Homo sapien
tgcacatcagtgttggcggcagatg

SEQ ID NO: 1313921 - DNA, 25 bp, Homo sapien
cacatcagtgttggcggcagatgtc

SEQ ID NO: 1313922 - DNA, 25 bp, Homo sapien
taggtcaccgatgagcaaagaatgt

SEQ ID NO: 1313923 - DNA, 25 bp, Homo sapien
taaattcgagcccaacaaactgacc

SEQ ID NO: 1313924 - DNA, 25 bp, Homo sapien
cactactactttcgaggatgagcca

SEQ ID NO: 1313925 - DNA, 25 bp, Homo sapien
gtggccacctaagcacacagctaag

SEQ ID NO: 1313926 - DNA, 25 bp, Homo sapien
gactctctgagtggtagtagggagg

SEQ ID NO: 1313927 - DNA, 25 bp, Homo sapien
cgactctctgagtggtagtagggag

SEQ ID NO: 1313928 - DNA, 25 bp, Homo sapien
gaggccacgagaggccggagcatta

SEQ ID NO: 1313929 - DNA, 25 bp, Homo sapien
aggccacgagaggccggagcattac

SEQ ID NO: 1313930 - DNA, 25 bp, Homo sapien
tatagcacttggcattccttggaag

SEQ ID NO: 1313931 - DNA, 25 bp, Homo sapien
actggcgtatagcacttggcattcc

SEQ ID NO: 1313932 - DNA, 25 bp, Homo sapien
cagatggcgaagagttggacgaggc

SEQ ID NO: 1313933 - DNA, 25 bp, Homo sapien
gcccagactggcgtatagcacttgg

SEQ ID NO: 1313934 - DNA, 25 bp, Homo sapien
cagaacctaggctgtgcctcagagt

SEQ ID NO: 1313935 - DNA, 25 bp, Homo sapien
ggctgtcaattactgttccccacca

SEQ ID NO: 1313936 - DNA, 25 bp, Homo sapien
aacctaggctgtgcctcagagtggg

SEQ ID NO: 1313937 - DNA, 25 bp, Homo sapien
gggagaccaggacaggtatatcctg

SEQ ID NO: 1313938 - DNA, 25 bp, Homo sapien
aactggttaggtgtataatatggag

SEQ ID NO: 1313939 - DNA, 25 bp, Homo sapien
ggcctcatctgtgctaactggttag

SEQ ID NO: 1313940 - DNA, 25 bp, Homo sapien
taggtgtataatatggaggccttcc

SEQ ID NO: 1313941 - DNA, 25 bp, Homo sapien
cttgctgccagcgtggattaggcct

SEQ ID NO: 1313942 - DNA, 25 bp, Homo sapien
cccttaaggactgaacccatcctag

SEQ ID NO: 1313943 - DNA, 25 bp, Homo sapien
ctgtaagacagaagaatacccaaac

SEQ ID NO: 1313944 - DNA, 25 bp, Homo sapien
tgtaagacagaagaatacccaaaca

SEQ ID NO: 1313945 - DNA, 25 bp, Homo sapien
ttaaggactgaacccatcctagaga

SEQ ID NO: 1313946 - DNA, 25 bp, Homo sapien
ctgctttggttgcttcttcaggaga

SEQ ID NO: 1313947 - DNA, 25 bp, Homo sapien
ggcaacatatagtggcttggagccc

SEQ ID NO: 1313948 - DNA, 25 bp, Homo sapien
tactggttggtcaggtgagcctttc

SEQ ID NO: 1313949 - DNA, 25 bp, Homo sapien
aggctggaactgatttaagatggca

SEQ ID NO: 1313950 - DNA, 25 bp, Homo sapien
ttttggaataccacgtgtggacagg

SEQ ID NO: 1313951 - DNA, 25 bp, Homo sapien
tggaataccacgtgtggacaggagt

SEQ ID NO: 1313952 - DNA, 25 bp, Homo sapien
caacgtcaggataacacttttggaa

SEQ ID NO: 1313953 - DNA, 25 bp, Homo sapien
acgtcaggataacacttttggaata

SEQ ID NO: 1313954 - DNA, 25 bp, Homo sapien
gcaaagtccactaagagccagggca

SEQ ID NO: 1313955 - DNA, 25 bp, Homo sapien
gaccagctcagagataggcagccta

SEQ ID NO: 1313956 - DNA, 25 bp, Homo sapien
gtcttagttaatggcccagagagcc

SEQ ID NO: 1313957 - DNA, 25 bp, Homo sapien
taactctctaccaatgagatgggcc

SEQ ID NO: 1313958 - DNA, 25 bp, Homo sapien
acgtggcttcccttctcatcaacta

SEQ ID NO: 1313959 - DNA, 25 bp, Homo sapien
catcaactaaaggattttgtggcat

SEQ ID NO: 1313960 - DNA, 25 bp, Homo sapien
gcttcccttctcatcaactaaagga

SEQ ID NO: 1313961 - DNA, 25 bp, Homo sapien
aaaggattttgtggcatctggtaca

SEQ ID NO: 1313962 - DNA, 25 bp, Homo sapien
acaccggcacgaggcagcaaggaat

SEQ ID NO: 1313963 - DNA, 25 bp, Homo sapien
gctgtagagacaggccccaagacaa

SEQ ID NO: 1313964 - DNA, 25 bp, Homo sapien
gacaggccccaagacaaatggaaaa

SEQ ID NO: 1313965 - DNA, 25 bp, Homo sapien
gctcattctgtagcaccatctgtcc

SEQ ID NO: 1313966 - DNA, 25 bp, Homo sapien
gaataccactgctttcaatccccag

SEQ ID NO: 1313967 - DNA, 25 bp, Homo sapien
caatccccagatcgcagtataatac

SEQ ID NO: 1313968 - DNA, 25 bp, Homo sapien
aatggaataccactgctttcaatcc

SEQ ID NO: 1313969 - DNA, 25 bp, Homo sapien
tttcaatccccagatcgcagtataa

SEQ ID NO: 1313970 - DNA, 25 bp, Homo sapien
gcactggtaattgatccaaaaggag

SEQ ID NO: 1313971 - DNA, 25 bp, Homo sapien
cactggtaattgatccaaaaggaga

SEQ ID NO: 1313972 - DNA, 25 bp, Homo sapien
gatcactgttaactacacttctata

SEQ ID NO: 1313973 - DNA, 25 bp, Homo sapien
gaaatgaaattctcggccggacgcg

SEQ ID NO: 1313974 - DNA, 25 bp, Homo sapien
ttagaaatgaaattctcggccggac

SEQ ID NO: 1313975 - DNA, 25 bp, Homo sapien
ctgaaggaaaaagatcactgttaac

SEQ ID NO: 1313976 - DNA, 25 bp, Homo sapien
cagcaggggtcttcttgaagccatg

SEQ ID NO: 1313977 - DNA, 25 bp, Homo sapien
taagtaaaaggaacctacatggcta

SEQ ID NO: 1313978 - DNA, 25 bp, Homo sapien
actgacaggatcatcagtgcactca

SEQ ID NO: 1313979 - DNA, 25 bp, Homo sapien
aagttgtgaaactactgccctgaaa

SEQ ID NO: 1313980 - DNA, 25 bp, Homo sapien
ctgcctgccgttctactttcttttg

SEQ ID NO: 1313981 - DNA, 25 bp, Homo sapien
caaatttccgttttaactctgcctg

SEQ ID NO: 1313982 - DNA, 25 bp, Homo sapien
tttcttttgtgcacggcctacaaat

SEQ ID NO: 1313983 - DNA, 25 bp, Homo sapien
ctgatatcgactaattctctcctgt

SEQ ID NO: 1313984 - DNA, 25 bp, Homo sapien
agctgaggtgacaggtatgtgccaa

SEQ ID NO: 1313985 - DNA, 25 bp, Homo sapien
cactcactgggctttagttctctca

SEQ ID NO: 1313986 - DNA, 25 bp, Homo sapien
ttctttcaacaactgatagctgagg

SEQ ID NO: 1313987 - DNA, 25 bp, Homo sapien
tgaagttaacatgcggaacccagga

SEQ ID NO: 1313988 - DNA, 25 bp, Homo sapien
agaccctacccatactctggggcaa

SEQ ID NO: 1313989 - DNA, 25 bp, Homo sapien
taggtaggtgctagcaagaccctac

SEQ ID NO: 1313990 - DNA, 25 bp, Homo sapien
ctctggggcaacctcttaaaagctt

SEQ ID NO: 1313991 - DNA, 25 bp, Homo sapien
ggtaggtgctagcaagaccctaccc

SEQ ID NO: 1313992 - DNA, 25 bp, Homo sapien
catcaccttgacacttagggtctta

SEQ ID NO: 1313993 - DNA, 25 bp, Homo sapien
tcgtgtttttcgtaactcacaaagc

SEQ ID NO: 1313994 - DNA, 25 bp, Homo sapien
cttattggcatcctcgtgtttttcg

SEQ ID NO: 1313995 - DNA, 25 bp, Homo sapien
tctcatcaccttgacacttagggtc

SEQ ID NO: 1313996 - DNA, 25 bp, Homo sapien
cagcttcccgctctttgcgagactt

SEQ ID NO: 1313997 - DNA, 25 bp, Homo sapien
gcttcccgctctttgcgagacttga

SEQ ID NO: 1313998 - DNA, 25 bp, Homo sapien
cgctctttgcgagacttgaatctgc

SEQ ID NO: 1313999 - DNA, 25 bp, Homo sapien
gctctttcagactctcatcatccac

SEQ ID NO: 1314000 - DNA, 25 bp, Homo sapien
cttcatgaagaaacctgatggccat

SEQ ID NO: 1314001 - DNA, 25 bp, Homo sapien
tagaccagggctattcctaccacat

SEQ ID NO: 1314002 - DNA, 25 bp, Homo sapien
ttataaagataacccatcctctggc

SEQ ID NO: 1314003 - DNA, 25 bp, Homo sapien
tcctctggcatactgaatgacacaa

SEQ ID NO: 1314004 - DNA, 25 bp, Homo sapien
ccagccagccccagttgttgatgct

SEQ ID NO: 1314005 - DNA, 25 bp, Homo sapien
cagatgcctttaagggagaggcggc

SEQ ID NO: 1314006 - DNA, 25 bp, Homo sapien
agccccagttgttgatgctcacaaa

SEQ ID NO: 1314007 - DNA, 25 bp, Homo sapien
ttgttgatgctcacaaaacccacag

SEQ ID NO: 1314008 - DNA, 25 bp, Homo sapien
ttggcgagtcaaaagggctgccacg

SEQ ID NO: 1314009 - DNA, 25 bp, Homo sapien
tggcgagtcaaaagggctgccacgg

SEQ ID NO: 1314010 - DNA, 25 bp, Homo sapien
cttggcgagtcaaaagggctgccac

SEQ ID NO: 1314011 - DNA, 25 bp, Homo sapien
ccttgtgtgtgccagttaatagcga

SEQ ID NO: 1314012 - DNA, 25 bp, Homo sapien
acacttgggccgagaaccagtagcc

SEQ ID NO: 1314013 - DNA, 25 bp, Homo sapien
gccacggctggctcatgcgatggtt

SEQ ID NO: 1314014 - DNA, 25 bp, Homo sapien
ttgttgctccggactgggacactca

SEQ ID NO: 1314015 - DNA, 25 bp, Homo sapien
gcagcctcttgggtctcgaagtgga

SEQ ID NO: 1314016 - DNA, 25 bp, Homo sapien
tcattgaggagcatgccattcatct

SEQ ID NO: 1314017 - DNA, 25 bp, Homo sapien
tcttctcgatggccttgtcggcagc

SEQ ID NO: 1314018 - DNA, 25 bp, Homo sapien
tcgaagtggacaaaggcataaccct

SEQ ID NO: 1314019 - DNA, 25 bp, Homo sapien
tagcagaactggccagctcctgaga

SEQ ID NO: 1314020 - DNA, 25 bp, Homo sapien
cagaactggccagctcctgagacat

SEQ ID NO: 1314021 - DNA, 25 bp, Homo sapien
cactttagcagaactggccagctcc

SEQ ID NO: 1314022 - DNA, 25 bp, Homo sapien
actttagcagaactggccagctcct

SEQ ID NO: 1314023 - DNA, 25 bp, Homo sapien
aggatcgttggagccagatcgttgg

SEQ ID NO: 1314024 - DNA, 25 bp, Homo sapien
tggctttcccttaatcacatcaaag

SEQ ID NO: 1314025 - DNA, 25 bp, Homo sapien
cggattggctttcccttaatcacat

SEQ ID NO: 1314026 - DNA, 25 bp, Homo sapien
agaccacatgatgcggattggcttt

SEQ ID NO: 1314027 - DNA, 25 bp, Homo sapien
cgtttcccacaccagattttctcaa

SEQ ID NO: 1314028 - DNA, 25 bp, Homo sapien
tgtggcactaacctaagtctctgcg

SEQ ID NO: 1314029 - DNA, 25 bp, Homo sapien
caagcaaggatctctaacagcccag

SEQ ID NO: 1314030 - DNA, 25 bp, Homo sapien
taaaagggctctgactagtgcaaag

SEQ ID NO: 1314031 - DNA, 25 bp, Homo sapien
tgacaccagattttcaagtgacgct

SEQ ID NO: 1314032 - DNA, 25 bp, Homo sapien
gcgggtgatcatatcgcggcagacc

SEQ ID NO: 1314033 - DNA, 25 bp, Homo sapien
acagcatggcctcggtgacgtccga

SEQ ID NO: 1314034 - DNA, 25 bp, Homo sapien
gcggcagacccggatggacagcaca

SEQ ID NO: 1314035 - DNA, 25 bp, Homo sapien
gggctgaacttttcgtacagcatgg

SEQ ID NO: 1314036 - DNA, 25 bp, Homo sapien
caccaccccgagccccgccaggagg

SEQ ID NO: 1314037 - DNA, 25 bp, Homo sapien
ccaccaccccgagccccgccaggag

SEQ ID NO: 1314038 - DNA, 25 bp, Homo sapien
ttatcgggcccgccgcaggacaaag

SEQ ID NO: 1314039 - DNA, 25 bp, Homo sapien
acaaaaggctctccgcacaatacgg

SEQ ID NO: 1314040 - DNA, 25 bp, Homo sapien
gagtcggcgggcttggagacgggac

SEQ ID NO: 1314041 - DNA, 25 bp, Homo sapien
gactttgcacttctccgcggtcctg

SEQ ID NO: 1314042 - DNA, 25 bp, Homo sapien
cctttaagaggcgaccggacgctgc

SEQ ID NO: 1314043 - DNA, 25 bp, Homo sapien
ccaaatctttgtgggcgccgactcg

SEQ ID NO: 1314044 - DNA, 25 bp, Homo sapien
gggacacgcgtttctctataaatat

SEQ ID NO: 1314045 - DNA, 25 bp, Homo sapien
gcgaagggcagcacggacacgtggt

SEQ ID NO: 1314046 - DNA, 25 bp, Homo sapien
agcgtacgaaagtgacttccccgcg

SEQ ID NO: 1314047 - DNA, 25 bp, Homo sapien
tcaggctgcgaagcccgaaagcggc

SEQ ID NO: 1314048 - DNA, 25 bp, Homo sapien
caggccggaagcgtacgaaagtgac

SEQ ID NO: 1314049 - DNA, 25 bp, Homo sapien
cggagaccgacggacgccaagcgct

SEQ ID NO: 1314050 - DNA, 25 bp, Homo sapien
agggagccaccgctccatttatacc

SEQ ID NO: 1314051 - DNA, 25 bp, Homo sapien
ccgagggagccaccgctccatttat

SEQ ID NO: 1314052 - DNA, 25 bp, Homo sapien
ccgggcgctgctggtcgaagggcgc

SEQ ID NO: 1314053 - DNA, 25 bp, Homo sapien
caccgctccatttatacccgcccgc

SEQ ID NO: 1314054 - DNA, 25 bp, Homo sapien
gaccctctatatggtgggcgggcca

SEQ ID NO: 1314055 - DNA, 25 bp, Homo sapien
gaataatgactacggtctcccgagg

SEQ ID NO: 1314056 - DNA, 25 bp, Homo sapien
gacttgagtttccagcgttcgcgct

SEQ ID NO: 1314057 - DNA, 25 bp, Homo sapien
aatgctctaatactggccacggtcg

SEQ ID NO: 1314058 - DNA, 25 bp, Homo sapien
tggcggtcagtcacccagctttctg

SEQ ID NO: 1314059 - DNA, 25 bp, Homo sapien
ctagtggatcctgtgcctggccgtg

SEQ ID NO: 1314060 - DNA, 25 bp, Homo sapien
ccagctatagaaacaggcctctcag

SEQ ID NO: 1314061 - DNA, 25 bp, Homo sapien
aacagaatttgtgccgtgctgaggg

SEQ ID NO: 1314062 - DNA, 25 bp, Homo sapien
aagcttcagcgcagctgggacccta

SEQ ID NO: 1314063 - DNA, 25 bp, Homo sapien
ttgatataagtaaatgacataataa

SEQ ID NO: 1314064 - DNA, 25 bp, Homo sapien
tcatgaagcttcagcgcagctggga

SEQ ID NO: 1314065 - DNA, 25 bp, Homo sapien
tgaagcttcagcgcagctgggaccc

SEQ ID NO: 1314066 - DNA, 25 bp, Homo sapien
tcctccgaaacagtgctggatgaac

SEQ ID NO: 1314067 - DNA, 25 bp, Homo sapien
gtcaacttgtttttgcgattgtgtg

SEQ ID NO: 1314068 - DNA, 25 bp, Homo sapien
aatatttaacttttcttccacactg

SEQ ID NO: 1314069 - DNA, 25 bp, Homo sapien
cgattgtgtgttgtttttcaataac

SEQ ID NO: 1314070 - DNA, 25 bp, Homo sapien
tacacagcaacgaaaagaaagagca

SEQ ID NO: 1314071 - DNA, 25 bp, Homo sapien
ttacactaagcgaagaaagccagac

SEQ ID NO: 1314072 - DNA, 25 bp, Homo sapien
tctgtgactgaaaaccatcctcagg

SEQ ID NO: 1314073 - DNA, 25 bp, Homo sapien
taaaaagccccttagaagcatttgc

SEQ ID NO: 1314074 - DNA, 25 bp, Homo sapien
caatgaccgtaaacctagtgctttc

SEQ ID NO: 1314075 - DNA, 25 bp, Homo sapien
tagagcaggagtcaggtttcgcctg

SEQ ID NO: 1314076 - DNA, 25 bp, Homo sapien
tgcgccagcctgaatgagtcttttc

SEQ ID NO: 1314077 - DNA, 25 bp, Homo sapien
tagtgctttcaacaatgcccattga

SEQ ID NO: 1314078 - DNA, 25 bp, Homo sapien
tcttatacaaggtaaggcagtcatg

SEQ ID NO: 1314079 - DNA, 25 bp, Homo sapien
ccggccctgagtcagtcttatacaa

SEQ ID NO: 1314080 - DNA, 25 bp, Homo sapien
aacatggctgattactgcctccacc

SEQ ID NO: 1314081 - DNA, 25 bp, Homo sapien
ctccagccggctgagtcaatttttt

SEQ ID NO: 1314082 - DNA, 25 bp, Homo sapien
ggagttttaggcaatggatggttca

SEQ ID NO: 1314083 - DNA, 25 bp, Homo sapien
cactttgaaatgttaggttgctgta

SEQ ID NO: 1314084 - DNA, 25 bp, Homo sapien
tgttgtcaggtgtgcatgaactaac

SEQ ID NO: 1314085 - DNA, 25 bp, Homo sapien
gccctggctccctcagttaaactgt

SEQ ID NO: 1314086 - DNA, 25 bp, Homo sapien
taccaagtaattaacgagcgcctct

SEQ ID NO: 1314087 - DNA, 25 bp, Homo sapien
gcagtgtaggtcagtcagccagctt

SEQ ID NO: 1314088 - DNA, 25 bp, Homo sapien
tacagggctcattgtgtcttgggca

SEQ ID NO: 1314089 - DNA, 25 bp, Homo sapien
gaaggtgtatgcatcggccagtacc

SEQ ID NO: 1314090 - DNA, 25 bp, Homo sapien
tgatagcggtagttactcacagagc

SEQ ID NO: 1314091 - DNA, 25 bp, Homo sapien
tgaatgccaatctacctcagcttgg

SEQ ID NO: 1314092 - DNA, 25 bp, Homo sapien
ttaatgggatcagctaatagacctg

SEQ ID NO: 1314093 - DNA, 25 bp, Homo sapien
ggcctacaggttcgagtccagtcac

SEQ ID NO: 1314094 - DNA, 25 bp, Homo sapien
taggctgaagcccagactctgcatg

SEQ ID NO: 1314095 - DNA, 25 bp, Homo sapien
tgatgacactaacggctaagattgg

SEQ ID NO: 1314096 - DNA, 25 bp, Homo sapien
gacactcgcacttgcctttggccag

SEQ ID NO: 1314097 - DNA, 25 bp, Homo sapien
ccaagggtggagagcaatgcctgct

SEQ ID NO: 1314098 - DNA, 25 bp, Homo sapien
ttgaacgccaactatggaccaggcc

SEQ ID NO: 1314099 - DNA, 25 bp, Homo sapien
attgaacgccaactatggaccaggc

SEQ ID NO: 1314100 - DNA, 25 bp, Homo sapien
atttattgaacgccaactatggacc

SEQ ID NO: 1314101 - DNA, 25 bp, Homo sapien
caagagggaagacctttctgaggcc

SEQ ID NO: 1314102 - DNA, 25 bp, Homo sapien
cagaactcagccatgcacagggtag

SEQ ID NO: 1314103 - DNA, 25 bp, Homo sapien
caagtaaagtagtcgaggaaggcct

SEQ ID NO: 1314104 - DNA, 25 bp, Homo sapien
tcttggacgaggcaacgttgaagcc

SEQ ID NO: 1314105 - DNA, 25 bp, Homo sapien
gattctcaggctaggaagttgccaa

SEQ ID NO: 1314106 - DNA, 25 bp, Homo sapien
gatgtccgcaacaacccatgcaatg

SEQ ID NO: 1314107 - DNA, 25 bp, Homo sapien
tgtggagtctcctcaatgcagcctc

SEQ ID NO: 1314108 - DNA, 25 bp, Homo sapien
tgagtgggccccttcatgataacgg

SEQ ID NO: 1314109 - DNA, 25 bp, Homo sapien
ttggatcggccaggcagtaaccaga

SEQ ID NO: 1314110 - DNA, 25 bp, Homo sapien
ccttggatcggccaggcagtaacca

SEQ ID NO: 1314111 - DNA, 25 bp, Homo sapien
acagccttggatcggccaggcagta

SEQ ID NO: 1314112 - DNA, 25 bp, Homo sapien
agccttggatcggccaggcagtaac

SEQ ID NO: 1314113 - DNA, 25 bp, Homo sapien
cacttgggggagtagatatttacca

SEQ ID NO: 1314114 - DNA, 25 bp, Homo sapien
atatttaccaacgagtacagaaggg

SEQ ID NO: 1314115 - DNA, 25 bp, Homo sapien
gatatttaccaacgagtacagaagg

SEQ ID NO: 1314116 - DNA, 25 bp, Homo sapien
gtagatatttaccaacgagtacaga

SEQ ID NO: 1314117 - DNA, 25 bp, Homo sapien
caactggtgtggcaacactggtccc

SEQ ID NO: 1314118 - DNA, 25 bp, Homo sapien
gtggcaacactggtcccactgggtg

SEQ ID NO: 1314119 - DNA, 25 bp, Homo sapien
aactggtgtggcaacactggtccca

SEQ ID NO: 1314120 - DNA, 25 bp, Homo sapien
tggtgtggcaacactggtcccactg

SEQ ID NO: 1314121 - DNA, 25 bp, Homo sapien
tctgctgggaacgactgctggacca

SEQ ID NO: 1314122 - DNA, 25 bp, Homo sapien
ctgggaacgactgctggaccatttg

SEQ ID NO: 1314123 - DNA, 25 bp, Homo sapien
tgctgggaacgactgctggaccatt

SEQ ID NO: 1314124 - DNA, 25 bp, Homo sapien
ggctccgctgttctgctgggaacga

SEQ ID NO: 1314125 - DNA, 25 bp, Homo sapien
gaagcgaggcagacactatgttcca

SEQ ID NO: 1314126 - DNA, 25 bp, Homo sapien
tggtgaacaggatctcaggcgctcg

SEQ ID NO: 1314127 - DNA, 25 bp, Homo sapien
gatggctggagaacgtgccttcaca

SEQ ID NO: 1314128 - DNA, 25 bp, Homo sapien
tgtgagccggatgcaaaccaggcag

SEQ ID NO: 1314129 - DNA, 25 bp, Homo sapien
tcagaaagccccgatttcagtgatt

SEQ ID NO: 1314130 - DNA, 25 bp, Homo sapien
aaagccccgatttcagtgatttcag

SEQ ID NO: 1314131 - DNA, 25 bp, Homo sapien
gtggtagagcatggctcccgctggc

SEQ ID NO: 1314132 - DNA, 25 bp, Homo sapien
ggagtggtagagcatggctcccgct

SEQ ID NO: 1314133 - DNA, 25 bp, Homo sapien
gtgggaacagccacgtaagcagccg

SEQ ID NO: 1314134 - DNA, 25 bp, Homo sapien
gggaacagccacgtaagcagccgac

SEQ ID NO: 1314135 - DNA, 25 bp, Homo sapien
tgggaacagccacgtaagcagccga

SEQ ID NO: 1314136 - DNA, 25 bp, Homo sapien
ggtgggaacagccacgtaagcagcc

SEQ ID NO: 1314137 - DNA, 25 bp, Homo sapien
gatgcccctcgactgggcagcacat

SEQ ID NO: 1314138 - DNA, 25 bp, Homo sapien
gcagcacattcctccgggctggcag

SEQ ID NO: 1314139 - DNA, 25 bp, Homo sapien
cctccgggtggaagatgcccctcga

SEQ ID NO: 1314140 - DNA, 25 bp, Homo sapien
tccgggctggcaggatgatgcctgt

SEQ ID NO: 1314141 - DNA, 25 bp, Homo sapien
tgggatggggtaagcaggagaggag

SEQ ID NO: 1314142 - DNA, 25 bp, Homo sapien
ctgggatggggtaagcaggagagga

SEQ ID NO: 1314143 - DNA, 25 bp, Homo sapien
atggggtaagcaggagaggagacac

SEQ ID NO: 1314144 - DNA, 25 bp, Homo sapien
ggatggggtaagcaggagaggagac

SEQ ID NO: 1314145 - DNA, 25 bp, Homo sapien
cgtgggcgaaggctccatctcggct

SEQ ID NO: 1314146 - DNA, 25 bp, Homo sapien
catctcggctgcgtagctgttgagg

SEQ ID NO: 1314147 - DNA, 25 bp, Homo sapien
gcgaaggctccatctcggctgcgta

SEQ ID NO: 1314148 - DNA, 25 bp, Homo sapien
gatggcgagctggttgctcagggct

SEQ ID NO: 1314149 - DNA, 25 bp, Homo sapien
aagtcaactgccagggctcgggcat

SEQ ID NO: 1314150 - DNA, 25 bp, Homo sapien
ctcagtgaggcactcccgaaaacca

SEQ ID NO: 1314151 - DNA, 25 bp, Homo sapien
aatgctccggaagtcaactgccagg

SEQ ID NO: 1314152 - DNA, 25 bp, Homo sapien
gaaaaccaatgctccggaagtcaac

SEQ ID NO: 1314153 - DNA, 25 bp, Homo sapien
gtgggacccataggaacagtctgtt

SEQ ID NO: 1314154 - DNA, 25 bp, Homo sapien
cagtgggtaggataccaggctcctc

SEQ ID NO: 1314155 - DNA, 25 bp, Homo sapien
gcagcgtgtggactttgctcaccag

SEQ ID NO: 1314156 - DNA, 25 bp, Homo sapien
tatgaatgacgcctgaaagagaaga

SEQ ID NO: 1314157 - DNA, 25 bp, Homo sapien
gcaagacctcggctttctccagctt

SEQ ID NO: 1314158 - DNA, 25 bp, Homo sapien
cagtggcatggagcattttcaagtg

SEQ ID NO: 1314159 - DNA, 25 bp, Homo sapien
gcatggagcattttcaagtgatcca

SEQ ID NO: 1314160 - DNA, 25 bp, Homo sapien
aagtgatccaccgtcatctgcaaga

SEQ ID NO: 1314161 - DNA, 25 bp, Homo sapien
gcctgcaaatgggcttctgctttgg

SEQ ID NO: 1314162 - DNA, 25 bp, Homo sapien
tgcctgcaaatgggcttctgctttg

SEQ ID NO: 1314163 - DNA, 25 bp, Homo sapien
gctgcctgcaaatgggcttctgctt

SEQ ID NO: 1314164 - DNA, 25 bp, Homo sapien
ctgcctgcaaatgggcttctgcttt

SEQ ID NO: 1314165 - DNA, 25 bp, Homo sapien
cagtggggaccaagcgtcgcaattc

SEQ ID NO: 1314166 - DNA, 25 bp, Homo sapien
caagcgtcgcaattcagaaaggcta

SEQ ID NO: 1314167 - DNA, 25 bp, Homo sapien
gatgcggtctcgacgccgtttctct

SEQ ID NO: 1314168 - DNA, 25 bp, Homo sapien
ggctactgttgatgcggtctcgacg

SEQ ID NO: 1314169 - DNA, 25 bp, Homo sapien
tcttcctggcttgcatctgcgaaga

SEQ ID NO: 1314170 - DNA, 25 bp, Homo sapien
ggtggacagcggcctggccatctgg

SEQ ID NO: 1314171 - DNA, 25 bp, Homo sapien
tggcttgcatctgcgaagagctggg

SEQ ID NO: 1314172 - DNA, 25 bp, Homo sapien
tcctggcttgcatctgcgaagagct

SEQ ID NO: 1314173 - DNA, 25 bp, Homo sapien
aaacatctggacaagccgacctggt

SEQ ID NO: 1314174 - DNA, 25 bp, Homo sapien
tggaaaaggatatctcccacccaaa

SEQ ID NO: 1314175 - DNA, 25 bp, Homo sapien
cctggtaagaggtctataatagctc

SEQ ID NO: 1314176 - DNA, 25 bp, Homo sapien
gtcaaatcctactgctatgtctctg

SEQ ID NO: 1314177 - DNA, 25 bp, Homo sapien
ctcttggcccacgtcgatgggtccg

SEQ ID NO: 1314178 - DNA, 25 bp, Homo sapien
ttggcccacgtcgatgggtccgtcg

SEQ ID NO: 1314179 - DNA, 25 bp, Homo sapien
gtcggactccccgtcggagccgctc

SEQ ID NO: 1314180 - DNA, 25 bp, Homo sapien
cacgtcgatgggtccgtcggactcc

SEQ ID NO: 1314181 - DNA, 25 bp, Homo sapien
tgcctggtctcagccccgcggctaa

SEQ ID NO: 1314182 - DNA, 25 bp, Homo sapien
tcccagtcgggaagtcaggccccgc

SEQ ID NO: 1314183 - DNA, 25 bp, Homo sapien
agccccgcggctaaggctcccagtc

SEQ ID NO: 1314184 - DNA, 25 bp, Homo sapien
cgcggctaaggctcccagtcgggaa

SEQ ID NO: 1314185 - DNA, 25 bp, Homo sapien
tgggaaggccctaggcggtcgccgc

SEQ ID NO: 1314186 - DNA, 25 bp, Homo sapien
taggcggtcgccgccttcatcgacg

SEQ ID NO: 1314187 - DNA, 25 bp, Homo sapien
ggtcgccgccttcatcgacggctgg

SEQ ID NO: 1314188 - DNA, 25 bp, Homo sapien
cgccttcatcgacggctgggaggtc

SEQ ID NO: 1314189 - DNA, 25 bp, Homo sapien
gggcaggtgccctgggaggccccgc

SEQ ID NO: 1314190 - DNA, 25 bp, Homo sapien
ccttgggcaggtgccctgggaggcc

SEQ ID NO: 1314191 - DNA, 25 bp, Homo sapien
ctgccgcgcgctgggtggccttggg

SEQ ID NO: 1314192 - DNA, 25 bp, Homo sapien
caggtgccctgggaggccccgcggg

SEQ ID NO: 1314193 - DNA, 25 bp, Homo sapien
cagcaccctttatcatgtgaccagg

SEQ ID NO: 1314194 - DNA, 25 bp, Homo sapien
catgctctaaccatttacggaggca

SEQ ID NO: 1314195 - DNA, 25 bp, Homo sapien
cggaggcacttaggtttatcataac

SEQ ID NO: 1314196 - DNA, 25 bp, Homo sapien
caaagggcttctgacaggtagatac

SEQ ID NO: 1314197 - DNA, 25 bp, Homo sapien
aagagcaatcggctcgtcactcggg

SEQ ID NO: 1314198 - DNA, 25 bp, Homo sapien
gataaaacccgtgatctgggaagcc

SEQ ID NO: 1314199 - DNA, 25 bp, Homo sapien
caatcacagtaattgccggcaagag

SEQ ID NO: 1314200 - DNA, 25 bp, Homo sapien
gagtccagcgcagcactaagtcagt

SEQ ID NO: 1314201 - DNA, 25 bp, Homo sapien
cactggttctgtgagccttggaggc

SEQ ID NO: 1314202 - DNA, 25 bp, Homo sapien
cacagtacctctgtctaggcttgga

SEQ ID NO: 1314203 - DNA, 25 bp, Homo sapien
tgtaggcttcttgcagtcactggtt

SEQ ID NO: 1314204 - DNA, 25 bp, Homo sapien
aattaggtgacatctggtgccgtcc

SEQ ID NO: 1314205 - DNA, 25 bp, Homo sapien
tggatcagtaaagccggtggttcag

SEQ ID NO: 1314206 - DNA, 25 bp, Homo sapien
gcctggagcaatgtggatcagtaaa

SEQ ID NO: 1314207 - DNA, 25 bp, Homo sapien
aggaggtgtcgaagtatgtcaggga

SEQ ID NO: 1314208 - DNA, 25 bp, Homo sapien
gagcctggagcaatgtggatcagta

SEQ ID NO: 1314209 - DNA, 25 bp, Homo sapien
ctgctttgcaggtgcagtccgccgg

SEQ ID NO: 1314210 - DNA, 25 bp, Homo sapien
gtccgccggggtgtctgtgccacac

SEQ ID NO: 1314211 - DNA, 25 bp, Homo sapien
cagtccgccggggtgtctgtgccac

SEQ ID NO: 1314212 - DNA, 25 bp, Homo sapien
tggggcctgctttgcaggtgcagtc

SEQ ID NO: 1314213 - DNA, 25 bp, Homo sapien
ttgggcgctccagcaaggaacaagg

SEQ ID NO: 1314214 - DNA, 25 bp, Homo sapien
gccgcaggcctttggagtagaactt

SEQ ID NO: 1314215 - DNA, 25 bp, Homo sapien
tgcgtgctgtcaccaagtaggtacg

SEQ ID NO: 1314216 - DNA, 25 bp, Homo sapien
taggtacgaattgggcactccagcc

SEQ ID NO: 1314217 - DNA, 25 bp, Homo sapien
tccgactcgtccgagaagagcacgg

SEQ ID NO: 1314218 - DNA, 25 bp, Homo sapien
tcatgctcgaagaatcggtccagcc

SEQ ID NO: 1314219 - DNA, 25 bp, Homo sapien
gttctcgtgggccttctcatgctcg

SEQ ID NO: 1314220 - DNA, 25 bp, Homo sapien
gctgactctgggacacaaccacatc

SEQ ID NO: 1314221 - DNA, 25 bp, Homo sapien
taggccttgaggtagcagatcgggc

SEQ ID NO: 1314222 - DNA, 25 bp, Homo sapien
catcggctgacaagtagaggttggt

SEQ ID NO: 1314223 - DNA, 25 bp, Homo sapien
tctcgcactttttccgcatcggctg

SEQ ID NO: 1314224 - DNA, 25 bp, Homo sapien
agaggttggtgtgataggccttgag

SEQ ID NO: 1314225 - DNA, 25 bp, Homo sapien
tcactatcagggtacagctcccgca

SEQ ID NO: 1314226 - DNA, 25 bp, Homo sapien
tcatgaggacgatgtcgaagacgtc

SEQ ID NO: 1314227 - DNA, 25 bp, Homo sapien
gatactgttgatgaggcggacaccc

SEQ ID NO: 1314228 - DNA, 25 bp, Homo sapien
gagcatggttgttagtcatgaggac

SEQ ID NO: 1314229 - DNA, 25 bp, Homo sapien
gaagggttcgttctcatgttccagc

SEQ ID NO: 1314230 - DNA, 25 bp, Homo sapien
tgcgaaacaaggctcgggaggacac

SEQ ID NO: 1314231 - DNA, 25 bp, Homo sapien
aggacacagcgatggtgactgcatt

SEQ ID NO: 1314232 - DNA, 25 bp, Homo sapien
ccctgctccgtgtagatctgctgct

SEQ ID NO: 1314233 - DNA, 25 bp, Homo sapien
gctccaggaaaccagggtgctggca

SEQ ID NO: 1314234 - DNA, 25 bp, Homo sapien
tctctgcctttcagggtcaggctga

SEQ ID NO: 1314235 - DNA, 25 bp, Homo sapien
ctctgagctccaggaaaccagggtg

SEQ ID NO: 1314236 - DNA, 25 bp, Homo sapien
tgagctccaggaaaccagggtgctg

SEQ ID NO: 1314237 - DNA, 25 bp, Homo sapien
cagggtcgtggggatgttaatgccc

SEQ ID NO: 1314238 - DNA, 25 bp, Homo sapien
agatctgggaagttggagacagcaa

SEQ ID NO: 1314239 - DNA, 25 bp, Homo sapien
gtcccagacggttgacaccaccaca

SEQ ID NO: 1314240 - DNA, 25 bp, Homo sapien
acagcaaggtccaggggcagaccag

SEQ ID NO: 1314241 - DNA, 25 bp, Homo sapien
ccgatcgccccccagcgcagagtgt

SEQ ID NO: 1314242 - DNA, 25 bp, Homo sapien
cagagtgtggatcccagtgcctgga

SEQ ID NO: 1314243 - DNA, 25 bp, Homo sapien
gggcagagtccagcgctgggagcct

SEQ ID NO: 1314244 - DNA, 25 bp, Homo sapien
atcccagtgcctggagagagcagct

SEQ ID NO: 1314245 - DNA, 25 bp, Homo sapien
gaccggggccgcagcggtctccgct

SEQ ID NO: 1314246 - DNA, 25 bp, Homo sapien
aggttgtcgtagaaaatcttggctt

SEQ ID NO: 1314247 - DNA, 25 bp, Homo sapien
cgaggttgtcgtagaaaatcttggc

SEQ ID NO: 1314248 - DNA, 25 bp, Homo sapien
tggcttcctcccagaccggggccgc

SEQ ID NO: 1314249 - DNA, 25 bp, Homo sapien
cggcggcgtagacgcggaggtggct

SEQ ID NO: 1314250 - DNA, 25 bp, Homo sapien
aggcggcggcgtagacgcggaggtg

SEQ ID NO: 1314251 - DNA, 25 bp, Homo sapien
gagcaggcggcggcgtagacgcgga

SEQ ID NO: 1314252 - DNA, 25 bp, Homo sapien
agcaggcggcggcgtagacgcggag

SEQ ID NO: 1314253 - DNA, 25 bp, Homo sapien
gggcagtcactgagtgcacagccag

SEQ ID NO: 1314254 - DNA, 25 bp, Homo sapien
caccaagcaggaagggctatacacc

SEQ ID NO: 1314255 - DNA, 25 bp, Homo sapien
tagggggctacactggaactggcct

SEQ ID NO: 1314256 - DNA, 25 bp, Homo sapien
cagcacagggttgagcagtgagggc

SEQ ID NO: 1314257 - DNA, 25 bp, Homo sapien
acagtgatctctaaagtcagctcaa

SEQ ID NO: 1314258 - DNA, 25 bp, Homo sapien
gtgatctctaaagtcagctcaaagc

SEQ ID NO: 1314259 - DNA, 25 bp, Homo sapien
cagtgatctctaaagtcagctcaaa

SEQ ID NO: 1314260 - DNA, 25 bp, Homo sapien
agtgatctctaaagtcagctcaaag

SEQ ID NO: 1314261 - DNA, 25 bp, Homo sapien
ctcacccagggtggatcttcaggaa

SEQ ID NO: 1314262 - DNA, 25 bp, Homo sapien
tacagctgaaaggactaaagtggcc

SEQ ID NO: 1314263 - DNA, 25 bp, Homo sapien
gagtaatcaaacacgccttcatggg

SEQ ID NO: 1314264 - DNA, 25 bp, Homo sapien
gattctgggaccttgcaattcacag

SEQ ID NO: 1314265 - DNA, 25 bp, Homo sapien
tgtctgggtgcctaaacagtggcca

SEQ ID NO: 1314266 - DNA, 25 bp, Homo sapien
caagaggatagcaacccagtggcct

SEQ ID NO: 1314267 - DNA, 25 bp, Homo sapien
gatttaggtcccagctaagccaggc

SEQ ID NO: 1314268 - DNA, 25 bp, Homo sapien
tgttttcaccggcagttcaagagga

SEQ ID NO: 1314269 - DNA, 25 bp, Homo sapien
aatctggtcgtccttatcctggtcc

SEQ ID NO: 1314270 - DNA, 25 bp, Homo sapien
tgagcccgtcctggttcatgcgcat

SEQ ID NO: 1314271 - DNA, 25 bp, Homo sapien
gcagcaacacaatggatgggtcact

SEQ ID NO: 1314272 - DNA, 25 bp, Homo sapien
gaactcctccaatgtaatctggtcg

SEQ ID NO: 1314273 - DNA, 25 bp, Homo sapien
gtgatgcgcccgtcgccgtccaggt

SEQ ID NO: 1314274 - DNA, 25 bp, Homo sapien
ctgctcgaagctgccgcgggaggtg

SEQ ID NO: 1314275 - DNA, 25 bp, Homo sapien
tgcggaaagcgtgctgcgcgaactt

SEQ ID NO: 1314276 - DNA, 25 bp, Homo sapien
cgacagggcgcagatgaactcccgg

SEQ ID NO: 1314277 - DNA, 25 bp, Homo sapien
agctcctgctcgctgaactcagtgt

SEQ ID NO: 1314278 - DNA, 25 bp, Homo sapien
gaactcagtgttctgaacaaggtcc

SEQ ID NO: 1314279 - DNA, 25 bp, Homo sapien
ggccagcttgctgttggtcttcccc

SEQ ID NO: 1314280 - DNA, 25 bp, Homo sapien
cttgatgtagagctgctgaaactcc

SEQ ID NO: 1314281 - DNA, 25 bp, Homo sapien
ctgtgggacagagggattcctccga

SEQ ID NO: 1314282 - DNA, 25 bp, Homo sapien
gtgcagcacgccacagtcttcatcc

SEQ ID NO: 1314283 - DNA, 25 bp, Homo sapien
cgtgcagcacgccacagtcttcatc

SEQ ID NO: 1314284 - DNA, 25 bp, Homo sapien
ctggggataagtaggcggctctgcc

SEQ ID NO: 1314285 - DNA, 25 bp, Homo sapien
tgagctggggataagtaggcggctc

SEQ ID NO: 1314286 - DNA, 25 bp, Homo sapien
ccaggggtgggctcttcagttgctg

SEQ ID NO: 1314287 - DNA, 25 bp, Homo sapien
aggggtgggctcttcagttgctgcc

SEQ ID NO: 1314288 - DNA, 25 bp, Homo sapien
tcactatgtgcctcccgaaggcgac

SEQ ID NO: 1314289 - DNA, 25 bp, Homo sapien
tgcacggctattggctcctctggag

SEQ ID NO: 1314290 - DNA, 25 bp, Homo sapien
tcgctggatggctccgagcctcggc

SEQ ID NO: 1314291 - DNA, 25 bp, Homo sapien
cgaaggcgacactatttgcataagc

SEQ ID NO: 1314292 - DNA, 25 bp, Homo sapien
ctggcgtctgagagctcctgacaca

SEQ ID NO: 1314293 - DNA, 25 bp, Homo sapien
agagctcctgacacaaggctgtggg

SEQ ID NO: 1314294 - DNA, 25 bp, Homo sapien
gcgtctgagagctcctgacacaagg

SEQ ID NO: 1314295 - DNA, 25 bp, Homo sapien
acacaaggctgtgggaaggaaccct

SEQ ID NO: 1314296 - DNA, 25 bp, Homo sapien
caaacacctgttccacgttgttgaa

SEQ ID NO: 1314297 - DNA, 25 bp, Homo sapien
cctgttccacgttgttgaaggagca

SEQ ID NO: 1314298 - DNA, 25 bp, Homo sapien
ttccacgttgttgaaggagcaggct

SEQ ID NO: 1314299 - DNA, 25 bp, Homo sapien
cacctgttccacgttgttgaaggag

SEQ ID NO: 1314300 - DNA, 25 bp, Homo sapien
ccagagctaggggtcataagagcca

SEQ ID NO: 1314301 - DNA, 25 bp, Homo sapien
gccagagctaggggtcataagagcc

SEQ ID NO: 1314302 - DNA, 25 bp, Homo sapien
cagagctaggggtcataagagccat

SEQ ID NO: 1314303 - DNA, 25 bp, Homo sapien
tgattaagttccttgaatggttttc

SEQ ID NO: 1314304 - DNA, 25 bp, Homo sapien
gctgattaagttccttgaatggttt

SEQ ID NO: 1314305 - DNA, 25 bp, Homo sapien
ctgattaagttccttgaatggtttt

SEQ ID NO: 1314306 - DNA, 25 bp, Homo sapien
aaatcagtttcctaccaatttagtg

SEQ ID NO: 1314307 - DNA, 25 bp, Homo sapien
tcagtttcctaccaatttagtgtgg

SEQ ID NO: 1314308 - DNA, 25 bp, Homo sapien
cagagctcgaacatgtatattcaat

SEQ ID NO: 1314309 - DNA, 25 bp, Homo sapien
aagggaacagagctcgaacatgtat

SEQ ID NO: 1314310 - DNA, 25 bp, Homo sapien
gacactaagagtctggaggagaccc

SEQ ID NO: 1314311 - DNA, 25 bp, Homo sapien
tattagccccgcttggattctgtgg

SEQ ID NO: 1314312 - DNA, 25 bp, Homo sapien
tcagtaaaatctcggtggttagtcc

SEQ ID NO: 1314313 - DNA, 25 bp, Homo sapien
taggagaaccatgcagccttgctag

SEQ ID NO: 1314314 - DNA, 25 bp, Homo sapien
tatgaaccaggaggatcacggctcg

SEQ ID NO: 1314315 - DNA, 25 bp, Homo sapien
gttagtgactacgaatcccctgctg

SEQ ID NO: 1314316 - DNA, 25 bp, Homo sapien
tctggtgcaacgagataaacaggcc

SEQ ID NO: 1314317 - DNA, 25 bp, Homo sapien
gaacactgcctgatgattgagacca

SEQ ID NO: 1314318 - DNA, 25 bp, Homo sapien
tgaccaccatgttgcggtgcttgcg

SEQ ID NO: 1314319 - DNA, 25 bp, Homo sapien
ccatgttgcggtgcttgcgcaggat

SEQ ID NO: 1314320 - DNA, 25 bp, Homo sapien
tgtcatagtagagcacagaggtggc

SEQ ID NO: 1314321 - DNA, 25 bp, Homo sapien
catagtagagcacagaggtggcgct

SEQ ID NO: 1314322 - DNA, 25 bp, Homo sapien
ccaaggcatagtgtgcgcacgtgtg

SEQ ID NO: 1314323 - DNA, 25 bp, Homo sapien
tgatcaaggcatcaccgttgaacct

SEQ ID NO: 1314324 - DNA, 25 bp, Homo sapien
gaacttctgggctcgtgtgctgcga

SEQ ID NO: 1314325 - DNA, 25 bp, Homo sapien
cgcacctgatcaaggcatcaccgtt

SEQ ID NO: 1314326 - DNA, 25 bp, Homo sapien
cagtaataggccgagtagccttggg

SEQ ID NO: 1314327 - DNA, 25 bp, Homo sapien
cccctcacagtaataggccgagtag

SEQ ID NO: 1314328 - DNA, 25 bp, Homo sapien
tggtggcattcatgcaggagtccag

SEQ ID NO: 1314329 - DNA, 25 bp, Homo sapien
agtgggaaggagcactccccctcac

SEQ ID NO: 1314330 - DNA, 25 bp, Homo sapien
gagctcgtgccgacggcagacctgc

SEQ ID NO: 1314331 - DNA, 25 bp, Homo sapien
gaagctgacgtagagctcgtgccga

SEQ ID NO: 1314332 - DNA, 25 bp, Homo sapien
gacggcagacctgccggccgtggga

SEQ ID NO: 1314333 - DNA, 25 bp, Homo sapien
ggtcctggaagctgacgtagagctc

SEQ ID NO: 1314334 - DNA, 25 bp, Homo sapien
aagatccctgggagtcggttggcct

SEQ ID NO: 1314335 - DNA, 25 bp, Homo sapien
gggactcggactggccctgaagaaa

SEQ ID NO: 1314336 - DNA, 25 bp, Homo sapien
agcgtggggcccgttgacccagcag

SEQ ID NO: 1314337 - DNA, 25 bp, Homo sapien
tgaagaaagtgaccacgaaaggctg

SEQ ID NO: 1314338 - DNA, 25 bp, Homo sapien
gccctgcagcagacacagcagcggt

SEQ ID NO: 1314339 - DNA, 25 bp, Homo sapien
cctgcagcagacacagcagcggtct

SEQ ID NO: 1314340 - DNA, 25 bp, Homo sapien
gggcagtggccctgcagcagacaca

SEQ ID NO: 1314341 - DNA, 25 bp, Homo sapien
tgcagcagacacagcagcggtctct

SEQ ID NO: 1314342 - DNA, 25 bp, Homo sapien
ctgggcaggtccaggagcgtggagg

SEQ ID NO: 1314343 - DNA, 25 bp, Homo sapien
ctgtgttctgtcttccgtcccgcac

SEQ ID NO: 1314344 - DNA, 25 bp, Homo sapien
tctgccaggttgagcgagtgcttgt

SEQ ID NO: 1314345 - DNA, 25 bp, Homo sapien
cagctcgtggtagcatctgccaggt

SEQ ID NO: 1314346 - DNA, 25 bp, Homo sapien
tgtgaatgtcaaacttatcaccgag

SEQ ID NO: 1314347 - DNA, 25 bp, Homo sapien
tatcaccgagacagctcgtggtagc

SEQ ID NO: 1314348 - DNA, 25 bp, Homo sapien
caagagcagggcattaactgtctcc

SEQ ID NO: 1314349 - DNA, 25 bp, Homo sapien
ggttatttcccggctttcatgataa

SEQ ID NO: 1314350 - DNA, 25 bp, Homo sapien
gaatggcagaagcatgattaccagc

SEQ ID NO: 1314351 - DNA, 25 bp, Homo sapien
tgaacaaccagtgaatccagagacc

SEQ ID NO: 1314352 - DNA, 25 bp, Homo sapien
cagatgcacatacgctcagacagac

SEQ ID NO: 1314353 - DNA, 25 bp, Homo sapien
tcacaacggagagagaacagagcag

SEQ ID NO: 1314354 - DNA, 25 bp, Homo sapien
ttaggcaggactccctggctccagc

SEQ ID NO: 1314355 - DNA, 25 bp, Homo sapien
tcttaggcaggactccctggctcca

SEQ ID NO: 1314356 - DNA, 25 bp, Homo sapien
aggcaggactccctggctccagctg

SEQ ID NO: 1314357 - DNA, 25 bp, Homo sapien
ggcaggactccctggctccagctgg

SEQ ID NO: 1314358 - DNA, 25 bp, Homo sapien
acaagtggccagtttgggcctccat

SEQ ID NO: 1314359 - DNA, 25 bp, Homo sapien
catcacacaagtggccagtttgggc

SEQ ID NO: 1314360 - DNA, 25 bp, Homo sapien
cacacaagtggccagtttgggcctc

SEQ ID NO: 1314361 - DNA, 25 bp, Homo sapien
cacaagtggccagtttgggcctcca

SEQ ID NO: 1314362 - DNA, 25 bp, Homo sapien
attaaagtcgcagctctctagagga

SEQ ID NO: 1314363 - DNA, 25 bp, Homo sapien
cagctctctagaggagcactgtcca

SEQ ID NO: 1314364 - DNA, 25 bp, Homo sapien
tttaattaaagtcgcagctctctag

SEQ ID NO: 1314365 - DNA, 25 bp, Homo sapien
ttgtttttaattaaagtcgcagctc

SEQ ID NO: 1314366 - DNA, 25 bp, Homo sapien
gagctggggacatgtattcccctgg

SEQ ID NO: 1314367 - DNA, 25 bp, Homo sapien
agtaggaggccagtagcaaacccct

SEQ ID NO: 1314368 - DNA, 25 bp, Homo sapien
aggaaagtaggaggccagtagcaaa

SEQ ID NO: 1314369 - DNA, 25 bp, Homo sapien
taggaggccagtagcaaacccctcc

SEQ ID NO: 1314370 - DNA, 25 bp, Homo sapien
tgcatgggcctgaggttcggggaca

SEQ ID NO: 1314371 - DNA, 25 bp, Homo sapien
tgctgcatgggcctgaggttcgggg

SEQ ID NO: 1314372 - DNA, 25 bp, Homo sapien
gcatgggcctgaggttcggggacac

SEQ ID NO: 1314373 - DNA, 25 bp, Homo sapien
ctgcatgggcctgaggttcggggac

SEQ ID NO: 1314374 - DNA, 25 bp, Homo sapien
cagggatcatccagttcgccaggtc

SEQ ID NO: 1314375 - DNA, 25 bp, Homo sapien
cgctccaaaaggaagtggtcgccgt

SEQ ID NO: 1314376 - DNA, 25 bp, Homo sapien
caggatcccgttctcactgtgaaga

SEQ ID NO: 1314377 - DNA, 25 bp, Homo sapien
tatgcccagattggcgtacatgccg

SEQ ID NO: 1314378 - DNA, 25 bp, Homo sapien
cgtaggaacagacgatgcgacggac

SEQ ID NO: 1314379 - DNA, 25 bp, Homo sapien
ctggaccagggtcccgtagcccgtg

SEQ ID NO: 1314380 - DNA, 25 bp, Homo sapien
tgccctggggcgtgagctccagctc

SEQ ID NO: 1314381 - DNA, 25 bp, Homo sapien
tactggctctcgcacagggtgttct

SEQ ID NO: 1314382 - DNA, 25 bp, Homo sapien
tgctgaccacctgcaggtctttcac

SEQ ID NO: 1314383 - DNA, 25 bp, Homo sapien
acgcccacgttgctgctgaccacct

SEQ ID NO: 1314384 - DNA, 25 bp, Homo sapien
gtcctccacgcccacgttgctgctg

SEQ ID NO: 1314385 - DNA, 25 bp, Homo sapien
gcaggtctttcacgcgggtcctgag

SEQ ID NO: 1314386 - DNA, 25 bp, Homo sapien
tcccgcagagcccgaagcccccgat

SEQ ID NO: 1314387 - DNA, 25 bp, Homo sapien
ccgcagagcccgaagcccccgatca

SEQ ID NO: 1314388 - DNA, 25 bp, Homo sapien
cgcagagcccgaagcccccgatcat

SEQ ID NO: 1314389 - DNA, 25 bp, Homo sapien
gatcccgcagagcccgaagcccccg

SEQ ID NO: 1314390 - DNA, 25 bp, Homo sapien
ccgtcagagatgtccttcaccatct

SEQ ID NO: 1314391 - DNA, 25 bp, Homo sapien
actggtggcaaagcagcgggcgcag

SEQ ID NO: 1314392 - DNA, 25 bp, Homo sapien
gacggtcgccccgtcagagatgtcc

SEQ ID NO: 1314393 - DNA, 25 bp, Homo sapien
ccgggtccgcgtagaacttggcacg

SEQ ID NO: 1314394 - DNA, 25 bp, Homo sapien
gaccccgcgcccgagcactgacgcc

SEQ ID NO: 1314395 - DNA, 25 bp, Homo sapien
agcactgacgccaggagccgcagcg

SEQ ID NO: 1314396 - DNA, 25 bp, Homo sapien
cgcgcccgagcactgacgccaggag

SEQ ID NO: 1314397 - DNA, 25 bp, Homo sapien
gcccgagcactgacgccaggagccg

SEQ ID NO: 1314398 - DNA, 25 bp, Homo sapien
gggccgcgcgtcacagagcagggcg

SEQ ID NO: 1314399 - DNA, 25 bp, Homo sapien
tgtgagccctgcgtgcgcctcgggc

SEQ ID NO: 1314400 - DNA, 25 bp, Homo sapien
gccgcgcgtcacagagcagggcggg

SEQ ID NO: 1314401 - DNA, 25 bp, Homo sapien
ctcgggccgcgcgtcacagagcagg

SEQ ID NO: 1314402 - DNA, 25 bp, Homo sapien
taagtaaacaccatgatcgatctgg

SEQ ID NO: 1314403 - DNA, 25 bp, Homo sapien
tacacaaggagttcccatacacctg

SEQ ID NO: 1314404 - DNA, 25 bp, Homo sapien
gctggtcttcttaggtgcctctggg

SEQ ID NO: 1314405 - DNA, 25 bp, Homo sapien
ggttaccgtcagctgtgattgcgcc

SEQ ID NO: 1314406 - DNA, 25 bp, Homo sapien
ctactgcctggcataaaagaggctc

SEQ ID NO: 1314407 - DNA, 25 bp, Homo sapien
acagctggtgaggccgggcacccag

SEQ ID NO: 1314408 - DNA, 25 bp, Homo sapien
gtgacccttgcagcgggcacagctg

SEQ ID NO: 1314409 - DNA, 25 bp, Homo sapien
tcagtgacccttgcagcgggcacag

SEQ ID NO: 1314410 - DNA, 25 bp, Homo sapien
agggccacaggaagccactaccgct

SEQ ID NO: 1314411 - DNA, 25 bp, Homo sapien
gagcgtctgaagatccaaaaagaac

SEQ ID NO: 1314412 - DNA, 25 bp, Homo sapien
tccttgtgacgcttcagcaaccagc

SEQ ID NO: 1314413 - DNA, 25 bp, Homo sapien
tctccacatagaggcggagtcccag

SEQ ID NO: 1314414 - DNA, 25 bp, Homo sapien
tcgtctccagctcggagcgtctgaa

SEQ ID NO: 1314415 - DNA, 25 bp, Homo sapien
cctggaccacctggaacatgctgac

SEQ ID NO: 1314416 - DNA, 25 bp, Homo sapien
tgggcaccttgtaaatccggaactc

SEQ ID NO: 1314417 - DNA, 25 bp, Homo sapien
ccacctggaacatgctgacgtggag

SEQ ID NO: 1314418 - DNA, 25 bp, Homo sapien
aaatccggaactccgcagctgtgac

SEQ ID NO: 1314419 - DNA, 25 bp, Homo sapien
gggctggcactcagaatggctcggg

SEQ ID NO: 1314420 - DNA, 25 bp, Homo sapien
gctggcactcagaatggctcgggct

SEQ ID NO: 1314421 - DNA, 25 bp, Homo sapien
tgggctggcactcagaatggctcgg

SEQ ID NO: 1314422 - DNA, 25 bp, Homo sapien
ggctggcactcagaatggctcgggc

SEQ ID NO: 1314423 - DNA, 25 bp, Homo sapien
tccaaaccctgaactcccgttgcgc

SEQ ID NO: 1314424 - DNA, 25 bp, Homo sapien
ttgcgcccccttctcggcccggctg

SEQ ID NO: 1314425 - DNA, 25 bp, Homo sapien
gccccaggctccaaaccctgaactc

SEQ ID NO: 1314426 - DNA, 25 bp, Homo sapien
tgcgcccccttctcggcccggctgg

SEQ ID NO: 1314427 - DNA, 25 bp, Homo sapien
ctggtagacaggaacataaccgaca

SEQ ID NO: 1314428 - DNA, 25 bp, Homo sapien
agcctgcccactgcctggatgggag

SEQ ID NO: 1314429 - DNA, 25 bp, Homo sapien
gggacacaaggcatccagagcctgc

SEQ ID NO: 1314430 - DNA, 25 bp, Homo sapien
ccgacataactgacggcatctcagg

SEQ ID NO: 1314431 - DNA, 25 bp, Homo sapien
gtcaggtttgtaaaagcaccaggct

SEQ ID NO: 1314432 - DNA, 25 bp, Homo sapien
cacggtcaggtttgtaaaagcacca

SEQ ID NO: 1314433 - DNA, 25 bp, Homo sapien
gaccacggtcaggtttgtaaaagca

SEQ ID NO: 1314434 - DNA, 25 bp, Homo sapien
tgaccacggtcaggtttgtaaaagc

SEQ ID NO: 1314435 - DNA, 25 bp, Homo sapien
tccggccatgggcaggcgaacagct

SEQ ID NO: 1314436 - DNA, 25 bp, Homo sapien
tggggccagacgtgtgtgggcagga

SEQ ID NO: 1314437 - DNA, 25 bp, Homo sapien
ctggtccggccatgggcaggcgaac

SEQ ID NO: 1314438 - DNA, 25 bp, Homo sapien
atgggcaggcgaacagctgtgcggg

SEQ ID NO: 1314439 - DNA, 25 bp, Homo sapien
ccagaaatctcagcaccgcctcaag

SEQ ID NO: 1314440 - DNA, 25 bp, Homo sapien
aatctcagcaccgcctcaaggcgag

SEQ ID NO: 1314441 - DNA, 25 bp, Homo sapien
tcagcaccgcctcaaggcgagccca

SEQ ID NO: 1314442 - DNA, 25 bp, Homo sapien
agaaatctcagcaccgcctcaaggc

SEQ ID NO: 1314443 - DNA, 25 bp, Homo sapien
cccgagcaccgccaggatctcgcgc

SEQ ID NO: 1314444 - DNA, 25 bp, Homo sapien
ggatctcgcgctgcacgtcccggcg

SEQ ID NO: 1314445 - DNA, 25 bp, Homo sapien
gcgcgcccagacgtcgctggggaca

SEQ ID NO: 1314446 - DNA, 25 bp, Homo sapien
tccgcgggcgcgccgtcctcgtcgt

SEQ ID NO: 1314447 - DNA, 25 bp, Homo sapien
cgcggacgccaccgcctcgaggccg

SEQ ID NO: 1314448 - DNA, 25 bp, Homo sapien
cggacgccaccgcctcgaggccggg

SEQ ID NO: 1314449 - DNA, 25 bp, Homo sapien
ggacgcggacgccaccgcctcgagg

SEQ ID NO: 1314450 - DNA, 25 bp, Homo sapien
gacgcggacgccaccgcctcgaggc

SEQ ID NO: 1314451 - DNA, 25 bp, Homo sapien
tgcggactgggactctcggccaatc

SEQ ID NO: 1314452 - DNA, 25 bp, Homo sapien
gactgggactctcggccaatccgtc

SEQ ID NO: 1314453 - DNA, 25 bp, Homo sapien
ctactctgcggactgggactctcgg

SEQ ID NO: 1314454 - DNA, 25 bp, Homo sapien
tctgcggactgggactctcggccaa

SEQ ID NO: 1314455 - DNA, 25 bp, Homo sapien
cttggtgcggttcccgcgagtccct

SEQ ID NO: 1314456 - DNA, 25 bp, Homo sapien
ccgcttggtgcggttcccgcgagtc

SEQ ID NO: 1314457 - DNA, 25 bp, Homo sapien
tgcagccacccgcttggtgcggttc

SEQ ID NO: 1314458 - DNA, 25 bp, Homo sapien
cgcaggggcgatgggcgagctcctg

SEQ ID NO: 1314459 - DNA, 25 bp, Homo sapien
tgggcgtggcgggtgggcaggcggc

SEQ ID NO: 1314460 - DNA, 25 bp, Homo sapien
caggcggcccgggcgaggggctcgc

SEQ ID NO: 1314461 - DNA, 25 bp, Homo sapien
ctgggcgtggcgggtgggcaggcgg

SEQ ID NO: 1314462 - DNA, 25 bp, Homo sapien
gcagcctgggcgtcagcgtggtcat

SEQ ID NO: 1314463 - DNA, 25 bp, Homo sapien
tctcttgtacatcagcaacaaatgc

SEQ ID NO: 1314464 - DNA, 25 bp, Homo sapien
aaccataaggttaaattcatgactg

SEQ ID NO: 1314465 - DNA, 25 bp, Homo sapien
cttcgctgtgtgaccggctctcttg

SEQ ID NO: 1314466 - DNA, 25 bp, Homo sapien
gaatcttcatgactgaaaccataag

SEQ ID NO: 1314467 - DNA, 25 bp, Homo sapien
tctaccaaggcctgcaaatcatcca

SEQ ID NO: 1314468 - DNA, 25 bp, Homo sapien
agtctaccaaggcctgcaaatcatc

SEQ ID NO: 1314469 - DNA, 25 bp, Homo sapien
taccaaggcctgcaaatcatccatg

SEQ ID NO: 1314470 - DNA, 25 bp, Homo sapien
ctagtctaccaaggcctgcaaatca

SEQ ID NO: 1314471 - DNA, 25 bp, Homo sapien
cagcccagggaatatccaggtcagg

SEQ ID NO: 1314472 - DNA, 25 bp, Homo sapien
tccctggccgaactccttttgtcag

SEQ ID NO: 1314473 - DNA, 25 bp, Homo sapien
gctggtttgggccagtgaagaggag

SEQ ID NO: 1314474 - DNA, 25 bp, Homo sapien
gggaagaaggctcctacatccttgc

SEQ ID NO: 1314475 - DNA, 25 bp, Homo sapien
gcagttggcctggagtctatgcaat

SEQ ID NO: 1314476 - DNA, 25 bp, Homo sapien
ggaggatggcagtgttcggaggctc

SEQ ID NO: 1314477 - DNA, 25 bp, Homo sapien
gagagccaggaaggtgttccaggct

SEQ ID NO: 1314478 - DNA, 25 bp, Homo sapien
gaaccaggaccactctctgggacgt

SEQ ID NO: 1314479 - DNA, 25 bp, Homo sapien
gcaggatgtgttgggcgggctgagc

SEQ ID NO: 1314480 - DNA, 25 bp, Homo sapien
tccttcccgcgcttccgctgccagt

SEQ ID NO: 1314481 - DNA, 25 bp, Homo sapien
gtgagaggcaggatgtgttgggcgg

SEQ ID NO: 1314482 - DNA, 25 bp, Homo sapien
cagcagctccttcccgcgcttccgc

SEQ ID NO: 1314483 - DNA, 25 bp, Homo sapien
gcttggaggccagtgcagaggagat

SEQ ID NO: 1314484 - DNA, 25 bp, Homo sapien
tgcagaggagatgatgcttgagcta

SEQ ID NO: 1314485 - DNA, 25 bp, Homo sapien
gccagtgcagaggagatgatgcttg

SEQ ID NO: 1314486 - DNA, 25 bp, Homo sapien
ggtgttggggacagcttggaggcca

SEQ ID NO: 1314487 - DNA, 25 bp, Homo sapien
acagcaccaaggtatttctgatagt

SEQ ID NO: 1314488 - DNA, 25 bp, Homo sapien
catgggtcaaactgaacatgcaagc

SEQ ID NO: 1314489 - DNA, 25 bp, Homo sapien
ctgaggggaatttcccatgggtcaa

SEQ ID NO: 1314490 - DNA, 25 bp, Homo sapien
ttctgatagtaacagaaatatctga

SEQ ID NO: 1314491 - DNA, 25 bp, Homo sapien
ctttaagataacctcataggcccat

SEQ ID NO: 1314492 - DNA, 25 bp, Homo sapien
taagataacctcataggcccataaa

SEQ ID NO: 1314493 - DNA, 25 bp, Homo sapien
aagataacctcataggcccataaaa

SEQ ID NO: 1314494 - DNA, 25 bp, Homo sapien
tttaagataacctcataggcccata

SEQ ID NO: 1314495 - DNA, 25 bp, Homo sapien
tagaactcccaatatgtggctcaca

SEQ ID NO: 1314496 - DNA, 25 bp, Homo sapien
gagaattccgcatagcactcctttg

SEQ ID NO: 1314497 - DNA, 25 bp, Homo sapien
tggtattcaccacaaagaagatcct

SEQ ID NO: 1314498 - DNA, 25 bp, Homo sapien
tctcaatggagatggccctttcctg

SEQ ID NO: 1314499 - DNA, 25 bp, Homo sapien
tcagttggttcaagtgggatttgga

SEQ ID NO: 1314500 - DNA, 25 bp, Homo sapien
gctcttgatcattctgccctgggga

SEQ ID NO: 1314501 - DNA, 25 bp, Homo sapien
cagcatctgagtccaatcttcttct

SEQ ID NO: 1314502 - DNA, 25 bp, Homo sapien
gggaaacactctgactttctatggt

SEQ ID NO: 1314503 - DNA, 25 bp, Homo sapien
ggtcacacagcaggtaaactcttct

SEQ ID NO: 1314504 - DNA, 25 bp, Homo sapien
tcagagaggtcttacaaaatgtcca

SEQ ID NO: 1314505 - DNA, 25 bp, Homo sapien
catatcaagtgctccctgttaggta

SEQ ID NO: 1314506 - DNA, 25 bp, Homo sapien
gaataaattatatggccagccagct

SEQ ID NO: 1314507 - DNA, 25 bp, Homo sapien
gaatcccatgcaaaacagtactctg

SEQ ID NO: 1314508 - DNA, 25 bp, Homo sapien
tactctgaacagaaggatcccagct

SEQ ID NO: 1314509 - DNA, 25 bp, Homo sapien
caatgacaatcgaggcttcttctgc

SEQ ID NO: 1314510 - DNA, 25 bp, Homo sapien
tcccagctgctgagtaaacgacaag

SEQ ID NO: 1314511 - DNA, 25 bp, Homo sapien
tagactccaggttcaatctgccaaa

SEQ ID NO: 1314512 - DNA, 25 bp, Homo sapien
tgaaaggccaagaaactcctccaag

SEQ ID NO: 1314513 - DNA, 25 bp, Homo sapien
tgaagtcaatgtgaacccaccctta

SEQ ID NO: 1314514 - DNA, 25 bp, Homo sapien
tccaaggaatttgagcacaggctct

SEQ ID NO: 1314515 - DNA, 25 bp, Homo sapien
cttgttctcagcttcattgtatggc

SEQ ID NO: 1314516 - DNA, 25 bp, Homo sapien
ttcgatcacagaggtcacacaggtg

SEQ ID NO: 1314517 - DNA, 25 bp, Homo sapien
tgcccattcgcgatccccaatgatg

SEQ ID NO: 1314518 - DNA, 25 bp, Homo sapien
attggagtggctgtaggcttgtggc

SEQ ID NO: 1314519 - DNA, 25 bp, Homo sapien
aactttgcacgatttcaagagcagg

SEQ ID NO: 1314520 - DNA, 25 bp, Homo sapien
agatacctctaagccatagacaggg

SEQ ID NO: 1314521 - DNA, 25 bp, Homo sapien
ttcaagagcaggttcaagaacagac

SEQ ID NO: 1314522 - DNA, 25 bp, Homo sapien
tcccacttcgagacatcagatacct

SEQ ID NO: 1314523 - DNA, 25 bp, Homo sapien
tttaggagcagatactagtctcggg

SEQ ID NO: 1314524 - DNA, 25 bp, Homo sapien
taacagctcaagtgaccattgtgtg

SEQ ID NO: 1314525 - DNA, 25 bp, Homo sapien
tgcatatattccctcagcggcctgg

SEQ ID NO: 1314526 - DNA, 25 bp, Homo sapien
tcatatcaaccaataagccgcagaa

SEQ ID NO: 1314527 - DNA, 25 bp, Homo sapien
caggcccagaatctaaaattcattt

SEQ ID NO: 1314528 - DNA, 25 bp, Homo sapien
gaaaacagacccataggataaagaa

SEQ ID NO: 1314529 - DNA, 25 bp, Homo sapien
ctatattctattgaaaacagaccca

SEQ ID NO: 1314530 - DNA, 25 bp, Homo sapien
ggtcagatccaaaatcttagaacag

SEQ ID NO: 1314531 - DNA, 25 bp, Homo sapien
tttgtttccgggcatatctcttagt

SEQ ID NO: 1314532 - DNA, 25 bp, Homo sapien
tttccgggcatatctcttagttact

SEQ ID NO: 1314533 - DNA, 25 bp, Homo sapien
catatctcttagttacttgtttcag

SEQ ID NO: 1314534 - DNA, 25 bp, Homo sapien
tgtttccgggcatatctcttagtta

SEQ ID NO: 1314535 - DNA, 25 bp, Homo sapien
agctggttactagtctccagtgtgc

SEQ ID NO: 1314536 - DNA, 25 bp, Homo sapien
tttccctcagtgatcaggtactcgt

SEQ ID NO: 1314537 - DNA, 25 bp, Homo sapien
gattggaagataccatgttgatagt

SEQ ID NO: 1314538 - DNA, 25 bp, Homo sapien
ggtactcgtgaaattccttgaagcc

SEQ ID NO: 1314539 - DNA, 25 bp, Homo sapien
gcagataagccattgctcctaaaag

SEQ ID NO: 1314540 - DNA, 25 bp, Homo sapien
gatggacctagttgagccatttcat

SEQ ID NO: 1314541 - DNA, 25 bp, Homo sapien
ccattgctcctaaaagctagcaggg

SEQ ID NO: 1314542 - DNA, 25 bp, Homo sapien
gctttggagatggacctagttgagc

SEQ ID NO: 1314543 - DNA, 25 bp, Homo sapien
gattatagcgtctgtgaaaatctct

SEQ ID NO: 1314544 - DNA, 25 bp, Homo sapien
gcaagcatgtcatccaccctcttat

SEQ ID NO: 1314545 - DNA, 25 bp, Homo sapien
gcgtctgtgaaaatctcttagttcc

SEQ ID NO: 1314546 - DNA, 25 bp, Homo sapien
agcaagcatgtcatccaccctctta

SEQ ID NO: 1314547 - DNA, 25 bp, Homo sapien
caccaccttcttccgtatgttgacg

SEQ ID NO: 1314548 - DNA, 25 bp, Homo sapien
gcaagggttagagaacttcagagga

SEQ ID NO: 1314549 - DNA, 25 bp, Homo sapien
cagcatgaagccaaaggatgcaagg

SEQ ID NO: 1314550 - DNA, 25 bp, Homo sapien
tatgttgacgatggagaaattcact

SEQ ID NO: 1314551 - DNA, 25 bp, Homo sapien
aacacatcaatctccactaactgct

SEQ ID NO: 1314552 - DNA, 25 bp, Homo sapien
aacctgctgagctagaacaacacat

SEQ ID NO: 1314553 - DNA, 25 bp, Homo sapien
gggtcagcgcgccaggctttcttac

SEQ ID NO: 1314554 - DNA, 25 bp, Homo sapien
tgaagaactgactgctctctagttg

SEQ ID NO: 1314555 - DNA, 25 bp, Homo sapien
caagctccacttttcggtcaatcac

SEQ ID NO: 1314556 - DNA, 25 bp, Homo sapien
ggccactttgcgtttgtcatgtgga

SEQ ID NO: 1314557 - DNA, 25 bp, Homo sapien
gtcatgtggatgcagcttggcagcc

SEQ ID NO: 1314558 - DNA, 25 bp, Homo sapien
ccacctggcttaggcgtttgtgaag

SEQ ID NO: 1314559 - DNA, 25 bp, Homo sapien
caatgtaataattggttcctcccac

SEQ ID NO: 1314560 - DNA, 25 bp, Homo sapien
gtattgacaagaactttccagagca

SEQ ID NO: 1314561 - DNA, 25 bp, Homo sapien
ctcccacaacaataggaattttgtc

SEQ ID NO: 1314562 - DNA, 25 bp, Homo sapien
caataggaattttgtctcgggcaaa

SEQ ID NO: 1314563 - DNA, 25 bp, Homo sapien
aacccagctgctgcctttcctaagg

SEQ ID NO: 1314564 - DNA, 25 bp, Homo sapien
cccagctgctgcctttcctaaggat

SEQ ID NO: 1314565 - DNA, 25 bp, Homo sapien
aaacccagctgctgcctttcctaag

SEQ ID NO: 1314566 - DNA, 25 bp, Homo sapien
caaacccagctgctgcctttcctaa

SEQ ID NO: 1314567 - DNA, 25 bp, Homo sapien
gcagttgctctatttctgaagtcca

SEQ ID NO: 1314568 - DNA, 25 bp, Homo sapien
agagcagttgctctatttctgaagt

SEQ ID NO: 1314569 - DNA, 25 bp, Homo sapien
cagttgctctatttctgaagtccac

SEQ ID NO: 1314570 - DNA, 25 bp, Homo sapien
gagcagttgctctatttctgaagtc

SEQ ID NO: 1314571 - DNA, 25 bp, Homo sapien
gaggatccacaaagctgatcatgtg

SEQ ID NO: 1314572 - DNA, 25 bp, Homo sapien
gtaattggtcacaagaggatccaca

SEQ ID NO: 1314573 - DNA, 25 bp, Homo sapien
ggcagaaaccttgttggtgatgatg

SEQ ID NO: 1314574 - DNA, 25 bp, Homo sapien
tgtggtgccggcagattctctgctc

SEQ ID NO: 1314575 - DNA, 25 bp, Homo sapien
gccttgggatgctgttaatctatgg

SEQ ID NO: 1314576 - DNA, 25 bp, Homo sapien
gggatgctgttaatctatggcctta

SEQ ID NO: 1314577 - DNA, 25 bp, Homo sapien
aaaggaaagagaaatcagattgttg

SEQ ID NO: 1314578 - DNA, 25 bp, Homo sapien
ggaaagagaaatcagattgttgctg

SEQ ID NO: 1314579 - DNA, 25 bp, Homo sapien
tctgattcaagtttctgaggaatcc

SEQ ID NO: 1314580 - DNA, 25 bp, Homo sapien
gtctgattcaagtttctgaggaatc

SEQ ID NO: 1314581 - DNA, 25 bp, Homo sapien
tcatgtacagtagtgagaaagggcc

SEQ ID NO: 1314582 - DNA, 25 bp, Homo sapien
tgagaaagggccaaagagtagaaaa

SEQ ID NO: 1314583 - DNA, 25 bp, Homo sapien
caaagagtagaaaagggagttccat

SEQ ID NO: 1314584 - DNA, 25 bp, Homo sapien
ctgagacaactcaatacctttggac

SEQ ID NO: 1314585 - DNA, 25 bp, Homo sapien
tagtatctaccaaatagtaacgtcg

SEQ ID NO: 1314586 - DNA, 25 bp, Homo sapien
agacctttgccacagggtgtccacg

SEQ ID NO: 1314587 - DNA, 25 bp, Homo sapien
ttgatgagacgatgataagggaaac

SEQ ID NO: 1314588 - DNA, 25 bp, Homo sapien
ggtgcttagtaagtatgggctccct

SEQ ID NO: 1314589 - DNA, 25 bp, Homo sapien
ctgcatggagtcagcgctgacgatc

SEQ ID NO: 1314590 - DNA, 25 bp, Homo sapien
tggatttgccggtgcccgtggcccc

SEQ ID NO: 1314591 - DNA, 25 bp, Homo sapien
ggagtcagcgctgacgatctcaccg

SEQ ID NO: 1314592 - DNA, 25 bp, Homo sapien
ctggcctagctgcaacgccagcgtg

SEQ ID NO: 1314593 - DNA, 25 bp, Homo sapien
gcccactgcccacgggaactgctcg

SEQ ID NO: 1314594 - DNA, 25 bp, Homo sapien
ctacaagaggtagggtccgttgcag

SEQ ID NO: 1314595 - DNA, 25 bp, Homo sapien
gtagggtccgttgcaggcccctgag

SEQ ID NO: 1314596 - DNA, 25 bp, Homo sapien
actgctcgtgcagccgccacggacg

SEQ ID NO: 1314597 - DNA, 25 bp, Homo sapien
gcaaccgtctatgcgcctgcgcgga

SEQ ID NO: 1314598 - DNA, 25 bp, Homo sapien
atggcaaccgtctatgcgcctgcgc

SEQ ID NO: 1314599 - DNA, 25 bp, Homo sapien
tggcaaccgtctatgcgcctgcgcg

SEQ ID NO: 1314600 - DNA, 25 bp, Homo sapien
ccatggcaaccgtctatgcgcctgc

SEQ ID NO: 1314601 - DNA, 25 bp, Homo sapien
tgggtcaccccgtattgtctatgtc

SEQ ID NO: 1314602 - DNA, 25 bp, Homo sapien
tactaggtgtgtgggcttaggcaaa

SEQ ID NO: 1314603 - DNA, 25 bp, Homo sapien
tcagcagagttgactcaaaagagct

SEQ ID NO: 1314604 - DNA, 25 bp, Homo sapien
gatcccttaggtgcattattcagag

SEQ ID NO: 1314605 - DNA, 25 bp, Homo sapien
ggagttagtggaggcttctttcacc

SEQ ID NO: 1314606 - DNA, 25 bp, Homo sapien
tggagggtcacaagagggtcatttt

SEQ ID NO: 1314607 - DNA, 25 bp, Homo sapien
taagaggagctttttgaccgtactg

SEQ ID NO: 1314608 - DNA, 25 bp, Homo sapien
taggaattcgggtgggcaataccaa

SEQ ID NO: 1314609 - DNA, 25 bp, Homo sapien
ggcatttcaggaacccagagtggaa

SEQ ID NO: 1314610 - DNA, 25 bp, Homo sapien
caacatggttagagaagtgcagccc

SEQ ID NO: 1314611 - DNA, 25 bp, Homo sapien
tgcagccctctggatcacttgtggc

SEQ ID NO: 1314612 - DNA, 25 bp, Homo sapien
ccgtgttcactgagtactgagccta

SEQ ID NO: 1314613 - DNA, 25 bp, Homo sapien
cagggatcaagttcatgggccagga

SEQ ID NO: 1314614 - DNA, 25 bp, Homo sapien
ggttggctaagcatatctcctggag

SEQ ID NO: 1314615 - DNA, 25 bp, Homo sapien
ttttgtaaaccatgctccagaaggg

SEQ ID NO: 1314616 - DNA, 25 bp, Homo sapien
gactagaagctgcacgtggattcca

SEQ ID NO: 1314617 - DNA, 25 bp, Homo sapien
tgtgtcttcgtaagacagaactgtc

SEQ ID NO: 1314618 - DNA, 25 bp, Homo sapien
tcgtaagacagaactgtcaggcttt

SEQ ID NO: 1314619 - DNA, 25 bp, Homo sapien
ggatctactgtccagactgtcccac

SEQ ID NO: 1314620 - DNA, 25 bp, Homo sapien
caagcctttattgtgtgtgcaccgg

SEQ ID NO: 1314621 - DNA, 25 bp, Homo sapien
tgctgccggcatcggagctgtcttt

SEQ ID NO: 1314622 - DNA, 25 bp, Homo sapien
ggtgaccggcttccgaatacccaga

SEQ ID NO: 1314623 - DNA, 25 bp, Homo sapien
gaatcgcgaacgcaggtcattccgc

SEQ ID NO: 1314624 - DNA, 25 bp, Homo sapien
ccaaggccttgcttaggatcactac

SEQ ID NO: 1314625 - DNA, 25 bp, Homo sapien
tcaagattctctttccagccattaa

SEQ ID NO: 1314626 - DNA, 25 bp, Homo sapien
tttttgatctcaagattctctttcc

SEQ ID NO: 1314627 - DNA, 25 bp, Homo sapien
gattctctttccagccattaaacaa

SEQ ID NO: 1314628 - DNA, 25 bp, Homo sapien
ttttgatctcaagattctctttcca

SEQ ID NO: 1314629 - DNA, 25 bp, Homo sapien
tggagttctactgccttgaccccag

SEQ ID NO: 1314630 - DNA, 25 bp, Homo sapien
tctcagggatgcacgagtggtaagt

SEQ ID NO: 1314631 - DNA, 25 bp, Homo sapien
ccagtattgtcctctctaagcgcca

SEQ ID NO: 1314632 - DNA, 25 bp, Homo sapien
ggctttgcacaaaaggctctcggct

SEQ ID NO: 1314633 - DNA, 25 bp, Homo sapien
agaggcggagatggcccaagagctt

SEQ ID NO: 1314634 - DNA, 25 bp, Homo sapien
gagaggcggagatggcccaagagct

SEQ ID NO: 1314635 - DNA, 25 bp, Homo sapien
tcttggatggctcggggaggtcctt

SEQ ID NO: 1314636 - DNA, 25 bp, Homo sapien
aaagagaggcggagatggcccaaga

SEQ ID NO: 1314637 - DNA, 25 bp, Homo sapien
aatagtgctggtacgagtcgtagtc

SEQ ID NO: 1314638 - DNA, 25 bp, Homo sapien
ggcgatggcaccagctcgaatttct

SEQ ID NO: 1314639 - DNA, 25 bp, Homo sapien
gggattccgcttcgtctccggtgca

SEQ ID NO: 1314640 - DNA, 25 bp, Homo sapien
tatgatggaggcgtagttcctgccc

SEQ ID NO: 1314641 - DNA, 25 bp, Homo sapien
ccgccacctggagcggaccggctcc

SEQ ID NO: 1314642 - DNA, 25 bp, Homo sapien
ggatcggcgcgggagcgcgagctgc

SEQ ID NO: 1314643 - DNA, 25 bp, Homo sapien
ctcgctcgcgcacggcggcccggac

SEQ ID NO: 1314644 - DNA, 25 bp, Homo sapien
acggcggcccggacgctctcgggat

SEQ ID NO: 1314645 - DNA, 25 bp, Homo sapien
cgctctcgggatcggcgcgggagcg

SEQ ID NO: 1314646 - DNA, 25 bp, Homo sapien
caaataaattgcacgctggggagcg

SEQ ID NO: 1314647 - DNA, 25 bp, Homo sapien
tgccagccggctgagctaaaccgtg

SEQ ID NO: 1314648 - DNA, 25 bp, Homo sapien
gaggagggctgatgcggcccggcgg

SEQ ID NO: 1314649 - DNA, 25 bp, Homo sapien
aaccgtgctccttgcccactccgag

SEQ ID NO: 1314650 - DNA, 25 bp, Homo sapien
caccggaaattggtctatacttaag

SEQ ID NO: 1314651 - DNA, 25 bp, Homo sapien
tgacctggaagttcccaccctgact

SEQ ID NO: 1314652 - DNA, 25 bp, Homo sapien
ttgtgttgttgcaggaacgtgacct

SEQ ID NO: 1314653 - DNA, 25 bp, Homo sapien
cgcaactgttccatccaccggaaat

SEQ ID NO: 1314654 - DNA, 25 bp, Homo sapien
tcagtaagtgcctgcctgaatgaag

SEQ ID NO: 1314655 - DNA, 25 bp, Homo sapien
tacaagaattcctgcctcttcggga

SEQ ID NO: 1314656 - DNA, 25 bp, Homo sapien
gtattttcctacaagaattcctgcc

SEQ ID NO: 1314657 - DNA, 25 bp, Homo sapien
cctcttcgggaagtcttgcatgcac

SEQ ID NO: 1314658 - DNA, 25 bp, Homo sapien
tcttgcatgcacatgggccttgagt

SEQ ID NO: 1314659 - DNA, 25 bp, Homo sapien
gcagcttgaggaagtctactaccac

SEQ ID NO: 1314660 - DNA, 25 bp, Homo sapien
tggccaggggagtccttacgcagct

SEQ ID NO: 1314661 - DNA, 25 bp, Homo sapien
ggagtccttacgcagcttgaggaag

SEQ ID NO: 1314662 - DNA, 25 bp, Homo sapien
tctactaccactttcactttgacca

SEQ ID NO: 1314663 - DNA, 25 bp, Homo sapien
cactggggctcccttagaggtacac

SEQ ID NO: 1314664 - DNA, 25 bp, Homo sapien
gtcctctgaggccacccggtagctt

SEQ ID NO: 1314665 - DNA, 25 bp, Homo sapien
aaggcaatgtctccttgcaggaatg

SEQ ID NO: 1314666 - DNA, 25 bp, Homo sapien
gaggccacccggtagcttggtccaa

SEQ ID NO: 1314667 - DNA, 25 bp, Homo sapien
tttggcctcggatggcgtagctgtc

SEQ ID NO: 1314668 - DNA, 25 bp, Homo sapien
atggcgtagctgtctgtgccaaggc

SEQ ID NO: 1314669 - DNA, 25 bp, Homo sapien
cattcttaacgtcttcttggcagtc

SEQ ID NO: 1314670 - DNA, 25 bp, Homo sapien
ctggcgttgcgcagcttctcacact

SEQ ID NO: 1314671 - DNA, 25 bp, Homo sapien
gacatgaggttcattcagtgcgctg

SEQ ID NO: 1314672 - DNA, 25 bp, Homo sapien
tctttactctcagctgttatttctc

SEQ ID NO: 1314673 - DNA, 25 bp, Homo sapien
tctttcaggcattgtgtaattgagc

SEQ ID NO: 1314674 - DNA, 25 bp, Homo sapien
tgtcatctccggctctgagcctatt

SEQ ID NO: 1314675 - DNA, 25 bp, Homo sapien
tagtaagaagcagggaaagggtaga

SEQ ID NO: 1314676 - DNA, 25 bp, Homo sapien
cagtagtaagaagcagggaaagggt

SEQ ID NO: 1314677 - DNA, 25 bp, Homo sapien
tgcagtagtaagaagcagggaaagg

SEQ ID NO: 1314678 - DNA, 25 bp, Homo sapien
agtgcagtagtaagaagcagggaaa

SEQ ID NO: 1314679 - DNA, 25 bp, Homo sapien
gagagctggcatgtggtccctagta

SEQ ID NO: 1314680 - DNA, 25 bp, Homo sapien
tctgggacactaagtgctatgatga

SEQ ID NO: 1314681 - DNA, 25 bp, Homo sapien
tcctgggctgggaattagacttcag

SEQ ID NO: 1314682 - DNA, 25 bp, Homo sapien
ggtagcaaacccataacctttggca

SEQ ID NO: 1314683 - DNA, 25 bp, Homo sapien
tttgaaagataagaacaccctagtg

SEQ ID NO: 1314684 - DNA, 25 bp, Homo sapien
tgtaagactccaataccgtaatcgc

SEQ ID NO: 1314685 - DNA, 25 bp, Homo sapien
tctgggtgtgcctgtacactgtgct

SEQ ID NO: 1314686 - DNA, 25 bp, Homo sapien
gcagcctttagtgacctaactggaa

SEQ ID NO: 1314687 - DNA, 25 bp, Homo sapien
atgcctggcctgaacttttatttta

SEQ ID NO: 1314688 - DNA, 25 bp, Homo sapien
catgcctggcctgaacttttatttt

SEQ ID NO: 1314689 - DNA, 25 bp, Homo sapien
aaagtcttgttaagaatgttcaggt

SEQ ID NO: 1314690 - DNA, 25 bp, Homo sapien
tcttgttaagaatgttcaggtcccg

SEQ ID NO: 1314691 - DNA, 25 bp, Homo sapien
gaatgttcaggtcccgtgtagtggc

SEQ ID NO: 1314692 - DNA, 25 bp, Homo sapien
gcgcctggcctacgatcatttaaaa

SEQ ID NO: 1314693 - DNA, 25 bp, Homo sapien
atgcagataacataggcccaggagt

SEQ ID NO: 1314694 - DNA, 25 bp, Homo sapien
gaggtatgcagataacataggccca

SEQ ID NO: 1314695 - DNA, 25 bp, Homo sapien
ggtatgcagataacataggcccagg

SEQ ID NO: 1314696 - DNA, 25 bp, Homo sapien
ggcagaggtatgcagataacatagg

SEQ ID NO: 1314697 - DNA, 25 bp, Homo sapien
cacgacattcagagttgccacagaa

SEQ ID NO: 1314698 - DNA, 25 bp, Homo sapien
gattccattggccagatctcaggca

SEQ ID NO: 1314699 - DNA, 25 bp, Homo sapien
taagtgtttctcgtgccctagcctc

SEQ ID NO: 1314700 - DNA, 25 bp, Homo sapien
gcaatgattcagagacccaaggtca

SEQ ID NO: 1314701 - DNA, 25 bp, Homo sapien
taggctctgcccaaacgtagacagg

SEQ ID NO: 1314702 - DNA, 25 bp, Homo sapien
tctgagccaggttgcacagatgcag

SEQ ID NO: 1314703 - DNA, 25 bp, Homo sapien
ggaaaggctccagatgaaccgccag

SEQ ID NO: 1314704 - DNA, 25 bp, Homo sapien
tagactgttgtctgtcattagcccg

SEQ ID NO: 1314705 - DNA, 25 bp, Homo sapien
atgaagcactgggtactggacaagg

SEQ ID NO: 1314706 - DNA, 25 bp, Homo sapien
ggatgaagcactgggtactggacaa

SEQ ID NO: 1314707 - DNA, 25 bp, Homo sapien
tggatgaagcactgggtactggaca

SEQ ID NO: 1314708 - DNA, 25 bp, Homo sapien
catggatgaagcactgggtactgga

SEQ ID NO: 1314709 - DNA, 25 bp, Homo sapien
cagcgtatcttctgatgaccactcc

SEQ ID NO: 1314710 - DNA, 25 bp, Homo sapien
gaaggcagcgtatcttctgatgacc

SEQ ID NO: 1314711 - DNA, 25 bp, Homo sapien
ggcagcgtatcttctgatgaccact

SEQ ID NO: 1314712 - DNA, 25 bp, Homo sapien
gcgtatcttctgatgaccactccaa

SEQ ID NO: 1314713 - DNA, 25 bp, Homo sapien
gattgactctggcacataacgcctg

SEQ ID NO: 1314714 - DNA, 25 bp, Homo sapien
ttgaaacacggagctgtcacagtcg

SEQ ID NO: 1314715 - DNA, 25 bp, Homo sapien
ccaaggagtacggaagcgaagcctc

SEQ ID NO: 1314716 - DNA, 25 bp, Homo sapien
ctcagaagccggatttcagcagagt

SEQ ID NO: 1314717 - DNA, 25 bp, Homo sapien
ctttccatattcctacttgtagatg

SEQ ID NO: 1314718 - DNA, 25 bp, Homo sapien
tccatattcctacttgtagatgaat

SEQ ID NO: 1314719 - DNA, 25 bp, Homo sapien
tctttccatattcctacttgtagat

SEQ ID NO: 1314720 - DNA, 25 bp, Homo sapien
agtctttccatattcctacttgtag

SEQ ID NO: 1314721 - DNA, 25 bp, Homo sapien
cagggcagttaatggagtcttggac

SEQ ID NO: 1314722 - DNA, 25 bp, Homo sapien
cactgttgacaagcgaggcaagggt

SEQ ID NO: 1314723 - DNA, 25 bp, Homo sapien
tcaaccgtgagataggagagtctct

SEQ ID NO: 1314724 - DNA, 25 bp, Homo sapien
taaggaactgccgactaggactgat

SEQ ID NO: 1314725 - DNA, 25 bp, Homo sapien
tgctgcagaagcaagactgtaggcc

SEQ ID NO: 1314726 - DNA, 25 bp, Homo sapien
ggcctgggcacctctttgcttgaaa

SEQ ID NO: 1314727 - DNA, 25 bp, Homo sapien
cactacctgaggagacaaagtgggt

SEQ ID NO: 1314728 - DNA, 25 bp, Homo sapien
ccaacacggttctttcatcaaggcg

SEQ ID NO: 1314729 - DNA, 25 bp, Homo sapien
ttcagacaactgaagatggtcccct

SEQ ID NO: 1314730 - DNA, 25 bp, Homo sapien
tcatccaaggaatggtatgatgtgg

SEQ ID NO: 1314731 - DNA, 25 bp, Homo sapien
tgtgggcataaaaccattcttcaga

SEQ ID NO: 1314732 - DNA, 25 bp, Homo sapien
caaggaatggtatgatgtgggcata

SEQ ID NO: 1314733 - DNA, 25 bp, Homo sapien
tccttggcttggccacttctgtaaa

SEQ ID NO: 1314734 - DNA, 25 bp, Homo sapien
ttggcttggccacttctgtaaaatc

SEQ ID NO: 1314735 - DNA, 25 bp, Homo sapien
cagggaggtctcctgtaagggaatg

SEQ ID NO: 1314736 - DNA, 25 bp, Homo sapien
agggaggtctcctgtaagggaatgg

SEQ ID NO: 1314737 - DNA, 25 bp, Homo sapien
ctccgaatctacagggtccacaatg

SEQ ID NO: 1314738 - DNA, 25 bp, Homo sapien
tccgaatctacagggtccacaatgg

SEQ ID NO: 1314739 - DNA, 25 bp, Homo sapien
ccgaatctacagggtccacaatgga

SEQ ID NO: 1314740 - DNA, 25 bp, Homo sapien
aagaagatgctgtggttgcgataca

SEQ ID NO: 1314741 - DNA, 25 bp, Homo sapien
catgccagtattcggcttgcacgag

SEQ ID NO: 1314742 - DNA, 25 bp, Homo sapien
ctcctttatggggtcatgccagtat

SEQ ID NO: 1314743 - DNA, 25 bp, Homo sapien
gctgtggttgcgatacacatcctcc

SEQ ID NO: 1314744 - DNA, 25 bp, Homo sapien
cagtgtttttcggatgaagtcacag

SEQ ID NO: 1314745 - DNA, 25 bp, Homo sapien
cgttcctgaacaactttggagtacg

SEQ ID NO: 1314746 - DNA, 25 bp, Homo sapien
cctgggcatcgagggagtccaaaaa

SEQ ID NO: 1314747 - DNA, 25 bp, Homo sapien
aactttggagtacgccccagcattc

SEQ ID NO: 1314748 - DNA, 25 bp, Homo sapien
gatcagattgatcatgggaggtgaa

SEQ ID NO: 1314749 - DNA, 25 bp, Homo sapien
aaccgagatcagattgatcatggga

SEQ ID NO: 1314750 - DNA, 25 bp, Homo sapien
tgtcccccaaccgagatcagattga

SEQ ID NO: 1314751 - DNA, 25 bp, Homo sapien
gatgttgtcccccaaccgagatcag

SEQ ID NO: 1314752 - DNA, 25 bp, Homo sapien
gtagccttgctgcaatttaggatcc

SEQ ID NO: 1314753 - DNA, 25 bp, Homo sapien
taggatccttagcaagtgcctgaca

SEQ ID NO: 1314754 - DNA, 25 bp, Homo sapien
ggaattgacattcaagaagaagctg

SEQ ID NO: 1314755 - DNA, 25 bp, Homo sapien
gaatcccatagcattgtagccttgc

SEQ ID NO: 1314756 - DNA, 25 bp, Homo sapien
aagataagacgtaaattccaggtat

SEQ ID NO: 1314757 - DNA, 25 bp, Homo sapien
tctctaaagataagacgtaaattcc

SEQ ID NO: 1314758 - DNA, 25 bp, Homo sapien
ctaaagataagacgtaaattccagg

SEQ ID NO: 1314759 - DNA, 25 bp, Homo sapien
tctaaagataagacgtaaattccag

SEQ ID NO: 1314760 - DNA, 25 bp, Homo sapien
ctatcatcccagcgctttggtaaga

SEQ ID NO: 1314761 - DNA, 25 bp, Homo sapien
catcccagcgctttggtaagacgag

SEQ ID NO: 1314762 - DNA, 25 bp, Homo sapien
cccagcgctttggtaagacgaggca

SEQ ID NO: 1314763 - DNA, 25 bp, Homo sapien
gcgctttggtaagacgaggcaggag

SEQ ID NO: 1314764 - DNA, 25 bp, Homo sapien
gatgctgcagcgcccgagaagcgca

SEQ ID NO: 1314765 - DNA, 25 bp, Homo sapien
gcaggtccatggcaggagagccaca

SEQ ID NO: 1314766 - DNA, 25 bp, Homo sapien
ggcgccggcgggtccagatgctgca

SEQ ID NO: 1314767 - DNA, 25 bp, Homo sapien
tgccagatcaccaacggcagcggcg

SEQ ID NO: 1314768 - DNA, 25 bp, Homo sapien
aaagtcgttgctcttcaccactgcc

SEQ ID NO: 1314769 - DNA, 25 bp, Homo sapien
ctaccctggagctttcagcgcgaca

SEQ ID NO: 1314770 - DNA, 25 bp, Homo sapien
gacactgaggcactgcgaattggca

SEQ ID NO: 1314771 - DNA, 25 bp, Homo sapien
cgccctctgcggtgaatcaaaataa

SEQ ID NO: 1314772 - DNA, 25 bp, Homo sapien
aaggcagcatctggttaaccaccct

SEQ ID NO: 1314773 - DNA, 25 bp, Homo sapien
tggcttttgtcttaggaacatcaag

SEQ ID NO: 1314774 - DNA, 25 bp, Homo sapien
gatgaagatcaaggagatccctttt

SEQ ID NO: 1314775 - DNA, 25 bp, Homo sapien
aatgagtcattcattgatttggctt

SEQ ID NO: 1314776 - DNA, 25 bp, Homo sapien
cagatgtggccagcaatgagtcatt

SEQ ID NO: 1314777 - DNA, 25 bp, Homo sapien
tataccttcataaaggatttctgaa

SEQ ID NO: 1314778 - DNA, 25 bp, Homo sapien
ataccttcataaaggatttctgaaa

SEQ ID NO: 1314779 - DNA, 25 bp, Homo sapien
ctataccttcataaaggatttctga

SEQ ID NO: 1314780 - DNA, 25 bp, Homo sapien
ttggaacaaacattccaagcaaata

SEQ ID NO: 1314781 - DNA, 25 bp, Homo sapien
tcttgtgagatcttgatgcttggaa

SEQ ID NO: 1314782 - DNA, 25 bp, Homo sapien
gtgagatcttgatgcttggaatgtt

SEQ ID NO: 1314783 - DNA, 25 bp, Homo sapien
tttggaacaaacattccaagcaaat

SEQ ID NO: 1314784 - DNA, 25 bp, Homo sapien
gacgtctcaatttgtgctttaaggg

SEQ ID NO: 1314785 - DNA, 25 bp, Homo sapien
cagaggttttccaggttccggatgc

SEQ ID NO: 1314786 - DNA, 25 bp, Homo sapien
taaggtattcgataacttatgggac

SEQ ID NO: 1314787 - DNA, 25 bp, Homo sapien
cagagaggcgcagcagaggttttcc

SEQ ID NO: 1314788 - DNA, 25 bp, Homo sapien
taacgttcaacgacaagaggattct

SEQ ID NO: 1314789 - DNA, 25 bp, Homo sapien
acgacaagaggattctcaacgtcca

SEQ ID NO: 1314790 - DNA, 25 bp, Homo sapien
tatgatcgactgcatgtaacagaga

SEQ ID NO: 1314791 - DNA, 25 bp, Homo sapien
gcatgtaacagagattctaacgttc

SEQ ID NO: 1314792 - DNA, 25 bp, Homo sapien
agttctccagcagttcgccgaggag

SEQ ID NO: 1314793 - DNA, 25 bp, Homo sapien
ttccacaagaaccacgaggacagag

SEQ ID NO: 1314794 - DNA, 25 bp, Homo sapien
cagcctctgcatcggagattcctgg

SEQ ID NO: 1314795 - DNA, 25 bp, Homo sapien
ccaaactggcattaactggcgagcc

SEQ ID NO: 1314796 - DNA, 25 bp, Homo sapien
ccaagagacccgacacttgcttcat

SEQ ID NO: 1314797 - DNA, 25 bp, Homo sapien
tccccaagagacccgacacttgctt

SEQ ID NO: 1314798 - DNA, 25 bp, Homo sapien
ttgagattgtgagaccccttgtccc

SEQ ID NO: 1314799 - DNA, 25 bp, Homo sapien
gggctttgagattgtgagacccctt

SEQ ID NO: 1314800 - DNA, 25 bp, Homo sapien
ctacacgtcggggagagagtctttg

SEQ ID NO: 1314801 - DNA, 25 bp, Homo sapien
tgggcgaggagtagtagcggccgca

SEQ ID NO: 1314802 - DNA, 25 bp, Homo sapien
cgaggagtagtagcggccgcagcgg

SEQ ID NO: 1314803 - DNA, 25 bp, Homo sapien
gtctttgggcgaggagtagtagcgg

SEQ ID NO: 1314804 - DNA, 25 bp, Homo sapien
ggacaaagtcgtgaaaatagatggc

SEQ ID NO: 1314805 - DNA, 25 bp, Homo sapien
aaagtcgtgaaaatagatggcatcc

SEQ ID NO: 1314806 - DNA, 25 bp, Homo sapien
gacaaagtcgtgaaaatagatggca

SEQ ID NO: 1314807 - DNA, 25 bp, Homo sapien
caaagtcgtgaaaatagatggcatc

SEQ ID NO: 1314808 - DNA, 25 bp, Homo sapien
taaatgtctcataggaactcacagg

SEQ ID NO: 1314809 - DNA, 25 bp, Homo sapien
tggagtactacaataggttccctgc

SEQ ID NO: 1314810 - DNA, 25 bp, Homo sapien
gatggccccacatcttcagctgaag

SEQ ID NO: 1314811 - DNA, 25 bp, Homo sapien
catggcagcaagagtgtaaaccaga

SEQ ID NO: 1314812 - DNA, 25 bp, Homo sapien
tctaccagggatgcttttcgctatg

SEQ ID NO: 1314813 - DNA, 25 bp, Homo sapien
tctacaggcatttctggctccgtga

SEQ ID NO: 1314814 - DNA, 25 bp, Homo sapien
gaagagtctgtcctttcgcccactg

SEQ ID NO: 1314815 - DNA, 25 bp, Homo sapien
gtcccttcagatcgcagttcaaatg

SEQ ID NO: 1314816 - DNA, 25 bp, Homo sapien
ctccgtgactcgccgcgcccccggg

SEQ ID NO: 1314817 - DNA, 25 bp, Homo sapien
cgtgactcgccgcgcccccgggccg

SEQ ID NO: 1314818 - DNA, 25 bp, Homo sapien
tccgtgactcgccgcgcccccgggc

SEQ ID NO: 1314819 - DNA, 25 bp, Homo sapien
acatctgcagttcatctttgtgttc

SEQ ID NO: 1314820 - DNA, 25 bp, Homo sapien
tggctgccaatcagggtctgttctc

SEQ ID NO: 1314821 - DNA, 25 bp, Homo sapien
tctcaggtgctagaagctacactca

SEQ ID NO: 1314822 - DNA, 25 bp, Homo sapien
gcaagggtgcaacaagttggtgctt

SEQ ID NO: 1314823 - DNA, 25 bp, Homo sapien
gctacactcagtctttacctctgtt

SEQ ID NO: 1314824 - DNA, 25 bp, Homo sapien
tctcagtttgcaagggattctacac

SEQ ID NO: 1314825 - DNA, 25 bp, Homo sapien
tctcagctcgtctgaaaggtaggga

SEQ ID NO: 1314826 - DNA, 25 bp, Homo sapien
gatacaggctaggtaatgcctctct

SEQ ID NO: 1314827 - DNA, 25 bp, Homo sapien
gaaccagatcctagctgatacaggc

SEQ ID NO: 1314828 - DNA, 25 bp, Homo sapien
gcaaaattggagtttgaatcgaatt

SEQ ID NO: 1314829 - DNA, 25 bp, Homo sapien
ccaactgacctaaatcttgaacagg

SEQ ID NO: 1314830 - DNA, 25 bp, Homo sapien
atgcaaaccaactgacctaaatctt

SEQ ID NO: 1314831 - DNA, 25 bp, Homo sapien
gacctaaatcttgaacaggaatgtg

SEQ ID NO: 1314832 - DNA, 25 bp, Homo sapien
gtaactttatggctctacgctggaa

SEQ ID NO: 1314833 - DNA, 25 bp, Homo sapien
ggtttctttccgagttgcatgccaa

SEQ ID NO: 1314834 - DNA, 25 bp, Homo sapien
catcagctgacaattcatgggccac

SEQ ID NO: 1314835 - DNA, 25 bp, Homo sapien
tactctcagaggcatttaggcaggg

SEQ ID NO: 1314836 - DNA, 25 bp, Homo sapien
tgaattccgaacaccccaatactgg

SEQ ID NO: 1314837 - DNA, 25 bp, Homo sapien
tccaagagagaaatggcgttgcgcc

SEQ ID NO: 1314838 - DNA, 25 bp, Homo sapien
ttgttccagggcactctcgcaggga

SEQ ID NO: 1314839 - DNA, 25 bp, Homo sapien
ttagaaagaggaggacttcgccgcg

SEQ ID NO: 1314840 - DNA, 25 bp, Homo sapien
gacactttctctaatatctcacaga

SEQ ID NO: 1314841 - DNA, 25 bp, Homo sapien
tatggttgccactgttcacataaat

SEQ ID NO: 1314842 - DNA, 25 bp, Homo sapien
agagtcattgtgtggccatttatgg

SEQ ID NO: 1314843 - DNA, 25 bp, Homo sapien
cacataaatatgacactgcacccag

SEQ ID NO: 1314844 - DNA, 25 bp, Homo sapien
gacaggcaaaagtctaggtaggaca

SEQ ID NO: 1314845 - DNA, 25 bp, Homo sapien
gcttagacaggaaagtgacatgatc

SEQ ID NO: 1314846 - DNA, 25 bp, Homo sapien
taggcaagaatcagtccacataggc

SEQ ID NO: 1314847 - DNA, 25 bp, Homo sapien
gataatggcctagacttttgacctg

SEQ ID NO: 1314848 - DNA, 25 bp, Homo sapien
cataaagtcttttgctccgctgaca

SEQ ID NO: 1314849 - DNA, 25 bp, Homo sapien
ttcccacgtggtagatatgatccca

SEQ ID NO: 1314850 - DNA, 25 bp, Homo sapien
tcctaaggctaaagaggagcagtcc

SEQ ID NO: 1314851 - DNA, 25 bp, Homo sapien
tccaaagtgggatcaactgtacgcc

SEQ ID NO: 1314852 - DNA, 25 bp, Homo sapien
cagtttgaccagaaacagctaggaa

SEQ ID NO: 1314853 - DNA, 25 bp, Homo sapien
taagaaacttgaccgagactgtatt

SEQ ID NO: 1314854 - DNA, 25 bp, Homo sapien
taacttgaacgatgtgtgccaggct

SEQ ID NO: 1314855 - DNA, 25 bp, Homo sapien
ggaccgccaatactcaggaagcaga

SEQ ID NO: 1314856 - DNA, 25 bp, Homo sapien
gaataaaactcggacactgggccat

SEQ ID NO: 1314857 - DNA, 25 bp, Homo sapien
ccagggagtcttacgtaggctacca

SEQ ID NO: 1314858 - DNA, 25 bp, Homo sapien
tacacgtgttagagggacagcatag

SEQ ID NO: 1314859 - DNA, 25 bp, Homo sapien
tatgtaatacctgagagcctgccca

SEQ ID NO: 1314860 - DNA, 25 bp, Homo sapien
tccaggatagagtaactccaatatc

SEQ ID NO: 1314861 - DNA, 25 bp, Homo sapien
gcttaagggtatagccgcctcaggg

SEQ ID NO: 1314862 - DNA, 25 bp, Homo sapien
tgatgctcgctggaaggaaagccgc

SEQ ID NO: 1314863 - DNA, 25 bp, Homo sapien
gcagcagtcacctggtaggtccaga

SEQ ID NO: 1314864 - DNA, 25 bp, Homo sapien
ggatcaggaactggcatagacctca

SEQ ID NO: 1314865 - DNA, 25 bp, Homo sapien
gatctccatccttgccgttgattgc

SEQ ID NO: 1314866 - DNA, 25 bp, Homo sapien
tcaaggccccttgatggatccaggc

SEQ ID NO: 1314867 - DNA, 25 bp, Homo sapien
ggcagaggcataggccgaagctcca

SEQ ID NO: 1314868 - DNA, 25 bp, Homo sapien
aagctccaaggcaggcggcaggttc

SEQ ID NO: 1314869 - DNA, 25 bp, Homo sapien
acttctcctggatcacccttctctc

SEQ ID NO: 1314870 - DNA, 25 bp, Homo sapien
tcctggatcacccttctctccacgt

SEQ ID NO: 1314871 - DNA, 25 bp, Homo sapien
tggatcacccttctctccacgtttt

SEQ ID NO: 1314872 - DNA, 25 bp, Homo sapien
gtgcccccgtcccacttctcctgga

SEQ ID NO: 1314873 - DNA, 25 bp, Homo sapien
atgccaggaacgccccgagggccag

SEQ ID NO: 1314874 - DNA, 25 bp, Homo sapien
ccttgggccccgtgttgccgatctg

SEQ ID NO: 1314875 - DNA, 25 bp, Homo sapien
gtgttgccgatctgacccacggctc

SEQ ID NO: 1314876 - DNA, 25 bp, Homo sapien
tgacccacggctcccacgatgccag

SEQ ID NO: 1314877 - DNA, 25 bp, Homo sapien
ccgcttggcactcacggcgacctct

SEQ ID NO: 1314878 - DNA, 25 bp, Homo sapien
cttcccgcttggcactcacggcgac

SEQ ID NO: 1314879 - DNA, 25 bp, Homo sapien
acccagggcttcccgcttggcactc

SEQ ID NO: 1314880 - DNA, 25 bp, Homo sapien
gcttggcactcacggcgacctctgc

SEQ ID NO: 1314881 - DNA, 25 bp, Homo sapien
cagcgccacatccacgatgtgctgg

SEQ ID NO: 1314882 - DNA, 25 bp, Homo sapien
gccacatccacgatgtgctggtcag

SEQ ID NO: 1314883 - DNA, 25 bp, Homo sapien
tcttcagcgccacatccacgatgtg

SEQ ID NO: 1314884 - DNA, 25 bp, Homo sapien
ccacgatgtgctggtcagtggcatc

SEQ ID NO: 1314885 - DNA, 25 bp, Homo sapien
tgaacccctggggcgcccgcatccc

SEQ ID NO: 1314886 - DNA, 25 bp, Homo sapien
ctcggttcccggccagtcctcgagg

SEQ ID NO: 1314887 - DNA, 25 bp, Homo sapien
gcctcggttcccggccagtcctcga

SEQ ID NO: 1314888 - DNA, 25 bp, Homo sapien
gccctgaacccctggggcgcccgca

SEQ ID NO: 1314889 - DNA, 25 bp, Homo sapien
ctgtcccttgggccccggctcgccg

SEQ ID NO: 1314890 - DNA, 25 bp, Homo sapien
ttgggccccggctcgccggactcgc

SEQ ID NO: 1314891 - DNA, 25 bp, Homo sapien
tgggccccggctcgccggactcgcc

SEQ ID NO: 1314892 - DNA, 25 bp, Homo sapien
cttgggccccggctcgccggactcg

SEQ ID NO: 1314893 - DNA, 25 bp, Homo sapien
cttctcgcctttctctccggggagg

SEQ ID NO: 1314894 - DNA, 25 bp, Homo sapien
ctcgcctttctctccggggaggccg

SEQ ID NO: 1314895 - DNA, 25 bp, Homo sapien
ttctcgcctttctctccggggaggc

SEQ ID NO: 1314896 - DNA, 25 bp, Homo sapien
tctcgcctttctctccggggaggcc

SEQ ID NO: 1314897 - DNA, 25 bp, Homo sapien
cctttgacgcctggcaagccttggg

SEQ ID NO: 1314898 - DNA, 25 bp, Homo sapien
cttgtctcctttgacgcctggcaag

SEQ ID NO: 1314899 - DNA, 25 bp, Homo sapien
tgtctcctttgacgcctggcaagcc

SEQ ID NO: 1314900 - DNA, 25 bp, Homo sapien
ctcctttgacgcctggcaagccttg

SEQ ID NO: 1314901 - DNA, 25 bp, Homo sapien
tgccttccctgagggcctggttgcc

SEQ ID NO: 1314902 - DNA, 25 bp, Homo sapien
actggacccctctcgccttggtcac

SEQ ID NO: 1314903 - DNA, 25 bp, Homo sapien
cactggacccctctcgccttggtca

SEQ ID NO: 1314904 - DNA, 25 bp, Homo sapien
gagggcctggttgccccactggacc

SEQ ID NO: 1314905 - DNA, 25 bp, Homo sapien
ggctgcacggagcagatgctgtatc

SEQ ID NO: 1314906 - DNA, 25 bp, Homo sapien
tgcacggagcagatgctgtatccag

SEQ ID NO: 1314907 - DNA, 25 bp, Homo sapien
cacggagcagatgctgtatccagca

SEQ ID NO: 1314908 - DNA, 25 bp, Homo sapien
agatgctgtatccagcagtgccagc

SEQ ID NO: 1314909 - DNA, 25 bp, Homo sapien
cccatgatgccctggggaccaattt

SEQ ID NO: 1314910 - DNA, 25 bp, Homo sapien
ctgtcccatgatgccctggggacca

SEQ ID NO: 1314911 - DNA, 25 bp, Homo sapien
ctggggaccaatttctcctcgaggc

SEQ ID NO: 1314912 - DNA, 25 bp, Homo sapien
ggaccaatttctcctcgaggccctg

SEQ ID NO: 1314913 - DNA, 25 bp, Homo sapien
cagctaatttgcttcatcagggaag

SEQ ID NO: 1314914 - DNA, 25 bp, Homo sapien
agctaatttgcttcatcagggaagg

SEQ ID NO: 1314915 - DNA, 25 bp, Homo sapien
tcagctaatttgcttcatcagggaa

SEQ ID NO: 1314916 - DNA, 25 bp, Homo sapien
gggaccagagaatccaggaaggccc

SEQ ID NO: 1314917 - DNA, 25 bp, Homo sapien
tttcccagggggaccagagaatcca

SEQ ID NO: 1314918 - DNA, 25 bp, Homo sapien
ctctttcccagggggaccagagaat

SEQ ID NO: 1314919 - DNA, 25 bp, Homo sapien
cccagggggaccagagaatccagga

SEQ ID NO: 1314920 - DNA, 25 bp, Homo sapien
tggtctccagggcctccttttgtcc

SEQ ID NO: 1314921 - DNA, 25 bp, Homo sapien
tctccagggcctccttttgtcccag

SEQ ID NO: 1314922 - DNA, 25 bp, Homo sapien
agggcctccttttgtcccaggctgg

SEQ ID NO: 1314923 - DNA, 25 bp, Homo sapien
tccagggcctccttttgtcccaggc

SEQ ID NO: 1314924 - DNA, 25 bp, Homo sapien
ttctgccctggcatgagggagcccc

SEQ ID NO: 1314925 - DNA, 25 bp, Homo sapien
tgctttgcttcccatccccaatcca

SEQ ID NO: 1314926 - DNA, 25 bp, Homo sapien
ggagccccatgcacctgctgctttg

SEQ ID NO: 1314927 - DNA, 25 bp, Homo sapien
ctgcagaaagaagttgaagtcagtt

SEQ ID NO: 1314928 - DNA, 25 bp, Homo sapien
tggacttccgggctgtcccgcctgt

SEQ ID NO: 1314929 - DNA, 25 bp, Homo sapien
ggacttccgggctgtcccgcctgtc

SEQ ID NO: 1314930 - DNA, 25 bp, Homo sapien
ctggacttccgggctgtcccgcctg

SEQ ID NO: 1314931 - DNA, 25 bp, Homo sapien
ttcatgccaggcgtgcctggggtcc

SEQ ID NO: 1314932 - DNA, 25 bp, Homo sapien
cttcatgccaggcgtgcctggggtc

SEQ ID NO: 1314933 - DNA, 25 bp, Homo sapien
gctcctttcgggcctgtgatcccct

SEQ ID NO: 1314934 - DNA, 25 bp, Homo sapien
tgatcccctggggtccacgaatacc

SEQ ID NO: 1314935 - DNA, 25 bp, Homo sapien
cctttcgggcctgtgatcccctggg

SEQ ID NO: 1314936 - DNA, 25 bp, Homo sapien
atcccctggggtccacgaatacctg

SEQ ID NO: 1314937 - DNA, 25 bp, Homo sapien
cagtggcctctaggtcccagagttc

SEQ ID NO: 1314938 - DNA, 25 bp, Homo sapien
agagccttgggagtacccttcctgc

SEQ ID NO: 1314939 - DNA, 25 bp, Homo sapien
cctcaggatgttgggcccctgtctg

SEQ ID NO: 1314940 - DNA, 25 bp, Homo sapien
cactgagaacagtggcctctaggtc

SEQ ID NO: 1314941 - DNA, 25 bp, Homo sapien
tcgtcacccttctccccagctcggc

SEQ ID NO: 1314942 - DNA, 25 bp, Homo sapien
ccagctcggcctggcggtcccctag

SEQ ID NO: 1314943 - DNA, 25 bp, Homo sapien
ctcgtcacccttctccccagctcgg

SEQ ID NO: 1314944 - DNA, 25 bp, Homo sapien
tggcggtcccctaggaccttcctca

SEQ ID NO: 1314945 - DNA, 25 bp, Homo sapien
agtggcaccgatagcgcccaccatg

SEQ ID NO: 1314946 - DNA, 25 bp, Homo sapien
cggtggcccagtggcaccgatagcg

SEQ ID NO: 1314947 - DNA, 25 bp, Homo sapien
cccaccatgcctttatatccatgag

SEQ ID NO: 1314948 - DNA, 25 bp, Homo sapien
cgatagcgcccaccatgcctttata

SEQ ID NO: 1314949 - DNA, 25 bp, Homo sapien
tgccatgcctgggtagcccctgatg

SEQ ID NO: 1314950 - DNA, 25 bp, Homo sapien
atgcctgggtagcccctgatgccct

SEQ ID NO: 1314951 - DNA, 25 bp, Homo sapien
cgtctctcccttgggccctgccatg

SEQ ID NO: 1314952 - DNA, 25 bp, Homo sapien
cctgggtagcccctgatgccctggg

SEQ ID NO: 1314953 - DNA, 25 bp, Homo sapien
tccagggatgccttgctctccagag

SEQ ID NO: 1314954 - DNA, 25 bp, Homo sapien
agaggcacccacatctcccttggga

SEQ ID NO: 1314955 - DNA, 25 bp, Homo sapien
ttgctctccagaggcacccacatct

SEQ ID NO: 1314956 - DNA, 25 bp, Homo sapien
cggtggtccagggatgccttgctct

SEQ ID NO: 1314957 - DNA, 25 bp, Homo sapien
cggcttcccctggtggccaggatca

SEQ ID NO: 1314958 - DNA, 25 bp, Homo sapien
ggatcacccagaatcccgcgtttgc

SEQ ID NO: 1314959 - DNA, 25 bp, Homo sapien
agaatcccgcgtttgcccgcatgcc

SEQ ID NO: 1314960 - DNA, 25 bp, Homo sapien
caggatcacccagaatcccgcgttt

SEQ ID NO: 1314961 - DNA, 25 bp, Homo sapien
cagccctgggggacctttcattccg

SEQ ID NO: 1314962 - DNA, 25 bp, Homo sapien
acctttcattccgggtggacagttg

SEQ ID NO: 1314963 - DNA, 25 bp, Homo sapien
cagaccctggatggttcccgggcga

SEQ ID NO: 1314964 - DNA, 25 bp, Homo sapien
aggaaatccgcactgccttccagac

SEQ ID NO: 1314965 - DNA, 25 bp, Homo sapien
caggaaatccgcactgccttccaga

SEQ ID NO: 1314966 - DNA, 25 bp, Homo sapien
cttccagaccctggatggttcccgg

SEQ ID NO: 1314967 - DNA, 25 bp, Homo sapien
ggggccccgatggtccatctggtcc

SEQ ID NO: 1314968 - DNA, 25 bp, Homo sapien
ccaccctgtcttcccggtcactttg

SEQ ID NO: 1314969 - DNA, 25 bp, Homo sapien
cctgtcttcccggtcactttgtgag

SEQ ID NO: 1314970 - DNA, 25 bp, Homo sapien
tgtcttcccggtcactttgtgagat

SEQ ID NO: 1314971 - DNA, 25 bp, Homo sapien
cttcccggtcactttgtgagatcca

SEQ ID NO: 1314972 - DNA, 25 bp, Homo sapien
gggcctcggattccaatctcaccag

SEQ ID NO: 1314973 - DNA, 25 bp, Homo sapien
ggattccaatctcaccagggaggcc

SEQ ID NO: 1314974 - DNA, 25 bp, Homo sapien
caccagggaggccaacaggtccagg

SEQ ID NO: 1314975 - DNA, 25 bp, Homo sapien
tcggattccaatctcaccagggagg

SEQ ID NO: 1314976 - DNA, 25 bp, Homo sapien
aaaggtagagacaggcacccaaagc

SEQ ID NO: 1314977 - DNA, 25 bp, Homo sapien
gaggctttaaggaccagagaattgc

SEQ ID NO: 1314978 - DNA, 25 bp, Homo sapien
ggtcagataccctgggcacaaaggt

SEQ ID NO: 1314979 - DNA, 25 bp, Homo sapien
catggtggccattccctcgaagcct

SEQ ID NO: 1314980 - DNA, 25 bp, Homo sapien
cggaaggccaggaggaccaggaagc

SEQ ID NO: 1314981 - DNA, 25 bp, Homo sapien
aggaggaccaggaagcccgggctgg

SEQ ID NO: 1314982 - DNA, 25 bp, Homo sapien
gaggaccaggaagcccgggctggcc

SEQ ID NO: 1314983 - DNA, 25 bp, Homo sapien
ccaggaggaccaggaagcccgggct

SEQ ID NO: 1314984 - DNA, 25 bp, Homo sapien
cttgactccagggatccccatgggg

SEQ ID NO: 1314985 - DNA, 25 bp, Homo sapien
caggctcccccttggctccagttaa

SEQ ID NO: 1314986 - DNA, 25 bp, Homo sapien
gactccagggatccccatggggcca

SEQ ID NO: 1314987 - DNA, 25 bp, Homo sapien
ccaggctcccccttggctccagtta

SEQ ID NO: 1314988 - DNA, 25 bp, Homo sapien
tggtcacacctcatgagccagcagg

SEQ ID NO: 1314989 - DNA, 25 bp, Homo sapien
caatatgccttgtaatcgttgcagg

SEQ ID NO: 1314990 - DNA, 25 bp, Homo sapien
tgatgcaacatagaaggcaatatgc

SEQ ID NO: 1314991 - DNA, 25 bp, Homo sapien
aggccattggcaactttttctgagc

SEQ ID NO: 1314992 - DNA, 25 bp, Homo sapien
atcaatcccgggcttcccgtctggc

SEQ ID NO: 1314993 - DNA, 25 bp, Homo sapien
gctttgccaggctcgcccttgggtc

SEQ ID NO: 1314994 - DNA, 25 bp, Homo sapien
atctggcccagctttgccaggctcg

SEQ ID NO: 1314995 - DNA, 25 bp, Homo sapien
gggcttcccgtctggcccatctggc

SEQ ID NO: 1314996 - DNA, 25 bp, Homo sapien
ccagcttttccagggggcccattgt

SEQ ID NO: 1314997 - DNA, 25 bp, Homo sapien
gcttttccagggggcccattgtcac

SEQ ID NO: 1314998 - DNA, 25 bp, Homo sapien
agcttttccagggggcccattgtca

SEQ ID NO: 1314999 - DNA, 25 bp, Homo sapien
gccagcttttccagggggcccattg

SEQ ID NO: 1315000 - DNA, 25 bp, Homo sapien
gcatgagaataaccctggccgggct

SEQ ID NO: 1315001 - DNA, 25 bp, Homo sapien
cctaagccttgcaatctttgggaaa

SEQ ID NO: 1315002 - DNA, 25 bp, Homo sapien
tcatgaggtgccagctgtgagaccc

SEQ ID NO: 1315003 - DNA, 25 bp, Homo sapien
aagctgatgcctcttggatttgggc

SEQ ID NO: 1315004 - DNA, 25 bp, Homo sapien
gagaaacgtgaagggggatgagcga

SEQ ID NO: 1315005 - DNA, 25 bp, Homo sapien
agggggatgagcgagttgggcagca

SEQ ID NO: 1315006 - DNA, 25 bp, Homo sapien
aacgtgaagggggatgagcgagttg

SEQ ID NO: 1315007 - DNA, 25 bp, Homo sapien
tttagagaaacgtgaagggggatga

SEQ ID NO: 1315008 - DNA, 25 bp, Homo sapien
aacaaacggcgtccttgtggtgcgg

SEQ ID NO: 1315009 - DNA, 25 bp, Homo sapien
tcccgccctggtctcaggttagaga

SEQ ID NO: 1315010 - DNA, 25 bp, Homo sapien
tattggcgacgaggggcactacatc

SEQ ID NO: 1315011 - DNA, 25 bp, Homo sapien
ggccggcgccgcctattggcgacga

SEQ ID NO: 1315012 - DNA, 25 bp, Homo sapien
cgatgccgtcggatccaggcactcc

SEQ ID NO: 1315013 - DNA, 25 bp, Homo sapien
tcgatgccgtcggatccaggcactc

SEQ ID NO: 1315014 - DNA, 25 bp, Homo sapien
ctgcggggggaggccgtagcggcgg

SEQ ID NO: 1315015 - DNA, 25 bp, Homo sapien
gctgcggggggaggccgtagcggcg

SEQ ID NO: 1315016 - DNA, 25 bp, Homo sapien
atctgcgccagagcgagcactacca

SEQ ID NO: 1315017 - DNA, 25 bp, Homo sapien
tccgcgcacgcaccgacggcagagt

SEQ ID NO: 1315018 - DNA, 25 bp, Homo sapien
gacggcagagtctcccggcgctcct

SEQ ID NO: 1315019 - DNA, 25 bp, Homo sapien
gggacgggtgcgtgtccgcgcacgc

SEQ ID NO: 1315020 - DNA, 25 bp, Homo sapien
ggctggcggcgagaccaagggggac

SEQ ID NO: 1315021 - DNA, 25 bp, Homo sapien
ggggctcctgaatatgcggggggcg

SEQ ID NO: 1315022 - DNA, 25 bp, Homo sapien
gggctcctgaatatgcggggggcgg

SEQ ID NO: 1315023 - DNA, 25 bp, Homo sapien
ggtgcgggtcggagatgatggtcca

SEQ ID NO: 1315024 - DNA, 25 bp, Homo sapien
tttgtgagaaggcataaggccgtct

SEQ ID NO: 1315025 - DNA, 25 bp, Homo sapien
ataaggccgtctgaggttcccctcg

SEQ ID NO: 1315026 - DNA, 25 bp, Homo sapien
aggcataaggccgtctgaggttccc

SEQ ID NO: 1315027 - DNA, 25 bp, Homo sapien
gaatagtttccagcagctcaggctc

SEQ ID NO: 1315028 - DNA, 25 bp, Homo sapien
atgccatgaattcatagggaatagt

SEQ ID NO: 1315029 - DNA, 25 bp, Homo sapien
ccatgaattcatagggaatagtttc

SEQ ID NO: 1315030 - DNA, 25 bp, Homo sapien
aatagtttccagcagctcaggctcc

SEQ ID NO: 1315031 - DNA, 25 bp, Homo sapien
tggtgcttccgttgaacccaggtaa

SEQ ID NO: 1315032 - DNA, 25 bp, Homo sapien
gctggtgcttccgttgaacccaggt

SEQ ID NO: 1315033 - DNA, 25 bp, Homo sapien
gtggagcaggctggtgcttccgttg

SEQ ID NO: 1315034 - DNA, 25 bp, Homo sapien
gcaggctggtgcttccgttgaaccc

SEQ ID NO: 1315035 - DNA, 25 bp, Homo sapien
tatagattcgcatatacatggccaa

SEQ ID NO: 1315036 - DNA, 25 bp, Homo sapien
aggcctagagaacatgtatcgggtg

SEQ ID NO: 1315037 - DNA, 25 bp, Homo sapien
ttcttatagattcgcatatacatgg

SEQ ID NO: 1315038 - DNA, 25 bp, Homo sapien
aaggcctagagaacatgtatcgggt

SEQ ID NO: 1315039 - DNA, 25 bp, Homo sapien
ctacagccacagcatagggttgtgc

SEQ ID NO: 1315040 - DNA, 25 bp, Homo sapien
cagcatagggttgtgcattttagga

SEQ ID NO: 1315041 - DNA, 25 bp, Homo sapien
cacagcatagggttgtgcattttag

SEQ ID NO: 1315042 - DNA, 25 bp, Homo sapien
cagccacagcatagggttgtgcatt

SEQ ID NO: 1315043 - DNA, 25 bp, Homo sapien
tgagcagtaaatcaggctggctggt

SEQ ID NO: 1315044 - DNA, 25 bp, Homo sapien
gttgctcctttagaccgactccagg

SEQ ID NO: 1315045 - DNA, 25 bp, Homo sapien
tcccacctccgataggaaggagagg

SEQ ID NO: 1315046 - DNA, 25 bp, Homo sapien
tgctctggcggcacctagtggtcct

SEQ ID NO: 1315047 - DNA, 25 bp, Homo sapien
tattcaacaacattaggtattataa

SEQ ID NO: 1315048 - DNA, 25 bp, Homo sapien
gccacttggcctggcttaaaaatct

SEQ ID NO: 1315049 - DNA, 25 bp, Homo sapien
acttcttttgctggtttgataagtt

SEQ ID NO: 1315050 - DNA, 25 bp, Homo sapien
gcatagttccctgtatattcaacaa

SEQ ID NO: 1315051 - DNA, 25 bp, Homo sapien
ggaacgaacaattccagacgcgctg

SEQ ID NO: 1315052 - DNA, 25 bp, Homo sapien
tcctgtagaataagcccaactgcct

SEQ ID NO: 1315053 - DNA, 25 bp, Homo sapien
gggcctagcaataataccacagata

SEQ ID NO: 1315054 - DNA, 25 bp, Homo sapien
tactgcaaggttcaaatggcatggc

SEQ ID NO: 1315055 - DNA, 25 bp, Homo sapien
taccctttagaggactggtggtgaa

SEQ ID NO: 1315056 - DNA, 25 bp, Homo sapien
tactaggcttaggaaattcaaggca

SEQ ID NO: 1315057 - DNA, 25 bp, Homo sapien
cccaggccttattccactgactgtt

SEQ ID NO: 1315058 - DNA, 25 bp, Homo sapien
ctttccatcagattcatgaaggacc

SEQ ID NO: 1315059 - DNA, 25 bp, Homo sapien
ccttgtgcaaacgagcaagcctgct

SEQ ID NO: 1315060 - DNA, 25 bp, Homo sapien
ttcagtaggatctggctccgtggct

SEQ ID NO: 1315061 - DNA, 25 bp, Homo sapien
tgggaatgcagagcttaacgtgtac

SEQ ID NO: 1315062 - DNA, 25 bp, Homo sapien
gtatgagtgtgtgttccgcctccca

SEQ ID NO: 1315063 - DNA, 25 bp, Homo sapien
gactttatgaagatcccacacacag

SEQ ID NO: 1315064 - DNA, 25 bp, Homo sapien
gaatcatagctgatatactttaaga

SEQ ID NO: 1315065 - DNA, 25 bp, Homo sapien
actttcctacctacattttatatgt

SEQ ID NO: 1315066 - DNA, 25 bp, Homo sapien
ccaatatttgagaatcgtatacctt

SEQ ID NO: 1315067 - DNA, 25 bp, Homo sapien
tttcttttctgtgcaagtggaccaa

SEQ ID NO: 1315068 - DNA, 25 bp, Homo sapien
aggcacccactattacacctggata

SEQ ID NO: 1315069 - DNA, 25 bp, Homo sapien
caggcacccactattacacctggat

SEQ ID NO: 1315070 - DNA, 25 bp, Homo sapien
gaactacatcatccctacaaagtgg

SEQ ID NO: 1315071 - DNA, 25 bp, Homo sapien
cagagtgataaagagcttgagctca

SEQ ID NO: 1315072 - DNA, 25 bp, Homo sapien
taataggcactacacaacaggttta

SEQ ID NO: 1315073 - DNA, 25 bp, Homo sapien
cacgtgtgctaatgcctgtagggaa

SEQ ID NO: 1315074 - DNA, 25 bp, Homo sapien
cggaaaggctgaaggaggtctccca

SEQ ID NO: 1315075 - DNA, 25 bp, Homo sapien
tcaccggaaaggctgaaggaggtct

SEQ ID NO: 1315076 - DNA, 25 bp, Homo sapien
caccggaaaggctgaaggaggtctc

SEQ ID NO: 1315077 - DNA, 25 bp, Homo sapien
aaggctgaaggaggtctcccaagga

SEQ ID NO: 1315078 - DNA, 25 bp, Homo sapien
cgcgcgctgcttcccgggagagggc

SEQ ID NO: 1315079 - DNA, 25 bp, Homo sapien
ccagcttccgggttcgagggcgcgc

SEQ ID NO: 1315080 - DNA, 25 bp, Homo sapien
gagagggcgggctccgtggcagccc

SEQ ID NO: 1315081 - DNA, 25 bp, Homo sapien
gcgctcgggcggcttccagcttccg

SEQ ID NO: 1315082 - DNA, 25 bp, Homo sapien
gggcttccgaaggaagccgacctca

SEQ ID NO: 1315083 - DNA, 25 bp, Homo sapien
aacgctggacgcttcttggagaatg

SEQ ID NO: 1315084 - DNA, 25 bp, Homo sapien
tgggaatgtggagcagaccctcgtc

SEQ ID NO: 1315085 - DNA, 25 bp, Homo sapien
cccttgatgggaatgtggagcagac

SEQ ID NO: 1315086 - DNA, 25 bp, Homo sapien
ctgggtccaaggccgatgtggtgag

SEQ ID NO: 1315087 - DNA, 25 bp, Homo sapien
ccgatgtggtgagtaggagtctgtg

SEQ ID NO: 1315088 - DNA, 25 bp, Homo sapien
tctttgagtccgagggtggcatgtc

SEQ ID NO: 1315089 - DNA, 25 bp, Homo sapien
cgagggtggcatgtctgggagcact

SEQ ID NO: 1315090 - DNA, 25 bp, Homo sapien
taaagtcacatcagtctctaggaac

SEQ ID NO: 1315091 - DNA, 25 bp, Homo sapien
gtggacaagtccagtaaggcaggca

SEQ ID NO: 1315092 - DNA, 25 bp, Homo sapien
tgattggaatctgagcaacacccca

SEQ ID NO: 1315093 - DNA, 25 bp, Homo sapien
gcaacatccaaagaaggccgtggag

SEQ ID NO: 1315094 - DNA, 25 bp, Homo sapien
tcaaagcagttacaccaggttattc

SEQ ID NO: 1315095 - DNA, 25 bp, Homo sapien
aatgtttactctaggtcagtggccc

SEQ ID NO: 1315096 - DNA, 25 bp, Homo sapien
tacctgtttatatcccttgccaatg

SEQ ID NO: 1315097 - DNA, 25 bp, Homo sapien
agtgtttctctaagatagctggtag

SEQ ID NO: 1315098 - DNA, 25 bp, Homo sapien
tagcttgacactccctcatgctcgg

SEQ ID NO: 1315099 - DNA, 25 bp, Homo sapien
caaagagttccattgatgatcccgt

SEQ ID NO: 1315100 - DNA, 25 bp, Homo sapien
gctattcaagaccagaatcagggac

SEQ ID NO: 1315101 - DNA, 25 bp, Homo sapien
tagggagggatgcataaatggcttc

SEQ ID NO: 1315102 - DNA, 25 bp, Homo sapien
tcagcatcatagaactcacactggg

SEQ ID NO: 1315103 - DNA, 25 bp, Homo sapien
cattagcttggttcaacatttgagg

SEQ ID NO: 1315104 - DNA, 25 bp, Homo sapien
aaatgtcagaaagctttcagccaga

SEQ ID NO: 1315105 - DNA, 25 bp, Homo sapien
cagacatcgctcatcacttaatcag

SEQ ID NO: 1315106 - DNA, 25 bp, Homo sapien
tgttgagttaaccacgcctggcctc

SEQ ID NO: 1315107 - DNA, 25 bp, Homo sapien
acatctgcatgttctttctgagaca

SEQ ID NO: 1315108 - DNA, 25 bp, Homo sapien
cagaaatggccacctcctatacaaa

SEQ ID NO: 1315109 - DNA, 25 bp, Homo sapien
agcagaaatggccacctcctataca

SEQ ID NO: 1315110 - DNA, 25 bp, Homo sapien
atttattttcccaccggcaagatat

SEQ ID NO: 1315111 - DNA, 25 bp, Homo sapien
tcccaccggcaagatatgtaactgt

SEQ ID NO: 1315112 - DNA, 25 bp, Homo sapien
cttcatagaggtttggacgtattta

SEQ ID NO: 1315113 - DNA, 25 bp, Homo sapien
tattggcaaatggaccttcatagag

SEQ ID NO: 1315114 - DNA, 25 bp, Homo sapien
taaatcaactgtaggcagagatgtc

SEQ ID NO: 1315115 - DNA, 25 bp, Homo sapien
taaggattcttattggcccagctag

SEQ ID NO: 1315116 - DNA, 25 bp, Homo sapien
taggtcaggtgccaacccttaaatc

SEQ ID NO: 1315117 - DNA, 25 bp, Homo sapien
caatgccagctcatgggatcaggat

SEQ ID NO: 1315118 - DNA, 25 bp, Homo sapien
tggtatagagcatctcctatttgtc

SEQ ID NO: 1315119 - DNA, 25 bp, Homo sapien
aaatttcttagtacagaccacttgg

SEQ ID NO: 1315120 - DNA, 25 bp, Homo sapien
tgcttcagctataaagatcttatgg

SEQ ID NO: 1315121 - DNA, 25 bp, Homo sapien
cctatttgtctagaagtggctccca

SEQ ID NO: 1315122 - DNA, 25 bp, Homo sapien
cctggcattcagtttacatctcaag

SEQ ID NO: 1315123 - DNA, 25 bp, Homo sapien
cacatatcatggaagaggtacctgg

SEQ ID NO: 1315124 - DNA, 25 bp, Homo sapien
atttgaggagtggtccatgtgtgaa

SEQ ID NO: 1315125 - DNA, 25 bp, Homo sapien
catctcaagtaagaaaggttatgtt

SEQ ID NO: 1315126 - DNA, 25 bp, Homo sapien
aaaattttcccaactgacgcaccag

SEQ ID NO: 1315127 - DNA, 25 bp, Homo sapien
gacactcaggagacctataattgat

SEQ ID NO: 1315128 - DNA, 25 bp, Homo sapien
tggcctcaacttacatatttctaag

SEQ ID NO: 1315129 - DNA, 25 bp, Homo sapien
taatattatctaaaacacaagtcac

SEQ ID NO: 1315130 - DNA, 25 bp, Homo sapien
catttaggtcttaatccagctacaa

SEQ ID NO: 1315131 - DNA, 25 bp, Homo sapien
ttacctattctgaagtccaaagata

SEQ ID NO: 1315132 - DNA, 25 bp, Homo sapien
tgaaatgagagatagaggtcctgtt

SEQ ID NO: 1315133 - DNA, 25 bp, Homo sapien
tcctatattatattctgaagacttt

SEQ ID NO: 1315134 - DNA, 25 bp, Homo sapien
caaaacctgctctcgcataagcaca

SEQ ID NO: 1315135 - DNA, 25 bp, Homo sapien
aaaacctgctctcgcataagcacac

SEQ ID NO: 1315136 - DNA, 25 bp, Homo sapien
ctttagtgagctcccaaaacctgct

SEQ ID NO: 1315137 - DNA, 25 bp, Homo sapien
ctgctttagtgagctcccaaaacct

SEQ ID NO: 1315138 - DNA, 25 bp, Homo sapien
tcagacttgagtgactcagagttcc

SEQ ID NO: 1315139 - DNA, 25 bp, Homo sapien
gttctcagacttgagtgactcagag

SEQ ID NO: 1315140 - DNA, 25 bp, Homo sapien
tatgcagggcccttctagcccaatc

SEQ ID NO: 1315141 - DNA, 25 bp, Homo sapien
ttctttaacatgttatgcagggccc

SEQ ID NO: 1315142 - DNA, 25 bp, Homo sapien
gcatatgggaaggagcttcctggtt

SEQ ID NO: 1315143 - DNA, 25 bp, Homo sapien
gagaactagaacttcatgatcttgt

SEQ ID NO: 1315144 - DNA, 25 bp, Homo sapien
tgtgactgtcccagtcaccactaaa

SEQ ID NO: 1315145 - DNA, 25 bp, Homo sapien
tggtgccagcatacacctagctaga

SEQ ID NO: 1315146 - DNA, 25 bp, Homo sapien
gctagcctaatccaccacacaaagt

SEQ ID NO: 1315147 - DNA, 25 bp, Homo sapien
gactgttttcaagtcagcctataca

SEQ ID NO: 1315148 - DNA, 25 bp, Homo sapien
tctttgatgccatggtacaaggaaa

SEQ ID NO: 1315149 - DNA, 25 bp, Homo sapien
gaaaagtgacccctgctagcctaat

SEQ ID NO: 1315150 - DNA, 25 bp, Homo sapien
tgtagccttcaaagagaaggaggtg

SEQ ID NO: 1315151 - DNA, 25 bp, Homo sapien
gaagtctttgggtgacctcatggaa

SEQ ID NO: 1315152 - DNA, 25 bp, Homo sapien
tatatggcctactggatgggccacc

SEQ ID NO: 1315153 - DNA, 25 bp, Homo sapien
tatccaccaagagactgccactgtg

SEQ ID NO: 1315154 - DNA, 25 bp, Homo sapien
tagttgtgtacgtgttattccaagc

SEQ ID NO: 1315155 - DNA, 25 bp, Homo sapien
gggttatactgtccctggagcttca

SEQ ID NO: 1315156 - DNA, 25 bp, Homo sapien
ggagcttcatcatgattgcctgaga

SEQ ID NO: 1315157 - DNA, 25 bp, Homo sapien
tgagaagacagatgctcatcatggc

SEQ ID NO: 1315158 - DNA, 25 bp, Homo sapien
cttgtgacactactggagaatttgc

SEQ ID NO: 1315159 - DNA, 25 bp, Homo sapien
tagagtttctgtattaactggaaca

SEQ ID NO: 1315160 - DNA, 25 bp, Homo sapien
tacatgagctggtaaatcctggaca

SEQ ID NO: 1315161 - DNA, 25 bp, Homo sapien
gaagataaggacttgcttgtgacac

SEQ ID NO: 1315162 - DNA, 25 bp, Homo sapien
ccttatgggaaatgtggtctccgac

SEQ ID NO: 1315163 - DNA, 25 bp, Homo sapien
tagcaatagagataccaacccggga

SEQ ID NO: 1315164 - DNA, 25 bp, Homo sapien
tacttccgcacacgcgtagtaggac

SEQ ID NO: 1315165 - DNA, 25 bp, Homo sapien
gtcttccggaaacgagctccactgg

SEQ ID NO: 1315166 - DNA, 25 bp, Homo sapien
cagtaagtattcagttgaggaaaag

SEQ ID NO: 1315167 - DNA, 25 bp, Homo sapien
catttgctggcacttttaatgggca

SEQ ID NO: 1315168 - DNA, 25 bp, Homo sapien
gaaaggcacttgtattctgtattac

SEQ ID NO: 1315169 - DNA, 25 bp, Homo sapien
tctgaatctgagtctcctttaatta

SEQ ID NO: 1315170 - DNA, 25 bp, Homo sapien
tgtttagccccgaagatgcctggaa

SEQ ID NO: 1315171 - DNA, 25 bp, Homo sapien
gaattttccgtatgaacagcatagg

SEQ ID NO: 1315172 - DNA, 25 bp, Homo sapien
tcttgagtggtgacaaaacttagac

SEQ ID NO: 1315173 - DNA, 25 bp, Homo sapien
tgtcttcaaaatcagtatgccatcc

SEQ ID NO: 1315174 - DNA, 25 bp, Homo sapien
cacacaggttgcattgtgatgccaa

SEQ ID NO: 1315175 - DNA, 25 bp, Homo sapien
caagatttccttgaggcacacacag

SEQ ID NO: 1315176 - DNA, 25 bp, Homo sapien
caaatagcaaggataaaacgtggtc

SEQ ID NO: 1315177 - DNA, 25 bp, Homo sapien
gtttctcgaaggcagcaaatagcaa

SEQ ID NO: 1315178 - DNA, 25 bp, Homo sapien
ctgcagggttttggcaggtttggca

SEQ ID NO: 1315179 - DNA, 25 bp, Homo sapien
gcagggttttggcaggtttggcaga

SEQ ID NO: 1315180 - DNA, 25 bp, Homo sapien
gggttttggcaggtttggcagattc

SEQ ID NO: 1315181 - DNA, 25 bp, Homo sapien
cagggttttggcaggtttggcagat

SEQ ID NO: 1315182 - DNA, 25 bp, Homo sapien
ttccaagtcgagttgcatgctctgg

SEQ ID NO: 1315183 - DNA, 25 bp, Homo sapien
ggattgcttccaagtcgagttgcat

SEQ ID NO: 1315184 - DNA, 25 bp, Homo sapien
ctgcctccaggcaccatgtacacct

SEQ ID NO: 1315185 - DNA, 25 bp, Homo sapien
ctagccacaacagctgctctgttgg

SEQ ID NO: 1315186 - DNA, 25 bp, Homo sapien
gcttagtaatgctatagcctttctc

SEQ ID NO: 1315187 - DNA, 25 bp, Homo sapien
gtaatactcagtataggatacactg

SEQ ID NO: 1315188 - DNA, 25 bp, Homo sapien
tgataaagtagaggctgtggtccaa

SEQ ID NO: 1315189 - DNA, 25 bp, Homo sapien
ggtccaaggtgagaggcttagtaat

SEQ ID NO: 1315190 - DNA, 25 bp, Homo sapien
cttggtggtcctccccttctaggag

SEQ ID NO: 1315191 - DNA, 25 bp, Homo sapien
tgagaacctggcttgtcccagagct

SEQ ID NO: 1315192 - DNA, 25 bp, Homo sapien
gatacccagcatcctggtgacccag

SEQ ID NO: 1315193 - DNA, 25 bp, Homo sapien
cctcttttccaagactgggttctca

SEQ ID NO: 1315194 - DNA, 25 bp, Homo sapien
accagcagacatacagcgtggaggg

SEQ ID NO: 1315195 - DNA, 25 bp, Homo sapien
tttttgcaaggcaccgtggtatgga

SEQ ID NO: 1315196 - DNA, 25 bp, Homo sapien
gtgtttttgcaaggcaccgtggtat

SEQ ID NO: 1315197 - DNA, 25 bp, Homo sapien
catgtgtttttgcaaggcaccgtgg

SEQ ID NO: 1315198 - DNA, 25 bp, Homo sapien
tcatgtgtttttgcaaggcaccgtg

SEQ ID NO: 1315199 - DNA, 25 bp, Homo sapien
tgtttactgctggtatcaggtgtgg

SEQ ID NO: 1315200 - DNA, 25 bp, Homo sapien
accgctatgtttactgctggtatca

SEQ ID NO: 1315201 - DNA, 25 bp, Homo sapien
gctatgtttactgctggtatcaggt

SEQ ID NO: 1315202 - DNA, 25 bp, Homo sapien
tcaaccgctatgtttactgctggta

SEQ ID NO: 1315203 - DNA, 25 bp, Homo sapien
cttcctctgtcgttggatatccctt

SEQ ID NO: 1315204 - DNA, 25 bp, Homo sapien
gtcgttggatatcccttgtggagtc

SEQ ID NO: 1315205 - DNA, 25 bp, Homo sapien
tctgtcgttggatatcccttgtgga

SEQ ID NO: 1315206 - DNA, 25 bp, Homo sapien
cctctgtcgttggatatcccttgtg

SEQ ID NO: 1315207 - DNA, 25 bp, Homo sapien
tgtgagaagctccaaccagacatgg

SEQ ID NO: 1315208 - DNA, 25 bp, Homo sapien
gaatgttgtacgaaacagccggcag

SEQ ID NO: 1315209 - DNA, 25 bp, Homo sapien
cagatgggatcctcaacagtggcgg

SEQ ID NO: 1315210 - DNA, 25 bp, Homo sapien
gagtattttcgcaacaccctgacag

SEQ ID NO: 1315211 - DNA, 25 bp, Homo sapien
agctccttcggcacggtggagtggg

SEQ ID NO: 1315212 - DNA, 25 bp, Homo sapien
cagggcctcaggaggactgtttgct

SEQ ID NO: 1315213 - DNA, 25 bp, Homo sapien
gcctcaggaggactgtttgctttag

SEQ ID NO: 1315214 - DNA, 25 bp, Homo sapien
ctggcagagctccttcggcacggtg

SEQ ID NO: 1315215 - DNA, 25 bp, Homo sapien
gcagcggatgctacatttctcagaa

SEQ ID NO: 1315216 - DNA, 25 bp, Homo sapien
ggagtgactatacccagacaaatga

SEQ ID NO: 1315217 - DNA, 25 bp, Homo sapien
caagacctcgtgcttcactggaaga

SEQ ID NO: 1315218 - DNA, 25 bp, Homo sapien
cagaacgcattcagtggcaggaaga

SEQ ID NO: 1315219 - DNA, 25 bp, Homo sapien
gcctggtgagggatccgagtgtgga

SEQ ID NO: 1315220 - DNA, 25 bp, Homo sapien
gagggatccgagtgtggagtctgcc

SEQ ID NO: 1315221 - DNA, 25 bp, Homo sapien
caggcgcctggtgagggatccgagt

SEQ ID NO: 1315222 - DNA, 25 bp, Homo sapien
gggacaggcgcctggtgagggatcc

SEQ ID NO: 1315223 - DNA, 25 bp, Homo sapien
agcacttgtggtccatgcggccata

SEQ ID NO: 1315224 - DNA, 25 bp, Homo sapien
ggtccagctcgtccagcatgatctg

SEQ ID NO: 1315225 - DNA, 25 bp, Homo sapien
cttgtggtccatgcggccatagtct

SEQ ID NO: 1315226 - DNA, 25 bp, Homo sapien
gtccagctcgtccagcatgatctgg

SEQ ID NO: 1315227 - DNA, 25 bp, Homo sapien
cagagcctgctggtacaggggatca

SEQ ID NO: 1315228 - DNA, 25 bp, Homo sapien
agcaggtaaaccttgatataggtgg

SEQ ID NO: 1315229 - DNA, 25 bp, Homo sapien
ccattctccagcaggtaaaccttga

SEQ ID NO: 1315230 - DNA, 25 bp, Homo sapien
tggggtccctcgtcaaagagcagag

SEQ ID NO: 1315231 - DNA, 25 bp, Homo sapien
gtcaggccccgagcttcaatcactt

SEQ ID NO: 1315232 - DNA, 25 bp, Homo sapien
ccactccggtccatgatggcaatgt

SEQ ID NO: 1315233 - DNA, 25 bp, Homo sapien
cagctggccactccggtccatgatg

SEQ ID NO: 1315234 - DNA, 25 bp, Homo sapien
gggtcaggccccgagcttcaatcac

SEQ ID NO: 1315235 - DNA, 25 bp, Homo sapien
ccagccagctgctgtactgaatgcc

SEQ ID NO: 1315236 - DNA, 25 bp, Homo sapien
ctttcagcccctagccgggtagtgg

SEQ ID NO: 1315237 - DNA, 25 bp, Homo sapien
ggaaatcgctgaactggctttcagc

SEQ ID NO: 1315238 - DNA, 25 bp, Homo sapien
ctagccgggtagtggggaagatgaa

SEQ ID NO: 1315239 - DNA, 25 bp, Homo sapien
ctggctttcagcccctagccgggta

SEQ ID NO: 1315240 - DNA, 25 bp, Homo sapien
tgaagtgacccttacaaggcagggc

SEQ ID NO: 1315241 - DNA, 25 bp, Homo sapien
taaatgatagttccggttgctgctg

SEQ ID NO: 1315242 - DNA, 25 bp, Homo sapien
ccactctgtgtggtaggagctatta

SEQ ID NO: 1315243 - DNA, 25 bp, Homo sapien
tattggccatggtcaacaacagcct

SEQ ID NO: 1315244 - DNA, 25 bp, Homo sapien
ttgctgcgcagcttcttggtggccc

SEQ ID NO: 1315245 - DNA, 25 bp, Homo sapien
ggctgccctggcgtgtgacccggct

SEQ ID NO: 1315246 - DNA, 25 bp, Homo sapien
ttggtgctcccatcggtggactccc

SEQ ID NO: 1315247 - DNA, 25 bp, Homo sapien
tgtctccgtgctccggcggatgttg

SEQ ID NO: 1315248 - DNA, 25 bp, Homo sapien
gaagctggagtgtgctcttgctcca

SEQ ID NO: 1315249 - DNA, 25 bp, Homo sapien
gctccactgagtcaggcccacgatg

SEQ ID NO: 1315250 - DNA, 25 bp, Homo sapien
ttgctccactgagtcaggcccacga

SEQ ID NO: 1315251 - DNA, 25 bp, Homo sapien
gctgcggaagctggagtgtgctctt

SEQ ID NO: 1315252 - DNA, 25 bp, Homo sapien
cagatttcaccgctaatgctggagc

SEQ ID NO: 1315253 - DNA, 25 bp, Homo sapien
gagctccgcaccacattcctggagg

SEQ ID NO: 1315254 - DNA, 25 bp, Homo sapien
tgctccgccgcttcttggcggtggt

SEQ ID NO: 1315255 - DNA, 25 bp, Homo sapien
ccccggcttgctgggatccgcagat

SEQ ID NO: 1315256 - DNA, 25 bp, Homo sapien
cggggtggcagggcctcaggcagct

SEQ ID NO: 1315257 - DNA, 25 bp, Homo sapien
cccggggtggcagggcctcaggcag

SEQ ID NO: 1315258 - DNA, 25 bp, Homo sapien
tccccggggtggcagggcctcaggc

SEQ ID NO: 1315259 - DNA, 25 bp, Homo sapien
ccccggggtggcagggcctcaggca

SEQ ID NO: 1315260 - DNA, 25 bp, Homo sapien
tctgagcctggtgttccgcatcaca

SEQ ID NO: 1315261 - DNA, 25 bp, Homo sapien
tgcctcccaacagcacacccctagg

SEQ ID NO: 1315262 - DNA, 25 bp, Homo sapien
cacccctagggcatttgcacaaggc

SEQ ID NO: 1315263 - DNA, 25 bp, Homo sapien
tgagcctggtgttccgcatcacagg

SEQ ID NO: 1315264 - DNA, 25 bp, Homo sapien
gctcccagaggaggcgatgtgataa

SEQ ID NO: 1315265 - DNA, 25 bp, Homo sapien
ggctcccagaggaggcgatgtgata

SEQ ID NO: 1315266 - DNA, 25 bp, Homo sapien
cccagaggaggcgatgtgataaaag

SEQ ID NO: 1315267 - DNA, 25 bp, Homo sapien
agaggaggcgatgtgataaaagggt

SEQ ID NO: 1315268 - DNA, 25 bp, Homo sapien
tgtttggaagctaacgaagatcccc

SEQ ID NO: 1315269 - DNA, 25 bp, Homo sapien
tggctgaaaccaagggacacaatac

SEQ ID NO: 1315270 - DNA, 25 bp, Homo sapien
catcggcactctaagaattccagga

SEQ ID NO: 1315271 - DNA, 25 bp, Homo sapien
gggattggatctgccaagccccaag

SEQ ID NO: 1315272 - DNA, 25 bp, Homo sapien
gactccgagtggataggcacgcggg

SEQ ID NO: 1315273 - DNA, 25 bp, Homo sapien
caggctggcgcggactccgagtgga

SEQ ID NO: 1315274 - DNA, 25 bp, Homo sapien
ccgcagcagccaccgttttcagtcg

SEQ ID NO: 1315275 - DNA, 25 bp, Homo sapien
ccgcgaacccggcagtaggcgcggc

SEQ ID NO: 1315276 - DNA, 25 bp, Homo sapien
cagaggagacgtcctccaagctgca

SEQ ID NO: 1315277 - DNA, 25 bp, Homo sapien
aaaatagtcatcagaggtgacagca

SEQ ID NO: 1315278 - DNA, 25 bp, Homo sapien
tacagaggactcattcaccccagga

SEQ ID NO: 1315279 - DNA, 25 bp, Homo sapien
tacagcgaatcctgatggctacaga

SEQ ID NO: 1315280 - DNA, 25 bp, Homo sapien
ggaacaaaggcccaggcaatagcag

SEQ ID NO: 1315281 - DNA, 25 bp, Homo sapien
gaacaaaggcccaggcaatagcagt

SEQ ID NO: 1315282 - DNA, 25 bp, Homo sapien
caaaggcccaggcaatagcagttgc

SEQ ID NO: 1315283 - DNA, 25 bp, Homo sapien
ggcccaggcaatagcagttgcactt

SEQ ID NO: 1315284 - DNA, 25 bp, Homo sapien
ggtcacagaagtaagctaggttgga

SEQ ID NO: 1315285 - DNA, 25 bp, Homo sapien
tggcaagaataaattctgttggaaa

SEQ ID NO: 1315286 - DNA, 25 bp, Homo sapien
ttcaatactgttccttgggtaatgg

SEQ ID NO: 1315287 - DNA, 25 bp, Homo sapien
acagtggcttgcgaagcaccaggag

SEQ ID NO: 1315288 - DNA, 25 bp, Homo sapien
tggagaaattacacgtcttctttaa

SEQ ID NO: 1315289 - DNA, 25 bp, Homo sapien
ttggagaaattacacgtcttcttta

SEQ ID NO: 1315290 - DNA, 25 bp, Homo sapien
gcagcgtatgggaagtaagacctcg

SEQ ID NO: 1315291 - DNA, 25 bp, Homo sapien
tttggcaaggccattgaggagtcct

SEQ ID NO: 1315292 - DNA, 25 bp, Homo sapien
taagacctcggagtaaagggcaatg

SEQ ID NO: 1315293 - DNA, 25 bp, Homo sapien
gagtcaaagtcacccatcggaagag

SEQ ID NO: 1315294 - DNA, 25 bp, Homo sapien
ggcgtaagcgtttaacgtatacaga

SEQ ID NO: 1315295 - DNA, 25 bp, Homo sapien
ggatgcacaacgtgaacaggcttaa

SEQ ID NO: 1315296 - DNA, 25 bp, Homo sapien
gcgtttaacgtatacagaatttcag

SEQ ID NO: 1315297 - DNA, 25 bp, Homo sapien
atgacaaattctgctgatggatgca

SEQ ID NO: 1315298 - DNA, 25 bp, Homo sapien
gcaccattgcactgcagccccggca

SEQ ID NO: 1315299 - DNA, 25 bp, Homo sapien
ccgagaggcggaggtcgcagtgaac

SEQ ID NO: 1315300 - DNA, 25 bp, Homo sapien
gagattgcaccattgcactgcagcc

SEQ ID NO: 1315301 - DNA, 25 bp, Homo sapien
cgagaggcggaggtcgcagtgaacc

SEQ ID NO: 1315302 - DNA, 25 bp, Homo sapien
gaagggcggaggctattgataataa

SEQ ID NO: 1315303 - DNA, 25 bp, Homo sapien
gggttaacacctagcacagacgtat

SEQ ID NO: 1315304 - DNA, 25 bp, Homo sapien
tacctggtaaatagctgctgtccca

SEQ ID NO: 1315305 - DNA, 25 bp, Homo sapien
gtatacctccaggatcctagctgca

SEQ ID NO: 1315306 - DNA, 25 bp, Homo sapien
gcaatttacgaagcactctcacatt

SEQ ID NO: 1315307 - DNA, 25 bp, Homo sapien
tgctagagtgcagcgagacactcgt

SEQ ID NO: 1315308 - DNA, 25 bp, Homo sapien
gatgaaggaattgagactccctgaa

SEQ ID NO: 1315309 - DNA, 25 bp, Homo sapien
gagacactcgtagctcttaccagta

SEQ ID NO: 1315310 - DNA, 25 bp, Homo sapien
gagacctcaaggagcacagcttctg

SEQ ID NO: 1315311 - DNA, 25 bp, Homo sapien
gaattcaagtcgagggtttactcca

SEQ ID NO: 1315312 - DNA, 25 bp, Homo sapien
tacaatcctgatgcctttggaccaa

SEQ ID NO: 1315313 - DNA, 25 bp, Homo sapien
tagttcctaaaactcaagggcacgc

SEQ ID NO: 1315314 - DNA, 25 bp, Homo sapien
tgctgtagctcggtccgtcctgccc

SEQ ID NO: 1315315 - DNA, 25 bp, Homo sapien
gctgtagctcggtccgtcctgcccg

SEQ ID NO: 1315316 - DNA, 25 bp, Homo sapien
ttgtgctcttgcctggcccgctgct

SEQ ID NO: 1315317 - DNA, 25 bp, Homo sapien
gttgtgctcttgcctggcccgctgc

SEQ ID NO: 1315318 - DNA, 25 bp, Homo sapien
gtgctcttgcctggcccgctgctgt

SEQ ID NO: 1315319 - DNA, 25 bp, Homo sapien
ctcttgcctggcccgctgctgtcgc

SEQ ID NO: 1315320 - DNA, 25 bp, Homo sapien
ggctcgctcgtgattggtcggtggc

SEQ ID NO: 1315321 - DNA, 25 bp, Homo sapien
tggcaccttattggacgcgccagct

SEQ ID NO: 1315322 - DNA, 25 bp, Homo sapien
aggccgcggacctggcaccttattg

SEQ ID NO: 1315323 - DNA, 25 bp, Homo sapien
ggacctggcaccttattggacgcgc

SEQ ID NO: 1315324 - DNA, 25 bp, Homo sapien
gggatgcgcgcgtcttgggctaggg

SEQ ID NO: 1315325 - DNA, 25 bp, Homo sapien
gttgcggcgagagggcgagcctaga

SEQ ID NO: 1315326 - DNA, 25 bp, Homo sapien
cgcgtcttgggctagggcggctggg

SEQ ID NO: 1315327 - DNA, 25 bp, Homo sapien
aggcgtggggttgcggcgagagggc

SEQ ID NO: 1315328 - DNA, 25 bp, Homo sapien
gacaggctgagagtcttcgagatcc

SEQ ID NO: 1315329 - DNA, 25 bp, Homo sapien
gcttttcctggtacatgcatggccc

SEQ ID NO: 1315330 - DNA, 25 bp, Homo sapien
tggaaacaccgaaacccaagtgaca

SEQ ID NO: 1315331 - DNA, 25 bp, Homo sapien
cgagatccagggttgctaatgtgac

SEQ ID NO: 1315332 - DNA, 25 bp, Homo sapien
gaacggtagaatcggatcagggatt

SEQ ID NO: 1315333 - DNA, 25 bp, Homo sapien
ctgaacggtagaatcggatcaggga

SEQ ID NO: 1315334 - DNA, 25 bp, Homo sapien
tgaacggtagaatcggatcagggat

SEQ ID NO: 1315335 - DNA, 25 bp, Homo sapien
acggtagaatcggatcagggatttt

SEQ ID NO: 1315336 - DNA, 25 bp, Homo sapien
caagtaaaccgagagaggaatgcta

SEQ ID NO: 1315337 - DNA, 25 bp, Homo sapien
tggagtccagagtcaacggacctgg

SEQ ID NO: 1315338 - DNA, 25 bp, Homo sapien
gtgcaagcattcaaacactgaggtt

SEQ ID NO: 1315339 - DNA, 25 bp, Homo sapien
tctgtccgagcctaggaagcacagc

SEQ ID NO: 1315340 - DNA, 25 bp, Homo sapien
taagccctgggttaggtgctatgct

SEQ ID NO: 1315341 - DNA, 25 bp, Homo sapien
tgtaactcttaatgtacagcatcat

SEQ ID NO: 1315342 - DNA, 25 bp, Homo sapien
cttatgtcctcccatagcattttgc

SEQ ID NO: 1315343 - DNA, 25 bp, Homo sapien
gtgttgtaactcttaatgtacagca

SEQ ID NO: 1315344 - DNA, 25 bp, Homo sapien
tggtgcagcggaaagagtaccactc

SEQ ID NO: 1315345 - DNA, 25 bp, Homo sapien
cctgaggtgctccatgtcttggtaa

SEQ ID NO: 1315346 - DNA, 25 bp, Homo sapien
gtaatatacctagcacagaacctgg

SEQ ID NO: 1315347 - DNA, 25 bp, Homo sapien
aatccagatgtatggctagggacca

SEQ ID NO: 1315348 - DNA, 25 bp, Homo sapien
gtttggtgtcaaatagcatgctaga

SEQ ID NO: 1315349 - DNA, 25 bp, Homo sapien
actgttaaagtggaaggaggctgca

SEQ ID NO: 1315350 - DNA, 25 bp, Homo sapien
tgctagattgaatgcctttgactgt

SEQ ID NO: 1315351 - DNA, 25 bp, Homo sapien
tcattggagcctcggagtttttcac

SEQ ID NO: 1315352 - DNA, 25 bp, Homo sapien
gaggacagctgttcgggttttcagt

SEQ ID NO: 1315353 - DNA, 25 bp, Homo sapien
cagctgttcgggttttcagtggagt

SEQ ID NO: 1315354 - DNA, 25 bp, Homo sapien
acagctgttcgggttttcagtggag

SEQ ID NO: 1315355 - DNA, 25 bp, Homo sapien
gttcgggttttcagtggagtggaca

SEQ ID NO: 1315356 - DNA, 25 bp, Homo sapien
tgccctgaagctttcctacggaata

SEQ ID NO: 1315357 - DNA, 25 bp, Homo sapien
tcctacggaataagctgggttgttg

SEQ ID NO: 1315358 - DNA, 25 bp, Homo sapien
tgttcaagtgccctgaagctttcct

SEQ ID NO: 1315359 - DNA, 25 bp, Homo sapien
tctttgcattgggtaaacttaactg

SEQ ID NO: 1315360 - DNA, 25 bp, Homo sapien
ctctagattctaataagtagtagtt

SEQ ID NO: 1315361 - DNA, 25 bp, Homo sapien
ataagtagtagttaatgtagtaaca

SEQ ID NO: 1315362 - DNA, 25 bp, Homo sapien
tagttaatgtagtaacaatctttgt

SEQ ID NO: 1315363 - DNA, 25 bp, Homo sapien
gattctaataagtagtagttaatgt

SEQ ID NO: 1315364 - DNA, 25 bp, Homo sapien
catacttgcttctcccctgaaaggc

SEQ ID NO: 1315365 - DNA, 25 bp, Homo sapien
atacttgcttctcccctgaaaggca

SEQ ID NO: 1315366 - DNA, 25 bp, Homo sapien
gaaccaccacttgagctgttttgca

SEQ ID NO: 1315367 - DNA, 25 bp, Homo sapien
tttaaaaatatcagcgcccaggctc

SEQ ID NO: 1315368 - DNA, 25 bp, Homo sapien
aagaatatgaacgtctgccttcccg

SEQ ID NO: 1315369 - DNA, 25 bp, Homo sapien
tatcttaggaagtctatcagagctc

SEQ ID NO: 1315370 - DNA, 25 bp, Homo sapien
aagacttgccacgttgttctgccct

SEQ ID NO: 1315371 - DNA, 25 bp, Homo sapien
tacggtatttcttgactctgggaac

SEQ ID NO: 1315372 - DNA, 25 bp, Homo sapien
tgtgtatttgcatccagaggccatg

SEQ ID NO: 1315373 - DNA, 25 bp, Homo sapien
cccaggaaactaggactttgtgtgt

SEQ ID NO: 1315374 - DNA, 25 bp, Homo sapien
atccggatggcgcaggaaggccacc

SEQ ID NO: 1315375 - DNA, 25 bp, Homo sapien
tgccaagtaaatttgctgtggcctc

SEQ ID NO: 1315376 - DNA, 25 bp, Homo sapien
ccggtgaccctaagagtggccacct

SEQ ID NO: 1315377 - DNA, 25 bp, Homo sapien
ccatgtgtacacatatgccaagtaa

SEQ ID NO: 1315378 - DNA, 25 bp, Homo sapien
tgagtggatgattaatttcaggctc

SEQ ID NO: 1315379 - DNA, 25 bp, Homo sapien
tcaagaggtggttattattcttggg

SEQ ID NO: 1315380 - DNA, 25 bp, Homo sapien
taagccaggagtgtttcaagaggtg

SEQ ID NO: 1315381 - DNA, 25 bp, Homo sapien
gccgaagcccttatccttgggatat

SEQ ID NO: 1315382 - DNA, 25 bp, Homo sapien
ctccctagcaccaatgtgggtcttt

SEQ ID NO: 1315383 - DNA, 25 bp, Homo sapien
cctagcaccaatgtgggtctttggg

SEQ ID NO: 1315384 - DNA, 25 bp, Homo sapien
ttgtgggctatggagccccccagca

SEQ ID NO: 1315385 - DNA, 25 bp, Homo sapien
tgtgggctatggagccccccagcag

SEQ ID NO: 1315386 - DNA, 25 bp, Homo sapien
acaggacagtgtggaagtcccactc

SEQ ID NO: 1315387 - DNA, 25 bp, Homo sapien
aagtcccactcgctgaaactcaagg

SEQ ID NO: 1315388 - DNA, 25 bp, Homo sapien
tgtggaggagccagactggccttgc

SEQ ID NO: 1315389 - DNA, 25 bp, Homo sapien
cagtgtggaagtcccactcgctgaa

SEQ ID NO: 1315390 - DNA, 25 bp, Homo sapien
gtggggagcggtcctcttctcacac

SEQ ID NO: 1315391 - DNA, 25 bp, Homo sapien
ggtggggagcggtcctcttctcaca

SEQ ID NO: 1315392 - DNA, 25 bp, Homo sapien
tggggagcggtcctcttctcacaca

SEQ ID NO: 1315393 - DNA, 25 bp, Homo sapien
accccttgagtacactgtcatggcc

SEQ ID NO: 1315394 - DNA, 25 bp, Homo sapien
ccctccactttggttgtgcggaagg

SEQ ID NO: 1315395 - DNA, 25 bp, Homo sapien
aagaagtcttcactgatccctccac

SEQ ID NO: 1315396 - DNA, 25 bp, Homo sapien
gagtacactgtcatggcctcgtcca

SEQ ID NO: 1315397 - DNA, 25 bp, Homo sapien
ccggcatgttgctctaggagggact

SEQ ID NO: 1315398 - DNA, 25 bp, Homo sapien
tactgaggtacactttggcgctccc

SEQ ID NO: 1315399 - DNA, 25 bp, Homo sapien
tactgaactcgcctcttgggaacga

SEQ ID NO: 1315400 - DNA, 25 bp, Homo sapien
tctgtaggacctgcgtaaactcagc

SEQ ID NO: 1315401 - DNA, 25 bp, Homo sapien
gcgcatccggctttcacatgcactg

SEQ ID NO: 1315402 - DNA, 25 bp, Homo sapien
taatagctataccaaccgcgcatcc

SEQ ID NO: 1315403 - DNA, 25 bp, Homo sapien
cccagagagaataagaatgcatgta

SEQ ID NO: 1315404 - DNA, 25 bp, Homo sapien
aggcctgacaccactggagagaccc

SEQ ID NO: 1315405 - DNA, 25 bp, Homo sapien
ctctgcatgtgaccgtcatgccctg

SEQ ID NO: 1315406 - DNA, 25 bp, Homo sapien
taccctatgaccaaggagacatggg

SEQ ID NO: 1315407 - DNA, 25 bp, Homo sapien
atgtgaccgtcatgccctggatgga

SEQ ID NO: 1315408 - DNA, 25 bp, Homo sapien
caggagaatgggattaccctatgac

SEQ ID NO: 1315409 - DNA, 25 bp, Homo sapien
caagaggaggtgattgttcttggtt

SEQ ID NO: 1315410 - DNA, 25 bp, Homo sapien
agaggaggtgattgttcttggtttt

SEQ ID NO: 1315411 - DNA, 25 bp, Homo sapien
aagaggaggtgattgttcttggttt

SEQ ID NO: 1315412 - DNA, 25 bp, Homo sapien
tcactcgggtttgccccatcccaac

SEQ ID NO: 1315413 - DNA, 25 bp, Homo sapien
cagagctatagacatcatggaacca

SEQ ID NO: 1315414 - DNA, 25 bp, Homo sapien
ggaacctttgctacagcataaccta

SEQ ID NO: 1315415 - DNA, 25 bp, Homo sapien
catggaaccaagtgatttgaaaacc

SEQ ID NO: 1315416 - DNA, 25 bp, Homo sapien
tttgtcccaaatggcttctctgggc

SEQ ID NO: 1315417 - DNA, 25 bp, Homo sapien
gggcatgaggcatatcctcttctct

SEQ ID NO: 1315418 - DNA, 25 bp, Homo sapien
ttgtttttgtcccaaatggcttctc

SEQ ID NO: 1315419 - DNA, 25 bp, Homo sapien
catgaggcatatcctcttctctttc

SEQ ID NO: 1315420 - DNA, 25 bp, Homo sapien
gatgtgcaatgtggatttcgtgttg

SEQ ID NO: 1315421 - DNA, 25 bp, Homo sapien
caatgtggatttcgtgttggtcgag

SEQ ID NO: 1315422 - DNA, 25 bp, Homo sapien
atttcgtgttggtcgaggtgtccag

SEQ ID NO: 1315423 - DNA, 25 bp, Homo sapien
gatttcgtgttggtcgaggtgtcca

SEQ ID NO: 1315424 - DNA, 25 bp, Homo sapien
agacacaaagatgtccatgacccag

SEQ ID NO: 1315425 - DNA, 25 bp, Homo sapien
aaagatgtccatgacccagattccg

SEQ ID NO: 1315426 - DNA, 25 bp, Homo sapien
aagatgtccatgacccagattccgc

SEQ ID NO: 1315427 - DNA, 25 bp, Homo sapien
agatgtccatgacccagattccgct

SEQ ID NO: 1315428 - DNA, 25 bp, Homo sapien
agcctggcttgagagtcaagcccag

SEQ ID NO: 1315429 - DNA, 25 bp, Homo sapien
gacagaaggtctcagcctggtgttc

SEQ ID NO: 1315430 - DNA, 25 bp, Homo sapien
gggacagaaggtctcagcctggtgt

SEQ ID NO: 1315431 - DNA, 25 bp, Homo sapien
ggacagaaggtctcagcctggtgtt

SEQ ID NO: 1315432 - DNA, 25 bp, Homo sapien
tgagaactgcccaggtatttggcac

SEQ ID NO: 1315433 - DNA, 25 bp, Homo sapien
gcccaggtatttggcactgtgctaa

SEQ ID NO: 1315434 - DNA, 25 bp, Homo sapien
cactgtgctaaaggcagcgtaacta

SEQ ID NO: 1315435 - DNA, 25 bp, Homo sapien
gcactgtgctaaaggcagcgtaact

SEQ ID NO: 1315436 - DNA, 25 bp, Homo sapien
gaagtgaagccaaactgtcctcccg

SEQ ID NO: 1315437 - DNA, 25 bp, Homo sapien
gagtccgaaagctgaagctggtccg

SEQ ID NO: 1315438 - DNA, 25 bp, Homo sapien
cagacagggcattgctccacgggtt

SEQ ID NO: 1315439 - DNA, 25 bp, Homo sapien
tctttcactttacggccgaggctgg

SEQ ID NO: 1315440 - DNA, 25 bp, Homo sapien
gagaagcagtcgaactcgctctggc

SEQ ID NO: 1315441 - DNA, 25 bp, Homo sapien
tcctcgtcgatgagttcggcgtcca

SEQ ID NO: 1315442 - DNA, 25 bp, Homo sapien
cagcgcctcctcgtcgatgagttcg

SEQ ID NO: 1315443 - DNA, 25 bp, Homo sapien
cggcgcggaccccaagtccgagaag

SEQ ID NO: 1315444 - DNA, 25 bp, Homo sapien
gcatgagggccatgggcggccgcgg

SEQ ID NO: 1315445 - DNA, 25 bp, Homo sapien
gtacggcgtcgccacaggctgcagg

SEQ ID NO: 1315446 - DNA, 25 bp, Homo sapien
ggcagagtccggagcgcatgagggc

SEQ ID NO: 1315447 - DNA, 25 bp, Homo sapien
tagccctcggcgagcatcaggtggt

SEQ ID NO: 1315448 - DNA, 25 bp, Homo sapien
agcctggggtcacaaaggcccgcaa

SEQ ID NO: 1315449 - DNA, 25 bp, Homo sapien
gctcggccgggcggagcaaaaccaa

SEQ ID NO: 1315450 - DNA, 25 bp, Homo sapien
gtgcggtccctgcagctcggccggg

SEQ ID NO: 1315451 - DNA, 25 bp, Homo sapien
actactgcgcaccttgcggccgcag

SEQ ID NO: 1315452 - DNA, 25 bp, Homo sapien
taactttccaggtagagaccgaggc

SEQ ID NO: 1315453 - DNA, 25 bp, Homo sapien
gatgtcaggcctacgcaacctttta

SEQ ID NO: 1315454 - DNA, 25 bp, Homo sapien
tatttggcactttcggagggattcg

SEQ ID NO: 1315455 - DNA, 25 bp, Homo sapien
tcagggcttcggaatcggacttggc

SEQ ID NO: 1315456 - DNA, 25 bp, Homo sapien
aggcaggggaacttcacgatggtca

SEQ ID NO: 1315457 - DNA, 25 bp, Homo sapien
tgtagagcagacatcaaagatgaag

SEQ ID NO: 1315458 - DNA, 25 bp, Homo sapien
aggggaacttcacgatggtcaggat

SEQ ID NO: 1315459 - DNA, 25 bp, Homo sapien
gtagagcagacatcaaagatgaagt

SEQ ID NO: 1315460 - DNA, 25 bp, Homo sapien
cagcgtcacccattccttaagagtc

SEQ ID NO: 1315461 - DNA, 25 bp, Homo sapien
taaacgagtcaatgctgagcccaaa

SEQ ID NO: 1315462 - DNA, 25 bp, Homo sapien
ccttaagagtcaggttgataaacga

SEQ ID NO: 1315463 - DNA, 25 bp, Homo sapien
gcccaaaccaggcaggattaatcat

SEQ ID NO: 1315464 - DNA, 25 bp, Homo sapien
cataggaatgataaacttgtgtgat

SEQ ID NO: 1315465 - DNA, 25 bp, Homo sapien
cattcatggtaagaaaccttaacag

SEQ ID NO: 1315466 - DNA, 25 bp, Homo sapien
gaatggtgacgcattcatggtaaga

SEQ ID NO: 1315467 - DNA, 25 bp, Homo sapien
ggagcagcataactatttcaattga

SEQ ID NO: 1315468 - DNA, 25 bp, Homo sapien
cccctgcagcatggatccgggacat

SEQ ID NO: 1315469 - DNA, 25 bp, Homo sapien
tgcatcccctgcagcatggatccgg

SEQ ID NO: 1315470 - DNA, 25 bp, Homo sapien
catcccctgcagcatggatccggga

SEQ ID NO: 1315471 - DNA, 25 bp, Homo sapien
gtgcatcccctgcagcatggatccg

SEQ ID NO: 1315472 - DNA, 25 bp, Homo sapien
taataaggttcttggtccaccactc

SEQ ID NO: 1315473 - DNA, 25 bp, Homo sapien
ttacaaacggaggtgctgtggagta

SEQ ID NO: 1315474 - DNA, 25 bp, Homo sapien
ttgtagctgcatattctgttttcat

SEQ ID NO: 1315475 - DNA, 25 bp, Homo sapien
acaaatcttacaaacggaggtgctg

SEQ ID NO: 1315476 - DNA, 25 bp, Homo sapien
gcaatatctcttagatagatcttgg

SEQ ID NO: 1315477 - DNA, 25 bp, Homo sapien
catgatcatcgtactcatgacaggg

SEQ ID NO: 1315478 - DNA, 25 bp, Homo sapien
tgttgctcttggaggcagcaatatc

SEQ ID NO: 1315479 - DNA, 25 bp, Homo sapien
acaggggcatgagttgttgctcttg

SEQ ID NO: 1315480 - DNA, 25 bp, Homo sapien
tcttgaacaaagtggttcacaccat

SEQ ID NO: 1315481 - DNA, 25 bp, Homo sapien
agctccatctcccaatttgtgcatg

SEQ ID NO: 1315482 - DNA, 25 bp, Homo sapien
tttatcccgaaggtaatggagtgtc

SEQ ID NO: 1315483 - DNA, 25 bp, Homo sapien
tgtgcatggcctcatacatcataga

SEQ ID NO: 1315484 - DNA, 25 bp, Homo sapien
ccattagaatgccagactagagtga

SEQ ID NO: 1315485 - DNA, 25 bp, Homo sapien
gagtgacagcgtattcatataaaag

SEQ ID NO: 1315486 - DNA, 25 bp, Homo sapien
gataatccattagaatgccagacta

SEQ ID NO: 1315487 - DNA, 25 bp, Homo sapien
ccagactagagtgacagcgtattca

SEQ ID NO: 1315488 - DNA, 25 bp, Homo sapien
gggaggccgacgaggagccaacgcc

SEQ ID NO: 1315489 - DNA, 25 bp, Homo sapien
cacttccgtcttggaggccagggtg

SEQ ID NO: 1315490 - DNA, 25 bp, Homo sapien
gtccctcgcccggaggcagagatgc

SEQ ID NO: 1315491 - DNA, 25 bp, Homo sapien
gggatcctagtccatccaaagcagc

SEQ ID NO: 1315492 - DNA, 25 bp, Homo sapien
tgaaagaccatcggatggaaggcga

SEQ ID NO: 1315493 - DNA, 25 bp, Homo sapien
aaagaccatcggatggaaggcgacg

SEQ ID NO: 1315494 - DNA, 25 bp, Homo sapien
gatggaaggcgacgcccagaactcc

SEQ ID NO: 1315495 - DNA, 25 bp, Homo sapien
cagtgaaagaccatcggatggaagg

SEQ ID NO: 1315496 - DNA, 25 bp, Homo sapien
gggaggatctgaagccggccgcagg

SEQ ID NO: 1315497 - DNA, 25 bp, Homo sapien
aagccggccgcaggtaggctgactc

SEQ ID NO: 1315498 - DNA, 25 bp, Homo sapien
gggatctgttctcccgcgcaggagt

SEQ ID NO: 1315499 - DNA, 25 bp, Homo sapien
agcccggcgccgaatagccccgccg

SEQ ID NO: 1315500 - DNA, 25 bp, Homo sapien
gtttcgaatcctcagcggccctgtg

SEQ ID NO: 1315501 - DNA, 25 bp, Homo sapien
gctcgttacagtttcgaatcctcag

SEQ ID NO: 1315502 - DNA, 25 bp, Homo sapien
gcgggcggcgcagagattctcaccc

SEQ ID NO: 1315503 - DNA, 25 bp, Homo sapien
cttccgtccacgctcgttacagttt

SEQ ID NO: 1315504 - DNA, 25 bp, Homo sapien
gtcgtgcagtcagtccttcaaggcc

SEQ ID NO: 1315505 - DNA, 25 bp, Homo sapien
gagtcgtgcagtcagtccttcaagg

SEQ ID NO: 1315506 - DNA, 25 bp, Homo sapien
agtcgtgcagtcagtccttcaaggc

SEQ ID NO: 1315507 - DNA, 25 bp, Homo sapien
catccatgttcataatagattggcc

SEQ ID NO: 1315508 - DNA, 25 bp, Homo sapien
ggctgtaagcctggtgagtttttgc

SEQ ID NO: 1315509 - DNA, 25 bp, Homo sapien
ttacaaggtcacgtagctagtagga

SEQ ID NO: 1315510 - DNA, 25 bp, Homo sapien
agctaccccccagttagctgagact

SEQ ID NO: 1315511 - DNA, 25 bp, Homo sapien
gaagggacagatacaacaatgtggc

SEQ ID NO: 1315512 - DNA, 25 bp, Homo sapien
tggaacaattgccaaatagacgtcg

SEQ ID NO: 1315513 - DNA, 25 bp, Homo sapien
taaaactgacactgcttagagaact

SEQ ID NO: 1315514 - DNA, 25 bp, Homo sapien
tgttgattgctgcttattctggaat

SEQ ID NO: 1315515 - DNA, 25 bp, Homo sapien
gtaaatgtcctttgagataactgtg

SEQ ID NO: 1315516 - DNA, 25 bp, Homo sapien
tgacagggtttgtaggttcataaag

SEQ ID NO: 1315517 - DNA, 25 bp, Homo sapien
cataaagtgcaataactgtgggcac

SEQ ID NO: 1315518 - DNA, 25 bp, Homo sapien
tgggcactgccacgaaatgtaaatg

SEQ ID NO: 1315519 - DNA, 25 bp, Homo sapien
gcaataggcatagctacgtggcact

SEQ ID NO: 1315520 - DNA, 25 bp, Homo sapien
tagacagctttgactggagggtcca

SEQ ID NO: 1315521 - DNA, 25 bp, Homo sapien
tattctggccagactcgatgtgtac

SEQ ID NO: 1315522 - DNA, 25 bp, Homo sapien
gaacctcagggtattgcttgccact

SEQ ID NO: 1315523 - DNA, 25 bp, Homo sapien
tgtagccaactggagtcacagacct

SEQ ID NO: 1315524 - DNA, 25 bp, Homo sapien
tcatgtgccatgttgaaggagtccc

SEQ ID NO: 1315525 - DNA, 25 bp, Homo sapien
gcagtttcttggctacacagatggg

SEQ ID NO: 1315526 - DNA, 25 bp, Homo sapien
tggttggccttacactcaaacagga

SEQ ID NO: 1315527 - DNA, 25 bp, Homo sapien
gacacaggcccgtgctgctgcagct

SEQ ID NO: 1315528 - DNA, 25 bp, Homo sapien
ttctccatcatcagcgccttcatct

SEQ ID NO: 1315529 - DNA, 25 bp, Homo sapien
caggtgcaggacacaggcccgtgct

SEQ ID NO: 1315530 - DNA, 25 bp, Homo sapien
atcatcagcgccttcatcttctctt

SEQ ID NO: 1315531 - DNA, 25 bp, Homo sapien
tggatgctcccgtcgcgccgcagaa

SEQ ID NO: 1315532 - DNA, 25 bp, Homo sapien
cctgcaccactcctggatggcgctg

SEQ ID NO: 1315533 - DNA, 25 bp, Homo sapien
cgctggcagacagcgggccctggat

SEQ ID NO: 1315534 - DNA, 25 bp, Homo sapien
tctgtctggtagagttgcggctggc

SEQ ID NO: 1315535 - DNA, 25 bp, Homo sapien
tcgctgttgaggaaggcgcacacgt

SEQ ID NO: 1315536 - DNA, 25 bp, Homo sapien
atattgcgggtctcgctgcccagga

SEQ ID NO: 1315537 - DNA, 25 bp, Homo sapien
gctaccccgcttgaactccatattg

SEQ ID NO: 1315538 - DNA, 25 bp, Homo sapien
gatctgaggcttgaagccctgcagg

SEQ ID NO: 1315539 - DNA, 25 bp, Homo sapien
ctggtgcacaatggcactgtcggag

SEQ ID NO: 1315540 - DNA, 25 bp, Homo sapien
tggcactgtcggagcacacgccgct

SEQ ID NO: 1315541 - DNA, 25 bp, Homo sapien
tgcacaatggcactgtcggagcaca

SEQ ID NO: 1315542 - DNA, 25 bp, Homo sapien
actgtcggagcacacgccgctgggc

SEQ ID NO: 1315543 - DNA, 25 bp, Homo sapien
ggcagcgtgtgtgtaggccaggtgg

SEQ ID NO: 1315544 - DNA, 25 bp, Homo sapien
tatcaggcagcgtgtgtgtaggcca

SEQ ID NO: 1315545 - DNA, 25 bp, Homo sapien
ctatcaggcagcgtgtgtgtaggcc

SEQ ID NO: 1315546 - DNA, 25 bp, Homo sapien
tcaggcagcgtgtgtgtaggccagg

SEQ ID NO: 1315547 - DNA, 25 bp, Homo sapien
tgacgctaacttcaaggcagattgt

SEQ ID NO: 1315548 - DNA, 25 bp, Homo sapien
agccaaccctccttagtgacgctaa

SEQ ID NO: 1315549 - DNA, 25 bp, Homo sapien
caaggcagattgttactcctcacaa

SEQ ID NO: 1315550 - DNA, 25 bp, Homo sapien
cctccttagtgacgctaacttcaag

SEQ ID NO: 1315551 - DNA, 25 bp, Homo sapien
cagctccccagagaagatgaattta

SEQ ID NO: 1315552 - DNA, 25 bp, Homo sapien
gctccccagagaagatgaatttatc

SEQ ID NO: 1315553 - DNA, 25 bp, Homo sapien
ccccagagaagatgaatttatcagt

SEQ ID NO: 1315554 - DNA, 25 bp, Homo sapien
tccccagagaagatgaatttatcag

SEQ ID NO: 1315555 - DNA, 25 bp, Homo sapien
ccttggatgatagccttggtgacct

SEQ ID NO: 1315556 - DNA, 25 bp, Homo sapien
gaatgtcctcccttgcaagtgcctg

SEQ ID NO: 1315557 - DNA, 25 bp, Homo sapien
cctgcagcctttagtgggagctcca

SEQ ID NO: 1315558 - DNA, 25 bp, Homo sapien
ggagctccagggacaccaaatggtt

SEQ ID NO: 1315559 - DNA, 25 bp, Homo sapien
tcaattgaacaaatgagttgggcca

SEQ ID NO: 1315560 - DNA, 25 bp, Homo sapien
cagccgcaagccatggtcatttgag

SEQ ID NO: 1315561 - DNA, 25 bp, Homo sapien
gctggaatgtaaaaggacctaagga

SEQ ID NO: 1315562 - DNA, 25 bp, Homo sapien
aaacgtcgggcttgagcttgaggca

SEQ ID NO: 1315563 - DNA, 25 bp, Homo sapien
gcaagcaccggcactgagaactggg

SEQ ID NO: 1315564 - DNA, 25 bp, Homo sapien
cagctccttgaggattaggtgctcc

SEQ ID NO: 1315565 - DNA, 25 bp, Homo sapien
gatggcccacatagagagtgtgcgc

SEQ ID NO: 1315566 - DNA, 25 bp, Homo sapien
gcccttgggcctcactcaatagcag

SEQ ID NO: 1315567 - DNA, 25 bp, Homo sapien
aagggctctgacacctgtgtttgca

SEQ ID NO: 1315568 - DNA, 25 bp, Homo sapien
actgctctgcgggtagctccggcag

SEQ ID NO: 1315569 - DNA, 25 bp, Homo sapien
agtactccgtcagggactgctctgc

SEQ ID NO: 1315570 - DNA, 25 bp, Homo sapien
tcgaggtcagagtactccgtcaggg

SEQ ID NO: 1315571 - DNA, 25 bp, Homo sapien
agaggactcagggagtgtcccggct

SEQ ID NO: 1315572 - DNA, 25 bp, Homo sapien
gaggactcagggagtgtcccggctc

SEQ ID NO: 1315573 - DNA, 25 bp, Homo sapien
tctgtgttctcagtgtggcttaagg

SEQ ID NO: 1315574 - DNA, 25 bp, Homo sapien
agggtctgtgttctcagtgtggctt

SEQ ID NO: 1315575 - DNA, 25 bp, Homo sapien
aggtacacagattggcagagactgg

SEQ ID NO: 1315576 - DNA, 25 bp, Homo sapien
gggcagagggcaagcaggaaagggc

SEQ ID NO: 1315577 - DNA, 25 bp, Homo sapien
ggaggtacacagattggcagagact

SEQ ID NO: 1315578 - DNA, 25 bp, Homo sapien
gcagagggcaagcaggaaagggcct

SEQ ID NO: 1315579 - DNA, 25 bp, Homo sapien
cgtggactgagcaagacacagggcc

SEQ ID NO: 1315580 - DNA, 25 bp, Homo sapien
tcacgtggactgagcaagacacagg

SEQ ID NO: 1315581 - DNA, 25 bp, Homo sapien
ggactgagcaagacacagggcctgt

SEQ ID NO: 1315582 - DNA, 25 bp, Homo sapien
cagagtcacgtggactgagcaagac

SEQ ID NO: 1315583 - DNA, 25 bp, Homo sapien
cccaaaaagtggcagaagggaccag

SEQ ID NO: 1315584 - DNA, 25 bp, Homo sapien
ctgagagctccaccatttcagtggc

SEQ ID NO: 1315585 - DNA, 25 bp, Homo sapien
tggcagaagggaccagaactcaggt

SEQ ID NO: 1315586 - DNA, 25 bp, Homo sapien
cagaactcaggtctctgagagctcc

SEQ ID NO: 1315587 - DNA, 25 bp, Homo sapien
ggcttttagagcagaggatctcacg

SEQ ID NO: 1315588 - DNA, 25 bp, Homo sapien
taaaaccccatgtgaggccatcggg

SEQ ID NO: 1315589 - DNA, 25 bp, Homo sapien
gatctcacgctttttggcacactga

SEQ ID NO: 1315590 - DNA, 25 bp, Homo sapien
taaggtggctcctagaccctaagaa

SEQ ID NO: 1315591 - DNA, 25 bp, Homo sapien
tcttagggttagagaatgacggctc

SEQ ID NO: 1315592 - DNA, 25 bp, Homo sapien
tcagggaacttggaggcttggcaca

SEQ ID NO: 1315593 - DNA, 25 bp, Homo sapien
tctactgagtactgacagggcccag

SEQ ID NO: 1315594 - DNA, 25 bp, Homo sapien
aaagtataggtgctctgcaggcagc

SEQ ID NO: 1315595 - DNA, 25 bp, Homo sapien
gattttcttcgacagcagttctggc

SEQ ID NO: 1315596 - DNA, 25 bp, Homo sapien
tgtgctgctgacttgcttacaagga

SEQ ID NO: 1315597 - DNA, 25 bp, Homo sapien
gggtggaaccgactccagcctggaa

SEQ ID NO: 1315598 - DNA, 25 bp, Homo sapien
cataaaataagtccagatggcagcg

SEQ ID NO: 1315599 - DNA, 25 bp, Homo sapien
ggctgatgcccctcattcctagaag

SEQ ID NO: 1315600 - DNA, 25 bp, Homo sapien
ctaaactcctggtgagaggccagcc

SEQ ID NO: 1315601 - DNA, 25 bp, Homo sapien
tctgggaccaaagcagggcagtctc

SEQ ID NO: 1315602 - DNA, 25 bp, Homo sapien
gaaggacttatcatggcagctgtgg

SEQ ID NO: 1315603 - DNA, 25 bp, Homo sapien
cttggttgtctaggctgcctctcct

SEQ ID NO: 1315604 - DNA, 25 bp, Homo sapien
tgctgccacttggttgtctaggctg

SEQ ID NO: 1315605 - DNA, 25 bp, Homo sapien
ctgctgccacttggttgtctaggct

SEQ ID NO: 1315606 - DNA, 25 bp, Homo sapien
ccacttggttgtctaggctgcctct

SEQ ID NO: 1315607 - DNA, 25 bp, Homo sapien
tgccctgcttcagccggtcaatgtg

SEQ ID NO: 1315608 - DNA, 25 bp, Homo sapien
cttgccctgcttcagccggtcaatg

SEQ ID NO: 1315609 - DNA, 25 bp, Homo sapien
gcttcagccggtcaatgtggtagga

SEQ ID NO: 1315610 - DNA, 25 bp, Homo sapien
ttcagccggtcaatgtggtaggaga

SEQ ID NO: 1315611 - DNA, 25 bp, Homo sapien
gcatcacatcctcgactgtccatga

SEQ ID NO: 1315612 - DNA, 25 bp, Homo sapien
tgaggatcagcttcccggacaaact

SEQ ID NO: 1315613 - DNA, 25 bp, Homo sapien
cgcggctctccaggtatcggtccga

SEQ ID NO: 1315614 - DNA, 25 bp, Homo sapien
tcagtcgagaggcatcgcggctctc

SEQ ID NO: 1315615 - DNA, 25 bp, Homo sapien
aaaatgattccatatcccttctttc

SEQ ID NO: 1315616 - DNA, 25 bp, Homo sapien
ccattgagtctgagtgtggttccaa

SEQ ID NO: 1315617 - DNA, 25 bp, Homo sapien
tagcctgcgcacagctgaggcagtg

SEQ ID NO: 1315618 - DNA, 25 bp, Homo sapien
tttgaggcagagtccattgagtctg

SEQ ID NO: 1315619 - DNA, 25 bp, Homo sapien
cgggccagactattccccaggacaa

SEQ ID NO: 1315620 - DNA, 25 bp, Homo sapien
gctcaaccatctggacatgtcagaa

SEQ ID NO: 1315621 - DNA, 25 bp, Homo sapien
tgcttctcggagcatgttagtctcc

SEQ ID NO: 1315622 - DNA, 25 bp, Homo sapien
gtaaagaatctgctcctatgttcca

SEQ ID NO: 1315623 - DNA, 25 bp, Homo sapien
gaatcgggtataatctggctctgcc

SEQ ID NO: 1315624 - DNA, 25 bp, Homo sapien
acccaatcactgtacaaagaacccg

SEQ ID NO: 1315625 - DNA, 25 bp, Homo sapien
gcggcagcacccaatcactgtacaa

SEQ ID NO: 1315626 - DNA, 25 bp, Homo sapien
caggcggcagcacccaatcactgta

SEQ ID NO: 1315627 - DNA, 25 bp, Homo sapien
ctgtacaaagaacccgaagcagatt

SEQ ID NO: 1315628 - DNA, 25 bp, Homo sapien
aaattgcttggcaactatgagctca

SEQ ID NO: 1315629 - DNA, 25 bp, Homo sapien
aatttgagcacatggtttggcacac

SEQ ID NO: 1315630 - DNA, 25 bp, Homo sapien
aatcagttcctcagcctaggccaca

SEQ ID NO: 1315631 - DNA, 25 bp, Homo sapien
taatgcttgggattcattcggagcc

SEQ ID NO: 1315632 - DNA, 25 bp, Homo sapien
gcatcgtccggagaaaagtcaaggg

SEQ ID NO: 1315633 - DNA, 25 bp, Homo sapien
gaaaggcaacgggaaggcatcgtcc

SEQ ID NO: 1315634 - DNA, 25 bp, Homo sapien
ggagcaactgggatcaaacaaacat

SEQ ID NO: 1315635 - DNA, 25 bp, Homo sapien
caccctaagggcagtcatgggaaaa

SEQ ID NO: 1315636 - DNA, 25 bp, Homo sapien
gcatctcttttggatgaggagagcc

SEQ ID NO: 1315637 - DNA, 25 bp, Homo sapien
gagccttggaggtcttcctgacacc

SEQ ID NO: 1315638 - DNA, 25 bp, Homo sapien
tattaagatggacagtatcaggtgc

SEQ ID NO: 1315639 - DNA, 25 bp, Homo sapien
tttaagctgtggtcccacgaaggtc

SEQ ID NO: 1315640 - DNA, 25 bp, Homo sapien
cacaaggaaccagtgtcatgggcaa

SEQ ID NO: 1315641 - DNA, 25 bp, Homo sapien
aacttaatagtcactgggaccagtg

SEQ ID NO: 1315642 - DNA, 25 bp, Homo sapien
cagagaggaacctgagaatcccaaa

SEQ ID NO: 1315643 - DNA, 25 bp, Homo sapien
ggctttaaccactgtgaatcttggg

SEQ ID NO: 1315644 - DNA, 25 bp, Homo sapien
atacatgttcacatatctctacctg

SEQ ID NO: 1315645 - DNA, 25 bp, Homo sapien
accagcctcttatttgatccagcca

SEQ ID NO: 1315646 - DNA, 25 bp, Homo sapien
ttgatccagccacatgcatagttct

SEQ ID NO: 1315647 - DNA, 25 bp, Homo sapien
tgggccagagtacctctgtgctctg

SEQ ID NO: 1315648 - DNA, 25 bp, Homo sapien
tctagcagaagcgtgtagccaggca

SEQ ID NO: 1315649 - DNA, 25 bp, Homo sapien
gggtgactacctgctatatcggaag

SEQ ID NO: 1315650 - DNA, 25 bp, Homo sapien
aaagacagctcttgtacagatcgag

SEQ ID NO: 1315651 - DNA, 25 bp, Homo sapien
tgctgagcacccacgatgagaaaca

SEQ ID NO: 1315652 - DNA, 25 bp, Homo sapien
ttttctcagagactctggtactgaa

SEQ ID NO: 1315653 - DNA, 25 bp, Homo sapien
ctgaaagaaagcaatctagcatggg

SEQ ID NO: 1315654 - DNA, 25 bp, Homo sapien
ggtgaggagaagttccctccataga

SEQ ID NO: 1315655 - DNA, 25 bp, Homo sapien
gcaacattctaactgcaagtcagaa

SEQ ID NO: 1315656 - DNA, 25 bp, Homo sapien
tttttgacctgcttgcaagtcacat

SEQ ID NO: 1315657 - DNA, 25 bp, Homo sapien
tgcaagtcacataagcaatacggat

SEQ ID NO: 1315658 - DNA, 25 bp, Homo sapien
tcacataagcaatacggatttgggt

SEQ ID NO: 1315659 - DNA, 25 bp, Homo sapien
caatacggatttgggtacagaagta

SEQ ID NO: 1315660 - DNA, 25 bp, Homo sapien
atgagggaaagggggaaggagaatg

SEQ ID NO: 1315661 - DNA, 25 bp, Homo sapien
gtgtcctgggttccagatgagagac

SEQ ID NO: 1315662 - DNA, 25 bp, Homo sapien
tcctgggttccagatgagagacgca

SEQ ID NO: 1315663 - DNA, 25 bp, Homo sapien
tttcttccctcccttgttctgtgtc

SEQ ID NO: 1315664 - DNA, 25 bp, Homo sapien
ctatgtttaaggctgagcttttctt

SEQ ID NO: 1315665 - DNA, 25 bp, Homo sapien
ctgtggctgtactctatggcagtga

SEQ ID NO: 1315666 - DNA, 25 bp, Homo sapien
gccaaacagattgtcactacgaagg

SEQ ID NO: 1315667 - DNA, 25 bp, Homo sapien
tgagggtatgctgttcccggtcaaa

SEQ ID NO: 1315668 - DNA, 25 bp, Homo sapien
gacaagtgagtctgtgtaaagggct

SEQ ID NO: 1315669 - DNA, 25 bp, Homo sapien
agtaaacagggccaagcatgtcagc

SEQ ID NO: 1315670 - DNA, 25 bp, Homo sapien
agcgctaggcaggacgagtccagcc

SEQ ID NO: 1315671 - DNA, 25 bp, Homo sapien
cagggccaagcatgtcagcctggca

SEQ ID NO: 1315672 - DNA, 25 bp, Homo sapien
gcagtggagtacagcgctaggcagg

SEQ ID NO: 1315673 - DNA, 25 bp, Homo sapien
cagaggtatgcataaggctcagagg

SEQ ID NO: 1315674 - DNA, 25 bp, Homo sapien
gagcctgcaggtatgaagtgggaac

SEQ ID NO: 1315675 - DNA, 25 bp, Homo sapien
cctgcaggtatgaagtgggaaccag

SEQ ID NO: 1315676 - DNA, 25 bp, Homo sapien
aatctgtgggtattctccttggcag

SEQ ID NO: 1315677 - DNA, 25 bp, Homo sapien
cacagtcgatacaggcctggacagc

SEQ ID NO: 1315678 - DNA, 25 bp, Homo sapien
tgaagacggttttctggtgataagc

SEQ ID NO: 1315679 - DNA, 25 bp, Homo sapien
tggtccaaaatggtcagggagttgc

SEQ ID NO: 1315680 - DNA, 25 bp, Homo sapien
ctgctgcaacaccacagaggcacgg

SEQ ID NO: 1315681 - DNA, 25 bp, Homo sapien
aggtctcagggcaaactattagccc

SEQ ID NO: 1315682 - DNA, 25 bp, Homo sapien
gaaaacctaaactgtacttgatgac

SEQ ID NO: 1315683 - DNA, 25 bp, Homo sapien
gagacagacaggtgaataagccgaa

SEQ ID NO: 1315684 - DNA, 25 bp, Homo sapien
aggtctggcacataaggagtttgga

SEQ ID NO: 1315685 - DNA, 25 bp, Homo sapien
tgctggtatccggttcaggagtgct

SEQ ID NO: 1315686 - DNA, 25 bp, Homo sapien
gggtacagtgctggtatccggttca

SEQ ID NO: 1315687 - DNA, 25 bp, Homo sapien
catcctggggtacagtgctggtatc

SEQ ID NO: 1315688 - DNA, 25 bp, Homo sapien
tacagtgctggtatccggttcagga

SEQ ID NO: 1315689 - DNA, 25 bp, Homo sapien
tcagtattcacatcggaggcaggat

SEQ ID NO: 1315690 - DNA, 25 bp, Homo sapien
gccctggttgatgttccaagacagt

SEQ ID NO: 1315691 - DNA, 25 bp, Homo sapien
ggatagggattctttggaatcacaa

SEQ ID NO: 1315692 - DNA, 25 bp, Homo sapien
ttgctgccaggtttgggacctctct

SEQ ID NO: 1315693 - DNA, 25 bp, Homo sapien
ctaaggacttttttgactctgccca

SEQ ID NO: 1315694 - DNA, 25 bp, Homo sapien
tctaaggacttttttgactctgccc

SEQ ID NO: 1315695 - DNA, 25 bp, Homo sapien
taaggacttttttgactctgcccat

SEQ ID NO: 1315696 - DNA, 25 bp, Homo sapien
gcagagacaatttcatcatagatcc

SEQ ID NO: 1315697 - DNA, 25 bp, Homo sapien
tatttgtttataagagggccctgag

SEQ ID NO: 1315698 - DNA, 25 bp, Homo sapien
tctgcccttaaacccatgcaatgag

SEQ ID NO: 1315699 - DNA, 25 bp, Homo sapien
tcagacattgggtagagaacaggac

SEQ ID NO: 1315700 - DNA, 25 bp, Homo sapien
cagtgcatccctataaaatcagtga

SEQ ID NO: 1315701 - DNA, 25 bp, Homo sapien
agtgatgaagctagctcaaacagtg

SEQ ID NO: 1315702 - DNA, 25 bp, Homo sapien
gacagtgcatccctataaaatcagt

SEQ ID NO: 1315703 - DNA, 25 bp, Homo sapien
cagtgatgaagctagctcaaacagt

SEQ ID NO: 1315704 - DNA, 25 bp, Homo sapien
aatgttagttgagagacacaacaaa

SEQ ID NO: 1315705 - DNA, 25 bp, Homo sapien
gcatgtcaaaaagcttatacatcat

SEQ ID NO: 1315706 - DNA, 25 bp, Homo sapien
aaaaatgttagttgagagacacaac

SEQ ID NO: 1315707 - DNA, 25 bp, Homo sapien
aaaaaatgttagttgagagacacaa

SEQ ID NO: 1315708 - DNA, 25 bp, Homo sapien
tgggccttggatatactatgtgcag

SEQ ID NO: 1315709 - DNA, 25 bp, Homo sapien
caattatgctttacacatggtgggt

SEQ ID NO: 1315710 - DNA, 25 bp, Homo sapien
caagtgacagcacacgtattgggca

SEQ ID NO: 1315711 - DNA, 25 bp, Homo sapien
tatattccatgtagtccccaaagct

SEQ ID NO: 1315712 - DNA, 25 bp, Homo sapien
ggaaacaaatcttagtgccctgtgc

SEQ ID NO: 1315713 - DNA, 25 bp, Homo sapien
tctggaaacaaatcttagtgccctg

SEQ ID NO: 1315714 - DNA, 25 bp, Homo sapien
ctgagaggtgagtgaatatgggctc

SEQ ID NO: 1315715 - DNA, 25 bp, Homo sapien
ccctgtgccactcttacttttggcc

SEQ ID NO: 1315716 - DNA, 25 bp, Homo sapien
acagcttgttaactggcatccctga

SEQ ID NO: 1315717 - DNA, 25 bp, Homo sapien
tccagcatctgaatccgtcctttca

SEQ ID NO: 1315718 - DNA, 25 bp, Homo sapien
gactccagcatctgaatccgtcctt

SEQ ID NO: 1315719 - DNA, 25 bp, Homo sapien
tgttaactggcatccctgactccag

SEQ ID NO: 1315720 - DNA, 25 bp, Homo sapien
tttctgccctagaatcccaaagtga

SEQ ID NO: 1315721 - DNA, 25 bp, Homo sapien
tctttaagtatggaaagcactttcc

SEQ ID NO: 1315722 - DNA, 25 bp, Homo sapien
gcgcctagcctaggattacaattta

SEQ ID NO: 1315723 - DNA, 25 bp, Homo sapien
gattgtggcataatttcgtatgtgg

SEQ ID NO: 1315724 - DNA, 25 bp, Homo sapien
tccagaccagtgtaagaatcctgta

SEQ ID NO: 1315725 - DNA, 25 bp, Homo sapien
cctccagaccagtgtaagaatcctg

SEQ ID NO: 1315726 - DNA, 25 bp, Homo sapien
ccagaccagtgtaagaatcctgtac

SEQ ID NO: 1315727 - DNA, 25 bp, Homo sapien
ctccagaccagtgtaagaatcctgt

SEQ ID NO: 1315728 - DNA, 25 bp, Homo sapien
gtgagccacgatgttgagtccgatt

SEQ ID NO: 1315729 - DNA, 25 bp, Homo sapien
cacgatgttgagtccgattttgaaa

SEQ ID NO: 1315730 - DNA, 25 bp, Homo sapien
gagccacgatgttgagtccgatttt

SEQ ID NO: 1315731 - DNA, 25 bp, Homo sapien
ttgagtccgattttgaaatttttgc

SEQ ID NO: 1315732 - DNA, 25 bp, Homo sapien
tatcaatccacatagggagctaagg

SEQ ID NO: 1315733 - DNA, 25 bp, Homo sapien
tactctaacaggtatgctaaagtgc

SEQ ID NO: 1315734 - DNA, 25 bp, Homo sapien
gggtctcatgttgtctcgctgctat

SEQ ID NO: 1315735 - DNA, 25 bp, Homo sapien
aaaggaggcctggttgaccatgtac

SEQ ID NO: 1315736 - DNA, 25 bp, Homo sapien
tctagactcagatatcaacagagcc

SEQ ID NO: 1315737 - DNA, 25 bp, Homo sapien
ggtcctgacaggtggctctactaaa

SEQ ID NO: 1315738 - DNA, 25 bp, Homo sapien
tgcatactaatgaccagaaggtagg

SEQ ID NO: 1315739 - DNA, 25 bp, Homo sapien
caaatgaagctttgaagaagggcca

SEQ ID NO: 1315740 - DNA, 25 bp, Homo sapien
aaggaatgcatatccagcaacctgg

SEQ ID NO: 1315741 - DNA, 25 bp, Homo sapien
tggacacaaagaccgtcagctctgt

SEQ ID NO: 1315742 - DNA, 25 bp, Homo sapien
gaaaatctaaggactccagagacac

SEQ ID NO: 1315743 - DNA, 25 bp, Homo sapien
gaacagtgaattccctaggcatgaa

SEQ ID NO: 1315744 - DNA, 25 bp, Homo sapien
atctcaccagcaatgatcgagaatt

SEQ ID NO: 1315745 - DNA, 25 bp, Homo sapien
taagatgcatctatactgtagcatg

SEQ ID NO: 1315746 - DNA, 25 bp, Homo sapien
tacttctgtctatgtgtatttgcca

SEQ ID NO: 1315747 - DNA, 25 bp, Homo sapien
ctatgagtggacttactgggtcaca

SEQ ID NO: 1315748 - DNA, 25 bp, Homo sapien
gaatggaggtgtcatgagcacagca

SEQ ID NO: 1315749 - DNA, 25 bp, Homo sapien
atctgtttcacccaactagaatgga

SEQ ID NO: 1315750 - DNA, 25 bp, Homo sapien
gatcctcagacaataagaagggtga

SEQ ID NO: 1315751 - DNA, 25 bp, Homo sapien
gcttggcttacaattaggtgctcaa

SEQ ID NO: 1315752 - DNA, 25 bp, Homo sapien
caagagcacgtagatgggcctttac

SEQ ID NO: 1315753 - DNA, 25 bp, Homo sapien
tcaagagcacgtagatgggccttta

SEQ ID NO: 1315754 - DNA, 25 bp, Homo sapien
ccgaacctccccaatagtggctggg

SEQ ID NO: 1315755 - DNA, 25 bp, Homo sapien
tgcaggttgtctccagtcaaggaac

SEQ ID NO: 1315756 - DNA, 25 bp, Homo sapien
atgtctcgggagtcgaagcggcacc

SEQ ID NO: 1315757 - DNA, 25 bp, Homo sapien
ccatcaaaagtgacaagcacctctg

SEQ ID NO: 1315758 - DNA, 25 bp, Homo sapien
tacttggagtcttttggtagatccc

SEQ ID NO: 1315759 - DNA, 25 bp, Homo sapien
gagacttaactagcagcataggcaa

SEQ ID NO: 1315760 - DNA, 25 bp, Homo sapien
tactcctgagttacataagtgctag

SEQ ID NO: 1315761 - DNA, 25 bp, Homo sapien
gaaaattcaactgatagactcactg

SEQ ID NO: 1315762 - DNA, 25 bp, Homo sapien
caagaagacgcattcagccgaaatc

SEQ ID NO: 1315763 - DNA, 25 bp, Homo sapien
caaaaggaacatgggccaagaagac

SEQ ID NO: 1315764 - DNA, 25 bp, Homo sapien
tctgctccatttagcgtcttcaaaa

SEQ ID NO: 1315765 - DNA, 25 bp, Homo sapien
atctctgctccatttagcgtcttca

SEQ ID NO: 1315766 - DNA, 25 bp, Homo sapien
aaaatcaaggtgtcgtcattgctac

SEQ ID NO: 1315767 - DNA, 25 bp, Homo sapien
tctaggccctttcaatgaacagtgc

SEQ ID NO: 1315768 - DNA, 25 bp, Homo sapien
attacaggtgtatcaggtgattttt

SEQ ID NO: 1315769 - DNA, 25 bp, Homo sapien
ctgagatgtaattgcttctaggccc

SEQ ID NO: 1315770 - DNA, 25 bp, Homo sapien
tactttctgcttacatggatttggc

SEQ ID NO: 1315771 - DNA, 25 bp, Homo sapien
ggtgctgtattatctaatccaaggt

SEQ ID NO: 1315772 - DNA, 25 bp, Homo sapien
ggttttagtactctgtgaacataca

SEQ ID NO: 1315773 - DNA, 25 bp, Homo sapien
aaagaggcccaatacctattagcag

SEQ ID NO: 1315774 - DNA, 25 bp, Homo sapien
ccaacctactattatgtcttgatga

SEQ ID NO: 1315775 - DNA, 25 bp, Homo sapien
tgtcttccatgtatcttctatcagg

SEQ ID NO: 1315776 - DNA, 25 bp, Homo sapien
catgtgtataaatcaggtttaggca

SEQ ID NO: 1315777 - DNA, 25 bp, Homo sapien
taccagtgtctattgaagagcagaa

SEQ ID NO: 1315778 - DNA, 25 bp, Homo sapien
gatctacctgatttcttaaagcctt

SEQ ID NO: 1315779 - DNA, 25 bp, Homo sapien
gctgtgttgagccttcattagtaca

SEQ ID NO: 1315780 - DNA, 25 bp, Homo sapien
cccctgttcaactaagagctattta

SEQ ID NO: 1315781 - DNA, 25 bp, Homo sapien
caccttgggtggtttcatagtagag

SEQ ID NO: 1315782 - DNA, 25 bp, Homo sapien
caatctgaatcaaaagtaggtccta

SEQ ID NO: 1315783 - DNA, 25 bp, Homo sapien
atttattcctcagaatgggcttggg

SEQ ID NO: 1315784 - DNA, 25 bp, Homo sapien
gttgctgtgcaacaggtttcctctg

SEQ ID NO: 1315785 - DNA, 25 bp, Homo sapien
gagtctattgtcctgttgttcacct

SEQ ID NO: 1315786 - DNA, 25 bp, Homo sapien
gaaagggtgaccaacctagtagcac

SEQ ID NO: 1315787 - DNA, 25 bp, Homo sapien
taaaaaggtagttcctgcctctcta

SEQ ID NO: 1315788 - DNA, 25 bp, Homo sapien
gcactgagcactctagtgttctgat

SEQ ID NO: 1315789 - DNA, 25 bp, Homo sapien
tctctataccaaaaagactagaaag

SEQ ID NO: 1315790 - DNA, 25 bp, Homo sapien
cgaaggcgggcacctgtcagtccaa

SEQ ID NO: 1315791 - DNA, 25 bp, Homo sapien
ctactgtggcaatacaggtggatgt

SEQ ID NO: 1315792 - DNA, 25 bp, Homo sapien
aagaggtggctgtagcataccccca

SEQ ID NO: 1315793 - DNA, 25 bp, Homo sapien
ttttgttgtcgctcccatcaaggcg

SEQ ID NO: 1315794 - DNA, 25 bp, Homo sapien
tgaactcgttgcttggaggtgtgta

SEQ ID NO: 1315795 - DNA, 25 bp, Homo sapien
tgatcttgaactcgttgcttggagg

SEQ ID NO: 1315796 - DNA, 25 bp, Homo sapien
tcttgaactcgttgcttggaggtgt

SEQ ID NO: 1315797 - DNA, 25 bp, Homo sapien
gatcttgaactcgttgcttggaggt

SEQ ID NO: 1315798 - DNA, 25 bp, Homo sapien
tactttccaacgaagcatcaaatag

SEQ ID NO: 1315799 - DNA, 25 bp, Homo sapien
tcagattggttatagctgggccagg

SEQ ID NO: 1315800 - DNA, 25 bp, Homo sapien
tagacagattaagagtaaaacccca

SEQ ID NO: 1315801 - DNA, 25 bp, Homo sapien
tatctaccacacagactattgaggg

SEQ ID NO: 1315802 - DNA, 25 bp, Homo sapien
tatgtggataaccagctgtacctgc

SEQ ID NO: 1315803 - DNA, 25 bp, Homo sapien
tacctgcaccagttgttgaaaaacc

SEQ ID NO: 1315804 - DNA, 25 bp, Homo sapien
ggtccatgatccacttgaagttaat

SEQ ID NO: 1315805 - DNA, 25 bp, Homo sapien
tgtatatggcatagaggtagagtcc

SEQ ID NO: 1315806 - DNA, 25 bp, Homo sapien
tgatactgatgatcccgagtctgtg

SEQ ID NO: 1315807 - DNA, 25 bp, Homo sapien
cgagtctgtgtaggcctagggtaat

SEQ ID NO: 1315808 - DNA, 25 bp, Homo sapien
atgatcccgagtctgtgtaggccta

SEQ ID NO: 1315809 - DNA, 25 bp, Homo sapien
tcccgagtctgtgtaggcctagggt

SEQ ID NO: 1315810 - DNA, 25 bp, Homo sapien
gcctgatacgggtgtacaagtttta

SEQ ID NO: 1315811 - DNA, 25 bp, Homo sapien
ccattcaaggtaagtgcctgatacg

SEQ ID NO: 1315812 - DNA, 25 bp, Homo sapien
gtttacatagacgaataccattgtg

SEQ ID NO: 1315813 - DNA, 25 bp, Homo sapien
gatatgtttacatagacgaatacca

SEQ ID NO: 1315814 - DNA, 25 bp, Homo sapien
ctgcttgaagcaatggacaggcgct

SEQ ID NO: 1315815 - DNA, 25 bp, Homo sapien
atggacaggcgctgggactgaacat

SEQ ID NO: 1315816 - DNA, 25 bp, Homo sapien
aagcaatggacaggcgctgggactg

SEQ ID NO: 1315817 - DNA, 25 bp, Homo sapien
tgcttgaagcaatggacaggcgctg

SEQ ID NO: 1315818 - DNA, 25 bp, Homo sapien
gcttttaacacccaatatggttgga

SEQ ID NO: 1315819 - DNA, 25 bp, Homo sapien
cagcttttaacacccaatatggttg

SEQ ID NO: 1315820 - DNA, 25 bp, Homo sapien
agtggcagcttttaacacccaatat

SEQ ID NO: 1315821 - DNA, 25 bp, Homo sapien
ggcagcttttaacacccaatatggt

SEQ ID NO: 1315822 - DNA, 25 bp, Homo sapien
ggtcccagagaatctcacaagctaa

SEQ ID NO: 1315823 - DNA, 25 bp, Homo sapien
cagagaatctcacaagctaaaacac

SEQ ID NO: 1315824 - DNA, 25 bp, Homo sapien
gaaggtcccagagaatctcacaagc

SEQ ID NO: 1315825 - DNA, 25 bp, Homo sapien
acaagctaaaacactgtagcaaacc

SEQ ID NO: 1315826 - DNA, 25 bp, Homo sapien
ttcttgaagtttcctctgtagtgga

SEQ ID NO: 1315827 - DNA, 25 bp, Homo sapien
cttgaagtttcctctgtagtggagc

SEQ ID NO: 1315828 - DNA, 25 bp, Homo sapien
ttcctctgtagtggagcagcacaga

SEQ ID NO: 1315829 - DNA, 25 bp, Homo sapien
ctctgtagtggagcagcacagagcc

SEQ ID NO: 1315830 - DNA, 25 bp, Homo sapien
ttgggccatgcaaaaagcactagat

SEQ ID NO: 1315831 - DNA, 25 bp, Homo sapien
tgggccatgcaaaaagcactagatg

SEQ ID NO: 1315832 - DNA, 25 bp, Homo sapien
aagatctctttaggcttatcagcca

SEQ ID NO: 1315833 - DNA, 25 bp, Homo sapien
agcctcactcagatacccaggatgg

SEQ ID NO: 1315834 - DNA, 25 bp, Homo sapien
tattcctaccgaaagtacacaggtg

SEQ ID NO: 1315835 - DNA, 25 bp, Homo sapien
tgtaaccccgatctggactcaagca

SEQ ID NO: 1315836 - DNA, 25 bp, Homo sapien
gaatgcttcacttcaaagaatgtca

SEQ ID NO: 1315837 - DNA, 25 bp, Homo sapien
taaagtctgagtatagccgctgaac

SEQ ID NO: 1315838 - DNA, 25 bp, Homo sapien
gaaaatcataataatcctccaaagt

SEQ ID NO: 1315839 - DNA, 25 bp, Homo sapien
tcagctcacattcatagaatgcttc

SEQ ID NO: 1315840 - DNA, 25 bp, Homo sapien
gtcactgggcaatggaaagtaatat

SEQ ID NO: 1315841 - DNA, 25 bp, Homo sapien
aagaggaggcaaatagacaatgata

SEQ ID NO: 1315842 - DNA, 25 bp, Homo sapien
gtgtcactgggcaatggaaagtaat

SEQ ID NO: 1315843 - DNA, 25 bp, Homo sapien
gcaagaggaggcaaatagacaatga

SEQ ID NO: 1315844 - DNA, 25 bp, Homo sapien
gttagcttggtctgtggcctactga

SEQ ID NO: 1315845 - DNA, 25 bp, Homo sapien
ggtttctgagacagagacacgtgga

SEQ ID NO: 1315846 - DNA, 25 bp, Homo sapien
gataattaggcagacaagagcacag

SEQ ID NO: 1315847 - DNA, 25 bp, Homo sapien
ggcctactgataagcaggacttgat

SEQ ID NO: 1315848 - DNA, 25 bp, Homo sapien
cataagtcattaagacaaacatacc

SEQ ID NO: 1315849 - DNA, 25 bp, Homo sapien
aaaaatgttggagcataagtcatta

SEQ ID NO: 1315850 - DNA, 25 bp, Homo sapien
taagacaaacataccaacatgatgg

SEQ ID NO: 1315851 - DNA, 25 bp, Homo sapien
tggagcataagtcattaagacaaac

SEQ ID NO: 1315852 - DNA, 25 bp, Homo sapien
ttgggatgcagactctgataggtga

SEQ ID NO: 1315853 - DNA, 25 bp, Homo sapien
cttgatattgggatgcagactctga

SEQ ID NO: 1315854 - DNA, 25 bp, Homo sapien
tattgggatgcagactctgataggt

SEQ ID NO: 1315855 - DNA, 25 bp, Homo sapien
gatattgggatgcagactctgatag

SEQ ID NO: 1315856 - DNA, 25 bp, Homo sapien
acaagaactcgggatctgctgaacg

SEQ ID NO: 1315857 - DNA, 25 bp, Homo sapien
tcactgggacgccctggcactgtga

SEQ ID NO: 1315858 - DNA, 25 bp, Homo sapien
gctgaacggcgtggctaaaagagtt

SEQ ID NO: 1315859 - DNA, 25 bp, Homo sapien
tcctgctaggggctgaacactcact

SEQ ID NO: 1315860 - DNA, 25 bp, Homo sapien
gtaacaccaaaagggctgaaatatg

SEQ ID NO: 1315861 - DNA, 25 bp, Homo sapien
ctgtaacaccaaaagggctgaaata

SEQ ID NO: 1315862 - DNA, 25 bp, Homo sapien
tgtaacaccaaaagggctgaaatat

SEQ ID NO: 1315863 - DNA, 25 bp, Homo sapien
aacaccaaaagggctgaaatatgcc

SEQ ID NO: 1315864 - DNA, 25 bp, Homo sapien
taactgacttcaacattacatcctc

SEQ ID NO: 1315865 - DNA, 25 bp, Homo sapien
tctacctgttgaccaatgtatccct

SEQ ID NO: 1315866 - DNA, 25 bp, Homo sapien
gaatgatcacaccagagtatagcaa

SEQ ID NO: 1315867 - DNA, 25 bp, Homo sapien
tcaacatgctctgcaatagaacacc

SEQ ID NO: 1315868 - DNA, 25 bp, Homo sapien
tcaatgtgtgttcctgtcaaaaagc

SEQ ID NO: 1315869 - DNA, 25 bp, Homo sapien
cctatttcattggtagacttgtctg

SEQ ID NO: 1315870 - DNA, 25 bp, Homo sapien
caattgactgtagatgcatgggttt

SEQ ID NO: 1315871 - DNA, 25 bp, Homo sapien
tctgtccagacctctagcagtttta

SEQ ID NO: 1315872 - DNA, 25 bp, Homo sapien
catcagtgagattggtctgcagtct

SEQ ID NO: 1315873 - DNA, 25 bp, Homo sapien
atttccatcacatcccaagggcaaa

SEQ ID NO: 1315874 - DNA, 25 bp, Homo sapien
tatactacggaatatggtttcttag

SEQ ID NO: 1315875 - DNA, 25 bp, Homo sapien
ttgttctaggtcttataggaaaagc

SEQ ID NO: 1315876 - DNA, 25 bp, Homo sapien
tgatttcatcgatcctttcttctgc

SEQ ID NO: 1315877 - DNA, 25 bp, Homo sapien
cctttcagggttttgaatgtatcat

SEQ ID NO: 1315878 - DNA, 25 bp, Homo sapien
tgtcccacaggtctcataaactatc

SEQ ID NO: 1315879 - DNA, 25 bp, Homo sapien
atcttttcgggttcatcttatttgg

SEQ ID NO: 1315880 - DNA, 25 bp, Homo sapien
taccgtagagtaggagccagaatct

SEQ ID NO: 1315881 - DNA, 25 bp, Homo sapien
tgatggtcccctcgagcttaggatg

SEQ ID NO: 1315882 - DNA, 25 bp, Homo sapien
tatcactgagattagctagagggct

SEQ ID NO: 1315883 - DNA, 25 bp, Homo sapien
taagccccttctggagaacaaatgg

SEQ ID NO: 1315884 - DNA, 25 bp, Homo sapien
tagaccctcggtggaagctgtgaaa

SEQ ID NO: 1315885 - DNA, 25 bp, Homo sapien
tctagagatctgcataggccaatcc

SEQ ID NO: 1315886 - DNA, 25 bp, Homo sapien
taaagtccagcgatgtgcttctgca

SEQ ID NO: 1315887 - DNA, 25 bp, Homo sapien
gacactcgttgtgtggacatacgcc

SEQ ID NO: 1315888 - DNA, 25 bp, Homo sapien
taaatgcccatatctaactgcggct

SEQ ID NO: 1315889 - DNA, 25 bp, Homo sapien
ccagagttggtgaattaagagccag

SEQ ID NO: 1315890 - DNA, 25 bp, Homo sapien
caattttatggcacaatgcccaggg

SEQ ID NO: 1315891 - DNA, 25 bp, Homo sapien
tgccccatgggtaggaatctttcaa

SEQ ID NO: 1315892 - DNA, 25 bp, Homo sapien
tatgtcgaagagttatctgcactcc

SEQ ID NO: 1315893 - DNA, 25 bp, Homo sapien
gaacatgcagggagctcaaacaaca

SEQ ID NO: 1315894 - DNA, 25 bp, Homo sapien
aattacacaattagacatcacgaga

SEQ ID NO: 1315895 - DNA, 25 bp, Homo sapien
tcatcttaccctagttacagtggct

SEQ ID NO: 1315896 - DNA, 25 bp, Homo sapien
tctggactatcaaggagaaactgaa

SEQ ID NO: 1315897 - DNA, 25 bp, Homo sapien
taccagcaataaccatgtgaccagt

SEQ ID NO: 1315898 - DNA, 25 bp, Homo sapien
tattactccacgttgtgattagggc

SEQ ID NO: 1315899 - DNA, 25 bp, Homo sapien
aatccaggcagaactacaaatgggc

SEQ ID NO: 1315900 - DNA, 25 bp, Homo sapien
catatgggattggactcatgccacc

SEQ ID NO: 1315901 - DNA, 25 bp, Homo sapien
catactcaattaagggtgctttaca

SEQ ID NO: 1315902 - DNA, 25 bp, Homo sapien
tacattgcagcaacattggccagtg

SEQ ID NO: 1315903 - DNA, 25 bp, Homo sapien
ccctaatactaggtcagagtgagta

SEQ ID NO: 1315904 - DNA, 25 bp, Homo sapien
cgatcaaacgactccgagctaaagg

SEQ ID NO: 1315905 - DNA, 25 bp, Homo sapien
agacgatcaaacgactccgagctaa

SEQ ID NO: 1315906 - DNA, 25 bp, Homo sapien
aagttcgaacccatggcaaagaagc

SEQ ID NO: 1315907 - DNA, 25 bp, Homo sapien
aacacagctccccaccagcaatgga

SEQ ID NO: 1315908 - DNA, 25 bp, Homo sapien
acgaaaaaaagtcctggaccagatg

SEQ ID NO: 1315909 - DNA, 25 bp, Homo sapien
ccagatgtacaaggaggacctggta

SEQ ID NO: 1315910 - DNA, 25 bp, Homo sapien
taccagatgtacaaggaggacctgg

SEQ ID NO: 1315911 - DNA, 25 bp, Homo sapien
agatgtacaaggaggacctggtacc

SEQ ID NO: 1315912 - DNA, 25 bp, Homo sapien
tggtagtgataccaaaacagaggta

SEQ ID NO: 1315913 - DNA, 25 bp, Homo sapien
catggtagtgataccaaaacagagg

SEQ ID NO: 1315914 - DNA, 25 bp, Homo sapien
tagtgataccaaaacagaggtatag

SEQ ID NO: 1315915 - DNA, 25 bp, Homo sapien
ggtagtgataccaaaacagaggtat

SEQ ID NO: 1315916 - DNA, 25 bp, Homo sapien
ggcagaaaggcatcaaatagttcaa

SEQ ID NO: 1315917 - DNA, 25 bp, Homo sapien
tcaaaaagttcggtggcccatgcct

SEQ ID NO: 1315918 - DNA, 25 bp, Homo sapien
gactcttggtacaaactactgaaac

SEQ ID NO: 1315919 - DNA, 25 bp, Homo sapien
acttctaggaagaaatagactcttg

SEQ ID NO: 1315920 - DNA, 25 bp, Homo sapien
cgagtagtctaattattcgtgagga

SEQ ID NO: 1315921 - DNA, 25 bp, Homo sapien
tgaggaattccttaaagccagtcct

SEQ ID NO: 1315922 - DNA, 25 bp, Homo sapien
tggctataaagaaaaggataacgag

SEQ ID NO: 1315923 - DNA, 25 bp, Homo sapien
tgctaggtctcttaatccctcttac

SEQ ID NO: 1315924 - DNA, 25 bp, Homo sapien
ggatccaccaataccttgctctgac

SEQ ID NO: 1315925 - DNA, 25 bp, Homo sapien
gggatttatccctggatccaccaat

SEQ ID NO: 1315926 - DNA, 25 bp, Homo sapien
gacttctgacaagtcagtttctttg

SEQ ID NO: 1315927 - DNA, 25 bp, Homo sapien
cattaggctgcatagtcaatggact

SEQ ID NO: 1315928 - DNA, 25 bp, Homo sapien
tcttggctccaactgaatccatatg

SEQ ID NO: 1315929 - DNA, 25 bp, Homo sapien
tagaggggcttgctagcatctccat

SEQ ID NO: 1315930 - DNA, 25 bp, Homo sapien
gaagtcacagtccattctttgtctc

SEQ ID NO: 1315931 - DNA, 25 bp, Homo sapien
tgatcgctgatgaagtcacagtcca

SEQ ID NO: 1315932 - DNA, 25 bp, Homo sapien
caatggatgatctgtatgccagtaa

SEQ ID NO: 1315933 - DNA, 25 bp, Homo sapien
actaaaggtattctctggaaaatgc

SEQ ID NO: 1315934 - DNA, 25 bp, Homo sapien
cacgaatagtacagatagatccaaa

SEQ ID NO: 1315935 - DNA, 25 bp, Homo sapien
tacaaataagagtgtaggaacacga

SEQ ID NO: 1315936 - DNA, 25 bp, Homo sapien
ccatgtttccgctgcgcagggaggg

SEQ ID NO: 1315937 - DNA, 25 bp, Homo sapien
cgccatgtttccgctgcgcagggag

SEQ ID NO: 1315938 - DNA, 25 bp, Homo sapien
gccatgtttccgctgcgcagggagg

SEQ ID NO: 1315939 - DNA, 25 bp, Homo sapien
ccgccatgtttccgctgcgcaggga

SEQ ID NO: 1315940 - DNA, 25 bp, Homo sapien
tctgcgtcctgtagatgggaaaact

SEQ ID NO: 1315941 - DNA, 25 bp, Homo sapien
cagctctccggtctgcgtcctgtag

SEQ ID NO: 1315942 - DNA, 25 bp, Homo sapien
cggtctgcgtcctgtagatgggaaa

SEQ ID NO: 1315943 - DNA, 25 bp, Homo sapien
tctccggtctgcgtcctgtagatgg

SEQ ID NO: 1315944 - DNA, 25 bp, Homo sapien
tgggctcaaaacacccaagcctctg

SEQ ID NO: 1315945 - DNA, 25 bp, Homo sapien
gttgggctcaaaacacccaagcctc

SEQ ID NO: 1315946 - DNA, 25 bp, Homo sapien
atctcctaatagcctgccagcattc

SEQ ID NO: 1315947 - DNA, 25 bp, Homo sapien
agttgaaaaggcctgcatctcctaa

SEQ ID NO: 1315948 - DNA, 25 bp, Homo sapien
gtctggtgagttttaggaacgttca

SEQ ID NO: 1315949 - DNA, 25 bp, Homo sapien
tggtgagttttaggaacgttcacca

SEQ ID NO: 1315950 - DNA, 25 bp, Homo sapien
tccccgggcatacagaagacccttg

SEQ ID NO: 1315951 - DNA, 25 bp, Homo sapien
tgctgccttccccgggcatacagaa

SEQ ID NO: 1315952 - DNA, 25 bp, Homo sapien
gtttgtgggagtgctataactacct

SEQ ID NO: 1315953 - DNA, 25 bp, Homo sapien
gagtgctataactacctttgttgtg

SEQ ID NO: 1315954 - DNA, 25 bp, Homo sapien
tgtgggagtgctataactacctttg

SEQ ID NO: 1315955 - DNA, 25 bp, Homo sapien
gggagtgctataactacctttgttg

SEQ ID NO: 1315956 - DNA, 25 bp, Homo sapien
aacccagactggacacgaggtggcg

SEQ ID NO: 1315957 - DNA, 25 bp, Homo sapien
tggcaatggaggtgattcaggatca

SEQ ID NO: 1315958 - DNA, 25 bp, Homo sapien
cttcatgcactgttggctccatctg

SEQ ID NO: 1315959 - DNA, 25 bp, Homo sapien
gatcaagaaatcatccagggaaagg

SEQ ID NO: 1315960 - DNA, 25 bp, Homo sapien
catttgggggccagcttttgacagt

SEQ ID NO: 1315961 - DNA, 25 bp, Homo sapien
gttttcaattgcataattcccctcc

SEQ ID NO: 1315962 - DNA, 25 bp, Homo sapien
ctgtgaaaagtagagcgagtgcctt

SEQ ID NO: 1315963 - DNA, 25 bp, Homo sapien
agtagagcgagtgcctttttcagtc

SEQ ID NO: 1315964 - DNA, 25 bp, Homo sapien
tatggtactgttagaaccctgatga

SEQ ID NO: 1315965 - DNA, 25 bp, Homo sapien
tgggaaggcaaaccactgtccaggc

SEQ ID NO: 1315966 - DNA, 25 bp, Homo sapien
tattataggatgtcccacatgacca

SEQ ID NO: 1315967 - DNA, 25 bp, Homo sapien
gagaaaaggaccaaagtgttagctc

SEQ ID NO: 1315968 - DNA, 25 bp, Homo sapien
aggagacggagcatgaaattaatga

SEQ ID NO: 1315969 - DNA, 25 bp, Homo sapien
tgaaattaatgagcgtgcgggagct

SEQ ID NO: 1315970 - DNA, 25 bp, Homo sapien
cggagcatgaaattaatgagcgtgc

SEQ ID NO: 1315971 - DNA, 25 bp, Homo sapien
agcgtgcgggagctggagtagtcac

SEQ ID NO: 1315972 - DNA, 25 bp, Homo sapien
atcagccctgccaatgaggagtgtg

SEQ ID NO: 1315973 - DNA, 25 bp, Homo sapien
cagccctgccaatgaggagtgtgag

SEQ ID NO: 1315974 - DNA, 25 bp, Homo sapien
ccagggccatcagccctgccaatga

SEQ ID NO: 1315975 - DNA, 25 bp, Homo sapien
gggccatcagccctgccaatgagga

SEQ ID NO: 1315976 - DNA, 25 bp, Homo sapien
tgcccctaggtggtgcagttttccc

SEQ ID NO: 1315977 - DNA, 25 bp, Homo sapien
ccctaggtggtgcagttttcccagg

SEQ ID NO: 1315978 - DNA, 25 bp, Homo sapien
agtgcccctaggtggtgcagttttc

SEQ ID NO: 1315979 - DNA, 25 bp, Homo sapien
gcccctaggtggtgcagttttccca

SEQ ID NO: 1315980 - DNA, 25 bp, Homo sapien
tgctgttaattcagtgcaggatcgg

SEQ ID NO: 1315981 - DNA, 25 bp, Homo sapien
ctgctgttaattcagtgcaggatcg

SEQ ID NO: 1315982 - DNA, 25 bp, Homo sapien
ttttgctgctgttaattcagtgcag

SEQ ID NO: 1315983 - DNA, 25 bp, Homo sapien
tgctgctgttaattcagtgcaggat

SEQ ID NO: 1315984 - DNA, 25 bp, Homo sapien
agaagcagagggaggtgcgtgtgtg

SEQ ID NO: 1315985 - DNA, 25 bp, Homo sapien
aagcagagggaggtgcgtgtgtgca

SEQ ID NO: 1315986 - DNA, 25 bp, Homo sapien
gggaggtgcgtgtgtgcatgcacat

SEQ ID NO: 1315987 - DNA, 25 bp, Homo sapien
gcagagggaggtgcgtgtgtgcatg

SEQ ID NO: 1315988 - DNA, 25 bp, Homo sapien
cctgctgtgagggagataggaaccc

SEQ ID NO: 1315989 - DNA, 25 bp, Homo sapien
tgctgtgagggagataggaaccctc

SEQ ID NO: 1315990 - DNA, 25 bp, Homo sapien
attcctgctgtgagggagataggaa

SEQ ID NO: 1315991 - DNA, 25 bp, Homo sapien
tgtgagggagataggaaccctccgt

SEQ ID NO: 1315992 - DNA, 25 bp, Homo sapien
ccctgggatcctgctgtcccctaag

SEQ ID NO: 1315993 - DNA, 25 bp, Homo sapien
tgggatcctgctgtcccctaagccc

SEQ ID NO: 1315994 - DNA, 25 bp, Homo sapien
gggatcctgctgtcccctaagccct

SEQ ID NO: 1315995 - DNA, 25 bp, Homo sapien
cctgggatcctgctgtcccctaagc

SEQ ID NO: 1315996 - DNA, 25 bp, Homo sapien
gagttctctggccaagtgctcagca

SEQ ID NO: 1315997 - DNA, 25 bp, Homo sapien
gggctgcttgaatcctctttgccaa

SEQ ID NO: 1315998 - DNA, 25 bp, Homo sapien
catcggtgcctatgccccaggtttg

SEQ ID NO: 1315999 - DNA, 25 bp, Homo sapien
gatttgactgtggtctaggcagaga

SEQ ID NO: 1316000 - DNA, 25 bp, Homo sapien
ggatataagatgatatccagggagt

SEQ ID NO: 1316001 - DNA, 25 bp, Homo sapien
tcttgccagtctccgttttctcgta

SEQ ID NO: 1316002 - DNA, 25 bp, Homo sapien
ttctggcactgacagtgtaaggata

SEQ ID NO: 1316003 - DNA, 25 bp, Homo sapien
cgttttctcgtagccacccacaatt

SEQ ID NO: 1316004 - DNA, 25 bp, Homo sapien
gctccttctcccctgtacttggagt

SEQ ID NO: 1316005 - DNA, 25 bp, Homo sapien
cctgtacttggagtttctccaaggt

SEQ ID NO: 1316006 - DNA, 25 bp, Homo sapien
tgatggtcgtgctgtggcctgctcc

SEQ ID NO: 1316007 - DNA, 25 bp, Homo sapien
ctgatggtcgtgctgtggcctgctc

SEQ ID NO: 1316008 - DNA, 25 bp, Homo sapien
ctggctggtcatatccacgtatggc

SEQ ID NO: 1316009 - DNA, 25 bp, Homo sapien
catatccacgtatggcaagtccttc

SEQ ID NO: 1316010 - DNA, 25 bp, Homo sapien
ggctggtcatatccacgtatggcaa

SEQ ID NO: 1316011 - DNA, 25 bp, Homo sapien
tggtcatatccacgtatggcaagtc

SEQ ID NO: 1316012 - DNA, 25 bp, Homo sapien
tgcacactcacacttgtgatgactg

SEQ ID NO: 1316013 - DNA, 25 bp, Homo sapien
ttgcacactcacacttgtgatgact

SEQ ID NO: 1316014 - DNA, 25 bp, Homo sapien
gcacactcacacttgtgatgactgt

SEQ ID NO: 1316015 - DNA, 25 bp, Homo sapien
cacactcacacttgtgatgactgtt

SEQ ID NO: 1316016 - DNA, 25 bp, Homo sapien
catcacaaagatctaatgctttaat

SEQ ID NO: 1316017 - DNA, 25 bp, Homo sapien
gatggcaacggcttcatcacaaaga

SEQ ID NO: 1316018 - DNA, 25 bp, Homo sapien
atgttgtgacatgacctgacatggg

SEQ ID NO: 1316019 - DNA, 25 bp, Homo sapien
gggtggcatttgatggattctctgg

SEQ ID NO: 1316020 - DNA, 25 bp, Homo sapien
ccctgctctctgtcttccaaggcag

SEQ ID NO: 1316021 - DNA, 25 bp, Homo sapien
ctgctctctgtcttccaaggcagtc

SEQ ID NO: 1316022 - DNA, 25 bp, Homo sapien
ttcccctgctctctgtcttccaagg

SEQ ID NO: 1316023 - DNA, 25 bp, Homo sapien
tcccctgctctctgtcttccaaggc

SEQ ID NO: 1316024 - DNA, 25 bp, Homo sapien
tagatacacagggacatgtcggagc

SEQ ID NO: 1316025 - DNA, 25 bp, Homo sapien
tggtagaagtaacagctgcactgct

SEQ ID NO: 1316026 - DNA, 25 bp, Homo sapien
atgtcggagcgggtgagagggattc

SEQ ID NO: 1316027 - DNA, 25 bp, Homo sapien
gggattcagacccatgtggtagaag

SEQ ID NO: 1316028 - DNA, 25 bp, Homo sapien
caggacacctggctggtctgcatgt

SEQ ID NO: 1316029 - DNA, 25 bp, Homo sapien
gggcaggacacctggctggtctgca

SEQ ID NO: 1316030 - DNA, 25 bp, Homo sapien
aggacacctggctggtctgcatgtc

SEQ ID NO: 1316031 - DNA, 25 bp, Homo sapien
gacacctggctggtctgcatgtcct

SEQ ID NO: 1316032 - DNA, 25 bp, Homo sapien
ccgaagaagttgcaggtccagaccc

SEQ ID NO: 1316033 - DNA, 25 bp, Homo sapien
agcatgcccgcagctgtccctgatt

SEQ ID NO: 1316034 - DNA, 25 bp, Homo sapien
gctgtccctgattccgatgacgctg

SEQ ID NO: 1316035 - DNA, 25 bp, Homo sapien
caggccctgccgaagaagttgcagg

SEQ ID NO: 1316036 - DNA, 25 bp, Homo sapien
taatgaagataaacctgaattggag

SEQ ID NO: 1316037 - DNA, 25 bp, Homo sapien
atgcacttcggacggctgctgcggc

SEQ ID NO: 1316038 - DNA, 25 bp, Homo sapien
gcccggtaatgaattacttgcttaa

SEQ ID NO: 1316039 - DNA, 25 bp, Homo sapien
tgcggcgtccggtttgatgccatca

SEQ ID NO: 1316040 - DNA, 25 bp, Homo sapien
acctcccacagactctaaaacaatg

SEQ ID NO: 1316041 - DNA, 25 bp, Homo sapien
tggggtccagcaatgttaacaagct

SEQ ID NO: 1316042 - DNA, 25 bp, Homo sapien
ttgttccaacaaccgcagtaagaac

SEQ ID NO: 1316043 - DNA, 25 bp, Homo sapien
gcaaggtgtggtctctcgtgcatca

SEQ ID NO: 1316044 - DNA, 25 bp, Homo sapien
acaccactaaatgtgccccagaaaa

SEQ ID NO: 1316045 - DNA, 25 bp, Homo sapien
cactgcccaggatcagaagaagatg

SEQ ID NO: 1316046 - DNA, 25 bp, Homo sapien
tcccactgcccaggatcagaagaag

SEQ ID NO: 1316047 - DNA, 25 bp, Homo sapien
aacgtgggcaacataagaaatcctc

SEQ ID NO: 1316048 - DNA, 25 bp, Homo sapien
ggtcaagggtaccatgagctataat

SEQ ID NO: 1316049 - DNA, 25 bp, Homo sapien
gtcaagggtaccatgagctataatt

SEQ ID NO: 1316050 - DNA, 25 bp, Homo sapien
aggtcaagggtaccatgagctataa

SEQ ID NO: 1316051 - DNA, 25 bp, Homo sapien
cagggcaatagtggagttctggctt

SEQ ID NO: 1316052 - DNA, 25 bp, Homo sapien
caagcagcctagaactcaaagtcca

SEQ ID NO: 1316053 - DNA, 25 bp, Homo sapien
ctgtagccatggtggggacagaaca

SEQ ID NO: 1316054 - DNA, 25 bp, Homo sapien
taaataagaagatggtacagcaacc

SEQ ID NO: 1316055 - DNA, 25 bp, Homo sapien
gcgccgcgcccgaccgcttcccggc

SEQ ID NO: 1316056 - DNA, 25 bp, Homo sapien
gacacactttcccactggtcttagt

SEQ ID NO: 1316057 - DNA, 25 bp, Homo sapien
tcagtttcatttgcggaggcctagc

SEQ ID NO: 1316058 - DNA, 25 bp, Homo sapien
aaacacggatctgattcccacttga

SEQ ID NO: 1316059 - DNA, 25 bp, Homo sapien
gccagggagcgtttacaaatcttca

SEQ ID NO: 1316060 - DNA, 25 bp, Homo sapien
ttcatgcacatcgtaaacctaagtg

SEQ ID NO: 1316061 - DNA, 25 bp, Homo sapien
gcagccggctttgatgctccttgaa

SEQ ID NO: 1316062 - DNA, 25 bp, Homo sapien
ggagaaggaccctcacgagaggcct

SEQ ID NO: 1316063 - DNA, 25 bp, Homo sapien
ctgtggaaaggcctttgggcagaac

SEQ ID NO: 1316064 - DNA, 25 bp, Homo sapien
gttgatcaaagctacgaggctccat

SEQ ID NO: 1316065 - DNA, 25 bp, Homo sapien
tgttgatcaaagctacgaggctcca

SEQ ID NO: 1316066 - DNA, 25 bp, Homo sapien
ctgttgatcaaagctacgaggctcc

SEQ ID NO: 1316067 - DNA, 25 bp, Homo sapien
acagatgagacggagcccgccaggc

SEQ ID NO: 1316068 - DNA, 25 bp, Homo sapien
aattgattccctcattcccatttgt

SEQ ID NO: 1316069 - DNA, 25 bp, Homo sapien
ttaattgattccctcattcccattt

SEQ ID NO: 1316070 - DNA, 25 bp, Homo sapien
gagacagatgagacggagcccgcca

SEQ ID NO: 1316071 - DNA, 25 bp, Homo sapien
gtgaggcgccagctcatgccaacag

SEQ ID NO: 1316072 - DNA, 25 bp, Homo sapien
tttcatcaaggaataattaattgca

SEQ ID NO: 1316073 - DNA, 25 bp, Homo sapien
tcctgggtgaggcgccagctcatgc

SEQ ID NO: 1316074 - DNA, 25 bp, Homo sapien
tatttcatcaaggaataattaattg

SEQ ID NO: 1316075 - DNA, 25 bp, Homo sapien
aggagagcagaaccctgactctgtt

SEQ ID NO: 1316076 - DNA, 25 bp, Homo sapien
ctctgtggccccaaatagagctcct

SEQ ID NO: 1316077 - DNA, 25 bp, Homo sapien
ctgtggccccaaatagagctcctgg

SEQ ID NO: 1316078 - DNA, 25 bp, Homo sapien
cctgcctctgtggccccaaatagag

SEQ ID NO: 1316079 - DNA, 25 bp, Homo sapien
aagtgttccaaccagaagctgtgtg

SEQ ID NO: 1316080 - DNA, 25 bp, Homo sapien
agtctccaggagatgtagcatggtg

SEQ ID NO: 1316081 - DNA, 25 bp, Homo sapien
catcggatgaacagttggagagacg

SEQ ID NO: 1316082 - DNA, 25 bp, Homo sapien
gagcaggcgagaaaaccgcatcgga

SEQ ID NO: 1316083 - DNA, 25 bp, Homo sapien
ggctccctgctggttgaagctcaga

SEQ ID NO: 1316084 - DNA, 25 bp, Homo sapien
tgaagctcagatgccctcttgtggc

SEQ ID NO: 1316085 - DNA, 25 bp, Homo sapien
tcttggccgcggctccctgctggtt

SEQ ID NO: 1316086 - DNA, 25 bp, Homo sapien
tgctggttgaagctcagatgccctc

SEQ ID NO: 1316087 - DNA, 25 bp, Homo sapien
agctcagcggcagcactggaccctc

SEQ ID NO: 1316088 - DNA, 25 bp, Homo sapien
tcagcggcagcactggaccctctac

SEQ ID NO: 1316089 - DNA, 25 bp, Homo sapien
tcagctcagcggcagcactggaccc

SEQ ID NO: 1316090 - DNA, 25 bp, Homo sapien
ctcagcggcagcactggaccctcta

SEQ ID NO: 1316091 - DNA, 25 bp, Homo sapien
ccccccgattgtacggaagtctgca

SEQ ID NO: 1316092 - DNA, 25 bp, Homo sapien
cgccccccgattgtacggaagtctg

SEQ ID NO: 1316093 - DNA, 25 bp, Homo sapien
ccccgattgtacggaagtctgcagc

SEQ ID NO: 1316094 - DNA, 25 bp, Homo sapien
ccgattgtacggaagtctgcagcgt

SEQ ID NO: 1316095 - DNA, 25 bp, Homo sapien
acactgcgagttgggggtggccctg

SEQ ID NO: 1316096 - DNA, 25 bp, Homo sapien
gccacactgcgagttgggggtggcc

SEQ ID NO: 1316097 - DNA, 25 bp, Homo sapien
tcaggccacactgcgagttgggggt

SEQ ID NO: 1316098 - DNA, 25 bp, Homo sapien
cactgcgagttgggggtggccctgg

SEQ ID NO: 1316099 - DNA, 25 bp, Homo sapien
catcctgcttcagcccgagctctac

SEQ ID NO: 1316100 - DNA, 25 bp, Homo sapien
tgagccccggccatttccgggctgt

SEQ ID NO: 1316101 - DNA, 25 bp, Homo sapien
cctgagccccggccatttccgggct

SEQ ID NO: 1316102 - DNA, 25 bp, Homo sapien
cttgaccagtaagtcctgagccccg

SEQ ID NO: 1316103 - DNA, 25 bp, Homo sapien
tgaccagtaagtcctgagccccggc

SEQ ID NO: 1316104 - DNA, 25 bp, Homo sapien
gggaagtccccatgatgaggaaggg

SEQ ID NO: 1316105 - DNA, 25 bp, Homo sapien
gcatctcttgtcctcctgtcggggt

SEQ ID NO: 1316106 - DNA, 25 bp, Homo sapien
gcagagccatagtgggggaagtccc

SEQ ID NO: 1316107 - DNA, 25 bp, Homo sapien
aggggcacattcctcagaacagggg

SEQ ID NO: 1316108 - DNA, 25 bp, Homo sapien
acaaaagttcggagcccttgcctgc

SEQ ID NO: 1316109 - DNA, 25 bp, Homo sapien
ggttcttctcaggtcaagccgagct

SEQ ID NO: 1316110 - DNA, 25 bp, Homo sapien
ggcacagtgcgttggttgtccaaca

SEQ ID NO: 1316111 - DNA, 25 bp, Homo sapien
tcctagcgggccatccttgagagtc

SEQ ID NO: 1316112 - DNA, 25 bp, Homo sapien
tcccctataggatcttcagcgcaag

SEQ ID NO: 1316113 - DNA, 25 bp, Homo sapien
aagtagtagctttcccctataggat

SEQ ID NO: 1316114 - DNA, 25 bp, Homo sapien
tagctttcccctataggatcttcag

SEQ ID NO: 1316115 - DNA, 25 bp, Homo sapien
ccctataggatcttcagcgcaaggg

SEQ ID NO: 1316116 - DNA, 25 bp, Homo sapien
ctcaggctcggcaggctccctgctg

SEQ ID NO: 1316117 - DNA, 25 bp, Homo sapien
ggctcggcaggctccctgctggcca

SEQ ID NO: 1316118 - DNA, 25 bp, Homo sapien
tcggcaggctccctgctggccatgg

SEQ ID NO: 1316119 - DNA, 25 bp, Homo sapien
tcaggctcggcaggctccctgctgg

SEQ ID NO: 1316120 - DNA, 25 bp, Homo sapien
ccgtggagtatgtcaagcaggatct

SEQ ID NO: 1316121 - DNA, 25 bp, Homo sapien
gctggcttcgaaccggcagccaaga

SEQ ID NO: 1316122 - DNA, 25 bp, Homo sapien
gccaagagaactccgtggagtatgt

SEQ ID NO: 1316123 - DNA, 25 bp, Homo sapien
tgttctggtttcgtgctctgtggct

SEQ ID NO: 1316124 - DNA, 25 bp, Homo sapien
ctaagaacacagatgtgcgtgtgga

SEQ ID NO: 1316125 - DNA, 25 bp, Homo sapien
gggaagaccgtgagcccatctgtca

SEQ ID NO: 1316126 - DNA, 25 bp, Homo sapien
tcgaagggggagacgtgcctcctct

SEQ ID NO: 1316127 - DNA, 25 bp, Homo sapien
gtaattagggcaatatctcgaaggg

SEQ ID NO: 1316128 - DNA, 25 bp, Homo sapien
acagggcccggcatgtgtggcctcc

SEQ ID NO: 1316129 - DNA, 25 bp, Homo sapien
tgagcacggagtggctgtgcaagcc

SEQ ID NO: 1316130 - DNA, 25 bp, Homo sapien
ccagtccaccgggctgaatcttcat

SEQ ID NO: 1316131 - DNA, 25 bp, Homo sapien
catctgtgaaccctcatgctcagca

SEQ ID NO: 1316132 - DNA, 25 bp, Homo sapien
gatggcatcccttagaattaccatg

SEQ ID NO: 1316133 - DNA, 25 bp, Homo sapien
gtgggatggcatcccttagaattac

SEQ ID NO: 1316134 - DNA, 25 bp, Homo sapien
atggcttaatctgtgggatggcatc

SEQ ID NO: 1316135 - DNA, 25 bp, Homo sapien
tgctttgtctaatggcttaatctgt

SEQ ID NO: 1316136 - DNA, 25 bp, Homo sapien
tcccagagcatggctgataacggca

SEQ ID NO: 1316137 - DNA, 25 bp, Homo sapien
ctgataacggcaggtgcagctccag

SEQ ID NO: 1316138 - DNA, 25 bp, Homo sapien
gtcccagagcatggctgataacggc

SEQ ID NO: 1316139 - DNA, 25 bp, Homo sapien
ggctgataacggcaggtgcagctcc

SEQ ID NO: 1316140 - DNA, 25 bp, Homo sapien
ccgagaatggacgagatcaggcatg

SEQ ID NO: 1316141 - DNA, 25 bp, Homo sapien
tccgagaatggacgagatcaggcat

SEQ ID NO: 1316142 - DNA, 25 bp, Homo sapien
taaagtcccctcattgcacatgctt

SEQ ID NO: 1316143 - DNA, 25 bp, Homo sapien
ctaaagtcccctcattgcacatgct

SEQ ID NO: 1316144 - DNA, 25 bp, Homo sapien
cctaaagtcccctcattgcacatgc

SEQ ID NO: 1316145 - DNA, 25 bp, Homo sapien
tcagatgaagatgttgtccccaaaa

SEQ ID NO: 1316146 - DNA, 25 bp, Homo sapien
cagatgaagatgttgtccccaaaag

SEQ ID NO: 1316147 - DNA, 25 bp, Homo sapien
tgaagatgttgtccccaaaaggtcc

SEQ ID NO: 1316148 - DNA, 25 bp, Homo sapien
gatgaagatgttgtccccaaaaggt

SEQ ID NO: 1316149 - DNA, 25 bp, Homo sapien
ttaaaaggcatgtttattatgggag

SEQ ID NO: 1316150 - DNA, 25 bp, Homo sapien
aggcatgtttattatgggaggtggg

SEQ ID NO: 1316151 - DNA, 25 bp, Homo sapien
catgtttattatgggaggtggggtc

SEQ ID NO: 1316152 - DNA, 25 bp, Homo sapien
ctgttaaaaggcatgtttattatgg

SEQ ID NO: 1316153 - DNA, 25 bp, Homo sapien
aaagctcagctctgccgaggtcccc

SEQ ID NO: 1316154 - DNA, 25 bp, Homo sapien
ccagccctctgtggcatatttccaa

SEQ ID NO: 1316155 - DNA, 25 bp, Homo sapien
tggccagccctctgtggcatatttc

SEQ ID NO: 1316156 - DNA, 25 bp, Homo sapien
tctggccagccctctgtggcatatt

SEQ ID NO: 1316157 - DNA, 25 bp, Homo sapien
tggggcacccacagccttggggttc

SEQ ID NO: 1316158 - DNA, 25 bp, Homo sapien
gggcacccacagccttggggttcac

SEQ ID NO: 1316159 - DNA, 25 bp, Homo sapien
cagtggggcacccacagccttgggg

SEQ ID NO: 1316160 - DNA, 25 bp, Homo sapien
agtggggcacccacagccttggggt

SEQ ID NO: 1316161 - DNA, 25 bp, Homo sapien
tctgagccttactgtcagcctctgc

SEQ ID NO: 1316162 - DNA, 25 bp, Homo sapien
gacagctttgctctgagccttactg

SEQ ID NO: 1316163 - DNA, 25 bp, Homo sapien
gccgctggggcgatgagtccctcca

SEQ ID NO: 1316164 - DNA, 25 bp, Homo sapien
cctccaccctcgtgtcttggcttct

SEQ ID NO: 1316165 - DNA, 25 bp, Homo sapien
cacagaactgccttggacgaggctc

SEQ ID NO: 1316166 - DNA, 25 bp, Homo sapien
ctgggcagtgcgaggacacagaact

SEQ ID NO: 1316167 - DNA, 25 bp, Homo sapien
caagttcgcaggtaaatagagggtc

SEQ ID NO: 1316168 - DNA, 25 bp, Homo sapien
ggtttgtagcccagcagacaggaca

SEQ ID NO: 1316169 - DNA, 25 bp, Homo sapien
atggcctcctgttgtcgcttggcaa

SEQ ID NO: 1316170 - DNA, 25 bp, Homo sapien
ctgttgtcgcttggcaaagaggctc

SEQ ID NO: 1316171 - DNA, 25 bp, Homo sapien
ctggaatgtgtggaccgaggctccc

SEQ ID NO: 1316172 - DNA, 25 bp, Homo sapien
gtggaccgaggctcccgcatggcct

SEQ ID NO: 1316173 - DNA, 25 bp, Homo sapien
attcagcacagcctgaacgaacaac

SEQ ID NO: 1316174 - DNA, 25 bp, Homo sapien
gcacagcctgaacgaacaactgtgg

SEQ ID NO: 1316175 - DNA, 25 bp, Homo sapien
gcctgaacgaacaactgtggtcctt

SEQ ID NO: 1316176 - DNA, 25 bp, Homo sapien
tgtgtgagatgctccattcagcaca

SEQ ID NO: 1316177 - DNA, 25 bp, Homo sapien
gccagtctggaacacgtctgcaggg

SEQ ID NO: 1316178 - DNA, 25 bp, Homo sapien
gtcttgccagtctggaacacgtctg

SEQ ID NO: 1316179 - DNA, 25 bp, Homo sapien
agaagctctcctgtagtggcccctg

SEQ ID NO: 1316180 - DNA, 25 bp, Homo sapien
cttccggcttgggactgccccggct

SEQ ID NO: 1316181 - DNA, 25 bp, Homo sapien
agcggcgccggcgtcttggcgggtt

SEQ ID NO: 1316182 - DNA, 25 bp, Homo sapien
gtttcccaggccgtaaggagctgtc

SEQ ID NO: 1316183 - DNA, 25 bp, Homo sapien
cactgacagcgccttggcagggagc

SEQ ID NO: 1316184 - DNA, 25 bp, Homo sapien
ctggagcactgacagcgccttggca

SEQ ID NO: 1316185 - DNA, 25 bp, Homo sapien
agctagctctggaggaagggcggcc

SEQ ID NO: 1316186 - DNA, 25 bp, Homo sapien
gtaaacacaggctcatagctaagct

SEQ ID NO: 1316187 - DNA, 25 bp, Homo sapien
taaacacaggctcatagctaagctg

SEQ ID NO: 1316188 - DNA, 25 bp, Homo sapien
gctagctctggaggaagggcggcca

SEQ ID NO: 1316189 - DNA, 25 bp, Homo sapien
tgggggaggcgcttaagctctctga

SEQ ID NO: 1316190 - DNA, 25 bp, Homo sapien
atcttgggggaggcgcttaagctct

SEQ ID NO: 1316191 - DNA, 25 bp, Homo sapien
gggggaggcgcttaagctctctgag

SEQ ID NO: 1316192 - DNA, 25 bp, Homo sapien
tgatcttgggggaggcgcttaagct

SEQ ID NO: 1316193 - DNA, 25 bp, Homo sapien
agtggcagaagtagacgcactcctt

SEQ ID NO: 1316194 - DNA, 25 bp, Homo sapien
tgttcacccagatgatgtccaagtg

SEQ ID NO: 1316195 - DNA, 25 bp, Homo sapien
gacgcactccttgtcgagccaggag

SEQ ID NO: 1316196 - DNA, 25 bp, Homo sapien
tcacccagatgatgtccaagtggca

SEQ ID NO: 1316197 - DNA, 25 bp, Homo sapien
gaagccgaaggtgggtgccttgggc

SEQ ID NO: 1316198 - DNA, 25 bp, Homo sapien
cggcgaagccgaaggtgggtgcctt

SEQ ID NO: 1316199 - DNA, 25 bp, Homo sapien
gaaggtgggtgccttgggcatgaga

SEQ ID NO: 1316200 - DNA, 25 bp, Homo sapien
ctgcaggagcaacggcgaagccgaa

SEQ ID NO: 1316201 - DNA, 25 bp, Homo sapien
cagggctagcgcaacggagcaccag

SEQ ID NO: 1316202 - DNA, 25 bp, Homo sapien
agcagggctagcgcaacggagcacc

SEQ ID NO: 1316203 - DNA, 25 bp, Homo sapien
gctagcgcaacggagcaccaggtgg

SEQ ID NO: 1316204 - DNA, 25 bp, Homo sapien
tagcgcaacggagcaccaggtggta

SEQ ID NO: 1316205 - DNA, 25 bp, Homo sapien
gctgagcagatagctcattgcctcg

SEQ ID NO: 1316206 - DNA, 25 bp, Homo sapien
agatagctcattgcctcggtgccct

SEQ ID NO: 1316207 - DNA, 25 bp, Homo sapien
gctgcctcttataccaggcacggtg

SEQ ID NO: 1316208 - DNA, 25 bp, Homo sapien
tggactggagcagggagtgcctgtt

SEQ ID NO: 1316209 - DNA, 25 bp, Homo sapien
ggcgggggcgaagagagccagagcc

SEQ ID NO: 1316210 - DNA, 25 bp, Homo sapien
gatgcagtgggtgagccccggccat

SEQ ID NO: 1316211 - DNA, 25 bp, Homo sapien
cagatgcagtgggtgagccccggcc

SEQ ID NO: 1316212 - DNA, 25 bp, Homo sapien
cagagccagagccattcctctgggg

SEQ ID NO: 1316213 - DNA, 25 bp, Homo sapien
tttaaaaaatatcctcaggctgaac

SEQ ID NO: 1316214 - DNA, 25 bp, Homo sapien
tcagactctgtgctttagacctgcg

SEQ ID NO: 1316215 - DNA, 25 bp, Homo sapien
ccagtgcggttgctgtacatatcta

SEQ ID NO: 1316216 - DNA, 25 bp, Homo sapien
gatatataccataccaacattgcaa

SEQ ID NO: 1316217 - DNA, 25 bp, Homo sapien
catttgcctgcacgtttcttttttc

SEQ ID NO: 1316218 - DNA, 25 bp, Homo sapien
tacatttgcctgcacgtttcttttt

SEQ ID NO: 1316219 - DNA, 25 bp, Homo sapien
ttacatttgcctgcacgtttctttt

SEQ ID NO: 1316220 - DNA, 25 bp, Homo sapien
acatttgcctgcacgtttctttttt

SEQ ID NO: 1316221 - DNA, 25 bp, Homo sapien
catttcaacagagcacgtagcaggc

SEQ ID NO: 1316222 - DNA, 25 bp, Homo sapien
taaagtgaccataagtgccgaagcg

SEQ ID NO: 1316223 - DNA, 25 bp, Homo sapien
ccttgaagtctccaatccgtgggca

SEQ ID NO: 1316224 - DNA, 25 bp, Homo sapien
gactagtctgtaccgaggaatggcc

SEQ ID NO: 1316225 - DNA, 25 bp, Homo sapien
aagattagtttttctgggcctgcct

SEQ ID NO: 1316226 - DNA, 25 bp, Homo sapien
ctccttctacctgcacctattattt

SEQ ID NO: 1316227 - DNA, 25 bp, Homo sapien
gattagtttttctgggcctgcctgc

SEQ ID NO: 1316228 - DNA, 25 bp, Homo sapien
tctacctgcacctattattttgtgt

SEQ ID NO: 1316229 - DNA, 25 bp, Homo sapien
cataaactattcacagcctcagact

SEQ ID NO: 1316230 - DNA, 25 bp, Homo sapien
gcaataaacaggaaccttgatcgca

SEQ ID NO: 1316231 - DNA, 25 bp, Homo sapien
tgcatacatgggaaggtacaacaga

SEQ ID NO: 1316232 - DNA, 25 bp, Homo sapien
tctgtacacaggagtgcttcctttt

SEQ ID NO: 1316233 - DNA, 25 bp, Homo sapien
gggggaaccctgtcctcaggctgat

SEQ ID NO: 1316234 - DNA, 25 bp, Homo sapien
ctcaggctgatgtggatgtgccctg

SEQ ID NO: 1316235 - DNA, 25 bp, Homo sapien
ggaaccctgtcctcaggctgatgtg

SEQ ID NO: 1316236 - DNA, 25 bp, Homo sapien
ctgatgtggatgtgccctgggctcc

SEQ ID NO: 1316237 - DNA, 25 bp, Homo sapien
aggactgcgctgcccggcgtccctg

SEQ ID NO: 1316238 - DNA, 25 bp, Homo sapien
ttggtcggtgcacgcggggactcca

SEQ ID NO: 1316239 - DNA, 25 bp, Homo sapien
ggtggcagaaggctcggggttggtc

SEQ ID NO: 1316240 - DNA, 25 bp, Homo sapien
ccggagaggttcctcgtccgggctg

SEQ ID NO: 1316241 - DNA, 25 bp, Homo sapien
gacacggaggctgacgagctctcag

SEQ ID NO: 1316242 - DNA, 25 bp, Homo sapien
tgaatttggagaccttagccacagg

SEQ ID NO: 1316243 - DNA, 25 bp, Homo sapien
caccgatgggaatcaagggacatgg

SEQ ID NO: 1316244 - DNA, 25 bp, Homo sapien
acgagctctcagtgggactccagcg

SEQ ID NO: 1316245 - DNA, 25 bp, Homo sapien
aggcccacttccctggcggcgctga

SEQ ID NO: 1316246 - DNA, 25 bp, Homo sapien
cttgtgaggtagaggcgcgggcggg

SEQ ID NO: 1316247 - DNA, 25 bp, Homo sapien
tggcggcgctgaccgtggtggtgac

SEQ ID NO: 1316248 - DNA, 25 bp, Homo sapien
gctgaggagcttgtgaggtagaggc

SEQ ID NO: 1316249 - DNA, 25 bp, Homo sapien
tccgagaccgagctgcctcgtgtag

SEQ ID NO: 1316250 - DNA, 25 bp, Homo sapien
cctcgtgtagcctccgtgccagagg

SEQ ID NO: 1316251 - DNA, 25 bp, Homo sapien
ggcttgtagctcaaggctgagcctg

SEQ ID NO: 1316252 - DNA, 25 bp, Homo sapien
taccctcgagtttggagagcacatg

SEQ ID NO: 1316253 - DNA, 25 bp, Homo sapien
tcgtccttccgagtcctggaacagg

SEQ ID NO: 1316254 - DNA, 25 bp, Homo sapien
ggtgaggagtctgcccgcagtgcat

SEQ ID NO: 1316255 - DNA, 25 bp, Homo sapien
aggtccgaaaactggtgctcctcca

SEQ ID NO: 1316256 - DNA, 25 bp, Homo sapien
ccgcagtgcatgtggtgggccaggc

SEQ ID NO: 1316257 - DNA, 25 bp, Homo sapien
tgggccttcgacttcatgtgcttag

SEQ ID NO: 1316258 - DNA, 25 bp, Homo sapien
tgtctcttggcactttttgctgtgg

SEQ ID NO: 1316259 - DNA, 25 bp, Homo sapien
gcactttttgctgtgggccttcgac

SEQ ID NO: 1316260 - DNA, 25 bp, Homo sapien
gacttcatgtgcttagtcagattcc

SEQ ID NO: 1316261 - DNA, 25 bp, Homo sapien
ccagggcggacccagggctcatgga

SEQ ID NO: 1316262 - DNA, 25 bp, Homo sapien
ctagaaagaaacgagaatacttagg

SEQ ID NO: 1316263 - DNA, 25 bp, Homo sapien
acttaggctctgctatggggcagga

SEQ ID NO: 1316264 - DNA, 25 bp, Homo sapien
aagaaacgagaatacttaggctctg

SEQ ID NO: 1316265 - DNA, 25 bp, Homo sapien
tgacactcatcaggcaggactattg

SEQ ID NO: 1316266 - DNA, 25 bp, Homo sapien
ttccccaggccaatctacagtgcag

SEQ ID NO: 1316267 - DNA, 25 bp, Homo sapien
ggactattggccatctcaagtgtgg

SEQ ID NO: 1316268 - DNA, 25 bp, Homo sapien
gttgtaggtccagcccacaagctga

SEQ ID NO: 1316269 - DNA, 25 bp, Homo sapien
ttctcacagtcatcccagaccccac

SEQ ID NO: 1316270 - DNA, 25 bp, Homo sapien
acagtcatcccagaccccaccaaag

SEQ ID NO: 1316271 - DNA, 25 bp, Homo sapien
tcacagtcatcccagaccccaccaa

SEQ ID NO: 1316272 - DNA, 25 bp, Homo sapien
cagtcatcccagaccccaccaaagc

SEQ ID NO: 1316273 - DNA, 25 bp, Homo sapien
aggcgatcggtgcaagggcctggac

SEQ ID NO: 1316274 - DNA, 25 bp, Homo sapien
ctgtcccctgaggcgatcggtgcaa

SEQ ID NO: 1316275 - DNA, 25 bp, Homo sapien
ccctgaggcgatcggtgcaagggcc

SEQ ID NO: 1316276 - DNA, 25 bp, Homo sapien
gtcccctgaggcgatcggtgcaagg

SEQ ID NO: 1316277 - DNA, 25 bp, Homo sapien
ccttagccagtttccagaggcctga

SEQ ID NO: 1316278 - DNA, 25 bp, Homo sapien
gcattccttagccagtttccagagg

SEQ ID NO: 1316279 - DNA, 25 bp, Homo sapien
ctactgacgcattccttagccagtt

SEQ ID NO: 1316280 - DNA, 25 bp, Homo sapien
tgacgcattccttagccagtttcca

SEQ ID NO: 1316281 - DNA, 25 bp, Homo sapien
tgctgggcttcttgcagcgaattcc

SEQ ID NO: 1316282 - DNA, 25 bp, Homo sapien
tacatactcttcgtttgatttgtac

SEQ ID NO: 1316283 - DNA, 25 bp, Homo sapien
tgggtgcggatgtgtttcttcagca

SEQ ID NO: 1316284 - DNA, 25 bp, Homo sapien
gcggcctcgcacatatacatactct

SEQ ID NO: 1316285 - DNA, 25 bp, Homo sapien
tccgagaggacgaactgaaggccgt

SEQ ID NO: 1316286 - DNA, 25 bp, Homo sapien
acgcgccaccttgcgtccgagagga

SEQ ID NO: 1316287 - DNA, 25 bp, Homo sapien
ggcggtacgcagaaatgactcggtt

SEQ ID NO: 1316288 - DNA, 25 bp, Homo sapien
ggtcacctttccacgggatccagga

SEQ ID NO: 1316289 - DNA, 25 bp, Homo sapien
cacgtagcagatctccaagaccaaa

SEQ ID NO: 1316290 - DNA, 25 bp, Homo sapien
ctcacgtagcagatctccaagacca

SEQ ID NO: 1316291 - DNA, 25 bp, Homo sapien
cgtagcagatctccaagaccaaaac

SEQ ID NO: 1316292 - DNA, 25 bp, Homo sapien
tagcagatctccaagaccaaaacca

SEQ ID NO: 1316293 - DNA, 25 bp, Homo sapien
ggatcttaattcccatgtccctcca

SEQ ID NO: 1316294 - DNA, 25 bp, Homo sapien
tggatcttaattcccatgtccctcc

SEQ ID NO: 1316295 - DNA, 25 bp, Homo sapien
ctggatcttaattcccatgtccctc

SEQ ID NO: 1316296 - DNA, 25 bp, Homo sapien
cagactgtgtgtactgcaatggcct

SEQ ID NO: 1316297 - DNA, 25 bp, Homo sapien
taatccactctatggaaatgtgact

SEQ ID NO: 1316298 - DNA, 25 bp, Homo sapien
aagtgggttttccttgcagcgagct

SEQ ID NO: 1316299 - DNA, 25 bp, Homo sapien
cccagaggagaccagctatggctgt

SEQ ID NO: 1316300 - DNA, 25 bp, Homo sapien
acccgcccatggagggtgtgctgat

SEQ ID NO: 1316301 - DNA, 25 bp, Homo sapien
ccaggtttgcggaggaatccataac

SEQ ID NO: 1316302 - DNA, 25 bp, Homo sapien
gaggaatccataacatgctgatggg

SEQ ID NO: 1316303 - DNA, 25 bp, Homo sapien
tccagccatggccaggtttgcggag

SEQ ID NO: 1316304 - DNA, 25 bp, Homo sapien
catgctgatggggatacagaagccc

SEQ ID NO: 1316305 - DNA, 25 bp, Homo sapien
tggaggatgatggaaatgaccacac

SEQ ID NO: 1316306 - DNA, 25 bp, Homo sapien
ctggaggatgatggaaatgaccaca

SEQ ID NO: 1316307 - DNA, 25 bp, Homo sapien
gaggatgatggaaatgaccacactc

SEQ ID NO: 1316308 - DNA, 25 bp, Homo sapien
ggatgatggaaatgaccacactcat

SEQ ID NO: 1316309 - DNA, 25 bp, Homo sapien
caaagtacttaatggtttgggcagt

SEQ ID NO: 1316310 - DNA, 25 bp, Homo sapien
cagatggttttcacggaggtaggca

SEQ ID NO: 1316311 - DNA, 25 bp, Homo sapien
cagttcttagcatgacagatggaca

SEQ ID NO: 1316312 - DNA, 25 bp, Homo sapien
cacagccacgagctggcgtgattca

SEQ ID NO: 1316313 - DNA, 25 bp, Homo sapien
ttaaaaacaccaggtcctggattca

SEQ ID NO: 1316314 - DNA, 25 bp, Homo sapien
tgattttttctgaagagtttttgtg

SEQ ID NO: 1316315 - DNA, 25 bp, Homo sapien
ttttctgaagagtttttgtgtgtct

SEQ ID NO: 1316316 - DNA, 25 bp, Homo sapien
taaaaacaccaggtcctggattcat

SEQ ID NO: 1316317 - DNA, 25 bp, Homo sapien
gcatcgatggtctttacaatctggc

SEQ ID NO: 1316318 - DNA, 25 bp, Homo sapien
aggcagtcctggtggtgaaaaaatc

SEQ ID NO: 1316319 - DNA, 25 bp, Homo sapien
cctagcatcgatggtctttacaatc

SEQ ID NO: 1316320 - DNA, 25 bp, Homo sapien
cttgtaaggcagtcctggtggtgaa

SEQ ID NO: 1316321 - DNA, 25 bp, Homo sapien
gtgttccagcaagctgatacccagc

SEQ ID NO: 1316322 - DNA, 25 bp, Homo sapien
aggtgttccagcaagctgataccca

SEQ ID NO: 1316323 - DNA, 25 bp, Homo sapien
ggtgttccagcaagctgatacccag

SEQ ID NO: 1316324 - DNA, 25 bp, Homo sapien
ttcattgttactgtgcatgggtcaa

SEQ ID NO: 1316325 - DNA, 25 bp, Homo sapien
catgggtcaatgcatttacagagtt

SEQ ID NO: 1316326 - DNA, 25 bp, Homo sapien
tcaaactcctgccatgatctcccaa

SEQ ID NO: 1316327 - DNA, 25 bp, Homo sapien
tctctcttctatgatgtgccgtcca

SEQ ID NO: 1316328 - DNA, 25 bp, Homo sapien
agctgcacatctacatttctgggga

SEQ ID NO: 1316329 - DNA, 25 bp, Homo sapien
cagagctgcacatctacatttctgg

SEQ ID NO: 1316330 - DNA, 25 bp, Homo sapien
tgcacatctacatttctggggagaa

SEQ ID NO: 1316331 - DNA, 25 bp, Homo sapien
tcagagctgcacatctacatttctg

SEQ ID NO: 1316332 - DNA, 25 bp, Homo sapien
catctgaacttatcattcccttcgg

SEQ ID NO: 1316333 - DNA, 25 bp, Homo sapien
tatcattcccttcggacataagccc

SEQ ID NO: 1316334 - DNA, 25 bp, Homo sapien
ttatcattcccttcggacataagcc

SEQ ID NO: 1316335 - DNA, 25 bp, Homo sapien
gaacttatcattcccttcggacata

SEQ ID NO: 1316336 - DNA, 25 bp, Homo sapien
ggcttggtcagccaggtggttccta

SEQ ID NO: 1316337 - DNA, 25 bp, Homo sapien
tcttccgtgtaagcccactgggctg

SEQ ID NO: 1316338 - DNA, 25 bp, Homo sapien
ttcctcttccgtgtaagcccactgg

SEQ ID NO: 1316339 - DNA, 25 bp, Homo sapien
tcagccaggtggttcctatcaattc

SEQ ID NO: 1316340 - DNA, 25 bp, Homo sapien
agtttaaactggatcctgtaggtga

SEQ ID NO: 1316341 - DNA, 25 bp, Homo sapien
gtaggtgaggcagccacagacggct

SEQ ID NO: 1316342 - DNA, 25 bp, Homo sapien
aggctgagtttaaactggatcctgt

SEQ ID NO: 1316343 - DNA, 25 bp, Homo sapien
ctgagtttaaactggatcctgtagg

SEQ ID NO: 1316344 - DNA, 25 bp, Homo sapien
aaggcactgattaagtagatcctcc

SEQ ID NO: 1316345 - DNA, 25 bp, Homo sapien
ttgtgttgccaccttggtgtagtcc

SEQ ID NO: 1316346 - DNA, 25 bp, Homo sapien
gccaccttggtgtagtccccaagca

SEQ ID NO: 1316347 - DNA, 25 bp, Homo sapien
ttctgacacagagcacccaaaaggc

SEQ ID NO: 1316348 - DNA, 25 bp, Homo sapien
ggagagggagtaggacccataccag

SEQ ID NO: 1316349 - DNA, 25 bp, Homo sapien
gaagattttgatcctcgccggctcc

SEQ ID NO: 1316350 - DNA, 25 bp, Homo sapien
tctccactctagctagatctttctg

SEQ ID NO: 1316351 - DNA, 25 bp, Homo sapien
ccttcgaagattttgatcctcgccg

SEQ ID NO: 1316352 - DNA, 25 bp, Homo sapien
cctccttcgaagattttgatcctcg

SEQ ID NO: 1316353 - DNA, 25 bp, Homo sapien
gacaaagcagctttagtggaaaccc

SEQ ID NO: 1316354 - DNA, 25 bp, Homo sapien
cttatgcaccaaccagcgtaaacag

SEQ ID NO: 1316355 - DNA, 25 bp, Homo sapien
gctgtggccatggtgtatgtctctt

SEQ ID NO: 1316356 - DNA, 25 bp, Homo sapien
tcactttctgcttagacctcaggag

SEQ ID NO: 1316357 - DNA, 25 bp, Homo sapien
tattggtctgaacacggacaggcac

SEQ ID NO: 1316358 - DNA, 25 bp, Homo sapien
ggtaatgtcacaggcactctcaggt

SEQ ID NO: 1316359 - DNA, 25 bp, Homo sapien
tttccatggtaagttcaaggctgcc

SEQ ID NO: 1316360 - DNA, 25 bp, Homo sapien
gaaagggtggtgtacattgcgctcc

SEQ ID NO: 1316361 - DNA, 25 bp, Homo sapien
tttactggatgagggctgtggttct

SEQ ID NO: 1316362 - DNA, 25 bp, Homo sapien
ggtggtggaacacttgcagtgcttc

SEQ ID NO: 1316363 - DNA, 25 bp, Homo sapien
caccatgtgaggtggccgcagagga

SEQ ID NO: 1316364 - DNA, 25 bp, Homo sapien
tcctggctcatgctgcacgagatgc

SEQ ID NO: 1316365 - DNA, 25 bp, Homo sapien
gatgatctcagcgtaggacttggcg

SEQ ID NO: 1316366 - DNA, 25 bp, Homo sapien
cagagctgtatagcccgctggagag

SEQ ID NO: 1316367 - DNA, 25 bp, Homo sapien
aaaggtaattcgattgccggctggc

SEQ ID NO: 1316368 - DNA, 25 bp, Homo sapien
gtaatgcatcatttgggaccacggc

SEQ ID NO: 1316369 - DNA, 25 bp, Homo sapien
cttgggtcttggggagagctctgca

SEQ ID NO: 1316370 - DNA, 25 bp, Homo sapien
tgggtcttggggagagctctgcagg

SEQ ID NO: 1316371 - DNA, 25 bp, Homo sapien
tcttggggagagctctgcagggtga

SEQ ID NO: 1316372 - DNA, 25 bp, Homo sapien
ggtcttggggagagctctgcagggt

SEQ ID NO: 1316373 - DNA, 25 bp, Homo sapien
cacctgtgtgtgagcgaatgtgctt

SEQ ID NO: 1316374 - DNA, 25 bp, Homo sapien
gagatgctcaggtttgccaggcgac

SEQ ID NO: 1316375 - DNA, 25 bp, Homo sapien
gaagaaacactggtctgaatggcct

SEQ ID NO: 1316376 - DNA, 25 bp, Homo sapien
cagcccatgtgggtacatctcgcca

SEQ ID NO: 1316377 - DNA, 25 bp, Homo sapien
tgtgggagccaaacccaagacggct

SEQ ID NO: 1316378 - DNA, 25 bp, Homo sapien
gaggcatggccctctactttgcaga

SEQ ID NO: 1316379 - DNA, 25 bp, Homo sapien
cgctattctattggtgaggcatggc

SEQ ID NO: 1316380 - DNA, 25 bp, Homo sapien
acattggtcaagagctgtgggagcc

SEQ ID NO: 1316381 - DNA, 25 bp, Homo sapien
gaaaacgtcatgaaggatgtcagta

SEQ ID NO: 1316382 - DNA, 25 bp, Homo sapien
ctgtcgggaaaacgtcatgaaggat

SEQ ID NO: 1316383 - DNA, 25 bp, Homo sapien
gaaggatgtcagtattgccattgta

SEQ ID NO: 1316384 - DNA, 25 bp, Homo sapien
tcagtattgccattgtattgtttca

SEQ ID NO: 1316385 - DNA, 25 bp, Homo sapien
caaacggttgaaggttggagacatc

SEQ ID NO: 1316386 - DNA, 25 bp, Homo sapien
tcaacggccttggaggagaaatcac

SEQ ID NO: 1316387 - DNA, 25 bp, Homo sapien
tgtccatggcccagtcatccctggt

SEQ ID NO: 1316388 - DNA, 25 bp, Homo sapien
gttctgggttggagatcaacggcct

SEQ ID NO: 1316389 - DNA, 25 bp, Homo sapien
gcttgatccaagcaattgccaggag

SEQ ID NO: 1316390 - DNA, 25 bp, Homo sapien
accatttgcttgatccaagcaattg

SEQ ID NO: 1316391 - DNA, 25 bp, Homo sapien
agcctttccttgtccagtcagtgcc

SEQ ID NO: 1316392 - DNA, 25 bp, Homo sapien
gcagcctttccttgtccagtcagtg

SEQ ID NO: 1316393 - DNA, 25 bp, Homo sapien
tttcttccagcaagggcagatcagg

SEQ ID NO: 1316394 - DNA, 25 bp, Homo sapien
tcaggaggcctggagtcaccttggc

SEQ ID NO: 1316395 - DNA, 25 bp, Homo sapien
aggcctggagtcaccttggctgcca

SEQ ID NO: 1316396 - DNA, 25 bp, Homo sapien
tcaactttctctgggggttggtctg

SEQ ID NO: 1316397 - DNA, 25 bp, Homo sapien
gctcttgcagttcatacaggctttc

SEQ ID NO: 1316398 - DNA, 25 bp, Homo sapien
tccaaaaaataagctcttgcagttc

SEQ ID NO: 1316399 - DNA, 25 bp, Homo sapien
ttccattcaaccaggtgaactctga

SEQ ID NO: 1316400 - DNA, 25 bp, Homo sapien
tcaagtatgatttcgtggggctgca

SEQ ID NO: 1316401 - DNA, 25 bp, Homo sapien
cagtgtcttcttttacaaaagagcc

SEQ ID NO: 1316402 - DNA, 25 bp, Homo sapien
ctaagcatcttttagttcagtgtct

SEQ ID NO: 1316403 - DNA, 25 bp, Homo sapien
gcatcttttagttcagtgtcttctt

SEQ ID NO: 1316404 - DNA, 25 bp, Homo sapien
tcagtgtcttcttttacaaaagagc

SEQ ID NO: 1316405 - DNA, 25 bp, Homo sapien
aatattttgctaagcagccaagaga

SEQ ID NO: 1316406 - DNA, 25 bp, Homo sapien
gaagagtctccttgcgctcagcaga

SEQ ID NO: 1316407 - DNA, 25 bp, Homo sapien
gttccgctgcgggatggtgccagag

SEQ ID NO: 1316408 - DNA, 25 bp, Homo sapien
gagcccggagccaccaggcttgcca

SEQ ID NO: 1316409 - DNA, 25 bp, Homo sapien
aagggagggctgtttgttccgctgc

SEQ ID NO: 1316410 - DNA, 25 bp, Homo sapien
ctgcggttatgcaatgccgggccag

SEQ ID NO: 1316411 - DNA, 25 bp, Homo sapien
gcggttatgcaatgccgggccagga

SEQ ID NO: 1316412 - DNA, 25 bp, Homo sapien
tgcggttatgcaatgccgggccagg

SEQ ID NO: 1316413 - DNA, 25 bp, Homo sapien
ggttatgcaatgccgggccaggagg

SEQ ID NO: 1316414 - DNA, 25 bp, Homo sapien
aatgctgaaaattgagggcctcagt

SEQ ID NO: 1316415 - DNA, 25 bp, Homo sapien
ttggaagttatctatccacctggcc

SEQ ID NO: 1316416 - DNA, 25 bp, Homo sapien
cctgcctaagcatgtccatctgaaa

SEQ ID NO: 1316417 - DNA, 25 bp, Homo sapien
gccccagtgacctgagctcaaggat

SEQ ID NO: 1316418 - DNA, 25 bp, Homo sapien
gggggctgcagctgagttcctttga

SEQ ID NO: 1316419 - DNA, 25 bp, Homo sapien
gctgcagctgagttcctttgaatat

SEQ ID NO: 1316420 - DNA, 25 bp, Homo sapien
gggctgcagctgagttcctttgaat

SEQ ID NO: 1316421 - DNA, 25 bp, Homo sapien
tttgggggctgcagctgagttcctt

SEQ ID NO: 1316422 - DNA, 25 bp, Homo sapien
taaggccaatgtgcaatcccagcca

SEQ ID NO: 1316423 - DNA, 25 bp, Homo sapien
tgcacccactgagtgaagggcaggt

SEQ ID NO: 1316424 - DNA, 25 bp, Homo sapien
agctgattctcctggcccctcgggt

SEQ ID NO: 1316425 - DNA, 25 bp, Homo sapien
gtgggctttgcctcaaatgcctaag

SEQ ID NO: 1316426 - DNA, 25 bp, Homo sapien
tcagagtgacgtgtatgctccccac

SEQ ID NO: 1316427 - DNA, 25 bp, Homo sapien
tctgcatgccgatcagagtgacgtg

SEQ ID NO: 1316428 - DNA, 25 bp, Homo sapien
agaggctctctgcatgccgatcaga

SEQ ID NO: 1316429 - DNA, 25 bp, Homo sapien
cccacttctctgcacacatgtttac

SEQ ID NO: 1316430 - DNA, 25 bp, Homo sapien
cttgctccacgctcttctgcacctt

SEQ ID NO: 1316431 - DNA, 25 bp, Homo sapien
ttgctccacgctcttctgcaccttt

SEQ ID NO: 1316432 - DNA, 25 bp, Homo sapien
tgctccacgctcttctgcacctttt

SEQ ID NO: 1316433 - DNA, 25 bp, Homo sapien
cgcgggccagaggtcattaaagcag

SEQ ID NO: 1316434 - DNA, 25 bp, Homo sapien
gcgcgggccagaggtcattaaagca

SEQ ID NO: 1316435 - DNA, 25 bp, Homo sapien
tgctcatcaacaactgctaggagac

SEQ ID NO: 1316436 - DNA, 25 bp, Homo sapien
gagacttcccaagcctcagcagaag

SEQ ID NO: 1316437 - DNA, 25 bp, Homo sapien
ccacttccgatgaccaaaactgaaa

SEQ ID NO: 1316438 - DNA, 25 bp, Homo sapien
ttccgatgaccaaaactgaaacgct

SEQ ID NO: 1316439 - DNA, 25 bp, Homo sapien
aaactgaaacgctgttctctctgaa

SEQ ID NO: 1316440 - DNA, 25 bp, Homo sapien
ggcaccacttccgatgaccaaaact

SEQ ID NO: 1316441 - DNA, 25 bp, Homo sapien
accctccacctaggcgccgctcttc

SEQ ID NO: 1316442 - DNA, 25 bp, Homo sapien
tccatgaactaggttgaggctgctg

SEQ ID NO: 1316443 - DNA, 25 bp, Homo sapien
tcttcccaccagaggggcgggcttg

SEQ ID NO: 1316444 - DNA, 25 bp, Homo sapien
gctcctccatgaactaggttgaggc

SEQ ID NO: 1316445 - DNA, 25 bp, Homo sapien
tgtgctttctgggatccgggtgggt

SEQ ID NO: 1316446 - DNA, 25 bp, Homo sapien
atagtaaccaggactttccatttca

SEQ ID NO: 1316447 - DNA, 25 bp, Homo sapien
aacctcctccagcaagttgtcatag

SEQ ID NO: 1316448 - DNA, 25 bp, Homo sapien
atccgggtgggtagggtcactggtg

SEQ ID NO: 1316449 - DNA, 25 bp, Homo sapien
ctggcgggtgacgaggcacatttta

SEQ ID NO: 1316450 - DNA, 25 bp, Homo sapien
ttaaggtgggatgcttcttcctgca

SEQ ID NO: 1316451 - DNA, 25 bp, Homo sapien
gcttcttcctgcaccgttggcagct

SEQ ID NO: 1316452 - DNA, 25 bp, Homo sapien
gcagctgtctacataaggtgcccat

SEQ ID NO: 1316453 - DNA, 25 bp, Homo sapien
ctgggtagagactaagtttattcat

SEQ ID NO: 1316454 - DNA, 25 bp, Homo sapien
caaaaaccagccgtggtctcatggt

SEQ ID NO: 1316455 - DNA, 25 bp, Homo sapien
caagatgtgtcagagatttctagag

SEQ ID NO: 1316456 - DNA, 25 bp, Homo sapien
ggtctcatggtcaagatgtgtcaga

SEQ ID NO: 1316457 - DNA, 25 bp, Homo sapien
ctagagcttggagaactgtgttgga

SEQ ID NO: 1316458 - DNA, 25 bp, Homo sapien
aggagggtctctggcgggtggatat

SEQ ID NO: 1316459 - DNA, 25 bp, Homo sapien
gtctcttaaagggccaaggctgagg

SEQ ID NO: 1316460 - DNA, 25 bp, Homo sapien
aaagtctcttaaagggccaaggctg

SEQ ID NO: 1316461 - DNA, 25 bp, Homo sapien
gagggtctctggcgggtggatatgc

SEQ ID NO: 1316462 - DNA, 25 bp, Homo sapien
gctgggcccatcagttcctcctgca

SEQ ID NO: 1316463 - DNA, 25 bp, Homo sapien
ctgggcccatcagttcctcctgcat

SEQ ID NO: 1316464 - DNA, 25 bp, Homo sapien
agcagctgggcccatcagttcctcc

SEQ ID NO: 1316465 - DNA, 25 bp, Homo sapien
tgccagcagctgggcccatcagttc

SEQ ID NO: 1316466 - DNA, 25 bp, Homo sapien
agaagccaagggaactcctcaaagg

SEQ ID NO: 1316467 - DNA, 25 bp, Homo sapien
cctcaacctactaagatgctacaat

SEQ ID NO: 1316468 - DNA, 25 bp, Homo sapien
cagagatagtgaaagaaatatgtgg

SEQ ID NO: 1316469 - DNA, 25 bp, Homo sapien
tcctcaaagggatttaatgtgactt

SEQ ID NO: 1316470 - DNA, 25 bp, Homo sapien
tgttgacagctgcagaatgcggcag

SEQ ID NO: 1316471 - DNA, 25 bp, Homo sapien
gctgttgacagctgcagaatgcggc

SEQ ID NO: 1316472 - DNA, 25 bp, Homo sapien
aatggctgttgacagctgcagaatg

SEQ ID NO: 1316473 - DNA, 25 bp, Homo sapien
cagctgcagaatgcggcagggaccc

SEQ ID NO: 1316474 - DNA, 25 bp, Homo sapien
caagttatctaagctcagggcctca

SEQ ID NO: 1316475 - DNA, 25 bp, Homo sapien
gcctcaatgtcctcacgcgtaagtg

SEQ ID NO: 1316476 - DNA, 25 bp, Homo sapien
tacaaacagtgcaaagcctccggag

SEQ ID NO: 1316477 - DNA, 25 bp, Homo sapien
gtggaaagacatgcccaaaaccgct

SEQ ID NO: 1316478 - DNA, 25 bp, Homo sapien
ggcttctttgggtcctgagggaggc

SEQ ID NO: 1316479 - DNA, 25 bp, Homo sapien
cagccaggggcagaggtcaccagga

SEQ ID NO: 1316480 - DNA, 25 bp, Homo sapien
ccaggggcagaggtcaccaggaaca

SEQ ID NO: 1316481 - DNA, 25 bp, Homo sapien
ttgggtcctgagggaggccagccag

SEQ ID NO: 1316482 - DNA, 25 bp, Homo sapien
caattatcctggagtagggcaggca

SEQ ID NO: 1316483 - DNA, 25 bp, Homo sapien
caaagtcccatgaggaatggcctcc

SEQ ID NO: 1316484 - DNA, 25 bp, Homo sapien
catcaaggagctgaccaggagacac

SEQ ID NO: 1316485 - DNA, 25 bp, Homo sapien
caaaatgagaaagacctcgctgtgc

SEQ ID NO: 1316486 - DNA, 25 bp, Homo sapien
catggtattggaatctgtgccttca

SEQ ID NO: 1316487 - DNA, 25 bp, Homo sapien
caacctctggcatggtattggaatc

SEQ ID NO: 1316488 - DNA, 25 bp, Homo sapien
aagcaccagtgtcctcaacctctgg

SEQ ID NO: 1316489 - DNA, 25 bp, Homo sapien
cattcttcaggacgtttgtccctcg

SEQ ID NO: 1316490 - DNA, 25 bp, Homo sapien
caacacaggaacaaatccgagacac

SEQ ID NO: 1316491 - DNA, 25 bp, Homo sapien
cacaggaacaaatccgagacaccag

SEQ ID NO: 1316492 - DNA, 25 bp, Homo sapien
acaggaacaaatccgagacaccaga

SEQ ID NO: 1316493 - DNA, 25 bp, Homo sapien
aacacaggaacaaatccgagacacc

SEQ ID NO: 1316494 - DNA, 25 bp, Homo sapien
gcatcagaatcatttgtagactttg

SEQ ID NO: 1316495 - DNA, 25 bp, Homo sapien
gcctggccggtagacccaaatctta

SEQ ID NO: 1316496 - DNA, 25 bp, Homo sapien
aagttcccaagcccagctattgctg

SEQ ID NO: 1316497 - DNA, 25 bp, Homo sapien
gctgacagctagagtttctaacaag

SEQ ID NO: 1316498 - DNA, 25 bp, Homo sapien
catgtccagatgagagcaccttctt

SEQ ID NO: 1316499 - DNA, 25 bp, Homo sapien
agcatgctggtgagtcaggtcttcc

SEQ ID NO: 1316500 - DNA, 25 bp, Homo sapien
aggagaaaaacgtgcccttaggctg

SEQ ID NO: 1316501 - DNA, 25 bp, Homo sapien
tcctttcgcacagaaagcatgctgg

SEQ ID NO: 1316502 - DNA, 25 bp, Homo sapien
tgggagccccggctcaagagcagaa

SEQ ID NO: 1316503 - DNA, 25 bp, Homo sapien
tgttttgccttccttagttctacca

SEQ ID NO: 1316504 - DNA, 25 bp, Homo sapien
ccttagttctaccagcactctcaga

SEQ ID NO: 1316505 - DNA, 25 bp, Homo sapien
ggcatgcatctccattcagtcttgc

SEQ ID NO: 1316506 - DNA, 25 bp, Homo sapien
ccacagcacagccatgagcagggca

SEQ ID NO: 1316507 - DNA, 25 bp, Homo sapien
atgagcagggcagccaacaggaagc

SEQ ID NO: 1316508 - DNA, 25 bp, Homo sapien
ctaaggtgctggcatgggctcctca

SEQ ID NO: 1316509 - DNA, 25 bp, Homo sapien
catgggctcctcagagccccgtggg

SEQ ID NO: 1316510 - DNA, 25 bp, Homo sapien
ggacacagggacaccgtcatcggcc

SEQ ID NO: 1316511 - DNA, 25 bp, Homo sapien
agggacacagggacaccgtcatcgg

SEQ ID NO: 1316512 - DNA, 25 bp, Homo sapien
agagggacacagggacaccgtcatc

SEQ ID NO: 1316513 - DNA, 25 bp, Homo sapien
tgtgagaggccacagagggacacag

SEQ ID NO: 1316514 - DNA, 25 bp, Homo sapien
gccggaagccctcacttttggccca

SEQ ID NO: 1316515 - DNA, 25 bp, Homo sapien
tgtaagaaacaagccggaagccctc

SEQ ID NO: 1316516 - DNA, 25 bp, Homo sapien
aacaagccggaagccctcacttttg

SEQ ID NO: 1316517 - DNA, 25 bp, Homo sapien
agaaacaagccggaagccctcactt

SEQ ID NO: 1316518 - DNA, 25 bp, Homo sapien
tcacgcagaactgtgtaaagttgtc

SEQ ID NO: 1316519 - DNA, 25 bp, Homo sapien
acgcagaactgtgtaaagttgtcct

SEQ ID NO: 1316520 - DNA, 25 bp, Homo sapien
cgcagaactgtgtaaagttgtcctt

SEQ ID NO: 1316521 - DNA, 25 bp, Homo sapien
cacgcagaactgtgtaaagttgtcc

SEQ ID NO: 1316522 - DNA, 25 bp, Homo sapien
aggcgaacctgccacaagctaccca

SEQ ID NO: 1316523 - DNA, 25 bp, Homo sapien
caaggcgaacctgccacaagctacc

SEQ ID NO: 1316524 - DNA, 25 bp, Homo sapien
aaggcgaacctgccacaagctaccc

SEQ ID NO: 1316525 - DNA, 25 bp, Homo sapien
gatatgcagaatggataaactgctt

SEQ ID NO: 1316526 - DNA, 25 bp, Homo sapien
gagaacctctggatatgcagaatgg

SEQ ID NO: 1316527 - DNA, 25 bp, Homo sapien
taaagaagggcgtctctgagtgctg

SEQ ID NO: 1316528 - DNA, 25 bp, Homo sapien
actggaaataatgtggggaaactgg

SEQ ID NO: 1316529 - DNA, 25 bp, Homo sapien
aaagaagggcgtctctgagtgctgg

SEQ ID NO: 1316530 - DNA, 25 bp, Homo sapien
tttaaagaagggcgtctctgagtgc

SEQ ID NO: 1316531 - DNA, 25 bp, Homo sapien
catgtttgatgactgttatctccct

SEQ ID NO: 1316532 - DNA, 25 bp, Homo sapien
tttaaggagcacatgtgttctataa

SEQ ID NO: 1316533 - DNA, 25 bp, Homo sapien
taaggagcacatgtgttctataatc

SEQ ID NO: 1316534 - DNA, 25 bp, Homo sapien
ctcaaaggtttccatgtttgatgac

SEQ ID NO: 1316535 - DNA, 25 bp, Homo sapien
gataacttcccaagacactaagctg

SEQ ID NO: 1316536 - DNA, 25 bp, Homo sapien
cacactggctttatcttggtttctg

SEQ ID NO: 1316537 - DNA, 25 bp, Homo sapien
ttcaagagtgggattcaagagacca

SEQ ID NO: 1316538 - DNA, 25 bp, Homo sapien
tacctcactaccttcagaaaggaag

SEQ ID NO: 1316539 - DNA, 25 bp, Homo sapien
ttaagcaatgttttgggagtcacag

SEQ ID NO: 1316540 - DNA, 25 bp, Homo sapien
gctgtcaaactctgagcgagttgct

SEQ ID NO: 1316541 - DNA, 25 bp, Homo sapien
agaagagaccggctttgcagtcaga

SEQ ID NO: 1316542 - DNA, 25 bp, Homo sapien
gagtctatgatatcccagattaagc

SEQ ID NO: 1316543 - DNA, 25 bp, Homo sapien
gggagctgaactggcctaacctgaa

SEQ ID NO: 1316544 - DNA, 25 bp, Homo sapien
tacaaccacctttgcaagtgataaa

SEQ ID NO: 1316545 - DNA, 25 bp, Homo sapien
tccaaaaggatatgagggtcctgct

SEQ ID NO: 1316546 - DNA, 25 bp, Homo sapien
cacgggatctaaattccaccagcag

SEQ ID NO: 1316547 - DNA, 25 bp, Homo sapien
acagcaggagctctagatacaccac

SEQ ID NO: 1316548 - DNA, 25 bp, Homo sapien
tgtcctccttaaatgcagcaccaac

SEQ ID NO: 1316549 - DNA, 25 bp, Homo sapien
tgagtactgcttaccaggaagggaa

SEQ ID NO: 1316550 - DNA, 25 bp, Homo sapien
gggaatgtggtcagcatgacaacaa

SEQ ID NO: 1316551 - DNA, 25 bp, Homo sapien
ttcgtgctacagttggacagagaca

SEQ ID NO: 1316552 - DNA, 25 bp, Homo sapien
tgagatccacactcttagggagagg

SEQ ID NO: 1316553 - DNA, 25 bp, Homo sapien
tctcagaagagcctaacgtgtggtc

SEQ ID NO: 1316554 - DNA, 25 bp, Homo sapien
gattctgtctaaactggattcgtgc

SEQ ID NO: 1316555 - DNA, 25 bp, Homo sapien
acacagcttggtgaccccgggccag

SEQ ID NO: 1316556 - DNA, 25 bp, Homo sapien
tggtcctgaccattttctgattggc

SEQ ID NO: 1316557 - DNA, 25 bp, Homo sapien
gtgaccccgggccagtgactttgac

SEQ ID NO: 1316558 - DNA, 25 bp, Homo sapien
ggcctgtgctttaactgtgcctccc

SEQ ID NO: 1316559 - DNA, 25 bp, Homo sapien
tgagattcggaggagcatatcgtgt

SEQ ID NO: 1316560 - DNA, 25 bp, Homo sapien
aagggtccaccgatgctcagagatc

SEQ ID NO: 1316561 - DNA, 25 bp, Homo sapien
tccagctcctctgatcttaagatag

SEQ ID NO: 1316562 - DNA, 25 bp, Homo sapien
tttcaacatctaatgctaagcctgg

SEQ ID NO: 1316563 - DNA, 25 bp, Homo sapien
tatcattagggaccattcggcacca

SEQ ID NO: 1316564 - DNA, 25 bp, Homo sapien
gaaaattggtcacgggctttggcca

SEQ ID NO: 1316565 - DNA, 25 bp, Homo sapien
actaaacacaatgggcggagacagc

SEQ ID NO: 1316566 - DNA, 25 bp, Homo sapien
cagagttcacagtagtagttggccc

SEQ ID NO: 1316567 - DNA, 25 bp, Homo sapien
tgttctctgacccacggatccagcc

SEQ ID NO: 1316568 - DNA, 25 bp, Homo sapien
ccggccaggcaggattttgtgcatt

SEQ ID NO: 1316569 - DNA, 25 bp, Homo sapien
tcttcatgaattattccggccaggc

SEQ ID NO: 1316570 - DNA, 25 bp, Homo sapien
ccttcttcatgaattattccggcca

SEQ ID NO: 1316571 - DNA, 25 bp, Homo sapien
catatgcacacggaatagccatgta

SEQ ID NO: 1316572 - DNA, 25 bp, Homo sapien
ttgtgagcatgctcgcgccgggaac

SEQ ID NO: 1316573 - DNA, 25 bp, Homo sapien
gaattcgtgctgctgaaaaacacgg

SEQ ID NO: 1316574 - DNA, 25 bp, Homo sapien
ttctgaatccagagccaacccatgc

SEQ ID NO: 1316575 - DNA, 25 bp, Homo sapien
ggagcctcaacagtgcctgaaggga

SEQ ID NO: 1316576 - DNA, 25 bp, Homo sapien
gacagggcactcttgtcagcaagcg

SEQ ID NO: 1316577 - DNA, 25 bp, Homo sapien
ttcacgggtcagacgagacagggca

SEQ ID NO: 1316578 - DNA, 25 bp, Homo sapien
tcctgccaggcaaaccgtgaaaaca

SEQ ID NO: 1316579 - DNA, 25 bp, Homo sapien
tgtgtcatcgcccaagcaagctggg

SEQ ID NO: 1316580 - DNA, 25 bp, Homo sapien
ttcagaaggtgattcgagtccatcc

SEQ ID NO: 1316581 - DNA, 25 bp, Homo sapien
tcagcaggcttagtgtgactcacca

SEQ ID NO: 1316582 - DNA, 25 bp, Homo sapien
catctaacatctcaggcaccaaggt

SEQ ID NO: 1316583 - DNA, 25 bp, Homo sapien
cattccaggattcaattcaggatcc

SEQ ID NO: 1316584 - DNA, 25 bp, Homo sapien
ttcgtgattaaactgggattgtgga

SEQ ID NO: 1316585 - DNA, 25 bp, Homo sapien
gattgtacaagttcccatacaccct

SEQ ID NO: 1316586 - DNA, 25 bp, Homo sapien
ttgcccttgacccttttgaagagta

SEQ ID NO: 1316587 - DNA, 25 bp, Homo sapien
tgagattggtttgcaaagagggcat

SEQ ID NO: 1316588 - DNA, 25 bp, Homo sapien
tctgagattggtttgcaaagagggc

SEQ ID NO: 1316589 - DNA, 25 bp, Homo sapien
ctgagattggtttgcaaagagggca

SEQ ID NO: 1316590 - DNA, 25 bp, Homo sapien
tttctgagattggtttgcaaagagg

SEQ ID NO: 1316591 - DNA, 25 bp, Homo sapien
tcactaatccgataagcagaggtcc

SEQ ID NO: 1316592 - DNA, 25 bp, Homo sapien
cagagccattaaggatcacctaggg

SEQ ID NO: 1316593 - DNA, 25 bp, Homo sapien
gatgcaggactgctacatcagtgag

SEQ ID NO: 1316594 - DNA, 25 bp, Homo sapien
cctgagcacaaacgcaatgttggac

SEQ ID NO: 1316595 - DNA, 25 bp, Homo sapien
caaagtagaaaccacatgtgcgtgc

SEQ ID NO: 1316596 - DNA, 25 bp, Homo sapien
attccaagcaaagtagaaaccacat

SEQ ID NO: 1316597 - DNA, 25 bp, Homo sapien
caagcaaagtagaaaccacatgtgc

SEQ ID NO: 1316598 - DNA, 25 bp, Homo sapien
gcaaagtagaaaccacatgtgcgtg

SEQ ID NO: 1316599 - DNA, 25 bp, Homo sapien
tgtggtctggaaatagcatggaatt

SEQ ID NO: 1316600 - DNA, 25 bp, Homo sapien
gcttagctgggcgttcattaccagc

SEQ ID NO: 1316601 - DNA, 25 bp, Homo sapien
ggctgcaaccaaggccttggccctg

SEQ ID NO: 1316602 - DNA, 25 bp, Homo sapien
tctgatgagtaagggaccttggtaa

SEQ ID NO: 1316603 - DNA, 25 bp, Homo sapien
aggtcaaccacgcttacgtctacat

SEQ ID NO: 1316604 - DNA, 25 bp, Homo sapien
tttgccctctaggtcaaccacgctt

SEQ ID NO: 1316605 - DNA, 25 bp, Homo sapien
tctcaaaactagtggtttcatccac

SEQ ID NO: 1316606 - DNA, 25 bp, Homo sapien
cacttgattgatgttctctttgccc

SEQ ID NO: 1316607 - DNA, 25 bp, Homo sapien
ggttcttcccttgtgtgagctgcca

SEQ ID NO: 1316608 - DNA, 25 bp, Homo sapien
tccacaagctagaggctccaggtgg

SEQ ID NO: 1316609 - DNA, 25 bp, Homo sapien
tgctgctaccaccaaataagggaac

SEQ ID NO: 1316610 - DNA, 25 bp, Homo sapien
tcctccaactccacaagctagaggc

SEQ ID NO: 1316611 - DNA, 25 bp, Homo sapien
gcagaggtgagtgtcacatcccccc

SEQ ID NO: 1316612 - DNA, 25 bp, Homo sapien
agaggtgagtgtcacatccccccat

SEQ ID NO: 1316613 - DNA, 25 bp, Homo sapien
cagaggtgagtgtcacatcccccca

SEQ ID NO: 1316614 - DNA, 25 bp, Homo sapien
cccaacgatcactgcaccagactga

SEQ ID NO: 1316615 - DNA, 25 bp, Homo sapien
ccagactgacgtgttgaggacagga

SEQ ID NO: 1316616 - DNA, 25 bp, Homo sapien
ctgcaccagactgacgtgttgagga

SEQ ID NO: 1316617 - DNA, 25 bp, Homo sapien
ctgccccaacgatcactgcaccaga

SEQ ID NO: 1316618 - DNA, 25 bp, Homo sapien
tgccgaataggacatttttaacaca

SEQ ID NO: 1316619 - DNA, 25 bp, Homo sapien
taaactattaagatactgtccttcc

SEQ ID NO: 1316620 - DNA, 25 bp, Homo sapien
ccgcgccctgccgaataggacattt

SEQ ID NO: 1316621 - DNA, 25 bp, Homo sapien
gtccttccagcagagtattaaatga

SEQ ID NO: 1316622 - DNA, 25 bp, Homo sapien
aaatgcatgcatttacagtcagctg

SEQ ID NO: 1316623 - DNA, 25 bp, Homo sapien
tgacaaaaacgccaagaacccacat

SEQ ID NO: 1316624 - DNA, 25 bp, Homo sapien
tgtaggtaccaggaatgagcaatga

SEQ ID NO: 1316625 - DNA, 25 bp, Homo sapien
tgtgccagacatcattgtaggtacc

SEQ ID NO: 1316626 - DNA, 25 bp, Homo sapien
gatatatgcaactcccatgttcact

SEQ ID NO: 1316627 - DNA, 25 bp, Homo sapien
tgttgaagagatatatgcaactccc

SEQ ID NO: 1316628 - DNA, 25 bp, Homo sapien
aatcctatcatttgtgaaaacacag

SEQ ID NO: 1316629 - DNA, 25 bp, Homo sapien
cacagatgaacctaaagaatattat

SEQ ID NO: 1316630 - DNA, 25 bp, Homo sapien
taagccccagacagttacttgggaa

SEQ ID NO: 1316631 - DNA, 25 bp, Homo sapien
gggatacatcaccataagccccaga

SEQ ID NO: 1316632 - DNA, 25 bp, Homo sapien
tataactagcacagttgatctgcca

SEQ ID NO: 1316633 - DNA, 25 bp, Homo sapien
tctgccaggtatctgaggactccct

SEQ ID NO: 1316634 - DNA, 25 bp, Homo sapien
catttccatcagcttattgtgttgt

SEQ ID NO: 1316635 - DNA, 25 bp, Homo sapien
ttgtgacatctgctcaggtgaactt

SEQ ID NO: 1316636 - DNA, 25 bp, Homo sapien
cagtgatgccgatctgtcctctcat

SEQ ID NO: 1316637 - DNA, 25 bp, Homo sapien
tgtaggtccagtgatgccgatctgt

SEQ ID NO: 1316638 - DNA, 25 bp, Homo sapien
ctgttttggcctccagaggtccgtg

SEQ ID NO: 1316639 - DNA, 25 bp, Homo sapien
gcctccagaggtccgtgctgctggt

SEQ ID NO: 1316640 - DNA, 25 bp, Homo sapien
ttttggcctccagaggtccgtgctg

SEQ ID NO: 1316641 - DNA, 25 bp, Homo sapien
tgactgtcaggcctgttttggcctc

SEQ ID NO: 1316642 - DNA, 25 bp, Homo sapien
aatatgactcacaccctaaaagtcc

SEQ ID NO: 1316643 - DNA, 25 bp, Homo sapien
aaataaccccatcccataccataca

SEQ ID NO: 1316644 - DNA, 25 bp, Homo sapien
ccttaattcccgcttctagtcatta

SEQ ID NO: 1316645 - DNA, 25 bp, Homo sapien
gcacaaggcatcattgtacagcttg

SEQ ID NO: 1316646 - DNA, 25 bp, Homo sapien
ctccttcaatacatagatcaaatct

SEQ ID NO: 1316647 - DNA, 25 bp, Homo sapien
ttcaatacatagatcaaatctttcc

SEQ ID NO: 1316648 - DNA, 25 bp, Homo sapien
caatacatagatcaaatctttcctc

SEQ ID NO: 1316649 - DNA, 25 bp, Homo sapien
ccttcaatacatagatcaaatcttt

SEQ ID NO: 1316650 - DNA, 25 bp, Homo sapien
gatatatttcccaattaccacatct

SEQ ID NO: 1316651 - DNA, 25 bp, Homo sapien
tgtcctatgtatggctatagcataa

SEQ ID NO: 1316652 - DNA, 25 bp, Homo sapien
gaagtgttatctctgtcctatgtat

SEQ ID NO: 1316653 - DNA, 25 bp, Homo sapien
aatggtccagatttgtcaagtattt

SEQ ID NO: 1316654 - DNA, 25 bp, Homo sapien
gcattacaggatgttcagccacacc

SEQ ID NO: 1316655 - DNA, 25 bp, Homo sapien
gttattgaaatacctcctgggtggc

SEQ ID NO: 1316656 - DNA, 25 bp, Homo sapien
ggttcatgcgccctcaaagtggaga

SEQ ID NO: 1316657 - DNA, 25 bp, Homo sapien
aaaacctgggaagtgctcagactct

SEQ ID NO: 1316658 - DNA, 25 bp, Homo sapien
taaagattcaacactacaacggcgc

SEQ ID NO: 1316659 - DNA, 25 bp, Homo sapien
tggtgttgcagaaccggcaggctaa

SEQ ID NO: 1316660 - DNA, 25 bp, Homo sapien
gagccaagattttctgcgcacgaag

SEQ ID NO: 1316661 - DNA, 25 bp, Homo sapien
caacggcgcctgattacaagagatt

SEQ ID NO: 1316662 - DNA, 25 bp, Homo sapien
tcctcgagcaaccagaagacatgga

SEQ ID NO: 1316663 - DNA, 25 bp, Homo sapien
tgaaggcatttcgttccaggatcta

SEQ ID NO: 1316664 - DNA, 25 bp, Homo sapien
ctaattagggatgggaaagcaactc

SEQ ID NO: 1316665 - DNA, 25 bp, Homo sapien
tgtccaactggtctaaatgtcaatg

SEQ ID NO: 1316666 - DNA, 25 bp, Homo sapien
cttctggaagggaaacctggaccag

SEQ ID NO: 1316667 - DNA, 25 bp, Homo sapien
cagagccgggatgccggcaggactt

SEQ ID NO: 1316668 - DNA, 25 bp, Homo sapien
gctgcaatccagagctcgctaacgt

SEQ ID NO: 1316669 - DNA, 25 bp, Homo sapien
ctaacgtagagacggagagacccgg

SEQ ID NO: 1316670 - DNA, 25 bp, Homo sapien
cgctgtcgcgccaggtctctgccct

SEQ ID NO: 1316671 - DNA, 25 bp, Homo sapien
ccctctgcctgggagcgcgttgcgg

SEQ ID NO: 1316672 - DNA, 25 bp, Homo sapien
agcgcgttgcggggacaggtgtggg

SEQ ID NO: 1316673 - DNA, 25 bp, Homo sapien
cggcccccgctgtcgcgccaggtct

SEQ ID NO: 1316674 - DNA, 25 bp, Homo sapien
cctgcgccggagctgcggaggccag

SEQ ID NO: 1316675 - DNA, 25 bp, Homo sapien
gctgcggaggccagacgggggaccc

SEQ ID NO: 1316676 - DNA, 25 bp, Homo sapien
tccctgcgccggagctgcggaggcc

SEQ ID NO: 1316677 - DNA, 25 bp, Homo sapien
gccggagctgcggaggccagacggg

SEQ ID NO: 1316678 - DNA, 25 bp, Homo sapien
ccccgggcgcagtcgggagctgcgg

SEQ ID NO: 1316679 - DNA, 25 bp, Homo sapien
gcgctgacacggcccggagagggcg

SEQ ID NO: 1316680 - DNA, 25 bp, Homo sapien
gggcgcgatggctcggcagccgcgg

SEQ ID NO: 1316681 - DNA, 25 bp, Homo sapien
cgcgtcagaccgagcccgaggaggg

SEQ ID NO: 1316682 - DNA, 25 bp, Homo sapien
atgcgaggagccgtggcgcggcggc

SEQ ID NO: 1316683 - DNA, 25 bp, Homo sapien
cgggccacggcatgcgaggagccgt

SEQ ID NO: 1316684 - DNA, 25 bp, Homo sapien
ccgggccacggcatgcgaggagccg

SEQ ID NO: 1316685 - DNA, 25 bp, Homo sapien
cacggcatgcgaggagccgtggcgc

SEQ ID NO: 1316686 - DNA, 25 bp, Homo sapien
gatgagagtccactggctgctgtgt

SEQ ID NO: 1316687 - DNA, 25 bp, Homo sapien
cagcccagctaacgagatattcctt

SEQ ID NO: 1316688 - DNA, 25 bp, Homo sapien
tgtgcctggcagcatcgttaccaga

SEQ ID NO: 1316689 - DNA, 25 bp, Homo sapien
cagctgcgccaccaaggatgagagt

SEQ ID NO: 1316690 - DNA, 25 bp, Homo sapien
gcattcattaatagtgacgaaggaa

SEQ ID NO: 1316691 - DNA, 25 bp, Homo sapien
taaaataaggatgtctagaccgttc

SEQ ID NO: 1316692 - DNA, 25 bp, Homo sapien
ccgttcaaaggcataaattaaggca

SEQ ID NO: 1316693 - DNA, 25 bp, Homo sapien
ggcattgcattcattaatagtgacg

SEQ ID NO: 1316694 - DNA, 25 bp, Homo sapien
tctgatcagcattgagaaagccagt

SEQ ID NO: 1316695 - DNA, 25 bp, Homo sapien
gaaacagagtttgtctccaatgaca

SEQ ID NO: 1316696 - DNA, 25 bp, Homo sapien
aaagttgggagccatattctctccc

SEQ ID NO: 1316697 - DNA, 25 bp, Homo sapien
tgcctgtagctaaagttgggagcca

SEQ ID NO: 1316698 - DNA, 25 bp, Homo sapien
gccttgttgctacagttacacctca

SEQ ID NO: 1316699 - DNA, 25 bp, Homo sapien
ttctcggaccttgcccaggtcaagc

SEQ ID NO: 1316700 - DNA, 25 bp, Homo sapien
ctcatcaaaaccaacgtatccgtct

SEQ ID NO: 1316701 - DNA, 25 bp, Homo sapien
tatccgtctagttctcttaggacca

SEQ ID NO: 1316702 - DNA, 25 bp, Homo sapien
ccaagccaatggctgcagaccatca

SEQ ID NO: 1316703 - DNA, 25 bp, Homo sapien
tgagaagctgcggtcttgatgtcag

SEQ ID NO: 1316704 - DNA, 25 bp, Homo sapien
agcagagcttactggcaggatgagt

SEQ ID NO: 1316705 - DNA, 25 bp, Homo sapien
ctgcggtcttgatgtcagcaaatgg

SEQ ID NO: 1316706 - DNA, 25 bp, Homo sapien
caaatgggaattcagcagagcttac

SEQ ID NO: 1316707 - DNA, 25 bp, Homo sapien
tagtgcatgtcagtgtagcaacgtc

SEQ ID NO: 1316708 - DNA, 25 bp, Homo sapien
tgattggttcagttagatggtggcc

SEQ ID NO: 1316709 - DNA, 25 bp, Homo sapien
caagaacacgtcttagctccagggc

SEQ ID NO: 1316710 - DNA, 25 bp, Homo sapien
tccagggccttcgtgattcccaagt

SEQ ID NO: 1316711 - DNA, 25 bp, Homo sapien
tgaagactgattccaccaaagcggt

SEQ ID NO: 1316712 - DNA, 25 bp, Homo sapien
tctaccggttagaggccaaagaagc

SEQ ID NO: 1316713 - DNA, 25 bp, Homo sapien
tagaaccgaggtcaaagcaatcagt

SEQ ID NO: 1316714 - DNA, 25 bp, Homo sapien
tattgaacaaggcaggtctcatccc

SEQ ID NO: 1316715 - DNA, 25 bp, Homo sapien
aggtcattgttattcctgcgggggc

SEQ ID NO: 1316716 - DNA, 25 bp, Homo sapien
cacttctttgagatcaggattccag

SEQ ID NO: 1316717 - DNA, 25 bp, Homo sapien
gagatcaggattccaggaatccagg

SEQ ID NO: 1316718 - DNA, 25 bp, Homo sapien
tttgagatcaggattccaggaatcc

SEQ ID NO: 1316719 - DNA, 25 bp, Homo sapien
gaagccattacacaacagggtggcc

SEQ ID NO: 1316720 - DNA, 25 bp, Homo sapien
tgggagcactgagactcttcctggg

SEQ ID NO: 1316721 - DNA, 25 bp, Homo sapien
tatcctcatgcaattatccatgtgg

SEQ ID NO: 1316722 - DNA, 25 bp, Homo sapien
ggaatgaaagccttggaccctgagt

SEQ ID NO: 1316723 - DNA, 25 bp, Homo sapien
agtacattacatcccgagcttccag

SEQ ID NO: 1316724 - DNA, 25 bp, Homo sapien
ttagtacattacatcccgagcttcc

SEQ ID NO: 1316725 - DNA, 25 bp, Homo sapien
attacatcccgagcttccagggcag

SEQ ID NO: 1316726 - DNA, 25 bp, Homo sapien
acattacatcccgagcttccagggc

SEQ ID NO: 1316727 - DNA, 25 bp, Homo sapien
ctgctgggagtggagtatcatgggt

SEQ ID NO: 1316728 - DNA, 25 bp, Homo sapien
tgctcctcccgactggaccagggta

SEQ ID NO: 1316729 - DNA, 25 bp, Homo sapien
agtatcatgggtggccctttctgca

SEQ ID NO: 1316730 - DNA, 25 bp, Homo sapien
tctggtttattagctgggggttgaa

SEQ ID NO: 1316731 - DNA, 25 bp, Homo sapien
acatgtgcccgggtcctcagcgatt

SEQ ID NO: 1316732 - DNA, 25 bp, Homo sapien
ctagcatccggtacaggcagcgtag

SEQ ID NO: 1316733 - DNA, 25 bp, Homo sapien
gtgcccgggtcctcagcgatttcct

SEQ ID NO: 1316734 - DNA, 25 bp, Homo sapien
agcgtaggcacagatttcacatgtg

SEQ ID NO: 1316735 - DNA, 25 bp, Homo sapien
cattgggctccttgcagagaggctt

SEQ ID NO: 1316736 - DNA, 25 bp, Homo sapien
ttgggctccttgcagagaggcttga

SEQ ID NO: 1316737 - DNA, 25 bp, Homo sapien
ggcattgggctccttgcagagaggc

SEQ ID NO: 1316738 - DNA, 25 bp, Homo sapien
tgggcattgggctccttgcagagag

SEQ ID NO: 1316739 - DNA, 25 bp, Homo sapien
gttgctacagaggatgggaaccaca

SEQ ID NO: 1316740 - DNA, 25 bp, Homo sapien
tgcaaagttcctgagtttcccaacc

SEQ ID NO: 1316741 - DNA, 25 bp, Homo sapien
tggaaagttcgggttgctacagagg

SEQ ID NO: 1316742 - DNA, 25 bp, Homo sapien
gttcaccagggatgggtgcaaagtt

SEQ ID NO: 1316743 - DNA, 25 bp, Homo sapien
aaggagccggcacataggacactca

SEQ ID NO: 1316744 - DNA, 25 bp, Homo sapien
taaaatgggactaatgatccctttc

SEQ ID NO: 1316745 - DNA, 25 bp, Homo sapien
tccaggttgatagtggagccacagt

SEQ ID NO: 1316746 - DNA, 25 bp, Homo sapien
ctccaaagttgaagggaaaggtgtg

SEQ ID NO: 1316747 - DNA, 25 bp, Homo sapien
ggcacagtgcggagagcaggaaggc

SEQ ID NO: 1316748 - DNA, 25 bp, Homo sapien
ggcaactgtggtcacgtagctagaa

SEQ ID NO: 1316749 - DNA, 25 bp, Homo sapien
gtggtcacgtagctagaaatcccag

SEQ ID NO: 1316750 - DNA, 25 bp, Homo sapien
aactgtggtcacgtagctagaaatc

SEQ ID NO: 1316751 - DNA, 25 bp, Homo sapien
ctgtggtcacgtagctagaaatccc

SEQ ID NO: 1316752 - DNA, 25 bp, Homo sapien
aaagttctattgagtccatcccatt

SEQ ID NO: 1316753 - DNA, 25 bp, Homo sapien
taaagttctattgagtccatcccat

SEQ ID NO: 1316754 - DNA, 25 bp, Homo sapien
ctaaagttctattgagtccatccca

SEQ ID NO: 1316755 - DNA, 25 bp, Homo sapien
gggcattggccaccaagacaacctc

SEQ ID NO: 1316756 - DNA, 25 bp, Homo sapien
caggaagaggcggtgaagaaactcc

SEQ ID NO: 1316757 - DNA, 25 bp, Homo sapien
ctgctttgggcattggccaccaaga

SEQ ID NO: 1316758 - DNA, 25 bp, Homo sapien
aagaaactccgttcaccatctgctc

SEQ ID NO: 1316759 - DNA, 25 bp, Homo sapien
tgacaaggtggcatttgcaacaggt

SEQ ID NO: 1316760 - DNA, 25 bp, Homo sapien
aatgggaagatttggacccatcgag

SEQ ID NO: 1316761 - DNA, 25 bp, Homo sapien
ggagagccgcgaggcaaaggcctgg

SEQ ID NO: 1316762 - DNA, 25 bp, Homo sapien
tttgcaacaggtcttgatcaatggg

SEQ ID NO: 1316763 - DNA, 25 bp, Homo sapien
ggccccagcagtatgtggccgagaa

SEQ ID NO: 1316764 - DNA, 25 bp, Homo sapien
acggggcagcagacttcagaggcag

SEQ ID NO: 1316765 - DNA, 25 bp, Homo sapien
tgtggccgagaactagacaggctcc

SEQ ID NO: 1316766 - DNA, 25 bp, Homo sapien
cagtatgtggccgagaactagacag

SEQ ID NO: 1316767 - DNA, 25 bp, Homo sapien
ctttctttaggagcaccaaaatctg

SEQ ID NO: 1316768 - DNA, 25 bp, Homo sapien
cctagggttgaattctggttctgac

SEQ ID NO: 1316769 - DNA, 25 bp, Homo sapien
acatgtctcaataagcccaacccgg

SEQ ID NO: 1316770 - DNA, 25 bp, Homo sapien
gacgcagtcagctaccaagtctctg

SEQ ID NO: 1316771 - DNA, 25 bp, Homo sapien
tctgtctttgagcattggaggaagc

SEQ ID NO: 1316772 - DNA, 25 bp, Homo sapien
caattactgtcctcaggtagtaatg

SEQ ID NO: 1316773 - DNA, 25 bp, Homo sapien
ctcagtgaccccaaggactctgggg

SEQ ID NO: 1316774 - DNA, 25 bp, Homo sapien
gcagcaattactgtcctcaggtagt

SEQ ID NO: 1316775 - DNA, 25 bp, Homo sapien
ttactgtcctcaggtagtaatgcaa

SEQ ID NO: 1316776 - DNA, 25 bp, Homo sapien
tcaagaaaagtaacgctgggccagg

SEQ ID NO: 1316777 - DNA, 25 bp, Homo sapien
tacaaaatggccactagagggactc

SEQ ID NO: 1316778 - DNA, 25 bp, Homo sapien
taatgaacccgacaggagctaagca

SEQ ID NO: 1316779 - DNA, 25 bp, Homo sapien
caaaggacatctgagcgacacgtat

SEQ ID NO: 1316780 - DNA, 25 bp, Homo sapien
ggaggcagggaacgccgcatctgga

SEQ ID NO: 1316781 - DNA, 25 bp, Homo sapien
aggcagggaacgccgcatctggaag

SEQ ID NO: 1316782 - DNA, 25 bp, Homo sapien
cagggaacgccgcatctggaaggct

SEQ ID NO: 1316783 - DNA, 25 bp, Homo sapien
agggaacgccgcatctggaaggctt

SEQ ID NO: 1316784 - DNA, 25 bp, Homo sapien
tataccaggctgcagtaaggaagac

SEQ ID NO: 1316785 - DNA, 25 bp, Homo sapien
taatagcagcgacttgggtagagaa

SEQ ID NO: 1316786 - DNA, 25 bp, Homo sapien
gaggtcagttcacttgatccacact

SEQ ID NO: 1316787 - DNA, 25 bp, Homo sapien
gaaaagtgccaatgtagccactgct

SEQ ID NO: 1316788 - DNA, 25 bp, Homo sapien
aacaggataatgatggcagtgcacc

SEQ ID NO: 1316789 - DNA, 25 bp, Homo sapien
cacagctgagtacagaatgcccacc

SEQ ID NO: 1316790 - DNA, 25 bp, Homo sapien
caggaaaccagaaggaaccacagct

SEQ ID NO: 1316791 - DNA, 25 bp, Homo sapien
tctgtgccaccaagtaatgtcaagt

SEQ ID NO: 1316792 - DNA, 25 bp, Homo sapien
ggctccagagccttaccaccttatg

SEQ ID NO: 1316793 - DNA, 25 bp, Homo sapien
tagtagtaagcactcacaacaggtt

SEQ ID NO: 1316794 - DNA, 25 bp, Homo sapien
taagttccttaatgtgggtcaggca

SEQ ID NO: 1316795 - DNA, 25 bp, Homo sapien
gaaaaacaacggactctgaatccag

SEQ ID NO: 1316796 - DNA, 25 bp, Homo sapien
caggacttcttagagaggcaagaca

SEQ ID NO: 1316797 - DNA, 25 bp, Homo sapien
tcaccatcgggaaagctaacgcttc

SEQ ID NO: 1316798 - DNA, 25 bp, Homo sapien
tacaggagctaataaagtaggttcc

SEQ ID NO: 1316799 - DNA, 25 bp, Homo sapien
tgaatgaagcagaatctacaggagc

SEQ ID NO: 1316800 - DNA, 25 bp, Homo sapien
ctgccatcgttgttcctggagtgct

SEQ ID NO: 1316801 - DNA, 25 bp, Homo sapien
gtgcctgtgggatatgaggataacc

SEQ ID NO: 1316802 - DNA, 25 bp, Homo sapien
atatgaggataaccagggggtggca

SEQ ID NO: 1316803 - DNA, 25 bp, Homo sapien
gcctgtgggatatgaggataaccag

SEQ ID NO: 1316804 - DNA, 25 bp, Homo sapien
tgctgagtgcctgtgggatatgagg

SEQ ID NO: 1316805 - DNA, 25 bp, Homo sapien
gggagattttgcctagaatctatgt

SEQ ID NO: 1316806 - DNA, 25 bp, Homo sapien
agattttgcctagaatctatgtaca

SEQ ID NO: 1316807 - DNA, 25 bp, Homo sapien
aaggagggagattttgcctagaatc

SEQ ID NO: 1316808 - DNA, 25 bp, Homo sapien
ggagggagattttgcctagaatcta

SEQ ID NO: 1316809 - DNA, 25 bp, Homo sapien
gagggaaaacatgttaccacaaata

SEQ ID NO: 1316810 - DNA, 25 bp, Homo sapien
aatggagcactaaaatcttaacaga

SEQ ID NO: 1316811 - DNA, 25 bp, Homo sapien
taacagaattgttactctgaaagta

SEQ ID NO: 1316812 - DNA, 25 bp, Homo sapien
gaaaatattactcctttcagatgct

SEQ ID NO: 1316813 - DNA, 25 bp, Homo sapien
gtaagacagggattgttacacccat

SEQ ID NO: 1316814 - DNA, 25 bp, Homo sapien
gacacattagtttgacagtgctagg

SEQ ID NO: 1316815 - DNA, 25 bp, Homo sapien
gaaaggctaacctgacttgcccaaa

SEQ ID NO: 1316816 - DNA, 25 bp, Homo sapien
tgtacgctggtaggcaagttatgtc

SEQ ID NO: 1316817 - DNA, 25 bp, Homo sapien
cacttctcttttatggcttcgtaat

SEQ ID NO: 1316818 - DNA, 25 bp, Homo sapien
ctcttttatggcttcgtaattctta

SEQ ID NO: 1316819 - DNA, 25 bp, Homo sapien
ttaccacttctcttttatggcttcg

SEQ ID NO: 1316820 - DNA, 25 bp, Homo sapien
tcttttatggcttcgtaattcttac

SEQ ID NO: 1316821 - DNA, 25 bp, Homo sapien
tattctgggactcaagacctacacc

SEQ ID NO: 1316822 - DNA, 25 bp, Homo sapien
gaatcacgaaggtgtcatcgggacc

SEQ ID NO: 1316823 - DNA, 25 bp, Homo sapien
taccaagcgggtccttgaagacagg

SEQ ID NO: 1316824 - DNA, 25 bp, Homo sapien
aacagcttggcaggcatgagtcaga

SEQ ID NO: 1316825 - DNA, 25 bp, Homo sapien
caaactgaacctggtctaaagacca

SEQ ID NO: 1316826 - DNA, 25 bp, Homo sapien
aacaaagatcggcaaactgaacctg

SEQ ID NO: 1316827 - DNA, 25 bp, Homo sapien
cattttgttgaacattactctgtga

SEQ ID NO: 1316828 - DNA, 25 bp, Homo sapien
tataaggccagtttgtgtaaagaac

SEQ ID NO: 1316829 - DNA, 25 bp, Homo sapien
tatccacgcaatgaagaatgacctt

SEQ ID NO: 1316830 - DNA, 25 bp, Homo sapien
caaagaaagttataatctagcagag

SEQ ID NO: 1316831 - DNA, 25 bp, Homo sapien
tgtctgtgaccctctgctataccaa

SEQ ID NO: 1316832 - DNA, 25 bp, Homo sapien
tttatggtagtgatttatccacgca

SEQ ID NO: 1316833 - DNA, 25 bp, Homo sapien
tcaagtgtcgcataccaatcatttg

SEQ ID NO: 1316834 - DNA, 25 bp, Homo sapien
tgaaactgtgaaaggtctacatctg

SEQ ID NO: 1316835 - DNA, 25 bp, Homo sapien
catctgaccaattaacactgctggc

SEQ ID NO: 1316836 - DNA, 25 bp, Homo sapien
cactgctggcaattcgacagctttc

SEQ ID NO: 1316837 - DNA, 25 bp, Homo sapien
tggtaagggaaaacgatgagctgcc

SEQ ID NO: 1316838 - DNA, 25 bp, Homo sapien
ttatatcacgtgttgggcaatctgc

SEQ ID NO: 1316839 - DNA, 25 bp, Homo sapien
tgatgaatctaagacttgaacccag

SEQ ID NO: 1316840 - DNA, 25 bp, Homo sapien
ggtcttctaacctccagtctagcag

SEQ ID NO: 1316841 - DNA, 25 bp, Homo sapien
ttgtgggggtgggggtgcctgatgt

SEQ ID NO: 1316842 - DNA, 25 bp, Homo sapien
tgtgggggtgggggtgcctgatgtg

SEQ ID NO: 1316843 - DNA, 25 bp, Homo sapien
tgttgtgggggtgggggtgcctgat

SEQ ID NO: 1316844 - DNA, 25 bp, Homo sapien
ctgttgtgggggtgggggtgcctga

SEQ ID NO: 1316845 - DNA, 25 bp, Homo sapien
ttaacgtctgatgctgatggttcgg

SEQ ID NO: 1316846 - DNA, 25 bp, Homo sapien
gatggttcggatggtgctgtatgtg

SEQ ID NO: 1316847 - DNA, 25 bp, Homo sapien
ttcggatggtgctgtatgtgttgat

SEQ ID NO: 1316848 - DNA, 25 bp, Homo sapien
acgtctgatgctgatggttcggatg

SEQ ID NO: 1316849 - DNA, 25 bp, Homo sapien
gctgcggtaaaccatgcggtcgatg

SEQ ID NO: 1316850 - DNA, 25 bp, Homo sapien
gaacgctgcggatgctgcggtaaac

SEQ ID NO: 1316851 - DNA, 25 bp, Homo sapien
gctgcggatgctgcggtaaaccatg

SEQ ID NO: 1316852 - DNA, 25 bp, Homo sapien
cggatgctgcggtaaaccatgcggt

SEQ ID NO: 1316853 - DNA, 25 bp, Homo sapien
tactgcctgtggtgttgaggccact

SEQ ID NO: 1316854 - DNA, 25 bp, Homo sapien
aggccactgccatgactgttggaca

SEQ ID NO: 1316855 - DNA, 25 bp, Homo sapien
ctgccatgactgttggacaggctgc

SEQ ID NO: 1316856 - DNA, 25 bp, Homo sapien
tgagacagtgagacctgtgcaaccg

SEQ ID NO: 1316857 - DNA, 25 bp, Homo sapien
agtgctgataggtacatgaagtgtg

SEQ ID NO: 1316858 - DNA, 25 bp, Homo sapien
tgctgggagagtgctgataggtaca

SEQ ID NO: 1316859 - DNA, 25 bp, Homo sapien
ggtacatgaagtgtgggactgctgg

SEQ ID NO: 1316860 - DNA, 25 bp, Homo sapien
gagagtgctgataggtacatgaagt

SEQ ID NO: 1316861 - DNA, 25 bp, Homo sapien
ctcagttgacttaatggcagaacct

SEQ ID NO: 1316862 - DNA, 25 bp, Homo sapien
tcctgcagtccctaagatctttaca

SEQ ID NO: 1316863 - DNA, 25 bp, Homo sapien
gtccctaagatctttacaaaagcca

SEQ ID NO: 1316864 - DNA, 25 bp, Homo sapien
gcttactaggtctacctctgcatct

SEQ ID NO: 1316865 - DNA, 25 bp, Homo sapien
tttggtcaagatgcaacagtgtatc

SEQ ID NO: 1316866 - DNA, 25 bp, Homo sapien
caaatttggcgctaccacattccga

SEQ ID NO: 1316867 - DNA, 25 bp, Homo sapien
catgtgagaataccgctaaaaggca

SEQ ID NO: 1316868 - DNA, 25 bp, Homo sapien
tgagagaactagctactttttgccc

SEQ ID NO: 1316869 - DNA, 25 bp, Homo sapien
aaatgaggcactaagatcttcaaaa

SEQ ID NO: 1316870 - DNA, 25 bp, Homo sapien
ttctggaaggttgtactgtggttgc

SEQ ID NO: 1316871 - DNA, 25 bp, Homo sapien
cttgttgactaagtgactgctcaaa

SEQ ID NO: 1316872 - DNA, 25 bp, Homo sapien
aactgacttataaaggctccgaaat

SEQ ID NO: 1316873 - DNA, 25 bp, Homo sapien
taatgattgagagactgattctgga

SEQ ID NO: 1316874 - DNA, 25 bp, Homo sapien
agactgattctggatggcttgtcac

SEQ ID NO: 1316875 - DNA, 25 bp, Homo sapien
tgaggagttaatgattgagagactg

SEQ ID NO: 1316876 - DNA, 25 bp, Homo sapien
tgagagactgattctggatggcttg

SEQ ID NO: 1316877 - DNA, 25 bp, Homo sapien
taactatgcacacttccaacactgt

SEQ ID NO: 1316878 - DNA, 25 bp, Homo sapien
taaggctactgcgtgggctatcact

SEQ ID NO: 1316879 - DNA, 25 bp, Homo sapien
ttaacagatgccaaactctggtctg

SEQ ID NO: 1316880 - DNA, 25 bp, Homo sapien
ctaccatcctgatcagtgttataca

SEQ ID NO: 1316881 - DNA, 25 bp, Homo sapien
gttggagaggcacttcccgaaataa

SEQ ID NO: 1316882 - DNA, 25 bp, Homo sapien
gcacttcccgaaataatacactcca

SEQ ID NO: 1316883 - DNA, 25 bp, Homo sapien
tcccaaagaatctgaatctatgcta

SEQ ID NO: 1316884 - DNA, 25 bp, Homo sapien
cagtgttgattgccagagttggaga

SEQ ID NO: 1316885 - DNA, 25 bp, Homo sapien
catcaaattcttgaacatccagttt

SEQ ID NO: 1316886 - DNA, 25 bp, Homo sapien
ttattagctcatatatccagcaact

SEQ ID NO: 1316887 - DNA, 25 bp, Homo sapien
aataattattagctcatatatccag

SEQ ID NO: 1316888 - DNA, 25 bp, Homo sapien
agtttgaagggatctcatcaaattc

SEQ ID NO: 1316889 - DNA, 25 bp, Homo sapien
cattcatcacaatgatctcttatga

SEQ ID NO: 1316890 - DNA, 25 bp, Homo sapien
attcatcacaatgatctcttatgaa

SEQ ID NO: 1316891 - DNA, 25 bp, Homo sapien
cgttctacagatcgtgccctcttct

SEQ ID NO: 1316892 - DNA, 25 bp, Homo sapien
tccttcggattggtgtctattgccc

SEQ ID NO: 1316893 - DNA, 25 bp, Homo sapien
agtaggcagcacatcttccttcgga

SEQ ID NO: 1316894 - DNA, 25 bp, Homo sapien
gccctcttctttggccgagtaggca

SEQ ID NO: 1316895 - DNA, 25 bp, Homo sapien
gacctccaaagctgaagtgatcccg

SEQ ID NO: 1316896 - DNA, 25 bp, Homo sapien
tccaaagctgaagtgatcccgagcc

SEQ ID NO: 1316897 - DNA, 25 bp, Homo sapien
aaagctgaagtgatcccgagcccca

SEQ ID NO: 1316898 - DNA, 25 bp, Homo sapien
aagtgatcccgagccccacaagtag

SEQ ID NO: 1316899 - DNA, 25 bp, Homo sapien
actgcaccaggcctagttttctgat

SEQ ID NO: 1316900 - DNA, 25 bp, Homo sapien
gcaccaggcctagttttctgatttt

SEQ ID NO: 1316901 - DNA, 25 bp, Homo sapien
cactgcaccaggcctagttttctga

SEQ ID NO: 1316902 - DNA, 25 bp, Homo sapien
caggtgatctgcctcccaagtgctg

SEQ ID NO: 1316903 - DNA, 25 bp, Homo sapien
gctggatgagtgttaaccttggtca

SEQ ID NO: 1316904 - DNA, 25 bp, Homo sapien
agtggttgaatgtaaacatccttgc

SEQ ID NO: 1316905 - DNA, 25 bp, Homo sapien
tctcatcaagttaaggaaattctct

SEQ ID NO: 1316906 - DNA, 25 bp, Homo sapien
cattggctaggacctctaacaggat

SEQ ID NO: 1316907 - DNA, 25 bp, Homo sapien
tactgcacctaacaatccgtcacct

SEQ ID NO: 1316908 - DNA, 25 bp, Homo sapien
actgcacctaacaatccgtcaccta

SEQ ID NO: 1316909 - DNA, 25 bp, Homo sapien
ggtttactgcacctaacaatccgtc

SEQ ID NO: 1316910 - DNA, 25 bp, Homo sapien
tttactgcacctaacaatccgtcac

SEQ ID NO: 1316911 - DNA, 25 bp, Homo sapien
ccctctacacatttaggtattgatg

SEQ ID NO: 1316912 - DNA, 25 bp, Homo sapien
atttccctctacacatttaggtatt

SEQ ID NO: 1316913 - DNA, 25 bp, Homo sapien
ctctacacatttaggtattgatggg

SEQ ID NO: 1316914 - DNA, 25 bp, Homo sapien
ttccctctacacatttaggtattga

SEQ ID NO: 1316915 - DNA, 25 bp, Homo sapien
tttagttcctttcaagtcaaagatc

SEQ ID NO: 1316916 - DNA, 25 bp, Homo sapien
ctataatcctttagttcctttcaag

SEQ ID NO: 1316917 - DNA, 25 bp, Homo sapien
tcctttcaagtcaaagatcatttct

SEQ ID NO: 1316918 - DNA, 25 bp, Homo sapien
tcaagtcaaagatcatttctctgaa

SEQ ID NO: 1316919 - DNA, 25 bp, Homo sapien
ccaccccaacttcgctcaatggttt

SEQ ID NO: 1316920 - DNA, 25 bp, Homo sapien
tcccaccccaacttcgctcaatggt

SEQ ID NO: 1316921 - DNA, 25 bp, Homo sapien
caacttcgctcaatggttttctccc

SEQ ID NO: 1316922 - DNA, 25 bp, Homo sapien
acttcgctcaatggttttctcccac

SEQ ID NO: 1316923 - DNA, 25 bp, Homo sapien
gcagtctagacaagtaaagcaagga

SEQ ID NO: 1316924 - DNA, 25 bp, Homo sapien
cattgagagtccaattaggagctac

SEQ ID NO: 1316925 - DNA, 25 bp, Homo sapien
atataaactggagggatcgagccca

SEQ ID NO: 1316926 - DNA, 25 bp, Homo sapien
ggtgaattatagctagaaaggcaga

SEQ ID NO: 1316927 - DNA, 25 bp, Homo sapien
taagtttcagagaccaagcaactag

SEQ ID NO: 1316928 - DNA, 25 bp, Homo sapien
agtcctaatctagtaacttaccttg

SEQ ID NO: 1316929 - DNA, 25 bp, Homo sapien
taccttgacaaccaaatacagtaca

SEQ ID NO: 1316930 - DNA, 25 bp, Homo sapien
tacagtacaaccaagtactcttaag

SEQ ID NO: 1316931 - DNA, 25 bp, Homo sapien
tatacactagttaggttcccacagc

SEQ ID NO: 1316932 - DNA, 25 bp, Homo sapien
gaggagtcaccatagaaaaaacgct

SEQ ID NO: 1316933 - DNA, 25 bp, Homo sapien
tacacagagatgcaccccttatatg

SEQ ID NO: 1316934 - DNA, 25 bp, Homo sapien
cagcaaagtacaacagcactgtggt

SEQ ID NO: 1316935 - DNA, 25 bp, Homo sapien
agaattcaactgttttaagaagatg

SEQ ID NO: 1316936 - DNA, 25 bp, Homo sapien
gaagaattcaactgttttaagaaga

SEQ ID NO: 1316937 - DNA, 25 bp, Homo sapien
tgaagaattcaactgttttaagaag

SEQ ID NO: 1316938 - DNA, 25 bp, Homo sapien
aattcaactgttttaagaagatgaa

SEQ ID NO: 1316939 - DNA, 25 bp, Homo sapien
catttgttcaatgacagattatgtc

SEQ ID NO: 1316940 - DNA, 25 bp, Homo sapien
caatgacagattatgtcgtatggaa

SEQ ID NO: 1316941 - DNA, 25 bp, Homo sapien
tagatcgaggcactttaaggaaaca

SEQ ID NO: 1316942 - DNA, 25 bp, Homo sapien
ccagggtcatccttagatcgaggca

SEQ ID NO: 1316943 - DNA, 25 bp, Homo sapien
gccataaggtcaataaaatccaaaa

SEQ ID NO: 1316944 - DNA, 25 bp, Homo sapien
agaaaagccataaggtcaataaaat

SEQ ID NO: 1316945 - DNA, 25 bp, Homo sapien
aaagccataaggtcaataaaatcca

SEQ ID NO: 1316946 - DNA, 25 bp, Homo sapien
aagccataaggtcaataaaatccaa

SEQ ID NO: 1316947 - DNA, 25 bp, Homo sapien
gaagagttagcagcagactgctgaa

SEQ ID NO: 1316948 - DNA, 25 bp, Homo sapien
aagaagagttagcagcagactgctg

SEQ ID NO: 1316949 - DNA, 25 bp, Homo sapien
agcagcagactgctgaagtgttcta

SEQ ID NO: 1316950 - DNA, 25 bp, Homo sapien
gagttagcagcagactgctgaagtg

SEQ ID NO: 1316951 - DNA, 25 bp, Homo sapien
ccatgtgcattttgtgtagcatcag

SEQ ID NO: 1316952 - DNA, 25 bp, Homo sapien
cctggtccagagttgtatttgggtc

SEQ ID NO: 1316953 - DNA, 25 bp, Homo sapien
taatgaggctggcataactgtatgg

SEQ ID NO: 1316954 - DNA, 25 bp, Homo sapien
gcctctctataatatgggaagttat

SEQ ID NO: 1316955 - DNA, 25 bp, Homo sapien
ccatagacgttaggctgctctccag

SEQ ID NO: 1316956 - DNA, 25 bp, Homo sapien
gtaaccagtccatagacgttaggct

SEQ ID NO: 1316957 - DNA, 25 bp, Homo sapien
aaccagtccatagacgttaggctgc

SEQ ID NO: 1316958 - DNA, 25 bp, Homo sapien
agtccatagacgttaggctgctctc

SEQ ID NO: 1316959 - DNA, 25 bp, Homo sapien
gattttcaggtatgttgatccataa

SEQ ID NO: 1316960 - DNA, 25 bp, Homo sapien
tttcaggtatgttgatccataattt

SEQ ID NO: 1316961 - DNA, 25 bp, Homo sapien
ttgattttcaggtatgttgatccat

SEQ ID NO: 1316962 - DNA, 25 bp, Homo sapien
caggtatgttgatccataattttac

SEQ ID NO: 1316963 - DNA, 25 bp, Homo sapien
tagaactccacttagaatacaaacc

SEQ ID NO: 1316964 - DNA, 25 bp, Homo sapien
ttagaattccatttagggccgggca

SEQ ID NO: 1316965 - DNA, 25 bp, Homo sapien
tacaaacctaaggatcatatatggt

SEQ ID NO: 1316966 - DNA, 25 bp, Homo sapien
ctacccagaaggctaagagtgggag

SEQ ID NO: 1316967 - DNA, 25 bp, Homo sapien
ctctgagtagttgtaaagattgatg

SEQ ID NO: 1316968 - DNA, 25 bp, Homo sapien
tgaacacaaccagtctttcgcataa

SEQ ID NO: 1316969 - DNA, 25 bp, Homo sapien
tcttatatccagtttagaacacaca

SEQ ID NO: 1316970 - DNA, 25 bp, Homo sapien
ccagtctttcgcataagaagattca

SEQ ID NO: 1316971 - DNA, 25 bp, Homo sapien
catgagtcagctgaccgttacctac

SEQ ID NO: 1316972 - DNA, 25 bp, Homo sapien
caccaccagtcaattcattggagga

SEQ ID NO: 1316973 - DNA, 25 bp, Homo sapien
gaaaaagttcctatgctggaggaga

SEQ ID NO: 1316974 - DNA, 25 bp, Homo sapien
taaataagtacgttcccttgagcac

SEQ ID NO: 1316975 - DNA, 25 bp, Homo sapien
acaaatatttgtgggctcagcatgg

SEQ ID NO: 1316976 - DNA, 25 bp, Homo sapien
gtactatgtcaattacatctcagtg

SEQ ID NO: 1316977 - DNA, 25 bp, Homo sapien
gggtatgttcaccacattgatgtgg

SEQ ID NO: 1316978 - DNA, 25 bp, Homo sapien
gaatgacgggtatgttcaccacatt

SEQ ID NO: 1316979 - DNA, 25 bp, Homo sapien
gcaccaccttgtctgagtgattttt

SEQ ID NO: 1316980 - DNA, 25 bp, Homo sapien
caccaccttgtctgagtgatttttc

SEQ ID NO: 1316981 - DNA, 25 bp, Homo sapien
gtgcaccaccttgtctgagtgattt

SEQ ID NO: 1316982 - DNA, 25 bp, Homo sapien
tgcaccaccttgtctgagtgatttt

SEQ ID NO: 1316983 - DNA, 25 bp, Homo sapien
tgtcagtgaggtgttgatgttctcc

SEQ ID NO: 1316984 - DNA, 25 bp, Homo sapien
gaggttttagtatgctgtgtctcca

SEQ ID NO: 1316985 - DNA, 25 bp, Homo sapien
ggttaacttagctagcaggctgtca

SEQ ID NO: 1316986 - DNA, 25 bp, Homo sapien
tccacgtgcagatgagattaatgta

SEQ ID NO: 1316987 - DNA, 25 bp, Homo sapien
tgagtctgtaactgtctttaaccag

SEQ ID NO: 1316988 - DNA, 25 bp, Homo sapien
tatctgatacgagaatggatactac

SEQ ID NO: 1316989 - DNA, 25 bp, Homo sapien
tcacctctttgagtctgtaactgtc

SEQ ID NO: 1316990 - DNA, 25 bp, Homo sapien
aatggatactactgctggcatttgt

SEQ ID NO: 1316991 - DNA, 25 bp, Homo sapien
gatccatcgctgaagagttagtgtg

SEQ ID NO: 1316992 - DNA, 25 bp, Homo sapien
tctcatctagataagccgtctctcc

SEQ ID NO: 1316993 - DNA, 25 bp, Homo sapien
tagactagtattaaagctttcaact

SEQ ID NO: 1316994 - DNA, 25 bp, Homo sapien
ccttctggagcattgttaacacact

SEQ ID NO: 1316995 - DNA, 25 bp, Homo sapien
gcaagtagagtacagcctaaaccct

SEQ ID NO: 1316996 - DNA, 25 bp, Homo sapien
atagcagggcacaagcaccaggtat

SEQ ID NO: 1316997 - DNA, 25 bp, Homo sapien
agttacccagaggtatgcctaggca

SEQ ID NO: 1316998 - DNA, 25 bp, Homo sapien
gatctgcagaatgcacaggtgtctg

SEQ ID NO: 1316999 - DNA, 25 bp, Homo sapien
tacctgtactcccatattgtttgca

SEQ ID NO: 1317000 - DNA, 25 bp, Homo sapien
gactaagaccttgtgtttgattgca

SEQ ID NO: 1317001 - DNA, 25 bp, Homo sapien
tacatatatacacgagatcctgtcg

SEQ ID NO: 1317002 - DNA, 25 bp, Homo sapien
agagtgagaatggttaacgggtaca

SEQ ID NO: 1317003 - DNA, 25 bp, Homo sapien
gaatggcctgctatccctcactatc

SEQ ID NO: 1317004 - DNA, 25 bp, Homo sapien
tctcactcttgctatccaaaactca

SEQ ID NO: 1317005 - DNA, 25 bp, Homo sapien
gatgtgaatggcctgctatccctca

SEQ ID NO: 1317006 - DNA, 25 bp, Homo sapien
gaattgaacagatgtgaatggcctg

SEQ ID NO: 1317007 - DNA, 25 bp, Homo sapien
cttaatgaagttacagatggacaag

SEQ ID NO: 1317008 - DNA, 25 bp, Homo sapien
tggacaagcctgtccatacaaaccc

SEQ ID NO: 1317009 - DNA, 25 bp, Homo sapien
taatgaagttacagatggacaagcc

SEQ ID NO: 1317010 - DNA, 25 bp, Homo sapien
gacaagcctgtccatacaaacccat

SEQ ID NO: 1317011 - DNA, 25 bp, Homo sapien
gctcaaaactcaggcaagggaaaat

SEQ ID NO: 1317012 - DNA, 25 bp, Homo sapien
ttaaaggtactgtcttgcttcttca

SEQ ID NO: 1317013 - DNA, 25 bp, Homo sapien
tttaaaggtactgtcttgcttcttc

SEQ ID NO: 1317014 - DNA, 25 bp, Homo sapien
taaaggtactgtcttgcttcttcat

SEQ ID NO: 1317015 - DNA, 25 bp, Homo sapien
agaaggcagactaggtctctactgt

SEQ ID NO: 1317016 - DNA, 25 bp, Homo sapien
ctcaagagatatatgctgaataatc

SEQ ID NO: 1317017 - DNA, 25 bp, Homo sapien
catgcacaggtactcaagagatata

SEQ ID NO: 1317018 - DNA, 25 bp, Homo sapien
gaaggattatcttgtgaaagaaggc

SEQ ID NO: 1317019 - DNA, 25 bp, Homo sapien
caaatctggcatctattcttacccc

SEQ ID NO: 1317020 - DNA, 25 bp, Homo sapien
tttgaaactgtcaacaccctgccct

SEQ ID NO: 1317021 - DNA, 25 bp, Homo sapien
tactaatgtctctacaaatcctgtg

SEQ ID NO: 1317022 - DNA, 25 bp, Homo sapien
tcctatcctggaaatgatgcacttt

SEQ ID NO: 1317023 - DNA, 25 bp, Homo sapien
cgcaacgcggctgcggctggaagag

SEQ ID NO: 1317024 - DNA, 25 bp, Homo sapien
cccgcaacgcggctgcggctggaag

SEQ ID NO: 1317025 - DNA, 25 bp, Homo sapien
caacgcggctgcggctggaagagag

SEQ ID NO: 1317026 - DNA, 25 bp, Homo sapien
acgcggctgcggctggaagagagag

SEQ ID NO: 1317027 - DNA, 25 bp, Homo sapien
ctactgcgagcggtcgaggccccga

SEQ ID NO: 1317028 - DNA, 25 bp, Homo sapien
cggccgctccgtgcgtctccgcccc

SEQ ID NO: 1317029 - DNA, 25 bp, Homo sapien
caacggtgcctactgcgagcggtcg

SEQ ID NO: 1317030 - DNA, 25 bp, Homo sapien
gtgcctactgcgagcggtcgaggcc

SEQ ID NO: 1317031 - DNA, 25 bp, Homo sapien
caggtgctagactcatgtctgcgga

SEQ ID NO: 1317032 - DNA, 25 bp, Homo sapien
ggcgccttggaccttcaggacaccc

SEQ ID NO: 1317033 - DNA, 25 bp, Homo sapien
tcatgtctgcggaggcctttcccgt

SEQ ID NO: 1317034 - DNA, 25 bp, Homo sapien
agcggacgccttttccgacctggca

SEQ ID NO: 1317035 - DNA, 25 bp, Homo sapien
acacagctatttgcctggtcgatgg

SEQ ID NO: 1317036 - DNA, 25 bp, Homo sapien
tgtacacagctatttgcctggtcga

SEQ ID NO: 1317037 - DNA, 25 bp, Homo sapien
gcctggtcgatggagaaattgaaga

SEQ ID NO: 1317038 - DNA, 25 bp, Homo sapien
cctggtcgatggagaaattgaagac

SEQ ID NO: 1317039 - DNA, 25 bp, Homo sapien
ggagagactgcctcagacaactggg

SEQ ID NO: 1317040 - DNA, 25 bp, Homo sapien
tgtgagcaacacaagcatcgccttc

SEQ ID NO: 1317041 - DNA, 25 bp, Homo sapien
gctggaaagccgacctggaaagcag

SEQ ID NO: 1317042 - DNA, 25 bp, Homo sapien
cagcgtgggctaatgtgaatggtac

SEQ ID NO: 1317043 - DNA, 25 bp, Homo sapien
tatattagatcttcagtagcccctg

SEQ ID NO: 1317044 - DNA, 25 bp, Homo sapien
tggaataacccttgatgcagagctc

SEQ ID NO: 1317045 - DNA, 25 bp, Homo sapien
cctcaaagcagttgtgcaaggctgg

SEQ ID NO: 1317046 - DNA, 25 bp, Homo sapien
taacagctatgtgtgcaatcccagg

SEQ ID NO: 1317047 - DNA, 25 bp, Homo sapien
tcttcagttgaaatgagacttaata

SEQ ID NO: 1317048 - DNA, 25 bp, Homo sapien
gagacttaataactcttgaatggtg

SEQ ID NO: 1317049 - DNA, 25 bp, Homo sapien
aagtaatgggatggtcttcagttga

SEQ ID NO: 1317050 - DNA, 25 bp, Homo sapien
agctgttgttctttggctagactga

SEQ ID NO: 1317051 - DNA, 25 bp, Homo sapien
tccccagtccctagattagtgcttt

SEQ ID NO: 1317052 - DNA, 25 bp, Homo sapien
gataggaaacgtatggatcaccact

SEQ ID NO: 1317053 - DNA, 25 bp, Homo sapien
caccagtgccatagagataggaaac

SEQ ID NO: 1317054 - DNA, 25 bp, Homo sapien
tgaactccgggacataagcaatcat

SEQ ID NO: 1317055 - DNA, 25 bp, Homo sapien
tctatgcaagactgggaaccctcgg

SEQ ID NO: 1317056 - DNA, 25 bp, Homo sapien
tatgcaggctagactcaacacagga

SEQ ID NO: 1317057 - DNA, 25 bp, Homo sapien
gagaaacatcgtgagcatctgaacc

SEQ ID NO: 1317058 - DNA, 25 bp, Homo sapien
gctctgagggcaaaagctattggaa

SEQ ID NO: 1317059 - DNA, 25 bp, Homo sapien
acatgaccaggatcttcagaacaaa

SEQ ID NO: 1317060 - DNA, 25 bp, Homo sapien
aagtcaggatgcgaatggcttctgc

SEQ ID NO: 1317061 - DNA, 25 bp, Homo sapien
caggtagtaaaacatgaccaggatc

SEQ ID NO: 1317062 - DNA, 25 bp, Homo sapien
cagatgtagattctcgaatgttcaa

SEQ ID NO: 1317063 - DNA, 25 bp, Homo sapien
ccatttgttggatgtgagcctgtga

SEQ ID NO: 1317064 - DNA, 25 bp, Homo sapien
gaggacttgatagtgattgttcaaa

SEQ ID NO: 1317065 - DNA, 25 bp, Homo sapien
tcaaatatgcatgccagatctcaga

SEQ ID NO: 1317066 - DNA, 25 bp, Homo sapien
tgttcaaatatgcatgccagatctc

SEQ ID NO: 1317067 - DNA, 25 bp, Homo sapien
gagatggtaatacaacaagcaggcc

SEQ ID NO: 1317068 - DNA, 25 bp, Homo sapien
ctcagccgtcggaccaggcaggtga

SEQ ID NO: 1317069 - DNA, 25 bp, Homo sapien
catttggccgggcttctggacaacc

SEQ ID NO: 1317070 - DNA, 25 bp, Homo sapien
gggaaaagagatggtaatacaacaa

SEQ ID NO: 1317071 - DNA, 25 bp, Homo sapien
tcctgaagtcctaatgtcctctgtt

SEQ ID NO: 1317072 - DNA, 25 bp, Homo sapien
taaggtcatagaatatattagccag

SEQ ID NO: 1317073 - DNA, 25 bp, Homo sapien
agcctcctgaagtcctaatgtcctc

SEQ ID NO: 1317074 - DNA, 25 bp, Homo sapien
tgccaggtccaactttttaaggtca

SEQ ID NO: 1317075 - DNA, 25 bp, Homo sapien
tatacaggtgttataacttagcttg

SEQ ID NO: 1317076 - DNA, 25 bp, Homo sapien
gaaatatacaggtgttataacttag

SEQ ID NO: 1317077 - DNA, 25 bp, Homo sapien
caggtgttataacttagcttgttta

SEQ ID NO: 1317078 - DNA, 25 bp, Homo sapien
tttggaaatatacaggtgttataac

SEQ ID NO: 1317079 - DNA, 25 bp, Homo sapien
gaatagatattcttcagcctgaacg

SEQ ID NO: 1317080 - DNA, 25 bp, Homo sapien
agattccgatgcagtaaagagtggg

SEQ ID NO: 1317081 - DNA, 25 bp, Homo sapien
gagtgggtggcattactacagtcag

SEQ ID NO: 1317082 - DNA, 25 bp, Homo sapien
tcttagctatatagagaagtcccag

SEQ ID NO: 1317083 - DNA, 25 bp, Homo sapien
gggaaatttgtcagaacagaataga

SEQ ID NO: 1317084 - DNA, 25 bp, Homo sapien
tgctgcagggtaggaggcgtgctct

SEQ ID NO: 1317085 - DNA, 25 bp, Homo sapien
agccactacgtcagtgtgctgcagg

SEQ ID NO: 1317086 - DNA, 25 bp, Homo sapien
gggcgaagcattggtgtgataggtg

SEQ ID NO: 1317087 - DNA, 25 bp, Homo sapien
ctagtgtatggaattgggaaaggac

SEQ ID NO: 1317088 - DNA, 25 bp, Homo sapien
ctggagaggcatagggtgaagtgga

SEQ ID NO: 1317089 - DNA, 25 bp, Homo sapien
gaagtgatactatcccttagggtga

SEQ ID NO: 1317090 - DNA, 25 bp, Homo sapien
ggtggagacataaaggaagtgatac

SEQ ID NO: 1317091 - DNA, 25 bp, Homo sapien
gactgcaaagctgctggtacagcat

SEQ ID NO: 1317092 - DNA, 25 bp, Homo sapien
ctgggctatggtgtagcagaattca

SEQ ID NO: 1317093 - DNA, 25 bp, Homo sapien
tcaggccatacagcttcacacggaa

SEQ ID NO: 1317094 - DNA, 25 bp, Homo sapien
aagcaggcacaagctctacggagct

SEQ ID NO: 1317095 - DNA, 25 bp, Homo sapien
gccatgctgccgttcttcctctgaa

SEQ ID NO: 1317096 - DNA, 25 bp, Homo sapien
tcatggatgctgtcccagtcagcct

SEQ ID NO: 1317097 - DNA, 25 bp, Homo sapien
gtcagccttctgatgtaccacccca

SEQ ID NO: 1317098 - DNA, 25 bp, Homo sapien
catggaagtgcgcagtggaatcaag

SEQ ID NO: 1317099 - DNA, 25 bp, Homo sapien
tggggcttcgcacacctcacagcag

SEQ ID NO: 1317100 - DNA, 25 bp, Homo sapien
gggactgccagtgggtagatcacat

SEQ ID NO: 1317101 - DNA, 25 bp, Homo sapien
cacagcagagtctgcgccccttggg

SEQ ID NO: 1317102 - DNA, 25 bp, Homo sapien
aggccgcgcacacccgctcggctgg

SEQ ID NO: 1317103 - DNA, 25 bp, Homo sapien
ggacgtgactcgactaacatctggg

SEQ ID NO: 1317104 - DNA, 25 bp, Homo sapien
aaatggccgagaaacgactcccaag

SEQ ID NO: 1317105 - DNA, 25 bp, Homo sapien
caagtcccacgggtcaaatggccga

SEQ ID NO: 1317106 - DNA, 25 bp, Homo sapien
gtctctaagacggttgcccagcaag

SEQ ID NO: 1317107 - DNA, 25 bp, Homo sapien
tcctgttcttgtatcgcgctcgctc

SEQ ID NO: 1317108 - DNA, 25 bp, Homo sapien
cggccggtgcgcttcctggacaact

SEQ ID NO: 1317109 - DNA, 25 bp, Homo sapien
aggtcccactggaagcgcggccggt

SEQ ID NO: 1317110 - DNA, 25 bp, Homo sapien
ttatggctcgcttcgcggccaggct

SEQ ID NO: 1317111 - DNA, 25 bp, Homo sapien
caaaaattgttcagggctcttagag

SEQ ID NO: 1317112 - DNA, 25 bp, Homo sapien
gaatggtcatgctttggagatcaaa

SEQ ID NO: 1317113 - DNA, 25 bp, Homo sapien
tgaatgcctatgtatgtcaggccct

SEQ ID NO: 1317114 - DNA, 25 bp, Homo sapien
gatggtgccaaaactgctttctcct

SEQ ID NO: 1317115 - DNA, 25 bp, Homo sapien
ctatggttcccgccggaaggacgcg

SEQ ID NO: 1317116 - DNA, 25 bp, Homo sapien
gctgatgagcaagcagaggaagttt

SEQ ID NO: 1317117 - DNA, 25 bp, Homo sapien
gatgagcaagcagaggaagtttttc

SEQ ID NO: 1317118 - DNA, 25 bp, Homo sapien
ttcttttcagccttgctgatgagca

SEQ ID NO: 1317119 - DNA, 25 bp, Homo sapien
taaggacttgaatagttcttttcag

SEQ ID NO: 1317120 - DNA, 25 bp, Homo sapien
gttccaacttcaatgtgtttctgtt

SEQ ID NO: 1317121 - DNA, 25 bp, Homo sapien
ttgttccaacttcaatgtgtttctg

SEQ ID NO: 1317122 - DNA, 25 bp, Homo sapien
tgttccaacttcaatgtgtttctgt

SEQ ID NO: 1317123 - DNA, 25 bp, Homo sapien
caggtaatcttcttgcctcccaaag

SEQ ID NO: 1317124 - DNA, 25 bp, Homo sapien
tgtgccactgtttctggcttgtatt

SEQ ID NO: 1317125 - DNA, 25 bp, Homo sapien
tcaggtaatcttcttgcctcccaaa

SEQ ID NO: 1317126 - DNA, 25 bp, Homo sapien
gcatgtgccactgtttctggcttgt

SEQ ID NO: 1317127 - DNA, 25 bp, Homo sapien
gaaggttgttccttaaccaacatgc

SEQ ID NO: 1317128 - DNA, 25 bp, Homo sapien
ggttgttccttaaccaacatgcaag

SEQ ID NO: 1317129 - DNA, 25 bp, Homo sapien
cagaaggttgttccttaaccaacat

SEQ ID NO: 1317130 - DNA, 25 bp, Homo sapien
cacttcttctaccccagaaggttgt

SEQ ID NO: 1317131 - DNA, 25 bp, Homo sapien
ttatgattcgcctgcttgcttctcc

SEQ ID NO: 1317132 - DNA, 25 bp, Homo sapien
ttatcgaatttctccatctcagcca

SEQ ID NO: 1317133 - DNA, 25 bp, Homo sapien
tgcttctcctgttcaatcgtttctt

SEQ ID NO: 1317134 - DNA, 25 bp, Homo sapien
tgttcaatcgtttctttggaaggca

SEQ ID NO: 1317135 - DNA, 25 bp, Homo sapien
tgaggtgcgtgagaacgagcgaagt

SEQ ID NO: 1317136 - DNA, 25 bp, Homo sapien
tgccgaggaaaagcggagtgaggtg

SEQ ID NO: 1317137 - DNA, 25 bp, Homo sapien
agcggagtgaggtgcgtgagaacga

SEQ ID NO: 1317138 - DNA, 25 bp, Homo sapien
agttgccgaggaaaagcggagtgag

SEQ ID NO: 1317139 - DNA, 25 bp, Homo sapien
gcaacaagtattaactgaaggatca

SEQ ID NO: 1317140 - DNA, 25 bp, Homo sapien
gatggtgatagcaacaagtattaac

SEQ ID NO: 1317141 - DNA, 25 bp, Homo sapien
ttggcagccaggtgatggtgatagc

SEQ ID NO: 1317142 - DNA, 25 bp, Homo sapien
gccaggtgatggtgatagcaacaag

SEQ ID NO: 1317143 - DNA, 25 bp, Homo sapien
gagcaaatggtttgccaaatcacaa

SEQ ID NO: 1317144 - DNA, 25 bp, Homo sapien
ctacttacagaattacatgggaggc

SEQ ID NO: 1317145 - DNA, 25 bp, Homo sapien
gaagatatagagtaacctttcagga

SEQ ID NO: 1317146 - DNA, 25 bp, Homo sapien
catgggaggcttatttaaagtacag

SEQ ID NO: 1317147 - DNA, 25 bp, Homo sapien
tgaggaaggactgatgagcgggacc

SEQ ID NO: 1317148 - DNA, 25 bp, Homo sapien
aaggactgatgagcgggaccattga

SEQ ID NO: 1317149 - DNA, 25 bp, Homo sapien
cttgtaagatgaggaaggactgatg

SEQ ID NO: 1317150 - DNA, 25 bp, Homo sapien
tgatgagcgggaccattgagccctc

SEQ ID NO: 1317151 - DNA, 25 bp, Homo sapien
tagctttcttcctgactacactggg

SEQ ID NO: 1317152 - DNA, 25 bp, Homo sapien
tgtgctggagctcccaaataagcag

SEQ ID NO: 1317153 - DNA, 25 bp, Homo sapien
tacactgggttgaatagcgtccctc

SEQ ID NO: 1317154 - DNA, 25 bp, Homo sapien
tgcttctaggccagaaaaacagtct

SEQ ID NO: 1317155 - DNA, 25 bp, Homo sapien
tatttgaagggatacagagtctctc

SEQ ID NO: 1317156 - DNA, 25 bp, Homo sapien
tgataacagaaccagatgcaagcta

SEQ ID NO: 1317157 - DNA, 25 bp, Homo sapien
cattgcataagtacatggcaagtac

SEQ ID NO: 1317158 - DNA, 25 bp, Homo sapien
tttcaagggctagaattaatactct

SEQ ID NO: 1317159 - DNA, 25 bp, Homo sapien
tcctgtgtgatctccaagcaatttg

SEQ ID NO: 1317160 - DNA, 25 bp, Homo sapien
ttagtaaactatctcctcctgtgtg

SEQ ID NO: 1317161 - DNA, 25 bp, Homo sapien
tactgtatctatggacaggtactcc

SEQ ID NO: 1317162 - DNA, 25 bp, Homo sapien
tgcacaccaggatagcagaccctga

SEQ ID NO: 1317163 - DNA, 25 bp, Homo sapien
ggtttacacaagtaacataatacac

SEQ ID NO: 1317164 - DNA, 25 bp, Homo sapien
agtttgatgtatgtccatcagggcc

SEQ ID NO: 1317165 - DNA, 25 bp, Homo sapien
ataatacactctcattgtgaaaact

SEQ ID NO: 1317166 - DNA, 25 bp, Homo sapien
aaacagataaagtgaaagcccctct

SEQ ID NO: 1317167 - DNA, 25 bp, Homo sapien
atgcctggtctgtacaactttagtt

SEQ ID NO: 1317168 - DNA, 25 bp, Homo sapien
tcagtgagttctgggagagtttttt

SEQ ID NO: 1317169 - DNA, 25 bp, Homo sapien
tatagaaaccttggttttatctcag

SEQ ID NO: 1317170 - DNA, 25 bp, Homo sapien
agcccttggaaaactttttatgatg

SEQ ID NO: 1317171 - DNA, 25 bp, Homo sapien
cccttccctggagtatttgattgag

SEQ ID NO: 1317172 - DNA, 25 bp, Homo sapien
taccaaatggtagagagctttcctt

SEQ ID NO: 1317173 - DNA, 25 bp, Homo sapien
gatatgcttaccctcttccctgtga

SEQ ID NO: 1317174 - DNA, 25 bp, Homo sapien
tctcttttgaaagcccgagttctgg

SEQ ID NO: 1317175 - DNA, 25 bp, Homo sapien
taaagctgatggacaaagaaggcac

SEQ ID NO: 1317176 - DNA, 25 bp, Homo sapien
gcttttgctgtgtatagttaatgcc

SEQ ID NO: 1317177 - DNA, 25 bp, Homo sapien
ctttagctaggaggactggcactcc

SEQ ID NO: 1317178 - DNA, 25 bp, Homo sapien
tgtagcaaacctaactctcttaggt

SEQ ID NO: 1317179 - DNA, 25 bp, Homo sapien
cgtgcctggctgcaaactagtttct

SEQ ID NO: 1317180 - DNA, 25 bp, Homo sapien
ggaacagtcatgaactattggtgct

SEQ ID NO: 1317181 - DNA, 25 bp, Homo sapien
tctgtactgtgctcaccacggacag

SEQ ID NO: 1317182 - DNA, 25 bp, Homo sapien
cagggagactagtaaagctctgcag

SEQ ID NO: 1317183 - DNA, 25 bp, Homo sapien
taaaacggatcagaaggcaggtccc

SEQ ID NO: 1317184 - DNA, 25 bp, Homo sapien
tgactgctccgacaaaagggtacgc

SEQ ID NO: 1317185 - DNA, 25 bp, Homo sapien
tgtaggtcgactgaattagccgcca

SEQ ID NO: 1317186 - DNA, 25 bp, Homo sapien
taatgttctcagatcacagggaccg

SEQ ID NO: 1317187 - DNA, 25 bp, Homo sapien
ctgaagacctaaagtgcttgctttt

SEQ ID NO: 1317188 - DNA, 25 bp, Homo sapien
gctgaagacctaaagtgcttgcttt

SEQ ID NO: 1317189 - DNA, 25 bp, Homo sapien
tggtgtggtcatcaaatattggttc

SEQ ID NO: 1317190 - DNA, 25 bp, Homo sapien
catcaaatattggttcagctcctta

SEQ ID NO: 1317191 - DNA, 25 bp, Homo sapien
agatgccaattgaagtgttaggaca

SEQ ID NO: 1317192 - DNA, 25 bp, Homo sapien
tgttaggacaacctgtcacactgcc

SEQ ID NO: 1317193 - DNA, 25 bp, Homo sapien
ggcagatgtaggtaactagctgaat

SEQ ID NO: 1317194 - DNA, 25 bp, Homo sapien
tagctgaatgcacggatgactgcag

SEQ ID NO: 1317195 - DNA, 25 bp, Homo sapien
atgcacggatgactgcagaatgttg

SEQ ID NO: 1317196 - DNA, 25 bp, Homo sapien
gtaggtaactagctgaatgcacgga

SEQ ID NO: 1317197 - DNA, 25 bp, Homo sapien
ctaaatttaatgtctggaggatctg

SEQ ID NO: 1317198 - DNA, 25 bp, Homo sapien
gatctgatagatcccccactgtagg

SEQ ID NO: 1317199 - DNA, 25 bp, Homo sapien
taagggtataacatttggtatctaa

SEQ ID NO: 1317200 - DNA, 25 bp, Homo sapien
ctgtaggtgaaccagggctttccct

SEQ ID NO: 1317201 - DNA, 25 bp, Homo sapien
tatggcctgccaatttccttctggg

SEQ ID NO: 1317202 - DNA, 25 bp, Homo sapien
taaacaacaacctggacatgacgcc

SEQ ID NO: 1317203 - DNA, 25 bp, Homo sapien
catgccttttgagtctgagccctac

SEQ ID NO: 1317204 - DNA, 25 bp, Homo sapien
tccctggctataggcagaaagggct

SEQ ID NO: 1317205 - DNA, 25 bp, Homo sapien
tctgattctaggacaaagaccttgg

SEQ ID NO: 1317206 - DNA, 25 bp, Homo sapien
ccagaagcctgatacgcagtggcca

SEQ ID NO: 1317207 - DNA, 25 bp, Homo sapien
aatgtgcatgcagggttgggaacca

SEQ ID NO: 1317208 - DNA, 25 bp, Homo sapien
tgcagacctcacagagtcacctggg

SEQ ID NO: 1317209 - DNA, 25 bp, Homo sapien
tggcggaggcgggcaatttaacaac

SEQ ID NO: 1317210 - DNA, 25 bp, Homo sapien
gcggaggcgggcaatttaacaactg

SEQ ID NO: 1317211 - DNA, 25 bp, Homo sapien
cggaggcgggcaatttaacaactgg

SEQ ID NO: 1317212 - DNA, 25 bp, Homo sapien
ttggcggaggcgggcaatttaacaa

SEQ ID NO: 1317213 - DNA, 25 bp, Homo sapien
tactaaggtacgtcttggccactgc

SEQ ID NO: 1317214 - DNA, 25 bp, Homo sapien
tcttcagtgagtaaacagccgggct

SEQ ID NO: 1317215 - DNA, 25 bp, Homo sapien
ggtccgacctcaccatctgtgtagg

SEQ ID NO: 1317216 - DNA, 25 bp, Homo sapien
cattcaggcccggacatgggtactg

SEQ ID NO: 1317217 - DNA, 25 bp, Homo sapien
cacgaacagggctgggccaaattca

SEQ ID NO: 1317218 - DNA, 25 bp, Homo sapien
ctgttgggtctctctggctccgggc

SEQ ID NO: 1317219 - DNA, 25 bp, Homo sapien
tctggctccgggcatgtgcagcaga

SEQ ID NO: 1317220 - DNA, 25 bp, Homo sapien
gcagagggtccaggccgatagggct

SEQ ID NO: 1317221 - DNA, 25 bp, Homo sapien
gcataccacgagacagcagtcaaag

SEQ ID NO: 1317222 - DNA, 25 bp, Homo sapien
caggtgtgcttgggttgaagaactc

SEQ ID NO: 1317223 - DNA, 25 bp, Homo sapien
ggtcaccagggtggcataccacgag

SEQ ID NO: 1317224 - DNA, 25 bp, Homo sapien
cagggtggcataccacgagacagca

SEQ ID NO: 1317225 - DNA, 25 bp, Homo sapien
cacttcatgccaactacgctgagga

SEQ ID NO: 1317226 - DNA, 25 bp, Homo sapien
ggcaatggggttgctgtctcccacc

SEQ ID NO: 1317227 - DNA, 25 bp, Homo sapien
cccggcgatggcaacacggcccttg

SEQ ID NO: 1317228 - DNA, 25 bp, Homo sapien
aggaccatggccacgaagcccagga

SEQ ID NO: 1317229 - DNA, 25 bp, Homo sapien
tagggtgggcgggatgacactgagt

SEQ ID NO: 1317230 - DNA, 25 bp, Homo sapien
gggtgggcgggatgacactgagtcg

SEQ ID NO: 1317231 - DNA, 25 bp, Homo sapien
agggtgggcgggatgacactgagtc

SEQ ID NO: 1317232 - DNA, 25 bp, Homo sapien
ctagggtgggcgggatgacactgag

SEQ ID NO: 1317233 - DNA, 25 bp, Homo sapien
gtccagggcgagcagcgagtcgtag

SEQ ID NO: 1317234 - DNA, 25 bp, Homo sapien
ggcgagcagcgagtcgtagagcttg

SEQ ID NO: 1317235 - DNA, 25 bp, Homo sapien
tcgcctgcgtaggaagactgcttcc

SEQ ID NO: 1317236 - DNA, 25 bp, Homo sapien
acggcagtgatgatggcgtcgcctg

SEQ ID NO: 1317237 - DNA, 25 bp, Homo sapien
ccaggagagaggaccgagggtccca

SEQ ID NO: 1317238 - DNA, 25 bp, Homo sapien
gaccgagggtcccaggactcagagc

SEQ ID NO: 1317239 - DNA, 25 bp, Homo sapien
accgagggtcccaggactcagagct

SEQ ID NO: 1317240 - DNA, 25 bp, Homo sapien
aggcacttagctggtgctcagtaaa

SEQ ID NO: 1317241 - DNA, 25 bp, Homo sapien
aggttcctacactcaacgccctgtg

SEQ ID NO: 1317242 - DNA, 25 bp, Homo sapien
gcacagtaaaagctctggacctagt

SEQ ID NO: 1317243 - DNA, 25 bp, Homo sapien
gacttgttcactgccacgttcccag

SEQ ID NO: 1317244 - DNA, 25 bp, Homo sapien
ttatacagatgacaaccccgaggtg

SEQ ID NO: 1317245 - DNA, 25 bp, Homo sapien
gccgctccctgccagaagaggatta

SEQ ID NO: 1317246 - DNA, 25 bp, Homo sapien
gagcagagggaggactatgatcccc

SEQ ID NO: 1317247 - DNA, 25 bp, Homo sapien
cccgaggtgctgaaggttaagtgtc

SEQ ID NO: 1317248 - DNA, 25 bp, Homo sapien
cactgggtcctgcctagagcaattt

SEQ ID NO: 1317249 - DNA, 25 bp, Homo sapien
ttatcaagtgagacctctgggacag

SEQ ID NO: 1317250 - DNA, 25 bp, Homo sapien
gcaccatgtagaaggctgtgagcag

SEQ ID NO: 1317251 - DNA, 25 bp, Homo sapien
tcccctcggctgagtggcagatgta

SEQ ID NO: 1317252 - DNA, 25 bp, Homo sapien
tatcgctgtcatgcagcggcctgtg

SEQ ID NO: 1317253 - DNA, 25 bp, Homo sapien
ggtgtctggtcatgtccactccaag

SEQ ID NO: 1317254 - DNA, 25 bp, Homo sapien
tcatccttgggcttcgattcactgc

SEQ ID NO: 1317255 - DNA, 25 bp, Homo sapien
atctcttctgggctgaagagcatct

SEQ ID NO: 1317256 - DNA, 25 bp, Homo sapien
tctcttctgggctgaagagcatctt

SEQ ID NO: 1317257 - DNA, 25 bp, Homo sapien
ggacaaacccctgcccattcagaga

SEQ ID NO: 1317258 - DNA, 25 bp, Homo sapien
caaggacaaacccctgcccattcag

SEQ ID NO: 1317259 - DNA, 25 bp, Homo sapien
aggacaaacccctgcccattcagag

SEQ ID NO: 1317260 - DNA, 25 bp, Homo sapien
ctgcaaggacaaacccctgcccatt

SEQ ID NO: 1317261 - DNA, 25 bp, Homo sapien
aactcagcatcgctccctgtcttga

SEQ ID NO: 1317262 - DNA, 25 bp, Homo sapien
cagcaggtcctactctctggaaaag

SEQ ID NO: 1317263 - DNA, 25 bp, Homo sapien
aggttccttaatggccccaggctca

SEQ ID NO: 1317264 - DNA, 25 bp, Homo sapien
ccaaggagggaaccaagaactcagc

SEQ ID NO: 1317265 - DNA, 25 bp, Homo sapien
accataatgacagggcgttggagct

SEQ ID NO: 1317266 - DNA, 25 bp, Homo sapien
tgaccataatgacagggcgttggag

SEQ ID NO: 1317267 - DNA, 25 bp, Homo sapien
gaccataatgacagggcgttggagc

SEQ ID NO: 1317268 - DNA, 25 bp, Homo sapien
gtgaccataatgacagggcgttgga

SEQ ID NO: 1317269 - DNA, 25 bp, Homo sapien
tgggaacgggtcaccacagcaccag

SEQ ID NO: 1317270 - DNA, 25 bp, Homo sapien
aaggcaaaccaagggcgctctggga

SEQ ID NO: 1317271 - DNA, 25 bp, Homo sapien
ggcgctctgggaacgggtcaccaca

SEQ ID NO: 1317272 - DNA, 25 bp, Homo sapien
gaagagaaaggcaaaccaagggcgc

SEQ ID NO: 1317273 - DNA, 25 bp, Homo sapien
ggtgacagccttcactccatgtggg

SEQ ID NO: 1317274 - DNA, 25 bp, Homo sapien
gtgcctgaagagaatcccacggctc

SEQ ID NO: 1317275 - DNA, 25 bp, Homo sapien
tgtcgagggtccagggtgaaccaca

SEQ ID NO: 1317276 - DNA, 25 bp, Homo sapien
tccatgtgggttttcagtgcctgaa

SEQ ID NO: 1317277 - DNA, 25 bp, Homo sapien
gacatgggctcattagggctcacga

SEQ ID NO: 1317278 - DNA, 25 bp, Homo sapien
gcttccctaagaccagaactaaaga

SEQ ID NO: 1317279 - DNA, 25 bp, Homo sapien
gcactttgggaacatcagctgtaga

SEQ ID NO: 1317280 - DNA, 25 bp, Homo sapien
gcagctcttcagtatggcttcccta

SEQ ID NO: 1317281 - DNA, 25 bp, Homo sapien
cttggcatccagttcagtgaaataa

SEQ ID NO: 1317282 - DNA, 25 bp, Homo sapien
tcttggcatccagttcagtgaaata

SEQ ID NO: 1317283 - DNA, 25 bp, Homo sapien
catcgaagtccccatttaggtaaag

SEQ ID NO: 1317284 - DNA, 25 bp, Homo sapien
cctttaagaacctatactgatgccg

SEQ ID NO: 1317285 - DNA, 25 bp, Homo sapien
aacagctagccccaaccagtgtgtg

SEQ ID NO: 1317286 - DNA, 25 bp, Homo sapien
tcttgtcacaccacgatatgattcc

SEQ ID NO: 1317287 - DNA, 25 bp, Homo sapien
tttgcctatcttcttatccagcggg

SEQ ID NO: 1317288 - DNA, 25 bp, Homo sapien
gatgcagttgtccacgtggactgga

SEQ ID NO: 1317289 - DNA, 25 bp, Homo sapien
tgtagtcgcggaaggtgtaggctgg

SEQ ID NO: 1317290 - DNA, 25 bp, Homo sapien
ttgacacacacgagggtctcggcat

SEQ ID NO: 1317291 - DNA, 25 bp, Homo sapien
gatgactatcatccttcctctctgc

SEQ ID NO: 1317292 - DNA, 25 bp, Homo sapien
tgagtctacggaatgcccaatgaac

SEQ ID NO: 1317293 - DNA, 25 bp, Homo sapien
tgggcagaatggcacaaccctggtt

SEQ ID NO: 1317294 - DNA, 25 bp, Homo sapien
cacatgttagcaagggagcacctcg

SEQ ID NO: 1317295 - DNA, 25 bp, Homo sapien
gacaagtctgcaggcttcctaggac

SEQ ID NO: 1317296 - DNA, 25 bp, Homo sapien
acaccatcccaccacccggagtact

SEQ ID NO: 1317297 - DNA, 25 bp, Homo sapien
caccatcccaccacccggagtactc

SEQ ID NO: 1317298 - DNA, 25 bp, Homo sapien
ccatcccaccacccggagtactccg

SEQ ID NO: 1317299 - DNA, 25 bp, Homo sapien
taaagtgcgttgtgtgacaagtgac

SEQ ID NO: 1317300 - DNA, 25 bp, Homo sapien
tgtatgaaaccctaacccggaggca

SEQ ID NO: 1317301 - DNA, 25 bp, Homo sapien
ccagcttccccattaaagtgcgttg

SEQ ID NO: 1317302 - DNA, 25 bp, Homo sapien
aggcaggtcctctatgaatggttta

SEQ ID NO: 1317303 - DNA, 25 bp, Homo sapien
tatttacattggttccccaactgaa

SEQ ID NO: 1317304 - DNA, 25 bp, Homo sapien
tgaagaaaagggaccgcatcctgtt

SEQ ID NO: 1317305 - DNA, 25 bp, Homo sapien
gcatgcatcacactgggatgccacc

SEQ ID NO: 1317306 - DNA, 25 bp, Homo sapien
cattggttccccaactgaagaaaag

SEQ ID NO: 1317307 - DNA, 25 bp, Homo sapien
tgtagtacaggtgggcactctgcag

SEQ ID NO: 1317308 - DNA, 25 bp, Homo sapien
aagtaggactccatgatgcgccgca

SEQ ID NO: 1317309 - DNA, 25 bp, Homo sapien
gcagtgcggcacaccagatgagagt

SEQ ID NO: 1317310 - DNA, 25 bp, Homo sapien
gcaccttctccgtcacgttgtagta

SEQ ID NO: 1317311 - DNA, 25 bp, Homo sapien
ctgcagaagttctctctttgcctgc

SEQ ID NO: 1317312 - DNA, 25 bp, Homo sapien
tgccatccatgtaagatgtgacttg

SEQ ID NO: 1317313 - DNA, 25 bp, Homo sapien
ttgtgaggcttccccagccacatgg

SEQ ID NO: 1317314 - DNA, 25 bp, Homo sapien
acttgctcctctttgccttccacca

SEQ ID NO: 1317315 - DNA, 25 bp, Homo sapien
tgtgaaaacggactaacacaacgcc

SEQ ID NO: 1317316 - DNA, 25 bp, Homo sapien
gtgtgaaaacggactaacacaacgc

SEQ ID NO: 1317317 - DNA, 25 bp, Homo sapien
cagtgtgaaaacggactaacacaac

SEQ ID NO: 1317318 - DNA, 25 bp, Homo sapien
agtgtgaaaacggactaacacaacg

SEQ ID NO: 1317319 - DNA, 25 bp, Homo sapien
agaacttttcattgggagtatgtgg

SEQ ID NO: 1317320 - DNA, 25 bp, Homo sapien
ggaggtctgaccccggtagccatct

SEQ ID NO: 1317321 - DNA, 25 bp, Homo sapien
gaagacagtgacaccatagaacttt

SEQ ID NO: 1317322 - DNA, 25 bp, Homo sapien
tttgaagacagtgacaccatagaac

SEQ ID NO: 1317323 - DNA, 25 bp, Homo sapien
tgacactcgtggtcagagattacgc

SEQ ID NO: 1317324 - DNA, 25 bp, Homo sapien
accattcaggagtttggagttcatg

SEQ ID NO: 1317325 - DNA, 25 bp, Homo sapien
accacccgctgggaaccattcagga

SEQ ID NO: 1317326 - DNA, 25 bp, Homo sapien
gagttcatggtgagactgatgcctt

SEQ ID NO: 1317327 - DNA, 25 bp, Homo sapien
gcgtacggctgtttcccgttctgac

SEQ ID NO: 1317328 - DNA, 25 bp, Homo sapien
ttccttcataaggttcccaatctcc

SEQ ID NO: 1317329 - DNA, 25 bp, Homo sapien
tctcctgggagatgcgtacggctgt

SEQ ID NO: 1317330 - DNA, 25 bp, Homo sapien
tctcttccacaagggtctcgatttc

SEQ ID NO: 1317331 - DNA, 25 bp, Homo sapien
cagccctgggctccaccccgacttc

SEQ ID NO: 1317332 - DNA, 25 bp, Homo sapien
agggccagccctgggctccaccccg

SEQ ID NO: 1317333 - DNA, 25 bp, Homo sapien
ctgaggactgcattccagggccagc

SEQ ID NO: 1317334 - DNA, 25 bp, Homo sapien
ggccagccctgggctccaccccgac

SEQ ID NO: 1317335 - DNA, 25 bp, Homo sapien
gaagcctcaagtgcttcatcagact

SEQ ID NO: 1317336 - DNA, 25 bp, Homo sapien
gctcaggaagcctcaagtgcttcat

SEQ ID NO: 1317337 - DNA, 25 bp, Homo sapien
gtgcttcatcagactgatccaacca

SEQ ID NO: 1317338 - DNA, 25 bp, Homo sapien
ctcaagtgcttcatcagactgatcc

SEQ ID NO: 1317339 - DNA, 25 bp, Homo sapien
ttgggaatcacttcttctggagtcc

SEQ ID NO: 1317340 - DNA, 25 bp, Homo sapien
atctcttgggaatcacttcttctgg

SEQ ID NO: 1317341 - DNA, 25 bp, Homo sapien
tgtttctcttgcaatctcttgggaa

SEQ ID NO: 1317342 - DNA, 25 bp, Homo sapien
tctgtttctcttgcaatctcttggg

SEQ ID NO: 1317343 - DNA, 25 bp, Homo sapien
catcataagcgaagaaaagcagttc

SEQ ID NO: 1317344 - DNA, 25 bp, Homo sapien
ttcgctgtcggtactccttggcact

SEQ ID NO: 1317345 - DNA, 25 bp, Homo sapien
gttctttttccagtaggcttcgctg

SEQ ID NO: 1317346 - DNA, 25 bp, Homo sapien
tccaaaaacatcataagcgaagaaa

SEQ ID NO: 1317347 - DNA, 25 bp, Homo sapien
ggtctttacagtcctaaagcccatg

SEQ ID NO: 1317348 - DNA, 25 bp, Homo sapien
tcctctcagaccctaaccagaccac

SEQ ID NO: 1317349 - DNA, 25 bp, Homo sapien
gataagcagctaaaggggagggcct

SEQ ID NO: 1317350 - DNA, 25 bp, Homo sapien
gcatttggacagataaagccgggtc

SEQ ID NO: 1317351 - DNA, 25 bp, Homo sapien
ccagggcagggaaactgagtacttt

SEQ ID NO: 1317352 - DNA, 25 bp, Homo sapien
tgagtactttccggggtcacatctt

SEQ ID NO: 1317353 - DNA, 25 bp, Homo sapien
aactgagtactttccggggtcacat

SEQ ID NO: 1317354 - DNA, 25 bp, Homo sapien
cagggcagggaaactgagtactttc

SEQ ID NO: 1317355 - DNA, 25 bp, Homo sapien
tgtcaccaaatgctatgttatctca

SEQ ID NO: 1317356 - DNA, 25 bp, Homo sapien
tctccaatgaccctataaggctgct

SEQ ID NO: 1317357 - DNA, 25 bp, Homo sapien
gacgttttctcttcaggagtttaca

SEQ ID NO: 1317358 - DNA, 25 bp, Homo sapien
tacattactggcttctgtcaccaaa

SEQ ID NO: 1317359 - DNA, 25 bp, Homo sapien
cggaagtgccatcttaaagccagat

SEQ ID NO: 1317360 - DNA, 25 bp, Homo sapien
gagaccggaagtgccatcttaaagc

SEQ ID NO: 1317361 - DNA, 25 bp, Homo sapien
aaagccagatggtcaccatctagtg

SEQ ID NO: 1317362 - DNA, 25 bp, Homo sapien
ccatctagtggctaaagaggacaac

SEQ ID NO: 1317363 - DNA, 25 bp, Homo sapien
ggggccgatggatctggtgtgttct

SEQ ID NO: 1317364 - DNA, 25 bp, Homo sapien
cacgggggccgatggatctggtgtg

SEQ ID NO: 1317365 - DNA, 25 bp, Homo sapien
ctcacgggggccgatggatctggtg

SEQ ID NO: 1317366 - DNA, 25 bp, Homo sapien
cgggggccgatggatctggtgtgtt

SEQ ID NO: 1317367 - DNA, 25 bp, Homo sapien
tcaacagcctgtgtataattcccaa

SEQ ID NO: 1317368 - DNA, 25 bp, Homo sapien
aagaagagaagataggtcttggcac

SEQ ID NO: 1317369 - DNA, 25 bp, Homo sapien
agctgcataataggccaaattttgg

SEQ ID NO: 1317370 - DNA, 25 bp, Homo sapien
tttggttcatcacctcgtcattggg

SEQ ID NO: 1317371 - DNA, 25 bp, Homo sapien
gcaagctccgtgacacagttctgct

SEQ ID NO: 1317372 - DNA, 25 bp, Homo sapien
caaagggcttctctcgacttgggtg

SEQ ID NO: 1317373 - DNA, 25 bp, Homo sapien
ataatgcgatgggaggaagtcttca

SEQ ID NO: 1317374 - DNA, 25 bp, Homo sapien
tacagttgaggacctggatgtaatg

SEQ ID NO: 1317375 - DNA, 25 bp, Homo sapien
gaagaggtcagcgttgtactcaagg

SEQ ID NO: 1317376 - DNA, 25 bp, Homo sapien
acaaagtattcttgcagcgccgcct

SEQ ID NO: 1317377 - DNA, 25 bp, Homo sapien
caaggtagttgtagccatcgtagtc

SEQ ID NO: 1317378 - DNA, 25 bp, Homo sapien
catcgtagtcatagggcccttcgca

SEQ ID NO: 1317379 - DNA, 25 bp, Homo sapien
cttaaggtggcggtattacaaatga

SEQ ID NO: 1317380 - DNA, 25 bp, Homo sapien
tgagaacattgaaggatactgtaac

SEQ ID NO: 1317381 - DNA, 25 bp, Homo sapien
tgcacttttttgtagggctaacagt

SEQ ID NO: 1317382 - DNA, 25 bp, Homo sapien
taagatggactatcatgcagccata

SEQ ID NO: 1317383 - DNA, 25 bp, Homo sapien
catggtttggtaatagtctaggttc

SEQ ID NO: 1317384 - DNA, 25 bp, Homo sapien
ggtttggtaatagtctaggttctgc

SEQ ID NO: 1317385 - DNA, 25 bp, Homo sapien
ccagacatggtttggtaatagtcta

SEQ ID NO: 1317386 - DNA, 25 bp, Homo sapien
actccagacatggtttggtaatagt

SEQ ID NO: 1317387 - DNA, 25 bp, Homo sapien
tacagtgggactaataacagcatct

SEQ ID NO: 1317388 - DNA, 25 bp, Homo sapien
ccaaacaagcctggaacgctccaag

SEQ ID NO: 1317389 - DNA, 25 bp, Homo sapien
tgatgaagcgacataaccaaagaca

SEQ ID NO: 1317390 - DNA, 25 bp, Homo sapien
tggcactctggcattccgaaaaata

SEQ ID NO: 1317391 - DNA, 25 bp, Homo sapien
ggcctgtgccctaaccccaggctgg

SEQ ID NO: 1317392 - DNA, 25 bp, Homo sapien
tgggagacccaaactgccgctttaa

SEQ ID NO: 1317393 - DNA, 25 bp, Homo sapien
gccgctttaattccttccaggagat

SEQ ID NO: 1317394 - DNA, 25 bp, Homo sapien
gccatgagttttgcttggcctgtgc

SEQ ID NO: 1317395 - DNA, 25 bp, Homo sapien
tttggggttagcatctgcccatgcg

SEQ ID NO: 1317396 - DNA, 25 bp, Homo sapien
aactgggcgaggaaggtctcctgcc

SEQ ID NO: 1317397 - DNA, 25 bp, Homo sapien
tctgcccatgcgaactgggcgagga

SEQ ID NO: 1317398 - DNA, 25 bp, Homo sapien
ttagcatctgcccatgcgaactggg

SEQ ID NO: 1317399 - DNA, 25 bp, Homo sapien
taggggctccgcttgcggaactcca

SEQ ID NO: 1317400 - DNA, 25 bp, Homo sapien
cttgaagtaggcgacctgcaggtag

SEQ ID NO: 1317401 - DNA, 25 bp, Homo sapien
cgcgacgcagaaggcccccgaagaa

SEQ ID NO: 1317402 - DNA, 25 bp, Homo sapien
cccgaagaagctcaggtcgcgcagg

SEQ ID NO: 1317403 - DNA, 25 bp, Homo sapien
ctgggggaccagtcggggtccagct

SEQ ID NO: 1317404 - DNA, 25 bp, Homo sapien
agcgcaggcgaagggcgcggagggc

SEQ ID NO: 1317405 - DNA, 25 bp, Homo sapien
gggagcgcagcgcccgttccatgct

SEQ ID NO: 1317406 - DNA, 25 bp, Homo sapien
aagtcggcggcacactgggtgcggc

SEQ ID NO: 1317407 - DNA, 25 bp, Homo sapien
ctgcggtcccctcggcgaagagcag

SEQ ID NO: 1317408 - DNA, 25 bp, Homo sapien
ctcgacctcggcttgggaggcagcg

SEQ ID NO: 1317409 - DNA, 25 bp, Homo sapien
gtcagcagcttcaacgcgcgtaccg

SEQ ID NO: 1317410 - DNA, 25 bp, Homo sapien
gcagtgtggtcagcagcttcaacgc

SEQ ID NO: 1317411 - DNA, 25 bp, Homo sapien
cggccacgacagccagcagtgtggt

SEQ ID NO: 1317412 - DNA, 25 bp, Homo sapien
cgctccctcagacctaacggaaccg

SEQ ID NO: 1317413 - DNA, 25 bp, Homo sapien
agccacccgccaccaaggccggagt

SEQ ID NO: 1317414 - DNA, 25 bp, Homo sapien
tcagacctaacggaaccgccagcca

SEQ ID NO: 1317415 - DNA, 25 bp, Homo sapien
cacccgccaccaaggccggagtcct

SEQ ID NO: 1317416 - DNA, 25 bp, Homo sapien
tagacccaagtcaaatgttatatcc

SEQ ID NO: 1317417 - DNA, 25 bp, Homo sapien
ggtcggtcctctcctttcatttaga

SEQ ID NO: 1317418 - DNA, 25 bp, Homo sapien
tgttatatccttggtgaggccttct

SEQ ID NO: 1317419 - DNA, 25 bp, Homo sapien
tcttgtctgaagaagaccgtaccct

SEQ ID NO: 1317420 - DNA, 25 bp, Homo sapien
tccaggagaaggtttcatgaggtaa

SEQ ID NO: 1317421 - DNA, 25 bp, Homo sapien
ttccaggagaaggtttcatgaggta

SEQ ID NO: 1317422 - DNA, 25 bp, Homo sapien
ccaggagaaggtttcatgaggtaaa

SEQ ID NO: 1317423 - DNA, 25 bp, Homo sapien
cagtttcagagtattggccagtgta

SEQ ID NO: 1317424 - DNA, 25 bp, Homo sapien
tctcccaagttggaaatcccaggct

SEQ ID NO: 1317425 - DNA, 25 bp, Homo sapien
aaaaacacttggcttggctggacca

SEQ ID NO: 1317426 - DNA, 25 bp, Homo sapien
gatacccaagtcagtcagtttcaga

SEQ ID NO: 1317427 - DNA, 25 bp, Homo sapien
cgatgatacttggttgctcggttca

SEQ ID NO: 1317428 - DNA, 25 bp, Homo sapien
gctgcagaggtcttttgctcaggtg

SEQ ID NO: 1317429 - DNA, 25 bp, Homo sapien
ggaatgctctttggactcagctgca

SEQ ID NO: 1317430 - DNA, 25 bp, Homo sapien
ggttgctcggttcacatgggaatgc

SEQ ID NO: 1317431 - DNA, 25 bp, Homo sapien
tctgcttggagcattgcctccaggg

SEQ ID NO: 1317432 - DNA, 25 bp, Homo sapien
cgctcatttacatttgctgtctcat

SEQ ID NO: 1317433 - DNA, 25 bp, Homo sapien
caaacaaactacaagccagatcaca

SEQ ID NO: 1317434 - DNA, 25 bp, Homo sapien
tgtgatctgccactctcaggactca

SEQ ID NO: 1317435 - DNA, 25 bp, Homo sapien
gagaccctgataaatgtcaccacag

SEQ ID NO: 1317436 - DNA, 25 bp, Homo sapien
caatagatttggtgcagcgagagga

SEQ ID NO: 1317437 - DNA, 25 bp, Homo sapien
gacttagtctctccacaacagcttg

SEQ ID NO: 1317438 - DNA, 25 bp, Homo sapien
gcttcctgcccgtgtctgacaaaga

SEQ ID NO: 1317439 - DNA, 25 bp, Homo sapien
cagatgggatttggttctacttacc

SEQ ID NO: 1317440 - DNA, 25 bp, Homo sapien
caagcagattgagtgtaaggtgtac

SEQ ID NO: 1317441 - DNA, 25 bp, Homo sapien
tctatgcctgcagcgaagaaacagc

SEQ ID NO: 1317442 - DNA, 25 bp, Homo sapien
gccattgagctcgttcactgccata

SEQ ID NO: 1317443 - DNA, 25 bp, Homo sapien
ggcttgttcccaacactcctgagta

SEQ ID NO: 1317444 - DNA, 25 bp, Homo sapien
ttgtgaccatcataacatgtcacag

SEQ ID NO: 1317445 - DNA, 25 bp, Homo sapien
ccagcgtgggtgttgtgaccatcat

SEQ ID NO: 1317446 - DNA, 25 bp, Homo sapien
gcttgttcccaacactcctgagtag

SEQ ID NO: 1317447 - DNA, 25 bp, Homo sapien
tctcaacaacactcctgagaggaag

SEQ ID NO: 1317448 - DNA, 25 bp, Homo sapien
cacaaaaaccatacccaatctgagg

SEQ ID NO: 1317449 - DNA, 25 bp, Homo sapien
ctgtatgtttatagggacagctccc

SEQ ID NO: 1317450 - DNA, 25 bp, Homo sapien
ggtaccctaggtcatttggctccaa

SEQ ID NO: 1317451 - DNA, 25 bp, Homo sapien
gttctgtaaggctccaaatgggcca

SEQ ID NO: 1317452 - DNA, 25 bp, Homo sapien
ggaagtgagttcagatttatccaca

SEQ ID NO: 1317453 - DNA, 25 bp, Homo sapien
aggatcccatctggtttgaacctgg

SEQ ID NO: 1317454 - DNA, 25 bp, Homo sapien
tcagcaagcatgtggccaattcaga

SEQ ID NO: 1317455 - DNA, 25 bp, Homo sapien
catctgtttacagaactcatcaaac

SEQ ID NO: 1317456 - DNA, 25 bp, Homo sapien
ctgctgctccagttctgtcatgact

SEQ ID NO: 1317457 - DNA, 25 bp, Homo sapien
ttctgtcatgactctgttgagggca

SEQ ID NO: 1317458 - DNA, 25 bp, Homo sapien
ctgtttacagaactcatcaaactgc

SEQ ID NO: 1317459 - DNA, 25 bp, Homo sapien
gatacatctgttagcaatggaagca

SEQ ID NO: 1317460 - DNA, 25 bp, Homo sapien
aagagatacatctgttagcaatgga

SEQ ID NO: 1317461 - DNA, 25 bp, Homo sapien
agaaagagatacatctgttagcaat

SEQ ID NO: 1317462 - DNA, 25 bp, Homo sapien
gagatacatctgttagcaatggaag

SEQ ID NO: 1317463 - DNA, 25 bp, Homo sapien
ctggtaacgttagaaggaatgcatc

SEQ ID NO: 1317464 - DNA, 25 bp, Homo sapien
caagtaggacagaggtaagtcccac

SEQ ID NO: 1317465 - DNA, 25 bp, Homo sapien
tgaaaagctggtggatgccatgcag

SEQ ID NO: 1317466 - DNA, 25 bp, Homo sapien
gacttccataaaggtctgtgccctg

SEQ ID NO: 1317467 - DNA, 25 bp, Homo sapien
agccaggggcccaagcgttccttca

SEQ ID NO: 1317468 - DNA, 25 bp, Homo sapien
acttctgggctcttactgttagtga

SEQ ID NO: 1317469 - DNA, 25 bp, Homo sapien
gccaggggcccaagcgttccttcat

SEQ ID NO: 1317470 - DNA, 25 bp, Homo sapien
tgttcaccaaagcacaatgcagtca

SEQ ID NO: 1317471 - DNA, 25 bp, Homo sapien
catatcatctgaggacccggatcca

SEQ ID NO: 1317472 - DNA, 25 bp, Homo sapien
ttcccagagcatttgttgtacacgg

SEQ ID NO: 1317473 - DNA, 25 bp, Homo sapien
tcagggctgtttcttatagcaaccc

SEQ ID NO: 1317474 - DNA, 25 bp, Homo sapien
ttacttattatgtttactgcctccc

SEQ ID NO: 1317475 - DNA, 25 bp, Homo sapien
tacagattaacttcaaatgcactag

SEQ ID NO: 1317476 - DNA, 25 bp, Homo sapien
gtcatcatgtgactcaaattcctcg

SEQ ID NO: 1317477 - DNA, 25 bp, Homo sapien
tggaatgcaagatccatgaaggcag

SEQ ID NO: 1317478 - DNA, 25 bp, Homo sapien
actctgctgacagattctttaactt

SEQ ID NO: 1317479 - DNA, 25 bp, Homo sapien
aactctgctgacagattctttaact

SEQ ID NO: 1317480 - DNA, 25 bp, Homo sapien
ggcttgacttctggatatttcttag

SEQ ID NO: 1317481 - DNA, 25 bp, Homo sapien
tctggatatttcttaggaggctctg

SEQ ID NO: 1317482 - DNA, 25 bp, Homo sapien
tggatatttcttaggaggctctgat

SEQ ID NO: 1317483 - DNA, 25 bp, Homo sapien
gacttctggatatttcttaggaggc

SEQ ID NO: 1317484 - DNA, 25 bp, Homo sapien
catcctttgccaggtgaggcagagt

SEQ ID NO: 1317485 - DNA, 25 bp, Homo sapien
aataccctgccagttactcctctaa

SEQ ID NO: 1317486 - DNA, 25 bp, Homo sapien
gtggtacagaaagaggcagatcttc

SEQ ID NO: 1317487 - DNA, 25 bp, Homo sapien
tctaatcctttagctccgccccatc

SEQ ID NO: 1317488 - DNA, 25 bp, Homo sapien
gctgggtgtccctgggcaagtctcc

SEQ ID NO: 1317489 - DNA, 25 bp, Homo sapien
cgctgggtgtccctgggcaagtctc

SEQ ID NO: 1317490 - DNA, 25 bp, Homo sapien
tgggtgtccctgggcaagtctcctc

SEQ ID NO: 1317491 - DNA, 25 bp, Homo sapien
ctcgctgggtgtccctgggcaagtc

SEQ ID NO: 1317492 - DNA, 25 bp, Homo sapien
cgagtcgcagacaacgcctccggga

SEQ ID NO: 1317493 - DNA, 25 bp, Homo sapien
agggccgagcgccaggaggcttccg

SEQ ID NO: 1317494 - DNA, 25 bp, Homo sapien
aagttggagcctccgccgagtcgca

SEQ ID NO: 1317495 - DNA, 25 bp, Homo sapien
cagacaacgcctccgggagggtaat

SEQ ID NO: 1317496 - DNA, 25 bp, Homo sapien
catctgaggcatgccagaagctctt

SEQ ID NO: 1317497 - DNA, 25 bp, Homo sapien
gccggagctctctccctagaggtga

SEQ ID NO: 1317498 - DNA, 25 bp, Homo sapien
tatctttaatgctatccagggcttg

SEQ ID NO: 1317499 - DNA, 25 bp, Homo sapien
gaagctcttagacatctccctgagg

SEQ ID NO: 1317500 - DNA, 25 bp, Homo sapien
taaaatcaataggaatcagggatcc

SEQ ID NO: 1317501 - DNA, 25 bp, Homo sapien
atgtgggagacaatttgggctgcca

SEQ ID NO: 1317502 - DNA, 25 bp, Homo sapien
gagagttgattagagaccggatcag

SEQ ID NO: 1317503 - DNA, 25 bp, Homo sapien
tcctcaaggcagtggcaaaaaatct

SEQ ID NO: 1317504 - DNA, 25 bp, Homo sapien
caagcgtggcgtgtatctggcagac

SEQ ID NO: 1317505 - DNA, 25 bp, Homo sapien
ccttgttgaagtctatctgggaaga

SEQ ID NO: 1317506 - DNA, 25 bp, Homo sapien
tactgtgggccactgagttggacac

SEQ ID NO: 1317507 - DNA, 25 bp, Homo sapien
tcagatgactccagattcaatgatg

SEQ ID NO: 1317508 - DNA, 25 bp, Homo sapien
tctggtgaagggcttgtgctacttc

SEQ ID NO: 1317509 - DNA, 25 bp, Homo sapien
ctggatggtccaagattgggcgact

SEQ ID NO: 1317510 - DNA, 25 bp, Homo sapien
cttcatagtatggtgatagttgctt

SEQ ID NO: 1317511 - DNA, 25 bp, Homo sapien
ccaagattgggcgactgtatctggt

SEQ ID NO: 1317512 - DNA, 25 bp, Homo sapien
gcagacctccttccgccttaaagag

SEQ ID NO: 1317513 - DNA, 25 bp, Homo sapien
acagagtcgtgggaatgagtatgaa

SEQ ID NO: 1317514 - DNA, 25 bp, Homo sapien
aatgagtatgaagctctcacatccc

SEQ ID NO: 1317515 - DNA, 25 bp, Homo sapien
gacactggcttctgcgacagagtcg

SEQ ID NO: 1317516 - DNA, 25 bp, Homo sapien
tcttctaaggaattgaagctcccag

SEQ ID NO: 1317517 - DNA, 25 bp, Homo sapien
aattgaagctcccagtgacctggag

SEQ ID NO: 1317518 - DNA, 25 bp, Homo sapien
ctttcttctaaggaattgaagctcc

SEQ ID NO: 1317519 - DNA, 25 bp, Homo sapien
taaggaattgaagctcccagtgacc

SEQ ID NO: 1317520 - DNA, 25 bp, Homo sapien
tgatatccagagctaatgtacatgc

SEQ ID NO: 1317521 - DNA, 25 bp, Homo sapien
tgatggtaactaggtacagcgactt

SEQ ID NO: 1317522 - DNA, 25 bp, Homo sapien
tatatgcgatctggcctaaccatgg

SEQ ID NO: 1317523 - DNA, 25 bp, Homo sapien
tagcaaacagcctcttaggttggag

SEQ ID NO: 1317524 - DNA, 25 bp, Homo sapien
attatggaggcggttaaatcccaag

SEQ ID NO: 1317525 - DNA, 25 bp, Homo sapien
gcaagatggagtcccatgagagctg

SEQ ID NO: 1317526 - DNA, 25 bp, Homo sapien
agtcagcaagatggagtcccatgag

SEQ ID NO: 1317527 - DNA, 25 bp, Homo sapien
caagatctgcaggataagtcagcaa

SEQ ID NO: 1317528 - DNA, 25 bp, Homo sapien
cttgacgccaaggaagagatgatgt

SEQ ID NO: 1317529 - DNA, 25 bp, Homo sapien
tttaattcaagtccgaaggcaagga

SEQ ID NO: 1317530 - DNA, 25 bp, Homo sapien
gaaaaagctgatggtcctgtccaaa

SEQ ID NO: 1317531 - DNA, 25 bp, Homo sapien
aaaagctgatggtcctgtccaaagg

SEQ ID NO: 1317532 - DNA, 25 bp, Homo sapien
aggttgtgtaggttggctatacaga

SEQ ID NO: 1317533 - DNA, 25 bp, Homo sapien
ggctatacagattctacaacttccc

SEQ ID NO: 1317534 - DNA, 25 bp, Homo sapien
gctgaacgcgcgagcacggaaagaa

SEQ ID NO: 1317535 - DNA, 25 bp, Homo sapien
gcgcgagcacggaaagaaatcccac

SEQ ID NO: 1317536 - DNA, 25 bp, Homo sapien
cgtaggacggaacccagtctcttca

SEQ ID NO: 1317537 - DNA, 25 bp, Homo sapien
gtaggacggaacccagtctcttcag

SEQ ID NO: 1317538 - DNA, 25 bp, Homo sapien
aggacggaacccagtctcttcagct

SEQ ID NO: 1317539 - DNA, 25 bp, Homo sapien
taggacggaacccagtctcttcagc

SEQ ID NO: 1317540 - DNA, 25 bp, Homo sapien
cagagaacctgcagtacctcagaca

SEQ ID NO: 1317541 - DNA, 25 bp, Homo sapien
gagaacctgcagtacctcagacaga

SEQ ID NO: 1317542 - DNA, 25 bp, Homo sapien
ctaccagagaacctgcagtacctca

SEQ ID NO: 1317543 - DNA, 25 bp, Homo sapien
gaacctgcagtacctcagacagaca

SEQ ID NO: 1317544 - DNA, 25 bp, Homo sapien
atcccgttcgtctgagcagggcagg

SEQ ID NO: 1317545 - DNA, 25 bp, Homo sapien
taggcatcccgttcgtctgagcagg

SEQ ID NO: 1317546 - DNA, 25 bp, Homo sapien
gcctgcgaggcccattgccggcccc

SEQ ID NO: 1317547 - DNA, 25 bp, Homo sapien
cctaggcatcccgttcgtctgagca

SEQ ID NO: 1317548 - DNA, 25 bp, Homo sapien
gattttgtcttccccctcgttgctg

SEQ ID NO: 1317549 - DNA, 25 bp, Homo sapien
tgtcttccccctcgttgctgatctg

SEQ ID NO: 1317550 - DNA, 25 bp, Homo sapien
caggcagatgaccttcctctggtcc

SEQ ID NO: 1317551 - DNA, 25 bp, Homo sapien
ggcagatgaccttcctctggtccag

SEQ ID NO: 1317552 - DNA, 25 bp, Homo sapien
ccagggtccggaaggggccgcagat

SEQ ID NO: 1317553 - DNA, 25 bp, Homo sapien
tgtccagggtccggaaggggccgca

SEQ ID NO: 1317554 - DNA, 25 bp, Homo sapien
tccagggtccggaaggggccgcaga

SEQ ID NO: 1317555 - DNA, 25 bp, Homo sapien
agggtccggaaggggccgcagatgg

SEQ ID NO: 1317556 - DNA, 25 bp, Homo sapien
gccagccaaggccggagcagtgcct

SEQ ID NO: 1317557 - DNA, 25 bp, Homo sapien
ccagccaaggccggagcagtgcctg

SEQ ID NO: 1317558 - DNA, 25 bp, Homo sapien
ggccagccaaggccggagcagtgcc

SEQ ID NO: 1317559 - DNA, 25 bp, Homo sapien
cagccaaggccggagcagtgcctgg

SEQ ID NO: 1317560 - DNA, 25 bp, Homo sapien
gtagaagacgagcagcagcttgatg

SEQ ID NO: 1317561 - DNA, 25 bp, Homo sapien
cgtagaagacgagcagcagcttgat

SEQ ID NO: 1317562 - DNA, 25 bp, Homo sapien
gacgtagaagacgagcagcagcttg

SEQ ID NO: 1317563 - DNA, 25 bp, Homo sapien
ttgacgtagaagacgagcagcagct

SEQ ID NO: 1317564 - DNA, 25 bp, Homo sapien
gtcggcccgtaaatcagctccagaa

SEQ ID NO: 1317565 - DNA, 25 bp, Homo sapien
tcggcccgtaaatcagctccagaac

SEQ ID NO: 1317566 - DNA, 25 bp, Homo sapien
ggcccgtaaatcagctccagaacat

SEQ ID NO: 1317567 - DNA, 25 bp, Homo sapien
agtcggcccgtaaatcagctccaga

SEQ ID NO: 1317568 - DNA, 25 bp, Homo sapien
tcaattccccgaaaagcgtgtccag

SEQ ID NO: 1317569 - DNA, 25 bp, Homo sapien
agacacaggagccacatgagcccca

SEQ ID NO: 1317570 - DNA, 25 bp, Homo sapien
caggaacccatacagcacgggttcc

SEQ ID NO: 1317571 - DNA, 25 bp, Homo sapien
agcctccggattctgcatcatgaac

SEQ ID NO: 1317572 - DNA, 25 bp, Homo sapien
ctccagggcggtcaggccaaggcac

SEQ ID NO: 1317573 - DNA, 25 bp, Homo sapien
cagcctcccgcacacgctcctgggg

SEQ ID NO: 1317574 - DNA, 25 bp, Homo sapien
tcccgcacacgctcctggggctctg

SEQ ID NO: 1317575 - DNA, 25 bp, Homo sapien
gccgcagcctcccgcacacgctcct

SEQ ID NO: 1317576 - DNA, 25 bp, Homo sapien
ctcccgcacacgctcctggggctct

SEQ ID NO: 1317577 - DNA, 25 bp, Homo sapien
ccggtgcgaatgttgtctgttgtct

SEQ ID NO: 1317578 - DNA, 25 bp, Homo sapien
tcccggtgcgaatgttgtctgttgt

SEQ ID NO: 1317579 - DNA, 25 bp, Homo sapien
tccttctcccggtgcgaatgttgtc

SEQ ID NO: 1317580 - DNA, 25 bp, Homo sapien
ttctcccggtgcgaatgttgtctgt

SEQ ID NO: 1317581 - DNA, 25 bp, Homo sapien
tactgtagtggctgtaatacatgat

SEQ ID NO: 1317582 - DNA, 25 bp, Homo sapien
tccaggccagagcagatgcgggcag

SEQ ID NO: 1317583 - DNA, 25 bp, Homo sapien
gctgcccacccggtattagcattag

SEQ ID NO: 1317584 - DNA, 25 bp, Homo sapien
cagaagatagtgacggcgtggatgc

SEQ ID NO: 1317585 - DNA, 25 bp, Homo sapien
cagcagcaggaaggcgttgaaggcc

SEQ ID NO: 1317586 - DNA, 25 bp, Homo sapien
aggaaggcgttgaaggccagcaggg

SEQ ID NO: 1317587 - DNA, 25 bp, Homo sapien
cagcaggaaggcgttgaaggccagc

SEQ ID NO: 1317588 - DNA, 25 bp, Homo sapien
gcaggaaggcgttgaaggccagcag

SEQ ID NO: 1317589 - DNA, 25 bp, Homo sapien
ggcttaggggaatccctcgaagcac

SEQ ID NO: 1317590 - DNA, 25 bp, Homo sapien
acttcccgctctgggttcggctctt

SEQ ID NO: 1317591 - DNA, 25 bp, Homo sapien
ttcccgctctgggttcggctcttct

SEQ ID NO: 1317592 - DNA, 25 bp, Homo sapien
ttctctcgcaggccgcgtttctcag

SEQ ID NO: 1317593 - DNA, 25 bp, Homo sapien
agcttcaggtcgtacagacgcaggc

SEQ ID NO: 1317594 - DNA, 25 bp, Homo sapien
tcaggtcgtacagacgcaggctgtg

SEQ ID NO: 1317595 - DNA, 25 bp, Homo sapien
gacgcaggctgtgccgggaggagcg

SEQ ID NO: 1317596 - DNA, 25 bp, Homo sapien
tcttcctcccaggacgtggggtcca

SEQ ID NO: 1317597 - DNA, 25 bp, Homo sapien
ggccggccaatggtgaggctgggaa

SEQ ID NO: 1317598 - DNA, 25 bp, Homo sapien
cagcacttggagttgataggcctgc

SEQ ID NO: 1317599 - DNA, 25 bp, Homo sapien
gcagcacttggagttgataggcctg

SEQ ID NO: 1317600 - DNA, 25 bp, Homo sapien
cgcagcacttggagttgataggcct

SEQ ID NO: 1317601 - DNA, 25 bp, Homo sapien
gagtctgtcagtctatcgtccctac

SEQ ID NO: 1317602 - DNA, 25 bp, Homo sapien
cagagtctgtcagtctatcgtccct

SEQ ID NO: 1317603 - DNA, 25 bp, Homo sapien
agagtctgtcagtctatcgtcccta

SEQ ID NO: 1317604 - DNA, 25 bp, Homo sapien
aaaagggcagctcccatgctcttta

SEQ ID NO: 1317605 - DNA, 25 bp, Homo sapien
ttcctttgttgggcccagtatcggc

SEQ ID NO: 1317606 - DNA, 25 bp, Homo sapien
ggcagctcccatgctctttatcaaa

SEQ ID NO: 1317607 - DNA, 25 bp, Homo sapien
cctttgttgggcccagtatcggctt

SEQ ID NO: 1317608 - DNA, 25 bp, Homo sapien
ttagatgtgatatggcattctgggc

SEQ ID NO: 1317609 - DNA, 25 bp, Homo sapien
tgcttagcacttctccacttgcaaa

SEQ ID NO: 1317610 - DNA, 25 bp, Homo sapien
tgtgatatggcattctgggcaggac

SEQ ID NO: 1317611 - DNA, 25 bp, Homo sapien
attgcttagcacttctccacttgca

SEQ ID NO: 1317612 - DNA, 25 bp, Homo sapien
gccgttggagaggatcctgaagtgg

SEQ ID NO: 1317613 - DNA, 25 bp, Homo sapien
ccttgctgtgctgcacagccaatga

SEQ ID NO: 1317614 - DNA, 25 bp, Homo sapien
tgctgtgctgcacagccaatgagag

SEQ ID NO: 1317615 - DNA, 25 bp, Homo sapien
caagtccttgctgtgctgcacagcc

SEQ ID NO: 1317616 - DNA, 25 bp, Homo sapien
ctgtgctgcacagccaatgagagct

SEQ ID NO: 1317617 - DNA, 25 bp, Homo sapien
gtccttcttgtgagcctcaatgcac

SEQ ID NO: 1317618 - DNA, 25 bp, Homo sapien
cttcttgtgagcctcaatgcacgat

SEQ ID NO: 1317619 - DNA, 25 bp, Homo sapien
gagcctcaatgcacgattttacatg

SEQ ID NO: 1317620 - DNA, 25 bp, Homo sapien
tgagcctcaatgcacgattttacat

SEQ ID NO: 1317621 - DNA, 25 bp, Homo sapien
tctgattcttctgagccctgcaggg

SEQ ID NO: 1317622 - DNA, 25 bp, Homo sapien
tcagtgcaggaaggcacagtacagc

SEQ ID NO: 1317623 - DNA, 25 bp, Homo sapien
tcaatagtattcacccagtcctctg

SEQ ID NO: 1317624 - DNA, 25 bp, Homo sapien
gcacagtacagccacagtagggttg

SEQ ID NO: 1317625 - DNA, 25 bp, Homo sapien
ggacaacattttagttagctctgta

SEQ ID NO: 1317626 - DNA, 25 bp, Homo sapien
gggacaacattttagttagctctgt

SEQ ID NO: 1317627 - DNA, 25 bp, Homo sapien
agggacaacattttagttagctctg

SEQ ID NO: 1317628 - DNA, 25 bp, Homo sapien
aagggacaacattttagttagctct

SEQ ID NO: 1317629 - DNA, 25 bp, Homo sapien
cttcctctggtaaaggctgcggtgc

SEQ ID NO: 1317630 - DNA, 25 bp, Homo sapien
tgatgtccaaatcgaccaggagtcc

SEQ ID NO: 1317631 - DNA, 25 bp, Homo sapien
tcctcagagcgagagatgaccttat

SEQ ID NO: 1317632 - DNA, 25 bp, Homo sapien
gctgcggtgcaaaaggcaatcccta

SEQ ID NO: 1317633 - DNA, 25 bp, Homo sapien
tacttaaaatactaagatgtcttta

SEQ ID NO: 1317634 - DNA, 25 bp, Homo sapien
aaatactaagatgtctttaaagtat

SEQ ID NO: 1317635 - DNA, 25 bp, Homo sapien
ccatacttaaaatactaagatgtct

SEQ ID NO: 1317636 - DNA, 25 bp, Homo sapien
atatcccatacttaaaatactaaga

SEQ ID NO: 1317637 - DNA, 25 bp, Homo sapien
cattcctaaaggtctgggccattca

SEQ ID NO: 1317638 - DNA, 25 bp, Homo sapien
ttctgtaactgatgacatggctgca

SEQ ID NO: 1317639 - DNA, 25 bp, Homo sapien
taatactgagacaccctaagagatc

SEQ ID NO: 1317640 - DNA, 25 bp, Homo sapien
cattcatagtcttgcctggtttggg

SEQ ID NO: 1317641 - DNA, 25 bp, Homo sapien
tgtccatgacaattgtgacgcactg

SEQ ID NO: 1317642 - DNA, 25 bp, Homo sapien
ctttgtccatgacaattgtgacgca

SEQ ID NO: 1317643 - DNA, 25 bp, Homo sapien
cttgaaccataattcaaaatcaagc

SEQ ID NO: 1317644 - DNA, 25 bp, Homo sapien
ccttcctcttgaaccataattcaaa

SEQ ID NO: 1317645 - DNA, 25 bp, Homo sapien
gaaaacctgatccagaaggcttcca

SEQ ID NO: 1317646 - DNA, 25 bp, Homo sapien
caagccgatgtagtgttcccgggaa

SEQ ID NO: 1317647 - DNA, 25 bp, Homo sapien
cttccagggagaggagattttgcgc

SEQ ID NO: 1317648 - DNA, 25 bp, Homo sapien
tcaattccggtacagcgtggagagc

SEQ ID NO: 1317649 - DNA, 25 bp, Homo sapien
atgcccagcgatacacaagtcaccg

SEQ ID NO: 1317650 - DNA, 25 bp, Homo sapien
tcaccccctccagagtaaaccgcat

SEQ ID NO: 1317651 - DNA, 25 bp, Homo sapien
gtgagctacgtccccagggatgccc

SEQ ID NO: 1317652 - DNA, 25 bp, Homo sapien
gcgggataggaacccgggtgagcta

SEQ ID NO: 1317653 - DNA, 25 bp, Homo sapien
tctggagaggatgcgccatcgaccc

SEQ ID NO: 1317654 - DNA, 25 bp, Homo sapien
tcgaccccggcagtaggcggccgaa

SEQ ID NO: 1317655 - DNA, 25 bp, Homo sapien
tgtgaggtctggagaggatgcgcca

SEQ ID NO: 1317656 - DNA, 25 bp, Homo sapien
atgcgccatcgaccccggcagtagg

SEQ ID NO: 1317657 - DNA, 25 bp, Homo sapien
atcttctaccccggggtggattgcg

SEQ ID NO: 1317658 - DNA, 25 bp, Homo sapien
tgcgcctgcgctgacattttgcagt

SEQ ID NO: 1317659 - DNA, 25 bp, Homo sapien
cagtttgggaaatggcggtgctcgg

SEQ ID NO: 1317660 - DNA, 25 bp, Homo sapien
tcgcggcactctggaccacgctgag

SEQ ID NO: 1317661 - DNA, 25 bp, Homo sapien
gggaccgaccggcagctgtgccgtc

SEQ ID NO: 1317662 - DNA, 25 bp, Homo sapien
tgcgagtggattgtcgggccttttc

SEQ ID NO: 1317663 - DNA, 25 bp, Homo sapien
ctgcgagtggattgtcgggcctttt

SEQ ID NO: 1317664 - DNA, 25 bp, Homo sapien
cacggctggcacaaaactagtgttt

SEQ ID NO: 1317665 - DNA, 25 bp, Homo sapien
ctgtactgaatagtgctgaggaccc

SEQ ID NO: 1317666 - DNA, 25 bp, Homo sapien
gatcctgagtcgaagtctaagccgt

SEQ ID NO: 1317667 - DNA, 25 bp, Homo sapien
tcattgggcccatacaaagaacgtg

SEQ ID NO: 1317668 - DNA, 25 bp, Homo sapien
aatggagcctgacccctagagtggg

SEQ ID NO: 1317669 - DNA, 25 bp, Homo sapien
acctcctgggatagaagctttgtag

SEQ ID NO: 1317670 - DNA, 25 bp, Homo sapien
aatcctggagccgttaagtcctgaa

SEQ ID NO: 1317671 - DNA, 25 bp, Homo sapien
tctatacacaacagggcaggagtct

SEQ ID NO: 1317672 - DNA, 25 bp, Homo sapien
gctcctgagagatccttagggctgc

SEQ ID NO: 1317673 - DNA, 25 bp, Homo sapien
tcctgagagatccttagggctgctg

SEQ ID NO: 1317674 - DNA, 25 bp, Homo sapien
gtgctcctgagagatccttagggct

SEQ ID NO: 1317675 - DNA, 25 bp, Homo sapien
ctcctgagagatccttagggctgct

SEQ ID NO: 1317676 - DNA, 25 bp, Homo sapien
cgggtgtcttgtcactttggctggc

SEQ ID NO: 1317677 - DNA, 25 bp, Homo sapien
tcctcgggtgtcttgtcactttggc

SEQ ID NO: 1317678 - DNA, 25 bp, Homo sapien
gtcttgtcactttggctggctcccc

SEQ ID NO: 1317679 - DNA, 25 bp, Homo sapien
cagctcctcgggtgtcttgtcactt

SEQ ID NO: 1317680 - DNA, 25 bp, Homo sapien
gaagcgatctcatcgaaggtccggc

SEQ ID NO: 1317681 - DNA, 25 bp, Homo sapien
gaagccggaagcgatctcatcgaag

SEQ ID NO: 1317682 - DNA, 25 bp, Homo sapien
ccggaagccggaagcgatctcatcg

SEQ ID NO: 1317683 - DNA, 25 bp, Homo sapien
gatctcatcgaaggtccggccttta

SEQ ID NO: 1317684 - DNA, 25 bp, Homo sapien
tgaagacgtagggaccacacagttg

SEQ ID NO: 1317685 - DNA, 25 bp, Homo sapien
gatgatgaagacgtagggaccacac

SEQ ID NO: 1317686 - DNA, 25 bp, Homo sapien
gatgaagacgtagggaccacacagt

SEQ ID NO: 1317687 - DNA, 25 bp, Homo sapien
tgatgaagacgtagggaccacacag

SEQ ID NO: 1317688 - DNA, 25 bp, Homo sapien
gacacacttggttggagtcatgacc

SEQ ID NO: 1317689 - DNA, 25 bp, Homo sapien
ttgagctgaaaagggaacatccacc

SEQ ID NO: 1317690 - DNA, 25 bp, Homo sapien
taactgagaccacgcttgtacctag

SEQ ID NO: 1317691 - DNA, 25 bp, Homo sapien
tacctagaatgtaacaggctccagg

SEQ ID NO: 1317692 - DNA, 25 bp, Homo sapien
tccacatactggaagcacatgccca

SEQ ID NO: 1317693 - DNA, 25 bp, Homo sapien
tggagaagcctgcaacggcaatggc

SEQ ID NO: 1317694 - DNA, 25 bp, Homo sapien
cagctggacgtggaccctggctgaa

SEQ ID NO: 1317695 - DNA, 25 bp, Homo sapien
cacatgcccacaatgaaatttgagg

SEQ ID NO: 1317696 - DNA, 25 bp, Homo sapien
gcctatgaggtgcagggtccgccgg

SEQ ID NO: 1317697 - DNA, 25 bp, Homo sapien
agtatggcacaacccgccatgccag

SEQ ID NO: 1317698 - DNA, 25 bp, Homo sapien
gccatgccagcgaggcctatgaggt

SEQ ID NO: 1317699 - DNA, 25 bp, Homo sapien
cagtgctagcgcgatggtcatgagt

SEQ ID NO: 1317700 - DNA, 25 bp, Homo sapien
cagtgaaggccgtgttgacgatacc

SEQ ID NO: 1317701 - DNA, 25 bp, Homo sapien
agatgctcgtggagtaatagaagac

SEQ ID NO: 1317702 - DNA, 25 bp, Homo sapien
caatggtggcatacacaggctgctg

SEQ ID NO: 1317703 - DNA, 25 bp, Homo sapien
cgccttctcgaagatgctcgtggag

SEQ ID NO: 1317704 - DNA, 25 bp, Homo sapien
aagggaaacttcttcggcagaggcg

SEQ ID NO: 1317705 - DNA, 25 bp, Homo sapien
tcggcagaggcgtatctgttgtttc

SEQ ID NO: 1317706 - DNA, 25 bp, Homo sapien
agaatgaaggggacaaatactcagg

SEQ ID NO: 1317707 - DNA, 25 bp, Homo sapien
aaacttcttcggcagaggcgtatct

SEQ ID NO: 1317708 - DNA, 25 bp, Homo sapien
caggaagggtgggtgggggcactca

SEQ ID NO: 1317709 - DNA, 25 bp, Homo sapien
gagggcttggctggggcacaggaag

SEQ ID NO: 1317710 - DNA, 25 bp, Homo sapien
catgcacacttgaccagagggcttg

SEQ ID NO: 1317711 - DNA, 25 bp, Homo sapien
gcacaggaagggtgggtgggggcac

SEQ ID NO: 1317712 - DNA, 25 bp, Homo sapien
tcagctgtcccgcgcagcttcttta

SEQ ID NO: 1317713 - DNA, 25 bp, Homo sapien
gctgtcccgcgcagcttctttagca

SEQ ID NO: 1317714 - DNA, 25 bp, Homo sapien
cacgtcagctgtcccgcgcagcttc

SEQ ID NO: 1317715 - DNA, 25 bp, Homo sapien
cggtaggcgggggagcggaacagct

SEQ ID NO: 1317716 - DNA, 25 bp, Homo sapien
cctcgttgcggttgatgagcaggaa

SEQ ID NO: 1317717 - DNA, 25 bp, Homo sapien
agggcagcacgatgcactgcagcag

SEQ ID NO: 1317718 - DNA, 25 bp, Homo sapien
aagggcagcacgatgcactgcagca

SEQ ID NO: 1317719 - DNA, 25 bp, Homo sapien
actcttggcccggttctcctcgttg

SEQ ID NO: 1317720 - DNA, 25 bp, Homo sapien
ccctgtggttggaagcctagagtga

SEQ ID NO: 1317721 - DNA, 25 bp, Homo sapien
gagtcaagtcatcttgctgtcaact

SEQ ID NO: 1317722 - DNA, 25 bp, Homo sapien
ggcacagatccgagagccactgaag

SEQ ID NO: 1317723 - DNA, 25 bp, Homo sapien
tctggacctgtgtaccatagttgtc

SEQ ID NO: 1317724 - DNA, 25 bp, Homo sapien
ggtgacacttcacccacatacatgg

SEQ ID NO: 1317725 - DNA, 25 bp, Homo sapien
aggccgcagtacacaccgatgatga

SEQ ID NO: 1317726 - DNA, 25 bp, Homo sapien
ggccagcaggttcatcatcagcatt

SEQ ID NO: 1317727 - DNA, 25 bp, Homo sapien
gacttgcccagtttcgagaagccca

SEQ ID NO: 1317728 - DNA, 25 bp, Homo sapien
ccacattccttgggctccgaggggc

SEQ ID NO: 1317729 - DNA, 25 bp, Homo sapien
acaggcagataagtctcccctacct

SEQ ID NO: 1317730 - DNA, 25 bp, Homo sapien
gaacaggcagataagtctcccctac

SEQ ID NO: 1317731 - DNA, 25 bp, Homo sapien
ctggaacaggcagataagtctcccc

SEQ ID NO: 1317732 - DNA, 25 bp, Homo sapien
tggaacaggcagataagtctcccct

SEQ ID NO: 1317733 - DNA, 25 bp, Homo sapien
cgtggtgagcgtggtgggcaggatg

SEQ ID NO: 1317734 - DNA, 25 bp, Homo sapien
ggatgctctccccatagcggtggac

SEQ ID NO: 1317735 - DNA, 25 bp, Homo sapien
gggaccagagcgtggtgagcgtggt

SEQ ID NO: 1317736 - DNA, 25 bp, Homo sapien
ccatagcggtggacccatgtctggt

SEQ ID NO: 1317737 - DNA, 25 bp, Homo sapien
cgcgaagctattcctcacccggtgg

SEQ ID NO: 1317738 - DNA, 25 bp, Homo sapien
ggatggcttctggtacgcgaagcta

SEQ ID NO: 1317739 - DNA, 25 bp, Homo sapien
tcctttgaaccggatggcttctggt

SEQ ID NO: 1317740 - DNA, 25 bp, Homo sapien
ctgggcagctgagatcctttgaacc

SEQ ID NO: 1317741 - DNA, 25 bp, Homo sapien
cctgggccaggtttaggctcggtct

SEQ ID NO: 1317742 - DNA, 25 bp, Homo sapien
gcgttttggaacctctggctggtct

SEQ ID NO: 1317743 - DNA, 25 bp, Homo sapien
caacccttgatctaggattctagac

SEQ ID NO: 1317744 - DNA, 25 bp, Homo sapien
taggattctagaccactgccaggag

SEQ ID NO: 1317745 - DNA, 25 bp, Homo sapien
catggtcctatgaatgcagtttaca

SEQ ID NO: 1317746 - DNA, 25 bp, Homo sapien
caggtgaccatacatggtcctatga

SEQ ID NO: 1317747 - DNA, 25 bp, Homo sapien
tgaagtgacctttggacaggtgacc

SEQ ID NO: 1317748 - DNA, 25 bp, Homo sapien
cagtttacaggctcatctgggccct

SEQ ID NO: 1317749 - DNA, 25 bp, Homo sapien
catcacccatgccagaaacctagaa

SEQ ID NO: 1317750 - DNA, 25 bp, Homo sapien
ggataccagtgactaattctcaact

SEQ ID NO: 1317751 - DNA, 25 bp, Homo sapien
gaaacagacccatacatacaggtgc

SEQ ID NO: 1317752 - DNA, 25 bp, Homo sapien
ccctcgcacggaattgatgaccaaa

SEQ ID NO: 1317753 - DNA, 25 bp, Homo sapien
cataagccaacgatggcacagtact

SEQ ID NO: 1317754 - DNA, 25 bp, Homo sapien
tccataagccaacgatggcacagta

SEQ ID NO: 1317755 - DNA, 25 bp, Homo sapien
taagccaacgatggcacagtactca

SEQ ID NO: 1317756 - DNA, 25 bp, Homo sapien
tgtccataagccaacgatggcacag

SEQ ID NO: 1317757 - DNA, 25 bp, Homo sapien
ccagcatgaggcgacccgtcagctt

SEQ ID NO: 1317758 - DNA, 25 bp, Homo sapien
tctggggggcattgatgactccagt

SEQ ID NO: 1317759 - DNA, 25 bp, Homo sapien
gggggcattgatgactccagtgttg

SEQ ID NO: 1317760 - DNA, 25 bp, Homo sapien
ggccagcatgaggcgacccgtcagc

SEQ ID NO: 1317761 - DNA, 25 bp, Homo sapien
actataccaagctgggccctggaag

SEQ ID NO: 1317762 - DNA, 25 bp, Homo sapien
gaagcagcctttacttcaagatcat

SEQ ID NO: 1317763 - DNA, 25 bp, Homo sapien
aagatcatcacagatagccctgggc

SEQ ID NO: 1317764 - DNA, 25 bp, Homo sapien
tgggccttggtttccacagaaccca

SEQ ID NO: 1317765 - DNA, 25 bp, Homo sapien
gaggctgctcacacattctgattaa

SEQ ID NO: 1317766 - DNA, 25 bp, Homo sapien
ggcactcgccagtcttcaaagtaga

SEQ ID NO: 1317767 - DNA, 25 bp, Homo sapien
tatcaagacccttgcatgactgaac

SEQ ID NO: 1317768 - DNA, 25 bp, Homo sapien
tatggctttcctgcttaggtcctcc

SEQ ID NO: 1317769 - DNA, 25 bp, Homo sapien
ggcaggccgagaactacatgtccaa

SEQ ID NO: 1317770 - DNA, 25 bp, Homo sapien
tagaaaaaagttgatcggcctctgc

SEQ ID NO: 1317771 - DNA, 25 bp, Homo sapien
tttgtactgcaacagcaaagctgag

SEQ ID NO: 1317772 - DNA, 25 bp, Homo sapien
taatttggtaagattgggcacatgc

SEQ ID NO: 1317773 - DNA, 25 bp, Homo sapien
catttattatgcttctctgtagttg

SEQ ID NO: 1317774 - DNA, 25 bp, Homo sapien
atttattatgcttctctgtagttgg

SEQ ID NO: 1317775 - DNA, 25 bp, Homo sapien
tggtaaccccacaatgcaacactgt

SEQ ID NO: 1317776 - DNA, 25 bp, Homo sapien
gcaacactgtggttagagactttat

SEQ ID NO: 1317777 - DNA, 25 bp, Homo sapien
tagttcatgcaaggaagtgtcagac

SEQ ID NO: 1317778 - DNA, 25 bp, Homo sapien
gggctgccccacagatgtatgaaca

SEQ ID NO: 1317779 - DNA, 25 bp, Homo sapien
caagaccaactactgaagggatatg

SEQ ID NO: 1317780 - DNA, 25 bp, Homo sapien
tagacgcagagtaccctagatggga

SEQ ID NO: 1317781 - DNA, 25 bp, Homo sapien
cactggaattcatccttagacgcag

SEQ ID NO: 1317782 - DNA, 25 bp, Homo sapien
gatgggcatttgcactaggacactg

SEQ ID NO: 1317783 - DNA, 25 bp, Homo sapien
agcccgggcttctaggcagcactgt

SEQ ID NO: 1317784 - DNA, 25 bp, Homo sapien
tcaagcccacaaatagcccgggctt

SEQ ID NO: 1317785 - DNA, 25 bp, Homo sapien
caaatagcccgggcttctaggcagc

SEQ ID NO: 1317786 - DNA, 25 bp, Homo sapien
agcccacaaatagcccgggcttcta

SEQ ID NO: 1317787 - DNA, 25 bp, Homo sapien
ctgatgacatagctggctgccgggc

SEQ ID NO: 1317788 - DNA, 25 bp, Homo sapien
gctgatgacatagctggctgccggg

SEQ ID NO: 1317789 - DNA, 25 bp, Homo sapien
tggctgccgggccactcaggcccac

SEQ ID NO: 1317790 - DNA, 25 bp, Homo sapien
tgaccgctgggacactggacttcag

SEQ ID NO: 1317791 - DNA, 25 bp, Homo sapien
ctgatgcagtcgatcagcgagttgg

SEQ ID NO: 1317792 - DNA, 25 bp, Homo sapien
cttggctggaggagattcccgtaga

SEQ ID NO: 1317793 - DNA, 25 bp, Homo sapien
agctccagccgcataagggccaggg

SEQ ID NO: 1317794 - DNA, 25 bp, Homo sapien
cccaagttatcacacgcagcaggga

SEQ ID NO: 1317795 - DNA, 25 bp, Homo sapien
aagttatcacacgcagcagggagct

SEQ ID NO: 1317796 - DNA, 25 bp, Homo sapien
ccaagttatcacacgcagcagggag

SEQ ID NO: 1317797 - DNA, 25 bp, Homo sapien
cacccaagttatcacacgcagcagg

SEQ ID NO: 1317798 - DNA, 25 bp, Homo sapien
gctggatggctgtacccttggtact

SEQ ID NO: 1317799 - DNA, 25 bp, Homo sapien
aggaggcactgggcaaagctgagct

SEQ ID NO: 1317800 - DNA, 25 bp, Homo sapien
agggagctggatggctgtacccttg

SEQ ID NO: 1317801 - DNA, 25 bp, Homo sapien
tacccttggtacttgagcagagctc

SEQ ID NO: 1317802 - DNA, 25 bp, Homo sapien
agaggagcacaatggaacacgggga

SEQ ID NO: 1317803 - DNA, 25 bp, Homo sapien
gagcacaatggaacacggggaagtt

SEQ ID NO: 1317804 - DNA, 25 bp, Homo sapien
cacaatggaacacggggaagttagt

SEQ ID NO: 1317805 - DNA, 25 bp, Homo sapien
ggagcacaatggaacacggggaagt

SEQ ID NO: 1317806 - DNA, 25 bp, Homo sapien
aggtcgtgtgcgacgtgccgctccc

SEQ ID NO: 1317807 - DNA, 25 bp, Homo sapien
gcagggccgcgtggacggcgcggcg

SEQ ID NO: 1317808 - DNA, 25 bp, Homo sapien
ctgctgccgaggtcgtgtgcgacgt

SEQ ID NO: 1317809 - DNA, 25 bp, Homo sapien
tgccgaggtcgtgtgcgacgtgccg

SEQ ID NO: 1317810 - DNA, 25 bp, Homo sapien
gggtggcgacgggcgtgcgagcggc

SEQ ID NO: 1317811 - DNA, 25 bp, Homo sapien
gtggctctggctgcgccgggtacgc

SEQ ID NO: 1317812 - DNA, 25 bp, Homo sapien
ggctctggctgcgccgggtacgcgg

SEQ ID NO: 1317813 - DNA, 25 bp, Homo sapien
cgggtggcgacgggcgtgcgagcgg

SEQ ID NO: 1317814 - DNA, 25 bp, Homo sapien
gcctcttgccagagagcgcgcggac

SEQ ID NO: 1317815 - DNA, 25 bp, Homo sapien
gcgcggaccgtagcgtttataggac

SEQ ID NO: 1317816 - DNA, 25 bp, Homo sapien
gcgaccggcacgctcgctgttgcta

SEQ ID NO: 1317817 - DNA, 25 bp, Homo sapien
ctgctccctggcgtgctcactcggg

SEQ ID NO: 1317818 - DNA, 25 bp, Homo sapien
ctggcgacgccggtgtgtcaggggt

SEQ ID NO: 1317819 - DNA, 25 bp, Homo sapien
tggcgacgccggtgtgtcaggggtg

SEQ ID NO: 1317820 - DNA, 25 bp, Homo sapien
acgccggtgtgtcaggggtgtgtgg

SEQ ID NO: 1317821 - DNA, 25 bp, Homo sapien
cgacgccggtgtgtcaggggtgtgt

SEQ ID NO: 1317822 - DNA, 25 bp, Homo sapien
acccccagtccaaaggtctgatcaa

SEQ ID NO: 1317823 - DNA, 25 bp, Homo sapien
ccctttcccgatggagggagtcatg

SEQ ID NO: 1317824 - DNA, 25 bp, Homo sapien
aggacccccagtccaaaggtctgat

SEQ ID NO: 1317825 - DNA, 25 bp, Homo sapien
ctttcccgatggagggagtcatggt

SEQ ID NO: 1317826 - DNA, 25 bp, Homo sapien
ggaggctgagccgaccagatgaccc

SEQ ID NO: 1317827 - DNA, 25 bp, Homo sapien
gctgagccgaccagatgacccctgg

SEQ ID NO: 1317828 - DNA, 25 bp, Homo sapien
ggagttctctggcaatgtgtccagt

SEQ ID NO: 1317829 - DNA, 25 bp, Homo sapien
gggcaccttggttgagtatggagcc

SEQ ID NO: 1317830 - DNA, 25 bp, Homo sapien
ttggtgttttgtaggttgccacttg

SEQ ID NO: 1317831 - DNA, 25 bp, Homo sapien
gtgttttgtaggttgccacttgtcc

SEQ ID NO: 1317832 - DNA, 25 bp, Homo sapien
taggttgccacttgtcctctgtctg

SEQ ID NO: 1317833 - DNA, 25 bp, Homo sapien
tttgtaggttgccacttgtcctctg

SEQ ID NO: 1317834 - DNA, 25 bp, Homo sapien
ccttgtccttctctgggccagcccc

SEQ ID NO: 1317835 - DNA, 25 bp, Homo sapien
aacagccaccttgtccttctctggg

SEQ ID NO: 1317836 - DNA, 25 bp, Homo sapien
caccttgtccttctctgggccagcc

SEQ ID NO: 1317837 - DNA, 25 bp, Homo sapien
caaacagccaccttgtccttctctg

SEQ ID NO: 1317838 - DNA, 25 bp, Homo sapien
cccattgttagcctcatggaggccc

SEQ ID NO: 1317839 - DNA, 25 bp, Homo sapien
ccattgttagcctcatggaggcccc

SEQ ID NO: 1317840 - DNA, 25 bp, Homo sapien
tctgtgggccttccggcagacacag

SEQ ID NO: 1317841 - DNA, 25 bp, Homo sapien
ccttgttccctctgacccagtctgg

SEQ ID NO: 1317842 - DNA, 25 bp, Homo sapien
gtgcggtcgactgggacaagcccat

SEQ ID NO: 1317843 - DNA, 25 bp, Homo sapien
cacgcccgtgttggctttcaccttg

SEQ ID NO: 1317844 - DNA, 25 bp, Homo sapien
taataagagttgtaacaagggacat

SEQ ID NO: 1317845 - DNA, 25 bp, Homo sapien
ctaataagagttgtaacaagggaca

SEQ ID NO: 1317846 - DNA, 25 bp, Homo sapien
acaaggaaaagcctgaagtggcagc

SEQ ID NO: 1317847 - DNA, 25 bp, Homo sapien
caaggaaaagcctgaagtggcagca

SEQ ID NO: 1317848 - DNA, 25 bp, Homo sapien
ctggctaggaggctgagatacccac

SEQ ID NO: 1317849 - DNA, 25 bp, Homo sapien
ctaggaggctgagatacccacaagg

SEQ ID NO: 1317850 - DNA, 25 bp, Homo sapien
agaattctttgagcaaacttttcac

SEQ ID NO: 1317851 - DNA, 25 bp, Homo sapien
tagaattctttgagcaaacttttca

SEQ ID NO: 1317852 - DNA, 25 bp, Homo sapien
gtagaattctttgagcaaacttttc

SEQ ID NO: 1317853 - DNA, 25 bp, Homo sapien
gctaaacctttgctgctatcgtcat

SEQ ID NO: 1317854 - DNA, 25 bp, Homo sapien
tgctaaacctttgctgctatcgtca

SEQ ID NO: 1317855 - DNA, 25 bp, Homo sapien
tcatgatggtccacaggctccacaa

SEQ ID NO: 1317856 - DNA, 25 bp, Homo sapien
caggctgtcatgatggtccacaggc

SEQ ID NO: 1317857 - DNA, 25 bp, Homo sapien
tttccaggctgtcatgatggtccac

SEQ ID NO: 1317858 - DNA, 25 bp, Homo sapien
gctgtcatgatggtccacaggctcc

SEQ ID NO: 1317859 - DNA, 25 bp, Homo sapien
gatgaagtgaataaaactggagtcc

SEQ ID NO: 1317860 - DNA, 25 bp, Homo sapien
aagtgaataaaactggagtccagga

SEQ ID NO: 1317861 - DNA, 25 bp, Homo sapien
tgaagtgaataaaactggagtccag

SEQ ID NO: 1317862 - DNA, 25 bp, Homo sapien
ggatgaagtgaataaaactggagtc

SEQ ID NO: 1317863 - DNA, 25 bp, Homo sapien
gagaaaaatggaacctggccccaca

SEQ ID NO: 1317864 - DNA, 25 bp, Homo sapien
ggatgaagttttgtctatgtagagc

SEQ ID NO: 1317865 - DNA, 25 bp, Homo sapien
ccccacagtgtcaccaaggagcagg

SEQ ID NO: 1317866 - DNA, 25 bp, Homo sapien
tctatgtagagctccaaagacacag

SEQ ID NO: 1317867 - DNA, 25 bp, Homo sapien
cttcagtgaagaacttgccactcag

SEQ ID NO: 1317868 - DNA, 25 bp, Homo sapien
caccgagaaggacccgggtactctg

SEQ ID NO: 1317869 - DNA, 25 bp, Homo sapien
attctcctggccaccgagaaggacc

SEQ ID NO: 1317870 - DNA, 25 bp, Homo sapien
cccgggtactctgaagacctggcca

SEQ ID NO: 1317871 - DNA, 25 bp, Homo sapien
cccttgccttgggggtggtattgct

SEQ ID NO: 1317872 - DNA, 25 bp, Homo sapien
agacaactggtcttgcaggcttttg

SEQ ID NO: 1317873 - DNA, 25 bp, Homo sapien
gacaactggtcttgcaggcttttgt

SEQ ID NO: 1317874 - DNA, 25 bp, Homo sapien
tttgtgctcccttgccttgggggtg

SEQ ID NO: 1317875 - DNA, 25 bp, Homo sapien
tctgtgcaggcagagatggctgctt

SEQ ID NO: 1317876 - DNA, 25 bp, Homo sapien
atggctgctttctgggggtctgtgg

SEQ ID NO: 1317877 - DNA, 25 bp, Homo sapien
ggatggtgctgaaaaacaggtctgt

SEQ ID NO: 1317878 - DNA, 25 bp, Homo sapien
tctgggggtctgtggggatggtgct

SEQ ID NO: 1317879 - DNA, 25 bp, Homo sapien
gatgtagcacaattgactcctccac

SEQ ID NO: 1317880 - DNA, 25 bp, Homo sapien
cataccactgatgctcacaatgatc

SEQ ID NO: 1317881 - DNA, 25 bp, Homo sapien
tccacataccactgatgctcacaat

SEQ ID NO: 1317882 - DNA, 25 bp, Homo sapien
catgatgtagcacaattgactcctc

SEQ ID NO: 1317883 - DNA, 25 bp, Homo sapien
tggtaaaccccattagcagctctga

SEQ ID NO: 1317884 - DNA, 25 bp, Homo sapien
caaccttggtaaaccccattagcag

SEQ ID NO: 1317885 - DNA, 25 bp, Homo sapien
caaatcctgatgcctcgatcctcat

SEQ ID NO: 1317886 - DNA, 25 bp, Homo sapien
ccccaaatcctgatgcctcgatcct

SEQ ID NO: 1317887 - DNA, 25 bp, Homo sapien
cctgagaggtcttccaagttcgaag

SEQ ID NO: 1317888 - DNA, 25 bp, Homo sapien
ccagcctcggtgaggctcatcctga

SEQ ID NO: 1317889 - DNA, 25 bp, Homo sapien
tatgtgtgaccatcgatcgggatga

SEQ ID NO: 1317890 - DNA, 25 bp, Homo sapien
actttttctgccgatatgtgtgacc

SEQ ID NO: 1317891 - DNA, 25 bp, Homo sapien
tggggaagggagcaggaggccaggc

SEQ ID NO: 1317892 - DNA, 25 bp, Homo sapien
ctggggaagggagcaggaggccagg

SEQ ID NO: 1317893 - DNA, 25 bp, Homo sapien
gaagggagcaggaggccaggcctgt

SEQ ID NO: 1317894 - DNA, 25 bp, Homo sapien
gggagcaggaggccaggcctgttcc

SEQ ID NO: 1317895 - DNA, 25 bp, Homo sapien
cgggcgctcccaaacagcccgcggg

SEQ ID NO: 1317896 - DNA, 25 bp, Homo sapien
tggagggagcattttgacatatgga

SEQ ID NO: 1317897 - DNA, 25 bp, Homo sapien
ttggagggagcattttgacatatgg

SEQ ID NO: 1317898 - DNA, 25 bp, Homo sapien
gattgaagatttggaggtgatcaga

SEQ ID NO: 1317899 - DNA, 25 bp, Homo sapien
caaggggttggcatttggtttagct

SEQ ID NO: 1317900 - DNA, 25 bp, Homo sapien
tgcaggtgaggtgttcttaggaact

SEQ ID NO: 1317901 - DNA, 25 bp, Homo sapien
cttaggaactttgatattgattgaa

SEQ ID NO: 1317902 - DNA, 25 bp, Homo sapien
ttaactggaacatttagtccattta

SEQ ID NO: 1317903 - DNA, 25 bp, Homo sapien
tctcgatggtctttacattttggca

SEQ ID NO: 1317904 - DNA, 25 bp, Homo sapien
gtctcgatggtctttacattttggc

SEQ ID NO: 1317905 - DNA, 25 bp, Homo sapien
tgtcttttaactggaacatttagtc

SEQ ID NO: 1317906 - DNA, 25 bp, Homo sapien
gatattctacttaagggtgtcttcc

SEQ ID NO: 1317907 - DNA, 25 bp, Homo sapien
tctacctataagaccaagttgtctg

SEQ ID NO: 1317908 - DNA, 25 bp, Homo sapien
tgtagatcccttttggtaatattga

SEQ ID NO: 1317909 - DNA, 25 bp, Homo sapien
gcatagaaagacaactgatatttgc

SEQ ID NO: 1317910 - DNA, 25 bp, Homo sapien
gaaagcccatcactgagaccaggat

SEQ ID NO: 1317911 - DNA, 25 bp, Homo sapien
taactggcagccttgcataggtaat

SEQ ID NO: 1317912 - DNA, 25 bp, Homo sapien
cctgtattgctgctatggagtagcc

SEQ ID NO: 1317913 - DNA, 25 bp, Homo sapien
gagtagccagctatcaatttaactg

SEQ ID NO: 1317914 - DNA, 25 bp, Homo sapien
ccttggaagctgagtcatgaaaaaa

SEQ ID NO: 1317915 - DNA, 25 bp, Homo sapien
tacccctccttttgtagtgcaacat

SEQ ID NO: 1317916 - DNA, 25 bp, Homo sapien
tagctatagctagaaggccacatgt

SEQ ID NO: 1317917 - DNA, 25 bp, Homo sapien
cagtgagcctaatcaaaaccttgaa

SEQ ID NO: 1317918 - DNA, 25 bp, Homo sapien
tctactgctcaaacacgggaaagag

SEQ ID NO: 1317919 - DNA, 25 bp, Homo sapien
acagcaagtaagcaacacagccagg

SEQ ID NO: 1317920 - DNA, 25 bp, Homo sapien
aaattccctacggtcaaacagcaag

SEQ ID NO: 1317921 - DNA, 25 bp, Homo sapien
tactgacaggaacccaatgaggtag

SEQ ID NO: 1317922 - DNA, 25 bp, Homo sapien
tgtctaaattatcaatagatagcaa

SEQ ID NO: 1317923 - DNA, 25 bp, Homo sapien
ttatcaatagatagcaatggaaagt

SEQ ID NO: 1317924 - DNA, 25 bp, Homo sapien
gaactcaatgtctaaattatcaata

SEQ ID NO: 1317925 - DNA, 25 bp, Homo sapien
aaggcaatttgaactcaatgtctaa

SEQ ID NO: 1317926 - DNA, 25 bp, Homo sapien
acatgacaccaacagaagggatcaa

SEQ ID NO: 1317927 - DNA, 25 bp, Homo sapien
caaagtgtgtcgtgaaattgcgagt

SEQ ID NO: 1317928 - DNA, 25 bp, Homo sapien
gaaattgcgagtcttcattcctttt

SEQ ID NO: 1317929 - DNA, 25 bp, Homo sapien
ccaacagaagggatcaaagtgtgtc

SEQ ID NO: 1317930 - DNA, 25 bp, Homo sapien
tcttctctcttgttcgttttccagg

SEQ ID NO: 1317931 - DNA, 25 bp, Homo sapien
ctcttgttcgttttccaggtctctt

SEQ ID NO: 1317932 - DNA, 25 bp, Homo sapien
catcttctctcttgttcgttttcca

SEQ ID NO: 1317933 - DNA, 25 bp, Homo sapien
ctctcttgttcgttttccaggtctc

SEQ ID NO: 1317934 - DNA, 25 bp, Homo sapien
acatctggtcacatagcagcttgcc

SEQ ID NO: 1317935 - DNA, 25 bp, Homo sapien
ccacatctggtcacatagcagcttg

SEQ ID NO: 1317936 - DNA, 25 bp, Homo sapien
catctggtcacatagcagcttgcct

SEQ ID NO: 1317937 - DNA, 25 bp, Homo sapien
cacatctggtcacatagcagcttgc

SEQ ID NO: 1317938 - DNA, 25 bp, Homo sapien
gagagggcagggttgggagtgggag

SEQ ID NO: 1317939 - DNA, 25 bp, Homo sapien
ggaggggaggctgagcctgctcctc

SEQ ID NO: 1317940 - DNA, 25 bp, Homo sapien
ctgaagggagagggcagggttggga

SEQ ID NO: 1317941 - DNA, 25 bp, Homo sapien
tgggaggggaggctgagcctgctcc

SEQ ID NO: 1317942 - DNA, 25 bp, Homo sapien
tacatcatcatagctctcccgagtg

SEQ ID NO: 1317943 - DNA, 25 bp, Homo sapien
cctttcttgccaggcctcttgaggc

SEQ ID NO: 1317944 - DNA, 25 bp, Homo sapien
tttataccgtcgtttagcactgggc

SEQ ID NO: 1317945 - DNA, 25 bp, Homo sapien
ggcccggaagctagatacatcatca

SEQ ID NO: 1317946 - DNA, 25 bp, Homo sapien
tgatggcccagcaatgctctcagtt

SEQ ID NO: 1317947 - DNA, 25 bp, Homo sapien
agaatctcatccttggccccacaat

SEQ ID NO: 1317948 - DNA, 25 bp, Homo sapien
taggcacgtctgtaacccagaatct

SEQ ID NO: 1317949 - DNA, 25 bp, Homo sapien
tcctttctataagcaaagcccctta

SEQ ID NO: 1317950 - DNA, 25 bp, Homo sapien
tgtgccagaggtttctgatctccct

SEQ ID NO: 1317951 - DNA, 25 bp, Homo sapien
ttctgatctccctcaaggaaatcca

SEQ ID NO: 1317952 - DNA, 25 bp, Homo sapien
tcctgccttcttgcgctgtgccaga

SEQ ID NO: 1317953 - DNA, 25 bp, Homo sapien
aggaaatccagtttatcagagaagc

SEQ ID NO: 1317954 - DNA, 25 bp, Homo sapien
tgctaccctcgttcccctattagag

SEQ ID NO: 1317955 - DNA, 25 bp, Homo sapien
gttcccctattagagatgtaccaac

SEQ ID NO: 1317956 - DNA, 25 bp, Homo sapien
gctaccctcgttcccctattagaga

SEQ ID NO: 1317957 - DNA, 25 bp, Homo sapien
ccctcgttcccctattagagatgta

SEQ ID NO: 1317958 - DNA, 25 bp, Homo sapien
cattcatcatatgggctttctcctg

SEQ ID NO: 1317959 - DNA, 25 bp, Homo sapien
ctgatatttcttaatagcattcatc

SEQ ID NO: 1317960 - DNA, 25 bp, Homo sapien
tcttctgaagaacctccgtttgcac

SEQ ID NO: 1317961 - DNA, 25 bp, Homo sapien
aatagcattcatcatatgggctttc

SEQ ID NO: 1317962 - DNA, 25 bp, Homo sapien
ccatggcagcctgtttagtctgcag

SEQ ID NO: 1317963 - DNA, 25 bp, Homo sapien
tcttcccgtatttcctaagtgctcg

SEQ ID NO: 1317964 - DNA, 25 bp, Homo sapien
cctgtttagtctgcagcttctgtcg

SEQ ID NO: 1317965 - DNA, 25 bp, Homo sapien
taagtgctcgcagttgcttagcttt

SEQ ID NO: 1317966 - DNA, 25 bp, Homo sapien
tcagatttggccatttccgcaaaat

SEQ ID NO: 1317967 - DNA, 25 bp, Homo sapien
tccgcaaaataatcagtgggtcgct

SEQ ID NO: 1317968 - DNA, 25 bp, Homo sapien
gccatttccgcaaaataatcagtgg

SEQ ID NO: 1317969 - DNA, 25 bp, Homo sapien
cagtgggtcgcttcgtagggacttt

SEQ ID NO: 1317970 - DNA, 25 bp, Homo sapien
gggtaagactgcaagcactgcggcc

SEQ ID NO: 1317971 - DNA, 25 bp, Homo sapien
aagactgcaagcactgcggcctggg

SEQ ID NO: 1317972 - DNA, 25 bp, Homo sapien
gtaagactgcaagcactgcggcctg

SEQ ID NO: 1317973 - DNA, 25 bp, Homo sapien
gatggaggcggggtaagactgcaag

SEQ ID NO: 1317974 - DNA, 25 bp, Homo sapien
taaagtggattttggatcgtgaccg

SEQ ID NO: 1317975 - DNA, 25 bp, Homo sapien
tcttagtcaaaagaagccgctctct

SEQ ID NO: 1317976 - DNA, 25 bp, Homo sapien
tcctaggcttattctgagtgcagac

SEQ ID NO: 1317977 - DNA, 25 bp, Homo sapien
tcgtgaccgtggaccaaagagctct

SEQ ID NO: 1317978 - DNA, 25 bp, Homo sapien
tctttcccactctcctgcacaagga

SEQ ID NO: 1317979 - DNA, 25 bp, Homo sapien
tcccactctcctgcacaaggatcct

SEQ ID NO: 1317980 - DNA, 25 bp, Homo sapien
tctcctgcacaaggatcctcaactt

SEQ ID NO: 1317981 - DNA, 25 bp, Homo sapien
tgcacaaggatcctcaacttctcca

SEQ ID NO: 1317982 - DNA, 25 bp, Homo sapien
aaactcatctctcgctggaagtcgt

SEQ ID NO: 1317983 - DNA, 25 bp, Homo sapien
ggaagtcgtcttctggatcaacagc

SEQ ID NO: 1317984 - DNA, 25 bp, Homo sapien
gtaccggacccagtgtcacatcgag

SEQ ID NO: 1317985 - DNA, 25 bp, Homo sapien
tccttgttctgaggtgctggcgcct

SEQ ID NO: 1317986 - DNA, 25 bp, Homo sapien
gcgaggcgcagggtgcatctttcct

SEQ ID NO: 1317987 - DNA, 25 bp, Homo sapien
gacactgagctcacaagaagggaac

SEQ ID NO: 1317988 - DNA, 25 bp, Homo sapien
tgaagcgcatcccatgtccgagtac

SEQ ID NO: 1317989 - DNA, 25 bp, Homo sapien
taattgaccctcttggcgaggcgca

SEQ ID NO: 1317990 - DNA, 25 bp, Homo sapien
ctggcttcagaagccctcgggaaaa

SEQ ID NO: 1317991 - DNA, 25 bp, Homo sapien
ttcacggccttcttcggcccctcta

SEQ ID NO: 1317992 - DNA, 25 bp, Homo sapien
ttcagaagccctcgggaaaacgcat

SEQ ID NO: 1317993 - DNA, 25 bp, Homo sapien
ctctagcacgacattgaggcctggc

SEQ ID NO: 1317994 - DNA, 25 bp, Homo sapien
ttccgactccgaatccgagagcggg

SEQ ID NO: 1317995 - DNA, 25 bp, Homo sapien
gggattcatcggattccgactccga

SEQ ID NO: 1317996 - DNA, 25 bp, Homo sapien
ctctctgtctgtgacaagggattca

SEQ ID NO: 1317997 - DNA, 25 bp, Homo sapien
tgacaagggattcatcggattccga

SEQ ID NO: 1317998 - DNA, 25 bp, Homo sapien
acgtgccaccgaatcgctccagcgc

SEQ ID NO: 1317999 - DNA, 25 bp, Homo sapien
cccgagacccaagcggctagcagag

SEQ ID NO: 1318000 - DNA, 25 bp, Homo sapien
gcggctagcagagggcggccctggc

SEQ ID NO: 1318001 - DNA, 25 bp, Homo sapien
gggtatcccgagacccaagcggcta

SEQ ID NO: 1318002 - DNA, 25 bp, Homo sapien
tcaacttttgattgggacttccgct

SEQ ID NO: 1318003 - DNA, 25 bp, Homo sapien
caggtagcgcctctggatacatgcg

SEQ ID NO: 1318004 - DNA, 25 bp, Homo sapien
tcgttgctataggaaccgctacggc

SEQ ID NO: 1318005 - DNA, 25 bp, Homo sapien
tgcttaggatccctacaggtagcgc

SEQ ID NO: 1318006 - DNA, 25 bp, Homo sapien
gagctggtagcagtgagggtacaaa

SEQ ID NO: 1318007 - DNA, 25 bp, Homo sapien
cagtgagggtacaaaggaaaaggca

SEQ ID NO: 1318008 - DNA, 25 bp, Homo sapien
cctgggggtcgccagaaggagctgg

SEQ ID NO: 1318009 - DNA, 25 bp, Homo sapien
tgctgacccagagagaaacgaaagg

SEQ ID NO: 1318010 - DNA, 25 bp, Homo sapien
gcagaactgtttggcgggagatcat

SEQ ID NO: 1318011 - DNA, 25 bp, Homo sapien
tcatgtcagccgtggtagctcagac

SEQ ID NO: 1318012 - DNA, 25 bp, Homo sapien
tttttggtcttcgatcccacgtggc

SEQ ID NO: 1318013 - DNA, 25 bp, Homo sapien
tagctcagacgctgcatgtttttgg

SEQ ID NO: 1318014 - DNA, 25 bp, Homo sapien
aatacctattggctcagacgtcacc

SEQ ID NO: 1318015 - DNA, 25 bp, Homo sapien
tctccagactccaaatacctattgg

SEQ ID NO: 1318016 - DNA, 25 bp, Homo sapien
tccagagtcaaatcttgtctactgg

SEQ ID NO: 1318017 - DNA, 25 bp, Homo sapien
cacctccagagtcaaatcttgtcta

SEQ ID NO: 1318018 - DNA, 25 bp, Homo sapien
gaggccatgaagatttacctctgta

SEQ ID NO: 1318019 - DNA, 25 bp, Homo sapien
gtttcatagtgctagctcttacatc

SEQ ID NO: 1318020 - DNA, 25 bp, Homo sapien
gtagatatccagtcgtcacagcatc

SEQ ID NO: 1318021 - DNA, 25 bp, Homo sapien
gaaatcagttgacacatgggtttgt

SEQ ID NO: 1318022 - DNA, 25 bp, Homo sapien
cttaatattgcttaccataaatttt

SEQ ID NO: 1318023 - DNA, 25 bp, Homo sapien
ttaatattgcttaccataaattttg

SEQ ID NO: 1318024 - DNA, 25 bp, Homo sapien
taatattgcttaccataaattttgc

SEQ ID NO: 1318025 - DNA, 25 bp, Homo sapien
taatttaattacactgtgcttagag

SEQ ID NO: 1318026 - DNA, 25 bp, Homo sapien
ttaattacactgtgcttagagaata

SEQ ID NO: 1318027 - DNA, 25 bp, Homo sapien
aatttaattacactgtgcttagaga

SEQ ID NO: 1318028 - DNA, 25 bp, Homo sapien
tttaattacactgtgcttagagaat

SEQ ID NO: 1318029 - DNA, 25 bp, Homo sapien
tcatctaaggtcgagaggtcgagac

SEQ ID NO: 1318030 - DNA, 25 bp, Homo sapien
tctggagactgctctatatgcactt

SEQ ID NO: 1318031 - DNA, 25 bp, Homo sapien
tgagttgggtgttctatatacgtct

SEQ ID NO: 1318032 - DNA, 25 bp, Homo sapien
tggcctggcatataatctattctgg

SEQ ID NO: 1318033 - DNA, 25 bp, Homo sapien
ttaaagaagctgaggttagaatggg

SEQ ID NO: 1318034 - DNA, 25 bp, Homo sapien
caaaccccaatgacatattcttata

SEQ ID NO: 1318035 - DNA, 25 bp, Homo sapien
caatttcatactaacttaatgctag

SEQ ID NO: 1318036 - DNA, 25 bp, Homo sapien
tgttattgccacatagctaccttcc

SEQ ID NO: 1318037 - DNA, 25 bp, Homo sapien
gatctattcttgagcacctctagtg

SEQ ID NO: 1318038 - DNA, 25 bp, Homo sapien
ttttttggacacacttggaatggct

SEQ ID NO: 1318039 - DNA, 25 bp, Homo sapien
acagttctatccctatattgatggg

SEQ ID NO: 1318040 - DNA, 25 bp, Homo sapien
taatttcaagcctttgggtgctgcc

SEQ ID NO: 1318041 - DNA, 25 bp, Homo sapien
gatggagatcatcctggataacacg

SEQ ID NO: 1318042 - DNA, 25 bp, Homo sapien
ggataacacggtgaaactccgtctc

SEQ ID NO: 1318043 - DNA, 25 bp, Homo sapien
gagatggagatcatcctggataaca

SEQ ID NO: 1318044 - DNA, 25 bp, Homo sapien
aggagatggagatcatcctggataa

SEQ ID NO: 1318045 - DNA, 25 bp, Homo sapien
tggcatgaacctgggggatggaggt

SEQ ID NO: 1318046 - DNA, 25 bp, Homo sapien
atggcatgaacctgggggatggagg

SEQ ID NO: 1318047 - DNA, 25 bp, Homo sapien
gaatggcatgaacctgggggatgga

SEQ ID NO: 1318048 - DNA, 25 bp, Homo sapien
gagaatggcatgaacctgggggatg

SEQ ID NO: 1318049 - DNA, 25 bp, Homo sapien
taccagatttatgtgtggcttggaa

SEQ ID NO: 1318050 - DNA, 25 bp, Homo sapien
tgcccatgagttgcctaagctgctt

SEQ ID NO: 1318051 - DNA, 25 bp, Homo sapien
tatctgtttcgtgacttggctgagc

SEQ ID NO: 1318052 - DNA, 25 bp, Homo sapien
tgtagtgagcagtgtctcatatcac

SEQ ID NO: 1318053 - DNA, 25 bp, Homo sapien
cacctgcttggaatagagcttctgc

SEQ ID NO: 1318054 - DNA, 25 bp, Homo sapien
gaaaccatagcccaagatcaggagc

SEQ ID NO: 1318055 - DNA, 25 bp, Homo sapien
cactctataagcaaactgggtcagg

SEQ ID NO: 1318056 - DNA, 25 bp, Homo sapien
gagggagtcgcttatcttggccaca

SEQ ID NO: 1318057 - DNA, 25 bp, Homo sapien
ccattccagaagtccactctctctg

SEQ ID NO: 1318058 - DNA, 25 bp, Homo sapien
gtgccattccagaagtccactctct

SEQ ID NO: 1318059 - DNA, 25 bp, Homo sapien
tgccattccagaagtccactctctc

SEQ ID NO: 1318060 - DNA, 25 bp, Homo sapien
cgtgccattccagaagtccactctc

SEQ ID NO: 1318061 - DNA, 25 bp, Homo sapien
tgctgctgaggatggctgcctgttc

SEQ ID NO: 1318062 - DNA, 25 bp, Homo sapien
ttgatgatcagttcctgctgactgc

SEQ ID NO: 1318063 - DNA, 25 bp, Homo sapien
ctgctgaggatggctgcctgttcac

SEQ ID NO: 1318064 - DNA, 25 bp, Homo sapien
ctttgatgatcagttcctgctgact

SEQ ID NO: 1318065 - DNA, 25 bp, Homo sapien
aaggtctttgataaggatggccggg

SEQ ID NO: 1318066 - DNA, 25 bp, Homo sapien
ccggggaatcaagcgagagagggag

SEQ ID NO: 1318067 - DNA, 25 bp, Homo sapien
ctttgataaggatggccggggaatc

SEQ ID NO: 1318068 - DNA, 25 bp, Homo sapien
ggctttgccgaagaggtgcttgtga

SEQ ID NO: 1318069 - DNA, 25 bp, Homo sapien
aactgtgtagatgaaccaacctgcc

SEQ ID NO: 1318070 - DNA, 25 bp, Homo sapien
tctttgagaagtacgtgcagcgagc

SEQ ID NO: 1318071 - DNA, 25 bp, Homo sapien
gagggcaggtgcacaagacttttcg

SEQ ID NO: 1318072 - DNA, 25 bp, Homo sapien
taagcactggatgagctaacacggg

SEQ ID NO: 1318073 - DNA, 25 bp, Homo sapien
acatacccgattcctcttttctaca

SEQ ID NO: 1318074 - DNA, 25 bp, Homo sapien
tctttatccagagcacacctgtgtc

SEQ ID NO: 1318075 - DNA, 25 bp, Homo sapien
gagagctcacctaggaggttttcta

SEQ ID NO: 1318076 - DNA, 25 bp, Homo sapien
tgagaccacctgtcttcagggctcc

SEQ ID NO: 1318077 - DNA, 25 bp, Homo sapien
gttaatcattgggaacctggaccag

SEQ ID NO: 1318078 - DNA, 25 bp, Homo sapien
tccaagatgaacgtgatagtgttcc

SEQ ID NO: 1318079 - DNA, 25 bp, Homo sapien
caactcattgtatgcagtgctgtgg

SEQ ID NO: 1318080 - DNA, 25 bp, Homo sapien
tgctgtgggctcatcctggaaatgg

SEQ ID NO: 1318081 - DNA, 25 bp, Homo sapien
gaggaccgtttgtcacagctcaggg

SEQ ID NO: 1318082 - DNA, 25 bp, Homo sapien
gactgggcatttcatccgagacaga

SEQ ID NO: 1318083 - DNA, 25 bp, Homo sapien
tctggtatacagaccctcaggtgct

SEQ ID NO: 1318084 - DNA, 25 bp, Homo sapien
tatggtcatacacgaggaactgctg

SEQ ID NO: 1318085 - DNA, 25 bp, Homo sapien
catatttctccatatcataaccttt

SEQ ID NO: 1318086 - DNA, 25 bp, Homo sapien
tctcactaataacatcttttggccc

SEQ ID NO: 1318087 - DNA, 25 bp, Homo sapien
catcttttggcccatttcatataca

SEQ ID NO: 1318088 - DNA, 25 bp, Homo sapien
tatacatgagaacaattccacaact

SEQ ID NO: 1318089 - DNA, 25 bp, Homo sapien
ctcagaagattcacctaacaacatt

SEQ ID NO: 1318090 - DNA, 25 bp, Homo sapien
tctgtcaaagaaggcataccaaaat

SEQ ID NO: 1318091 - DNA, 25 bp, Homo sapien
tgcttggactttttcacctaacgta

SEQ ID NO: 1318092 - DNA, 25 bp, Homo sapien
tggctagattaacagctttataacc

SEQ ID NO: 1318093 - DNA, 25 bp, Homo sapien
gccatgaaatgccaatacaagcgta

SEQ ID NO: 1318094 - DNA, 25 bp, Homo sapien
ccaatacaagcgtactggttttaca

SEQ ID NO: 1318095 - DNA, 25 bp, Homo sapien
tacatggttatacgttgtttgcccc

SEQ ID NO: 1318096 - DNA, 25 bp, Homo sapien
tagttaatccagtgaagaatgtgaa

SEQ ID NO: 1318097 - DNA, 25 bp, Homo sapien
tgaggcttggcagtcacatttggca

SEQ ID NO: 1318098 - DNA, 25 bp, Homo sapien
gaggcttggcagtcacatttggcaa

SEQ ID NO: 1318099 - DNA, 25 bp, Homo sapien
ctgaggcttggcagtcacatttggc

SEQ ID NO: 1318100 - DNA, 25 bp, Homo sapien
aggcttggcagtcacatttggcaag

SEQ ID NO: 1318101 - DNA, 25 bp, Homo sapien
tctttaagagctgtaggccaggtgt

SEQ ID NO: 1318102 - DNA, 25 bp, Homo sapien
ctgaatattggaaggaacaaactcc

SEQ ID NO: 1318103 - DNA, 25 bp, Homo sapien
ccatctttaagagctgtaggccagg

SEQ ID NO: 1318104 - DNA, 25 bp, Homo sapien
atctgaatattggaaggaacaaact

SEQ ID NO: 1318105 - DNA, 25 bp, Homo sapien
gtcagtgagaccaagaacccaccgg

SEQ ID NO: 1318106 - DNA, 25 bp, Homo sapien
tgagaccaagaacccaccggaagga

SEQ ID NO: 1318107 - DNA, 25 bp, Homo sapien
agtgagaccaagaacccaccggaag

SEQ ID NO: 1318108 - DNA, 25 bp, Homo sapien
caccggaaggaaccaattctggaca

SEQ ID NO: 1318109 - DNA, 25 bp, Homo sapien
caagtacaaaacaatttcttttcag

SEQ ID NO: 1318110 - DNA, 25 bp, Homo sapien
agtacaaaacaatttcttttcagct

SEQ ID NO: 1318111 - DNA, 25 bp, Homo sapien
acatccaggcttctcgtgagttccc

SEQ ID NO: 1318112 - DNA, 25 bp, Homo sapien
cttctcggatcggatccagcacatc

SEQ ID NO: 1318113 - DNA, 25 bp, Homo sapien
gttaggcaggtgaagtgtctccccg

SEQ ID NO: 1318114 - DNA, 25 bp, Homo sapien
gaaaccaagctagagtgccccacct

SEQ ID NO: 1318115 - DNA, 25 bp, Homo sapien
gcgcagaaacgcctcatgatgaaga

SEQ ID NO: 1318116 - DNA, 25 bp, Homo sapien
gaatatgggctctgcaatgagacag

SEQ ID NO: 1318117 - DNA, 25 bp, Homo sapien
tgtatctcaggtcagtaggcgcaga

SEQ ID NO: 1318118 - DNA, 25 bp, Homo sapien
tctcccgttgagcactagcagctgg

SEQ ID NO: 1318119 - DNA, 25 bp, Homo sapien
ctgccgtgggtgagtgggtgagcac

SEQ ID NO: 1318120 - DNA, 25 bp, Homo sapien
ggcataagcatctgactgagcagct

SEQ ID NO: 1318121 - DNA, 25 bp, Homo sapien
ctggcataagcatctgactgagcag

SEQ ID NO: 1318122 - DNA, 25 bp, Homo sapien
gccgtgggtgagtgggtgagcacca

SEQ ID NO: 1318123 - DNA, 25 bp, Homo sapien
cactggaaaacatggaaagactttc

SEQ ID NO: 1318124 - DNA, 25 bp, Homo sapien
agaataggatttgggacttgctggc

SEQ ID NO: 1318125 - DNA, 25 bp, Homo sapien
gaatttggactttgtcctcaggaca

SEQ ID NO: 1318126 - DNA, 25 bp, Homo sapien
ctgtggccagaataggatttgggac

SEQ ID NO: 1318127 - DNA, 25 bp, Homo sapien
tcacagagggccttatgtccacact

SEQ ID NO: 1318128 - DNA, 25 bp, Homo sapien
taaccactgtccttaagctgtcagg

SEQ ID NO: 1318129 - DNA, 25 bp, Homo sapien
gaccaatgtgagcaaaggtgcctgg

SEQ ID NO: 1318130 - DNA, 25 bp, Homo sapien
ccaagaggccgagaggcatgatcac

SEQ ID NO: 1318131 - DNA, 25 bp, Homo sapien
cagagggagaagtggtccctgctac

SEQ ID NO: 1318132 - DNA, 25 bp, Homo sapien
tcagagggagaagtggtccctgcta

SEQ ID NO: 1318133 - DNA, 25 bp, Homo sapien
gcatttggcagcaagtgcaatgagg

SEQ ID NO: 1318134 - DNA, 25 bp, Homo sapien
ggtagctggcatggtatcggcggca

SEQ ID NO: 1318135 - DNA, 25 bp, Homo sapien
caatgaggagcgagaggaccacagc

SEQ ID NO: 1318136 - DNA, 25 bp, Homo sapien
tgtcctcgatgaagccatcatcatc

SEQ ID NO: 1318137 - DNA, 25 bp, Homo sapien
cacagcagacgctgtggggagctcc

SEQ ID NO: 1318138 - DNA, 25 bp, Homo sapien
gggagctccgaaggcccaacaagtg

SEQ ID NO: 1318139 - DNA, 25 bp, Homo sapien
ccacagcagacgctgtggggagctc

SEQ ID NO: 1318140 - DNA, 25 bp, Homo sapien
ctgtggggagctccgaaggcccaac

SEQ ID NO: 1318141 - DNA, 25 bp, Homo sapien
gacaccagtgagtctcagcctcaac

SEQ ID NO: 1318142 - DNA, 25 bp, Homo sapien
accagtgagtctcagcctcaaccag

SEQ ID NO: 1318143 - DNA, 25 bp, Homo sapien
gtctcagcctcaaccagaaagagcc

SEQ ID NO: 1318144 - DNA, 25 bp, Homo sapien
gtgagtctcagcctcaaccagaaag

SEQ ID NO: 1318145 - DNA, 25 bp, Homo sapien
gctgagcctacagaaactggctatt

SEQ ID NO: 1318146 - DNA, 25 bp, Homo sapien
acaaactctggggactggacaactg

SEQ ID NO: 1318147 - DNA, 25 bp, Homo sapien
gccatggtagccctgcacaaactct

SEQ ID NO: 1318148 - DNA, 25 bp, Homo sapien
ctggctatttgtaagggaccatcac

SEQ ID NO: 1318149 - DNA, 25 bp, Homo sapien
tgccagaagccccttgggtactgtg

SEQ ID NO: 1318150 - DNA, 25 bp, Homo sapien
cccaactctgatgtgtagcttcctt

SEQ ID NO: 1318151 - DNA, 25 bp, Homo sapien
tgctgccagaagccccttgggtact

SEQ ID NO: 1318152 - DNA, 25 bp, Homo sapien
ccaactctgatgtgtagcttccttc

SEQ ID NO: 1318153 - DNA, 25 bp, Homo sapien
cttcaagaactgtgcacaatccgcg

SEQ ID NO: 1318154 - DNA, 25 bp, Homo sapien
gaactgtgcacaatccgcggagtaa

SEQ ID NO: 1318155 - DNA, 25 bp, Homo sapien
cacaatccgcggagtaagcttccgg

SEQ ID NO: 1318156 - DNA, 25 bp, Homo sapien
aatccgcggagtaagcttccggctg

SEQ ID NO: 1318157 - DNA, 25 bp, Homo sapien
ggacaggtgggcgggtcaaggcaga

SEQ ID NO: 1318158 - DNA, 25 bp, Homo sapien
aggtgggcgggtcaaggcagagctt

SEQ ID NO: 1318159 - DNA, 25 bp, Homo sapien
tgggcgggtcaaggcagagcttgac

SEQ ID NO: 1318160 - DNA, 25 bp, Homo sapien
cgggtcaaggcagagcttgactcac

SEQ ID NO: 1318161 - DNA, 25 bp, Homo sapien
gccaagaactttatgggtgtagacc

SEQ ID NO: 1318162 - DNA, 25 bp, Homo sapien
ttgccaagaactttatgggtgtaga

SEQ ID NO: 1318163 - DNA, 25 bp, Homo sapien
tgccaagaactttatgggtgtagac

SEQ ID NO: 1318164 - DNA, 25 bp, Homo sapien
tttgccaagaactttatgggtgtag

SEQ ID NO: 1318165 - DNA, 25 bp, Homo sapien
tgaacgtccggtgactggtacaaag

SEQ ID NO: 1318166 - DNA, 25 bp, Homo sapien
caatgcttgcggtttgtacagctgg

SEQ ID NO: 1318167 - DNA, 25 bp, Homo sapien
ggcaggtgctcaggttgataaacaa

SEQ ID NO: 1318168 - DNA, 25 bp, Homo sapien
agagaagcgtccagcgggccctaga

SEQ ID NO: 1318169 - DNA, 25 bp, Homo sapien
aaactccagtgtgattatgtcatgg

SEQ ID NO: 1318170 - DNA, 25 bp, Homo sapien
aactccagtgtgattatgtcatgga

SEQ ID NO: 1318171 - DNA, 25 bp, Homo sapien
actccagtgtgattatgtcatggag

SEQ ID NO: 1318172 - DNA, 25 bp, Homo sapien
ctccagtgtgattatgtcatggagc

SEQ ID NO: 1318173 - DNA, 25 bp, Homo sapien
tgctggccggagcaaactctgctgt

SEQ ID NO: 1318174 - DNA, 25 bp, Homo sapien
ttctttctagttcagctgccccaca

SEQ ID NO: 1318175 - DNA, 25 bp, Homo sapien
taggtgtctcatagctatcctgggc

SEQ ID NO: 1318176 - DNA, 25 bp, Homo sapien
tctgacttaagctgcctcaaggaat

SEQ ID NO: 1318177 - DNA, 25 bp, Homo sapien
caagagttacagaatacctactgtg

SEQ ID NO: 1318178 - DNA, 25 bp, Homo sapien
aagggatccctgcttacaagaagca

SEQ ID NO: 1318179 - DNA, 25 bp, Homo sapien
ttcatccattcaagagttacagaat

SEQ ID NO: 1318180 - DNA, 25 bp, Homo sapien
aaaagggatccctgcttacaagaag

SEQ ID NO: 1318181 - DNA, 25 bp, Homo sapien
tgtccatcgcccgacctggagttgt

SEQ ID NO: 1318182 - DNA, 25 bp, Homo sapien
cctggagttgtgagaacacccggta

SEQ ID NO: 1318183 - DNA, 25 bp, Homo sapien
tgcgtgtaccgggatccctgccgag

SEQ ID NO: 1318184 - DNA, 25 bp, Homo sapien
cacccggtagggtgtgcgtgtaccg

SEQ ID NO: 1318185 - DNA, 25 bp, Homo sapien
ggttaccttaatcccatgccagctg

SEQ ID NO: 1318186 - DNA, 25 bp, Homo sapien
gcttggtgcatgatagtaggccttc

SEQ ID NO: 1318187 - DNA, 25 bp, Homo sapien
tctgtcccctgctactagattgtga

SEQ ID NO: 1318188 - DNA, 25 bp, Homo sapien
gctcagacatctactacagcactgt

SEQ ID NO: 1318189 - DNA, 25 bp, Homo sapien
gagtagctgtaagacagggctgcca

SEQ ID NO: 1318190 - DNA, 25 bp, Homo sapien
ccaacctatgggcaggtggcaatga

SEQ ID NO: 1318191 - DNA, 25 bp, Homo sapien
ggagtggttcccagatcaccagaga

SEQ ID NO: 1318192 - DNA, 25 bp, Homo sapien
aaggtgctggcactagccctaggca

SEQ ID NO: 1318193 - DNA, 25 bp, Homo sapien
tactggatgtcatccatttgtccca

SEQ ID NO: 1318194 - DNA, 25 bp, Homo sapien
cctatgcttagcaaggctgattcat

SEQ ID NO: 1318195 - DNA, 25 bp, Homo sapien
ggagtaaagtcagagcctttcatgt

SEQ ID NO: 1318196 - DNA, 25 bp, Homo sapien
gaattatggagattgggtatactgg

SEQ ID NO: 1318197 - DNA, 25 bp, Homo sapien
aacacagtagttagatggtccataa

SEQ ID NO: 1318198 - DNA, 25 bp, Homo sapien
tcattattagagcactagattgagt

SEQ ID NO: 1318199 - DNA, 25 bp, Homo sapien
tacttttatgattgctgctccacct

SEQ ID NO: 1318200 - DNA, 25 bp, Homo sapien
tagattgagtgcgagtcagacctgg

SEQ ID NO: 1318201 - DNA, 25 bp, Homo sapien
ttctagcagggttcctacccggcgc

SEQ ID NO: 1318202 - DNA, 25 bp, Homo sapien
tccagataggcaggtttgaataccg

SEQ ID NO: 1318203 - DNA, 25 bp, Homo sapien
cacacgttacttcctttctagcagg

SEQ ID NO: 1318204 - DNA, 25 bp, Homo sapien
cctcctgtagggcagtctaagctta

SEQ ID NO: 1318205 - DNA, 25 bp, Homo sapien
gcactccatcgggttctgcaccgag

SEQ ID NO: 1318206 - DNA, 25 bp, Homo sapien
tctaggaacggctcaagcgccttgg

SEQ ID NO: 1318207 - DNA, 25 bp, Homo sapien
tgcaggttctcggaccctgaagcac

SEQ ID NO: 1318208 - DNA, 25 bp, Homo sapien
tctgcatcataaatacgactctcgt

SEQ ID NO: 1318209 - DNA, 25 bp, Homo sapien
gggctctactctactgggatcagag

SEQ ID NO: 1318210 - DNA, 25 bp, Homo sapien
gatatgtcctgtgggagcctggacc

SEQ ID NO: 1318211 - DNA, 25 bp, Homo sapien
ctatgtcccagcagccttcctaggg

SEQ ID NO: 1318212 - DNA, 25 bp, Homo sapien
acagggctaagcgtgttgtgttccc

SEQ ID NO: 1318213 - DNA, 25 bp, Homo sapien
ccacataagccttggtcacaggtgt

SEQ ID NO: 1318214 - DNA, 25 bp, Homo sapien
tcctgaggcacttaggtgggcgcct

SEQ ID NO: 1318215 - DNA, 25 bp, Homo sapien
tgaggaaccaaagccgtggtccctg

SEQ ID NO: 1318216 - DNA, 25 bp, Homo sapien
gacacaagttgagtaagcagcctcc

SEQ ID NO: 1318217 - DNA, 25 bp, Homo sapien
tgtgcagtgagaccaggacaaactg

SEQ ID NO: 1318218 - DNA, 25 bp, Homo sapien
taatgactgggtactggtagttaca

SEQ ID NO: 1318219 - DNA, 25 bp, Homo sapien
tataagagtgataccagaagttgga

SEQ ID NO: 1318220 - DNA, 25 bp, Homo sapien
catccagatgaggtgaataatgact

SEQ ID NO: 1318221 - DNA, 25 bp, Homo sapien
cacggaagagtttatcatggcatgg

SEQ ID NO: 1318222 - DNA, 25 bp, Homo sapien
ccaccaaaggtagggttgtgccaca

SEQ ID NO: 1318223 - DNA, 25 bp, Homo sapien
aaaggcagataatccgtagtacagg

SEQ ID NO: 1318224 - DNA, 25 bp, Homo sapien
tacaggtacattatgacatgcacgg

SEQ ID NO: 1318225 - DNA, 25 bp, Homo sapien
gaagcacagagtgatggaagacatg

SEQ ID NO: 1318226 - DNA, 25 bp, Homo sapien
agcacagagtgatggaagacatgta

SEQ ID NO: 1318227 - DNA, 25 bp, Homo sapien
cacagagtgatggaagacatgtagg

SEQ ID NO: 1318228 - DNA, 25 bp, Homo sapien
gatggaagacatgtaggaaggtcac

SEQ ID NO: 1318229 - DNA, 25 bp, Homo sapien
cgtctttctttcggagaataaagat

SEQ ID NO: 1318230 - DNA, 25 bp, Homo sapien
tctttctttcggagaataaagatca

SEQ ID NO: 1318231 - DNA, 25 bp, Homo sapien
gtctttctttcggagaataaagatc

SEQ ID NO: 1318232 - DNA, 25 bp, Homo sapien
ctttctttcggagaataaagatcac

SEQ ID NO: 1318233 - DNA, 25 bp, Homo sapien
cagaacctgggcttctccacctcat

SEQ ID NO: 1318234 - DNA, 25 bp, Homo sapien
gagtgagggaaggggattcagaacc

SEQ ID NO: 1318235 - DNA, 25 bp, Homo sapien
ttctcccctcaagttctcacatctc

SEQ ID NO: 1318236 - DNA, 25 bp, Homo sapien
agtgagggaaggggattcagaacct

SEQ ID NO: 1318237 - DNA, 25 bp, Homo sapien
agctcaatgaacttggagaagagga

SEQ ID NO: 1318238 - DNA, 25 bp, Homo sapien
cagctcaatgaacttggagaagagg

SEQ ID NO: 1318239 - DNA, 25 bp, Homo sapien
ccacagggtcacagcgccaggtata

SEQ ID NO: 1318240 - DNA, 25 bp, Homo sapien
agcgccaggtataggtgctcagcca

SEQ ID NO: 1318241 - DNA, 25 bp, Homo sapien
cctaagtgcctcagggctgttggaa

SEQ ID NO: 1318242 - DNA, 25 bp, Homo sapien
ggtcacagcgccaggtataggtgct

SEQ ID NO: 1318243 - DNA, 25 bp, Homo sapien
cttcgctagctgaggacatggatct

SEQ ID NO: 1318244 - DNA, 25 bp, Homo sapien
gggatgtggattagaccaccagagt

SEQ ID NO: 1318245 - DNA, 25 bp, Homo sapien
atccctccccttcgctagctgagga

SEQ ID NO: 1318246 - DNA, 25 bp, Homo sapien
gatgtggattagaccaccagagttc

SEQ ID NO: 1318247 - DNA, 25 bp, Homo sapien
gctccttatcctgctgacagaaatt

SEQ ID NO: 1318248 - DNA, 25 bp, Homo sapien
catgctctggctctatggcctgctc

SEQ ID NO: 1318249 - DNA, 25 bp, Homo sapien
acagaaattaaagcccggcatccca

SEQ ID NO: 1318250 - DNA, 25 bp, Homo sapien
tccttatcctgctgacagaaattaa

SEQ ID NO: 1318251 - DNA, 25 bp, Homo sapien
acaatgtagagggagagtgccacca

SEQ ID NO: 1318252 - DNA, 25 bp, Homo sapien
caatcatgaagccacggagctggaa

SEQ ID NO: 1318253 - DNA, 25 bp, Homo sapien
gcccaagtgagagaacgaagtacac

SEQ ID NO: 1318254 - DNA, 25 bp, Homo sapien
gattagccatgatgcgaggcccaag

SEQ ID NO: 1318255 - DNA, 25 bp, Homo sapien
ctatgaataagggtcaaaggaatca

SEQ ID NO: 1318256 - DNA, 25 bp, Homo sapien
aagagtcacagggttcgaagggtct

SEQ ID NO: 1318257 - DNA, 25 bp, Homo sapien
cacagggttcgaagggtcttcattt

SEQ ID NO: 1318258 - DNA, 25 bp, Homo sapien
aataagggtcaaaggaatcaggaag

SEQ ID NO: 1318259 - DNA, 25 bp, Homo sapien
cttggtacaagttcacaacagcctc

SEQ ID NO: 1318260 - DNA, 25 bp, Homo sapien
tggtacaagttcacaacagcctcca

SEQ ID NO: 1318261 - DNA, 25 bp, Homo sapien
ttggtacaagttcacaacagcctcc

SEQ ID NO: 1318262 - DNA, 25 bp, Homo sapien
ccacctgtctgactagatctggcag

SEQ ID NO: 1318263 - DNA, 25 bp, Homo sapien
tctgactagatctggcagcagcccc

SEQ ID NO: 1318264 - DNA, 25 bp, Homo sapien
tctcctctcgcagagcccttcctct

SEQ ID NO: 1318265 - DNA, 25 bp, Homo sapien
tggctctttgagactcctgccccgg

SEQ ID NO: 1318266 - DNA, 25 bp, Homo sapien
ctgtgcagggggtggagggtgggtc

SEQ ID NO: 1318267 - DNA, 25 bp, Homo sapien
tgtgcagggggtggagggtgggtcc

SEQ ID NO: 1318268 - DNA, 25 bp, Homo sapien
tccaggaggcccggcttctttaggc

SEQ ID NO: 1318269 - DNA, 25 bp, Homo sapien
ctccaggaggcccggcttctttagg

SEQ ID NO: 1318270 - DNA, 25 bp, Homo sapien
accacgcaacacctccgtgggctga

SEQ ID NO: 1318271 - DNA, 25 bp, Homo sapien
tccacccccaacagcgaaggtgcca

SEQ ID NO: 1318272 - DNA, 25 bp, Homo sapien
gcgaaggtgccacgccgagggctgg

SEQ ID NO: 1318273 - DNA, 25 bp, Homo sapien
tgcctgacacaccacgcaacacctc

SEQ ID NO: 1318274 - DNA, 25 bp, Homo sapien
tggccacgctcggatcccctcctta

SEQ ID NO: 1318275 - DNA, 25 bp, Homo sapien
gcgcgctgcctggccacgctcggat

SEQ ID NO: 1318276 - DNA, 25 bp, Homo sapien
tgcctggccacgctcggatcccctc

SEQ ID NO: 1318277 - DNA, 25 bp, Homo sapien
gcgctgcctggccacgctcggatcc

SEQ ID NO: 1318278 - DNA, 25 bp, Homo sapien
ggcgagggcgccaacacaggttcct

SEQ ID NO: 1318279 - DNA, 25 bp, Homo sapien
ttgctcccccaccatcgggcttgct

SEQ ID NO: 1318280 - DNA, 25 bp, Homo sapien
ttgctggccgcccatcgccggcagg

SEQ ID NO: 1318281 - DNA, 25 bp, Homo sapien
gcgagggcgccaacacaggttcctc

SEQ ID NO: 1318282 - DNA, 25 bp, Homo sapien
tctccccaagctgcaggaaaatctg

SEQ ID NO: 1318283 - DNA, 25 bp, Homo sapien
ttcctttaagatggatggaagggaa

SEQ ID NO: 1318284 - DNA, 25 bp, Homo sapien
ccggcaggccaggagggaccaaggc

SEQ ID NO: 1318285 - DNA, 25 bp, Homo sapien
tgtgtctctcgtcggggaactcagc

SEQ ID NO: 1318286 - DNA, 25 bp, Homo sapien
aggaaggcccgggtgtaggcaaatg

SEQ ID NO: 1318287 - DNA, 25 bp, Homo sapien
ctgggccgactttctgtcaccagag

SEQ ID NO: 1318288 - DNA, 25 bp, Homo sapien
ccagagagaagtccccggggccagc

SEQ ID NO: 1318289 - DNA, 25 bp, Homo sapien
gccaggcgggcaacggcggagcgct

SEQ ID NO: 1318290 - DNA, 25 bp, Homo sapien
ctcatctgctgggccgactttctgt

SEQ ID NO: 1318291 - DNA, 25 bp, Homo sapien
ctgtccccgggtgactgctccccgg

SEQ ID NO: 1318292 - DNA, 25 bp, Homo sapien
catctgtggcggcaggcccagctca

SEQ ID NO: 1318293 - DNA, 25 bp, Homo sapien
caggactgcacatctgtggcggcag

SEQ ID NO: 1318294 - DNA, 25 bp, Homo sapien
gagcacgctgtctcttcccgacgtg

SEQ ID NO: 1318295 - DNA, 25 bp, Homo sapien
gggtttgccagttaataattctgca

SEQ ID NO: 1318296 - DNA, 25 bp, Homo sapien
gatgggagggttagcctgtgaggac

SEQ ID NO: 1318297 - DNA, 25 bp, Homo sapien
cagctagctggtatcctcttccaaa

SEQ ID NO: 1318298 - DNA, 25 bp, Homo sapien
tctgcatgtttcttgggccccagcc

SEQ ID NO: 1318299 - DNA, 25 bp, Homo sapien
gtaactttctaaggccacacaatgg

SEQ ID NO: 1318300 - DNA, 25 bp, Homo sapien
gtgttgactatttgcctgaagggcc

SEQ ID NO: 1318301 - DNA, 25 bp, Homo sapien
gagactaacagttaccacttgagtg

SEQ ID NO: 1318302 - DNA, 25 bp, Homo sapien
taaactgcaatagaactatgggtgc

SEQ ID NO: 1318303 - DNA, 25 bp, Homo sapien
gtgggcgtttggaaggactcagcct

SEQ ID NO: 1318304 - DNA, 25 bp, Homo sapien
tgtccataaggaggattattctgta

SEQ ID NO: 1318305 - DNA, 25 bp, Homo sapien
agggtgggcgtttggaaggactcag

SEQ ID NO: 1318306 - DNA, 25 bp, Homo sapien
gggtgggcgtttggaaggactcagc

SEQ ID NO: 1318307 - DNA, 25 bp, Homo sapien
ttggataagcttccgccttcagcag

SEQ ID NO: 1318308 - DNA, 25 bp, Homo sapien
taggcaatgggccttatgctgacat

SEQ ID NO: 1318309 - DNA, 25 bp, Homo sapien
tgtagtaagctcttgacgtttcaca

SEQ ID NO: 1318310 - DNA, 25 bp, Homo sapien
gctcttgacgtttcacagctgctgc

SEQ ID NO: 1318311 - DNA, 25 bp, Homo sapien
atgccaaagtaccagtgtgtgacag

SEQ ID NO: 1318312 - DNA, 25 bp, Homo sapien
aatgccaaagtaccagtgtgtgaca

SEQ ID NO: 1318313 - DNA, 25 bp, Homo sapien
gccaaagtaccagtgtgtgacagaa

SEQ ID NO: 1318314 - DNA, 25 bp, Homo sapien
tgccaaagtaccagtgtgtgacaga

SEQ ID NO: 1318315 - DNA, 25 bp, Homo sapien
tgggccacaggcttagggaaatgaa

SEQ ID NO: 1318316 - DNA, 25 bp, Homo sapien
cacttcctgagaaagcctcgtgtgt

SEQ ID NO: 1318317 - DNA, 25 bp, Homo sapien
caaagtcgagaaagtgggcaccatt

SEQ ID NO: 1318318 - DNA, 25 bp, Homo sapien
gaggtcaactaaaccctgatggcag

SEQ ID NO: 1318319 - DNA, 25 bp, Homo sapien
agcttcttcaccttgcgccttagag

SEQ ID NO: 1318320 - DNA, 25 bp, Homo sapien
tcaccttgcgccttagagggatagc

SEQ ID NO: 1318321 - DNA, 25 bp, Homo sapien
tagagggatagccagaatgaaaccc

SEQ ID NO: 1318322 - DNA, 25 bp, Homo sapien
cgccttagagggatagccagaatga

SEQ ID NO: 1318323 - DNA, 25 bp, Homo sapien
tgatcttgtgtccatcagctcacca

SEQ ID NO: 1318324 - DNA, 25 bp, Homo sapien
gaggttgctacagtttctggcagca

SEQ ID NO: 1318325 - DNA, 25 bp, Homo sapien
ccattgacgtgaggcagtatcagat

SEQ ID NO: 1318326 - DNA, 25 bp, Homo sapien
aacagtgtgcctctaagaacacaga

SEQ ID NO: 1318327 - DNA, 25 bp, Homo sapien
acccattatttcatatactgtacta

SEQ ID NO: 1318328 - DNA, 25 bp, Homo sapien
ttatttcatatactgtactaagtgc

SEQ ID NO: 1318329 - DNA, 25 bp, Homo sapien
cattatttcatatactgtactaagt

SEQ ID NO: 1318330 - DNA, 25 bp, Homo sapien
tattgaatacccattatttcatata

SEQ ID NO: 1318331 - DNA, 25 bp, Homo sapien
ctcagaaaaattaggtcacttgtcc

SEQ ID NO: 1318332 - DNA, 25 bp, Homo sapien
tcagaaaaattaggtcacttgtcca

SEQ ID NO: 1318333 - DNA, 25 bp, Homo sapien
tgtacccatctaggtgagccttgag

SEQ ID NO: 1318334 - DNA, 25 bp, Homo sapien
ttttattgtacccatctaggtgagc

SEQ ID NO: 1318335 - DNA, 25 bp, Homo sapien
gcccaactctgcaaagagcaccagg

SEQ ID NO: 1318336 - DNA, 25 bp, Homo sapien
tgcatggaagccgacttgatgttgg

SEQ ID NO: 1318337 - DNA, 25 bp, Homo sapien
gaagccgacttgatgttggttttta

SEQ ID NO: 1318338 - DNA, 25 bp, Homo sapien
cgctggtagggatgcatggaagccg

SEQ ID NO: 1318339 - DNA, 25 bp, Homo sapien
cgacttgatgttggtttttattcca

SEQ ID NO: 1318340 - DNA, 25 bp, Homo sapien
ctgaaaggaacattaaaaaagtcat

SEQ ID NO: 1318341 - DNA, 25 bp, Homo sapien
gctgtctccctgaaggtgtccagga

SEQ ID NO: 1318342 - DNA, 25 bp, Homo sapien
tcagaaatgtggtacctcaggttcc

SEQ ID NO: 1318343 - DNA, 25 bp, Homo sapien
ccctgtttgacagaggtcagaagta

SEQ ID NO: 1318344 - DNA, 25 bp, Homo sapien
taagcaaggtaagactttcatgaca

SEQ ID NO: 1318345 - DNA, 25 bp, Homo sapien
aactggcctgcgtgtcaattcctga

SEQ ID NO: 1318346 - DNA, 25 bp, Homo sapien
gaatacatgtaggactggaaaactg

SEQ ID NO: 1318347 - DNA, 25 bp, Homo sapien
gctggaggcccagataatctagctt

SEQ ID NO: 1318348 - DNA, 25 bp, Homo sapien
aattcctgatgcacctaccaaatgg

SEQ ID NO: 1318349 - DNA, 25 bp, Homo sapien
ggttgacctgcctgagccatttgta

SEQ ID NO: 1318350 - DNA, 25 bp, Homo sapien
gaggttcctgcaaggatcgtcccag

SEQ ID NO: 1318351 - DNA, 25 bp, Homo sapien
tttgtaccccactgagcattggctg

SEQ ID NO: 1318352 - DNA, 25 bp, Homo sapien
taaaggtctgcttgttcggccggag

SEQ ID NO: 1318353 - DNA, 25 bp, Homo sapien
taatggggatcctgaagtatgcttc

SEQ ID NO: 1318354 - DNA, 25 bp, Homo sapien
aagtaatggggatcctgaagtatgc

SEQ ID NO: 1318355 - DNA, 25 bp, Homo sapien
agtatgcttctgatgcaggactgaa

SEQ ID NO: 1318356 - DNA, 25 bp, Homo sapien
tcctgaagtatgcttctgatgcagg

SEQ ID NO: 1318357 - DNA, 25 bp, Homo sapien
ggatacaaaccccaaagcagttcac

SEQ ID NO: 1318358 - DNA, 25 bp, Homo sapien
tcagtgctggccttaaatacaaaag

SEQ ID NO: 1318359 - DNA, 25 bp, Homo sapien
tcacccttgtgtcctaacttcacta

SEQ ID NO: 1318360 - DNA, 25 bp, Homo sapien
gaagaccagtatgagtgccagggtt

SEQ ID NO: 1318361 - DNA, 25 bp, Homo sapien
tctgtttagccaccagtcccatcat

SEQ ID NO: 1318362 - DNA, 25 bp, Homo sapien
tgtttagccaccagtcccatcatac

SEQ ID NO: 1318363 - DNA, 25 bp, Homo sapien
tctctgtttagccaccagtcccatc

SEQ ID NO: 1318364 - DNA, 25 bp, Homo sapien
ttctctgtttagccaccagtcccat

SEQ ID NO: 1318365 - DNA, 25 bp, Homo sapien
tgattttctccagaaggtttgaaca

SEQ ID NO: 1318366 - DNA, 25 bp, Homo sapien
tttctccagaaggtttgaacacatt

SEQ ID NO: 1318367 - DNA, 25 bp, Homo sapien
tctgattctcgctcctctttgctga

SEQ ID NO: 1318368 - DNA, 25 bp, Homo sapien
cattttattcaagctctggatctgc

SEQ ID NO: 1318369 - DNA, 25 bp, Homo sapien
agcatctgtcgtcagttgcttctcc

SEQ ID NO: 1318370 - DNA, 25 bp, Homo sapien
cgggcagcatctgtcgtcagttgct

SEQ ID NO: 1318371 - DNA, 25 bp, Homo sapien
gctgcatctgcaccaatgcgggcag

SEQ ID NO: 1318372 - DNA, 25 bp, Homo sapien
ttggttctcagatggtcagggacta

SEQ ID NO: 1318373 - DNA, 25 bp, Homo sapien
gaatgatgacctggttacggaacag

SEQ ID NO: 1318374 - DNA, 25 bp, Homo sapien
gacaacaccagaggaatgatgacct

SEQ ID NO: 1318375 - DNA, 25 bp, Homo sapien
cttcatctcggtctggagacaacac

SEQ ID NO: 1318376 - DNA, 25 bp, Homo sapien
cggaacagcggtgttttttcatgct

SEQ ID NO: 1318377 - DNA, 25 bp, Homo sapien
tgactagcctaagtgggaacagact

SEQ ID NO: 1318378 - DNA, 25 bp, Homo sapien
tgctaaatgttaggaaacccagctc

SEQ ID NO: 1318379 - DNA, 25 bp, Homo sapien
gcaagagatccagcacgaatagagc

SEQ ID NO: 1318380 - DNA, 25 bp, Homo sapien
gactaacagggatgacagggctatg

SEQ ID NO: 1318381 - DNA, 25 bp, Homo sapien
gactcagcagtgcatctaatgatgc

SEQ ID NO: 1318382 - DNA, 25 bp, Homo sapien
aggtcagccggccatactcgttctc

SEQ ID NO: 1318383 - DNA, 25 bp, Homo sapien
ccatactcgttctccaacttgcaaa

SEQ ID NO: 1318384 - DNA, 25 bp, Homo sapien
gcatctaatgatgcctcaagctgct

SEQ ID NO: 1318385 - DNA, 25 bp, Homo sapien
cgagtatgacacatagaaaggaggg

SEQ ID NO: 1318386 - DNA, 25 bp, Homo sapien
taaacgagtatgacacatagaaagg

SEQ ID NO: 1318387 - DNA, 25 bp, Homo sapien
ttggtcacccagataaacgagtatg

SEQ ID NO: 1318388 - DNA, 25 bp, Homo sapien
cacccagataaacgagtatgacaca

SEQ ID NO: 1318389 - DNA, 25 bp, Homo sapien
tagacagcatcaaccctgagacctt

SEQ ID NO: 1318390 - DNA, 25 bp, Homo sapien
aagtccttccaccaactgattcctt

SEQ ID NO: 1318391 - DNA, 25 bp, Homo sapien
tatctttggtatttgggttatagac

SEQ ID NO: 1318392 - DNA, 25 bp, Homo sapien
caacctgtttgcctgaccccaagtc

SEQ ID NO: 1318393 - DNA, 25 bp, Homo sapien
ggcggctgccacgatttcacttccg

SEQ ID NO: 1318394 - DNA, 25 bp, Homo sapien
cacgatttcacttccggttttccag

SEQ ID NO: 1318395 - DNA, 25 bp, Homo sapien
gctgccacgatttcacttccggttt

SEQ ID NO: 1318396 - DNA, 25 bp, Homo sapien
cacttccggttttccagtcagcaaa

SEQ ID NO: 1318397 - DNA, 25 bp, Homo sapien
agaaggcttcgtccaccaatcagaa

SEQ ID NO: 1318398 - DNA, 25 bp, Homo sapien
gagaaggcttcgtccaccaatcaga

SEQ ID NO: 1318399 - DNA, 25 bp, Homo sapien
ggacaggaactcttcgtcaacaaaa

SEQ ID NO: 1318400 - DNA, 25 bp, Homo sapien
gacaggaactcttcgtcaacaaaaa

SEQ ID NO: 1318401 - DNA, 25 bp, Homo sapien
gaagaaagggatacttcgctgatcc

SEQ ID NO: 1318402 - DNA, 25 bp, Homo sapien
ggccagcccagaaggatctgttttt

SEQ ID NO: 1318403 - DNA, 25 bp, Homo sapien
aagggactgcctacaagatgatgga

SEQ ID NO: 1318404 - DNA, 25 bp, Homo sapien
tgctggtgaggcttagacacacgaa

SEQ ID NO: 1318405 - DNA, 25 bp, Homo sapien
ctgcacagttctggctcctacctgg

SEQ ID NO: 1318406 - DNA, 25 bp, Homo sapien
tctccccaacccgtcctgcacagtt

SEQ ID NO: 1318407 - DNA, 25 bp, Homo sapien
tgttttattagaaccccagagttga

SEQ ID NO: 1318408 - DNA, 25 bp, Homo sapien
tgagggacttcgacaccaggatgac

SEQ ID NO: 1318409 - DNA, 25 bp, Homo sapien
cggtcagcagatcccctaccttgaa

SEQ ID NO: 1318410 - DNA, 25 bp, Homo sapien
tgagcggcacgttctgcggtcagca

SEQ ID NO: 1318411 - DNA, 25 bp, Homo sapien
tgtgtgtctcttgctacaaccacca

SEQ ID NO: 1318412 - DNA, 25 bp, Homo sapien
aggctacagttcttcgtggtgctca

SEQ ID NO: 1318413 - DNA, 25 bp, Homo sapien
cagctggtaaggaactgtgggctcc

SEQ ID NO: 1318414 - DNA, 25 bp, Homo sapien
gggcttattctagcgcctggaccgg

SEQ ID NO: 1318415 - DNA, 25 bp, Homo sapien
cacaggaatctgaggtgactggcac

SEQ ID NO: 1318416 - DNA, 25 bp, Homo sapien
gaggaactcctagaagcagtccatg

SEQ ID NO: 1318417 - DNA, 25 bp, Homo sapien
ttgtggccaccgtcaagtccctttg

SEQ ID NO: 1318418 - DNA, 25 bp, Homo sapien
tctgcctttgaagcacttgtggcca

SEQ ID NO: 1318419 - DNA, 25 bp, Homo sapien
tagagtctcgggagttcacacaggg

SEQ ID NO: 1318420 - DNA, 25 bp, Homo sapien
ccatcgagatgacacctgggttcca

SEQ ID NO: 1318421 - DNA, 25 bp, Homo sapien
gcactggcttctcaatgggagggaa

SEQ ID NO: 1318422 - DNA, 25 bp, Homo sapien
tcctttaatgaggtgggttcagaag

SEQ ID NO: 1318423 - DNA, 25 bp, Homo sapien
agagaaactgaagtgttagacacta

SEQ ID NO: 1318424 - DNA, 25 bp, Homo sapien
ccaccccattacagagacatatgac

SEQ ID NO: 1318425 - DNA, 25 bp, Homo sapien
catctttaatgcagaggaggagatg

SEQ ID NO: 1318426 - DNA, 25 bp, Homo sapien
ctggaggcacgtgggtggtgtgcgg

SEQ ID NO: 1318427 - DNA, 25 bp, Homo sapien
aggcacgtgggtggtgtgcgggccc

SEQ ID NO: 1318428 - DNA, 25 bp, Homo sapien
ggaggcacgtgggtggtgtgcgggc

SEQ ID NO: 1318429 - DNA, 25 bp, Homo sapien
gaggcacgtgggtggtgtgcgggcc

SEQ ID NO: 1318430 - DNA, 25 bp, Homo sapien
actggccagcctctgggtggccccg

SEQ ID NO: 1318431 - DNA, 25 bp, Homo sapien
tcactggccagcctctgggtggccc

SEQ ID NO: 1318432 - DNA, 25 bp, Homo sapien
ctggccagcctctgggtggccccgc

SEQ ID NO: 1318433 - DNA, 25 bp, Homo sapien
cactggccagcctctgggtggcccc

SEQ ID NO: 1318434 - DNA, 25 bp, Homo sapien
tatgaacgtagccaactcaagccct

SEQ ID NO: 1318435 - DNA, 25 bp, Homo sapien
ctatcccagtatgaacgtagccaac

SEQ ID NO: 1318436 - DNA, 25 bp, Homo sapien
tagccaactcaagccctctactgtg

SEQ ID NO: 1318437 - DNA, 25 bp, Homo sapien
cccagtatgaacgtagccaactcaa

SEQ ID NO: 1318438 - DNA, 25 bp, Homo sapien
gcccctgtccgggtccctccagagc

SEQ ID NO: 1318439 - DNA, 25 bp, Homo sapien
ctcggcacctcagcccacaaggaga

SEQ ID NO: 1318440 - DNA, 25 bp, Homo sapien
ggcctcggcacctcagcccacaagg

SEQ ID NO: 1318441 - DNA, 25 bp, Homo sapien
gcacctcagcccacaaggagaaaac

SEQ ID NO: 1318442 - DNA, 25 bp, Homo sapien
gataggggaaattcagctctccggg

SEQ ID NO: 1318443 - DNA, 25 bp, Homo sapien
gggaaattcagctctccggggctgc

SEQ ID NO: 1318444 - DNA, 25 bp, Homo sapien
taggggaaattcagctctccggggc

SEQ ID NO: 1318445 - DNA, 25 bp, Homo sapien
cagataggggaaattcagctctccg

SEQ ID NO: 1318446 - DNA, 25 bp, Homo sapien
ccatgatctgccagtggaatatgtc

SEQ ID NO: 1318447 - DNA, 25 bp, Homo sapien
tgtaattggaggttgggtcttccta

SEQ ID NO: 1318448 - DNA, 25 bp, Homo sapien
catttgtaattggaggttgggtctt

SEQ ID NO: 1318449 - DNA, 25 bp, Homo sapien
agggaggggaccgtgagcctcaaga

SEQ ID NO: 1318450 - DNA, 25 bp, Homo sapien
tcaagagcacaggaatcaaaaggga

SEQ ID NO: 1318451 - DNA, 25 bp, Homo sapien
aggggaccgtgagcctcaagagcac

SEQ ID NO: 1318452 - DNA, 25 bp, Homo sapien
caagagcacaggaatcaaaagggac

SEQ ID NO: 1318453 - DNA, 25 bp, Homo sapien
gggctccagcagtcccacgaggtcc

SEQ ID NO: 1318454 - DNA, 25 bp, Homo sapien
aggaagtactgggggtcagtgatgc

SEQ ID NO: 1318455 - DNA, 25 bp, Homo sapien
ggaagtactgggggtcagtgatgcg

SEQ ID NO: 1318456 - DNA, 25 bp, Homo sapien
tgaatagagctccttcccaagtttg

SEQ ID NO: 1318457 - DNA, 25 bp, Homo sapien
cagcatgtcgggtgctgtgaataga

SEQ ID NO: 1318458 - DNA, 25 bp, Homo sapien
cccacagagacatgtaagtacgtgt

SEQ ID NO: 1318459 - DNA, 25 bp, Homo sapien
tctgacctaggctggcagcctcacg

SEQ ID NO: 1318460 - DNA, 25 bp, Homo sapien
cttgactgctattcgatcagctccc

SEQ ID NO: 1318461 - DNA, 25 bp, Homo sapien
cagccttgactgctattcgatcagc

SEQ ID NO: 1318462 - DNA, 25 bp, Homo sapien
tggggtactcggccagccatcaggt

SEQ ID NO: 1318463 - DNA, 25 bp, Homo sapien
tctccagaaaaacggcctccatctc

SEQ ID NO: 1318464 - DNA, 25 bp, Homo sapien
ttgaccagtagtgatcccctcttgc

SEQ ID NO: 1318465 - DNA, 25 bp, Homo sapien
attccctgactgtgccagccctcgt

SEQ ID NO: 1318466 - DNA, 25 bp, Homo sapien
ttctccgcaacctgtaacctgctaa

SEQ ID NO: 1318467 - DNA, 25 bp, Homo sapien
tctcctcgcatctacttagcctttt

SEQ ID NO: 1318468 - DNA, 25 bp, Homo sapien
agcacccttgcaaggaacactcaac

SEQ ID NO: 1318469 - DNA, 25 bp, Homo sapien
cttgcaaggaacactcaacttcctg

SEQ ID NO: 1318470 - DNA, 25 bp, Homo sapien
acccttgcaaggaacactcaacttc

SEQ ID NO: 1318471 - DNA, 25 bp, Homo sapien
aaggaacactcaacttcctgcccat

SEQ ID NO: 1318472 - DNA, 25 bp, Homo sapien
gagataaaccagtgggctcagactt

SEQ ID NO: 1318473 - DNA, 25 bp, Homo sapien
ggaataggcctgtcctcaaatgcat

SEQ ID NO: 1318474 - DNA, 25 bp, Homo sapien
gagcgtctcagatctggcgtcctcg

SEQ ID NO: 1318475 - DNA, 25 bp, Homo sapien
ccaggaccgcagaggcagagataaa

SEQ ID NO: 1318476 - DNA, 25 bp, Homo sapien
gggacagcccagggctttggcatac

SEQ ID NO: 1318477 - DNA, 25 bp, Homo sapien
tgggacagcccagggctttggcata

SEQ ID NO: 1318478 - DNA, 25 bp, Homo sapien
ctgggacagcccagggctttggcat

SEQ ID NO: 1318479 - DNA, 25 bp, Homo sapien
tgctccagtccctctcggaaggccg

SEQ ID NO: 1318480 - DNA, 25 bp, Homo sapien
gtccctctcggaaggccgcctgtct

SEQ ID NO: 1318481 - DNA, 25 bp, Homo sapien
tccagtccctctcggaaggccgcct

SEQ ID NO: 1318482 - DNA, 25 bp, Homo sapien
ctgctccagtccctctcggaaggcc

SEQ ID NO: 1318483 - DNA, 25 bp, Homo sapien
agaacgggcctcagcccccggctcg

SEQ ID NO: 1318484 - DNA, 25 bp, Homo sapien
cccggctcggacactcccctgcccg

SEQ ID NO: 1318485 - DNA, 25 bp, Homo sapien
cggctcggacactcccctgcccgcg

SEQ ID NO: 1318486 - DNA, 25 bp, Homo sapien
cagcccccggctcggacactcccct

SEQ ID NO: 1318487 - DNA, 25 bp, Homo sapien
gcactgttcgtggttagaaaagcga

SEQ ID NO: 1318488 - DNA, 25 bp, Homo sapien
gccctgcgaacgaacgagcactgtt

SEQ ID NO: 1318489 - DNA, 25 bp, Homo sapien
ggcgtgttgatcagtacaagccgca

SEQ ID NO: 1318490 - DNA, 25 bp, Homo sapien
aatagccaggacagattggcggaga

SEQ ID NO: 1318491 - DNA, 25 bp, Homo sapien
cccggttgcaatgatgggacgcgca

SEQ ID NO: 1318492 - DNA, 25 bp, Homo sapien
actttaatactgagtctttcctctg

SEQ ID NO: 1318493 - DNA, 25 bp, Homo sapien
taaaaatgctatctgttcgttaagc

SEQ ID NO: 1318494 - DNA, 25 bp, Homo sapien
gctgtatgaccaaataaagaagcac

SEQ ID NO: 1318495 - DNA, 25 bp, Homo sapien
ggaagtccgagccagagcagtcaga

SEQ ID NO: 1318496 - DNA, 25 bp, Homo sapien
tgattattcagcaaagtttctggat

SEQ ID NO: 1318497 - DNA, 25 bp, Homo sapien
gaagtcagactgtccctgtttgcta

SEQ ID NO: 1318498 - DNA, 25 bp, Homo sapien
cacatcggtaaagaggaagtcagac

SEQ ID NO: 1318499 - DNA, 25 bp, Homo sapien
tctattatagcctttccagtgggtg

SEQ ID NO: 1318500 - DNA, 25 bp, Homo sapien
tattggccatttatacgtgatcttt

SEQ ID NO: 1318501 - DNA, 25 bp, Homo sapien
catttatacgtgatctttggtgaaa

SEQ ID NO: 1318502 - DNA, 25 bp, Homo sapien
atcttttctattatagcctttccag

SEQ ID NO: 1318503 - DNA, 25 bp, Homo sapien
tctgcaggcagatgcgatggagccc

SEQ ID NO: 1318504 - DNA, 25 bp, Homo sapien
ccatctacacacttggtgcccggga

SEQ ID NO: 1318505 - DNA, 25 bp, Homo sapien
ttccatcttgagagacctgccaggc

SEQ ID NO: 1318506 - DNA, 25 bp, Homo sapien
tgacgatggctgtgagtctcccatg

SEQ ID NO: 1318507 - DNA, 25 bp, Homo sapien
tctgggcagcgctatctagataggt

SEQ ID NO: 1318508 - DNA, 25 bp, Homo sapien
agaacattgccttcctcgtgcagag

SEQ ID NO: 1318509 - DNA, 25 bp, Homo sapien
cgcgaatccgtatctgcagaatggg

SEQ ID NO: 1318510 - DNA, 25 bp, Homo sapien
gctaagtcaagatcaacattccagg

SEQ ID NO: 1318511 - DNA, 25 bp, Homo sapien
aaagctgaggaccagtcttggaccc

SEQ ID NO: 1318512 - DNA, 25 bp, Homo sapien
tacggctactgctgggttaataaca

SEQ ID NO: 1318513 - DNA, 25 bp, Homo sapien
cagagacttgagacgaccacatcct

SEQ ID NO: 1318514 - DNA, 25 bp, Homo sapien
ttaataacagcaggcgggaatagca

SEQ ID NO: 1318515 - DNA, 25 bp, Homo sapien
cagaatgctattggaaggtagctaa

SEQ ID NO: 1318516 - DNA, 25 bp, Homo sapien
aatgtagagtcttgctccctttccg

SEQ ID NO: 1318517 - DNA, 25 bp, Homo sapien
cagtgttgccttatgcagatgcttg

SEQ ID NO: 1318518 - DNA, 25 bp, Homo sapien
cctctaggtcaattatggattcaac

SEQ ID NO: 1318519 - DNA, 25 bp, Homo sapien
ggaggtatagataggcatgtgctac

SEQ ID NO: 1318520 - DNA, 25 bp, Homo sapien
actggaggtatagataggcatgtgc

SEQ ID NO: 1318521 - DNA, 25 bp, Homo sapien
actgcatccggctgacaccttaact

SEQ ID NO: 1318522 - DNA, 25 bp, Homo sapien
gtaactggaggtatagataggcatg

SEQ ID NO: 1318523 - DNA, 25 bp, Homo sapien
tttcccttatggttaccatgccggc

SEQ ID NO: 1318524 - DNA, 25 bp, Homo sapien
gtgccagaggagagtcagatcccct

SEQ ID NO: 1318525 - DNA, 25 bp, Homo sapien
taagttgtggtggagctcagaattc

SEQ ID NO: 1318526 - DNA, 25 bp, Homo sapien
tatgacttaccctttgttactcagc

SEQ ID NO: 1318527 - DNA, 25 bp, Homo sapien
taatggattttgctaaccctgcatc

SEQ ID NO: 1318528 - DNA, 25 bp, Homo sapien
tgtcacagttgcaaagtggccctct

SEQ ID NO: 1318529 - DNA, 25 bp, Homo sapien
tagttgcacatggagtctgtaggcc

SEQ ID NO: 1318530 - DNA, 25 bp, Homo sapien
cctgggcaggcctttgcacacagta

SEQ ID NO: 1318531 - DNA, 25 bp, Homo sapien
gggacgccgtcagcctttaagcaag

SEQ ID NO: 1318532 - DNA, 25 bp, Homo sapien
taactaagatatgtccgtgccctca

SEQ ID NO: 1318533 - DNA, 25 bp, Homo sapien
tagacttgacaggacaggacatcag

SEQ ID NO: 1318534 - DNA, 25 bp, Homo sapien
ttcttcaccaggaggaaagcagctc

SEQ ID NO: 1318535 - DNA, 25 bp, Homo sapien
tcagatcggtaagagagccagcttt

SEQ ID NO: 1318536 - DNA, 25 bp, Homo sapien
gagctgtagccatagtcagatcggt

SEQ ID NO: 1318537 - DNA, 25 bp, Homo sapien
ggtaacttcaattagcagctccggg

SEQ ID NO: 1318538 - DNA, 25 bp, Homo sapien
gaagattgaaatcccagttgcctct

SEQ ID NO: 1318539 - DNA, 25 bp, Homo sapien
ggaggatggcaccagcatactcgtt

SEQ ID NO: 1318540 - DNA, 25 bp, Homo sapien
gaggaccaagccattgattccagaa

SEQ ID NO: 1318541 - DNA, 25 bp, Homo sapien
ttcacttcgactggctgcagcacgg

SEQ ID NO: 1318542 - DNA, 25 bp, Homo sapien
gattccagaaatgtgcttcacttcg

SEQ ID NO: 1318543 - DNA, 25 bp, Homo sapien
ctggagtacgggagtacggtggcat

SEQ ID NO: 1318544 - DNA, 25 bp, Homo sapien
gccttaatgtcacttcttgattcaa

SEQ ID NO: 1318545 - DNA, 25 bp, Homo sapien
caggctggagtacgggagtacggtg

SEQ ID NO: 1318546 - DNA, 25 bp, Homo sapien
gctggccttaatgtcacttcttgat

SEQ ID NO: 1318547 - DNA, 25 bp, Homo sapien
tcagccttgcgtagatatgtaattg

SEQ ID NO: 1318548 - DNA, 25 bp, Homo sapien
ctgtttaggttcaagtataggaaga

SEQ ID NO: 1318549 - DNA, 25 bp, Homo sapien
tattattctctgatatccaccaaaa

SEQ ID NO: 1318550 - DNA, 25 bp, Homo sapien
ccaccaaaactcaatggaagtaaca

SEQ ID NO: 1318551 - DNA, 25 bp, Homo sapien
tatgctgggaatacgatgaggactt

SEQ ID NO: 1318552 - DNA, 25 bp, Homo sapien
tgccagcagttgtacctatcctagg

SEQ ID NO: 1318553 - DNA, 25 bp, Homo sapien
gtgtctcaggaacccctcagaggtt

SEQ ID NO: 1318554 - DNA, 25 bp, Homo sapien
actagtagagcttagggtcagtgcc

SEQ ID NO: 1318555 - DNA, 25 bp, Homo sapien
ccaggtcccatggtaggtgactctt

SEQ ID NO: 1318556 - DNA, 25 bp, Homo sapien
acagttactttgtcctggttcactc

SEQ ID NO: 1318557 - DNA, 25 bp, Homo sapien
tggttcactcttccctgagtagagg

SEQ ID NO: 1318558 - DNA, 25 bp, Homo sapien
gctgccttgctctctaaaacagtta

SEQ ID NO: 1318559 - DNA, 25 bp, Homo sapien
gactttgacttagcaaggtctttaa

SEQ ID NO: 1318560 - DNA, 25 bp, Homo sapien
tgtgcaggtggacgttcctttcacc

SEQ ID NO: 1318561 - DNA, 25 bp, Homo sapien
tgtgtgcaggtggacgttcctttca

SEQ ID NO: 1318562 - DNA, 25 bp, Homo sapien
ttgtgtgcaggtggacgttcctttc

SEQ ID NO: 1318563 - DNA, 25 bp, Homo sapien
gcaggtggacgttcctttcaccctc

SEQ ID NO: 1318564 - DNA, 25 bp, Homo sapien
caagtgagatggacagacggccaag

SEQ ID NO: 1318565 - DNA, 25 bp, Homo sapien
caaagttctacctttctagggagtg

SEQ ID NO: 1318566 - DNA, 25 bp, Homo sapien
gaggcgagtctttgctcttaggaga

SEQ ID NO: 1318567 - DNA, 25 bp, Homo sapien
agagtcagggatatcctagccaaaa

SEQ ID NO: 1318568 - DNA, 25 bp, Homo sapien
ggattctcagccatccaggcaagag

SEQ ID NO: 1318569 - DNA, 25 bp, Homo sapien
cagcagacatggaacgctgaagtct

SEQ ID NO: 1318570 - DNA, 25 bp, Homo sapien
catggagtaggtgcttccagggtcc

SEQ ID NO: 1318571 - DNA, 25 bp, Homo sapien
caggcaagagcactctgggttccac

SEQ ID NO: 1318572 - DNA, 25 bp, Homo sapien
ataactatcacctgcaccgactagg

SEQ ID NO: 1318573 - DNA, 25 bp, Homo sapien
tgcattccgctgtagtgaaaggacg

SEQ ID NO: 1318574 - DNA, 25 bp, Homo sapien
cctggcctaggacttagcttcataa

SEQ ID NO: 1318575 - DNA, 25 bp, Homo sapien
ggcagcagtcgctgatctcccagct

SEQ ID NO: 1318576 - DNA, 25 bp, Homo sapien
ggagctgatgccacctctttgtctt

SEQ ID NO: 1318577 - DNA, 25 bp, Homo sapien
ctaaggagctgatgccacctctttg

SEQ ID NO: 1318578 - DNA, 25 bp, Homo sapien
aaggagctgatgccacctctttgtc

SEQ ID NO: 1318579 - DNA, 25 bp, Homo sapien
agctgatgccacctctttgtcttcc

SEQ ID NO: 1318580 - DNA, 25 bp, Homo sapien
ccagtgggatcctcagattgctctc

SEQ ID NO: 1318581 - DNA, 25 bp, Homo sapien
gctctccgagctgtctagttggtga

SEQ ID NO: 1318582 - DNA, 25 bp, Homo sapien
cggctggcccttaaacagccaggca

SEQ ID NO: 1318583 - DNA, 25 bp, Homo sapien
ccctgaggtcaaagtggacaaggat

SEQ ID NO: 1318584 - DNA, 25 bp, Homo sapien
tcccagaagcctttttgtagggcaa

SEQ ID NO: 1318585 - DNA, 25 bp, Homo sapien
tccaaggttgcagtttaaagaccac

SEQ ID NO: 1318586 - DNA, 25 bp, Homo sapien
tgggagggctgcaaagtgtacgtgg

SEQ ID NO: 1318587 - DNA, 25 bp, Homo sapien
cgccccaggcggataacaccagggc

SEQ ID NO: 1318588 - DNA, 25 bp, Homo sapien
gagatgagatgtccctcggcgtgaa

SEQ ID NO: 1318589 - DNA, 25 bp, Homo sapien
gtgaagtggccgtgactaccctagc

SEQ ID NO: 1318590 - DNA, 25 bp, Homo sapien
ggtccgaagctttcggcctcagtga

SEQ ID NO: 1318591 - DNA, 25 bp, Homo sapien
gagggttcctctagacagctcgatg

SEQ ID NO: 1318592 - DNA, 25 bp, Homo sapien
tcgccgcagcactgctctcgtggta

SEQ ID NO: 1318593 - DNA, 25 bp, Homo sapien
cgcagcactgctctcgtggtaggcg

SEQ ID NO: 1318594 - DNA, 25 bp, Homo sapien
gctcctgcgtctattgggctgctcg

SEQ ID NO: 1318595 - DNA, 25 bp, Homo sapien
gcgggacggcaaatccgcggctcct

SEQ ID NO: 1318596 - DNA, 25 bp, Homo sapien
gcagagcacggacaccgtcattcgg

SEQ ID NO: 1318597 - DNA, 25 bp, Homo sapien
cttggcgcagagcacggacaccgtc

SEQ ID NO: 1318598 - DNA, 25 bp, Homo sapien
gcgcagagcacggacaccgtcattc

SEQ ID NO: 1318599 - DNA, 25 bp, Homo sapien
agagcacggacaccgtcattcgggc

SEQ ID NO: 1318600 - DNA, 25 bp, Homo sapien
ggtagcggttgtcattgcttactgc

SEQ ID NO: 1318601 - DNA, 25 bp, Homo sapien
cctgagcgggaatcggcagcgtttg

SEQ ID NO: 1318602 - DNA, 25 bp, Homo sapien
tccagggagcgcctgagcgggaatc

SEQ ID NO: 1318603 - DNA, 25 bp, Homo sapien
cagcgtttgggtagcggttgtcatt

SEQ ID NO: 1318604 - DNA, 25 bp, Homo sapien
tgatcggcaaagtacgcctctcttg

SEQ ID NO: 1318605 - DNA, 25 bp, Homo sapien
ggcaaagtacgcctctcttgcttcc

SEQ ID NO: 1318606 - DNA, 25 bp, Homo sapien
gggtcagtttgatcggcaaagtacg

SEQ ID NO: 1318607 - DNA, 25 bp, Homo sapien
ccccgttgtgtcctcggtgcttttg

SEQ ID NO: 1318608 - DNA, 25 bp, Homo sapien
caaaggaagctgtagctaactatca

SEQ ID NO: 1318609 - DNA, 25 bp, Homo sapien
tgtagctaactatcaggaatacagt

SEQ ID NO: 1318610 - DNA, 25 bp, Homo sapien
caggaatacagtaacactttacttg

SEQ ID NO: 1318611 - DNA, 25 bp, Homo sapien
agtaacactttacttgtcattgtca

SEQ ID NO: 1318612 - DNA, 25 bp, Homo sapien
tacagcattcttagtaacaaataca

SEQ ID NO: 1318613 - DNA, 25 bp, Homo sapien
ctggccagtgacaaagtatttttca

SEQ ID NO: 1318614 - DNA, 25 bp, Homo sapien
ttttcagctttactcttctgttctc

SEQ ID NO: 1318615 - DNA, 25 bp, Homo sapien
ttcagctttactcttctgttctctg

SEQ ID NO: 1318616 - DNA, 25 bp, Homo sapien
acaaagtatttttcagctttactct

SEQ ID NO: 1318617 - DNA, 25 bp, Homo sapien
tcactgactactcatcttgcaggag

SEQ ID NO: 1318618 - DNA, 25 bp, Homo sapien
tttgatttctactcaggaagtcact

SEQ ID NO: 1318619 - DNA, 25 bp, Homo sapien
ttgatttctactcaggaagtcactg

SEQ ID NO: 1318620 - DNA, 25 bp, Homo sapien
cactgactactcatcttgcaggagt

SEQ ID NO: 1318621 - DNA, 25 bp, Homo sapien
ttgctgtatcatctcatggcaggac

SEQ ID NO: 1318622 - DNA, 25 bp, Homo sapien
agatcaaggggctggcatgtggtga

SEQ ID NO: 1318623 - DNA, 25 bp, Homo sapien
gggcctccttgctgtatcatctcat

SEQ ID NO: 1318624 - DNA, 25 bp, Homo sapien
ctccttgctgtatcatctcatggca

SEQ ID NO: 1318625 - DNA, 25 bp, Homo sapien
tggagtcagccattcttccaaggag

SEQ ID NO: 1318626 - DNA, 25 bp, Homo sapien
ccattcttccaaggagacctgcttc

SEQ ID NO: 1318627 - DNA, 25 bp, Homo sapien
gccattcttccaaggagacctgctt

SEQ ID NO: 1318628 - DNA, 25 bp, Homo sapien
gcagctggtacaggatgaatagaaa

SEQ ID NO: 1318629 - DNA, 25 bp, Homo sapien
gctggtacaggatgaatagaaaaga

SEQ ID NO: 1318630 - DNA, 25 bp, Homo sapien
cagctggtacaggatgaatagaaaa

SEQ ID NO: 1318631 - DNA, 25 bp, Homo sapien
ggtacaggatgaatagaaaagagat

SEQ ID NO: 1318632 - DNA, 25 bp, Homo sapien
taggcctgtcctactctcatggtcg

SEQ ID NO: 1318633 - DNA, 25 bp, Homo sapien
aattggcagttagagtattcctggc

SEQ ID NO: 1318634 - DNA, 25 bp, Homo sapien
gaaatacagaacaagcatgcacaga

SEQ ID NO: 1318635 - DNA, 25 bp, Homo sapien
gttataatctagcaaccttacgagg

SEQ ID NO: 1318636 - DNA, 25 bp, Homo sapien
cacttaggtaaattagaaagataca

SEQ ID NO: 1318637 - DNA, 25 bp, Homo sapien
caagcacattggctcctagtgcttt

SEQ ID NO: 1318638 - DNA, 25 bp, Homo sapien
ttaaggatacaagaagcatgaacca

SEQ ID NO: 1318639 - DNA, 25 bp, Homo sapien
caaaaactatatggacgagacttag

SEQ ID NO: 1318640 - DNA, 25 bp, Homo sapien
aatatttaaaggcaagccacagcct

SEQ ID NO: 1318641 - DNA, 25 bp, Homo sapien
taataagtagacaaagagccagcta

SEQ ID NO: 1318642 - DNA, 25 bp, Homo sapien
caaagatatgtatagacacttcacc

SEQ ID NO: 1318643 - DNA, 25 bp, Homo sapien
gtagacatacacatggcaagtaagc

SEQ ID NO: 1318644 - DNA, 25 bp, Homo sapien
gaaccttttgattgccacaggacag

SEQ ID NO: 1318645 - DNA, 25 bp, Homo sapien
tcctgcatggagtagttcttcaact

SEQ ID NO: 1318646 - DNA, 25 bp, Homo sapien
ttactagaccgtgggcatccaaagg

SEQ ID NO: 1318647 - DNA, 25 bp, Homo sapien
acagattagcgctggaatgacttct

SEQ ID NO: 1318648 - DNA, 25 bp, Homo sapien
catgttcctatttctcctctaagag

SEQ ID NO: 1318649 - DNA, 25 bp, Homo sapien
tcatgttcctatttctcctctaaga

SEQ ID NO: 1318650 - DNA, 25 bp, Homo sapien
tcaagtttttagctgtgtgcgtaaa

SEQ ID NO: 1318651 - DNA, 25 bp, Homo sapien
gctgtgtgcgtaaattaacaaacac

SEQ ID NO: 1318652 - DNA, 25 bp, Homo sapien
caagtttttagctgtgtgcgtaaat

SEQ ID NO: 1318653 - DNA, 25 bp, Homo sapien
ttttagctgtgtgcgtaaattaaca

SEQ ID NO: 1318654 - DNA, 25 bp, Homo sapien
tttgtccctcatcagttatcccctt

SEQ ID NO: 1318655 - DNA, 25 bp, Homo sapien
cctctattttgtcatggctgtttcc

SEQ ID NO: 1318656 - DNA, 25 bp, Homo sapien
ttccagctgtagttgccatttccag

SEQ ID NO: 1318657 - DNA, 25 bp, Homo sapien
ttccagtggaattcttttgtccctc

SEQ ID NO: 1318658 - DNA, 25 bp, Homo sapien
ctctgtggaaggtggagccaagcat

SEQ ID NO: 1318659 - DNA, 25 bp, Homo sapien
aggtggagccaagcatctccagggc

SEQ ID NO: 1318660 - DNA, 25 bp, Homo sapien
tgtggaaggtggagccaagcatctc

SEQ ID NO: 1318661 - DNA, 25 bp, Homo sapien
ggaaggtggagccaagcatctccag

SEQ ID NO: 1318662 - DNA, 25 bp, Homo sapien
cagatttgtaaaagtctgttgtagt

SEQ ID NO: 1318663 - DNA, 25 bp, Homo sapien
aagtctgttgtagttctgtgtagaa

SEQ ID NO: 1318664 - DNA, 25 bp, Homo sapien
taaaagtctgttgtagttctgtgta

SEQ ID NO: 1318665 - DNA, 25 bp, Homo sapien
gatttgtaaaagtctgttgtagttc

SEQ ID NO: 1318666 - DNA, 25 bp, Homo sapien
gctctttctgaaatcgccagtagca

SEQ ID NO: 1318667 - DNA, 25 bp, Homo sapien
agtagcatcctaattggcaaaccca

SEQ ID NO: 1318668 - DNA, 25 bp, Homo sapien
gacatttgataacgtgtggcttcca

SEQ ID NO: 1318669 - DNA, 25 bp, Homo sapien
tctcacggagttaactgaacctgct

SEQ ID NO: 1318670 - DNA, 25 bp, Homo sapien
gataccaagctctgaccaagtctgc

SEQ ID NO: 1318671 - DNA, 25 bp, Homo sapien
tgataccaagctctgaccaagtctg

SEQ ID NO: 1318672 - DNA, 25 bp, Homo sapien
taccaagctctgaccaagtctgccc

SEQ ID NO: 1318673 - DNA, 25 bp, Homo sapien
actgataccaagctctgaccaagtc

SEQ ID NO: 1318674 - DNA, 25 bp, Homo sapien
gaagagactactttgattcctcagc

SEQ ID NO: 1318675 - DNA, 25 bp, Homo sapien
tgggaagagactactttgattcctc

SEQ ID NO: 1318676 - DNA, 25 bp, Homo sapien
acatcactgtgcctgttgacaggaa

SEQ ID NO: 1318677 - DNA, 25 bp, Homo sapien
ggaagtgggaagagactactttgat

SEQ ID NO: 1318678 - DNA, 25 bp, Homo sapien
cagcttcgacacctagttctgcctt

SEQ ID NO: 1318679 - DNA, 25 bp, Homo sapien
agcttcgacacctagttctgcctta

SEQ ID NO: 1318680 - DNA, 25 bp, Homo sapien
ttgtaagttcttgatatgttaaggc

SEQ ID NO: 1318681 - DNA, 25 bp, Homo sapien
ttgatatgttaaggcaagtctttca

SEQ ID NO: 1318682 - DNA, 25 bp, Homo sapien
caatgtttgtaagttcttgatatgt

SEQ ID NO: 1318683 - DNA, 25 bp, Homo sapien
agttcttgatatgttaaggcaagtc

SEQ ID NO: 1318684 - DNA, 25 bp, Homo sapien
ccttgtggggcagcttgtacatctc

SEQ ID NO: 1318685 - DNA, 25 bp, Homo sapien
tcagtgggtcccttgtggggcagct

SEQ ID NO: 1318686 - DNA, 25 bp, Homo sapien
tgtggggcagcttgtacatctctca

SEQ ID NO: 1318687 - DNA, 25 bp, Homo sapien
tcccttgtggggcagcttgtacatc

SEQ ID NO: 1318688 - DNA, 25 bp, Homo sapien
cagagggaagagagtgaagctctca

SEQ ID NO: 1318689 - DNA, 25 bp, Homo sapien
gagggaagagagtgaagctctcaac

SEQ ID NO: 1318690 - DNA, 25 bp, Homo sapien
ttagaagtcaggcaggccaggcaga

SEQ ID NO: 1318691 - DNA, 25 bp, Homo sapien
ggaagagagtgaagctctcaacctc

SEQ ID NO: 1318692 - DNA, 25 bp, Homo sapien
ctgatgccagcgttgctctggatct

SEQ ID NO: 1318693 - DNA, 25 bp, Homo sapien
tctgatgccagcgttgctctggatc

SEQ ID NO: 1318694 - DNA, 25 bp, Homo sapien
tgccagcgttgctctggatctgcag

SEQ ID NO: 1318695 - DNA, 25 bp, Homo sapien
tgatgccagcgttgctctggatctg

SEQ ID NO: 1318696 - DNA, 25 bp, Homo sapien
ccaaaagtccaagagatgtcagtgc

SEQ ID NO: 1318697 - DNA, 25 bp, Homo sapien
caaaagtccaagagatgtcagtgct

SEQ ID NO: 1318698 - DNA, 25 bp, Homo sapien
caccacatggtgctgataaacttca

SEQ ID NO: 1318699 - DNA, 25 bp, Homo sapien
aacctgtgactgtttggtagcccag

SEQ ID NO: 1318700 - DNA, 25 bp, Homo sapien
tgggccgtagagtgtttctatcatc

SEQ ID NO: 1318701 - DNA, 25 bp, Homo sapien
tctgccatctgtgcctttgattgaa

SEQ ID NO: 1318702 - DNA, 25 bp, Homo sapien
ccaggttgtacagaatctctttgcc

SEQ ID NO: 1318703 - DNA, 25 bp, Homo sapien
gtagaagatcgtgcggacttggcag

SEQ ID NO: 1318704 - DNA, 25 bp, Homo sapien
ctgtagaagatcgtgcggacttggc

SEQ ID NO: 1318705 - DNA, 25 bp, Homo sapien
ttcctgtagaagatcgtgcggactt

SEQ ID NO: 1318706 - DNA, 25 bp, Homo sapien
tcctgtagaagatcgtgcggacttg

SEQ ID NO: 1318707 - DNA, 25 bp, Homo sapien
tcaaatggggagggcaccacgccag

SEQ ID NO: 1318708 - DNA, 25 bp, Homo sapien
ctgctgatatgtgccatgtccacca

SEQ ID NO: 1318709 - DNA, 25 bp, Homo sapien
tctgcagcggggcatagtccaggtt

SEQ ID NO: 1318710 - DNA, 25 bp, Homo sapien
tgtccaccatgagatacaccccatt

SEQ ID NO: 1318711 - DNA, 25 bp, Homo sapien
gcagtttttctgcagcggggcatag

SEQ ID NO: 1318712 - DNA, 25 bp, Homo sapien
ttaggaggagcagctggttcctgca

SEQ ID NO: 1318713 - DNA, 25 bp, Homo sapien
taggaggagcagctggttcctgcac

SEQ ID NO: 1318714 - DNA, 25 bp, Homo sapien
cagctggtcatagttgatgtagcca

SEQ ID NO: 1318715 - DNA, 25 bp, Homo sapien
tccagctggtcatagttgatgtagc

SEQ ID NO: 1318716 - DNA, 25 bp, Homo sapien
tcctccagctggtcatagttgatgt

SEQ ID NO: 1318717 - DNA, 25 bp, Homo sapien
cctccagctggtcatagttgatgta

SEQ ID NO: 1318718 - DNA, 25 bp, Homo sapien
gaagatggacgtggcagagattttc

SEQ ID NO: 1318719 - DNA, 25 bp, Homo sapien
tcaggtgacccccatctggcaggtc

SEQ ID NO: 1318720 - DNA, 25 bp, Homo sapien
ctgtcatgaacccgtgggtcaggtg

SEQ ID NO: 1318721 - DNA, 25 bp, Homo sapien
tcatgaacccgtgggtcaggtgacc

SEQ ID NO: 1318722 - DNA, 25 bp, Homo sapien
gtgacccccatctggcaggtccagg

SEQ ID NO: 1318723 - DNA, 25 bp, Homo sapien
ggtttccaccagggcagttacactc

SEQ ID NO: 1318724 - DNA, 25 bp, Homo sapien
tccaccagggcagttacactcaaag

SEQ ID NO: 1318725 - DNA, 25 bp, Homo sapien
tttccaccagggcagttacactcaa

SEQ ID NO: 1318726 - DNA, 25 bp, Homo sapien
ccagggcagttacactcaaagtttg

SEQ ID NO: 1318727 - DNA, 25 bp, Homo sapien
agtcagtcctgccttagtatctctg

SEQ ID NO: 1318728 - DNA, 25 bp, Homo sapien
aaagtcagtcctgccttagtatctc

SEQ ID NO: 1318729 - DNA, 25 bp, Homo sapien
tcagtcctgccttagtatctctggc

SEQ ID NO: 1318730 - DNA, 25 bp, Homo sapien
agtcctgccttagtatctctggccc

SEQ ID NO: 1318731 - DNA, 25 bp, Homo sapien
tgggtccgaagctgccggaacacag

SEQ ID NO: 1318732 - DNA, 25 bp, Homo sapien
actggcattgctattgcatgggtcc

SEQ ID NO: 1318733 - DNA, 25 bp, Homo sapien
aacatcgctgtctttgaggggctgc

SEQ ID NO: 1318734 - DNA, 25 bp, Homo sapien
tgggccctgttgactggcattgcta

SEQ ID NO: 1318735 - DNA, 25 bp, Homo sapien
cagagacattcaagtcaagttgaga

SEQ ID NO: 1318736 - DNA, 25 bp, Homo sapien
gggtttcagagacattcaagtcaag

SEQ ID NO: 1318737 - DNA, 25 bp, Homo sapien
gtagctcagggtttcagagacattc

SEQ ID NO: 1318738 - DNA, 25 bp, Homo sapien
aaaaaacgcaggcatggtcccagct

SEQ ID NO: 1318739 - DNA, 25 bp, Homo sapien
gcttcagaccaagggtgagcagttt

SEQ ID NO: 1318740 - DNA, 25 bp, Homo sapien
cccggagcctcagaaaaactggctt

SEQ ID NO: 1318741 - DNA, 25 bp, Homo sapien
tcgcacaagtcacgaaaagcttcag

SEQ ID NO: 1318742 - DNA, 25 bp, Homo sapien
actcttctgagcaagtcccctggca

SEQ ID NO: 1318743 - DNA, 25 bp, Homo sapien
cagtccatagaggccatcgtaaggt

SEQ ID NO: 1318744 - DNA, 25 bp, Homo sapien
tcaagcatcgggattgaggctctta

SEQ ID NO: 1318745 - DNA, 25 bp, Homo sapien
caggtataaaagattcagtccatag

SEQ ID NO: 1318746 - DNA, 25 bp, Homo sapien
gaggctcttagctgtcaggtataaa

SEQ ID NO: 1318747 - DNA, 25 bp, Homo sapien
tcatgtgtctagaatgacctacagc

SEQ ID NO: 1318748 - DNA, 25 bp, Homo sapien
cctggaaaggtgtcatgtgtctaga

SEQ ID NO: 1318749 - DNA, 25 bp, Homo sapien
gaatgacctacagcaagtctctggt

SEQ ID NO: 1318750 - DNA, 25 bp, Homo sapien
aatggcagtactatggcctggaaag

SEQ ID NO: 1318751 - DNA, 25 bp, Homo sapien
tgctcattgcatgtggatggacgaa

SEQ ID NO: 1318752 - DNA, 25 bp, Homo sapien
ttgcatgtggatggacgaatgtgaa

SEQ ID NO: 1318753 - DNA, 25 bp, Homo sapien
ttatggttgtgacaggtccctatcc

SEQ ID NO: 1318754 - DNA, 25 bp, Homo sapien
atgctgcagcccagtagttatggtt

SEQ ID NO: 1318755 - DNA, 25 bp, Homo sapien
ccttcgactcctgctctcccatagg

SEQ ID NO: 1318756 - DNA, 25 bp, Homo sapien
tccttcgactcctgctctcccatag

SEQ ID NO: 1318757 - DNA, 25 bp, Homo sapien
cttcgactcctgctctcccatagga

SEQ ID NO: 1318758 - DNA, 25 bp, Homo sapien
gagatgcacctaactagccgaagtg

SEQ ID NO: 1318759 - DNA, 25 bp, Homo sapien
aagccaaaggcctgataaaagagag

SEQ ID NO: 1318760 - DNA, 25 bp, Homo sapien
tatatacaccggaggaaaaaatgag

SEQ ID NO: 1318761 - DNA, 25 bp, Homo sapien
agttccctttgcaaagagatgcacc

SEQ ID NO: 1318762 - DNA, 25 bp, Homo sapien
tggacgcactgaacagtaagggctg

SEQ ID NO: 1318763 - DNA, 25 bp, Homo sapien
ggacactgggatgtcggatttcaga

SEQ ID NO: 1318764 - DNA, 25 bp, Homo sapien
gctgtgccccagaatggacactggg

SEQ ID NO: 1318765 - DNA, 25 bp, Homo sapien
cctagactagggcaatagaaggaca

SEQ ID NO: 1318766 - DNA, 25 bp, Homo sapien
agctgatccataggactaccgcagg

SEQ ID NO: 1318767 - DNA, 25 bp, Homo sapien
taggtttcagcaacaagactgccag

SEQ ID NO: 1318768 - DNA, 25 bp, Homo sapien
atggtgggcaggatctcaagccagc

SEQ ID NO: 1318769 - DNA, 25 bp, Homo sapien
gtgttacctgttagctccctgtggg

SEQ ID NO: 1318770 - DNA, 25 bp, Homo sapien
gatggatatcatccccgaacaggtg

SEQ ID NO: 1318771 - DNA, 25 bp, Homo sapien
tacgaagcggtctccttcatggacg

SEQ ID NO: 1318772 - DNA, 25 bp, Homo sapien
tttgcagactggacccttaccggtg

SEQ ID NO: 1318773 - DNA, 25 bp, Homo sapien
ttcatggacgtcaacagcacctgga

SEQ ID NO: 1318774 - DNA, 25 bp, Homo sapien
ctctgatgaacactacagtggctga

SEQ ID NO: 1318775 - DNA, 25 bp, Homo sapien
gaactggcctgtactcactcatggg

SEQ ID NO: 1318776 - DNA, 25 bp, Homo sapien
tgcagttgcttggttgaaagtgcct

SEQ ID NO: 1318777 - DNA, 25 bp, Homo sapien
cctgtagggacagcatttgaaggac

SEQ ID NO: 1318778 - DNA, 25 bp, Homo sapien
agaagttactgctgactctggcctc

SEQ ID NO: 1318779 - DNA, 25 bp, Homo sapien
gctaagaagtccacaccttcgtggg

SEQ ID NO: 1318780 - DNA, 25 bp, Homo sapien
gagaagcttcaaccaggagagacag

SEQ ID NO: 1318781 - DNA, 25 bp, Homo sapien
ttggcaaatggtacgaaaaggacag

SEQ ID NO: 1318782 - DNA, 25 bp, Homo sapien
tggatgagaggcatggaacccgaac

SEQ ID NO: 1318783 - DNA, 25 bp, Homo sapien
ggttctcagccctggacaggaatgg

SEQ ID NO: 1318784 - DNA, 25 bp, Homo sapien
caagtaccccagtagaagtatgact

SEQ ID NO: 1318785 - DNA, 25 bp, Homo sapien
cccgaactggttattgctgattgcc

SEQ ID NO: 1318786 - DNA, 25 bp, Homo sapien
caagaagcggagactaaggaggacc

SEQ ID NO: 1318787 - DNA, 25 bp, Homo sapien
ccaaaaaggagtagtcagagtgtcg

SEQ ID NO: 1318788 - DNA, 25 bp, Homo sapien
ctttcatcttgagggcagttgccga

SEQ ID NO: 1318789 - DNA, 25 bp, Homo sapien
tgcatcagaaccgaaaactgcccgt

SEQ ID NO: 1318790 - DNA, 25 bp, Homo sapien
tcattgctgtgagactgggcttctt

SEQ ID NO: 1318791 - DNA, 25 bp, Homo sapien
tctgctgagttttgggatgttccct

SEQ ID NO: 1318792 - DNA, 25 bp, Homo sapien
caaagacttatctgccacttggctc

SEQ ID NO: 1318793 - DNA, 25 bp, Homo sapien
ggctctgagctatcctgcactaaca

SEQ ID NO: 1318794 - DNA, 25 bp, Homo sapien
actgtccatggtatgtggtttcccg

SEQ ID NO: 1318795 - DNA, 25 bp, Homo sapien
gtcctccggcccctcgagtcacgtc

SEQ ID NO: 1318796 - DNA, 25 bp, Homo sapien
cctcgagtcacgtcgtcctactaag

SEQ ID NO: 1318797 - DNA, 25 bp, Homo sapien
gagtcacgtcgtcctactaaggagt

SEQ ID NO: 1318798 - DNA, 25 bp, Homo sapien
cacgtcgtcctactaaggagttggg

SEQ ID NO: 1318799 - DNA, 25 bp, Homo sapien
atactgtcattgtccttggggcggg

SEQ ID NO: 1318800 - DNA, 25 bp, Homo sapien
aggttggaagagatactactgtagc

SEQ ID NO: 1318801 - DNA, 25 bp, Homo sapien
gtgggaacatcctctagctcccagg

SEQ ID NO: 1318802 - DNA, 25 bp, Homo sapien
gaagagatactactgtagccaagcc

SEQ ID NO: 1318803 - DNA, 25 bp, Homo sapien
ctactttgacgtctacgcccagcac

SEQ ID NO: 1318804 - DNA, 25 bp, Homo sapien
ctcgtggccgtcatcctctactttg

SEQ ID NO: 1318805 - DNA, 25 bp, Homo sapien
cgcctgcgggatgagcagactgctg

SEQ ID NO: 1318806 - DNA, 25 bp, Homo sapien
gctggagcgcgtctgcaaggctgtg

SEQ ID NO: 1318807 - DNA, 25 bp, Homo sapien
caataaatagctggcaagagagtca

SEQ ID NO: 1318808 - DNA, 25 bp, Homo sapien
tggcagtagccttggtgcttagagc

SEQ ID NO: 1318809 - DNA, 25 bp, Homo sapien
gtagccttggtgcttagagcacagc

SEQ ID NO: 1318810 - DNA, 25 bp, Homo sapien
tcaataaatagctggcaagagagtc

SEQ ID NO: 1318811 - DNA, 25 bp, Homo sapien
cactcaagtgcgcagcctctgtaag

SEQ ID NO: 1318812 - DNA, 25 bp, Homo sapien
tcccactggctaggaagcagagcct

SEQ ID NO: 1318813 - DNA, 25 bp, Homo sapien
tccatggccgatggtcttatcagga

SEQ ID NO: 1318814 - DNA, 25 bp, Homo sapien
taaatatatcgcagttaggccccat

SEQ ID NO: 1318815 - DNA, 25 bp, Homo sapien
agtaagtctggttcccgcctccctg

SEQ ID NO: 1318816 - DNA, 25 bp, Homo sapien
gcttgtgtttgtacattgcacagaa

SEQ ID NO: 1318817 - DNA, 25 bp, Homo sapien
ggcttggatcagtaagtctggttcc

SEQ ID NO: 1318818 - DNA, 25 bp, Homo sapien
cagggccggcttgtgtttgtacatt

SEQ ID NO: 1318819 - DNA, 25 bp, Homo sapien
cacttcagggattcagacacttcag

SEQ ID NO: 1318820 - DNA, 25 bp, Homo sapien
tatcggaggccacgtaaagccatcc

SEQ ID NO: 1318821 - DNA, 25 bp, Homo sapien
cccctagggaggaatagccaaatgt

SEQ ID NO: 1318822 - DNA, 25 bp, Homo sapien
catttggcacatgaacgagggcagc

SEQ ID NO: 1318823 - DNA, 25 bp, Homo sapien
gtagcgccctgtccggtgctccagg

SEQ ID NO: 1318824 - DNA, 25 bp, Homo sapien
tgcagtggctggacctcgaagccgt

SEQ ID NO: 1318825 - DNA, 25 bp, Homo sapien
ggagccattactgcccacaatgggg

SEQ ID NO: 1318826 - DNA, 25 bp, Homo sapien
gatctgcgccttgtccgggtgcagt

SEQ ID NO: 1318827 - DNA, 25 bp, Homo sapien
tactggtagtggttgtaggtgatcg

SEQ ID NO: 1318828 - DNA, 25 bp, Homo sapien
taggtgatcggctggtactggatca

SEQ ID NO: 1318829 - DNA, 25 bp, Homo sapien
ctggtactggatcacagtgaaaact

SEQ ID NO: 1318830 - DNA, 25 bp, Homo sapien
aggaagccaatggccacggcccagc

SEQ ID NO: 1318831 - DNA, 25 bp, Homo sapien
caccacatagccaaggccctggaac

SEQ ID NO: 1318832 - DNA, 25 bp, Homo sapien
gcttgcaaagttgcccccatgcaga

SEQ ID NO: 1318833 - DNA, 25 bp, Homo sapien
tcccaccacatagccaaggccctgg

SEQ ID NO: 1318834 - DNA, 25 bp, Homo sapien
cctggaaggcttgcaaagttgcccc

SEQ ID NO: 1318835 - DNA, 25 bp, Homo sapien
tggcgggagagacgaagcgccagca

SEQ ID NO: 1318836 - DNA, 25 bp, Homo sapien
atgtcctggaagtagttccggtgcc

SEQ ID NO: 1318837 - DNA, 25 bp, Homo sapien
agagacgaagcgccagcagatctga

SEQ ID NO: 1318838 - DNA, 25 bp, Homo sapien
tggatgtcctggaagtagttccggt

SEQ ID NO: 1318839 - DNA, 25 bp, Homo sapien
atcagcagcagccaatagatgcctg

SEQ ID NO: 1318840 - DNA, 25 bp, Homo sapien
tcagcagcagccaatagatgcctgc

SEQ ID NO: 1318841 - DNA, 25 bp, Homo sapien
ccacacacatgatgcaggagatgac

SEQ ID NO: 1318842 - DNA, 25 bp, Homo sapien
tgaccagcgtctccaggaggcagaa

SEQ ID NO: 1318843 - DNA, 25 bp, Homo sapien
gcaggatccactcattccccacctc

SEQ ID NO: 1318844 - DNA, 25 bp, Homo sapien
ggtcacataggtctttttctgcagg

SEQ ID NO: 1318845 - DNA, 25 bp, Homo sapien
catccacaatggctgtgaccagcgt

SEQ ID NO: 1318846 - DNA, 25 bp, Homo sapien
tgtggctgtcagatcggagacctgc

SEQ ID NO: 1318847 - DNA, 25 bp, Homo sapien
gctgtcagatcggagacctgcccct

SEQ ID NO: 1318848 - DNA, 25 bp, Homo sapien
gtcagatcggagacctgccccttgt

SEQ ID NO: 1318849 - DNA, 25 bp, Homo sapien
gtggctgtcagatcggagacctgcc

SEQ ID NO: 1318850 - DNA, 25 bp, Homo sapien
cacgcccaggtgattggccatgaag

SEQ ID NO: 1318851 - DNA, 25 bp, Homo sapien
catagacgctggtggcacagttggt

SEQ ID NO: 1318852 - DNA, 25 bp, Homo sapien
gccgtggtctgccacacgggacaca

SEQ ID NO: 1318853 - DNA, 25 bp, Homo sapien
tgggaagtagtgtgagggcctcggg

SEQ ID NO: 1318854 - DNA, 25 bp, Homo sapien
gcccatggctgcactggagctgaga

SEQ ID NO: 1318855 - DNA, 25 bp, Homo sapien
gattacggcgtgaagcactgagcct

SEQ ID NO: 1318856 - DNA, 25 bp, Homo sapien
cactggagctgagatcaggctgcag

SEQ ID NO: 1318857 - DNA, 25 bp, Homo sapien
tatccagaaccagtattcccagaac

SEQ ID NO: 1318858 - DNA, 25 bp, Homo sapien
ggaagccatggtgatgaggcctccc

SEQ ID NO: 1318859 - DNA, 25 bp, Homo sapien
tattgtggaacttgttgtaggaagc

SEQ ID NO: 1318860 - DNA, 25 bp, Homo sapien
ggtgatgaggcctccccacgcgcag

SEQ ID NO: 1318861 - DNA, 25 bp, Homo sapien
cacgcgcagcccagtgagtagaaga

SEQ ID NO: 1318862 - DNA, 25 bp, Homo sapien
ctgcagggaaggaccggtgggtgag

SEQ ID NO: 1318863 - DNA, 25 bp, Homo sapien
tgcagggaaggaccggtgggtgagg

SEQ ID NO: 1318864 - DNA, 25 bp, Homo sapien
cagggaaggaccggtgggtgaggag

SEQ ID NO: 1318865 - DNA, 25 bp, Homo sapien
gcagggaaggaccggtgggtgagga

SEQ ID NO: 1318866 - DNA, 25 bp, Homo sapien
tacatgatgccgtcaaaggctccct

SEQ ID NO: 1318867 - DNA, 25 bp, Homo sapien
gatcttgtcccactgcggggttagg

SEQ ID NO: 1318868 - DNA, 25 bp, Homo sapien
acagaatggtcagcaccacgtaggg

SEQ ID NO: 1318869 - DNA, 25 bp, Homo sapien
tcactccgcggacaaacagaatggt

SEQ ID NO: 1318870 - DNA, 25 bp, Homo sapien
tccatggactcttctgggctctccc

SEQ ID NO: 1318871 - DNA, 25 bp, Homo sapien
tggactcttctgggctctcccctcc

SEQ ID NO: 1318872 - DNA, 25 bp, Homo sapien
catggactcttctgggctctcccct

SEQ ID NO: 1318873 - DNA, 25 bp, Homo sapien
ctccatggactcttctgggctctcc

SEQ ID NO: 1318874 - DNA, 25 bp, Homo sapien
aagacgaccaaccaggagacaccga

SEQ ID NO: 1318875 - DNA, 25 bp, Homo sapien
ggcagaggaagacgaccaaccagga

SEQ ID NO: 1318876 - DNA, 25 bp, Homo sapien
aggaagacgaccaaccaggagacac

SEQ ID NO: 1318877 - DNA, 25 bp, Homo sapien
gacgaccaaccaggagacaccgagg

SEQ ID NO: 1318878 - DNA, 25 bp, Homo sapien
ctccccaaagttcccaatgtcatct

SEQ ID NO: 1318879 - DNA, 25 bp, Homo sapien
gtcatctgacagcttcagcacgtac

SEQ ID NO: 1318880 - DNA, 25 bp, Homo sapien
atctgacagcttcagcacgtacagc

SEQ ID NO: 1318881 - DNA, 25 bp, Homo sapien
cccaaagttcccaatgtcatctgac

SEQ ID NO: 1318882 - DNA, 25 bp, Homo sapien
tacaccggcgcagtcatgcgtgttc

SEQ ID NO: 1318883 - DNA, 25 bp, Homo sapien
gcgtcatggacgagaagaagtagta

SEQ ID NO: 1318884 - DNA, 25 bp, Homo sapien
gatgccgatgtaggtggacaccacc

SEQ ID NO: 1318885 - DNA, 25 bp, Homo sapien
ccattggtgaggttggaggcgtcca

SEQ ID NO: 1318886 - DNA, 25 bp, Homo sapien
aaaggaaggccaggtcaaggtcttg

SEQ ID NO: 1318887 - DNA, 25 bp, Homo sapien
tttgtgtgtacacgtggtaggaggg

SEQ ID NO: 1318888 - DNA, 25 bp, Homo sapien
gttttgtgtgtacacgtggtaggag

SEQ ID NO: 1318889 - DNA, 25 bp, Homo sapien
tggagggccaaaggaaggccaggtc

SEQ ID NO: 1318890 - DNA, 25 bp, Homo sapien
aggcacccctggcttgcaaactggc

SEQ ID NO: 1318891 - DNA, 25 bp, Homo sapien
ggatcccgcagaagatgagcatgat

SEQ ID NO: 1318892 - DNA, 25 bp, Homo sapien
tggcttgcaaactggccgaaggaga

SEQ ID NO: 1318893 - DNA, 25 bp, Homo sapien
acccctggcttgcaaactggccgaa

SEQ ID NO: 1318894 - DNA, 25 bp, Homo sapien
tgaaccccagggaatagaacaggga

SEQ ID NO: 1318895 - DNA, 25 bp, Homo sapien
caagcataagttgctgagatcctca

SEQ ID NO: 1318896 - DNA, 25 bp, Homo sapien
ctcaggaattctgcttggagtggaa

SEQ ID NO: 1318897 - DNA, 25 bp, Homo sapien
gcctccatacttgggtgggatttga

SEQ ID NO: 1318898 - DNA, 25 bp, Homo sapien
tggtccctgccctgtgcccactggg

SEQ ID NO: 1318899 - DNA, 25 bp, Homo sapien
cccaagtgggtggtccctgccctgt

SEQ ID NO: 1318900 - DNA, 25 bp, Homo sapien
tccctgccctgtgcccactgggtac

SEQ ID NO: 1318901 - DNA, 25 bp, Homo sapien
acccaagtgggtggtccctgccctg

SEQ ID NO: 1318902 - DNA, 25 bp, Homo sapien
tggttgccccagttgccccgtttga

SEQ ID NO: 1318903 - DNA, 25 bp, Homo sapien
gctcgtcagtacaaactcgatctgg

SEQ ID NO: 1318904 - DNA, 25 bp, Homo sapien
acggcatagcccacgctcgtcagta

SEQ ID NO: 1318905 - DNA, 25 bp, Homo sapien
ccccgttgcgatagcagaggtatgg

SEQ ID NO: 1318906 - DNA, 25 bp, Homo sapien
gtggggacaggagagaagctaccat

SEQ ID NO: 1318907 - DNA, 25 bp, Homo sapien
ctgtggggacaggagagaagctacc

SEQ ID NO: 1318908 - DNA, 25 bp, Homo sapien
tgtggggacaggagagaagctacca

SEQ ID NO: 1318909 - DNA, 25 bp, Homo sapien
aaggcatttgtgctccatgcctgac

SEQ ID NO: 1318910 - DNA, 25 bp, Homo sapien
cagcaaggcatttgtgctccatgcc

SEQ ID NO: 1318911 - DNA, 25 bp, Homo sapien
ggcatttgtgctccatgcctgaccc

SEQ ID NO: 1318912 - DNA, 25 bp, Homo sapien
gcaaggcatttgtgctccatgcctg

SEQ ID NO: 1318913 - DNA, 25 bp, Homo sapien
ctgaggagctgctaccagcatccgg

SEQ ID NO: 1318914 - DNA, 25 bp, Homo sapien
aggagctgctaccagcatccgggag

SEQ ID NO: 1318915 - DNA, 25 bp, Homo sapien
tgaggagctgctaccagcatccggg

SEQ ID NO: 1318916 - DNA, 25 bp, Homo sapien
ggagctgctaccagcatccgggagg

SEQ ID NO: 1318917 - DNA, 25 bp, Homo sapien
cccacccgtcgcctaccacatcacc

SEQ ID NO: 1318918 - DNA, 25 bp, Homo sapien
cccgtcgcctaccacatcaccaggc

SEQ ID NO: 1318919 - DNA, 25 bp, Homo sapien
cacccgtcgcctaccacatcaccag

SEQ ID NO: 1318920 - DNA, 25 bp, Homo sapien
caagcagccaagtcaggctgggcac

SEQ ID NO: 1318921 - DNA, 25 bp, Homo sapien
ccatggctagggagtgctgggccat

SEQ ID NO: 1318922 - DNA, 25 bp, Homo sapien
accagagttgtaggccccatgccag

SEQ ID NO: 1318923 - DNA, 25 bp, Homo sapien
tgggccatggctagggagtgctggg

SEQ ID NO: 1318924 - DNA, 25 bp, Homo sapien
ggagaccagagttgtaggccccatg

SEQ ID NO: 1318925 - DNA, 25 bp, Homo sapien
aagtagagggagtggctccagaaaa

SEQ ID NO: 1318926 - DNA, 25 bp, Homo sapien
tggcaggaagaaggatctctgaaca

SEQ ID NO: 1318927 - DNA, 25 bp, Homo sapien
ggagtggctccagaaaagggtggca

SEQ ID NO: 1318928 - DNA, 25 bp, Homo sapien
gatctctgaacagggagaagcgtca

SEQ ID NO: 1318929 - DNA, 25 bp, Homo sapien
tgttctctcctatcagtgcagggcc

SEQ ID NO: 1318930 - DNA, 25 bp, Homo sapien
actttgagccaaatcagatcactgg

SEQ ID NO: 1318931 - DNA, 25 bp, Homo sapien
gagaatgggcaagacctcacatccc

SEQ ID NO: 1318932 - DNA, 25 bp, Homo sapien
tacagtaaattgtggctgcctcaga

SEQ ID NO: 1318933 - DNA, 25 bp, Homo sapien
ttgattagtacaattcctgggcacc

SEQ ID NO: 1318934 - DNA, 25 bp, Homo sapien
cataggagtaactgccgtggcacag

SEQ ID NO: 1318935 - DNA, 25 bp, Homo sapien
caatgaggctgtattgattagtaca

SEQ ID NO: 1318936 - DNA, 25 bp, Homo sapien
ccgtctccccgggagctaggacaat

SEQ ID NO: 1318937 - DNA, 25 bp, Homo sapien
ggggccacaggtccatgagccgcgg

SEQ ID NO: 1318938 - DNA, 25 bp, Homo sapien
ggccacaggtccatgagccgcggcc

SEQ ID NO: 1318939 - DNA, 25 bp, Homo sapien
agagggggccacaggtccatgagcc

SEQ ID NO: 1318940 - DNA, 25 bp, Homo sapien
agggggccacaggtccatgagccgc

SEQ ID NO: 1318941 - DNA, 25 bp, Homo sapien
gcgagcgatcgcagcccgcgtgtct

SEQ ID NO: 1318942 - DNA, 25 bp, Homo sapien
tcgcagcccgcgtgtctccgccgct

SEQ ID NO: 1318943 - DNA, 25 bp, Homo sapien
ctggggcgagcgatcgcagcccgcg

SEQ ID NO: 1318944 - DNA, 25 bp, Homo sapien
gggcgagcgatcgcagcccgcgtgt

SEQ ID NO: 1318945 - DNA, 25 bp, Homo sapien
tttcacctcatctcctcccgaagct

SEQ ID NO: 1318946 - DNA, 25 bp, Homo sapien
tgggcagcgtcaattactttcacct

SEQ ID NO: 1318947 - DNA, 25 bp, Homo sapien
agctccagcgcgacactgacgcatc

SEQ ID NO: 1318948 - DNA, 25 bp, Homo sapien
atgcagcccagcacgggtgctccgg

SEQ ID NO: 1318949 - DNA, 25 bp, Homo sapien
tctgccgacactgaagagacttgga

SEQ ID NO: 1318950 - DNA, 25 bp, Homo sapien
cagaagctccaaggataacacaggg

SEQ ID NO: 1318951 - DNA, 25 bp, Homo sapien
aagagacttggagggccagtgtcct

SEQ ID NO: 1318952 - DNA, 25 bp, Homo sapien
ggcactggctgtagcatccagcaga

SEQ ID NO: 1318953 - DNA, 25 bp, Homo sapien
gcatccctttggcaccttttcctac

SEQ ID NO: 1318954 - DNA, 25 bp, Homo sapien
agcatccctttggcaccttttccta

SEQ ID NO: 1318955 - DNA, 25 bp, Homo sapien
cagcatccctttggcaccttttcct

SEQ ID NO: 1318956 - DNA, 25 bp, Homo sapien
tctggtgacggggaccacactcaca

SEQ ID NO: 1318957 - DNA, 25 bp, Homo sapien
gctctggtgacggggaccacactca

SEQ ID NO: 1318958 - DNA, 25 bp, Homo sapien
ctctggtgacggggaccacactcac

SEQ ID NO: 1318959 - DNA, 25 bp, Homo sapien
gccagagcgcggacaaagagaggct

SEQ ID NO: 1318960 - DNA, 25 bp, Homo sapien
caccgggagggcagatagggaggca

SEQ ID NO: 1318961 - DNA, 25 bp, Homo sapien
cgggcactggaaccggcaccgggag

SEQ ID NO: 1318962 - DNA, 25 bp, Homo sapien
aggtgtgccggtaatgagggttggg

SEQ ID NO: 1318963 - DNA, 25 bp, Homo sapien
tgtgccgcgccgagttcgcccgccc

SEQ ID NO: 1318964 - DNA, 25 bp, Homo sapien
aggcgtgctgggtccgcaccgcggt

SEQ ID NO: 1318965 - DNA, 25 bp, Homo sapien
aaagggaaagttgcatcagcctccc

SEQ ID NO: 1318966 - DNA, 25 bp, Homo sapien
cggtgcgcccaggtggctttcttaa

SEQ ID NO: 1318967 - DNA, 25 bp, Homo sapien
aaaggagcatggtgagcctcggttt

SEQ ID NO: 1318968 - DNA, 25 bp, Homo sapien
caaaaggagcatggtgagcctcggt

SEQ ID NO: 1318969 - DNA, 25 bp, Homo sapien
aaaaggagcatggtgagcctcggtt

SEQ ID NO: 1318970 - DNA, 25 bp, Homo sapien
gtgagagccaccacctttcatggag

SEQ ID NO: 1318971 - DNA, 25 bp, Homo sapien
ttgtgagagccaccacctttcatgg

SEQ ID NO: 1318972 - DNA, 25 bp, Homo sapien
tgtgagagccaccacctttcatgga

SEQ ID NO: 1318973 - DNA, 25 bp, Homo sapien
cttgtgagagccaccacctttcatg

SEQ ID NO: 1318974 - DNA, 25 bp, Homo sapien
tagtctcctacaagccaagtgcagg

SEQ ID NO: 1318975 - DNA, 25 bp, Homo sapien
cacacacctggatctaggcaacctg

SEQ ID NO: 1318976 - DNA, 25 bp, Homo sapien
taacaggcatcaagcccaggcattc

SEQ ID NO: 1318977 - DNA, 25 bp, Homo sapien
cattggactcctgatcagatctggg

SEQ ID NO: 1318978 - DNA, 25 bp, Homo sapien
cagggaatccatatgaagggaggca

SEQ ID NO: 1318979 - DNA, 25 bp, Homo sapien
tcagtgaagattccgagagttttca

SEQ ID NO: 1318980 - DNA, 25 bp, Homo sapien
gattccgagagttttcatggctcag

SEQ ID NO: 1318981 - DNA, 25 bp, Homo sapien
gctcagggaatccatatgaagggag

SEQ ID NO: 1318982 - DNA, 25 bp, Homo sapien
ctggctggtttcctcgagtggtgtc

SEQ ID NO: 1318983 - DNA, 25 bp, Homo sapien
ggtttcctcgagtggtgtcatcagc

SEQ ID NO: 1318984 - DNA, 25 bp, Homo sapien
caggagcctccagttactgcagcca

SEQ ID NO: 1318985 - DNA, 25 bp, Homo sapien
tcctcgagtggtgtcatcagcctgc

SEQ ID NO: 1318986 - DNA, 25 bp, Homo sapien
cacccaacactgtagaggacccaaa

SEQ ID NO: 1318987 - DNA, 25 bp, Homo sapien
tccagagcacccaatgttcataaca

SEQ ID NO: 1318988 - DNA, 25 bp, Homo sapien
tttcagagtgccagtgttccaattc

SEQ ID NO: 1318989 - DNA, 25 bp, Homo sapien
ccagactcctcaatcgctttgagct

SEQ ID NO: 1318990 - DNA, 25 bp, Homo sapien
gcaatctccccagacacattgtggc

SEQ ID NO: 1318991 - DNA, 25 bp, Homo sapien
aggaatcctggccttttcagcatat

SEQ ID NO: 1318992 - DNA, 25 bp, Homo sapien
cctgtctgtaatcaccctgaaactc

SEQ ID NO: 1318993 - DNA, 25 bp, Homo sapien
ctgaaactccccaggaatcctggcc

SEQ ID NO: 1318994 - DNA, 25 bp, Homo sapien
tctggagcaactggggcatccccat

SEQ ID NO: 1318995 - DNA, 25 bp, Homo sapien
ctcggtgcgatgattggctgtctct

SEQ ID NO: 1318996 - DNA, 25 bp, Homo sapien
gcctcggtgcgatgattggctgtct

SEQ ID NO: 1318997 - DNA, 25 bp, Homo sapien
ccgcctcggtgcgatgattggctgt

SEQ ID NO: 1318998 - DNA, 25 bp, Homo sapien
ttgacactctcgtcctggtaaccct

SEQ ID NO: 1318999 - DNA, 25 bp, Homo sapien
cctagcgcattctagcaggagagcg

SEQ ID NO: 1319000 - DNA, 25 bp, Homo sapien
tttattgccccaaaacaggttgaca

SEQ ID NO: 1319001 - DNA, 25 bp, Homo sapien
ggaaaaagcgtttctctggtctcag

SEQ ID NO: 1319002 - DNA, 25 bp, Homo sapien
taaatcctgaagaatggctctgcct

SEQ ID NO: 1319003 - DNA, 25 bp, Homo sapien
tgagcttggccatgatcacccgtag

SEQ ID NO: 1319004 - DNA, 25 bp, Homo sapien
ttacaggtgacctcgtgctgcggga

SEQ ID NO: 1319005 - DNA, 25 bp, Homo sapien
cccgtagtttctcgaggtgccatga

SEQ ID NO: 1319006 - DNA, 25 bp, Homo sapien
tgcagacaacaggatctgcaatact

SEQ ID NO: 1319007 - DNA, 25 bp, Homo sapien
ttgcagacaacaggatctgcaatac

SEQ ID NO: 1319008 - DNA, 25 bp, Homo sapien
ctttgcagacaacaggatctgcaat

SEQ ID NO: 1319009 - DNA, 25 bp, Homo sapien
ggctttgcagacaacaggatctgca

SEQ ID NO: 1319010 - DNA, 25 bp, Homo sapien
catagctctccacactcttggctac

SEQ ID NO: 1319011 - DNA, 25 bp, Homo sapien
ctcagcatagctctccacactcttg

SEQ ID NO: 1319012 - DNA, 25 bp, Homo sapien
tcagcatagctctccacactcttgg

SEQ ID NO: 1319013 - DNA, 25 bp, Homo sapien
agcatagctctccacactcttggct

SEQ ID NO: 1319014 - DNA, 25 bp, Homo sapien
tagtagttaactacctggagcttcc

SEQ ID NO: 1319015 - DNA, 25 bp, Homo sapien
cggtagtagttaactacctggagct

SEQ ID NO: 1319016 - DNA, 25 bp, Homo sapien
gtagtagttaactacctggagcttc

SEQ ID NO: 1319017 - DNA, 25 bp, Homo sapien
tgtctcttggaagcttgctgcaagg

SEQ ID NO: 1319018 - DNA, 25 bp, Homo sapien
catttaatgaacaacctgctgtgtc

SEQ ID NO: 1319019 - DNA, 25 bp, Homo sapien
acattgtattgtatcttcctctgct

SEQ ID NO: 1319020 - DNA, 25 bp, Homo sapien
tcagcacaataacattgtattgtat

SEQ ID NO: 1319021 - DNA, 25 bp, Homo sapien
cactgtaggtaatgatcactggagc

SEQ ID NO: 1319022 - DNA, 25 bp, Homo sapien
catgaatggtgctgaagagagtcac

SEQ ID NO: 1319023 - DNA, 25 bp, Homo sapien
caatttagtctgcaacaggaaggag

SEQ ID NO: 1319024 - DNA, 25 bp, Homo sapien
ggtatgctaaggaaccgacaggcca

SEQ ID NO: 1319025 - DNA, 25 bp, Homo sapien
cctcataatcaggaaactaatgctg

SEQ ID NO: 1319026 - DNA, 25 bp, Homo sapien
aaacaaggccattctgttacagaac

SEQ ID NO: 1319027 - DNA, 25 bp, Homo sapien
cagaaagtttccaagaatactacaa

SEQ ID NO: 1319028 - DNA, 25 bp, Homo sapien
aatcttggaccatgagttaccttca

SEQ ID NO: 1319029 - DNA, 25 bp, Homo sapien
agacatgggcaagggggtatcccca

SEQ ID NO: 1319030 - DNA, 25 bp, Homo sapien
ggtatccccaagcagtaaactcctc

SEQ ID NO: 1319031 - DNA, 25 bp, Homo sapien
gcaagggggtatccccaagcagtaa

SEQ ID NO: 1319032 - DNA, 25 bp, Homo sapien
ccctcccggactctggggcagccgc

SEQ ID NO: 1319033 - DNA, 25 bp, Homo sapien
aggactcggacaccggactcggaca

SEQ ID NO: 1319034 - DNA, 25 bp, Homo sapien
tcggacaccggcttcccgttgcagg

SEQ ID NO: 1319035 - DNA, 25 bp, Homo sapien
ccgttgcaggtctggatcttcttca

SEQ ID NO: 1319036 - DNA, 25 bp, Homo sapien
tcaaaggactcggacaccggactcg

SEQ ID NO: 1319037 - DNA, 25 bp, Homo sapien
gccggctctcctcgccctctagcag

SEQ ID NO: 1319038 - DNA, 25 bp, Homo sapien
tccagccggctctcctcgccctcta

SEQ ID NO: 1319039 - DNA, 25 bp, Homo sapien
cggctctcctcgccctctagcagct

SEQ ID NO: 1319040 - DNA, 25 bp, Homo sapien
agccggctctcctcgccctctagca

SEQ ID NO: 1319041 - DNA, 25 bp, Homo sapien
ggtggcgatctcgatctcgatgtcc

SEQ ID NO: 1319042 - DNA, 25 bp, Homo sapien
gtccagggccagcttgacgttcatc

SEQ ID NO: 1319043 - DNA, 25 bp, Homo sapien
gggccagcttgacgttcatcagctc

SEQ ID NO: 1319044 - DNA, 25 bp, Homo sapien
gtggcgatctcgatctcgatgtcca

SEQ ID NO: 1319045 - DNA, 25 bp, Homo sapien
gtatgctgcacgtcatcccagtgcc

SEQ ID NO: 1319046 - DNA, 25 bp, Homo sapien
cagtttatctcggaggtctcagtct

SEQ ID NO: 1319047 - DNA, 25 bp, Homo sapien
tatgctgcacgtcatcccagtgcct

SEQ ID NO: 1319048 - DNA, 25 bp, Homo sapien
ccactgatgttccagtttatctcgg

SEQ ID NO: 1319049 - DNA, 25 bp, Homo sapien
acttcgtctcctgaatcttgttctg

SEQ ID NO: 1319050 - DNA, 25 bp, Homo sapien
caggaggctccacttcgtctcctga

SEQ ID NO: 1319051 - DNA, 25 bp, Homo sapien
gtctcctgaatcttgttctgctgcc

SEQ ID NO: 1319052 - DNA, 25 bp, Homo sapien
tggcgatctcgtactgcgccttgac

SEQ ID NO: 1319053 - DNA, 25 bp, Homo sapien
cagtttctggttattggctagggtt

SEQ ID NO: 1319054 - DNA, 25 bp, Homo sapien
tattggctagggttgtttgtgagtc

SEQ ID NO: 1319055 - DNA, 25 bp, Homo sapien
ggttgtttgtgagtcatctaacttg

SEQ ID NO: 1319056 - DNA, 25 bp, Homo sapien
tcagtttctggttattggctagggt

SEQ ID NO: 1319057 - DNA, 25 bp, Homo sapien
aggtgtagtaatcccattaccaatc

SEQ ID NO: 1319058 - DNA, 25 bp, Homo sapien
tttgaaacagtaatcctgagagaca

SEQ ID NO: 1319059 - DNA, 25 bp, Homo sapien
ctttgaaacagtaatcctgagagac

SEQ ID NO: 1319060 - DNA, 25 bp, Homo sapien
tatcgcctaggaccccctcttcctc

SEQ ID NO: 1319061 - DNA, 25 bp, Homo sapien
tatccagaggtaaactgtctagtag

SEQ ID NO: 1319062 - DNA, 25 bp, Homo sapien
cgaatactcagcgtttccagctgta

SEQ ID NO: 1319063 - DNA, 25 bp, Homo sapien
catccacaagtagtgtatccagagg

SEQ ID NO: 1319064 - DNA, 25 bp, Homo sapien
gctgtacaggttctctgttcttcgg

SEQ ID NO: 1319065 - DNA, 25 bp, Homo sapien
tgtgactgttccatggacctgtgtt

SEQ ID NO: 1319066 - DNA, 25 bp, Homo sapien
gcaatggttacagtttcatgactca

SEQ ID NO: 1319067 - DNA, 25 bp, Homo sapien
aaaatctcacgagcttcatcctagc

SEQ ID NO: 1319068 - DNA, 25 bp, Homo sapien
gtgttctgttcttcaatgcaatggt

SEQ ID NO: 1319069 - DNA, 25 bp, Homo sapien
tgcatattgaacacaggtagggcct

SEQ ID NO: 1319070 - DNA, 25 bp, Homo sapien
ctctacatcgcatacatagggcttc

SEQ ID NO: 1319071 - DNA, 25 bp, Homo sapien
aatgttgtggacctttgcatgctgc

SEQ ID NO: 1319072 - DNA, 25 bp, Homo sapien
tctgagcgggcaaatttccacgtac

SEQ ID NO: 1319073 - DNA, 25 bp, Homo sapien
aagcctttgaataagacatcttgca

SEQ ID NO: 1319074 - DNA, 25 bp, Homo sapien
ttgaataagacatcttgcagtcctc

SEQ ID NO: 1319075 - DNA, 25 bp, Homo sapien
tgcttgcgcatgtgggttcggaggt

SEQ ID NO: 1319076 - DNA, 25 bp, Homo sapien
gtcctcgtaagtgcagacatagggc

SEQ ID NO: 1319077 - DNA, 25 bp, Homo sapien
tgggaacttgaaaagcataggaatc

SEQ ID NO: 1319078 - DNA, 25 bp, Homo sapien
tgggagttgtccttgaatcaaatgg

SEQ ID NO: 1319079 - DNA, 25 bp, Homo sapien
tctgttttgggagttgtccttgaat

SEQ ID NO: 1319080 - DNA, 25 bp, Homo sapien
tccttgaatcaaatgggaacttgaa

SEQ ID NO: 1319081 - DNA, 25 bp, Homo sapien
tgcccacctgaagagtcagcatctg

SEQ ID NO: 1319082 - DNA, 25 bp, Homo sapien
tgagcgttgtcatattgcccacctg

SEQ ID NO: 1319083 - DNA, 25 bp, Homo sapien
gcatctggtccccatagagggtctg

SEQ ID NO: 1319084 - DNA, 25 bp, Homo sapien
tatcagtggaggtcatattctgccc

SEQ ID NO: 1319085 - DNA, 25 bp, Homo sapien
tctagactggttgtcatttggcccc

SEQ ID NO: 1319086 - DNA, 25 bp, Homo sapien
ggtcgtcatctgtctcccgtagaag

SEQ ID NO: 1319087 - DNA, 25 bp, Homo sapien
cattgtggaccccaagggaggcatc

SEQ ID NO: 1319088 - DNA, 25 bp, Homo sapien
agagagggtctcatcgctaccggaa

SEQ ID NO: 1319089 - DNA, 25 bp, Homo sapien
tctggagtctgatgtggtgtgactt

SEQ ID NO: 1319090 - DNA, 25 bp, Homo sapien
ttaaacgagtatgacttttctggag

SEQ ID NO: 1319091 - DNA, 25 bp, Homo sapien
aaacgagtatgacttttctggagtc

SEQ ID NO: 1319092 - DNA, 25 bp, Homo sapien
tgacttctggctgaaagcttcccac

SEQ ID NO: 1319093 - DNA, 25 bp, Homo sapien
cctgtgtgtattcttacatacagag

SEQ ID NO: 1319094 - DNA, 25 bp, Homo sapien
catggaaaccatagggctgctcacc

SEQ ID NO: 1319095 - DNA, 25 bp, Homo sapien
gtgtattcttacatacagagcaaga

SEQ ID NO: 1319096 - DNA, 25 bp, Homo sapien
gtgtgtattcttacatacagagcaa

SEQ ID NO: 1319097 - DNA, 25 bp, Homo sapien
ttttccacagtgagttcatagggtt

SEQ ID NO: 1319098 - DNA, 25 bp, Homo sapien
acagtgagttcatagggttgatcat

SEQ ID NO: 1319099 - DNA, 25 bp, Homo sapien
tccacagtgagttcatagggttgat

SEQ ID NO: 1319100 - DNA, 25 bp, Homo sapien
gagttcatagggttgatcatctgaa

SEQ ID NO: 1319101 - DNA, 25 bp, Homo sapien
gctgacagaagatgtttccacattc

SEQ ID NO: 1319102 - DNA, 25 bp, Homo sapien
cacactccttatacacaaagggttt

SEQ ID NO: 1319103 - DNA, 25 bp, Homo sapien
cttgctcagtaaggtttgattttcc

SEQ ID NO: 1319104 - DNA, 25 bp, Homo sapien
cacagtctttactctcaaaaggtct

SEQ ID NO: 1319105 - DNA, 25 bp, Homo sapien
tttccacatttgttatattcacaaa

SEQ ID NO: 1319106 - DNA, 25 bp, Homo sapien
catttgttatattcacaaagcttct

SEQ ID NO: 1319107 - DNA, 25 bp, Homo sapien
tccacatttgttatattcacaaagc

SEQ ID NO: 1319108 - DNA, 25 bp, Homo sapien
ttccacatttgttatattcacaaag

SEQ ID NO: 1319109 - DNA, 25 bp, Homo sapien
tggttatgagcgttcagatggttaa

SEQ ID NO: 1319110 - DNA, 25 bp, Homo sapien
tatgagcgttcagatggttaatgac

SEQ ID NO: 1319111 - DNA, 25 bp, Homo sapien
ctgtggttatgagcgttcagatggt

SEQ ID NO: 1319112 - DNA, 25 bp, Homo sapien
agcgttcagatggttaatgacatac

SEQ ID NO: 1319113 - DNA, 25 bp, Homo sapien
tagtgtgaaaatgctcatgctcggt

SEQ ID NO: 1319114 - DNA, 25 bp, Homo sapien
gtgaaaatgctcatgctcggtgaaa

SEQ ID NO: 1319115 - DNA, 25 bp, Homo sapien
tctctctagtgtgaaaatgctcatg

SEQ ID NO: 1319116 - DNA, 25 bp, Homo sapien
tctagtgtgaaaatgctcatgctcg

SEQ ID NO: 1319117 - DNA, 25 bp, Homo sapien
gcagaggggctttccccacataaac

SEQ ID NO: 1319118 - DNA, 25 bp, Homo sapien
ggctttccccacataaaccctctgc

SEQ ID NO: 1319119 - DNA, 25 bp, Homo sapien
tttccccacataaaccctctgctga

SEQ ID NO: 1319120 - DNA, 25 bp, Homo sapien
ctcacataccatgcaggcagagggg

SEQ ID NO: 1319121 - DNA, 25 bp, Homo sapien
ttataaggtttatctgtgtaagacc

SEQ ID NO: 1319122 - DNA, 25 bp, Homo sapien
tttataaggtttatctgtgtaagac

SEQ ID NO: 1319123 - DNA, 25 bp, Homo sapien
tataaggtttatctgtgtaagacct

SEQ ID NO: 1319124 - DNA, 25 bp, Homo sapien
aaagccagccaaatttcgcagtggg

SEQ ID NO: 1319125 - DNA, 25 bp, Homo sapien
accaactttagcaacactaatgttg

SEQ ID NO: 1319126 - DNA, 25 bp, Homo sapien
aactttagcaacactaatgttgata

SEQ ID NO: 1319127 - DNA, 25 bp, Homo sapien
caacactaatgttgataagttctga

SEQ ID NO: 1319128 - DNA, 25 bp, Homo sapien
gcttagcttccagaaaacatgtttc

SEQ ID NO: 1319129 - DNA, 25 bp, Homo sapien
cctggggcgtcctgaggcaggagca

SEQ ID NO: 1319130 - DNA, 25 bp, Homo sapien
ttcagggaagccactgaggacaggc

SEQ ID NO: 1319131 - DNA, 25 bp, Homo sapien
ggcccagaacaaggatgccagcccc

SEQ ID NO: 1319132 - DNA, 25 bp, Homo sapien
gctgcagaagcgggacttcagtgtg

SEQ ID NO: 1319133 - DNA, 25 bp, Homo sapien
gagccaggccattgagccaggcagt

SEQ ID NO: 1319134 - DNA, 25 bp, Homo sapien
gctggtcttgtcctgaggccctgtg

SEQ ID NO: 1319135 - DNA, 25 bp, Homo sapien
gccaggcagtctctagcaggctgca

SEQ ID NO: 1319136 - DNA, 25 bp, Homo sapien
tataagaagtgtccatgcacctatc

SEQ ID NO: 1319137 - DNA, 25 bp, Homo sapien
tcaacagtgagcaacattctgttgc

SEQ ID NO: 1319138 - DNA, 25 bp, Homo sapien
aacacaattttatgaccagatccag

SEQ ID NO: 1319139 - DNA, 25 bp, Homo sapien
tgcacctatcactccatttcaacag

SEQ ID NO: 1319140 - DNA, 25 bp, Homo sapien
ggcctgattataaaacagtgcagca

SEQ ID NO: 1319141 - DNA, 25 bp, Homo sapien
tcctgaggtctcagaataacttggg

SEQ ID NO: 1319142 - DNA, 25 bp, Homo sapien
ccagccacggctttataccatcaaa

SEQ ID NO: 1319143 - DNA, 25 bp, Homo sapien
tggtaggacccatttgcttgactat

SEQ ID NO: 1319144 - DNA, 25 bp, Homo sapien
atctccaacgctaagcctaaaataa

SEQ ID NO: 1319145 - DNA, 25 bp, Homo sapien
atccatctccaacgctaagcctaaa

SEQ ID NO: 1319146 - DNA, 25 bp, Homo sapien
ttgagggttttggtgaagattgtca

SEQ ID NO: 1319147 - DNA, 25 bp, Homo sapien
tgctccactgatgtcaatttgaatg

SEQ ID NO: 1319148 - DNA, 25 bp, Homo sapien
tccgcttaggtctggattggccccg

SEQ ID NO: 1319149 - DNA, 25 bp, Homo sapien
tgagcaccgccggaagtttctgccg

SEQ ID NO: 1319150 - DNA, 25 bp, Homo sapien
tgccagtcggcttcgtttcctacaa

SEQ ID NO: 1319151 - DNA, 25 bp, Homo sapien
gaccggaagtgtttctgtcggccgc

SEQ ID NO: 1319152 - DNA, 25 bp, Homo sapien
aaatgcataggagaaatatgtaacc

SEQ ID NO: 1319153 - DNA, 25 bp, Homo sapien
gatgcctgagagctcgaaaggttga

SEQ ID NO: 1319154 - DNA, 25 bp, Homo sapien
accgcacatggccctgagttgttgg

SEQ ID NO: 1319155 - DNA, 25 bp, Homo sapien
agatgatgcctgagagctcgaaagg

SEQ ID NO: 1319156 - DNA, 25 bp, Homo sapien
ggtttgcagactatcctttaagtag

SEQ ID NO: 1319157 - DNA, 25 bp, Homo sapien
gagatcacgtcttagctgcagatgg

SEQ ID NO: 1319158 - DNA, 25 bp, Homo sapien
ggcagagatcagtagcgaggctatt

SEQ ID NO: 1319159 - DNA, 25 bp, Homo sapien
tttcagtgtgtactctcagtttcca

SEQ ID NO: 1319160 - DNA, 25 bp, Homo sapien
tattgactgaaatctggactggaga

SEQ ID NO: 1319161 - DNA, 25 bp, Homo sapien
tcagtactgagctaagtttgaggtt

SEQ ID NO: 1319162 - DNA, 25 bp, Homo sapien
gataatgtttgagagagggccatga

SEQ ID NO: 1319163 - DNA, 25 bp, Homo sapien
gaaagataggaattaagatgcctcc

SEQ ID NO: 1319164 - DNA, 25 bp, Homo sapien
gggctgggccaaacagctaccctgt

SEQ ID NO: 1319165 - DNA, 25 bp, Homo sapien
tggacacagagctatgccactctcc

SEQ ID NO: 1319166 - DNA, 25 bp, Homo sapien
acaagcccacgccaagggcatgagc

SEQ ID NO: 1319167 - DNA, 25 bp, Homo sapien
ggccaagtggccaagcccttgcaag

SEQ ID NO: 1319168 - DNA, 25 bp, Homo sapien
tgcttgaagatgaagcctcgatagg

SEQ ID NO: 1319169 - DNA, 25 bp, Homo sapien
tcagaacggcttcgatgtctgcttg

SEQ ID NO: 1319170 - DNA, 25 bp, Homo sapien
taggcgagtgtcttcatgatgttgg

SEQ ID NO: 1319171 - DNA, 25 bp, Homo sapien
gatgttggcaatgttcttgcagtcg

SEQ ID NO: 1319172 - DNA, 25 bp, Homo sapien
tcattactgtgcgaccattcatcac

SEQ ID NO: 1319173 - DNA, 25 bp, Homo sapien
gccacccgccttgatgtctccattt

SEQ ID NO: 1319174 - DNA, 25 bp, Homo sapien
cggccgctgggcgatccttcttgtt

SEQ ID NO: 1319175 - DNA, 25 bp, Homo sapien
catggccagggtgactttgccggca

SEQ ID NO: 1319176 - DNA, 25 bp, Homo sapien
cttctcccacctcccttagatgctc

SEQ ID NO: 1319177 - DNA, 25 bp, Homo sapien
ttctcccacctcccttagatgctcc

SEQ ID NO: 1319178 - DNA, 25 bp, Homo sapien
tcttctcccacctcccttagatgct

SEQ ID NO: 1319179 - DNA, 25 bp, Homo sapien
ggtgaaggatgacgatggttccaca

SEQ ID NO: 1319180 - DNA, 25 bp, Homo sapien
gatgacgatggttccacaataaggg

SEQ ID NO: 1319181 - DNA, 25 bp, Homo sapien
aggatgacgatggttccacaataag

SEQ ID NO: 1319182 - DNA, 25 bp, Homo sapien
gaaggatgacgatggttccacaata

SEQ ID NO: 1319183 - DNA, 25 bp, Homo sapien
ggccaggctgggtacatccacatag

SEQ ID NO: 1319184 - DNA, 25 bp, Homo sapien
ggcagcacggacaccacatctttct

SEQ ID NO: 1319185 - DNA, 25 bp, Homo sapien
gtgttattgcttgtctgccatttgc

SEQ ID NO: 1319186 - DNA, 25 bp, Homo sapien
tcattattaattgtgggccctggtg

SEQ ID NO: 1319187 - DNA, 25 bp, Homo sapien
ctacagccaagtgaagggaacccag

SEQ ID NO: 1319188 - DNA, 25 bp, Homo sapien
gaacagctgagcagatctgccatac

SEQ ID NO: 1319189 - DNA, 25 bp, Homo sapien
tatagccagatcacctacagccaag

SEQ ID NO: 1319190 - DNA, 25 bp, Homo sapien
aactagaagtgccaggttatagcca

SEQ ID NO: 1319191 - DNA, 25 bp, Homo sapien
taggatcgccttaccgccaaatttc

SEQ ID NO: 1319192 - DNA, 25 bp, Homo sapien
tgttctggctactgagacatgaggg

SEQ ID NO: 1319193 - DNA, 25 bp, Homo sapien
gagttagcctatgaagaccatgctg

SEQ ID NO: 1319194 - DNA, 25 bp, Homo sapien
gatatgctgaattaaccgaccttag

SEQ ID NO: 1319195 - DNA, 25 bp, Homo sapien
cactctctctccgtgggcaaactta

SEQ ID NO: 1319196 - DNA, 25 bp, Homo sapien
gatatggatgttgctcagaactgtc

SEQ ID NO: 1319197 - DNA, 25 bp, Homo sapien
tctcccatctaggtaacggcagtgc

SEQ ID NO: 1319198 - DNA, 25 bp, Homo sapien
tctaagcccatgttcccattaccaa

SEQ ID NO: 1319199 - DNA, 25 bp, Homo sapien
tcaggacccaggcttgctagtgctt

SEQ ID NO: 1319200 - DNA, 25 bp, Homo sapien
gcagccaattctccgcctatcgtaa

SEQ ID NO: 1319201 - DNA, 25 bp, Homo sapien
aaattcaggctcatttgcaccttga

SEQ ID NO: 1319202 - DNA, 25 bp, Homo sapien
tgtgttaggaacctcttctgtgtgc

SEQ ID NO: 1319203 - DNA, 25 bp, Homo sapien
cacctccaaaacatgcactcccact

SEQ ID NO: 1319204 - DNA, 25 bp, Homo sapien
acctccaaaacatgcactcccacta

SEQ ID NO: 1319205 - DNA, 25 bp, Homo sapien
cctccaaaacatgcactcccactac

SEQ ID NO: 1319206 - DNA, 25 bp, Homo sapien
caggagtcctacttgctcttcttgc

SEQ ID NO: 1319207 - DNA, 25 bp, Homo sapien
ttctaaggctgtccctcgtgctagg

SEQ ID NO: 1319208 - DNA, 25 bp, Homo sapien
tcaagggcattaaccctcaaatggg

SEQ ID NO: 1319209 - DNA, 25 bp, Homo sapien
gatcttgtgcttgtggccttctaag

SEQ ID NO: 1319210 - DNA, 25 bp, Homo sapien
ctggtttatgaactaggtgcagctc

SEQ ID NO: 1319211 - DNA, 25 bp, Homo sapien
tggtttatgaactaggtgcagctct

SEQ ID NO: 1319212 - DNA, 25 bp, Homo sapien
aaagtggccactttgaaaatccata

SEQ ID NO: 1319213 - DNA, 25 bp, Homo sapien
tgcacatgctcagggtttgtatttc

SEQ ID NO: 1319214 - DNA, 25 bp, Homo sapien
ggccactttgaaaatccatacgtct

SEQ ID NO: 1319215 - DNA, 25 bp, Homo sapien
ttgaaaatccatacgtctccaggct

SEQ ID NO: 1319216 - DNA, 25 bp, Homo sapien
ccaggcactatccaggcaggccagt

SEQ ID NO: 1319217 - DNA, 25 bp, Homo sapien
ttccatctatggttgctactgaaga

SEQ ID NO: 1319218 - DNA, 25 bp, Homo sapien
ctggtgtctggcaagaaccaattcc

SEQ ID NO: 1319219 - DNA, 25 bp, Homo sapien
gcaagaaccaattcctcagatgtct

SEQ ID NO: 1319220 - DNA, 25 bp, Homo sapien
gtctctattggtagcgcaaagccca

SEQ ID NO: 1319221 - DNA, 25 bp, Homo sapien
tgaaatcacaaagaaccgtcagggc

SEQ ID NO: 1319222 - DNA, 25 bp, Homo sapien
taccgaaggtctgttcaggcctgcg

SEQ ID NO: 1319223 - DNA, 25 bp, Homo sapien
gcccttagagaacccaagtgcgtag

SEQ ID NO: 1319224 - DNA, 25 bp, Homo sapien
cagtgacaggagctgacctctgacc

SEQ ID NO: 1319225 - DNA, 25 bp, Homo sapien
catgtcactaaggaccagcctgagt

SEQ ID NO: 1319226 - DNA, 25 bp, Homo sapien
gctgggaagcagtccacgtcaaact

SEQ ID NO: 1319227 - DNA, 25 bp, Homo sapien
tctttggtgcgagggccattaacct

SEQ ID NO: 1319228 - DNA, 25 bp, Homo sapien
tgccgggggaatatgcgaagggact

SEQ ID NO: 1319229 - DNA, 25 bp, Homo sapien
acgcgggcaagggacgatggatgga

SEQ ID NO: 1319230 - DNA, 25 bp, Homo sapien
agggacgatggatggagctgccggg

SEQ ID NO: 1319231 - DNA, 25 bp, Homo sapien
gggactggggcacgcgggcaaggga

SEQ ID NO: 1319232 - DNA, 25 bp, Homo sapien
ggccggcctatgtgttgcaggctga

SEQ ID NO: 1319233 - DNA, 25 bp, Homo sapien
agcagcccatggcgaagctgtaagc

SEQ ID NO: 1319234 - DNA, 25 bp, Homo sapien
tgaggcccttgttcatgtctagaag

SEQ ID NO: 1319235 - DNA, 25 bp, Homo sapien
tagaagtccattcttgggccagcag

SEQ ID NO: 1319236 - DNA, 25 bp, Homo sapien
gtgatggaaccaaagtgactgccag

SEQ ID NO: 1319237 - DNA, 25 bp, Homo sapien
caggacagcgtacagggcagtggtc

SEQ ID NO: 1319238 - DNA, 25 bp, Homo sapien
cagaatgaagcttgggtgagtttcc

SEQ ID NO: 1319239 - DNA, 25 bp, Homo sapien
tccagaagttggataggtggtccag

SEQ ID NO: 1319240 - DNA, 25 bp, Homo sapien
ctgtgagtagatgagcaccgcagtg

SEQ ID NO: 1319241 - DNA, 25 bp, Homo sapien
gagtagatgagcaccgcagtggtcc

SEQ ID NO: 1319242 - DNA, 25 bp, Homo sapien
cgcagtggtccagccctttgctagt

SEQ ID NO: 1319243 - DNA, 25 bp, Homo sapien
ccctttgctagtcccaggaggtctc

SEQ ID NO: 1319244 - DNA, 25 bp, Homo sapien
agctgaacccacaaatcaggggctg

SEQ ID NO: 1319245 - DNA, 25 bp, Homo sapien
gcgggaagaccacttcagataacat

SEQ ID NO: 1319246 - DNA, 25 bp, Homo sapien
gtcatcctgagtcttatcgcagcta

SEQ ID NO: 1319247 - DNA, 25 bp, Homo sapien
gataacattagatgcttgccccacc

SEQ ID NO: 1319248 - DNA, 25 bp, Homo sapien
caccgcgtcaccgtgattagattat

SEQ ID NO: 1319249 - DNA, 25 bp, Homo sapien
ggggccaccctaagcatagtaccag

SEQ ID NO: 1319250 - DNA, 25 bp, Homo sapien
gccaccctaagcatagtaccagggc

SEQ ID NO: 1319251 - DNA, 25 bp, Homo sapien
accctaagcatagtaccagggccca

SEQ ID NO: 1319252 - DNA, 25 bp, Homo sapien
ccctaagcatagtaccagggcccag

SEQ ID NO: 1319253 - DNA, 25 bp, Homo sapien
ggctgctgccccattagcttagtgg

SEQ ID NO: 1319254 - DNA, 25 bp, Homo sapien
gctgctgcaatttccatgcacaggg

SEQ ID NO: 1319255 - DNA, 25 bp, Homo sapien
agcaggtgccgagctgctcccggct

SEQ ID NO: 1319256 - DNA, 25 bp, Homo sapien
ttagtggccagccatctgcgacggg

SEQ ID NO: 1319257 - DNA, 25 bp, Homo sapien
cagctcagtttgatcccaagtatta

SEQ ID NO: 1319258 - DNA, 25 bp, Homo sapien
tatggtcccgagtattttcaggtgg

SEQ ID NO: 1319259 - DNA, 25 bp, Homo sapien
ttgagaataagataagtagctcctg

SEQ ID NO: 1319260 - DNA, 25 bp, Homo sapien
ttggcttcaccgctgagtcagaggg

SEQ ID NO: 1319261 - DNA, 25 bp, Homo sapien
gagaactcgacaggcctcgacttga

SEQ ID NO: 1319262 - DNA, 25 bp, Homo sapien
tagcctgaagtctaggtccccactc

SEQ ID NO: 1319263 - DNA, 25 bp, Homo sapien
tcttacaggtcctagaagcaggcag

SEQ ID NO: 1319264 - DNA, 25 bp, Homo sapien
tgcccacagtcctttgagaactcga

SEQ ID NO: 1319265 - DNA, 25 bp, Homo sapien
taacagtgccgatgcagtgagacat

SEQ ID NO: 1319266 - DNA, 25 bp, Homo sapien
cacatgttaacaaggcgagggaagg

SEQ ID NO: 1319267 - DNA, 25 bp, Homo sapien
ctagtcaaaggttagaataccaatc

SEQ ID NO: 1319268 - DNA, 25 bp, Homo sapien
gattaccccaaaggcaacacatgtt

SEQ ID NO: 1319269 - DNA, 25 bp, Homo sapien
ctgctatggcccccagcaaagaact

SEQ ID NO: 1319270 - DNA, 25 bp, Homo sapien
tgctatggcccccagcaaagaactt

SEQ ID NO: 1319271 - DNA, 25 bp, Homo sapien
ctatggcccccagcaaagaacttca

SEQ ID NO: 1319272 - DNA, 25 bp, Homo sapien
tatggcccccagcaaagaacttcat

SEQ ID NO: 1319273 - DNA, 25 bp, Homo sapien
tcaggtgaccaagcagaccaggacc

SEQ ID NO: 1319274 - DNA, 25 bp, Homo sapien
caggtgaccaagcagaccaggacct

SEQ ID NO: 1319275 - DNA, 25 bp, Homo sapien
gctctgcccacagattcagctctga

SEQ ID NO: 1319276 - DNA, 25 bp, Homo sapien
tctcctagagacaagccagctctgc

SEQ ID NO: 1319277 - DNA, 25 bp, Homo sapien
ctcagctagtgccatgtctctccta

SEQ ID NO: 1319278 - DNA, 25 bp, Homo sapien
catgtctctcctagagacaagccag

SEQ ID NO: 1319279 - DNA, 25 bp, Homo sapien
caccaactagggcagtgtcataatc

SEQ ID NO: 1319280 - DNA, 25 bp, Homo sapien
tctccacagtcagaaataaccacat

SEQ ID NO: 1319281 - DNA, 25 bp, Homo sapien
aaaggacgggagctctgaggcacaa

SEQ ID NO: 1319282 - DNA, 25 bp, Homo sapien
cagtgcatattagctaaggaaaagg

SEQ ID NO: 1319283 - DNA, 25 bp, Homo sapien
tgcttgaagtaatccgccactggca

SEQ ID NO: 1319284 - DNA, 25 bp, Homo sapien
gcaagcccaagtactggcactggcc

SEQ ID NO: 1319285 - DNA, 25 bp, Homo sapien
cagattaatccactgcttgaagtaa

SEQ ID NO: 1319286 - DNA, 25 bp, Homo sapien
agtaatccgccactggcaagcccaa

SEQ ID NO: 1319287 - DNA, 25 bp, Homo sapien
gccaccattacccttccacatctca

SEQ ID NO: 1319288 - DNA, 25 bp, Homo sapien
caccattacccttccacatctcatc

SEQ ID NO: 1319289 - DNA, 25 bp, Homo sapien
cattacccttccacatctcatcaag

SEQ ID NO: 1319290 - DNA, 25 bp, Homo sapien
ttacccttccacatctcatcaaggt

SEQ ID NO: 1319291 - DNA, 25 bp, Homo sapien
cacggctgccatgtaacactgggct

SEQ ID NO: 1319292 - DNA, 25 bp, Homo sapien
tgccatgtaacactgggctgggctc

SEQ ID NO: 1319293 - DNA, 25 bp, Homo sapien
cagggtgaacccagccgggcagaga

SEQ ID NO: 1319294 - DNA, 25 bp, Homo sapien
gcctggcacgggtcacggctgccat

SEQ ID NO: 1319295 - DNA, 25 bp, Homo sapien
acagctggaagtgttcccagacatg

SEQ ID NO: 1319296 - DNA, 25 bp, Homo sapien
gacatgctactctggagagttccca

SEQ ID NO: 1319297 - DNA, 25 bp, Homo sapien
agagggatgctccatggtccaggct

SEQ ID NO: 1319298 - DNA, 25 bp, Homo sapien
tgcgtctgggtctggcggcacagct

SEQ ID NO: 1319299 - DNA, 25 bp, Homo sapien
agcaccttcaatggcaatttccaac

SEQ ID NO: 1319300 - DNA, 25 bp, Homo sapien
gaatgccagcacttccgggatatgc

SEQ ID NO: 1319301 - DNA, 25 bp, Homo sapien
cttcaatggcaatttccaacaggat

SEQ ID NO: 1319302 - DNA, 25 bp, Homo sapien
tgactttaggctactaccggaatgc

SEQ ID NO: 1319303 - DNA, 25 bp, Homo sapien
ccatgatgtattcagggtgagggcc

SEQ ID NO: 1319304 - DNA, 25 bp, Homo sapien
ggagcttcaccccacaatgaatggc

SEQ ID NO: 1319305 - DNA, 25 bp, Homo sapien
tctctcattagaggcaagcctgcca

SEQ ID NO: 1319306 - DNA, 25 bp, Homo sapien
aagcctgccatgatgtattcagggt

SEQ ID NO: 1319307 - DNA, 25 bp, Homo sapien
gatctaagaggccttccttcgccat

SEQ ID NO: 1319308 - DNA, 25 bp, Homo sapien
acttgacgtttggatctaagaggcc

SEQ ID NO: 1319309 - DNA, 25 bp, Homo sapien
caaaaattgacttgacgtttggatc

SEQ ID NO: 1319310 - DNA, 25 bp, Homo sapien
tctccacaggtgacaaaaattgact

SEQ ID NO: 1319311 - DNA, 25 bp, Homo sapien
cttccactgctaaatggtctctctc

SEQ ID NO: 1319312 - DNA, 25 bp, Homo sapien
cactgctaaatggtctctctcctct

SEQ ID NO: 1319313 - DNA, 25 bp, Homo sapien
tctgacccaactccttgcatgtatg

SEQ ID NO: 1319314 - DNA, 25 bp, Homo sapien
cccaactccttgcatgtatgtgcac

SEQ ID NO: 1319315 - DNA, 25 bp, Homo sapien
gagatccacgggctttttctcttct

SEQ ID NO: 1319316 - DNA, 25 bp, Homo sapien
atgagatccacgggctttttctctt

SEQ ID NO: 1319317 - DNA, 25 bp, Homo sapien
ctaatgagatccacgggctttttct

SEQ ID NO: 1319318 - DNA, 25 bp, Homo sapien
gatccacgggctttttctcttctcc

SEQ ID NO: 1319319 - DNA, 25 bp, Homo sapien
tctctgccaagggttttcaagtctt

SEQ ID NO: 1319320 - DNA, 25 bp, Homo sapien
acatcctagaagtgtggtctctgcc

SEQ ID NO: 1319321 - DNA, 25 bp, Homo sapien
tagctccccgaggagaacatcctag

SEQ ID NO: 1319322 - DNA, 25 bp, Homo sapien
ttgatttccctcacataggcaattg

SEQ ID NO: 1319323 - DNA, 25 bp, Homo sapien
tgctgcaggcttggctgaccatcca

SEQ ID NO: 1319324 - DNA, 25 bp, Homo sapien
gcacttgctgcaggcttggctgacc

SEQ ID NO: 1319325 - DNA, 25 bp, Homo sapien
gcaggcttggctgaccatccaccat

SEQ ID NO: 1319326 - DNA, 25 bp, Homo sapien
acttgctgcaggcttggctgaccat

SEQ ID NO: 1319327 - DNA, 25 bp, Homo sapien
tactgggaagttctatcttaggcct

SEQ ID NO: 1319328 - DNA, 25 bp, Homo sapien
tactaatgacctataagacacgtgt

SEQ ID NO: 1319329 - DNA, 25 bp, Homo sapien
caggatgctatgagggaacgagaca

SEQ ID NO: 1319330 - DNA, 25 bp, Homo sapien
tgttacagtttaagcccagtcccac

SEQ ID NO: 1319331 - DNA, 25 bp, Homo sapien
caagtgtttacttggtagcagaccc

SEQ ID NO: 1319332 - DNA, 25 bp, Homo sapien
ggatcaggtctagtttcttccctca

SEQ ID NO: 1319333 - DNA, 25 bp, Homo sapien
tctggtatggagacagggcaaaata

SEQ ID NO: 1319334 - DNA, 25 bp, Homo sapien
tgatctgaggttttccaaacaagac

SEQ ID NO: 1319335 - DNA, 25 bp, Homo sapien
catggtccggccatttagctttagg

SEQ ID NO: 1319336 - DNA, 25 bp, Homo sapien
tggatggactacaggctggacatac

SEQ ID NO: 1319337 - DNA, 25 bp, Homo sapien
catgtgaaaggtagactcaatctcc

SEQ ID NO: 1319338 - DNA, 25 bp, Homo sapien
tagctttaggatggggaactcgatg

SEQ ID NO: 1319339 - DNA, 25 bp, Homo sapien
aacgccagcccaatcgcttagctag

SEQ ID NO: 1319340 - DNA, 25 bp, Homo sapien
ccaaggtcctggtgtgcaaacaggc

SEQ ID NO: 1319341 - DNA, 25 bp, Homo sapien
tatttaatagagatgcacagcacca

SEQ ID NO: 1319342 - DNA, 25 bp, Homo sapien
ttgcagaacgctggctgtgcagcac

SEQ ID NO: 1319343 - DNA, 25 bp, Homo sapien
actggcccaaacagcccagtagtgg

SEQ ID NO: 1319344 - DNA, 25 bp, Homo sapien
cccaaacagcccagtagtgggagag

SEQ ID NO: 1319345 - DNA, 25 bp, Homo sapien
agccagtacttccatacttcccaga

SEQ ID NO: 1319346 - DNA, 25 bp, Homo sapien
gtgggagaggtgccccaatctgcac

SEQ ID NO: 1319347 - DNA, 25 bp, Homo sapien
gtgcccaagtgccagcctctatgtc

SEQ ID NO: 1319348 - DNA, 25 bp, Homo sapien
cccaacacaaagatttgtgacaatg

SEQ ID NO: 1319349 - DNA, 25 bp, Homo sapien
gttgctcagataatgaaactgttat

SEQ ID NO: 1319350 - DNA, 25 bp, Homo sapien
gataatgaaactgttattcctgacc

SEQ ID NO: 1319351 - DNA, 25 bp, Homo sapien
gactttcaatgctaacactgaaaca

SEQ ID NO: 1319352 - DNA, 25 bp, Homo sapien
tggactttcaatgctaacactgaaa

SEQ ID NO: 1319353 - DNA, 25 bp, Homo sapien
aacatggactttcaatgctaacact

SEQ ID NO: 1319354 - DNA, 25 bp, Homo sapien
tttcaatgctaacactgaaacacca

SEQ ID NO: 1319355 - DNA, 25 bp, Homo sapien
tttgtcagttgctttgtgcttcggg

SEQ ID NO: 1319356 - DNA, 25 bp, Homo sapien
ccgtcgatttgtccggacttgtttg

SEQ ID NO: 1319357 - DNA, 25 bp, Homo sapien
tgctttgtgcttcgggtcatctttg

SEQ ID NO: 1319358 - DNA, 25 bp, Homo sapien
catctttggcatttggctgtttggg

SEQ ID NO: 1319359 - DNA, 25 bp, Homo sapien
caggttatgtgctagagaggtcccc

SEQ ID NO: 1319360 - DNA, 25 bp, Homo sapien
cctggaggcatcactaaggaagggc

SEQ ID NO: 1319361 - DNA, 25 bp, Homo sapien
tatgttgataagagggcctgatctc

SEQ ID NO: 1319362 - DNA, 25 bp, Homo sapien
gcccaaggtcagactaccagtaggt

SEQ ID NO: 1319363 - DNA, 25 bp, Homo sapien
aacaccatcaaccatgaatttcctt

SEQ ID NO: 1319364 - DNA, 25 bp, Homo sapien
attcaacaccatcaaccatgaattt

SEQ ID NO: 1319365 - DNA, 25 bp, Homo sapien
caacaccatcaaccatgaatttcct

SEQ ID NO: 1319366 - DNA, 25 bp, Homo sapien
tcaacaccatcaaccatgaatttcc

SEQ ID NO: 1319367 - DNA, 25 bp, Homo sapien
tccgtggcaggagcatcaatacata

SEQ ID NO: 1319368 - DNA, 25 bp, Homo sapien
cctaacagggttttgtccgtggcag

SEQ ID NO: 1319369 - DNA, 25 bp, Homo sapien
tactggccaactacatgcagggaca

SEQ ID NO: 1319370 - DNA, 25 bp, Homo sapien
tagagccacttgtgtatcagacctg

SEQ ID NO: 1319371 - DNA, 25 bp, Homo sapien
ttgactctccctagagacctagcag

SEQ ID NO: 1319372 - DNA, 25 bp, Homo sapien
gacaccttctagctcgaatgtgaga

SEQ ID NO: 1319373 - DNA, 25 bp, Homo sapien
gacaatacctcagagccttagctta

SEQ ID NO: 1319374 - DNA, 25 bp, Homo sapien
gcccacccaaatgctatgctgaggt

SEQ ID NO: 1319375 - DNA, 25 bp, Homo sapien
tatgtctgctccaaatacagacagg

SEQ ID NO: 1319376 - DNA, 25 bp, Homo sapien
tgcttctacattgctatgtctgctc

SEQ ID NO: 1319377 - DNA, 25 bp, Homo sapien
cattgctatgtctgctccaaataca

SEQ ID NO: 1319378 - DNA, 25 bp, Homo sapien
tgctccaaatacagacaggcccttc

SEQ ID NO: 1319379 - DNA, 25 bp, Homo sapien
gtgaagttgcaatacagccaagact

SEQ ID NO: 1319380 - DNA, 25 bp, Homo sapien
ccgggaatactagtgaggagccata

SEQ ID NO: 1319381 - DNA, 25 bp, Homo sapien
gactcggacacagcaaacgcttgtt

SEQ ID NO: 1319382 - DNA, 25 bp, Homo sapien
caggcggaggcccatccttatgagg

SEQ ID NO: 1319383 - DNA, 25 bp, Homo sapien
cactggccatcaatagaggaattca

SEQ ID NO: 1319384 - DNA, 25 bp, Homo sapien
ggccatcaatagaggaattcattta

SEQ ID NO: 1319385 - DNA, 25 bp, Homo sapien
atcactggccatcaatagaggaatt

SEQ ID NO: 1319386 - DNA, 25 bp, Homo sapien
ggcctagtgggccaccccattccca

SEQ ID NO: 1319387 - DNA, 25 bp, Homo sapien
tccagtttagaagaatagcgtcagc

SEQ ID NO: 1319388 - DNA, 25 bp, Homo sapien
tgttacattaacgtcggttttgcat

SEQ ID NO: 1319389 - DNA, 25 bp, Homo sapien
caaccataatgttacattaacgtcg

SEQ ID NO: 1319390 - DNA, 25 bp, Homo sapien
tgctgtgggaagcataactttgaat

SEQ ID NO: 1319391 - DNA, 25 bp, Homo sapien
ttaaagatgcacaattaaagatccc

SEQ ID NO: 1319392 - DNA, 25 bp, Homo sapien
aaccatcactcggtgcacatccaca

SEQ ID NO: 1319393 - DNA, 25 bp, Homo sapien
ctgaggtggtgagtgaacttgcccc

SEQ ID NO: 1319394 - DNA, 25 bp, Homo sapien
ggcctcagggtcacaacaaccatca

SEQ ID NO: 1319395 - DNA, 25 bp, Homo sapien
caatgctgttactcacccaagtaca

SEQ ID NO: 1319396 - DNA, 25 bp, Homo sapien
catgtttataaccaatgctgttact

SEQ ID NO: 1319397 - DNA, 25 bp, Homo sapien
tactcacccaagtacaacagggctt

SEQ ID NO: 1319398 - DNA, 25 bp, Homo sapien
tataaccaatgctgttactcaccca

SEQ ID NO: 1319399 - DNA, 25 bp, Homo sapien
tcctttaagatagtcccaataagct

SEQ ID NO: 1319400 - DNA, 25 bp, Homo sapien
aataagctgactcaactaactcagg

SEQ ID NO: 1319401 - DNA, 25 bp, Homo sapien
tagtttttcgtgatggcattccttt

SEQ ID NO: 1319402 - DNA, 25 bp, Homo sapien
ttttcgtgatggcattcctttaaga

SEQ ID NO: 1319403 - DNA, 25 bp, Homo sapien
ggaaggacaccattgccgccatgga

SEQ ID NO: 1319404 - DNA, 25 bp, Homo sapien
aatctgtggcttgtcgcacgtggcc

SEQ ID NO: 1319405 - DNA, 25 bp, Homo sapien
ccagctttctggtggatatggagca

SEQ ID NO: 1319406 - DNA, 25 bp, Homo sapien
tacgaagaaaatcgagctgctccag

SEQ ID NO: 1319407 - DNA, 25 bp, Homo sapien
ctgtaaaggtgctagcattgaacat

SEQ ID NO: 1319408 - DNA, 25 bp, Homo sapien
gctagcattgaacatccagaagcat

SEQ ID NO: 1319409 - DNA, 25 bp, Homo sapien
aaggtgctagcattgaacatccaga

SEQ ID NO: 1319410 - DNA, 25 bp, Homo sapien
ggtgctagcattgaacatccagaag

SEQ ID NO: 1319411 - DNA, 25 bp, Homo sapien
tcaaaggcaatgaggccactaccac

SEQ ID NO: 1319412 - DNA, 25 bp, Homo sapien
aagtccagcgcgtactcaaaggcaa

SEQ ID NO: 1319413 - DNA, 25 bp, Homo sapien
ggctcccttcacatagggtagaggg

SEQ ID NO: 1319414 - DNA, 25 bp, Homo sapien
tagagggatagcaccctgtgaagtc

SEQ ID NO: 1319415 - DNA, 25 bp, Homo sapien
tcatgaatgccaaggaacgtttact

SEQ ID NO: 1319416 - DNA, 25 bp, Homo sapien
aatgcaacccacgattctgaactgg

SEQ ID NO: 1319417 - DNA, 25 bp, Homo sapien
tcacacgacgagaagaacaaagcat

SEQ ID NO: 1319418 - DNA, 25 bp, Homo sapien
cacccactggccaagaaacaatgat

SEQ ID NO: 1319419 - DNA, 25 bp, Homo sapien
aggtcggcaacttaaccctcaaatg

SEQ ID NO: 1319420 - DNA, 25 bp, Homo sapien
ggccagcccgatttggagaagcagg

SEQ ID NO: 1319421 - DNA, 25 bp, Homo sapien
ggggccagcccgatttggagaagca

SEQ ID NO: 1319422 - DNA, 25 bp, Homo sapien
ccagcccgatttggagaagcaggcc

SEQ ID NO: 1319423 - DNA, 25 bp, Homo sapien
cagcccgatttggagaagcaggcct

SEQ ID NO: 1319424 - DNA, 25 bp, Homo sapien
aaccacagaggagtcgttctggtgt

SEQ ID NO: 1319425 - DNA, 25 bp, Homo sapien
tcaccagattagaggaaccacagag

SEQ ID NO: 1319426 - DNA, 25 bp, Homo sapien
gagagaccaaagaagcaccaaatca

SEQ ID NO: 1319427 - DNA, 25 bp, Homo sapien
aagcaccaaatcaccagattagagg

SEQ ID NO: 1319428 - DNA, 25 bp, Homo sapien
aacaggttctgagtccagctgactg

SEQ ID NO: 1319429 - DNA, 25 bp, Homo sapien
ctgcaacaggttctgagtccagctg

SEQ ID NO: 1319430 - DNA, 25 bp, Homo sapien
gcaacaggttctgagtccagctgac

SEQ ID NO: 1319431 - DNA, 25 bp, Homo sapien
tgcaacaggttctgagtccagctga

SEQ ID NO: 1319432 - DNA, 25 bp, Homo sapien
cacagagggtctgaacaggcatact

SEQ ID NO: 1319433 - DNA, 25 bp, Homo sapien
tcaggctcatgcaaagaggaatcaa

SEQ ID NO: 1319434 - DNA, 25 bp, Homo sapien
caggcatactaatggcctcctgagg

SEQ ID NO: 1319435 - DNA, 25 bp, Homo sapien
ggaatcaattgcaaggacacagagg

SEQ ID NO: 1319436 - DNA, 25 bp, Homo sapien
caatcccaggaactagcacagtgcc

SEQ ID NO: 1319437 - DNA, 25 bp, Homo sapien
gcctggcccttagctattgaacaaa

SEQ ID NO: 1319438 - DNA, 25 bp, Homo sapien
cagacaggttggaactaaccaccca

SEQ ID NO: 1319439 - DNA, 25 bp, Homo sapien
tgaacaaacaagctcgagtccctgg

SEQ ID NO: 1319440 - DNA, 25 bp, Homo sapien
tgctgaaggttctgtgagagctgga

SEQ ID NO: 1319441 - DNA, 25 bp, Homo sapien
ttcgaagatgccaagaccggcagct

SEQ ID NO: 1319442 - DNA, 25 bp, Homo sapien
cgaagatgccaagaccggcagctgg

SEQ ID NO: 1319443 - DNA, 25 bp, Homo sapien
ggttctgtgagagctggaaagcccc

SEQ ID NO: 1319444 - DNA, 25 bp, Homo sapien
tgaaggatactacacctcaaactct

SEQ ID NO: 1319445 - DNA, 25 bp, Homo sapien
tcaataccaaggatcaaatccccat

SEQ ID NO: 1319446 - DNA, 25 bp, Homo sapien
tttcaataccaaggatcaaatcccc

SEQ ID NO: 1319447 - DNA, 25 bp, Homo sapien
aatccccatgaaggatactacacct

SEQ ID NO: 1319448 - DNA, 25 bp, Homo sapien
gcaagaactcgcagtcaagcctcaa

SEQ ID NO: 1319449 - DNA, 25 bp, Homo sapien
taagaaaacacctgttgctggacca

SEQ ID NO: 1319450 - DNA, 25 bp, Homo sapien
tctcgcagacacaacgatgggcact

SEQ ID NO: 1319451 - DNA, 25 bp, Homo sapien
cagaaagctagccaggttaggccct

SEQ ID NO: 1319452 - DNA, 25 bp, Homo sapien
attaaccagggcccaatcttggcgg

SEQ ID NO: 1319453 - DNA, 25 bp, Homo sapien
ccagcaccccaggttgcataaattc

SEQ ID NO: 1319454 - DNA, 25 bp, Homo sapien
tgcataaattctgcgcaccgcgacc

SEQ ID NO: 1319455 - DNA, 25 bp, Homo sapien
ttaagtaagcatccagggtaagcac

SEQ ID NO: 1319456 - DNA, 25 bp, Homo sapien
aactcgggcccatccaagtccaggg

SEQ ID NO: 1319457 - DNA, 25 bp, Homo sapien
gtgttgcccccaactcgggcccatc

SEQ ID NO: 1319458 - DNA, 25 bp, Homo sapien
cccaactcgggcccatccaagtcca

SEQ ID NO: 1319459 - DNA, 25 bp, Homo sapien
ttgcccccaactcgggcccatccaa

SEQ ID NO: 1319460 - DNA, 25 bp, Homo sapien
cctcagcaagcgctcagggcagttg

SEQ ID NO: 1319461 - DNA, 25 bp, Homo sapien
cctccaggtgcaggccccgacgtct

SEQ ID NO: 1319462 - DNA, 25 bp, Homo sapien
gtgcaggccccgacgtctccctcgg

SEQ ID NO: 1319463 - DNA, 25 bp, Homo sapien
gcagccagcaccacgagtccacaac

SEQ ID NO: 1319464 - DNA, 25 bp, Homo sapien
tacatgactcctcatgattcgttca

SEQ ID NO: 1319465 - DNA, 25 bp, Homo sapien
gaatgtgggctcacaacgtgacaga

SEQ ID NO: 1319466 - DNA, 25 bp, Homo sapien
gtaattattgtcatctactttcgga

SEQ ID NO: 1319467 - DNA, 25 bp, Homo sapien
atctactttcggatgtgggcctggg

SEQ ID NO: 1319468 - DNA, 25 bp, Homo sapien
catcgccgttaaaacacgagtcctt

SEQ ID NO: 1319469 - DNA, 25 bp, Homo sapien
agtaacatcgccgttaaaacacgag

SEQ ID NO: 1319470 - DNA, 25 bp, Homo sapien
ggtaactgctcccaagtgttagtaa

SEQ ID NO: 1319471 - DNA, 25 bp, Homo sapien
tcccaagtgttagtaacatcgccgt

SEQ ID NO: 1319472 - DNA, 25 bp, Homo sapien
taactccggtattccactgaggtcc

SEQ ID NO: 1319473 - DNA, 25 bp, Homo sapien
aactccggtattccactgaggtcca

SEQ ID NO: 1319474 - DNA, 25 bp, Homo sapien
ctaactccggtattccactgaggtc

SEQ ID NO: 1319475 - DNA, 25 bp, Homo sapien
ccaaagtggctgggctgtaaccctg

SEQ ID NO: 1319476 - DNA, 25 bp, Homo sapien
tccagaattcaatccaaagtggctg

SEQ ID NO: 1319477 - DNA, 25 bp, Homo sapien
aagtggctgggctgtaaccctgaca

SEQ ID NO: 1319478 - DNA, 25 bp, Homo sapien
cagaattcaatccaaagtggctggg

SEQ ID NO: 1319479 - DNA, 25 bp, Homo sapien
ccaccaggttataagtaacctggag

SEQ ID NO: 1319480 - DNA, 25 bp, Homo sapien
caccaggttataagtaacctggagt

SEQ ID NO: 1319481 - DNA, 25 bp, Homo sapien
ctgggcaaggaacaaggagagatcc

SEQ ID NO: 1319482 - DNA, 25 bp, Homo sapien
ggcaaggaacaaggagagatcccct

SEQ ID NO: 1319483 - DNA, 25 bp, Homo sapien
tgggcaaggaacaaggagagatccc

SEQ ID NO: 1319484 - DNA, 25 bp, Homo sapien
actgggcaaggaacaaggagagatc

SEQ ID NO: 1319485 - DNA, 25 bp, Homo sapien
cagcttccctttagggctttctggg

SEQ ID NO: 1319486 - DNA, 25 bp, Homo sapien
ggacaggagcctgaacagcttccct

SEQ ID NO: 1319487 - DNA, 25 bp, Homo sapien
aggcctcctagttccctccaggtgc

SEQ ID NO: 1319488 - DNA, 25 bp, Homo sapien
gagcaccgtagtggcctgcggtgga

SEQ ID NO: 1319489 - DNA, 25 bp, Homo sapien
tgatcctgcatcagaattaaagggc

SEQ ID NO: 1319490 - DNA, 25 bp, Homo sapien
tgcaagtgtggacacgtgatggact

SEQ ID NO: 1319491 - DNA, 25 bp, Homo sapien
catgggtcgggtgggtcttggtgcc

SEQ ID NO: 1319492 - DNA, 25 bp, Homo sapien
agaattaaagggcttaagggcagca

SEQ ID NO: 1319493 - DNA, 25 bp, Homo sapien
cttacccacatgagagcaagccccg

SEQ ID NO: 1319494 - DNA, 25 bp, Homo sapien
acatgagagcaagccccgggtcctt

SEQ ID NO: 1319495 - DNA, 25 bp, Homo sapien
acccacatgagagcaagccccgggt

SEQ ID NO: 1319496 - DNA, 25 bp, Homo sapien
caagccccgggtccttggggagcat

SEQ ID NO: 1319497 - DNA, 25 bp, Homo sapien
ccaaggaatttccacggcaagtatg

SEQ ID NO: 1319498 - DNA, 25 bp, Homo sapien
tgttcaggaacctggctaactttcc

SEQ ID NO: 1319499 - DNA, 25 bp, Homo sapien
aagtgcgaccgttctcccaaggaat

SEQ ID NO: 1319500 - DNA, 25 bp, Homo sapien
cgaacccgggacttttcatgcacca

SEQ ID NO: 1319501 - DNA, 25 bp, Homo sapien
ttgtcagcccgggccgagcgacctt

SEQ ID NO: 1319502 - DNA, 25 bp, Homo sapien
gccgagcgaccttctctgcccggaa

SEQ ID NO: 1319503 - DNA, 25 bp, Homo sapien
tctcttctgacttaagaacaaaact

SEQ ID NO: 1319504 - DNA, 25 bp, Homo sapien
tgagcacgccggtcgctgcggtcct

SEQ ID NO: 1319505 - DNA, 25 bp, Homo sapien
aggagcctctccgagagctcgcggc

SEQ ID NO: 1319506 - DNA, 25 bp, Homo sapien
tcggcctgggcgtttcgcctttgtg

SEQ ID NO: 1319507 - DNA, 25 bp, Homo sapien
tttcttccagggcacaacaaacttg

SEQ ID NO: 1319508 - DNA, 25 bp, Homo sapien
caaacttgggcggagagcttccgtg

SEQ ID NO: 1319509 - DNA, 25 bp, Homo sapien
cattctcgggtcgtggatgcagctc

SEQ ID NO: 1319510 - DNA, 25 bp, Homo sapien
gcagctccagcggagagcccgtgtt

SEQ ID NO: 1319511 - DNA, 25 bp, Homo sapien
cgcgcgtcgcactgggtgggtgcat

SEQ ID NO: 1319512 - DNA, 25 bp, Homo sapien
aagctctcgcttcccgttaagcaca

SEQ ID NO: 1319513 - DNA, 25 bp, Homo sapien
agagcaccgcactcgctgcccacga

SEQ ID NO: 1319514 - DNA, 25 bp, Homo sapien
gcccgggtcgtctggggtctgcgcc

SEQ ID NO: 1319515 - DNA, 25 bp, Homo sapien
ctgcccacgacgcccagcagccaca

SEQ ID NO: 1319516 - DNA, 25 bp, Homo sapien
gccgccgagggggagagcaccgcac

SEQ ID NO: 1319517 - DNA, 25 bp, Homo sapien
ggagtggaggagtccgcggctgccc

SEQ ID NO: 1319518 - DNA, 25 bp, Homo sapien
gcgagccgcgcggtgtgcggcggcc

SEQ ID NO: 1319519 - DNA, 25 bp, Homo sapien
cgcgccggtccgtatttgcaggaga

SEQ ID NO: 1319520 - DNA, 25 bp, Homo sapien
actgcgcatccgcagtccaggagct

SEQ ID NO: 1319521 - DNA, 25 bp, Homo sapien
gggcccttgcacgtgtcggttcttc

SEQ ID NO: 1319522 - DNA, 25 bp, Homo sapien
aagttgggcgcagattgtttcgtgc

SEQ ID NO: 1319523 - DNA, 25 bp, Homo sapien
acgtgtcggttcttcctggactggc

SEQ ID NO: 1319524 - DNA, 25 bp, Homo sapien
tggactggcgctttggttgcccaaa

SEQ ID NO: 1319525 - DNA, 25 bp, Homo sapien
ccctttgccgggttcttcacagtca

SEQ ID NO: 1319526 - DNA, 25 bp, Homo sapien
gctccatcaagctgattatcttaca

SEQ ID NO: 1319527 - DNA, 25 bp, Homo sapien
aaatgctccatcaagctgattatct

SEQ ID NO: 1319528 - DNA, 25 bp, Homo sapien
ggttcttcacagtcacccaaatgct

SEQ ID NO: 1319529 - DNA, 25 bp, Homo sapien
tgtttgcctggtttgcattgtgtgg

SEQ ID NO: 1319530 - DNA, 25 bp, Homo sapien
gagtgtcaaagccataactcttctg

SEQ ID NO: 1319531 - DNA, 25 bp, Homo sapien
tagacgtggatatccattcccctct

SEQ ID NO: 1319532 - DNA, 25 bp, Homo sapien
tcagaactcatagacgtggatatcc

SEQ ID NO: 1319533 - DNA, 25 bp, Homo sapien
ggcactgaccacacgtggcttggct

SEQ ID NO: 1319534 - DNA, 25 bp, Homo sapien
cccagggatggaccctgggcactga

SEQ ID NO: 1319535 - DNA, 25 bp, Homo sapien
cactgaccacacgtggcttggcttt

SEQ ID NO: 1319536 - DNA, 25 bp, Homo sapien
tgggcactgaccacacgtggcttgg

SEQ ID NO: 1319537 - DNA, 25 bp, Homo sapien
ctttgatgtacttgaacagccattc

SEQ ID NO: 1319538 - DNA, 25 bp, Homo sapien
tggtcgggcagagtcacaggtaggc

SEQ ID NO: 1319539 - DNA, 25 bp, Homo sapien
tttgatgtacttgaacagccattct

SEQ ID NO: 1319540 - DNA, 25 bp, Homo sapien
cttcactgtggtcgggcagagtcac

SEQ ID NO: 1319541 - DNA, 25 bp, Homo sapien
tggttgtttctggttgttcactccc

SEQ ID NO: 1319542 - DNA, 25 bp, Homo sapien
caagaactcctgtgatgtgtgtggt

SEQ ID NO: 1319543 - DNA, 25 bp, Homo sapien
gctgctgggtttaattgtcttgttg

SEQ ID NO: 1319544 - DNA, 25 bp, Homo sapien
tacggccggaatgcctaatcaccat

SEQ ID NO: 1319545 - DNA, 25 bp, Homo sapien
cacagaaggaatagtactgcttcat

SEQ ID NO: 1319546 - DNA, 25 bp, Homo sapien
ctccataagatactggtcccacaga

SEQ ID NO: 1319547 - DNA, 25 bp, Homo sapien
ggtcccacagaaggaatagtactgc

SEQ ID NO: 1319548 - DNA, 25 bp, Homo sapien
tcccacagaaggaatagtactgctt

SEQ ID NO: 1319549 - DNA, 25 bp, Homo sapien
gctccagggacagagtctttccttt

SEQ ID NO: 1319550 - DNA, 25 bp, Homo sapien
aggctccagggacagagtctttcct

SEQ ID NO: 1319551 - DNA, 25 bp, Homo sapien
cagggacagagtctttccttttcca

SEQ ID NO: 1319552 - DNA, 25 bp, Homo sapien
ctgagcccaggctccagggacagag

SEQ ID NO: 1319553 - DNA, 25 bp, Homo sapien
cttgcgtttggggaggggaattgag

SEQ ID NO: 1319554 - DNA, 25 bp, Homo sapien
tgtaacattgcaactgtagcaggca

SEQ ID NO: 1319555 - DNA, 25 bp, Homo sapien
aatgtaacattgcaactgtagcagg

SEQ ID NO: 1319556 - DNA, 25 bp, Homo sapien
tcaaatgtaacattgcaactgtagc

SEQ ID NO: 1319557 - DNA, 25 bp, Homo sapien
tagtcaaatgtaacattgcaactgt

SEQ ID NO: 1319558 - DNA, 25 bp, Homo sapien
caggatgatattcatgtctctagac

SEQ ID NO: 1319559 - DNA, 25 bp, Homo sapien
tgtgtgtttccccacgtcctctgct

SEQ ID NO: 1319560 - DNA, 25 bp, Homo sapien
ctagaccatactggaaggttctggc

SEQ ID NO: 1319561 - DNA, 25 bp, Homo sapien
gtctctagaccatactggaaggttc

SEQ ID NO: 1319562 - DNA, 25 bp, Homo sapien
tgctctgctggcggctataaagatt

SEQ ID NO: 1319563 - DNA, 25 bp, Homo sapien
tggcggctataaagattcaaatcat

SEQ ID NO: 1319564 - DNA, 25 bp, Homo sapien
ctctgctggcggctataaagattca

SEQ ID NO: 1319565 - DNA, 25 bp, Homo sapien
ctgctggcggctataaagattcaaa

SEQ ID NO: 1319566 - DNA, 25 bp, Homo sapien
ccagttacgaggtctgcaccgtttg

SEQ ID NO: 1319567 - DNA, 25 bp, Homo sapien
tgtaataatagaggccccagttacg

SEQ ID NO: 1319568 - DNA, 25 bp, Homo sapien
agtgtcactgcggtgactctccatg

SEQ ID NO: 1319569 - DNA, 25 bp, Homo sapien
tagcctctaatctcagtcgcttctg

SEQ ID NO: 1319570 - DNA, 25 bp, Homo sapien
ctgttgaacggtaaagcccacttgg

SEQ ID NO: 1319571 - DNA, 25 bp, Homo sapien
tgtgtctgttgaacggtaaagccca

SEQ ID NO: 1319572 - DNA, 25 bp, Homo sapien
tccatgtgtctgttgaacggtaaag

SEQ ID NO: 1319573 - DNA, 25 bp, Homo sapien
tccatgacacgtccatgtgtctgtt

SEQ ID NO: 1319574 - DNA, 25 bp, Homo sapien
tgccttcttctagcggccggatctc

SEQ ID NO: 1319575 - DNA, 25 bp, Homo sapien
tagcggccggatctcttccctccct

SEQ ID NO: 1319576 - DNA, 25 bp, Homo sapien
ttctagcggccggatctcttccctc

SEQ ID NO: 1319577 - DNA, 25 bp, Homo sapien
gaatgccttcttctagcggccggat

SEQ ID NO: 1319578 - DNA, 25 bp, Homo sapien
catcaatagcggaaatttgaacaaa

SEQ ID NO: 1319579 - DNA, 25 bp, Homo sapien
agagcctagtaactcatcaatagcg

SEQ ID NO: 1319580 - DNA, 25 bp, Homo sapien
gtaactcatcaatagcggaaatttg

SEQ ID NO: 1319581 - DNA, 25 bp, Homo sapien
gcctagtaactcatcaatagcggaa

SEQ ID NO: 1319582 - DNA, 25 bp, Homo sapien
ccggtgtgggcggcttgggcgctgg

SEQ ID NO: 1319583 - DNA, 25 bp, Homo sapien
gctggacgcagaggggggtacggaa

SEQ ID NO: 1319584 - DNA, 25 bp, Homo sapien
tgagcagtgaagtggccggtgtggg

SEQ ID NO: 1319585 - DNA, 25 bp, Homo sapien
gggtacggaatgaagccccgccagc

SEQ ID NO: 1319586 - DNA, 25 bp, Homo sapien
aaaggatcaagtcggtagcattgtt

SEQ ID NO: 1319587 - DNA, 25 bp, Homo sapien
ttatgaaaggatcaagtcggtagca

SEQ ID NO: 1319588 - DNA, 25 bp, Homo sapien
aggatcaagtcggtagcattgttct

SEQ ID NO: 1319589 - DNA, 25 bp, Homo sapien
tgaaaggatcaagtcggtagcattg

SEQ ID NO: 1319590 - DNA, 25 bp, Homo sapien
tgaagaacactctgtagtttgcaaa

SEQ ID NO: 1319591 - DNA, 25 bp, Homo sapien
ctgaagaacactctgtagtttgcaa

SEQ ID NO: 1319592 - DNA, 25 bp, Homo sapien
tgtagtttgcaaagaactcatgaga

SEQ ID NO: 1319593 - DNA, 25 bp, Homo sapien
cttttggtgaggcaaggaagcatgc

SEQ ID NO: 1319594 - DNA, 25 bp, Homo sapien
atttttcaaaggtgccagtccattt

SEQ ID NO: 1319595 - DNA, 25 bp, Homo sapien
tcaaaggtgccagtccatttttgga

SEQ ID NO: 1319596 - DNA, 25 bp, Homo sapien
catgcagcccacttcagctttctcc

SEQ ID NO: 1319597 - DNA, 25 bp, Homo sapien
tttggataattaggaagtaaatgca

SEQ ID NO: 1319598 - DNA, 25 bp, Homo sapien
gaagtaaatgcagactgtgcaaaaa

SEQ ID NO: 1319599 - DNA, 25 bp, Homo sapien
gggcagagatgctcagctcattttt

SEQ ID NO: 1319600 - DNA, 25 bp, Homo sapien
cattttttagatcagtctttaagaa

SEQ ID NO: 1319601 - DNA, 25 bp, Homo sapien
ttcgctgtggttgtaggtatgtaaa

SEQ ID NO: 1319602 - DNA, 25 bp, Homo sapien
cagatgtgttgtaatgggtgtgcca

SEQ ID NO: 1319603 - DNA, 25 bp, Homo sapien
aaacaggttcaggttttcgctgtgg

SEQ ID NO: 1319604 - DNA, 25 bp, Homo sapien
aacagaatagcgctaagtgatcaaa

SEQ ID NO: 1319605 - DNA, 25 bp, Homo sapien
tttcccaacagtgagctcggtggct

SEQ ID NO: 1319606 - DNA, 25 bp, Homo sapien
caacagtgagctcggtggctcctgg

SEQ ID NO: 1319607 - DNA, 25 bp, Homo sapien
cagcgagtttcccaacagtgagctc

SEQ ID NO: 1319608 - DNA, 25 bp, Homo sapien
ccttcggcagcgagtttcccaacag

SEQ ID NO: 1319609 - DNA, 25 bp, Homo sapien
tcattttgccttttgctagcagcat

SEQ ID NO: 1319610 - DNA, 25 bp, Homo sapien
cattttgccttttgctagcagcatc

SEQ ID NO: 1319611 - DNA, 25 bp, Homo sapien
tttgccttttgctagcagcatcctc

SEQ ID NO: 1319612 - DNA, 25 bp, Homo sapien
actgcagccaatcccttaagggatt

SEQ ID NO: 1319613 - DNA, 25 bp, Homo sapien
aaggggaagcaagtggcaaggccca

SEQ ID NO: 1319614 - DNA, 25 bp, Homo sapien
tccctggggtcccgagcctggccca

SEQ ID NO: 1319615 - DNA, 25 bp, Homo sapien
gggggccagccaggctgcctcccgc

SEQ ID NO: 1319616 - DNA, 25 bp, Homo sapien
ggggccagccaggctgcctcccgca

SEQ ID NO: 1319617 - DNA, 25 bp, Homo sapien
gggccagccaggctgcctcccgcat

SEQ ID NO: 1319618 - DNA, 25 bp, Homo sapien
tgccacatcgccaatgtcttctact

SEQ ID NO: 1319619 - DNA, 25 bp, Homo sapien
tgtcttctacttccgctcttcctgg

SEQ ID NO: 1319620 - DNA, 25 bp, Homo sapien
gaatagaggcgtttgttagctttgg

SEQ ID NO: 1319621 - DNA, 25 bp, Homo sapien
tagctttggaagtttcccttcagga

SEQ ID NO: 1319622 - DNA, 25 bp, Homo sapien
gggaaaatggctaacattccatcca

SEQ ID NO: 1319623 - DNA, 25 bp, Homo sapien
tgagggtgccagtataggggaaaat

SEQ ID NO: 1319624 - DNA, 25 bp, Homo sapien
ctttgtgtgatgaactgagggtgcc

SEQ ID NO: 1319625 - DNA, 25 bp, Homo sapien
ttattttccctttgtgtgatgaact

SEQ ID NO: 1319626 - DNA, 25 bp, Homo sapien
tggcaaccttgtccttatctgctac

SEQ ID NO: 1319627 - DNA, 25 bp, Homo sapien
tagatgctccaagagtctaggaaac

SEQ ID NO: 1319628 - DNA, 25 bp, Homo sapien
agtatgagaaggctctcttggcaat

SEQ ID NO: 1319629 - DNA, 25 bp, Homo sapien
cacagagatggcaaccttgtcctta

SEQ ID NO: 1319630 - DNA, 25 bp, Homo sapien
gcagtggtgagcacgtttaggccca

SEQ ID NO: 1319631 - DNA, 25 bp, Homo sapien
aaataaatccacctctaggctgggt

SEQ ID NO: 1319632 - DNA, 25 bp, Homo sapien
tcttcctgatgccaaagctcatgat

SEQ ID NO: 1319633 - DNA, 25 bp, Homo sapien
ccatcaggcagtgcatggtattcct

SEQ ID NO: 1319634 - DNA, 25 bp, Homo sapien
aatccagcatccagcgcagccccat

SEQ ID NO: 1319635 - DNA, 25 bp, Homo sapien
gactccttgtaattcaacttcctgt

SEQ ID NO: 1319636 - DNA, 25 bp, Homo sapien
ggcagggtgagagcccaccctcaga

SEQ ID NO: 1319637 - DNA, 25 bp, Homo sapien
agggtgagagcccaccctcagactc

SEQ ID NO: 1319638 - DNA, 25 bp, Homo sapien
caccctcagactccttgtaattcaa

SEQ ID NO: 1319639 - DNA, 25 bp, Homo sapien
ggcttccagggctgataacaagcaa

SEQ ID NO: 1319640 - DNA, 25 bp, Homo sapien
aggcttccagggctgataacaagca

SEQ ID NO: 1319641 - DNA, 25 bp, Homo sapien
tcttcagcgctttgtccaatagaca

SEQ ID NO: 1319642 - DNA, 25 bp, Homo sapien
tgaatatcttcagcgctttgtccaa

SEQ ID NO: 1319643 - DNA, 25 bp, Homo sapien
tcgtgctgctctggtcccatttttc

SEQ ID NO: 1319644 - DNA, 25 bp, Homo sapien
tgcctggtgaatatcttcagcgctt

SEQ ID NO: 1319645 - DNA, 25 bp, Homo sapien
tttcatagcaagcaggtagaaggca

SEQ ID NO: 1319646 - DNA, 25 bp, Homo sapien
gaatggagggtcaggaagatctacc

SEQ ID NO: 1319647 - DNA, 25 bp, Homo sapien
catcagagcagttccttgcatgcag

SEQ ID NO: 1319648 - DNA, 25 bp, Homo sapien
aaatccagtcatgtcttaccccttg

SEQ ID NO: 1319649 - DNA, 25 bp, Homo sapien
ctgctgagaagccagggtctggtgg

SEQ ID NO: 1319650 - DNA, 25 bp, Homo sapien
gctgagaagccagggtctggtggga

SEQ ID NO: 1319651 - DNA, 25 bp, Homo sapien
gagaagccagggtctggtgggaagg

SEQ ID NO: 1319652 - DNA, 25 bp, Homo sapien
tgagaagccagggtctggtgggaag

SEQ ID NO: 1319653 - DNA, 25 bp, Homo sapien
gtgtgatataaaatccaatgacatg

SEQ ID NO: 1319654 - DNA, 25 bp, Homo sapien
gaaaaggtcacttctcccatcagga

SEQ ID NO: 1319655 - DNA, 25 bp, Homo sapien
ccatggcacattgtccttgtgtgat

SEQ ID NO: 1319656 - DNA, 25 bp, Homo sapien
aaacgattttaatacccatggcaca

SEQ ID NO: 1319657 - DNA, 25 bp, Homo sapien
cctgcctctgtacccgctagagtga

SEQ ID NO: 1319658 - DNA, 25 bp, Homo sapien
gctagagtgaacaccttatagccca

SEQ ID NO: 1319659 - DNA, 25 bp, Homo sapien
gaccccgaggccataaatcctgcct

SEQ ID NO: 1319660 - DNA, 25 bp, Homo sapien
gtcattgcctacagctgaccccgag

SEQ ID NO: 1319661 - DNA, 25 bp, Homo sapien
tatcggcgtattattttaggcgtta

SEQ ID NO: 1319662 - DNA, 25 bp, Homo sapien
taggcgttatctggcacgttgatgc

SEQ ID NO: 1319663 - DNA, 25 bp, Homo sapien
tccgctgtttactgtctcgcctttg

SEQ ID NO: 1319664 - DNA, 25 bp, Homo sapien
tcaattcaatttcagccgccggtcc

SEQ ID NO: 1319665 - DNA, 25 bp, Homo sapien
ttaataaaaccagccgcattgctct

SEQ ID NO: 1319666 - DNA, 25 bp, Homo sapien
acggataatgtatttgacgtattaa

SEQ ID NO: 1319667 - DNA, 25 bp, Homo sapien
gggaatgccaatatacgatgacaga

SEQ ID NO: 1319668 - DNA, 25 bp, Homo sapien
gggcctcgttcatattgactgaagg

SEQ ID NO: 1319669 - DNA, 25 bp, Homo sapien
tggttttatctgtctcggccccgcc

SEQ ID NO: 1319670 - DNA, 25 bp, Homo sapien
gacagcgggatctgcacagcaagtg

SEQ ID NO: 1319671 - DNA, 25 bp, Homo sapien
aattcccgtcggatcgataaagccg

SEQ ID NO: 1319672 - DNA, 25 bp, Homo sapien
gataaagccgaaacgctggcggcga

SEQ ID NO: 1319673 - DNA, 25 bp, Homo sapien
ccgccgcttggagctgaagtgccgc

SEQ ID NO: 1319674 - DNA, 25 bp, Homo sapien
gcagatcacgtgattagggccaaca

SEQ ID NO: 1319675 - DNA, 25 bp, Homo sapien
cgcgacggcggcagatcacgtgatt

SEQ ID NO: 1319676 - DNA, 25 bp, Homo sapien
gtgattagggccaacatggccgccg

SEQ ID NO: 1319677 - DNA, 25 bp, Homo sapien
ttccagggacaacaagggatcatct

SEQ ID NO: 1319678 - DNA, 25 bp, Homo sapien
tgaacattgtggtatcatcagcacc

SEQ ID NO: 1319679 - DNA, 25 bp, Homo sapien
cctgagcaaggagcgcatccagtat

SEQ ID NO: 1319680 - DNA, 25 bp, Homo sapien
caaagcccgtgtttctccaaccatg

SEQ ID NO: 1319681 - DNA, 25 bp, Homo sapien
tatgggtagaccttgcaccagctgc

SEQ ID NO: 1319682 - DNA, 25 bp, Homo sapien
tgacacgtagacattggcactctgg

SEQ ID NO: 1319683 - DNA, 25 bp, Homo sapien
tccttgggctccagcggaaaactat

SEQ ID NO: 1319684 - DNA, 25 bp, Homo sapien
tgagaacaacaaccgctttgaggag

SEQ ID NO: 1319685 - DNA, 25 bp, Homo sapien
acagcagaattggttgggtgcccag

SEQ ID NO: 1319686 - DNA, 25 bp, Homo sapien
tgacctcccatgagcttcattggtg

SEQ ID NO: 1319687 - DNA, 25 bp, Homo sapien
cccagttgctacaaaggagtgtgca

SEQ ID NO: 1319688 - DNA, 25 bp, Homo sapien
tagtgacttgttaaactccccagcc

SEQ ID NO: 1319689 - DNA, 25 bp, Homo sapien
tgccatccaccagcaatggtgaaag

SEQ ID NO: 1319690 - DNA, 25 bp, Homo sapien
gagatgccatccaccagcaatggtg

SEQ ID NO: 1319691 - DNA, 25 bp, Homo sapien
cagcagagatgccatccaccagcaa

SEQ ID NO: 1319692 - DNA, 25 bp, Homo sapien
tctggccggagtgtgagttgcccct

SEQ ID NO: 1319693 - DNA, 25 bp, Homo sapien
tgagccaattgtctcccctaaactg

SEQ ID NO: 1319694 - DNA, 25 bp, Homo sapien
gacaggccacctgtaagctctcaag

SEQ ID NO: 1319695 - DNA, 25 bp, Homo sapien
ttgagtacatctgtgaaacctgagc

SEQ ID NO: 1319696 - DNA, 25 bp, Homo sapien
agcttcctgctgtccacgagataaa

SEQ ID NO: 1319697 - DNA, 25 bp, Homo sapien
caggaaatgggaaccgagctgaagc

SEQ ID NO: 1319698 - DNA, 25 bp, Homo sapien
gacatgatcctctccttagtcttag

SEQ ID NO: 1319699 - DNA, 25 bp, Homo sapien
tgtataaatgggacaactcctcgcc

SEQ ID NO: 1319700 - DNA, 25 bp, Homo sapien
aaccattcctgggattagagctgcc

SEQ ID NO: 1319701 - DNA, 25 bp, Homo sapien
tctgagtgaactgccaagtgggagc

SEQ ID NO: 1319702 - DNA, 25 bp, Homo sapien
cagcggcttcctagcaaagtgtggt

SEQ ID NO: 1319703 - DNA, 25 bp, Homo sapien
tgctggagcaaagatcatagcccct

SEQ ID NO: 1319704 - DNA, 25 bp, Homo sapien
cagttctagaggtctgccgtgcaca

SEQ ID NO: 1319705 - DNA, 25 bp, Homo sapien
tgcaccattgcaccccagcctaggt

SEQ ID NO: 1319706 - DNA, 25 bp, Homo sapien
cggtgactcatgcctgtaatcctag

SEQ ID NO: 1319707 - DNA, 25 bp, Homo sapien
tttgttaggtgatcttggccaggcg

SEQ ID NO: 1319708 - DNA, 25 bp, Homo sapien
cactttgggaggctgaggtgggagg

SEQ ID NO: 1319709 - DNA, 25 bp, Homo sapien
agaagagtgcccgacagattgcagg

SEQ ID NO: 1319710 - DNA, 25 bp, Homo sapien
tggtaagcagaccaccagcagacag

SEQ ID NO: 1319711 - DNA, 25 bp, Homo sapien
caaagggctacagggagttgaacga

SEQ ID NO: 1319712 - DNA, 25 bp, Homo sapien
gacaggcccataggaattttctact

SEQ ID NO: 1319713 - DNA, 25 bp, Homo sapien
ggaggtgtcaggcatttatttctgg

SEQ ID NO: 1319714 - DNA, 25 bp, Homo sapien
tggggaggtgtcaggcatttatttc

SEQ ID NO: 1319715 - DNA, 25 bp, Homo sapien
gggaggtgtcaggcatttatttctg

SEQ ID NO: 1319716 - DNA, 25 bp, Homo sapien
ggggaggtgtcaggcatttatttct

SEQ ID NO: 1319717 - DNA, 25 bp, Homo sapien
gatgacacgaaatccacagaacgcg

SEQ ID NO: 1319718 - DNA, 25 bp, Homo sapien
catgcgttctatgtctctggccagg

SEQ ID NO: 1319719 - DNA, 25 bp, Homo sapien
tctggccaggactacttcgtcagcc

SEQ ID NO: 1319720 - DNA, 25 bp, Homo sapien
tgcgcatgaagtcgacacagaggct

SEQ ID NO: 1319721 - DNA, 25 bp, Homo sapien
gctgtgatgggagcaagcaggacgt

SEQ ID NO: 1319722 - DNA, 25 bp, Homo sapien
ctgtcatagaagtgggtgtggaaga

SEQ ID NO: 1319723 - DNA, 25 bp, Homo sapien
aggacgtggaacaggacgaccacca

SEQ ID NO: 1319724 - DNA, 25 bp, Homo sapien
gaacaggacgaccaccagggcaaag

SEQ ID NO: 1319725 - DNA, 25 bp, Homo sapien
aggagctccagcacgtagcggtaca

SEQ ID NO: 1319726 - DNA, 25 bp, Homo sapien
tctcaatctcataatcaaagagcag

SEQ ID NO: 1319727 - DNA, 25 bp, Homo sapien
gacgccaccgttgctgaagacatgg

SEQ ID NO: 1319728 - DNA, 25 bp, Homo sapien
tcaccaggagcgctgtcaaagatgg

SEQ ID NO: 1319729 - DNA, 25 bp, Homo sapien
gggatacccagtgactcggagaaga

SEQ ID NO: 1319730 - DNA, 25 bp, Homo sapien
aagggatacccagtgactcggagaa

SEQ ID NO: 1319731 - DNA, 25 bp, Homo sapien
gaagggatacccagtgactcggaga

SEQ ID NO: 1319732 - DNA, 25 bp, Homo sapien
gatacccagtgactcggagaagaag

SEQ ID NO: 1319733 - DNA, 25 bp, Homo sapien
ccacggggctgtgtatcggattacg

SEQ ID NO: 1319734 - DNA, 25 bp, Homo sapien
cacggggctgtgtatcggattacga

SEQ ID NO: 1319735 - DNA, 25 bp, Homo sapien
gggctgtgtatcggattacgatgca

SEQ ID NO: 1319736 - DNA, 25 bp, Homo sapien
ctgtgtatcggattacgatgcagcc

SEQ ID NO: 1319737 - DNA, 25 bp, Homo sapien
ccttttgtggtagatggcactgtac

SEQ ID NO: 1319738 - DNA, 25 bp, Homo sapien
ggcactgtacttggcaaggttcttg

SEQ ID NO: 1319739 - DNA, 25 bp, Homo sapien
ccagcccaagagaatcaccacaggc

SEQ ID NO: 1319740 - DNA, 25 bp, Homo sapien
atcaccacaggctgccgagtttctg

SEQ ID NO: 1319741 - DNA, 25 bp, Homo sapien
acagatgtggactgtcaacaccaga

SEQ ID NO: 1319742 - DNA, 25 bp, Homo sapien
cagatgtggactgtcaacaccagag

SEQ ID NO: 1319743 - DNA, 25 bp, Homo sapien
ctgcaggcagggaacaacgggtgcc

SEQ ID NO: 1319744 - DNA, 25 bp, Homo sapien
gctgcaggcagggaacaacgggtgc

SEQ ID NO: 1319745 - DNA, 25 bp, Homo sapien
caggccctttacacaatctccagat

SEQ ID NO: 1319746 - DNA, 25 bp, Homo sapien
tttacacaatctccagatggcccca

SEQ ID NO: 1319747 - DNA, 25 bp, Homo sapien
tccttatcccggttttgcagaggag

SEQ ID NO: 1319748 - DNA, 25 bp, Homo sapien
gccctatgaggaaggttactatcct

SEQ ID NO: 1319749 - DNA, 25 bp, Homo sapien
ccgcgcctggacccaaccctcattc

SEQ ID NO: 1319750 - DNA, 25 bp, Homo sapien
gatccgggatctcgatggtgtagtc

SEQ ID NO: 1319751 - DNA, 25 bp, Homo sapien
gctgatccgggatctcgatggtgta

SEQ ID NO: 1319752 - DNA, 25 bp, Homo sapien
cagcagggctgatccgggatctcga

SEQ ID NO: 1319753 - DNA, 25 bp, Homo sapien
gctccagcagggctgatccgggatc

SEQ ID NO: 1319754 - DNA, 25 bp, Homo sapien
cgggcgcctcctgggcgccgcccaa

SEQ ID NO: 1319755 - DNA, 25 bp, Homo sapien
agagcacgggtctccagccggaact

SEQ ID NO: 1319756 - DNA, 25 bp, Homo sapien
cggaactcccgcttgcgcacccgtg

SEQ ID NO: 1319757 - DNA, 25 bp, Homo sapien
aacacggcccaatccctgcgccgcg

SEQ ID NO: 1319758 - DNA, 25 bp, Homo sapien
gattctttggtccacggcaatccca

SEQ ID NO: 1319759 - DNA, 25 bp, Homo sapien
cagtgatgcaacatgagaaccaggc

SEQ ID NO: 1319760 - DNA, 25 bp, Homo sapien
aaggtctaatagctttgctgccctg

SEQ ID NO: 1319761 - DNA, 25 bp, Homo sapien
tcaggtgtacgatccatagcagaat

SEQ ID NO: 1319762 - DNA, 25 bp, Homo sapien
ggagggactgggtctgattcatctt

SEQ ID NO: 1319763 - DNA, 25 bp, Homo sapien
agccttgcctaggcaagacttcaaa

SEQ ID NO: 1319764 - DNA, 25 bp, Homo sapien
cagccttgcctaggcaagacttcaa

SEQ ID NO: 1319765 - DNA, 25 bp, Homo sapien
ggtgcctttggacctgcagacagaa

SEQ ID NO: 1319766 - DNA, 25 bp, Homo sapien
acctgcgcgtggtgcgtggcctaat

SEQ ID NO: 1319767 - DNA, 25 bp, Homo sapien
ggacagtgtgatgccccttcagaca

SEQ ID NO: 1319768 - DNA, 25 bp, Homo sapien
caatgagcagatggcggctcggaca

SEQ ID NO: 1319769 - DNA, 25 bp, Homo sapien
tggcgcgcaacgacatgagcatcgc

SEQ ID NO: 1319770 - DNA, 25 bp, Homo sapien
aagagccgctggctgcgaagagtca

SEQ ID NO: 1319771 - DNA, 25 bp, Homo sapien
tcagagccactccacttggctccag

SEQ ID NO: 1319772 - DNA, 25 bp, Homo sapien
aaggcgcctggggtcaagctcagag

SEQ ID NO: 1319773 - DNA, 25 bp, Homo sapien
gagacggggattaggcatcccagag

SEQ ID NO: 1319774 - DNA, 25 bp, Homo sapien
tcaaaaaatttgcttgaaactcaaa

SEQ ID NO: 1319775 - DNA, 25 bp, Homo sapien
tgcttgaaactcaaaacggtttctc

SEQ ID NO: 1319776 - DNA, 25 bp, Homo sapien
tagggcttcaaaaaatttgcttgaa

SEQ ID NO: 1319777 - DNA, 25 bp, Homo sapien
gcttcaaaaaatttgcttgaaactc

SEQ ID NO: 1319778 - DNA, 25 bp, Homo sapien
gctgaagctagtgaggcccacatgg

SEQ ID NO: 1319779 - DNA, 25 bp, Homo sapien
accataggttggctagattcctgca

SEQ ID NO: 1319780 - DNA, 25 bp, Homo sapien
tctggagtatctaatggaggatgca

SEQ ID NO: 1319781 - DNA, 25 bp, Homo sapien
aatatcctttggtgggctgaagcta

SEQ ID NO: 1319782 - DNA, 25 bp, Homo sapien
cagctgtttgacctgctcaacaaga

SEQ ID NO: 1319783 - DNA, 25 bp, Homo sapien
tctggttaactctgctgatgatgtc

SEQ ID NO: 1319784 - DNA, 25 bp, Homo sapien
tcttgtccgagctgggcaggctagt

SEQ ID NO: 1319785 - DNA, 25 bp, Homo sapien
tcaagatgatcgacatgggcagcgc

SEQ ID NO: 1319786 - DNA, 25 bp, Homo sapien
agggggttccagaattcggaagatg

SEQ ID NO: 1319787 - DNA, 25 bp, Homo sapien
tccctcaggttcactggctcccagc

SEQ ID NO: 1319788 - DNA, 25 bp, Homo sapien
tggcctccctcaggttcactggctc

SEQ ID NO: 1319789 - DNA, 25 bp, Homo sapien
aagatgggcctttgggtcagcagga

SEQ ID NO: 1319790 - DNA, 25 bp, Homo sapien
tgtgactctgaacctgaggcttggg

SEQ ID NO: 1319791 - DNA, 25 bp, Homo sapien
taggtctgtcccaatcctctccggg

SEQ ID NO: 1319792 - DNA, 25 bp, Homo sapien
aggcttgggagttccgccgtgatgc

SEQ ID NO: 1319793 - DNA, 25 bp, Homo sapien
cctctgtgactctgaacctgaggct

SEQ ID NO: 1319794 - DNA, 25 bp, Homo sapien
gatcatacaggtaggcagctggccc

SEQ ID NO: 1319795 - DNA, 25 bp, Homo sapien
caatgtaaggaccaggatgcggcca

SEQ ID NO: 1319796 - DNA, 25 bp, Homo sapien
tggccctctcagttatccaaggaag

SEQ ID NO: 1319797 - DNA, 25 bp, Homo sapien
cttgtttcctcagggtcaaggagct

SEQ ID NO: 1319798 - DNA, 25 bp, Homo sapien
gaatctttgcggtttctctttccag

SEQ ID NO: 1319799 - DNA, 25 bp, Homo sapien
tgcttcacagcctactgaggagtcc

SEQ ID NO: 1319800 - DNA, 25 bp, Homo sapien
acagccacgaggagtggtggccctc

SEQ ID NO: 1319801 - DNA, 25 bp, Homo sapien
ttgagctcaatcaggccccatcctg

SEQ ID NO: 1319802 - DNA, 25 bp, Homo sapien
gggccgcaagaagggagccaagctg

SEQ ID NO: 1319803 - DNA, 25 bp, Homo sapien
agaatgccaaaatcagcagtctcct

SEQ ID NO: 1319804 - DNA, 25 bp, Homo sapien
ttcagaagaaatatgatgaaaggaa

SEQ ID NO: 1319805 - DNA, 25 bp, Homo sapien
tgccaaaatcagcagtctcctggag

SEQ ID NO: 1319806 - DNA, 25 bp, Homo sapien
aatgccaaaatcagcagtctcctgg

SEQ ID NO: 1319807 - DNA, 25 bp, Homo sapien
tggtcaccctattcgtatgaagctg

SEQ ID NO: 1319808 - DNA, 25 bp, Homo sapien
tgaacccacagagattcttaagcgg

SEQ ID NO: 1319809 - DNA, 25 bp, Homo sapien
agagtctgcataggcccgtgcttgg

SEQ ID NO: 1319810 - DNA, 25 bp, Homo sapien
ggatcacctactctcttgcagcgtg

SEQ ID NO: 1319811 - DNA, 25 bp, Homo sapien
aaatcaaactggcgggatggaagca

SEQ ID NO: 1319812 - DNA, 25 bp, Homo sapien
tatatgtattacatccctagaaaaa

SEQ ID NO: 1319813 - DNA, 25 bp, Homo sapien
tgtccttgaggcattttatttgtaa

SEQ ID NO: 1319814 - DNA, 25 bp, Homo sapien
ttttcgtcttgcttcatggtccatg

SEQ ID NO: 1319815 - DNA, 25 bp, Homo sapien
cctgcctgtgaggttcacaacaatt

SEQ ID NO: 1319816 - DNA, 25 bp, Homo sapien
gaggttcacaacaattttcccagct

SEQ ID NO: 1319817 - DNA, 25 bp, Homo sapien
tgtttagcctgcctgtgaggttcac

SEQ ID NO: 1319818 - DNA, 25 bp, Homo sapien
ctgtgaggttcacaacaattttccc

SEQ ID NO: 1319819 - DNA, 25 bp, Homo sapien
gatcatcagtgatttcaaattcgcc

SEQ ID NO: 1319820 - DNA, 25 bp, Homo sapien
gtgatttcaaattcgccaatgtaac

SEQ ID NO: 1319821 - DNA, 25 bp, Homo sapien
tcagtgatttcaaattcgccaatgt

SEQ ID NO: 1319822 - DNA, 25 bp, Homo sapien
gtgatcatcagtgatttcaaattcg

SEQ ID NO: 1319823 - DNA, 25 bp, Homo sapien
ggagcatggcctaagaagcacctgg

SEQ ID NO: 1319824 - DNA, 25 bp, Homo sapien
agcatggcctaagaagcacctggcg

SEQ ID NO: 1319825 - DNA, 25 bp, Homo sapien
atggcctaagaagcacctggcgttt

SEQ ID NO: 1319826 - DNA, 25 bp, Homo sapien
cagtgagaaactggacgatgacttt

SEQ ID NO: 1319827 - DNA, 25 bp, Homo sapien
gcgcaccattgtgacggcgtggaaa

SEQ ID NO: 1319828 - DNA, 25 bp, Homo sapien
atgcgcaccattgtgacggcgtgga

SEQ ID NO: 1319829 - DNA, 25 bp, Homo sapien
gcaccattgtgacggcgtggaaaga

SEQ ID NO: 1319830 - DNA, 25 bp, Homo sapien
aaagatggcggaaagaggacgggag

SEQ ID NO: 1319831 - DNA, 25 bp, Homo sapien
tgacaagaccttccgtgatgctgat

SEQ ID NO: 1319832 - DNA, 25 bp, Homo sapien
gaaccaatggcctagctccctgttg

SEQ ID NO: 1319833 - DNA, 25 bp, Homo sapien
aaatgcaagttattgggcgccatcc

SEQ ID NO: 1319834 - DNA, 25 bp, Homo sapien
gctgtgaagctaaccgtgcacctgg

SEQ ID NO: 1319835 - DNA, 25 bp, Homo sapien
gccgattcctcctcgatgcgggctg

SEQ ID NO: 1319836 - DNA, 25 bp, Homo sapien
cgcggccgaagttccggaggctgat

SEQ ID NO: 1319837 - DNA, 25 bp, Homo sapien
ctacgcccaggaagcggccgagcaa

SEQ ID NO: 1319838 - DNA, 25 bp, Homo sapien
aggctctgctcagggtcgtcgctca

SEQ ID NO: 1319839 - DNA, 25 bp, Homo sapien
cgcaggttgaaggtggagcccagga

SEQ ID NO: 1319840 - DNA, 25 bp, Homo sapien
agcccaggaatgagggccgcagaga

SEQ ID NO: 1319841 - DNA, 25 bp, Homo sapien
aggtggagcccaggaatgagggccg

SEQ ID NO: 1319842 - DNA, 25 bp, Homo sapien
ggagcccaggaatgagggccgcaga

SEQ ID NO: 1319843 - DNA, 25 bp, Homo sapien
ggtacatttcgtccacggatagcag

SEQ ID NO: 1319844 - DNA, 25 bp, Homo sapien
acatttcgtccacggatagcaggga

SEQ ID NO: 1319845 - DNA, 25 bp, Homo sapien
ggttctggtacatttcgtccacgga

SEQ ID NO: 1319846 - DNA, 25 bp, Homo sapien
tttcgtccacggatagcagggacac

SEQ ID NO: 1319847 - DNA, 25 bp, Homo sapien
caccagcaagttacaaggatcctcc

SEQ ID NO: 1319848 - DNA, 25 bp, Homo sapien
ggccaccagcaagttacaaggatcc

SEQ ID NO: 1319849 - DNA, 25 bp, Homo sapien
gccaccagcaagttacaaggatcct

SEQ ID NO: 1319850 - DNA, 25 bp, Homo sapien
ccaccagcaagttacaaggatcctc

SEQ ID NO: 1319851 - DNA, 25 bp, Homo sapien
tggactcctgatcctgatgcttgct

SEQ ID NO: 1319852 - DNA, 25 bp, Homo sapien
ccctggactcctgatcctgatgctt

SEQ ID NO: 1319853 - DNA, 25 bp, Homo sapien
ctgccctggactcctgatcctgatg

SEQ ID NO: 1319854 - DNA, 25 bp, Homo sapien
gactcctgatcctgatgcttgctca

SEQ ID NO: 1319855 - DNA, 25 bp, Homo sapien
atgggttgatgatctgttcagccac

SEQ ID NO: 1319856 - DNA, 25 bp, Homo sapien
gcaagttgcggtctatgagctgatt

SEQ ID NO: 1319857 - DNA, 25 bp, Homo sapien
gttgcggtctatgagctgatttgtc

SEQ ID NO: 1319858 - DNA, 25 bp, Homo sapien
catcctcaccaaatgggttgatgat

SEQ ID NO: 1319859 - DNA, 25 bp, Homo sapien
aagagtagacggctatggtcaccac

SEQ ID NO: 1319860 - DNA, 25 bp, Homo sapien
agtggtgagaggcacgtacatgtcc

SEQ ID NO: 1319861 - DNA, 25 bp, Homo sapien
gcacgtacatgtccgggtctcccag

SEQ ID NO: 1319862 - DNA, 25 bp, Homo sapien
agggcaaagaaagagtagacggcta

SEQ ID NO: 1319863 - DNA, 25 bp, Homo sapien
acttggctcggtacttgttcagctc

SEQ ID NO: 1319864 - DNA, 25 bp, Homo sapien
catgctgcacttggctcggtacttg

SEQ ID NO: 1319865 - DNA, 25 bp, Homo sapien
tgctgatccagtcatagtggaatag

SEQ ID NO: 1319866 - DNA, 25 bp, Homo sapien
tggaatagcatgctgcacttggctc

SEQ ID NO: 1319867 - DNA, 25 bp, Homo sapien
ttccaaaagtagacagagagcgata

SEQ ID NO: 1319868 - DNA, 25 bp, Homo sapien
gatatcgtcacgtattcgcccgtcc

SEQ ID NO: 1319869 - DNA, 25 bp, Homo sapien
gaagtcggatttcaggctctcaaac

SEQ ID NO: 1319870 - DNA, 25 bp, Homo sapien
gacccagtacttgttgaagtcggat

SEQ ID NO: 1319871 - DNA, 25 bp, Homo sapien
ggtgctgaccgagcgcagcaccagc

SEQ ID NO: 1319872 - DNA, 25 bp, Homo sapien
agcacggacgccaggttcgcgtagc

SEQ ID NO: 1319873 - DNA, 25 bp, Homo sapien
ttcgcgtagcggatgagggtgcggc

SEQ ID NO: 1319874 - DNA, 25 bp, Homo sapien
aagcgcttaagcacgcgggtgctga

SEQ ID NO: 1319875 - DNA, 25 bp, Homo sapien
gccgtgcacgctagccgagatgacg

SEQ ID NO: 1319876 - DNA, 25 bp, Homo sapien
tgacgcacatcagctggtctggcag

SEQ ID NO: 1319877 - DNA, 25 bp, Homo sapien
tgtactgggaccaccagcggttcac

SEQ ID NO: 1319878 - DNA, 25 bp, Homo sapien
cggttcaccacgagagtcacataga

SEQ ID NO: 1319879 - DNA, 25 bp, Homo sapien
ccgtgatagagggagtaggaaggga

SEQ ID NO: 1319880 - DNA, 25 bp, Homo sapien
gccgccgtgatagagggagtaggaa

SEQ ID NO: 1319881 - DNA, 25 bp, Homo sapien
cttggccgccgtgatagagggagta

SEQ ID NO: 1319882 - DNA, 25 bp, Homo sapien
tgcttggccgccgtgatagagggag

SEQ ID NO: 1319883 - DNA, 25 bp, Homo sapien
atctgttgggtaattctgaccctcg

SEQ ID NO: 1319884 - DNA, 25 bp, Homo sapien
tgttgggtaattctgaccctcggag

SEQ ID NO: 1319885 - DNA, 25 bp, Homo sapien
gggtaattctgaccctcggagctgt

SEQ ID NO: 1319886 - DNA, 25 bp, Homo sapien
aattctgaccctcggagctgtcaac

SEQ ID NO: 1319887 - DNA, 25 bp, Homo sapien
ctgagcggttgcagtaccgggccac

SEQ ID NO: 1319888 - DNA, 25 bp, Homo sapien
tctgctgagcggttgcagtaccggg

SEQ ID NO: 1319889 - DNA, 25 bp, Homo sapien
gaatgaggtctgctgagcggttgca

SEQ ID NO: 1319890 - DNA, 25 bp, Homo sapien
aggacaagggaatgaggtctgctga

SEQ ID NO: 1319891 - DNA, 25 bp, Homo sapien
gggcctccgccactttgagagtgta

SEQ ID NO: 1319892 - DNA, 25 bp, Homo sapien
caaagaggaggaattccttgtagag

SEQ ID NO: 1319893 - DNA, 25 bp, Homo sapien
ccttgtagaggagcttgtagatgct

SEQ ID NO: 1319894 - DNA, 25 bp, Homo sapien
gatgctaagcacagcgtacaaggcc

SEQ ID NO: 1319895 - DNA, 25 bp, Homo sapien
ggcctcctcctaggataataaacaa

SEQ ID NO: 1319896 - DNA, 25 bp, Homo sapien
caattttgcagaattggactccccc

SEQ ID NO: 1319897 - DNA, 25 bp, Homo sapien
tcgtcgctggagtagcacgcgtcgt

SEQ ID NO: 1319898 - DNA, 25 bp, Homo sapien
tgccggtcgggcctcatcaatgctg

SEQ ID NO: 1319899 - DNA, 25 bp, Homo sapien
cataccagcttgtagcgtggcgggc

SEQ ID NO: 1319900 - DNA, 25 bp, Homo sapien
accctgagaagctgacccttgagcc

SEQ ID NO: 1319901 - DNA, 25 bp, Homo sapien
tggatcagatagtcccaggctgcct

SEQ ID NO: 1319902 - DNA, 25 bp, Homo sapien
gaagttagccaggtacgctcggagt

SEQ ID NO: 1319903 - DNA, 25 bp, Homo sapien
gactgggatcctcggctagtccttg

SEQ ID NO: 1319904 - DNA, 25 bp, Homo sapien
ttctctgggcactatggaagttagc

SEQ ID NO: 1319905 - DNA, 25 bp, Homo sapien
ccgcaggctttggcttctgagttct

SEQ ID NO: 1319906 - DNA, 25 bp, Homo sapien
cttctgagttctgtcctggctgcac

SEQ ID NO: 1319907 - DNA, 25 bp, Homo sapien
gcttctgagttctgtcctggctgca

SEQ ID NO: 1319908 - DNA, 25 bp, Homo sapien
ttggcttctgagttctgtcctggct

SEQ ID NO: 1319909 - DNA, 25 bp, Homo sapien
gcttcttcccaggaccataggccac

SEQ ID NO: 1319910 - DNA, 25 bp, Homo sapien
agcttcttcccaggaccataggcca

SEQ ID NO: 1319911 - DNA, 25 bp, Homo sapien
cttcttcccaggaccataggccact

SEQ ID NO: 1319912 - DNA, 25 bp, Homo sapien
cagcgacaagctctgcgtggacgag

SEQ ID NO: 1319913 - DNA, 25 bp, Homo sapien
gagctgagactagccttgctggccc

SEQ ID NO: 1319914 - DNA, 25 bp, Homo sapien
tcaaatgatccaacgccgggactcg

SEQ ID NO: 1319915 - DNA, 25 bp, Homo sapien
gggactgcgcactaactggccttgc

SEQ ID NO: 1319916 - DNA, 25 bp, Homo sapien
cgatttcggctcacttcaaactccg

SEQ ID NO: 1319917 - DNA, 25 bp, Homo sapien
cctgacttcatgtgatccgccagcc

SEQ ID NO: 1319918 - DNA, 25 bp, Homo sapien
tgcgatttcggctcacttcaaactc

SEQ ID NO: 1319919 - DNA, 25 bp, Homo sapien
tggtgcgatttcggctcacttcaaa

SEQ ID NO: 1319920 - DNA, 25 bp, Homo sapien
gagagacagttgactatttagaaga

SEQ ID NO: 1319921 - DNA, 25 bp, Homo sapien
gcatgttccatcacattcggctaac

SEQ ID NO: 1319922 - DNA, 25 bp, Homo sapien
gatttctatctcagggacttcatac

SEQ ID NO: 1319923 - DNA, 25 bp, Homo sapien
taaaggagctgcaaagcaagatact

SEQ ID NO: 1319924 - DNA, 25 bp, Homo sapien
tgaccggacgacttgaaagcgcctt

SEQ ID NO: 1319925 - DNA, 25 bp, Homo sapien
aattaatgaccggacgacttgaaag

SEQ ID NO: 1319926 - DNA, 25 bp, Homo sapien
gacgacttgaaagcgccttccactg

SEQ ID NO: 1319927 - DNA, 25 bp, Homo sapien
gaaagcgccttccactgtttatctc

SEQ ID NO: 1319928 - DNA, 25 bp, Homo sapien
gtgggattgcaaacaggcaccacca

SEQ ID NO: 1319929 - DNA, 25 bp, Homo sapien
ccgccccagcttctccaataggtgg

SEQ ID NO: 1319930 - DNA, 25 bp, Homo sapien
cgccccagcttctccaataggtggg

SEQ ID NO: 1319931 - DNA, 25 bp, Homo sapien
ccacgcccgaataagtttgtgaaca

SEQ ID NO: 1319932 - DNA, 25 bp, Homo sapien
cttaaaaatgtagcctcaggaaata

SEQ ID NO: 1319933 - DNA, 25 bp, Homo sapien
ttaatacttaaaaatgtagcctcag

SEQ ID NO: 1319934 - DNA, 25 bp, Homo sapien
tttaatacttaaaaatgtagcctca

SEQ ID NO: 1319935 - DNA, 25 bp, Homo sapien
atacttaaaaatgtagcctcaggaa

SEQ ID NO: 1319936 - DNA, 25 bp, Homo sapien
ataaaaactcacaactttctctcca

SEQ ID NO: 1319937 - DNA, 25 bp, Homo sapien
aaaactcacaactttctctccacgg

SEQ ID NO: 1319938 - DNA, 25 bp, Homo sapien
aactcacaactttctctccacggaa

SEQ ID NO: 1319939 - DNA, 25 bp, Homo sapien
aaaaactcacaactttctctccacg

SEQ ID NO: 1319940 - DNA, 25 bp, Homo sapien
ttagggacccgaagaccaattcagc

SEQ ID NO: 1319941 - DNA, 25 bp, Homo sapien
gaacctcgcagggagaactaacact

SEQ ID NO: 1319942 - DNA, 25 bp, Homo sapien
cgtggtacgcactccctatatgtag

SEQ ID NO: 1319943 - DNA, 25 bp, Homo sapien
gagggtatcttttcgtggtgcacca

SEQ ID NO: 1319944 - DNA, 25 bp, Homo sapien
gggtgggatgtgagaacgcattgtt

SEQ ID NO: 1319945 - DNA, 25 bp, Homo sapien
aacatgatttcctggcctttgtcca

SEQ ID NO: 1319946 - DNA, 25 bp, Homo sapien
agaacatgatttcctggcctttgtc

SEQ ID NO: 1319947 - DNA, 25 bp, Homo sapien
ggtgggatgtgagaacgcattgttc

SEQ ID NO: 1319948 - DNA, 25 bp, Homo sapien
cctgctgcatggctttgcccctctg

SEQ ID NO: 1319949 - DNA, 25 bp, Homo sapien
tctgccttgccgtttcccgtgcggg

SEQ ID NO: 1319950 - DNA, 25 bp, Homo sapien
agaccctgttgacctctctctgctt

SEQ ID NO: 1319951 - DNA, 25 bp, Homo sapien
tggctgctttcctgatctgcctcca

SEQ ID NO: 1319952 - DNA, 25 bp, Homo sapien
cagagaagctccttccaatagctaa

SEQ ID NO: 1319953 - DNA, 25 bp, Homo sapien
gctaatgttcacttgcaaactcccc

SEQ ID NO: 1319954 - DNA, 25 bp, Homo sapien
ccttccaatagctaatgttcacttg

SEQ ID NO: 1319955 - DNA, 25 bp, Homo sapien
gagaagctccttccaatagctaatg

SEQ ID NO: 1319956 - DNA, 25 bp, Homo sapien
actctcaagtgacacagatacaggc

SEQ ID NO: 1319957 - DNA, 25 bp, Homo sapien
cccaggagtcaccagacggaagggt

SEQ ID NO: 1319958 - DNA, 25 bp, Homo sapien
tataaataatggatgtggtaggagg

SEQ ID NO: 1319959 - DNA, 25 bp, Homo sapien
cagggatatggagagcctgcccagg

SEQ ID NO: 1319960 - DNA, 25 bp, Homo sapien
cggtggctgttctgtatggatatca

SEQ ID NO: 1319961 - DNA, 25 bp, Homo sapien
ggcctggatgtgcaaatcggtggct

SEQ ID NO: 1319962 - DNA, 25 bp, Homo sapien
ggatgtgcaaatcggtggctgttct

SEQ ID NO: 1319963 - DNA, 25 bp, Homo sapien
tgttctgtatggatatcagggaggc

SEQ ID NO: 1319964 - DNA, 25 bp, Homo sapien
cctgcgtctaacaccagacccagtg

SEQ ID NO: 1319965 - DNA, 25 bp, Homo sapien
caggggtccatcctgcgtctaacac

SEQ ID NO: 1319966 - DNA, 25 bp, Homo sapien
ggtccatcctgcgtctaacaccaga

SEQ ID NO: 1319967 - DNA, 25 bp, Homo sapien
ccagtgaccccacacgccccacaca

SEQ ID NO: 1319968 - DNA, 25 bp, Homo sapien
aactgaggttgccagagctagtggc

SEQ ID NO: 1319969 - DNA, 25 bp, Homo sapien
ctggaactgaggttgccagagctag

SEQ ID NO: 1319970 - DNA, 25 bp, Homo sapien
ggttgccagagctagtggcagcagg

SEQ ID NO: 1319971 - DNA, 25 bp, Homo sapien
ggtcccctggaactgaggttgccag

SEQ ID NO: 1319972 - DNA, 25 bp, Homo sapien
tgggtggatggccacggtcatggag

SEQ ID NO: 1319973 - DNA, 25 bp, Homo sapien
ccacggtcatggaggtagtcactct

SEQ ID NO: 1319974 - DNA, 25 bp, Homo sapien
tggaggtagtcactctggcaaagct

SEQ ID NO: 1319975 - DNA, 25 bp, Homo sapien
tggatggatgtaggcaccaggcagg

SEQ ID NO: 1319976 - DNA, 25 bp, Homo sapien
gggcagggaggaggatgccccccac

SEQ ID NO: 1319977 - DNA, 25 bp, Homo sapien
tggggcagggaggaggatgcccccc

SEQ ID NO: 1319978 - DNA, 25 bp, Homo sapien
ggggcagggaggaggatgcccccca

SEQ ID NO: 1319979 - DNA, 25 bp, Homo sapien
ctggggcagggaggaggatgccccc

SEQ ID NO: 1319980 - DNA, 25 bp, Homo sapien
ggctttccttgtacatctgtatcac

SEQ ID NO: 1319981 - DNA, 25 bp, Homo sapien
tgggctttccttgtacatctgtatc

SEQ ID NO: 1319982 - DNA, 25 bp, Homo sapien
gggctttccttgtacatctgtatca

SEQ ID NO: 1319983 - DNA, 25 bp, Homo sapien
ctgggctttccttgtacatctgtat

SEQ ID NO: 1319984 - DNA, 25 bp, Homo sapien
tggcaggcgacaggatgttgaggcc

SEQ ID NO: 1319985 - DNA, 25 bp, Homo sapien
ccgtcccctttagcatctcgctggg

SEQ ID NO: 1319986 - DNA, 25 bp, Homo sapien
ttggtctccagcaggatatgagagc

SEQ ID NO: 1319987 - DNA, 25 bp, Homo sapien
gcctggggcaaaccctgcaccttgt

SEQ ID NO: 1319988 - DNA, 25 bp, Homo sapien
tgtcccttcccttgcctctccctac

SEQ ID NO: 1319989 - DNA, 25 bp, Homo sapien
acagggctctgtcccttcccttgcc

SEQ ID NO: 1319990 - DNA, 25 bp, Homo sapien
ctgtctgtgggccacagggctctgt

SEQ ID NO: 1319991 - DNA, 25 bp, Homo sapien
agggctctgtcccttcccttgcctc

SEQ ID NO: 1319992 - DNA, 25 bp, Homo sapien
cccgtcccttgggctgggagtagag

SEQ ID NO: 1319993 - DNA, 25 bp, Homo sapien
caggagcgtgagcactgtcagcgcc

SEQ ID NO: 1319994 - DNA, 25 bp, Homo sapien
aggcagcagcacgagtccatggagg

SEQ ID NO: 1319995 - DNA, 25 bp, Homo sapien
agcacgagtccatggaggaggccca

SEQ ID NO: 1319996 - DNA, 25 bp, Homo sapien
tgagcactgtcagcgccgcaaagaa

SEQ ID NO: 1319997 - DNA, 25 bp, Homo sapien
ccccatcggtcacgggggcaaatgt

SEQ ID NO: 1319998 - DNA, 25 bp, Homo sapien
tcacgggggcaaatgtgtgctcaag

SEQ ID NO: 1319999 - DNA, 25 bp, Homo sapien
atgagcagacccagcaatgtggaga

SEQ ID NO: 1320000 - DNA, 25 bp, Homo sapien
cccagcaatgtggagatggccccat

SEQ ID NO: 1320001 - DNA, 25 bp, Homo sapien
atcccacaatggttcacagtaaaac

SEQ ID NO: 1320002 - DNA, 25 bp, Homo sapien
cccatcccacaatggttcacagtaa

SEQ ID NO: 1320003 - DNA, 25 bp, Homo sapien
tggcccatcccacaatggttcacag

SEQ ID NO: 1320004 - DNA, 25 bp, Homo sapien
ggcccatcccacaatggttcacagt

SEQ ID NO: 1320005 - DNA, 25 bp, Homo sapien
tgaactcaacgccaatgcctacaga

SEQ ID NO: 1320006 - DNA, 25 bp, Homo sapien
cagagccacgtggactgtgaactca

SEQ ID NO: 1320007 - DNA, 25 bp, Homo sapien
caggaaacccatgataccaaagagt

SEQ ID NO: 1320008 - DNA, 25 bp, Homo sapien
acagaggccacaaggatcaccacgg

SEQ ID NO: 1320009 - DNA, 25 bp, Homo sapien
acagacgaggaaagtgcacaccagc

SEQ ID NO: 1320010 - DNA, 25 bp, Homo sapien
cacagacgaggaaagtgcacaccag

SEQ ID NO: 1320011 - DNA, 25 bp, Homo sapien
tatgaggccagccgtccaggggttg

SEQ ID NO: 1320012 - DNA, 25 bp, Homo sapien
ggccagccgtccaggggttgaggag

SEQ ID NO: 1320013 - DNA, 25 bp, Homo sapien
tggggtaggcgtgcaccccagcctg

SEQ ID NO: 1320014 - DNA, 25 bp, Homo sapien
gcctctgcgcatgctgcccgggccc

SEQ ID NO: 1320015 - DNA, 25 bp, Homo sapien
caaagtctgcagtcttctggaggcc

SEQ ID NO: 1320016 - DNA, 25 bp, Homo sapien
gaactgggcaaactccaagggctga

SEQ ID NO: 1320017 - DNA, 25 bp, Homo sapien
tgcgaaggttctcccccgtggtgtc

SEQ ID NO: 1320018 - DNA, 25 bp, Homo sapien
cacggtcagccccatgtagaagagc

SEQ ID NO: 1320019 - DNA, 25 bp, Homo sapien
ccccatgtagaagagctcgggtgga

SEQ ID NO: 1320020 - DNA, 25 bp, Homo sapien
ttgtcgtgcagccattcaggaggtg

SEQ ID NO: 1320021 - DNA, 25 bp, Homo sapien
catcctcagagccattgcggtacga

SEQ ID NO: 1320022 - DNA, 25 bp, Homo sapien
gtggcgggtgatgcgcccagaagcc

SEQ ID NO: 1320023 - DNA, 25 bp, Homo sapien
cattgcggtacgagtggcgggtgat

SEQ ID NO: 1320024 - DNA, 25 bp, Homo sapien
tacgagtggcgggtgatgcgcccag

SEQ ID NO: 1320025 - DNA, 25 bp, Homo sapien
gccagttgcggtaatagtgcagcca

SEQ ID NO: 1320026 - DNA, 25 bp, Homo sapien
gcagcaccgccttgagggaactgaa

SEQ ID NO: 1320027 - DNA, 25 bp, Homo sapien
tgaagcgctggtgcagatcaaagag

SEQ ID NO: 1320028 - DNA, 25 bp, Homo sapien
gggccacctcgtacagggagaagta

SEQ ID NO: 1320029 - DNA, 25 bp, Homo sapien
gagcaccaaagagcaccagcacgat

SEQ ID NO: 1320030 - DNA, 25 bp, Homo sapien
gcaccaaagagcaccagcacgatgg

SEQ ID NO: 1320031 - DNA, 25 bp, Homo sapien
aagagcaccaaagagcaccagcacg

SEQ ID NO: 1320032 - DNA, 25 bp, Homo sapien
caccaaagagcaccagcacgatggc

SEQ ID NO: 1320033 - DNA, 25 bp, Homo sapien
tgactggagcagcaacggggcaaac

SEQ ID NO: 1320034 - DNA, 25 bp, Homo sapien
cctggcctagaaggtcccgtgtgga

SEQ ID NO: 1320035 - DNA, 25 bp, Homo sapien
caaactgatagcgggcgaaatgggc

SEQ ID NO: 1320036 - DNA, 25 bp, Homo sapien
aatgggcaagattccagcgggcaca

SEQ ID NO: 1320037 - DNA, 25 bp, Homo sapien
tgggcaatgcccactggtactgtcc

SEQ ID NO: 1320038 - DNA, 25 bp, Homo sapien
tcacagtgggtaaaggcttgaactg

SEQ ID NO: 1320039 - DNA, 25 bp, Homo sapien
gtgggcaatgcccactggtactgtc

SEQ ID NO: 1320040 - DNA, 25 bp, Homo sapien
tggcttcacagtgggtaaaggcttg

SEQ ID NO: 1320041 - DNA, 25 bp, Homo sapien
ggaagacaagcatcacggctacaaa

SEQ ID NO: 1320042 - DNA, 25 bp, Homo sapien
tggcgccgccgtaggtccaggctga

SEQ ID NO: 1320043 - DNA, 25 bp, Homo sapien
acggctacaaaggtgcagccaacca

SEQ ID NO: 1320044 - DNA, 25 bp, Homo sapien
agagcacatcaaggcgctggcagtg

SEQ ID NO: 1320045 - DNA, 25 bp, Homo sapien
gtgcgctgcagacactcgcccatgc

SEQ ID NO: 1320046 - DNA, 25 bp, Homo sapien
gttgatggatgtgagtacgacactg

SEQ ID NO: 1320047 - DNA, 25 bp, Homo sapien
gtacgacactggtgcccgtgcgctg

SEQ ID NO: 1320048 - DNA, 25 bp, Homo sapien
gtagggagaaggctcgcagcgcagg

SEQ ID NO: 1320049 - DNA, 25 bp, Homo sapien
aggaatacgtcatccacgccgattc

SEQ ID NO: 1320050 - DNA, 25 bp, Homo sapien
tccacgccgattcccagagccaaga

SEQ ID NO: 1320051 - DNA, 25 bp, Homo sapien
agcaggaatacgtcatccacgccga

SEQ ID NO: 1320052 - DNA, 25 bp, Homo sapien
aggcatgcgccagcaggaatacgtc

SEQ ID NO: 1320053 - DNA, 25 bp, Homo sapien
cagtcccaccgcagcatggtcacac

SEQ ID NO: 1320054 - DNA, 25 bp, Homo sapien
cgcagtcccaccgcagcatggtcac

SEQ ID NO: 1320055 - DNA, 25 bp, Homo sapien
gcatggtcacacaggcataggccag

SEQ ID NO: 1320056 - DNA, 25 bp, Homo sapien
gggcgcagtcccaccgcagcatggt

SEQ ID NO: 1320057 - DNA, 25 bp, Homo sapien
gcagcactgacttcagagaacgcat

SEQ ID NO: 1320058 - DNA, 25 bp, Homo sapien
gagaacgcatgcaggatgtcatcca

SEQ ID NO: 1320059 - DNA, 25 bp, Homo sapien
tcagagaacgcatgcaggatgtcat

SEQ ID NO: 1320060 - DNA, 25 bp, Homo sapien
tgacttcagagaacgcatgcaggat

SEQ ID NO: 1320061 - DNA, 25 bp, Homo sapien
cactccagccaatgtcatgtgtctg

SEQ ID NO: 1320062 - DNA, 25 bp, Homo sapien
gctgccaggcttgtagcactgtgct

SEQ ID NO: 1320063 - DNA, 25 bp, Homo sapien
catgtgtctgatagtcaccccggaa

SEQ ID NO: 1320064 - DNA, 25 bp, Homo sapien
ccggaaatgctcgtacagctggcgg

SEQ ID NO: 1320065 - DNA, 25 bp, Homo sapien
caagaaggtgctctgcagggcctct

SEQ ID NO: 1320066 - DNA, 25 bp, Homo sapien
aagaaggtgctctgcagggcctctg

SEQ ID NO: 1320067 - DNA, 25 bp, Homo sapien
gaaggtgctctgcagggcctctgcc

SEQ ID NO: 1320068 - DNA, 25 bp, Homo sapien
agcaagaaggtgctctgcagggcct

SEQ ID NO: 1320069 - DNA, 25 bp, Homo sapien
tcctgccagtgcatgaatttgtggg

SEQ ID NO: 1320070 - DNA, 25 bp, Homo sapien
cctgccagtgcatgaatttgtggga

SEQ ID NO: 1320071 - DNA, 25 bp, Homo sapien
tgccagtgcatgaatttgtgggaga

SEQ ID NO: 1320072 - DNA, 25 bp, Homo sapien
gccagtgcatgaatttgtgggagaa

SEQ ID NO: 1320073 - DNA, 25 bp, Homo sapien
ctgcctgctgtgatggttgggggca

SEQ ID NO: 1320074 - DNA, 25 bp, Homo sapien
ggggcactaggtgggcagtggaggt

SEQ ID NO: 1320075 - DNA, 25 bp, Homo sapien
cactaggtgggcagtggaggtcatc

SEQ ID NO: 1320076 - DNA, 25 bp, Homo sapien
cctgctgtgatggttgggggcacta

SEQ ID NO: 1320077 - DNA, 25 bp, Homo sapien
ttggtccactggatatccgggcggc

SEQ ID NO: 1320078 - DNA, 25 bp, Homo sapien
tgccttgtctagcagctcccggaag

SEQ ID NO: 1320079 - DNA, 25 bp, Homo sapien
gctgctctggatccaggttggtcca

SEQ ID NO: 1320080 - DNA, 25 bp, Homo sapien
cccacctgtgccttgtctagcagct

SEQ ID NO: 1320081 - DNA, 25 bp, Homo sapien
cccaccagggtgctacagtgagctg

SEQ ID NO: 1320082 - DNA, 25 bp, Homo sapien
gagacgaatatcagggcagggttac

SEQ ID NO: 1320083 - DNA, 25 bp, Homo sapien
ggcctgggcaatggcttagcaaaca

SEQ ID NO: 1320084 - DNA, 25 bp, Homo sapien
ctgagttccttaccaagctgtgtgc

SEQ ID NO: 1320085 - DNA, 25 bp, Homo sapien
gggtgaggatcacgcacggaaacag

SEQ ID NO: 1320086 - DNA, 25 bp, Homo sapien
gaggatcacgcacggaaacagcttc

SEQ ID NO: 1320087 - DNA, 25 bp, Homo sapien
cttggagtttggctccctcccagaa

SEQ ID NO: 1320088 - DNA, 25 bp, Homo sapien
gcggagcccccttggagtttggctc

SEQ ID NO: 1320089 - DNA, 25 bp, Homo sapien
tcaataaggggaactcctgacttgt

SEQ ID NO: 1320090 - DNA, 25 bp, Homo sapien
caataaggggaactcctgacttgta

SEQ ID NO: 1320091 - DNA, 25 bp, Homo sapien
aataaggggaactcctgacttgtag

SEQ ID NO: 1320092 - DNA, 25 bp, Homo sapien
taaggggaactcctgacttgtagca

SEQ ID NO: 1320093 - DNA, 25 bp, Homo sapien
cttctccttggtgtaatgcagctcc

SEQ ID NO: 1320094 - DNA, 25 bp, Homo sapien
cgtgcggtctgtatcagcatctgag

SEQ ID NO: 1320095 - DNA, 25 bp, Homo sapien
tctgagaggtgtatgcagcctcctc

SEQ ID NO: 1320096 - DNA, 25 bp, Homo sapien
caagtgcttcgggtgtgaggatgtt

SEQ ID NO: 1320097 - DNA, 25 bp, Homo sapien
aatcagctcacgaaccctggcaggg

SEQ ID NO: 1320098 - DNA, 25 bp, Homo sapien
tgcatggaatcagctcacgaaccct

SEQ ID NO: 1320099 - DNA, 25 bp, Homo sapien
cactcaggcagaaagtgcatggaat

SEQ ID NO: 1320100 - DNA, 25 bp, Homo sapien
gaaagtgcatggaatcagctcacga

SEQ ID NO: 1320101 - DNA, 25 bp, Homo sapien
tcctgcgttatgctggccacaggct

SEQ ID NO: 1320102 - DNA, 25 bp, Homo sapien
tccagtcctgcgttatgctggccac

SEQ ID NO: 1320103 - DNA, 25 bp, Homo sapien
tgtccagaccacagggattcccggc

SEQ ID NO: 1320104 - DNA, 25 bp, Homo sapien
tagtgtcctggatcttagcgcccct

SEQ ID NO: 1320105 - DNA, 25 bp, Homo sapien
ggctatcacctaactatgatgtggg

SEQ ID NO: 1320106 - DNA, 25 bp, Homo sapien
tgctgggacccaaacgtactgcttc

SEQ ID NO: 1320107 - DNA, 25 bp, Homo sapien
gatctcagaccctgcgctgtttcca

SEQ ID NO: 1320108 - DNA, 25 bp, Homo sapien
tctgagactcaagccccatctgaga

SEQ ID NO: 1320109 - DNA, 25 bp, Homo sapien
cacacagtaggtacagatgtggagt

SEQ ID NO: 1320110 - DNA, 25 bp, Homo sapien
tgccttgggctcattagttattctc

SEQ ID NO: 1320111 - DNA, 25 bp, Homo sapien
cattgtggtgcagaaaggaagagtc

SEQ ID NO: 1320112 - DNA, 25 bp, Homo sapien
taaatgcaggcaaagtacttaggaa

SEQ ID NO: 1320113 - DNA, 25 bp, Homo sapien
ttggccagatggagattggccacag

SEQ ID NO: 1320114 - DNA, 25 bp, Homo sapien
ccagatggagattggccacagggtg

SEQ ID NO: 1320115 - DNA, 25 bp, Homo sapien
ggccagatggagattggccacaggg

SEQ ID NO: 1320116 - DNA, 25 bp, Homo sapien
cagatggagattggccacagggtgg

SEQ ID NO: 1320117 - DNA, 25 bp, Homo sapien
gctatggccagtgtccacaacttac

SEQ ID NO: 1320118 - DNA, 25 bp, Homo sapien
cagctatggccagtgtccacaactt

SEQ ID NO: 1320119 - DNA, 25 bp, Homo sapien
ctgagcagctatggccagtgtccac

SEQ ID NO: 1320120 - DNA, 25 bp, Homo sapien
agcagctatggccagtgtccacaac

SEQ ID NO: 1320121 - DNA, 25 bp, Homo sapien
ccaaaggccaacagtcccagaaaga

SEQ ID NO: 1320122 - DNA, 25 bp, Homo sapien
caagtttgtctcaataatggccatg

SEQ ID NO: 1320123 - DNA, 25 bp, Homo sapien
gcactttgccacaatgtctctggat

SEQ ID NO: 1320124 - DNA, 25 bp, Homo sapien
atgcggagacctaatgccagggccc

SEQ ID NO: 1320125 - DNA, 25 bp, Homo sapien
cggcacttcaagacatcacaaacct

SEQ ID NO: 1320126 - DNA, 25 bp, Homo sapien
catcacaaaccttgcagaggcccga

SEQ ID NO: 1320127 - DNA, 25 bp, Homo sapien
aatgacactcggcacttcaagacat

SEQ ID NO: 1320128 - DNA, 25 bp, Homo sapien
agaggcccgagtgacagacctggct

SEQ ID NO: 1320129 - DNA, 25 bp, Homo sapien
tgggggtgtgtaactcgggggcagc

SEQ ID NO: 1320130 - DNA, 25 bp, Homo sapien
ctggggtgctgcggttcgagctggg

SEQ ID NO: 1320131 - DNA, 25 bp, Homo sapien
gtgctgcggttcgagctgggggtgt

SEQ ID NO: 1320132 - DNA, 25 bp, Homo sapien
gcagctctctgaggggcggcgatcg

SEQ ID NO: 1320133 - DNA, 25 bp, Homo sapien
tggcccgagacgcacagcagggctc

SEQ ID NO: 1320134 - DNA, 25 bp, Homo sapien
gctgggccccgcgtagggattcagt

SEQ ID NO: 1320135 - DNA, 25 bp, Homo sapien
ggattcacccgctccgtgggccgtg

SEQ ID NO: 1320136 - DNA, 25 bp, Homo sapien
tatctgggcgctcccataggctagc

SEQ ID NO: 1320137 - DNA, 25 bp, Homo sapien
gccacactttctttccgacccaatc

SEQ ID NO: 1320138 - DNA, 25 bp, Homo sapien
tccgacccaatcaaagcccaagatt

SEQ ID NO: 1320139 - DNA, 25 bp, Homo sapien
gatggcatcaaagtgggtagggcca

SEQ ID NO: 1320140 - DNA, 25 bp, Homo sapien
cactttctttccgacccaatcaaag

SEQ ID NO: 1320141 - DNA, 25 bp, Homo sapien
ttgggtcagccagtcagaaagtagc

SEQ ID NO: 1320142 - DNA, 25 bp, Homo sapien
cctatgggtctagaaaggctgatta

SEQ ID NO: 1320143 - DNA, 25 bp, Homo sapien
actttcaggactgggttgggtcagc

SEQ ID NO: 1320144 - DNA, 25 bp, Homo sapien
gagttaggccactgtatctgtcctg

SEQ ID NO: 1320145 - DNA, 25 bp, Homo sapien
cagagttaaacaggtgggccggcca

SEQ ID NO: 1320146 - DNA, 25 bp, Homo sapien
aatacagagttaaacaggtgggccg

SEQ ID NO: 1320147 - DNA, 25 bp, Homo sapien
ccggccaacatctgtggctttggag

SEQ ID NO: 1320148 - DNA, 25 bp, Homo sapien
gtgggccggccaacatctgtggctt

SEQ ID NO: 1320149 - DNA, 25 bp, Homo sapien
tcagatctccatgagctggtcattc

SEQ ID NO: 1320150 - DNA, 25 bp, Homo sapien
tctccatgagctggtcattccccac

SEQ ID NO: 1320151 - DNA, 25 bp, Homo sapien
cagatctccatgagctggtcattcc

SEQ ID NO: 1320152 - DNA, 25 bp, Homo sapien
gatctccatgagctggtcattcccc

SEQ ID NO: 1320153 - DNA, 25 bp, Homo sapien
agcattgttgcagatgacactgcct

SEQ ID NO: 1320154 - DNA, 25 bp, Homo sapien
tccaatcaagcagtccttgatgtct

SEQ ID NO: 1320155 - DNA, 25 bp, Homo sapien
tttggcttcaatcctctggccactt

SEQ ID NO: 1320156 - DNA, 25 bp, Homo sapien
gatgtctgcacccttctcgatcaca

SEQ ID NO: 1320157 - DNA, 25 bp, Homo sapien
agttagggaggacccaaggctcgca

SEQ ID NO: 1320158 - DNA, 25 bp, Homo sapien
tgtaacacagtagccaagttaggga

SEQ ID NO: 1320159 - DNA, 25 bp, Homo sapien
tcattactattggttgggggttctg

SEQ ID NO: 1320160 - DNA, 25 bp, Homo sapien
gaggacccaaggctcgcatcaccat

SEQ ID NO: 1320161 - DNA, 25 bp, Homo sapien
taatggctacgtgcctcaagttatc

SEQ ID NO: 1320162 - DNA, 25 bp, Homo sapien
gagaaatccagatttgggactatgc

SEQ ID NO: 1320163 - DNA, 25 bp, Homo sapien
gggcagtccagttaatggctacgtg

SEQ ID NO: 1320164 - DNA, 25 bp, Homo sapien
gactatgctcataacgatctttctc

SEQ ID NO: 1320165 - DNA, 25 bp, Homo sapien
gaacctagaggtctaaattccatcc

SEQ ID NO: 1320166 - DNA, 25 bp, Homo sapien
tggtccttaggctgacccatcactg

SEQ ID NO: 1320167 - DNA, 25 bp, Homo sapien
aatcctcctaggacatcaactctgg

SEQ ID NO: 1320168 - DNA, 25 bp, Homo sapien
ttgaggctcagaaatcacaaatcct

SEQ ID NO: 1320169 - DNA, 25 bp, Homo sapien
cctgagtagtgtaaacaatgacaaa

SEQ ID NO: 1320170 - DNA, 25 bp, Homo sapien
ggtggcgtgatctgcctcaagtaaa

SEQ ID NO: 1320171 - DNA, 25 bp, Homo sapien
caatgacaaataatgccaccctcag

SEQ ID NO: 1320172 - DNA, 25 bp, Homo sapien
taggtctcggataggagctaaatgt

SEQ ID NO: 1320173 - DNA, 25 bp, Homo sapien
ttagagaatattcggcaaagagcca

SEQ ID NO: 1320174 - DNA, 25 bp, Homo sapien
ttgatgagttgacaggctttctaaa

SEQ ID NO: 1320175 - DNA, 25 bp, Homo sapien
tgagttgacaggctttctaaactac

SEQ ID NO: 1320176 - DNA, 25 bp, Homo sapien
cgggctcctgcttcagatattgact

SEQ ID NO: 1320177 - DNA, 25 bp, Homo sapien
gtttttattctattgccctcttgat

SEQ ID NO: 1320178 - DNA, 25 bp, Homo sapien
ttgattagcactttgcctgggtata

SEQ ID NO: 1320179 - DNA, 25 bp, Homo sapien
tattctattgccctcttgattagca

SEQ ID NO: 1320180 - DNA, 25 bp, Homo sapien
ctcttgattagcactttgcctgggt

SEQ ID NO: 1320181 - DNA, 25 bp, Homo sapien
tgcctcaagtgggtacagggggaaa

SEQ ID NO: 1320182 - DNA, 25 bp, Homo sapien
ttatctttgcctcaagtgggtacag

SEQ ID NO: 1320183 - DNA, 25 bp, Homo sapien
tcaagtgggtacagggggaaacata

SEQ ID NO: 1320184 - DNA, 25 bp, Homo sapien
atctttgcctcaagtgggtacaggg

SEQ ID NO: 1320185 - DNA, 25 bp, Homo sapien
gtcactctatcttttatgagacagg

SEQ ID NO: 1320186 - DNA, 25 bp, Homo sapien
ggcaattggtaatagtcactctatc

SEQ ID NO: 1320187 - DNA, 25 bp, Homo sapien
aatgactgagcgcttaatggatgac

SEQ ID NO: 1320188 - DNA, 25 bp, Homo sapien
tcatgagaaggcaattggtaatagt

SEQ ID NO: 1320189 - DNA, 25 bp, Homo sapien
tgacaatctgggctgacgaatggac

SEQ ID NO: 1320190 - DNA, 25 bp, Homo sapien
gtggttcttctggacagagagcaga

SEQ ID NO: 1320191 - DNA, 25 bp, Homo sapien
acagagagcagacagcaatttgggc

SEQ ID NO: 1320192 - DNA, 25 bp, Homo sapien
gctgacgaatggactggtggttctt

SEQ ID NO: 1320193 - DNA, 25 bp, Homo sapien
catctaaaccctttactgctctgca

SEQ ID NO: 1320194 - DNA, 25 bp, Homo sapien
tcatctaaaccctttactgctctgc

SEQ ID NO: 1320195 - DNA, 25 bp, Homo sapien
tctaaaccctttactgctctgcatt

SEQ ID NO: 1320196 - DNA, 25 bp, Homo sapien
tctgttgcttaggcttaggctggag

SEQ ID NO: 1320197 - DNA, 25 bp, Homo sapien
gaagtaagtactgcagatatcccca

SEQ ID NO: 1320198 - DNA, 25 bp, Homo sapien
tttttgctgcacctgagtaccctag

SEQ ID NO: 1320199 - DNA, 25 bp, Homo sapien
agtagtctcccttgacgtgccaggt

SEQ ID NO: 1320200 - DNA, 25 bp, Homo sapien
tagaggccctgactatggaccaggc

SEQ ID NO: 1320201 - DNA, 25 bp, Homo sapien
tttgcttccatgtagagtcccagtg

SEQ ID NO: 1320202 - DNA, 25 bp, Homo sapien
gcagagcccctctttcatgatgtgg

SEQ ID NO: 1320203 - DNA, 25 bp, Homo sapien
gcaggcatcatagggagccaggttc

SEQ ID NO: 1320204 - DNA, 25 bp, Homo sapien
tgatgtggacatagcagcgcacctg

SEQ ID NO: 1320205 - DNA, 25 bp, Homo sapien
tactatgagtccacgactgggccgg

SEQ ID NO: 1320206 - DNA, 25 bp, Homo sapien
gccaaaccagagctatgaatcagag

SEQ ID NO: 1320207 - DNA, 25 bp, Homo sapien
gctgcctagagcctagagaacaggg

SEQ ID NO: 1320208 - DNA, 25 bp, Homo sapien
tgatgcccagttctacagtcctaat

SEQ ID NO: 1320209 - DNA, 25 bp, Homo sapien
tatggaatcagttcactccggatag

SEQ ID NO: 1320210 - DNA, 25 bp, Homo sapien
gaatcagttcactccggatagaagt

SEQ ID NO: 1320211 - DNA, 25 bp, Homo sapien
aaatatggaatcagttcactccgga

SEQ ID NO: 1320212 - DNA, 25 bp, Homo sapien
ttcactccggatagaagttattgac

SEQ ID NO: 1320213 - DNA, 25 bp, Homo sapien
tcataatccaatggacagtagcctg

SEQ ID NO: 1320214 - DNA, 25 bp, Homo sapien
gggccagatcacgaaagctttttgt

SEQ ID NO: 1320215 - DNA, 25 bp, Homo sapien
gttaagctaatcaggtaggcaaggg

SEQ ID NO: 1320216 - DNA, 25 bp, Homo sapien
gtagcatttaccaagcatatgcgag

SEQ ID NO: 1320217 - DNA, 25 bp, Homo sapien
taatgcttcaaaccagtgtaggcag

SEQ ID NO: 1320218 - DNA, 25 bp, Homo sapien
gaactgtcactgcaagaggcaagca

SEQ ID NO: 1320219 - DNA, 25 bp, Homo sapien
tctgctggagctcaacattaggtca

SEQ ID NO: 1320220 - DNA, 25 bp, Homo sapien
taaatcgtctctatctcggcagcag

SEQ ID NO: 1320221 - DNA, 25 bp, Homo sapien
caagacccgtgtggaaacgtattct

SEQ ID NO: 1320222 - DNA, 25 bp, Homo sapien
tgggcatccacaagacccgtgtgga

SEQ ID NO: 1320223 - DNA, 25 bp, Homo sapien
tccacaagacccgtgtggaaacgta

SEQ ID NO: 1320224 - DNA, 25 bp, Homo sapien
agacccgtgtggaaacgtattctag

SEQ ID NO: 1320225 - DNA, 25 bp, Homo sapien
ggcattctcggcatataggattcag

SEQ ID NO: 1320226 - DNA, 25 bp, Homo sapien
ctcggcatataggattcagctggct

SEQ ID NO: 1320227 - DNA, 25 bp, Homo sapien
catataggattcagctggcttccca

SEQ ID NO: 1320228 - DNA, 25 bp, Homo sapien
ctttgctcgtggcattctcggcata

SEQ ID NO: 1320229 - DNA, 25 bp, Homo sapien
ccagtactatgctgggtaacagcag

SEQ ID NO: 1320230 - DNA, 25 bp, Homo sapien
cctctccgggagcttgtaagatctc

SEQ ID NO: 1320231 - DNA, 25 bp, Homo sapien
ccagtattgctgttaggaagttcaa

SEQ ID NO: 1320232 - DNA, 25 bp, Homo sapien
cacaatgataaccttggtatgtttc

SEQ ID NO: 1320233 - DNA, 25 bp, Homo sapien
tgtaggatggatcccttaatgacca

SEQ ID NO: 1320234 - DNA, 25 bp, Homo sapien
taggatggatcccttaatgaccagc

SEQ ID NO: 1320235 - DNA, 25 bp, Homo sapien
ttctgtaggatggatcccttaatga

SEQ ID NO: 1320236 - DNA, 25 bp, Homo sapien
aggatggatcccttaatgaccagct

SEQ ID NO: 1320237 - DNA, 25 bp, Homo sapien
tgtccactccaatgaagtcacgctg

SEQ ID NO: 1320238 - DNA, 25 bp, Homo sapien
tgctgtccactccaatgaagtcacg

SEQ ID NO: 1320239 - DNA, 25 bp, Homo sapien
tgtgctgtccactccaatgaagtca

SEQ ID NO: 1320240 - DNA, 25 bp, Homo sapien
tccactccaatgaagtcacgctgct

SEQ ID NO: 1320241 - DNA, 25 bp, Homo sapien
cctgggagcaataatttccagccag

SEQ ID NO: 1320242 - DNA, 25 bp, Homo sapien
tgctttagcaaaataggaatttcac

SEQ ID NO: 1320243 - DNA, 25 bp, Homo sapien
agcaggtaattgtagaatgtcttcc

SEQ ID NO: 1320244 - DNA, 25 bp, Homo sapien
gaagaaaggctacacaaacttaaga

SEQ ID NO: 1320245 - DNA, 25 bp, Homo sapien
tagtgcagagggagctaagccgatt

SEQ ID NO: 1320246 - DNA, 25 bp, Homo sapien
taagccgattaagaggtgacagcca

SEQ ID NO: 1320247 - DNA, 25 bp, Homo sapien
tactgattctagtctgggccaaggc

SEQ ID NO: 1320248 - DNA, 25 bp, Homo sapien
gccaaggccatataactctgagaac

SEQ ID NO: 1320249 - DNA, 25 bp, Homo sapien
tcagtaactgtggtaagctgatctc

SEQ ID NO: 1320250 - DNA, 25 bp, Homo sapien
caccctttcactcagtaagtagtat

SEQ ID NO: 1320251 - DNA, 25 bp, Homo sapien
taagtagtatcaagcaatggcgaga

SEQ ID NO: 1320252 - DNA, 25 bp, Homo sapien
cctagttcaggagttggcataatac

SEQ ID NO: 1320253 - DNA, 25 bp, Homo sapien
atttccccgcacagccttagctggg

SEQ ID NO: 1320254 - DNA, 25 bp, Homo sapien
caaaagttggtacattctagaaaat

SEQ ID NO: 1320255 - DNA, 25 bp, Homo sapien
ggctgtttgaatcactagaaaagtt

SEQ ID NO: 1320256 - DNA, 25 bp, Homo sapien
gggtcttgcttacacttctaagttg

SEQ ID NO: 1320257 - DNA, 25 bp, Homo sapien
tgcctttataagcaggccattcaat

SEQ ID NO: 1320258 - DNA, 25 bp, Homo sapien
tttattgattgttcaccatgggaca

SEQ ID NO: 1320259 - DNA, 25 bp, Homo sapien
gcaagaagagctgcctttataagca

SEQ ID NO: 1320260 - DNA, 25 bp, Homo sapien
ccatgggacataactgggccaggtg

SEQ ID NO: 1320261 - DNA, 25 bp, Homo sapien
gcctggcaacagagcgagtctccat

SEQ ID NO: 1320262 - DNA, 25 bp, Homo sapien
agattggagtgaaccgagatggtgc

SEQ ID NO: 1320263 - DNA, 25 bp, Homo sapien
gtggagattggagtgaaccgagatg

SEQ ID NO: 1320264 - DNA, 25 bp, Homo sapien
tggagattggagtgaaccgagatgg

SEQ ID NO: 1320265 - DNA, 25 bp, Homo sapien
tgttatcagatcacagctcagcacc

SEQ ID NO: 1320266 - DNA, 25 bp, Homo sapien
caacctcatgtaaggcaacgtctgt

SEQ ID NO: 1320267 - DNA, 25 bp, Homo sapien
gaacaggttctatgctatcttggcc

SEQ ID NO: 1320268 - DNA, 25 bp, Homo sapien
cataagctctaaacaggtccacaac

SEQ ID NO: 1320269 - DNA, 25 bp, Homo sapien
taatggctatgatccaaatcaccag

SEQ ID NO: 1320270 - DNA, 25 bp, Homo sapien
tatgatccaaatcaccagcctgcat

SEQ ID NO: 1320271 - DNA, 25 bp, Homo sapien
tggctatgatccaaatcaccagcct

SEQ ID NO: 1320272 - DNA, 25 bp, Homo sapien
ccagtgcttccacaaataatggcta

SEQ ID NO: 1320273 - DNA, 25 bp, Homo sapien
tggccaggcattatagagatacagc

SEQ ID NO: 1320274 - DNA, 25 bp, Homo sapien
gactttaacatccttatggctgaga

SEQ ID NO: 1320275 - DNA, 25 bp, Homo sapien
tactttgcatatgaacccaagaagc

SEQ ID NO: 1320276 - DNA, 25 bp, Homo sapien
tatattgaaccctgaatatggccag

SEQ ID NO: 1320277 - DNA, 25 bp, Homo sapien
aaagctagatattgtccgcacagaa

SEQ ID NO: 1320278 - DNA, 25 bp, Homo sapien
cagtgggcttctggacatatcaggt

SEQ ID NO: 1320279 - DNA, 25 bp, Homo sapien
cagcatggcagtggtgagtttagtc

SEQ ID NO: 1320280 - DNA, 25 bp, Homo sapien
gatcgtgttggacgttagctcctga

SEQ ID NO: 1320281 - DNA, 25 bp, Homo sapien
taggtctacctctcttatgaaagcc

SEQ ID NO: 1320282 - DNA, 25 bp, Homo sapien
aagggactcataacttccaaggtca

SEQ ID NO: 1320283 - DNA, 25 bp, Homo sapien
caagaattatctatctaggtctacc

SEQ ID NO: 1320284 - DNA, 25 bp, Homo sapien
gaggacaggtatcttttttatctgg

SEQ ID NO: 1320285 - DNA, 25 bp, Homo sapien
tgaaccaataatctctcttgataag

SEQ ID NO: 1320286 - DNA, 25 bp, Homo sapien
tgaatgaaccaataatctctcttga

SEQ ID NO: 1320287 - DNA, 25 bp, Homo sapien
gaaccaataatctctcttgataagt

SEQ ID NO: 1320288 - DNA, 25 bp, Homo sapien
aatgaaccaataatctctcttgata

SEQ ID NO: 1320289 - DNA, 25 bp, Homo sapien
cacagcattttgagagggcaaggtt

SEQ ID NO: 1320290 - DNA, 25 bp, Homo sapien
acagcattttgagagggcaaggttg

SEQ ID NO: 1320291 - DNA, 25 bp, Homo sapien
catatgaatggaatcttttgaagta

SEQ ID NO: 1320292 - DNA, 25 bp, Homo sapien
gaagtacatttagagtatatctttt

SEQ ID NO: 1320293 - DNA, 25 bp, Homo sapien
tttgaagtacatttagagtatatct

SEQ ID NO: 1320294 - DNA, 25 bp, Homo sapien
gaatggaatcttttgaagtacattt

SEQ ID NO: 1320295 - DNA, 25 bp, Homo sapien
aaagactataatgcactgggaaaac

SEQ ID NO: 1320296 - DNA, 25 bp, Homo sapien
aaaaagactataatgcactgggaaa

SEQ ID NO: 1320297 - DNA, 25 bp, Homo sapien
aaaaaaagactataatgcactggga

SEQ ID NO: 1320298 - DNA, 25 bp, Homo sapien
aaaaaagactataatgcactgggaa

SEQ ID NO: 1320299 - DNA, 25 bp, Homo sapien
aacaagaagagtcaaaaaattgctt

SEQ ID NO: 1320300 - DNA, 25 bp, Homo sapien
tcaataaacaagaagagtcaaaaaa

SEQ ID NO: 1320301 - DNA, 25 bp, Homo sapien
caagaagagtcaaaaaattgctttt

SEQ ID NO: 1320302 - DNA, 25 bp, Homo sapien
gaagagtcaaaaaattgcttttcac

SEQ ID NO: 1320303 - DNA, 25 bp, Homo sapien
aagttttggatatatgtagcgcaaa

SEQ ID NO: 1320304 - DNA, 25 bp, Homo sapien
gcagttcccatgtcagcgtcatcag

SEQ ID NO: 1320305 - DNA, 25 bp, Homo sapien
tagcgcaaagaatctgcagttccca

SEQ ID NO: 1320306 - DNA, 25 bp, Homo sapien
tcaggaatacacacaatatctggct

SEQ ID NO: 1320307 - DNA, 25 bp, Homo sapien
aagcaggttcaatgggtaccaaatt

SEQ ID NO: 1320308 - DNA, 25 bp, Homo sapien
taggtctgtcatccgagatcctcca

SEQ ID NO: 1320309 - DNA, 25 bp, Homo sapien
tggaagcagaggtttgggaatgctg

SEQ ID NO: 1320310 - DNA, 25 bp, Homo sapien
ggaatgctggaagttaggtctgtca

SEQ ID NO: 1320311 - DNA, 25 bp, Homo sapien
tggttggctcggattctcatcccca

SEQ ID NO: 1320312 - DNA, 25 bp, Homo sapien
ttctacttcggacacagctacaccg

SEQ ID NO: 1320313 - DNA, 25 bp, Homo sapien
cagggagtcgagctgacaacttcgg

SEQ ID NO: 1320314 - DNA, 25 bp, Homo sapien
gagattagaaacttagttcctccat

SEQ ID NO: 1320315 - DNA, 25 bp, Homo sapien
cagaagtcacagctataactcagct

SEQ ID NO: 1320316 - DNA, 25 bp, Homo sapien
tctccacgccgcctctgactgacag

SEQ ID NO: 1320317 - DNA, 25 bp, Homo sapien
agccagcttgtgtgcggcctggcag

SEQ ID NO: 1320318 - DNA, 25 bp, Homo sapien
actgacagcccaatggcgcaggcgc

SEQ ID NO: 1320319 - DNA, 25 bp, Homo sapien
aatcataaacttaactcagcaatcc

SEQ ID NO: 1320320 - DNA, 25 bp, Homo sapien
cataatcataaacttaactcagcaa

SEQ ID NO: 1320321 - DNA, 25 bp, Homo sapien
ttcataatcataaacttaactcagc

SEQ ID NO: 1320322 - DNA, 25 bp, Homo sapien
taatcataaacttaactcagcaatc

SEQ ID NO: 1320323 - DNA, 25 bp, Homo sapien
tttctccccgcaggtgtacttgcca

SEQ ID NO: 1320324 - DNA, 25 bp, Homo sapien
aatttctccccgcaggtgtacttgc

SEQ ID NO: 1320325 - DNA, 25 bp, Homo sapien
gtgtatgctttaggacgaagctctc

SEQ ID NO: 1320326 - DNA, 25 bp, Homo sapien
ggatgtgtatgctttaggacgaagc

SEQ ID NO: 1320327 - DNA, 25 bp, Homo sapien
gatcgtacagagctcctggcgtcgg

SEQ ID NO: 1320328 - DNA, 25 bp, Homo sapien
tcgtacagagctcctggcgtcggtg

SEQ ID NO: 1320329 - DNA, 25 bp, Homo sapien
acagagctcctggcgtcggtggctg

SEQ ID NO: 1320330 - DNA, 25 bp, Homo sapien
ctgatcgtacagagctcctggcgtc

SEQ ID NO: 1320331 - DNA, 25 bp, Homo sapien
ctctctaggtaggtaattcctgcac

SEQ ID NO: 1320332 - DNA, 25 bp, Homo sapien
actctctaggtaggtaattcctgca

SEQ ID NO: 1320333 - DNA, 25 bp, Homo sapien
cagtttgcaatgcaacttagaaaaa

SEQ ID NO: 1320334 - DNA, 25 bp, Homo sapien
acacagtttgcaatgcaacttagaa

SEQ ID NO: 1320335 - DNA, 25 bp, Homo sapien
aactttgaaaacaatctcggccagt

SEQ ID NO: 1320336 - DNA, 25 bp, Homo sapien
ctgtcactggatttatgatttttcc

SEQ ID NO: 1320337 - DNA, 25 bp, Homo sapien
tttgaaaacaatctcggccagttca

SEQ ID NO: 1320338 - DNA, 25 bp, Homo sapien
tcctgtcactggatttatgattttt

SEQ ID NO: 1320339 - DNA, 25 bp, Homo sapien
acttggcatgggtggatgaatgaac

SEQ ID NO: 1320340 - DNA, 25 bp, Homo sapien
tggcatgggtggatgaatgaactac

SEQ ID NO: 1320341 - DNA, 25 bp, Homo sapien
catgggtggatgaatgaactacgga

SEQ ID NO: 1320342 - DNA, 25 bp, Homo sapien
gggtggatgaatgaactacggacat

SEQ ID NO: 1320343 - DNA, 25 bp, Homo sapien
ggcacagaaactggctacttcctgt

SEQ ID NO: 1320344 - DNA, 25 bp, Homo sapien
cacagaaactggctacttcctgtag

SEQ ID NO: 1320345 - DNA, 25 bp, Homo sapien
taggagcacgtggcctgggcccttt

SEQ ID NO: 1320346 - DNA, 25 bp, Homo sapien
ttcctgtaggagcacgtggcctggg

SEQ ID NO: 1320347 - DNA, 25 bp, Homo sapien
ggtgaaatacctcgggaagcaagcc

SEQ ID NO: 1320348 - DNA, 25 bp, Homo sapien
aaggccaagagggacacgtgcagtc

SEQ ID NO: 1320349 - DNA, 25 bp, Homo sapien
ttttcatggagtgtcacggaggccc

SEQ ID NO: 1320350 - DNA, 25 bp, Homo sapien
cataactggccttaacctgtgcaaa

SEQ ID NO: 1320351 - DNA, 25 bp, Homo sapien
cacgcagttgtaggccgcatagcgg

SEQ ID NO: 1320352 - DNA, 25 bp, Homo sapien
gcggagcttctcctcgcataccttg

SEQ ID NO: 1320353 - DNA, 25 bp, Homo sapien
tgtaggccgcatagcggagcttctc

SEQ ID NO: 1320354 - DNA, 25 bp, Homo sapien
agtgtcgatggccacgcagttgtag

SEQ ID NO: 1320355 - DNA, 25 bp, Homo sapien
gagcaagtggaagactcgggcagcg

SEQ ID NO: 1320356 - DNA, 25 bp, Homo sapien
agcaagtggaagactcgggcagcgc

SEQ ID NO: 1320357 - DNA, 25 bp, Homo sapien
tggagcaagtggaagactcgggcag

SEQ ID NO: 1320358 - DNA, 25 bp, Homo sapien
caagtggaagactcgggcagcgcgt

SEQ ID NO: 1320359 - DNA, 25 bp, Homo sapien
acagaaggcggccatggcaccttca

SEQ ID NO: 1320360 - DNA, 25 bp, Homo sapien
aggcggccatggcaccttcaggcct

SEQ ID NO: 1320361 - DNA, 25 bp, Homo sapien
agaaggcggccatggcaccttcagg

SEQ ID NO: 1320362 - DNA, 25 bp, Homo sapien
gatgtgttggggcacatgtacgtgt

SEQ ID NO: 1320363 - DNA, 25 bp, Homo sapien
cgactgcggcccgtgacaaagcgca

SEQ ID NO: 1320364 - DNA, 25 bp, Homo sapien
aaagcgcaggaagcggctccggtcc

SEQ ID NO: 1320365 - DNA, 25 bp, Homo sapien
tgtagatccgtgctggcaggcgact

SEQ ID NO: 1320366 - DNA, 25 bp, Homo sapien
cccagcttgtctgggtagatgtaga

SEQ ID NO: 1320367 - DNA, 25 bp, Homo sapien
tggagggagaaggaaatcagtgcct

SEQ ID NO: 1320368 - DNA, 25 bp, Homo sapien
ggagaaggaaatcagtgcctgcatg

SEQ ID NO: 1320369 - DNA, 25 bp, Homo sapien
agggagaaggaaatcagtgcctgca

SEQ ID NO: 1320370 - DNA, 25 bp, Homo sapien
agaaggaaatcagtgcctgcatgga

SEQ ID NO: 1320371 - DNA, 25 bp, Homo sapien
tactgcacccgcgagtcagatggct

SEQ ID NO: 1320372 - DNA, 25 bp, Homo sapien
agaaatactgcacccgcgagtcaga

SEQ ID NO: 1320373 - DNA, 25 bp, Homo sapien
cgcgagtcagatggctcgaagtcct

SEQ ID NO: 1320374 - DNA, 25 bp, Homo sapien
agatggctcgaagtcctcaaaccgg

SEQ ID NO: 1320375 - DNA, 25 bp, Homo sapien
tgacctctggatccccacacacttt

SEQ ID NO: 1320376 - DNA, 25 bp, Homo sapien
agcctgtggtaccaccttcagcaga

SEQ ID NO: 1320377 - DNA, 25 bp, Homo sapien
tgagcttgcgcagagcatccacagt

SEQ ID NO: 1320378 - DNA, 25 bp, Homo sapien
tccaactcttgccaggtcagcaagt

SEQ ID NO: 1320379 - DNA, 25 bp, Homo sapien
tggatgaaacgagaacggtccccat

SEQ ID NO: 1320380 - DNA, 25 bp, Homo sapien
tccaccacctgttggtcactcagta

SEQ ID NO: 1320381 - DNA, 25 bp, Homo sapien
tagccgtgccttctggaccagttgg

SEQ ID NO: 1320382 - DNA, 25 bp, Homo sapien
cactcagtacagtggtgaatgttag

SEQ ID NO: 1320383 - DNA, 25 bp, Homo sapien
ggaggtaaccttttcactgtggaga

SEQ ID NO: 1320384 - DNA, 25 bp, Homo sapien
attctatcctaagcccagggccgag

SEQ ID NO: 1320385 - DNA, 25 bp, Homo sapien
aaaggtgtcctcaaccaggcaggga

SEQ ID NO: 1320386 - DNA, 25 bp, Homo sapien
gaagataaagaacacactgagcctg

SEQ ID NO: 1320387 - DNA, 25 bp, Homo sapien
cagaacagccttagggaggaccaac

SEQ ID NO: 1320388 - DNA, 25 bp, Homo sapien
tgtgtggtgaaagaacaaggtacag

SEQ ID NO: 1320389 - DNA, 25 bp, Homo sapien
ggatcttgtgtgtggtgaaagaaca

SEQ ID NO: 1320390 - DNA, 25 bp, Homo sapien
gaccaacctttaggggctgggcaga

SEQ ID NO: 1320391 - DNA, 25 bp, Homo sapien
gggaagtccttgctccagctcacct

SEQ ID NO: 1320392 - DNA, 25 bp, Homo sapien
gcacagagtccacagctgggaagtc

SEQ ID NO: 1320393 - DNA, 25 bp, Homo sapien
ccacagctgggaagtccttgctcca

SEQ ID NO: 1320394 - DNA, 25 bp, Homo sapien
gctgggaagtccttgctccagctca

SEQ ID NO: 1320395 - DNA, 25 bp, Homo sapien
ttccacacaaaaccaggcagggcca

SEQ ID NO: 1320396 - DNA, 25 bp, Homo sapien
ctgcttccacacaaaaccaggcagg

SEQ ID NO: 1320397 - DNA, 25 bp, Homo sapien
tgcttccacacaaaaccaggcaggg

SEQ ID NO: 1320398 - DNA, 25 bp, Homo sapien
cacacaaaaccaggcagggccagga

SEQ ID NO: 1320399 - DNA, 25 bp, Homo sapien
agctgcccaggtttggctggccttt

SEQ ID NO: 1320400 - DNA, 25 bp, Homo sapien
gctgcccaggtttggctggcctttc

SEQ ID NO: 1320401 - DNA, 25 bp, Homo sapien
caagggccagggctgatcggacggg

SEQ ID NO: 1320402 - DNA, 25 bp, Homo sapien
ggctgatcggacgggggtgtggata

SEQ ID NO: 1320403 - DNA, 25 bp, Homo sapien
ctgatcggacgggggtgtggataag

SEQ ID NO: 1320404 - DNA, 25 bp, Homo sapien
gatcggacgggggtgtggataaggc

SEQ ID NO: 1320405 - DNA, 25 bp, Homo sapien
gggtacatacatgtcccgagcctca

SEQ ID NO: 1320406 - DNA, 25 bp, Homo sapien
gggttgggtacatacatgtcccgag

SEQ ID NO: 1320407 - DNA, 25 bp, Homo sapien
atacttggcaaagtctcggcaggag

SEQ ID NO: 1320408 - DNA, 25 bp, Homo sapien
catcagctgtccgatccattcatac

SEQ ID NO: 1320409 - DNA, 25 bp, Homo sapien
ttctagctcaatctggcacctggga

SEQ ID NO: 1320410 - DNA, 25 bp, Homo sapien
ttgcagagatggaaacggagattac

SEQ ID NO: 1320411 - DNA, 25 bp, Homo sapien
tttctagctcaatctggccccctcc

SEQ ID NO: 1320412 - DNA, 25 bp, Homo sapien
cccctttctagctcaatctggcacc

SEQ ID NO: 1320413 - DNA, 25 bp, Homo sapien
ctcttctgacatatctgccaggctg

SEQ ID NO: 1320414 - DNA, 25 bp, Homo sapien
ctggttggctgtgcgtacaaagaag

SEQ ID NO: 1320415 - DNA, 25 bp, Homo sapien
ggtatccgctgagctagggcacagc

SEQ ID NO: 1320416 - DNA, 25 bp, Homo sapien
ttggctgtgcgtacaaagaagggca

SEQ ID NO: 1320417 - DNA, 25 bp, Homo sapien
tcccaccactggtcatagcgcatgg

SEQ ID NO: 1320418 - DNA, 25 bp, Homo sapien
ccactggtcatagcgcatgggccac

SEQ ID NO: 1320419 - DNA, 25 bp, Homo sapien
ccaccactggtcatagcgcatgggc

SEQ ID NO: 1320420 - DNA, 25 bp, Homo sapien
accactggtcatagcgcatgggcca

SEQ ID NO: 1320421 - DNA, 25 bp, Homo sapien
gatttgtcattatgtggggccaggt

SEQ ID NO: 1320422 - DNA, 25 bp, Homo sapien
ctgcaaaaaacgtgggcagatttgt

SEQ ID NO: 1320423 - DNA, 25 bp, Homo sapien
gcagcacaattcatcagctcagaga

SEQ ID NO: 1320424 - DNA, 25 bp, Homo sapien
cagcacaattcatcagctcagagac

SEQ ID NO: 1320425 - DNA, 25 bp, Homo sapien
tcatatttgtcagagggcttgaggc

SEQ ID NO: 1320426 - DNA, 25 bp, Homo sapien
tttgtcagagggcttgaggccttca

SEQ ID NO: 1320427 - DNA, 25 bp, Homo sapien
ttcatatttgtcagagggcttgagg

SEQ ID NO: 1320428 - DNA, 25 bp, Homo sapien
ttttcatatttgtcagagggcttga

SEQ ID NO: 1320429 - DNA, 25 bp, Homo sapien
tgatgtataggcgtggcatgaagct

SEQ ID NO: 1320430 - DNA, 25 bp, Homo sapien
gccgctggcgggacagcagtaggaa

SEQ ID NO: 1320431 - DNA, 25 bp, Homo sapien
tgttccatggcaagacggcggttga

SEQ ID NO: 1320432 - DNA, 25 bp, Homo sapien
gacagcagtaggaactgcttcactt

SEQ ID NO: 1320433 - DNA, 25 bp, Homo sapien
ggtgcaggacactatcgaggatctt

SEQ ID NO: 1320434 - DNA, 25 bp, Homo sapien
gcaggacactatcgaggatcttgat

SEQ ID NO: 1320435 - DNA, 25 bp, Homo sapien
tggtcccaggcaggtaccaggtggt

SEQ ID NO: 1320436 - DNA, 25 bp, Homo sapien
caggtggtgcaggacactatcgagg

SEQ ID NO: 1320437 - DNA, 25 bp, Homo sapien
catgggtagatagactgcagctaaa

SEQ ID NO: 1320438 - DNA, 25 bp, Homo sapien
tggcatgggtagatagactgcagct

SEQ ID NO: 1320439 - DNA, 25 bp, Homo sapien
gggtagatagactgcagctaaagag

SEQ ID NO: 1320440 - DNA, 25 bp, Homo sapien
gcatgggtagatagactgcagctaa

SEQ ID NO: 1320441 - DNA, 25 bp, Homo sapien
agaccttgggaacctcctccatgca

SEQ ID NO: 1320442 - DNA, 25 bp, Homo sapien
tctctgacccttgaacagcttatac

SEQ ID NO: 1320443 - DNA, 25 bp, Homo sapien
cagcttatactatgagaccttggga

SEQ ID NO: 1320444 - DNA, 25 bp, Homo sapien
cacacaaggctcaatgttgggggaa

SEQ ID NO: 1320445 - DNA, 25 bp, Homo sapien
ggaacaggtctgcattcaaccctag

SEQ ID NO: 1320446 - DNA, 25 bp, Homo sapien
gatatcgcaccagactagttggctg

SEQ ID NO: 1320447 - DNA, 25 bp, Homo sapien
gaggacagctctgcggtacagtact

SEQ ID NO: 1320448 - DNA, 25 bp, Homo sapien
tacagtacttcagggtcggtgcctt

SEQ ID NO: 1320449 - DNA, 25 bp, Homo sapien
tccctccttatagccttaaacctca

SEQ ID NO: 1320450 - DNA, 25 bp, Homo sapien
aggtggacggtcatgtcctccagga

SEQ ID NO: 1320451 - DNA, 25 bp, Homo sapien
tccacgatgcggatctcgatgatcg

SEQ ID NO: 1320452 - DNA, 25 bp, Homo sapien
ggacacagacatccccgatgagggt

SEQ ID NO: 1320453 - DNA, 25 bp, Homo sapien
tcgatgatcgggaggtggacggtca

SEQ ID NO: 1320454 - DNA, 25 bp, Homo sapien
ccgctttggcataaagttgtcatct

SEQ ID NO: 1320455 - DNA, 25 bp, Homo sapien
cacccgctttggcataaagttgtca

SEQ ID NO: 1320456 - DNA, 25 bp, Homo sapien
cccgctttggcataaagttgtcatc

SEQ ID NO: 1320457 - DNA, 25 bp, Homo sapien
accacccgctttggcataaagttgt

SEQ ID NO: 1320458 - DNA, 25 bp, Homo sapien
ccttcttcatagtaagccgtaccca

SEQ ID NO: 1320459 - DNA, 25 bp, Homo sapien
ccatcgctctcccagtaggtatcgg

SEQ ID NO: 1320460 - DNA, 25 bp, Homo sapien
tagtaagccgtacccagtgttggca

SEQ ID NO: 1320461 - DNA, 25 bp, Homo sapien
tatcggcattgctgtctgtcaggca

SEQ ID NO: 1320462 - DNA, 25 bp, Homo sapien
gaggaaacgtctatgctctccacat

SEQ ID NO: 1320463 - DNA, 25 bp, Homo sapien
gaagtggatcaggtcctcgtcgcac

SEQ ID NO: 1320464 - DNA, 25 bp, Homo sapien
tgcccaggtggtcatacaagaagtg

SEQ ID NO: 1320465 - DNA, 25 bp, Homo sapien
tactgcttcacgctacccaggttct

SEQ ID NO: 1320466 - DNA, 25 bp, Homo sapien
tgaggtctcgatcccaggcgatgtg

SEQ ID NO: 1320467 - DNA, 25 bp, Homo sapien
caggcgatgtgagtatgtcaggtcc

SEQ ID NO: 1320468 - DNA, 25 bp, Homo sapien
ttgtacagcttctgcgtatgcctct

SEQ ID NO: 1320469 - DNA, 25 bp, Homo sapien
tctgccggctgaggtctcgatccca

SEQ ID NO: 1320470 - DNA, 25 bp, Homo sapien
ggccgataatccacgccaaagagct

SEQ ID NO: 1320471 - DNA, 25 bp, Homo sapien
gtgtcgatgggtaccaggcgggctc

SEQ ID NO: 1320472 - DNA, 25 bp, Homo sapien
tgagcaccggccgataatccacgcc

SEQ ID NO: 1320473 - DNA, 25 bp, Homo sapien
ggtggttgggagtgtcgatgggtac

SEQ ID NO: 1320474 - DNA, 25 bp, Homo sapien
gctcaatgctgtcgcgggcggcgcg

SEQ ID NO: 1320475 - DNA, 25 bp, Homo sapien
ttcacccagagcccgtggccattgc

SEQ ID NO: 1320476 - DNA, 25 bp, Homo sapien
gccgcgccggagctcaatgctgtcg

SEQ ID NO: 1320477 - DNA, 25 bp, Homo sapien
tcctcgcccgtggtgcgcacgcagg

SEQ ID NO: 1320478 - DNA, 25 bp, Homo sapien
ttgtagagcacctctcgcggcacga

SEQ ID NO: 1320479 - DNA, 25 bp, Homo sapien
gcgacggtcccgctgggtccttgta

SEQ ID NO: 1320480 - DNA, 25 bp, Homo sapien
caccggcagaagcacgcgcgacggt

SEQ ID NO: 1320481 - DNA, 25 bp, Homo sapien
tgcctctgccaagaagcgcacgcgg

SEQ ID NO: 1320482 - DNA, 25 bp, Homo sapien
gtgagcacctagaggcgaccctgcc

SEQ ID NO: 1320483 - DNA, 25 bp, Homo sapien
gaggtgagcacctagaggcgaccct

SEQ ID NO: 1320484 - DNA, 25 bp, Homo sapien
tagaggcgaccctgcccggggaaca

SEQ ID NO: 1320485 - DNA, 25 bp, Homo sapien
ggcgaagtggcggaggtgagcacct

SEQ ID NO: 1320486 - DNA, 25 bp, Homo sapien
tcccagagccattaagagaagagca

SEQ ID NO: 1320487 - DNA, 25 bp, Homo sapien
gcaggacctagaacgcctacgggat

SEQ ID NO: 1320488 - DNA, 25 bp, Homo sapien
tacgggatccagaagtggtagcctc

SEQ ID NO: 1320489 - DNA, 25 bp, Homo sapien
tgaccatggtacctggcaaaggacc

SEQ ID NO: 1320490 - DNA, 25 bp, Homo sapien
ggcctgacctgatactacctgggaa

SEQ ID NO: 1320491 - DNA, 25 bp, Homo sapien
tattatgaactcagcggcttcccag

SEQ ID NO: 1320492 - DNA, 25 bp, Homo sapien
gaacaaacgtttagctggcgagaga

SEQ ID NO: 1320493 - DNA, 25 bp, Homo sapien
ttatcgactagagctggactttccc

SEQ ID NO: 1320494 - DNA, 25 bp, Homo sapien
cactgtgcagcgtcgtaagatgtct

SEQ ID NO: 1320495 - DNA, 25 bp, Homo sapien
aagatgtctgaaagcactgtggcac

SEQ ID NO: 1320496 - DNA, 25 bp, Homo sapien
tgaactctccatagtggcgagggct

SEQ ID NO: 1320497 - DNA, 25 bp, Homo sapien
caactggcgcaatggagctttgtca

SEQ ID NO: 1320498 - DNA, 25 bp, Homo sapien
gggggagcctgagctcagccgtggc

SEQ ID NO: 1320499 - DNA, 25 bp, Homo sapien
ggagcctgagctcagccgtggccat

SEQ ID NO: 1320500 - DNA, 25 bp, Homo sapien
tcagggggagcctgagctcagccgt

SEQ ID NO: 1320501 - DNA, 25 bp, Homo sapien
ctgtcagggggagcctgagctcagc

SEQ ID NO: 1320502 - DNA, 25 bp, Homo sapien
cagttaagggttgataaggtcatcc

SEQ ID NO: 1320503 - DNA, 25 bp, Homo sapien
ccatcgtaccatctccctgcgtctc

SEQ ID NO: 1320504 - DNA, 25 bp, Homo sapien
cctgcgtctccagttaagggttgat

SEQ ID NO: 1320505 - DNA, 25 bp, Homo sapien
gggttgataaggtcatccgcatcac

SEQ ID NO: 1320506 - DNA, 25 bp, Homo sapien
gtattgcttccagaattgttcggag

SEQ ID NO: 1320507 - DNA, 25 bp, Homo sapien
aattgttcggagtctcaaagtgtct

SEQ ID NO: 1320508 - DNA, 25 bp, Homo sapien
gaggaagaatgaatgtgcttctgta

SEQ ID NO: 1320509 - DNA, 25 bp, Homo sapien
aggaagaatgaatgtgcttctgtat

SEQ ID NO: 1320510 - DNA, 25 bp, Homo sapien
tctttgggattcatacatagtcaat

SEQ ID NO: 1320511 - DNA, 25 bp, Homo sapien
gtattcctcatatcaatcttataca

SEQ ID NO: 1320512 - DNA, 25 bp, Homo sapien
ttctttgctggcatataggaaagca

SEQ ID NO: 1320513 - DNA, 25 bp, Homo sapien
catgtcatttgtgagcaatatgtac

SEQ ID NO: 1320514 - DNA, 25 bp, Homo sapien
tttacattgctcttctttcgctatt

SEQ ID NO: 1320515 - DNA, 25 bp, Homo sapien
actaatgtgcaaacttagatgattg

SEQ ID NO: 1320516 - DNA, 25 bp, Homo sapien
ctttcgctattttccccaatgtgga

SEQ ID NO: 1320517 - DNA, 25 bp, Homo sapien
caaagaaccggtcttgcttttattg

SEQ ID NO: 1320518 - DNA, 25 bp, Homo sapien
caccaactcttatatctgtaaggag

SEQ ID NO: 1320519 - DNA, 25 bp, Homo sapien
tagacttagaagtaccttaaagatc

SEQ ID NO: 1320520 - DNA, 25 bp, Homo sapien
ggctgacaggtcattgacaatgatc

SEQ ID NO: 1320521 - DNA, 25 bp, Homo sapien
gattttatcaaacagaaggttagac

SEQ ID NO: 1320522 - DNA, 25 bp, Homo sapien
cagcgaggataacggctgggcacca

SEQ ID NO: 1320523 - DNA, 25 bp, Homo sapien
caccacagacaccatatggtgaggg

SEQ ID NO: 1320524 - DNA, 25 bp, Homo sapien
tgggcaccacagacaccatatggtg

SEQ ID NO: 1320525 - DNA, 25 bp, Homo sapien
tccaagtgtccaagcgtgaaccagc

SEQ ID NO: 1320526 - DNA, 25 bp, Homo sapien
ctcatggcacgtaaggctaatttat

SEQ ID NO: 1320527 - DNA, 25 bp, Homo sapien
tggcacgtaaggctaatttatagga

SEQ ID NO: 1320528 - DNA, 25 bp, Homo sapien
catggcacgtaaggctaatttatag

SEQ ID NO: 1320529 - DNA, 25 bp, Homo sapien
gcacgtaaggctaatttataggaca

SEQ ID NO: 1320530 - DNA, 25 bp, Homo sapien
ggcattaacctctgttgacccaggc

SEQ ID NO: 1320531 - DNA, 25 bp, Homo sapien
tgcgtagaggccttcaggcattaac

SEQ ID NO: 1320532 - DNA, 25 bp, Homo sapien
ggccaatgacaggtaggactcactg

SEQ ID NO: 1320533 - DNA, 25 bp, Homo sapien
tgacccaggcccatcagtgcaactt

SEQ ID NO: 1320534 - DNA, 25 bp, Homo sapien
aaaaggttacacagagccacaaaga

SEQ ID NO: 1320535 - DNA, 25 bp, Homo sapien
tcagaaccccagaatagtaaggaaa

SEQ ID NO: 1320536 - DNA, 25 bp, Homo sapien
accgtattcggcctagtcttctgtc

SEQ ID NO: 1320537 - DNA, 25 bp, Homo sapien
ggtcaacagctatcatagggaagct

SEQ ID NO: 1320538 - DNA, 25 bp, Homo sapien
ggcaggcctcagtcaaagtgagaaa

SEQ ID NO: 1320539 - DNA, 25 bp, Homo sapien
gcaggcctcagtcaaagtgagaaac

SEQ ID NO: 1320540 - DNA, 25 bp, Homo sapien
caggcctcagtcaaagtgagaaaca

SEQ ID NO: 1320541 - DNA, 25 bp, Homo sapien
ggaacgcagggcgtcaactcgagca

SEQ ID NO: 1320542 - DNA, 25 bp, Homo sapien
acgcagggcgtcaactcgagcacag

SEQ ID NO: 1320543 - DNA, 25 bp, Homo sapien
agggcgtcaactcgagcacaggctg

SEQ ID NO: 1320544 - DNA, 25 bp, Homo sapien
gcgtcaactcgagcacaggctgtag

SEQ ID NO: 1320545 - DNA, 25 bp, Homo sapien
agtctttcactttcccgctggcagg

SEQ ID NO: 1320546 - DNA, 25 bp, Homo sapien
ccctcaatggctctagtgaatactg

SEQ ID NO: 1320547 - DNA, 25 bp, Homo sapien
tgaatactgttcgtcttggtctgga

SEQ ID NO: 1320548 - DNA, 25 bp, Homo sapien
caatgtaattcacgcccctcaatgg

SEQ ID NO: 1320549 - DNA, 25 bp, Homo sapien
acagacatccaggtcgctccacttc

SEQ ID NO: 1320550 - DNA, 25 bp, Homo sapien
aggatttctcctccagtttgcagtg

SEQ ID NO: 1320551 - DNA, 25 bp, Homo sapien
ttccatcctccaggggacagacatc

SEQ ID NO: 1320552 - DNA, 25 bp, Homo sapien
cctccagtttgcagtgtggatttaa

SEQ ID NO: 1320553 - DNA, 25 bp, Homo sapien
gtgtcagcatccttgctccattgga

SEQ ID NO: 1320554 - DNA, 25 bp, Homo sapien
aaactgctcagttattagtgtcagc

SEQ ID NO: 1320555 - DNA, 25 bp, Homo sapien
tgctgcctccagagtgtgagtcgtg

SEQ ID NO: 1320556 - DNA, 25 bp, Homo sapien
tctctcatccgcagcatttctcgaa

SEQ ID NO: 1320557 - DNA, 25 bp, Homo sapien
cagagccacagtaaccgccctggga

SEQ ID NO: 1320558 - DNA, 25 bp, Homo sapien
tttccagagccacagtaaccgccct

SEQ ID NO: 1320559 - DNA, 25 bp, Homo sapien
caaatgccaacagttctcatcgtca

SEQ ID NO: 1320560 - DNA, 25 bp, Homo sapien
tgccaacagttctcatcgtcaatgc

SEQ ID NO: 1320561 - DNA, 25 bp, Homo sapien
tttaggtcccctgaagctgtaactg

SEQ ID NO: 1320562 - DNA, 25 bp, Homo sapien
cgctggattcactagttggttttag

SEQ ID NO: 1320563 - DNA, 25 bp, Homo sapien
actgatggtgtatctgaagatagcc

SEQ ID NO: 1320564 - DNA, 25 bp, Homo sapien
tagccaaatcccatattttctcagc

SEQ ID NO: 1320565 - DNA, 25 bp, Homo sapien
tttggtgcattcgatcagtccagga

SEQ ID NO: 1320566 - DNA, 25 bp, Homo sapien
tatttggtgcattcgatcagtccag

SEQ ID NO: 1320567 - DNA, 25 bp, Homo sapien
tggtgcattcgatcagtccaggatt

SEQ ID NO: 1320568 - DNA, 25 bp, Homo sapien
tgcattcgatcagtccaggattatg

SEQ ID NO: 1320569 - DNA, 25 bp, Homo sapien
gtccttccataatatactgtccatt

SEQ ID NO: 1320570 - DNA, 25 bp, Homo sapien
ggatgcaagtccttccataatatac

SEQ ID NO: 1320571 - DNA, 25 bp, Homo sapien
tgtaaacaggaagctggatgcaagt

SEQ ID NO: 1320572 - DNA, 25 bp, Homo sapien
gaagctggatgcaagtccttccata

SEQ ID NO: 1320573 - DNA, 25 bp, Homo sapien
cagtcatggccaacggcatgggcag

SEQ ID NO: 1320574 - DNA, 25 bp, Homo sapien
ttaggacattcgagcacaaagaacg

SEQ ID NO: 1320575 - DNA, 25 bp, Homo sapien
tcagtcacagaaccaacacttggag

SEQ ID NO: 1320576 - DNA, 25 bp, Homo sapien
cattcgagcacaaagaacgggacat

SEQ ID NO: 1320577 - DNA, 25 bp, Homo sapien
cgtctctaagcccaataactcttag

SEQ ID NO: 1320578 - DNA, 25 bp, Homo sapien
agtttctttctctacgtcgtctcta

SEQ ID NO: 1320579 - DNA, 25 bp, Homo sapien
gatagaagtactctcttttagcatt

SEQ ID NO: 1320580 - DNA, 25 bp, Homo sapien
tcttgtaggtatgtatcactcattt

SEQ ID NO: 1320581 - DNA, 25 bp, Homo sapien
tcaagaagaggcaagagagcttgga

SEQ ID NO: 1320582 - DNA, 25 bp, Homo sapien
caagaagaggcaagagagcttggaa

SEQ ID NO: 1320583 - DNA, 25 bp, Homo sapien
gaggcaagagagcttggaaataatt

SEQ ID NO: 1320584 - DNA, 25 bp, Homo sapien
gaagaggcaagagagcttggaaata

SEQ ID NO: 1320585 - DNA, 25 bp, Homo sapien
ttgctagaagcagtcaggctacatc

SEQ ID NO: 1320586 - DNA, 25 bp, Homo sapien
tgctagaagcagtcaggctacatct

SEQ ID NO: 1320587 - DNA, 25 bp, Homo sapien
atcacaccccgggggctgtcgcggg

SEQ ID NO: 1320588 - DNA, 25 bp, Homo sapien
tatatataaagtcctctgtggatgg

SEQ ID NO: 1320589 - DNA, 25 bp, Homo sapien
taatatatataaagtcctctgtgga

SEQ ID NO: 1320590 - DNA, 25 bp, Homo sapien
ctgtggatggagaacaaaacactgc

SEQ ID NO: 1320591 - DNA, 25 bp, Homo sapien
ctgtgcctggccccttctttaaaat

SEQ ID NO: 1320592 - DNA, 25 bp, Homo sapien
gatttttgtatttttaatagagaca

SEQ ID NO: 1320593 - DNA, 25 bp, Homo sapien
gggtttcaccatgttcactaggctg

SEQ ID NO: 1320594 - DNA, 25 bp, Homo sapien
caccatcatgcctggatgatttttg

SEQ ID NO: 1320595 - DNA, 25 bp, Homo sapien
cggatcctgtagagtgagagtgcta

SEQ ID NO: 1320596 - DNA, 25 bp, Homo sapien
gacttggtctggtttacggatcctg

SEQ ID NO: 1320597 - DNA, 25 bp, Homo sapien
gaatatgtccttgttcccacagcca

SEQ ID NO: 1320598 - DNA, 25 bp, Homo sapien
gagagtgctaccacatgggcacagt

SEQ ID NO: 1320599 - DNA, 25 bp, Homo sapien
aactttagtttgtacgtgtatacat

SEQ ID NO: 1320600 - DNA, 25 bp, Homo sapien
gtttgtacgtgtatacatttttctg

SEQ ID NO: 1320601 - DNA, 25 bp, Homo sapien
ttgtacgtgtatacatttttctggg

SEQ ID NO: 1320602 - DNA, 25 bp, Homo sapien
gggtggggatagttcatagctatca

SEQ ID NO: 1320603 - DNA, 25 bp, Homo sapien
gccataaaggtaaaacatcgctatt

SEQ ID NO: 1320604 - DNA, 25 bp, Homo sapien
cataaaggtaaaacatcgctatttt

SEQ ID NO: 1320605 - DNA, 25 bp, Homo sapien
gctttactagtgactccagtgggcc

SEQ ID NO: 1320606 - DNA, 25 bp, Homo sapien
ccataaaggtaaaacatcgctattt

SEQ ID NO: 1320607 - DNA, 25 bp, Homo sapien
tgatctccctggcttggcttaagcg

SEQ ID NO: 1320608 - DNA, 25 bp, Homo sapien
gagctatcgatacggttgtcagttt

SEQ ID NO: 1320609 - DNA, 25 bp, Homo sapien
tcagcacctgagctatcgatacggt

SEQ ID NO: 1320610 - DNA, 25 bp, Homo sapien
cgatacggttgtcagttttttcatc

SEQ ID NO: 1320611 - DNA, 25 bp, Homo sapien
taataacacaagtacattctctttt

SEQ ID NO: 1320612 - DNA, 25 bp, Homo sapien
tataacagtttcaaggcttcaaagg

SEQ ID NO: 1320613 - DNA, 25 bp, Homo sapien
gcagagggtaatcccaggaaaacag

SEQ ID NO: 1320614 - DNA, 25 bp, Homo sapien
ggcaagcaaaacctgagctgggaag

SEQ ID NO: 1320615 - DNA, 25 bp, Homo sapien
caggaagctgtagagcagagttcaa

SEQ ID NO: 1320616 - DNA, 25 bp, Homo sapien
tttaaatgaagtccttcaggcagaa

SEQ ID NO: 1320617 - DNA, 25 bp, Homo sapien
ctccctcctgtttgagcctcctgag

SEQ ID NO: 1320618 - DNA, 25 bp, Homo sapien
gtgtgagacatcctgcccagcaaca

SEQ ID NO: 1320619 - DNA, 25 bp, Homo sapien
aattttaaatgaagtccttcaggca

SEQ ID NO: 1320620 - DNA, 25 bp, Homo sapien
atggaagtgtgctgtgataaggtac

SEQ ID NO: 1320621 - DNA, 25 bp, Homo sapien
tacaatatcacttgaaagtagacgg

SEQ ID NO: 1320622 - DNA, 25 bp, Homo sapien
tagacggtgctaaaggtacaaccaa

SEQ ID NO: 1320623 - DNA, 25 bp, Homo sapien
tgaaaacattagcacaaaggctggt

SEQ ID NO: 1320624 - DNA, 25 bp, Homo sapien
cagcccaagtagagaacatgtagat

SEQ ID NO: 1320625 - DNA, 25 bp, Homo sapien
gaattataggccatagcagccaggt

SEQ ID NO: 1320626 - DNA, 25 bp, Homo sapien
ccagaaagtactagggagatcacag

SEQ ID NO: 1320627 - DNA, 25 bp, Homo sapien
ggtctgaacccaaccagatagactg

SEQ ID NO: 1320628 - DNA, 25 bp, Homo sapien
caagagaaattgaataggtggccaa

SEQ ID NO: 1320629 - DNA, 25 bp, Homo sapien
gcctggccaatagttgtatatttac

SEQ ID NO: 1320630 - DNA, 25 bp, Homo sapien
agagaaattgaataggtggccaaaa

SEQ ID NO: 1320631 - DNA, 25 bp, Homo sapien
acaagagaaattgaataggtggcca

SEQ ID NO: 1320632 - DNA, 25 bp, Homo sapien
gtccccataaggatccagtccaaag

SEQ ID NO: 1320633 - DNA, 25 bp, Homo sapien
ttatcatataatgcacaggccccat

SEQ ID NO: 1320634 - DNA, 25 bp, Homo sapien
gatacttacgaagacttcaggctag

SEQ ID NO: 1320635 - DNA, 25 bp, Homo sapien
caactgttgccaattgccccaaaaa

SEQ ID NO: 1320636 - DNA, 25 bp, Homo sapien
catgctaggccactgctccagttgg

SEQ ID NO: 1320637 - DNA, 25 bp, Homo sapien
gagaagagcagtatcattgtatgac

SEQ ID NO: 1320638 - DNA, 25 bp, Homo sapien
tgggctccaatataccctttcaggc

SEQ ID NO: 1320639 - DNA, 25 bp, Homo sapien
tctaacaaggctatgaactatggcc

SEQ ID NO: 1320640 - DNA, 25 bp, Homo sapien
aaagacacagactgggccgggcgcg

SEQ ID NO: 1320641 - DNA, 25 bp, Homo sapien
cggtggctcacgcctgtaatcccag

SEQ ID NO: 1320642 - DNA, 25 bp, Homo sapien
cgcggtggctcacgcctgtaatccc

SEQ ID NO: 1320643 - DNA, 25 bp, Homo sapien
gtggctcacgcctgtaatcccagca

SEQ ID NO: 1320644 - DNA, 25 bp, Homo sapien
tgacatggttgaattcctaggacct

SEQ ID NO: 1320645 - DNA, 25 bp, Homo sapien
tcaaaaggcaccaatttttcttcag

SEQ ID NO: 1320646 - DNA, 25 bp, Homo sapien
tttctttagggatgtgctaagtggc

SEQ ID NO: 1320647 - DNA, 25 bp, Homo sapien
tccatgagcttttgaaatcccctta

SEQ ID NO: 1320648 - DNA, 25 bp, Homo sapien
caaatattcactgtttataacttcc

SEQ ID NO: 1320649 - DNA, 25 bp, Homo sapien
tattcactgtttataacttcctccc

SEQ ID NO: 1320650 - DNA, 25 bp, Homo sapien
gaaactctcagagtcaaatattcac

SEQ ID NO: 1320651 - DNA, 25 bp, Homo sapien
aaacaggcttcagaaactctcagag

SEQ ID NO: 1320652 - DNA, 25 bp, Homo sapien
ttttctacggtatcatatagtaaac

SEQ ID NO: 1320653 - DNA, 25 bp, Homo sapien
tggtgtatagttccatacattttaa

SEQ ID NO: 1320654 - DNA, 25 bp, Homo sapien
aataaaattgtctcccataggcata

SEQ ID NO: 1320655 - DNA, 25 bp, Homo sapien
taaccctcaccataatagattactg

SEQ ID NO: 1320656 - DNA, 25 bp, Homo sapien
gatgtttaagttatagataacttcc

SEQ ID NO: 1320657 - DNA, 25 bp, Homo sapien
aaggtaatacttagcattctggttc

SEQ ID NO: 1320658 - DNA, 25 bp, Homo sapien
acttcaagaacaaatcatgtactta

SEQ ID NO: 1320659 - DNA, 25 bp, Homo sapien
gataacttcctgaaatgggccactt

SEQ ID NO: 1320660 - DNA, 25 bp, Homo sapien
caaaacaagttgtggtatgctgttg

SEQ ID NO: 1320661 - DNA, 25 bp, Homo sapien
cactgtcactatattctggcacagg

SEQ ID NO: 1320662 - DNA, 25 bp, Homo sapien
tctcaataaccagaagcagattact

SEQ ID NO: 1320663 - DNA, 25 bp, Homo sapien
ttacctggagagctagatgtctggg

SEQ ID NO: 1320664 - DNA, 25 bp, Homo sapien
tcatcgagactcaatcggctagggc

SEQ ID NO: 1320665 - DNA, 25 bp, Homo sapien
ttttgaaaaacccagcgtgaccagc

SEQ ID NO: 1320666 - DNA, 25 bp, Homo sapien
ggttattgttagtccgcagcctaga

SEQ ID NO: 1320667 - DNA, 25 bp, Homo sapien
gtgaccagcttttgatttaccccag

SEQ ID NO: 1320668 - DNA, 25 bp, Homo sapien
gtgacttgttcgtccttcggcaggg

SEQ ID NO: 1320669 - DNA, 25 bp, Homo sapien
cgagaacgcctggacgagcacatac

SEQ ID NO: 1320670 - DNA, 25 bp, Homo sapien
aggcacccgcggaagaggaggctga

SEQ ID NO: 1320671 - DNA, 25 bp, Homo sapien
tggacctgagtgaaaggttgaaaaa

SEQ ID NO: 1320672 - DNA, 25 bp, Homo sapien
ttgcagcacgttctccacggagccg

SEQ ID NO: 1320673 - DNA, 25 bp, Homo sapien
cgacttgcagcacgttctccacgga

SEQ ID NO: 1320674 - DNA, 25 bp, Homo sapien
acttgcagcacgttctccacggagc

SEQ ID NO: 1320675 - DNA, 25 bp, Homo sapien
gacttgcagcacgttctccacggag

SEQ ID NO: 1320676 - DNA, 25 bp, Homo sapien
tccagcagacggatgccccggcgga

SEQ ID NO: 1320677 - DNA, 25 bp, Homo sapien
ggagcccctcgccaccgcagccggc

SEQ ID NO: 1320678 - DNA, 25 bp, Homo sapien
tgcgcccagcccgggggatgcccca

SEQ ID NO: 1320679 - DNA, 25 bp, Homo sapien
ggggatgccccagccgcgacgcccc

SEQ ID NO: 1320680 - DNA, 25 bp, Homo sapien
ccagtagacgatgcggcgctgcacg

SEQ ID NO: 1320681 - DNA, 25 bp, Homo sapien
cgttcgtatgcccacttttccgcca

SEQ ID NO: 1320682 - DNA, 25 bp, Homo sapien
tcttggcggcgcagtccagtaagga

SEQ ID NO: 1320683 - DNA, 25 bp, Homo sapien
ctcattccgcgggaaggaccagtag

SEQ ID NO: 1320684 - DNA, 25 bp, Homo sapien
gctgggccacgaacactgccgctta

SEQ ID NO: 1320685 - DNA, 25 bp, Homo sapien
caggcgaaccgcgagggtgatgagc

SEQ ID NO: 1320686 - DNA, 25 bp, Homo sapien
accggtgacggcgagagcagctcct

SEQ ID NO: 1320687 - DNA, 25 bp, Homo sapien
acactgccgcttagccggagagacc

SEQ ID NO: 1320688 - DNA, 25 bp, Homo sapien
gggcggggcgagagaacccgcgagc

SEQ ID NO: 1320689 - DNA, 25 bp, Homo sapien
cgccccgcgcaagcgcccagcggtg

SEQ ID NO: 1320690 - DNA, 25 bp, Homo sapien
agcgcgccgcgagggcagacgcggg

SEQ ID NO: 1320691 - DNA, 25 bp, Homo sapien
gcggcggagaccctggccacggcca

SEQ ID NO: 1320692 - DNA, 25 bp, Homo sapien
tcatatatttactggaagcttcttc

SEQ ID NO: 1320693 - DNA, 25 bp, Homo sapien
ttcttcttcttgggctgaaatgaga

SEQ ID NO: 1320694 - DNA, 25 bp, Homo sapien
cttcttcttgggctgaaatgagaag

SEQ ID NO: 1320695 - DNA, 25 bp, Homo sapien
tatatttactggaagcttcttcttc

SEQ ID NO: 1320696 - DNA, 25 bp, Homo sapien
ctccgctatactccctttgctccag

SEQ ID NO: 1320697 - DNA, 25 bp, Homo sapien
ctgggtccagcccaatatctttctc

SEQ ID NO: 1320698 - DNA, 25 bp, Homo sapien
tgggtccagcccaatatctttctcc

SEQ ID NO: 1320699 - DNA, 25 bp, Homo sapien
gggtccagcccaatatctttctcca

SEQ ID NO: 1320700 - DNA, 25 bp, Homo sapien
agttgagctggaaatccagctcaac

SEQ ID NO: 1320701 - DNA, 25 bp, Homo sapien
cagttgagctggaaatccagctcaa

SEQ ID NO: 1320702 - DNA, 25 bp, Homo sapien
gttgagctggaaatccagctcaact

SEQ ID NO: 1320703 - DNA, 25 bp, Homo sapien
tcagttgagctggaaatccagctca

SEQ ID NO: 1320704 - DNA, 25 bp, Homo sapien
tgttcctggcctgctgatctgtacc

SEQ ID NO: 1320705 - DNA, 25 bp, Homo sapien
tctaagcaggaaagcgtcctagtca

SEQ ID NO: 1320706 - DNA, 25 bp, Homo sapien
ttgccgctccaagaaattagtcagg

SEQ ID NO: 1320707 - DNA, 25 bp, Homo sapien
gcttctgtgcctcggaatcaggatg

SEQ ID NO: 1320708 - DNA, 25 bp, Homo sapien
taggcggccgggtggtcacatcttt

SEQ ID NO: 1320709 - DNA, 25 bp, Homo sapien
tagagtgagcacaaggccctttgtt

SEQ ID NO: 1320710 - DNA, 25 bp, Homo sapien
ttgcaaagactgacgcaccaggctg

SEQ ID NO: 1320711 - DNA, 25 bp, Homo sapien
atcacagacaaaggcaggacgctct

SEQ ID NO: 1320712 - DNA, 25 bp, Homo sapien
ttgtctgagcctaatcaaccatgga

SEQ ID NO: 1320713 - DNA, 25 bp, Homo sapien
cagcggtaaccaaaaaaagctggag

SEQ ID NO: 1320714 - DNA, 25 bp, Homo sapien
gaaggcatccgcaagcaagtgaaat

SEQ ID NO: 1320715 - DNA, 25 bp, Homo sapien
tattgtgctctcaacactgggcata

SEQ ID NO: 1320716 - DNA, 25 bp, Homo sapien
tctctacgaggtttttctgggccac

SEQ ID NO: 1320717 - DNA, 25 bp, Homo sapien
atctctacgaggtttttctgggcca

SEQ ID NO: 1320718 - DNA, 25 bp, Homo sapien
catctctacgaggtttttctgggcc

SEQ ID NO: 1320719 - DNA, 25 bp, Homo sapien
tcaagccctcgacgagccgggagag

SEQ ID NO: 1320720 - DNA, 25 bp, Homo sapien
cagaaagacgggagcttccgaggcc

SEQ ID NO: 1320721 - DNA, 25 bp, Homo sapien
cttccggaaccgcttagagctaagg

SEQ ID NO: 1320722 - DNA, 25 bp, Homo sapien
cgagccgggagagagtcggaatcct

SEQ ID NO: 1320723 - DNA, 25 bp, Homo sapien
gagcggcccggcgagccgccgcgcc

SEQ ID NO: 1320724 - DNA, 25 bp, Homo sapien
taaggggagcggcccggcgagccgc

SEQ ID NO: 1320725 - DNA, 25 bp, Homo sapien
aggggagcggcccggcgagccgccg

SEQ ID NO: 1320726 - DNA, 25 bp, Homo sapien
gagtaaggggagcggcccggcgagc

SEQ ID NO: 1320727 - DNA, 25 bp, Homo sapien
tggcttcacgagttcggctcctcgg

SEQ ID NO: 1320728 - DNA, 25 bp, Homo sapien
gaacgtggcttcacgagttcggctc

SEQ ID NO: 1320729 - DNA, 25 bp, Homo sapien
caggaggaacgtggcttcacgagtt

SEQ ID NO: 1320730 - DNA, 25 bp, Homo sapien
aggaacgtggcttcacgagttcggc

SEQ ID NO: 1320731 - DNA, 25 bp, Homo sapien
tgcgaaagttctgcgaggtcctgac

SEQ ID NO: 1320732 - DNA, 25 bp, Homo sapien
tggccggaagggagatccaacatcc

SEQ ID NO: 1320733 - DNA, 25 bp, Homo sapien
gcaatcgcgggcagactccgaggac

SEQ ID NO: 1320734 - DNA, 25 bp, Homo sapien
tccgaggacccatcttgcgaaagtt

SEQ ID NO: 1320735 - DNA, 25 bp, Homo sapien
gcgctcagtgatcatattgttggtt

SEQ ID NO: 1320736 - DNA, 25 bp, Homo sapien
tttactaacaacaggattctcaggg

SEQ ID NO: 1320737 - DNA, 25 bp, Homo sapien
aagcactttactaacaacaggattc

SEQ ID NO: 1320738 - DNA, 25 bp, Homo sapien
tactaacaacaggattctcagggaa

SEQ ID NO: 1320739 - DNA, 25 bp, Homo sapien
aacaacaggattctcagggaatggg

SEQ ID NO: 1320740 - DNA, 25 bp, Homo sapien
tttccgactgcacggagaggacacc

SEQ ID NO: 1320741 - DNA, 25 bp, Homo sapien
tcagtggagatgtgagaccgaaaga

SEQ ID NO: 1320742 - DNA, 25 bp, Homo sapien
aagaaattatccaggacttgctggc

SEQ ID NO: 1320743 - DNA, 25 bp, Homo sapien
ggctgcactgttgaggctgtgtgca

SEQ ID NO: 1320744 - DNA, 25 bp, Homo sapien
tctagctaggcttagcctggaatgc

SEQ ID NO: 1320745 - DNA, 25 bp, Homo sapien
cttagcctggaatgctgtagagctt

SEQ ID NO: 1320746 - DNA, 25 bp, Homo sapien
ctttcatcctgcctcaagtatctgc

SEQ ID NO: 1320747 - DNA, 25 bp, Homo sapien
ccccgactctactgatctagctagg

SEQ ID NO: 1320748 - DNA, 25 bp, Homo sapien
gcagcctagggctcacaccctgact

SEQ ID NO: 1320749 - DNA, 25 bp, Homo sapien
agggctcacaccctgactgacccag

SEQ ID NO: 1320750 - DNA, 25 bp, Homo sapien
agtcagcagcctagggctcacaccc

SEQ ID NO: 1320751 - DNA, 25 bp, Homo sapien
cctagggctcacaccctgactgacc

SEQ ID NO: 1320752 - DNA, 25 bp, Homo sapien
gattcatttctaggacgaagattac

SEQ ID NO: 1320753 - DNA, 25 bp, Homo sapien
aagaaaaggattcatttctaggacg

SEQ ID NO: 1320754 - DNA, 25 bp, Homo sapien
aaaggattcatttctaggacgaaga

SEQ ID NO: 1320755 - DNA, 25 bp, Homo sapien
gaaaaggattcatttctaggacgaa

SEQ ID NO: 1320756 - DNA, 25 bp, Homo sapien
cagctgcttcctccaaacagccttt

SEQ ID NO: 1320757 - DNA, 25 bp, Homo sapien
ctttcctgatccgtctcccaattag

SEQ ID NO: 1320758 - DNA, 25 bp, Homo sapien
tcccaattagaactgatagctccca

SEQ ID NO: 1320759 - DNA, 25 bp, Homo sapien
ttagaactgatagctcccatggatg

SEQ ID NO: 1320760 - DNA, 25 bp, Homo sapien
ggctccacaattcatatcccacaaa

SEQ ID NO: 1320761 - DNA, 25 bp, Homo sapien
attcctccctccagtgaagcctgga

SEQ ID NO: 1320762 - DNA, 25 bp, Homo sapien
cctgcaccccacaatggaaggtctc

SEQ ID NO: 1320763 - DNA, 25 bp, Homo sapien
tcagtacaggcatttcacacacctg

SEQ ID NO: 1320764 - DNA, 25 bp, Homo sapien
tggggagacacggttgggagaggcc

SEQ ID NO: 1320765 - DNA, 25 bp, Homo sapien
ctaaaaacctatggactcaggcctg

SEQ ID NO: 1320766 - DNA, 25 bp, Homo sapien
gttggccctgatacacacggaaaac

SEQ ID NO: 1320767 - DNA, 25 bp, Homo sapien
tggctgttggccctgatacacacgg

SEQ ID NO: 1320768 - DNA, 25 bp, Homo sapien
tccctggctgttggccctgatacac

SEQ ID NO: 1320769 - DNA, 25 bp, Homo sapien
gctgttggccctgatacacacggaa

SEQ ID NO: 1320770 - DNA, 25 bp, Homo sapien
ttgcaaaagagataaaccggtgttc

SEQ ID NO: 1320771 - DNA, 25 bp, Homo sapien
caaaagagataaaccggtgttctgc

SEQ ID NO: 1320772 - DNA, 25 bp, Homo sapien
aacttcatgtcccagtacttttgtt

SEQ ID NO: 1320773 - DNA, 25 bp, Homo sapien
gagataaaccggtgttctgccctta

SEQ ID NO: 1320774 - DNA, 25 bp, Homo sapien
aatatattcatgtagaacatgtagg

SEQ ID NO: 1320775 - DNA, 25 bp, Homo sapien
tttttcctgtttacacagtaatata

SEQ ID NO: 1320776 - DNA, 25 bp, Homo sapien
atatattcatgtagaacatgtagga

SEQ ID NO: 1320777 - DNA, 25 bp, Homo sapien
ggtgtgaaattcctcctgcgtcagc

SEQ ID NO: 1320778 - DNA, 25 bp, Homo sapien
ttttcatggcggtggaaacagctgc

SEQ ID NO: 1320779 - DNA, 25 bp, Homo sapien
tttcatggcggtggaaacagctgcg

SEQ ID NO: 1320780 - DNA, 25 bp, Homo sapien
aaacagctgcggtgtgaaattcctc

SEQ ID NO: 1320781 - DNA, 25 bp, Homo sapien
caaggccagcccatatacttgatat

SEQ ID NO: 1320782 - DNA, 25 bp, Homo sapien
ccaaggccagcccatatacttgata

SEQ ID NO: 1320783 - DNA, 25 bp, Homo sapien
atacttgatatgtcagcttgatgtg

SEQ ID NO: 1320784 - DNA, 25 bp, Homo sapien
atatacttgatatgtcagcttgatg

SEQ ID NO: 1320785 - DNA, 25 bp, Homo sapien
gtcaaggggttcaaataggcctgtg

SEQ ID NO: 1320786 - DNA, 25 bp, Homo sapien
acatccttggctattccgctgctca

SEQ ID NO: 1320787 - DNA, 25 bp, Homo sapien
ggttcaaataggcctgtggatatag

SEQ ID NO: 1320788 - DNA, 25 bp, Homo sapien
atagcctcaaaagccaacatccttg

SEQ ID NO: 1320789 - DNA, 25 bp, Homo sapien
cccaaggtgccggaggtgcgtggct

SEQ ID NO: 1320790 - DNA, 25 bp, Homo sapien
cagggccttgcgctgaagctgctct

SEQ ID NO: 1320791 - DNA, 25 bp, Homo sapien
gctcccaggtcacggacgggaactc

SEQ ID NO: 1320792 - DNA, 25 bp, Homo sapien
cagcccaacgctgtagttcctgcag

SEQ ID NO: 1320793 - DNA, 25 bp, Homo sapien
tctgcaccagcagaatttgggcccc

SEQ ID NO: 1320794 - DNA, 25 bp, Homo sapien
cctggggggcttgcggctggccttt

SEQ ID NO: 1320795 - DNA, 25 bp, Homo sapien
ccaggctgttccagaacacaggtgg

SEQ ID NO: 1320796 - DNA, 25 bp, Homo sapien
tctggggaagttgaccactcccagg

SEQ ID NO: 1320797 - DNA, 25 bp, Homo sapien
ggcacaggtggcactgtccagtgtt

SEQ ID NO: 1320798 - DNA, 25 bp, Homo sapien
cacaggtggcactgtccagtgttgg

SEQ ID NO: 1320799 - DNA, 25 bp, Homo sapien
ggaggcaggcacaggtggcactgtc

SEQ ID NO: 1320800 - DNA, 25 bp, Homo sapien
gcaggcacaggtggcactgtccagt

SEQ ID NO: 1320801 - DNA, 25 bp, Homo sapien
tgcagaatcttactcaggttagagg

SEQ ID NO: 1320802 - DNA, 25 bp, Homo sapien
tactcaagccaagagggctttaggg

SEQ ID NO: 1320803 - DNA, 25 bp, Homo sapien
gggccaacctagagagtgggctttg

SEQ ID NO: 1320804 - DNA, 25 bp, Homo sapien
ggctttggccgggttctgcagaatc

SEQ ID NO: 1320805 - DNA, 25 bp, Homo sapien
ccgacaggctccctgaggctaagag

SEQ ID NO: 1320806 - DNA, 25 bp, Homo sapien
caggctccctgaggctaagagctgt

SEQ ID NO: 1320807 - DNA, 25 bp, Homo sapien
tgaggctaagagctgttcctgctcc

SEQ ID NO: 1320808 - DNA, 25 bp, Homo sapien
ccctgaggctaagagctgttcctgc

SEQ ID NO: 1320809 - DNA, 25 bp, Homo sapien
cgtgcccggcacaggctctccacag

SEQ ID NO: 1320810 - DNA, 25 bp, Homo sapien
cacagtgggcgctgtggggtacaca

SEQ ID NO: 1320811 - DNA, 25 bp, Homo sapien
cctggccgggctgggtccaccagct

SEQ ID NO: 1320812 - DNA, 25 bp, Homo sapien
cacactgtggcccctagctccatgg

SEQ ID NO: 1320813 - DNA, 25 bp, Homo sapien
tgctgtgaagcagagctcctttgca

SEQ ID NO: 1320814 - DNA, 25 bp, Homo sapien
gaagcagagctcctttgcagacacc

SEQ ID NO: 1320815 - DNA, 25 bp, Homo sapien
ctaaaagaagggaacactgctgtga

SEQ ID NO: 1320816 - DNA, 25 bp, Homo sapien
gaacactgctgtgaagcagagctcc

SEQ ID NO: 1320817 - DNA, 25 bp, Homo sapien
acgttgccatccaccacaccggttg

SEQ ID NO: 1320818 - DNA, 25 bp, Homo sapien
acagcacccgtgctacgttgccatc

SEQ ID NO: 1320819 - DNA, 25 bp, Homo sapien
agcaccaatggctcggacacggcac

SEQ ID NO: 1320820 - DNA, 25 bp, Homo sapien
caagggtgctgctgggatcagcacc

SEQ ID NO: 1320821 - DNA, 25 bp, Homo sapien
tctgctgtacgtggcatgtggcccc

SEQ ID NO: 1320822 - DNA, 25 bp, Homo sapien
caatggccccagctgtgtagcgccc

SEQ ID NO: 1320823 - DNA, 25 bp, Homo sapien
caaaggcgatagaggcaatggcccc

SEQ ID NO: 1320824 - DNA, 25 bp, Homo sapien
gcagggtctctgctgtacgtggcat

SEQ ID NO: 1320825 - DNA, 25 bp, Homo sapien
gcagccgccggccacgagaatagta

SEQ ID NO: 1320826 - DNA, 25 bp, Homo sapien
cgccggccacgagaatagtagccca

SEQ ID NO: 1320827 - DNA, 25 bp, Homo sapien
ccggccacgagaatagtagcccagg

SEQ ID NO: 1320828 - DNA, 25 bp, Homo sapien
ggccagcccagagttgattcacctc

SEQ ID NO: 1320829 - DNA, 25 bp, Homo sapien
ggtaggatcagaggtcaaagagatc

SEQ ID NO: 1320830 - DNA, 25 bp, Homo sapien
ggtcaaagagatcacccgtcagtcc

SEQ ID NO: 1320831 - DNA, 25 bp, Homo sapien
tcagaggtcaaagagatcacccgtc

SEQ ID NO: 1320832 - DNA, 25 bp, Homo sapien
gatcacccgtcagtccctctattgt

SEQ ID NO: 1320833 - DNA, 25 bp, Homo sapien
ctccagggaagcactggccaggtcc

SEQ ID NO: 1320834 - DNA, 25 bp, Homo sapien
ggccaggtcctgcagtgtaggccac

SEQ ID NO: 1320835 - DNA, 25 bp, Homo sapien
ccaggtcctgcagtgtaggccactt

SEQ ID NO: 1320836 - DNA, 25 bp, Homo sapien
ctggccaggtcctgcagtgtaggcc

SEQ ID NO: 1320837 - DNA, 25 bp, Homo sapien
tgaaggtggtagaggaagccttctc

SEQ ID NO: 1320838 - DNA, 25 bp, Homo sapien
tctggggtctgacccatgacccttc

SEQ ID NO: 1320839 - DNA, 25 bp, Homo sapien
ccccaaagtagaggctctcatctgg

SEQ ID NO: 1320840 - DNA, 25 bp, Homo sapien
cagaaagagacaaggtcaagggtga

SEQ ID NO: 1320841 - DNA, 25 bp, Homo sapien
tgcatccatccggtatagtagttga

SEQ ID NO: 1320842 - DNA, 25 bp, Homo sapien
tagttgatcacagtggcaacctggg

SEQ ID NO: 1320843 - DNA, 25 bp, Homo sapien
tgcagcatgacctctgagacccaca

SEQ ID NO: 1320844 - DNA, 25 bp, Homo sapien
gtctgctgcagcatgacctctgaga

SEQ ID NO: 1320845 - DNA, 25 bp, Homo sapien
gccctgctctcaggagatgtactga

SEQ ID NO: 1320846 - DNA, 25 bp, Homo sapien
ggttggcatgaggacactgctgacc

SEQ ID NO: 1320847 - DNA, 25 bp, Homo sapien
cctcgaggcaaagtggccctgctct

SEQ ID NO: 1320848 - DNA, 25 bp, Homo sapien
gacccaagggcctcgaggcaaagtg

SEQ ID NO: 1320849 - DNA, 25 bp, Homo sapien
gcatatgcccgcctgtccaggtcca

SEQ ID NO: 1320850 - DNA, 25 bp, Homo sapien
agcatatgcccgcctgtccaggtcc

SEQ ID NO: 1320851 - DNA, 25 bp, Homo sapien
cagcatatgcccgcctgtccaggtc

SEQ ID NO: 1320852 - DNA, 25 bp, Homo sapien
catatgcccgcctgtccaggtccat

SEQ ID NO: 1320853 - DNA, 25 bp, Homo sapien
gtcgtaccagcttagcaggctccct

SEQ ID NO: 1320854 - DNA, 25 bp, Homo sapien
tcccgtttctcttggtcgtaccagc

SEQ ID NO: 1320855 - DNA, 25 bp, Homo sapien
tccatggtaggtcccgtttctcttg

SEQ ID NO: 1320856 - DNA, 25 bp, Homo sapien
tcttctccatggtaggtcccgtttc

SEQ ID NO: 1320857 - DNA, 25 bp, Homo sapien
gaatagatggtatgaggagacagag

SEQ ID NO: 1320858 - DNA, 25 bp, Homo sapien
tgaatagatggtatgaggagacaga

SEQ ID NO: 1320859 - DNA, 25 bp, Homo sapien
ctgaatagatggtatgaggagacag

SEQ ID NO: 1320860 - DNA, 25 bp, Homo sapien
aatagatggtatgaggagacagagg

SEQ ID NO: 1320861 - DNA, 25 bp, Homo sapien
gcaataccacctcttccggctgcct

SEQ ID NO: 1320862 - DNA, 25 bp, Homo sapien
ctgcaataccacctcttccggctgc

SEQ ID NO: 1320863 - DNA, 25 bp, Homo sapien
aataccacctcttccggctgcctgg

SEQ ID NO: 1320864 - DNA, 25 bp, Homo sapien
cacctcttccggctgcctggccagg

SEQ ID NO: 1320865 - DNA, 25 bp, Homo sapien
gccccaggacactcagcaatcatcc

SEQ ID NO: 1320866 - DNA, 25 bp, Homo sapien
gggccccaggacactcagcaatcat

SEQ ID NO: 1320867 - DNA, 25 bp, Homo sapien
ctggggccccaggacactcagcaat

SEQ ID NO: 1320868 - DNA, 25 bp, Homo sapien
tggggccccaggacactcagcaatc

SEQ ID NO: 1320869 - DNA, 25 bp, Homo sapien
cctggcccttagtaagtctcttaat

SEQ ID NO: 1320870 - DNA, 25 bp, Homo sapien
aatgtcttgatacgtatcacaatcc

SEQ ID NO: 1320871 - DNA, 25 bp, Homo sapien
gtaagtctcttaatgtcttgatacg

SEQ ID NO: 1320872 - DNA, 25 bp, Homo sapien
ggcccttagtaagtctcttaatgtc

SEQ ID NO: 1320873 - DNA, 25 bp, Homo sapien
ccacggctgctcgtggcttcctcat

SEQ ID NO: 1320874 - DNA, 25 bp, Homo sapien
acaggcagaaggcttggcctgactg

SEQ ID NO: 1320875 - DNA, 25 bp, Homo sapien
gtgaccacttcccacggctgctcgt

SEQ ID NO: 1320876 - DNA, 25 bp, Homo sapien
ggcttggcctgactgttgttcttag

SEQ ID NO: 1320877 - DNA, 25 bp, Homo sapien
gttttaggcacttggcatacttcag

SEQ ID NO: 1320878 - DNA, 25 bp, Homo sapien
ggtagacccaaagcattctaagtga

SEQ ID NO: 1320879 - DNA, 25 bp, Homo sapien
atactgtaggcctttactatgggtc

SEQ ID NO: 1320880 - DNA, 25 bp, Homo sapien
tctgtggtacagtaagtaggtcaat

SEQ ID NO: 1320881 - DNA, 25 bp, Homo sapien
taaacacctcaagtgtgtctgccca

SEQ ID NO: 1320882 - DNA, 25 bp, Homo sapien
ggctgccacacccttgctcttagaa

SEQ ID NO: 1320883 - DNA, 25 bp, Homo sapien
aaatgtccaaatcaggtcccctcat

SEQ ID NO: 1320884 - DNA, 25 bp, Homo sapien
gccattggagggatttggctgccac

SEQ ID NO: 1320885 - DNA, 25 bp, Homo sapien
gacttgagtgcaaggactgattctc

SEQ ID NO: 1320886 - DNA, 25 bp, Homo sapien
tcagtgccaggtaaactgtacacaa

SEQ ID NO: 1320887 - DNA, 25 bp, Homo sapien
tgactgtaaaaaacgacttgagtgc

SEQ ID NO: 1320888 - DNA, 25 bp, Homo sapien
cagtgtgtacttcctgaatttgact

SEQ ID NO: 1320889 - DNA, 25 bp, Homo sapien
caggcgcccgcaccatacccagcta

SEQ ID NO: 1320890 - DNA, 25 bp, Homo sapien
attacaggcgcccgcaccataccca

SEQ ID NO: 1320891 - DNA, 25 bp, Homo sapien
cctaggctgaagtgcaaaatggcgt

SEQ ID NO: 1320892 - DNA, 25 bp, Homo sapien
ttgaactccggacctcaggtaatcc

SEQ ID NO: 1320893 - DNA, 25 bp, Homo sapien
acagcagaacacggaggccccgcgt

SEQ ID NO: 1320894 - DNA, 25 bp, Homo sapien
agacagcagaacacggaggccccgc

SEQ ID NO: 1320895 - DNA, 25 bp, Homo sapien
tgaagacagcagaacacggaggccc

SEQ ID NO: 1320896 - DNA, 25 bp, Homo sapien
gaagacagcagaacacggaggcccc

SEQ ID NO: 1320897 - DNA, 25 bp, Homo sapien
ctttccggcgcactccagggggcgt

SEQ ID NO: 1320898 - DNA, 25 bp, Homo sapien
ccaataggcaattagcgcgcgccag

SEQ ID NO: 1320899 - DNA, 25 bp, Homo sapien
tagcgcgcccggctttccggcgcac

SEQ ID NO: 1320900 - DNA, 25 bp, Homo sapien
cagcacaggccaataggcaattagc

SEQ ID NO: 1320901 - DNA, 25 bp, Homo sapien
agacgactcaggcgggagacgagcg

SEQ ID NO: 1320902 - DNA, 25 bp, Homo sapien
ccacgaggagactacaagttccgtt

SEQ ID NO: 1320903 - DNA, 25 bp, Homo sapien
ttcaaagcctctgcgctctgggaga

SEQ ID NO: 1320904 - DNA, 25 bp, Homo sapien
tgacgatggcgcagtttcagctccc

SEQ ID NO: 1320905 - DNA, 25 bp, Homo sapien
ttccgcctgaactagccacgaggag

SEQ ID NO: 1320906 - DNA, 25 bp, Homo sapien
tattcctggagctaatccgagcccg

SEQ ID NO: 1320907 - DNA, 25 bp, Homo sapien
tagaatatgccttccggaaatggtg

SEQ ID NO: 1320908 - DNA, 25 bp, Homo sapien
tagtggaccattaccctcttgcgct

SEQ ID NO: 1320909 - DNA, 25 bp, Homo sapien
gcatctgtgacaacttctcggtgag

SEQ ID NO: 1320910 - DNA, 25 bp, Homo sapien
tgccgatgaaactaggaacctgcct

SEQ ID NO: 1320911 - DNA, 25 bp, Homo sapien
aaagctgtacccctcacagtggcca

SEQ ID NO: 1320912 - DNA, 25 bp, Homo sapien
tagagctacctcagaagtgccaggg

SEQ ID NO: 1320913 - DNA, 25 bp, Homo sapien
gaagctaaggatggtcctcccaaga

SEQ ID NO: 1320914 - DNA, 25 bp, Homo sapien
agacatcactgcattgccctggacc

SEQ ID NO: 1320915 - DNA, 25 bp, Homo sapien
cccagtgtttgaggtacaagtaaga

SEQ ID NO: 1320916 - DNA, 25 bp, Homo sapien
caactgctactgagtttaggggagg

SEQ ID NO: 1320917 - DNA, 25 bp, Homo sapien
gccctggaccgcctcctttatccca

SEQ ID NO: 1320918 - DNA, 25 bp, Homo sapien
gaagcaccccaatattcaggtctgg

SEQ ID NO: 1320919 - DNA, 25 bp, Homo sapien
ttagctaagagccatgaccaccacg

SEQ ID NO: 1320920 - DNA, 25 bp, Homo sapien
aaatacatagaagcaggccctaggg

SEQ ID NO: 1320921 - DNA, 25 bp, Homo sapien
tgggaaacagccatgaccattacgg

SEQ ID NO: 1320922 - DNA, 25 bp, Homo sapien
cagcaccatctcgtggccggtagta

SEQ ID NO: 1320923 - DNA, 25 bp, Homo sapien
tcctggcgagcactaaaagggttga

SEQ ID NO: 1320924 - DNA, 25 bp, Homo sapien
tcttgatgcaagaactcaggcgaac

SEQ ID NO: 1320925 - DNA, 25 bp, Homo sapien
acagccagatggtacgtcttgggca

SEQ ID NO: 1320926 - DNA, 25 bp, Homo sapien
ttcctgtaggcggctcagaatttcc

SEQ ID NO: 1320927 - DNA, 25 bp, Homo sapien
ctgtaggcggctcagaatttcctcc

SEQ ID NO: 1320928 - DNA, 25 bp, Homo sapien
cctgtaggcggctcagaatttcctc

SEQ ID NO: 1320929 - DNA, 25 bp, Homo sapien
ttcttcctgtaggcggctcagaatt

SEQ ID NO: 1320930 - DNA, 25 bp, Homo sapien
tcaggtcagggaaaacactactgtc

SEQ ID NO: 1320931 - DNA, 25 bp, Homo sapien
ttctaaaggccccagacaatgaagg

SEQ ID NO: 1320932 - DNA, 25 bp, Homo sapien
gaaccttccaaaagtatgctcatat

SEQ ID NO: 1320933 - DNA, 25 bp, Homo sapien
ggtgatccctacagttcaggtcagg

SEQ ID NO: 1320934 - DNA, 25 bp, Homo sapien
gcctctctgtacagtcctaaccagg

SEQ ID NO: 1320935 - DNA, 25 bp, Homo sapien
tcagccagcccctgatgaaaggcag

SEQ ID NO: 1320936 - DNA, 25 bp, Homo sapien
gtccctcatgaagctaattagcagc

SEQ ID NO: 1320937 - DNA, 25 bp, Homo sapien
taaccaggtgaaaagggttcagcca

SEQ ID NO: 1320938 - DNA, 25 bp, Homo sapien
gttacagcagttgaaagtaagttgc

SEQ ID NO: 1320939 - DNA, 25 bp, Homo sapien
ttgcagaaaatctgggggacagtct

SEQ ID NO: 1320940 - DNA, 25 bp, Homo sapien
gggacagtctcccaccatgtgctgg

SEQ ID NO: 1320941 - DNA, 25 bp, Homo sapien
gttgaaagtaagttgcagaaaatct

SEQ ID NO: 1320942 - DNA, 25 bp, Homo sapien
cctggatgcgggcgatgatctcgca

SEQ ID NO: 1320943 - DNA, 25 bp, Homo sapien
tctcgcagaggatgataccataaga

SEQ ID NO: 1320944 - DNA, 25 bp, Homo sapien
gaagatagtccggatcggcctggat

SEQ ID NO: 1320945 - DNA, 25 bp, Homo sapien
agatagtccggatcggcctggatgc

SEQ ID NO: 1320946 - DNA, 25 bp, Homo sapien
cttttcattatagggctcatctcgg

SEQ ID NO: 1320947 - DNA, 25 bp, Homo sapien
ttatagggctcatctcggagaacct

SEQ ID NO: 1320948 - DNA, 25 bp, Homo sapien
ttcattatagggctcatctcggaga

SEQ ID NO: 1320949 - DNA, 25 bp, Homo sapien
gggctcatctcggagaacctcaggt

SEQ ID NO: 1320950 - DNA, 25 bp, Homo sapien
taccactgcagagtaaccattctca

SEQ ID NO: 1320951 - DNA, 25 bp, Homo sapien
aggccaaagtcagctaccactgcag

SEQ ID NO: 1320952 - DNA, 25 bp, Homo sapien
tcagctaccactgcagagtaaccat

SEQ ID NO: 1320953 - DNA, 25 bp, Homo sapien
caaagtcagctaccactgcagagta

SEQ ID NO: 1320954 - DNA, 25 bp, Homo sapien
aggttactgtctagcaactgttcca

SEQ ID NO: 1320955 - DNA, 25 bp, Homo sapien
gtagctgaggcccactgctatgtca

SEQ ID NO: 1320956 - DNA, 25 bp, Homo sapien
tgctatgtcataggccagttttacc

SEQ ID NO: 1320957 - DNA, 25 bp, Homo sapien
tgtgaggtcccgatgaaaaatgcct

SEQ ID NO: 1320958 - DNA, 25 bp, Homo sapien
ggtttgagggtagtacacctcacac

SEQ ID NO: 1320959 - DNA, 25 bp, Homo sapien
caacgtgcagacattaataaggttt

SEQ ID NO: 1320960 - DNA, 25 bp, Homo sapien
catcgtgctatggactacaaaatga

SEQ ID NO: 1320961 - DNA, 25 bp, Homo sapien
tcagacaacgtgcagacattaataa

SEQ ID NO: 1320962 - DNA, 25 bp, Homo sapien
tacgttgcactggagacttagagac

SEQ ID NO: 1320963 - DNA, 25 bp, Homo sapien
tactcattttagagaaggcatttag

SEQ ID NO: 1320964 - DNA, 25 bp, Homo sapien
cacagcatctgagtaagagagcctc

SEQ ID NO: 1320965 - DNA, 25 bp, Homo sapien
gagtccatactctttaccactacgt

SEQ ID NO: 1320966 - DNA, 25 bp, Homo sapien
agcatgttcagctttcccggatggg

SEQ ID NO: 1320967 - DNA, 25 bp, Homo sapien
agagcaactgcattagcatgttcag

SEQ ID NO: 1320968 - DNA, 25 bp, Homo sapien
ttctccataagcaactcccagtgca

SEQ ID NO: 1320969 - DNA, 25 bp, Homo sapien
cattagcatgttcagctttcccgga

SEQ ID NO: 1320970 - DNA, 25 bp, Homo sapien
aaagagataaggtctaaatacaaag

SEQ ID NO: 1320971 - DNA, 25 bp, Homo sapien
gtttagctcatagtacacaactcat

SEQ ID NO: 1320972 - DNA, 25 bp, Homo sapien
gtcagtccagtttggtgtttagctc

SEQ ID NO: 1320973 - DNA, 25 bp, Homo sapien
agacaatggcagcaagaatggaaag

SEQ ID NO: 1320974 - DNA, 25 bp, Homo sapien
gctattacttgtaggataaaaccca

SEQ ID NO: 1320975 - DNA, 25 bp, Homo sapien
catttcatggtaacccataggcagg

SEQ ID NO: 1320976 - DNA, 25 bp, Homo sapien
tctgaaatgccaacctgaagccact

SEQ ID NO: 1320977 - DNA, 25 bp, Homo sapien
ttatcattctcacgcctcccttagg

SEQ ID NO: 1320978 - DNA, 25 bp, Homo sapien
gacctagttttcactgtagcccaac

SEQ ID NO: 1320979 - DNA, 25 bp, Homo sapien
catcagtaagtcagaaacctgtcag

SEQ ID NO: 1320980 - DNA, 25 bp, Homo sapien
aattagtggcttgttggcactctac

SEQ ID NO: 1320981 - DNA, 25 bp, Homo sapien
taaatgactcaatgtgccatcagta

SEQ ID NO: 1320982 - DNA, 25 bp, Homo sapien
taaatgcctatgactgactctggaa

SEQ ID NO: 1320983 - DNA, 25 bp, Homo sapien
aactagccattgacacagtacctgc

SEQ ID NO: 1320984 - DNA, 25 bp, Homo sapien
catggtcctacttgctacagattcc

SEQ ID NO: 1320985 - DNA, 25 bp, Homo sapien
tattgggagaccctccttccatggt

SEQ ID NO: 1320986 - DNA, 25 bp, Homo sapien
gactaataccagttaccaagccagt

SEQ ID NO: 1320987 - DNA, 25 bp, Homo sapien
cacatattccgcctagcagaggctg

SEQ ID NO: 1320988 - DNA, 25 bp, Homo sapien
gatggagtcatatctaggcagcaag

SEQ ID NO: 1320989 - DNA, 25 bp, Homo sapien
gacagcaaacattaccaggtggtct

SEQ ID NO: 1320990 - DNA, 25 bp, Homo sapien
tctgtaagtgcatgcaattgtcctt

SEQ ID NO: 1320991 - DNA, 25 bp, Homo sapien
taagtgcatgcaattgtccttgatg

SEQ ID NO: 1320992 - DNA, 25 bp, Homo sapien
gtgcatgcaattgtccttgatgaac

SEQ ID NO: 1320993 - DNA, 25 bp, Homo sapien
tgtaagtgcatgcaattgtccttga

SEQ ID NO: 1320994 - DNA, 25 bp, Homo sapien
tatatacaatgtctcacacaaaatg

SEQ ID NO: 1320995 - DNA, 25 bp, Homo sapien
tttaagagtacagatcttgtctcat

SEQ ID NO: 1320996 - DNA, 25 bp, Homo sapien
tatgccgggccaaggcttttaagag

SEQ ID NO: 1320997 - DNA, 25 bp, Homo sapien
gccactatgccgggccaaggctttt

SEQ ID NO: 1320998 - DNA, 25 bp, Homo sapien
ttttgaccacaccatctacagagat

SEQ ID NO: 1320999 - DNA, 25 bp, Homo sapien
ggtttggatgtgacacacccttgct

SEQ ID NO: 1321000 - DNA, 25 bp, Homo sapien
gagatgtcatagcacatccaggcag

SEQ ID NO: 1321001 - DNA, 25 bp, Homo sapien
gctggcaagctgagacatgcattag

SEQ ID NO: 1321002 - DNA, 25 bp, Homo sapien
gcttttgtactttagaccactgtgg

SEQ ID NO: 1321003 - DNA, 25 bp, Homo sapien
ttgtcaaaatgcagactcgcactct

SEQ ID NO: 1321004 - DNA, 25 bp, Homo sapien
ccaccacactaggccaaggattgct

SEQ ID NO: 1321005 - DNA, 25 bp, Homo sapien
ctcgcactctgtaggtcagggatgg

SEQ ID NO: 1321006 - DNA, 25 bp, Homo sapien
tatgttgcagttatacaacctgcca

SEQ ID NO: 1321007 - DNA, 25 bp, Homo sapien
gaatccttaaaaacttggctcaaga

SEQ ID NO: 1321008 - DNA, 25 bp, Homo sapien
caacctgccacttctaaatatgtcc

SEQ ID NO: 1321009 - DNA, 25 bp, Homo sapien
catttagtgtgccagacatgtccac

SEQ ID NO: 1321010 - DNA, 25 bp, Homo sapien
aagactgtaacactaagttctggcc

SEQ ID NO: 1321011 - DNA, 25 bp, Homo sapien
cagcagatgcagaagatccagtgga

SEQ ID NO: 1321012 - DNA, 25 bp, Homo sapien
tatatgggcagaagtgattatgtca

SEQ ID NO: 1321013 - DNA, 25 bp, Homo sapien
tcttctaggtgaaaatgagctctcc

SEQ ID NO: 1321014 - DNA, 25 bp, Homo sapien
tcactgtgggtccaaagtaatcaca

SEQ ID NO: 1321015 - DNA, 25 bp, Homo sapien
ctatgagccgaggaatgcaaacagc

SEQ ID NO: 1321016 - DNA, 25 bp, Homo sapien
taatcacaaggtcctcataggtgga

SEQ ID NO: 1321017 - DNA, 25 bp, Homo sapien
caatatcagagtgatgcaatgtgag

SEQ ID NO: 1321018 - DNA, 25 bp, Homo sapien
ttttctgctgccaacgttgagcagt

SEQ ID NO: 1321019 - DNA, 25 bp, Homo sapien
agtaagcagcatacatatcataggg

SEQ ID NO: 1321020 - DNA, 25 bp, Homo sapien
ggtttgctttacaagcttttctgct

SEQ ID NO: 1321021 - DNA, 25 bp, Homo sapien
caacgttgagcagtaagcagcatac

SEQ ID NO: 1321022 - DNA, 25 bp, Homo sapien
cttgggagtcatgtggctagagatc

SEQ ID NO: 1321023 - DNA, 25 bp, Homo sapien
tacaatttcttactgcttgggagtc

SEQ ID NO: 1321024 - DNA, 25 bp, Homo sapien
cacccagtctgtgtttcagtggcac

SEQ ID NO: 1321025 - DNA, 25 bp, Homo sapien
tcagtggcacaactgaaaccacctt

SEQ ID NO: 1321026 - DNA, 25 bp, Homo sapien
agggtttatgtgtccggttggatgg

SEQ ID NO: 1321027 - DNA, 25 bp, Homo sapien
ggtttatgtgtccggttggatggca

SEQ ID NO: 1321028 - DNA, 25 bp, Homo sapien
cagggtttatgtgtccggttggatg

SEQ ID NO: 1321029 - DNA, 25 bp, Homo sapien
gggtttatgtgtccggttggatggc

SEQ ID NO: 1321030 - DNA, 25 bp, Homo sapien
ctgggaatggcaagaccagcaagga

SEQ ID NO: 1321031 - DNA, 25 bp, Homo sapien
gggaatggcaagaccagcaaggaga

SEQ ID NO: 1321032 - DNA, 25 bp, Homo sapien
atggcaagaccagcaaggagatcac

SEQ ID NO: 1321033 - DNA, 25 bp, Homo sapien
gaatggcaagaccagcaaggagatc

SEQ ID NO: 1321034 - DNA, 25 bp, Homo sapien
cccatttgctcgcaatatcccataa

SEQ ID NO: 1321035 - DNA, 25 bp, Homo sapien
catttgctcgcaatatcccataatc

SEQ ID NO: 1321036 - DNA, 25 bp, Homo sapien
tttgctcgcaatatcccataatctt

SEQ ID NO: 1321037 - DNA, 25 bp, Homo sapien
atttgctcgcaatatcccataatct

SEQ ID NO: 1321038 - DNA, 25 bp, Homo sapien
ctcggccttccaagcttttagtttg

SEQ ID NO: 1321039 - DNA, 25 bp, Homo sapien
tcatttagtgtaacatcctccaggt

SEQ ID NO: 1321040 - DNA, 25 bp, Homo sapien
tttcatttagtgtaacatcctccag

SEQ ID NO: 1321041 - DNA, 25 bp, Homo sapien
tcggccttccaagcttttagtttga

SEQ ID NO: 1321042 - DNA, 25 bp, Homo sapien
aagaaaatatacttgcctgactaaa

SEQ ID NO: 1321043 - DNA, 25 bp, Homo sapien
aaagaaaatatacttgcctgactaa

SEQ ID NO: 1321044 - DNA, 25 bp, Homo sapien
agaaaatatacttgcctgactaaaa

SEQ ID NO: 1321045 - DNA, 25 bp, Homo sapien
ggagagtctattcatgagctgtact

SEQ ID NO: 1321046 - DNA, 25 bp, Homo sapien
catcttaagagccatcacctgacca

SEQ ID NO: 1321047 - DNA, 25 bp, Homo sapien
catgtttgcccggttactgctcaat

SEQ ID NO: 1321048 - DNA, 25 bp, Homo sapien
cctgaccagaagctcggtgtcgtac

SEQ ID NO: 1321049 - DNA, 25 bp, Homo sapien
tatagtaagagatggagatccagtt

SEQ ID NO: 1321050 - DNA, 25 bp, Homo sapien
tgtatatagtaagagatggagatcc

SEQ ID NO: 1321051 - DNA, 25 bp, Homo sapien
ttgtatatagtaagagatggagatc

SEQ ID NO: 1321052 - DNA, 25 bp, Homo sapien
tatatagtaagagatggagatccag

SEQ ID NO: 1321053 - DNA, 25 bp, Homo sapien
gatttcaaggaaggagactttctag

SEQ ID NO: 1321054 - DNA, 25 bp, Homo sapien
ggtaatgacgtgtacttgaattatc

SEQ ID NO: 1321055 - DNA, 25 bp, Homo sapien
gacttacatcatgggtaatgacgtg

SEQ ID NO: 1321056 - DNA, 25 bp, Homo sapien
aatacataccaacagacttacatca

SEQ ID NO: 1321057 - DNA, 25 bp, Homo sapien
tgtgtttgaggatgtgtccattgct

SEQ ID NO: 1321058 - DNA, 25 bp, Homo sapien
tccattgctacatccatgtaactca

SEQ ID NO: 1321059 - DNA, 25 bp, Homo sapien
tgtgtccattgctacatccatgtaa

SEQ ID NO: 1321060 - DNA, 25 bp, Homo sapien
gaggatgtgtccattgctacatcca

SEQ ID NO: 1321061 - DNA, 25 bp, Homo sapien
cactctttaggattctattggcagc

SEQ ID NO: 1321062 - DNA, 25 bp, Homo sapien
tattggcagcacctaaactggctcg

SEQ ID NO: 1321063 - DNA, 25 bp, Homo sapien
tagagcatggtctgccttaggacct

SEQ ID NO: 1321064 - DNA, 25 bp, Homo sapien
gcgcatggactgtggaaattgttca

SEQ ID NO: 1321065 - DNA, 25 bp, Homo sapien
cttaggagcatgagtagttgatcca

SEQ ID NO: 1321066 - DNA, 25 bp, Homo sapien
cttagtagtgaaaatacaatgtaga

SEQ ID NO: 1321067 - DNA, 25 bp, Homo sapien
caatgcctattagtaggcaagtgga

SEQ ID NO: 1321068 - DNA, 25 bp, Homo sapien
gggagaatttcttaggcaatgccta

SEQ ID NO: 1321069 - DNA, 25 bp, Homo sapien
gctcgatacgaagatggccaaactc

SEQ ID NO: 1321070 - DNA, 25 bp, Homo sapien
gaaatcatccaaacgcgtcagtctg

SEQ ID NO: 1321071 - DNA, 25 bp, Homo sapien
ttcagaaaagaagccagaccctatt

SEQ ID NO: 1321072 - DNA, 25 bp, Homo sapien
ggcacttataagagctcgatacgaa

SEQ ID NO: 1321073 - DNA, 25 bp, Homo sapien
ttcaagacgctccacacgtggagga

SEQ ID NO: 1321074 - DNA, 25 bp, Homo sapien
aaactcttcaagacgctccacacgt

SEQ ID NO: 1321075 - DNA, 25 bp, Homo sapien
tcttcaagacgctccacacgtggag

SEQ ID NO: 1321076 - DNA, 25 bp, Homo sapien
ctcttcaagacgctccacacgtgga

SEQ ID NO: 1321077 - DNA, 25 bp, Homo sapien
gcaattgaattccgtttgctccgat

SEQ ID NO: 1321078 - DNA, 25 bp, Homo sapien
tgcaattgaattccgtttgctccga

SEQ ID NO: 1321079 - DNA, 25 bp, Homo sapien
ctgcaattgaattccgtttgctccg

SEQ ID NO: 1321080 - DNA, 25 bp, Homo sapien
caattgaattccgtttgctccgatc

SEQ ID NO: 1321081 - DNA, 25 bp, Homo sapien
ttgttgaattttacttctcttctgg

SEQ ID NO: 1321082 - DNA, 25 bp, Homo sapien
tcttcttttaagaaggaactccaca

SEQ ID NO: 1321083 - DNA, 25 bp, Homo sapien
attttacttctcttctggtttgaca

SEQ ID NO: 1321084 - DNA, 25 bp, Homo sapien
tcttttaagaaggaactccacacat

SEQ ID NO: 1321085 - DNA, 25 bp, Homo sapien
ccgagaaaacgaaagatccctaatg

SEQ ID NO: 1321086 - DNA, 25 bp, Homo sapien
gagcgaggtaacttctaatgggttc

SEQ ID NO: 1321087 - DNA, 25 bp, Homo sapien
gggagctggaagtctctgaaacaag

SEQ ID NO: 1321088 - DNA, 25 bp, Homo sapien
tctgaaacaagagttttccgagaaa

SEQ ID NO: 1321089 - DNA, 25 bp, Homo sapien
ctaagggggagcagacgtggcgggg

SEQ ID NO: 1321090 - DNA, 25 bp, Homo sapien
taagggggagcagacgtggcgggga

SEQ ID NO: 1321091 - DNA, 25 bp, Homo sapien
agggggagcagacgtggcggggagc

SEQ ID NO: 1321092 - DNA, 25 bp, Homo sapien
aagggggagcagacgtggcggggag

SEQ ID NO: 1321093 - DNA, 25 bp, Homo sapien
caggactgagcagccagaggggtgc

SEQ ID NO: 1321094 - DNA, 25 bp, Homo sapien
ggcaggactgagcagccagaggggt

SEQ ID NO: 1321095 - DNA, 25 bp, Homo sapien
gaggcaggactgagcagccagaggg

SEQ ID NO: 1321096 - DNA, 25 bp, Homo sapien
ctgaggcaggactgagcagccagag

SEQ ID NO: 1321097 - DNA, 25 bp, Homo sapien
aggagacggcggcaaagagggagca

SEQ ID NO: 1321098 - DNA, 25 bp, Homo sapien
gaggagacggcggcaaagagggagc

SEQ ID NO: 1321099 - DNA, 25 bp, Homo sapien
ggagacggcggcaaagagggagcat

SEQ ID NO: 1321100 - DNA, 25 bp, Homo sapien
cagcggctccttagcctgcggaggc

SEQ ID NO: 1321101 - DNA, 25 bp, Homo sapien
gaacgaggagactactgccatggcc

SEQ ID NO: 1321102 - DNA, 25 bp, Homo sapien
gaagccggcgactcagctaggctag

SEQ ID NO: 1321103 - DNA, 25 bp, Homo sapien
tcacagctcgttggtggcagcggct

SEQ ID NO: 1321104 - DNA, 25 bp, Homo sapien
tcaactgagcttgcactcagaaggt

SEQ ID NO: 1321105 - DNA, 25 bp, Homo sapien
gaaaggtagcctcctactgtccaga

SEQ ID NO: 1321106 - DNA, 25 bp, Homo sapien
tcttgcttaagactctgggcatgga

SEQ ID NO: 1321107 - DNA, 25 bp, Homo sapien
tgctacagaaatgcagtctgggctg

SEQ ID NO: 1321108 - DNA, 25 bp, Homo sapien
ggcttccataaaagttcccagctac

SEQ ID NO: 1321109 - DNA, 25 bp, Homo sapien
tggcttccataaaagttcccagcta

SEQ ID NO: 1321110 - DNA, 25 bp, Homo sapien
tactgtccagaagactgaattaaga

SEQ ID NO: 1321111 - DNA, 25 bp, Homo sapien
ttactgtccagaagactgaattaag

SEQ ID NO: 1321112 - DNA, 25 bp, Homo sapien
actgtccagaagactgaattaagag

SEQ ID NO: 1321113 - DNA, 25 bp, Homo sapien
gcttagattggacaacatgaatgga

SEQ ID NO: 1321114 - DNA, 25 bp, Homo sapien
cagaggcagcttagattggacaaca

SEQ ID NO: 1321115 - DNA, 25 bp, Homo sapien
ggcagaggcagcttagattggacaa

SEQ ID NO: 1321116 - DNA, 25 bp, Homo sapien
ggcagcttagattggacaacatgaa

SEQ ID NO: 1321117 - DNA, 25 bp, Homo sapien
gtagcctccagggtatgacccttgc

SEQ ID NO: 1321118 - DNA, 25 bp, Homo sapien
tcctggccactttgcaactgctcta

SEQ ID NO: 1321119 - DNA, 25 bp, Homo sapien
taaggaggttgtgctccctccaggc

SEQ ID NO: 1321120 - DNA, 25 bp, Homo sapien
ggtatgacccttgccttcctggcca

SEQ ID NO: 1321121 - DNA, 25 bp, Homo sapien
tgagcctgtcgtccctcagccagct

SEQ ID NO: 1321122 - DNA, 25 bp, Homo sapien
ccaacctgagcctgtcgtccctcag

SEQ ID NO: 1321123 - DNA, 25 bp, Homo sapien
cttccaactgccaacctgagcctgt

SEQ ID NO: 1321124 - DNA, 25 bp, Homo sapien
aactgccaacctgagcctgtcgtcc

SEQ ID NO: 1321125 - DNA, 25 bp, Homo sapien
tccttctgcataatctctgactcct

SEQ ID NO: 1321126 - DNA, 25 bp, Homo sapien
ttcaattccttctgcataatctctg

SEQ ID NO: 1321127 - DNA, 25 bp, Homo sapien
caacttcaattccttctgcataatc

SEQ ID NO: 1321128 - DNA, 25 bp, Homo sapien
tcaactggtactgcagcaacttcaa

SEQ ID NO: 1321129 - DNA, 25 bp, Homo sapien
ctgcaggagtgacagcagtgctatt

SEQ ID NO: 1321130 - DNA, 25 bp, Homo sapien
ggccattggtagtactgcattctcc

SEQ ID NO: 1321131 - DNA, 25 bp, Homo sapien
aggaaggccattggtagtactgcat

SEQ ID NO: 1321132 - DNA, 25 bp, Homo sapien
gaaggccattggtagtactgcattc

SEQ ID NO: 1321133 - DNA, 25 bp, Homo sapien
aaggccattggtagtactgcattct

SEQ ID NO: 1321134 - DNA, 25 bp, Homo sapien
ggccccctgcagcaaccttagtgat

SEQ ID NO: 1321135 - DNA, 25 bp, Homo sapien
agctcctccaggcattgctccagga

SEQ ID NO: 1321136 - DNA, 25 bp, Homo sapien
caggagaaaagcactcccctttggg

SEQ ID NO: 1321137 - DNA, 25 bp, Homo sapien
caggcattgctccaggagaaaagca

SEQ ID NO: 1321138 - DNA, 25 bp, Homo sapien
gctgctctcgctcttctagcaggcc

SEQ ID NO: 1321139 - DNA, 25 bp, Homo sapien
tgctgctctcgctcttctagcaggc

SEQ ID NO: 1321140 - DNA, 25 bp, Homo sapien
tgcactgcctgccttagtgcctgtc

SEQ ID NO: 1321141 - DNA, 25 bp, Homo sapien
cactgcctgccttagtgcctgtcac

SEQ ID NO: 1321142 - DNA, 25 bp, Homo sapien
ctgcactgcctgccttagtgcctgt

SEQ ID NO: 1321143 - DNA, 25 bp, Homo sapien
gcactgcctgccttagtgcctgtca

SEQ ID NO: 1321144 - DNA, 25 bp, Homo sapien
ggagtctctaaagcccaaggctgtt

SEQ ID NO: 1321145 - DNA, 25 bp, Homo sapien
gagcttggactcctgactgcagagg

SEQ ID NO: 1321146 - DNA, 25 bp, Homo sapien
tgagcctgacattgaaattaggatc

SEQ ID NO: 1321147 - DNA, 25 bp, Homo sapien
cagcctttgtggaactatgggagtc

SEQ ID NO: 1321148 - DNA, 25 bp, Homo sapien
ctgcggtggagaccccaagaagata

SEQ ID NO: 1321149 - DNA, 25 bp, Homo sapien
gcggtggagaccccaagaagataca

SEQ ID NO: 1321150 - DNA, 25 bp, Homo sapien
ggtggagaccccaagaagatacagc

SEQ ID NO: 1321151 - DNA, 25 bp, Homo sapien
tggagaccccaagaagatacagcca

SEQ ID NO: 1321152 - DNA, 25 bp, Homo sapien
gaaacagatgcacaggccaatgagc

SEQ ID NO: 1321153 - DNA, 25 bp, Homo sapien
accagctgaggctcgtattcatatc

SEQ ID NO: 1321154 - DNA, 25 bp, Homo sapien
atcagtagcgttgagaagcacatcc

SEQ ID NO: 1321155 - DNA, 25 bp, Homo sapien
aaccagctgaggctcgtattcatat

SEQ ID NO: 1321156 - DNA, 25 bp, Homo sapien
acatttccatcagtagcgttgagaa

SEQ ID NO: 1321157 - DNA, 25 bp, Homo sapien
gtctggctccctggtgtcttgtgct

SEQ ID NO: 1321158 - DNA, 25 bp, Homo sapien
ggagcggcaggggtctggctccctg

SEQ ID NO: 1321159 - DNA, 25 bp, Homo sapien
gagcggcaggggtctggctccctgg

SEQ ID NO: 1321160 - DNA, 25 bp, Homo sapien
caggggtctggctccctggtgtctt

SEQ ID NO: 1321161 - DNA, 25 bp, Homo sapien
gatgcactatcagaccaaaactgcg

SEQ ID NO: 1321162 - DNA, 25 bp, Homo sapien
gaaaggccaccacgttagatggaaa

SEQ ID NO: 1321163 - DNA, 25 bp, Homo sapien
caaaactgcgatcctgtgactaggg

SEQ ID NO: 1321164 - DNA, 25 bp, Homo sapien
tgactagggaaaggaaggacgctct

SEQ ID NO: 1321165 - DNA, 25 bp, Homo sapien
ttgcgaacacaaccggcgatggagg

SEQ ID NO: 1321166 - DNA, 25 bp, Homo sapien
cctgggaaactgaggtcgcctcttg

SEQ ID NO: 1321167 - DNA, 25 bp, Homo sapien
tttgaaagtccgactttggactggc

SEQ ID NO: 1321168 - DNA, 25 bp, Homo sapien
gacctccccagaagtagtacactgg

SEQ ID NO: 1321169 - DNA, 25 bp, Homo sapien
gcagaagatcgaggacacgctatgt

SEQ ID NO: 1321170 - DNA, 25 bp, Homo sapien
gaagctgactcaaaacgtaacggcc

SEQ ID NO: 1321171 - DNA, 25 bp, Homo sapien
tatggagccgaaagtcgcagagctg

SEQ ID NO: 1321172 - DNA, 25 bp, Homo sapien
tatgattggcttcgttgcaactggc

SEQ ID NO: 1321173 - DNA, 25 bp, Homo sapien
tcaaggctagaaccaagggaaggct

SEQ ID NO: 1321174 - DNA, 25 bp, Homo sapien
tcaaaacgagctttggccaggcact

SEQ ID NO: 1321175 - DNA, 25 bp, Homo sapien
gccctgggaattctgtactgctgct

SEQ ID NO: 1321176 - DNA, 25 bp, Homo sapien
tgttggccattaccaaaggccctgg

SEQ ID NO: 1321177 - DNA, 25 bp, Homo sapien
caggtaccaggcatttatcagaaga

SEQ ID NO: 1321178 - DNA, 25 bp, Homo sapien
tgctctggccaacactatagcaggg

SEQ ID NO: 1321179 - DNA, 25 bp, Homo sapien
caaaaataggtgtccaagtagtcac

SEQ ID NO: 1321180 - DNA, 25 bp, Homo sapien
taattccctgatttggaggcagctc

SEQ ID NO: 1321181 - DNA, 25 bp, Homo sapien
caactcaggccattcctaccaaagg

SEQ ID NO: 1321182 - DNA, 25 bp, Homo sapien
atacaaaccagtagcctgcccacaa

SEQ ID NO: 1321183 - DNA, 25 bp, Homo sapien
gggttgctctactaatacatcatac

SEQ ID NO: 1321184 - DNA, 25 bp, Homo sapien
aagattaatgggttgctctactaat

SEQ ID NO: 1321185 - DNA, 25 bp, Homo sapien
ggtatcactgccaggtttccagcca

SEQ ID NO: 1321186 - DNA, 25 bp, Homo sapien
tttgctcttttggacatcaggcttg

SEQ ID NO: 1321187 - DNA, 25 bp, Homo sapien
ttggacatcaggcttgatggtatca

SEQ ID NO: 1321188 - DNA, 25 bp, Homo sapien
caggcttgatggtatcactgccagg

SEQ ID NO: 1321189 - DNA, 25 bp, Homo sapien
gaactggaaggcctgaactagtctc

SEQ ID NO: 1321190 - DNA, 25 bp, Homo sapien
gtcagtgaactggaaggcctgaact

SEQ ID NO: 1321191 - DNA, 25 bp, Homo sapien
ggcctgaactagtctcaaagtctca

SEQ ID NO: 1321192 - DNA, 25 bp, Homo sapien
tggaaggcctgaactagtctcaaag

SEQ ID NO: 1321193 - DNA, 25 bp, Homo sapien
tgcgcttcgggtctgataccaaagg

SEQ ID NO: 1321194 - DNA, 25 bp, Homo sapien
ggtgcgcttcgggtctgataccaaa

SEQ ID NO: 1321195 - DNA, 25 bp, Homo sapien
ggtctgataccaaaggaatgttcat

SEQ ID NO: 1321196 - DNA, 25 bp, Homo sapien
ataccaaaggaatgttcatgggtcc

SEQ ID NO: 1321197 - DNA, 25 bp, Homo sapien
tcttaaattcttctgccctatcact

SEQ ID NO: 1321198 - DNA, 25 bp, Homo sapien
agacaggctgatatctttaaactga

SEQ ID NO: 1321199 - DNA, 25 bp, Homo sapien
ggggcagggtgcccaattttagcat

SEQ ID NO: 1321200 - DNA, 25 bp, Homo sapien
ggtgcccaattttagcatttcctga

SEQ ID NO: 1321201 - DNA, 25 bp, Homo sapien
cagggtgcccaattttagcatttcc

SEQ ID NO: 1321202 - DNA, 25 bp, Homo sapien
tgggggcagggtgcccaattttagc

SEQ ID NO: 1321203 - DNA, 25 bp, Homo sapien
aagactcgactcgagtccacgcttg

SEQ ID NO: 1321204 - DNA, 25 bp, Homo sapien
agactcgactcgagtccacgcttgc

SEQ ID NO: 1321205 - DNA, 25 bp, Homo sapien
aacaggcaagaagggcgcgccgcgc

SEQ ID NO: 1321206 - DNA, 25 bp, Homo sapien
ccggctgcctcacgcatcacagcac

SEQ ID NO: 1321207 - DNA, 25 bp, Homo sapien
gggcccacgagaggggtgtgcgcag

SEQ ID NO: 1321208 - DNA, 25 bp, Homo sapien
gctcaagcagtctcggactccgggc

SEQ ID NO: 1321209 - DNA, 25 bp, Homo sapien
actaaccaccgacaccaggcaagaa

SEQ ID NO: 1321210 - DNA, 25 bp, Homo sapien
acaagacgcgcaagagctctccggg

SEQ ID NO: 1321211 - DNA, 25 bp, Homo sapien
gcgctgcctttatagccagtaggga

SEQ ID NO: 1321212 - DNA, 25 bp, Homo sapien
cagtcccaacacaagtcgcagaaac

SEQ ID NO: 1321213 - DNA, 25 bp, Homo sapien
ctcacctccggagtgtctgggacta

SEQ ID NO: 1321214 - DNA, 25 bp, Homo sapien
cgcctcacctccggagtgtctggga

SEQ ID NO: 1321215 - DNA, 25 bp, Homo sapien
tcccgcctcacctccggagtgtctg

SEQ ID NO: 1321216 - DNA, 25 bp, Homo sapien
ctcccgcctcacctccggagtgtct

SEQ ID NO: 1321217 - DNA, 25 bp, Homo sapien
aaggtaaggcaattcaatgtaagta

SEQ ID NO: 1321218 - DNA, 25 bp, Homo sapien
atgtaagtataaagcccatgtccca

SEQ ID NO: 1321219 - DNA, 25 bp, Homo sapien
aatgtaagtataaagcccatgtccc

SEQ ID NO: 1321220 - DNA, 25 bp, Homo sapien
caatgtaagtataaagcccatgtcc

SEQ ID NO: 1321221 - DNA, 25 bp, Homo sapien
cccttacggttgagcagtctgagca

SEQ ID NO: 1321222 - DNA, 25 bp, Homo sapien
tagtgggtggtctggtaacctgccc

SEQ ID NO: 1321223 - DNA, 25 bp, Homo sapien
tcaggcctgacagatggaccctagt

SEQ ID NO: 1321224 - DNA, 25 bp, Homo sapien
tgatgtcgggactagaaagactcac

SEQ ID NO: 1321225 - DNA, 25 bp, Homo sapien
gcggcgcctaggcgcgcggtgcaat

SEQ ID NO: 1321226 - DNA, 25 bp, Homo sapien
tgcaatgtgggccagcaaaaggcga

SEQ ID NO: 1321227 - DNA, 25 bp, Homo sapien
taggcgcgcggtgcaatgtgggcca

SEQ ID NO: 1321228 - DNA, 25 bp, Homo sapien
tgtgggccagcaaaaggcgaggctg

SEQ ID NO: 1321229 - DNA, 25 bp, Homo sapien
tgtttcactatgttcgctaagctgg

SEQ ID NO: 1321230 - DNA, 25 bp, Homo sapien
gcccggcctgcatccagctatttat

SEQ ID NO: 1321231 - DNA, 25 bp, Homo sapien
tgagatggagactcaccatcgccca

SEQ ID NO: 1321232 - DNA, 25 bp, Homo sapien
gatggagactcaccatcgcccaggc

SEQ ID NO: 1321233 - DNA, 25 bp, Homo sapien
tccgatcagcgtagactgggccatg

SEQ ID NO: 1321234 - DNA, 25 bp, Homo sapien
cacaatgtccttaagcggtggctac

SEQ ID NO: 1321235 - DNA, 25 bp, Homo sapien
tacaatccgggttacgtgacctggc

SEQ ID NO: 1321236 - DNA, 25 bp, Homo sapien
tcggtcacaccagtaattgcagagg

SEQ ID NO: 1321237 - DNA, 25 bp, Homo sapien
tcataggcaggagtggacaaacagc

SEQ ID NO: 1321238 - DNA, 25 bp, Homo sapien
gtatccaggccggaaggagactctc

SEQ ID NO: 1321239 - DNA, 25 bp, Homo sapien
gaatcaagcgcggtagtttcagctg

SEQ ID NO: 1321240 - DNA, 25 bp, Homo sapien
caatcccgcggagccatatggagag

SEQ ID NO: 1321241 - DNA, 25 bp, Homo sapien
ggagctggtttctgccgacaagtaa

SEQ ID NO: 1321242 - DNA, 25 bp, Homo sapien
ggagtacttgccttcccaagagcag

SEQ ID NO: 1321243 - DNA, 25 bp, Homo sapien
cgctgttcgggaaggcctggtcact

SEQ ID NO: 1321244 - DNA, 25 bp, Homo sapien
tattccgttcgctggttcgccacct

SEQ ID NO: 1321245 - DNA, 25 bp, Homo sapien
cctgccccgcttttcgcggccgcca

SEQ ID NO: 1321246 - DNA, 25 bp, Homo sapien
caacgaagatttggcgccaaaaggg

SEQ ID NO: 1321247 - DNA, 25 bp, Homo sapien
tgtatccttcgcctgcccctctcct

SEQ ID NO: 1321248 - DNA, 25 bp, Homo sapien
aaaccttgcacgaggaaggaggctg

SEQ ID NO: 1321249 - DNA, 25 bp, Homo sapien
tggcgcgcgggttggccttcacgcc

SEQ ID NO: 1321250 - DNA, 25 bp, Homo sapien
cctctaaatgttggaaggctcccag

SEQ ID NO: 1321251 - DNA, 25 bp, Homo sapien
gggctcagtcagtcctacaacgtct

SEQ ID NO: 1321252 - DNA, 25 bp, Homo sapien
agtggctttaagtacctgactctcc

SEQ ID NO: 1321253 - DNA, 25 bp, Homo sapien
tcttggaggtctaatagggatctca

SEQ ID NO: 1321254 - DNA, 25 bp, Homo sapien
gagaagaacagatgaaagagggtga

SEQ ID NO: 1321255 - DNA, 25 bp, Homo sapien
gagacacaagagagagaagaacaga

SEQ ID NO: 1321256 - DNA, 25 bp, Homo sapien
gaagaacagatgaaagagggtgaag

SEQ ID NO: 1321257 - DNA, 25 bp, Homo sapien
ctaatgaagagacacaagagagaga

SEQ ID NO: 1321258 - DNA, 25 bp, Homo sapien
tgtgcccaggtatcaatggcaatgc

SEQ ID NO: 1321259 - DNA, 25 bp, Homo sapien
ccgcgcctggcagccattgccatta

SEQ ID NO: 1321260 - DNA, 25 bp, Homo sapien
ctggcagccattgccattactttaa

SEQ ID NO: 1321261 - DNA, 25 bp, Homo sapien
ttgtgcccaggtatcaatggcaatg

SEQ ID NO: 1321262 - DNA, 25 bp, Homo sapien
agaaaatgataagaccgaagaaatg

SEQ ID NO: 1321263 - DNA, 25 bp, Homo sapien
gaaatgccaaatgattcagtccttg

SEQ ID NO: 1321264 - DNA, 25 bp, Homo sapien
gataagaccgaagaaatgccaaatg

SEQ ID NO: 1321265 - DNA, 25 bp, Homo sapien
ccaaatgattcagtccttgaaaaca

SEQ ID NO: 1321266 - DNA, 25 bp, Homo sapien
gattgggaacctagagcttgcctgg

SEQ ID NO: 1321267 - DNA, 25 bp, Homo sapien
gagattgggaacctagagcttgcct

SEQ ID NO: 1321268 - DNA, 25 bp, Homo sapien
gaggagattgggaacctagagcttg

SEQ ID NO: 1321269 - DNA, 25 bp, Homo sapien
ggagattgggaacctagagcttgcc

SEQ ID NO: 1321270 - DNA, 25 bp, Homo sapien
tatatccacctagtcttcacctggg

SEQ ID NO: 1321271 - DNA, 25 bp, Homo sapien
gattcctaaggaaaacggtctgcat

SEQ ID NO: 1321272 - DNA, 25 bp, Homo sapien
gatgatggactttggctgtgagcca

SEQ ID NO: 1321273 - DNA, 25 bp, Homo sapien
tatctgtctaacgtggaggtgatca

SEQ ID NO: 1321274 - DNA, 25 bp, Homo sapien
gaactggttttctgtactcaactgc

SEQ ID NO: 1321275 - DNA, 25 bp, Homo sapien
tggttttctgtactcaactgctaga

SEQ ID NO: 1321276 - DNA, 25 bp, Homo sapien
ggaactggttttctgtactcaactg

SEQ ID NO: 1321277 - DNA, 25 bp, Homo sapien
ttctgtactcaactgctagatgctt

SEQ ID NO: 1321278 - DNA, 25 bp, Homo sapien
gcatgttcagatgctcatctccaca

SEQ ID NO: 1321279 - DNA, 25 bp, Homo sapien
taggtctggaaataggccccagtcc

SEQ ID NO: 1321280 - DNA, 25 bp, Homo sapien
gccccagtcctgtgcatgttcagat

SEQ ID NO: 1321281 - DNA, 25 bp, Homo sapien
ccaatgtcagaacatggagtagtaa

SEQ ID NO: 1321282 - DNA, 25 bp, Homo sapien
actgtggtgagggcccaaaccctca

SEQ ID NO: 1321283 - DNA, 25 bp, Homo sapien
ctgtggtgagggcccaaaccctcat

SEQ ID NO: 1321284 - DNA, 25 bp, Homo sapien
agtcagaactgtggtgagggcccaa

SEQ ID NO: 1321285 - DNA, 25 bp, Homo sapien
cagaactgtggtgagggcccaaacc

SEQ ID NO: 1321286 - DNA, 25 bp, Homo sapien
ctctatccttgactccactgagggg

SEQ ID NO: 1321287 - DNA, 25 bp, Homo sapien
tacgaggtgggggatcagcaaagcc

SEQ ID NO: 1321288 - DNA, 25 bp, Homo sapien
aggtgggggatcagcaaagccaact

SEQ ID NO: 1321289 - DNA, 25 bp, Homo sapien
agcaaagccaactgcgggggtgagg

SEQ ID NO: 1321290 - DNA, 25 bp, Homo sapien
ctcttctgtacgaggtgggggatca

SEQ ID NO: 1321291 - DNA, 25 bp, Homo sapien
ccttatctgttacatagtaggactt

SEQ ID NO: 1321292 - DNA, 25 bp, Homo sapien
tgtgaggatcaaacaagaaagcatt

SEQ ID NO: 1321293 - DNA, 25 bp, Homo sapien
tgtgaaccaagttaacctgctcctg

SEQ ID NO: 1321294 - DNA, 25 bp, Homo sapien
agcattggtaatgactggcacacag

SEQ ID NO: 1321295 - DNA, 25 bp, Homo sapien
ggctggccgttagccataccagcca

SEQ ID NO: 1321296 - DNA, 25 bp, Homo sapien
cacaccggtatgtgtagctgtggtg

SEQ ID NO: 1321297 - DNA, 25 bp, Homo sapien
tcaataaaggctggccgttagccat

SEQ ID NO: 1321298 - DNA, 25 bp, Homo sapien
gccataccagccacaccggtatgtg

SEQ ID NO: 1321299 - DNA, 25 bp, Homo sapien
attcaccagccgcagaaagagctca

SEQ ID NO: 1321300 - DNA, 25 bp, Homo sapien
gatctctgccagtgtctgtacagct

SEQ ID NO: 1321301 - DNA, 25 bp, Homo sapien
gggtactggtactcatggacacttg

SEQ ID NO: 1321302 - DNA, 25 bp, Homo sapien
tggacacttgctggattgatctctg

SEQ ID NO: 1321303 - DNA, 25 bp, Homo sapien
ctttgctgtatgcccaatccctgcg

SEQ ID NO: 1321304 - DNA, 25 bp, Homo sapien
gagagatgaaatggtattgcacttg

SEQ ID NO: 1321305 - DNA, 25 bp, Homo sapien
ttgctgtatgcccaatccctgcgca

SEQ ID NO: 1321306 - DNA, 25 bp, Homo sapien
tgtatgcccaatccctgcgcaccac

SEQ ID NO: 1321307 - DNA, 25 bp, Homo sapien
gaggaatcccattcagctgcccaag

SEQ ID NO: 1321308 - DNA, 25 bp, Homo sapien
aggaatcccattcagctgcccaagg

SEQ ID NO: 1321309 - DNA, 25 bp, Homo sapien
gaagggcccgaagtgggaggcgcca

SEQ ID NO: 1321310 - DNA, 25 bp, Homo sapien
tgtggtgccctagcccatgctagcc

SEQ ID NO: 1321311 - DNA, 25 bp, Homo sapien
cttagcacccgctgatcttggtcaa

SEQ ID NO: 1321312 - DNA, 25 bp, Homo sapien
gccagcggccacttagcacccgctg

SEQ ID NO: 1321313 - DNA, 25 bp, Homo sapien
agatactgatgatgagggtggtagt

SEQ ID NO: 1321314 - DNA, 25 bp, Homo sapien
ctcacagaccaaagatactgatgat

SEQ ID NO: 1321315 - DNA, 25 bp, Homo sapien
aagatactgatgatgagggtggtag

SEQ ID NO: 1321316 - DNA, 25 bp, Homo sapien
tcggaagccagagctacagtccctt

SEQ ID NO: 1321317 - DNA, 25 bp, Homo sapien
tgtcggaagccagagctacagtccc

SEQ ID NO: 1321318 - DNA, 25 bp, Homo sapien
tttctaggacttagccctttagagc

SEQ ID NO: 1321319 - DNA, 25 bp, Homo sapien
gagccagcggcctctgtatacagat

SEQ ID NO: 1321320 - DNA, 25 bp, Homo sapien
gggcaacgctgtggtccttcctgta

SEQ ID NO: 1321321 - DNA, 25 bp, Homo sapien
caaggccccgcaggaaatcatagaa

SEQ ID NO: 1321322 - DNA, 25 bp, Homo sapien
aagccagtccttagttgcacccaaa

SEQ ID NO: 1321323 - DNA, 25 bp, Homo sapien
gatggcacagttgcccatgggcccg

SEQ ID NO: 1321324 - DNA, 25 bp, Homo sapien
gggaacacaagtcttagcacagaaa

SEQ ID NO: 1321325 - DNA, 25 bp, Homo sapien
ggcaggtccctaaccctatctggtc

SEQ ID NO: 1321326 - DNA, 25 bp, Homo sapien
cacagaggctgtcgaaggtggcacg

SEQ ID NO: 1321327 - DNA, 25 bp, Homo sapien
tgggctcccttaaccagcagtgctg

SEQ ID NO: 1321328 - DNA, 25 bp, Homo sapien
cccagcatgtccgatgtgggcagga

SEQ ID NO: 1321329 - DNA, 25 bp, Homo sapien
gggcccagcatgtccgatgtgggca

SEQ ID NO: 1321330 - DNA, 25 bp, Homo sapien
ccaggatcatagggtgcagggccca

SEQ ID NO: 1321331 - DNA, 25 bp, Homo sapien
gcagggcccagcatgtccgatgtgg

SEQ ID NO: 1321332 - DNA, 25 bp, Homo sapien
ggggaagagagctgactcctccaga

SEQ ID NO: 1321333 - DNA, 25 bp, Homo sapien
ggaagagagctgactcctccagaaa

SEQ ID NO: 1321334 - DNA, 25 bp, Homo sapien
gggaagagagctgactcctccagaa

SEQ ID NO: 1321335 - DNA, 25 bp, Homo sapien
gaagagagctgactcctccagaaag

SEQ ID NO: 1321336 - DNA, 25 bp, Homo sapien
tccgagaagcctggaagtggtggca

SEQ ID NO: 1321337 - DNA, 25 bp, Homo sapien
gcggtggtgccaccggtggcgggag

SEQ ID NO: 1321338 - DNA, 25 bp, Homo sapien
tccccttcggttgtaggctggcatc

SEQ ID NO: 1321339 - DNA, 25 bp, Homo sapien
atcccccaggagtcgcagatcctgg

SEQ ID NO: 1321340 - DNA, 25 bp, Homo sapien
ggtaattagctgagatacccctccc

SEQ ID NO: 1321341 - DNA, 25 bp, Homo sapien
gagcagaagagttagggtgccccta

SEQ ID NO: 1321342 - DNA, 25 bp, Homo sapien
tgcccctaagttggacaaagcaggt

SEQ ID NO: 1321343 - DNA, 25 bp, Homo sapien
tgtggatacagggatacacacgtgc

SEQ ID NO: 1321344 - DNA, 25 bp, Homo sapien
actactggaagctcccctgaggtgg

SEQ ID NO: 1321345 - DNA, 25 bp, Homo sapien
cggttttcagcctccactactggaa

SEQ ID NO: 1321346 - DNA, 25 bp, Homo sapien
tctgcatttgcaaggccaagatttc

SEQ ID NO: 1321347 - DNA, 25 bp, Homo sapien
aagatttctgcctccaagcgccggt

SEQ ID NO: 1321348 - DNA, 25 bp, Homo sapien
tgcgatgaacaagtgtgacctgtca

SEQ ID NO: 1321349 - DNA, 25 bp, Homo sapien
ctgcgatgaacaagtgtgacctgtc

SEQ ID NO: 1321350 - DNA, 25 bp, Homo sapien
ccagcgctaaggctcttcggataag

SEQ ID NO: 1321351 - DNA, 25 bp, Homo sapien
agctctccagcgctaaggctcttcg

SEQ ID NO: 1321352 - DNA, 25 bp, Homo sapien
taaggctcttcggataaggctggac

SEQ ID NO: 1321353 - DNA, 25 bp, Homo sapien
tgagcagctctccagcgctaaggct

SEQ ID NO: 1321354 - DNA, 25 bp, Homo sapien
gagttcttttctcctcccaggactg

SEQ ID NO: 1321355 - DNA, 25 bp, Homo sapien
cagccacaggccctccctcgagttc

SEQ ID NO: 1321356 - DNA, 25 bp, Homo sapien
cacaggccctccctcgagttctttt

SEQ ID NO: 1321357 - DNA, 25 bp, Homo sapien
gttcttttctcctcccaggactgac

SEQ ID NO: 1321358 - DNA, 25 bp, Homo sapien
accgctggcgagaggccctcctgtt

SEQ ID NO: 1321359 - DNA, 25 bp, Homo sapien
gctggcgagaggccctcctgttcac

SEQ ID NO: 1321360 - DNA, 25 bp, Homo sapien
caccgctggcgagaggccctcctgt

SEQ ID NO: 1321361 - DNA, 25 bp, Homo sapien
cgctggcgagaggccctcctgttca

SEQ ID NO: 1321362 - DNA, 25 bp, Homo sapien
ccgtctcgaatgtaggcctcccgca

SEQ ID NO: 1321363 - DNA, 25 bp, Homo sapien
ggtctgcgaccgctgcagctccagt

SEQ ID NO: 1321364 - DNA, 25 bp, Homo sapien
tgcaactgccatatctggcccagca

SEQ ID NO: 1321365 - DNA, 25 bp, Homo sapien
ctctgcgggtctgcgaccgctgcag

SEQ ID NO: 1321366 - DNA, 25 bp, Homo sapien
tttccagaactgctcagcgcttcgc

SEQ ID NO: 1321367 - DNA, 25 bp, Homo sapien
tctttccagaactgctcagcgcttc

SEQ ID NO: 1321368 - DNA, 25 bp, Homo sapien
ggaacaggaaggccgtctttccaga

SEQ ID NO: 1321369 - DNA, 25 bp, Homo sapien
cgtctttccagaactgctcagcgct

SEQ ID NO: 1321370 - DNA, 25 bp, Homo sapien
cagccagagttcccgggttggcctt

SEQ ID NO: 1321371 - DNA, 25 bp, Homo sapien
ttggccttttgcactggagaataaa

SEQ ID NO: 1321372 - DNA, 25 bp, Homo sapien
tttgcactggagaataaagttctgc

SEQ ID NO: 1321373 - DNA, 25 bp, Homo sapien
tgcactggagaataaagttctgcct

SEQ ID NO: 1321374 - DNA, 25 bp, Homo sapien
ccgcgtacaggccacaacttggagg

SEQ ID NO: 1321375 - DNA, 25 bp, Homo sapien
gccacaacttggaggcgtcggctca

SEQ ID NO: 1321376 - DNA, 25 bp, Homo sapien
ggcctcagcttgtagttctcgaatc

SEQ ID NO: 1321377 - DNA, 25 bp, Homo sapien
ccaacacctctagagctccccgcgt

SEQ ID NO: 1321378 - DNA, 25 bp, Homo sapien
gcttaagccaaacggcgagggcaga

SEQ ID NO: 1321379 - DNA, 25 bp, Homo sapien
ggccgagtcagaaccggcccgagca

SEQ ID NO: 1321380 - DNA, 25 bp, Homo sapien
agaaccggcccgagcaagcttaagc

SEQ ID NO: 1321381 - DNA, 25 bp, Homo sapien
cgagcaagcttaagccaaacggcga

SEQ ID NO: 1321382 - DNA, 25 bp, Homo sapien
gagtcctgaacagcgcccgcagccg

SEQ ID NO: 1321383 - DNA, 25 bp, Homo sapien
gctctgcgcttccatctccgccacg

SEQ ID NO: 1321384 - DNA, 25 bp, Homo sapien
cgccacgcgcctcgcgcgagtcctg

SEQ ID NO: 1321385 - DNA, 25 bp, Homo sapien
tcgcgcgagtcctgaacagcgcccg

SEQ ID NO: 1321386 - DNA, 25 bp, Homo sapien
acatgggactctgaggccgcgcctc

SEQ ID NO: 1321387 - DNA, 25 bp, Homo sapien
tcggaacgtgtccagggccccgcga

SEQ ID NO: 1321388 - DNA, 25 bp, Homo sapien
gaacaccctggggacctctgttatc

SEQ ID NO: 1321389 - DNA, 25 bp, Homo sapien
cctctgttatccagggccgcatttc

SEQ ID NO: 1321390 - DNA, 25 bp, Homo sapien
ctgtagggatagccgcagccactgc

SEQ ID NO: 1321391 - DNA, 25 bp, Homo sapien
tgtagggatagccgcagccactgca

SEQ ID NO: 1321392 - DNA, 25 bp, Homo sapien
gtagggatagccgcagccactgcac

SEQ ID NO: 1321393 - DNA, 25 bp, Homo sapien
ggtaacagcgatccgcgatctctgc

SEQ ID NO: 1321394 - DNA, 25 bp, Homo sapien
cgatctctgcgtgggcagaatctgt

SEQ ID NO: 1321395 - DNA, 25 bp, Homo sapien
ctggaggtaacagcgatccgcgatc

SEQ ID NO: 1321396 - DNA, 25 bp, Homo sapien
gatccgcgatctctgcgtgggcaga

SEQ ID NO: 1321397 - DNA, 25 bp, Homo sapien
ggaagacgctcaacgttttgagccc

SEQ ID NO: 1321398 - DNA, 25 bp, Homo sapien
gggaagacgctcaacgttttgagcc

SEQ ID NO: 1321399 - DNA, 25 bp, Homo sapien
ggggaagacgctcaacgttttgagc

SEQ ID NO: 1321400 - DNA, 25 bp, Homo sapien
tggggaagacgctcaacgttttgag

SEQ ID NO: 1321401 - DNA, 25 bp, Homo sapien
tgtggcacgccctggtgttcttgtg

SEQ ID NO: 1321402 - DNA, 25 bp, Homo sapien
ctctttagagcagatctactggcct

SEQ ID NO: 1321403 - DNA, 25 bp, Homo sapien
gttaacctctttagagcagatctac

SEQ ID NO: 1321404 - DNA, 25 bp, Homo sapien
ggttcttgtggcacgccctggtgtt

SEQ ID NO: 1321405 - DNA, 25 bp, Homo sapien
tggggatagggtgtagtaggatgag

SEQ ID NO: 1321406 - DNA, 25 bp, Homo sapien
aggatgaggaatcataaaggtcctg

SEQ ID NO: 1321407 - DNA, 25 bp, Homo sapien
atgaggaatcataaaggtcctggct

SEQ ID NO: 1321408 - DNA, 25 bp, Homo sapien
gggatagggtgtagtaggatgagga

SEQ ID NO: 1321409 - DNA, 25 bp, Homo sapien
ttcagtggcaactgatgcctgtgct

SEQ ID NO: 1321410 - DNA, 25 bp, Homo sapien
gcctgtgctccaaatgtcatctctt

SEQ ID NO: 1321411 - DNA, 25 bp, Homo sapien
taacagagctgaggagcggaaaacc

SEQ ID NO: 1321412 - DNA, 25 bp, Homo sapien
aagcgctgagtatgggtggctaaca

SEQ ID NO: 1321413 - DNA, 25 bp, Homo sapien
tgttacaaagtctgaacgtgggcaa

SEQ ID NO: 1321414 - DNA, 25 bp, Homo sapien
ggaaaggccgtgtctattaggtctg

SEQ ID NO: 1321415 - DNA, 25 bp, Homo sapien
ggctgggcccttatcacttactaca

SEQ ID NO: 1321416 - DNA, 25 bp, Homo sapien
cctcggccgtttgggaggagccact

SEQ ID NO: 1321417 - DNA, 25 bp, Homo sapien
ctggaaaccatgtcgcaccagggat

SEQ ID NO: 1321418 - DNA, 25 bp, Homo sapien
cctggaaaccatgtcgcaccaggga

SEQ ID NO: 1321419 - DNA, 25 bp, Homo sapien
tgcctggaaaccatgtcgcaccagg

SEQ ID NO: 1321420 - DNA, 25 bp, Homo sapien
ctgcctggaaaccatgtcgcaccag

SEQ ID NO: 1321421 - DNA, 25 bp, Homo sapien
tttattactggtaatttattgcaca

SEQ ID NO: 1321422 - DNA, 25 bp, Homo sapien
cctaaaaaagaatccactcatctaa

SEQ ID NO: 1321423 - DNA, 25 bp, Homo sapien
taaaaaagaatccactcatctaatt

SEQ ID NO: 1321424 - DNA, 25 bp, Homo sapien
tcccctaaaaaagaatccactcatc

SEQ ID NO: 1321425 - DNA, 25 bp, Homo sapien
aaaatatacttcttacacaagacaa

SEQ ID NO: 1321426 - DNA, 25 bp, Homo sapien
tatcaaggctgcaagaataacacaa

SEQ ID NO: 1321427 - DNA, 25 bp, Homo sapien
gacttgtgataaccacatcttttaa

SEQ ID NO: 1321428 - DNA, 25 bp, Homo sapien
ccaagttagttattttatgcagtag

SEQ ID NO: 1321429 - DNA, 25 bp, Homo sapien
gggctaaagttacccgagcagccaa

SEQ ID NO: 1321430 - DNA, 25 bp, Homo sapien
tactgggtcagatttaactgtgagc

SEQ ID NO: 1321431 - DNA, 25 bp, Homo sapien
ttgctgcagaccagtgtctcctctt

SEQ ID NO: 1321432 - DNA, 25 bp, Homo sapien
ccccaagggctggtagtagaagctg

SEQ ID NO: 1321433 - DNA, 25 bp, Homo sapien
tgtgcatcgccccatatatactggg

SEQ ID NO: 1321434 - DNA, 25 bp, Homo sapien
ccaggcatcgtcatctgatgtttca

SEQ ID NO: 1321435 - DNA, 25 bp, Homo sapien
tgctactggtttcggtgtctgagtc

SEQ ID NO: 1321436 - DNA, 25 bp, Homo sapien
tgctttgcaagtgcttctccaaggg

SEQ ID NO: 1321437 - DNA, 25 bp, Homo sapien
aaactctgctttgcaagtgcttctc

SEQ ID NO: 1321438 - DNA, 25 bp, Homo sapien
tcaggatattcctgccaacccatag

SEQ ID NO: 1321439 - DNA, 25 bp, Homo sapien
gaggggaaggcaattctcatcattt

SEQ ID NO: 1321440 - DNA, 25 bp, Homo sapien
cctgccaacccatagctttcaataa

SEQ ID NO: 1321441 - DNA, 25 bp, Homo sapien
cttcatgtggaactctttgagctca

SEQ ID NO: 1321442 - DNA, 25 bp, Homo sapien
tcctttggttcaggtgtgctgttgt

SEQ ID NO: 1321443 - DNA, 25 bp, Homo sapien
tcttccactacagggagggcaagac

SEQ ID NO: 1321444 - DNA, 25 bp, Homo sapien
ctctgcttctagagagtgtgagaga

SEQ ID NO: 1321445 - DNA, 25 bp, Homo sapien
ctgtgctctgcttctagagagtgtg

SEQ ID NO: 1321446 - DNA, 25 bp, Homo sapien
atcaaggactcacgacccaggaagt

SEQ ID NO: 1321447 - DNA, 25 bp, Homo sapien
gaaatcaaggactcacgacccagga

SEQ ID NO: 1321448 - DNA, 25 bp, Homo sapien
aaggactcacgacccaggaagtgtt

SEQ ID NO: 1321449 - DNA, 25 bp, Homo sapien
aagacagcctcagcccacagatttt

SEQ ID NO: 1321450 - DNA, 25 bp, Homo sapien
ggattaaactcactttactatgtgg

SEQ ID NO: 1321451 - DNA, 25 bp, Homo sapien
gaagaaatcacgtatgtatcaaagg

SEQ ID NO: 1321452 - DNA, 25 bp, Homo sapien
tgtacttcaataggtgagtgattac

SEQ ID NO: 1321453 - DNA, 25 bp, Homo sapien
ggcagttacacctacagacagtatc

SEQ ID NO: 1321454 - DNA, 25 bp, Homo sapien
cgagaggagctgatctcaattggag

SEQ ID NO: 1321455 - DNA, 25 bp, Homo sapien
cactcttcctgtcggtggttcggcg

SEQ ID NO: 1321456 - DNA, 25 bp, Homo sapien
tctccattccggtcatccttcagag

SEQ ID NO: 1321457 - DNA, 25 bp, Homo sapien
tcaacttggtcagacgagaggagct

SEQ ID NO: 1321458 - DNA, 25 bp, Homo sapien
gggcaaataccacaaacaggttgct

SEQ ID NO: 1321459 - DNA, 25 bp, Homo sapien
tgggcaaataccacaaacaggttgc

SEQ ID NO: 1321460 - DNA, 25 bp, Homo sapien
ggcaaataccacaaacaggttgctc

SEQ ID NO: 1321461 - DNA, 25 bp, Homo sapien
ctgggcaaataccacaaacaggttg

SEQ ID NO: 1321462 - DNA, 25 bp, Homo sapien
ctggtagcctatttatcactctgtc

SEQ ID NO: 1321463 - DNA, 25 bp, Homo sapien
tcaagaatctggtagcctatttatc

SEQ ID NO: 1321464 - DNA, 25 bp, Homo sapien
cactctgtcttaaaccaaacaatcc

SEQ ID NO: 1321465 - DNA, 25 bp, Homo sapien
gggttctcttctactaagtgctgac

SEQ ID NO: 1321466 - DNA, 25 bp, Homo sapien
tttggtaacagagattggactggta

SEQ ID NO: 1321467 - DNA, 25 bp, Homo sapien
gccagtaccactggtttggtaacag

SEQ ID NO: 1321468 - DNA, 25 bp, Homo sapien
taaaagcagactcccggctagagga

SEQ ID NO: 1321469 - DNA, 25 bp, Homo sapien
gaaagggatcctgacttgtgctcca

SEQ ID NO: 1321470 - DNA, 25 bp, Homo sapien
aaagagtgaaatgttacatgagaac

SEQ ID NO: 1321471 - DNA, 25 bp, Homo sapien
tgaaatgttacatgagaacataagt

SEQ ID NO: 1321472 - DNA, 25 bp, Homo sapien
acagggtgaaagaacaaatcagtca

SEQ ID NO: 1321473 - DNA, 25 bp, Homo sapien
aagaacaaatcagtcagaacaagca

SEQ ID NO: 1321474 - DNA, 25 bp, Homo sapien
tgagttaccacactgtccaaggaga

SEQ ID NO: 1321475 - DNA, 25 bp, Homo sapien
caaaaggctagttccaggccagggt

SEQ ID NO: 1321476 - DNA, 25 bp, Homo sapien
taagagaaacgatgacccaaccaga

SEQ ID NO: 1321477 - DNA, 25 bp, Homo sapien
aagatgatttgtggcttcccctgag

SEQ ID NO: 1321478 - DNA, 25 bp, Homo sapien
gccaactgttaccatctctgccatt

SEQ ID NO: 1321479 - DNA, 25 bp, Homo sapien
taacatctcatatcctacgtaccca

SEQ ID NO: 1321480 - DNA, 25 bp, Homo sapien
tacgtacccagaaccacaatcacat

SEQ ID NO: 1321481 - DNA, 25 bp, Homo sapien
cttttgctgcctaatttgcctccca

SEQ ID NO: 1321482 - DNA, 25 bp, Homo sapien
gaaacttgctcaaggacgtaagatg

SEQ ID NO: 1321483 - DNA, 25 bp, Homo sapien
tcttccaagtacagttcaagttgct

SEQ ID NO: 1321484 - DNA, 25 bp, Homo sapien
gttaaaaggtgccactacctccaca

SEQ ID NO: 1321485 - DNA, 25 bp, Homo sapien
aaatctgtctattccatagcccggc

SEQ ID NO: 1321486 - DNA, 25 bp, Homo sapien
cttggaaccacggatgacaatttgt

SEQ ID NO: 1321487 - DNA, 25 bp, Homo sapien
ccaggttcttatagacacttggaac

SEQ ID NO: 1321488 - DNA, 25 bp, Homo sapien
aatttgttcccatttgcatggtgag

SEQ ID NO: 1321489 - DNA, 25 bp, Homo sapien
tcccatttgcatggtgagatcctgg

SEQ ID NO: 1321490 - DNA, 25 bp, Homo sapien
ggagggttgcttggcactaggcggg

SEQ ID NO: 1321491 - DNA, 25 bp, Homo sapien
gagggttgcttggcactaggcgggt

SEQ ID NO: 1321492 - DNA, 25 bp, Homo sapien
agggttgcttggcactaggcgggtt

SEQ ID NO: 1321493 - DNA, 25 bp, Homo sapien
tggagggttgcttggcactaggcgg

SEQ ID NO: 1321494 - DNA, 25 bp, Homo sapien
cagcctggcaacagagtgagactcc

SEQ ID NO: 1321495 - DNA, 25 bp, Homo sapien
gaggctgaggttgcagtgagctgag

SEQ ID NO: 1321496 - DNA, 25 bp, Homo sapien
aggcaggagaaaagcttgaatccgg

SEQ ID NO: 1321497 - DNA, 25 bp, Homo sapien
tgagatctcgccaccgcactccagc

SEQ ID NO: 1321498 - DNA, 25 bp, Homo sapien
tccagaaggtgtcccaataggtctg

SEQ ID NO: 1321499 - DNA, 25 bp, Homo sapien
caataggtctgcatggctgatgctg

SEQ ID NO: 1321500 - DNA, 25 bp, Homo sapien
gaaggtgtcccaataggtctgcatg

SEQ ID NO: 1321501 - DNA, 25 bp, Homo sapien
ggtgtcccaataggtctgcatggct

SEQ ID NO: 1321502 - DNA, 25 bp, Homo sapien
tatgtatgccaaataaggaggcact

SEQ ID NO: 1321503 - DNA, 25 bp, Homo sapien
tatgaatggttgatacagaaagctg

SEQ ID NO: 1321504 - DNA, 25 bp, Homo sapien
cagactaaatgtgcgaattcccact

SEQ ID NO: 1321505 - DNA, 25 bp, Homo sapien
gccatcaccatggaacctatcaaat

SEQ ID NO: 1321506 - DNA, 25 bp, Homo sapien
gatcaattccatagtccgggagggt

SEQ ID NO: 1321507 - DNA, 25 bp, Homo sapien
taactaatcgtatgacactgctgtc

SEQ ID NO: 1321508 - DNA, 25 bp, Homo sapien
tacaaccgtcactctagtagcagct

SEQ ID NO: 1321509 - DNA, 25 bp, Homo sapien
gctgtcctagcccaaactttacgat

SEQ ID NO: 1321510 - DNA, 25 bp, Homo sapien
tatgacgaagtcaaatggttgggat

SEQ ID NO: 1321511 - DNA, 25 bp, Homo sapien
catggtccatgataccagctaaggc

SEQ ID NO: 1321512 - DNA, 25 bp, Homo sapien
aagtcaaatggttgggatagaagca

SEQ ID NO: 1321513 - DNA, 25 bp, Homo sapien
cagctaaggctgtcaatatgacgaa

SEQ ID NO: 1321514 - DNA, 25 bp, Homo sapien
ctagatctttgagttgcaaatcaaa

SEQ ID NO: 1321515 - DNA, 25 bp, Homo sapien
tagatctttgagttgcaaatcaaag

SEQ ID NO: 1321516 - DNA, 25 bp, Homo sapien
tgtttagcctgcctgtgaggttcac

SEQ ID NO: 1321517 - DNA, 25 bp, Homo sapien
ttgtttagcctgcctgtgaggttca

SEQ ID NO: 1321518 - DNA, 25 bp, Homo sapien
aagttggacaatgactttggagcat

SEQ ID NO: 1321519 - DNA, 25 bp, Homo sapien
agaagttggacaatgactttggagc

SEQ ID NO: 1321520 - DNA, 25 bp, Homo sapien
acagctagaagttggacaatgactt

SEQ ID NO: 1321521 - DNA, 25 bp, Homo sapien
gctagaagttggacaatgactttgg

SEQ ID NO: 1321522 - DNA, 25 bp, Homo sapien
tttccctctcttttcggcattggtg

SEQ ID NO: 1321523 - DNA, 25 bp, Homo sapien
tccctctcttttcggcattggtgat

SEQ ID NO: 1321524 - DNA, 25 bp, Homo sapien
cggcgtttccctctcttttcggcat

SEQ ID NO: 1321525 - DNA, 25 bp, Homo sapien
gcgtttccctctcttttcggcattg

SEQ ID NO: 1321526 - DNA, 25 bp, Homo sapien
gagcaacaggtaggatgttcacaca

SEQ ID NO: 1321527 - DNA, 25 bp, Homo sapien
cttgagagcaacaggtaggatgttc

SEQ ID NO: 1321528 - DNA, 25 bp, Homo sapien
tgagagcaacaggtaggatgttcac

SEQ ID NO: 1321529 - DNA, 25 bp, Homo sapien
gagagcaacaggtaggatgttcaca

SEQ ID NO: 1321530 - DNA, 25 bp, Homo sapien
gagtatgtcttagtcatcctggcta

SEQ ID NO: 1321531 - DNA, 25 bp, Homo sapien
tgtggcagcgcgaaacaatgccgga

SEQ ID NO: 1321532 - DNA, 25 bp, Homo sapien
cctgaatggccaaaggatatctttc

SEQ ID NO: 1321533 - DNA, 25 bp, Homo sapien
taactgaacattagcttgacaaagc

SEQ ID NO: 1321534 - DNA, 25 bp, Homo sapien
gctggttaccgcttcttagtcacaa

SEQ ID NO: 1321535 - DNA, 25 bp, Homo sapien
tataagtgagctcagagaccagcag

SEQ ID NO: 1321536 - DNA, 25 bp, Homo sapien
caacagtttgtcctcagtgacgggc

SEQ ID NO: 1321537 - DNA, 25 bp, Homo sapien
tagcatgaacaacgatagaaccctg

SEQ ID NO: 1321538 - DNA, 25 bp, Homo sapien
tgcagctacgacctgccagactcaa

SEQ ID NO: 1321539 - DNA, 25 bp, Homo sapien
tcactgcagctacgacctgccagac

SEQ ID NO: 1321540 - DNA, 25 bp, Homo sapien
ctcctgaaccatgtgcaagttgcag

SEQ ID NO: 1321541 - DNA, 25 bp, Homo sapien
aacaaaagttttcactgcgacctgc

SEQ ID NO: 1321542 - DNA, 25 bp, Homo sapien
tgtcccactgatgttttagcaaaag

SEQ ID NO: 1321543 - DNA, 25 bp, Homo sapien
ttctacttgtggcatgacatccaca

SEQ ID NO: 1321544 - DNA, 25 bp, Homo sapien
ggtctcctatgattagatccaggca

SEQ ID NO: 1321545 - DNA, 25 bp, Homo sapien
aacttctttgaagattattaacact

SEQ ID NO: 1321546 - DNA, 25 bp, Homo sapien
gatccaggcaatgcatttctggaag

SEQ ID NO: 1321547 - DNA, 25 bp, Homo sapien
cagaggtgatggtgcatatttctca

SEQ ID NO: 1321548 - DNA, 25 bp, Homo sapien
ctttttatgtaaagaaagctcaaca

SEQ ID NO: 1321549 - DNA, 25 bp, Homo sapien
tatgtaaagaaagctcaacagtgta

SEQ ID NO: 1321550 - DNA, 25 bp, Homo sapien
atgtaaagaaagctcaacagtgtac

SEQ ID NO: 1321551 - DNA, 25 bp, Homo sapien
tttatgtaaagaaagctcaacagtg

SEQ ID NO: 1321552 - DNA, 25 bp, Homo sapien
ttagacaaacctcctttgtcttcca

SEQ ID NO: 1321553 - DNA, 25 bp, Homo sapien
ctttttgagcttggcaatgcgagtc

SEQ ID NO: 1321554 - DNA, 25 bp, Homo sapien
tgagcttggcaatgcgagtcacaga

SEQ ID NO: 1321555 - DNA, 25 bp, Homo sapien
tttaatccaattggtggcaagttct

SEQ ID NO: 1321556 - DNA, 25 bp, Homo sapien
agtagacatcccactcttgacttcc

SEQ ID NO: 1321557 - DNA, 25 bp, Homo sapien
tggagtagacatcccactcttgact

SEQ ID NO: 1321558 - DNA, 25 bp, Homo sapien
tctttctgtggagtagacatcccac

SEQ ID NO: 1321559 - DNA, 25 bp, Homo sapien
tctgtggagtagacatcccactctt

SEQ ID NO: 1321560 - DNA, 25 bp, Homo sapien
ggctctgcttcttgacgacagcagg

SEQ ID NO: 1321561 - DNA, 25 bp, Homo sapien
gcgcaaggcctggatgaactggtta

SEQ ID NO: 1321562 - DNA, 25 bp, Homo sapien
ctgtttggcagcgcaaggcctggat

SEQ ID NO: 1321563 - DNA, 25 bp, Homo sapien
tggctctgcttcttgacgacagcag

SEQ ID NO: 1321564 - DNA, 25 bp, Homo sapien
gtaatgagcaacatacattgttttc

SEQ ID NO: 1321565 - DNA, 25 bp, Homo sapien
gatatgaatttcatcaagttcctta

SEQ ID NO: 1321566 - DNA, 25 bp, Homo sapien
tcatcaagttccttaagtgtaatga

SEQ ID NO: 1321567 - DNA, 25 bp, Homo sapien
atgctttcattgctagtttgatatg

SEQ ID NO: 1321568 - DNA, 25 bp, Homo sapien
ttggatttgcttgtaatacaagttt

SEQ ID NO: 1321569 - DNA, 25 bp, Homo sapien
cttggatttgcttgtaatacaagtt

SEQ ID NO: 1321570 - DNA, 25 bp, Homo sapien
gttttgaagaacactcacctgggaa

SEQ ID NO: 1321571 - DNA, 25 bp, Homo sapien
cgactgatcgatgtgctacttaaaa

SEQ ID NO: 1321572 - DNA, 25 bp, Homo sapien
tggctataacagaagcgactgatcg

SEQ ID NO: 1321573 - DNA, 25 bp, Homo sapien
taagggcagtatagaccttcctgag

SEQ ID NO: 1321574 - DNA, 25 bp, Homo sapien
taggcaacagctgaaatactcccaa

SEQ ID NO: 1321575 - DNA, 25 bp, Homo sapien
caagtgttactgaacgcataggcaa

SEQ ID NO: 1321576 - DNA, 25 bp, Homo sapien
agttacataggagttttggtcacca

SEQ ID NO: 1321577 - DNA, 25 bp, Homo sapien
gatttaagaggccaaaaggcatgta

SEQ ID NO: 1321578 - DNA, 25 bp, Homo sapien
tcctcttcaaactgcaacttttcca

SEQ ID NO: 1321579 - DNA, 25 bp, Homo sapien
cctcctcttcaaactgcaacttttc

SEQ ID NO: 1321580 - DNA, 25 bp, Homo sapien
cctcttcaaactgcaacttttccac

SEQ ID NO: 1321581 - DNA, 25 bp, Homo sapien
ctcctcttcaaactgcaacttttcc

SEQ ID NO: 1321582 - DNA, 25 bp, Homo sapien
gaagctgccattccaatggcgatgg

SEQ ID NO: 1321583 - DNA, 25 bp, Homo sapien
gtgccacctccactacgttggctca

SEQ ID NO: 1321584 - DNA, 25 bp, Homo sapien
agcacaccctttccgggagtggaag

SEQ ID NO: 1321585 - DNA, 25 bp, Homo sapien
cattccaatggcgatggttccctgt

SEQ ID NO: 1321586 - DNA, 25 bp, Homo sapien
tgacctcgggaagagctatgccaac

SEQ ID NO: 1321587 - DNA, 25 bp, Homo sapien
gctatgccaaccagatgggttccct

SEQ ID NO: 1321588 - DNA, 25 bp, Homo sapien
gccatcatgacctcgggaagagcta

SEQ ID NO: 1321589 - DNA, 25 bp, Homo sapien
cgggaagagctatgccaaccagatg

SEQ ID NO: 1321590 - DNA, 25 bp, Homo sapien
aacagggagggctggtgccaagaat

SEQ ID NO: 1321591 - DNA, 25 bp, Homo sapien
ccagagtccacagaatcatggcgga

SEQ ID NO: 1321592 - DNA, 25 bp, Homo sapien
cttagagacaccagagtccacagaa

SEQ ID NO: 1321593 - DNA, 25 bp, Homo sapien
caccagagtccacagaatcatggcg

SEQ ID NO: 1321594 - DNA, 25 bp, Homo sapien
gaaaaggactaattagattgtttgc

SEQ ID NO: 1321595 - DNA, 25 bp, Homo sapien
agaaaaggactaattagattgtttg

SEQ ID NO: 1321596 - DNA, 25 bp, Homo sapien
gtgctctccgtgtttttcgaaggtg

SEQ ID NO: 1321597 - DNA, 25 bp, Homo sapien
catcagaggaattatgtcgacggcg

SEQ ID NO: 1321598 - DNA, 25 bp, Homo sapien
ccgtgtttttcgaaggtggcagtag

SEQ ID NO: 1321599 - DNA, 25 bp, Homo sapien
tcgacggcggcttactccaaatcta

SEQ ID NO: 1321600 - DNA, 25 bp, Homo sapien
caattgtttgcatgaaaggaggcgg

SEQ ID NO: 1321601 - DNA, 25 bp, Homo sapien
gcctcggcctatggagtagctagaa

SEQ ID NO: 1321602 - DNA, 25 bp, Homo sapien
caaaggctgaggttctttactccgc

SEQ ID NO: 1321603 - DNA, 25 bp, Homo sapien
ctaagggtacccacaggtgcctaat

SEQ ID NO: 1321604 - DNA, 25 bp, Homo sapien
gaaatgatgtttagagccgggtgtg

SEQ ID NO: 1321605 - DNA, 25 bp, Homo sapien
gctccaagctttgggtcagattagg

SEQ ID NO: 1321606 - DNA, 25 bp, Homo sapien
taggccaattatgaggtcctgcaaa

SEQ ID NO: 1321607 - DNA, 25 bp, Homo sapien
tcagattaggccaattatgaggtcc

SEQ ID NO: 1321608 - DNA, 25 bp, Homo sapien
ccccaaaccctctcatatttgagaa

SEQ ID NO: 1321609 - DNA, 25 bp, Homo sapien
tttgagaagttactacaggaatgga

SEQ ID NO: 1321610 - DNA, 25 bp, Homo sapien
accctctcatatttgagaagttact

SEQ ID NO: 1321611 - DNA, 25 bp, Homo sapien
agaagttactacaggaatggagaac

SEQ ID NO: 1321612 - DNA, 25 bp, Homo sapien
tagctgactgtggtgttgagaaatt

SEQ ID NO: 1321613 - DNA, 25 bp, Homo sapien
caggaacaaaatcatgctgcgccat

SEQ ID NO: 1321614 - DNA, 25 bp, Homo sapien
tgttgagaaatttagccaagcagga

SEQ ID NO: 1321615 - DNA, 25 bp, Homo sapien
actgtggtgttgagaaatttagcca

SEQ ID NO: 1321616 - DNA, 25 bp, Homo sapien
ctcctttcagtaaggtgaggcatcc

SEQ ID NO: 1321617 - DNA, 25 bp, Homo sapien
tctcctttcagtaaggtgaggcatc

SEQ ID NO: 1321618 - DNA, 25 bp, Homo sapien
gtctcctttcagtaaggtgaggcat

SEQ ID NO: 1321619 - DNA, 25 bp, Homo sapien
ggtgcttaagtaacctggccggcag

SEQ ID NO: 1321620 - DNA, 25 bp, Homo sapien
ttctgaactcgagtcggccagctgg

SEQ ID NO: 1321621 - DNA, 25 bp, Homo sapien
gccggcagcacgacttatgatgaag

SEQ ID NO: 1321622 - DNA, 25 bp, Homo sapien
tatgatgaagcacgaagaagccagg

SEQ ID NO: 1321623 - DNA, 25 bp, Homo sapien
gagacagtctcactccatcacctag

SEQ ID NO: 1321624 - DNA, 25 bp, Homo sapien
agacagtctcactccatcacctagg

SEQ ID NO: 1321625 - DNA, 25 bp, Homo sapien
ctggagtacagtggtgtgatctcag

SEQ ID NO: 1321626 - DNA, 25 bp, Homo sapien
tgatctcagctcactgcaacctctg

SEQ ID NO: 1321627 - DNA, 25 bp, Homo sapien
agcaaatctcgtgcctcaccttctc

SEQ ID NO: 1321628 - DNA, 25 bp, Homo sapien
aagcaaatctcgtgcctcaccttct

SEQ ID NO: 1321629 - DNA, 25 bp, Homo sapien
tttaaatggctgtttactgctggca

SEQ ID NO: 1321630 - DNA, 25 bp, Homo sapien
cattatttcctttaaatggctgttt

SEQ ID NO: 1321631 - DNA, 25 bp, Homo sapien
aatttgtctatagattccacaaata

SEQ ID NO: 1321632 - DNA, 25 bp, Homo sapien
tactgctggcataaattatatccag

SEQ ID NO: 1321633 - DNA, 25 bp, Homo sapien
gacattacatcattagaccagcagt

SEQ ID NO: 1321634 - DNA, 25 bp, Homo sapien
taccctgtgattacagatggtccct

SEQ ID NO: 1321635 - DNA, 25 bp, Homo sapien
gagagcagcaatgagtgacaaccac

SEQ ID NO: 1321636 - DNA, 25 bp, Homo sapien
taaggactgacacaggattgcctat

SEQ ID NO: 1321637 - DNA, 25 bp, Homo sapien
taaggagagttaaaggtgagacacc

SEQ ID NO: 1321638 - DNA, 25 bp, Homo sapien
tttcacccagcataaggagagttaa

SEQ ID NO: 1321639 - DNA, 25 bp, Homo sapien
cacccagcataaggagagttaaagg

SEQ ID NO: 1321640 - DNA, 25 bp, Homo sapien
ccagcataaggagagttaaaggtga

SEQ ID NO: 1321641 - DNA, 25 bp, Homo sapien
aagagccgcaggtgagcgttccgac

SEQ ID NO: 1321642 - DNA, 25 bp, Homo sapien
gccaaagagccgcaggtgagcgttc

SEQ ID NO: 1321643 - DNA, 25 bp, Homo sapien
ctggagaggagccaaagagccgcag

SEQ ID NO: 1321644 - DNA, 25 bp, Homo sapien
agccgcaggtgagcgttccgacccg

SEQ ID NO: 1321645 - DNA, 25 bp, Homo sapien
ccagcttgtcgacccggcagaggcg

SEQ ID NO: 1321646 - DNA, 25 bp, Homo sapien
gatatggccagggactagacgctgc

SEQ ID NO: 1321647 - DNA, 25 bp, Homo sapien
tagacgctgcgtctgaggacgcgtc

SEQ ID NO: 1321648 - DNA, 25 bp, Homo sapien
agaggcggctagtccacaaccataa

SEQ ID NO: 1321649 - DNA, 25 bp, Homo sapien
ctctacaaggacttgcaaaccggtt

SEQ ID NO: 1321650 - DNA, 25 bp, Homo sapien
tgcgcgtcgttgaaactccagtccc

SEQ ID NO: 1321651 - DNA, 25 bp, Homo sapien
ttccgctccttacttctcgtgtgcg

SEQ ID NO: 1321652 - DNA, 25 bp, Homo sapien
gctacccgctgggagtagtagttcc

SEQ ID NO: 1321653 - DNA, 25 bp, Homo sapien
ccgcgctacccgctgggagtagtag

SEQ ID NO: 1321654 - DNA, 25 bp, Homo sapien
cgaagggcgggattccggcgagagc

SEQ ID NO: 1321655 - DNA, 25 bp, Homo sapien
cgcccaagcgaagggcgggattccg

SEQ ID NO: 1321656 - DNA, 25 bp, Homo sapien
gattccggcgagagcctgcgcttgc

SEQ ID NO: 1321657 - DNA, 25 bp, Homo sapien
ctgcgcttgcgacagtgccgtttct

SEQ ID NO: 1321658 - DNA, 25 bp, Homo sapien
ctgaagtctcattgggtatcgcact

SEQ ID NO: 1321659 - DNA, 25 bp, Homo sapien
aagtctcattgggtatcgcactact

SEQ ID NO: 1321660 - DNA, 25 bp, Homo sapien
attgggtatcgcactactggaaggg

SEQ ID NO: 1321661 - DNA, 25 bp, Homo sapien
ctcattgggtatcgcactactggaa

SEQ ID NO: 1321662 - DNA, 25 bp, Homo sapien
caaggaccgttcaacatctggattc

SEQ ID NO: 1321663 - DNA, 25 bp, Homo sapien
agaacttcaaggaccgttcaacatc

SEQ ID NO: 1321664 - DNA, 25 bp, Homo sapien
catctggattcaactagaaattaag

SEQ ID NO: 1321665 - DNA, 25 bp, Homo sapien
caacatctggattcaactagaaatt

SEQ ID NO: 1321666 - DNA, 25 bp, Homo sapien
gtatgcttcgcttcatccagaagtt

SEQ ID NO: 1321667 - DNA, 25 bp, Homo sapien
agaaacatgcccctgattcagtgcc

SEQ ID NO: 1321668 - DNA, 25 bp, Homo sapien
agaactacctggcatcttcctgaac

SEQ ID NO: 1321669 - DNA, 25 bp, Homo sapien
gaaaaccagtactcaagcaatttgc

SEQ ID NO: 1321670 - DNA, 25 bp, Homo sapien
actttgcccgtgtacaatgaaaggc

SEQ ID NO: 1321671 - DNA, 25 bp, Homo sapien
aaaaaatacggtcctggctctcaag

SEQ ID NO: 1321672 - DNA, 25 bp, Homo sapien
gagcattaaatcagaccgtagaagg

SEQ ID NO: 1321673 - DNA, 25 bp, Homo sapien
cacagggtgcttactataggagcat

SEQ ID NO: 1321674 - DNA, 25 bp, Homo sapien
ccttcgttgctccaccactggtcat

SEQ ID NO: 1321675 - DNA, 25 bp, Homo sapien
tggcaggactaatccccttcgttgc

SEQ ID NO: 1321676 - DNA, 25 bp, Homo sapien
aaagccagcattatgtgtaactctg

SEQ ID NO: 1321677 - DNA, 25 bp, Homo sapien
gtgtaactctggcaggactaatccc

SEQ ID NO: 1321678 - DNA, 25 bp, Homo sapien
taaagccctgaggatagtagtcact

SEQ ID NO: 1321679 - DNA, 25 bp, Homo sapien
cagtaataatgggtatgggagtagc

SEQ ID NO: 1321680 - DNA, 25 bp, Homo sapien
gcctggccgcctgaccatctgggaa

SEQ ID NO: 1321681 - DNA, 25 bp, Homo sapien
tatttctgaaagacttagtgaagcc

SEQ ID NO: 1321682 - DNA, 25 bp, Homo sapien
ttggcatggtacagataacaacttg

SEQ ID NO: 1321683 - DNA, 25 bp, Homo sapien
ttaccaccaaacacataatagctgg

SEQ ID NO: 1321684 - DNA, 25 bp, Homo sapien
cactagtacatataaattaggaaag

SEQ ID NO: 1321685 - DNA, 25 bp, Homo sapien
aagctggagccatcttgatattcta

SEQ ID NO: 1321686 - DNA, 25 bp, Homo sapien
gcaacaccttagattttcacttgaa

SEQ ID NO: 1321687 - DNA, 25 bp, Homo sapien
tgaaattcctagtctcaccaaaaag

SEQ ID NO: 1321688 - DNA, 25 bp, Homo sapien
gaaaacgtagtctctaatcactcta

SEQ ID NO: 1321689 - DNA, 25 bp, Homo sapien
tcactctacttaaggtggagaaaaa

SEQ ID NO: 1321690 - DNA, 25 bp, Homo sapien
gcaggatacttagaagcatatcgga

SEQ ID NO: 1321691 - DNA, 25 bp, Homo sapien
gtttggtaacccagaatgccactga

SEQ ID NO: 1321692 - DNA, 25 bp, Homo sapien
tgtgcaatcctactacagtttggta

SEQ ID NO: 1321693 - DNA, 25 bp, Homo sapien
aacaatcttgttagcctggtgaggt

SEQ ID NO: 1321694 - DNA, 25 bp, Homo sapien
aaaaccaatcttgtcattacctagg

SEQ ID NO: 1321695 - DNA, 25 bp, Homo sapien
cacctattttcagggatcttcggga

SEQ ID NO: 1321696 - DNA, 25 bp, Homo sapien
cagttgctactagacaatgagaaat

SEQ ID NO: 1321697 - DNA, 25 bp, Homo sapien
ttctgccacagctgtgcaaagcaca

SEQ ID NO: 1321698 - DNA, 25 bp, Homo sapien
cagagaagggaacatagagcttcct

SEQ ID NO: 1321699 - DNA, 25 bp, Homo sapien
tttgacatcttacagatctctacac

SEQ ID NO: 1321700 - DNA, 25 bp, Homo sapien
tgtgacccttcagacgttcaggatg

SEQ ID NO: 1321701 - DNA, 25 bp, Homo sapien
gaaggtatagttgtagactaaacca

SEQ ID NO: 1321702 - DNA, 25 bp, Homo sapien
gaagtacctacaatttagccctcta

SEQ ID NO: 1321703 - DNA, 25 bp, Homo sapien
attttactgtatgcagccgggcacg

SEQ ID NO: 1321704 - DNA, 25 bp, Homo sapien
tagccctctacatccaagcagtagc

SEQ ID NO: 1321705 - DNA, 25 bp, Homo sapien
ccaactggccagtagaaataactta

SEQ ID NO: 1321706 - DNA, 25 bp, Homo sapien
tggagaattctacagcataaatggc

SEQ ID NO: 1321707 - DNA, 25 bp, Homo sapien
ggagttgtctacacttaaactggag

SEQ ID NO: 1321708 - DNA, 25 bp, Homo sapien
gaagtagctaaagggactatttgcc

SEQ ID NO: 1321709 - DNA, 25 bp, Homo sapien
gcctgctggactgtatagcccatta

SEQ ID NO: 1321710 - DNA, 25 bp, Homo sapien
cacagaatcagagggtcttatcacc

SEQ ID NO: 1321711 - DNA, 25 bp, Homo sapien
tgctttgcaaaaggtcaggtcctgc

SEQ ID NO: 1321712 - DNA, 25 bp, Homo sapien
tgcgcccagcctcgttagtcattta

SEQ ID NO: 1321713 - DNA, 25 bp, Homo sapien
tccttgtgctctgttatgctttata

SEQ ID NO: 1321714 - DNA, 25 bp, Homo sapien
gatcgacctccagaaacatacagaa

SEQ ID NO: 1321715 - DNA, 25 bp, Homo sapien
cacaacgactggtgatcatgttacc

SEQ ID NO: 1321716 - DNA, 25 bp, Homo sapien
aaatcatggctggaagatcgacctc

SEQ ID NO: 1321717 - DNA, 25 bp, Homo sapien
cagaagaccattgactgccacaaca

SEQ ID NO: 1321718 - DNA, 25 bp, Homo sapien
taacaaagggaccttagggctcatc

SEQ ID NO: 1321719 - DNA, 25 bp, Homo sapien
ccacataggtactaggatagtgcca

SEQ ID NO: 1321720 - DNA, 25 bp, Homo sapien
gcacatcacaaaactgacacaactg

SEQ ID NO: 1321721 - DNA, 25 bp, Homo sapien
cattctcaagaagatccatttctgg

SEQ ID NO: 1321722 - DNA, 25 bp, Homo sapien
aaaatgcatctagttttaatccaga

SEQ ID NO: 1321723 - DNA, 25 bp, Homo sapien
ccttatgctttacaacaagacatga

SEQ ID NO: 1321724 - DNA, 25 bp, Homo sapien
gataaactcaaataggatcatggag

SEQ ID NO: 1321725 - DNA, 25 bp, Homo sapien
taaaacttgtcagaaatgagaatca

SEQ ID NO: 1321726 - DNA, 25 bp, Homo sapien
tgaaaagctgatcctgaaatgcgta

SEQ ID NO: 1321727 - DNA, 25 bp, Homo sapien
gaaattcaagttacccaggagagcc

SEQ ID NO: 1321728 - DNA, 25 bp, Homo sapien
tatgagtgcagcaaggtcgcagaat

SEQ ID NO: 1321729 - DNA, 25 bp, Homo sapien
gaatctctgtcaaaaacccaactgg

SEQ ID NO: 1321730 - DNA, 25 bp, Homo sapien
accgcaatctcttccggcagctgaa

SEQ ID NO: 1321731 - DNA, 25 bp, Homo sapien
aatcttggcccttactatcgatgag

SEQ ID NO: 1321732 - DNA, 25 bp, Homo sapien
tgtgggacatggacaaccgcaatct

SEQ ID NO: 1321733 - DNA, 25 bp, Homo sapien
gcttgcttagctacttgatctgcga

SEQ ID NO: 1321734 - DNA, 25 bp, Homo sapien
tctgctaaaaggcaagcgcaaaagg

SEQ ID NO: 1321735 - DNA, 25 bp, Homo sapien
ttgcactagccagtatgacccgtct

SEQ ID NO: 1321736 - DNA, 25 bp, Homo sapien
taatagcccggagatcttgcactag

SEQ ID NO: 1321737 - DNA, 25 bp, Homo sapien
tttgaccggagtgagggtcctccca

SEQ ID NO: 1321738 - DNA, 25 bp, Homo sapien
tagctcatctgaggcacgactggat

SEQ ID NO: 1321739 - DNA, 25 bp, Homo sapien
cacgtggccctatggcagcacataa

SEQ ID NO: 1321740 - DNA, 25 bp, Homo sapien
gactggatacagattcactttcaag

SEQ ID NO: 1321741 - DNA, 25 bp, Homo sapien
ggccagcaaaggagagatagaatct

SEQ ID NO: 1321742 - DNA, 25 bp, Homo sapien
tcctgtaaattagaagtttggtcta

SEQ ID NO: 1321743 - DNA, 25 bp, Homo sapien
gaaagaagcctggtaccagatgctg

SEQ ID NO: 1321744 - DNA, 25 bp, Homo sapien
tatggactttaaagcaggaccttag

SEQ ID NO: 1321745 - DNA, 25 bp, Homo sapien
tattcttctgtgtcgaactcccagg

SEQ ID NO: 1321746 - DNA, 25 bp, Homo sapien
gactttgggtgccttgatgttagca

SEQ ID NO: 1321747 - DNA, 25 bp, Homo sapien
gaagctctcaaattatttattttga

SEQ ID NO: 1321748 - DNA, 25 bp, Homo sapien
ttattttgaattcaagtgaagatga

SEQ ID NO: 1321749 - DNA, 25 bp, Homo sapien
taatttgaagctctcaaattattta

SEQ ID NO: 1321750 - DNA, 25 bp, Homo sapien
tatttattttgaattcaagtgaaga

SEQ ID NO: 1321751 - DNA, 25 bp, Homo sapien
tcccgctccatcgtctgcttgatga

SEQ ID NO: 1321752 - DNA, 25 bp, Homo sapien
gtccctgatactgttatgtaactca

SEQ ID NO: 1321753 - DNA, 25 bp, Homo sapien
tcagattacttgcatttagaatgtc

SEQ ID NO: 1321754 - DNA, 25 bp, Homo sapien
tccctgatactgttatgtaactcaa

SEQ ID NO: 1321755 - DNA, 25 bp, Homo sapien
aagatgattttgaaaccattgcagt

SEQ ID NO: 1321756 - DNA, 25 bp, Homo sapien
gttagttcacaagcatctttgtttg

SEQ ID NO: 1321757 - DNA, 25 bp, Homo sapien
ttaagtacctttcagttagttcaca

SEQ ID NO: 1321758 - DNA, 25 bp, Homo sapien
ttgcagtttttcaccaataagattg

SEQ ID NO: 1321759 - DNA, 25 bp, Homo sapien
tttaacttggattgatcttgaatat

SEQ ID NO: 1321760 - DNA, 25 bp, Homo sapien
aagtttaacttggattgatcttgaa

SEQ ID NO: 1321761 - DNA, 25 bp, Homo sapien
gtttaacttggattgatcttgaata

SEQ ID NO: 1321762 - DNA, 25 bp, Homo sapien
acagtttcagatcttcggcttctct

SEQ ID NO: 1321763 - DNA, 25 bp, Homo sapien
cctgattgtgtagcttttctcccca

SEQ ID NO: 1321764 - DNA, 25 bp, Homo sapien
ctccccaacttgctgtgaatattcc

SEQ ID NO: 1321765 - DNA, 25 bp, Homo sapien
ttctccccaacttgctgtgaatatt

SEQ ID NO: 1321766 - DNA, 25 bp, Homo sapien
ctgattgtgtagcttttctccccaa

SEQ ID NO: 1321767 - DNA, 25 bp, Homo sapien
ggatggatttccacggatgcgcttc

SEQ ID NO: 1321768 - DNA, 25 bp, Homo sapien
gtgccttagttgtcacagaatgtac

SEQ ID NO: 1321769 - DNA, 25 bp, Homo sapien
ccttagttgtcacagaatgtactga

SEQ ID NO: 1321770 - DNA, 25 bp, Homo sapien
gaagtcggaagggatggatttccac

SEQ ID NO: 1321771 - DNA, 25 bp, Homo sapien
tccactgtttctcgtcctcatagcc

SEQ ID NO: 1321772 - DNA, 25 bp, Homo sapien
ctgtttctcgtcctcatagcctgat

SEQ ID NO: 1321773 - DNA, 25 bp, Homo sapien
cactgtttctcgtcctcatagcctg

SEQ ID NO: 1321774 - DNA, 25 bp, Homo sapien
gctccactgtttctcgtcctcatag

SEQ ID NO: 1321775 - DNA, 25 bp, Homo sapien
gtcatttaagtcttggtcagaagga

SEQ ID NO: 1321776 - DNA, 25 bp, Homo sapien
tgtcatttaagtcttggtcagaagg

SEQ ID NO: 1321777 - DNA, 25 bp, Homo sapien
catttaagtcttggtcagaaggagg

SEQ ID NO: 1321778 - DNA, 25 bp, Homo sapien
tcatttaagtcttggtcagaaggag

SEQ ID NO: 1321779 - DNA, 25 bp, Homo sapien
ttataaaggcccgtttcctctgata

SEQ ID NO: 1321780 - DNA, 25 bp, Homo sapien
aaaggcccgtttcctctgatatatc

SEQ ID NO: 1321781 - DNA, 25 bp, Homo sapien
gcgaatcctatggtgtgctcattcc

SEQ ID NO: 1321782 - DNA, 25 bp, Homo sapien
cttagaatggttctcccaagagcga

SEQ ID NO: 1321783 - DNA, 25 bp, Homo sapien
tgactcacaggttaattctttggac

SEQ ID NO: 1321784 - DNA, 25 bp, Homo sapien
tgatgtacatggatggtccacgtga

SEQ ID NO: 1321785 - DNA, 25 bp, Homo sapien
ggaaccaagcactgatgtacatgga

SEQ ID NO: 1321786 - DNA, 25 bp, Homo sapien
aggtgtacttctctgatgtgactca

SEQ ID NO: 1321787 - DNA, 25 bp, Homo sapien
ctggaggtaaaagtaatatcttctt

SEQ ID NO: 1321788 - DNA, 25 bp, Homo sapien
ttggtcagataaaggatgtaaaata

SEQ ID NO: 1321789 - DNA, 25 bp, Homo sapien
taaaagtaatatcttctttggtcag

SEQ ID NO: 1321790 - DNA, 25 bp, Homo sapien
taatatcttctttggtcagataaag

SEQ ID NO: 1321791 - DNA, 25 bp, Homo sapien
accaagccactttgaatatgtttct

SEQ ID NO: 1321792 - DNA, 25 bp, Homo sapien
aaccaagccactttgaatatgtttc

SEQ ID NO: 1321793 - DNA, 25 bp, Homo sapien
aaaccaagccactttgaatatgttt

SEQ ID NO: 1321794 - DNA, 25 bp, Homo sapien
ttgtggtaccttgtcagaatctcta

SEQ ID NO: 1321795 - DNA, 25 bp, Homo sapien
catttagtgctgattgtgctttggc

SEQ ID NO: 1321796 - DNA, 25 bp, Homo sapien
cactgccgtggaggtaaggaaactt

SEQ ID NO: 1321797 - DNA, 25 bp, Homo sapien
taccctttgccgaggagctgaagta

SEQ ID NO: 1321798 - DNA, 25 bp, Homo sapien
ggctggtgaacaatgtgggcatgct

SEQ ID NO: 1321799 - DNA, 25 bp, Homo sapien
tggggctggtgaacaatgtgggcat

SEQ ID NO: 1321800 - DNA, 25 bp, Homo sapien
ggggctggtgaacaatgtgggcatg

SEQ ID NO: 1321801 - DNA, 25 bp, Homo sapien
gggctggtgaacaatgtgggcatgc

SEQ ID NO: 1321802 - DNA, 25 bp, Homo sapien
tacagacatgcaccagaagcctggc

SEQ ID NO: 1321803 - DNA, 25 bp, Homo sapien
attttaatctagggtgttctcacct

SEQ ID NO: 1321804 - DNA, 25 bp, Homo sapien
ctgcaaagtttattttaatctaggg

SEQ ID NO: 1321805 - DNA, 25 bp, Homo sapien
caggctgtactgcaaagtttatttt

SEQ ID NO: 1321806 - DNA, 25 bp, Homo sapien
catgcttgttatgtagactctggga

SEQ ID NO: 1321807 - DNA, 25 bp, Homo sapien
tgagaatgcatctagaaggcagcag

SEQ ID NO: 1321808 - DNA, 25 bp, Homo sapien
tcatgtccctagatgccacaagagg

SEQ ID NO: 1321809 - DNA, 25 bp, Homo sapien
ttcgttgtgaagattgtttgcccag

SEQ ID NO: 1321810 - DNA, 25 bp, Homo sapien
gaacctttggcagaaatatcacaaa

SEQ ID NO: 1321811 - DNA, 25 bp, Homo sapien
tttgaagattacagaccagtttatt

SEQ ID NO: 1321812 - DNA, 25 bp, Homo sapien
gataggatgtcctttaatttgaatt

SEQ ID NO: 1321813 - DNA, 25 bp, Homo sapien
cctcaacttttataacctcaatact

SEQ ID NO: 1321814 - DNA, 25 bp, Homo sapien
tattttgtaccctcactagcccttg

SEQ ID NO: 1321815 - DNA, 25 bp, Homo sapien
tgttgatggtagacatggttgccca

SEQ ID NO: 1321816 - DNA, 25 bp, Homo sapien
tacttaggttcactgctcccgggaa

SEQ ID NO: 1321817 - DNA, 25 bp, Homo sapien
tctttgaaagtgagaactctggccg

SEQ ID NO: 1321818 - DNA, 25 bp, Homo sapien
taatagagttttacacttggcaaca

SEQ ID NO: 1321819 - DNA, 25 bp, Homo sapien
tttcttcagtaaagctacctgtggt

SEQ ID NO: 1321820 - DNA, 25 bp, Homo sapien
tgagtaactcaaagaggtgctgaga

SEQ ID NO: 1321821 - DNA, 25 bp, Homo sapien
gctgagaattcggtgcttgtacacc

SEQ ID NO: 1321822 - DNA, 25 bp, Homo sapien
ggtccacagttactcagcaatcagg

SEQ ID NO: 1321823 - DNA, 25 bp, Homo sapien
tccataggctaccatagagctgaag

SEQ ID NO: 1321824 - DNA, 25 bp, Homo sapien
tggtttgcccagaccaaagctggtc

SEQ ID NO: 1321825 - DNA, 25 bp, Homo sapien
gcagcccactggatgtagttgcagc

SEQ ID NO: 1321826 - DNA, 25 bp, Homo sapien
gctaaaatcgattcttaaagtggaa

SEQ ID NO: 1321827 - DNA, 25 bp, Homo sapien
tctcctccagctgctaaaatcgatt

SEQ ID NO: 1321828 - DNA, 25 bp, Homo sapien
agtggaaaaagcctgcttgctaggc

SEQ ID NO: 1321829 - DNA, 25 bp, Homo sapien
gctaggctgctagattttctgtcag

SEQ ID NO: 1321830 - DNA, 25 bp, Homo sapien
gtctgggagggtcccaacacaaagc

SEQ ID NO: 1321831 - DNA, 25 bp, Homo sapien
cataaaaatcaggtccggccaaaga

SEQ ID NO: 1321832 - DNA, 25 bp, Homo sapien
gctgctacaaaactgccctcacttt

SEQ ID NO: 1321833 - DNA, 25 bp, Homo sapien
gaaaacatgtgtaggacaaggtctg

SEQ ID NO: 1321834 - DNA, 25 bp, Homo sapien
ctgtctctaaaccgcattttttgtt

SEQ ID NO: 1321835 - DNA, 25 bp, Homo sapien
gtcactcttcgacagacattcccaa

SEQ ID NO: 1321836 - DNA, 25 bp, Homo sapien
cagctaagggtatgtcacctccctt

SEQ ID NO: 1321837 - DNA, 25 bp, Homo sapien
tggttttatgagtcctaacggctcc

SEQ ID NO: 1321838 - DNA, 25 bp, Homo sapien
ggcagcctataactgtttcccattg

SEQ ID NO: 1321839 - DNA, 25 bp, Homo sapien
tgatcagtggtaggtactatgcccc

SEQ ID NO: 1321840 - DNA, 25 bp, Homo sapien
tctcatagattacggaagcggctgt

SEQ ID NO: 1321841 - DNA, 25 bp, Homo sapien
gatgcttgagctgatcccctaggta

SEQ ID NO: 1321842 - DNA, 25 bp, Homo sapien
ttttgacagtaaggccaccgatggg

SEQ ID NO: 1321843 - DNA, 25 bp, Homo sapien
gggccatcaaaagcatcgggatttg

SEQ ID NO: 1321844 - DNA, 25 bp, Homo sapien
catttcttgcactcagacctgtgta

SEQ ID NO: 1321845 - DNA, 25 bp, Homo sapien
gcatcgggatttggcattggttcca

SEQ ID NO: 1321846 - DNA, 25 bp, Homo sapien
cagaaggcaggacgttccatgccga

SEQ ID NO: 1321847 - DNA, 25 bp, Homo sapien
caagtcatgggcgtagagaagcacc

SEQ ID NO: 1321848 - DNA, 25 bp, Homo sapien
tagtatgtcagtgcagcggcatggc

SEQ ID NO: 1321849 - DNA, 25 bp, Homo sapien
cagatcagtggtaaggacgcaggca

SEQ ID NO: 1321850 - DNA, 25 bp, Homo sapien
ggtgtgcccaacagcaattagcttg

SEQ ID NO: 1321851 - DNA, 25 bp, Homo sapien
caagcctgacgttgagggagtcgtt

SEQ ID NO: 1321852 - DNA, 25 bp, Homo sapien
ctgcaaagccatagccccgagcagt

SEQ ID NO: 1321853 - DNA, 25 bp, Homo sapien
ccaaggatgtctgctggtaatggag

SEQ ID NO: 1321854 - DNA, 25 bp, Homo sapien
tgctgtagatcacacagtgcttcac

SEQ ID NO: 1321855 - DNA, 25 bp, Homo sapien
gctagggtacagtggcttgattaca

SEQ ID NO: 1321856 - DNA, 25 bp, Homo sapien
acgaaagctagggtacagtggcttg

SEQ ID NO: 1321857 - DNA, 25 bp, Homo sapien
agggtacagtggcttgattacagct

SEQ ID NO: 1321858 - DNA, 25 bp, Homo sapien
atcacgaaagctagggtacagtggc

SEQ ID NO: 1321859 - DNA, 25 bp, Homo sapien
tgagcgactgggcttactgccttcc

SEQ ID NO: 1321860 - DNA, 25 bp, Homo sapien
aggctgccacccaataacctgagtg

SEQ ID NO: 1321861 - DNA, 25 bp, Homo sapien
cagtttatgtaaggactgcagccaa

SEQ ID NO: 1321862 - DNA, 25 bp, Homo sapien
tctgactccatgatacaagtagagc

SEQ ID NO: 1321863 - DNA, 25 bp, Homo sapien
cacagagcaagcatagcatcctttc

SEQ ID NO: 1321864 - DNA, 25 bp, Homo sapien
aagtcctctgcttgtactcgattga

SEQ ID NO: 1321865 - DNA, 25 bp, Homo sapien
gattgatatcctcaacaaaccaggt

SEQ ID NO: 1321866 - DNA, 25 bp, Homo sapien
taagaatgcaccatcaggtttccca

SEQ ID NO: 1321867 - DNA, 25 bp, Homo sapien
acattcaggcgtttctgtctcactc

SEQ ID NO: 1321868 - DNA, 25 bp, Homo sapien
ttcaggcgtttctgtctcactcctt

SEQ ID NO: 1321869 - DNA, 25 bp, Homo sapien
agcatcctcattcttaattcccagc

SEQ ID NO: 1321870 - DNA, 25 bp, Homo sapien
gtctcactcctttgtgattgagcca

SEQ ID NO: 1321871 - DNA, 25 bp, Homo sapien
tgttgatctcggatctttcgcagct

SEQ ID NO: 1321872 - DNA, 25 bp, Homo sapien
tatttctcggttgtccaaagcttga

SEQ ID NO: 1321873 - DNA, 25 bp, Homo sapien
gaatctcacccagacgtgatttcaa

SEQ ID NO: 1321874 - DNA, 25 bp, Homo sapien
tcaggtcaggtttgatgctattcat

SEQ ID NO: 1321875 - DNA, 25 bp, Homo sapien
catggattcagatggtacaagcccc

SEQ ID NO: 1321876 - DNA, 25 bp, Homo sapien
tattagcaccctgatgttccctgga

SEQ ID NO: 1321877 - DNA, 25 bp, Homo sapien
gatcctactgggtgagcacggtcct

SEQ ID NO: 1321878 - DNA, 25 bp, Homo sapien
aaaggagtttcgtgagctgggccca

SEQ ID NO: 1321879 - DNA, 25 bp, Homo sapien
cttttcattcccctctctgcgaaat

SEQ ID NO: 1321880 - DNA, 25 bp, Homo sapien
ccctctctgcgaaatcgctcaatat

SEQ ID NO: 1321881 - DNA, 25 bp, Homo sapien
tgcgaaatcgctcaatatattcttt

SEQ ID NO: 1321882 - DNA, 25 bp, Homo sapien
tttcattcccctctctgcgaaatcg

SEQ ID NO: 1321883 - DNA, 25 bp, Homo sapien
tgaatcacaattccccaaaaatctt

SEQ ID NO: 1321884 - DNA, 25 bp, Homo sapien
tataacacctagtctttcaaaagtc

SEQ ID NO: 1321885 - DNA, 25 bp, Homo sapien
ggcaataaatatgcataagggtcta

SEQ ID NO: 1321886 - DNA, 25 bp, Homo sapien
tcttctccttgtttaggaggactaa

SEQ ID NO: 1321887 - DNA, 25 bp, Homo sapien
tctagtatattcttcatacagccta

SEQ ID NO: 1321888 - DNA, 25 bp, Homo sapien
tacagcctatcatactctttactct

SEQ ID NO: 1321889 - DNA, 25 bp, Homo sapien
tttacctactgcatcaatattatct

SEQ ID NO: 1321890 - DNA, 25 bp, Homo sapien
tcttgcagttttttacctactgcat

SEQ ID NO: 1321891 - DNA, 25 bp, Homo sapien
caagtttgggattgtactgagcaag

SEQ ID NO: 1321892 - DNA, 25 bp, Homo sapien
gccatatttaccatcccggtgatag

SEQ ID NO: 1321893 - DNA, 25 bp, Homo sapien
ctgttggtatctggacactgggtac

SEQ ID NO: 1321894 - DNA, 25 bp, Homo sapien
gctccaccacggaattaaatgtcag

SEQ ID NO: 1321895 - DNA, 25 bp, Homo sapien
catttttgttgaggcatctcggacc

SEQ ID NO: 1321896 - DNA, 25 bp, Homo sapien
ctcggaccaagaaggtcccatctgg

SEQ ID NO: 1321897 - DNA, 25 bp, Homo sapien
gcaaagtcaaagtataatctccctg

SEQ ID NO: 1321898 - DNA, 25 bp, Homo sapien
tcccatctggcatatcccgcaattt

SEQ ID NO: 1321899 - DNA, 25 bp, Homo sapien
cagaactgtccttcattccatttgg

SEQ ID NO: 1321900 - DNA, 25 bp, Homo sapien
acagaactgtccttcattccatttg

SEQ ID NO: 1321901 - DNA, 25 bp, Homo sapien
tggcttaggtggctttggtggaaga

SEQ ID NO: 1321902 - DNA, 25 bp, Homo sapien
ggcttaggtggctttggtggaagag

SEQ ID NO: 1321903 - DNA, 25 bp, Homo sapien
aataaagtcccttagtcaactgatt

SEQ ID NO: 1321904 - DNA, 25 bp, Homo sapien
ataaagtcccttagtcaactgattt

SEQ ID NO: 1321905 - DNA, 25 bp, Homo sapien
ttcttcctacatgaggctactaaag

SEQ ID NO: 1321906 - DNA, 25 bp, Homo sapien
actaaagtgtcaaatccgtagagac

SEQ ID NO: 1321907 - DNA, 25 bp, Homo sapien
ctcacatggagcttcaaaatggatg

SEQ ID NO: 1321908 - DNA, 25 bp, Homo sapien
tggcaggtattcatcaccttatcac

SEQ ID NO: 1321909 - DNA, 25 bp, Homo sapien
tacacccctgtggaatttcacaaca

SEQ ID NO: 1321910 - DNA, 25 bp, Homo sapien
gaaaaagatccatatcaagctacac

SEQ ID NO: 1321911 - DNA, 25 bp, Homo sapien
tttgggttgctcaacaacactggag

SEQ ID NO: 1321912 - DNA, 25 bp, Homo sapien
tcaactcagaagatccagcatcaaa

SEQ ID NO: 1321913 - DNA, 25 bp, Homo sapien
tatggcataagagaagtaaatcact

SEQ ID NO: 1321914 - DNA, 25 bp, Homo sapien
cggaagagttaagtgttgcccctag

SEQ ID NO: 1321915 - DNA, 25 bp, Homo sapien
tagaaggaaagagtgtatggcataa

SEQ ID NO: 1321916 - DNA, 25 bp, Homo sapien
taaatagcagtattaccgtattaca

SEQ ID NO: 1321917 - DNA, 25 bp, Homo sapien
ccatttgaagccataatccattaaa

SEQ ID NO: 1321918 - DNA, 25 bp, Homo sapien
gaaaagggcatgttttaggctccat

SEQ ID NO: 1321919 - DNA, 25 bp, Homo sapien
caagtaagatacgtagctgcctcta

SEQ ID NO: 1321920 - DNA, 25 bp, Homo sapien
tctcaaggcagcatgtacacaaagc

SEQ ID NO: 1321921 - DNA, 25 bp, Homo sapien
gccaagtagcctctagcaagtaaga

SEQ ID NO: 1321922 - DNA, 25 bp, Homo sapien
tgcgcaggccacgtcctatctcata

SEQ ID NO: 1321923 - DNA, 25 bp, Homo sapien
ttatgcatttattcaggctgttacg

SEQ ID NO: 1321924 - DNA, 25 bp, Homo sapien
taactttatgcatttattcaggctg

SEQ ID NO: 1321925 - DNA, 25 bp, Homo sapien
tctcatacattgtcttcaacaaaac

SEQ ID NO: 1321926 - DNA, 25 bp, Homo sapien
taagacagtgatcctttggagcaca

SEQ ID NO: 1321927 - DNA, 25 bp, Homo sapien
ggttcaattagtgtcaagcttagga

SEQ ID NO: 1321928 - DNA, 25 bp, Homo sapien
aaggcagccatcttgtactactggg

SEQ ID NO: 1321929 - DNA, 25 bp, Homo sapien
aggaagcatctactttctctccagg

SEQ ID NO: 1321930 - DNA, 25 bp, Homo sapien
tagtgcacgcctgtagttggtccta

SEQ ID NO: 1321931 - DNA, 25 bp, Homo sapien
gacaacacagcaagatcgtgtctct

SEQ ID NO: 1321932 - DNA, 25 bp, Homo sapien
tgcacgcctgtagttggtcctagct

SEQ ID NO: 1321933 - DNA, 25 bp, Homo sapien
gctacagtgagctgttggtgacact

SEQ ID NO: 1321934 - DNA, 25 bp, Homo sapien
tctgtaatagcgtcagacagagctt

SEQ ID NO: 1321935 - DNA, 25 bp, Homo sapien
gaattcatcctcgacagaaacaagg

SEQ ID NO: 1321936 - DNA, 25 bp, Homo sapien
gtagacttagccataacacgtttta

SEQ ID NO: 1321937 - DNA, 25 bp, Homo sapien
gaaacaaggagtcacaaaggctctc

SEQ ID NO: 1321938 - DNA, 25 bp, Homo sapien
ttctgtcgaatagggcatcatcacc

SEQ ID NO: 1321939 - DNA, 25 bp, Homo sapien
ctggaggatccatttcaatataaaa

SEQ ID NO: 1321940 - DNA, 25 bp, Homo sapien
ggtccatactccacaccgtattgta

SEQ ID NO: 1321941 - DNA, 25 bp, Homo sapien
tccagtctgcgtcatcgcggtccat

SEQ ID NO: 1321942 - DNA, 25 bp, Homo sapien
tagagtttcattttaacggcgcgga

SEQ ID NO: 1321943 - DNA, 25 bp, Homo sapien
aagccacttttgtgtccttcgaagg

SEQ ID NO: 1321944 - DNA, 25 bp, Homo sapien
ccggagaagtccagtcagctcggct

SEQ ID NO: 1321945 - DNA, 25 bp, Homo sapien
gcaggtcgccaggagatatatagaa

SEQ ID NO: 1321946 - DNA, 25 bp, Homo sapien
aggcgccacccaaccgcgccgggag

SEQ ID NO: 1321947 - DNA, 25 bp, Homo sapien
ccgctgaggcgccacccaaccgcgc

SEQ ID NO: 1321948 - DNA, 25 bp, Homo sapien
cttccacgccgtcccgcctcgatgt

SEQ ID NO: 1321949 - DNA, 25 bp, Homo sapien
aggggggacagcaggcatcaccacc

SEQ ID NO: 1321950 - DNA, 25 bp, Homo sapien
tgtcaagtgcctgagaacatgttca

SEQ ID NO: 1321951 - DNA, 25 bp, Homo sapien
taggcttcggctccccaatcagcca

SEQ ID NO: 1321952 - DNA, 25 bp, Homo sapien
ctccccaccgctctctaggcttcgg

SEQ ID NO: 1321953 - DNA, 25 bp, Homo sapien
gctgctctccatctcgactttcacg

SEQ ID NO: 1321954 - DNA, 25 bp, Homo sapien
ggtgttcatgtgcattcccaaacaa

SEQ ID NO: 1321955 - DNA, 25 bp, Homo sapien
agagcaatcacccaggcttttccca

SEQ ID NO: 1321956 - DNA, 25 bp, Homo sapien
ttttgttcacgggtgttcatgtgca

SEQ ID NO: 1321957 - DNA, 25 bp, Homo sapien
cttttcccacagctaaggctttgag

SEQ ID NO: 1321958 - DNA, 25 bp, Homo sapien
tatagggtatgatctcagagctctc

SEQ ID NO: 1321959 - DNA, 25 bp, Homo sapien
tccaaatggctaggatgcccttcac

SEQ ID NO: 1321960 - DNA, 25 bp, Homo sapien
tgcaagctgcttagtttatagtgaa

SEQ ID NO: 1321961 - DNA, 25 bp, Homo sapien
ggaactcagccagaagttcttcgtg

SEQ ID NO: 1321962 - DNA, 25 bp, Homo sapien
gaacactaagaattgcttgcaaccc

SEQ ID NO: 1321963 - DNA, 25 bp, Homo sapien
gcaatgtgaagacagtaatagagat

SEQ ID NO: 1321964 - DNA, 25 bp, Homo sapien
ggatttaaggtggatcctagatcta

SEQ ID NO: 1321965 - DNA, 25 bp, Homo sapien
cctagatctaatgatcagtgtgtcc

SEQ ID NO: 1321966 - DNA, 25 bp, Homo sapien
cacggaatcaatctctggaggtatt

SEQ ID NO: 1321967 - DNA, 25 bp, Homo sapien
cctgaaggctgagttgcaaaggaag

SEQ ID NO: 1321968 - DNA, 25 bp, Homo sapien
tctctggaggtattatggccatgtt

SEQ ID NO: 1321969 - DNA, 25 bp, Homo sapien
ctataacacggaatcaatctctgga

SEQ ID NO: 1321970 - DNA, 25 bp, Homo sapien
acatatacccacagatttttcatct

SEQ ID NO: 1321971 - DNA, 25 bp, Homo sapien
catatacccacagatttttcatctc

SEQ ID NO: 1321972 - DNA, 25 bp, Homo sapien
cacagagagtgtactatcaccattc

SEQ ID NO: 1321973 - DNA, 25 bp, Homo sapien
ttctcacagagagtgtactatcacc

SEQ ID NO: 1321974 - DNA, 25 bp, Homo sapien
agagagtgtactatcaccattcaca

SEQ ID NO: 1321975 - DNA, 25 bp, Homo sapien
tctcacagagagtgtactatcacca

SEQ ID NO: 1321976 - DNA, 25 bp, Homo sapien
cctggtactgcagtcacgttatcag

SEQ ID NO: 1321977 - DNA, 25 bp, Homo sapien
ctggccctggtactgcagtcacgtt

SEQ ID NO: 1321978 - DNA, 25 bp, Homo sapien
ggccctggtactgcagtcacgttat

SEQ ID NO: 1321979 - DNA, 25 bp, Homo sapien
tactgcagtcacgttatcagttccc

SEQ ID NO: 1321980 - DNA, 25 bp, Homo sapien
gctccgaagctctggatgtccccat

SEQ ID NO: 1321981 - DNA, 25 bp, Homo sapien
gccccgcgaataaatccggagcgga

SEQ ID NO: 1321982 - DNA, 25 bp, Homo sapien
ccgcgagaaggctagctgctgccaa

SEQ ID NO: 1321983 - DNA, 25 bp, Homo sapien
tttgcatcacagcagccgcgagaag

SEQ ID NO: 1321984 - DNA, 25 bp, Homo sapien
tagtagtcagcactctcttggcctc

SEQ ID NO: 1321985 - DNA, 25 bp, Homo sapien
gggacattccctagggagccctgca

SEQ ID NO: 1321986 - DNA, 25 bp, Homo sapien
tgggatagtacccagggaagcccag

SEQ ID NO: 1321987 - DNA, 25 bp, Homo sapien
gaaggtcatttccacctctcccgag

SEQ ID NO: 1321988 - DNA, 25 bp, Homo sapien
tgggctgcacccgctcatccgggag

SEQ ID NO: 1321989 - DNA, 25 bp, Homo sapien
gctcatccgggagccacctaaactg

SEQ ID NO: 1321990 - DNA, 25 bp, Homo sapien
ccacctaaactgaggtggtgggtgc

SEQ ID NO: 1321991 - DNA, 25 bp, Homo sapien
caccagggaactctggcagggtggg

SEQ ID NO: 1321992 - DNA, 25 bp, Homo sapien
tatttgttgttcaccacccacacgg

SEQ ID NO: 1321993 - DNA, 25 bp, Homo sapien
tctagaggatcagaaaaatcccagg

SEQ ID NO: 1321994 - DNA, 25 bp, Homo sapien
ccagggcaaaccaagcttctgggct

SEQ ID NO: 1321995 - DNA, 25 bp, Homo sapien
ggcaaaccaagcttctgggctagct

SEQ ID NO: 1321996 - DNA, 25 bp, Homo sapien
tggcaggattgatggctgcactgct

SEQ ID NO: 1321997 - DNA, 25 bp, Homo sapien
gcactgctggcagttcgacctcgga

SEQ ID NO: 1321998 - DNA, 25 bp, Homo sapien
cctgttgatatcttctgcggctaca

SEQ ID NO: 1321999 - DNA, 25 bp, Homo sapien
gtgttgttgatacccatggccctgg

SEQ ID NO: 1322000 - DNA, 25 bp, Homo sapien
tgggccagcccatacctggcctgcg

SEQ ID NO: 1322001 - DNA, 25 bp, Homo sapien
ctgcggtagggggaacgcatgccct

SEQ ID NO: 1322002 - DNA, 25 bp, Homo sapien
gggccgagggccacggacaagccga

SEQ ID NO: 1322003 - DNA, 25 bp, Homo sapien
cagcccatacctggcctgcggtagg

SEQ ID NO: 1322004 - DNA, 25 bp, Homo sapien
cacagggagcttctgcagtgtgcct

SEQ ID NO: 1322005 - DNA, 25 bp, Homo sapien
gcacagggagcttctgcagtgtgcc

SEQ ID NO: 1322006 - DNA, 25 bp, Homo sapien
cagggagcttctgcagtgtgcctgg

SEQ ID NO: 1322007 - DNA, 25 bp, Homo sapien
gggcacagggagcttctgcagtgtg

SEQ ID NO: 1322008 - DNA, 25 bp, Homo sapien
ctggccacggattcctgtggggctg

SEQ ID NO: 1322009 - DNA, 25 bp, Homo sapien
ctaaactggccacggattcctgtgg

SEQ ID NO: 1322010 - DNA, 25 bp, Homo sapien
taaactggccacggattcctgtggg

SEQ ID NO: 1322011 - DNA, 25 bp, Homo sapien
aactggccacggattcctgtggggc

SEQ ID NO: 1322012 - DNA, 25 bp, Homo sapien
tgcatgggatttgtttgcccagggc

SEQ ID NO: 1322013 - DNA, 25 bp, Homo sapien
tttgtttgcccagggcgggcctcta

SEQ ID NO: 1322014 - DNA, 25 bp, Homo sapien
gctgctcaacctggctgttgtgcca

SEQ ID NO: 1322015 - DNA, 25 bp, Homo sapien
ggcctctacctcatcatgggctaat

SEQ ID NO: 1322016 - DNA, 25 bp, Homo sapien
ggtggcgagatatgtccaagcgaca

SEQ ID NO: 1322017 - DNA, 25 bp, Homo sapien
aaggcgtcagggtggcgagatatgt

SEQ ID NO: 1322018 - DNA, 25 bp, Homo sapien
ggcgagatatgtccaagcgacatac

SEQ ID NO: 1322019 - DNA, 25 bp, Homo sapien
tcagggtggcgagatatgtccaagc

SEQ ID NO: 1322020 - DNA, 25 bp, Homo sapien
tgtcaccgagttgggctccaagcac

SEQ ID NO: 1322021 - DNA, 25 bp, Homo sapien
tgctgtcaccgagttgggctccaag

SEQ ID NO: 1322022 - DNA, 25 bp, Homo sapien
cccatgctgtcaccgagttgggctc

SEQ ID NO: 1322023 - DNA, 25 bp, Homo sapien
catgctgtcaccgagttgggctcca

SEQ ID NO: 1322024 - DNA, 25 bp, Homo sapien
cgtctcttgaatgatgcctgcccag

SEQ ID NO: 1322025 - DNA, 25 bp, Homo sapien
caagataagcaggaacccggctggt

SEQ ID NO: 1322026 - DNA, 25 bp, Homo sapien
tagcaaagtgctctaagggccatag

SEQ ID NO: 1322027 - DNA, 25 bp, Homo sapien
taaagtcaagctgtcctagggtaga

SEQ ID NO: 1322028 - DNA, 25 bp, Homo sapien
aatgaccaacttatccagctttgga

SEQ ID NO: 1322029 - DNA, 25 bp, Homo sapien
gaccaacttatccagctttggaaat

SEQ ID NO: 1322030 - DNA, 25 bp, Homo sapien
taatcaatgaccaacttatccagct

SEQ ID NO: 1322031 - DNA, 25 bp, Homo sapien
tttttaatcaatgaccaacttatcc

SEQ ID NO: 1322032 - DNA, 25 bp, Homo sapien
cctggtccagtgtctaagggtctct

SEQ ID NO: 1322033 - DNA, 25 bp, Homo sapien
ccatgggttgggcacagcagtttcc

SEQ ID NO: 1322034 - DNA, 25 bp, Homo sapien
gagtctgtgtcagcatgtgggcccc

SEQ ID NO: 1322035 - DNA, 25 bp, Homo sapien
tccaggttcggcctgttttcaaggc

SEQ ID NO: 1322036 - DNA, 25 bp, Homo sapien
ccttggagttagtaattaagtctca

SEQ ID NO: 1322037 - DNA, 25 bp, Homo sapien
agggatcgtaatgattcccaggtac

SEQ ID NO: 1322038 - DNA, 25 bp, Homo sapien
caggatgagctgctagggatcgtaa

SEQ ID NO: 1322039 - DNA, 25 bp, Homo sapien
tggaaagtgagggtattcaaagggc

SEQ ID NO: 1322040 - DNA, 25 bp, Homo sapien
tagccagcctgggggtacacagtac

SEQ ID NO: 1322041 - DNA, 25 bp, Homo sapien
gctagccagcctgggggtacacagt

SEQ ID NO: 1322042 - DNA, 25 bp, Homo sapien
ctagccagcctgggggtacacagta

SEQ ID NO: 1322043 - DNA, 25 bp, Homo sapien
ccagccccgcagggtcctggaggag

SEQ ID NO: 1322044 - DNA, 25 bp, Homo sapien
cagccccgcagggtcctggaggagg

SEQ ID NO: 1322045 - DNA, 25 bp, Homo sapien
agccccgcagggtcctggaggaggt

SEQ ID NO: 1322046 - DNA, 25 bp, Homo sapien
gccccgcagggtcctggaggaggtc

SEQ ID NO: 1322047 - DNA, 25 bp, Homo sapien
tcctcctttgggggtggctccagga

SEQ ID NO: 1322048 - DNA, 25 bp, Homo sapien
agaagccattagctatatccctgga

SEQ ID NO: 1322049 - DNA, 25 bp, Homo sapien
tggatctcactaggcctcctgtttc

SEQ ID NO: 1322050 - DNA, 25 bp, Homo sapien
caagaatgtatagagaagaagccat

SEQ ID NO: 1322051 - DNA, 25 bp, Homo sapien
tacaagaatgtatagagaagaagcc

SEQ ID NO: 1322052 - DNA, 25 bp, Homo sapien
aggccccgatggttgccacgcacat

SEQ ID NO: 1322053 - DNA, 25 bp, Homo sapien
ggttcttcttccgaaacaatctcca

SEQ ID NO: 1322054 - DNA, 25 bp, Homo sapien
agtggttcttcttccgaaacaatct

SEQ ID NO: 1322055 - DNA, 25 bp, Homo sapien
gaaacaatctccacaggccccgatg

SEQ ID NO: 1322056 - DNA, 25 bp, Homo sapien
cagggtgggcatggtattggagcac

SEQ ID NO: 1322057 - DNA, 25 bp, Homo sapien
ttctccattcgaataaaggccacgt

SEQ ID NO: 1322058 - DNA, 25 bp, Homo sapien
tgtgtctggcaggaaagagtcttca

SEQ ID NO: 1322059 - DNA, 25 bp, Homo sapien
caggaaagagtcttcacaagggttc

SEQ ID NO: 1322060 - DNA, 25 bp, Homo sapien
ataaaggccacgtaggtgtggccct

SEQ ID NO: 1322061 - DNA, 25 bp, Homo sapien
cacttcatgggtgtgtcccacagga

SEQ ID NO: 1322062 - DNA, 25 bp, Homo sapien
tgggagaatatagccaagacagggc

SEQ ID NO: 1322063 - DNA, 25 bp, Homo sapien
tgcacaggaccctgtaaattatggg

SEQ ID NO: 1322064 - DNA, 25 bp, Homo sapien
gatccccagtatttgactctttgct

SEQ ID NO: 1322065 - DNA, 25 bp, Homo sapien
gtgaacttccacttcataagcttct

SEQ ID NO: 1322066 - DNA, 25 bp, Homo sapien
tgtgaacttccacttcataagcttc

SEQ ID NO: 1322067 - DNA, 25 bp, Homo sapien
gaacttccacttcataagcttcttt

SEQ ID NO: 1322068 - DNA, 25 bp, Homo sapien
tgaacttccacttcataagcttctt

SEQ ID NO: 1322069 - DNA, 25 bp, Homo sapien
ctcctagatatccaccccttgccct

SEQ ID NO: 1322070 - DNA, 25 bp, Homo sapien
acatgggaatctgtagccgcagggc

SEQ ID NO: 1322071 - DNA, 25 bp, Homo sapien
ccgcagggctggagtaaacacacag

SEQ ID NO: 1322072 - DNA, 25 bp, Homo sapien
aaatctcctagatatccaccccttg

SEQ ID NO: 1322073 - DNA, 25 bp, Homo sapien
tgagctggacacctggaaccgtgtt

SEQ ID NO: 1322074 - DNA, 25 bp, Homo sapien
tggacacctggaaccgtgttgaact

SEQ ID NO: 1322075 - DNA, 25 bp, Homo sapien
cattcctgagctggacacctggaac

SEQ ID NO: 1322076 - DNA, 25 bp, Homo sapien
acctggaaccgtgttgaacttgtgc

SEQ ID NO: 1322077 - DNA, 25 bp, Homo sapien
ggagagctcatgctgtcacggcagc

SEQ ID NO: 1322078 - DNA, 25 bp, Homo sapien
gctgaccagccagacatctataaga

SEQ ID NO: 1322079 - DNA, 25 bp, Homo sapien
gaagtcctagacctgtaaagagccc

SEQ ID NO: 1322080 - DNA, 25 bp, Homo sapien
tcctcagcaagctcttactagcttt

SEQ ID NO: 1322081 - DNA, 25 bp, Homo sapien
ccctgggcctgctgttctagagcca

SEQ ID NO: 1322082 - DNA, 25 bp, Homo sapien
ttctagagccacagatgtcagaaac

SEQ ID NO: 1322083 - DNA, 25 bp, Homo sapien
tgcctcttgtagttctccctgggcc

SEQ ID NO: 1322084 - DNA, 25 bp, Homo sapien
catgaactagcagtccctgcctctt

SEQ ID NO: 1322085 - DNA, 25 bp, Homo sapien
tcaaaatatcgtaacccagtgaggt

SEQ ID NO: 1322086 - DNA, 25 bp, Homo sapien
tctggcttctaggaggttccaagct

SEQ ID NO: 1322087 - DNA, 25 bp, Homo sapien
aataggatagctctttccccaaggt

SEQ ID NO: 1322088 - DNA, 25 bp, Homo sapien
agggctggaccagtacttagaggca

SEQ ID NO: 1322089 - DNA, 25 bp, Homo sapien
cattcatgttgaggccgacgatgcc

SEQ ID NO: 1322090 - DNA, 25 bp, Homo sapien
tgccaaagtggtaggatcgggaaac

SEQ ID NO: 1322091 - DNA, 25 bp, Homo sapien
gaaacgtcagggatgatgcactctc

SEQ ID NO: 1322092 - DNA, 25 bp, Homo sapien
ttgttcaggcatccgcatccacatg

SEQ ID NO: 1322093 - DNA, 25 bp, Homo sapien
tgtttcgagttggtaggggactcca

SEQ ID NO: 1322094 - DNA, 25 bp, Homo sapien
catggaccacgatgaaggttaagat

SEQ ID NO: 1322095 - DNA, 25 bp, Homo sapien
ctggcagacatggaccacgatgaag

SEQ ID NO: 1322096 - DNA, 25 bp, Homo sapien
cacgatgaaggttaagatgtttcga

SEQ ID NO: 1322097 - DNA, 25 bp, Homo sapien
atggtctccacacggtacagtagtg

SEQ ID NO: 1322098 - DNA, 25 bp, Homo sapien
tccggtgtaggccacttgggctcaa

SEQ ID NO: 1322099 - DNA, 25 bp, Homo sapien
tacagtagtgctgggtcctcagccg

SEQ ID NO: 1322100 - DNA, 25 bp, Homo sapien
ggtcctcagccgtgtgttcataccc

SEQ ID NO: 1322101 - DNA, 25 bp, Homo sapien
aggcagagatgcagtacaggctgtc

SEQ ID NO: 1322102 - DNA, 25 bp, Homo sapien
tccagtaggtggatggattggctca

SEQ ID NO: 1322103 - DNA, 25 bp, Homo sapien
ctcctccagtaggtggatggattgg

SEQ ID NO: 1322104 - DNA, 25 bp, Homo sapien
gcagagatgcagtacaggctgtcat

SEQ ID NO: 1322105 - DNA, 25 bp, Homo sapien
ctgaaaaaatccacagcaatgtcca

SEQ ID NO: 1322106 - DNA, 25 bp, Homo sapien
agcaatgtccaggtcctcttccaga

SEQ ID NO: 1322107 - DNA, 25 bp, Homo sapien
aaatccacagcaatgtccaggtcct

SEQ ID NO: 1322108 - DNA, 25 bp, Homo sapien
atgtccaggtcctcttccagaacca

SEQ ID NO: 1322109 - DNA, 25 bp, Homo sapien
acaggttgaaagtggcagtgaggct

SEQ ID NO: 1322110 - DNA, 25 bp, Homo sapien
cggaaacaggttgaaagtggcagtg

SEQ ID NO: 1322111 - DNA, 25 bp, Homo sapien
tggcagtgaggctggccttgtagtg

SEQ ID NO: 1322112 - DNA, 25 bp, Homo sapien
gaaacaggttgaaagtggcagtgag

SEQ ID NO: 1322113 - DNA, 25 bp, Homo sapien
atgggagtatgctggatgcccctca

SEQ ID NO: 1322114 - DNA, 25 bp, Homo sapien
atgcccctcagaccaaacagtgcca

SEQ ID NO: 1322115 - DNA, 25 bp, Homo sapien
agacacgcgggcattcttgatgctg

SEQ ID NO: 1322116 - DNA, 25 bp, Homo sapien
gacacgcgggcattcttgatgctga

SEQ ID NO: 1322117 - DNA, 25 bp, Homo sapien
cactgctcaccatgtgaggtcactt

SEQ ID NO: 1322118 - DNA, 25 bp, Homo sapien
tccatgttgtactccacccgaggca

SEQ ID NO: 1322119 - DNA, 25 bp, Homo sapien
tcccttgcccgtccctggcaatcac

SEQ ID NO: 1322120 - DNA, 25 bp, Homo sapien
caccatgtgaggtcactttccctct

SEQ ID NO: 1322121 - DNA, 25 bp, Homo sapien
ctcatagtagccgtcaatgaaaact

SEQ ID NO: 1322122 - DNA, 25 bp, Homo sapien
tatcatctgaggagacaccccctgg

SEQ ID NO: 1322123 - DNA, 25 bp, Homo sapien
tagccgtcaatgaaaactgttatca

SEQ ID NO: 1322124 - DNA, 25 bp, Homo sapien
aggagacaccccctgggctgaaagc

SEQ ID NO: 1322125 - DNA, 25 bp, Homo sapien
cccacagaggtgaatgcgtctagaa

SEQ ID NO: 1322126 - DNA, 25 bp, Homo sapien
ccagggataggttagggtcacttca

SEQ ID NO: 1322127 - DNA, 25 bp, Homo sapien
gtagatgacctaagcaccctcctgt

SEQ ID NO: 1322128 - DNA, 25 bp, Homo sapien
agagtccctatgcttacccacagag

SEQ ID NO: 1322129 - DNA, 25 bp, Homo sapien
agccacaggcacattgaggaccttg

SEQ ID NO: 1322130 - DNA, 25 bp, Homo sapien
caggtaattgggtcggttccctgca

SEQ ID NO: 1322131 - DNA, 25 bp, Homo sapien
gggtcggttccctgcaatgacagcc

SEQ ID NO: 1322132 - DNA, 25 bp, Homo sapien
cacaggcacattgaggaccttgttg

SEQ ID NO: 1322133 - DNA, 25 bp, Homo sapien
gtgtctgcccagtggcactctgcct

SEQ ID NO: 1322134 - DNA, 25 bp, Homo sapien
tcagggctgaactcgatgggtgtgg

SEQ ID NO: 1322135 - DNA, 25 bp, Homo sapien
cttgcagctgcatacacttccatag

SEQ ID NO: 1322136 - DNA, 25 bp, Homo sapien
actttgctgcagaagcgccggcggc

SEQ ID NO: 1322137 - DNA, 25 bp, Homo sapien
tagaatgtttctccccgaagacagg

SEQ ID NO: 1322138 - DNA, 25 bp, Homo sapien
ttcagcaggactgggtccccccagg

SEQ ID NO: 1322139 - DNA, 25 bp, Homo sapien
gggcaggtgatttagaatgtttctc

SEQ ID NO: 1322140 - DNA, 25 bp, Homo sapien
aagagagggcaggtgatttagaatg

SEQ ID NO: 1322141 - DNA, 25 bp, Homo sapien
ttcgtcccacgaaggcccatgtgtc

SEQ ID NO: 1322142 - DNA, 25 bp, Homo sapien
ccttttcgtcccacgaaggcccatg

SEQ ID NO: 1322143 - DNA, 25 bp, Homo sapien
ttggctgtgtccttgaggtggaagg

SEQ ID NO: 1322144 - DNA, 25 bp, Homo sapien
ttttcgtcccacgaaggcccatgtg

SEQ ID NO: 1322145 - DNA, 25 bp, Homo sapien
ccgggcgctaccatgttgaggaata

SEQ ID NO: 1322146 - DNA, 25 bp, Homo sapien
cagatgagcactcggccgggcgcta

SEQ ID NO: 1322147 - DNA, 25 bp, Homo sapien
caaacacacgttttgccatcacgtg

SEQ ID NO: 1322148 - DNA, 25 bp, Homo sapien
cctcatgaggtgagtacgtgtcaaa

SEQ ID NO: 1322149 - DNA, 25 bp, Homo sapien
ggttgaggacaatgacatggatgcc

SEQ ID NO: 1322150 - DNA, 25 bp, Homo sapien
caatgacatggatgccccggccctg

SEQ ID NO: 1322151 - DNA, 25 bp, Homo sapien
aggacaatgacatggatgccccggc

SEQ ID NO: 1322152 - DNA, 25 bp, Homo sapien
cgtggcctggttgaggacaatgaca

SEQ ID NO: 1322153 - DNA, 25 bp, Homo sapien
tgaatacacctctacgtccaggacc

SEQ ID NO: 1322154 - DNA, 25 bp, Homo sapien
gggaccactgcctctgcgccgtggg

SEQ ID NO: 1322155 - DNA, 25 bp, Homo sapien
cactgccacatatactttgctgcga

SEQ ID NO: 1322156 - DNA, 25 bp, Homo sapien
ggctccaggcggcctagggcctcat

SEQ ID NO: 1322157 - DNA, 25 bp, Homo sapien
gatggctcgccgagtgtccaggatc

SEQ ID NO: 1322158 - DNA, 25 bp, Homo sapien
tcattggcttcactgatggctcgcc

SEQ ID NO: 1322159 - DNA, 25 bp, Homo sapien
cttgatattgacaatgacagtcacc

SEQ ID NO: 1322160 - DNA, 25 bp, Homo sapien
ccaggatcaacttgatattgacaat

SEQ ID NO: 1322161 - DNA, 25 bp, Homo sapien
gtcccctccattgttggtttctaga

SEQ ID NO: 1322162 - DNA, 25 bp, Homo sapien
tgcaaagccagcctgatcagacttc

SEQ ID NO: 1322163 - DNA, 25 bp, Homo sapien
tcctggccctaactgcctcacaggg

SEQ ID NO: 1322164 - DNA, 25 bp, Homo sapien
gtttctagagatggagccaggccca

SEQ ID NO: 1322165 - DNA, 25 bp, Homo sapien
caggtaaggtaccagctccgcttct

SEQ ID NO: 1322166 - DNA, 25 bp, Homo sapien
tcttccgagccccaaagggcttgat

SEQ ID NO: 1322167 - DNA, 25 bp, Homo sapien
tgacagaatctccgcagggcccgct

SEQ ID NO: 1322168 - DNA, 25 bp, Homo sapien
ggcccgctggtttgtcagtttatac

SEQ ID NO: 1322169 - DNA, 25 bp, Homo sapien
attggcgggtcaccaatgtcctggc

SEQ ID NO: 1322170 - DNA, 25 bp, Homo sapien
ggattggcgggtcaccaatgtcctg

SEQ ID NO: 1322171 - DNA, 25 bp, Homo sapien
ctggccagcccatgacttcaggaat

SEQ ID NO: 1322172 - DNA, 25 bp, Homo sapien
ccggattggcgggtcaccaatgtcc

SEQ ID NO: 1322173 - DNA, 25 bp, Homo sapien
ccggcagcgctacccgttccggaca

SEQ ID NO: 1322174 - DNA, 25 bp, Homo sapien
cagcgctacccgttccggacaccca

SEQ ID NO: 1322175 - DNA, 25 bp, Homo sapien
ctgcaccggcagcgctacccgttcc

SEQ ID NO: 1322176 - DNA, 25 bp, Homo sapien
cggacacccacgcggaggcactcac

SEQ ID NO: 1322177 - DNA, 25 bp, Homo sapien
cgctcgggccccgctagggccctca

SEQ ID NO: 1322178 - DNA, 25 bp, Homo sapien
gctcgggccccgctagggccctcac

SEQ ID NO: 1322179 - DNA, 25 bp, Homo sapien
ggctcgccgcggcctccgcctcctc

SEQ ID NO: 1322180 - DNA, 25 bp, Homo sapien
tcgccgcggcctccgcctcctccat

SEQ ID NO: 1322181 - DNA, 25 bp, Homo sapien
gctcggcccggctcgccgcggcctc

SEQ ID NO: 1322182 - DNA, 25 bp, Homo sapien
tgctcggcccggctcgccgcggcct

SEQ ID NO: 1322183 - DNA, 25 bp, Homo sapien
ccacgttccgagatggactgggcaa

SEQ ID NO: 1322184 - DNA, 25 bp, Homo sapien
tcgatgtgaagatcctgcagcagct

SEQ ID NO: 1322185 - DNA, 25 bp, Homo sapien
caccaggctagggagcttgagagct

SEQ ID NO: 1322186 - DNA, 25 bp, Homo sapien
tcaccagaggatgagagtgccaagc

SEQ ID NO: 1322187 - DNA, 25 bp, Homo sapien
aggatggagttcagcgggcagcgga

SEQ ID NO: 1322188 - DNA, 25 bp, Homo sapien
gccccagctgcagatatgaagcgga

SEQ ID NO: 1322189 - DNA, 25 bp, Homo sapien
cgcccgaccgccgggaggatggagt

SEQ ID NO: 1322190 - DNA, 25 bp, Homo sapien
cgggcagcggagctgtctcagtctt

SEQ ID NO: 1322191 - DNA, 25 bp, Homo sapien
tgatgagctgtttagttcccaagga

SEQ ID NO: 1322192 - DNA, 25 bp, Homo sapien
cctgggttctaagcctcgtggttga

SEQ ID NO: 1322193 - DNA, 25 bp, Homo sapien
gctttccaaggtgctataccctagg

SEQ ID NO: 1322194 - DNA, 25 bp, Homo sapien
gaaggtgtaaccctatatgacagtg

SEQ ID NO: 1322195 - DNA, 25 bp, Homo sapien
tctgttgtagaaggattcatgaacc

SEQ ID NO: 1322196 - DNA, 25 bp, Homo sapien
tcatgttggagtcctccagaaagga

SEQ ID NO: 1322197 - DNA, 25 bp, Homo sapien
cagaaaggaagtgttggtctggtca

SEQ ID NO: 1322198 - DNA, 25 bp, Homo sapien
tcatcatttcctatgagaccttccg

SEQ ID NO: 1322199 - DNA, 25 bp, Homo sapien
agccggcgggtgctcatctccggaa

SEQ ID NO: 1322200 - DNA, 25 bp, Homo sapien
aagccctggacagcttgaacaccag

SEQ ID NO: 1322201 - DNA, 25 bp, Homo sapien
gcttgagtatttcagcttggtacat

SEQ ID NO: 1322202 - DNA, 25 bp, Homo sapien
cattttgttaattccggcatcctag

SEQ ID NO: 1322203 - DNA, 25 bp, Homo sapien
cagttcaccctgacgggatttagcc

SEQ ID NO: 1322204 - DNA, 25 bp, Homo sapien
gagaagatcttccagcgtcagagcc

SEQ ID NO: 1322205 - DNA, 25 bp, Homo sapien
caggccctgggacccttcattagta

SEQ ID NO: 1322206 - DNA, 25 bp, Homo sapien
gacagactgggaaaatggacctcag

SEQ ID NO: 1322207 - DNA, 25 bp, Homo sapien
caccagcgttctcatgaggagcagc

SEQ ID NO: 1322208 - DNA, 25 bp, Homo sapien
gttgtgtcaacagccgtcagatccg

SEQ ID NO: 1322209 - DNA, 25 bp, Homo sapien
ttatcctggatgaagctagcctcag

SEQ ID NO: 1322210 - DNA, 25 bp, Homo sapien
tgtccctaggttgcactgccgacgt

SEQ ID NO: 1322211 - DNA, 25 bp, Homo sapien
gaaagggtttgaggcctgagagcag

SEQ ID NO: 1322212 - DNA, 25 bp, Homo sapien
tgagagcagtgtggtaagcccagca

SEQ ID NO: 1322213 - DNA, 25 bp, Homo sapien
gaagccccctatacttctctaaagc

SEQ ID NO: 1322214 - DNA, 25 bp, Homo sapien
aggtatgaaagggtttgaggcctga

SEQ ID NO: 1322215 - DNA, 25 bp, Homo sapien
ccaggatactgagtaaggggcccaa

SEQ ID NO: 1322216 - DNA, 25 bp, Homo sapien
ttatgatgaccactgtaacctcctg

SEQ ID NO: 1322217 - DNA, 25 bp, Homo sapien
atgagactgtgaggtacgggcccca

SEQ ID NO: 1322218 - DNA, 25 bp, Homo sapien
gctgatggtaccgagcatgagactg

SEQ ID NO: 1322219 - DNA, 25 bp, Homo sapien
ttggcgaactccagaagcccatctg

SEQ ID NO: 1322220 - DNA, 25 bp, Homo sapien
gagccgccggatggcttccctggct

SEQ ID NO: 1322221 - DNA, 25 bp, Homo sapien
gatgagtcccatgagtcgctaacca

SEQ ID NO: 1322222 - DNA, 25 bp, Homo sapien
tgctaacataatctgcgaaggcctg

SEQ ID NO: 1322223 - DNA, 25 bp, Homo sapien
gagaggaggatgaatcctctgagaa

SEQ ID NO: 1322224 - DNA, 25 bp, Homo sapien
ggaggatgaatcctctgagaaaaca

SEQ ID NO: 1322225 - DNA, 25 bp, Homo sapien
gaggaggatgaatcctctgagaaaa

SEQ ID NO: 1322226 - DNA, 25 bp, Homo sapien
aggatgaatcctctgagaaaacatc

SEQ ID NO: 1322227 - DNA, 25 bp, Homo sapien
taggtcaaaggcctagctcctttcc

SEQ ID NO: 1322228 - DNA, 25 bp, Homo sapien
tgcctttatccagtgagtttttagg

SEQ ID NO: 1322229 - DNA, 25 bp, Homo sapien
gagaaggggagaacgcctatcacct

SEQ ID NO: 1322230 - DNA, 25 bp, Homo sapien
agggtatcccaacccaactatggct

SEQ ID NO: 1322231 - DNA, 25 bp, Homo sapien
gcagaaattgggctgggcgcttctc

SEQ ID NO: 1322232 - DNA, 25 bp, Homo sapien
ggcgcttctcaaacagacggcagaa

SEQ ID NO: 1322233 - DNA, 25 bp, Homo sapien
gagttgcccttcatagcagcaacca

SEQ ID NO: 1322234 - DNA, 25 bp, Homo sapien
tcaaacagacggcagaaggagaagg

SEQ ID NO: 1322235 - DNA, 25 bp, Homo sapien
ctgatggctgcattaggactggtgc

SEQ ID NO: 1322236 - DNA, 25 bp, Homo sapien
caagaaaggaacagtggtttgctca

SEQ ID NO: 1322237 - DNA, 25 bp, Homo sapien
tagctgaggacacaaggccaagaaa

SEQ ID NO: 1322238 - DNA, 25 bp, Homo sapien
tgctcactcagattatggcagaacc

SEQ ID NO: 1322239 - DNA, 25 bp, Homo sapien
gagtcagattctgtagcaaaaagag

SEQ ID NO: 1322240 - DNA, 25 bp, Homo sapien
acagtcagcgagattcatgtcatgg

SEQ ID NO: 1322241 - DNA, 25 bp, Homo sapien
ctcagtcttttcagggctaggttgt

SEQ ID NO: 1322242 - DNA, 25 bp, Homo sapien
aaaagagcacctcgctctgacagtc

SEQ ID NO: 1322243 - DNA, 25 bp, Homo sapien
tttgcaaaacaagcccaaaatcctg

SEQ ID NO: 1322244 - DNA, 25 bp, Homo sapien
cttcagaacggagcacagcagtggg

SEQ ID NO: 1322245 - DNA, 25 bp, Homo sapien
tgctgcagagaacccgaggccttca

SEQ ID NO: 1322246 - DNA, 25 bp, Homo sapien
caaaggtggcactatccagggacag

SEQ ID NO: 1322247 - DNA, 25 bp, Homo sapien
ctcatcgcctattatgtggctaggg

SEQ ID NO: 1322248 - DNA, 25 bp, Homo sapien
tggtatctcctcatcgcctattatg

SEQ ID NO: 1322249 - DNA, 25 bp, Homo sapien
tctcctcatcgcctattatgtggct

SEQ ID NO: 1322250 - DNA, 25 bp, Homo sapien
tattatgtggctagggggccctgca

SEQ ID NO: 1322251 - DNA, 25 bp, Homo sapien
cgatagcacgtgtcagctccaggat

SEQ ID NO: 1322252 - DNA, 25 bp, Homo sapien
tagcaggcggaagatgttagagccc

SEQ ID NO: 1322253 - DNA, 25 bp, Homo sapien
atgcagggcacggaggcgacatcca

SEQ ID NO: 1322254 - DNA, 25 bp, Homo sapien
ctggcttgggtggtcaacacgaata

SEQ ID NO: 1322255 - DNA, 25 bp, Homo sapien
tcacttgccctcatagggttgtgag

SEQ ID NO: 1322256 - DNA, 25 bp, Homo sapien
tgatggagacctgttaaaatgctga

SEQ ID NO: 1322257 - DNA, 25 bp, Homo sapien
gttatcctgaggaagtcacttgccc

SEQ ID NO: 1322258 - DNA, 25 bp, Homo sapien
tgaaagcatgaatctgcagtctggt

SEQ ID NO: 1322259 - DNA, 25 bp, Homo sapien
ccttagaaaggatggtggtctcttc

SEQ ID NO: 1322260 - DNA, 25 bp, Homo sapien
tctgtgaagtaggtgaggtcatccc

SEQ ID NO: 1322261 - DNA, 25 bp, Homo sapien
ttttgctagctggtcacaagcagga

SEQ ID NO: 1322262 - DNA, 25 bp, Homo sapien
cctaggcggattgctggatttagcc

SEQ ID NO: 1322263 - DNA, 25 bp, Homo sapien
tgctgctaggcaatctaagcccaat

SEQ ID NO: 1322264 - DNA, 25 bp, Homo sapien
caatgacagtctcccctgctatgag

SEQ ID NO: 1322265 - DNA, 25 bp, Homo sapien
gcctgagcatgcatatactatactg

SEQ ID NO: 1322266 - DNA, 25 bp, Homo sapien
tgctatgaggcatacaagccttcct

SEQ ID NO: 1322267 - DNA, 25 bp, Homo sapien
tctgatccatccaaagctccacaag

SEQ ID NO: 1322268 - DNA, 25 bp, Homo sapien
tctttgtgaagcttccagtgctgga

SEQ ID NO: 1322269 - DNA, 25 bp, Homo sapien
tccaaggtggagatgctgcggaatc

SEQ ID NO: 1322270 - DNA, 25 bp, Homo sapien
gcagctcgcttgaaacgctttaggg

SEQ ID NO: 1322271 - DNA, 25 bp, Homo sapien
cccgtttgtatgaggatgtagaaga

SEQ ID NO: 1322272 - DNA, 25 bp, Homo sapien
agcagaaggtgaccgcttggtgcca

SEQ ID NO: 1322273 - DNA, 25 bp, Homo sapien
gggtgcagctccctcttaaggtctg

SEQ ID NO: 1322274 - DNA, 25 bp, Homo sapien
gctgagctagctggtgcccgtttgt

SEQ ID NO: 1322275 - DNA, 25 bp, Homo sapien
ccgacgtgagcccaataagagggac

SEQ ID NO: 1322276 - DNA, 25 bp, Homo sapien
tggcttcactcttacgccggctggc

SEQ ID NO: 1322277 - DNA, 25 bp, Homo sapien
atcagggctgcagcacatcgctcag

SEQ ID NO: 1322278 - DNA, 25 bp, Homo sapien
accaggccctggttgccagaagcca

SEQ ID NO: 1322279 - DNA, 25 bp, Homo sapien
ctgacagccccatggtgaatgagct

SEQ ID NO: 1322280 - DNA, 25 bp, Homo sapien
gcacaggccaggagtatagcgacac

SEQ ID NO: 1322281 - DNA, 25 bp, Homo sapien
agaaccctgcggttgggctcagcca

SEQ ID NO: 1322282 - DNA, 25 bp, Homo sapien
ctgatgcaacagctgccgaagtgac

SEQ ID NO: 1322283 - DNA, 25 bp, Homo sapien
gacacatcaatggtcccacgtagaa

SEQ ID NO: 1322284 - DNA, 25 bp, Homo sapien
ccgctgatcacaaagacgcctgtca

SEQ ID NO: 1322285 - DNA, 25 bp, Homo sapien
cagaagaggtgagaaccgctgatca

SEQ ID NO: 1322286 - DNA, 25 bp, Homo sapien
aaaaggcctccataaacttggctcg

SEQ ID NO: 1322287 - DNA, 25 bp, Homo sapien
tgccaccacacccaaataaattttg

SEQ ID NO: 1322288 - DNA, 25 bp, Homo sapien
tttttaagacattcctgctctgttg

SEQ ID NO: 1322289 - DNA, 25 bp, Homo sapien
ttttaagacattcctgctctgttgc

SEQ ID NO: 1322290 - DNA, 25 bp, Homo sapien
attttgtatttttggtagagatggg

SEQ ID NO: 1322291 - DNA, 25 bp, Homo sapien
ctaatattcttgagtctgcttctct

SEQ ID NO: 1322292 - DNA, 25 bp, Homo sapien
cctcataaggtctgttgtcctcatt

SEQ ID NO: 1322293 - DNA, 25 bp, Homo sapien
aatattcttgagtctgcttctcttc

SEQ ID NO: 1322294 - DNA, 25 bp, Homo sapien
cttctcttcctcataaggtctgttg

SEQ ID NO: 1322295 - DNA, 25 bp, Homo sapien
ttctccaatctccacgggtagcctg

SEQ ID NO: 1322296 - DNA, 25 bp, Homo sapien
gttcacacagctcaaggtatagtcg

SEQ ID NO: 1322297 - DNA, 25 bp, Homo sapien
tgaccattgcagagctaggcaggac

SEQ ID NO: 1322298 - DNA, 25 bp, Homo sapien
tcagtgacaaatgccaaatggacca

SEQ ID NO: 1322299 - DNA, 25 bp, Homo sapien
tcttcatcagttcatcccagagtcg

SEQ ID NO: 1322300 - DNA, 25 bp, Homo sapien
aggccttgtcttcatcagttcatcc

SEQ ID NO: 1322301 - DNA, 25 bp, Homo sapien
ttcatcccagagtcggcgccagatg

SEQ ID NO: 1322302 - DNA, 25 bp, Homo sapien
atcagttcatcccagagtcggcgcc

SEQ ID NO: 1322303 - DNA, 25 bp, Homo sapien
ttcctcaatcctctccaagtaatat

SEQ ID NO: 1322304 - DNA, 25 bp, Homo sapien
aatatatattgagcagaggtaggat

SEQ ID NO: 1322305 - DNA, 25 bp, Homo sapien
cagaggtaggatgctttgaagtatt

SEQ ID NO: 1322306 - DNA, 25 bp, Homo sapien
ctttcttgagggcagtttcctcaat

SEQ ID NO: 1322307 - DNA, 25 bp, Homo sapien
catagtaggtcctcgatgtacgggc

SEQ ID NO: 1322308 - DNA, 25 bp, Homo sapien
taggagctggtcagttcacttctgc

SEQ ID NO: 1322309 - DNA, 25 bp, Homo sapien
tgagatcatcccacaaaacaagctg

SEQ ID NO: 1322310 - DNA, 25 bp, Homo sapien
ggtctttcataatctgccctgctag

SEQ ID NO: 1322311 - DNA, 25 bp, Homo sapien
gaggccacacgggaagaagttcctc

SEQ ID NO: 1322312 - DNA, 25 bp, Homo sapien
aggcggaaaagccagaccctctctg

SEQ ID NO: 1322313 - DNA, 25 bp, Homo sapien
taatgggatggtggtatgtacagca

SEQ ID NO: 1322314 - DNA, 25 bp, Homo sapien
ttttctggtctaggcccacaggagc

SEQ ID NO: 1322315 - DNA, 25 bp, Homo sapien
tcgcttgtttaagccgctccgggcc

SEQ ID NO: 1322316 - DNA, 25 bp, Homo sapien
tcgccgctcgagccgatccgagtgg

SEQ ID NO: 1322317 - DNA, 25 bp, Homo sapien
tcattcgagcctccctcgcttgttt

SEQ ID NO: 1322318 - DNA, 25 bp, Homo sapien
tcgagccgatccgagtggcctccgg

SEQ ID NO: 1322319 - DNA, 25 bp, Homo sapien
accccgctctccagaacccccatat

SEQ ID NO: 1322320 - DNA, 25 bp, Homo sapien
tccagaacccccatatgggcgctca

SEQ ID NO: 1322321 - DNA, 25 bp, Homo sapien
ctccagaacccccatatgggcgctc

SEQ ID NO: 1322322 - DNA, 25 bp, Homo sapien
cgctctccagaacccccatatgggc

SEQ ID NO: 1322323 - DNA, 25 bp, Homo sapien
gcccgcacagctcgaacagggcggg

SEQ ID NO: 1322324 - DNA, 25 bp, Homo sapien
ggacgtggcctccatggtcgttgcc

SEQ ID NO: 1322325 - DNA, 25 bp, Homo sapien
cgctacctcacagaaccagcaactc

SEQ ID NO: 1322326 - DNA, 25 bp, Homo sapien
ggcccgaggccgagctcttcgctgg

SEQ ID NO: 1322327 - DNA, 25 bp, Homo sapien
gagcccgagagtgtcgcccgcggac

SEQ ID NO: 1322328 - DNA, 25 bp, Homo sapien
gggaggtgcgcgagcccgagagtgt

SEQ ID NO: 1322329 - DNA, 25 bp, Homo sapien
gtgcgcgagcccgagagtgtcgccc

SEQ ID NO: 1322330 - DNA, 25 bp, Homo sapien
gagagtgtcgcccgcggaccgccat

SEQ ID NO: 1322331 - DNA, 25 bp, Homo sapien
tcctcgggtgcaaacatcagctacc

SEQ ID NO: 1322332 - DNA, 25 bp, Homo sapien
tgtttcttagcaaagcctcctcggg

SEQ ID NO: 1322333 - DNA, 25 bp, Homo sapien
ttaggacggctccataagcgatatg

SEQ ID NO: 1322334 - DNA, 25 bp, Homo sapien
tgaaaaggtcagcagttaggacggc

SEQ ID NO: 1322335 - DNA, 25 bp, Homo sapien
cacgatgagtgtgccgcacttccgg

SEQ ID NO: 1322336 - DNA, 25 bp, Homo sapien
gcacttccggccagatcgccggatt

SEQ ID NO: 1322337 - DNA, 25 bp, Homo sapien
cgctgagtgacccttacaagtcctt

SEQ ID NO: 1322338 - DNA, 25 bp, Homo sapien
gatcgccggatttccgctgagtgac

SEQ ID NO: 1322339 - DNA, 25 bp, Homo sapien
ttttctaaggtcatgcagctaccaa

SEQ ID NO: 1322340 - DNA, 25 bp, Homo sapien
cagctaccaaattggtgcagccagg

SEQ ID NO: 1322341 - DNA, 25 bp, Homo sapien
taagtgttgggtactattagtgcca

SEQ ID NO: 1322342 - DNA, 25 bp, Homo sapien
tgaggaaacaagcatagaggttaaa

SEQ ID NO: 1322343 - DNA, 25 bp, Homo sapien
taaaatccgaactccccaagagagc

SEQ ID NO: 1322344 - DNA, 25 bp, Homo sapien
tttggagcaagcaaggggtacgtga

SEQ ID NO: 1322345 - DNA, 25 bp, Homo sapien
tgattgatttggagcaagcaagggg

SEQ ID NO: 1322346 - DNA, 25 bp, Homo sapien
ttgatttggagcaagcaaggggtac

SEQ ID NO: 1322347 - DNA, 25 bp, Homo sapien
tcgaattcatgctacacttgcatgg

SEQ ID NO: 1322348 - DNA, 25 bp, Homo sapien
gaattcatgctacacttgcatgggc

SEQ ID NO: 1322349 - DNA, 25 bp, Homo sapien
ggatcgaattcatgctacacttgca

SEQ ID NO: 1322350 - DNA, 25 bp, Homo sapien
caggatcgaattcatgctacacttg

SEQ ID NO: 1322351 - DNA, 25 bp, Homo sapien
gagacataagttggatggccctccg

SEQ ID NO: 1322352 - DNA, 25 bp, Homo sapien
gacataagttggatggccctccggg

SEQ ID NO: 1322353 - DNA, 25 bp, Homo sapien
tagtgttgggagacataagttggat

SEQ ID NO: 1322354 - DNA, 25 bp, Homo sapien
ttgggagacataagttggatggccc

SEQ ID NO: 1322355 - DNA, 25 bp, Homo sapien
tgccaatgcagacccgccatgggtg

SEQ ID NO: 1322356 - DNA, 25 bp, Homo sapien
gccaatgcagacccgccatgggtga

SEQ ID NO: 1322357 - DNA, 25 bp, Homo sapien
aagtgccaatgcagacccgccatgg

SEQ ID NO: 1322358 - DNA, 25 bp, Homo sapien
gtgccaatgcagacccgccatgggt

SEQ ID NO: 1322359 - DNA, 25 bp, Homo sapien
cacagggcaggtttaagccggccgt

SEQ ID NO: 1322360 - DNA, 25 bp, Homo sapien
tttaagccggccgtcagtcacctcg

SEQ ID NO: 1322361 - DNA, 25 bp, Homo sapien
tacatgctgctctggcgacgcgttc

SEQ ID NO: 1322362 - DNA, 25 bp, Homo sapien
tctgtgggggcctgctacatgctgc

SEQ ID NO: 1322363 - DNA, 25 bp, Homo sapien
catgtacttctgcaaaatgcgtagg

SEQ ID NO: 1322364 - DNA, 25 bp, Homo sapien
tctccaggcctgtactaaagtttgc

SEQ ID NO: 1322365 - DNA, 25 bp, Homo sapien
tagaagatttgctgtcctgctgtcc

SEQ ID NO: 1322366 - DNA, 25 bp, Homo sapien
ggagcatcagcaggtttccaactca

SEQ ID NO: 1322367 - DNA, 25 bp, Homo sapien
taaccgcctccgtgcgtggcatatg

SEQ ID NO: 1322368 - DNA, 25 bp, Homo sapien
tagtgctctgagtaggaccgtaacc

SEQ ID NO: 1322369 - DNA, 25 bp, Homo sapien
caggcagacctagataagaaaagca

SEQ ID NO: 1322370 - DNA, 25 bp, Homo sapien
tgcattgtaattgagggccctggaa

SEQ ID NO: 1322371 - DNA, 25 bp, Homo sapien
tattagtaatgctgccaataccttt

SEQ ID NO: 1322372 - DNA, 25 bp, Homo sapien
gggctattattagtaatgctgccaa

SEQ ID NO: 1322373 - DNA, 25 bp, Homo sapien
ttgggcatataattttgtgagtacg

SEQ ID NO: 1322374 - DNA, 25 bp, Homo sapien
tgggcatataattttgtgagtacgt

SEQ ID NO: 1322375 - DNA, 25 bp, Homo sapien
tgcttcttggatgtaaaatccagaa

SEQ ID NO: 1322376 - DNA, 25 bp, Homo sapien
tcttggatgtaaaatccagaagtac

SEQ ID NO: 1322377 - DNA, 25 bp, Homo sapien
cctctgaagcggaccaggtccccag

SEQ ID NO: 1322378 - DNA, 25 bp, Homo sapien
catccccctctgaagcggaccaggt

SEQ ID NO: 1322379 - DNA, 25 bp, Homo sapien
acattgctgactcgaatgcctgggt

SEQ ID NO: 1322380 - DNA, 25 bp, Homo sapien
gacattgctgactcgaatgcctggg

SEQ ID NO: 1322381 - DNA, 25 bp, Homo sapien
tagacattgctgactcgaatgcctg

SEQ ID NO: 1322382 - DNA, 25 bp, Homo sapien
gtagacattgctgactcgaatgcct

SEQ ID NO: 1322383 - DNA, 25 bp, Homo sapien
taaagttagattggtgcagacagag

SEQ ID NO: 1322384 - DNA, 25 bp, Homo sapien
cagacagaggaagagtgaagtcacg

SEQ ID NO: 1322385 - DNA, 25 bp, Homo sapien
cagtaagctgtgtgacgtaagcccc

SEQ ID NO: 1322386 - DNA, 25 bp, Homo sapien
tccaacagagtgcaggagctgtaaa

SEQ ID NO: 1322387 - DNA, 25 bp, Homo sapien
tgccctggcaagaagagttgtgtct

SEQ ID NO: 1322388 - DNA, 25 bp, Homo sapien
tgccggtggccgtgcagtgtgtggc

SEQ ID NO: 1322389 - DNA, 25 bp, Homo sapien
caaggaaatgtcctgcatggggcag

SEQ ID NO: 1322390 - DNA, 25 bp, Homo sapien
agcgactgatgacccctgaaaagca

SEQ ID NO: 1322391 - DNA, 25 bp, Homo sapien
cagtgagtacgatggccagaagagt

SEQ ID NO: 1322392 - DNA, 25 bp, Homo sapien
ctttctgttgatgccaagccccagt

SEQ ID NO: 1322393 - DNA, 25 bp, Homo sapien
cttggaaccgaaagctaggccagtc

SEQ ID NO: 1322394 - DNA, 25 bp, Homo sapien
gagtgagagcacaaatcagcctcct

SEQ ID NO: 1322395 - DNA, 25 bp, Homo sapien
tgatattgttccgtgggtggagtcc

SEQ ID NO: 1322396 - DNA, 25 bp, Homo sapien
tacattggagtcattaggtcacttg

SEQ ID NO: 1322397 - DNA, 25 bp, Homo sapien
ttcaaagcgctcctgatacattgga

SEQ ID NO: 1322398 - DNA, 25 bp, Homo sapien
catggcagctaagagtgtggcttct

SEQ ID NO: 1322399 - DNA, 25 bp, Homo sapien
tcccctcagattgggttagtagggc

SEQ ID NO: 1322400 - DNA, 25 bp, Homo sapien
gacagggctattgctgacgtcacgt

SEQ ID NO: 1322401 - DNA, 25 bp, Homo sapien
gctcaaactccattgcgctgatggg

SEQ ID NO: 1322402 - DNA, 25 bp, Homo sapien
gctcttagatccactgtcgctgcga

SEQ ID NO: 1322403 - DNA, 25 bp, Homo sapien
gaagatcacgtctgtccagctgcag

SEQ ID NO: 1322404 - DNA, 25 bp, Homo sapien
agctgcaggatgagacagaccctca

SEQ ID NO: 1322405 - DNA, 25 bp, Homo sapien
tacaacacgggtccaggttctggct

SEQ ID NO: 1322406 - DNA, 25 bp, Homo sapien
tgggtacatatggaacctcctggac

SEQ ID NO: 1322407 - DNA, 25 bp, Homo sapien
tgttgctcagtattgtgcccttgga

SEQ ID NO: 1322408 - DNA, 25 bp, Homo sapien
gactttaccatagggccagaccttg

SEQ ID NO: 1322409 - DNA, 25 bp, Homo sapien
cattcaattccatgatccagacctg

SEQ ID NO: 1322410 - DNA, 25 bp, Homo sapien
tgcccttggaagaaggtccttgaat

SEQ ID NO: 1322411 - DNA, 25 bp, Homo sapien
ggcgccgacgctgatacaatattag

SEQ ID NO: 1322412 - DNA, 25 bp, Homo sapien
cgagtgtgcgccgtgtaaagtgaca

SEQ ID NO: 1322413 - DNA, 25 bp, Homo sapien
tcgggcgggcgaagccatttccaat

SEQ ID NO: 1322414 - DNA, 25 bp, Homo sapien
cagatagctgtgaggtacgtttcca

SEQ ID NO: 1322415 - DNA, 25 bp, Homo sapien
ggattaggccgcaaatcgcgctgag

SEQ ID NO: 1322416 - DNA, 25 bp, Homo sapien
taagtgacagcgagagaatcgcgcg

SEQ ID NO: 1322417 - DNA, 25 bp, Homo sapien
aagggaacaatctggcggcccctcg

SEQ ID NO: 1322418 - DNA, 25 bp, Homo sapien
atcgcgctgagcctccctaagtgac

SEQ ID NO: 1322419 - DNA, 25 bp, Homo sapien
ctctagcctttctggttcggagtcc

SEQ ID NO: 1322420 - DNA, 25 bp, Homo sapien
cctcctctagcctttctggttcgga

SEQ ID NO: 1322421 - DNA, 25 bp, Homo sapien
cctctagcctttctggttcggagtc

SEQ ID NO: 1322422 - DNA, 25 bp, Homo sapien
tcctctagcctttctggttcggagt

SEQ ID NO: 1322423 - DNA, 25 bp, Homo sapien
tagttacagaagtattgattttgcc

SEQ ID NO: 1322424 - DNA, 25 bp, Homo sapien
tttagttacagaagtattgattttg

SEQ ID NO: 1322425 - DNA, 25 bp, Homo sapien
ttacagaagtattgattttgcccac

SEQ ID NO: 1322426 - DNA, 25 bp, Homo sapien
agtgcccctgttgaaaaatgtttca

SEQ ID NO: 1322427 - DNA, 25 bp, Homo sapien
tattttagactctaatagtctgcag

SEQ ID NO: 1322428 - DNA, 25 bp, Homo sapien
ctcgcctcgggtgaagacgtggcct

SEQ ID NO: 1322429 - DNA, 25 bp, Homo sapien
ccccatatttcacgtcagggacgtg

SEQ ID NO: 1322430 - DNA, 25 bp, Homo sapien
gtctgcagatagagtcacccgctga

SEQ ID NO: 1322431 - DNA, 25 bp, Homo sapien
cgcgcgccatggatcaagatgatga

SEQ ID NO: 1322432 - DNA, 25 bp, Homo sapien
caggagatggctcgtggcaaattgc

SEQ ID NO: 1322433 - DNA, 25 bp, Homo sapien
gtcagcgcgcgccatggatcaagat

SEQ ID NO: 1322434 - DNA, 25 bp, Homo sapien
tttgttagtcttgtcagcgcggccg

SEQ ID NO: 1322435 - DNA, 25 bp, Homo sapien
agaggcccggtgacacagttcagcc

SEQ ID NO: 1322436 - DNA, 25 bp, Homo sapien
gaaggcgtcatgaattactttctct

SEQ ID NO: 1322437 - DNA, 25 bp, Homo sapien
aaggcagtagaatggccagcattcc

SEQ ID NO: 1322438 - DNA, 25 bp, Homo sapien
agtagttaatctgggaaggcagtag

SEQ ID NO: 1322439 - DNA, 25 bp, Homo sapien
cacttgtcccattcaattgacccaa

SEQ ID NO: 1322440 - DNA, 25 bp, Homo sapien
acttgtcccattcaattgacccaaa

SEQ ID NO: 1322441 - DNA, 25 bp, Homo sapien
cctgtgtcctcaattgttccattca

SEQ ID NO: 1322442 - DNA, 25 bp, Homo sapien
tgtgtcctcaattgttccattcaga

SEQ ID NO: 1322443 - DNA, 25 bp, Homo sapien
catcctgtgtcctcaattgttccat

SEQ ID NO: 1322444 - DNA, 25 bp, Homo sapien
gtcctcaattgttccattcagagct

SEQ ID NO: 1322445 - DNA, 25 bp, Homo sapien
ctttggctccaatgatgttgtcccc

SEQ ID NO: 1322446 - DNA, 25 bp, Homo sapien
caatgatgttgtccccttcccttgg

SEQ ID NO: 1322447 - DNA, 25 bp, Homo sapien
tcccaaggctaactgcaatgcatcc

SEQ ID NO: 1322448 - DNA, 25 bp, Homo sapien
tggtcctcccaaggctaactgcaat

SEQ ID NO: 1322449 - DNA, 25 bp, Homo sapien
caccttcacaagctgcagactccag

SEQ ID NO: 1322450 - DNA, 25 bp, Homo sapien
cacaccttcacaagctgcagactcc

SEQ ID NO: 1322451 - DNA, 25 bp, Homo sapien
ctaccacaccttcacaagctgcaga

SEQ ID NO: 1322452 - DNA, 25 bp, Homo sapien
accacaccttcacaagctgcagact

SEQ ID NO: 1322453 - DNA, 25 bp, Homo sapien
tgctggagccgccttgagcctgatt

SEQ ID NO: 1322454 - DNA, 25 bp, Homo sapien
ttgagcctgattcaccttttctcgc

SEQ ID NO: 1322455 - DNA, 25 bp, Homo sapien
atgtcttggccgctgtcaacctgag

SEQ ID NO: 1322456 - DNA, 25 bp, Homo sapien
tggccgctgtcaacctgaggccctg

SEQ ID NO: 1322457 - DNA, 25 bp, Homo sapien
caggcatctaacagcaggtgggaga

SEQ ID NO: 1322458 - DNA, 25 bp, Homo sapien
tgcagaacaggatctggaagtcttg

SEQ ID NO: 1322459 - DNA, 25 bp, Homo sapien
gagaatgtaattccaggcatctaac

SEQ ID NO: 1322460 - DNA, 25 bp, Homo sapien
gggttcggctgagcctagcattgca

SEQ ID NO: 1322461 - DNA, 25 bp, Homo sapien
tcctatgttcatccagtcccccaat

SEQ ID NO: 1322462 - DNA, 25 bp, Homo sapien
actcctatgttcatccagtccccca

SEQ ID NO: 1322463 - DNA, 25 bp, Homo sapien
atgttcatccagtcccccaatctga

SEQ ID NO: 1322464 - DNA, 25 bp, Homo sapien
ctatgttcatccagtcccccaatct

SEQ ID NO: 1322465 - DNA, 25 bp, Homo sapien
cctctcccttgaagccgccttctag

SEQ ID NO: 1322466 - DNA, 25 bp, Homo sapien
cttgaagccgccttctaggtctcca

SEQ ID NO: 1322467 - DNA, 25 bp, Homo sapien
tcttttactcatagtcacacactcc

SEQ ID NO: 1322468 - DNA, 25 bp, Homo sapien
tctgttcccacattcatgggcacac

SEQ ID NO: 1322469 - DNA, 25 bp, Homo sapien
cacactaggactttcagggctgcag

SEQ ID NO: 1322470 - DNA, 25 bp, Homo sapien
ctttattgaggagtaaggcactgca

SEQ ID NO: 1322471 - DNA, 25 bp, Homo sapien
taattctagggaccatcctggccca

SEQ ID NO: 1322472 - DNA, 25 bp, Homo sapien
caggaatgcatggtgtgccacagtc

SEQ ID NO: 1322473 - DNA, 25 bp, Homo sapien
caagctggatgggtaaggtttacta

SEQ ID NO: 1322474 - DNA, 25 bp, Homo sapien
caccacattctacccaggagtttgg

SEQ ID NO: 1322475 - DNA, 25 bp, Homo sapien
gtttactagagaccagagaccctgt

SEQ ID NO: 1322476 - DNA, 25 bp, Homo sapien
ttagccccttcagggtgggtgctcc

SEQ ID NO: 1322477 - DNA, 25 bp, Homo sapien
cagcggagtcacggcggggccctgg

SEQ ID NO: 1322478 - DNA, 25 bp, Homo sapien
acagcggagtcacggcggggccctg

SEQ ID NO: 1322479 - DNA, 25 bp, Homo sapien
agcggagtcacggcggggccctggt

SEQ ID NO: 1322480 - DNA, 25 bp, Homo sapien
gcggagtcacggcggggccctggtc

SEQ ID NO: 1322481 - DNA, 25 bp, Homo sapien
gagctggactccttccgagcgcagc

SEQ ID NO: 1322482 - DNA, 25 bp, Homo sapien
tgggttgagctggactccttccgag

SEQ ID NO: 1322483 - DNA, 25 bp, Homo sapien
tgtcctgtgccgtgggctcgctgct

SEQ ID NO: 1322484 - DNA, 25 bp, Homo sapien
gcacggccgtggtgtcctgtgccgt

SEQ ID NO: 1322485 - DNA, 25 bp, Homo sapien
agccccacgacgagcagcgcgttgt

SEQ ID NO: 1322486 - DNA, 25 bp, Homo sapien
tcgggcaagaaggaggcgaaggcgc

SEQ ID NO: 1322487 - DNA, 25 bp, Homo sapien
gcgaagaagccgagcgccagcacca

SEQ ID NO: 1322488 - DNA, 25 bp, Homo sapien
cagcgcgttgtgctcgggcaagaag

SEQ ID NO: 1322489 - DNA, 25 bp, Homo sapien
agcgtcacgttcacgcccgccagca

SEQ ID NO: 1322490 - DNA, 25 bp, Homo sapien
agcagcgcgcacagaccgcaggcgc

SEQ ID NO: 1322491 - DNA, 25 bp, Homo sapien
aggcgcagcacagcgccggcgacgg

SEQ ID NO: 1322492 - DNA, 25 bp, Homo sapien
cctcgctcttttctgccggcggcat

SEQ ID NO: 1322493 - DNA, 25 bp, Homo sapien
cacgccaggcacgcatcaagctccc

SEQ ID NO: 1322494 - DNA, 25 bp, Homo sapien
gcacgccaggcacgcatcaagctcc

SEQ ID NO: 1322495 - DNA, 25 bp, Homo sapien
gctggtcctgtgggcaactgccagg

SEQ ID NO: 1322496 - DNA, 25 bp, Homo sapien
gtcctgtgggcaactgccaggagcc

SEQ ID NO: 1322497 - DNA, 25 bp, Homo sapien
tggtcctgtgggcaactgccaggag

SEQ ID NO: 1322498 - DNA, 25 bp, Homo sapien
tgggcaactgccaggagcctcctca

SEQ ID NO: 1322499 - DNA, 25 bp, Homo sapien
tgtccaaaccctatacccagtggag

SEQ ID NO: 1322500 - DNA, 25 bp, Homo sapien
ttgttgccgtaccaagctggcagga

SEQ ID NO: 1322501 - DNA, 25 bp, Homo sapien
ttcacttgcaacacacaggatgcgc

SEQ ID NO: 1322502 - DNA, 25 bp, Homo sapien
tctagccagaatcaccttgttgccg

SEQ ID NO: 1322503 - DNA, 25 bp, Homo sapien
ccctgcgggtccgaccaggctgacc

SEQ ID NO: 1322504 - DNA, 25 bp, Homo sapien
gtccgtggacactcccctgcgggtc

SEQ ID NO: 1322505 - DNA, 25 bp, Homo sapien
tgagcccgtccgtggacactcccct

SEQ ID NO: 1322506 - DNA, 25 bp, Homo sapien
tgcgggtccgaccaggctgaccctt

SEQ ID NO: 1322507 - DNA, 25 bp, Homo sapien
cctccgccgtccgctgacttctagg

SEQ ID NO: 1322508 - DNA, 25 bp, Homo sapien
tccgccgtccgctgacttctagggg

SEQ ID NO: 1322509 - DNA, 25 bp, Homo sapien
ccgtccgctgacttctaggggctgg

SEQ ID NO: 1322510 - DNA, 25 bp, Homo sapien
cgccgtccgctgacttctaggggct

SEQ ID NO: 1322511 - DNA, 25 bp, Homo sapien
tgggccgagccgcttggagatccta

SEQ ID NO: 1322512 - DNA, 25 bp, Homo sapien
tctcccacgcggctgggtttccagg

SEQ ID NO: 1322513 - DNA, 25 bp, Homo sapien
ttggagatcctagatcagcatgtgg

SEQ ID NO: 1322514 - DNA, 25 bp, Homo sapien
tttccaggcggtgtcctgggccgag

SEQ ID NO: 1322515 - DNA, 25 bp, Homo sapien
agacccgctcccactccgcttggct

SEQ ID NO: 1322516 - DNA, 25 bp, Homo sapien
actccgcttggctcccttggagcag

SEQ ID NO: 1322517 - DNA, 25 bp, Homo sapien
agagcagagacgcgcagacccgctc

SEQ ID NO: 1322518 - DNA, 25 bp, Homo sapien
gctcccactccgcttggctcccttg

SEQ ID NO: 1322519 - DNA, 25 bp, Homo sapien
gcttcacggtttgcaagcacccttg

SEQ ID NO: 1322520 - DNA, 25 bp, Homo sapien
tcgtccgcactttccgagagccagg

SEQ ID NO: 1322521 - DNA, 25 bp, Homo sapien
agcacccttgcaaataactcctagc

SEQ ID NO: 1322522 - DNA, 25 bp, Homo sapien
gagccaggcacggatatattgcaac

SEQ ID NO: 1322523 - DNA, 25 bp, Homo sapien
cttttctcgaagtgtgagggggaga

SEQ ID NO: 1322524 - DNA, 25 bp, Homo sapien
gagaagccacatgtctccacattga

SEQ ID NO: 1322525 - DNA, 25 bp, Homo sapien
tgagggggagaagccacatgtctcc

SEQ ID NO: 1322526 - DNA, 25 bp, Homo sapien
gccacatgtctccacattgactact

SEQ ID NO: 1322527 - DNA, 25 bp, Homo sapien
gggctggagggaagatgtttcagga

SEQ ID NO: 1322528 - DNA, 25 bp, Homo sapien
tggagggaagatgtttcaggaagcc

SEQ ID NO: 1322529 - DNA, 25 bp, Homo sapien
gctggagggaagatgtttcaggaag

SEQ ID NO: 1322530 - DNA, 25 bp, Homo sapien
gagggaagatgtttcaggaagccca

SEQ ID NO: 1322531 - DNA, 25 bp, Homo sapien
tagctcttgccgttgtatgctttca

SEQ ID NO: 1322532 - DNA, 25 bp, Homo sapien
cccagtggacatagctcttgccgtt

SEQ ID NO: 1322533 - DNA, 25 bp, Homo sapien
gacatagctcttgccgttgtatgct

SEQ ID NO: 1322534 - DNA, 25 bp, Homo sapien
tcttccccagtggacatagctcttg

SEQ ID NO: 1322535 - DNA, 25 bp, Homo sapien
gaagtgccgtctccattgatcctgg

SEQ ID NO: 1322536 - DNA, 25 bp, Homo sapien
cagcatttgtggaaggcagcccctt

SEQ ID NO: 1322537 - DNA, 25 bp, Homo sapien
tctcagctgaaggaaacgaagtctc

SEQ ID NO: 1322538 - DNA, 25 bp, Homo sapien
tcaaacaactctgcctggagggtgc

SEQ ID NO: 1322539 - DNA, 25 bp, Homo sapien
ggccttggaccccaaattccagaga

SEQ ID NO: 1322540 - DNA, 25 bp, Homo sapien
tcacttctgtagccgggttagagca

SEQ ID NO: 1322541 - DNA, 25 bp, Homo sapien
gcctgaaacatgggaaccctgtggg

SEQ ID NO: 1322542 - DNA, 25 bp, Homo sapien
aacaggcaacaaagctgagctgcag

SEQ ID NO: 1322543 - DNA, 25 bp, Homo sapien
gcttggccgggcgagtgcaaaaggc

SEQ ID NO: 1322544 - DNA, 25 bp, Homo sapien
gccgggcgagtgcaaaaggccccat

SEQ ID NO: 1322545 - DNA, 25 bp, Homo sapien
cgggcgagtgcaaaaggccccattc

SEQ ID NO: 1322546 - DNA, 25 bp, Homo sapien
ggcgagtgcaaaaggccccattcca

SEQ ID NO: 1322547 - DNA, 25 bp, Homo sapien
ggcatgggcagccgctcagactttg

SEQ ID NO: 1322548 - DNA, 25 bp, Homo sapien
cagggcatgggcagccgctcagact

SEQ ID NO: 1322549 - DNA, 25 bp, Homo sapien
catgggcagccgctcagactttgcc

SEQ ID NO: 1322550 - DNA, 25 bp, Homo sapien
agggcatgggcagccgctcagactt

SEQ ID NO: 1322551 - DNA, 25 bp, Homo sapien
cagggtcctgctcacggtggacagg

SEQ ID NO: 1322552 - DNA, 25 bp, Homo sapien
cgggtccccggcttcagcttctcca

SEQ ID NO: 1322553 - DNA, 25 bp, Homo sapien
tcctgctcacggtggacaggctgct

SEQ ID NO: 1322554 - DNA, 25 bp, Homo sapien
tccagggtcctgctcacggtggaca

SEQ ID NO: 1322555 - DNA, 25 bp, Homo sapien
ccttgttgccattggtgctggatct

SEQ ID NO: 1322556 - DNA, 25 bp, Homo sapien
tgctggatcttccttccccgtggtc

SEQ ID NO: 1322557 - DNA, 25 bp, Homo sapien
gccattggtgctggatcttccttcc

SEQ ID NO: 1322558 - DNA, 25 bp, Homo sapien
gtgctggatcttccttccccgtggt

SEQ ID NO: 1322559 - DNA, 25 bp, Homo sapien
ggatggggatggattcttaggctcc

SEQ ID NO: 1322560 - DNA, 25 bp, Homo sapien
ctggatggggatggattcttaggct

SEQ ID NO: 1322561 - DNA, 25 bp, Homo sapien
tggatggggatggattcttaggctc

SEQ ID NO: 1322562 - DNA, 25 bp, Homo sapien
cttcaggaaggggtaggccaagatg

SEQ ID NO: 1322563 - DNA, 25 bp, Homo sapien
caggatgtggtccaggttgaaccga

SEQ ID NO: 1322564 - DNA, 25 bp, Homo sapien
tggtccaggttgaaccgagccttca

SEQ ID NO: 1322565 - DNA, 25 bp, Homo sapien
ggtaggcaggatgtggtccaggttg

SEQ ID NO: 1322566 - DNA, 25 bp, Homo sapien
cgagagccacgcaggccagctgcag

SEQ ID NO: 1322567 - DNA, 25 bp, Homo sapien
ggccgcggaagtctctgctgctgat

SEQ ID NO: 1322568 - DNA, 25 bp, Homo sapien
gaacagcagcgccaataaagacacc

SEQ ID NO: 1322569 - DNA, 25 bp, Homo sapien
ggagatgccgataatgatgctgcca

SEQ ID NO: 1322570 - DNA, 25 bp, Homo sapien
gggcactgcctccagccggtgcagt

SEQ ID NO: 1322571 - DNA, 25 bp, Homo sapien
cggggcactgcctccagccggtgca

SEQ ID NO: 1322572 - DNA, 25 bp, Homo sapien
cccggggcactgcctccagccggtg

SEQ ID NO: 1322573 - DNA, 25 bp, Homo sapien
gcaggcccacccggggcactgcctc

SEQ ID NO: 1322574 - DNA, 25 bp, Homo sapien
gagtctgtgggccaaaaggatcaga

SEQ ID NO: 1322575 - DNA, 25 bp, Homo sapien
ccaggtagatgaaaaagggatgtga

SEQ ID NO: 1322576 - DNA, 25 bp, Homo sapien
aaaggatcagattttgcaggtctgt

SEQ ID NO: 1322577 - DNA, 25 bp, Homo sapien
gagggtgtcagggttactgtcaagg

SEQ ID NO: 1322578 - DNA, 25 bp, Homo sapien
tctttgttgcatagtcccgggcaca

SEQ ID NO: 1322579 - DNA, 25 bp, Homo sapien
actttagtcctttgcgtgatgtaca

SEQ ID NO: 1322580 - DNA, 25 bp, Homo sapien
tctgatgatcgcctgggacaatggg

SEQ ID NO: 1322581 - DNA, 25 bp, Homo sapien
gcacatgacacacccttgataaagg

SEQ ID NO: 1322582 - DNA, 25 bp, Homo sapien
atggctgtaccttcatgcacacggg

SEQ ID NO: 1322583 - DNA, 25 bp, Homo sapien
tcctgaatgaggaaggctccttgcc

SEQ ID NO: 1322584 - DNA, 25 bp, Homo sapien
tctctgggaagttcatgggcttgca

SEQ ID NO: 1322585 - DNA, 25 bp, Homo sapien
tgtgcttttccgtgctgcagaccgg

SEQ ID NO: 1322586 - DNA, 25 bp, Homo sapien
aggacatccggaggacagaggaagg

SEQ ID NO: 1322587 - DNA, 25 bp, Homo sapien
tcagccaagggagaagacgggcaaa

SEQ ID NO: 1322588 - DNA, 25 bp, Homo sapien
aagacgggcaaagaggacatccgga

SEQ ID NO: 1322589 - DNA, 25 bp, Homo sapien
tggaaggaccgccagaggagggtga

SEQ ID NO: 1322590 - DNA, 25 bp, Homo sapien
gagagcaggctggatcccagatctg

SEQ ID NO: 1322591 - DNA, 25 bp, Homo sapien
gaaatgggggttgatgggaacctca

SEQ ID NO: 1322592 - DNA, 25 bp, Homo sapien
aaatgggggttgatgggaacctcag

SEQ ID NO: 1322593 - DNA, 25 bp, Homo sapien
agagcaggctggatcccagatctgc

SEQ ID NO: 1322594 - DNA, 25 bp, Homo sapien
ctagggcctataaggtgtgactgga

SEQ ID NO: 1322595 - DNA, 25 bp, Homo sapien
cagactttagccacacaggtttcca

SEQ ID NO: 1322596 - DNA, 25 bp, Homo sapien
tggccaggcctagggcctataaggt

SEQ ID NO: 1322597 - DNA, 25 bp, Homo sapien
tgctcagcagactttagccacacag

SEQ ID NO: 1322598 - DNA, 25 bp, Homo sapien
agagtgctgtgggcgggctcctgtc

SEQ ID NO: 1322599 - DNA, 25 bp, Homo sapien
gtgctgtgggcgggctcctgtcttc

SEQ ID NO: 1322600 - DNA, 25 bp, Homo sapien
gctgtgggcgggctcctgtcttcac

SEQ ID NO: 1322601 - DNA, 25 bp, Homo sapien
tcagagtgctgtgggcgggctcctg

SEQ ID NO: 1322602 - DNA, 25 bp, Homo sapien
cgggccaggcgtgacttgcagggag

SEQ ID NO: 1322603 - DNA, 25 bp, Homo sapien
ggccaggcgtgacttgcagggaggg

SEQ ID NO: 1322604 - DNA, 25 bp, Homo sapien
ccgtctccgggccaggcgtgacttg

SEQ ID NO: 1322605 - DNA, 25 bp, Homo sapien
gtctccgggccaggcgtgacttgca

SEQ ID NO: 1322606 - DNA, 25 bp, Homo sapien
agagcgtcaggtccattgtgctgct

SEQ ID NO: 1322607 - DNA, 25 bp, Homo sapien
gctgcgaagagcgtcaggtccattg

SEQ ID NO: 1322608 - DNA, 25 bp, Homo sapien
cgaagagcgtcaggtccattgtgct

SEQ ID NO: 1322609 - DNA, 25 bp, Homo sapien
tcagctgcgaagagcgtcaggtcca

SEQ ID NO: 1322610 - DNA, 25 bp, Homo sapien
tattatcactgtccgtctagtaccg

SEQ ID NO: 1322611 - DNA, 25 bp, Homo sapien
tgaataacccatgggtaaggtctgt

SEQ ID NO: 1322612 - DNA, 25 bp, Homo sapien
ggacttaatcctggtggccactatt

SEQ ID NO: 1322613 - DNA, 25 bp, Homo sapien
tttcattaaatacaagggcagaggg

SEQ ID NO: 1322614 - DNA, 25 bp, Homo sapien
tggggagtcccttttctggagcttg

SEQ ID NO: 1322615 - DNA, 25 bp, Homo sapien
ctctggaggacttgcggcgtgggga

SEQ ID NO: 1322616 - DNA, 25 bp, Homo sapien
aggacttgcggcgtggggagtccct

SEQ ID NO: 1322617 - DNA, 25 bp, Homo sapien
cgtggggagtcccttttctggagct

SEQ ID NO: 1322618 - DNA, 25 bp, Homo sapien
cttgggcggcgctaagtctctgctt

SEQ ID NO: 1322619 - DNA, 25 bp, Homo sapien
tgctgcagaacttgggcggcgctaa

SEQ ID NO: 1322620 - DNA, 25 bp, Homo sapien
ctcgcaccaggagcttggagatgag

SEQ ID NO: 1322621 - DNA, 25 bp, Homo sapien
tctgctttgcatctcgcaccaggag

SEQ ID NO: 1322622 - DNA, 25 bp, Homo sapien
agcgcttgtcgtagaatgtggcctg

SEQ ID NO: 1322623 - DNA, 25 bp, Homo sapien
ctggtccgtgaagacctccactacc

SEQ ID NO: 1322624 - DNA, 25 bp, Homo sapien
cgtgaagacctccactacctcaggg

SEQ ID NO: 1322625 - DNA, 25 bp, Homo sapien
cgcttgtcgtagaatgtggcctggt

SEQ ID NO: 1322626 - DNA, 25 bp, Homo sapien
agagactatcctgtccagtcaggga

SEQ ID NO: 1322627 - DNA, 25 bp, Homo sapien
gcgatcccatgtgcatatagcctga

SEQ ID NO: 1322628 - DNA, 25 bp, Homo sapien
cagttcccaccacagagagactatc

SEQ ID NO: 1322629 - DNA, 25 bp, Homo sapien
gcaaacaggctaacttggccaagcg

SEQ ID NO: 1322630 - DNA, 25 bp, Homo sapien
gctcatatgcaaaagggctggcctg

SEQ ID NO: 1322631 - DNA, 25 bp, Homo sapien
taggacttacagaactacccaaatg

SEQ ID NO: 1322632 - DNA, 25 bp, Homo sapien
tgtgccttcagcagtgggaatagga

SEQ ID NO: 1322633 - DNA, 25 bp, Homo sapien
tgggaataggacttacagaactacc

SEQ ID NO: 1322634 - DNA, 25 bp, Homo sapien
tgtcagtttcgttagcaactaaggg

SEQ ID NO: 1322635 - DNA, 25 bp, Homo sapien
cccaactaacagtccaagtgtcagt

SEQ ID NO: 1322636 - DNA, 25 bp, Homo sapien
agagaggacccaacccaactaacag

SEQ ID NO: 1322637 - DNA, 25 bp, Homo sapien
tccaagtgtcagtttcgttagcaac

SEQ ID NO: 1322638 - DNA, 25 bp, Homo sapien
gcaggaagataggtccacttggttt

SEQ ID NO: 1322639 - DNA, 25 bp, Homo sapien
aacactccaaatacttaggagccca

SEQ ID NO: 1322640 - DNA, 25 bp, Homo sapien
gataggtccacttggttttccatcc

SEQ ID NO: 1322641 - DNA, 25 bp, Homo sapien
ctccaaatacttaggagcccagagg

SEQ ID NO: 1322642 - DNA, 25 bp, Homo sapien
gagttgttcagtttcatcccactgc

SEQ ID NO: 1322643 - DNA, 25 bp, Homo sapien
gtacaggagttgttcagtttcatcc

SEQ ID NO: 1322644 - DNA, 25 bp, Homo sapien
aagtcacagattttcactggagaca

SEQ ID NO: 1322645 - DNA, 25 bp, Homo sapien
aaagtcacagattttcactggagac

SEQ ID NO: 1322646 - DNA, 25 bp, Homo sapien
tgtagagttttaggaatcctttata

SEQ ID NO: 1322647 - DNA, 25 bp, Homo sapien
tcaatcacactgatgatcaagagcg

SEQ ID NO: 1322648 - DNA, 25 bp, Homo sapien
tcaagagcgaagaaaggacgaggat

SEQ ID NO: 1322649 - DNA, 25 bp, Homo sapien
catcacacagtaagtgtaacattct

SEQ ID NO: 1322650 - DNA, 25 bp, Homo sapien
gaaacatcacacagtaagtgtaaca

SEQ ID NO: 1322651 - DNA, 25 bp, Homo sapien
tgtccaagacgatcagttcaagttg

SEQ ID NO: 1322652 - DNA, 25 bp, Homo sapien
tggcttcctcggtaagtataaacta

SEQ ID NO: 1322653 - DNA, 25 bp, Homo sapien
tgtctgaggccaacggaactgctaa

SEQ ID NO: 1322654 - DNA, 25 bp, Homo sapien
gaactgctaacaatccatcctgaaa

SEQ ID NO: 1322655 - DNA, 25 bp, Homo sapien
ggtttcagatcacgatgagcaatgc

SEQ ID NO: 1322656 - DNA, 25 bp, Homo sapien
ttttctggtttcagatcacgatgag

SEQ ID NO: 1322657 - DNA, 25 bp, Homo sapien
cttttctggagattcacacaatata

SEQ ID NO: 1322658 - DNA, 25 bp, Homo sapien
ctggagattcacacaatatattttc

SEQ ID NO: 1322659 - DNA, 25 bp, Homo sapien
gtaggcattattactgagagaacac

SEQ ID NO: 1322660 - DNA, 25 bp, Homo sapien
gggtaggcattattactgagagaac

SEQ ID NO: 1322661 - DNA, 25 bp, Homo sapien
taggcattattactgagagaacaca

SEQ ID NO: 1322662 - DNA, 25 bp, Homo sapien
ggtaggcattattactgagagaaca

SEQ ID NO: 1322663 - DNA, 25 bp, Homo sapien
gtgagccctgatggcgccatagcac

SEQ ID NO: 1322664 - DNA, 25 bp, Homo sapien
tggagcccagggaggttggggctgc

SEQ ID NO: 1322665 - DNA, 25 bp, Homo sapien
actggagcccagggaggttggggct

SEQ ID NO: 1322666 - DNA, 25 bp, Homo sapien
gcagtgagccctgatggcgccatag

SEQ ID NO: 1322667 - DNA, 25 bp, Homo sapien
tctcgctcattgaagtgcttttgct

SEQ ID NO: 1322668 - DNA, 25 bp, Homo sapien
ttctggatgtgggctaagatggaac

SEQ ID NO: 1322669 - DNA, 25 bp, Homo sapien
cactcggctggcttctcgctcattg

SEQ ID NO: 1322670 - DNA, 25 bp, Homo sapien
gggcagcagcaacgtcccgcaccac

SEQ ID NO: 1322671 - DNA, 25 bp, Homo sapien
gggtctggcctcaataagctacatt

SEQ ID NO: 1322672 - DNA, 25 bp, Homo sapien
tgtacctgtctatgaggagctcaga

SEQ ID NO: 1322673 - DNA, 25 bp, Homo sapien
gcgcctggccgtataacttcttaga

SEQ ID NO: 1322674 - DNA, 25 bp, Homo sapien
gacatagggattcatcgctgactca

SEQ ID NO: 1322675 - DNA, 25 bp, Homo sapien
caatgtatttgagagcttccacccc

SEQ ID NO: 1322676 - DNA, 25 bp, Homo sapien
tgttggtttctaaagcacgctccct

SEQ ID NO: 1322677 - DNA, 25 bp, Homo sapien
cacaggtgacattctaagctctgca

SEQ ID NO: 1322678 - DNA, 25 bp, Homo sapien
tattgggcccttagtgcctaccaga

SEQ ID NO: 1322679 - DNA, 25 bp, Homo sapien
gattcatgatggatgatcaccaccc

SEQ ID NO: 1322680 - DNA, 25 bp, Homo sapien
taatcagaagtccacacacatactc

SEQ ID NO: 1322681 - DNA, 25 bp, Homo sapien
tgactcgttttggaagtctctggga

SEQ ID NO: 1322682 - DNA, 25 bp, Homo sapien
accaccctgggtcttaatcagaagt

SEQ ID NO: 1322683 - DNA, 25 bp, Homo sapien
caagtaaaaccttgtgtcatcttca

SEQ ID NO: 1322684 - DNA, 25 bp, Homo sapien
gtcatcttcaaagaactcaatcagc

SEQ ID NO: 1322685 - DNA, 25 bp, Homo sapien
aagtaaaaccttgtgtcatcttcaa

SEQ ID NO: 1322686 - DNA, 25 bp, Homo sapien
tgtgtcatcttcaaagaactcaatc

SEQ ID NO: 1322687 - DNA, 25 bp, Homo sapien
aaaatatacaacacctggtagtggg

SEQ ID NO: 1322688 - DNA, 25 bp, Homo sapien
gaaaccaacttgaaatcagaatgct

SEQ ID NO: 1322689 - DNA, 25 bp, Homo sapien
gccaatggtgttagcaagattcagg

SEQ ID NO: 1322690 - DNA, 25 bp, Homo sapien
ttaaagacccgcgtatggaagcagc

SEQ ID NO: 1322691 - DNA, 25 bp, Homo sapien
ccataatgtttagtctctggtgttt

SEQ ID NO: 1322692 - DNA, 25 bp, Homo sapien
ccaagtctgtgctgtcaaaccccag

SEQ ID NO: 1322693 - DNA, 25 bp, Homo sapien
tagtctctggtgttttcaccaagtc

SEQ ID NO: 1322694 - DNA, 25 bp, Homo sapien
tgtgctgtcaaaccccagccctaaa

SEQ ID NO: 1322695 - DNA, 25 bp, Homo sapien
gcaattgcggctaataacactgaat

SEQ ID NO: 1322696 - DNA, 25 bp, Homo sapien
ggctaataacactgaatactaggtg

SEQ ID NO: 1322697 - DNA, 25 bp, Homo sapien
actggaagcaattgcggctaataac

SEQ ID NO: 1322698 - DNA, 25 bp, Homo sapien
gcagccgactggaagcaattgcggc

SEQ ID NO: 1322699 - DNA, 25 bp, Homo sapien
gaaacatctgtcaaatggacttggg

SEQ ID NO: 1322700 - DNA, 25 bp, Homo sapien
agcaaataattacttgccctccctc

SEQ ID NO: 1322701 - DNA, 25 bp, Homo sapien
cattgcctggagaaaatggaaacat

SEQ ID NO: 1322702 - DNA, 25 bp, Homo sapien
taacatgggcaccgctagaccctaa

SEQ ID NO: 1322703 - DNA, 25 bp, Homo sapien
tgtaactcagtagggaagccaccag

SEQ ID NO: 1322704 - DNA, 25 bp, Homo sapien
tcagtgctctgccaacaaggtcgtc

SEQ ID NO: 1322705 - DNA, 25 bp, Homo sapien
tgagcactctctgtctgcccgagta

SEQ ID NO: 1322706 - DNA, 25 bp, Homo sapien
taagcgctgcttaatgaaacggccg

SEQ ID NO: 1322707 - DNA, 25 bp, Homo sapien
ccccagagaagcagcgagaatcaca

SEQ ID NO: 1322708 - DNA, 25 bp, Homo sapien
ggcagtgcctggagttaaatcaaca

SEQ ID NO: 1322709 - DNA, 25 bp, Homo sapien
gaagtggagtcttagaggtgcccct

SEQ ID NO: 1322710 - DNA, 25 bp, Homo sapien
gcttttactagtgtgaaggcatcca

SEQ ID NO: 1322711 - DNA, 25 bp, Homo sapien
tttccctgacactgatacagcgtct

SEQ ID NO: 1322712 - DNA, 25 bp, Homo sapien
tgacactgatacagcgtctccacct

SEQ ID NO: 1322713 - DNA, 25 bp, Homo sapien
tcgaaacaccctactccgactgtgc

SEQ ID NO: 1322714 - DNA, 25 bp, Homo sapien
tgtgccctgcttgtttctcgatgat

SEQ ID NO: 1322715 - DNA, 25 bp, Homo sapien
ctgacttccaaacagccctttggca

SEQ ID NO: 1322716 - DNA, 25 bp, Homo sapien
ttccaaacagccctttggcaggagt

SEQ ID NO: 1322717 - DNA, 25 bp, Homo sapien
caaacagccctttggcaggagtcct

SEQ ID NO: 1322718 - DNA, 25 bp, Homo sapien
tgacttccaaacagccctttggcag

SEQ ID NO: 1322719 - DNA, 25 bp, Homo sapien
tctaacttcttcgaggacctggagg

SEQ ID NO: 1322720 - DNA, 25 bp, Homo sapien
tctcctgtgatacggtgggctgctc

SEQ ID NO: 1322721 - DNA, 25 bp, Homo sapien
cacttttacctgagatgcttgtcaa

SEQ ID NO: 1322722 - DNA, 25 bp, Homo sapien
cctccacacttttacctgagatgct

SEQ ID NO: 1322723 - DNA, 25 bp, Homo sapien
gcttacggacatttgatgacttgcc

SEQ ID NO: 1322724 - DNA, 25 bp, Homo sapien
gaagggcaggtatcatcatttagag

SEQ ID NO: 1322725 - DNA, 25 bp, Homo sapien
cagtgaatacagcttcagagtcccc

SEQ ID NO: 1322726 - DNA, 25 bp, Homo sapien
taacttgcccgaggtacacagtaag

SEQ ID NO: 1322727 - DNA, 25 bp, Homo sapien
gaatgactatttgcaaagtaaagcc

SEQ ID NO: 1322728 - DNA, 25 bp, Homo sapien
gatgagctaggaatgactatttgca

SEQ ID NO: 1322729 - DNA, 25 bp, Homo sapien
tatttggttcaagatgagctaggaa

SEQ ID NO: 1322730 - DNA, 25 bp, Homo sapien
tatttgcaaagtaaagcctggcatt

SEQ ID NO: 1322731 - DNA, 25 bp, Homo sapien
gctcacggcaccttgaactttggca

SEQ ID NO: 1322732 - DNA, 25 bp, Homo sapien
tgaactttggcataggctccctctc

SEQ ID NO: 1322733 - DNA, 25 bp, Homo sapien
caattcagaggtcagcttgtacata

SEQ ID NO: 1322734 - DNA, 25 bp, Homo sapien
taggctccctctccaagcaattcag

SEQ ID NO: 1322735 - DNA, 25 bp, Homo sapien
ccacaggaaatagaagtaggatgca

SEQ ID NO: 1322736 - DNA, 25 bp, Homo sapien
ttgaggtttttagggtactgagtca

SEQ ID NO: 1322737 - DNA, 25 bp, Homo sapien
agtctccagaagtcacccacaggaa

SEQ ID NO: 1322738 - DNA, 25 bp, Homo sapien
cccatacatggaagtcattggaggc

SEQ ID NO: 1322739 - DNA, 25 bp, Homo sapien
atatagttctatctctcagcagccc

SEQ ID NO: 1322740 - DNA, 25 bp, Homo sapien
cttatatagttctatctctcagcag

SEQ ID NO: 1322741 - DNA, 25 bp, Homo sapien
gaagtttcatttgcggccatggcct

SEQ ID NO: 1322742 - DNA, 25 bp, Homo sapien
gagactgaagtttcatttgcggcca

SEQ ID NO: 1322743 - DNA, 25 bp, Homo sapien
tcctcctcctgtcaccatctgcgat

SEQ ID NO: 1322744 - DNA, 25 bp, Homo sapien
ctgtcaccatctgcgatgggaaggg

SEQ ID NO: 1322745 - DNA, 25 bp, Homo sapien
ctggcaaggagtcagtggcccggcc

SEQ ID NO: 1322746 - DNA, 25 bp, Homo sapien
tgggaaggggttcgctactgcccat

SEQ ID NO: 1322747 - DNA, 25 bp, Homo sapien
agagtggagctttaatactctttgc

SEQ ID NO: 1322748 - DNA, 25 bp, Homo sapien
catgtcatgcccctgatccagagtg

SEQ ID NO: 1322749 - DNA, 25 bp, Homo sapien
tcatgcccctgatccagagtggagc

SEQ ID NO: 1322750 - DNA, 25 bp, Homo sapien
cccctgatccagagtggagctttaa

SEQ ID NO: 1322751 - DNA, 25 bp, Homo sapien
aaagcatggttacgcagccaagtgc

SEQ ID NO: 1322752 - DNA, 25 bp, Homo sapien
tctcagacgcaagtacgtgacagcc

SEQ ID NO: 1322753 - DNA, 25 bp, Homo sapien
ctcagaggatctggcggcatacgac

SEQ ID NO: 1322754 - DNA, 25 bp, Homo sapien
catacgaccagagaaagagcaagtc

SEQ ID NO: 1322755 - DNA, 25 bp, Homo sapien
ctggtatattctgcatggatttcaa

SEQ ID NO: 1322756 - DNA, 25 bp, Homo sapien
aaatggaacttggagagttgtttct

SEQ ID NO: 1322757 - DNA, 25 bp, Homo sapien
gccagaagggacaaatggttaagac

SEQ ID NO: 1322758 - DNA, 25 bp, Homo sapien
tgaaagagggtacgccagaagggac

SEQ ID NO: 1322759 - DNA, 25 bp, Homo sapien
tggagcctggccacacactattttc

SEQ ID NO: 1322760 - DNA, 25 bp, Homo sapien
atcacagagtccactagcaggtctg

SEQ ID NO: 1322761 - DNA, 25 bp, Homo sapien
gagaggtgtcataatctcaccaagg

SEQ ID NO: 1322762 - DNA, 25 bp, Homo sapien
tgcttagcttccctggttacacagg

SEQ ID NO: 1322763 - DNA, 25 bp, Homo sapien
tctcctacagatcatggcacagtgt

SEQ ID NO: 1322764 - DNA, 25 bp, Homo sapien
gaaacatgggtacaactttgccctg

SEQ ID NO: 1322765 - DNA, 25 bp, Homo sapien
tgccctgtagacaatgcagagtaag

SEQ ID NO: 1322766 - DNA, 25 bp, Homo sapien
taggtacccagtgcacatcctgaaa

SEQ ID NO: 1322767 - DNA, 25 bp, Homo sapien
gccttctcgggcatcagctagctga

SEQ ID NO: 1322768 - DNA, 25 bp, Homo sapien
tcttaaggaagtggccaagactaag

SEQ ID NO: 1322769 - DNA, 25 bp, Homo sapien
gagtccacatgactactcctagtag

SEQ ID NO: 1322770 - DNA, 25 bp, Homo sapien
tagccggagcagtattagagtccac

SEQ ID NO: 1322771 - DNA, 25 bp, Homo sapien
ctctactaaaaacaaaaattagctg

SEQ ID NO: 1322772 - DNA, 25 bp, Homo sapien
ccagctactcaggaagctgaggcag

SEQ ID NO: 1322773 - DNA, 25 bp, Homo sapien
ggtgtggtggtgcacgcctgtaatc

SEQ ID NO: 1322774 - DNA, 25 bp, Homo sapien
tggctaacatgatgaaacccgtctc

SEQ ID NO: 1322775 - DNA, 25 bp, Homo sapien
tttccaacttttgagaagataccat

SEQ ID NO: 1322776 - DNA, 25 bp, Homo sapien
ttttccaacttttgagaagatacca

SEQ ID NO: 1322777 - DNA, 25 bp, Homo sapien
aatcccaaatgaaataaagctcctg

SEQ ID NO: 1322778 - DNA, 25 bp, Homo sapien
ctttgtgcgtaggtggcaatcttca

SEQ ID NO: 1322779 - DNA, 25 bp, Homo sapien
caatggcctttgtgcgtaggtggca

SEQ ID NO: 1322780 - DNA, 25 bp, Homo sapien
ctacacgaagtgtctcaatggcctt

SEQ ID NO: 1322781 - DNA, 25 bp, Homo sapien
tacacgaagtgtctcaatggccttt

SEQ ID NO: 1322782 - DNA, 25 bp, Homo sapien
cgcttcatgcaatctgagttgccat

SEQ ID NO: 1322783 - DNA, 25 bp, Homo sapien
tggcttcgcttcatgcaatctgagt

SEQ ID NO: 1322784 - DNA, 25 bp, Homo sapien
gcttcgcttcatgcaatctgagttg

SEQ ID NO: 1322785 - DNA, 25 bp, Homo sapien
ccatggcttcgcttcatgcaatctg

SEQ ID NO: 1322786 - DNA, 25 bp, Homo sapien
ctttccctgtggacagccatccaca

SEQ ID NO: 1322787 - DNA, 25 bp, Homo sapien
catccacacaggcaggagcctttaa

SEQ ID NO: 1322788 - DNA, 25 bp, Homo sapien
ttccctgtggacagccatccacaca

SEQ ID NO: 1322789 - DNA, 25 bp, Homo sapien
ccacacaggcaggagcctttaaata

SEQ ID NO: 1322790 - DNA, 25 bp, Homo sapien
tcccgccggggagcggtcgcgcgca

SEQ ID NO: 1322791 - DNA, 25 bp, Homo sapien
tggctcccgccggggagcggtcgcg

SEQ ID NO: 1322792 - DNA, 25 bp, Homo sapien
gctcccgccggggagcggtcgcgcg

SEQ ID NO: 1322793 - DNA, 25 bp, Homo sapien
cgctggctcccgccggggagcggtc

SEQ ID NO: 1322794 - DNA, 25 bp, Homo sapien
ctgatggctacccagggccgcctga

SEQ ID NO: 1322795 - DNA, 25 bp, Homo sapien
gtgggcccgatcagagaggagggtg

SEQ ID NO: 1322796 - DNA, 25 bp, Homo sapien
ggaagaggcggtgctagatccaggg

SEQ ID NO: 1322797 - DNA, 25 bp, Homo sapien
ctcctccgagaacgcggaagaggcg

SEQ ID NO: 1322798 - DNA, 25 bp, Homo sapien
tatgtagcaattgatgggccctgcg

SEQ ID NO: 1322799 - DNA, 25 bp, Homo sapien
ccccaggaggacacgtataatacag

SEQ ID NO: 1322800 - DNA, 25 bp, Homo sapien
cggtttaggaactcaaggcaaggct

SEQ ID NO: 1322801 - DNA, 25 bp, Homo sapien
taatggagtgctgcgtgaacatccc

SEQ ID NO: 1322802 - DNA, 25 bp, Homo sapien
tcagtggcagatccgctctgtcatc

SEQ ID NO: 1322803 - DNA, 25 bp, Homo sapien
gtggcagatccgctctgtcatctcc

SEQ ID NO: 1322804 - DNA, 25 bp, Homo sapien
ggcagatccgctctgtcatctccct

SEQ ID NO: 1322805 - DNA, 25 bp, Homo sapien
cagtggcagatccgctctgtcatct

SEQ ID NO: 1322806 - DNA, 25 bp, Homo sapien
ggtccaccagactgaactcgcggat

SEQ ID NO: 1322807 - DNA, 25 bp, Homo sapien
catgctgaggatgctatcgaagtgg

SEQ ID NO: 1322808 - DNA, 25 bp, Homo sapien
catggacaaagactcggaagaggcg

SEQ ID NO: 1322809 - DNA, 25 bp, Homo sapien
cagacctgctggaagttcttaggga

SEQ ID NO: 1322810 - DNA, 25 bp, Homo sapien
gcaatgccatatagcgcggcgcaga

SEQ ID NO: 1322811 - DNA, 25 bp, Homo sapien
gatgaggccttcgatccagtccatg

SEQ ID NO: 1322812 - DNA, 25 bp, Homo sapien
tcgtcgatgttctccccgggtggta

SEQ ID NO: 1322813 - DNA, 25 bp, Homo sapien
aacacgcgtgggaaagacctcttcg

SEQ ID NO: 1322814 - DNA, 25 bp, Homo sapien
ccaggggctcggacctgaggatacc

SEQ ID NO: 1322815 - DNA, 25 bp, Homo sapien
ctgctgtccaggggctcggacctga

SEQ ID NO: 1322816 - DNA, 25 bp, Homo sapien
tgtccaggggctcggacctgaggat

SEQ ID NO: 1322817 - DNA, 25 bp, Homo sapien
gctgtccaggggctcggacctgagg

SEQ ID NO: 1322818 - DNA, 25 bp, Homo sapien
cttgctgttggtcacgagagaggtc

SEQ ID NO: 1322819 - DNA, 25 bp, Homo sapien
cctctttccaggctatgttagtccc

SEQ ID NO: 1322820 - DNA, 25 bp, Homo sapien
ggaatctaagtcctcagcccctagg

SEQ ID NO: 1322821 - DNA, 25 bp, Homo sapien
ggtcaaggccttatcatctgggctc

SEQ ID NO: 1322822 - DNA, 25 bp, Homo sapien
acgtgggagagcctcgcagcattgt

SEQ ID NO: 1322823 - DNA, 25 bp, Homo sapien
cttggacgagatgacctctgggagc

SEQ ID NO: 1322824 - DNA, 25 bp, Homo sapien
acaggggcttggacgagatgacctc

SEQ ID NO: 1322825 - DNA, 25 bp, Homo sapien
agctggtgcaacgtgggagagcctc

SEQ ID NO: 1322826 - DNA, 25 bp, Homo sapien
taccactggcttactgggtgacccc

SEQ ID NO: 1322827 - DNA, 25 bp, Homo sapien
gagggcgtcgcttcctctgacaaca

SEQ ID NO: 1322828 - DNA, 25 bp, Homo sapien
tggatttagcccatccaggtcctgg

SEQ ID NO: 1322829 - DNA, 25 bp, Homo sapien
tcctgggtcactctgctatagctag

SEQ ID NO: 1322830 - DNA, 25 bp, Homo sapien
ctgaggcttgcttatggccaaagcc

SEQ ID NO: 1322831 - DNA, 25 bp, Homo sapien
aggcttgcttatggccaaagcctgg

SEQ ID NO: 1322832 - DNA, 25 bp, Homo sapien
cctgaggcttgcttatggccaaagc

SEQ ID NO: 1322833 - DNA, 25 bp, Homo sapien
cttatggccaaagcctgggcttgac

SEQ ID NO: 1322834 - DNA, 25 bp, Homo sapien
cactgtcctttctcacatctctggt

SEQ ID NO: 1322835 - DNA, 25 bp, Homo sapien
gcactgtcctttctcacatctctgg

SEQ ID NO: 1322836 - DNA, 25 bp, Homo sapien
actgtcctttctcacatctctggta

SEQ ID NO: 1322837 - DNA, 25 bp, Homo sapien
tgtcctttctcacatctctggtaac

SEQ ID NO: 1322838 - DNA, 25 bp, Homo sapien
ctggtaaaatgagagcagcttggag

SEQ ID NO: 1322839 - DNA, 25 bp, Homo sapien
ttccttgaacccacaaaggcaggcc

SEQ ID NO: 1322840 - DNA, 25 bp, Homo sapien
tgacacctgggtaaaagcaaaggga

SEQ ID NO: 1322841 - DNA, 25 bp, Homo sapien
cttggagagtagaaacaggccattc

SEQ ID NO: 1322842 - DNA, 25 bp, Homo sapien
gactcttcgacttctcacccaaaga

SEQ ID NO: 1322843 - DNA, 25 bp, Homo sapien
tccagagcaaagagatttctgcgct

SEQ ID NO: 1322844 - DNA, 25 bp, Homo sapien
gagcaaagagatttctgcgcttcat

SEQ ID NO: 1322845 - DNA, 25 bp, Homo sapien
tcatctcatccatcccgactcttcg

SEQ ID NO: 1322846 - DNA, 25 bp, Homo sapien
ttggggcaagtgcttccaaaatccc

SEQ ID NO: 1322847 - DNA, 25 bp, Homo sapien
cacactgcaattaggcggggctcct

SEQ ID NO: 1322848 - DNA, 25 bp, Homo sapien
ccacattgcatggccccctttatga

SEQ ID NO: 1322849 - DNA, 25 bp, Homo sapien
tgacagttagaaataggcccccacc

SEQ ID NO: 1322850 - DNA, 25 bp, Homo sapien
attcctgaacacgcccccactcttt

SEQ ID NO: 1322851 - DNA, 25 bp, Homo sapien
tgattcctgaacacgcccccactct

SEQ ID NO: 1322852 - DNA, 25 bp, Homo sapien
tcctgaacacgcccccactcttttg

SEQ ID NO: 1322853 - DNA, 25 bp, Homo sapien
ctgattcctgaacacgcccccactc

SEQ ID NO: 1322854 - DNA, 25 bp, Homo sapien
aggatggccccagtttgaacccaga

SEQ ID NO: 1322855 - DNA, 25 bp, Homo sapien
aaaagtagaggcgaagactccacgc

SEQ ID NO: 1322856 - DNA, 25 bp, Homo sapien
taggctacatctaccactccttggg

SEQ ID NO: 1322857 - DNA, 25 bp, Homo sapien
ggcaggtgctcttctagccacaggg

SEQ ID NO: 1322858 - DNA, 25 bp, Homo sapien
gggtcctcttctggccgtggggtca

SEQ ID NO: 1322859 - DNA, 25 bp, Homo sapien
caggtcccgcagtgcctgttctctc

SEQ ID NO: 1322860 - DNA, 25 bp, Homo sapien
ctcctgccccgggcgacgccagctc

SEQ ID NO: 1322861 - DNA, 25 bp, Homo sapien
ggccgtggggtcacattcccagcca

SEQ ID NO: 1322862 - DNA, 25 bp, Homo sapien
acatcagaaattcccagctcatcct

SEQ ID NO: 1322863 - DNA, 25 bp, Homo sapien
acagagataagtcctggccctcaag

SEQ ID NO: 1322864 - DNA, 25 bp, Homo sapien
tgcgaacagagataagtcctggccc

SEQ ID NO: 1322865 - DNA, 25 bp, Homo sapien
aacagagataagtcctggccctcaa

SEQ ID NO: 1322866 - DNA, 25 bp, Homo sapien
cactgcgaacagagataagtcctgg

SEQ ID NO: 1322867 - DNA, 25 bp, Homo sapien
cacccgctggtggaggtgtatcaat

SEQ ID NO: 1322868 - DNA, 25 bp, Homo sapien
ggtactttagtcatgccccacacat

SEQ ID NO: 1322869 - DNA, 25 bp, Homo sapien
gccactatgggagacaaagaacaga

SEQ ID NO: 1322870 - DNA, 25 bp, Homo sapien
ctataacaccatgctagcaccaggg

SEQ ID NO: 1322871 - DNA, 25 bp, Homo sapien
tatttaaagagcttagggacaggcc

SEQ ID NO: 1322872 - DNA, 25 bp, Homo sapien
tcttgggacccaaaacattcagaag

SEQ ID NO: 1322873 - DNA, 25 bp, Homo sapien
taaccagatcttaggcaggagcagc

SEQ ID NO: 1322874 - DNA, 25 bp, Homo sapien
ttcagaaggctggtgtgtaaccacc

SEQ ID NO: 1322875 - DNA, 25 bp, Homo sapien
tgagtcaactaggtgaagggccaac

SEQ ID NO: 1322876 - DNA, 25 bp, Homo sapien
tagaaaagcgggtgccacaaactat

SEQ ID NO: 1322877 - DNA, 25 bp, Homo sapien
ggtttaatagtatgcaggccctgta

SEQ ID NO: 1322878 - DNA, 25 bp, Homo sapien
gagctataaggtcaaagtggccaga

SEQ ID NO: 1322879 - DNA, 25 bp, Homo sapien
ctaagtcttattttggttctgggca

SEQ ID NO: 1322880 - DNA, 25 bp, Homo sapien
taagtcttattttggttctgggcac

SEQ ID NO: 1322881 - DNA, 25 bp, Homo sapien
ccaagtccgctttgctccaattcag

SEQ ID NO: 1322882 - DNA, 25 bp, Homo sapien
ggtctgaggttaaaggtctccacta

SEQ ID NO: 1322883 - DNA, 25 bp, Homo sapien
ttcagcgatgacagacatatatttg

SEQ ID NO: 1322884 - DNA, 25 bp, Homo sapien
catatatttgaactcatttggtctg

SEQ ID NO: 1322885 - DNA, 25 bp, Homo sapien
ttggcgatgcactgtgcctcagcaa

SEQ ID NO: 1322886 - DNA, 25 bp, Homo sapien
tagaagagctgaacttggttggcga

SEQ ID NO: 1322887 - DNA, 25 bp, Homo sapien
ttccgatcagtagcgtagaagagct

SEQ ID NO: 1322888 - DNA, 25 bp, Homo sapien
ccgtaggtctctttccgatcagtag

SEQ ID NO: 1322889 - DNA, 25 bp, Homo sapien
agaataatgaggtcctttcttgcac

SEQ ID NO: 1322890 - DNA, 25 bp, Homo sapien
aaagaataatgaggtcctttcttgc

SEQ ID NO: 1322891 - DNA, 25 bp, Homo sapien
aagaataatgaggtcctttcttgca

SEQ ID NO: 1322892 - DNA, 25 bp, Homo sapien
taagacagcaacagttacccagctc

SEQ ID NO: 1322893 - DNA, 25 bp, Homo sapien
tgggtaatggctatactcagtgact

SEQ ID NO: 1322894 - DNA, 25 bp, Homo sapien
gagaactaagttcttgactaaccag

SEQ ID NO: 1322895 - DNA, 25 bp, Homo sapien
tacccagctctaagaaccagtttgt

SEQ ID NO: 1322896 - DNA, 25 bp, Homo sapien
taggataggaaggtaagacacagag

SEQ ID NO: 1322897 - DNA, 25 bp, Homo sapien
tccctgtgctgctcaataaagaggt

SEQ ID NO: 1322898 - DNA, 25 bp, Homo sapien
cactgctgtagttcaagttttcacc

SEQ ID NO: 1322899 - DNA, 25 bp, Homo sapien
tacaatcaacgcaccaagtcctgac

SEQ ID NO: 1322900 - DNA, 25 bp, Homo sapien
ccttaagttcaggatagtgatataa

SEQ ID NO: 1322901 - DNA, 25 bp, Homo sapien
aagttcaggatagtgatataaaatc

SEQ ID NO: 1322902 - DNA, 25 bp, Homo sapien
ttccttaagttcaggatagtgatat

SEQ ID NO: 1322903 - DNA, 25 bp, Homo sapien
gttcaggatagtgatataaaatcag

SEQ ID NO: 1322904 - DNA, 25 bp, Homo sapien
ctgcaaggtggaacacttatcaagg

SEQ ID NO: 1322905 - DNA, 25 bp, Homo sapien
gctcaataaggtaccatcacaacaa

SEQ ID NO: 1322906 - DNA, 25 bp, Homo sapien
ttatcaaggctcaataaggtaccat

SEQ ID NO: 1322907 - DNA, 25 bp, Homo sapien
tcaaggctcaataaggtaccatcac

SEQ ID NO: 1322908 - DNA, 25 bp, Homo sapien
gatgggttcaaagctaaagccccta

SEQ ID NO: 1322909 - DNA, 25 bp, Homo sapien
ccagatttgtaatgtgcagctctaa

SEQ ID NO: 1322910 - DNA, 25 bp, Homo sapien
ctagggtacttgtaatagttcagca

SEQ ID NO: 1322911 - DNA, 25 bp, Homo sapien
cagggcagtggttactaaatctcaa

SEQ ID NO: 1322912 - DNA, 25 bp, Homo sapien
tggagttcagtacctgtccattgtc

SEQ ID NO: 1322913 - DNA, 25 bp, Homo sapien
agtgcagtgaagtggagttcagtac

SEQ ID NO: 1322914 - DNA, 25 bp, Homo sapien
ctgtccattgtcctacaaaaaactc

SEQ ID NO: 1322915 - DNA, 25 bp, Homo sapien
taagtgcagtgaagtggagttcagt

SEQ ID NO: 1322916 - DNA, 25 bp, Homo sapien
cagagcactataacatgtgagacag

SEQ ID NO: 1322917 - DNA, 25 bp, Homo sapien
tattagtacaatcaacatgtgagca

SEQ ID NO: 1322918 - DNA, 25 bp, Homo sapien
cagtatggaatatgacgtgatgggc

SEQ ID NO: 1322919 - DNA, 25 bp, Homo sapien
taagcaacccttacgtgatcaccag

SEQ ID NO: 1322920 - DNA, 25 bp, Homo sapien
ggacaggactgagcccggttccaga

SEQ ID NO: 1322921 - DNA, 25 bp, Homo sapien
ggactgagcccggttccagatcaaa

SEQ ID NO: 1322922 - DNA, 25 bp, Homo sapien
gttggacaggactgagcccggttcc

SEQ ID NO: 1322923 - DNA, 25 bp, Homo sapien
gactgagcccggttccagatcaaat

SEQ ID NO: 1322924 - DNA, 25 bp, Homo sapien
aagaataaagttaacctacacatag

SEQ ID NO: 1322925 - DNA, 25 bp, Homo sapien
gaataaagttaacctacacatagta

SEQ ID NO: 1322926 - DNA, 25 bp, Homo sapien
agaataaagttaacctacacatagt

SEQ ID NO: 1322927 - DNA, 25 bp, Homo sapien
tttcatgttgtaacactttcacttt

SEQ ID NO: 1322928 - DNA, 25 bp, Homo sapien
tcatgttgtaacactttcactttgc

SEQ ID NO: 1322929 - DNA, 25 bp, Homo sapien
ttcactttgccctccaaactactta

SEQ ID NO: 1322930 - DNA, 25 bp, Homo sapien
cactttcactttgccctccaaacta

SEQ ID NO: 1322931 - DNA, 25 bp, Homo sapien
gaataactgcgtagactgtatcttt

SEQ ID NO: 1322932 - DNA, 25 bp, Homo sapien
taactgcgtagactgtatcttttgc

SEQ ID NO: 1322933 - DNA, 25 bp, Homo sapien
ctgcgtagactgtatcttttgctgc

SEQ ID NO: 1322934 - DNA, 25 bp, Homo sapien
aggaataactgcgtagactgtatct

SEQ ID NO: 1322935 - DNA, 25 bp, Homo sapien
ttactagctatactaccttgggcaa

SEQ ID NO: 1322936 - DNA, 25 bp, Homo sapien
taatgtaggtctgtgcttagctcag

SEQ ID NO: 1322937 - DNA, 25 bp, Homo sapien
tcaggactagagctcagggttcaca

SEQ ID NO: 1322938 - DNA, 25 bp, Homo sapien
aatatgtgccttgtgtgtgatagac

SEQ ID NO: 1322939 - DNA, 25 bp, Homo sapien
gatgcctaggatatgctacttcata

SEQ ID NO: 1322940 - DNA, 25 bp, Homo sapien
tgtactctgaagctgagcctatatg

SEQ ID NO: 1322941 - DNA, 25 bp, Homo sapien
catgcagtttcccttgatattacag

SEQ ID NO: 1322942 - DNA, 25 bp, Homo sapien
tatttccctcactagtttgcaagcc

SEQ ID NO: 1322943 - DNA, 25 bp, Homo sapien
cttttaccatctcaatgttaaagat

SEQ ID NO: 1322944 - DNA, 25 bp, Homo sapien
ttaccatctcaatgttaaagattga

SEQ ID NO: 1322945 - DNA, 25 bp, Homo sapien
tctcaatgttaaagattgaactgag

SEQ ID NO: 1322946 - DNA, 25 bp, Homo sapien
atctcaatgttaaagattgaactga

SEQ ID NO: 1322947 - DNA, 25 bp, Homo sapien
caatgagtcctgcggcactttgcag

SEQ ID NO: 1322948 - DNA, 25 bp, Homo sapien
ccaatgagtcctgcggcactttgca

SEQ ID NO: 1322949 - DNA, 25 bp, Homo sapien
ttaccaatgagtcctgcggcacttt

SEQ ID NO: 1322950 - DNA, 25 bp, Homo sapien
taccaatgagtcctgcggcactttg

SEQ ID NO: 1322951 - DNA, 25 bp, Homo sapien
ccttagtgaatcctctgttcacaga

SEQ ID NO: 1322952 - DNA, 25 bp, Homo sapien
gtccttagtgaatcctctgttcaca

SEQ ID NO: 1322953 - DNA, 25 bp, Homo sapien
tagtgaatcctctgttcacagactg

SEQ ID NO: 1322954 - DNA, 25 bp, Homo sapien
ttagtgaatcctctgttcacagact

SEQ ID NO: 1322955 - DNA, 25 bp, Homo sapien
acctggattactccatattctccct

SEQ ID NO: 1322956 - DNA, 25 bp, Homo sapien
cacacctggattactccatattctc

SEQ ID NO: 1322957 - DNA, 25 bp, Homo sapien
gcccacacctggattactccatatt

SEQ ID NO: 1322958 - DNA, 25 bp, Homo sapien
cagcccacacctggattactccata

SEQ ID NO: 1322959 - DNA, 25 bp, Homo sapien
tcttgggagcaggaagtacccctct

SEQ ID NO: 1322960 - DNA, 25 bp, Homo sapien
tagcctactaccatgtgtgccttgc

SEQ ID NO: 1322961 - DNA, 25 bp, Homo sapien
catttacgtacggtctaggcctgct

SEQ ID NO: 1322962 - DNA, 25 bp, Homo sapien
gaaggagtgctggtaagcaaacacc

SEQ ID NO: 1322963 - DNA, 25 bp, Homo sapien
tggctgcttccgaaattcactgcgt

SEQ ID NO: 1322964 - DNA, 25 bp, Homo sapien
gaaattcactgcgtttctccaggcg

SEQ ID NO: 1322965 - DNA, 25 bp, Homo sapien
gcgggactcaaaagcagctgggtct

SEQ ID NO: 1322966 - DNA, 25 bp, Homo sapien
ctgcgtttctccaggcgggactcaa

SEQ ID NO: 1322967 - DNA, 25 bp, Homo sapien
acccagagtttcatgggtgaggtct

SEQ ID NO: 1322968 - DNA, 25 bp, Homo sapien
tttggccatgagacccagagtttca

SEQ ID NO: 1322969 - DNA, 25 bp, Homo sapien
tttggtgaagatatcatccagggat

SEQ ID NO: 1322970 - DNA, 25 bp, Homo sapien
agggattccagctctttggccatga

SEQ ID NO: 1322971 - DNA, 25 bp, Homo sapien
tcaatgggtgatccgactgtgacac

SEQ ID NO: 1322972 - DNA, 25 bp, Homo sapien
ggagcctggctacatcatctgaaga

SEQ ID NO: 1322973 - DNA, 25 bp, Homo sapien
tgttagggaccctggactcagagtc

SEQ ID NO: 1322974 - DNA, 25 bp, Homo sapien
tggagaaccaaagcagacaaacgtg

SEQ ID NO: 1322975 - DNA, 25 bp, Homo sapien
gctggatcttgtcgcggtagcggtc

SEQ ID NO: 1322976 - DNA, 25 bp, Homo sapien
cttgtcgcggtagcggtcgtagaaa

SEQ ID NO: 1322977 - DNA, 25 bp, Homo sapien
agctggatcttgtcgcggtagcggt

SEQ ID NO: 1322978 - DNA, 25 bp, Homo sapien
gatcttgtcgcggtagcggtcgtag

SEQ ID NO: 1322979 - DNA, 25 bp, Homo sapien
gcagctgcgcgggtgacacgagccc

SEQ ID NO: 1322980 - DNA, 25 bp, Homo sapien
agctgcgcgggtgacacgagcccca

SEQ ID NO: 1322981 - DNA, 25 bp, Homo sapien
gaagacgcgcagctgcgcgggtgac

SEQ ID NO: 1322982 - DNA, 25 bp, Homo sapien
agacgcgcagctgcgcgggtgacac

SEQ ID NO: 1322983 - DNA, 25 bp, Homo sapien
gccacctgcaggaccgccggtcccg

SEQ ID NO: 1322984 - DNA, 25 bp, Homo sapien
ggtagagaccggccacctgcaggac

SEQ ID NO: 1322985 - DNA, 25 bp, Homo sapien
gcaggaccgccggtcccgcgccacc

SEQ ID NO: 1322986 - DNA, 25 bp, Homo sapien
gccccggtagagaccggccacctgc

SEQ ID NO: 1322987 - DNA, 25 bp, Homo sapien
ctcctcaggcgcgtcggcctcggcc

SEQ ID NO: 1322988 - DNA, 25 bp, Homo sapien
ctcctcctcaggcgcgtcggcctcg

SEQ ID NO: 1322989 - DNA, 25 bp, Homo sapien
ggcgcgtcggcctcggcccgcggcc

SEQ ID NO: 1322990 - DNA, 25 bp, Homo sapien
aggcgcgtcggcctcggcccgcggc

SEQ ID NO: 1322991 - DNA, 25 bp, Homo sapien
ggcgctacggcatgaatgcagccat

SEQ ID NO: 1322992 - DNA, 25 bp, Homo sapien
tcaccaagactgagactgaggtcca

SEQ ID NO: 1322993 - DNA, 25 bp, Homo sapien
tactggattaacaagcgacggcgct

SEQ ID NO: 1322994 - DNA, 25 bp, Homo sapien
tctgtgggatttggacatccccgaa

SEQ ID NO: 1322995 - DNA, 25 bp, Homo sapien
gttgcatcatacacattcctgaggg

SEQ ID NO: 1322996 - DNA, 25 bp, Homo sapien
tctccaacagaagggacaatggcca

SEQ ID NO: 1322997 - DNA, 25 bp, Homo sapien
caagccaatgaggtgtgcagcaaac

SEQ ID NO: 1322998 - DNA, 25 bp, Homo sapien
tctgatgcaagggaaaatacacaca

SEQ ID NO: 1322999 - DNA, 25 bp, Homo sapien
gaaaaacttgctaccaccatgtgaa

SEQ ID NO: 1323000 - DNA, 25 bp, Homo sapien
catcctttgggtagaaagcctctag

SEQ ID NO: 1323001 - DNA, 25 bp, Homo sapien
caatctagggatctttcatgccagg

SEQ ID NO: 1323002 - DNA, 25 bp, Homo sapien
tgaaatcggttcctccagctaccag

SEQ ID NO: 1323003 - DNA, 25 bp, Homo sapien
aaaggtggcaaagtatctgctacag

SEQ ID NO: 1323004 - DNA, 25 bp, Homo sapien
gactagaggactgatgggtaagtaa

SEQ ID NO: 1323005 - DNA, 25 bp, Homo sapien
tcttcaaacaagttaaaaggtggca

SEQ ID NO: 1323006 - DNA, 25 bp, Homo sapien
tctgctacagtagtttggaggacta

SEQ ID NO: 1323007 - DNA, 25 bp, Homo sapien
ccttagctccaggaatgagtatctt

SEQ ID NO: 1323008 - DNA, 25 bp, Homo sapien
aacctagggaggtccagatttcctg

SEQ ID NO: 1323009 - DNA, 25 bp, Homo sapien
gatttcctggtaggtcagcttccca

SEQ ID NO: 1323010 - DNA, 25 bp, Homo sapien
cctggccagtcttgcggaataaatc

SEQ ID NO: 1323011 - DNA, 25 bp, Homo sapien
tcgggaggcactaaacatcaccatg

SEQ ID NO: 1323012 - DNA, 25 bp, Homo sapien
ggaggagcctaatccagtcactgga

SEQ ID NO: 1323013 - DNA, 25 bp, Homo sapien
taaaagtgcaagcttcggccaggtg

SEQ ID NO: 1323014 - DNA, 25 bp, Homo sapien
ccagctaatacaaaatcgggaggca

SEQ ID NO: 1323015 - DNA, 25 bp, Homo sapien
gaaaattttggcaatgctgatggct

SEQ ID NO: 1323016 - DNA, 25 bp, Homo sapien
cagtgctagaaactcctggtaggga

SEQ ID NO: 1323017 - DNA, 25 bp, Homo sapien
ggagataggtcttagttgggcagct

SEQ ID NO: 1323018 - DNA, 25 bp, Homo sapien
gctgatggctttgatgtgaaactct

SEQ ID NO: 1323019 - DNA, 25 bp, Homo sapien
tgaaatattaagaagccggctctgc

SEQ ID NO: 1323020 - DNA, 25 bp, Homo sapien
catatttgtgggcaagggaacacca

SEQ ID NO: 1323021 - DNA, 25 bp, Homo sapien
cgcttggtgcgatcagtactgctgg

SEQ ID NO: 1323022 - DNA, 25 bp, Homo sapien
gatgtgctttaaacccagtctaggg

SEQ ID NO: 1323023 - DNA, 25 bp, Homo sapien
atacctgagaatttgaactatcttc

SEQ ID NO: 1323024 - DNA, 25 bp, Homo sapien
gcttggatacctgagaatttgaact

SEQ ID NO: 1323025 - DNA, 25 bp, Homo sapien
tttgtttgtaagagcactgatcagc

SEQ ID NO: 1323026 - DNA, 25 bp, Homo sapien
ttgtttgtaagagcactgatcagct

SEQ ID NO: 1323027 - DNA, 25 bp, Homo sapien
ccttgtgactagaccactttaggca

SEQ ID NO: 1323028 - DNA, 25 bp, Homo sapien
cctggtgatgagtcaactggtggca

SEQ ID NO: 1323029 - DNA, 25 bp, Homo sapien
tgatgtctttggtcctcagcactga

SEQ ID NO: 1323030 - DNA, 25 bp, Homo sapien
cccaggagtatcaagagtggcatat

SEQ ID NO: 1323031 - DNA, 25 bp, Homo sapien
tgtgctcaaaatttacatctggctc

SEQ ID NO: 1323032 - DNA, 25 bp, Homo sapien
tatcttagcccagagtttaacactc

SEQ ID NO: 1323033 - DNA, 25 bp, Homo sapien
gcctttactgtgtggttccagttca

SEQ ID NO: 1323034 - DNA, 25 bp, Homo sapien
ttagaaaactcaacaaaagcttagc

SEQ ID NO: 1323035 - DNA, 25 bp, Homo sapien
tcagagtggcagatctatcacccat

SEQ ID NO: 1323036 - DNA, 25 bp, Homo sapien
ttttcagagtggcagatctatcacc

SEQ ID NO: 1323037 - DNA, 25 bp, Homo sapien
tcttttcagagtggcagatctatca

SEQ ID NO: 1323038 - DNA, 25 bp, Homo sapien
ttcagagtggcagatctatcaccca

SEQ ID NO: 1323039 - DNA, 25 bp, Homo sapien
cacatcgctttctatcaggttgact

SEQ ID NO: 1323040 - DNA, 25 bp, Homo sapien
gactctctgggtaagattactgact

SEQ ID NO: 1323041 - DNA, 25 bp, Homo sapien
ttgctcatagcaaccacatcgcttt

SEQ ID NO: 1323042 - DNA, 25 bp, Homo sapien
tccctcgagtttaagatcattctgt

SEQ ID NO: 1323043 - DNA, 25 bp, Homo sapien
tggttttgaccatcaatcgtctgtc

SEQ ID NO: 1323044 - DNA, 25 bp, Homo sapien
gacgtaaattagacaagcaggccag

SEQ ID NO: 1323045 - DNA, 25 bp, Homo sapien
tatggaatccactaaagacgtaaat

SEQ ID NO: 1323046 - DNA, 25 bp, Homo sapien
cagcagcaccgaacaaccattacta

SEQ ID NO: 1323047 - DNA, 25 bp, Homo sapien
aaggtgacggaatgatctggttgct

SEQ ID NO: 1323048 - DNA, 25 bp, Homo sapien
gaatgatctggttgcttccaggagt

SEQ ID NO: 1323049 - DNA, 25 bp, Homo sapien
tgtgggttttattgtcaagttctga

SEQ ID NO: 1323050 - DNA, 25 bp, Homo sapien
tattgtcaagttctgatgtggctga

SEQ ID NO: 1323051 - DNA, 25 bp, Homo sapien
tcagattagtggaaagttggcaaca

SEQ ID NO: 1323052 - DNA, 25 bp, Homo sapien
gttggcaacatgactcttacacaaa

SEQ ID NO: 1323053 - DNA, 25 bp, Homo sapien
cagggccttttcagattagtggaaa

SEQ ID NO: 1323054 - DNA, 25 bp, Homo sapien
caggagcatgctgacttgctgggtc

SEQ ID NO: 1323055 - DNA, 25 bp, Homo sapien
ttcttgtgttcatccacagttttct

SEQ ID NO: 1323056 - DNA, 25 bp, Homo sapien
aagtattgccaatggaagctacact

SEQ ID NO: 1323057 - DNA, 25 bp, Homo sapien
gatggacgctgtttaaagtattgcc

SEQ ID NO: 1323058 - DNA, 25 bp, Homo sapien
aattccatcgttttcttgtgttcat

SEQ ID NO: 1323059 - DNA, 25 bp, Homo sapien
tagaccctggcacataatctgacca

SEQ ID NO: 1323060 - DNA, 25 bp, Homo sapien
gaattcatatgctcatagaccctgg

SEQ ID NO: 1323061 - DNA, 25 bp, Homo sapien
ctagatttgatatccaccgtttggg

SEQ ID NO: 1323062 - DNA, 25 bp, Homo sapien
tctttatgttcgaattaggcacctc

SEQ ID NO: 1323063 - DNA, 25 bp, Homo sapien
gctgaaaagcgaacccatatatgct

SEQ ID NO: 1323064 - DNA, 25 bp, Homo sapien
taactatcatgtacaattggtctgc

SEQ ID NO: 1323065 - DNA, 25 bp, Homo sapien
gaattctttaggacacagtgataca

SEQ ID NO: 1323066 - DNA, 25 bp, Homo sapien
tatatgctaacacaagagtgccagc

SEQ ID NO: 1323067 - DNA, 25 bp, Homo sapien
ggtaggcaggctaatcaagtctgca

SEQ ID NO: 1323068 - DNA, 25 bp, Homo sapien
tgcagctgacttaacattggctttg

SEQ ID NO: 1323069 - DNA, 25 bp, Homo sapien
gaagtccctctacagtggtaggcag

SEQ ID NO: 1323070 - DNA, 25 bp, Homo sapien
caggctaatcaagtctgcagctgac

SEQ ID NO: 1323071 - DNA, 25 bp, Homo sapien
gagcactactttgtatcctgaaggg

SEQ ID NO: 1323072 - DNA, 25 bp, Homo sapien
tacagtctacaggaactgcactctg

SEQ ID NO: 1323073 - DNA, 25 bp, Homo sapien
gactcactgactgatgcaatgtatg

SEQ ID NO: 1323074 - DNA, 25 bp, Homo sapien
ctgcccaagtgggaacatataaagt

SEQ ID NO: 1323075 - DNA, 25 bp, Homo sapien
cagaagtttaggtggcaggatctca

SEQ ID NO: 1323076 - DNA, 25 bp, Homo sapien
gagcctgggaactcgggaactcaag

SEQ ID NO: 1323077 - DNA, 25 bp, Homo sapien
tagactgatcggtctgaggaggcct

SEQ ID NO: 1323078 - DNA, 25 bp, Homo sapien
ggaactgctagaccaaaagtcccag

SEQ ID NO: 1323079 - DNA, 25 bp, Homo sapien
cattttcatgctctgcttatgggag

SEQ ID NO: 1323080 - DNA, 25 bp, Homo sapien
cacacacgcatgttaacccataggc

SEQ ID NO: 1323081 - DNA, 25 bp, Homo sapien
cagcaaaccataaacttcctaagag

SEQ ID NO: 1323082 - DNA, 25 bp, Homo sapien
cagtccacagagatactctcagcaa

SEQ ID NO: 1323083 - DNA, 25 bp, Homo sapien
cacagagtactataggagaagggca

SEQ ID NO: 1323084 - DNA, 25 bp, Homo sapien
gatacggctcttgctgacttactta

SEQ ID NO: 1323085 - DNA, 25 bp, Homo sapien
tttggactgagtgctaaaagagagc

SEQ ID NO: 1323086 - DNA, 25 bp, Homo sapien
gcagtgcacctaataatggctggca

SEQ ID NO: 1323087 - DNA, 25 bp, Homo sapien
catgacccgatcctgcgctgaaata

SEQ ID NO: 1323088 - DNA, 25 bp, Homo sapien
tgaagccctaggacagaagcaaact

SEQ ID NO: 1323089 - DNA, 25 bp, Homo sapien
taccctaagcaggataggctctggc

SEQ ID NO: 1323090 - DNA, 25 bp, Homo sapien
tgtgtatgagtaagccctgcgatgg

SEQ ID NO: 1323091 - DNA, 25 bp, Homo sapien
tattcatttctgtgatgtttatcca

SEQ ID NO: 1323092 - DNA, 25 bp, Homo sapien
ttctgtgatgtttatccagactttg

SEQ ID NO: 1323093 - DNA, 25 bp, Homo sapien
tcatttctgtgatgtttatccagac

SEQ ID NO: 1323094 - DNA, 25 bp, Homo sapien
tgtgatgtttatccagactttgttc

SEQ ID NO: 1323095 - DNA, 25 bp, Homo sapien
tatgtgatcaaaacaagctacagca

SEQ ID NO: 1323096 - DNA, 25 bp, Homo sapien
taggagacccaattaactacagaga

SEQ ID NO: 1323097 - DNA, 25 bp, Homo sapien
actacaagcctaactaactacaggg

SEQ ID NO: 1323098 - DNA, 25 bp, Homo sapien
gctacagcacaagcctatagctgaa

SEQ ID NO: 1323099 - DNA, 25 bp, Homo sapien
gatcttgcagcatcgtaaatagtct

SEQ ID NO: 1323100 - DNA, 25 bp, Homo sapien
accacagagcggataacagatcttg

SEQ ID NO: 1323101 - DNA, 25 bp, Homo sapien
cagagcggataacagatcttgcagc

SEQ ID NO: 1323102 - DNA, 25 bp, Homo sapien
cttgcagcatcgtaaatagtctccc

SEQ ID NO: 1323103 - DNA, 25 bp, Homo sapien
cattccacctttcaccactactcac

SEQ ID NO: 1323104 - DNA, 25 bp, Homo sapien
ccattccacctttcaccactactca

SEQ ID NO: 1323105 - DNA, 25 bp, Homo sapien
cttcccattccacctttcaccacta

SEQ ID NO: 1323106 - DNA, 25 bp, Homo sapien
tcccattccacctttcaccactact

SEQ ID NO: 1323107 - DNA, 25 bp, Homo sapien
tcttgggcttctttctccggctgtc

SEQ ID NO: 1323108 - DNA, 25 bp, Homo sapien
actcagagtctgagtcgggaggctc

SEQ ID NO: 1323109 - DNA, 25 bp, Homo sapien
aagcgagagcgatttccaaccacac

SEQ ID NO: 1323110 - DNA, 25 bp, Homo sapien
aatcaatgcattgagctctttgcgc

SEQ ID NO: 1323111 - DNA, 25 bp, Homo sapien
tggggtgagtggagccccgactcct

SEQ ID NO: 1323112 - DNA, 25 bp, Homo sapien
gttcgtacccgatgcccaattctct

SEQ ID NO: 1323113 - DNA, 25 bp, Homo sapien
tcctgagctgccaggttcgtacccg

SEQ ID NO: 1323114 - DNA, 25 bp, Homo sapien
gccaggttcgtacccgatgcccaat

SEQ ID NO: 1323115 - DNA, 25 bp, Homo sapien
gaaggattctcagcccggataagta

SEQ ID NO: 1323116 - DNA, 25 bp, Homo sapien
ctggtgaccccaaaggataaggcct

SEQ ID NO: 1323117 - DNA, 25 bp, Homo sapien
taagaaagtgggaacgcgtcagtcc

SEQ ID NO: 1323118 - DNA, 25 bp, Homo sapien
gcaatacttctaagggtgctccagg

SEQ ID NO: 1323119 - DNA, 25 bp, Homo sapien
agtttgaggtctccggcacgggcaa

SEQ ID NO: 1323120 - DNA, 25 bp, Homo sapien
cggcctccgtcctgaacgtgaaggg

SEQ ID NO: 1323121 - DNA, 25 bp, Homo sapien
tgtgtgatgatcaccgttctccggc

SEQ ID NO: 1323122 - DNA, 25 bp, Homo sapien
agaagggtcggcctgagagaagcca

SEQ ID NO: 1323123 - DNA, 25 bp, Homo sapien
aggccccactccagccgcgactccg

SEQ ID NO: 1323124 - DNA, 25 bp, Homo sapien
ggccccactccagccgcgactccgg

SEQ ID NO: 1323125 - DNA, 25 bp, Homo sapien
cgcaggccccactccagccgcgact

SEQ ID NO: 1323126 - DNA, 25 bp, Homo sapien
acgcgcaggccccactccagccgcg

SEQ ID NO: 1323127 - DNA, 25 bp, Homo sapien
cggcggccgcgagctccagccccgg

SEQ ID NO: 1323128 - DNA, 25 bp, Homo sapien
ttgttggcgttggtggcggcggctg

SEQ ID NO: 1323129 - DNA, 25 bp, Homo sapien
tgctcccgacacgttgttgttggcg

SEQ ID NO: 1323130 - DNA, 25 bp, Homo sapien
tcccgacacgttgttgttggcgttg

SEQ ID NO: 1323131 - DNA, 25 bp, Homo sapien
agatcacttcccctttggcagcggc

SEQ ID NO: 1323132 - DNA, 25 bp, Homo sapien
cgctccagccccagatcacttcccc

SEQ ID NO: 1323133 - DNA, 25 bp, Homo sapien
cccagatcacttcccctttggcagc

SEQ ID NO: 1323134 - DNA, 25 bp, Homo sapien
cacttcccctttggcagcggccgcc

SEQ ID NO: 1323135 - DNA, 25 bp, Homo sapien
gtggggacacacagatgaggtccat

SEQ ID NO: 1323136 - DNA, 25 bp, Homo sapien
ggtggggacacacagatgaggtcca

SEQ ID NO: 1323137 - DNA, 25 bp, Homo sapien
cgttaatccctgtgttggatggtgg

SEQ ID NO: 1323138 - DNA, 25 bp, Homo sapien
cttcgttaatccctgtgttggatgg

SEQ ID NO: 1323139 - DNA, 25 bp, Homo sapien
cgagaatatcttgcaggttcgggcc

SEQ ID NO: 1323140 - DNA, 25 bp, Homo sapien
ccatgagggcacagtttgacgtaac

SEQ ID NO: 1323141 - DNA, 25 bp, Homo sapien
tagaacagttgtacagcatcttcac

SEQ ID NO: 1323142 - DNA, 25 bp, Homo sapien
ggtgtaagaattcccgctatggctc

SEQ ID NO: 1323143 - DNA, 25 bp, Homo sapien
tgttgattatcctggtcttgctgct

SEQ ID NO: 1323144 - DNA, 25 bp, Homo sapien
cttgttgattatcctggtcttgctg

SEQ ID NO: 1323145 - DNA, 25 bp, Homo sapien
caaacccctgcatccaggtactcct

SEQ ID NO: 1323146 - DNA, 25 bp, Homo sapien
ccccaaacccctgcatccaggtact

SEQ ID NO: 1323147 - DNA, 25 bp, Homo sapien
ccttgcagaagtaacacaggagctt

SEQ ID NO: 1323148 - DNA, 25 bp, Homo sapien
ttcaaggactcatcagtcttcatct

SEQ ID NO: 1323149 - DNA, 25 bp, Homo sapien
tcttcatctcgtcttcattctggct

SEQ ID NO: 1323150 - DNA, 25 bp, Homo sapien
ccactcagttcggtcctggtttcag

SEQ ID NO: 1323151 - DNA, 25 bp, Homo sapien
ttgcgggagattgggtcacctgcca

SEQ ID NO: 1323152 - DNA, 25 bp, Homo sapien
gacctgcacctgtgccagcaattct

SEQ ID NO: 1323153 - DNA, 25 bp, Homo sapien
tccttgcgggagattgggtcacctg

SEQ ID NO: 1323154 - DNA, 25 bp, Homo sapien
ctgccccgacctgcacctgtgccag

SEQ ID NO: 1323155 - DNA, 25 bp, Homo sapien
tcaaaagtgagtcctgttccctgaa

SEQ ID NO: 1323156 - DNA, 25 bp, Homo sapien
gctcaaaagtgagtcctgttccctg

SEQ ID NO: 1323157 - DNA, 25 bp, Homo sapien
ggctcaaaagtgagtcctgttccct

SEQ ID NO: 1323158 - DNA, 25 bp, Homo sapien
tggctcaaaagtgagtcctgttccc

SEQ ID NO: 1323159 - DNA, 25 bp, Homo sapien
ctgatggtaagaaactgattaaccg

SEQ ID NO: 1323160 - DNA, 25 bp, Homo sapien
ccatagaatgaaagacttattgcta

SEQ ID NO: 1323161 - DNA, 25 bp, Homo sapien
agaatgaaagacttattgctaatgt

SEQ ID NO: 1323162 - DNA, 25 bp, Homo sapien
cagctctgagctctataattctgat

SEQ ID NO: 1323163 - DNA, 25 bp, Homo sapien
cctactaccaaactggaagctttcg

SEQ ID NO: 1323164 - DNA, 25 bp, Homo sapien
accaaactggaagctttcgtgatgc

SEQ ID NO: 1323165 - DNA, 25 bp, Homo sapien
ggaagctttcgtgatgctggaggct

SEQ ID NO: 1323166 - DNA, 25 bp, Homo sapien
gatggcagttgtgggttggctggga

SEQ ID NO: 1323167 - DNA, 25 bp, Homo sapien
tcgctgcgactcaggcaggctgttt

SEQ ID NO: 1323168 - DNA, 25 bp, Homo sapien
atctttgttcactcgctgcgactca

SEQ ID NO: 1323169 - DNA, 25 bp, Homo sapien
catttgccaagactgtacccatcct

SEQ ID NO: 1323170 - DNA, 25 bp, Homo sapien
ttcccagggatgcatctcgtactca

SEQ ID NO: 1323171 - DNA, 25 bp, Homo sapien
agtcagcttgagttttttcaggtgt

SEQ ID NO: 1323172 - DNA, 25 bp, Homo sapien
tgtgggtttcaccagatccagcaag

SEQ ID NO: 1323173 - DNA, 25 bp, Homo sapien
ttttcaggtgtttctgtgggtttca

SEQ ID NO: 1323174 - DNA, 25 bp, Homo sapien
agatccagcaaggaaattagaatta

SEQ ID NO: 1323175 - DNA, 25 bp, Homo sapien
cttggacttgaggagcatttgacga

SEQ ID NO: 1323176 - DNA, 25 bp, Homo sapien
ggacttgaggagcatttgacgaaca

SEQ ID NO: 1323177 - DNA, 25 bp, Homo sapien
tgaggagcatttgacgaacaggctg

SEQ ID NO: 1323178 - DNA, 25 bp, Homo sapien
gacttgaggagcatttgacgaacag

SEQ ID NO: 1323179 - DNA, 25 bp, Homo sapien
agctgagaatggtatgaaggcatag

SEQ ID NO: 1323180 - DNA, 25 bp, Homo sapien
ttcagaactttccctggagaatctc

SEQ ID NO: 1323181 - DNA, 25 bp, Homo sapien
gaactttccctggagaatctcaagg

SEQ ID NO: 1323182 - DNA, 25 bp, Homo sapien
aactttccctggagaatctcaaggg

SEQ ID NO: 1323183 - DNA, 25 bp, Homo sapien
cagaactttccctggagaatctcaa

SEQ ID NO: 1323184 - DNA, 25 bp, Homo sapien
agagcccaaatattgataaacacag

SEQ ID NO: 1323185 - DNA, 25 bp, Homo sapien
gactctgagctgtcttgtttgaaca

SEQ ID NO: 1323186 - DNA, 25 bp, Homo sapien
gttaagagcacactctagagtccca

SEQ ID NO: 1323187 - DNA, 25 bp, Homo sapien
tgaacaactaggtgcgtggaacatt

SEQ ID NO: 1323188 - DNA, 25 bp, Homo sapien
gatgattgcaaagatccccatgata

SEQ ID NO: 1323189 - DNA, 25 bp, Homo sapien
aattgctccagtgacatgccctgct

SEQ ID NO: 1323190 - DNA, 25 bp, Homo sapien
tggctacatcatggctccaggtata

SEQ ID NO: 1323191 - DNA, 25 bp, Homo sapien
tccctctgtgaatcctggagtctgg

SEQ ID NO: 1323192 - DNA, 25 bp, Homo sapien
tataatcgtgctacccagcttagat

SEQ ID NO: 1323193 - DNA, 25 bp, Homo sapien
cgtagaggcggaggcattccttgat

SEQ ID NO: 1323194 - DNA, 25 bp, Homo sapien
tcgagtaaccgggatatgtttacta

SEQ ID NO: 1323195 - DNA, 25 bp, Homo sapien
ggcggaggcattccttgatgcacat

SEQ ID NO: 1323196 - DNA, 25 bp, Homo sapien
tttactaccggtgcgtagaggcgga

SEQ ID NO: 1323197 - DNA, 25 bp, Homo sapien
cccctaggagttccctgatttcatc

SEQ ID NO: 1323198 - DNA, 25 bp, Homo sapien
aggtaatagaagacccatcccctag

SEQ ID NO: 1323199 - DNA, 25 bp, Homo sapien
catcccctaggagttccctgatttc

SEQ ID NO: 1323200 - DNA, 25 bp, Homo sapien
caggtaatagaagacccatccccta

SEQ ID NO: 1323201 - DNA, 25 bp, Homo sapien
tcagcatctctgctgatgctcaggg

SEQ ID NO: 1323202 - DNA, 25 bp, Homo sapien
gcatctctgctgatgctcagggtac

SEQ ID NO: 1323203 - DNA, 25 bp, Homo sapien
cagcatctctgctgatgctcagggt

SEQ ID NO: 1323204 - DNA, 25 bp, Homo sapien
agcatctctgctgatgctcagggta

SEQ ID NO: 1323205 - DNA, 25 bp, Homo sapien
gcaaacatgaacgttttcacttcag

SEQ ID NO: 1323206 - DNA, 25 bp, Homo sapien
tgtcctgcaaacatgaacgttttca

SEQ ID NO: 1323207 - DNA, 25 bp, Homo sapien
tcctgcaaacatgaacgttttcact

SEQ ID NO: 1323208 - DNA, 25 bp, Homo sapien
gtcctgcaaacatgaacgttttcac

SEQ ID NO: 1323209 - DNA, 25 bp, Homo sapien
atgtccagaaaatcctggcgtcttt

SEQ ID NO: 1323210 - DNA, 25 bp, Homo sapien
tgtccagaaaatcctggcgtctttt

SEQ ID NO: 1323211 - DNA, 25 bp, Homo sapien
atcctggcgtcttttctgagtagta

SEQ ID NO: 1323212 - DNA, 25 bp, Homo sapien
gaaaatcctggcgtcttttctgagt

SEQ ID NO: 1323213 - DNA, 25 bp, Homo sapien
tagaaaagatttggccttgagagct

SEQ ID NO: 1323214 - DNA, 25 bp, Homo sapien
tggagattttgctaaggttgaacac

SEQ ID NO: 1323215 - DNA, 25 bp, Homo sapien
actgctttcaggtatgagtccaggg

SEQ ID NO: 1323216 - DNA, 25 bp, Homo sapien
gaaaaccaggtcgttgtgatgtaga

SEQ ID NO: 1323217 - DNA, 25 bp, Homo sapien
tcatcagggagacatgttgaaagag

SEQ ID NO: 1323218 - DNA, 25 bp, Homo sapien
gtcatcagggagacatgttgaaaga

SEQ ID NO: 1323219 - DNA, 25 bp, Homo sapien
agttttgggcaatgtgttcctccca

SEQ ID NO: 1323220 - DNA, 25 bp, Homo sapien
agacgtgagttttgggcaatgtgtt

SEQ ID NO: 1323221 - DNA, 25 bp, Homo sapien
aaccatccagggtcacaagtcctcg

SEQ ID NO: 1323222 - DNA, 25 bp, Homo sapien
catcatggtgatgaatattttcaga

SEQ ID NO: 1323223 - DNA, 25 bp, Homo sapien
tcagaatgctgatgttgaagccagg

SEQ ID NO: 1323224 - DNA, 25 bp, Homo sapien
caggtttcacaatctggcggtgctt

SEQ ID NO: 1323225 - DNA, 25 bp, Homo sapien
caacccaggattcaaggattttgtg

SEQ ID NO: 1323226 - DNA, 25 bp, Homo sapien
ttgtggctaacagcacttttgggat

SEQ ID NO: 1323227 - DNA, 25 bp, Homo sapien
tcaaggattttgtggctaacagcac

SEQ ID NO: 1323228 - DNA, 25 bp, Homo sapien
cccaggattcaaggattttgtggct

SEQ ID NO: 1323229 - DNA, 25 bp, Homo sapien
cctgtcataggtgagtgcatctcca

SEQ ID NO: 1323230 - DNA, 25 bp, Homo sapien
tccctgtcataggtgagtgcatctc

SEQ ID NO: 1323231 - DNA, 25 bp, Homo sapien
ggtccctgtcataggtgagtgcatc

SEQ ID NO: 1323232 - DNA, 25 bp, Homo sapien
aggtccctgtcataggtgagtgcat

SEQ ID NO: 1323233 - DNA, 25 bp, Homo sapien
agttcctgctaggatctctactgcc

SEQ ID NO: 1323234 - DNA, 25 bp, Homo sapien
ttcctgctaggatctctactgcctg

SEQ ID NO: 1323235 - DNA, 25 bp, Homo sapien
tcctgctaggatctctactgcctgg

SEQ ID NO: 1323236 - DNA, 25 bp, Homo sapien
gcagttcctgctaggatctctactg

SEQ ID NO: 1323237 - DNA, 25 bp, Homo sapien
tggagaaacctcaatattgaatgcc

SEQ ID NO: 1323238 - DNA, 25 bp, Homo sapien
ttgaatgcccaacctatactagcct

SEQ ID NO: 1323239 - DNA, 25 bp, Homo sapien
aaaatggtgccctgtctctgcatcc

SEQ ID NO: 1323240 - DNA, 25 bp, Homo sapien
tggagccctgaaagttaatctgaca

SEQ ID NO: 1323241 - DNA, 25 bp, Homo sapien
aagcctatcacgaacagcttgttgt

SEQ ID NO: 1323242 - DNA, 25 bp, Homo sapien
tagtgaaatgtgactcttgccatgg

SEQ ID NO: 1323243 - DNA, 25 bp, Homo sapien
gccccccagtgaggtacctggtgga

SEQ ID NO: 1323244 - DNA, 25 bp, Homo sapien
gattggcatcccattggctttaagg

SEQ ID NO: 1323245 - DNA, 25 bp, Homo sapien
ctggtcaaggtatagagacctgtgt

SEQ ID NO: 1323246 - DNA, 25 bp, Homo sapien
ggagcagagtaaagtttgaaactgg

SEQ ID NO: 1323247 - DNA, 25 bp, Homo sapien
aaggtccaaaggtgagagcagagca

SEQ ID NO: 1323248 - DNA, 25 bp, Homo sapien
ccaggaagaaagctgagatggtgat

SEQ ID NO: 1323249 - DNA, 25 bp, Homo sapien
tgaaactggatagccagacatttct

SEQ ID NO: 1323250 - DNA, 25 bp, Homo sapien
tcacagtggtggtaagtggtagtcc

SEQ ID NO: 1323251 - DNA, 25 bp, Homo sapien
agtggtggtaagtggtagtcctggg

SEQ ID NO: 1323252 - DNA, 25 bp, Homo sapien
cacagtggtggtaagtggtagtcct

SEQ ID NO: 1323253 - DNA, 25 bp, Homo sapien
acagtggtggtaagtggtagtcctg

SEQ ID NO: 1323254 - DNA, 25 bp, Homo sapien
tgaagaacatcgtaaagggtccaac

SEQ ID NO: 1323255 - DNA, 25 bp, Homo sapien
catcgtaaagggtccaacccacaag

SEQ ID NO: 1323256 - DNA, 25 bp, Homo sapien
tgtggccatagaaccagtgcgcagg

SEQ ID NO: 1323257 - DNA, 25 bp, Homo sapien
caggaaacaggtgcatggctctgat

SEQ ID NO: 1323258 - DNA, 25 bp, Homo sapien
ccttgtggccatagaaccagtgcgc

SEQ ID NO: 1323259 - DNA, 25 bp, Homo sapien
gcatggctctgatcgtccatctcct

SEQ ID NO: 1323260 - DNA, 25 bp, Homo sapien
acagcagcagagacatgcagaggag

SEQ ID NO: 1323261 - DNA, 25 bp, Homo sapien
cagcagagacatgcagaggaggatc

SEQ ID NO: 1323262 - DNA, 25 bp, Homo sapien
gagccatgagttcctgaagccagga

SEQ ID NO: 1323263 - DNA, 25 bp, Homo sapien
caagaaggggtgagccatgagttcc

SEQ ID NO: 1323264 - DNA, 25 bp, Homo sapien
tcttctcagaggtcctgagctctgg

SEQ ID NO: 1323265 - DNA, 25 bp, Homo sapien
gagctctggaaagcctgagagaact

SEQ ID NO: 1323266 - DNA, 25 bp, Homo sapien
gtcctgagctctggaaagcctgaga

SEQ ID NO: 1323267 - DNA, 25 bp, Homo sapien
cctgagctctggaaagcctgagaga

SEQ ID NO: 1323268 - DNA, 25 bp, Homo sapien
agggatttatctccctgccttagtg

SEQ ID NO: 1323269 - DNA, 25 bp, Homo sapien
cctcttctaaccctatcaccttcca

SEQ ID NO: 1323270 - DNA, 25 bp, Homo sapien
tcagtagggatttatctccctgcct

SEQ ID NO: 1323271 - DNA, 25 bp, Homo sapien
gacaaagcatgcaagcttgtgaacc

SEQ ID NO: 1323272 - DNA, 25 bp, Homo sapien
ttgatgtaactaaccacaagggtcc

SEQ ID NO: 1323273 - DNA, 25 bp, Homo sapien
tgtctggctgacaatcacgtatgta

SEQ ID NO: 1323274 - DNA, 25 bp, Homo sapien
tacaggagagatttagatggacaca

SEQ ID NO: 1323275 - DNA, 25 bp, Homo sapien
tgaaacctgtgattgtgggactgca

SEQ ID NO: 1323276 - DNA, 25 bp, Homo sapien
aatcactgagattgtgatagtttat

SEQ ID NO: 1323277 - DNA, 25 bp, Homo sapien
atcactgagattgtgatagtttatt

SEQ ID NO: 1323278 - DNA, 25 bp, Homo sapien
gacggtttagcatctgctctgctac

SEQ ID NO: 1323279 - DNA, 25 bp, Homo sapien
gaggcagcaagttcagacacattcc

SEQ ID NO: 1323280 - DNA, 25 bp, Homo sapien
ggtccagggcgccaaagctaaggat

SEQ ID NO: 1323281 - DNA, 25 bp, Homo sapien
taggagacaggtagacaagcaggta

SEQ ID NO: 1323282 - DNA, 25 bp, Homo sapien
agaaaacaggatatgggcagacagg

SEQ ID NO: 1323283 - DNA, 25 bp, Homo sapien
cctcctgagacgcaggtggattcca

SEQ ID NO: 1323284 - DNA, 25 bp, Homo sapien
ttagggagcctcctgagacgcaggt

SEQ ID NO: 1323285 - DNA, 25 bp, Homo sapien
gacgcaggtggattccatttttgga

SEQ ID NO: 1323286 - DNA, 25 bp, Homo sapien
gtcttcacaagggttagggagcctc

SEQ ID NO: 1323287 - DNA, 25 bp, Homo sapien
cagctcaaagcggagcagggtcagg

SEQ ID NO: 1323288 - DNA, 25 bp, Homo sapien
agcagctcaaagcggagcagggtca

SEQ ID NO: 1323289 - DNA, 25 bp, Homo sapien
ggcaaattgtttcccgatgcagttc

SEQ ID NO: 1323290 - DNA, 25 bp, Homo sapien
gttcatggcaaattgtttcccgatg

SEQ ID NO: 1323291 - DNA, 25 bp, Homo sapien
ccaggtggagataatgaattgagaa

SEQ ID NO: 1323292 - DNA, 25 bp, Homo sapien
gataatgaattgagaagtgtcctca

SEQ ID NO: 1323293 - DNA, 25 bp, Homo sapien
caggtggagataatgaattgagaag

SEQ ID NO: 1323294 - DNA, 25 bp, Homo sapien
tgaattgagaagtgtcctcaggccc

SEQ ID NO: 1323295 - DNA, 25 bp, Homo sapien
tatttcacataccaggaggcttcaa

SEQ ID NO: 1323296 - DNA, 25 bp, Homo sapien
gggcttttctctccaagacagtgta

SEQ ID NO: 1323297 - DNA, 25 bp, Homo sapien
catcatgctgcataggacttgaccc

SEQ ID NO: 1323298 - DNA, 25 bp, Homo sapien
taaagcctgttctgtgtaagtggac

SEQ ID NO: 1323299 - DNA, 25 bp, Homo sapien
aggaaagcgtggctgtgttgagcag

SEQ ID NO: 1323300 - DNA, 25 bp, Homo sapien
gctgtgttgagcagaacccggtgca

SEQ ID NO: 1323301 - DNA, 25 bp, Homo sapien
tgttgagcagaacccggtgcaaaac

SEQ ID NO: 1323302 - DNA, 25 bp, Homo sapien
agcgtggctgtgttgagcagaaccc

SEQ ID NO: 1323303 - DNA, 25 bp, Homo sapien
gccataaatggagaggaggaccatg

SEQ ID NO: 1323304 - DNA, 25 bp, Homo sapien
ccataaatggagaggaggaccatga

SEQ ID NO: 1323305 - DNA, 25 bp, Homo sapien
taaatggagaggaggaccatgatac

SEQ ID NO: 1323306 - DNA, 25 bp, Homo sapien
cataaatggagaggaggaccatgat

SEQ ID NO: 1323307 - DNA, 25 bp, Homo sapien
tcagggaaggtgacgggagtgctga

SEQ ID NO: 1323308 - DNA, 25 bp, Homo sapien
gaaggtgacgggagtgctgagctct

SEQ ID NO: 1323309 - DNA, 25 bp, Homo sapien
gggaaggtgacgggagtgctgagct

SEQ ID NO: 1323310 - DNA, 25 bp, Homo sapien
aaggtgacgggagtgctgagctctc

SEQ ID NO: 1323311 - DNA, 25 bp, Homo sapien
gcaccggtgggtagagcctcagtgc

SEQ ID NO: 1323312 - DNA, 25 bp, Homo sapien
tggcaccggtgggtagagcctcagt

SEQ ID NO: 1323313 - DNA, 25 bp, Homo sapien
gcctcagtgcctccttaatgcacat

SEQ ID NO: 1323314 - DNA, 25 bp, Homo sapien
ccggtgggtagagcctcagtgcctc

SEQ ID NO: 1323315 - DNA, 25 bp, Homo sapien
aaacaattccatcctgaacaccagc

SEQ ID NO: 1323316 - DNA, 25 bp, Homo sapien
attccatcctgaacaccagcaaggc

SEQ ID NO: 1323317 - DNA, 25 bp, Homo sapien
aattccatcctgaacaccagcaagg

SEQ ID NO: 1323318 - DNA, 25 bp, Homo sapien
ctgaaacaattccatcctgaacacc

SEQ ID NO: 1323319 - DNA, 25 bp, Homo sapien
tccttgtctgacaagatgctcccat

SEQ ID NO: 1323320 - DNA, 25 bp, Homo sapien
ctcaaacatgaacgtgtccacctca

SEQ ID NO: 1323321 - DNA, 25 bp, Homo sapien
cacctcagcacggaggtccttgtct

SEQ ID NO: 1323322 - DNA, 25 bp, Homo sapien
tgtggccagagcatagaggatccag

SEQ ID NO: 1323323 - DNA, 25 bp, Homo sapien
gccttcctcagttggatcacttggt

SEQ ID NO: 1323324 - DNA, 25 bp, Homo sapien
ggccagctggcaggcgcggtgtgtc

SEQ ID NO: 1323325 - DNA, 25 bp, Homo sapien
cagctggcaggcgcggtgtgtccag

SEQ ID NO: 1323326 - DNA, 25 bp, Homo sapien
gctggcaggcgcggtgtgtccagcg

SEQ ID NO: 1323327 - DNA, 25 bp, Homo sapien
ccagctggcaggcgcggtgtgtcca

SEQ ID NO: 1323328 - DNA, 25 bp, Homo sapien
cattcctcacacgggaaaaaaccag

SEQ ID NO: 1323329 - DNA, 25 bp, Homo sapien
gcattcctcacacgggaaaaaacca

SEQ ID NO: 1323330 - DNA, 25 bp, Homo sapien
ccacttgataagaacaagggccctg

SEQ ID NO: 1323331 - DNA, 25 bp, Homo sapien
ctgcccctcaggtatgtgcactcca

SEQ ID NO: 1323332 - DNA, 25 bp, Homo sapien
cttgataagaacaagggccctgcag

SEQ ID NO: 1323333 - DNA, 25 bp, Homo sapien
ggtatgtgcactccacttgataaga

SEQ ID NO: 1323334 - DNA, 25 bp, Homo sapien
tgtccacctggatgctgccctgatg

SEQ ID NO: 1323335 - DNA, 25 bp, Homo sapien
ctgtccacctggatgctgccctgat

SEQ ID NO: 1323336 - DNA, 25 bp, Homo sapien
gtccacctggatgctgccctgatgg

SEQ ID NO: 1323337 - DNA, 25 bp, Homo sapien
caaggagacgtgctgaaagacctcc

SEQ ID NO: 1323338 - DNA, 25 bp, Homo sapien
tcaaggagacgtgctgaaagacctc

SEQ ID NO: 1323339 - DNA, 25 bp, Homo sapien
acctccagaggggaatcctggccaa

SEQ ID NO: 1323340 - DNA, 25 bp, Homo sapien
caaagcgtggatatgacctgatgcc

SEQ ID NO: 1323341 - DNA, 25 bp, Homo sapien
gaagtcctactgtccagcaagattg

SEQ ID NO: 1323342 - DNA, 25 bp, Homo sapien
gcttaaatccatgcagaaacccggg

SEQ ID NO: 1323343 - DNA, 25 bp, Homo sapien
gagaagggccttgcattcaccatga

SEQ ID NO: 1323344 - DNA, 25 bp, Homo sapien
cttatacaactctggggaaccctct

SEQ ID NO: 1323345 - DNA, 25 bp, Homo sapien
ctgtgggacacagggttgagagtgg

SEQ ID NO: 1323346 - DNA, 25 bp, Homo sapien
aactctggggaaccctctactctca

SEQ ID NO: 1323347 - DNA, 25 bp, Homo sapien
agcaatgacctgagagtgttgttcc

SEQ ID NO: 1323348 - DNA, 25 bp, Homo sapien
cagcatcactcgtacagagtctgcc

SEQ ID NO: 1323349 - DNA, 25 bp, Homo sapien
tcgtacagagtctgccatgagcccc

SEQ ID NO: 1323350 - DNA, 25 bp, Homo sapien
catgtctgcccattcaacaggagca

SEQ ID NO: 1323351 - DNA, 25 bp, Homo sapien
agcatccgtcgatgctggaaccatg

SEQ ID NO: 1323352 - DNA, 25 bp, Homo sapien
atggagccaggaatctgtaggaacc

SEQ ID NO: 1323353 - DNA, 25 bp, Homo sapien
ctgtaggaaccatgggatttcgggt

SEQ ID NO: 1323354 - DNA, 25 bp, Homo sapien
aatccatggagccaggaatctgtag

SEQ ID NO: 1323355 - DNA, 25 bp, Homo sapien
tctgtaggaaccatgggatttcggg

SEQ ID NO: 1323356 - DNA, 25 bp, Homo sapien
tcagggtcatagagctggacacgaa

SEQ ID NO: 1323357 - DNA, 25 bp, Homo sapien
gtcagggtcatagagctggacacga

SEQ ID NO: 1323358 - DNA, 25 bp, Homo sapien
tggacacgaactttgcctccccata

SEQ ID NO: 1323359 - DNA, 25 bp, Homo sapien
gagctggacacgaactttgcctccc

SEQ ID NO: 1323360 - DNA, 25 bp, Homo sapien
gccgcttggaggattccagagacat

SEQ ID NO: 1323361 - DNA, 25 bp, Homo sapien
gcagggaggccgcttggaggattcc

SEQ ID NO: 1323362 - DNA, 25 bp, Homo sapien
gcttggaggattccagagacatcac

SEQ ID NO: 1323363 - DNA, 25 bp, Homo sapien
aggccgcttggaggattccagagac

SEQ ID NO: 1323364 - DNA, 25 bp, Homo sapien
agggaggattgtcccgcccacttgt

SEQ ID NO: 1323365 - DNA, 25 bp, Homo sapien
tgactatggatgatccacctagggc

SEQ ID NO: 1323366 - DNA, 25 bp, Homo sapien
gcaccgctgcgaggaaaacagactt

SEQ ID NO: 1323367 - DNA, 25 bp, Homo sapien
cctgtccatgtacctcacaaatatt

SEQ ID NO: 1323368 - DNA, 25 bp, Homo sapien
tgatgctgatgtaactttacatttc

SEQ ID NO: 1323369 - DNA, 25 bp, Homo sapien
ctgaggaccttcggtatcatcactt

SEQ ID NO: 1323370 - DNA, 25 bp, Homo sapien
atttctgggttttgataaaggtgag

SEQ ID NO: 1323371 - DNA, 25 bp, Homo sapien
gaggaccttcggtatcatcacttcc

SEQ ID NO: 1323372 - DNA, 25 bp, Homo sapien
gctgggaaggtgaccacatccacct

SEQ ID NO: 1323373 - DNA, 25 bp, Homo sapien
gcctagctgggaaggtgaccacatc

SEQ ID NO: 1323374 - DNA, 25 bp, Homo sapien
tttcctaggctgactaagaatccct

SEQ ID NO: 1323375 - DNA, 25 bp, Homo sapien
gctgactaagaatccctaagcctag

SEQ ID NO: 1323376 - DNA, 25 bp, Homo sapien
agcagctcaaagcggagcagggtca

SEQ ID NO: 1323377 - DNA, 25 bp, Homo sapien
agctcaaagcggagcagggtcaggg

SEQ ID NO: 1323378 - DNA, 25 bp, Homo sapien
gcagctcaaagcggagcagggtcag

SEQ ID NO: 1323379 - DNA, 25 bp, Homo sapien
cagctcaaagcggagcagggtcagg

SEQ ID NO: 1323380 - DNA, 25 bp, Homo sapien
cttgtcccatacatgtagagatggc

SEQ ID NO: 1323381 - DNA, 25 bp, Homo sapien
gtccttgtcccatacatgtagagat

SEQ ID NO: 1323382 - DNA, 25 bp, Homo sapien
tccttgtcccatacatgtagagatg

SEQ ID NO: 1323383 - DNA, 25 bp, Homo sapien
gtcccatacatgtagagatggctga

SEQ ID NO: 1323384 - DNA, 25 bp, Homo sapien
gttcaacagctatattatgtgtctt

SEQ ID NO: 1323385 - DNA, 25 bp, Homo sapien
cagttcaacagctatattatgtgtc

SEQ ID NO: 1323386 - DNA, 25 bp, Homo sapien
ttcaacagctatattatgtgtcttc

SEQ ID NO: 1323387 - DNA, 25 bp, Homo sapien
agttcaacagctatattatgtgtct

SEQ ID NO: 1323388 - DNA, 25 bp, Homo sapien
catgcaggtgtatcccattgttgaa

SEQ ID NO: 1323389 - DNA, 25 bp, Homo sapien
ggtgtatcccattgttgaatttcaa

SEQ ID NO: 1323390 - DNA, 25 bp, Homo sapien
ggttcttgtcctcacaagtattagg

SEQ ID NO: 1323391 - DNA, 25 bp, Homo sapien
tagggagcctcttaacatgcaggtg

SEQ ID NO: 1323392 - DNA, 25 bp, Homo sapien
gatagggatactggcaggatcagaa

SEQ ID NO: 1323393 - DNA, 25 bp, Homo sapien
tcagggccaccttaagctcgttcat

SEQ ID NO: 1323394 - DNA, 25 bp, Homo sapien
tggtaagaggatagggatactggca

SEQ ID NO: 1323395 - DNA, 25 bp, Homo sapien
gatcagaaaacagcttaaagttgag

SEQ ID NO: 1323396 - DNA, 25 bp, Homo sapien
caatgaattgagatgtggtttcagg

SEQ ID NO: 1323397 - DNA, 25 bp, Homo sapien
atgaattgagatgtggtttcaggcc

SEQ ID NO: 1323398 - DNA, 25 bp, Homo sapien
gacaatgaattgagatgtggtttca

SEQ ID NO: 1323399 - DNA, 25 bp, Homo sapien
aattgagatgtggtttcaggcccca

SEQ ID NO: 1323400 - DNA, 25 bp, Homo sapien
cgctcttcatcacagcggggacagc

SEQ ID NO: 1323401 - DNA, 25 bp, Homo sapien
ctcccacgctcttcatcacagcggg

SEQ ID NO: 1323402 - DNA, 25 bp, Homo sapien
cggggacagcgtcccaatacctcat

SEQ ID NO: 1323403 - DNA, 25 bp, Homo sapien
agctcagaccctcccacgctcttca

SEQ ID NO: 1323404 - DNA, 25 bp, Homo sapien
gaacacagggtattttgcaatttgt

SEQ ID NO: 1323405 - DNA, 25 bp, Homo sapien
aattaatgaacacagggtattttgc

SEQ ID NO: 1323406 - DNA, 25 bp, Homo sapien
ttaatgaacacagggtattttgcaa

SEQ ID NO: 1323407 - DNA, 25 bp, Homo sapien
aatgaacacagggtattttgcaatt

SEQ ID NO: 1323408 - DNA, 25 bp, Homo sapien
agccaatgggatgccaatccacaaa

SEQ ID NO: 1323409 - DNA, 25 bp, Homo sapien
ccttaaagccaatgggatgccaatc

SEQ ID NO: 1323410 - DNA, 25 bp, Homo sapien
ccaccaggtacctcactggggggct

SEQ ID NO: 1323411 - DNA, 25 bp, Homo sapien
cctcactggggggctggtaattaat

SEQ ID NO: 1323412 - DNA, 25 bp, Homo sapien
tagtcctgggatttacatggccaga

SEQ ID NO: 1323413 - DNA, 25 bp, Homo sapien
catcagttcacaggttagtcctggg

SEQ ID NO: 1323414 - DNA, 25 bp, Homo sapien
tgactctggttatggctgcttctac

SEQ ID NO: 1323415 - DNA, 25 bp, Homo sapien
ttttctacatcacaacgacctggtt

SEQ ID NO: 1323416 - DNA, 25 bp, Homo sapien
aatctcatgccatttccgttgtacc

SEQ ID NO: 1323417 - DNA, 25 bp, Homo sapien
cgttgtaccaaatggcaccatgtga

SEQ ID NO: 1323418 - DNA, 25 bp, Homo sapien
gacaattctggtttggtccaaatct

SEQ ID NO: 1323419 - DNA, 25 bp, Homo sapien
aagacaattctggtttggtccaaat

SEQ ID NO: 1323420 - DNA, 25 bp, Homo sapien
taatccagcgactcagaagacagag

SEQ ID NO: 1323421 - DNA, 25 bp, Homo sapien
aattcccaggaactaatgacttgtt

SEQ ID NO: 1323422 - DNA, 25 bp, Homo sapien
gaattcaaagctaatcatgccactg

SEQ ID NO: 1323423 - DNA, 25 bp, Homo sapien
tcttcctaaaccaggactactaaga

SEQ ID NO: 1323424 - DNA, 25 bp, Homo sapien
tgcagggactacgggcattgccacc

SEQ ID NO: 1323425 - DNA, 25 bp, Homo sapien
ttgcagggactacgggcattgccac

SEQ ID NO: 1323426 - DNA, 25 bp, Homo sapien
ttgttttggaggtgtcatagttcct

SEQ ID NO: 1323427 - DNA, 25 bp, Homo sapien
gtgttgttttggaggtgtcatagtt

SEQ ID NO: 1323428 - DNA, 25 bp, Homo sapien
gttgttttggaggtgtcatagttcc

SEQ ID NO: 1323429 - DNA, 25 bp, Homo sapien
tgttttggaggtgtcatagttcctt

SEQ ID NO: 1323430 - DNA, 25 bp, Homo sapien
tgggggtgatagggtcactggcagt

SEQ ID NO: 1323431 - DNA, 25 bp, Homo sapien
ctgttgaaccccaaggcaagacaca

SEQ ID NO: 1323432 - DNA, 25 bp, Homo sapien
agctgtggtggggaatgtcactggg

SEQ ID NO: 1323433 - DNA, 25 bp, Homo sapien
ccttgcagctacagttacaggcagt

SEQ ID NO: 1323434 - DNA, 25 bp, Homo sapien
tatgtacctctctaaactaagttct

SEQ ID NO: 1323435 - DNA, 25 bp, Homo sapien
ttagaacccaactagaattgatccc

SEQ ID NO: 1323436 - DNA, 25 bp, Homo sapien
gtaggttccgtatgctatgctaatt

SEQ ID NO: 1323437 - DNA, 25 bp, Homo sapien
ttagagtgtccaattgtaggttccg

SEQ ID NO: 1323438 - DNA, 25 bp, Homo sapien
tattgggcatcatcaactggcacag

SEQ ID NO: 1323439 - DNA, 25 bp, Homo sapien
tcaagctgccaccatgggaatagac

SEQ ID NO: 1323440 - DNA, 25 bp, Homo sapien
gacatagcagctgagataccacctt

SEQ ID NO: 1323441 - DNA, 25 bp, Homo sapien
tacccacaggagtaactgcttcaag

SEQ ID NO: 1323442 - DNA, 25 bp, Homo sapien
gacgcaccgtgatcttgcatccaat

SEQ ID NO: 1323443 - DNA, 25 bp, Homo sapien
ggtccattgtgctgatgcctcaaga

SEQ ID NO: 1323444 - DNA, 25 bp, Homo sapien
taaggatcttgctagctctgacgca

SEQ ID NO: 1323445 - DNA, 25 bp, Homo sapien
gactccttacataacgctcgtcggg

SEQ ID NO: 1323446 - DNA, 25 bp, Homo sapien
tgagaggttcctgggaccacgccat

SEQ ID NO: 1323447 - DNA, 25 bp, Homo sapien
aggttcctgggaccacgccatggaa

SEQ ID NO: 1323448 - DNA, 25 bp, Homo sapien
accacgccatggaaatgcgtccggt

SEQ ID NO: 1323449 - DNA, 25 bp, Homo sapien
aatgcgtccggtcccagtgtgacgg

SEQ ID NO: 1323450 - DNA, 25 bp, Homo sapien
tacaggaaactgatcagcactaggg

SEQ ID NO: 1323451 - DNA, 25 bp, Homo sapien
tgtcatcagacactcccatttgagg

SEQ ID NO: 1323452 - DNA, 25 bp, Homo sapien
aaaaaccagcccattggcagaaatg

SEQ ID NO: 1323453 - DNA, 25 bp, Homo sapien
gctcatattagggtctgctctgccc

SEQ ID NO: 1323454 - DNA, 25 bp, Homo sapien
tgcagattccacacaaagaaggagg

SEQ ID NO: 1323455 - DNA, 25 bp, Homo sapien
aacctagacacggtctgagctccaa

SEQ ID NO: 1323456 - DNA, 25 bp, Homo sapien
gggagtcagcccactattgcagatt

SEQ ID NO: 1323457 - DNA, 25 bp, Homo sapien
gctggctatacttcaagggcgggta

SEQ ID NO: 1323458 - DNA, 25 bp, Homo sapien
catcggggtgctgcggaccttgcct

SEQ ID NO: 1323459 - DNA, 25 bp, Homo sapien
cggggtgctgcggaccttgccttcc

SEQ ID NO: 1323460 - DNA, 25 bp, Homo sapien
acattctcataggcattctcatgct

SEQ ID NO: 1323461 - DNA, 25 bp, Homo sapien
ttacatcggggtgctgcggaccttg

SEQ ID NO: 1323462 - DNA, 25 bp, Homo sapien
gaagagtaccttccatctgttccca

SEQ ID NO: 1323463 - DNA, 25 bp, Homo sapien
gaaactggccgccatcgaagagtac

SEQ ID NO: 1323464 - DNA, 25 bp, Homo sapien
atctgccttgtttccgacggtcagg

SEQ ID NO: 1323465 - DNA, 25 bp, Homo sapien
ccgacggtcaggatcatgtgtgcag

SEQ ID NO: 1323466 - DNA, 25 bp, Homo sapien
tcacaagcccgaaggctagcaactg

SEQ ID NO: 1323467 - DNA, 25 bp, Homo sapien
agctgtgtgcaacagggcatgtcag

SEQ ID NO: 1323468 - DNA, 25 bp, Homo sapien
gatgggattcatcagtggggctcct

SEQ ID NO: 1323469 - DNA, 25 bp, Homo sapien
atatttgcaaaagatttatcctgag

SEQ ID NO: 1323470 - DNA, 25 bp, Homo sapien
tctgccacgaggcagccagagtcat

SEQ ID NO: 1323471 - DNA, 25 bp, Homo sapien
tcattctgctaaggccgtgtctcat

SEQ ID NO: 1323472 - DNA, 25 bp, Homo sapien
gtgtctcatcccgaaactggcttaa

SEQ ID NO: 1323473 - DNA, 25 bp, Homo sapien
gtctgtgacgaccaactcccagggt

SEQ ID NO: 1323474 - DNA, 25 bp, Homo sapien
ccgcgataaggccctgcatccaggg

SEQ ID NO: 1323475 - DNA, 25 bp, Homo sapien
ttgcaacgaggaccaggaacacggc

SEQ ID NO: 1323476 - DNA, 25 bp, Homo sapien
ggcaccagaagtggttgactgcaaa

SEQ ID NO: 1323477 - DNA, 25 bp, Homo sapien
gactgcaaaggcgattgcaacgagg

SEQ ID NO: 1323478 - DNA, 25 bp, Homo sapien
gtgcaggagagcgaggggcctcact

SEQ ID NO: 1323479 - DNA, 25 bp, Homo sapien
agcgaggggcctcactcttcaagga

SEQ ID NO: 1323480 - DNA, 25 bp, Homo sapien
ggagagcgaggggcctcactcttca

SEQ ID NO: 1323481 - DNA, 25 bp, Homo sapien
gcaggagagcgaggggcctcactct

SEQ ID NO: 1323482 - DNA, 25 bp, Homo sapien
aggcaggggtgggatacagcccatc

SEQ ID NO: 1323483 - DNA, 25 bp, Homo sapien
gggaggcaggggtgggatacagccc

SEQ ID NO: 1323484 - DNA, 25 bp, Homo sapien
caaggagacattgtggggaggcagg

SEQ ID NO: 1323485 - DNA, 25 bp, Homo sapien
ggcaggggtgggatacagcccatct

SEQ ID NO: 1323486 - DNA, 25 bp, Homo sapien
ggagggaagagcctcagtgctgtat

SEQ ID NO: 1323487 - DNA, 25 bp, Homo sapien
agaagggagttggaaggagtgagaa

SEQ ID NO: 1323488 - DNA, 25 bp, Homo sapien
agagaagggagttggaaggagtgag

SEQ ID NO: 1323489 - DNA, 25 bp, Homo sapien
gagaagggagttggaaggagtgaga

SEQ ID NO: 1323490 - DNA, 25 bp, Homo sapien
tctatccaagcccaagaggccgaga

SEQ ID NO: 1323491 - DNA, 25 bp, Homo sapien
tgagatcctagaaccaactgctgcc

SEQ ID NO: 1323492 - DNA, 25 bp, Homo sapien
gggacattctttcagctagcgcagt

SEQ ID NO: 1323493 - DNA, 25 bp, Homo sapien
tgtagaatgaaagccagaccttggg

SEQ ID NO: 1323494 - DNA, 25 bp, Homo sapien
agctggcaggtggcactgccgtgag

SEQ ID NO: 1323495 - DNA, 25 bp, Homo sapien
gctggcaggtggcactgccgtgagc

SEQ ID NO: 1323496 - DNA, 25 bp, Homo sapien
ggcactgccgtgagcaggcccagaa

SEQ ID NO: 1323497 - DNA, 25 bp, Homo sapien
ctgccgtgagcaggcccagaatgag

SEQ ID NO: 1323498 - DNA, 25 bp, Homo sapien
cagcagctcctagccttgcttctgg

SEQ ID NO: 1323499 - DNA, 25 bp, Homo sapien
agctgctgtggagtctattggtgtc

SEQ ID NO: 1323500 - DNA, 25 bp, Homo sapien
tctggccgccggtgtctgggctcct

SEQ ID NO: 1323501 - DNA, 25 bp, Homo sapien
tgctgtggagtctattggtgtccgc

SEQ ID NO: 1323502 - DNA, 25 bp, Homo sapien
agacgggcgtcggagagaacgtgcc

SEQ ID NO: 1323503 - DNA, 25 bp, Homo sapien
ctgaaatcaacctgggctcagtctg

SEQ ID NO: 1323504 - DNA, 25 bp, Homo sapien
agggaggagacacgaagacgggcgt

SEQ ID NO: 1323505 - DNA, 25 bp, Homo sapien
ggctggcattcgaggtcatcttcca

SEQ ID NO: 1323506 - DNA, 25 bp, Homo sapien
tggtcagaggcttcaacacccaact

SEQ ID NO: 1323507 - DNA, 25 bp, Homo sapien
ggcagggcctcaaaacaagatacag

SEQ ID NO: 1323508 - DNA, 25 bp, Homo sapien
gagccctcggaagaggcaaaagcct

SEQ ID NO: 1323509 - DNA, 25 bp, Homo sapien
ccctcatagccaaaagcagcattga

SEQ ID NO: 1323510 - DNA, 25 bp, Homo sapien
aaaagatgcttagtgttggccgggc

SEQ ID NO: 1323511 - DNA, 25 bp, Homo sapien
gagcatggagacagatagaagtata

SEQ ID NO: 1323512 - DNA, 25 bp, Homo sapien
taggcaaaacaagattactcacatg

SEQ ID NO: 1323513 - DNA, 25 bp, Homo sapien
caattgctgaaactggattcatgcc

SEQ ID NO: 1323514 - DNA, 25 bp, Homo sapien
taaaagccaaagtccctatgtggac

SEQ ID NO: 1323515 - DNA, 25 bp, Homo sapien
caatgttattgcatcccacccaaag

SEQ ID NO: 1323516 - DNA, 25 bp, Homo sapien
gaggctccatgtggtacctctccaa

SEQ ID NO: 1323517 - DNA, 25 bp, Homo sapien
tgactccggtgacccctattctgcg

SEQ ID NO: 1323518 - DNA, 25 bp, Homo sapien
cactgggagccatcaaagggagtga

SEQ ID NO: 1323519 - DNA, 25 bp, Homo sapien
cctccagcaaggacaagtgcaggac

SEQ ID NO: 1323520 - DNA, 25 bp, Homo sapien
cgtgggagtctacagaaagggcatc

SEQ ID NO: 1323521 - DNA, 25 bp, Homo sapien
aaaacctgctcctggcgtgggagtc

SEQ ID NO: 1323522 - DNA, 25 bp, Homo sapien
aggcaaggccccagttgcagctctt

SEQ ID NO: 1323523 - DNA, 25 bp, Homo sapien
caggcaaggccccagttgcagctct

SEQ ID NO: 1323524 - DNA, 25 bp, Homo sapien
agcagggccatttcaggcaaggccc

SEQ ID NO: 1323525 - DNA, 25 bp, Homo sapien
gctcaccccacggctaaatctcacc

SEQ ID NO: 1323526 - DNA, 25 bp, Homo sapien
tcaccccacggctaaatctcaccat

SEQ ID NO: 1323527 - DNA, 25 bp, Homo sapien
accactgctgagatccacagccagc

SEQ ID NO: 1323528 - DNA, 25 bp, Homo sapien
ccactgctgagatccacagccagct

SEQ ID NO: 1323529 - DNA, 25 bp, Homo sapien
tctcaataactcaggccaaagcggt

SEQ ID NO: 1323530 - DNA, 25 bp, Homo sapien
gtcttcagcagagggtcacgtacca

SEQ ID NO: 1323531 - DNA, 25 bp, Homo sapien
caacgttgacggaaagtgctgggcc

SEQ ID NO: 1323532 - DNA, 25 bp, Homo sapien
gaaacaatgcactatgtacacgggc

SEQ ID NO: 1323533 - DNA, 25 bp, Homo sapien
tccacggtgaagcaaacagccttag

SEQ ID NO: 1323534 - DNA, 25 bp, Homo sapien
tgtacatggctgaattagggcccca

SEQ ID NO: 1323535 - DNA, 25 bp, Homo sapien
gatcctggtcctattgagcgctaaa

SEQ ID NO: 1323536 - DNA, 25 bp, Homo sapien
cacaggcttaggaaggcaagtctca

SEQ ID NO: 1323537 - DNA, 25 bp, Homo sapien
ttcaaccaggccctgaagaaggcac

SEQ ID NO: 1323538 - DNA, 25 bp, Homo sapien
cctgaagaaggcacctcgaggcttg

SEQ ID NO: 1323539 - DNA, 25 bp, Homo sapien
aagaaggcacctcgaggcttgtgac

SEQ ID NO: 1323540 - DNA, 25 bp, Homo sapien
aaggcacctcgaggcttgtgactct

SEQ ID NO: 1323541 - DNA, 25 bp, Homo sapien
gacaactccagcctcttacttggga

SEQ ID NO: 1323542 - DNA, 25 bp, Homo sapien
gagagctgacaaccccaggtcttag

SEQ ID NO: 1323543 - DNA, 25 bp, Homo sapien
cacgaaatgggcagctattgggtac

SEQ ID NO: 1323544 - DNA, 25 bp, Homo sapien
caggaaagttcaagtccaccgcctt

SEQ ID NO: 1323545 - DNA, 25 bp, Homo sapien
acgccctcctggctgatcctggtgg

SEQ ID NO: 1323546 - DNA, 25 bp, Homo sapien
aagaacgccctcctggctgatcctg

SEQ ID NO: 1323547 - DNA, 25 bp, Homo sapien
gaacgccctcctggctgatcctggt

SEQ ID NO: 1323548 - DNA, 25 bp, Homo sapien
ctaagaacgccctcctggctgatcc

SEQ ID NO: 1323549 - DNA, 25 bp, Homo sapien
gagggccggctccatcggcggcagg

SEQ ID NO: 1323550 - DNA, 25 bp, Homo sapien
ctccgtgtagctgtccgggctggct

SEQ ID NO: 1323551 - DNA, 25 bp, Homo sapien
tccatcggcggcaggcagcatggca

SEQ ID NO: 1323552 - DNA, 25 bp, Homo sapien
ggccgtgtgtttgggcgcgggctcc

SEQ ID NO: 1323553 - DNA, 25 bp, Homo sapien
aaagcacgtcttgcaggaggtcatc

SEQ ID NO: 1323554 - DNA, 25 bp, Homo sapien
agttgggggaaagcacgtcttgcag

SEQ ID NO: 1323555 - DNA, 25 bp, Homo sapien
ggaaagcacgtcttgcaggaggtca

SEQ ID NO: 1323556 - DNA, 25 bp, Homo sapien
cacgtcttgcaggaggtcatctggg

SEQ ID NO: 1323557 - DNA, 25 bp, Homo sapien
tggccaggcggaggatctcattctt

SEQ ID NO: 1323558 - DNA, 25 bp, Homo sapien
gatcagcttgcggagctcggcaaag

SEQ ID NO: 1323559 - DNA, 25 bp, Homo sapien
ggcaaaggccccgttcacattctgc

SEQ ID NO: 1323560 - DNA, 25 bp, Homo sapien
gatacgccgcacaactttggtgtgg

SEQ ID NO: 1323561 - DNA, 25 bp, Homo sapien
ggacctcggagaaaacccttgatga

SEQ ID NO: 1323562 - DNA, 25 bp, Homo sapien
tgtcaggaagggaactccaggtcta

SEQ ID NO: 1323563 - DNA, 25 bp, Homo sapien
tctaagcccagaatgtgttaacggg

SEQ ID NO: 1323564 - DNA, 25 bp, Homo sapien
gaagcagactccagactctaaggaa

SEQ ID NO: 1323565 - DNA, 25 bp, Homo sapien
catagggggaaggtctcctcttcac

SEQ ID NO: 1323566 - DNA, 25 bp, Homo sapien
tgaacatagggaaggcatccggctc

SEQ ID NO: 1323567 - DNA, 25 bp, Homo sapien
cactcgattgttggtggtgaacata

SEQ ID NO: 1323568 - DNA, 25 bp, Homo sapien
taatctccatctcatagggggaagg

SEQ ID NO: 1323569 - DNA, 25 bp, Homo sapien
tgtgggagggaacgggcagatcaca

SEQ ID NO: 1323570 - DNA, 25 bp, Homo sapien
tgggagggaacgggcagatcacaag

SEQ ID NO: 1323571 - DNA, 25 bp, Homo sapien
ctgtgggagggaacgggcagatcac

SEQ ID NO: 1323572 - DNA, 25 bp, Homo sapien
ggagggaacgggcagatcacaagat

SEQ ID NO: 1323573 - DNA, 25 bp, Homo sapien
catgcaggcacactctttcctggta

SEQ ID NO: 1323574 - DNA, 25 bp, Homo sapien
tgcaggcacactctttcctggtacc

SEQ ID NO: 1323575 - DNA, 25 bp, Homo sapien
gctcaggggactccttcctctccgt

SEQ ID NO: 1323576 - DNA, 25 bp, Homo sapien
tcctggtacccacgctcaggggact

SEQ ID NO: 1323577 - DNA, 25 bp, Homo sapien
agccagcgcgggaggactcagctgc

SEQ ID NO: 1323578 - DNA, 25 bp, Homo sapien
gcagccagcgcgggaggactcagct

SEQ ID NO: 1323579 - DNA, 25 bp, Homo sapien
gccagcgcgggaggactcagctgca

SEQ ID NO: 1323580 - DNA, 25 bp, Homo sapien
cagccagcgcgggaggactcagctg

SEQ ID NO: 1323581 - DNA, 25 bp, Homo sapien
ggtctgcacagctcggtggtgggca

SEQ ID NO: 1323582 - DNA, 25 bp, Homo sapien
cgcgcgcgcccagttcgatgactgg

SEQ ID NO: 1323583 - DNA, 25 bp, Homo sapien
cagctccgctgtaaccgaggcgggc

SEQ ID NO: 1323584 - DNA, 25 bp, Homo sapien
cttggcgacgccgttcagcaggacc

SEQ ID NO: 1323585 - DNA, 25 bp, Homo sapien
tagagtatttgacgactacagctcc

SEQ ID NO: 1323586 - DNA, 25 bp, Homo sapien
ctttgtactacggagaccctgctta

SEQ ID NO: 1323587 - DNA, 25 bp, Homo sapien
gactgaatcgttctagagtatttga

SEQ ID NO: 1323588 - DNA, 25 bp, Homo sapien
tgcagttgccagacagccagaatat

SEQ ID NO: 1323589 - DNA, 25 bp, Homo sapien
tgggactgcactagccaggaaggct

SEQ ID NO: 1323590 - DNA, 25 bp, Homo sapien
gggacaggtctcaagcagacccaat

SEQ ID NO: 1323591 - DNA, 25 bp, Homo sapien
catcctcgcctctaccggagaagag

SEQ ID NO: 1323592 - DNA, 25 bp, Homo sapien
tgcacaagtaccaaacccaccaggg

SEQ ID NO: 1323593 - DNA, 25 bp, Homo sapien
gaagaggatgcacacccgggtcttt

SEQ ID NO: 1323594 - DNA, 25 bp, Homo sapien
ggcatatttagagagaccggcccct

SEQ ID NO: 1323595 - DNA, 25 bp, Homo sapien
ccctttttcgctgagaggcctgcag

SEQ ID NO: 1323596 - DNA, 25 bp, Homo sapien
tgcagttacgctgcggtgtggtcct

SEQ ID NO: 1323597 - DNA, 25 bp, Homo sapien
gcgcccaaagcgagtttccaggaaa

SEQ ID NO: 1323598 - DNA, 25 bp, Homo sapien
tccaactgggatcggtctggttcag

SEQ ID NO: 1323599 - DNA, 25 bp, Homo sapien
cagtccagggaatcgcaaacagctt

SEQ ID NO: 1323600 - DNA, 25 bp, Homo sapien
ttctaagcagggaggtgtctacgcg

SEQ ID NO: 1323601 - DNA, 25 bp, Homo sapien
tcaggcttatgatcacacatcgaag

SEQ ID NO: 1323602 - DNA, 25 bp, Homo sapien
aatccatccattcccggcgtgttcg

SEQ ID NO: 1323603 - DNA, 25 bp, Homo sapien
ccgcggctttggtggacatatagga

SEQ ID NO: 1323604 - DNA, 25 bp, Homo sapien
tcttggattaactgcgaaggcctcc

SEQ ID NO: 1323605 - DNA, 25 bp, Homo sapien
acccgaggctcgaggcctggtgaat

SEQ ID NO: 1323606 - DNA, 25 bp, Homo sapien
ggaggtgatcccgaatgtccccacc

SEQ ID NO: 1323607 - DNA, 25 bp, Homo sapien
ccacccgaggctcgaggcctggtga

SEQ ID NO: 1323608 - DNA, 25 bp, Homo sapien
tcttcccaggaggtgatcccgaatg

SEQ ID NO: 1323609 - DNA, 25 bp, Homo sapien
aagcccgcagctaccggctcgaagg

SEQ ID NO: 1323610 - DNA, 25 bp, Homo sapien
cgctgctcagcttcaagcctggagg

SEQ ID NO: 1323611 - DNA, 25 bp, Homo sapien
cagaaatggatgaagccggagtgca

SEQ ID NO: 1323612 - DNA, 25 bp, Homo sapien
agtgcagcgggaaccgaagcccgca

SEQ ID NO: 1323613 - DNA, 25 bp, Homo sapien
ctgctgagaacaccaacggagcaca

SEQ ID NO: 1323614 - DNA, 25 bp, Homo sapien
agaatcagatccctgctgagaacac

SEQ ID NO: 1323615 - DNA, 25 bp, Homo sapien
ccaacggagcacaatcgtacgcaac

SEQ ID NO: 1323616 - DNA, 25 bp, Homo sapien
gaatcagatccctgctgagaacacc

SEQ ID NO: 1323617 - DNA, 25 bp, Homo sapien
gctacgggggtacgcgtgtggccat

SEQ ID NO: 1323618 - DNA, 25 bp, Homo sapien
ggggtacgcgtgtggccattttgag

SEQ ID NO: 1323619 - DNA, 25 bp, Homo sapien
tccgctacgggggtacgcgtgtggc

SEQ ID NO: 1323620 - DNA, 25 bp, Homo sapien
cgggggtacgcgtgtggccattttg

SEQ ID NO: 1323621 - DNA, 25 bp, Homo sapien
caggcctcgttagcatgggccgagg

SEQ ID NO: 1323622 - DNA, 25 bp, Homo sapien
gggccgtgtgcgccgcagagataag

SEQ ID NO: 1323623 - DNA, 25 bp, Homo sapien
cgcccccgataagcgcctcggccat

SEQ ID NO: 1323624 - DNA, 25 bp, Homo sapien
agagataaggcactgccgcgggtcc

SEQ ID NO: 1323625 - DNA, 25 bp, Homo sapien
caacctcagtcccttaacctttcag

SEQ ID NO: 1323626 - DNA, 25 bp, Homo sapien
cctcagtcccttaacctttcagaca

SEQ ID NO: 1323627 - DNA, 25 bp, Homo sapien
cgatggtcagtggaaaaacggaagc

SEQ ID NO: 1323628 - DNA, 25 bp, Homo sapien
gcctgtcggtcagcgagttgtccga

SEQ ID NO: 1323629 - DNA, 25 bp, Homo sapien
agcgtccacgagagagtgacaggcc

SEQ ID NO: 1323630 - DNA, 25 bp, Homo sapien
aaaacggaagctgtgcgctaagcgg

SEQ ID NO: 1323631 - DNA, 25 bp, Homo sapien
ccccgagcttcttctccggaaagat

SEQ ID NO: 1323632 - DNA, 25 bp, Homo sapien
tctgagtactggactatctctgagc

SEQ ID NO: 1323633 - DNA, 25 bp, Homo sapien
cgagcttcttctccggaaagatgcc

SEQ ID NO: 1323634 - DNA, 25 bp, Homo sapien
agtactggactatctctgagcttct

SEQ ID NO: 1323635 - DNA, 25 bp, Homo sapien
cagagatgcaacatgctggaacttc

SEQ ID NO: 1323636 - DNA, 25 bp, Homo sapien
tgactccagaatgatcaggagcctt

SEQ ID NO: 1323637 - DNA, 25 bp, Homo sapien
gagaacttagtcctatcaccagcca

SEQ ID NO: 1323638 - DNA, 25 bp, Homo sapien
gaagtcactcttcccaattggctgc

SEQ ID NO: 1323639 - DNA, 25 bp, Homo sapien
tgtctgagacgttttacatctaaga

SEQ ID NO: 1323640 - DNA, 25 bp, Homo sapien
taattttggtaactgtctgagacgt

SEQ ID NO: 1323641 - DNA, 25 bp, Homo sapien
taaaataattttggtaactgtctga

SEQ ID NO: 1323642 - DNA, 25 bp, Homo sapien
ggtaactgtctgagacgttttacat

SEQ ID NO: 1323643 - DNA, 25 bp, Homo sapien
cactgcaggacttggtttaaggttc

SEQ ID NO: 1323644 - DNA, 25 bp, Homo sapien
gttgagtgaactctgctttcccggt

SEQ ID NO: 1323645 - DNA, 25 bp, Homo sapien
gctttagcgtttcagaaggttgcaa

SEQ ID NO: 1323646 - DNA, 25 bp, Homo sapien
ttcccggttcgaaggttcactgcag

SEQ ID NO: 1323647 - DNA, 25 bp, Homo sapien
tgtcactgctttgtaggagtccata

SEQ ID NO: 1323648 - DNA, 25 bp, Homo sapien
ggctctttctgaccaccaagctgtt

SEQ ID NO: 1323649 - DNA, 25 bp, Homo sapien
tatttcatggtcattcttagaaggc

SEQ ID NO: 1323650 - DNA, 25 bp, Homo sapien
ggtccccacagattcacagttagaa

SEQ ID NO: 1323651 - DNA, 25 bp, Homo sapien
taagccgctcatgccaacattagca

SEQ ID NO: 1323652 - DNA, 25 bp, Homo sapien
ccatgctcaaatccacaccattggg

SEQ ID NO: 1323653 - DNA, 25 bp, Homo sapien
cgatcgagtgacagacagttgtgac

SEQ ID NO: 1323654 - DNA, 25 bp, Homo sapien
tgcttctgggctgatgcatgccaac

SEQ ID NO: 1323655 - DNA, 25 bp, Homo sapien
tttcttcactttagtgggagaatca

SEQ ID NO: 1323656 - DNA, 25 bp, Homo sapien
ttaaggacacaatctttgtccacca

SEQ ID NO: 1323657 - DNA, 25 bp, Homo sapien
ggcgtgatccacgttatgtgcattt

SEQ ID NO: 1323658 - DNA, 25 bp, Homo sapien
gcttcttagttgcttaagagttgca

SEQ ID NO: 1323659 - DNA, 25 bp, Homo sapien
cttggaggaactatttaataggtgg

SEQ ID NO: 1323660 - DNA, 25 bp, Homo sapien
tatctgatggttgatgaagcaaggg

SEQ ID NO: 1323661 - DNA, 25 bp, Homo sapien
gatgaagcaagggttgcattacatg

SEQ ID NO: 1323662 - DNA, 25 bp, Homo sapien
gcaagggttgcattacatgctcaat

SEQ ID NO: 1323663 - DNA, 25 bp, Homo sapien
aagcaagggttgcattacatgctca

SEQ ID NO: 1323664 - DNA, 25 bp, Homo sapien
acacatgcttacactttctgccagc

SEQ ID NO: 1323665 - DNA, 25 bp, Homo sapien
cacatgcttacactttctgccagct

SEQ ID NO: 1323666 - DNA, 25 bp, Homo sapien
gttggtccagtctgtaaacacatgc

SEQ ID NO: 1323667 - DNA, 25 bp, Homo sapien
cttggaaagaacacaggtacatcag

SEQ ID NO: 1323668 - DNA, 25 bp, Homo sapien
aggtacatcaggttcttttctcaca

SEQ ID NO: 1323669 - DNA, 25 bp, Homo sapien
ggaaagaacacaggtacatcaggtt

SEQ ID NO: 1323670 - DNA, 25 bp, Homo sapien
ggtacatcaggttcttttctcacaa

SEQ ID NO: 1323671 - DNA, 25 bp, Homo sapien
ctgcttttaatgaagatgcactacc

SEQ ID NO: 1323672 - DNA, 25 bp, Homo sapien
actacctggaagacttgtgacttca

SEQ ID NO: 1323673 - DNA, 25 bp, Homo sapien
aggctcttgatcctcacctgctgca

SEQ ID NO: 1323674 - DNA, 25 bp, Homo sapien
aaactgggaatatcaactgctttta

SEQ ID NO: 1323675 - DNA, 25 bp, Homo sapien
accttttctcatgtgcaagccaggg

SEQ ID NO: 1323676 - DNA, 25 bp, Homo sapien
cacagcaatgcttacaccttttctc

SEQ ID NO: 1323677 - DNA, 25 bp, Homo sapien
ctgtgctcacagcaatgcttacacc

SEQ ID NO: 1323678 - DNA, 25 bp, Homo sapien
acaccttttctcatgtgcaagccag

SEQ ID NO: 1323679 - DNA, 25 bp, Homo sapien
aacagggcatcagagactgtgcttc

SEQ ID NO: 1323680 - DNA, 25 bp, Homo sapien
cttaggggaacagggcatcagagac

SEQ ID NO: 1323681 - DNA, 25 bp, Homo sapien
actgtgcttccaacaaacgctgaat

SEQ ID NO: 1323682 - DNA, 25 bp, Homo sapien
catcagagactgtgcttccaacaaa

SEQ ID NO: 1323683 - DNA, 25 bp, Homo sapien
ttgttctgtgaggaaccgatatgca

SEQ ID NO: 1323684 - DNA, 25 bp, Homo sapien
cctgaagtagtcttagctgtctgtc

SEQ ID NO: 1323685 - DNA, 25 bp, Homo sapien
ggagatagtcccatcattccattat

SEQ ID NO: 1323686 - DNA, 25 bp, Homo sapien
attccattatctgactcagtcttgg

SEQ ID NO: 1323687 - DNA, 25 bp, Homo sapien
aacaaaatcgtgtggttgggactgc

SEQ ID NO: 1323688 - DNA, 25 bp, Homo sapien
cattacagtacagggctggacatcc

SEQ ID NO: 1323689 - DNA, 25 bp, Homo sapien
tccatatgtgaaggcggtcttgcca

SEQ ID NO: 1323690 - DNA, 25 bp, Homo sapien
ccctgaggtctcaaggctataggac

SEQ ID NO: 1323691 - DNA, 25 bp, Homo sapien
tttcaaatatatcatgagatggccc

SEQ ID NO: 1323692 - DNA, 25 bp, Homo sapien
ctttcttataggcaggtggctgtct

SEQ ID NO: 1323693 - DNA, 25 bp, Homo sapien
tgagatggcccattatgagaagatg

SEQ ID NO: 1323694 - DNA, 25 bp, Homo sapien
tgagaagatggtttaatactgttcc

SEQ ID NO: 1323695 - DNA, 25 bp, Homo sapien
ccaagtggttaatcaaaggaggatt

SEQ ID NO: 1323696 - DNA, 25 bp, Homo sapien
catttccaatggagtaggcagaggg

SEQ ID NO: 1323697 - DNA, 25 bp, Homo sapien
gatttggtattcctctcaaggaagg

SEQ ID NO: 1323698 - DNA, 25 bp, Homo sapien
tctcaaaagagctggtttatcctgg

SEQ ID NO: 1323699 - DNA, 25 bp, Homo sapien
gactaggaattggtcttggagaaaa

SEQ ID NO: 1323700 - DNA, 25 bp, Homo sapien
gagtcgtgatcatgtattggcatct

SEQ ID NO: 1323701 - DNA, 25 bp, Homo sapien
atgaggactaggaattggtcttgga

SEQ ID NO: 1323702 - DNA, 25 bp, Homo sapien
atcttcaacaccagagtcgtgatca

SEQ ID NO: 1323703 - DNA, 25 bp, Homo sapien
tgatattccaaagcgctcagtgcag

SEQ ID NO: 1323704 - DNA, 25 bp, Homo sapien
gatggatgagaatcacgtcacccca

SEQ ID NO: 1323705 - DNA, 25 bp, Homo sapien
cacctcagcagattgtagcacagat

SEQ ID NO: 1323706 - DNA, 25 bp, Homo sapien
gccagtgttagttgaccagggaagc

SEQ ID NO: 1323707 - DNA, 25 bp, Homo sapien
gcgctcagttcacaacggattggat

SEQ ID NO: 1323708 - DNA, 25 bp, Homo sapien
cattttggctttcagcgctcagttc

SEQ ID NO: 1323709 - DNA, 25 bp, Homo sapien
cacaacggattggatttttgtcagg

SEQ ID NO: 1323710 - DNA, 25 bp, Homo sapien
tggctttcagcgctcagttcacaac

SEQ ID NO: 1323711 - DNA, 25 bp, Homo sapien
gtttccttactggttagcaactgaa

SEQ ID NO: 1323712 - DNA, 25 bp, Homo sapien
actcaggttccttatgtgtcataga

SEQ ID NO: 1323713 - DNA, 25 bp, Homo sapien
tcttgccatcacaagggaagcattc

SEQ ID NO: 1323714 - DNA, 25 bp, Homo sapien
accgaaagtcaggtatcttgccatc

SEQ ID NO: 1323715 - DNA, 25 bp, Homo sapien
tcacagtgttagtgcaggtagagaa

SEQ ID NO: 1323716 - DNA, 25 bp, Homo sapien
ttctttcacagtgttagtgcaggta

SEQ ID NO: 1323717 - DNA, 25 bp, Homo sapien
gatccccagtactgtgaacataata

SEQ ID NO: 1323718 - DNA, 25 bp, Homo sapien
cccagtactgtgaacataatagata

SEQ ID NO: 1323719 - DNA, 25 bp, Homo sapien
cagtagacaatctccacagtttttt

SEQ ID NO: 1323720 - DNA, 25 bp, Homo sapien
aaaaggttacggcattacatgaatt

SEQ ID NO: 1323721 - DNA, 25 bp, Homo sapien
tggtatttccaggtatactgcaacc

SEQ ID NO: 1323722 - DNA, 25 bp, Homo sapien
tctgtggttaggcaagtgaattcct

SEQ ID NO: 1323723 - DNA, 25 bp, Homo sapien
cccatacctgaggactatagatatg

SEQ ID NO: 1323724 - DNA, 25 bp, Homo sapien
aatatgtatcgcaaacagcaagccc

SEQ ID NO: 1323725 - DNA, 25 bp, Homo sapien
actatagatatgtgtaattccagac

SEQ ID NO: 1323726 - DNA, 25 bp, Homo sapien
tcttgaacagaagaattgaatatgt

SEQ ID NO: 1323727 - DNA, 25 bp, Homo sapien
caaaagtaacaatttgcgtgtttca

SEQ ID NO: 1323728 - DNA, 25 bp, Homo sapien
ggtagagaataaaccttgggatcag

SEQ ID NO: 1323729 - DNA, 25 bp, Homo sapien
atggtagagaataaaccttgggatc

SEQ ID NO: 1323730 - DNA, 25 bp, Homo sapien
gtaacaatttgcgtgtttcatccat

SEQ ID NO: 1323731 - DNA, 25 bp, Homo sapien
ttacatggacattctgaaaatatac

SEQ ID NO: 1323732 - DNA, 25 bp, Homo sapien
ctggcatataaattgactggacaat

SEQ ID NO: 1323733 - DNA, 25 bp, Homo sapien
caattctttcacattacatggacat

SEQ ID NO: 1323734 - DNA, 25 bp, Homo sapien
tgcaactaacatttagattaatgta

SEQ ID NO: 1323735 - DNA, 25 bp, Homo sapien
tatttataagtcccttgaacttgag

SEQ ID NO: 1323736 - DNA, 25 bp, Homo sapien
gaaatattcagattactgctcaagt

SEQ ID NO: 1323737 - DNA, 25 bp, Homo sapien
agtcaaattccacactgtccaaact

SEQ ID NO: 1323738 - DNA, 25 bp, Homo sapien
aagtcaaattccacactgtccaaac

SEQ ID NO: 1323739 - DNA, 25 bp, Homo sapien
tatgaactcttagggaaagcagctt

SEQ ID NO: 1323740 - DNA, 25 bp, Homo sapien
agtgatatgaactcttagggaaagc

SEQ ID NO: 1323741 - DNA, 25 bp, Homo sapien
gatatgaactcttagggaaagcagc

SEQ ID NO: 1323742 - DNA, 25 bp, Homo sapien
tggaagtgatatgaactcttaggga

SEQ ID NO: 1323743 - DNA, 25 bp, Homo sapien
tgctacatatatggcactgtagagc

SEQ ID NO: 1323744 - DNA, 25 bp, Homo sapien
tctttgctacatatatggcactgta

SEQ ID NO: 1323745 - DNA, 25 bp, Homo sapien
tccaaggaatctttgctacatatat

SEQ ID NO: 1323746 - DNA, 25 bp, Homo sapien
ggaatctttgctacatatatggcac

SEQ ID NO: 1323747 - DNA, 25 bp, Homo sapien
tcttgtgttgaattaactatcaagt

SEQ ID NO: 1323748 - DNA, 25 bp, Homo sapien
ttgtgttgaattaactatcaagttg

SEQ ID NO: 1323749 - DNA, 25 bp, Homo sapien
gttgaattaactatcaagttgtcaa

SEQ ID NO: 1323750 - DNA, 25 bp, Homo sapien
gtgttgaattaactatcaagttgtc

SEQ ID NO: 1323751 - DNA, 25 bp, Homo sapien
gcattcaggtacttctcgaccagga

SEQ ID NO: 1323752 - DNA, 25 bp, Homo sapien
tgaactgaagtcatctacactgtga

SEQ ID NO: 1323753 - DNA, 25 bp, Homo sapien
gcatggaatcaaaaagtccccagga

SEQ ID NO: 1323754 - DNA, 25 bp, Homo sapien
caaagcgatctactgtcaatgttac

SEQ ID NO: 1323755 - DNA, 25 bp, Homo sapien
gatggtcttctcagtcaccacaagc

SEQ ID NO: 1323756 - DNA, 25 bp, Homo sapien
ataagcaagtcggatggtcttctca

SEQ ID NO: 1323757 - DNA, 25 bp, Homo sapien
gtcagagaaccaagtaaaaagcatg

SEQ ID NO: 1323758 - DNA, 25 bp, Homo sapien
tattctgcttagcatgacgataagc

SEQ ID NO: 1323759 - DNA, 25 bp, Homo sapien
gcccagttatagcaccttaaaccat

SEQ ID NO: 1323760 - DNA, 25 bp, Homo sapien
cccagttatagcaccttaaaccatt

SEQ ID NO: 1323761 - DNA, 25 bp, Homo sapien
ccagttatagcaccttaaaccatta

SEQ ID NO: 1323762 - DNA, 25 bp, Homo sapien
tggcgttgggttccaaagtgcacat

SEQ ID NO: 1323763 - DNA, 25 bp, Homo sapien
ggaaagtggaaaggtaccatcctgc

SEQ ID NO: 1323764 - DNA, 25 bp, Homo sapien
gtagtaactgagatgtaagtagatg

SEQ ID NO: 1323765 - DNA, 25 bp, Homo sapien
taagtagatgaaatctccagttggc

SEQ ID NO: 1323766 - DNA, 25 bp, Homo sapien
caaacttggtagacatttggtagga

SEQ ID NO: 1323767 - DNA, 25 bp, Homo sapien
catttggtaggaaacaactaactat

SEQ ID NO: 1323768 - DNA, 25 bp, Homo sapien
ttaaagcacaaggaatagcaaactt

SEQ ID NO: 1323769 - DNA, 25 bp, Homo sapien
caaggaatagcaaacttggtagaca

SEQ ID NO: 1323770 - DNA, 25 bp, Homo sapien
agaaaaagaccactaatggggccag

SEQ ID NO: 1323771 - DNA, 25 bp, Homo sapien
tataacacgagaaaaccacaataag

SEQ ID NO: 1323772 - DNA, 25 bp, Homo sapien
gagtgtataacacgagaaaaccaca

SEQ ID NO: 1323773 - DNA, 25 bp, Homo sapien
aagaccactaatggggccaggcctg

SEQ ID NO: 1323774 - DNA, 25 bp, Homo sapien
tcatctggggccgtgcaaaaggata

SEQ ID NO: 1323775 - DNA, 25 bp, Homo sapien
gtgcaaaaggatatataggctccat

SEQ ID NO: 1323776 - DNA, 25 bp, Homo sapien
ccgtgcaaaaggatatataggctcc

SEQ ID NO: 1323777 - DNA, 25 bp, Homo sapien
gggccgtgcaaaaggatatataggc

SEQ ID NO: 1323778 - DNA, 25 bp, Homo sapien
tctttaattccaaatcctcagtatc

SEQ ID NO: 1323779 - DNA, 25 bp, Homo sapien
tttccatataaatctgatcaaatta

SEQ ID NO: 1323780 - DNA, 25 bp, Homo sapien
cataatgctgctagaagagtgtttc

SEQ ID NO: 1323781 - DNA, 25 bp, Homo sapien
cagacttatggaaaagtccccataa

SEQ ID NO: 1323782 - DNA, 25 bp, Homo sapien
aaaagtccccataatgctgctagaa

SEQ ID NO: 1323783 - DNA, 25 bp, Homo sapien
tggctcatgtcaggggcggtggctc

SEQ ID NO: 1323784 - DNA, 25 bp, Homo sapien
aaaagtcaatggctcatgtcagggg

SEQ ID NO: 1323785 - DNA, 25 bp, Homo sapien
aagtcaatggctcatgtcaggggcg

SEQ ID NO: 1323786 - DNA, 25 bp, Homo sapien
aatggctcatgtcaggggcggtggc

SEQ ID NO: 1323787 - DNA, 25 bp, Homo sapien
gcctctcaaggggaaaccaggagca

SEQ ID NO: 1323788 - DNA, 25 bp, Homo sapien
gggaaaccaggagcacaaagctcca

SEQ ID NO: 1323789 - DNA, 25 bp, Homo sapien
cccgctgccgcctctcaaggggaaa

SEQ ID NO: 1323790 - DNA, 25 bp, Homo sapien
accaggagcacaaagctccacttac

SEQ ID NO: 1323791 - DNA, 25 bp, Homo sapien
gaactgaggcggcaaacacaagctc

SEQ ID NO: 1323792 - DNA, 25 bp, Homo sapien
cgggagccggctccaaggagcgcca

SEQ ID NO: 1323793 - DNA, 25 bp, Homo sapien
tctgtttgcagggtaggagcgggag

SEQ ID NO: 1323794 - DNA, 25 bp, Homo sapien
aggcggcaaacacaagctcgcgaaa

SEQ ID NO: 1323795 - DNA, 25 bp, Homo sapien
cttcttggagaactgcgggcgccac

SEQ ID NO: 1323796 - DNA, 25 bp, Homo sapien
ccaccggcgctccaggatcaaggat

SEQ ID NO: 1323797 - DNA, 25 bp, Homo sapien
caggatcaaggatccgaggatttaa

SEQ ID NO: 1323798 - DNA, 25 bp, Homo sapien
gcgctcgaccaatcccaagtcttct

SEQ ID NO: 1323799 - DNA, 25 bp, Homo sapien
ccctgtgtggaatccttagttctgg

SEQ ID NO: 1323800 - DNA, 25 bp, Homo sapien
caaggccttcactaaaagtatgcca

SEQ ID NO: 1323801 - DNA, 25 bp, Homo sapien
aagtatgccaatagcttcctagccc

SEQ ID NO: 1323802 - DNA, 25 bp, Homo sapien
gtctttttgtctctagcccaaggcc

SEQ ID NO: 1323803 - DNA, 25 bp, Homo sapien
tcacatatctaaacgtgggtccctg

SEQ ID NO: 1323804 - DNA, 25 bp, Homo sapien
catatctaaacgtgggtccctgttt

SEQ ID NO: 1323805 - DNA, 25 bp, Homo sapien
aattcacatatctaaacgtgggtcc

SEQ ID NO: 1323806 - DNA, 25 bp, Homo sapien
tgaaaattcacatatctaaacgtgg

SEQ ID NO: 1323807 - DNA, 25 bp, Homo sapien
cattctcctttctatggtgggaagg

SEQ ID NO: 1323808 - DNA, 25 bp, Homo sapien
gaaaaggtagaagttgtggagagga

SEQ ID NO: 1323809 - DNA, 25 bp, Homo sapien
ctgagtgagctaagaaaggaccacc

SEQ ID NO: 1323810 - DNA, 25 bp, Homo sapien
aagaagggcaaacaaaggcaagtag

SEQ ID NO: 1323811 - DNA, 25 bp, Homo sapien
ggactttttgtccaggtaagagaga

SEQ ID NO: 1323812 - DNA, 25 bp, Homo sapien
gcccggtccatgatcttaagttgaa

SEQ ID NO: 1323813 - DNA, 25 bp, Homo sapien
tgtaccacattccagtttagatgct

SEQ ID NO: 1323814 - DNA, 25 bp, Homo sapien
taaacccagggcactattgtgaatt

SEQ ID NO: 1323815 - DNA, 25 bp, Homo sapien
gagtagatggtcttaccagctccaa

SEQ ID NO: 1323816 - DNA, 25 bp, Homo sapien
gatctgtacctcaaaacttctgtgt

SEQ ID NO: 1323817 - DNA, 25 bp, Homo sapien
tctgtagcgtacgagttggagcacc

SEQ ID NO: 1323818 - DNA, 25 bp, Homo sapien
caatatagtcacacccaaaaggcaa

SEQ ID NO: 1323819 - DNA, 25 bp, Homo sapien
ggcagatgtatctttcgttctcttt

SEQ ID NO: 1323820 - DNA, 25 bp, Homo sapien
gggaaggcagatgtatctttcgttc

SEQ ID NO: 1323821 - DNA, 25 bp, Homo sapien
ccttcaaggatggaacaagaccatg

SEQ ID NO: 1323822 - DNA, 25 bp, Homo sapien
acaaccttcaaggatggaacaagac

SEQ ID NO: 1323823 - DNA, 25 bp, Homo sapien
ttgtattgaacgatgtcttgagagg

SEQ ID NO: 1323824 - DNA, 25 bp, Homo sapien
gagtagtggtaggagtgatgacaac

SEQ ID NO: 1323825 - DNA, 25 bp, Homo sapien
tattgaacgatgtcttgagagggga

SEQ ID NO: 1323826 - DNA, 25 bp, Homo sapien
ttgaacgatgtcttgagaggggaaa

SEQ ID NO: 1323827 - DNA, 25 bp, Homo sapien
aagccaattattgacttatatgaag

SEQ ID NO: 1323828 - DNA, 25 bp, Homo sapien
gatgcttctaaatctgttgatgaag

SEQ ID NO: 1323829 - DNA, 25 bp, Homo sapien
caagaaaatagatgcttctaaatct

SEQ ID NO: 1323830 - DNA, 25 bp, Homo sapien
agaattcagacctaccttcagtcaa

SEQ ID NO: 1323831 - DNA, 25 bp, Homo sapien
ggtacacagggtcaaatagggcaaa

SEQ ID NO: 1323832 - DNA, 25 bp, Homo sapien
caatgctaagtggtatccgaggttc

SEQ ID NO: 1323833 - DNA, 25 bp, Homo sapien
tcttatctagtgttgcaggccagca

SEQ ID NO: 1323834 - DNA, 25 bp, Homo sapien
tggtgctcaccaaacgaagggtatc

SEQ ID NO: 1323835 - DNA, 25 bp, Homo sapien
cctcagataagcctggaaggtcacc

SEQ ID NO: 1323836 - DNA, 25 bp, Homo sapien
caccatctttcctgttgtgcagaga

SEQ ID NO: 1323837 - DNA, 25 bp, Homo sapien
gaagccagtgtaaatactctcttgg

SEQ ID NO: 1323838 - DNA, 25 bp, Homo sapien
ggctgccgccatatacctgatgtca

SEQ ID NO: 1323839 - DNA, 25 bp, Homo sapien
cctttatgggaatgcctttatggga

SEQ ID NO: 1323840 - DNA, 25 bp, Homo sapien
tcaggcccacacctttatgggaatg

SEQ ID NO: 1323841 - DNA, 25 bp, Homo sapien
gaacctgcttctcttaggttcctct

SEQ ID NO: 1323842 - DNA, 25 bp, Homo sapien
tatgggagttcatcagagcagaacc

SEQ ID NO: 1323843 - DNA, 25 bp, Homo sapien
tgcccttgatcaggctcaaacgacc

SEQ ID NO: 1323844 - DNA, 25 bp, Homo sapien
gcagaactaggcctagaacccagtt

SEQ ID NO: 1323845 - DNA, 25 bp, Homo sapien
ttcaaagccctccagacagttagga

SEQ ID NO: 1323846 - DNA, 25 bp, Homo sapien
tctattgtcttaatagcctgacaca

SEQ ID NO: 1323847 - DNA, 25 bp, Homo sapien
gcattcgctcataagttcaacttgg

SEQ ID NO: 1323848 - DNA, 25 bp, Homo sapien
gatgcattcgctcataagttcaact

SEQ ID NO: 1323849 - DNA, 25 bp, Homo sapien
agccttgtatctttgtgggcaaggg

SEQ ID NO: 1323850 - DNA, 25 bp, Homo sapien
tctttgtgggcaagggatcaagtct

SEQ ID NO: 1323851 - DNA, 25 bp, Homo sapien
tagttatcagtatggccaccaagag

SEQ ID NO: 1323852 - DNA, 25 bp, Homo sapien
caagaggcgcccaggatccatcctg

SEQ ID NO: 1323853 - DNA, 25 bp, Homo sapien
caggtgtagttatcagtatggccac

SEQ ID NO: 1323854 - DNA, 25 bp, Homo sapien
gaggcgcccaggatccatcctgcat

SEQ ID NO: 1323855 - DNA, 25 bp, Homo sapien
gaagactcacaactctgaaggtcag

SEQ ID NO: 1323856 - DNA, 25 bp, Homo sapien
cctggatagcctcccggtcccagcc

SEQ ID NO: 1323857 - DNA, 25 bp, Homo sapien
ggtcaggtggaggtcctttagcagg

SEQ ID NO: 1323858 - DNA, 25 bp, Homo sapien
cggtcccagccaaatattgttccta

SEQ ID NO: 1323859 - DNA, 25 bp, Homo sapien
tcctgcagtggaaataaactttctt

SEQ ID NO: 1323860 - DNA, 25 bp, Homo sapien
tctcttcagcgactgctctcctgga

SEQ ID NO: 1323861 - DNA, 25 bp, Homo sapien
tttctcttcagcgactgctctcctg

SEQ ID NO: 1323862 - DNA, 25 bp, Homo sapien
cagtgcttcctgcagtggaaataaa

SEQ ID NO: 1323863 - DNA, 25 bp, Homo sapien
aacttgcattgggtcacatagcaca

SEQ ID NO: 1323864 - DNA, 25 bp, Homo sapien
gggcttatgtccctaacatgggcca

SEQ ID NO: 1323865 - DNA, 25 bp, Homo sapien
tatgtccctaacatgggccacagga

SEQ ID NO: 1323866 - DNA, 25 bp, Homo sapien
cacatgaatggtggattcaaactca

SEQ ID NO: 1323867 - DNA, 25 bp, Homo sapien
ccaggttccctaatgtctgtgagtg

SEQ ID NO: 1323868 - DNA, 25 bp, Homo sapien
ggaccgactactgggaggagcaaaa

SEQ ID NO: 1323869 - DNA, 25 bp, Homo sapien
tgatctggagcagtcaaacattctc

SEQ ID NO: 1323870 - DNA, 25 bp, Homo sapien
ttctcccagagacaaaaccggcctg

SEQ ID NO: 1323871 - DNA, 25 bp, Homo sapien
tcctattatgatagatgaacattta

SEQ ID NO: 1323872 - DNA, 25 bp, Homo sapien
taaatattgttctgtgataagctac

SEQ ID NO: 1323873 - DNA, 25 bp, Homo sapien
tagcatttacatcgttactatgtaa

SEQ ID NO: 1323874 - DNA, 25 bp, Homo sapien
gctactagtgtactacaattataat

SEQ ID NO: 1323875 - DNA, 25 bp, Homo sapien
caggtcggctgaacagagctggatc

SEQ ID NO: 1323876 - DNA, 25 bp, Homo sapien
tgagatgaggtcaaacttaccagga

SEQ ID NO: 1323877 - DNA, 25 bp, Homo sapien
tgtggtacagcttttcatgagatga

SEQ ID NO: 1323878 - DNA, 25 bp, Homo sapien
attaccttggtaattctgtgtcctg

SEQ ID NO: 1323879 - DNA, 25 bp, Homo sapien
cttgagttatgaaggggctggggtt

SEQ ID NO: 1323880 - DNA, 25 bp, Homo sapien
aggtggtgggttggagttctgaaag

SEQ ID NO: 1323881 - DNA, 25 bp, Homo sapien
gtgagcttcacaaaggaatgcttcc

SEQ ID NO: 1323882 - DNA, 25 bp, Homo sapien
ctcccttgagttatgaaggggctgg

SEQ ID NO: 1323883 - DNA, 25 bp, Homo sapien
aaacaaacaacgtatcttggtgctt

SEQ ID NO: 1323884 - DNA, 25 bp, Homo sapien
ccaatttgccctagtgtataatcag

SEQ ID NO: 1323885 - DNA, 25 bp, Homo sapien
cactcaacaatgtatcttggctggg

SEQ ID NO: 1323886 - DNA, 25 bp, Homo sapien
ggatgcatgtttacactgttctata

SEQ ID NO: 1323887 - DNA, 25 bp, Homo sapien
atgaataacttcagtctttattcac

SEQ ID NO: 1323888 - DNA, 25 bp, Homo sapien
gcccagcatgcaacacaaggcgtgg

SEQ ID NO: 1323889 - DNA, 25 bp, Homo sapien
atgcccagcatgcaacacaaggcgt

SEQ ID NO: 1323890 - DNA, 25 bp, Homo sapien
ccagcatgcaacacaaggcgtgggt

SEQ ID NO: 1323891 - DNA, 25 bp, Homo sapien
cagcatgcaacacaaggcgtgggtg

SEQ ID NO: 1323892 - DNA, 25 bp, Homo sapien
caaacataagcgaagagtggagtcc

SEQ ID NO: 1323893 - DNA, 25 bp, Homo sapien
tatggtacacacaggtcgctatggc

SEQ ID NO: 1323894 - DNA, 25 bp, Homo sapien
tcaacaaccgcgcagtacttgggtg

SEQ ID NO: 1323895 - DNA, 25 bp, Homo sapien
tacttgggtgcttaagcgagtcccc

SEQ ID NO: 1323896 - DNA, 25 bp, Homo sapien
tggtgatcactcgaatgcgtctccc

SEQ ID NO: 1323897 - DNA, 25 bp, Homo sapien
gctgcgggcgccaagttcgctcctg

SEQ ID NO: 1323898 - DNA, 25 bp, Homo sapien
ctgagcgttctgaaggcggcggctt

SEQ ID NO: 1323899 - DNA, 25 bp, Homo sapien
gcccgagtgagccttaacatccagg

SEQ ID NO: 1323900 - DNA, 25 bp, Homo sapien
gcagagccccaagaagcggctgacg

SEQ ID NO: 1323901 - DNA, 25 bp, Homo sapien
aagtcgccggccttagtggctgcca

SEQ ID NO: 1323902 - DNA, 25 bp, Homo sapien
taagcgggctctatcgctcagggcg

SEQ ID NO: 1323903 - DNA, 25 bp, Homo sapien
tacgcgaagaagtcgcaggccaaga

SEQ ID NO: 1323904 - DNA, 25 bp, Homo sapien
cagggtcccggtttgccagcaaagt

SEQ ID NO: 1323905 - DNA, 25 bp, Homo sapien
gcctcctccagcgccgccgcagcgc

SEQ ID NO: 1323906 - DNA, 25 bp, Homo sapien
ctcctccagcgccgccgcagcgcgc

SEQ ID NO: 1323907 - DNA, 25 bp, Homo sapien
cctccagcgccgccgcagcgcgcac

SEQ ID NO: 1323908 - DNA, 25 bp, Homo sapien
ttaaacttcgcctcctccagcgccg

SEQ ID NO: 1323909 - DNA, 25 bp, Homo sapien
acagggtcaggcgaataaaggcgcc

SEQ ID NO: 1323910 - DNA, 25 bp, Homo sapien
gaccaggcgggttttcctgcgcaca

SEQ ID NO: 1323911 - DNA, 25 bp, Homo sapien
gggcagtcgcggaccagacaatgac

SEQ ID NO: 1323912 - DNA, 25 bp, Homo sapien
aatgaagttgaaggctcggtgagcc

SEQ ID NO: 1323913 - DNA, 25 bp, Homo sapien
cagtggtcgggcaggataactcatc

SEQ ID NO: 1323914 - DNA, 25 bp, Homo sapien
tactctgttctttaaggtcggcgca

SEQ ID NO: 1323915 - DNA, 25 bp, Homo sapien
gcctaacttaattccgatacgcgcg

SEQ ID NO: 1323916 - DNA, 25 bp, Homo sapien
tcatcctcctaaagcgtttgtgagc

SEQ ID NO: 1323917 - DNA, 25 bp, Homo sapien
gcgctgtcttttcgctccacgcgga

SEQ ID NO: 1323918 - DNA, 25 bp, Homo sapien
ccagctctagtttcgggaacggatt

SEQ ID NO: 1323919 - DNA, 25 bp, Homo sapien
tccacgcggactctgagcggaagtc

SEQ ID NO: 1323920 - DNA, 25 bp, Homo sapien
aaggaaggcggtttcctccgcagcg

SEQ ID NO: 1323921 - DNA, 25 bp, Homo sapien
tatgtatcctaaggccagctttggt

SEQ ID NO: 1323922 - DNA, 25 bp, Homo sapien
gtcccagttcactgggtgccggctg

SEQ ID NO: 1323923 - DNA, 25 bp, Homo sapien
ccgaacggtatgaggatatgtatcc

SEQ ID NO: 1323924 - DNA, 25 bp, Homo sapien
atgagccctggacccgaacggtatg

SEQ ID NO: 1323925 - DNA, 25 bp, Homo sapien
ggctgtcaatgcttctgaatgcccc

SEQ ID NO: 1323926 - DNA, 25 bp, Homo sapien
ctgggctgtcaatgcttctgaatgc

SEQ ID NO: 1323927 - DNA, 25 bp, Homo sapien
ctgtcaatgcttctgaatgcccctt

SEQ ID NO: 1323928 - DNA, 25 bp, Homo sapien
tgggctgtcaatgcttctgaatgcc

SEQ ID NO: 1323929 - DNA, 25 bp, Homo sapien
gatctaagaggcttccacgtgggac

SEQ ID NO: 1323930 - DNA, 25 bp, Homo sapien
ggttgccggtttgcataaatgtacc

SEQ ID NO: 1323931 - DNA, 25 bp, Homo sapien
gccatggaggggtggccaaatctct

SEQ ID NO: 1323932 - DNA, 25 bp, Homo sapien
ggctcacttcctttctggatctaag

SEQ ID NO: 1323933 - DNA, 25 bp, Homo sapien
tttccagtcgaagttctcctctctg

SEQ ID NO: 1323934 - DNA, 25 bp, Homo sapien
tccagttttccagtcgaagttctcc

SEQ ID NO: 1323935 - DNA, 25 bp, Homo sapien
tgggtctcagatgcaatcgcgcacc

SEQ ID NO: 1323936 - DNA, 25 bp, Homo sapien
gatgcaatcgcgcacccaaattgca

SEQ ID NO: 1323937 - DNA, 25 bp, Homo sapien
ctctggccgctggacttgctggtca

SEQ ID NO: 1323938 - DNA, 25 bp, Homo sapien
tctggccgctggacttgctggtcat

SEQ ID NO: 1323939 - DNA, 25 bp, Homo sapien
ctgcttgctgttccccctccctcat

SEQ ID NO: 1323940 - DNA, 25 bp, Homo sapien
tttctgcttgctgttccccctccct

SEQ ID NO: 1323941 - DNA, 25 bp, Homo sapien
attttctgcttgctgttccccctcc

SEQ ID NO: 1323942 - DNA, 25 bp, Homo sapien
tgtgatgtattattttctgcttgct

SEQ ID NO: 1323943 - DNA, 25 bp, Homo sapien
catcaaattatagcccacgtgggca

SEQ ID NO: 1323944 - DNA, 25 bp, Homo sapien
tatgaagagctcagcgctcgaaagc

SEQ ID NO: 1323945 - DNA, 25 bp, Homo sapien
cagtgcaattgacaacagcttgtgg

SEQ ID NO: 1323946 - DNA, 25 bp, Homo sapien
gaaagcggctgtttaacaacttgag

SEQ ID NO: 1323947 - DNA, 25 bp, Homo sapien
ggattagacctctgccatcattgtt

SEQ ID NO: 1323948 - DNA, 25 bp, Homo sapien
tggattagacctctgccatcattgt

SEQ ID NO: 1323949 - DNA, 25 bp, Homo sapien
gtggattagacctctgccatcattg

SEQ ID NO: 1323950 - DNA, 25 bp, Homo sapien
cactgtaggtaccttcgacaaagca

SEQ ID NO: 1323951 - DNA, 25 bp, Homo sapien
gacactgtaggtaccttcgacaaag

SEQ ID NO: 1323952 - DNA, 25 bp, Homo sapien
cttccaatttataaccatccgtttg

SEQ ID NO: 1323953 - DNA, 25 bp, Homo sapien
taaccatccgtttgacactgtaggt

SEQ ID NO: 1323954 - DNA, 25 bp, Homo sapien
tctctcttgcatagcactcgccacg

SEQ ID NO: 1323955 - DNA, 25 bp, Homo sapien
actcgccacgctgaattttaattaa

SEQ ID NO: 1323956 - DNA, 25 bp, Homo sapien
ttgcatagcactcgccacgctgaat

SEQ ID NO: 1323957 - DNA, 25 bp, Homo sapien
ttttaattaattgctgctcgtccat

SEQ ID NO: 1323958 - DNA, 25 bp, Homo sapien
caaaaggcacaaggtgtgggcaaac

SEQ ID NO: 1323959 - DNA, 25 bp, Homo sapien
cattagtgagtgttttaccaagaat

SEQ ID NO: 1323960 - DNA, 25 bp, Homo sapien
gatcgtatctggtcattagtgagtg

SEQ ID NO: 1323961 - DNA, 25 bp, Homo sapien
aaacaccttctgtgatcgtatctgg

SEQ ID NO: 1323962 - DNA, 25 bp, Homo sapien
cactctgggtctgtttaaaaggcat

SEQ ID NO: 1323963 - DNA, 25 bp, Homo sapien
tgagctccctctccgtaacctgtgg

SEQ ID NO: 1323964 - DNA, 25 bp, Homo sapien
gcatcaatctttgccggggtgtgag

SEQ ID NO: 1323965 - DNA, 25 bp, Homo sapien
tttgccggggtgtgagctccctctc

SEQ ID NO: 1323966 - DNA, 25 bp, Homo sapien
cagagcttttggccgggcctcttct

SEQ ID NO: 1323967 - DNA, 25 bp, Homo sapien
aggacttgctgatgcatgagctcag

SEQ ID NO: 1323968 - DNA, 25 bp, Homo sapien
tggccgatcttgtcccagagctttt

SEQ ID NO: 1323969 - DNA, 25 bp, Homo sapien
tgatgcatgagctcagactcatctt

SEQ ID NO: 1323970 - DNA, 25 bp, Homo sapien
tgttgcacgagcttacaataaagtt

SEQ ID NO: 1323971 - DNA, 25 bp, Homo sapien
ttgagctgcgtgatagaatgtgtct

SEQ ID NO: 1323972 - DNA, 25 bp, Homo sapien
ggctctaagcgatcactcaggctca

SEQ ID NO: 1323973 - DNA, 25 bp, Homo sapien
tgtgtctaagttcagcactccccga

SEQ ID NO: 1323974 - DNA, 25 bp, Homo sapien
cagcagctccggttccttttcattg

SEQ ID NO: 1323975 - DNA, 25 bp, Homo sapien
gcagctccggttccttttcattggt

SEQ ID NO: 1323976 - DNA, 25 bp, Homo sapien
catacattcatagggaagaggttcc

SEQ ID NO: 1323977 - DNA, 25 bp, Homo sapien
tccagcagctccggttccttttcat

SEQ ID NO: 1323978 - DNA, 25 bp, Homo sapien
tcccagcagttaagcaatggctctg

SEQ ID NO: 1323979 - DNA, 25 bp, Homo sapien
ggtggcacagctcgatggcgaatct

SEQ ID NO: 1323980 - DNA, 25 bp, Homo sapien
ctcattgatattggacaccagaaca

SEQ ID NO: 1323981 - DNA, 25 bp, Homo sapien
taaactgtcattgttccatcatatc

SEQ ID NO: 1323982 - DNA, 25 bp, Homo sapien
tgggcccggcctgagtctttgaacg

SEQ ID NO: 1323983 - DNA, 25 bp, Homo sapien
ctgagtctttgaacgtgagcttggg

SEQ ID NO: 1323984 - DNA, 25 bp, Homo sapien
ccggcctgagtctttgaacgtgagc

SEQ ID NO: 1323985 - DNA, 25 bp, Homo sapien
gcccggcctgagtctttgaacgtga

SEQ ID NO: 1323986 - DNA, 25 bp, Homo sapien
tcaggcagaggggaaacatttaaac

SEQ ID NO: 1323987 - DNA, 25 bp, Homo sapien
gcagaggggaaacatttaaactcgc

SEQ ID NO: 1323988 - DNA, 25 bp, Homo sapien
gaggggaaacatttaaactcgctca

SEQ ID NO: 1323989 - DNA, 25 bp, Homo sapien
caggcagaggggaaacatttaaact

SEQ ID NO: 1323990 - DNA, 25 bp, Homo sapien
tattaaataccgacccgaggctgag

SEQ ID NO: 1323991 - DNA, 25 bp, Homo sapien
ctttgaactgccagggacgctgttt

SEQ ID NO: 1323992 - DNA, 25 bp, Homo sapien
ccagggacgctgtttaccttggctg

SEQ ID NO: 1323993 - DNA, 25 bp, Homo sapien
ggctgcccgagtggcagttttacag

SEQ ID NO: 1323994 - DNA, 25 bp, Homo sapien
ccgaagatgtctatgggacagagga

SEQ ID NO: 1323995 - DNA, 25 bp, Homo sapien
gaacagaggagacctctctctccga

SEQ ID NO: 1323996 - DNA, 25 bp, Homo sapien
agtgagggtcccgagcccctttctg

SEQ ID NO: 1323997 - DNA, 25 bp, Homo sapien
gggatgtcataagcgaggcacctcc

SEQ ID NO: 1323998 - DNA, 25 bp, Homo sapien
taaaaaagccatcttgcactttgca

SEQ ID NO: 1323999 - DNA, 25 bp, Homo sapien
gatccttatgctgggctaaaaaagc

SEQ ID NO: 1324000 - DNA, 25 bp, Homo sapien
gaggcacaagccatgttgattttac

SEQ ID NO: 1324001 - DNA, 25 bp, Homo sapien
gttgattttacggagcaggctgcta

SEQ ID NO: 1324002 - DNA, 25 bp, Homo sapien
aacaactaggtctgattgagacccc

SEQ ID NO: 1324003 - DNA, 25 bp, Homo sapien
tacatgtgttttccgtgggagtcgg

SEQ ID NO: 1324004 - DNA, 25 bp, Homo sapien
ggcttgatgggtcgccgttaaacaa

SEQ ID NO: 1324005 - DNA, 25 bp, Homo sapien
aaggagcccaaggaagacgctggct

SEQ ID NO: 1324006 - DNA, 25 bp, Homo sapien
cctgtcaaagccctcatgatgtgtt

SEQ ID NO: 1324007 - DNA, 25 bp, Homo sapien
ggcatgcaatagaacattacacaga

SEQ ID NO: 1324008 - DNA, 25 bp, Homo sapien
catgatgtgtttatatagggcacac

SEQ ID NO: 1324009 - DNA, 25 bp, Homo sapien
gggcacactgtaattgattggcatg

SEQ ID NO: 1324010 - DNA, 25 bp, Homo sapien
caactctgggagcttccatatttca

SEQ ID NO: 1324011 - DNA, 25 bp, Homo sapien
tggccacaaattcttgggattctgg

SEQ ID NO: 1324012 - DNA, 25 bp, Homo sapien
aatccaaggcttccactcctgtggc

SEQ ID NO: 1324013 - DNA, 25 bp, Homo sapien
ccgggcccaatccaaggcttccact

SEQ ID NO: 1324014 - DNA, 25 bp, Homo sapien
ccccagagcggcctcacaggatgtt

SEQ ID NO: 1324015 - DNA, 25 bp, Homo sapien
gagcggcctcacaggatgttctggc

SEQ ID NO: 1324016 - DNA, 25 bp, Homo sapien
ccagagcggcctcacaggatgttct

SEQ ID NO: 1324017 - DNA, 25 bp, Homo sapien
agagcggcctcacaggatgttctgg

SEQ ID NO: 1324018 - DNA, 25 bp, Homo sapien
gccctaatgggagtcagctgtgttt

SEQ ID NO: 1324019 - DNA, 25 bp, Homo sapien
agcctgtgagagggccctaatggga

SEQ ID NO: 1324020 - DNA, 25 bp, Homo sapien
ggagcctgtgagagggccctaatgg

SEQ ID NO: 1324021 - DNA, 25 bp, Homo sapien
gagcctgtgagagggccctaatggg

SEQ ID NO: 1324022 - DNA, 25 bp, Homo sapien
cgggacgggtttctctgcggattct

SEQ ID NO: 1324023 - DNA, 25 bp, Homo sapien
taagggccggcctgtaatgaggccc

SEQ ID NO: 1324024 - DNA, 25 bp, Homo sapien
tattgctccaggtgtcgcgtatttg

SEQ ID NO: 1324025 - DNA, 25 bp, Homo sapien
tgaaataatgtgatgcacgccgcga

SEQ ID NO: 1324026 - DNA, 25 bp, Homo sapien
tgtccttcagcatcgggctcctcat

SEQ ID NO: 1324027 - DNA, 25 bp, Homo sapien
ctgtccttcagcatcgggctcctca

SEQ ID NO: 1324028 - DNA, 25 bp, Homo sapien
atatagacatagagaggttgggctg

SEQ ID NO: 1324029 - DNA, 25 bp, Homo sapien
cccgttgaggttgggatatatagac

SEQ ID NO: 1324030 - DNA, 25 bp, Homo sapien
agacatagagaggttgggctgttgc

SEQ ID NO: 1324031 - DNA, 25 bp, Homo sapien
gcccgttgaggttgggatatataga

SEQ ID NO: 1324032 - DNA, 25 bp, Homo sapien
gttgcttggaaaagtccattcaact

SEQ ID NO: 1324033 - DNA, 25 bp, Homo sapien
ttgcttggaaaagtccattcaactt

SEQ ID NO: 1324034 - DNA, 25 bp, Homo sapien
atgaggggctgatctccagctctgg

SEQ ID NO: 1324035 - DNA, 25 bp, Homo sapien
gacccatgaggggctgatctccagc

SEQ ID NO: 1324036 - DNA, 25 bp, Homo sapien
aggggctgatctccagctctggcat

SEQ ID NO: 1324037 - DNA, 25 bp, Homo sapien
ggacccatgaggggctgatctccag

SEQ ID NO: 1324038 - DNA, 25 bp, Homo sapien
gatttcttgccccgtgaatctgctc

SEQ ID NO: 1324039 - DNA, 25 bp, Homo sapien
cagatttcttgccccgtgaatctgc

SEQ ID NO: 1324040 - DNA, 25 bp, Homo sapien
tttcttgccccgtgaatctgctcca

SEQ ID NO: 1324041 - DNA, 25 bp, Homo sapien
ttcttgccccgtgaatctgctccag

SEQ ID NO: 1324042 - DNA, 25 bp, Homo sapien
ttcttccaggccaaactcaaaggtc

SEQ ID NO: 1324043 - DNA, 25 bp, Homo sapien
tcttccaggccaaactcaaaggtcc

SEQ ID NO: 1324044 - DNA, 25 bp, Homo sapien
caaactcaaaggtcccttcctccat

SEQ ID NO: 1324045 - DNA, 25 bp, Homo sapien
tactttttcttccaggccaaactca

SEQ ID NO: 1324046 - DNA, 25 bp, Homo sapien
cgtgttttcagatcccaagtatgaa

SEQ ID NO: 1324047 - DNA, 25 bp, Homo sapien
ggaaatcgtgttttcagatcccaag

SEQ ID NO: 1324048 - DNA, 25 bp, Homo sapien
cttaacgctaagcttctttgctggg

SEQ ID NO: 1324049 - DNA, 25 bp, Homo sapien
tccttccaagccgattttccgctta

SEQ ID NO: 1324050 - DNA, 25 bp, Homo sapien
caatctccaccttgtgtcagaattc

SEQ ID NO: 1324051 - DNA, 25 bp, Homo sapien
tctccaccttgtgtcagaattcacc

SEQ ID NO: 1324052 - DNA, 25 bp, Homo sapien
ctccaccttgtgtcagaattcacca

SEQ ID NO: 1324053 - DNA, 25 bp, Homo sapien
aatctccaccttgtgtcagaattca

SEQ ID NO: 1324054 - DNA, 25 bp, Homo sapien
gtacttgtgtctgttggctccacca

SEQ ID NO: 1324055 - DNA, 25 bp, Homo sapien
tcgctttccccaggaccatagggtg

SEQ ID NO: 1324056 - DNA, 25 bp, Homo sapien
taggtagagttctttgctgcctccc

SEQ ID NO: 1324057 - DNA, 25 bp, Homo sapien
gaattgtggacatttcagggactcc

SEQ ID NO: 1324058 - DNA, 25 bp, Homo sapien
tggggccgacgtctgccagaaaagc

SEQ ID NO: 1324059 - DNA, 25 bp, Homo sapien
gggccgacgtctgccagaaaagcag

SEQ ID NO: 1324060 - DNA, 25 bp, Homo sapien
ctgctggggccgacgtctgccagaa

SEQ ID NO: 1324061 - DNA, 25 bp, Homo sapien
tttgccaggctgcagcgggcctgtc

SEQ ID NO: 1324062 - DNA, 25 bp, Homo sapien
tggcttcttggttcgaacgtgaaag

SEQ ID NO: 1324063 - DNA, 25 bp, Homo sapien
ttcctttgccgtggctggcatgagc

SEQ ID NO: 1324064 - DNA, 25 bp, Homo sapien
ttgtctgcttctgccaggcgcctgg

SEQ ID NO: 1324065 - DNA, 25 bp, Homo sapien
gtttgcacaatggaagacccgccca

SEQ ID NO: 1324066 - DNA, 25 bp, Homo sapien
cagagttgggtgaccctgactggca

SEQ ID NO: 1324067 - DNA, 25 bp, Homo sapien
ccccaagcacctgtatattggcagc

SEQ ID NO: 1324068 - DNA, 25 bp, Homo sapien
gcacctgtatattggcagcccttgt

SEQ ID NO: 1324069 - DNA, 25 bp, Homo sapien
caagcacctgtatattggcagccct

SEQ ID NO: 1324070 - DNA, 25 bp, Homo sapien
gatagcatcatgtaatggtctaaac

SEQ ID NO: 1324071 - DNA, 25 bp, Homo sapien
gagattctggagtgatagcatcatg

SEQ ID NO: 1324072 - DNA, 25 bp, Homo sapien
aatggctgttagtccatggagattc

SEQ ID NO: 1324073 - DNA, 25 bp, Homo sapien
tgtgaaggatggtaaatcttcatct

SEQ ID NO: 1324074 - DNA, 25 bp, Homo sapien
ccacaactccatggtgggggctctc

SEQ ID NO: 1324075 - DNA, 25 bp, Homo sapien
ctccacccacaactccatggtgggg

SEQ ID NO: 1324076 - DNA, 25 bp, Homo sapien
cacccacaactccatggtgggggct

SEQ ID NO: 1324077 - DNA, 25 bp, Homo sapien
cccacaactccatggtgggggctct

SEQ ID NO: 1324078 - DNA, 25 bp, Homo sapien
tgtgtcaggtccaaaaataacctct

SEQ ID NO: 1324079 - DNA, 25 bp, Homo sapien
cacctttatccaggcttagaggcag

SEQ ID NO: 1324080 - DNA, 25 bp, Homo sapien
aataacctctctcaactgttggatt

SEQ ID NO: 1324081 - DNA, 25 bp, Homo sapien
tcatttagcatttgtgtcaggtcca

SEQ ID NO: 1324082 - DNA, 25 bp, Homo sapien
taaataggcaagtctctgaagcttc

SEQ ID NO: 1324083 - DNA, 25 bp, Homo sapien
tatgttgttattgtgggtctgtgga

SEQ ID NO: 1324084 - DNA, 25 bp, Homo sapien
tcagatcaccatggagtgtagggaa

SEQ ID NO: 1324085 - DNA, 25 bp, Homo sapien
ttggtggctggtcctttcagatcac

SEQ ID NO: 1324086 - DNA, 25 bp, Homo sapien
agctctgacgccttccaagaactca

SEQ ID NO: 1324087 - DNA, 25 bp, Homo sapien
agaaagcgctttctgtgagtccacc

SEQ ID NO: 1324088 - DNA, 25 bp, Homo sapien
agtccacctcatggagggccagcag

SEQ ID NO: 1324089 - DNA, 25 bp, Homo sapien
gctctgacgccttccaagaactcag

SEQ ID NO: 1324090 - DNA, 25 bp, Homo sapien
tatcttcttaggagacctcgcacag

SEQ ID NO: 1324091 - DNA, 25 bp, Homo sapien
ccccaaaggcaggagcaagatctgt

SEQ ID NO: 1324092 - DNA, 25 bp, Homo sapien
tagcatgactaactccaagtggaag

SEQ ID NO: 1324093 - DNA, 25 bp, Homo sapien
taacctgacaaaccaggagctgaag

SEQ ID NO: 1324094 - DNA, 25 bp, Homo sapien
tcaccagtgtgaagtacgggcctgg

SEQ ID NO: 1324095 - DNA, 25 bp, Homo sapien
tgaaagcagcggaagttctcgggca

SEQ ID NO: 1324096 - DNA, 25 bp, Homo sapien
tgagtaaacagatagcccagcgagg

SEQ ID NO: 1324097 - DNA, 25 bp, Homo sapien
gaacccacttataatcctggccagg

SEQ ID NO: 1324098 - DNA, 25 bp, Homo sapien
atgtactcccgtgcatctggaaggg

SEQ ID NO: 1324099 - DNA, 25 bp, Homo sapien
ggatgtactcccgtgcatctggaag

SEQ ID NO: 1324100 - DNA, 25 bp, Homo sapien
cctctggatgtactcccgtgcatct

SEQ ID NO: 1324101 - DNA, 25 bp, Homo sapien
ggagagaatcacagacgatgtaatt

SEQ ID NO: 1324102 - DNA, 25 bp, Homo sapien
gcaaagacccttctattagcaggtg

SEQ ID NO: 1324103 - DNA, 25 bp, Homo sapien
tagcaggtgagtaatcacatcttgg

SEQ ID NO: 1324104 - DNA, 25 bp, Homo sapien
gatgtttcctataatgcttctgggt

SEQ ID NO: 1324105 - DNA, 25 bp, Homo sapien
aaacagtgtgtgaggcgttagaaag

SEQ ID NO: 1324106 - DNA, 25 bp, Homo sapien
cagctgaccgtggccgacaaacagc

SEQ ID NO: 1324107 - DNA, 25 bp, Homo sapien
tgtccctcagtggcagctagttctt

SEQ ID NO: 1324108 - DNA, 25 bp, Homo sapien
atgtccctcagtggcagctagttct

SEQ ID NO: 1324109 - DNA, 25 bp, Homo sapien
gtccctcagtggcagctagttcttc

SEQ ID NO: 1324110 - DNA, 25 bp, Homo sapien
tctcttccatcctctttttgataag

SEQ ID NO: 1324111 - DNA, 25 bp, Homo sapien
tccatcctctttttgataagtttcc

SEQ ID NO: 1324112 - DNA, 25 bp, Homo sapien
tttctttccagcacctgagagatcc

SEQ ID NO: 1324113 - DNA, 25 bp, Homo sapien
ctttccagcacctgagagatcccat

SEQ ID NO: 1324114 - DNA, 25 bp, Homo sapien
tcaggtcaaggaaatctttggttct

SEQ ID NO: 1324115 - DNA, 25 bp, Homo sapien
ttggttctaaccacttctccgagcc

SEQ ID NO: 1324116 - DNA, 25 bp, Homo sapien
caggtcaaggaaatctttggttcta

SEQ ID NO: 1324117 - DNA, 25 bp, Homo sapien
ttcaggtcaaggaaatctttggttc

SEQ ID NO: 1324118 - DNA, 25 bp, Homo sapien
gagcaacccggtgtctgcggaagat

SEQ ID NO: 1324119 - DNA, 25 bp, Homo sapien
gctgagcattctggcccctaggctt

SEQ ID NO: 1324120 - DNA, 25 bp, Homo sapien
gactgttttggcctccggagcaacc

SEQ ID NO: 1324121 - DNA, 25 bp, Homo sapien
tgcggaagattggaagcgactctcc

SEQ ID NO: 1324122 - DNA, 25 bp, Homo sapien
tccggatgagccacatgatcccaga

SEQ ID NO: 1324123 - DNA, 25 bp, Homo sapien
agaccattcatacctcgctggaggg

SEQ ID NO: 1324124 - DNA, 25 bp, Homo sapien
tctgcgcgcccaaaaaatgagaatg

SEQ ID NO: 1324125 - DNA, 25 bp, Homo sapien
agcagcctgagccttagtctgcgcg

SEQ ID NO: 1324126 - DNA, 25 bp, Homo sapien
ggatgcattttgtataccgtacgct

SEQ ID NO: 1324127 - DNA, 25 bp, Homo sapien
tgctggacttggacgcggcatctga

SEQ ID NO: 1324128 - DNA, 25 bp, Homo sapien
ctctcaatgattgcgcaggcgagga

SEQ ID NO: 1324129 - DNA, 25 bp, Homo sapien
gacctgagaccacacgaggatgcat

SEQ ID NO: 1324130 - DNA, 25 bp, Homo sapien
aggcgactggagcactgagtccagc

SEQ ID NO: 1324131 - DNA, 25 bp, Homo sapien
gcactgagtccagcgcggggtacca

SEQ ID NO: 1324132 - DNA, 25 bp, Homo sapien
gccaggcgactggagcactgagtcc

SEQ ID NO: 1324133 - DNA, 25 bp, Homo sapien
cgactggagcactgagtccagcgcg

SEQ ID NO: 1324134 - DNA, 25 bp, Homo sapien
atgagtgtggatgctctcatgtggt

SEQ ID NO: 1324135 - DNA, 25 bp, Homo sapien
tgtggatgctctcatgtggtggagt

SEQ ID NO: 1324136 - DNA, 25 bp, Homo sapien
actgtgggatgagtgtggatgctct

SEQ ID NO: 1324137 - DNA, 25 bp, Homo sapien
tgtgggatgagtgtggatgctctca

SEQ ID NO: 1324138 - DNA, 25 bp, Homo sapien
tctaggtggcgctgtggccacaaaa

SEQ ID NO: 1324139 - DNA, 25 bp, Homo sapien
tggcgctgtggccacaaaagttttg

SEQ ID NO: 1324140 - DNA, 25 bp, Homo sapien
tagatgaactctaggtggcgctgtg

SEQ ID NO: 1324141 - DNA, 25 bp, Homo sapien
tggccacaaaagttttgggctgagg

SEQ ID NO: 1324142 - DNA, 25 bp, Homo sapien
tccactcctcataccctgaggatgg

SEQ ID NO: 1324143 - DNA, 25 bp, Homo sapien
agtccactcctcataccctgaggat

SEQ ID NO: 1324144 - DNA, 25 bp, Homo sapien
ctgctctgacagtccactcctcata

SEQ ID NO: 1324145 - DNA, 25 bp, Homo sapien
tgacagtccactcctcataccctga

SEQ ID NO: 1324146 - DNA, 25 bp, Homo sapien
ttgcagtcagccttaggtttgcttt

SEQ ID NO: 1324147 - DNA, 25 bp, Homo sapien
cctgcgtggagatttttatgacccc

SEQ ID NO: 1324148 - DNA, 25 bp, Homo sapien
tttttatgaccccatccatctgttt

SEQ ID NO: 1324149 - DNA, 25 bp, Homo sapien
catctgtttgcagtcagccttaggt

SEQ ID NO: 1324150 - DNA, 25 bp, Homo sapien
tgagcgaagcttgaagcattgtgga

SEQ ID NO: 1324151 - DNA, 25 bp, Homo sapien
cttgagcgaagcttgaagcattgtg

SEQ ID NO: 1324152 - DNA, 25 bp, Homo sapien
gttcttgagcgaagcttgaagcatt

SEQ ID NO: 1324153 - DNA, 25 bp, Homo sapien
ttcttgagcgaagcttgaagcattg

SEQ ID NO: 1324154 - DNA, 25 bp, Homo sapien
gaggcccaagattgtccatgtcacc

SEQ ID NO: 1324155 - DNA, 25 bp, Homo sapien
tagagcctcctttggctgaatcagc

SEQ ID NO: 1324156 - DNA, 25 bp, Homo sapien
tatctccggaaaggaagagcccagc

SEQ ID NO: 1324157 - DNA, 25 bp, Homo sapien
ggcagctcaccggaaacatcttaga

SEQ ID NO: 1324158 - DNA, 25 bp, Homo sapien
aatgtcatctacaccaggcccttgg

SEQ ID NO: 1324159 - DNA, 25 bp, Homo sapien
gaacttgatcattgcagagccagga

SEQ ID NO: 1324160 - DNA, 25 bp, Homo sapien
tctagcggacacttcagggtgaggc

SEQ ID NO: 1324161 - DNA, 25 bp, Homo sapien
tagatagtcacaacactgggcagtg

SEQ ID NO: 1324162 - DNA, 25 bp, Homo sapien
gatccactgtgacaatggccctggg

SEQ ID NO: 1324163 - DNA, 25 bp, Homo sapien
ccgaggccaggaagttgtagataac

SEQ ID NO: 1324164 - DNA, 25 bp, Homo sapien
gcacaaggttccatgcttcctagat

SEQ ID NO: 1324165 - DNA, 25 bp, Homo sapien
ttgactctcaggactggaggcatcc

SEQ ID NO: 1324166 - DNA, 25 bp, Homo sapien
cactttacctgctgggtctcagacc

SEQ ID NO: 1324167 - DNA, 25 bp, Homo sapien
gagcaacaggagcattttatgaggc

SEQ ID NO: 1324168 - DNA, 25 bp, Homo sapien
caaatttctcagagcaacaggagca

SEQ ID NO: 1324169 - DNA, 25 bp, Homo sapien
cagaaaagtctaagaagtgcacaca

SEQ ID NO: 1324170 - DNA, 25 bp, Homo sapien
gattcctgcatatgtgcctcaagtc

SEQ ID NO: 1324171 - DNA, 25 bp, Homo sapien
caagtcttttgggtcataagtcagc

SEQ ID NO: 1324172 - DNA, 25 bp, Homo sapien
gagagaattcaagtgccccagacat

SEQ ID NO: 1324173 - DNA, 25 bp, Homo sapien
gaatggtggttctctggcccaggat

SEQ ID NO: 1324174 - DNA, 25 bp, Homo sapien
cctaaattatcttcccaggccgcgg

SEQ ID NO: 1324175 - DNA, 25 bp, Homo sapien
tctggagggccagatagacactcag

SEQ ID NO: 1324176 - DNA, 25 bp, Homo sapien
ggatggccaacgttcacacctctgg

SEQ ID NO: 1324177 - DNA, 25 bp, Homo sapien
gacccaggaggcttcggtgatccaa

SEQ ID NO: 1324178 - DNA, 25 bp, Homo sapien
atgtggactgccctcgacgtgttgg

SEQ ID NO: 1324179 - DNA, 25 bp, Homo sapien
tctagagtgtctagccaatcccatg

SEQ ID NO: 1324180 - DNA, 25 bp, Homo sapien
ttttacaaaagagccccatagcact

SEQ ID NO: 1324181 - DNA, 25 bp, Homo sapien
tgtggccgaagacccctgtgtcatt

SEQ ID NO: 1324182 - DNA, 25 bp, Homo sapien
caggaagcagacagcgatggtggtg

SEQ ID NO: 1324183 - DNA, 25 bp, Homo sapien
ccctggcgggtcctgctgttgtagc

SEQ ID NO: 1324184 - DNA, 25 bp, Homo sapien
tggcggtccccgagctgtgggtggg

SEQ ID NO: 1324185 - DNA, 25 bp, Homo sapien
gcccaaggctatgcagcaggaagca

SEQ ID NO: 1324186 - DNA, 25 bp, Homo sapien
gaagggaacaaggagcttgagcagg

SEQ ID NO: 1324187 - DNA, 25 bp, Homo sapien
ttgagcaggcaaaccgggcagccca

SEQ ID NO: 1324188 - DNA, 25 bp, Homo sapien
tcggcagcctcgtcctgggcagaag

SEQ ID NO: 1324189 - DNA, 25 bp, Homo sapien
gccttggggctcagatctgattttt

SEQ ID NO: 1324190 - DNA, 25 bp, Homo sapien
gggtggtcagtcatcgacgtacaca

SEQ ID NO: 1324191 - DNA, 25 bp, Homo sapien
ggtcagtcatcgacgtacacaggtg

SEQ ID NO: 1324192 - DNA, 25 bp, Homo sapien
agtcatcgacgtacacaggtgccct

SEQ ID NO: 1324193 - DNA, 25 bp, Homo sapien
taccatggggtggtcagtcatcgac

SEQ ID NO: 1324194 - DNA, 25 bp, Homo sapien
tatgtctcacaaggtgcccaaaggc

SEQ ID NO: 1324195 - DNA, 25 bp, Homo sapien
ggagttatgaatactatgtctcaca

SEQ ID NO: 1324196 - DNA, 25 bp, Homo sapien
gcgagaccaagtaggagttatgaat

SEQ ID NO: 1324197 - DNA, 25 bp, Homo sapien
catcagaaggcgagaccaagtagga

SEQ ID NO: 1324198 - DNA, 25 bp, Homo sapien
tgtgtaccccacagtttatgataat

SEQ ID NO: 1324199 - DNA, 25 bp, Homo sapien
tacatttctcagtaacccaaggttc

SEQ ID NO: 1324200 - DNA, 25 bp, Homo sapien
ggaccatggcaacattttggcattg

SEQ ID NO: 1324201 - DNA, 25 bp, Homo sapien
caatgggcttgactcttatttgctg

SEQ ID NO: 1324202 - DNA, 25 bp, Homo sapien
gatggagactctatgactgctaagc

SEQ ID NO: 1324203 - DNA, 25 bp, Homo sapien
gaagacagcatcctggtcacagcag

SEQ ID NO: 1324204 - DNA, 25 bp, Homo sapien
tatggagactcctgccaaaaagtgg

SEQ ID NO: 1324205 - DNA, 25 bp, Homo sapien
cacagcaggactttggtgacagaca

SEQ ID NO: 1324206 - DNA, 25 bp, Homo sapien
tgtgtgctctgcctcttgtgccact

SEQ ID NO: 1324207 - DNA, 25 bp, Homo sapien
cctcgatgcggacccagaggtcatt

SEQ ID NO: 1324208 - DNA, 25 bp, Homo sapien
cagaggtcattgaactgccgcggcc

SEQ ID NO: 1324209 - DNA, 25 bp, Homo sapien
gccgcggccgctggtgtgtgctctg

SEQ ID NO: 1324210 - DNA, 25 bp, Homo sapien
ggccgggctcgtcgaggtcccctca

SEQ ID NO: 1324211 - DNA, 25 bp, Homo sapien
tcctcatcctctggtggggcggtgg

SEQ ID NO: 1324212 - DNA, 25 bp, Homo sapien
gctcgtcgaggtcccctcaggagag

SEQ ID NO: 1324213 - DNA, 25 bp, Homo sapien
cgggctcgtcgaggtcccctcagga

SEQ ID NO: 1324214 - DNA, 25 bp, Homo sapien
caattcagtgggagtttgtcatggc

SEQ ID NO: 1324215 - DNA, 25 bp, Homo sapien
tgagagcttacattccaaagcagca

SEQ ID NO: 1324216 - DNA, 25 bp, Homo sapien
aaacctcgtctggtgctgaaagcca

SEQ ID NO: 1324217 - DNA, 25 bp, Homo sapien
gacgctgctaactgccgaggagcaa

SEQ ID NO: 1324218 - DNA, 25 bp, Homo sapien
tctggggctccccgggactcagagc

SEQ ID NO: 1324219 - DNA, 25 bp, Homo sapien
gggctccccgggactcagagcctgg

SEQ ID NO: 1324220 - DNA, 25 bp, Homo sapien
ggctccccgggactcagagcctggc

SEQ ID NO: 1324221 - DNA, 25 bp, Homo sapien
tggggctccccgggactcagagcct

SEQ ID NO: 1324222 - DNA, 25 bp, Homo sapien
cctgcccggcgggtgtgtggtccac

SEQ ID NO: 1324223 - DNA, 25 bp, Homo sapien
ctgtgtatggcctgcccggcgggtg

SEQ ID NO: 1324224 - DNA, 25 bp, Homo sapien
tgtgtatggcctgcccggcgggtgt

SEQ ID NO: 1324225 - DNA, 25 bp, Homo sapien
gcgggtgtgtggtccacctccagcc

SEQ ID NO: 1324226 - DNA, 25 bp, Homo sapien
ccagggcagggagaatggtcacctc

SEQ ID NO: 1324227 - DNA, 25 bp, Homo sapien
ggcagggagaatggtcacctccacc

SEQ ID NO: 1324228 - DNA, 25 bp, Homo sapien
acccaggtggctactccttgcacaa

SEQ ID NO: 1324229 - DNA, 25 bp, Homo sapien
tggctactccttgcacaactccagg

SEQ ID NO: 1324230 - DNA, 25 bp, Homo sapien
tgatctcatcctatccccaggagac

SEQ ID NO: 1324231 - DNA, 25 bp, Homo sapien
aaatcctaaaataggtgccacacct

SEQ ID NO: 1324232 - DNA, 25 bp, Homo sapien
gacctgagctcatggatctcctctt

SEQ ID NO: 1324233 - DNA, 25 bp, Homo sapien
agagcatgccgtcctcaggagctgg

SEQ ID NO: 1324234 - DNA, 25 bp, Homo sapien
gctgtgatagcaaaatcctggaggc

SEQ ID NO: 1324235 - DNA, 25 bp, Homo sapien
gagagaggctgtgatagcaaaatcc

SEQ ID NO: 1324236 - DNA, 25 bp, Homo sapien
ctagactgggagcatgagagaggct

SEQ ID NO: 1324237 - DNA, 25 bp, Homo sapien
gaggctgtgatagcaaaatcctgga

SEQ ID NO: 1324238 - DNA, 25 bp, Homo sapien
tggattatggggtctgcggcactct

SEQ ID NO: 1324239 - DNA, 25 bp, Homo sapien
ttttggattatggggtctgcggcac

SEQ ID NO: 1324240 - DNA, 25 bp, Homo sapien
gattatggggtctgcggcactctag

SEQ ID NO: 1324241 - DNA, 25 bp, Homo sapien
tgtgttttggattatggggtctgcg

SEQ ID NO: 1324242 - DNA, 25 bp, Homo sapien
gactccagaaccacagagctttcag

SEQ ID NO: 1324243 - DNA, 25 bp, Homo sapien
ttcaggaacttcagctggacactga

SEQ ID NO: 1324244 - DNA, 25 bp, Homo sapien
cttcacatgcttggccccatccaga

SEQ ID NO: 1324245 - DNA, 25 bp, Homo sapien
atccagactccagaaccacagagct

SEQ ID NO: 1324246 - DNA, 25 bp, Homo sapien
tagtcctgggctctcacatggctgc

SEQ ID NO: 1324247 - DNA, 25 bp, Homo sapien
ttagtcctgggctctcacatggctg

SEQ ID NO: 1324248 - DNA, 25 bp, Homo sapien
aaagaagcagatcttgtcctcgttc

SEQ ID NO: 1324249 - DNA, 25 bp, Homo sapien
ccatgcgctcattcctcttgtagat

SEQ ID NO: 1324250 - DNA, 25 bp, Homo sapien
tcttgtagatgagctcctggcggaa

SEQ ID NO: 1324251 - DNA, 25 bp, Homo sapien
gttctcccgtagaagcgccatgacc

SEQ ID NO: 1324252 - DNA, 25 bp, Homo sapien
gcgctgaggtctccgcagttgtagt

SEQ ID NO: 1324253 - DNA, 25 bp, Homo sapien
gcttgatgaggtcctccgtggtgta

SEQ ID NO: 1324254 - DNA, 25 bp, Homo sapien
cagttgtagtgcttgatgaggtcct

SEQ ID NO: 1324255 - DNA, 25 bp, Homo sapien
aagatgactgcgctgaggtctccgc

SEQ ID NO: 1324256 - DNA, 25 bp, Homo sapien
gaggagctcggtcctgaacatctgc

SEQ ID NO: 1324257 - DNA, 25 bp, Homo sapien
acatctgctctatccttgtattcag

SEQ ID NO: 1324258 - DNA, 25 bp, Homo sapien
ccttgtattcagcatgcatgtcctc

SEQ ID NO: 1324259 - DNA, 25 bp, Homo sapien
aggcctgaggagctcggtcctgaac

SEQ ID NO: 1324260 - DNA, 25 bp, Homo sapien
acatgcctcggatgaaagtgtccat

SEQ ID NO: 1324261 - DNA, 25 bp, Homo sapien
cggcacatgcctcggatgaaagtgt

SEQ ID NO: 1324262 - DNA, 25 bp, Homo sapien
acggcacatgcctcggatgaaagtg

SEQ ID NO: 1324263 - DNA, 25 bp, Homo sapien
gcacatgcctcggatgaaagtgtcc

SEQ ID NO: 1324264 - DNA, 25 bp, Homo sapien
tctcggcgtcggcttggccaagaca

SEQ ID NO: 1324265 - DNA, 25 bp, Homo sapien
tcggcttggccaagacaccacctga

SEQ ID NO: 1324266 - DNA, 25 bp, Homo sapien
ctgctcccttgtttctcggcgtcgg

SEQ ID NO: 1324267 - DNA, 25 bp, Homo sapien
tgtttctcggcgtcggcttggccaa

SEQ ID NO: 1324268 - DNA, 25 bp, Homo sapien
ggatggctgtgtggaggcccagcca

SEQ ID NO: 1324269 - DNA, 25 bp, Homo sapien
accaggagctccagagcatcctctg

SEQ ID NO: 1324270 - DNA, 25 bp, Homo sapien
gagcatcctctgtggactcccctca

SEQ ID NO: 1324271 - DNA, 25 bp, Homo sapien
tggctgtgtggaggcccagccacca

SEQ ID NO: 1324272 - DNA, 25 bp, Homo sapien
tgtaggcccagaatttaaacacgtc

SEQ ID NO: 1324273 - DNA, 25 bp, Homo sapien
ggcatctgctgaatgtaggcccaga

SEQ ID NO: 1324274 - DNA, 25 bp, Homo sapien
ctgctgaatgtaggcccagaattta

SEQ ID NO: 1324275 - DNA, 25 bp, Homo sapien
gcttgtggcatctgctgaatgtagg

SEQ ID NO: 1324276 - DNA, 25 bp, Homo sapien
caaaggccccaatccactcagccat

SEQ ID NO: 1324277 - DNA, 25 bp, Homo sapien
gaatcactgcaaaggccccaatcca

SEQ ID NO: 1324278 - DNA, 25 bp, Homo sapien
gggaatcactgcaaaggccccaatc

SEQ ID NO: 1324279 - DNA, 25 bp, Homo sapien
tgcaaaggccccaatccactcagcc

SEQ ID NO: 1324280 - DNA, 25 bp, Homo sapien
aatactcagggctatccaaggcctc

SEQ ID NO: 1324281 - DNA, 25 bp, Homo sapien
gggaaatactcagggctatccaagg

SEQ ID NO: 1324282 - DNA, 25 bp, Homo sapien
aaatactcagggctatccaaggcct

SEQ ID NO: 1324283 - DNA, 25 bp, Homo sapien
tatgtgaggcgatgagagcagacag

SEQ ID NO: 1324284 - DNA, 25 bp, Homo sapien
agccttttagctccctgcccagaat

SEQ ID NO: 1324285 - DNA, 25 bp, Homo sapien
gcttccaggatccaccttgggcaga

SEQ ID NO: 1324286 - DNA, 25 bp, Homo sapien
ggagggcgggctgtatgtgaggcga

SEQ ID NO: 1324287 - DNA, 25 bp, Homo sapien
cagtcccaggccctcctatgtaagt

SEQ ID NO: 1324288 - DNA, 25 bp, Homo sapien
aggccctcctatgtaagtccagtcc

SEQ ID NO: 1324289 - DNA, 25 bp, Homo sapien
ctatgtaagtccagtccccctgagc

SEQ ID NO: 1324290 - DNA, 25 bp, Homo sapien
tcctatgtaagtccagtccccctga

SEQ ID NO: 1324291 - DNA, 25 bp, Homo sapien
caagcttggtgaggtaccaggaaaa

SEQ ID NO: 1324292 - DNA, 25 bp, Homo sapien
ctcaagcttggtgaggtaccaggaa

SEQ ID NO: 1324293 - DNA, 25 bp, Homo sapien
gcttggtgaggtaccaggaaaatgc

SEQ ID NO: 1324294 - DNA, 25 bp, Homo sapien
ttggtgaggtaccaggaaaatgcgc

SEQ ID NO: 1324295 - DNA, 25 bp, Homo sapien
tctgtgtatcgtgatggtgcccctg

SEQ ID NO: 1324296 - DNA, 25 bp, Homo sapien
tctgggcatctgtgtatcgtgatgg

SEQ ID NO: 1324297 - DNA, 25 bp, Homo sapien
gtatcgtgatggtgcccctgtctgg

SEQ ID NO: 1324298 - DNA, 25 bp, Homo sapien
gctgtcttgcagaccgctccctgca

SEQ ID NO: 1324299 - DNA, 25 bp, Homo sapien
cagtagtgttccagaaatgccaggg

SEQ ID NO: 1324300 - DNA, 25 bp, Homo sapien
tctgagctgaaacggcctcctgttt

SEQ ID NO: 1324301 - DNA, 25 bp, Homo sapien
agctgaaacggcctcctgtttctcc

SEQ ID NO: 1324302 - DNA, 25 bp, Homo sapien
ttctcccagtagtgttccagaaatg

SEQ ID NO: 1324303 - DNA, 25 bp, Homo sapien
gagaatcaggaccttgctgtcccag

SEQ ID NO: 1324304 - DNA, 25 bp, Homo sapien
tccacttccaagtgagaatcaggac

SEQ ID NO: 1324305 - DNA, 25 bp, Homo sapien
aggttcgtgcctgggtcactgactg

SEQ ID NO: 1324306 - DNA, 25 bp, Homo sapien
gcactgaaaggctggtcctccgatt

SEQ ID NO: 1324307 - DNA, 25 bp, Homo sapien
aacaggctcctgaactgaaaatccc

SEQ ID NO: 1324308 - DNA, 25 bp, Homo sapien
gtcccacccccatgggcagcactgt

SEQ ID NO: 1324309 - DNA, 25 bp, Homo sapien
acaggctcctgaactgaaaatcccc

SEQ ID NO: 1324310 - DNA, 25 bp, Homo sapien
atgctctcatttgatgcctaccctg

SEQ ID NO: 1324311 - DNA, 25 bp, Homo sapien
ctctcatttgatgcctaccctgagc

SEQ ID NO: 1324312 - DNA, 25 bp, Homo sapien
gcgtctgcatcggccaatgctgcgg

SEQ ID NO: 1324313 - DNA, 25 bp, Homo sapien
gtctgcatcggccaatgctgcggat

SEQ ID NO: 1324314 - DNA, 25 bp, Homo sapien
gatggcgtgcataatccacatccgt

SEQ ID NO: 1324315 - DNA, 25 bp, Homo sapien
ggcgtgcataatccacatccgtctg

SEQ ID NO: 1324316 - DNA, 25 bp, Homo sapien
tgtcgatggcgtgcataatccacat

SEQ ID NO: 1324317 - DNA, 25 bp, Homo sapien
cataatccacatccgtctgcaggag

SEQ ID NO: 1324318 - DNA, 25 bp, Homo sapien
tctggaagtcattcatccagggacc

SEQ ID NO: 1324319 - DNA, 25 bp, Homo sapien
ggaagtcattcatccagggacccaa

SEQ ID NO: 1324320 - DNA, 25 bp, Homo sapien
tggaagtcattcatccagggaccca

SEQ ID NO: 1324321 - DNA, 25 bp, Homo sapien
ctttctggaagtcattcatccaggg

SEQ ID NO: 1324322 - DNA, 25 bp, Homo sapien
ctccatcgatggccaagcttgttgc

SEQ ID NO: 1324323 - DNA, 25 bp, Homo sapien
catcgatggccaagcttgttgctgc

SEQ ID NO: 1324324 - DNA, 25 bp, Homo sapien
agctggacatgggcagtgttgagtg

SEQ ID NO: 1324325 - DNA, 25 bp, Homo sapien
gctggacatgggcagtgttgagtgc

SEQ ID NO: 1324326 - DNA, 25 bp, Homo sapien
gagtgtttacctcctcggattctgt

SEQ ID NO: 1324327 - DNA, 25 bp, Homo sapien
ttcctggagagtgtttacctcctcg

SEQ ID NO: 1324328 - DNA, 25 bp, Homo sapien
tgtgagttcctggagagtgtttacc

SEQ ID NO: 1324329 - DNA, 25 bp, Homo sapien
ggagagtgtttacctcctcggattc

SEQ ID NO: 1324330 - DNA, 25 bp, Homo sapien
ttcagctgatctccagagtctggtt

SEQ ID NO: 1324331 - DNA, 25 bp, Homo sapien
cttcagctgatctccagagtctggt

SEQ ID NO: 1324332 - DNA, 25 bp, Homo sapien
caacttgccaggtgaccgcagtagc

SEQ ID NO: 1324333 - DNA, 25 bp, Homo sapien
tagctgaataggaggttttttgaca

SEQ ID NO: 1324334 - DNA, 25 bp, Homo sapien
agtagcactgccttcggtccttgag

SEQ ID NO: 1324335 - DNA, 25 bp, Homo sapien
gtttcagcaatggtccaacaacttg

SEQ ID NO: 1324336 - DNA, 25 bp, Homo sapien
gcatcaggcttcctgggagcctctt

SEQ ID NO: 1324337 - DNA, 25 bp, Homo sapien
ttcttctgcatcaggcttcctggga

SEQ ID NO: 1324338 - DNA, 25 bp, Homo sapien
cttgagttaacttttccttcttctg

SEQ ID NO: 1324339 - DNA, 25 bp, Homo sapien
tcttccaaatccacatggctgcctg

SEQ ID NO: 1324340 - DNA, 25 bp, Homo sapien
gtaggaggaggccgccctacactca

SEQ ID NO: 1324341 - DNA, 25 bp, Homo sapien
tggtaggaggaggccgccctacact

SEQ ID NO: 1324342 - DNA, 25 bp, Homo sapien
taggaggaggccgccctacactcag

SEQ ID NO: 1324343 - DNA, 25 bp, Homo sapien
gctggtaggaggaggccgccctaca

SEQ ID NO: 1324344 - DNA, 25 bp, Homo sapien
tgagacaacgtgatgtgcctagaca

SEQ ID NO: 1324345 - DNA, 25 bp, Homo sapien
atcacacagccacgaactagaaggg

SEQ ID NO: 1324346 - DNA, 25 bp, Homo sapien
gaagatttttagtgacaccatagcg

SEQ ID NO: 1324347 - DNA, 25 bp, Homo sapien
tgcctagacagaagggattacactg

SEQ ID NO: 1324348 - DNA, 25 bp, Homo sapien
gaacgcggataccaggtcaaaacag

SEQ ID NO: 1324349 - DNA, 25 bp, Homo sapien
gagtcgctaggttttagacatcaag

SEQ ID NO: 1324350 - DNA, 25 bp, Homo sapien
gcacagcgtgtgcacaggttctcct

SEQ ID NO: 1324351 - DNA, 25 bp, Homo sapien
tattgtgacacagcatggaacgcgg

SEQ ID NO: 1324352 - DNA, 25 bp, Homo sapien
caccccatggcggtccataaattca

SEQ ID NO: 1324353 - DNA, 25 bp, Homo sapien
ttcaggctcgagcttagatcttgtc

SEQ ID NO: 1324354 - DNA, 25 bp, Homo sapien
caattgctgagaactagagggtact

SEQ ID NO: 1324355 - DNA, 25 bp, Homo sapien
cccctcgcagcagtgagaacagcaa

SEQ ID NO: 1324356 - DNA, 25 bp, Homo sapien
catgaatcaacatgtctctgtgttt

SEQ ID NO: 1324357 - DNA, 25 bp, Homo sapien
ctgcatggcttgtggcatctgtctt

SEQ ID NO: 1324358 - DNA, 25 bp, Homo sapien
gtcctgatataactgtgcatcctgg

SEQ ID NO: 1324359 - DNA, 25 bp, Homo sapien
tatgtggccgttcatctgcacaccc

SEQ ID NO: 1324360 - DNA, 25 bp, Homo sapien
ttattcagcaagttgcctgtattgc

SEQ ID NO: 1324361 - DNA, 25 bp, Homo sapien
tcagcaagttgcctgtattgctcat

SEQ ID NO: 1324362 - DNA, 25 bp, Homo sapien
ttagatgtgtaagtgccactggctt

SEQ ID NO: 1324363 - DNA, 25 bp, Homo sapien
agatgtgtaagtgccactggctttc

SEQ ID NO: 1324364 - DNA, 25 bp, Homo sapien
cctgaatcttattgccagatgtggg

SEQ ID NO: 1324365 - DNA, 25 bp, Homo sapien
tgacagatacctgaatcttattgcc

SEQ ID NO: 1324366 - DNA, 25 bp, Homo sapien
catgtcacattgatgacagatacct

SEQ ID NO: 1324367 - DNA, 25 bp, Homo sapien
ccttggaagtgactcaagccactgt

SEQ ID NO: 1324368 - DNA, 25 bp, Homo sapien
tagcagcagtgataggctggtggca

SEQ ID NO: 1324369 - DNA, 25 bp, Homo sapien
tcattgtgctcaagccttgctggcc

SEQ ID NO: 1324370 - DNA, 25 bp, Homo sapien
caggtacagtaacagtagcagcagt

SEQ ID NO: 1324371 - DNA, 25 bp, Homo sapien
agcaatggccatgaccagcgtggtc

SEQ ID NO: 1324372 - DNA, 25 bp, Homo sapien
cagtcgctaccttcctagcgttgtt

SEQ ID NO: 1324373 - DNA, 25 bp, Homo sapien
tgttgattaaatgcacagtcgctac

SEQ ID NO: 1324374 - DNA, 25 bp, Homo sapien
caatgcttgagagcttgttgacact

SEQ ID NO: 1324375 - DNA, 25 bp, Homo sapien
gggaagttgccaaacatgctgttgt

SEQ ID NO: 1324376 - DNA, 25 bp, Homo sapien
ccttgggtgatcctctgggctgaaa

SEQ ID NO: 1324377 - DNA, 25 bp, Homo sapien
gaaagcccttgggtgatcctctggg

SEQ ID NO: 1324378 - DNA, 25 bp, Homo sapien
ccagaaagcccttgggtgatcctct

SEQ ID NO: 1324379 - DNA, 25 bp, Homo sapien
aaggggcccatagggcagagatttc

SEQ ID NO: 1324380 - DNA, 25 bp, Homo sapien
agggctgccgcacaaagggacattc

SEQ ID NO: 1324381 - DNA, 25 bp, Homo sapien
cagggctgccgcacaaagggacatt

SEQ ID NO: 1324382 - DNA, 25 bp, Homo sapien
tcagggctgccgcacaaagggacat

SEQ ID NO: 1324383 - DNA, 25 bp, Homo sapien
gtcagggctgccgcacaaagggaca

SEQ ID NO: 1324384 - DNA, 25 bp, Homo sapien
cctcccttctgtgtaataactgatt

SEQ ID NO: 1324385 - DNA, 25 bp, Homo sapien
gctttaactgtctttctagcaataa

SEQ ID NO: 1324386 - DNA, 25 bp, Homo sapien
gttaactgcaggattcactggcatc

SEQ ID NO: 1324387 - DNA, 25 bp, Homo sapien
acccacttggtaaggcaaattgagg

SEQ ID NO: 1324388 - DNA, 25 bp, Homo sapien
gggtccctggacatgggtcccacat

SEQ ID NO: 1324389 - DNA, 25 bp, Homo sapien
gtggacgggtccctggacatgggtc

SEQ ID NO: 1324390 - DNA, 25 bp, Homo sapien
cgggtccctggacatgggtcccaca

SEQ ID NO: 1324391 - DNA, 25 bp, Homo sapien
gacgggtccctggacatgggtccca

SEQ ID NO: 1324392 - DNA, 25 bp, Homo sapien
cagaatcggaaccaggtcttggtag

SEQ ID NO: 1324393 - DNA, 25 bp, Homo sapien
agtcagcagaatcggaaccaggtct

SEQ ID NO: 1324394 - DNA, 25 bp, Homo sapien
tgagtcagcagaatcggaaccaggt

SEQ ID NO: 1324395 - DNA, 25 bp, Homo sapien
aatcggaaccaggtcttggtagagg

SEQ ID NO: 1324396 - DNA, 25 bp, Homo sapien
ggttgctgaggacgccgcagacagc

SEQ ID NO: 1324397 - DNA, 25 bp, Homo sapien
catggctgacaggtctccgggagac

SEQ ID NO: 1324398 - DNA, 25 bp, Homo sapien
aagctgctgcgtagccatggctgac

SEQ ID NO: 1324399 - DNA, 25 bp, Homo sapien
gagacacctgtttttcattgctggc

SEQ ID NO: 1324400 - DNA, 25 bp, Homo sapien
tcccggattctttatgatctatgac

SEQ ID NO: 1324401 - DNA, 25 bp, Homo sapien
tcctgaacaaatactcccggattct

SEQ ID NO: 1324402 - DNA, 25 bp, Homo sapien
caaatactcccggattctttatgat

SEQ ID NO: 1324403 - DNA, 25 bp, Homo sapien
attctttatgatctatgacatgcat

SEQ ID NO: 1324404 - DNA, 25 bp, Homo sapien
gctggacaaacgacgtggcattttc

SEQ ID NO: 1324405 - DNA, 25 bp, Homo sapien
gactgctggacaaacgacgtggcat

SEQ ID NO: 1324406 - DNA, 25 bp, Homo sapien
gacaaacgacgtggcattttcaaag

SEQ ID NO: 1324407 - DNA, 25 bp, Homo sapien
gagggtgccaacagaacccagggta

SEQ ID NO: 1324408 - DNA, 25 bp, Homo sapien
tattgcactgtagatctgcccgggc

SEQ ID NO: 1324409 - DNA, 25 bp, Homo sapien
tctcatacatacagcagcacggctc

SEQ ID NO: 1324410 - DNA, 25 bp, Homo sapien
tgcccgggccaagtcatggctcctg

SEQ ID NO: 1324411 - DNA, 25 bp, Homo sapien
cacggctccaatagtgcgttctatt

SEQ ID NO: 1324412 - DNA, 25 bp, Homo sapien
aattcccgtgatctgcttccaaagc

SEQ ID NO: 1324413 - DNA, 25 bp, Homo sapien
gaaaaacactgtccaaccctgctaa

SEQ ID NO: 1324414 - DNA, 25 bp, Homo sapien
tcctggagaaccttcaagatggtac

SEQ ID NO: 1324415 - DNA, 25 bp, Homo sapien
tcatcggccacatttacaagggagg

SEQ ID NO: 1324416 - DNA, 25 bp, Homo sapien
taaatgtcccaaacagagatctgga

SEQ ID NO: 1324417 - DNA, 25 bp, Homo sapien
ggaatgctgagctcaccaacagagg

SEQ ID NO: 1324418 - DNA, 25 bp, Homo sapien
tggcttcagccaagtcacaagggaa

SEQ ID NO: 1324419 - DNA, 25 bp, Homo sapien
gatgagctcaagtataaaggcccaa

SEQ ID NO: 1324420 - DNA, 25 bp, Homo sapien
gtgagaagggacatatctccactca

SEQ ID NO: 1324421 - DNA, 25 bp, Homo sapien
tgagaagggacatatctccactcag

SEQ ID NO: 1324422 - DNA, 25 bp, Homo sapien
ggtgagaagggacatatctccactc

SEQ ID NO: 1324423 - DNA, 25 bp, Homo sapien
catgcacacttgatatttgcatctc

SEQ ID NO: 1324424 - DNA, 25 bp, Homo sapien
gcatctcctatttcaatagtatgga

SEQ ID NO: 1324425 - DNA, 25 bp, Homo sapien
gtgcactttacatccagggtcccca

SEQ ID NO: 1324426 - DNA, 25 bp, Homo sapien
tacagttcaatgacaggcacacagg

SEQ ID NO: 1324427 - DNA, 25 bp, Homo sapien
aaagcacccaaggactgccgtggga

SEQ ID NO: 1324428 - DNA, 25 bp, Homo sapien
agagcacgaggctgagaaggctctc

SEQ ID NO: 1324429 - DNA, 25 bp, Homo sapien
aaggctctcagtggtcacggcctcc

SEQ ID NO: 1324430 - DNA, 25 bp, Homo sapien
atgctacagccgcaccaggagtcgg

SEQ ID NO: 1324431 - DNA, 25 bp, Homo sapien
ttttacagctacacacagggtccct

SEQ ID NO: 1324432 - DNA, 25 bp, Homo sapien
cagggtccctgcatgtgtactcaaa

SEQ ID NO: 1324433 - DNA, 25 bp, Homo sapien
ctaccaggatactcaggcgatgatg

SEQ ID NO: 1324434 - DNA, 25 bp, Homo sapien
gggaaacccagattcattctacgag

SEQ ID NO: 1324435 - DNA, 25 bp, Homo sapien
tgttgctaggtaacatccaacctgt

SEQ ID NO: 1324436 - DNA, 25 bp, Homo sapien
tactgagagcatagagcacctgatg

SEQ ID NO: 1324437 - DNA, 25 bp, Homo sapien
cacctgatggctgataaaggccttc

SEQ ID NO: 1324438 - DNA, 25 bp, Homo sapien
caacctgtctgagcagtagaggaaa

SEQ ID NO: 1324439 - DNA, 25 bp, Homo sapien
cttggcagccgctgaacagaactga

SEQ ID NO: 1324440 - DNA, 25 bp, Homo sapien
tcggcgagacggcttggcagccgct

SEQ ID NO: 1324441 - DNA, 25 bp, Homo sapien
ggaggagctgctcggcgagacggct

SEQ ID NO: 1324442 - DNA, 25 bp, Homo sapien
ttggcagccgctgaacagaactgaa

SEQ ID NO: 1324443 - DNA, 25 bp, Homo sapien
gcccggctggcaggctgtggcgctc

SEQ ID NO: 1324444 - DNA, 25 bp, Homo sapien
tcaaggggaaaagagcgtcagcagc

SEQ ID NO: 1324445 - DNA, 25 bp, Homo sapien
gaaaagagcgtcagcagcccggctg

SEQ ID NO: 1324446 - DNA, 25 bp, Homo sapien
ccggctggcaggctgtggcgctcac

SEQ ID NO: 1324447 - DNA, 25 bp, Homo sapien
ttgtttcctccctaggaaagctgca

SEQ ID NO: 1324448 - DNA, 25 bp, Homo sapien
ccggcattcttgtttcctccctagg

SEQ ID NO: 1324449 - DNA, 25 bp, Homo sapien
tttcctccctaggaaagctgcatta

SEQ ID NO: 1324450 - DNA, 25 bp, Homo sapien
gccggcattcttgtttcctccctag

SEQ ID NO: 1324451 - DNA, 25 bp, Homo sapien
tatctccgtcagaaagtgctttgcc

SEQ ID NO: 1324452 - DNA, 25 bp, Homo sapien
tgggaactattaacaaaggcacgct

SEQ ID NO: 1324453 - DNA, 25 bp, Homo sapien
gctttgccggtcaggttttctctgc

SEQ ID NO: 1324454 - DNA, 25 bp, Homo sapien
tgagagacgtccaaatgggaactat

SEQ ID NO: 1324455 - DNA, 25 bp, Homo sapien
aggtcgcgccagaagaagcctgttt

SEQ ID NO: 1324456 - DNA, 25 bp, Homo sapien
tggtataggcgatgccagcctgtgt

SEQ ID NO: 1324457 - DNA, 25 bp, Homo sapien
cctgtgtttaattccacggtgatgg

SEQ ID NO: 1324458 - DNA, 25 bp, Homo sapien
tggcagactgccgaagcacaaggtg

SEQ ID NO: 1324459 - DNA, 25 bp, Homo sapien
gagaaaaggcttcggcacggtctga

SEQ ID NO: 1324460 - DNA, 25 bp, Homo sapien
aaggcttcggcacggtctgaggtcc

SEQ ID NO: 1324461 - DNA, 25 bp, Homo sapien
cttcggcacggtctgaggtcctcca

SEQ ID NO: 1324462 - DNA, 25 bp, Homo sapien
tgggagaaaaggcttcggcacggtc

SEQ ID NO: 1324463 - DNA, 25 bp, Homo sapien
actctgccatgcagggagttgaagg

SEQ ID NO: 1324464 - DNA, 25 bp, Homo sapien
cgactctgccatgcagggagttgaa

SEQ ID NO: 1324465 - DNA, 25 bp, Homo sapien
tccagtgtctccgactctgccatgc

SEQ ID NO: 1324466 - DNA, 25 bp, Homo sapien
ctcatccagtgtctccgactctgcc

SEQ ID NO: 1324467 - DNA, 25 bp, Homo sapien
tagagggagaagtagtggcagccgg

SEQ ID NO: 1324468 - DNA, 25 bp, Homo sapien
gagggagaagtagtggcagccggta

SEQ ID NO: 1324469 - DNA, 25 bp, Homo sapien
ctagagggagaagtagtggcagccg

SEQ ID NO: 1324470 - DNA, 25 bp, Homo sapien
agggagaagtagtggcagccggtac

SEQ ID NO: 1324471 - DNA, 25 bp, Homo sapien
ctaatactccaacgttcaacaaggg

SEQ ID NO: 1324472 - DNA, 25 bp, Homo sapien
tcaacaagggatgacgagtggatat

SEQ ID NO: 1324473 - DNA, 25 bp, Homo sapien
tagaaatctgcaggtctcaagcttg

SEQ ID NO: 1324474 - DNA, 25 bp, Homo sapien
tcaagacttaggcatccttgggccc

SEQ ID NO: 1324475 - DNA, 25 bp, Homo sapien
gggggtcccgacacagataatatca

SEQ ID NO: 1324476 - DNA, 25 bp, Homo sapien
ctgcctccgaaatgagatgggcggt

SEQ ID NO: 1324477 - DNA, 25 bp, Homo sapien
gccgggggtcccgacacagataata

SEQ ID NO: 1324478 - DNA, 25 bp, Homo sapien
ggtcccgacacagataatatcagct

SEQ ID NO: 1324479 - DNA, 25 bp, Homo sapien
caggtgaggagtgtacatccccaac

SEQ ID NO: 1324480 - DNA, 25 bp, Homo sapien
tttttgatcactctgatgctctgag

SEQ ID NO: 1324481 - DNA, 25 bp, Homo sapien
gaggagtgtacatccccaacatgta

SEQ ID NO: 1324482 - DNA, 25 bp, Homo sapien
ggaaggcctgacacaaaccggaagc

SEQ ID NO: 1324483 - DNA, 25 bp, Homo sapien
cagagaagaggacccaggtacccag

SEQ ID NO: 1324484 - DNA, 25 bp, Homo sapien
caaattccagtatacgccactctca

SEQ ID NO: 1324485 - DNA, 25 bp, Homo sapien
cagtatacgccactctcaactgata

SEQ ID NO: 1324486 - DNA, 25 bp, Homo sapien
aatcagagaagaggacccaggtacc

SEQ ID NO: 1324487 - DNA, 25 bp, Homo sapien
tctgtgagcgagtttaccatgagca

SEQ ID NO: 1324488 - DNA, 25 bp, Homo sapien
tcaacttcacgtagtccaggtggcg

SEQ ID NO: 1324489 - DNA, 25 bp, Homo sapien
ttcaagcgccagtaaagctcgtggg

SEQ ID NO: 1324490 - DNA, 25 bp, Homo sapien
tgccaaacaggtaggccggaggatc

SEQ ID NO: 1324491 - DNA, 25 bp, Homo sapien
gggcgggcgcgagcggtggcgagga

SEQ ID NO: 1324492 - DNA, 25 bp, Homo sapien
cggccggcactgtcctccgtccggg

SEQ ID NO: 1324493 - DNA, 25 bp, Homo sapien
gggcggccggcactgtcctccgtcc

SEQ ID NO: 1324494 - DNA, 25 bp, Homo sapien
cactgtcctccgtccgggggctgcg

SEQ ID NO: 1324495 - DNA, 25 bp, Homo sapien
ggaccacaggcttggaccacaggct

SEQ ID NO: 1324496 - DNA, 25 bp, Homo sapien
gggaccacaggcttggaccacaggc

SEQ ID NO: 1324497 - DNA, 25 bp, Homo sapien
cagtccctgaatagcctgagtccag

SEQ ID NO: 1324498 - DNA, 25 bp, Homo sapien
tgaactcggcgtggaatctgtaaca

SEQ ID NO: 1324499 - DNA, 25 bp, Homo sapien
tgagtggagaattccatccgtcggg

SEQ ID NO: 1324500 - DNA, 25 bp, Homo sapien
tgtctaccaaagctggcagtccctg

SEQ ID NO: 1324501 - DNA, 25 bp, Homo sapien
gagagcttgacgctaattgggccca

SEQ ID NO: 1324502 - DNA, 25 bp, Homo sapien
tgggcccagccgacataaatcatgt

SEQ ID NO: 1324503 - DNA, 25 bp, Homo sapien
agcccaagagagcttgacgctaatt

SEQ ID NO: 1324504 - DNA, 25 bp, Homo sapien
aaatcatgtctctcattaagaggaa

SEQ ID NO: 1324505 - DNA, 25 bp, Homo sapien
ggcctctctgcctgagggactgagc

SEQ ID NO: 1324506 - DNA, 25 bp, Homo sapien
gcctgttcatagaatgggcttcatg

SEQ ID NO: 1324507 - DNA, 25 bp, Homo sapien
ttccctttagtggagtacagctggg

SEQ ID NO: 1324508 - DNA, 25 bp, Homo sapien
tgggcttcatgcaaacacgatggct

SEQ ID NO: 1324509 - DNA, 25 bp, Homo sapien
cggctcacatagagaagccagggca

SEQ ID NO: 1324510 - DNA, 25 bp, Homo sapien
gggtccttgccaatacggctcacat

SEQ ID NO: 1324511 - DNA, 25 bp, Homo sapien
tgagcaatgtacttgccaataaggg

SEQ ID NO: 1324512 - DNA, 25 bp, Homo sapien
ctctgcttaggctgagcaatgtact

SEQ ID NO: 1324513 - DNA, 25 bp, Homo sapien
caaggcatccgttctgggctgagga

SEQ ID NO: 1324514 - DNA, 25 bp, Homo sapien
agcagctggggcacattacgtctgg

SEQ ID NO: 1324515 - DNA, 25 bp, Homo sapien
tggcatgatcttgcgcagagctggt

SEQ ID NO: 1324516 - DNA, 25 bp, Homo sapien
gcacattacgtctggggctggcaag

SEQ ID NO: 1324517 - DNA, 25 bp, Homo sapien
tgctccagaaggtctaccactgaag

SEQ ID NO: 1324518 - DNA, 25 bp, Homo sapien
aaagctggcattggaggtttcttga

SEQ ID NO: 1324519 - DNA, 25 bp, Homo sapien
ggaaaacaataaggccagcagagtg

SEQ ID NO: 1324520 - DNA, 25 bp, Homo sapien
agcagagtgctccagaaggtctacc

SEQ ID NO: 1324521 - DNA, 25 bp, Homo sapien
gctgcttaggcaagaacattagcag

SEQ ID NO: 1324522 - DNA, 25 bp, Homo sapien
cagctgcttaggcaagaacattagc

SEQ ID NO: 1324523 - DNA, 25 bp, Homo sapien
gcttaggcaagaacattagcagcct

SEQ ID NO: 1324524 - DNA, 25 bp, Homo sapien
ctccagctgcttaggcaagaacatt

SEQ ID NO: 1324525 - DNA, 25 bp, Homo sapien
cagctgtggaccataggacattgct

SEQ ID NO: 1324526 - DNA, 25 bp, Homo sapien
ccaacttctacctgcatggaggtgt

SEQ ID NO: 1324527 - DNA, 25 bp, Homo sapien
tctgaggtgtcagttccaacttcta

SEQ ID NO: 1324528 - DNA, 25 bp, Homo sapien
ccagctgtggaccataggacattgc

SEQ ID NO: 1324529 - DNA, 25 bp, Homo sapien
gcagaatgggaatggaagaggctgc

SEQ ID NO: 1324530 - DNA, 25 bp, Homo sapien
ctgcagaatgggaatggaagaggct

SEQ ID NO: 1324531 - DNA, 25 bp, Homo sapien
tgcagaatgggaatggaagaggctg

SEQ ID NO: 1324532 - DNA, 25 bp, Homo sapien
actggtgacaggacccttagggtca

SEQ ID NO: 1324533 - DNA, 25 bp, Homo sapien
cagggagatcttttccctaacatcc

SEQ ID NO: 1324534 - DNA, 25 bp, Homo sapien
tggccatggatgtcctgcatgtgct

SEQ ID NO: 1324535 - DNA, 25 bp, Homo sapien
tgggtatttggccatggatgtcctg

SEQ ID NO: 1324536 - DNA, 25 bp, Homo sapien
gaggagggtgagctcgctcactcta

SEQ ID NO: 1324537 - DNA, 25 bp, Homo sapien
gctagagacaggtagccagatactc

SEQ ID NO: 1324538 - DNA, 25 bp, Homo sapien
tgctctgtcctcagtagggcacggg

SEQ ID NO: 1324539 - DNA, 25 bp, Homo sapien
tgttcagggagaatgagtcacttgg

SEQ ID NO: 1324540 - DNA, 25 bp, Homo sapien
caaattcatgtggtgcatacaggaa

SEQ ID NO: 1324541 - DNA, 25 bp, Homo sapien
caacgctccaaagcaggaatgggaa

SEQ ID NO: 1324542 - DNA, 25 bp, Homo sapien
tcagagccccatctataagtcagac

SEQ ID NO: 1324543 - DNA, 25 bp, Homo sapien
gaatgggaattcagctttcgacagg

SEQ ID NO: 1324544 - DNA, 25 bp, Homo sapien
cttggtccaagacatttcccgctgg

SEQ ID NO: 1324545 - DNA, 25 bp, Homo sapien
agagctgtgacccttttacaggccg

SEQ ID NO: 1324546 - DNA, 25 bp, Homo sapien
ggaccctgaggcagatattttccac

SEQ ID NO: 1324547 - DNA, 25 bp, Homo sapien
cacccgtgtccaagggcttggtcca

SEQ ID NO: 1324548 - DNA, 25 bp, Homo sapien
gagaggagtgagtgctcgaggggag

SEQ ID NO: 1324549 - DNA, 25 bp, Homo sapien
agaggagtgagtgctcgaggggaga

SEQ ID NO: 1324550 - DNA, 25 bp, Homo sapien
tggagaggagtgagtgctcgagggg

SEQ ID NO: 1324551 - DNA, 25 bp, Homo sapien
gaggagtgagtgctcgaggggagag

SEQ ID NO: 1324552 - DNA, 25 bp, Homo sapien
gacaccctccaagaatgggcaccag

SEQ ID NO: 1324553 - DNA, 25 bp, Homo sapien
tcctctcttatgtctccggaggaag

SEQ ID NO: 1324554 - DNA, 25 bp, Homo sapien
tcacatcctctcttatgtctccgga

SEQ ID NO: 1324555 - DNA, 25 bp, Homo sapien
ttatgtctccggaggaaggatgctc

SEQ ID NO: 1324556 - DNA, 25 bp, Homo sapien
cttatgtctccggaggaaggatgct

SEQ ID NO: 1324557 - DNA, 25 bp, Homo sapien
tagcagcaaatgtggaggaatttga

SEQ ID NO: 1324558 - DNA, 25 bp, Homo sapien
cttagcagcaaatgtggaggaattt

SEQ ID NO: 1324559 - DNA, 25 bp, Homo sapien
gcagcaaatgtggaggaatttgagg

SEQ ID NO: 1324560 - DNA, 25 bp, Homo sapien
ttagcagcaaatgtggaggaatttg

SEQ ID NO: 1324561 - DNA, 25 bp, Homo sapien
ttccgatgtgtagtttcacttcttc

SEQ ID NO: 1324562 - DNA, 25 bp, Homo sapien
tgtcaaaaggccctgtaaacagcgc

SEQ ID NO: 1324563 - DNA, 25 bp, Homo sapien
gcgcaaagtcctttccgatgtgtag

SEQ ID NO: 1324564 - DNA, 25 bp, Homo sapien
gccctgtaaacagcgcaaagtcctt

SEQ ID NO: 1324565 - DNA, 25 bp, Homo sapien
gcaatgtcacccagttgcttggcct

SEQ ID NO: 1324566 - DNA, 25 bp, Homo sapien
gggcaatgtcacccagttgcttggc

SEQ ID NO: 1324567 - DNA, 25 bp, Homo sapien
aggagggggcaatgtcacccagttg

SEQ ID NO: 1324568 - DNA, 25 bp, Homo sapien
gagggggcaatgtcacccagttgct

SEQ ID NO: 1324569 - DNA, 25 bp, Homo sapien
gcccgaagaatgtggctggctttgc

SEQ ID NO: 1324570 - DNA, 25 bp, Homo sapien
caggaagctattaagttgatgagca

SEQ ID NO: 1324571 - DNA, 25 bp, Homo sapien
cctggattgatacagcgacgctctg

SEQ ID NO: 1324572 - DNA, 25 bp, Homo sapien
taaataaacttggactctagcccga

SEQ ID NO: 1324573 - DNA, 25 bp, Homo sapien
gggccacatagaacagagagcagac

SEQ ID NO: 1324574 - DNA, 25 bp, Homo sapien
ggggccacatagaacagagagcaga

SEQ ID NO: 1324575 - DNA, 25 bp, Homo sapien
gggagccacatatcttatgtacctg

SEQ ID NO: 1324576 - DNA, 25 bp, Homo sapien
tacctgctgcgtacaaagcgttctt

SEQ ID NO: 1324577 - DNA, 25 bp, Homo sapien
cactgagcaagggagccacatatct

SEQ ID NO: 1324578 - DNA, 25 bp, Homo sapien
aagcgttcttctttccgtcattgag

SEQ ID NO: 1324579 - DNA, 25 bp, Homo sapien
ctttctttctgagatccctaacaca

SEQ ID NO: 1324580 - DNA, 25 bp, Homo sapien
gaagtcaaagcctgtatctttctct

SEQ ID NO: 1324581 - DNA, 25 bp, Homo sapien
tctttctgagatccctaacacagac

SEQ ID NO: 1324582 - DNA, 25 bp, Homo sapien
ggcaggttgagaagtcaaagcctgt

SEQ ID NO: 1324583 - DNA, 25 bp, Homo sapien
tgattataaacattgcaaactgaga

SEQ ID NO: 1324584 - DNA, 25 bp, Homo sapien
gcatctggaaccattgagcagggct

SEQ ID NO: 1324585 - DNA, 25 bp, Homo sapien
ccgcattaaccatgggtctggcagc

SEQ ID NO: 1324586 - DNA, 25 bp, Homo sapien
tgttttgcgtcttgataccagcccg

SEQ ID NO: 1324587 - DNA, 25 bp, Homo sapien
gcactgtccctgactgcctgaacgt

SEQ ID NO: 1324588 - DNA, 25 bp, Homo sapien
ctaggctactgcagagtttgtatcc

SEQ ID NO: 1324589 - DNA, 25 bp, Homo sapien
catggtgtggagatgtggcatttca

SEQ ID NO: 1324590 - DNA, 25 bp, Homo sapien
tccttcatcttgagaggcatgacca

SEQ ID NO: 1324591 - DNA, 25 bp, Homo sapien
tcagtgcccaggactatgttcctgg

SEQ ID NO: 1324592 - DNA, 25 bp, Homo sapien
tgcccatccctcttacagtctggag

SEQ ID NO: 1324593 - DNA, 25 bp, Homo sapien
acagtctggaggctccacgaggagc

SEQ ID NO: 1324594 - DNA, 25 bp, Homo sapien
gtctggaggctccacgaggagcccc

SEQ ID NO: 1324595 - DNA, 25 bp, Homo sapien
tgtcctaggccatggtttgagaatc

SEQ ID NO: 1324596 - DNA, 25 bp, Homo sapien
caaggaacgacaagggacaagaggt

SEQ ID NO: 1324597 - DNA, 25 bp, Homo sapien
tagagaggacagagctttgtctatc

SEQ ID NO: 1324598 - DNA, 25 bp, Homo sapien
tgtaaaggccctttgcctctgatct

SEQ ID NO: 1324599 - DNA, 25 bp, Homo sapien
ggagcatctgagtagagacaatgtt

SEQ ID NO: 1324600 - DNA, 25 bp, Homo sapien
tcaggagcatctgagtagagacaat

SEQ ID NO: 1324601 - DNA, 25 bp, Homo sapien
tgagagaactctggaggctcccgaa

SEQ ID NO: 1324602 - DNA, 25 bp, Homo sapien
tttgagagaactctggaggctcccg

SEQ ID NO: 1324603 - DNA, 25 bp, Homo sapien
ccacaactgctacttcaggtgggtc

SEQ ID NO: 1324604 - DNA, 25 bp, Homo sapien
tgtctgtatccacaactgctacttc

SEQ ID NO: 1324605 - DNA, 25 bp, Homo sapien
cttcgtcctgtgtctgtatccacaa

SEQ ID NO: 1324606 - DNA, 25 bp, Homo sapien
tcaggtgggtcttcaagggaactag

SEQ ID NO: 1324607 - DNA, 25 bp, Homo sapien
gagccaggccaacctttccatttgc

SEQ ID NO: 1324608 - DNA, 25 bp, Homo sapien
tgctcaaatcctcctggcatggcat

SEQ ID NO: 1324609 - DNA, 25 bp, Homo sapien
tccacagtagaaggacacctagaag

SEQ ID NO: 1324610 - DNA, 25 bp, Homo sapien
ggttctccatattcgagccaggcca

SEQ ID NO: 1324611 - DNA, 25 bp, Homo sapien
tacaagaaataagatgtgcacactc

SEQ ID NO: 1324612 - DNA, 25 bp, Homo sapien
gacatacattaaatatgcccagcac

SEQ ID NO: 1324613 - DNA, 25 bp, Homo sapien
actcttacgtacatgcaaatgctag

SEQ ID NO: 1324614 - DNA, 25 bp, Homo sapien
tctctgcccaccatattgacacagg

SEQ ID NO: 1324615 - DNA, 25 bp, Homo sapien
ggagctgagctaagggagacccttt

SEQ ID NO: 1324616 - DNA, 25 bp, Homo sapien
caggagctgagctaagggagaccct

SEQ ID NO: 1324617 - DNA, 25 bp, Homo sapien
gctgagctaagggagacccttttct

SEQ ID NO: 1324618 - DNA, 25 bp, Homo sapien
tttatatctccttcaggggccctcc

SEQ ID NO: 1324619 - DNA, 25 bp, Homo sapien
gacagtcctttgtaaaagtcaaatc

SEQ ID NO: 1324620 - DNA, 25 bp, Homo sapien
aaggacctcgcttcagatgtcagag

SEQ ID NO: 1324621 - DNA, 25 bp, Homo sapien
tgatatcccacttgatcctctcagc

SEQ ID NO: 1324622 - DNA, 25 bp, Homo sapien
caaccttctatttggacagtccttt

SEQ ID NO: 1324623 - DNA, 25 bp, Homo sapien
ccaggattccaccagatgttagggc

SEQ ID NO: 1324624 - DNA, 25 bp, Homo sapien
cagaaagggcttttgaacaacatgc

SEQ ID NO: 1324625 - DNA, 25 bp, Homo sapien
gagacatacagacattcggaatcag

SEQ ID NO: 1324626 - DNA, 25 bp, Homo sapien
tgttgacaggaagacgcttaggttc

SEQ ID NO: 1324627 - DNA, 25 bp, Homo sapien
gggctattgcagctttatgagtttc

SEQ ID NO: 1324628 - DNA, 25 bp, Homo sapien
cacaacatccaaagttgagctggac

SEQ ID NO: 1324629 - DNA, 25 bp, Homo sapien
tgtgggctattgcagctttatgagt

SEQ ID NO: 1324630 - DNA, 25 bp, Homo sapien
gtttcacaacatccaaagttgagct

SEQ ID NO: 1324631 - DNA, 25 bp, Homo sapien
ttatgggaagcagttagtgtatcac

SEQ ID NO: 1324632 - DNA, 25 bp, Homo sapien
tatgggaagcagttagtgtatcact

SEQ ID NO: 1324633 - DNA, 25 bp, Homo sapien
tgggaagcagttagtgtatcactgg

SEQ ID NO: 1324634 - DNA, 25 bp, Homo sapien
gggaagcagttagtgtatcactggc

SEQ ID NO: 1324635 - DNA, 25 bp, Homo sapien
aggccacgctcaagccactggaccc

SEQ ID NO: 1324636 - DNA, 25 bp, Homo sapien
actcctgcatcggtcagcagtttgc

SEQ ID NO: 1324637 - DNA, 25 bp, Homo sapien
tgcatcggtcagcagtttgctcaga

SEQ ID NO: 1324638 - DNA, 25 bp, Homo sapien
accactcctgcatcggtcagcagtt

SEQ ID NO: 1324639 - DNA, 25 bp, Homo sapien
gctgtccacggcgacccacccttct

SEQ ID NO: 1324640 - DNA, 25 bp, Homo sapien
gggcctccgggcaggatgagactcc

SEQ ID NO: 1324641 - DNA, 25 bp, Homo sapien
gggcaagggccgtgctcgtccacct

SEQ ID NO: 1324642 - DNA, 25 bp, Homo sapien
gcaggatgagactccccgggcaagg

SEQ ID NO: 1324643 - DNA, 25 bp, Homo sapien
tgtagaagacctccatgttcatcag

SEQ ID NO: 1324644 - DNA, 25 bp, Homo sapien
gcccttggggagtgtagaagacctc

SEQ ID NO: 1324645 - DNA, 25 bp, Homo sapien
gctccattttaaggagagaacagaa

SEQ ID NO: 1324646 - DNA, 25 bp, Homo sapien
tgggagttctgattgatgtggacca

SEQ ID NO: 1324647 - DNA, 25 bp, Homo sapien
ctgtggttacattgctggaggtgtc

SEQ ID NO: 1324648 - DNA, 25 bp, Homo sapien
gacctgcaggatccctgcagtacct

SEQ ID NO: 1324649 - DNA, 25 bp, Homo sapien
agtgtgaggatttaagcccagctgt

SEQ ID NO: 1324650 - DNA, 25 bp, Homo sapien
tacattgctggaggtgtcagtgtga

SEQ ID NO: 1324651 - DNA, 25 bp, Homo sapien
caggtgcggcagctgcacaactggt

SEQ ID NO: 1324652 - DNA, 25 bp, Homo sapien
ctgcatcggaaacgcaggtgcggca

SEQ ID NO: 1324653 - DNA, 25 bp, Homo sapien
gcatcggaaacgcaggtgcggcagc

SEQ ID NO: 1324654 - DNA, 25 bp, Homo sapien
aggtgcggcagctgcacaactggtt

SEQ ID NO: 1324655 - DNA, 25 bp, Homo sapien
actgtgtgaaacacgtttttgcctg

SEQ ID NO: 1324656 - DNA, 25 bp, Homo sapien
tgaattagggttcacaccgggtggc

SEQ ID NO: 1324657 - DNA, 25 bp, Homo sapien
ttaactgctgttggaacaactccaa

SEQ ID NO: 1324658 - DNA, 25 bp, Homo sapien
ctgctgttggaacaactccaagcct

SEQ ID NO: 1324659 - DNA, 25 bp, Homo sapien
ctatgaaatcaaggaggcccacatc

SEQ ID NO: 1324660 - DNA, 25 bp, Homo sapien
ttgctcatgatgttgagatagctac

SEQ ID NO: 1324661 - DNA, 25 bp, Homo sapien
gggagagcatgtcctctaggtaaca

SEQ ID NO: 1324662 - DNA, 25 bp, Homo sapien
acacaagtgtttgcaggtgggtggg

SEQ ID NO: 1324663 - DNA, 25 bp, Homo sapien
tggtcctgcaagagtggtcactcag

SEQ ID NO: 1324664 - DNA, 25 bp, Homo sapien
gcaaggcagcctttattgatgcaca

SEQ ID NO: 1324665 - DNA, 25 bp, Homo sapien
gtttttccaggccatggtgatgcct

SEQ ID NO: 1324666 - DNA, 25 bp, Homo sapien
cagatctagaagagaactggagcca

SEQ ID NO: 1324667 - DNA, 25 bp, Homo sapien
gctactgggcccgggcaaacttgga

SEQ ID NO: 1324668 - DNA, 25 bp, Homo sapien
tgtgagggtctaataactgttatat

SEQ ID NO: 1324669 - DNA, 25 bp, Homo sapien
tatctaccttgtaagacttttgtga

SEQ ID NO: 1324670 - DNA, 25 bp, Homo sapien
taaaatagggatacgatcattctca

SEQ ID NO: 1324671 - DNA, 25 bp, Homo sapien
tcagatcctctgactgagggatgat

SEQ ID NO: 1324672 - DNA, 25 bp, Homo sapien
caatgggaccaggtggccatagagg

SEQ ID NO: 1324673 - DNA, 25 bp, Homo sapien
gcaggtgggatgtgcttttccaaag

SEQ ID NO: 1324674 - DNA, 25 bp, Homo sapien
ttcagagatgttatgcagggaactc

SEQ ID NO: 1324675 - DNA, 25 bp, Homo sapien
taaaaaggttaggaagtgcatttca

SEQ ID NO: 1324676 - DNA, 25 bp, Homo sapien
gtgcttttccaaaggatccatttct

SEQ ID NO: 1324677 - DNA, 25 bp, Homo sapien
caggaattggttccccttatcaact

SEQ ID NO: 1324678 - DNA, 25 bp, Homo sapien
attggttccccttatcaactttcag

SEQ ID NO: 1324679 - DNA, 25 bp, Homo sapien
atgacctagccaaattcagctcaaa

SEQ ID NO: 1324680 - DNA, 25 bp, Homo sapien
tcagttttattgcatatgacctagc

SEQ ID NO: 1324681 - DNA, 25 bp, Homo sapien
cttaagctctatcttgctgtctcag

SEQ ID NO: 1324682 - DNA, 25 bp, Homo sapien
gctgctgatgtgactcacccactgt

SEQ ID NO: 1324683 - DNA, 25 bp, Homo sapien
tgatgtgactcacccactgtgagtg

SEQ ID NO: 1324684 - DNA, 25 bp, Homo sapien
tgtgagtgagctggttgctacttaa

SEQ ID NO: 1324685 - DNA, 25 bp, Homo sapien
cttggcttgactttacgctgatgtg

SEQ ID NO: 1324686 - DNA, 25 bp, Homo sapien
cagcactggttaccaaggtggtgtt

SEQ ID NO: 1324687 - DNA, 25 bp, Homo sapien
cagcagcactggttaccaaggtggt

SEQ ID NO: 1324688 - DNA, 25 bp, Homo sapien
tttacgctgatgtgaatcactcact

SEQ ID NO: 1324689 - DNA, 25 bp, Homo sapien
gatgcaaaccgataatgagtccaac

SEQ ID NO: 1324690 - DNA, 25 bp, Homo sapien
gaaggctatcccaatgactatcagg

SEQ ID NO: 1324691 - DNA, 25 bp, Homo sapien
tgcacacattgaaaagaaggctatc

SEQ ID NO: 1324692 - DNA, 25 bp, Homo sapien
tgagtccaacaattgcacacattga

SEQ ID NO: 1324693 - DNA, 25 bp, Homo sapien
caacacttggcaacataatgaagaa

SEQ ID NO: 1324694 - DNA, 25 bp, Homo sapien
ctctttgctgtagttcaacacttgg

SEQ ID NO: 1324695 - DNA, 25 bp, Homo sapien
agttcaacacttggcaacataatga

SEQ ID NO: 1324696 - DNA, 25 bp, Homo sapien
tgctgtagttcaacacttggcaaca

SEQ ID NO: 1324697 - DNA, 25 bp, Homo sapien
tgatgcaggcggaatgatctctcct

SEQ ID NO: 1324698 - DNA, 25 bp, Homo sapien
ccatttgaggctgtggtaaccaacc

SEQ ID NO: 1324699 - DNA, 25 bp, Homo sapien
tcagatcgcacctggtaagacaatg

SEQ ID NO: 1324700 - DNA, 25 bp, Homo sapien
gaaggctcatcttcatggtgaacaa

SEQ ID NO: 1324701 - DNA, 25 bp, Homo sapien
tctttgaagaagcagtggtactgcc

SEQ ID NO: 1324702 - DNA, 25 bp, Homo sapien
tctgcgctttgtggtggagacagct

SEQ ID NO: 1324703 - DNA, 25 bp, Homo sapien
ccttatacaggtaaacaggtcgtgt

SEQ ID NO: 1324704 - DNA, 25 bp, Homo sapien
tgtgtagtgactctggaaccagcgt

SEQ ID NO: 1324705 - DNA, 25 bp, Homo sapien
cttttccacccagtggagccaagat

SEQ ID NO: 1324706 - DNA, 25 bp, Homo sapien
tcaacttttccacccagtggagcca

SEQ ID NO: 1324707 - DNA, 25 bp, Homo sapien
ccacccagtggagccaagattggcc

SEQ ID NO: 1324708 - DNA, 25 bp, Homo sapien
tgagctcaacttttccacccagtgg

SEQ ID NO: 1324709 - DNA, 25 bp, Homo sapien
cagactaccctggaagacggactta

SEQ ID NO: 1324710 - DNA, 25 bp, Homo sapien
taactgcaagtgaggagtaaggtac

SEQ ID NO: 1324711 - DNA, 25 bp, Homo sapien
tcttatgtattcgaggagggcacag

SEQ ID NO: 1324712 - DNA, 25 bp, Homo sapien
gagaacatgttcgaaaaacccagag

SEQ ID NO: 1324713 - DNA, 25 bp, Homo sapien
caagctatcctcccgcctcttagcc

SEQ ID NO: 1324714 - DNA, 25 bp, Homo sapien
tttctggagaacggggtctcgctat

SEQ ID NO: 1324715 - DNA, 25 bp, Homo sapien
ttttctggagaacggggtctcgcta

SEQ ID NO: 1324716 - DNA, 25 bp, Homo sapien
tcccgcctcttagcctccctgagag

SEQ ID NO: 1324717 - DNA, 25 bp, Homo sapien
tgtggagccaggagaagccgttcac

SEQ ID NO: 1324718 - DNA, 25 bp, Homo sapien
gaacaccagtgtggagccaggagaa

SEQ ID NO: 1324719 - DNA, 25 bp, Homo sapien
cagcaccgagtagctggacctggtg

SEQ ID NO: 1324720 - DNA, 25 bp, Homo sapien
gacctggtgttccagggtgaacacc

SEQ ID NO: 1324721 - DNA, 25 bp, Homo sapien
gcactgtcagagcagctgtcagagg

SEQ ID NO: 1324722 - DNA, 25 bp, Homo sapien
ttcacagccctcctggcactgtcag

SEQ ID NO: 1324723 - DNA, 25 bp, Homo sapien
ctggcactgtcagagcagctgtcag

SEQ ID NO: 1324724 - DNA, 25 bp, Homo sapien
ccctcctggcactgtcagagcagct

SEQ ID NO: 1324725 - DNA, 25 bp, Homo sapien
gaactgctaagtctgacccctggga

SEQ ID NO: 1324726 - DNA, 25 bp, Homo sapien
tggatattgtaatgcccaaggccat

SEQ ID NO: 1324727 - DNA, 25 bp, Homo sapien
cagggaagttctgcctttagtagga

SEQ ID NO: 1324728 - DNA, 25 bp, Homo sapien
taggatgcttttaccaaggctcggg

SEQ ID NO: 1324729 - DNA, 25 bp, Homo sapien
ggctgctaactgaccacctactggt

SEQ ID NO: 1324730 - DNA, 25 bp, Homo sapien
ggcgtgatctgatttcaacccaggg

SEQ ID NO: 1324731 - DNA, 25 bp, Homo sapien
tactggtgtaagacagggaggtcct

SEQ ID NO: 1324732 - DNA, 25 bp, Homo sapien
tcagagctgacaaggaaaatacaag

SEQ ID NO: 1324733 - DNA, 25 bp, Homo sapien
gaactaactcagaggtcgacctggc

SEQ ID NO: 1324734 - DNA, 25 bp, Homo sapien
tctctgatgtccagcaatgtgggca

SEQ ID NO: 1324735 - DNA, 25 bp, Homo sapien
tacatcgcagcaggtgtggtcacaa

SEQ ID NO: 1324736 - DNA, 25 bp, Homo sapien
caagatctcggtaggtgtcactgca

SEQ ID NO: 1324737 - DNA, 25 bp, Homo sapien
caagtatgtagatgacccagaccca

SEQ ID NO: 1324738 - DNA, 25 bp, Homo sapien
cacagagggctagctctagaactga

SEQ ID NO: 1324739 - DNA, 25 bp, Homo sapien
ctccgttgccaggtctagggctgaa

SEQ ID NO: 1324740 - DNA, 25 bp, Homo sapien
taagctcaggctataagcccatgtc

SEQ ID NO: 1324741 - DNA, 25 bp, Homo sapien
agttaagtgtcccttcgccaggaag

SEQ ID NO: 1324742 - DNA, 25 bp, Homo sapien
tgtatttaagggtaagccccacagc

SEQ ID NO: 1324743 - DNA, 25 bp, Homo sapien
tgccgcaacgtccagacctgggtca

SEQ ID NO: 1324744 - DNA, 25 bp, Homo sapien
taccttggaatacactgtgacccca

SEQ ID NO: 1324745 - DNA, 25 bp, Homo sapien
tatgctggctgacacaataagtgat

SEQ ID NO: 1324746 - DNA, 25 bp, Homo sapien
tatcaaattggtaacctggtcccca

SEQ ID NO: 1324747 - DNA, 25 bp, Homo sapien
gagacatattagcatggaggcagtc

SEQ ID NO: 1324748 - DNA, 25 bp, Homo sapien
aaaaccactcgcgtgagtcagacca

SEQ ID NO: 1324749 - DNA, 25 bp, Homo sapien
agggtttttagccttcaatgtgaat

SEQ ID NO: 1324750 - DNA, 25 bp, Homo sapien
ccttcaatgtgaatatacaatatgc

SEQ ID NO: 1324751 - DNA, 25 bp, Homo sapien
gggtttttagccttcaatgtgaata

SEQ ID NO: 1324752 - DNA, 25 bp, Homo sapien
tttagccttcaatgtgaatatacaa

SEQ ID NO: 1324753 - DNA, 25 bp, Homo sapien
ttccacttgcacattgcgtaagtag

SEQ ID NO: 1324754 - DNA, 25 bp, Homo sapien
ggcaccaaggctaaaatgtatgtaa

SEQ ID NO: 1324755 - DNA, 25 bp, Homo sapien
gatcatataacctacctttggtgca

SEQ ID NO: 1324756 - DNA, 25 bp, Homo sapien
ggaagaacaatccttctgccatcca

SEQ ID NO: 1324757 - DNA, 25 bp, Homo sapien
aaatccaggcacctagcagatgaag

SEQ ID NO: 1324758 - DNA, 25 bp, Homo sapien
gaatgacaggtaatctctacactaa

SEQ ID NO: 1324759 - DNA, 25 bp, Homo sapien
ataacgtataagaagcacacagggc

SEQ ID NO: 1324760 - DNA, 25 bp, Homo sapien
tcactggctataggcaaacaaagaa

SEQ ID NO: 1324761 - DNA, 25 bp, Homo sapien
ccaagactttgctcctgtgaacagt

SEQ ID NO: 1324762 - DNA, 25 bp, Homo sapien
acatttctgtatccagtctatcgtt

SEQ ID NO: 1324763 - DNA, 25 bp, Homo sapien
gttccaagactttgctcctgtgaac

SEQ ID NO: 1324764 - DNA, 25 bp, Homo sapien
cacatttctgtatccagtctatcgt

SEQ ID NO: 1324765 - DNA, 25 bp, Homo sapien
ccccttattgaatatacggtttgca

SEQ ID NO: 1324766 - DNA, 25 bp, Homo sapien
taacctgtgggaggtgatatctcat

SEQ ID NO: 1324767 - DNA, 25 bp, Homo sapien
cataacggctatggaaaaacacttg

SEQ ID NO: 1324768 - DNA, 25 bp, Homo sapien
ttcggtattaaggtgtatgagtccc

SEQ ID NO: 1324769 - DNA, 25 bp, Homo sapien
gagggagtgagcatcttttccttgt

SEQ ID NO: 1324770 - DNA, 25 bp, Homo sapien
gtagaatactgaatagcagcagagg

SEQ ID NO: 1324771 - DNA, 25 bp, Homo sapien
gacttccagtagaatactgaatagc

SEQ ID NO: 1324772 - DNA, 25 bp, Homo sapien
caaaagattataatgttagcagtgg

SEQ ID NO: 1324773 - DNA, 25 bp, Homo sapien
ccatctccactcttgtaaaatctga

SEQ ID NO: 1324774 - DNA, 25 bp, Homo sapien
cattttcataccatggaagttacca

SEQ ID NO: 1324775 - DNA, 25 bp, Homo sapien
tattcagctcaatggtcacctcttc

SEQ ID NO: 1324776 - DNA, 25 bp, Homo sapien
cacttctagctaaagcacttggagg

SEQ ID NO: 1324777 - DNA, 25 bp, Homo sapien
gaagtgatcactaatggttacagga

SEQ ID NO: 1324778 - DNA, 25 bp, Homo sapien
caaaaagcatatagtggtttccagg

SEQ ID NO: 1324779 - DNA, 25 bp, Homo sapien
gaaaacaactctgcctgcctaggac

SEQ ID NO: 1324780 - DNA, 25 bp, Homo sapien
actagctagtagaaccaaggaagag

SEQ ID NO: 1324781 - DNA, 25 bp, Homo sapien
tagactcagctagaaaacggcagac

SEQ ID NO: 1324782 - DNA, 25 bp, Homo sapien
cagacatgggatactaaagcctagg

SEQ ID NO: 1324783 - DNA, 25 bp, Homo sapien
tgtagacagccccagtttacaggcg

SEQ ID NO: 1324784 - DNA, 25 bp, Homo sapien
ggaacatcaattacatgccaggctg

SEQ ID NO: 1324785 - DNA, 25 bp, Homo sapien
tgcaccaaaaggtatggccctagaa

SEQ ID NO: 1324786 - DNA, 25 bp, Homo sapien
cattttctgattctggttgcaccaa

SEQ ID NO: 1324787 - DNA, 25 bp, Homo sapien
gaaattgacacggacactaatgagg

SEQ ID NO: 1324788 - DNA, 25 bp, Homo sapien
tataagcttactaacagaggccatt

SEQ ID NO: 1324789 - DNA, 25 bp, Homo sapien
agaactacaggcctttttgtataag

SEQ ID NO: 1324790 - DNA, 25 bp, Homo sapien
tgccctgttggaccagtattcaccg

SEQ ID NO: 1324791 - DNA, 25 bp, Homo sapien
gattttcccttataagaggctgccc

SEQ ID NO: 1324792 - DNA, 25 bp, Homo sapien
catgctgttctcaaagatgggtcgg

SEQ ID NO: 1324793 - DNA, 25 bp, Homo sapien
agtgtactcatggttcaatagtgaa

SEQ ID NO: 1324794 - DNA, 25 bp, Homo sapien
atattacataatggcgaatctgggc

SEQ ID NO: 1324795 - DNA, 25 bp, Homo sapien
tagtgaacactaaccaacaggtatt

SEQ ID NO: 1324796 - DNA, 25 bp, Homo sapien
cataatggcgaatctgggctttcag

SEQ ID NO: 1324797 - DNA, 25 bp, Homo sapien
aaattagtggctcattagggccttc

SEQ ID NO: 1324798 - DNA, 25 bp, Homo sapien
tagggccttcaccaatatctctcat

SEQ ID NO: 1324799 - DNA, 25 bp, Homo sapien
taagtagaactttatcaaggccagc

SEQ ID NO: 1324800 - DNA, 25 bp, Homo sapien
caactgtggctatcttctctcagga

SEQ ID NO: 1324801 - DNA, 25 bp, Homo sapien
cagagtctctacataaaagacttct

SEQ ID NO: 1324802 - DNA, 25 bp, Homo sapien
ctatactcggggtcactgtcatagg

SEQ ID NO: 1324803 - DNA, 25 bp, Homo sapien
cggggtcactgtcataggcagagtc

SEQ ID NO: 1324804 - DNA, 25 bp, Homo sapien
gcagagtctctacataaaagacttc

SEQ ID NO: 1324805 - DNA, 25 bp, Homo sapien
gtctggccaagcctcttttgcatac

SEQ ID NO: 1324806 - DNA, 25 bp, Homo sapien
tgtgggcttcttgtctggccaagcc

SEQ ID NO: 1324807 - DNA, 25 bp, Homo sapien
tcatatcagtaaggaagatgtgggc

SEQ ID NO: 1324808 - DNA, 25 bp, Homo sapien
gaagatgtgggcttcttgtctggcc

SEQ ID NO: 1324809 - DNA, 25 bp, Homo sapien
acagtttcagggttatggactgcaa

SEQ ID NO: 1324810 - DNA, 25 bp, Homo sapien
agtttcagggttatggactgcaagg

SEQ ID NO: 1324811 - DNA, 25 bp, Homo sapien
cagtttcagggttatggactgcaag

SEQ ID NO: 1324812 - DNA, 25 bp, Homo sapien
tttcagggttatggactgcaaggtt

SEQ ID NO: 1324813 - DNA, 25 bp, Homo sapien
ttgtggaaactgggagcctgcttca

SEQ ID NO: 1324814 - DNA, 25 bp, Homo sapien
ctgtcttgtggaaactgggagcctg

SEQ ID NO: 1324815 - DNA, 25 bp, Homo sapien
tcttgtggaaactgggagcctgctt

SEQ ID NO: 1324816 - DNA, 25 bp, Homo sapien
tgtcttgtggaaactgggagcctgc

SEQ ID NO: 1324817 - DNA, 25 bp, Homo sapien
gcacaggcccccgtagagtcctccc

SEQ ID NO: 1324818 - DNA, 25 bp, Homo sapien
tgtgtgtagggcacaggcccccgta

SEQ ID NO: 1324819 - DNA, 25 bp, Homo sapien
gggcacaggcccccgtagagtcctc

SEQ ID NO: 1324820 - DNA, 25 bp, Homo sapien
tgtgtagggcacaggcccccgtaga

SEQ ID NO: 1324821 - DNA, 25 bp, Homo sapien
cctgaatcgacaaactgagggatcc

SEQ ID NO: 1324822 - DNA, 25 bp, Homo sapien
agggatccacattctctgagttgat

SEQ ID NO: 1324823 - DNA, 25 bp, Homo sapien
aatgtcacccgggagttcttcctct

SEQ ID NO: 1324824 - DNA, 25 bp, Homo sapien
gcttcttcttgactgggaccactgc

SEQ ID NO: 1324825 - DNA, 25 bp, Homo sapien
agtgttgaactatgtcaggttatca

SEQ ID NO: 1324826 - DNA, 25 bp, Homo sapien
ctttggtcttggaatgttagatttc

SEQ ID NO: 1324827 - DNA, 25 bp, Homo sapien
tcaggttatcaagcttagtttcctc

SEQ ID NO: 1324828 - DNA, 25 bp, Homo sapien
ttggaatgttagatttccctcctca

SEQ ID NO: 1324829 - DNA, 25 bp, Homo sapien
atggcaatggcccaagtatctcgcg

SEQ ID NO: 1324830 - DNA, 25 bp, Homo sapien
gcccaagtatctcgcgcaaggtgta

SEQ ID NO: 1324831 - DNA, 25 bp, Homo sapien
aatggcccaagtatctcgcgcaagg

SEQ ID NO: 1324832 - DNA, 25 bp, Homo sapien
agtatctcgcgcaaggtgtatgccc

SEQ ID NO: 1324833 - DNA, 25 bp, Homo sapien
ccctggaatcagtcggaatttgctg

SEQ ID NO: 1324834 - DNA, 25 bp, Homo sapien
ctgtggatgcgtcaaatgagaccct

SEQ ID NO: 1324835 - DNA, 25 bp, Homo sapien
ggaatcagtcggaatttgctgaggc

SEQ ID NO: 1324836 - DNA, 25 bp, Homo sapien
tgagaccctggaatcagtcggaatt

SEQ ID NO: 1324837 - DNA, 25 bp, Homo sapien
tccagatgtcaaccagaagggggct

SEQ ID NO: 1324838 - DNA, 25 bp, Homo sapien
tctcgtttaactaaatccagatgtc

SEQ ID NO: 1324839 - DNA, 25 bp, Homo sapien
tggtaggcaagtgcagtatggatcc

SEQ ID NO: 1324840 - DNA, 25 bp, Homo sapien
caagtgcagtatggatccaagagca

SEQ ID NO: 1324841 - DNA, 25 bp, Homo sapien
aggttgggcagtggagcagcgggag

SEQ ID NO: 1324842 - DNA, 25 bp, Homo sapien
gctggagccagagtctgtgactgcc

SEQ ID NO: 1324843 - DNA, 25 bp, Homo sapien
ggaggctggagccagagtctgtgac

SEQ ID NO: 1324844 - DNA, 25 bp, Homo sapien
cagcgggaggctggagccagagtct

SEQ ID NO: 1324845 - DNA, 25 bp, Homo sapien
agtcggacgtggtggcccgcccctg

SEQ ID NO: 1324846 - DNA, 25 bp, Homo sapien
cggacgtggtggcccgcccctgtag

SEQ ID NO: 1324847 - DNA, 25 bp, Homo sapien
taattagtcggacgtggtggcccgc

SEQ ID NO: 1324848 - DNA, 25 bp, Homo sapien
tcggacgtggtggcccgcccctgta

SEQ ID NO: 1324849 - DNA, 25 bp, Homo sapien
aatatacgctatgaaaaatccctgt

SEQ ID NO: 1324850 - DNA, 25 bp, Homo sapien
tacccaaatatatcagtaggaatgt

SEQ ID NO: 1324851 - DNA, 25 bp, Homo sapien
ggaacagactgactactacaattaa

SEQ ID NO: 1324852 - DNA, 25 bp, Homo sapien
tagaacaggtagtgcaaatagaaaa

SEQ ID NO: 1324853 - DNA, 25 bp, Homo sapien
tctcatattttgaaggctgtgaaat

SEQ ID NO: 1324854 - DNA, 25 bp, Homo sapien
cataatgacttaggtcaagcaggca

SEQ ID NO: 1324855 - DNA, 25 bp, Homo sapien
tgccttgggcaaaaccactgacttc

SEQ ID NO: 1324856 - DNA, 25 bp, Homo sapien
tacccactcatgctaccatttagga

SEQ ID NO: 1324857 - DNA, 25 bp, Homo sapien
tttgatgagcctgatgtgatttcaa

SEQ ID NO: 1324858 - DNA, 25 bp, Homo sapien
agcctgatgtgatttcaagacattt

SEQ ID NO: 1324859 - DNA, 25 bp, Homo sapien
tgagcctgatgtgatttcaagacat

SEQ ID NO: 1324860 - DNA, 25 bp, Homo sapien
ttgatgagcctgatgtgatttcaag

SEQ ID NO: 1324861 - DNA, 25 bp, Homo sapien
tcgcagtttgaaggtgaacaccaat

SEQ ID NO: 1324862 - DNA, 25 bp, Homo sapien
catggatctcatcgcagtttgaagg

SEQ ID NO: 1324863 - DNA, 25 bp, Homo sapien
gaaggtgaacaccaatcagaatgaa

SEQ ID NO: 1324864 - DNA, 25 bp, Homo sapien
ccggtcatggatctcatcgcagttt

SEQ ID NO: 1324865 - DNA, 25 bp, Homo sapien
tagcaaggtcctcgctgaatgccgg

SEQ ID NO: 1324866 - DNA, 25 bp, Homo sapien
agctctatttaacacagggcttgga

SEQ ID NO: 1324867 - DNA, 25 bp, Homo sapien
tactacacgaccttgggctcaaata

SEQ ID NO: 1324868 - DNA, 25 bp, Homo sapien
gagtcatcgaagtctctcccatggg

SEQ ID NO: 1324869 - DNA, 25 bp, Homo sapien
ttaaatgggatagtcagtaggaacc

SEQ ID NO: 1324870 - DNA, 25 bp, Homo sapien
cctgctcctgtggaacatatattct

SEQ ID NO: 1324871 - DNA, 25 bp, Homo sapien
gacctaagtcacgaagattatctgt

SEQ ID NO: 1324872 - DNA, 25 bp, Homo sapien
gaaccaaatggtagcctagtttagc

SEQ ID NO: 1324873 - DNA, 25 bp, Homo sapien
tagctcatcacagaagggttatatt

SEQ ID NO: 1324874 - DNA, 25 bp, Homo sapien
aatccctgctgtttatgagaccctg

SEQ ID NO: 1324875 - DNA, 25 bp, Homo sapien
taaactaatctgaaactggtacagg

SEQ ID NO: 1324876 - DNA, 25 bp, Homo sapien
gcaagtcatttaccctattaaggct

SEQ ID NO: 1324877 - DNA, 25 bp, Homo sapien
tctggtcatggactctctttggttg

SEQ ID NO: 1324878 - DNA, 25 bp, Homo sapien
ggtcatggactctctttggttggta

SEQ ID NO: 1324879 - DNA, 25 bp, Homo sapien
tccatctggtcatggactctctttg

SEQ ID NO: 1324880 - DNA, 25 bp, Homo sapien
catctggtcatggactctctttggt

SEQ ID NO: 1324881 - DNA, 25 bp, Homo sapien
ataattcaaatggaattagctgaga

SEQ ID NO: 1324882 - DNA, 25 bp, Homo sapien
gaccataggacagaagcacagtgca

SEQ ID NO: 1324883 - DNA, 25 bp, Homo sapien
tgagaagtagttgagaataaggacc

SEQ ID NO: 1324884 - DNA, 25 bp, Homo sapien
cacagtgcaggtacaacttgcagga

SEQ ID NO: 1324885 - DNA, 25 bp, Homo sapien
ccttatctcctgtgttatgttcctc

SEQ ID NO: 1324886 - DNA, 25 bp, Homo sapien
cctcaggcctctatccttcctcttg

SEQ ID NO: 1324887 - DNA, 25 bp, Homo sapien
ctattccttatctcctgtgttatgt

SEQ ID NO: 1324888 - DNA, 25 bp, Homo sapien
ttccttatctcctgtgttatgttcc

SEQ ID NO: 1324889 - DNA, 25 bp, Homo sapien
taagacagatttgtcttagcagaga

SEQ ID NO: 1324890 - DNA, 25 bp, Homo sapien
gccaaacaatatcacatgtagaatc

SEQ ID NO: 1324891 - DNA, 25 bp, Homo sapien
tctctcgacaggtgggaattgtcca

SEQ ID NO: 1324892 - DNA, 25 bp, Homo sapien
gacaaatgtcacatgattatgctta

SEQ ID NO: 1324893 - DNA, 25 bp, Homo sapien
gccctgatattaaggaatccagcga

SEQ ID NO: 1324894 - DNA, 25 bp, Homo sapien
tactatcccctaagggaagccctga

SEQ ID NO: 1324895 - DNA, 25 bp, Homo sapien
gacaatctacctcttgaatacaaaa

SEQ ID NO: 1324896 - DNA, 25 bp, Homo sapien
aatccagcgatgagagtggaaagga

SEQ ID NO: 1324897 - DNA, 25 bp, Homo sapien
cttataatccttgggtcggcagcag

SEQ ID NO: 1324898 - DNA, 25 bp, Homo sapien
tccttgggtcggcagcagccaagat

SEQ ID NO: 1324899 - DNA, 25 bp, Homo sapien
cggcagcagccaagatgagaatgat

SEQ ID NO: 1324900 - DNA, 25 bp, Homo sapien
tcggcagcagccaagatgagaatga

SEQ ID NO: 1324901 - DNA, 25 bp, Homo sapien
ggcaaggcaccactttagaactccc

SEQ ID NO: 1324902 - DNA, 25 bp, Homo sapien
caagctgtcacaagctactggatgt

SEQ ID NO: 1324903 - DNA, 25 bp, Homo sapien
gagctgccgggagattgtaccatgc

SEQ ID NO: 1324904 - DNA, 25 bp, Homo sapien
gaaccctcgtgagccctgaaactaa

SEQ ID NO: 1324905 - DNA, 25 bp, Homo sapien
attgtgcacccttgaccatccatct

SEQ ID NO: 1324906 - DNA, 25 bp, Homo sapien
cattgtgcacccttgaccatccatc

SEQ ID NO: 1324907 - DNA, 25 bp, Homo sapien
ttgtgcacccttgaccatccatctc

SEQ ID NO: 1324908 - DNA, 25 bp, Homo sapien
gatagctcacacatgcgtctttttg

SEQ ID NO: 1324909 - DNA, 25 bp, Homo sapien
ccagatttaaatgggccagccgccg

SEQ ID NO: 1324910 - DNA, 25 bp, Homo sapien
gccgccgcctggtgtcttcagatag

SEQ ID NO: 1324911 - DNA, 25 bp, Homo sapien
tttttgaactcatagggtcccagat

SEQ ID NO: 1324912 - DNA, 25 bp, Homo sapien
agttgcatcagattactccatcttt

SEQ ID NO: 1324913 - DNA, 25 bp, Homo sapien
gcatcagattactccatctttcctt

SEQ ID NO: 1324914 - DNA, 25 bp, Homo sapien
tcatggtatgcttctggaccttctc

SEQ ID NO: 1324915 - DNA, 25 bp, Homo sapien
gtagttcatggtatgcttctggacc

SEQ ID NO: 1324916 - DNA, 25 bp, Homo sapien
tggcttaagtcacagttatcatctt

SEQ ID NO: 1324917 - DNA, 25 bp, Homo sapien
caaatttacttgaatactgataatg

SEQ ID NO: 1324918 - DNA, 25 bp, Homo sapien
ggcttaagtcacagttatcatcttc

SEQ ID NO: 1324919 - DNA, 25 bp, Homo sapien
cagcaaatttacttgaatactgata

SEQ ID NO: 1324920 - DNA, 25 bp, Homo sapien
ttccttgaacttatcagacattcag

SEQ ID NO: 1324921 - DNA, 25 bp, Homo sapien
aaaattccagccttggagcatttcc

SEQ ID NO: 1324922 - DNA, 25 bp, Homo sapien
tcagtaatcactgaagtcgtagaaa

SEQ ID NO: 1324923 - DNA, 25 bp, Homo sapien
ccttgaacttatcagacattcagta

SEQ ID NO: 1324924 - DNA, 25 bp, Homo sapien
caaaaaccctatgatatcgccatgt

SEQ ID NO: 1324925 - DNA, 25 bp, Homo sapien
ttcaatttattagatcaggcccact

SEQ ID NO: 1324926 - DNA, 25 bp, Homo sapien
tattaagtacctactccaggcaagg

SEQ ID NO: 1324927 - DNA, 25 bp, Homo sapien
tattgagtgtttacttgccagacac

SEQ ID NO: 1324928 - DNA, 25 bp, Homo sapien
taacctggcggtttgaatcatggtg

SEQ ID NO: 1324929 - DNA, 25 bp, Homo sapien
tattttcgtcatacgtagacagtgt

SEQ ID NO: 1324930 - DNA, 25 bp, Homo sapien
tttggacccggaaacatgaaatctc

SEQ ID NO: 1324931 - DNA, 25 bp, Homo sapien
catgaaatctcgtgtattttcgtca

SEQ ID NO: 1324932 - DNA, 25 bp, Homo sapien
ggacccggaaacatgaaatctcgtg

SEQ ID NO: 1324933 - DNA, 25 bp, Homo sapien
gaactagctgtatcaactcgaacac

SEQ ID NO: 1324934 - DNA, 25 bp, Homo sapien
gctgtatcaactcgaacactgctgt

SEQ ID NO: 1324935 - DNA, 25 bp, Homo sapien
tatcaactcgaacactgctgtatca

SEQ ID NO: 1324936 - DNA, 25 bp, Homo sapien
ctggtggaactagctgtatcaactc

SEQ ID NO: 1324937 - DNA, 25 bp, Homo sapien
tggaaaatataacaccaagggctag

SEQ ID NO: 1324938 - DNA, 25 bp, Homo sapien
aacagtggaaaatataacaccaagg

SEQ ID NO: 1324939 - DNA, 25 bp, Homo sapien
ctgcaacagtggaaaatataacacc

SEQ ID NO: 1324940 - DNA, 25 bp, Homo sapien
tgcaacagtggaaaatataacacca

SEQ ID NO: 1324941 - DNA, 25 bp, Homo sapien
atgtcttagaatcaggaattaaaaa

SEQ ID NO: 1324942 - DNA, 25 bp, Homo sapien
ctaaaatgtcttagaatcaggaatt

SEQ ID NO: 1324943 - DNA, 25 bp, Homo sapien
aaatgtcttagaatcaggaattaaa

SEQ ID NO: 1324944 - DNA, 25 bp, Homo sapien
taaaatgtcttagaatcaggaatta

SEQ ID NO: 1324945 - DNA, 25 bp, Homo sapien
caggatctactgcgtccgggaacac

SEQ ID NO: 1324946 - DNA, 25 bp, Homo sapien
attcaagctgtgtaaccacatctcc

SEQ ID NO: 1324947 - DNA, 25 bp, Homo sapien
ccaggatctactgcgtccgggaaca

SEQ ID NO: 1324948 - DNA, 25 bp, Homo sapien
tccaggatctactgcgtccgggaac

SEQ ID NO: 1324949 - DNA, 25 bp, Homo sapien
tttgtctttaagcacgactcctggg

SEQ ID NO: 1324950 - DNA, 25 bp, Homo sapien
cacattgtgtctttttgtattggcc

SEQ ID NO: 1324951 - DNA, 25 bp, Homo sapien
tgtattggccaaacacacagatgct

SEQ ID NO: 1324952 - DNA, 25 bp, Homo sapien
cacagatgctaagatagatgtcctc

SEQ ID NO: 1324953 - DNA, 25 bp, Homo sapien
tttctcctagcatggagaggtccag

SEQ ID NO: 1324954 - DNA, 25 bp, Homo sapien
ggaagtcttctgagatcaacaaggg

SEQ ID NO: 1324955 - DNA, 25 bp, Homo sapien
gaatgcaggggaagaagttcaaaac

SEQ ID NO: 1324956 - DNA, 25 bp, Homo sapien
cactggatgagtggggttctctgcc

SEQ ID NO: 1324957 - DNA, 25 bp, Homo sapien
tggggttgcaaggttggagaaggag

SEQ ID NO: 1324958 - DNA, 25 bp, Homo sapien
gttgcaaggttggagaaggaggtgt

SEQ ID NO: 1324959 - DNA, 25 bp, Homo sapien
gcaaggttggagaaggaggtgtttc

SEQ ID NO: 1324960 - DNA, 25 bp, Homo sapien
tgcaaggttggagaaggaggtgttt

SEQ ID NO: 1324961 - DNA, 25 bp, Homo sapien
gggcctttcttgcaatggctggcac

SEQ ID NO: 1324962 - DNA, 25 bp, Homo sapien
gctggcacaaagtcggaagggtctg

SEQ ID NO: 1324963 - DNA, 25 bp, Homo sapien
actgggcctttcttgcaatggctgg

SEQ ID NO: 1324964 - DNA, 25 bp, Homo sapien
tgactgggcctttcttgcaatggct

SEQ ID NO: 1324965 - DNA, 25 bp, Homo sapien
agggaaggcaaggtactttgcgcaa

SEQ ID NO: 1324966 - DNA, 25 bp, Homo sapien
gcaaggtactttgcgcaatgacaca

SEQ ID NO: 1324967 - DNA, 25 bp, Homo sapien
tcagttgttggatgtgaagattctc

SEQ ID NO: 1324968 - DNA, 25 bp, Homo sapien
ggtactttgcgcaatgacacatttc

SEQ ID NO: 1324969 - DNA, 25 bp, Homo sapien
gatctccagcgccagggcgcactgc

SEQ ID NO: 1324970 - DNA, 25 bp, Homo sapien
gcgccagggcgcactgcagcgcctt

SEQ ID NO: 1324971 - DNA, 25 bp, Homo sapien
cgccagggcgcactgcagcgccttc

SEQ ID NO: 1324972 - DNA, 25 bp, Homo sapien
agctgatctccagcgccagggcgca

SEQ ID NO: 1324973 - DNA, 25 bp, Homo sapien
agctgagcgcggggcgcagactcgt

SEQ ID NO: 1324974 - DNA, 25 bp, Homo sapien
tcggcctcccgaggtgccgcgattg

SEQ ID NO: 1324975 - DNA, 25 bp, Homo sapien
gctcctaaccgcgagtgatctgcca

SEQ ID NO: 1324976 - DNA, 25 bp, Homo sapien
ccgcgattgcagacggagtctggtt

SEQ ID NO: 1324977 - DNA, 25 bp, Homo sapien
ccagctcctaaccgcgagtgatctg

SEQ ID NO: 1324978 - DNA, 25 bp, Homo sapien
tctgcttgtctgttggggctttgga

SEQ ID NO: 1324979 - DNA, 25 bp, Homo sapien
tctagctacacaaagggctatattc

SEQ ID NO: 1324980 - DNA, 25 bp, Homo sapien
ttcacccctagctgttctagctaca

SEQ ID NO: 1324981 - DNA, 25 bp, Homo sapien
gctgttctagctacacaaagggcta

SEQ ID NO: 1324982 - DNA, 25 bp, Homo sapien
cagaggcaggcttttaaacccgaag

SEQ ID NO: 1324983 - DNA, 25 bp, Homo sapien
tcagaggcaggcttttaaacccgaa

SEQ ID NO: 1324984 - DNA, 25 bp, Homo sapien
cctataaaacatttgatactttgcc

SEQ ID NO: 1324985 - DNA, 25 bp, Homo sapien
tgctgagcacagctggacggatgta

SEQ ID NO: 1324986 - DNA, 25 bp, Homo sapien
cctagtgtgagtcccaactgaaaca

SEQ ID NO: 1324987 - DNA, 25 bp, Homo sapien
ggatgtagcatttgccctataaaac

SEQ ID NO: 1324988 - DNA, 25 bp, Homo sapien
ctctttgtggtcttgtcaactggtg

SEQ ID NO: 1324989 - DNA, 25 bp, Homo sapien
cctgcacctccactgtcattactgt

SEQ ID NO: 1324990 - DNA, 25 bp, Homo sapien
tggtcttgtcaactggtgtagctac

SEQ ID NO: 1324991 - DNA, 25 bp, Homo sapien
gtcaactggtgtagctactgtggca

SEQ ID NO: 1324992 - DNA, 25 bp, Homo sapien
gagctgtccctttgcttgtacccat

SEQ ID NO: 1324993 - DNA, 25 bp, Homo sapien
agagctgtccctttgcttgtaccca

SEQ ID NO: 1324994 - DNA, 25 bp, Homo sapien
tgctttccttccgatacctttatgg

SEQ ID NO: 1324995 - DNA, 25 bp, Homo sapien
gcattacccagaacttcaggaagaa

SEQ ID NO: 1324996 - DNA, 25 bp, Homo sapien
gcctgagctgtttcccgtcagacac

SEQ ID NO: 1324997 - DNA, 25 bp, Homo sapien
taaacaagcattgcagccagcccaa

SEQ ID NO: 1324998 - DNA, 25 bp, Homo sapien
aaaattcaactcaaactgggtcatg

SEQ ID NO: 1324999 - DNA, 25 bp, Homo sapien
aaattcaactcaaactgggtcatgt

SEQ ID NO: 1325000 - DNA, 25 bp, Homo sapien
atccaaaagtaggaggagctttggg

SEQ ID NO: 1325001 - DNA, 25 bp, Homo sapien
gattgatccctcatggtataggtta

SEQ ID NO: 1325002 - DNA, 25 bp, Homo sapien
aaataatacagattggttctccctg

SEQ ID NO: 1325003 - DNA, 25 bp, Homo sapien
cacatgaaacaaagctacagttgag

SEQ ID NO: 1325004 - DNA, 25 bp, Homo sapien
gccctatagctaccgccaaagtcaa

SEQ ID NO: 1325005 - DNA, 25 bp, Homo sapien
atttagttgtatctgtggtgttcca

SEQ ID NO: 1325006 - DNA, 25 bp, Homo sapien
tttagttgtatctgtggtgttccat

SEQ ID NO: 1325007 - DNA, 25 bp, Homo sapien
gatttagttgtatctgtggtgttcc

SEQ ID NO: 1325008 - DNA, 25 bp, Homo sapien
tacgtctggcaaattatgggactgt

SEQ ID NO: 1325009 - DNA, 25 bp, Homo sapien
ccacatacgtctggcaaattatggg

SEQ ID NO: 1325010 - DNA, 25 bp, Homo sapien
catacgtctggcaaattatgggact

SEQ ID NO: 1325011 - DNA, 25 bp, Homo sapien
tgccccacatacgtctggcaaatta

SEQ ID NO: 1325012 - DNA, 25 bp, Homo sapien
tacacaattcagctggggaccccaa

SEQ ID NO: 1325013 - DNA, 25 bp, Homo sapien
atgttacttgtagaaattggtcttc

SEQ ID NO: 1325014 - DNA, 25 bp, Homo sapien
acattacacaattcagctggggacc

SEQ ID NO: 1325015 - DNA, 25 bp, Homo sapien
gaaatgttacttgtagaaattggtc

SEQ ID NO: 1325016 - DNA, 25 bp, Homo sapien
ccttcctgggagcttcttttttctg

SEQ ID NO: 1325017 - DNA, 25 bp, Homo sapien
agtaagtaagggcaaggctttgcaa

SEQ ID NO: 1325018 - DNA, 25 bp, Homo sapien
aagttttaggagtgtctaaatctga

SEQ ID NO: 1325019 - DNA, 25 bp, Homo sapien
gagtgtctaaatctgaggttctttg

SEQ ID NO: 1325020 - DNA, 25 bp, Homo sapien
gtgcgatggacagttccatgcacct

SEQ ID NO: 1325021 - DNA, 25 bp, Homo sapien
tgacttagtgcagtgcgatggacag

SEQ ID NO: 1325022 - DNA, 25 bp, Homo sapien
tagtgcagtgcgatggacagttcca

SEQ ID NO: 1325023 - DNA, 25 bp, Homo sapien
ccactgacttagtgcagtgcgatgg

SEQ ID NO: 1325024 - DNA, 25 bp, Homo sapien
tatgcaaggttcgtggtgtcaccag

SEQ ID NO: 1325025 - DNA, 25 bp, Homo sapien
tcgtggtgtcaccagctcgtctcac

SEQ ID NO: 1325026 - DNA, 25 bp, Homo sapien
aattaggtcctcagtactgcatctc

SEQ ID NO: 1325027 - DNA, 25 bp, Homo sapien
ctgcatctcttgtatgcaaggttcg

SEQ ID NO: 1325028 - DNA, 25 bp, Homo sapien
agcttaattctgtaagtaaaggaag

SEQ ID NO: 1325029 - DNA, 25 bp, Homo sapien
aatctgagctgtggaatgtctcaga

SEQ ID NO: 1325030 - DNA, 25 bp, Homo sapien
ctttaatgctgagttggagcttaat

SEQ ID NO: 1325031 - DNA, 25 bp, Homo sapien
gaagccatagaggaaatctgagctg

SEQ ID NO: 1325032 - DNA, 25 bp, Homo sapien
gatgggtccaacaaccctgctgaga

SEQ ID NO: 1325033 - DNA, 25 bp, Homo sapien
aatgggccccttgcctaaacgctgc

SEQ ID NO: 1325034 - DNA, 25 bp, Homo sapien
ggccagtaacccagagagtgtcacg

SEQ ID NO: 1325035 - DNA, 25 bp, Homo sapien
gcatgtcaagggataaatgggcccc

SEQ ID NO: 1325036 - DNA, 25 bp, Homo sapien
tgtggctctaatctgagacagacct

SEQ ID NO: 1325037 - DNA, 25 bp, Homo sapien
gcgggttgtacacctcttggtgctg

SEQ ID NO: 1325038 - DNA, 25 bp, Homo sapien
gagccaggtgggctagtagcctctg

SEQ ID NO: 1325039 - DNA, 25 bp, Homo sapien
acaagaagataggctggtgcgcccc

SEQ ID NO: 1325040 - DNA, 25 bp, Homo sapien
tttgagggaatcagcaagcatgcag

SEQ ID NO: 1325041 - DNA, 25 bp, Homo sapien
cacaccttgggaattgctactactg

SEQ ID NO: 1325042 - DNA, 25 bp, Homo sapien
aattagcaggctgtcatggtgactc

SEQ ID NO: 1325043 - DNA, 25 bp, Homo sapien
gcatgcagcttagatacagtgacca

SEQ ID NO: 1325044 - DNA, 25 bp, Homo sapien
cccctttgctgttggggtagttgct

SEQ ID NO: 1325045 - DNA, 25 bp, Homo sapien
ggttcactgagctcttcttgtcccc

SEQ ID NO: 1325046 - DNA, 25 bp, Homo sapien
gtggttcactgagctcttcttgtcc

SEQ ID NO: 1325047 - DNA, 25 bp, Homo sapien
tcactgagctcttcttgtccccttt

SEQ ID NO: 1325048 - DNA, 25 bp, Homo sapien
tctctggacttctatttctttattt

SEQ ID NO: 1325049 - DNA, 25 bp, Homo sapien
cttctctggacttctatttctttat

SEQ ID NO: 1325050 - DNA, 25 bp, Homo sapien
ttctctggacttctatttctttatt

SEQ ID NO: 1325051 - DNA, 25 bp, Homo sapien
gggttcagccgataatagtccaaaa

SEQ ID NO: 1325052 - DNA, 25 bp, Homo sapien
cgcagtctcggcatgggaattgcca

SEQ ID NO: 1325053 - DNA, 25 bp, Homo sapien
tcggcatgggaattgccaccttttc

SEQ ID NO: 1325054 - DNA, 25 bp, Homo sapien
aaggttcttgccacattccgcccca

SEQ ID NO: 1325055 - DNA, 25 bp, Homo sapien
tgcaggtgtgtgcattaaggagcaa

SEQ ID NO: 1325056 - DNA, 25 bp, Homo sapien
ctgcaggtgtgtgcattaaggagca

SEQ ID NO: 1325057 - DNA, 25 bp, Homo sapien
ggcattgggcatgacctctctgagc

SEQ ID NO: 1325058 - DNA, 25 bp, Homo sapien
ccaaatggtggttgtgtgcgccagc

SEQ ID NO: 1325059 - DNA, 25 bp, Homo sapien
tggaggcagtctcacccagctttca

SEQ ID NO: 1325060 - DNA, 25 bp, Homo sapien
aaaagttcacaagctggcattgggc

SEQ ID NO: 1325061 - DNA, 25 bp, Homo sapien
tcccagagcagcttcggcagagaca

SEQ ID NO: 1325062 - DNA, 25 bp, Homo sapien
cgtggtaatggctgttttctgtctc

SEQ ID NO: 1325063 - DNA, 25 bp, Homo sapien
caggaacacctttttcgtggtaatg

SEQ ID NO: 1325064 - DNA, 25 bp, Homo sapien
tcagggacgagtcctccctcatggg

SEQ ID NO: 1325065 - DNA, 25 bp, Homo sapien
cagagcagagaaccctgaacctttt

SEQ ID NO: 1325066 - DNA, 25 bp, Homo sapien
ctaggcagagcagagaaccctgaac

SEQ ID NO: 1325067 - DNA, 25 bp, Homo sapien
ggcagagcagagaaccctgaacctt

SEQ ID NO: 1325068 - DNA, 25 bp, Homo sapien
gagcagagaaccctgaaccttttgc

SEQ ID NO: 1325069 - DNA, 25 bp, Homo sapien
tctttgaggagcagtaggggctgga

SEQ ID NO: 1325070 - DNA, 25 bp, Homo sapien
cagagtgaaggcaatgtgcaccaca

SEQ ID NO: 1325071 - DNA, 25 bp, Homo sapien
agagaggggtctgtcccgccacagc

SEQ ID NO: 1325072 - DNA, 25 bp, Homo sapien
ccgccacagcttcgcagtctgctgc

SEQ ID NO: 1325073 - DNA, 25 bp, Homo sapien
aaggcccttgtctcagacagagttg

SEQ ID NO: 1325074 - DNA, 25 bp, Homo sapien
cagctaaaggcccttgtctcagaca

SEQ ID NO: 1325075 - DNA, 25 bp, Homo sapien
gctgcctcctcttattggcagcaca

SEQ ID NO: 1325076 - DNA, 25 bp, Homo sapien
cacaaccccagctaaaggcccttgt

SEQ ID NO: 1325077 - DNA, 25 bp, Homo sapien
gcaactgggctatcagggattgcaa

SEQ ID NO: 1325078 - DNA, 25 bp, Homo sapien
ttgcaaatcggtcaaactagggacg

SEQ ID NO: 1325079 - DNA, 25 bp, Homo sapien
gctgcaactgggctatcagggattg

SEQ ID NO: 1325080 - DNA, 25 bp, Homo sapien
agagctgcaactgggctatcaggga

SEQ ID NO: 1325081 - DNA, 25 bp, Homo sapien
agtaagggctgactggtaggtccca

SEQ ID NO: 1325082 - DNA, 25 bp, Homo sapien
tgactggtaggtcccaacctctgca

SEQ ID NO: 1325083 - DNA, 25 bp, Homo sapien
aggtcccaacctctgcagggttcag

SEQ ID NO: 1325084 - DNA, 25 bp, Homo sapien
cagaaaaggctcttgtccaacagga

SEQ ID NO: 1325085 - DNA, 25 bp, Homo sapien
gaacaaatatctaggcagtacccat

SEQ ID NO: 1325086 - DNA, 25 bp, Homo sapien
gtatctttagatgccaaccaatagg

SEQ ID NO: 1325087 - DNA, 25 bp, Homo sapien
tagtgaaggctctctggcaagaaca

SEQ ID NO: 1325088 - DNA, 25 bp, Homo sapien
cagatgccgatactgtttctgaaca

SEQ ID NO: 1325089 - DNA, 25 bp, Homo sapien
catgcattgaatcggcctgagcttc

SEQ ID NO: 1325090 - DNA, 25 bp, Homo sapien
tgcatgcattgaatcggcctgagct

SEQ ID NO: 1325091 - DNA, 25 bp, Homo sapien
cccttgcatgcattgaatcggcctg

SEQ ID NO: 1325092 - DNA, 25 bp, Homo sapien
gcttccctggtgcagtttgtttcct

SEQ ID NO: 1325093 - DNA, 25 bp, Homo sapien
aaaactcagtttaggccgggctcag

SEQ ID NO: 1325094 - DNA, 25 bp, Homo sapien
ttcctggcaaggtacctggacacca

SEQ ID NO: 1325095 - DNA, 25 bp, Homo sapien
caaggcagggtaggtccatcagtat

SEQ ID NO: 1325096 - DNA, 25 bp, Homo sapien
taagtcatgccacgttcagaaaaga

SEQ ID NO: 1325097 - DNA, 25 bp, Homo sapien
tccaaagacgccaccagaagaagaa

SEQ ID NO: 1325098 - DNA, 25 bp, Homo sapien
gagtatcatactaagggctgaggca

SEQ ID NO: 1325099 - DNA, 25 bp, Homo sapien
catagcttagatggcaggagactca

SEQ ID NO: 1325100 - DNA, 25 bp, Homo sapien
gcagagtaagatatgggcaggccat

SEQ ID NO: 1325101 - DNA, 25 bp, Homo sapien
ctgagctgggggcctaattcctgac

SEQ ID NO: 1325102 - DNA, 25 bp, Homo sapien
cttggatactctcggctggatgagg

SEQ ID NO: 1325103 - DNA, 25 bp, Homo sapien
gacttggatactctcggctggatga

SEQ ID NO: 1325104 - DNA, 25 bp, Homo sapien
tcagacttggatactctcggctgga

SEQ ID NO: 1325105 - DNA, 25 bp, Homo sapien
ctgtcagacttggatactctcggct

SEQ ID NO: 1325106 - DNA, 25 bp, Homo sapien
caataggaagtgtggtccaggagtc

SEQ ID NO: 1325107 - DNA, 25 bp, Homo sapien
cagcagccgtggtgccactgatgat

SEQ ID NO: 1325108 - DNA, 25 bp, Homo sapien
cgtcccggttaaaggatgtgctgga

SEQ ID NO: 1325109 - DNA, 25 bp, Homo sapien
gacctctagggtgtagcaataggaa

SEQ ID NO: 1325110 - DNA, 25 bp, Homo sapien
atggcctgcctctggaaccgttcct

SEQ ID NO: 1325111 - DNA, 25 bp, Homo sapien
cctcaaagatgttgccatacatgaa

SEQ ID NO: 1325112 - DNA, 25 bp, Homo sapien
aatggcctgcctctggaaccgttcc

SEQ ID NO: 1325113 - DNA, 25 bp, Homo sapien
tgttgccatacatgaagccattcat

SEQ ID NO: 1325114 - DNA, 25 bp, Homo sapien
gtcaatataaaactccaggcttgtt

SEQ ID NO: 1325115 - DNA, 25 bp, Homo sapien
gatgtcaatataaaactccaggctt

SEQ ID NO: 1325116 - DNA, 25 bp, Homo sapien
ggcatggatgtcaatataaaactcc

SEQ ID NO: 1325117 - DNA, 25 bp, Homo sapien
tggatgtcaatataaaactccaggc

SEQ ID NO: 1325118 - DNA, 25 bp, Homo sapien
gggagatacaagatgcactgctctg

SEQ ID NO: 1325119 - DNA, 25 bp, Homo sapien
ccaagctcccagttctctgggtagc

SEQ ID NO: 1325120 - DNA, 25 bp, Homo sapien
tcccagttctctgggtagcaaaagc

SEQ ID NO: 1325121 - DNA, 25 bp, Homo sapien
tttgggagatacaagatgcactgct

SEQ ID NO: 1325122 - DNA, 25 bp, Homo sapien
acttgcacataaatggaggcatttc

SEQ ID NO: 1325123 - DNA, 25 bp, Homo sapien
cttgcacataaatggaggcatttct

SEQ ID NO: 1325124 - DNA, 25 bp, Homo sapien
tacttgcacataaatggaggcattt

SEQ ID NO: 1325125 - DNA, 25 bp, Homo sapien
tcttccttgttcaatatgaaatcta

SEQ ID NO: 1325126 - DNA, 25 bp, Homo sapien
ttcttccttgttcaatatgaaatct

SEQ ID NO: 1325127 - DNA, 25 bp, Homo sapien
acatctgaaggccatatggaattct

SEQ ID NO: 1325128 - DNA, 25 bp, Homo sapien
tatactatgtgctcatttacagctg

SEQ ID NO: 1325129 - DNA, 25 bp, Homo sapien
tgaaggccatatggaattctgaggg

SEQ ID NO: 1325130 - DNA, 25 bp, Homo sapien
tgtgctcatttacagctgtgacaat

SEQ ID NO: 1325131 - DNA, 25 bp, Homo sapien
tctgttcatgtgatggctcttgttt

SEQ ID NO: 1325132 - DNA, 25 bp, Homo sapien
ttaactgcatccctcctaccatatg

SEQ ID NO: 1325133 - DNA, 25 bp, Homo sapien
ctaccatatgcccatggggattctc

SEQ ID NO: 1325134 - DNA, 25 bp, Homo sapien
ggctcttgttttaactgcatccctc

SEQ ID NO: 1325135 - DNA, 25 bp, Homo sapien
tgtcctacgggctggccgttgtttc

SEQ ID NO: 1325136 - DNA, 25 bp, Homo sapien
tctgccttggggcggcccttgggcc

SEQ ID NO: 1325137 - DNA, 25 bp, Homo sapien
tttctgtcctacgggctggccgttg

SEQ ID NO: 1325138 - DNA, 25 bp, Homo sapien
tctgtcctacgggctggccgttgtt

SEQ ID NO: 1325139 - DNA, 25 bp, Homo sapien
ttggacccttgagtaccctctgctt

SEQ ID NO: 1325140 - DNA, 25 bp, Homo sapien
tggacccttgagtaccctctgcttc

SEQ ID NO: 1325141 - DNA, 25 bp, Homo sapien
gacccttgagtaccctctgcttctc

SEQ ID NO: 1325142 - DNA, 25 bp, Homo sapien
cttggacccttgagtaccctctgct

SEQ ID NO: 1325143 - DNA, 25 bp, Homo sapien
ctgagaggggacccgagtccaggtg

SEQ ID NO: 1325144 - DNA, 25 bp, Homo sapien
tatgctatttgatgtaccacagtga

SEQ ID NO: 1325145 - DNA, 25 bp, Homo sapien
aggccgatttctgaagtgcaatatg

SEQ ID NO: 1325146 - DNA, 25 bp, Homo sapien
agtgcaatatgctatttgatgtacc

SEQ ID NO: 1325147 - DNA, 25 bp, Homo sapien
gagcctctcaatggcaacaagcaaa

SEQ ID NO: 1325148 - DNA, 25 bp, Homo sapien
atccttgggagtgttggacaatctc

SEQ ID NO: 1325149 - DNA, 25 bp, Homo sapien
gcaggttgcagggaaatctctgtca

SEQ ID NO: 1325150 - DNA, 25 bp, Homo sapien
ctctgtcaccagatcagagccttca

SEQ ID NO: 1325151 - DNA, 25 bp, Homo sapien
acaatctcagcaggttgcagggaaa

SEQ ID NO: 1325152 - DNA, 25 bp, Homo sapien
ggatacactccaatatatttccttt

SEQ ID NO: 1325153 - DNA, 25 bp, Homo sapien
gagcaggcctagtgcctccctggtt

SEQ ID NO: 1325154 - DNA, 25 bp, Homo sapien
tgaatccactatttgtgagaggttg

SEQ ID NO: 1325155 - DNA, 25 bp, Homo sapien
caaagatccctgacaaatatggata

SEQ ID NO: 1325156 - DNA, 25 bp, Homo sapien
agtggactttcccaatacaatgctg

SEQ ID NO: 1325157 - DNA, 25 bp, Homo sapien
gcagcttctagtggactttcccaat

SEQ ID NO: 1325158 - DNA, 25 bp, Homo sapien
tctagtggactttcccaatacaatg

SEQ ID NO: 1325159 - DNA, 25 bp, Homo sapien
atttgcagcttctagtggactttcc

SEQ ID NO: 1325160 - DNA, 25 bp, Homo sapien
gacgatgagttgtttcactccatgc

SEQ ID NO: 1325161 - DNA, 25 bp, Homo sapien
tgggtcgttgtacatctggacgatg

SEQ ID NO: 1325162 - DNA, 25 bp, Homo sapien
atctggacgatgagttgtttcactc

SEQ ID NO: 1325163 - DNA, 25 bp, Homo sapien
tggacgatgagttgtttcactccat

SEQ ID NO: 1325164 - DNA, 25 bp, Homo sapien
cagccagtgacgattcagatcaaat

SEQ ID NO: 1325165 - DNA, 25 bp, Homo sapien
gatccagccagtgacgattcagatc

SEQ ID NO: 1325166 - DNA, 25 bp, Homo sapien
gattcagatcaaatcccatcagaga

SEQ ID NO: 1325167 - DNA, 25 bp, Homo sapien
cagtgacgattcagatcaaatccca

SEQ ID NO: 1325168 - DNA, 25 bp, Homo sapien
cagggtacagcagaagactgaagat

SEQ ID NO: 1325169 - DNA, 25 bp, Homo sapien
acagggtacagcagaagactgaaga

SEQ ID NO: 1325170 - DNA, 25 bp, Homo sapien
tgctggctatcaggggagtgtggga

SEQ ID NO: 1325171 - DNA, 25 bp, Homo sapien
gcttggtgctggctatcaggggagt

SEQ ID NO: 1325172 - DNA, 25 bp, Homo sapien
ctcccagggtctggcaggcttggtg

SEQ ID NO: 1325173 - DNA, 25 bp, Homo sapien
agggcaggcctgtctttggttctcc

SEQ ID NO: 1325174 - DNA, 25 bp, Homo sapien
tctgaggcttgagagtctgcacgtc

SEQ ID NO: 1325175 - DNA, 25 bp, Homo sapien
ctgcacgtccagagggagatgttga

SEQ ID NO: 1325176 - DNA, 25 bp, Homo sapien
aggcttgagagtctgcacgtccaga

SEQ ID NO: 1325177 - DNA, 25 bp, Homo sapien
ctcacggggatgacttaacttctct

SEQ ID NO: 1325178 - DNA, 25 bp, Homo sapien
gacaatgccttgcatgcaaagctgg

SEQ ID NO: 1325179 - DNA, 25 bp, Homo sapien
gtcatcttgaaagtcgtgggccgaa

SEQ ID NO: 1325180 - DNA, 25 bp, Homo sapien
gtcgtgggccgaacgagctctaaaa

SEQ ID NO: 1325181 - DNA, 25 bp, Homo sapien
caaagctggggggtctgaatgtcat

SEQ ID NO: 1325182 - DNA, 25 bp, Homo sapien
tgaagaccaggtattcccggaggac

SEQ ID NO: 1325183 - DNA, 25 bp, Homo sapien
tagggtgctggcttacaaggaagtc

SEQ ID NO: 1325184 - DNA, 25 bp, Homo sapien
tgtaattgcccaggtagactccatc

SEQ ID NO: 1325185 - DNA, 25 bp, Homo sapien
tagactccatcaggattgagcattg

SEQ ID NO: 1325186 - DNA, 25 bp, Homo sapien
cttggacctgcctgctatccccaga

SEQ ID NO: 1325187 - DNA, 25 bp, Homo sapien
gacctgcctgctatccccagaagaa

SEQ ID NO: 1325188 - DNA, 25 bp, Homo sapien
cctgcctgctatccccagaagaagg

SEQ ID NO: 1325189 - DNA, 25 bp, Homo sapien
cctgctatccccagaagaaggtggg

SEQ ID NO: 1325190 - DNA, 25 bp, Homo sapien
cctgggtggactcgtcctgtgatga

SEQ ID NO: 1325191 - DNA, 25 bp, Homo sapien
ttcccctgggtggactcgtcctgtg

SEQ ID NO: 1325192 - DNA, 25 bp, Homo sapien
gtggactcgtcctgtgatgaatacc

SEQ ID NO: 1325193 - DNA, 25 bp, Homo sapien
ctcgtcctgtgatgaataccacctt

SEQ ID NO: 1325194 - DNA, 25 bp, Homo sapien
cattgagagaggttgaattgaagga

SEQ ID NO: 1325195 - DNA, 25 bp, Homo sapien
gagagaggttgaattgaaggattta

SEQ ID NO: 1325196 - DNA, 25 bp, Homo sapien
aagaacattgagagaggttgaattg

SEQ ID NO: 1325197 - DNA, 25 bp, Homo sapien
aatttagaaagaacattgagagagg

SEQ ID NO: 1325198 - DNA, 25 bp, Homo sapien
tattagcaaatgcaaattgaattat

SEQ ID NO: 1325199 - DNA, 25 bp, Homo sapien
gaattatgaagtgcccttttgcaac

SEQ ID NO: 1325200 - DNA, 25 bp, Homo sapien
aatgcaaattgaattatgaagtgcc

SEQ ID NO: 1325201 - DNA, 25 bp, Homo sapien
caaattgaattatgaagtgcccttt

SEQ ID NO: 1325202 - DNA, 25 bp, Homo sapien
acccagtcaggtgctctgcgtctgc

SEQ ID NO: 1325203 - DNA, 25 bp, Homo sapien
ctgattaagaacacccagtcaggtg

SEQ ID NO: 1325204 - DNA, 25 bp, Homo sapien
cagtcaggtgctctgcgtctgcaga

SEQ ID NO: 1325205 - DNA, 25 bp, Homo sapien
gtcaggtgctctgcgtctgcagagg

SEQ ID NO: 1325206 - DNA, 25 bp, Homo sapien
cagctcacggtgcttagtaactgct

SEQ ID NO: 1325207 - DNA, 25 bp, Homo sapien
tctaaagcccaatttgttagtcgct

SEQ ID NO: 1325208 - DNA, 25 bp, Homo sapien
aataagcccaccctgatctctgcgg

SEQ ID NO: 1325209 - DNA, 25 bp, Homo sapien
tgtgtgctatacctctcctgtgcca

SEQ ID NO: 1325210 - DNA, 25 bp, Homo sapien
tgtaattactttccactttgctaga

SEQ ID NO: 1325211 - DNA, 25 bp, Homo sapien
agtcaacagctgacttgtcaaaacc

SEQ ID NO: 1325212 - DNA, 25 bp, Homo sapien
cagctgacttgtcaaaaccacactg

SEQ ID NO: 1325213 - DNA, 25 bp, Homo sapien
aatgtaattactttccactttgcta

SEQ ID NO: 1325214 - DNA, 25 bp, Homo sapien
gaagggcactgacagccttccgtga

SEQ ID NO: 1325215 - DNA, 25 bp, Homo sapien
agaacagccgtggaccccaaaacat

SEQ ID NO: 1325216 - DNA, 25 bp, Homo sapien
tcacaagaccgctggccaaaaggaa

SEQ ID NO: 1325217 - DNA, 25 bp, Homo sapien
caagaacaagcctggtgacatccat

SEQ ID NO: 1325218 - DNA, 25 bp, Homo sapien
ccacggaattgcgaggatctggatc

SEQ ID NO: 1325219 - DNA, 25 bp, Homo sapien
aggcagcctggtgaagtgagccctc

SEQ ID NO: 1325220 - DNA, 25 bp, Homo sapien
gcagcctggtgaagtgagccctcct

SEQ ID NO: 1325221 - DNA, 25 bp, Homo sapien
aggatctggatctggcttctgagtc

SEQ ID NO: 1325222 - DNA, 25 bp, Homo sapien
aaccccagtctctggacccacaagc

SEQ ID NO: 1325223 - DNA, 25 bp, Homo sapien
cttacgttccgcctttgtacctgct

SEQ ID NO: 1325224 - DNA, 25 bp, Homo sapien
gctctgtcccctgacctgatttttt

SEQ ID NO: 1325225 - DNA, 25 bp, Homo sapien
gggctatactcaaccaaccccagtc

SEQ ID NO: 1325226 - DNA, 25 bp, Homo sapien
gtccatgatgctccttgtgctcttc

SEQ ID NO: 1325227 - DNA, 25 bp, Homo sapien
aagctggagcaagttatccagcaca

SEQ ID NO: 1325228 - DNA, 25 bp, Homo sapien
ctgaagctggagcaagttatccagc

SEQ ID NO: 1325229 - DNA, 25 bp, Homo sapien
aggctccctctgacagtatcctgtc

SEQ ID NO: 1325230 - DNA, 25 bp, Homo sapien
cacatccaacccaggttgtttttag

SEQ ID NO: 1325231 - DNA, 25 bp, Homo sapien
ggttgtttttagcatcaagttagat

SEQ ID NO: 1325232 - DNA, 25 bp, Homo sapien
gttgtttttagcatcaagttagata

SEQ ID NO: 1325233 - DNA, 25 bp, Homo sapien
caggtgcccacaactacgcctagct

SEQ ID NO: 1325234 - DNA, 25 bp, Homo sapien
ttacaggtgcccacaactacgccta

SEQ ID NO: 1325235 - DNA, 25 bp, Homo sapien
aaggttccaccatgttggccatgct

SEQ ID NO: 1325236 - DNA, 25 bp, Homo sapien
aggttccaccatgttggccatgctg

SEQ ID NO: 1325237 - DNA, 25 bp, Homo sapien
ctgtacttacagtgccatggaggat

SEQ ID NO: 1325238 - DNA, 25 bp, Homo sapien
tgtattcactggaggaaactaactt

SEQ ID NO: 1325239 - DNA, 25 bp, Homo sapien
catggaggatgtattcactggagga

SEQ ID NO: 1325240 - DNA, 25 bp, Homo sapien
acagtgccatggaggatgtattcac

SEQ ID NO: 1325241 - DNA, 25 bp, Homo sapien
ccctgatcacccttgactggaggtc

SEQ ID NO: 1325242 - DNA, 25 bp, Homo sapien
tgatcacccttgactggaggtcctc

SEQ ID NO: 1325243 - DNA, 25 bp, Homo sapien
gatcacccttgactggaggtcctcc

SEQ ID NO: 1325244 - DNA, 25 bp, Homo sapien
tcacccttgactggaggtcctccag

SEQ ID NO: 1325245 - DNA, 25 bp, Homo sapien
gatccccgatttaatcctctcaaga

SEQ ID NO: 1325246 - DNA, 25 bp, Homo sapien
aaagtgccttcaaccgatccccgat

SEQ ID NO: 1325247 - DNA, 25 bp, Homo sapien
gtgccttcaaccgatccccgattta

SEQ ID NO: 1325248 - DNA, 25 bp, Homo sapien
cgatttaatcctctcaagagcctgt

SEQ ID NO: 1325249 - DNA, 25 bp, Homo sapien
cactggactgggctctctgaagggc

SEQ ID NO: 1325250 - DNA, 25 bp, Homo sapien
ctacttggcactggactgggctctc

SEQ ID NO: 1325251 - DNA, 25 bp, Homo sapien
gccccaccctgcaaagcctccacct

SEQ ID NO: 1325252 - DNA, 25 bp, Homo sapien
tgggctctctgaagggcagccccac

SEQ ID NO: 1325253 - DNA, 25 bp, Homo sapien
tgatctcccctctggacatagggtg

SEQ ID NO: 1325254 - DNA, 25 bp, Homo sapien
cctctggacatagggtggatgctgt

SEQ ID NO: 1325255 - DNA, 25 bp, Homo sapien
catagggtggatgctgtgtctgaca

SEQ ID NO: 1325256 - DNA, 25 bp, Homo sapien
caaacacgtttgatctcccctctgg

SEQ ID NO: 1325257 - DNA, 25 bp, Homo sapien
ggtgctcctctggacatagttgccc

SEQ ID NO: 1325258 - DNA, 25 bp, Homo sapien
tgctcctctggacatagttgccctg

SEQ ID NO: 1325259 - DNA, 25 bp, Homo sapien
aggagctgcatgaaggaggtgctcc

SEQ ID NO: 1325260 - DNA, 25 bp, Homo sapien
ctctggacatagttgccctgggcac

SEQ ID NO: 1325261 - DNA, 25 bp, Homo sapien
gcaccattgcattgtggtgctcata

SEQ ID NO: 1325262 - DNA, 25 bp, Homo sapien
ctgcaccattgcattgtggtgctca

SEQ ID NO: 1325263 - DNA, 25 bp, Homo sapien
accattgcattgtggtgctcatagt

SEQ ID NO: 1325264 - DNA, 25 bp, Homo sapien
cattgcattgtggtgctcatagtca

SEQ ID NO: 1325265 - DNA, 25 bp, Homo sapien
ggcaccatcgctcgcaaatcacatg

SEQ ID NO: 1325266 - DNA, 25 bp, Homo sapien
caaaatagagcaacaaagaagtcct

SEQ ID NO: 1325267 - DNA, 25 bp, Homo sapien
gggtctgatttggacggcaccatcg

SEQ ID NO: 1325268 - DNA, 25 bp, Homo sapien
ttcaaaccccagtcaagtgacaggc

SEQ ID NO: 1325269 - DNA, 25 bp, Homo sapien
tcatttttacaggatttattgatat

SEQ ID NO: 1325270 - DNA, 25 bp, Homo sapien
gcaatttcagtttcatccacagttt

SEQ ID NO: 1325271 - DNA, 25 bp, Homo sapien
ttgtgctattctgtcatacaaacac

SEQ ID NO: 1325272 - DNA, 25 bp, Homo sapien
gttgactttggagagtctctgtgca

SEQ ID NO: 1325273 - DNA, 25 bp, Homo sapien
ttcatccacagtttcttgtgctatt

SEQ ID NO: 1325274 - DNA, 25 bp, Homo sapien
ttactaatgaggctcagtacggcca

SEQ ID NO: 1325275 - DNA, 25 bp, Homo sapien
gaaattctccagtatcagcctaggc

SEQ ID NO: 1325276 - DNA, 25 bp, Homo sapien
gactggcactcctagcaacagtgta

SEQ ID NO: 1325277 - DNA, 25 bp, Homo sapien
gataaagtgtccacgtgtccaccac

SEQ ID NO: 1325278 - DNA, 25 bp, Homo sapien
ttgacctcgaccagtcacttcctga

SEQ ID NO: 1325279 - DNA, 25 bp, Homo sapien
ttttaattgacctcgaccagtcact

SEQ ID NO: 1325280 - DNA, 25 bp, Homo sapien
agcttttaattgacctcgaccagtc

SEQ ID NO: 1325281 - DNA, 25 bp, Homo sapien
taattgacctcgaccagtcacttcc

SEQ ID NO: 1325282 - DNA, 25 bp, Homo sapien
tcgaagtctctaattgtctgcaagg

SEQ ID NO: 1325283 - DNA, 25 bp, Homo sapien
ccttggagcccctagcattagtcag

SEQ ID NO: 1325284 - DNA, 25 bp, Homo sapien
cccatagtgactttgtaggaacctg

SEQ ID NO: 1325285 - DNA, 25 bp, Homo sapien
catttcctgtgggtaacagcactga

SEQ ID NO: 1325286 - DNA, 25 bp, Homo sapien
acgatgcttagtttgtgaggcgaga

SEQ ID NO: 1325287 - DNA, 25 bp, Homo sapien
tgttccccaaatcataactgccaag

SEQ ID NO: 1325288 - DNA, 25 bp, Homo sapien
ccttgggttacttgtagctggtgcc

SEQ ID NO: 1325289 - DNA, 25 bp, Homo sapien
tcgtgtacttggaatctccttgggt

SEQ ID NO: 1325290 - DNA, 25 bp, Homo sapien
ctgagaggaataagaacaccagcac

SEQ ID NO: 1325291 - DNA, 25 bp, Homo sapien
tgtgttacactatggaaagacccac

SEQ ID NO: 1325292 - DNA, 25 bp, Homo sapien
tttctgtgttacactatggaaagac

SEQ ID NO: 1325293 - DNA, 25 bp, Homo sapien
cactatggaaagacccaccttcctt

SEQ ID NO: 1325294 - DNA, 25 bp, Homo sapien
tgttacactatggaaagacccacct

SEQ ID NO: 1325295 - DNA, 25 bp, Homo sapien
taatcattaaaaaaacagtgttcac

SEQ ID NO: 1325296 - DNA, 25 bp, Homo sapien
ttaatcattaaaaaaacagtgttca

SEQ ID NO: 1325297 - DNA, 25 bp, Homo sapien
tctgtgaagggacgaaatggcctct

SEQ ID NO: 1325298 - DNA, 25 bp, Homo sapien
taatgagctaaactttctaagggac

SEQ ID NO: 1325299 - DNA, 25 bp, Homo sapien
tctaagggacatgagaaggacctgc

SEQ ID NO: 1325300 - DNA, 25 bp, Homo sapien
cctgccaaaggtccttgttttcaga

SEQ ID NO: 1325301 - DNA, 25 bp, Homo sapien
ctggctgctggctaggcaacacgga

SEQ ID NO: 1325302 - DNA, 25 bp, Homo sapien
ggacaccaaggtcaagtgtggcctt

SEQ ID NO: 1325303 - DNA, 25 bp, Homo sapien
tgtggccttttctccgcagttcgaa

SEQ ID NO: 1325304 - DNA, 25 bp, Homo sapien
ccgcagttcgaactgcaggtgggca

SEQ ID NO: 1325305 - DNA, 25 bp, Homo sapien
ttcagtccttcacagtacatgtcag

SEQ ID NO: 1325306 - DNA, 25 bp, Homo sapien
tcccctacaaagtgataagggctag

SEQ ID NO: 1325307 - DNA, 25 bp, Homo sapien
gggagggtcaaggctttgcctcttc

SEQ ID NO: 1325308 - DNA, 25 bp, Homo sapien
ctcttctgtcccctacaaagtgata

SEQ ID NO: 1325309 - DNA, 25 bp, Homo sapien
ctcgggctcgagacattctgacttt

SEQ ID NO: 1325310 - DNA, 25 bp, Homo sapien
cattgtctaggatatacttgtccat

SEQ ID NO: 1325311 - DNA, 25 bp, Homo sapien
tatacttgtccatgacaggcgcagg

SEQ ID NO: 1325312 - DNA, 25 bp, Homo sapien
aaagtgctccgtaactccggctcgg

SEQ ID NO: 1325313 - DNA, 25 bp, Homo sapien
tttgatggatgcgcgacatcttggg

SEQ ID NO: 1325314 - DNA, 25 bp, Homo sapien
aattctagcatgaatcctggattag

SEQ ID NO: 1325315 - DNA, 25 bp, Homo sapien
ttaagggatcctagaaggcttcagg

SEQ ID NO: 1325316 - DNA, 25 bp, Homo sapien
gattaggtgagatcccagcagctga

SEQ ID NO: 1325317 - DNA, 25 bp, Homo sapien
gccttggactttgccttctaagaac

SEQ ID NO: 1325318 - DNA, 25 bp, Homo sapien
tttgccttctaagaacagggaatct

SEQ ID NO: 1325319 - DNA, 25 bp, Homo sapien
caaactggggaggacaccgtagcct

SEQ ID NO: 1325320 - DNA, 25 bp, Homo sapien
gaggacaccgtagccttggactttg

SEQ ID NO: 1325321 - DNA, 25 bp, Homo sapien
caaggtgcgccattacaactcctgg

SEQ ID NO: 1325322 - DNA, 25 bp, Homo sapien
ctttccaaggtgcgccattacaact

SEQ ID NO: 1325323 - DNA, 25 bp, Homo sapien
tgcgccattacaactcctggctgct

SEQ ID NO: 1325324 - DNA, 25 bp, Homo sapien
tccaaggtgcgccattacaactcct

SEQ ID NO: 1325325 - DNA, 25 bp, Homo sapien
tctgaaaagaccaggcggctgctct

SEQ ID NO: 1325326 - DNA, 25 bp, Homo sapien
taggaccccactacctcggtgagta

SEQ ID NO: 1325327 - DNA, 25 bp, Homo sapien
gcacccaagctagacaaaggccttt

SEQ ID NO: 1325328 - DNA, 25 bp, Homo sapien
tgtgtgaatgatccagcacccaagc

SEQ ID NO: 1325329 - DNA, 25 bp, Homo sapien
gaagttggcacattagcatcctcct

SEQ ID NO: 1325330 - DNA, 25 bp, Homo sapien
tgggagagcctagaaagatcaagac

SEQ ID NO: 1325331 - DNA, 25 bp, Homo sapien
gtaaaatgcagggtgtcttaccacc

SEQ ID NO: 1325332 - DNA, 25 bp, Homo sapien
gaagagctagccactggcctgtgca

SEQ ID NO: 1325333 - DNA, 25 bp, Homo sapien
taccgatttcctcaatattgactgg

SEQ ID NO: 1325334 - DNA, 25 bp, Homo sapien
gctgctgcctttcaggtttctcgat

SEQ ID NO: 1325335 - DNA, 25 bp, Homo sapien
taagcagtcatttcttccggcagtc

SEQ ID NO: 1325336 - DNA, 25 bp, Homo sapien
tagataatgaaaaccttcacaaggg

SEQ ID NO: 1325337 - DNA, 25 bp, Homo sapien
acccaagtggagtggtaggtgacct

SEQ ID NO: 1325338 - DNA, 25 bp, Homo sapien
cacccaagtggagtggtaggtgacc

SEQ ID NO: 1325339 - DNA, 25 bp, Homo sapien
ccaagtggagtggtaggtgacctgc

SEQ ID NO: 1325340 - DNA, 25 bp, Homo sapien
tcacccaagtggagtggtaggtgac

SEQ ID NO: 1325341 - DNA, 25 bp, Homo sapien
gggcaccacagcatcttctagactg

SEQ ID NO: 1325342 - DNA, 25 bp, Homo sapien
ggtcacggagctccttcatttcaga

SEQ ID NO: 1325343 - DNA, 25 bp, Homo sapien
agcagctcctcatacagagcccggg

SEQ ID NO: 1325344 - DNA, 25 bp, Homo sapien
tggagcctccggttaaggtcacgga

SEQ ID NO: 1325345 - DNA, 25 bp, Homo sapien
tgtgcctggcgaggcctccacgaag

SEQ ID NO: 1325346 - DNA, 25 bp, Homo sapien
ggctcaggccgttctgcttctctag

SEQ ID NO: 1325347 - DNA, 25 bp, Homo sapien
tcgatgctcttgtgcgccacttcgc

SEQ ID NO: 1325348 - DNA, 25 bp, Homo sapien
gacctcttccggacacgtgctatgg

SEQ ID NO: 1325349 - DNA, 25 bp, Homo sapien
tgtaggacaacgagaatcagttcag

SEQ ID NO: 1325350 - DNA, 25 bp, Homo sapien
taggacaacgagaatcagttcaggc

SEQ ID NO: 1325351 - DNA, 25 bp, Homo sapien
ctgtgtaggacaacgagaatcagtt

SEQ ID NO: 1325352 - DNA, 25 bp, Homo sapien
gacaacgagaatcagttcaggcaag

SEQ ID NO: 1325353 - DNA, 25 bp, Homo sapien
cgttccaaacctccaacagcgatga

SEQ ID NO: 1325354 - DNA, 25 bp, Homo sapien
aacaggaccaagcttggtggcacag

SEQ ID NO: 1325355 - DNA, 25 bp, Homo sapien
tggtggcacagcatgaatcagggct

SEQ ID NO: 1325356 - DNA, 25 bp, Homo sapien
ctccaacagcgatgacactgcacag

SEQ ID NO: 1325357 - DNA, 25 bp, Homo sapien
ctacatgattaagagaaagcttggg

SEQ ID NO: 1325358 - DNA, 25 bp, Homo sapien
cttgatgtgtctaagctgtaaatct

SEQ ID NO: 1325359 - DNA, 25 bp, Homo sapien
gatgtgtctaagctgtaaatcttct

SEQ ID NO: 1325360 - DNA, 25 bp, Homo sapien
gtctaagctgtaaatcttcttcccc

SEQ ID NO: 1325361 - DNA, 25 bp, Homo sapien
aaaatgcatatcaagagaacaaggt

SEQ ID NO: 1325362 - DNA, 25 bp, Homo sapien
aatgcatatcaagagaacaaggttc

SEQ ID NO: 1325363 - DNA, 25 bp, Homo sapien
atgcatatcaagagaacaaggttca

SEQ ID NO: 1325364 - DNA, 25 bp, Homo sapien
ctaaaatgcatatcaagagaacaag

SEQ ID NO: 1325365 - DNA, 25 bp, Homo sapien
cttcctggacccatgttcccagagt

SEQ ID NO: 1325366 - DNA, 25 bp, Homo sapien
cccatgttcccagagtgagggtcgg

SEQ ID NO: 1325367 - DNA, 25 bp, Homo sapien
ggaagtcccaagtcctctgctcatt

SEQ ID NO: 1325368 - DNA, 25 bp, Homo sapien
gtcgggaagtcccaagtcctctgct

SEQ ID NO: 1325369 - DNA, 25 bp, Homo sapien
tgcaggcagtgaacatttactgttc

SEQ ID NO: 1325370 - DNA, 25 bp, Homo sapien
ctgcaggcagtgaacatttactgtt

SEQ ID NO: 1325371 - DNA, 25 bp, Homo sapien
tgcatatgaaatcggctagtcctct

SEQ ID NO: 1325372 - DNA, 25 bp, Homo sapien
tgtagaagttccaaagcatttctgg

SEQ ID NO: 1325373 - DNA, 25 bp, Homo sapien
caatgccaagctgggacctgagccc

SEQ ID NO: 1325374 - DNA, 25 bp, Homo sapien
tgatctatttggactaacaatgcca

SEQ ID NO: 1325375 - DNA, 25 bp, Homo sapien
acactccctgaggatgatacccatt

SEQ ID NO: 1325376 - DNA, 25 bp, Homo sapien
ttgaggcccccaaattacacactcc

SEQ ID NO: 1325377 - DNA, 25 bp, Homo sapien
caaattacacactccctgaggatga

SEQ ID NO: 1325378 - DNA, 25 bp, Homo sapien
tccctgaggatgatacccatttctt

SEQ ID NO: 1325379 - DNA, 25 bp, Homo sapien
gcctgtcaaaaagggtccaagtgct

SEQ ID NO: 1325380 - DNA, 25 bp, Homo sapien
gcaaaccgatttttcagaggcaaca

SEQ ID NO: 1325381 - DNA, 25 bp, Homo sapien
ggtggtatggatagagcctgtcaaa

SEQ ID NO: 1325382 - DNA, 25 bp, Homo sapien
cctgggcaagtctctatgggttgag

SEQ ID NO: 1325383 - DNA, 25 bp, Homo sapien
ggccttgtggagcaacagcgcgccc

SEQ ID NO: 1325384 - DNA, 25 bp, Homo sapien
aggatctgggccttgtggagcaaca

SEQ ID NO: 1325385 - DNA, 25 bp, Homo sapien
ttgtggagcaacagcgcgccccagt

SEQ ID NO: 1325386 - DNA, 25 bp, Homo sapien
tctgggccttgtggagcaacagcgc

SEQ ID NO: 1325387 - DNA, 25 bp, Homo sapien
gctgaagtcgcgcacgcacgacacg

SEQ ID NO: 1325388 - DNA, 25 bp, Homo sapien
tccaggaaccgcacaaaggcgtaca

SEQ ID NO: 1325389 - DNA, 25 bp, Homo sapien
tggttgtcaaaatccagccgcgagc

SEQ ID NO: 1325390 - DNA, 25 bp, Homo sapien
agcgcgtagcagacgttgtcctcca

SEQ ID NO: 1325391 - DNA, 25 bp, Homo sapien
tattgttcctgaaagcaccgttctg

SEQ ID NO: 1325392 - DNA, 25 bp, Homo sapien
cactgttattgttcctgaaagcacc

SEQ ID NO: 1325393 - DNA, 25 bp, Homo sapien
ggcgggccccggtcgggcagctcag

SEQ ID NO: 1325394 - DNA, 25 bp, Homo sapien
cccactgttattgttcctgaaagca

SEQ ID NO: 1325395 - DNA, 25 bp, Homo sapien
tattgcttcaacaatcgcgctgcca

SEQ ID NO: 1325396 - DNA, 25 bp, Homo sapien
ggccttgcaaagtcagtgtaccaga

SEQ ID NO: 1325397 - DNA, 25 bp, Homo sapien
cattgattaaaaggtgcgctgcgtg

SEQ ID NO: 1325398 - DNA, 25 bp, Homo sapien
cagggatgcctcgtatcaaatatgg

SEQ ID NO: 1325399 - DNA, 25 bp, Homo sapien
gagtacagtatcacacccagaaagt

SEQ ID NO: 1325400 - DNA, 25 bp, Homo sapien
taatcgagagttatcctgtataccc

SEQ ID NO: 1325401 - DNA, 25 bp, Homo sapien
catatagtggtaagaataatcgaga

SEQ ID NO: 1325402 - DNA, 25 bp, Homo sapien
taacatcttgcatactagagtacag

SEQ ID NO: 1325403 - DNA, 25 bp, Homo sapien
taaagacatcccttggtctccagct

SEQ ID NO: 1325404 - DNA, 25 bp, Homo sapien
ccaccagccagagtaacctaattaa

SEQ ID NO: 1325405 - DNA, 25 bp, Homo sapien
tccagctggcactttctaacatcgt

SEQ ID NO: 1325406 - DNA, 25 bp, Homo sapien
cctaattaaagcacaaaatgagcta

SEQ ID NO: 1325407 - DNA, 25 bp, Homo sapien
gcttttgaatgttccccatgcagat

SEQ ID NO: 1325408 - DNA, 25 bp, Homo sapien
tatccagccaatttatagcttttga

SEQ ID NO: 1325409 - DNA, 25 bp, Homo sapien
gcagatgtgcaggattcttgcacac

SEQ ID NO: 1325410 - DNA, 25 bp, Homo sapien
agatgtgcaggattcttgcacacat

SEQ ID NO: 1325411 - DNA, 25 bp, Homo sapien
ttcctgtgtagacttctttgctcct

SEQ ID NO: 1325412 - DNA, 25 bp, Homo sapien
tcttcctgtgtagacttctttgctc

SEQ ID NO: 1325413 - DNA, 25 bp, Homo sapien
tctcttctggctctgatggagacat

SEQ ID NO: 1325414 - DNA, 25 bp, Homo sapien
tattcttcctgtgtagacttctttg

SEQ ID NO: 1325415 - DNA, 25 bp, Homo sapien
gagagtctgcagtcttaccggaaac

SEQ ID NO: 1325416 - DNA, 25 bp, Homo sapien
gaaagtgcagcacctaggactaacc

SEQ ID NO: 1325417 - DNA, 25 bp, Homo sapien
cacactgatgagcttgagttctccc

SEQ ID NO: 1325418 - DNA, 25 bp, Homo sapien
gcttgcagatgcacctgggagatgc

SEQ ID NO: 1325419 - DNA, 25 bp, Homo sapien
tcttgagtaactactgtgtgcagac

SEQ ID NO: 1325420 - DNA, 25 bp, Homo sapien
tgctatcgttttcttggctctcaga

SEQ ID NO: 1325421 - DNA, 25 bp, Homo sapien
agttctgcatgcttccttgtttagg

SEQ ID NO: 1325422 - DNA, 25 bp, Homo sapien
ggctccatgtccttgctctggataa

SEQ ID NO: 1325423 - DNA, 25 bp, Homo sapien
attgaaccataccttcacaaagccc

SEQ ID NO: 1325424 - DNA, 25 bp, Homo sapien
tttgtcatcattgaaccataccttc

SEQ ID NO: 1325425 - DNA, 25 bp, Homo sapien
tgaaagttgttgcatgttcagcatc

SEQ ID NO: 1325426 - DNA, 25 bp, Homo sapien
agccccagattcctaacttggtgaa

SEQ ID NO: 1325427 - DNA, 25 bp, Homo sapien
ttcttcagaaccagggtgctggtgg

SEQ ID NO: 1325428 - DNA, 25 bp, Homo sapien
ggtggcggctggctttctttaccag

SEQ ID NO: 1325429 - DNA, 25 bp, Homo sapien
tgctggtggcggctggctttcttta

SEQ ID NO: 1325430 - DNA, 25 bp, Homo sapien
tctttcttcagaaccagggtgctgg

SEQ ID NO: 1325431 - DNA, 25 bp, Homo sapien
gagtttgtttatcattcctgaattc

SEQ ID NO: 1325432 - DNA, 25 bp, Homo sapien
tgagtttgtttatcattcctgaatt

SEQ ID NO: 1325433 - DNA, 25 bp, Homo sapien
agtttacattctgacatgtatacaa

SEQ ID NO: 1325434 - DNA, 25 bp, Homo sapien
atgagtttgtttatcattcctgaat

SEQ ID NO: 1325435 - DNA, 25 bp, Homo sapien
cagcaatctcatcttttgaaatggc

SEQ ID NO: 1325436 - DNA, 25 bp, Homo sapien
atctcatcttttgaaatggcttcct

SEQ ID NO: 1325437 - DNA, 25 bp, Homo sapien
atttcccatcattccagcaatctca

SEQ ID NO: 1325438 - DNA, 25 bp, Homo sapien
tccagcaatctcatcttttgaaatg

SEQ ID NO: 1325439 - DNA, 25 bp, Homo sapien
aatctacctccagaaactgagaggt

SEQ ID NO: 1325440 - DNA, 25 bp, Homo sapien
tcaatctacctccagaaactgagag

SEQ ID NO: 1325441 - DNA, 25 bp, Homo sapien
caatctacctccagaaactgagagg

SEQ ID NO: 1325442 - DNA, 25 bp, Homo sapien
tgcttcctgctccataccctctttc

SEQ ID NO: 1325443 - DNA, 25 bp, Homo sapien
gcttcctgctccataccctctttct

SEQ ID NO: 1325444 - DNA, 25 bp, Homo sapien
atcagaagaactgccacttgtagct

SEQ ID NO: 1325445 - DNA, 25 bp, Homo sapien
gcactgtgaagtctgccgtattgtg

SEQ ID NO: 1325446 - DNA, 25 bp, Homo sapien
caattttctcattttgctaactcga

SEQ ID NO: 1325447 - DNA, 25 bp, Homo sapien
gaagtctgccgtattgtgtccacaa

SEQ ID NO: 1325448 - DNA, 25 bp, Homo sapien
gctaactcgagattgggaattctga

SEQ ID NO: 1325449 - DNA, 25 bp, Homo sapien
tttgatatttgtcctgtggcaccag

SEQ ID NO: 1325450 - DNA, 25 bp, Homo sapien
ggcaccagagcccttatccgtagtg

SEQ ID NO: 1325451 - DNA, 25 bp, Homo sapien
tgagaacacttacacagcagcccat

SEQ ID NO: 1325452 - DNA, 25 bp, Homo sapien
tgatatttgtcctgtggcaccagag

SEQ ID NO: 1325453 - DNA, 25 bp, Homo sapien
attgtgttcacgtggacagttcata

SEQ ID NO: 1325454 - DNA, 25 bp, Homo sapien
ccttatggtataacagggagattta

SEQ ID NO: 1325455 - DNA, 25 bp, Homo sapien
actgccttatggtataacagggaga

SEQ ID NO: 1325456 - DNA, 25 bp, Homo sapien
gacagttcatataatctcatagcag

SEQ ID NO: 1325457 - DNA, 25 bp, Homo sapien
tgcaaaagagtaaagttagactcct

SEQ ID NO: 1325458 - DNA, 25 bp, Homo sapien
cctaaatttaagagataaagctata

SEQ ID NO: 1325459 - DNA, 25 bp, Homo sapien
aaaattcttagaagagagcataggt

SEQ ID NO: 1325460 - DNA, 25 bp, Homo sapien
aacaatttgacaagatggacaacat

SEQ ID NO: 1325461 - DNA, 25 bp, Homo sapien
tcccagtctatgactggccacatca

SEQ ID NO: 1325462 - DNA, 25 bp, Homo sapien
tcagacaagccagtacctcctactg

SEQ ID NO: 1325463 - DNA, 25 bp, Homo sapien
cacactgcagttctgttgttgaaga

SEQ ID NO: 1325464 - DNA, 25 bp, Homo sapien
tactggcagcgcaagaaaggtagca

SEQ ID NO: 1325465 - DNA, 25 bp, Homo sapien
ctgccgtatgaccactgtgccacac

SEQ ID NO: 1325466 - DNA, 25 bp, Homo sapien
agtccagtaaccaaagtgttaatgc

SEQ ID NO: 1325467 - DNA, 25 bp, Homo sapien
tatgaccactgtgccacactagctc

SEQ ID NO: 1325468 - DNA, 25 bp, Homo sapien
tccccacagtccagtaaccaaagtg

SEQ ID NO: 1325469 - DNA, 25 bp, Homo sapien
gctggttatcgtcaggaggtcaagc

SEQ ID NO: 1325470 - DNA, 25 bp, Homo sapien
cagggctggttatcgtcaggaggtc

SEQ ID NO: 1325471 - DNA, 25 bp, Homo sapien
ttatcgtcaggaggtcaagctttcg

SEQ ID NO: 1325472 - DNA, 25 bp, Homo sapien
tcaggaggtcaagctttcgttgttg

SEQ ID NO: 1325473 - DNA, 25 bp, Homo sapien
ggtcagggcggacaagcaaagagga

SEQ ID NO: 1325474 - DNA, 25 bp, Homo sapien
cagggcggacaagcaaagaggatgt

SEQ ID NO: 1325475 - DNA, 25 bp, Homo sapien
gccaaaattgtgcttagcaggtcag

SEQ ID NO: 1325476 - DNA, 25 bp, Homo sapien
caggtcagggcggacaagcaaagag

SEQ ID NO: 1325477 - DNA, 25 bp, Homo sapien
caattctgcagagagggtttgtacc

SEQ ID NO: 1325478 - DNA, 25 bp, Homo sapien
ttccaattctgcagagagggtttgt

SEQ ID NO: 1325479 - DNA, 25 bp, Homo sapien
ccaattctgcagagagggtttgtac

SEQ ID NO: 1325480 - DNA, 25 bp, Homo sapien
tccaattctgcagagagggtttgta

SEQ ID NO: 1325481 - DNA, 25 bp, Homo sapien
ctttaacccaccgatcactgacata

SEQ ID NO: 1325482 - DNA, 25 bp, Homo sapien
gcccctttaacccaccgatcactga

SEQ ID NO: 1325483 - DNA, 25 bp, Homo sapien
ccaccgatcactgacatatgtgtgc

SEQ ID NO: 1325484 - DNA, 25 bp, Homo sapien
aacccaccgatcactgacatatgtg

SEQ ID NO: 1325485 - DNA, 25 bp, Homo sapien
tgcgtggtagaagagaatagtcact

SEQ ID NO: 1325486 - DNA, 25 bp, Homo sapien
gctttctgtgtttcgtgcaagatag

SEQ ID NO: 1325487 - DNA, 25 bp, Homo sapien
tcccagaatgagaagggacgtgttg

SEQ ID NO: 1325488 - DNA, 25 bp, Homo sapien
gctcagtggctggtttgatgtgtgg

SEQ ID NO: 1325489 - DNA, 25 bp, Homo sapien
gctcctgcccttgacaagatcttct

SEQ ID NO: 1325490 - DNA, 25 bp, Homo sapien
ttgctgaacaactgatgggcagcat

SEQ ID NO: 1325491 - DNA, 25 bp, Homo sapien
ttgacaagatcttctttctacctct

SEQ ID NO: 1325492 - DNA, 25 bp, Homo sapien
tccttttgctgaacaactgatgggc

SEQ ID NO: 1325493 - DNA, 25 bp, Homo sapien
tcccagataacaccttgcctcaact

SEQ ID NO: 1325494 - DNA, 25 bp, Homo sapien
tttcccagataacaccttgcctcaa

SEQ ID NO: 1325495 - DNA, 25 bp, Homo sapien
ccagataacaccttgcctcaactcc

SEQ ID NO: 1325496 - DNA, 25 bp, Homo sapien
ggctttcccagataacaccttgcct

SEQ ID NO: 1325497 - DNA, 25 bp, Homo sapien
cttggtccactgactgatatctgga

SEQ ID NO: 1325498 - DNA, 25 bp, Homo sapien
tatctggatgccatacccgatcacc

SEQ ID NO: 1325499 - DNA, 25 bp, Homo sapien
gactgatatctggatgccatacccg

SEQ ID NO: 1325500 - DNA, 25 bp, Homo sapien
tccactgactgatatctggatgcca

SEQ ID NO: 1325501 - DNA, 25 bp, Homo sapien
gcccagaggtctttacaattccaaa

SEQ ID NO: 1325502 - DNA, 25 bp, Homo sapien
tttattaaaagcactaaggcgggca

SEQ ID NO: 1325503 - DNA, 25 bp, Homo sapien
taaaagcactaaggcgggcagtgct

SEQ ID NO: 1325504 - DNA, 25 bp, Homo sapien
aagcccagaggtctttacaattcca

SEQ ID NO: 1325505 - DNA, 25 bp, Homo sapien
aagttatatcacatcctcttttatg

SEQ ID NO: 1325506 - DNA, 25 bp, Homo sapien
agtttctaacaactcagcaaattcc

SEQ ID NO: 1325507 - DNA, 25 bp, Homo sapien
catatgtagtttctaacaactcagc

SEQ ID NO: 1325508 - DNA, 25 bp, Homo sapien
tagtctttcacatatgtagtttcta

SEQ ID NO: 1325509 - DNA, 25 bp, Homo sapien
gatacagcatgttcagattagagag

SEQ ID NO: 1325510 - DNA, 25 bp, Homo sapien
gaagccattagatacagcatgttca

SEQ ID NO: 1325511 - DNA, 25 bp, Homo sapien
gcatgttcagattagagagagagat

SEQ ID NO: 1325512 - DNA, 25 bp, Homo sapien
gccattagatacagcatgttcagat

SEQ ID NO: 1325513 - DNA, 25 bp, Homo sapien
gagcagactcccctgatgctccgtg

SEQ ID NO: 1325514 - DNA, 25 bp, Homo sapien
ccgtgatgagtcaagggtaaaggca

SEQ ID NO: 1325515 - DNA, 25 bp, Homo sapien
ggcagtgactgaagctctcaggaag

SEQ ID NO: 1325516 - DNA, 25 bp, Homo sapien
gaagctctcaggaagcaccactgtg

SEQ ID NO: 1325517 - DNA, 25 bp, Homo sapien
tcgtgctgacaagcctagagttaag

SEQ ID NO: 1325518 - DNA, 25 bp, Homo sapien
ctaatgagctaatggcgcagccggg

SEQ ID NO: 1325519 - DNA, 25 bp, Homo sapien
gcctagagttaagcaggtccactgc

SEQ ID NO: 1325520 - DNA, 25 bp, Homo sapien
gggcactgccttattggattgctgg

SEQ ID NO: 1325521 - DNA, 25 bp, Homo sapien
cgtcagcacagctgtataccaattt

SEQ ID NO: 1325522 - DNA, 25 bp, Homo sapien
ggcgtcagcacagctgtataccaat

SEQ ID NO: 1325523 - DNA, 25 bp, Homo sapien
ctgggcgtcagcacagctgtatacc

SEQ ID NO: 1325524 - DNA, 25 bp, Homo sapien
gggcgtcagcacagctgtataccaa

SEQ ID NO: 1325525 - DNA, 25 bp, Homo sapien
tgaagctttgaccaaacttggtctc

SEQ ID NO: 1325526 - DNA, 25 bp, Homo sapien
ggtgaagctttgaccaaacttggtc

SEQ ID NO: 1325527 - DNA, 25 bp, Homo sapien
gctggtgaagctttgaccaaacttg

SEQ ID NO: 1325528 - DNA, 25 bp, Homo sapien
tggtgaagctttgaccaaacttggt

SEQ ID NO: 1325529 - DNA, 25 bp, Homo sapien
agcttctgcgagaagcatccactga

SEQ ID NO: 1325530 - DNA, 25 bp, Homo sapien
ctgcgagaagcatccactgacagga

SEQ ID NO: 1325531 - DNA, 25 bp, Homo sapien
cttctgcgagaagcatccactgaca

SEQ ID NO: 1325532 - DNA, 25 bp, Homo sapien
tctgcgagaagcatccactgacagg

SEQ ID NO: 1325533 - DNA, 25 bp, Homo sapien
caccaataaccttctccagacctgg

SEQ ID NO: 1325534 - DNA, 25 bp, Homo sapien
tgcctacattcaccaataaccttct

SEQ ID NO: 1325535 - DNA, 25 bp, Homo sapien
ctccagacctggatccttctcttgc

SEQ ID NO: 1325536 - DNA, 25 bp, Homo sapien
tccagacctggatccttctcttgcc

SEQ ID NO: 1325537 - DNA, 25 bp, Homo sapien
tgtcagactcaaaaagcaggcaact

SEQ ID NO: 1325538 - DNA, 25 bp, Homo sapien
tcaggcttcagcacattattgccta

SEQ ID NO: 1325539 - DNA, 25 bp, Homo sapien
aacccaggtccttaggaaatcactg

SEQ ID NO: 1325540 - DNA, 25 bp, Homo sapien
gaaatcactgctgttaccttccata

SEQ ID NO: 1325541 - DNA, 25 bp, Homo sapien
ttccaagtacacatctggaaactga

SEQ ID NO: 1325542 - DNA, 25 bp, Homo sapien
tgaggaaccaggaaattagaaatgt

SEQ ID NO: 1325543 - DNA, 25 bp, Homo sapien
ctaaagtggacgtttcatctgagga

SEQ ID NO: 1325544 - DNA, 25 bp, Homo sapien
tacaagactcttgaaaccccttgcc

SEQ ID NO: 1325545 - DNA, 25 bp, Homo sapien
cctgaccctggctctaattggatct

SEQ ID NO: 1325546 - DNA, 25 bp, Homo sapien
gatggaggcccactcgtgtgcctga

SEQ ID NO: 1325547 - DNA, 25 bp, Homo sapien
tctccgagcaatatccactccttgg

SEQ ID NO: 1325548 - DNA, 25 bp, Homo sapien
tccttggtttatccaaatctgtgtg

SEQ ID NO: 1325549 - DNA, 25 bp, Homo sapien
gcacctggttctcctagacgatgga

SEQ ID NO: 1325550 - DNA, 25 bp, Homo sapien
tcaaagtatggttgccagctcaaaa

SEQ ID NO: 1325551 - DNA, 25 bp, Homo sapien
caaagtatggttgccagctcaaaat

SEQ ID NO: 1325552 - DNA, 25 bp, Homo sapien
agtatggttgccagctcaaaatcat

SEQ ID NO: 1325553 - DNA, 25 bp, Homo sapien
tttcaaagtatggttgccagctcaa

SEQ ID NO: 1325554 - DNA, 25 bp, Homo sapien
aaaatccactgtgtttccttatact

SEQ ID NO: 1325555 - DNA, 25 bp, Homo sapien
tgagcactatttccaaaatccactg

SEQ ID NO: 1325556 - DNA, 25 bp, Homo sapien
agcactatttccaaaatccactgtg

SEQ ID NO: 1325557 - DNA, 25 bp, Homo sapien
tccactgtgtttccttatacttcat

SEQ ID NO: 1325558 - DNA, 25 bp, Homo sapien
caaagtttgtcattcggtgcctggc

SEQ ID NO: 1325559 - DNA, 25 bp, Homo sapien
acaaagtttgtcattcggtgcctgg

SEQ ID NO: 1325560 - DNA, 25 bp, Homo sapien
aacaaagtttgtcattcggtgcctg

SEQ ID NO: 1325561 - DNA, 25 bp, Homo sapien
gataagaaccttatttgaataggaa

SEQ ID NO: 1325562 - DNA, 25 bp, Homo sapien
gaaccttatttgaataggaatggaa

SEQ ID NO: 1325563 - DNA, 25 bp, Homo sapien
ggccatgataagaaccttatttgaa

SEQ ID NO: 1325564 - DNA, 25 bp, Homo sapien
gaatggattctaggggcaagaagta

SEQ ID NO: 1325565 - DNA, 25 bp, Homo sapien
ttttgcagtgacctgtgcttctcat

SEQ ID NO: 1325566 - DNA, 25 bp, Homo sapien
tctcatcactatgggtaacatcaca

SEQ ID NO: 1325567 - DNA, 25 bp, Homo sapien
gagggtcctctccatgaacactttt

SEQ ID NO: 1325568 - DNA, 25 bp, Homo sapien
gggaacattcgaatgcaagttcagg

SEQ ID NO: 1325569 - DNA, 25 bp, Homo sapien
tcaggcccatcatggactgaagcaa

SEQ ID NO: 1325570 - DNA, 25 bp, Homo sapien
ctgaagcaaggtcattttctgaata

SEQ ID NO: 1325571 - DNA, 25 bp, Homo sapien
aggcccatcatggactgaagcaagg

SEQ ID NO: 1325572 - DNA, 25 bp, Homo sapien
ggactgaagcaaggtcattttctga

SEQ ID NO: 1325573 - DNA, 25 bp, Homo sapien
ttcctcacagttactcgtgtatgag

SEQ ID NO: 1325574 - DNA, 25 bp, Homo sapien
tactcgtgtatgagtcttgcctccc

SEQ ID NO: 1325575 - DNA, 25 bp, Homo sapien
gcctcccacactagactgggtgctt

SEQ ID NO: 1325576 - DNA, 25 bp, Homo sapien
tcttttagggtagatacagctgttg

SEQ ID NO: 1325577 - DNA, 25 bp, Homo sapien
ctctcttttctggagagccaggtcc

SEQ ID NO: 1325578 - DNA, 25 bp, Homo sapien
ctcttttctggagagccaggtccat

SEQ ID NO: 1325579 - DNA, 25 bp, Homo sapien
tctcttttctggagagccaggtcca

SEQ ID NO: 1325580 - DNA, 25 bp, Homo sapien
tgggtgttattgatgcagcttccca

SEQ ID NO: 1325581 - DNA, 25 bp, Homo sapien
tcatgtgggtgttattgatgcagct

SEQ ID NO: 1325582 - DNA, 25 bp, Homo sapien
tgtgacagctgtaccccctcagcat

SEQ ID NO: 1325583 - DNA, 25 bp, Homo sapien
tctggagtcatcaggggcatgcctg

SEQ ID NO: 1325584 - DNA, 25 bp, Homo sapien
gtaatgaaatagtaaccagcttctg

SEQ ID NO: 1325585 - DNA, 25 bp, Homo sapien
aatagtaaccagcttctgaagggct

SEQ ID NO: 1325586 - DNA, 25 bp, Homo sapien
aagtgaatgtaatgaaatagtaacc

SEQ ID NO: 1325587 - DNA, 25 bp, Homo sapien
tgaatgtaatgaaatagtaaccagc

SEQ ID NO: 1325588 - DNA, 25 bp, Homo sapien
gaagcagttttagtctcctctacag

SEQ ID NO: 1325589 - DNA, 25 bp, Homo sapien
agtttctgagccagtcctaacaggg

SEQ ID NO: 1325590 - DNA, 25 bp, Homo sapien
cctctacaggtggagtcttgttgtc

SEQ ID NO: 1325591 - DNA, 25 bp, Homo sapien
gattctgcaggcactaccacttcca

SEQ ID NO: 1325592 - DNA, 25 bp, Homo sapien
ggtacccttgacaggtgatcatctg

SEQ ID NO: 1325593 - DNA, 25 bp, Homo sapien
cagcccttgggcctgtaaacaactt

SEQ ID NO: 1325594 - DNA, 25 bp, Homo sapien
taaacaacttcatggaacctcatcc

SEQ ID NO: 1325595 - DNA, 25 bp, Homo sapien
cagaagccatcctgtggtacccttg

SEQ ID NO: 1325596 - DNA, 25 bp, Homo sapien
gcagccagatgagcctttacccact

SEQ ID NO: 1325597 - DNA, 25 bp, Homo sapien
ctgaacactttcaggccctcagact

SEQ ID NO: 1325598 - DNA, 25 bp, Homo sapien
tgcctgtaggatgtaacagaaaatc

SEQ ID NO: 1325599 - DNA, 25 bp, Homo sapien
agttcttagcaagggtgagcctgag

SEQ ID NO: 1325600 - DNA, 25 bp, Homo sapien
tctttaattcggcattcaaggccct

SEQ ID NO: 1325601 - DNA, 25 bp, Homo sapien
gaaggaaagccagctagacagcgtc

SEQ ID NO: 1325602 - DNA, 25 bp, Homo sapien
taagggtcacaatgatcatactgcc

SEQ ID NO: 1325603 - DNA, 25 bp, Homo sapien
gacagcgtcttcttatcaggaaggt

SEQ ID NO: 1325604 - DNA, 25 bp, Homo sapien
gctgctcccgaaagaagtaatccat

SEQ ID NO: 1325605 - DNA, 25 bp, Homo sapien
agctgctcccgaaagaagtaatcca

SEQ ID NO: 1325606 - DNA, 25 bp, Homo sapien
tatgggtagcagtaagcaaactggt

SEQ ID NO: 1325607 - DNA, 25 bp, Homo sapien
ggtaaatatcttcttctcggtcaaa

SEQ ID NO: 1325608 - DNA, 25 bp, Homo sapien
tccgggcagcggtagtagtaaacat

SEQ ID NO: 1325609 - DNA, 25 bp, Homo sapien
tagttcttcctatggtccgggcagc

SEQ ID NO: 1325610 - DNA, 25 bp, Homo sapien
cagaggaaaaagtggaagatgaaga

SEQ ID NO: 1325611 - DNA, 25 bp, Homo sapien
agaggaaaaagtggaagatgaagag

SEQ ID NO: 1325612 - DNA, 25 bp, Homo sapien
gaggaaaaagtggaagatgaagagg

SEQ ID NO: 1325613 - DNA, 25 bp, Homo sapien
aggaaaaagtggaagatgaagaggt

SEQ ID NO: 1325614 - DNA, 25 bp, Homo sapien
cttttaagcaacttcctatcctcac

SEQ ID NO: 1325615 - DNA, 25 bp, Homo sapien
tgatggccttgtgattccagcatca

SEQ ID NO: 1325616 - DNA, 25 bp, Homo sapien
ggccttgtgattccagcatcatcat

SEQ ID NO: 1325617 - DNA, 25 bp, Homo sapien
tggcccacaaggcttcctgtgatgg

SEQ ID NO: 1325618 - DNA, 25 bp, Homo sapien
tcagtttggcccacaaggcttcctg

SEQ ID NO: 1325619 - DNA, 25 bp, Homo sapien
ccatagctaagatcaaagagaatcc

SEQ ID NO: 1325620 - DNA, 25 bp, Homo sapien
ttggacacctcattggtctcctatc

SEQ ID NO: 1325621 - DNA, 25 bp, Homo sapien
ccagagactatcttgtggatccaaa

SEQ ID NO: 1325622 - DNA, 25 bp, Homo sapien
aaacacagagcttggacacctcatt

SEQ ID NO: 1325623 - DNA, 25 bp, Homo sapien
agtttactttacctagacccatcag

SEQ ID NO: 1325624 - DNA, 25 bp, Homo sapien
catgagttgcaaaatggatgtagcg

SEQ ID NO: 1325625 - DNA, 25 bp, Homo sapien
aataacttgttaatccatgagttgc

SEQ ID NO: 1325626 - DNA, 25 bp, Homo sapien
actgcgcccagacacaaatgttctt

SEQ ID NO: 1325627 - DNA, 25 bp, Homo sapien
taggcttaaagtctagtcctctttc

SEQ ID NO: 1325628 - DNA, 25 bp, Homo sapien
taattgaaatagaatgtgcaggtgc

SEQ ID NO: 1325629 - DNA, 25 bp, Homo sapien
tcaagttacaggagataaggacttc

SEQ ID NO: 1325630 - DNA, 25 bp, Homo sapien
tcagggtaatatgacatgtatccag

SEQ ID NO: 1325631 - DNA, 25 bp, Homo sapien
agtggtcgccaggtactatgttaga

SEQ ID NO: 1325632 - DNA, 25 bp, Homo sapien
tggtcgccaggtactatgttagaac

SEQ ID NO: 1325633 - DNA, 25 bp, Homo sapien
ggtcgccaggtactatgttagaact

SEQ ID NO: 1325634 - DNA, 25 bp, Homo sapien
tcagtggtcgccaggtactatgtta

SEQ ID NO: 1325635 - DNA, 25 bp, Homo sapien
atcattacagccaacccaaacatct

SEQ ID NO: 1325636 - DNA, 25 bp, Homo sapien
tcattacagccaacccaaacatctg

SEQ ID NO: 1325637 - DNA, 25 bp, Homo sapien
cctgccattcttcttgctgaagact

SEQ ID NO: 1325638 - DNA, 25 bp, Homo sapien
tgccattcttcttgctgaagactgt

SEQ ID NO: 1325639 - DNA, 25 bp, Homo sapien
ccattcttcttgctgaagactgtca

SEQ ID NO: 1325640 - DNA, 25 bp, Homo sapien
tcaggcctgccattcttcttgctga

SEQ ID NO: 1325641 - DNA, 25 bp, Homo sapien
acacatactgcaatgttccaaccat

SEQ ID NO: 1325642 - DNA, 25 bp, Homo sapien
gaagcacacatactgcaatgttcca

SEQ ID NO: 1325643 - DNA, 25 bp, Homo sapien
tctgtccacggggaagcacacatac

SEQ ID NO: 1325644 - DNA, 25 bp, Homo sapien
ctgaagtctgtccacggggaagcac

SEQ ID NO: 1325645 - DNA, 25 bp, Homo sapien
gtgcagagctgaccattcaactggt

SEQ ID NO: 1325646 - DNA, 25 bp, Homo sapien
taaattttgagcaactggagaactt

SEQ ID NO: 1325647 - DNA, 25 bp, Homo sapien
gatactccacaggtttcatcttccc

SEQ ID NO: 1325648 - DNA, 25 bp, Homo sapien
gcacaaggagcttgcttagctccct

SEQ ID NO: 1325649 - DNA, 25 bp, Homo sapien
cactctgctgatgtctctgctgctg

SEQ ID NO: 1325650 - DNA, 25 bp, Homo sapien
agccgctggggaccaggtggcacaa

SEQ ID NO: 1325651 - DNA, 25 bp, Homo sapien
gccgctggggaccaggtggcacaac

SEQ ID NO: 1325652 - DNA, 25 bp, Homo sapien
tctgctgctgtcagcagccgctggg

SEQ ID NO: 1325653 - DNA, 25 bp, Homo sapien
actcacagattgcctggccagttaa

SEQ ID NO: 1325654 - DNA, 25 bp, Homo sapien
aatagctggttatatcttgccccat

SEQ ID NO: 1325655 - DNA, 25 bp, Homo sapien
cctggccagttaaatagctggttat

SEQ ID NO: 1325656 - DNA, 25 bp, Homo sapien
gttaaatagctggttatatcttgcc

SEQ ID NO: 1325657 - DNA, 25 bp, Homo sapien
gaaagcctcaaactgaagatgacag

SEQ ID NO: 1325658 - DNA, 25 bp, Homo sapien
acatggaaagcctcaaactgaagat

SEQ ID NO: 1325659 - DNA, 25 bp, Homo sapien
ctacagcaggcctacatcttcaggt

SEQ ID NO: 1325660 - DNA, 25 bp, Homo sapien
cctacatcttcaggtttcacatgga

SEQ ID NO: 1325661 - DNA, 25 bp, Homo sapien
gtacactctgttcccatggatggcc

SEQ ID NO: 1325662 - DNA, 25 bp, Homo sapien
tacctccgcagccttgtacactctg

SEQ ID NO: 1325663 - DNA, 25 bp, Homo sapien
ctgtctctccaaactcatccttaaa

SEQ ID NO: 1325664 - DNA, 25 bp, Homo sapien
tcctgtaaggccacgatccacacca

SEQ ID NO: 1325665 - DNA, 25 bp, Homo sapien
actctgtataatttccttgtttata

SEQ ID NO: 1325666 - DNA, 25 bp, Homo sapien
cccaaatgccagttttatgagtgtt

SEQ ID NO: 1325667 - DNA, 25 bp, Homo sapien
tgtatgttggtagggccttttggct

SEQ ID NO: 1325668 - DNA, 25 bp, Homo sapien
tgcctggcccgatgtatgttggtag

SEQ ID NO: 1325669 - DNA, 25 bp, Homo sapien
ctcattcctgctcttgattctttta

SEQ ID NO: 1325670 - DNA, 25 bp, Homo sapien
gagttactccactcaacctcattcc

SEQ ID NO: 1325671 - DNA, 25 bp, Homo sapien
actcaacctcattcctgctcttgat

SEQ ID NO: 1325672 - DNA, 25 bp, Homo sapien
gttactccactcaacctcattcctg

SEQ ID NO: 1325673 - DNA, 25 bp, Homo sapien
catgcaggcaagatgtctctcaggg

SEQ ID NO: 1325674 - DNA, 25 bp, Homo sapien
ctctcagggatagaaaaacaacatt

SEQ ID NO: 1325675 - DNA, 25 bp, Homo sapien
cacttagaagtaccctgccaaatgg

SEQ ID NO: 1325676 - DNA, 25 bp, Homo sapien
taatatgaccatggaaatagcagca

SEQ ID NO: 1325677 - DNA, 25 bp, Homo sapien
tgtcataggataatcatagtttctt

SEQ ID NO: 1325678 - DNA, 25 bp, Homo sapien
taggataatcatagtttctttgaaa

SEQ ID NO: 1325679 - DNA, 25 bp, Homo sapien
cataggataatcatagtttctttga

SEQ ID NO: 1325680 - DNA, 25 bp, Homo sapien
tcataggataatcatagtttctttg

SEQ ID NO: 1325681 - DNA, 25 bp, Homo sapien
gtgggcttaaccctggaaggcacca

SEQ ID NO: 1325682 - DNA, 25 bp, Homo sapien
ggcaaatgtgggcttaaccctggaa

SEQ ID NO: 1325683 - DNA, 25 bp, Homo sapien
caagaacagtcaagtgtttagtgac

SEQ ID NO: 1325684 - DNA, 25 bp, Homo sapien
tcaagtgtttagtgaccaagacatt

SEQ ID NO: 1325685 - DNA, 25 bp, Homo sapien
gcagcctctgttagaagagcactaa

SEQ ID NO: 1325686 - DNA, 25 bp, Homo sapien
gagccctttccctgcttatagctgt

SEQ ID NO: 1325687 - DNA, 25 bp, Homo sapien
tgactcaacgtctggtgagagccct

SEQ ID NO: 1325688 - DNA, 25 bp, Homo sapien
tccaaggtcaaagtgagggctgact

SEQ ID NO: 1325689 - DNA, 25 bp, Homo sapien
ctgcacgtggtcctgtttaaagaaa

SEQ ID NO: 1325690 - DNA, 25 bp, Homo sapien
gcaaatgttcagctccagaaatagc

SEQ ID NO: 1325691 - DNA, 25 bp, Homo sapien
ccacgcaggttctcggcatatttat

SEQ ID NO: 1325692 - DNA, 25 bp, Homo sapien
caagcagggtaagaaccacgcaggt

SEQ ID NO: 1325693 - DNA, 25 bp, Homo sapien
tcccatctctatagagactcttggt

SEQ ID NO: 1325694 - DNA, 25 bp, Homo sapien
gagactcttggttttactgaagtta

SEQ ID NO: 1325695 - DNA, 25 bp, Homo sapien
gatttcaccataggggccatcccat

SEQ ID NO: 1325696 - DNA, 25 bp, Homo sapien
tgctggtagatttcaccataggggc

SEQ ID NO: 1325697 - DNA, 25 bp, Homo sapien
tgaaaaagaaagagggagaagttca

SEQ ID NO: 1325698 - DNA, 25 bp, Homo sapien
tccattccaggtataggccaaagag

SEQ ID NO: 1325699 - DNA, 25 bp, Homo sapien
taaaggtatcgtgaacagcctgcgt

SEQ ID NO: 1325700 - DNA, 25 bp, Homo sapien
tgcgtgcagtcctaaagagtggcct

SEQ ID NO: 1325701 - DNA, 25 bp, Homo sapien
gagtactgcccatcctgaccaaggg

SEQ ID NO: 1325702 - DNA, 25 bp, Homo sapien
tttgaatttgctagcctaacctggc

SEQ ID NO: 1325703 - DNA, 25 bp, Homo sapien
cagagccctaagaaagttgtcagcc

SEQ ID NO: 1325704 - DNA, 25 bp, Homo sapien
tgtcagaagaagtcgacccaggcca

SEQ ID NO: 1325705 - DNA, 25 bp, Homo sapien
tgctgtgtaggcaggaacgtctgcc

SEQ ID NO: 1325706 - DNA, 25 bp, Homo sapien
ctgaataattatccaacagagcttg

SEQ ID NO: 1325707 - DNA, 25 bp, Homo sapien
tctgaataattatccaacagagctt

SEQ ID NO: 1325708 - DNA, 25 bp, Homo sapien
agcagcctgacctacaacttgtatt

SEQ ID NO: 1325709 - DNA, 25 bp, Homo sapien
tccagcagcctgacctacaacttgt

SEQ ID NO: 1325710 - DNA, 25 bp, Homo sapien
tctttagtggcagcccattacattt

SEQ ID NO: 1325711 - DNA, 25 bp, Homo sapien
agtggcagcccattacatttttgca

SEQ ID NO: 1325712 - DNA, 25 bp, Homo sapien
aaaatctttagtggcagcccattac

SEQ ID NO: 1325713 - DNA, 25 bp, Homo sapien
ttagtggcagcccattacatttttg

SEQ ID NO: 1325714 - DNA, 25 bp, Homo sapien
tataaactgtgaggagctcttttac

SEQ ID NO: 1325715 - DNA, 25 bp, Homo sapien
tcataaggaccaaatgagatagctg

SEQ ID NO: 1325716 - DNA, 25 bp, Homo sapien
cataaggaccaaatgagatagctga

SEQ ID NO: 1325717 - DNA, 25 bp, Homo sapien
tattccaatgggaaagttttcagag

SEQ ID NO: 1325718 - DNA, 25 bp, Homo sapien
gagtgtgccctatacaatgagataa

SEQ ID NO: 1325719 - DNA, 25 bp, Homo sapien
agcacaagtgtcaccaggattttgg

SEQ ID NO: 1325720 - DNA, 25 bp, Homo sapien
taatgtttttcgtggatggtggaca

SEQ ID NO: 1325721 - DNA, 25 bp, Homo sapien
ggacagattgaaaccgttgatcatc

SEQ ID NO: 1325722 - DNA, 25 bp, Homo sapien
gattgaaaccgttgatcatctgggt

SEQ ID NO: 1325723 - DNA, 25 bp, Homo sapien
ccgttgatcatctgggtctgatcag

SEQ ID NO: 1325724 - DNA, 25 bp, Homo sapien
gtgcaggacagattgaaaccgttga

SEQ ID NO: 1325725 - DNA, 25 bp, Homo sapien
ggcagagaatatcagctcccagcag

SEQ ID NO: 1325726 - DNA, 25 bp, Homo sapien
tgatggctgcttaatctgcactggg

SEQ ID NO: 1325727 - DNA, 25 bp, Homo sapien
tttgatacccatagcaccaggagca

SEQ ID NO: 1325728 - DNA, 25 bp, Homo sapien
tcggcagtggcccttcatgtgatgg

SEQ ID NO: 1325729 - DNA, 25 bp, Homo sapien
agagcctgatgagtgtcgacgtgca

SEQ ID NO: 1325730 - DNA, 25 bp, Homo sapien
ggtatcctgggacatagtacttcac

SEQ ID NO: 1325731 - DNA, 25 bp, Homo sapien
tatgatgatggctcccaagagagcc

SEQ ID NO: 1325732 - DNA, 25 bp, Homo sapien
tagaggttgtctacaggactggccg

SEQ ID NO: 1325733 - DNA, 25 bp, Homo sapien
taggatccttttctacaccaacaat

SEQ ID NO: 1325734 - DNA, 25 bp, Homo sapien
caacaatttcaatgactctgctttg

SEQ ID NO: 1325735 - DNA, 25 bp, Homo sapien
gaaattatatgattgggtaaagatc

SEQ ID NO: 1325736 - DNA, 25 bp, Homo sapien
ttgggtaaagatctcagcaccaggt

SEQ ID NO: 1325737 - DNA, 25 bp, Homo sapien
tcagataatgcttctatatccgaag

SEQ ID NO: 1325738 - DNA, 25 bp, Homo sapien
gcttctatatccgaagccagttgtc

SEQ ID NO: 1325739 - DNA, 25 bp, Homo sapien
aaaattactgagctcagataatgct

SEQ ID NO: 1325740 - DNA, 25 bp, Homo sapien
tatccgaagccagttgtcctacttt

SEQ ID NO: 1325741 - DNA, 25 bp, Homo sapien
ctcaatctttaagatcattttagag

SEQ ID NO: 1325742 - DNA, 25 bp, Homo sapien
tctcaatctttaagatcattttaga

SEQ ID NO: 1325743 - DNA, 25 bp, Homo sapien
tctctcaatctttaagatcatttta

SEQ ID NO: 1325744 - DNA, 25 bp, Homo sapien
ctctcaatctttaagatcattttag

SEQ ID NO: 1325745 - DNA, 25 bp, Homo sapien
tgggtttctggactgccaagtcaca

SEQ ID NO: 1325746 - DNA, 25 bp, Homo sapien
catccaatcaagttaaaggcctgca

SEQ ID NO: 1325747 - DNA, 25 bp, Homo sapien
catctacaccactggctcttctggg

SEQ ID NO: 1325748 - DNA, 25 bp, Homo sapien
tagctatacagattttcacaggtgg

SEQ ID NO: 1325749 - DNA, 25 bp, Homo sapien
caagtaaggaatattgtggacaaca

SEQ ID NO: 1325750 - DNA, 25 bp, Homo sapien
cactctcaatctgggtaggcatcat

SEQ ID NO: 1325751 - DNA, 25 bp, Homo sapien
caatctattgtaaagcacttcgcaa

SEQ ID NO: 1325752 - DNA, 25 bp, Homo sapien
gtaagagattgcttcctgtaactcc

SEQ ID NO: 1325753 - DNA, 25 bp, Homo sapien
tccacctccagttctatcgatatag

SEQ ID NO: 1325754 - DNA, 25 bp, Homo sapien
tgcctttcccctaagcaccgtttga

SEQ ID NO: 1325755 - DNA, 25 bp, Homo sapien
cgatatagattccacatttagatgt

SEQ ID NO: 1325756 - DNA, 25 bp, Homo sapien
taagcaccgtttgacgcccactcca

SEQ ID NO: 1325757 - DNA, 25 bp, Homo sapien
ggtctgggtccccaatgtactgtgg

SEQ ID NO: 1325758 - DNA, 25 bp, Homo sapien
gctgagttaccctacgaaccacata

SEQ ID NO: 1325759 - DNA, 25 bp, Homo sapien
aatgtactgtggagctgagttaccc

SEQ ID NO: 1325760 - DNA, 25 bp, Homo sapien
gagttaccctacgaaccacatatat

SEQ ID NO: 1325761 - DNA, 25 bp, Homo sapien
tgatagatttctgtagtggcaccgt

SEQ ID NO: 1325762 - DNA, 25 bp, Homo sapien
tgatggcaaaagtagtcccttcatt

SEQ ID NO: 1325763 - DNA, 25 bp, Homo sapien
tgtgtgattactttaccagtgagct

SEQ ID NO: 1325764 - DNA, 25 bp, Homo sapien
gatcaggttttataatccatccagc

SEQ ID NO: 1325765 - DNA, 25 bp, Homo sapien
aggaaaaactacaacttgtgacaga

SEQ ID NO: 1325766 - DNA, 25 bp, Homo sapien
caacttgtgacagaaggcaaagaaa

SEQ ID NO: 1325767 - DNA, 25 bp, Homo sapien
tcaggagatggaatttttaaggaaa

SEQ ID NO: 1325768 - DNA, 25 bp, Homo sapien
aactacaacttgtgacagaaggcaa

SEQ ID NO: 1325769 - DNA, 25 bp, Homo sapien
agacttagagttctttttagcattt

SEQ ID NO: 1325770 - DNA, 25 bp, Homo sapien
agtggtgaatactctcagcatctat

SEQ ID NO: 1325771 - DNA, 25 bp, Homo sapien
tcttgggagtggtgaatactctcag

SEQ ID NO: 1325772 - DNA, 25 bp, Homo sapien
tgctgtcttgggagtggtgaatact

SEQ ID NO: 1325773 - DNA, 25 bp, Homo sapien
tgtgagccagttagaaagtgtgagt

SEQ ID NO: 1325774 - DNA, 25 bp, Homo sapien
catgacttctctaccatgaaggtga

SEQ ID NO: 1325775 - DNA, 25 bp, Homo sapien
gcagccaaacgtaaaagtcaaccat

SEQ ID NO: 1325776 - DNA, 25 bp, Homo sapien
caatcttgggtatctgctttatgtg

SEQ ID NO: 1325777 - DNA, 25 bp, Homo sapien
tcactgctttcttactaaataagta

SEQ ID NO: 1325778 - DNA, 25 bp, Homo sapien
ctccattcactgctttcttactaaa

SEQ ID NO: 1325779 - DNA, 25 bp, Homo sapien
tactaaataagtattttgcatccat

SEQ ID NO: 1325780 - DNA, 25 bp, Homo sapien
ccattcactgctttcttactaaata

SEQ ID NO: 1325781 - DNA, 25 bp, Homo sapien
taagagaggaatacgagacaggact

SEQ ID NO: 1325782 - DNA, 25 bp, Homo sapien
gaagcacagagtctatgtaagagag

SEQ ID NO: 1325783 - DNA, 25 bp, Homo sapien
gtgtcctcgggtaaatgattcaata

SEQ ID NO: 1325784 - DNA, 25 bp, Homo sapien
cggttaagcagattggctgaagcac

SEQ ID NO: 1325785 - DNA, 25 bp, Homo sapien
cttgcttgtgtagtgtcagaatagt

SEQ ID NO: 1325786 - DNA, 25 bp, Homo sapien
cttgtgtagtgtcagaatagtcttg

SEQ ID NO: 1325787 - DNA, 25 bp, Homo sapien
tgtagtgtcagaatagtcttgtgga

SEQ ID NO: 1325788 - DNA, 25 bp, Homo sapien
cagaatagtcttgtggaaaatcgta

SEQ ID NO: 1325789 - DNA, 25 bp, Homo sapien
agagatccctcatacactgtttgtg

SEQ ID NO: 1325790 - DNA, 25 bp, Homo sapien
gaaacttatgcacagtataggaaac

SEQ ID NO: 1325791 - DNA, 25 bp, Homo sapien
ggcaaccaaagtaaacatggcccaa

SEQ ID NO: 1325792 - DNA, 25 bp, Homo sapien
tggcccaatgaaatcccatcatgtt

SEQ ID NO: 1325793 - DNA, 25 bp, Homo sapien
gttatacagtaataacaggctattt

SEQ ID NO: 1325794 - DNA, 25 bp, Homo sapien
gacttagaaaccactattacagtat

SEQ ID NO: 1325795 - DNA, 25 bp, Homo sapien
gattgtgaagttactttaaccagtg

SEQ ID NO: 1325796 - DNA, 25 bp, Homo sapien
gataatttaactctagtcacatgaa

SEQ ID NO: 1325797 - DNA, 25 bp, Homo sapien
gctttctatcctttagtctctctct

SEQ ID NO: 1325798 - DNA, 25 bp, Homo sapien
cttcttaattcctataccatgtaca

SEQ ID NO: 1325799 - DNA, 25 bp, Homo sapien
tttggattgagtctgcttgtagact

SEQ ID NO: 1325800 - DNA, 25 bp, Homo sapien
tcttgtttggattgagtctgcttgt

SEQ ID NO: 1325801 - DNA, 25 bp, Homo sapien
attgtactctttctccacgaccatt

SEQ ID NO: 1325802 - DNA, 25 bp, Homo sapien
tttctccacgaccattcctcaaggt

SEQ ID NO: 1325803 - DNA, 25 bp, Homo sapien
actctttctccacgaccattcctca

SEQ ID NO: 1325804 - DNA, 25 bp, Homo sapien
gtactctttctccacgaccattcct

SEQ ID NO: 1325805 - DNA, 25 bp, Homo sapien
tcttagtcccatccagtcatcaagc

SEQ ID NO: 1325806 - DNA, 25 bp, Homo sapien
caagtggcaggtaccggagacctgc

SEQ ID NO: 1325807 - DNA, 25 bp, Homo sapien
catcaagcccatgaacatcaagcat

SEQ ID NO: 1325808 - DNA, 25 bp, Homo sapien
gagacctgcaccttatatcttagtc

SEQ ID NO: 1325809 - DNA, 25 bp, Homo sapien
tctttacatccaggatatgcccaag

SEQ ID NO: 1325810 - DNA, 25 bp, Homo sapien
gaataaggcttataacaccctgacc

SEQ ID NO: 1325811 - DNA, 25 bp, Homo sapien
ggagcaggcccaacttactcattca

SEQ ID NO: 1325812 - DNA, 25 bp, Homo sapien
attagatgctgggtcataagcctca

SEQ ID NO: 1325813 - DNA, 25 bp, Homo sapien
tgtgtaactctgacccccaggtcat

SEQ ID NO: 1325814 - DNA, 25 bp, Homo sapien
atctgcaatgtgtaactctgacccc

SEQ ID NO: 1325815 - DNA, 25 bp, Homo sapien
aatgtgtaactctgacccccaggtc

SEQ ID NO: 1325816 - DNA, 25 bp, Homo sapien
caaatctgcaatgtgtaactctgac

SEQ ID NO: 1325817 - DNA, 25 bp, Homo sapien
caaagtaaacaatcgtattgtcagc

SEQ ID NO: 1325818 - DNA, 25 bp, Homo sapien
gccactatacctgacctaggggttg

SEQ ID NO: 1325819 - DNA, 25 bp, Homo sapien
cgttgtaaagagagatactgatttg

SEQ ID NO: 1325820 - DNA, 25 bp, Homo sapien
ctgcttggttgctgtcgttgtaaag

SEQ ID NO: 1325821 - DNA, 25 bp, Homo sapien
cactgtgatttgagagagtgcttta

SEQ ID NO: 1325822 - DNA, 25 bp, Homo sapien
ggtgccagttgtaatatcccgtttc

SEQ ID NO: 1325823 - DNA, 25 bp, Homo sapien
gctgtaaatccgtctggtctgggac

SEQ ID NO: 1325824 - DNA, 25 bp, Homo sapien
tatgcgcataaactaggtttcctag

SEQ ID NO: 1325825 - DNA, 25 bp, Homo sapien
tcctgccggtaggtagtgctgtcca

SEQ ID NO: 1325826 - DNA, 25 bp, Homo sapien
gacatgagccatctatgggtctcag

SEQ ID NO: 1325827 - DNA, 25 bp, Homo sapien
tgtctttagttaccaggtggggcag

SEQ ID NO: 1325828 - DNA, 25 bp, Homo sapien
ggtgtaatggactccatgagagttc

SEQ ID NO: 1325829 - DNA, 25 bp, Homo sapien
ttccttgcttagatggattcctagg

SEQ ID NO: 1325830 - DNA, 25 bp, Homo sapien
caatgctaagagtttttaggtaggc

SEQ ID NO: 1325831 - DNA, 25 bp, Homo sapien
tcattcttagctcaatcaatattgg

SEQ ID NO: 1325832 - DNA, 25 bp, Homo sapien
tcaggtacatcaccagaagatgcct

SEQ ID NO: 1325833 - DNA, 25 bp, Homo sapien
tggcttgctgaagcaatgtcaagtt

SEQ ID NO: 1325834 - DNA, 25 bp, Homo sapien
tgtggcttgctgaagcaatgtcaag

SEQ ID NO: 1325835 - DNA, 25 bp, Homo sapien
gtggcttgctgaagcaatgtcaagt

SEQ ID NO: 1325836 - DNA, 25 bp, Homo sapien
tatgtggcttgctgaagcaatgtca

SEQ ID NO: 1325837 - DNA, 25 bp, Homo sapien
ggcctggaatgtatgtctaacgaaa

SEQ ID NO: 1325838 - DNA, 25 bp, Homo sapien
agtgactacctaggcacaaatcctg

SEQ ID NO: 1325839 - DNA, 25 bp, Homo sapien
gacagagcaaatgagaacctgtgtt

SEQ ID NO: 1325840 - DNA, 25 bp, Homo sapien
tgtttcttccatcaacgctattagg

SEQ ID NO: 1325841 - DNA, 25 bp, Homo sapien
gaagatctgctttcatatcacacaa

SEQ ID NO: 1325842 - DNA, 25 bp, Homo sapien
gaaatacaacgcaaaagctagacct

SEQ ID NO: 1325843 - DNA, 25 bp, Homo sapien
tatttaatggagtcagcctgcaatg

SEQ ID NO: 1325844 - DNA, 25 bp, Homo sapien
tatcacacaagtgctctcagctgca

SEQ ID NO: 1325845 - DNA, 25 bp, Homo sapien
tgaaggtatccactatttccctcac

SEQ ID NO: 1325846 - DNA, 25 bp, Homo sapien
ctgaaggtatccactatttccctca

SEQ ID NO: 1325847 - DNA, 25 bp, Homo sapien
taaagttgaaccagactcggaagcg

SEQ ID NO: 1325848 - DNA, 25 bp, Homo sapien
ctcggaagcgtggattacaggtgtc

SEQ ID NO: 1325849 - DNA, 25 bp, Homo sapien
gatcatactcaaactcagagacctg

SEQ ID NO: 1325850 - DNA, 25 bp, Homo sapien
ggtgtccggcctaatgaacagatca

SEQ ID NO: 1325851 - DNA, 25 bp, Homo sapien
tgaggtaaacaggaatatggggctg

SEQ ID NO: 1325852 - DNA, 25 bp, Homo sapien
taaacaggaatatggggctgagaag

SEQ ID NO: 1325853 - DNA, 25 bp, Homo sapien
gcgatgacacactcttttggtgagg

SEQ ID NO: 1325854 - DNA, 25 bp, Homo sapien
ccagctcagaaatgcgatgacacac

SEQ ID NO: 1325855 - DNA, 25 bp, Homo sapien
cattttggagattaccagggatacc

SEQ ID NO: 1325856 - DNA, 25 bp, Homo sapien
cccaggtgtggtacaggcagtagtt

SEQ ID NO: 1325857 - DNA, 25 bp, Homo sapien
tatggaagaatgatcccaaaggcat

SEQ ID NO: 1325858 - DNA, 25 bp, Homo sapien
gatacccctcttattacaggcccag

SEQ ID NO: 1325859 - DNA, 25 bp, Homo sapien
cctagtaggcggttaggcaattgaa

SEQ ID NO: 1325860 - DNA, 25 bp, Homo sapien
tccgaggttctcactagcttctgaa

SEQ ID NO: 1325861 - DNA, 25 bp, Homo sapien
gattgctaggatatgaaatcccctt

SEQ ID NO: 1325862 - DNA, 25 bp, Homo sapien
aaatgccctgttcctaacatagtag

SEQ ID NO: 1325863 - DNA, 25 bp, Homo sapien
ccagttggaagcactatatatttgc

SEQ ID NO: 1325864 - DNA, 25 bp, Homo sapien
ttgggctgtccacaatagccagttg

SEQ ID NO: 1325865 - DNA, 25 bp, Homo sapien
caaagataagatgtcctttcttggg

SEQ ID NO: 1325866 - DNA, 25 bp, Homo sapien
tatatttgctcacattccctccaat

SEQ ID NO: 1325867 - DNA, 25 bp, Homo sapien
tttgcataacagaaaaatcctaggg

SEQ ID NO: 1325868 - DNA, 25 bp, Homo sapien
cacattgccgaacaaagtgtcttaa

SEQ ID NO: 1325869 - DNA, 25 bp, Homo sapien
caatgtgtgagacattgggctaagc

SEQ ID NO: 1325870 - DNA, 25 bp, Homo sapien
gaaaattacacgtattgaaccactg

SEQ ID NO: 1325871 - DNA, 25 bp, Homo sapien
ttgctggataagacggcagctgaga

SEQ ID NO: 1325872 - DNA, 25 bp, Homo sapien
gctggataagacggcagctgagagg

SEQ ID NO: 1325873 - DNA, 25 bp, Homo sapien
cttgctggataagacggcagctgag

SEQ ID NO: 1325874 - DNA, 25 bp, Homo sapien
tgctggataagacggcagctgagag

SEQ ID NO: 1325875 - DNA, 25 bp, Homo sapien
tatgagattccctgactggcatgcc

SEQ ID NO: 1325876 - DNA, 25 bp, Homo sapien
tggcatgccaacttctgtcacagca

SEQ ID NO: 1325877 - DNA, 25 bp, Homo sapien
gaggaactattccatctgcgctaag

SEQ ID NO: 1325878 - DNA, 25 bp, Homo sapien
gcgctaagacctgctacaacacatg

SEQ ID NO: 1325879 - DNA, 25 bp, Homo sapien
gcagacattagtaccaaatttcaga

SEQ ID NO: 1325880 - DNA, 25 bp, Homo sapien
gcagtgaaacagtgtgaaaatctct

SEQ ID NO: 1325881 - DNA, 25 bp, Homo sapien
aatttcagacgtcaaaccccaccat

SEQ ID NO: 1325882 - DNA, 25 bp, Homo sapien
cacagagtggtgattaaacatgcag

SEQ ID NO: 1325883 - DNA, 25 bp, Homo sapien
ttcacctctcgtcttccatggactt

SEQ ID NO: 1325884 - DNA, 25 bp, Homo sapien
tatgggcttcacctctcgtcttcca

SEQ ID NO: 1325885 - DNA, 25 bp, Homo sapien
ggcttcacctctcgtcttccatgga

SEQ ID NO: 1325886 - DNA, 25 bp, Homo sapien
cttctatgggcttcacctctcgtct

SEQ ID NO: 1325887 - DNA, 25 bp, Homo sapien
tacgggacctaagtccatgccaggc

SEQ ID NO: 1325888 - DNA, 25 bp, Homo sapien
aaatgttaagtctctacccagggtg

SEQ ID NO: 1325889 - DNA, 25 bp, Homo sapien
tacagagactgcatctttgagagcc

SEQ ID NO: 1325890 - DNA, 25 bp, Homo sapien
gagcagactcttctatggcagtaag

SEQ ID NO: 1325891 - DNA, 25 bp, Homo sapien
ggcaggaaaggctccaatgggatgg

SEQ ID NO: 1325892 - DNA, 25 bp, Homo sapien
aggaaaggctccaatgggatggcac

SEQ ID NO: 1325893 - DNA, 25 bp, Homo sapien
atgggatggcaccaatgaggtaggg

SEQ ID NO: 1325894 - DNA, 25 bp, Homo sapien
tgggatggcaccaatgaggtagggt

SEQ ID NO: 1325895 - DNA, 25 bp, Homo sapien
gcggcacgacggttgcctgggcaac

SEQ ID NO: 1325896 - DNA, 25 bp, Homo sapien
tacctcaggaagacgcggcacgacg

SEQ ID NO: 1325897 - DNA, 25 bp, Homo sapien
tgttgtccctcagtctccgagctca

SEQ ID NO: 1325898 - DNA, 25 bp, Homo sapien
tcagtgggctgacaggagctacctc

SEQ ID NO: 1325899 - DNA, 25 bp, Homo sapien
tttgctctgtttacggcctaatctc

SEQ ID NO: 1325900 - DNA, 25 bp, Homo sapien
tggcttgtaaaatggctgtcttgtc

SEQ ID NO: 1325901 - DNA, 25 bp, Homo sapien
caaggttgttattctgagatctgtc

SEQ ID NO: 1325902 - DNA, 25 bp, Homo sapien
gatgaaggtgttagcaaggttgtta

SEQ ID NO: 1325903 - DNA, 25 bp, Homo sapien
tattccgtgatacctcttgagattg

SEQ ID NO: 1325904 - DNA, 25 bp, Homo sapien
ctcaatattccgtgatacctcttga

SEQ ID NO: 1325905 - DNA, 25 bp, Homo sapien
gatacctcttgagattgtaatatca

SEQ ID NO: 1325906 - DNA, 25 bp, Homo sapien
accagcatggattttgaaaagtaag

SEQ ID NO: 1325907 - DNA, 25 bp, Homo sapien
caatctcatctagcttcaggcccac

SEQ ID NO: 1325908 - DNA, 25 bp, Homo sapien
aatctcatctagcttcaggcccact

SEQ ID NO: 1325909 - DNA, 25 bp, Homo sapien
tggacctggaaccaccaatctcatc

SEQ ID NO: 1325910 - DNA, 25 bp, Homo sapien
accaatctcatctagcttcaggccc

SEQ ID NO: 1325911 - DNA, 25 bp, Homo sapien
gctgagtctagcaatagccccattt

SEQ ID NO: 1325912 - DNA, 25 bp, Homo sapien
tattatccgccattctgccacactg

SEQ ID NO: 1325913 - DNA, 25 bp, Homo sapien
ggcttgaagtctccacagcaaagga

SEQ ID NO: 1325914 - DNA, 25 bp, Homo sapien
tgagcagctctgactacaagccacc

SEQ ID NO: 1325915 - DNA, 25 bp, Homo sapien
tctgtttttagcgtgggcttgggga

SEQ ID NO: 1325916 - DNA, 25 bp, Homo sapien
ggccaagtacagtgggaatacagac

SEQ ID NO: 1325917 - DNA, 25 bp, Homo sapien
ctgcattagggtgcacattgttgca

SEQ ID NO: 1325918 - DNA, 25 bp, Homo sapien
cttccgttggtagagctttctcaca

SEQ ID NO: 1325919 - DNA, 25 bp, Homo sapien
ttccgttggtagagctttctcacaa

SEQ ID NO: 1325920 - DNA, 25 bp, Homo sapien
ccgttggtagagctttctcacaaca

SEQ ID NO: 1325921 - DNA, 25 bp, Homo sapien
ttggtagagctttctcacaacagaa

SEQ ID NO: 1325922 - DNA, 25 bp, Homo sapien
gctgttgcacgtgaatgctctggaa

SEQ ID NO: 1325923 - DNA, 25 bp, Homo sapien
taatcgactgaaaatgagccggcta

SEQ ID NO: 1325924 - DNA, 25 bp, Homo sapien
gaagaggtaatccagacagccggaa

SEQ ID NO: 1325925 - DNA, 25 bp, Homo sapien
gagccggctacagtcatatggaaca

SEQ ID NO: 1325926 - DNA, 25 bp, Homo sapien
ctggcagatggtagaccgtcaatgg

SEQ ID NO: 1325927 - DNA, 25 bp, Homo sapien
tagaccgtcaatgggtggtattgat

SEQ ID NO: 1325928 - DNA, 25 bp, Homo sapien
tggtagaccgtcaatgggtggtatt

SEQ ID NO: 1325929 - DNA, 25 bp, Homo sapien
gatggtagaccgtcaatgggtggta

SEQ ID NO: 1325930 - DNA, 25 bp, Homo sapien
ggttaaatggtattaagtgatgccg

SEQ ID NO: 1325931 - DNA, 25 bp, Homo sapien
tgatgccgtcttgacttaaagatga

SEQ ID NO: 1325932 - DNA, 25 bp, Homo sapien
taatatatgcaaggaggttaaatgg

SEQ ID NO: 1325933 - DNA, 25 bp, Homo sapien
ggtattaagtgatgccgtcttgact

SEQ ID NO: 1325934 - DNA, 25 bp, Homo sapien
tatctgcaacctttgggatgtgtgc

SEQ ID NO: 1325935 - DNA, 25 bp, Homo sapien
taagaggaatacagcggcgctggca

SEQ ID NO: 1325936 - DNA, 25 bp, Homo sapien
catctggactctgtgtgggaaagct

SEQ ID NO: 1325937 - DNA, 25 bp, Homo sapien
gctgccggcgactgatgctgagata

SEQ ID NO: 1325938 - DNA, 25 bp, Homo sapien
ttataatctgttgtttgtgttgctg

SEQ ID NO: 1325939 - DNA, 25 bp, Homo sapien
ataatctgttgtttgtgttgctgga

SEQ ID NO: 1325940 - DNA, 25 bp, Homo sapien
tgttgtttgtgttgctggagggaag

SEQ ID NO: 1325941 - DNA, 25 bp, Homo sapien
aatctgttgtttgtgttgctggagg

SEQ ID NO: 1325942 - DNA, 25 bp, Homo sapien
tagagagtgcgggtaggtcctttta

SEQ ID NO: 1325943 - DNA, 25 bp, Homo sapien
cagtcttatgcttgcacaagagttt

SEQ ID NO: 1325944 - DNA, 25 bp, Homo sapien
acaagagtttagttctgtgctgctg

SEQ ID NO: 1325945 - DNA, 25 bp, Homo sapien
tgtgctgctgtttggttcctacatt

SEQ ID NO: 1325946 - DNA, 25 bp, Homo sapien
tcataaaaaagaggaggcggcttgt

SEQ ID NO: 1325947 - DNA, 25 bp, Homo sapien
cacactgtgtgagggtccatcttct

SEQ ID NO: 1325948 - DNA, 25 bp, Homo sapien
tcctttccgcttttgacacactgtg

SEQ ID NO: 1325949 - DNA, 25 bp, Homo sapien
cagctctgtaagaaggaatgtcagc

SEQ ID NO: 1325950 - DNA, 25 bp, Homo sapien
gcttctgtcgcctgatgttgaccct

SEQ ID NO: 1325951 - DNA, 25 bp, Homo sapien
gaaactccttgagtgccgcttctgt

SEQ ID NO: 1325952 - DNA, 25 bp, Homo sapien
tgttgaccctgaagatatggcacaa

SEQ ID NO: 1325953 - DNA, 25 bp, Homo sapien
ctttctgccgaagtagtaaatctat

SEQ ID NO: 1325954 - DNA, 25 bp, Homo sapien
aacagaggagaagccgagtagggag

SEQ ID NO: 1325955 - DNA, 25 bp, Homo sapien
gcagcccaactgaaagcgatagctg

SEQ ID NO: 1325956 - DNA, 25 bp, Homo sapien
gagcaggtggctatcatgagaacac

SEQ ID NO: 1325957 - DNA, 25 bp, Homo sapien
cgatagctgggaggaaaacccaatg

SEQ ID NO: 1325958 - DNA, 25 bp, Homo sapien
cccataagaactggtttctcttcat

SEQ ID NO: 1325959 - DNA, 25 bp, Homo sapien
tcccataagaactggtttctcttca

SEQ ID NO: 1325960 - DNA, 25 bp, Homo sapien
ggctgcttcccataagaactggttt

SEQ ID NO: 1325961 - DNA, 25 bp, Homo sapien
tgggctgcttcccataagaactggt

SEQ ID NO: 1325962 - DNA, 25 bp, Homo sapien
tctttggaacgtggaatccaaggtc

SEQ ID NO: 1325963 - DNA, 25 bp, Homo sapien
gcatttctttggaacgtggaatcca

SEQ ID NO: 1325964 - DNA, 25 bp, Homo sapien
ggaacgtggaatccaaggtcaccat

SEQ ID NO: 1325965 - DNA, 25 bp, Homo sapien
catttctttggaacgtggaatccaa

SEQ ID NO: 1325966 - DNA, 25 bp, Homo sapien
gatagtgaccgttttggcatgccaa

SEQ ID NO: 1325967 - DNA, 25 bp, Homo sapien
ggcatgccaaattggaagtttgcta

SEQ ID NO: 1325968 - DNA, 25 bp, Homo sapien
aagtttgctagtggagcagaaatca

SEQ ID NO: 1325969 - DNA, 25 bp, Homo sapien
ggagcatctgaacagatagtgaccg

SEQ ID NO: 1325970 - DNA, 25 bp, Homo sapien
ggtttgtttagcaccctctccagca

SEQ ID NO: 1325971 - DNA, 25 bp, Homo sapien
gaagacagcctttaatttggtatac

SEQ ID NO: 1325972 - DNA, 25 bp, Homo sapien
gaataggagtgacagcttcgaagac

SEQ ID NO: 1325973 - DNA, 25 bp, Homo sapien
gaatgctaatttggtagttcaccga

SEQ ID NO: 1325974 - DNA, 25 bp, Homo sapien
gcttcttacacactcatcaggggga

SEQ ID NO: 1325975 - DNA, 25 bp, Homo sapien
gggggaatcagagactttccatcct

SEQ ID NO: 1325976 - DNA, 25 bp, Homo sapien
gaacttgaagaacgtcagaacgtgt

SEQ ID NO: 1325977 - DNA, 25 bp, Homo sapien
tgtagtgcaaacagtaaaccatgta

SEQ ID NO: 1325978 - DNA, 25 bp, Homo sapien
gctgagccattagaaggtcttcgta

SEQ ID NO: 1325979 - DNA, 25 bp, Homo sapien
ttgcaatctcactcgtattcctggg

SEQ ID NO: 1325980 - DNA, 25 bp, Homo sapien
tctgccacgtacttgactccatgta

SEQ ID NO: 1325981 - DNA, 25 bp, Homo sapien
gactccatgtaatgaagctggtcat

SEQ ID NO: 1325982 - DNA, 25 bp, Homo sapien
caaggtgtgcagattggcagtgcag

SEQ ID NO: 1325983 - DNA, 25 bp, Homo sapien
taactgttcggtttctggagaatga

SEQ ID NO: 1325984 - DNA, 25 bp, Homo sapien
ttaaaaagcgaaagagcaaggtgtg

SEQ ID NO: 1325985 - DNA, 25 bp, Homo sapien
aaatgctgaggttctttctggccag

SEQ ID NO: 1325986 - DNA, 25 bp, Homo sapien
tgaaaatactgttgccatccctatg

SEQ ID NO: 1325987 - DNA, 25 bp, Homo sapien
cagatacactagctctgggctccag

SEQ ID NO: 1325988 - DNA, 25 bp, Homo sapien
tgggctccagactggatccctcagg

SEQ ID NO: 1325989 - DNA, 25 bp, Homo sapien
cttggtccccatagaaaaagtgttg

SEQ ID NO: 1325990 - DNA, 25 bp, Homo sapien
tctctctctaaagttagagcaggtg

SEQ ID NO: 1325991 - DNA, 25 bp, Homo sapien
cacagttgtgctaattgcagtcagg

SEQ ID NO: 1325992 - DNA, 25 bp, Homo sapien
caggaactaaggtgatggtggattt

SEQ ID NO: 1325993 - DNA, 25 bp, Homo sapien
gcaggtggcttgacatgatacatct

SEQ ID NO: 1325994 - DNA, 25 bp, Homo sapien
gctggagtgcacccagcattctctc

SEQ ID NO: 1325995 - DNA, 25 bp, Homo sapien
gcagctggagtgcacccagcattct

SEQ ID NO: 1325996 - DNA, 25 bp, Homo sapien
cagcagctggagtgcacccagcatt

SEQ ID NO: 1325997 - DNA, 25 bp, Homo sapien
tggagtgcacccagcattctctcct

SEQ ID NO: 1325998 - DNA, 25 bp, Homo sapien
acaaagtcacccattttctcatcca

SEQ ID NO: 1325999 - DNA, 25 bp, Homo sapien
tgtctggtaaagtttgcccctgtct

SEQ ID NO: 1326000 - DNA, 25 bp, Homo sapien
caaaggaatatcctaatggaagtgt

SEQ ID NO: 1326001 - DNA, 25 bp, Homo sapien
tgctccatcctataacaaagtcacc

SEQ ID NO: 1326002 - DNA, 25 bp, Homo sapien
gaaagattttttggccgctgaaatg

SEQ ID NO: 1326003 - DNA, 25 bp, Homo sapien
ccccgtactccaaagagagctttat

SEQ ID NO: 1326004 - DNA, 25 bp, Homo sapien
tgctgtattatctcccagccctggc

SEQ ID NO: 1326005 - DNA, 25 bp, Homo sapien
tctttgctgacatgtgacgtcctgt

SEQ ID NO: 1326006 - DNA, 25 bp, Homo sapien
ctgccgcccacaaatcaataacatt

SEQ ID NO: 1326007 - DNA, 25 bp, Homo sapien
tgtttcttaaagggtatgtcagaaa

SEQ ID NO: 1326008 - DNA, 25 bp, Homo sapien
gtttcctaatgatatttctggctga

SEQ ID NO: 1326009 - DNA, 25 bp, Homo sapien
ccacaaatcaataacattgcttggg

SEQ ID NO: 1326010 - DNA, 25 bp, Homo sapien
gcaggtctgacgcaaagtaggacaa

SEQ ID NO: 1326011 - DNA, 25 bp, Homo sapien
gctgccagccaattaatgagtcccc

SEQ ID NO: 1326012 - DNA, 25 bp, Homo sapien
gggaagtgtctcctgggcgctctta

SEQ ID NO: 1326013 - DNA, 25 bp, Homo sapien
gaaatctatagatggcaccagctct

SEQ ID NO: 1326014 - DNA, 25 bp, Homo sapien
cagaggtaaactgatcctcacaatc

SEQ ID NO: 1326015 - DNA, 25 bp, Homo sapien
ccttgagaggatttgttcctagaag

SEQ ID NO: 1326016 - DNA, 25 bp, Homo sapien
caaagctgcggtttccaggaaccag

SEQ ID NO: 1326017 - DNA, 25 bp, Homo sapien
gattgtaggtccttgagaggatttg

SEQ ID NO: 1326018 - DNA, 25 bp, Homo sapien
tctgtttaatagcaagaaaggcctg

SEQ ID NO: 1326019 - DNA, 25 bp, Homo sapien
caagaaacatttgacaaccgtaggt

SEQ ID NO: 1326020 - DNA, 25 bp, Homo sapien
aatgaaacatgaaccacccatctgt

SEQ ID NO: 1326021 - DNA, 25 bp, Homo sapien
gaaaggcctgttcattgtcacgtat

SEQ ID NO: 1326022 - DNA, 25 bp, Homo sapien
tttgtcgcgttcatactgcactggt

SEQ ID NO: 1326023 - DNA, 25 bp, Homo sapien
aactttttagagatcaagatgtgtg

SEQ ID NO: 1326024 - DNA, 25 bp, Homo sapien
tgaaggatgggctataaacagatga

SEQ ID NO: 1326025 - DNA, 25 bp, Homo sapien
tgtgttttaaactggattcgtagac

SEQ ID NO: 1326026 - DNA, 25 bp, Homo sapien
cgttaacagcaagagtgtgttttct

SEQ ID NO: 1326027 - DNA, 25 bp, Homo sapien
aatgatacctgataagatagcgtta

SEQ ID NO: 1326028 - DNA, 25 bp, Homo sapien
tacctgataagatagcgttaacagc

SEQ ID NO: 1326029 - DNA, 25 bp, Homo sapien
cctgataagatagcgttaacagcaa

SEQ ID NO: 1326030 - DNA, 25 bp, Homo sapien
tctaatatccttgcacccttgactg

SEQ ID NO: 1326031 - DNA, 25 bp, Homo sapien
tcagggtaaaggagtggaggccaca

SEQ ID NO: 1326032 - DNA, 25 bp, Homo sapien
ccacactaaggagcttaggtgggca

SEQ ID NO: 1326033 - DNA, 25 bp, Homo sapien
gaaaagggttggtcatgcaggctga

SEQ ID NO: 1326034 - DNA, 25 bp, Homo sapien
gctgaggcaggaaacatctttagga

SEQ ID NO: 1326035 - DNA, 25 bp, Homo sapien
tatctccaagccctactcctcttgg

SEQ ID NO: 1326036 - DNA, 25 bp, Homo sapien
aaatatctggtaaagggcaaatatc

SEQ ID NO: 1326037 - DNA, 25 bp, Homo sapien
gaagtgagggcccttcgttcataaa

SEQ ID NO: 1326038 - DNA, 25 bp, Homo sapien
gggcccttcgttcataaatatctgg

SEQ ID NO: 1326039 - DNA, 25 bp, Homo sapien
agcctccatggggacagaggaatca

SEQ ID NO: 1326040 - DNA, 25 bp, Homo sapien
tccatggggacagaggaatcaggca

SEQ ID NO: 1326041 - DNA, 25 bp, Homo sapien
catatttgtactgctgcatgcagcc

SEQ ID NO: 1326042 - DNA, 25 bp, Homo sapien
atatttgtactgctgcatgcagcct

SEQ ID NO: 1326043 - DNA, 25 bp, Homo sapien
ggcccagacccttgtgtatggggca

SEQ ID NO: 1326044 - DNA, 25 bp, Homo sapien
ccgctgagccaaacgtatgcagctc

SEQ ID NO: 1326045 - DNA, 25 bp, Homo sapien
tgctgctgccgctgagccaaacgta

SEQ ID NO: 1326046 - DNA, 25 bp, Homo sapien
gacccttgtgtatggggcaatccca

SEQ ID NO: 1326047 - DNA, 25 bp, Homo sapien
tccaaacccaacttgctgctcccag

SEQ ID NO: 1326048 - DNA, 25 bp, Homo sapien
attcaccccagaatagaagtccgag

SEQ ID NO: 1326049 - DNA, 25 bp, Homo sapien
tacagcttagcaatgacctccaaac

SEQ ID NO: 1326050 - DNA, 25 bp, Homo sapien
tgttgtcattgtcacgattacccca

SEQ ID NO: 1326051 - DNA, 25 bp, Homo sapien
gcagcctgtagaggccccacagtat

SEQ ID NO: 1326052 - DNA, 25 bp, Homo sapien
tcagcaagccagcccttgtcagcag

SEQ ID NO: 1326053 - DNA, 25 bp, Homo sapien
aagccagcccttgtcagcagcctgt

SEQ ID NO: 1326054 - DNA, 25 bp, Homo sapien
tgtagaggccccacagtatgccagc

SEQ ID NO: 1326055 - DNA, 25 bp, Homo sapien
ggacactcttgtacttcctctggac

SEQ ID NO: 1326056 - DNA, 25 bp, Homo sapien
cttgagcacgtggcttcattccctt

SEQ ID NO: 1326057 - DNA, 25 bp, Homo sapien
atgtgtgctttgagggacactcttg

SEQ ID NO: 1326058 - DNA, 25 bp, Homo sapien
gctttgagggacactcttgtacttc

SEQ ID NO: 1326059 - DNA, 25 bp, Homo sapien
cttgtagtacaaagctatgaacatt

SEQ ID NO: 1326060 - DNA, 25 bp, Homo sapien
catcttgtagtacaaagctatgaac

SEQ ID NO: 1326061 - DNA, 25 bp, Homo sapien
tgtactactcatcttcatcttgtag

SEQ ID NO: 1326062 - DNA, 25 bp, Homo sapien
ttcatcttgtagtacaaagctatga

SEQ ID NO: 1326063 - DNA, 25 bp, Homo sapien
cactccttgtagcaactaacactgg

SEQ ID NO: 1326064 - DNA, 25 bp, Homo sapien
cttggtcagagatgacatggcacca

SEQ ID NO: 1326065 - DNA, 25 bp, Homo sapien
agcttagtcttggaactttgaacaa

SEQ ID NO: 1326066 - DNA, 25 bp, Homo sapien
aacactggaaagagggactctgtgg

SEQ ID NO: 1326067 - DNA, 25 bp, Homo sapien
aacatgaagcgtcctggaccctgca

SEQ ID NO: 1326068 - DNA, 25 bp, Homo sapien
acatgaagcgtcctggaccctgcat

SEQ ID NO: 1326069 - DNA, 25 bp, Homo sapien
ctcaacatgaagcgtcctggaccct

SEQ ID NO: 1326070 - DNA, 25 bp, Homo sapien
tcaacatgaagcgtcctggaccctg

SEQ ID NO: 1326071 - DNA, 25 bp, Homo sapien
tctcagcctgtaaagcaaatgtacc

SEQ ID NO: 1326072 - DNA, 25 bp, Homo sapien
tctgctgcaacaatgccagctgcat

SEQ ID NO: 1326073 - DNA, 25 bp, Homo sapien
tgcattcaatcaactgagaagctgc

SEQ ID NO: 1326074 - DNA, 25 bp, Homo sapien
tttaagggcgactttgttgcagagg

SEQ ID NO: 1326075 - DNA, 25 bp, Homo sapien
tagcataacagcgtggaaaatgtct

SEQ ID NO: 1326076 - DNA, 25 bp, Homo sapien
tgattccattagcataacagcgtgg

SEQ ID NO: 1326077 - DNA, 25 bp, Homo sapien
agtgtgaccatctccataaagcttc

SEQ ID NO: 1326078 - DNA, 25 bp, Homo sapien
gcagtgcaatatttctggaaagttc

SEQ ID NO: 1326079 - DNA, 25 bp, Homo sapien
tcatagccgccacaaaaggcccaga

SEQ ID NO: 1326080 - DNA, 25 bp, Homo sapien
ttggcaccgacatgaaacctcttat

SEQ ID NO: 1326081 - DNA, 25 bp, Homo sapien
caaagaaggtaattggcaccgacat

SEQ ID NO: 1326082 - DNA, 25 bp, Homo sapien
taggctctgcggcagacgctgtcat

SEQ ID NO: 1326083 - DNA, 25 bp, Homo sapien
gctcagtgtttacggaaggcagtgt

SEQ ID NO: 1326084 - DNA, 25 bp, Homo sapien
atctcatcaccaaggctctaggttt

SEQ ID NO: 1326085 - DNA, 25 bp, Homo sapien
tatttagctcagtgtttacggaagg

SEQ ID NO: 1326086 - DNA, 25 bp, Homo sapien
gtttatttagctcagtgtttacgga

SEQ ID NO: 1326087 - DNA, 25 bp, Homo sapien
aataggaaatagtcagtctcaagcc

SEQ ID NO: 1326088 - DNA, 25 bp, Homo sapien
gaaataggaaatagtcagtctcaag

SEQ ID NO: 1326089 - DNA, 25 bp, Homo sapien
taggaaatagtcagtctcaagcctg

SEQ ID NO: 1326090 - DNA, 25 bp, Homo sapien
ggaaatagtcagtctcaagcctgaa

SEQ ID NO: 1326091 - DNA, 25 bp, Homo sapien
acactcaggagatgctccacctcaa

SEQ ID NO: 1326092 - DNA, 25 bp, Homo sapien
ctgcacactcaggagatgctccacc

SEQ ID NO: 1326093 - DNA, 25 bp, Homo sapien
tgcacactcaggagatgctccacct

SEQ ID NO: 1326094 - DNA, 25 bp, Homo sapien
gctccacctcaaaggcctctgccat

SEQ ID NO: 1326095 - DNA, 25 bp, Homo sapien
gatcctcagccaacagggaagggaa

SEQ ID NO: 1326096 - DNA, 25 bp, Homo sapien
gggtctgtctgacttaacccagctc

SEQ ID NO: 1326097 - DNA, 25 bp, Homo sapien
gaagttgaccttggagtcacaaggg

SEQ ID NO: 1326098 - DNA, 25 bp, Homo sapien
cacaagggacaataagttgagactc

SEQ ID NO: 1326099 - DNA, 25 bp, Homo sapien
tatttgtcagcctgccagactgtga

SEQ ID NO: 1326100 - DNA, 25 bp, Homo sapien
tgaagactgcaacatagctatttgt

SEQ ID NO: 1326101 - DNA, 25 bp, Homo sapien
gcctaagagtgagccctagatttga

SEQ ID NO: 1326102 - DNA, 25 bp, Homo sapien
ttttaccacaccgaagtgtggagcc

SEQ ID NO: 1326103 - DNA, 25 bp, Homo sapien
tagcctagccatgtatcctgtcact

SEQ ID NO: 1326104 - DNA, 25 bp, Homo sapien
catcacattctatccagggcccagt

SEQ ID NO: 1326105 - DNA, 25 bp, Homo sapien
tcttgggccgcagctcttaatctgc

SEQ ID NO: 1326106 - DNA, 25 bp, Homo sapien
ggaagtcctctgctacaccatttgg

SEQ ID NO: 1326107 - DNA, 25 bp, Homo sapien
ttctgtgtggttttattactgagtt

SEQ ID NO: 1326108 - DNA, 25 bp, Homo sapien
ggtggtgtaaagaccccatggaaca

SEQ ID NO: 1326109 - DNA, 25 bp, Homo sapien
cagaaacacatgctaacacggtggt

SEQ ID NO: 1326110 - DNA, 25 bp, Homo sapien
aaaagaagtaaccatgtagcagaaa

SEQ ID NO: 1326111 - DNA, 25 bp, Homo sapien
cccctatgaggagattattaagact

SEQ ID NO: 1326112 - DNA, 25 bp, Homo sapien
tcttaaagatgagcagattgaggct

SEQ ID NO: 1326113 - DNA, 25 bp, Homo sapien
tgtttaaccccaagtccagtactca

SEQ ID NO: 1326114 - DNA, 25 bp, Homo sapien
tacagattatgtgcccttgggtagg

SEQ ID NO: 1326115 - DNA, 25 bp, Homo sapien
aagtagatgcttctattctccccaa

SEQ ID NO: 1326116 - DNA, 25 bp, Homo sapien
catgaagtagatgcttctattctcc

SEQ ID NO: 1326117 - DNA, 25 bp, Homo sapien
ctactacatgaagtagatgcttcta

SEQ ID NO: 1326118 - DNA, 25 bp, Homo sapien
attctccccaatttagagatgaaat

SEQ ID NO: 1326119 - DNA, 25 bp, Homo sapien
tacggcaggcagtgagacctggctc

SEQ ID NO: 1326120 - DNA, 25 bp, Homo sapien
catgggagctgcagtacatgctgca

SEQ ID NO: 1326121 - DNA, 25 bp, Homo sapien
gacctggctctaaggattcacacag

SEQ ID NO: 1326122 - DNA, 25 bp, Homo sapien
ctggcccagaaaagatcccgcagaa

SEQ ID NO: 1326123 - DNA, 25 bp, Homo sapien
tgtcttggaaagatcatctctgggt

SEQ ID NO: 1326124 - DNA, 25 bp, Homo sapien
aacaagttccgacactgccatggag

SEQ ID NO: 1326125 - DNA, 25 bp, Homo sapien
gcagcagtcgataccttggaaacca

SEQ ID NO: 1326126 - DNA, 25 bp, Homo sapien
ccatggtgactcaaatgtgatgcag

SEQ ID NO: 1326127 - DNA, 25 bp, Homo sapien
tgggccgactctggcccgcctaggc

SEQ ID NO: 1326128 - DNA, 25 bp, Homo sapien
gctcggcgagtgctccgggaaaggg

SEQ ID NO: 1326129 - DNA, 25 bp, Homo sapien
caggctctcgctcgggctgggccga

SEQ ID NO: 1326130 - DNA, 25 bp, Homo sapien
gaccccacacgcactgggttccagg

SEQ ID NO: 1326131 - DNA, 25 bp, Homo sapien
cgctcttcgcgcctccttggcctgg

SEQ ID NO: 1326132 - DNA, 25 bp, Homo sapien
ctgccccctactggcggaaggaaga

SEQ ID NO: 1326133 - DNA, 25 bp, Homo sapien
cggaaggaagagtcgccgctccggg

SEQ ID NO: 1326134 - DNA, 25 bp, Homo sapien
tggcggccgccgctcttcgcgcctc

SEQ ID NO: 1326135 - DNA, 25 bp, Homo sapien
tgggcctctcccctgctcttttctc

SEQ ID NO: 1326136 - DNA, 25 bp, Homo sapien
ctctgggcctctcccctgctctttt

SEQ ID NO: 1326137 - DNA, 25 bp, Homo sapien
cctgagggcctctgggcctctcccc

SEQ ID NO: 1326138 - DNA, 25 bp, Homo sapien
ctcctgagggcctctgggcctctcc

SEQ ID NO: 1326139 - DNA, 25 bp, Homo sapien
gaaccagcacttacaacaccctgca

SEQ ID NO: 1326140 - DNA, 25 bp, Homo sapien
gcacccctgccctcttagtccgcgg

SEQ ID NO: 1326141 - DNA, 25 bp, Homo sapien
atctgaaccagcacttacaacaccc

SEQ ID NO: 1326142 - DNA, 25 bp, Homo sapien
tgccctcttagtccgcggcccagtg

SEQ ID NO: 1326143 - DNA, 25 bp, Homo sapien
ttcctccagaagtatctaccctcat

SEQ ID NO: 1326144 - DNA, 25 bp, Homo sapien
cagtgtcctccttatcccgtttcac

SEQ ID NO: 1326145 - DNA, 25 bp, Homo sapien
tgggtcgttttggttcagtgcataa

SEQ ID NO: 1326146 - DNA, 25 bp, Homo sapien
tccggctgattatcttgggtcgttt

SEQ ID NO: 1326147 - DNA, 25 bp, Homo sapien
gattatcttgggtcgttttggttca

SEQ ID NO: 1326148 - DNA, 25 bp, Homo sapien
ttcagtgcataatgacgaggaacac

SEQ ID NO: 1326149 - DNA, 25 bp, Homo sapien
tttgcatttatctaagagcttcttt

SEQ ID NO: 1326150 - DNA, 25 bp, Homo sapien
gcagggatcaggtgttcatggcatt

SEQ ID NO: 1326151 - DNA, 25 bp, Homo sapien
tgtatttgcccactacagtgccagt

SEQ ID NO: 1326152 - DNA, 25 bp, Homo sapien
ccagtgattagacccatgatactcc

SEQ ID NO: 1326153 - DNA, 25 bp, Homo sapien
gcaaggaatgcggcaacagaagagg

SEQ ID NO: 1326154 - DNA, 25 bp, Homo sapien
aaggaatgcggcaacagaagaggca

SEQ ID NO: 1326155 - DNA, 25 bp, Homo sapien
agcaaggaatgcggcaacagaagag

SEQ ID NO: 1326156 - DNA, 25 bp, Homo sapien
caaggaatgcggcaacagaagaggc

SEQ ID NO: 1326157 - DNA, 25 bp, Homo sapien
tgtatctctatcaccagcgagatgg

SEQ ID NO: 1326158 - DNA, 25 bp, Homo sapien
tcaccagcgagatggaggtagagct

SEQ ID NO: 1326159 - DNA, 25 bp, Homo sapien
tctatcaccagcgagatggaggtag

SEQ ID NO: 1326160 - DNA, 25 bp, Homo sapien
ggagcctgtatctctatcaccagcg

SEQ ID NO: 1326161 - DNA, 25 bp, Homo sapien
cagtagagacagtagagggacttga

SEQ ID NO: 1326162 - DNA, 25 bp, Homo sapien
tgaaaacctcatccaagcgtcagca

SEQ ID NO: 1326163 - DNA, 25 bp, Homo sapien
cagaagtgacccagatgaatacagc

SEQ ID NO: 1326164 - DNA, 25 bp, Homo sapien
attgcaacacctctctcaagcaagg

SEQ ID NO: 1326165 - DNA, 25 bp, Homo sapien
gaaagagcacgtcagtacccgctgt

SEQ ID NO: 1326166 - DNA, 25 bp, Homo sapien
gctgttaactcggaactgaggctgc

SEQ ID NO: 1326167 - DNA, 25 bp, Homo sapien
tctgtgaacgcattttaaccctcgg

SEQ ID NO: 1326168 - DNA, 25 bp, Homo sapien
taattaagctctgaaaagcggctgg

SEQ ID NO: 1326169 - DNA, 25 bp, Homo sapien
ttttcagccttgatgactccctttt

SEQ ID NO: 1326170 - DNA, 25 bp, Homo sapien
gcttttttcagccttgatgactccc

SEQ ID NO: 1326171 - DNA, 25 bp, Homo sapien
atcatcattttcttcaccttcatct

SEQ ID NO: 1326172 - DNA, 25 bp, Homo sapien
tcagccttgatgactcccttttttg

SEQ ID NO: 1326173 - DNA, 25 bp, Homo sapien
atatgcagcaagatcctttttgtat

SEQ ID NO: 1326174 - DNA, 25 bp, Homo sapien
tatgcagcaagatcctttttgtatt

SEQ ID NO: 1326175 - DNA, 25 bp, Homo sapien
atgcagcaagatcctttttgtattt

SEQ ID NO: 1326176 - DNA, 25 bp, Homo sapien
caagatgttctttgatttggggcaa

SEQ ID NO: 1326177 - DNA, 25 bp, Homo sapien
aagatgttctttgatttggggcaac

SEQ ID NO: 1326178 - DNA, 25 bp, Homo sapien
aggccaagatgttctttgatttggg

SEQ ID NO: 1326179 - DNA, 25 bp, Homo sapien
ggacaggccaagatgttctttgatt

SEQ ID NO: 1326180 - DNA, 25 bp, Homo sapien
agaacagaacacgaaacaggctgca

SEQ ID NO: 1326181 - DNA, 25 bp, Homo sapien
agaacacgaaacaggctgcaggagg

SEQ ID NO: 1326182 - DNA, 25 bp, Homo sapien
gccacttgggtgcattggacttgaa

SEQ ID NO: 1326183 - DNA, 25 bp, Homo sapien
aacagaacacgaaacaggctgcagg

SEQ ID NO: 1326184 - DNA, 25 bp, Homo sapien
tcacaagaaatgcatatgataacat

SEQ ID NO: 1326185 - DNA, 25 bp, Homo sapien
gaagcttcttatgctccttctgaca

SEQ ID NO: 1326186 - DNA, 25 bp, Homo sapien
gaagttgactgaagcttcttatgct

SEQ ID NO: 1326187 - DNA, 25 bp, Homo sapien
tctgacaagttttcacaagaaatgc

SEQ ID NO: 1326188 - DNA, 25 bp, Homo sapien
aaggtcccagtcaactgtggcaata

SEQ ID NO: 1326189 - DNA, 25 bp, Homo sapien
tgtggcaataatgtaacacttatgc

SEQ ID NO: 1326190 - DNA, 25 bp, Homo sapien
gcaataatgtaacacttatgctgag

SEQ ID NO: 1326191 - DNA, 25 bp, Homo sapien
cttttaaggtcccagtcaactgtgg

SEQ ID NO: 1326192 - DNA, 25 bp, Homo sapien
cctttaatgtgttgggatccttctt

SEQ ID NO: 1326193 - DNA, 25 bp, Homo sapien
cttggtgtgcacatggtaatagttc

SEQ ID NO: 1326194 - DNA, 25 bp, Homo sapien
aaggtgggccgagctgtgtattata

SEQ ID NO: 1326195 - DNA, 25 bp, Homo sapien
gcataggttccttggtgtgcacatg

SEQ ID NO: 1326196 - DNA, 25 bp, Homo sapien
acggtcacatcacacttctgtttct

SEQ ID NO: 1326197 - DNA, 25 bp, Homo sapien
ttgcgtacttccttgttctattttg

SEQ ID NO: 1326198 - DNA, 25 bp, Homo sapien
tgcgtacttccttgttctattttgc

SEQ ID NO: 1326199 - DNA, 25 bp, Homo sapien
ccacggtcacatcacacttctgttt

SEQ ID NO: 1326200 - DNA, 25 bp, Homo sapien
tcccaacactggatcaacagtgggt

SEQ ID NO: 1326201 - DNA, 25 bp, Homo sapien
agtgggtagtttggctcctagcagt

SEQ ID NO: 1326202 - DNA, 25 bp, Homo sapien
ttggctcctagcagttcttgaaggg

SEQ ID NO: 1326203 - DNA, 25 bp, Homo sapien
caacactggatcaacagtgggtagt

SEQ ID NO: 1326204 - DNA, 25 bp, Homo sapien
ccagagcatcggcaggaaccgagga

SEQ ID NO: 1326205 - DNA, 25 bp, Homo sapien
ttcttgggaatgagtaacgcgggtc

SEQ ID NO: 1326206 - DNA, 25 bp, Homo sapien
tgagtaacgcgggtccacaggccgc

SEQ ID NO: 1326207 - DNA, 25 bp, Homo sapien
cggaaccgccctacgaggagaggct

SEQ ID NO: 1326208 - DNA, 25 bp, Homo sapien
gggaggagtcattcttttcctggag

SEQ ID NO: 1326209 - DNA, 25 bp, Homo sapien
ccagccgaggggaggagtcattctt

SEQ ID NO: 1326210 - DNA, 25 bp, Homo sapien
ggagtcattcttttcctggagcggg

SEQ ID NO: 1326211 - DNA, 25 bp, Homo sapien
ttgggatgtcgccggacccagccga

SEQ ID NO: 1326212 - DNA, 25 bp, Homo sapien
tgcttcagtgcgcaccttgacggct

SEQ ID NO: 1326213 - DNA, 25 bp, Homo sapien
tggctcagtcacacgtcgctctgtt

SEQ ID NO: 1326214 - DNA, 25 bp, Homo sapien
ttcagtcagggcgtttggcgagtcc

SEQ ID NO: 1326215 - DNA, 25 bp, Homo sapien
gcgttttccgctgcgggcccttcag

SEQ ID NO: 1326216 - DNA, 25 bp, Homo sapien
caagaggggcaggtgggcaggattc

SEQ ID NO: 1326217 - DNA, 25 bp, Homo sapien
ggcaagaggggcaggtgggcaggat

SEQ ID NO: 1326218 - DNA, 25 bp, Homo sapien
cagccgcaggcaagaggggcaggtg

SEQ ID NO: 1326219 - DNA, 25 bp, Homo sapien
agaggggcaggtgggcaggattcat

SEQ ID NO: 1326220 - DNA, 25 bp, Homo sapien
tatgtgtgtcccaaagactcagtgc

SEQ ID NO: 1326221 - DNA, 25 bp, Homo sapien
taaacctgataagtacaatgcgcgc

SEQ ID NO: 1326222 - DNA, 25 bp, Homo sapien
taccgcaacgaggaaagtgcacctt

SEQ ID NO: 1326223 - DNA, 25 bp, Homo sapien
caccttagagtgagaagacgcccag

SEQ ID NO: 1326224 - DNA, 25 bp, Homo sapien
gccgttgaccataggcccgtacagg

SEQ ID NO: 1326225 - DNA, 25 bp, Homo sapien
cgtcggcaccgaagtgactggcgtt

SEQ ID NO: 1326226 - DNA, 25 bp, Homo sapien
cggtcacgcatgagatcgctaaagg

SEQ ID NO: 1326227 - DNA, 25 bp, Homo sapien
tcgctaaaggcgtagtccatgggtg

SEQ ID NO: 1326228 - DNA, 25 bp, Homo sapien
gtggtgcggaggtgcggcgggcccc

SEQ ID NO: 1326229 - DNA, 25 bp, Homo sapien
ctgtggtgcggaggtgcggcgggcc

SEQ ID NO: 1326230 - DNA, 25 bp, Homo sapien
ggtgcggaggtgcggcgggccccgc

SEQ ID NO: 1326231 - DNA, 25 bp, Homo sapien
tgtggtgcggaggtgcggcgggccc

SEQ ID NO: 1326232 - DNA, 25 bp, Homo sapien
agcggcgcaggcagcccaggccccc

SEQ ID NO: 1326233 - DNA, 25 bp, Homo sapien
gcggcgcaggcagcccaggcccccc

SEQ ID NO: 1326234 - DNA, 25 bp, Homo sapien
gcgcaggcagcccaggccccccggc

SEQ ID NO: 1326235 - DNA, 25 bp, Homo sapien
aggcagcccaggccccccggcggcg

SEQ ID NO: 1326236 - DNA, 25 bp, Homo sapien
ggcccccacggtggtggttcagcac

SEQ ID NO: 1326237 - DNA, 25 bp, Homo sapien
cagcacccacggcggccttatctgg

SEQ ID NO: 1326238 - DNA, 25 bp, Homo sapien
gcggccttatctgggggcgccgcag

SEQ ID NO: 1326239 - DNA, 25 bp, Homo sapien
aggcccccacggtggtggttcagca

SEQ ID NO: 1326240 - DNA, 25 bp, Homo sapien
cagaaaaggactcgccatcgccgtt

SEQ ID NO: 1326241 - DNA, 25 bp, Homo sapien
tttgtcagcctctgaaccggattca

SEQ ID NO: 1326242 - DNA, 25 bp, Homo sapien
acgcctcgccggtggcctgggaaca

SEQ ID NO: 1326243 - DNA, 25 bp, Homo sapien
gtgtcaagatatccagcggcgtccg

SEQ ID NO: 1326244 - DNA, 25 bp, Homo sapien
taggaaacaggtcaaacttctgcaa

SEQ ID NO: 1326245 - DNA, 25 bp, Homo sapien
ccgagtctgcgccgtcgggtgataa

SEQ ID NO: 1326246 - DNA, 25 bp, Homo sapien
acaggtcaaacttctgcaacttggc

SEQ ID NO: 1326247 - DNA, 25 bp, Homo sapien
gtgataagggcttcaccggcggcgg

SEQ ID NO: 1326248 - DNA, 25 bp, Homo sapien
gggagaaaacgtgtcgtgaggagcg

SEQ ID NO: 1326249 - DNA, 25 bp, Homo sapien
gagaaaacgtgtcgtgaggagcggt

SEQ ID NO: 1326250 - DNA, 25 bp, Homo sapien
gaaaacgtgtcgtgaggagcggtta

SEQ ID NO: 1326251 - DNA, 25 bp, Homo sapien
aaaacgtgtcgtgaggagcggttag

SEQ ID NO: 1326252 - DNA, 25 bp, Homo sapien
tgtaaactcgatgttcagtgctgct

SEQ ID NO: 1326253 - DNA, 25 bp, Homo sapien
ctccacccttaactgcccttccagt

SEQ ID NO: 1326254 - DNA, 25 bp, Homo sapien
gtaaactcgatgttcagtgctgctt

SEQ ID NO: 1326255 - DNA, 25 bp, Homo sapien
aaactcgatgttcagtgctgctttc

SEQ ID NO: 1326256 - DNA, 25 bp, Homo sapien
gagaaaccagggagggtgcggaaga

SEQ ID NO: 1326257 - DNA, 25 bp, Homo sapien
tgagaaaccagggagggtgcggaag

SEQ ID NO: 1326258 - DNA, 25 bp, Homo sapien
ctgagaaaccagggagggtgcggaa

SEQ ID NO: 1326259 - DNA, 25 bp, Homo sapien
tccccccgccgtcggcggcgcacac

SEQ ID NO: 1326260 - DNA, 25 bp, Homo sapien
cgacaccacgccatggttgcgacag

SEQ ID NO: 1326261 - DNA, 25 bp, Homo sapien
ggcagtccttccagcgacagtagcg

SEQ ID NO: 1326262 - DNA, 25 bp, Homo sapien
gacagtagcgtttgtggcccttgag

SEQ ID NO: 1326263 - DNA, 25 bp, Homo sapien
tgaaccgaagacctcgtaggcgggc

SEQ ID NO: 1326264 - DNA, 25 bp, Homo sapien
ccgcagcaacagtggcggcccccgc

SEQ ID NO: 1326265 - DNA, 25 bp, Homo sapien
agcaacagtggcggcccccgcagca

SEQ ID NO: 1326266 - DNA, 25 bp, Homo sapien
cgcagcaacagtggcggcccccgca

SEQ ID NO: 1326267 - DNA, 25 bp, Homo sapien
gcagcaacagtggcggcccccgcag

SEQ ID NO: 1326268 - DNA, 25 bp, Homo sapien
ctcaccggtagcgatgcagcggccg

SEQ ID NO: 1326269 - DNA, 25 bp, Homo sapien
acaggcggccccgtcgctgttgccg

SEQ ID NO: 1326270 - DNA, 25 bp, Homo sapien
gcacgctgggcagctccgagcgcag

SEQ ID NO: 1326271 - DNA, 25 bp, Homo sapien
accgacgccaccgacgccacaggcg

SEQ ID NO: 1326272 - DNA, 25 bp, Homo sapien
tggccataaacggacaccagagtcc

SEQ ID NO: 1326273 - DNA, 25 bp, Homo sapien
tcgcaactggccataaacggacacc

SEQ ID NO: 1326274 - DNA, 25 bp, Homo sapien
caagccaggggagtcgccttcgcaa

SEQ ID NO: 1326275 - DNA, 25 bp, Homo sapien
gggagtcgccttcgcaactggccat

SEQ ID NO: 1326276 - DNA, 25 bp, Homo sapien
actggcgacgctggagctcttggcc

SEQ ID NO: 1326277 - DNA, 25 bp, Homo sapien
gctccactggcgacgctggagctct

SEQ ID NO: 1326278 - DNA, 25 bp, Homo sapien
gctcttggccgcttccctttgcccc

SEQ ID NO: 1326279 - DNA, 25 bp, Homo sapien
cgctggcgctgcacgcgcctcccgg

SEQ ID NO: 1326280 - DNA, 25 bp, Homo sapien
tcagtcaccatgtccgaacttccgg

SEQ ID NO: 1326281 - DNA, 25 bp, Homo sapien
gctgccagactctcaatgagccgct

SEQ ID NO: 1326282 - DNA, 25 bp, Homo sapien
ctcccttcagaaatccgggtcggag

SEQ ID NO: 1326283 - DNA, 25 bp, Homo sapien
gccgctcgcccgctctattgttggt

SEQ ID NO: 1326284 - DNA, 25 bp, Homo sapien
ggctgcaccgctcttactggcctgg

SEQ ID NO: 1326285 - DNA, 25 bp, Homo sapien
cttgtgtaacctctcggcttctggg

SEQ ID NO: 1326286 - DNA, 25 bp, Homo sapien
gggcgcttggcaaagccgagcttcc

SEQ ID NO: 1326287 - DNA, 25 bp, Homo sapien
tgtccggtgcgcctctctgcgtaga

SEQ ID NO: 1326288 - DNA, 25 bp, Homo sapien
accgcagaacctggcgccccggaag

SEQ ID NO: 1326289 - DNA, 25 bp, Homo sapien
cctggcgccccggaagagccctgga

SEQ ID NO: 1326290 - DNA, 25 bp, Homo sapien
ctggcgccccggaagagccctggaa

SEQ ID NO: 1326291 - DNA, 25 bp, Homo sapien
ccgaagaccgcagaacctggcgccc

SEQ ID NO: 1326292 - DNA, 25 bp, Homo sapien
gtgattcgctggaggaccgggcgga

SEQ ID NO: 1326293 - DNA, 25 bp, Homo sapien
gttactcgctcccagaaaatgccac

SEQ ID NO: 1326294 - DNA, 25 bp, Homo sapien
tctatgatagcgataaaaagctggt

SEQ ID NO: 1326295 - DNA, 25 bp, Homo sapien
gggcgctccgacacggacaaggtct

SEQ ID NO: 1326296 - DNA, 25 bp, Homo sapien
ggttccgaggccaagtatgtctagc

SEQ ID NO: 1326297 - DNA, 25 bp, Homo sapien
gaggccaagtatgtctagccccggc

SEQ ID NO: 1326298 - DNA, 25 bp, Homo sapien
caagtatgtctagccccggctgcac

SEQ ID NO: 1326299 - DNA, 25 bp, Homo sapien
acacctggaggttccgaggccaagt

SEQ ID NO: 1326300 - DNA, 25 bp, Homo sapien
gacaaccgccggattccgcgcaggg

SEQ ID NO: 1326301 - DNA, 25 bp, Homo sapien
aagagcgccgacaaccgccggattc

SEQ ID NO: 1326302 - DNA, 25 bp, Homo sapien
ctgggtaggtgagccatggggtcgg

SEQ ID NO: 1326303 - DNA, 25 bp, Homo sapien
gggaagagcgccgacaaccgccgga

SEQ ID NO: 1326304 - DNA, 25 bp, Homo sapien
gtcggaggggaaagcaagggcatgg

SEQ ID NO: 1326305 - DNA, 25 bp, Homo sapien
ccacacttcgacagggcaggatatc

SEQ ID NO: 1326306 - DNA, 25 bp, Homo sapien
ctgatttggattgggttggtcggag

SEQ ID NO: 1326307 - DNA, 25 bp, Homo sapien
acacttcgacagggcaggatatcct

SEQ ID NO: 1326308 - DNA, 25 bp, Homo sapien
caaatgaggcggctgagagcagagg

SEQ ID NO: 1326309 - DNA, 25 bp, Homo sapien
cacgcgtactcttagctcagaatca

SEQ ID NO: 1326310 - DNA, 25 bp, Homo sapien
gcagagggtcttcctcacacatcca

SEQ ID NO: 1326311 - DNA, 25 bp, Homo sapien
accctccgggacaaatgaggcggct

SEQ ID NO: 1326312 - DNA, 25 bp, Homo sapien
gacttttgcgctgtttgcccgcggc

SEQ ID NO: 1326313 - DNA, 25 bp, Homo sapien
cgccatctgtttgccggctgcgacg

SEQ ID NO: 1326314 - DNA, 25 bp, Homo sapien
ggctgcgacgcgtcccgtttaatta

SEQ ID NO: 1326315 - DNA, 25 bp, Homo sapien
gcggcctcggagcaagcagacgcca

SEQ ID NO: 1326316 - DNA, 25 bp, Homo sapien
gacgcgcagcttggtttcctgtccc

SEQ ID NO: 1326317 - DNA, 25 bp, Homo sapien
ggtcattttccgtggtcatagccac

SEQ ID NO: 1326318 - DNA, 25 bp, Homo sapien
cgtcctctgacaccgctaaaatggt

SEQ ID NO: 1326319 - DNA, 25 bp, Homo sapien
tcatagccacggatctatgccacga

SEQ ID NO: 1326320 - DNA, 25 bp, Homo sapien
tggtggcgccgggtttctcaggcgc

SEQ ID NO: 1326321 - DNA, 25 bp, Homo sapien
tgtggtggcgccgggtttctcaggc

SEQ ID NO: 1326322 - DNA, 25 bp, Homo sapien
ggtggcgccgggtttctcaggcgct

SEQ ID NO: 1326323 - DNA, 25 bp, Homo sapien
ctgtggtggcgccgggtttctcagg

SEQ ID NO: 1326324 - DNA, 25 bp, Homo sapien
tcgatactagttggtgcacagccca

SEQ ID NO: 1326325 - DNA, 25 bp, Homo sapien
gcggcactgacgcacatatgtctgc

SEQ ID NO: 1326326 - DNA, 25 bp, Homo sapien
aagtagacagcctgctgcgatggga

SEQ ID NO: 1326327 - DNA, 25 bp, Homo sapien
ggactccaggcttgctgcggcactg

SEQ ID NO: 1326328 - DNA, 25 bp, Homo sapien
ctttacgacccagcctcagagatct

SEQ ID NO: 1326329 - DNA, 25 bp, Homo sapien
gcacaataggcacacactgactccg

SEQ ID NO: 1326330 - DNA, 25 bp, Homo sapien
agaggcacaataggcacacactgac

SEQ ID NO: 1326331 - DNA, 25 bp, Homo sapien
actgactccgcaaactctccaagta

SEQ ID NO: 1326332 - DNA, 25 bp, Homo sapien
tgaaattggtggccccaacccactc

SEQ ID NO: 1326333 - DNA, 25 bp, Homo sapien
agcctttctgacagcccggactggg

SEQ ID NO: 1326334 - DNA, 25 bp, Homo sapien
cttctagcaccaccctgaaattggt

SEQ ID NO: 1326335 - DNA, 25 bp, Homo sapien
tctgacagcccggactggggacctc

SEQ ID NO: 1326336 - DNA, 25 bp, Homo sapien
aaagaatggacagattcttctcccc

SEQ ID NO: 1326337 - DNA, 25 bp, Homo sapien
aaagtctagtgattgtatttcatcc

SEQ ID NO: 1326338 - DNA, 25 bp, Homo sapien
cttccaaagcagattatttgagaca

SEQ ID NO: 1326339 - DNA, 25 bp, Homo sapien
tactaaatgcagagatattcaaggc

SEQ ID NO: 1326340 - DNA, 25 bp, Homo sapien
aaaaaagaggtggtgccctggtgca

SEQ ID NO: 1326341 - DNA, 25 bp, Homo sapien
ttctgagaaccccttggccgaggct

SEQ ID NO: 1326342 - DNA, 25 bp, Homo sapien
tggtactggcctctctgcacatgat

SEQ ID NO: 1326343 - DNA, 25 bp, Homo sapien
tacactgatggactagcaacttggg

SEQ ID NO: 1326344 - DNA, 25 bp, Homo sapien
atggctggttccaccgctgggccgt

SEQ ID NO: 1326345 - DNA, 25 bp, Homo sapien
tgctggcttgtcaaggaatggctgg

SEQ ID NO: 1326346 - DNA, 25 bp, Homo sapien
tgtgggtgggttggcgaggagccct

SEQ ID NO: 1326347 - DNA, 25 bp, Homo sapien
cattgaattgagtgagacgagcgtg

SEQ ID NO: 1326348 - DNA, 25 bp, Homo sapien
tgcttcaaggaaaagggtttcttga

SEQ ID NO: 1326349 - DNA, 25 bp, Homo sapien
ccaataatgatttatttgggtccag

SEQ ID NO: 1326350 - DNA, 25 bp, Homo sapien
aataatgatttatttgggtccagtt

SEQ ID NO: 1326351 - DNA, 25 bp, Homo sapien
gatttatttgggtccagttgagtta

SEQ ID NO: 1326352 - DNA, 25 bp, Homo sapien
aatgatttatttgggtccagttgag

SEQ ID NO: 1326353 - DNA, 25 bp, Homo sapien
tgactggcattcctagagacctctg

SEQ ID NO: 1326354 - DNA, 25 bp, Homo sapien
gagacctctgcttggttagccccta

SEQ ID NO: 1326355 - DNA, 25 bp, Homo sapien
caacgatgaagatctcccctggtga

SEQ ID NO: 1326356 - DNA, 25 bp, Homo sapien
tatgcactggcacgaagagtctcgc

SEQ ID NO: 1326357 - DNA, 25 bp, Homo sapien
ctcttacgccaatgtcaaggacaag

SEQ ID NO: 1326358 - DNA, 25 bp, Homo sapien
tgtcaaggacaagcaggtctaatcc

SEQ ID NO: 1326359 - DNA, 25 bp, Homo sapien
tacgccaatgtcaaggacaagcagg

SEQ ID NO: 1326360 - DNA, 25 bp, Homo sapien
ttacgccaatgtcaaggacaagcag

SEQ ID NO: 1326361 - DNA, 25 bp, Homo sapien
ggaaccaacctgctctcatgttaca

SEQ ID NO: 1326362 - DNA, 25 bp, Homo sapien
catgttacaaggtacgagggcctgc

SEQ ID NO: 1326363 - DNA, 25 bp, Homo sapien
ggcctgcagtgtccagctataccat

SEQ ID NO: 1326364 - DNA, 25 bp, Homo sapien
gctataccatggactgagtgggcaa

SEQ ID NO: 1326365 - DNA, 25 bp, Homo sapien
atgggaaaatcaactagtcagggca

SEQ ID NO: 1326366 - DNA, 25 bp, Homo sapien
gaatgtgctactaaacttcgttctg

SEQ ID NO: 1326367 - DNA, 25 bp, Homo sapien
tatgcacagtcgtacaaccagaaat

SEQ ID NO: 1326368 - DNA, 25 bp, Homo sapien
ggctgcatatgtaagttcccagatt

SEQ ID NO: 1326369 - DNA, 25 bp, Homo sapien
tatacaaagaacgagaacaggcatg

SEQ ID NO: 1326370 - DNA, 25 bp, Homo sapien
aaaagctgtaaccttctccttgcag

SEQ ID NO: 1326371 - DNA, 25 bp, Homo sapien
caggagatgatccaagtcttcagaa

SEQ ID NO: 1326372 - DNA, 25 bp, Homo sapien
tagtgaagacaccagctctaaggta

SEQ ID NO: 1326373 - DNA, 25 bp, Homo sapien
ggcatgtattatcaacatccaggtc

SEQ ID NO: 1326374 - DNA, 25 bp, Homo sapien
aaaagacccagagacgtatgtacct

SEQ ID NO: 1326375 - DNA, 25 bp, Homo sapien
ggagacatggttcccagcttaaccc

SEQ ID NO: 1326376 - DNA, 25 bp, Homo sapien
gatcacataacaagtggctagaaga

SEQ ID NO: 1326377 - DNA, 25 bp, Homo sapien
taaagaattctgtggagcactatgc

SEQ ID NO: 1326378 - DNA, 25 bp, Homo sapien
tataagccgcttggcagctctaagt

SEQ ID NO: 1326379 - DNA, 25 bp, Homo sapien
caaaagacctaggtgaagccactgc

SEQ ID NO: 1326380 - DNA, 25 bp, Homo sapien
gccactgctctgcaacttagctagg

SEQ ID NO: 1326381 - DNA, 25 bp, Homo sapien
caaacagttgatattggacaaagat

SEQ ID NO: 1326382 - DNA, 25 bp, Homo sapien
caggtcctctgctgagaaaccagtc

SEQ ID NO: 1326383 - DNA, 25 bp, Homo sapien
aaccagtctctgctttgtggagaaa

SEQ ID NO: 1326384 - DNA, 25 bp, Homo sapien
ggtcctctgctgagaaaccagtctc

SEQ ID NO: 1326385 - DNA, 25 bp, Homo sapien
tcctctgctgagaaaccagtctctg

SEQ ID NO: 1326386 - DNA, 25 bp, Homo sapien
caacagcaactttccacagtccaga

SEQ ID NO: 1326387 - DNA, 25 bp, Homo sapien
tcctttcaacagcaactttccacag

SEQ ID NO: 1326388 - DNA, 25 bp, Homo sapien
cagcaactttccacagtccagagtt

SEQ ID NO: 1326389 - DNA, 25 bp, Homo sapien
caactttccacagtccagagtttta

SEQ ID NO: 1326390 - DNA, 25 bp, Homo sapien
tactcatcccatggaaatcctttgg

SEQ ID NO: 1326391 - DNA, 25 bp, Homo sapien
cttgctctaaggacagccggatggc

SEQ ID NO: 1326392 - DNA, 25 bp, Homo sapien
ggtccggatccgcagtttgctcaca

SEQ ID NO: 1326393 - DNA, 25 bp, Homo sapien
acaatctggagcttgttgctggcca

SEQ ID NO: 1326394 - DNA, 25 bp, Homo sapien
tcttcttgttctttgcgaatctgct

SEQ ID NO: 1326395 - DNA, 25 bp, Homo sapien
tgccatctctctctcgtgagcttcc

SEQ ID NO: 1326396 - DNA, 25 bp, Homo sapien
tgcgaatctgctccaaacgaaactg

SEQ ID NO: 1326397 - DNA, 25 bp, Homo sapien
tccaaacgaaactgttctgccatct

SEQ ID NO: 1326398 - DNA, 25 bp, Homo sapien
caagtgaaaggcgataggcctcatc

SEQ ID NO: 1326399 - DNA, 25 bp, Homo sapien
cctcaagtgaaaggcgataggcctc

SEQ ID NO: 1326400 - DNA, 25 bp, Homo sapien
tgaaaggcgataggcctcatcttgc

SEQ ID NO: 1326401 - DNA, 25 bp, Homo sapien
ctgtcagcctcaagtgaaaggcgat

SEQ ID NO: 1326402 - DNA, 25 bp, Homo sapien
ccaaatttatcatggtcatagcttc

SEQ ID NO: 1326403 - DNA, 25 bp, Homo sapien
cagattttatacttgcctctccaac

SEQ ID NO: 1326404 - DNA, 25 bp, Homo sapien
tatgtttggtagttgttggtgaatg

SEQ ID NO: 1326405 - DNA, 25 bp, Homo sapien
tcatagcttcttgtatgtttggtag

SEQ ID NO: 1326406 - DNA, 25 bp, Homo sapien
tgagagagaaaactgcttatgtgtt

SEQ ID NO: 1326407 - DNA, 25 bp, Homo sapien
ttgagagagaaaactgcttatgtgt

SEQ ID NO: 1326408 - DNA, 25 bp, Homo sapien
gagaaaactgcttatgtgtttcccc

SEQ ID NO: 1326409 - DNA, 25 bp, Homo sapien
gagagaaaactgcttatgtgtttcc

SEQ ID NO: 1326410 - DNA, 25 bp, Homo sapien
aggctaaggacattttactcgattc

SEQ ID NO: 1326411 - DNA, 25 bp, Homo sapien
ttcaaatctgataaggcaagaaaaa

SEQ ID NO: 1326412 - DNA, 25 bp, Homo sapien
tgtggaaaattctaaggattctacc

SEQ ID NO: 1326413 - DNA, 25 bp, Homo sapien
tgtctgatgccgtctctgcatccac

SEQ ID NO: 1326414 - DNA, 25 bp, Homo sapien
tgtaaacaccactgcatttggacca

SEQ ID NO: 1326415 - DNA, 25 bp, Homo sapien
caaagaaatttgttactggttgtgg

SEQ ID NO: 1326416 - DNA, 25 bp, Homo sapien
ttgttactggttgtggtcaattagc

SEQ ID NO: 1326417 - DNA, 25 bp, Homo sapien
gaaatttgttactggttgtggtcaa

SEQ ID NO: 1326418 - DNA, 25 bp, Homo sapien
atctgtatgtcgaacatcataaaac

SEQ ID NO: 1326419 - DNA, 25 bp, Homo sapien
tctgtatgtcgaacatcataaaaca

SEQ ID NO: 1326420 - DNA, 25 bp, Homo sapien
ctgtatgtcgaacatcataaaacac

SEQ ID NO: 1326421 - DNA, 25 bp, Homo sapien
caatctgtatgtcgaacatcataaa

SEQ ID NO: 1326422 - DNA, 25 bp, Homo sapien
tgttaaagtatcatgtgtaccccat

SEQ ID NO: 1326423 - DNA, 25 bp, Homo sapien
ttcttgaccagggaaatgctatcta

SEQ ID NO: 1326424 - DNA, 25 bp, Homo sapien
aaagacacatagacagcaaataagc

SEQ ID NO: 1326425 - DNA, 25 bp, Homo sapien
agtgacaaaaccatagactgagaga

SEQ ID NO: 1326426 - DNA, 25 bp, Homo sapien
ccaatctggtctctaacagcttcag

SEQ ID NO: 1326427 - DNA, 25 bp, Homo sapien
cagcttcaggtactgagttttcatt

SEQ ID NO: 1326428 - DNA, 25 bp, Homo sapien
tttttagagataagtggcaagtacc

SEQ ID NO: 1326429 - DNA, 25 bp, Homo sapien
gactatatccctccgttttgaacca

SEQ ID NO: 1326430 - DNA, 25 bp, Homo sapien
tctgttgatttttgaaaaccctgcc

SEQ ID NO: 1326431 - DNA, 25 bp, Homo sapien
gagatgatgattagtgcttagcaca

SEQ ID NO: 1326432 - DNA, 25 bp, Homo sapien
gattgatatacaacttcacgggtta

SEQ ID NO: 1326433 - DNA, 25 bp, Homo sapien
tcttgcaaatcgacttcctgtaccc

SEQ ID NO: 1326434 - DNA, 25 bp, Homo sapien
tctcatcattaactcatctactgtt

SEQ ID NO: 1326435 - DNA, 25 bp, Homo sapien
ctgtgaagatctccattgcagccat

SEQ ID NO: 1326436 - DNA, 25 bp, Homo sapien
gcagccatgagtctcatcattaact

SEQ ID NO: 1326437 - DNA, 25 bp, Homo sapien
gatctccattgcagccatgagtctc

SEQ ID NO: 1326438 - DNA, 25 bp, Homo sapien
tatactggcagttgaaatttcggaa

SEQ ID NO: 1326439 - DNA, 25 bp, Homo sapien
aatctgaaaccagaagaggctgact

SEQ ID NO: 1326440 - DNA, 25 bp, Homo sapien
gactaaggtcaagctggttaagtgg

SEQ ID NO: 1326441 - DNA, 25 bp, Homo sapien
tatatcactgattaggctaagcact

SEQ ID NO: 1326442 - DNA, 25 bp, Homo sapien
gtccataacaaacatatagcacata

SEQ ID NO: 1326443 - DNA, 25 bp, Homo sapien
gtcattttattccaaccgagtccat

SEQ ID NO: 1326444 - DNA, 25 bp, Homo sapien
ttgcttgggatgtacctacaaaaga

SEQ ID NO: 1326445 - DNA, 25 bp, Homo sapien
aagtcattgttatttgcttgggatg

SEQ ID NO: 1326446 - DNA, 25 bp, Homo sapien
taggttttctccaaggcttgagaag

SEQ ID NO: 1326447 - DNA, 25 bp, Homo sapien
agagttaggttttctccaaggcttg

SEQ ID NO: 1326448 - DNA, 25 bp, Homo sapien
gcaatggccatcctttacaggacaa

SEQ ID NO: 1326449 - DNA, 25 bp, Homo sapien
taatgcaatggccatcctttacagg

SEQ ID NO: 1326450 - DNA, 25 bp, Homo sapien
gatgatcgctttcccataataatca

SEQ ID NO: 1326451 - DNA, 25 bp, Homo sapien
agtccgaatggtttgtgccacaaca

SEQ ID NO: 1326452 - DNA, 25 bp, Homo sapien
cactgccaaagtgtctattgcacat

SEQ ID NO: 1326453 - DNA, 25 bp, Homo sapien
agcggaaactgatccgttttttgag

SEQ ID NO: 1326454 - DNA, 25 bp, Homo sapien
attagaggactgtttgaaattagca

SEQ ID NO: 1326455 - DNA, 25 bp, Homo sapien
aaagggtagcttatgatatgttttc

SEQ ID NO: 1326456 - DNA, 25 bp, Homo sapien
gtagcttatgatatgttttcagatc

SEQ ID NO: 1326457 - DNA, 25 bp, Homo sapien
ctattagaggactgtttgaaattag

SEQ ID NO: 1326458 - DNA, 25 bp, Homo sapien
ttctcaattgctctacattctatga

SEQ ID NO: 1326459 - DNA, 25 bp, Homo sapien
tctcaattgctctacattctatgat

SEQ ID NO: 1326460 - DNA, 25 bp, Homo sapien
gctgctggcagaacgcaaaccttga

SEQ ID NO: 1326461 - DNA, 25 bp, Homo sapien
caaaccttgagttaaaccatgctgc

SEQ ID NO: 1326462 - DNA, 25 bp, Homo sapien
ttctgaagttacaagaacacacggc

SEQ ID NO: 1326463 - DNA, 25 bp, Homo sapien
aacacacggcattgtttgcagggac

SEQ ID NO: 1326464 - DNA, 25 bp, Homo sapien
gcacagcagcggaagtttgcagtga

SEQ ID NO: 1326465 - DNA, 25 bp, Homo sapien
cacagcagcggaagtttgcagtgac

SEQ ID NO: 1326466 - DNA, 25 bp, Homo sapien
ccagtgaatggcaaaagatttagcc

SEQ ID NO: 1326467 - DNA, 25 bp, Homo sapien
ttgcctcatgaaagaccttcgatgt

SEQ ID NO: 1326468 - DNA, 25 bp, Homo sapien
tctgtttttggcactgcttttcatc

SEQ ID NO: 1326469 - DNA, 25 bp, Homo sapien
ccttcgatgtggcatttttatctgt

SEQ ID NO: 1326470 - DNA, 25 bp, Homo sapien
gaaacaatggattcagcacaaagca

SEQ ID NO: 1326471 - DNA, 25 bp, Homo sapien
tgtcagatcccaagcccaggttata

SEQ ID NO: 1326472 - DNA, 25 bp, Homo sapien
aaagcatttgtgagcagaacacgtt

SEQ ID NO: 1326473 - DNA, 25 bp, Homo sapien
ttttgactcagataagaaacaatgg

SEQ ID NO: 1326474 - DNA, 25 bp, Homo sapien
tgttgactaacttcttggtactacc

SEQ ID NO: 1326475 - DNA, 25 bp, Homo sapien
tgtccactgtggctcttcatataga

SEQ ID NO: 1326476 - DNA, 25 bp, Homo sapien
tctgtcatagttggatactcaatgc

SEQ ID NO: 1326477 - DNA, 25 bp, Homo sapien
cattgatggtttgcaacatgttagc

SEQ ID NO: 1326478 - DNA, 25 bp, Homo sapien
gcatgctgaagtttttaggggtaaa

SEQ ID NO: 1326479 - DNA, 25 bp, Homo sapien
aaatatacagtataccctaaatgtt

SEQ ID NO: 1326480 - DNA, 25 bp, Homo sapien
tgtatatgcactggatagtagataa

SEQ ID NO: 1326481 - DNA, 25 bp, Homo sapien
gggtaaagtatgacatctataattt

SEQ ID NO: 1326482 - DNA, 25 bp, Homo sapien
catagaaggcctcttgaaaagcagc

SEQ ID NO: 1326483 - DNA, 25 bp, Homo sapien
aaatacaggatggcaatcaccatat

SEQ ID NO: 1326484 - DNA, 25 bp, Homo sapien
taatgagccaataaaaaatacagga

SEQ ID NO: 1326485 - DNA, 25 bp, Homo sapien
atctcgggctttcacatagaaggcc

SEQ ID NO: 1326486 - DNA, 25 bp, Homo sapien
tgtaaattgtaataaggcatctcct

SEQ ID NO: 1326487 - DNA, 25 bp, Homo sapien
agaaaactctgctgtaaattgtaat

SEQ ID NO: 1326488 - DNA, 25 bp, Homo sapien
gaaaactctgctgtaaattgtaata

SEQ ID NO: 1326489 - DNA, 25 bp, Homo sapien
gacgccatgccaaatacttctccat

SEQ ID NO: 1326490 - DNA, 25 bp, Homo sapien
taaccatatgaacatcggtgatttg

SEQ ID NO: 1326491 - DNA, 25 bp, Homo sapien
aaagtcatctccatcgctatcacta

SEQ ID NO: 1326492 - DNA, 25 bp, Homo sapien
gcagatgacgccatgccaaatactt

SEQ ID NO: 1326493 - DNA, 25 bp, Homo sapien
gccatggctagcaacaatgaaggcc

SEQ ID NO: 1326494 - DNA, 25 bp, Homo sapien
gctgcaagggctactggagtcctct

SEQ ID NO: 1326495 - DNA, 25 bp, Homo sapien
tccttgacggcaaaagttgtgggag

SEQ ID NO: 1326496 - DNA, 25 bp, Homo sapien
tgtccagcaacaaagggccatggct

SEQ ID NO: 1326497 - DNA, 25 bp, Homo sapien
ctctggtgtagaggctggctgcaga

SEQ ID NO: 1326498 - DNA, 25 bp, Homo sapien
agcaactgaggataaattgttacct

SEQ ID NO: 1326499 - DNA, 25 bp, Homo sapien
ccaagcaactgaggataaattgtta

SEQ ID NO: 1326500 - DNA, 25 bp, Homo sapien
agccagggtcaacaaggcccccaca

SEQ ID NO: 1326501 - DNA, 25 bp, Homo sapien
agggtcaacaaggcccccacactgt

SEQ ID NO: 1326502 - DNA, 25 bp, Homo sapien
tgaaacatgaaactaacagagcgag

SEQ ID NO: 1326503 - DNA, 25 bp, Homo sapien
agcctgatggttctaagtaaaaatc

SEQ ID NO: 1326504 - DNA, 25 bp, Homo sapien
agaaagttctttgttagcctgatgg

SEQ ID NO: 1326505 - DNA, 25 bp, Homo sapien
aatccatctgaattccgtctgttga

SEQ ID NO: 1326506 - DNA, 25 bp, Homo sapien
tctgtgcaggtgaagatcttcttcc

SEQ ID NO: 1326507 - DNA, 25 bp, Homo sapien
agggataagagagccctgattcagc

SEQ ID NO: 1326508 - DNA, 25 bp, Homo sapien
cttccgactgttcccgggtctgtgc

SEQ ID NO: 1326509 - DNA, 25 bp, Homo sapien
cccactgtaagtcgatggcagggat

SEQ ID NO: 1326510 - DNA, 25 bp, Homo sapien
aaggcaggcacttaacaaattcttg

SEQ ID NO: 1326511 - DNA, 25 bp, Homo sapien
caaattcttgttgatccctaaagga

SEQ ID NO: 1326512 - DNA, 25 bp, Homo sapien
gaaaaaatagctatagttggcaaga

SEQ ID NO: 1326513 - DNA, 25 bp, Homo sapien
tagtaacaggagacggctaagtgta

SEQ ID NO: 1326514 - DNA, 25 bp, Homo sapien
tgtaaaatactaacaaatatcttga

SEQ ID NO: 1326515 - DNA, 25 bp, Homo sapien
acggccgactgccacctcgatctcc

SEQ ID NO: 1326516 - DNA, 25 bp, Homo sapien
tgggctcccccttttggcctctcaa

SEQ ID NO: 1326517 - DNA, 25 bp, Homo sapien
tggtacaatcacggccgactgccac

SEQ ID NO: 1326518 - DNA, 25 bp, Homo sapien
catttagttgcttatgagcaccctc

SEQ ID NO: 1326519 - DNA, 25 bp, Homo sapien
taacactgtctaatggcatagtccc

SEQ ID NO: 1326520 - DNA, 25 bp, Homo sapien
tatcctcaggtaagtaagtgctcaa

SEQ ID NO: 1326521 - DNA, 25 bp, Homo sapien
tgtcatagcgagataaagagctgct

SEQ ID NO: 1326522 - DNA, 25 bp, Homo sapien
ctgcttacgactgggaatttcgaaa

SEQ ID NO: 1326523 - DNA, 25 bp, Homo sapien
aggatacattacatagccatgtcca

SEQ ID NO: 1326524 - DNA, 25 bp, Homo sapien
gggaatttcgaaaggatacattaca

SEQ ID NO: 1326525 - DNA, 25 bp, Homo sapien
tacgactgggaatttcgaaaggata

SEQ ID NO: 1326526 - DNA, 25 bp, Homo sapien
cctcttagtaagaatgaacctggca

SEQ ID NO: 1326527 - DNA, 25 bp, Homo sapien
tcgatcacagacctaacagacagca

SEQ ID NO: 1326528 - DNA, 25 bp, Homo sapien
caaccacaatgtgtcaagacctcag

SEQ ID NO: 1326529 - DNA, 25 bp, Homo sapien
ggctcatattttcacccagggtcga

SEQ ID NO: 1326530 - DNA, 25 bp, Homo sapien
ctttaggtgtctggcagaattcagc

SEQ ID NO: 1326531 - DNA, 25 bp, Homo sapien
agcttgatactcgtctattcaggga

SEQ ID NO: 1326532 - DNA, 25 bp, Homo sapien
tcagtagcactgataccagttcttc

SEQ ID NO: 1326533 - DNA, 25 bp, Homo sapien
cagttcttctttaggtgtctggcag

SEQ ID NO: 1326534 - DNA, 25 bp, Homo sapien
taatgttcagtataaggagctccca

SEQ ID NO: 1326535 - DNA, 25 bp, Homo sapien
tcagtggcaatactctaatgttcag

SEQ ID NO: 1326536 - DNA, 25 bp, Homo sapien
aagttttaatcctgtctctgcggcc

SEQ ID NO: 1326537 - DNA, 25 bp, Homo sapien
tatggatcaattagtaaacccttgg

SEQ ID NO: 1326538 - DNA, 25 bp, Homo sapien
cgttttcatctcacattccataaaa

SEQ ID NO: 1326539 - DNA, 25 bp, Homo sapien
gttgctacccagtgaacattattca

SEQ ID NO: 1326540 - DNA, 25 bp, Homo sapien
tgctcatcatgagttgctacccagt

SEQ ID NO: 1326541 - DNA, 25 bp, Homo sapien
gccacaatgtgtagcatgctcatca

SEQ ID NO: 1326542 - DNA, 25 bp, Homo sapien
aagctgccgctgaatgtcacctgaa

SEQ ID NO: 1326543 - DNA, 25 bp, Homo sapien
cactacggcaaccagcagggaataa

SEQ ID NO: 1326544 - DNA, 25 bp, Homo sapien
caggaactataaaaggacactctac

SEQ ID NO: 1326545 - DNA, 25 bp, Homo sapien
tgttggtatgaagtggcacagcaaa

SEQ ID NO: 1326546 - DNA, 25 bp, Homo sapien
taccatacctgatctgaggcaaaca

SEQ ID NO: 1326547 - DNA, 25 bp, Homo sapien
taaggtctcagatcaacatactcat

SEQ ID NO: 1326548 - DNA, 25 bp, Homo sapien
gaaatggcatggtacaagagaaagc

SEQ ID NO: 1326549 - DNA, 25 bp, Homo sapien
gccattggtttcttagattagcgca

SEQ ID NO: 1326550 - DNA, 25 bp, Homo sapien
ttttgattggcattgcagtgaatcc

SEQ ID NO: 1326551 - DNA, 25 bp, Homo sapien
tgagattttgattggcattgcagtg

SEQ ID NO: 1326552 - DNA, 25 bp, Homo sapien
gattttgattggcattgcagtgaat

SEQ ID NO: 1326553 - DNA, 25 bp, Homo sapien
ttgagattttgattggcattgcagt

SEQ ID NO: 1326554 - DNA, 25 bp, Homo sapien
actccttggcaacccactgactgga

SEQ ID NO: 1326555 - DNA, 25 bp, Homo sapien
gcttatcattcactagttgacggac

SEQ ID NO: 1326556 - DNA, 25 bp, Homo sapien
cacacagtgatgtagtctttgtgcc

SEQ ID NO: 1326557 - DNA, 25 bp, Homo sapien
gttccaatgttgcaccatccacgta

SEQ ID NO: 1326558 - DNA, 25 bp, Homo sapien
ttggaaaagaatatgaagaggatta

SEQ ID NO: 1326559 - DNA, 25 bp, Homo sapien
ccaatgtctcggaccaattttggta

SEQ ID NO: 1326560 - DNA, 25 bp, Homo sapien
agaatatgaagaggattagaattag

SEQ ID NO: 1326561 - DNA, 25 bp, Homo sapien
tccccaatgtctcggaccaattttg

SEQ ID NO: 1326562 - DNA, 25 bp, Homo sapien
ctgagcaaacatttcccttgagtgc

SEQ ID NO: 1326563 - DNA, 25 bp, Homo sapien
gcttcatccacattcccaaacttct

SEQ ID NO: 1326564 - DNA, 25 bp, Homo sapien
tagtgcttgtaagtttccaactggg

SEQ ID NO: 1326565 - DNA, 25 bp, Homo sapien
ctcttgttcagaatagaattcattt

SEQ ID NO: 1326566 - DNA, 25 bp, Homo sapien
gggattagaggcggccgccaagtga

SEQ ID NO: 1326567 - DNA, 25 bp, Homo sapien
gaggcggccgccaagtgattctctt

SEQ ID NO: 1326568 - DNA, 25 bp, Homo sapien
gattagaggcggccgccaagtgatt

SEQ ID NO: 1326569 - DNA, 25 bp, Homo sapien
ttagaggcggccgccaagtgattct

SEQ ID NO: 1326570 - DNA, 25 bp, Homo sapien
agttggccagccctcccataattgg

SEQ ID NO: 1326571 - DNA, 25 bp, Homo sapien
cctcccataattggtggcgaacggg

SEQ ID NO: 1326572 - DNA, 25 bp, Homo sapien
ccagccctcccataattggtggcga

SEQ ID NO: 1326573 - DNA, 25 bp, Homo sapien
cggggatacttgtaaggtcatacac

SEQ ID NO: 1326574 - DNA, 25 bp, Homo sapien
aggctcttcctcttatacacttttg

SEQ ID NO: 1326575 - DNA, 25 bp, Homo sapien
cttcaccccttacattagtaaggat

SEQ ID NO: 1326576 - DNA, 25 bp, Homo sapien
tggccaatgccttctgagtctcctt

SEQ ID NO: 1326577 - DNA, 25 bp, Homo sapien
tctccttcaccccttacattagtaa

SEQ ID NO: 1326578 - DNA, 25 bp, Homo sapien
gatgctcagacgtgatgtgatgttt

SEQ ID NO: 1326579 - DNA, 25 bp, Homo sapien
gctcagacgtgatgtgatgtttatg

SEQ ID NO: 1326580 - DNA, 25 bp, Homo sapien
cgctgatgctcagacgtgatgtgat

SEQ ID NO: 1326581 - DNA, 25 bp, Homo sapien
accacgctgatgctcagacgtgatg

SEQ ID NO: 1326582 - DNA, 25 bp, Homo sapien
ctagatacttacatgcttcacttca

SEQ ID NO: 1326583 - DNA, 25 bp, Homo sapien
gagggacagggtatcacccagctaa

SEQ ID NO: 1326584 - DNA, 25 bp, Homo sapien
ccactcacagctagtagtgacccta

SEQ ID NO: 1326585 - DNA, 25 bp, Homo sapien
ccctattggacaatatattgatact

SEQ ID NO: 1326586 - DNA, 25 bp, Homo sapien
tatagtgatagctaactcaaaggga

SEQ ID NO: 1326587 - DNA, 25 bp, Homo sapien
tgtcatgcagtccaaaataaacggt

SEQ ID NO: 1326588 - DNA, 25 bp, Homo sapien
gattctgatcaaagataccttgcct

SEQ ID NO: 1326589 - DNA, 25 bp, Homo sapien
tccttgaaaattgtcacagcctggc

SEQ ID NO: 1326590 - DNA, 25 bp, Homo sapien
atgatataccggtaaatggctctcc

SEQ ID NO: 1326591 - DNA, 25 bp, Homo sapien
ttcctatcacagtcgaggcattcag

SEQ ID NO: 1326592 - DNA, 25 bp, Homo sapien
tcaggcagtagaggaataaagcagc

SEQ ID NO: 1326593 - DNA, 25 bp, Homo sapien
tgaaattcggtctctgccagcaggg

SEQ ID NO: 1326594 - DNA, 25 bp, Homo sapien
gaagagctgagggaactacatgagc

SEQ ID NO: 1326595 - DNA, 25 bp, Homo sapien
caacatgtgtcagggaagtgatcct

SEQ ID NO: 1326596 - DNA, 25 bp, Homo sapien
taaagagtccgtgtagcgagataga

SEQ ID NO: 1326597 - DNA, 25 bp, Homo sapien
tcagcaggaccattgtgttgcacag

SEQ ID NO: 1326598 - DNA, 25 bp, Homo sapien
taagtcttagatttggatctgtgat

SEQ ID NO: 1326599 - DNA, 25 bp, Homo sapien
tagttttagtgtcctaactgagaaa

SEQ ID NO: 1326600 - DNA, 25 bp, Homo sapien
gccctctgaggcactaaagttttta

SEQ ID NO: 1326601 - DNA, 25 bp, Homo sapien
catatatcctagatacaagtctctt

SEQ ID NO: 1326602 - DNA, 25 bp, Homo sapien
caatgccggctttgcaatgagcaga

SEQ ID NO: 1326603 - DNA, 25 bp, Homo sapien
ttgccttgcagctgtaaaaccctag

SEQ ID NO: 1326604 - DNA, 25 bp, Homo sapien
tatagccctatattgagcagcagga

SEQ ID NO: 1326605 - DNA, 25 bp, Homo sapien
tactctactgtctggtcacgcaatg

SEQ ID NO: 1326606 - DNA, 25 bp, Homo sapien
taagtgtcattgtggattgaatagc

SEQ ID NO: 1326607 - DNA, 25 bp, Homo sapien
caggtgttgcacaagttgaagcaga

SEQ ID NO: 1326608 - DNA, 25 bp, Homo sapien
ttgaatagctgtagataagggcacc

SEQ ID NO: 1326609 - DNA, 25 bp, Homo sapien
ccctccatcacaggtgttgcacaag

SEQ ID NO: 1326610 - DNA, 25 bp, Homo sapien
tcaggtgtgagcagattgcattaac

SEQ ID NO: 1326611 - DNA, 25 bp, Homo sapien
aactcgatttcggaaatatttgcag

SEQ ID NO: 1326612 - DNA, 25 bp, Homo sapien
acatttcaacttgtcagtatggcca

SEQ ID NO: 1326613 - DNA, 25 bp, Homo sapien
agtattttcccatcgaaacagtaat

SEQ ID NO: 1326614 - DNA, 25 bp, Homo sapien
ttgtgggagaaagctgaaacacact

SEQ ID NO: 1326615 - DNA, 25 bp, Homo sapien
ctgctgaatagtcctttctgccctc

SEQ ID NO: 1326616 - DNA, 25 bp, Homo sapien
gctgaaacacactcaaataacagaa

SEQ ID NO: 1326617 - DNA, 25 bp, Homo sapien
ggctatctgctgaatagtcctttct

SEQ ID NO: 1326618 - DNA, 25 bp, Homo sapien
tttatttcttagctgtgagacataa

SEQ ID NO: 1326619 - DNA, 25 bp, Homo sapien
ctttatttcttagctgtgagacata

SEQ ID NO: 1326620 - DNA, 25 bp, Homo sapien
ttatttcttagctgtgagacataac

SEQ ID NO: 1326621 - DNA, 25 bp, Homo sapien
gaatagtactgcttcctgagaagtt

SEQ ID NO: 1326622 - DNA, 25 bp, Homo sapien
ctgcttcctgagaagttcaggttgt

SEQ ID NO: 1326623 - DNA, 25 bp, Homo sapien
tagtactgcttcctgagaagttcag

SEQ ID NO: 1326624 - DNA, 25 bp, Homo sapien
tggacttctcggtgggtgatgatca

SEQ ID NO: 1326625 - DNA, 25 bp, Homo sapien
gcttgctttacagctagctgcaaaa

SEQ ID NO: 1326626 - DNA, 25 bp, Homo sapien
tagcttgctttacagctagctgcaa

SEQ ID NO: 1326627 - DNA, 25 bp, Homo sapien
cagagatgaacaagttctagcttgc

SEQ ID NO: 1326628 - DNA, 25 bp, Homo sapien
acaagttctagcttgctttacagct

SEQ ID NO: 1326629 - DNA, 25 bp, Homo sapien
caaggggagctaacctgttaactct

SEQ ID NO: 1326630 - DNA, 25 bp, Homo sapien
tccacacaggcatgtctgggcccaa

SEQ ID NO: 1326631 - DNA, 25 bp, Homo sapien
gaacacactgagaacaaccaagggg

SEQ ID NO: 1326632 - DNA, 25 bp, Homo sapien
gtctgggcccaatgttatcatattt

SEQ ID NO: 1326633 - DNA, 25 bp, Homo sapien
gctggagctgggtatcagtttttta

SEQ ID NO: 1326634 - DNA, 25 bp, Homo sapien
caagaatggcttgggttaacagcta

SEQ ID NO: 1326635 - DNA, 25 bp, Homo sapien
ttttctaataactctaagctctgtc

SEQ ID NO: 1326636 - DNA, 25 bp, Homo sapien
tgggaactgcctttgacagacctat

SEQ ID NO: 1326637 - DNA, 25 bp, Homo sapien
ccaaaaaatgagccacttttaagtg

SEQ ID NO: 1326638 - DNA, 25 bp, Homo sapien
caaaaaatgagccacttttaagtgg

SEQ ID NO: 1326639 - DNA, 25 bp, Homo sapien
cagggctccgctactcttgacagag

SEQ ID NO: 1326640 - DNA, 25 bp, Homo sapien
tatatattgctagttgctacacgct

SEQ ID NO: 1326641 - DNA, 25 bp, Homo sapien
atacccaaatggctcaggccagtgg

SEQ ID NO: 1326642 - DNA, 25 bp, Homo sapien
cagactaggctccacattttcttgc

SEQ ID NO: 1326643 - DNA, 25 bp, Homo sapien
taacaggcttgccaaaaaacctggc

SEQ ID NO: 1326644 - DNA, 25 bp, Homo sapien
aatctagatcccagaaatgttctcc

SEQ ID NO: 1326645 - DNA, 25 bp, Homo sapien
tctgcaaaacaggtaatcgtatcta

SEQ ID NO: 1326646 - DNA, 25 bp, Homo sapien
gaatctgtcatcaaccattactgta

SEQ ID NO: 1326647 - DNA, 25 bp, Homo sapien
cctgcttgcctagggagtgagtgac

SEQ ID NO: 1326648 - DNA, 25 bp, Homo sapien
gaacgtttccattagcccaggtaga

SEQ ID NO: 1326649 - DNA, 25 bp, Homo sapien
taatcacgctactggaaagcaacag

SEQ ID NO: 1326650 - DNA, 25 bp, Homo sapien
tcaaactaaggtcagctacatggca

SEQ ID NO: 1326651 - DNA, 25 bp, Homo sapien
ttgttttttggcaagtgtagagatt

SEQ ID NO: 1326652 - DNA, 25 bp, Homo sapien
aggacataaagactgttgttttttg

SEQ ID NO: 1326653 - DNA, 25 bp, Homo sapien
tgttttttggcaagtgtagagattt

SEQ ID NO: 1326654 - DNA, 25 bp, Homo sapien
gctttcccactaagagagcagtgat

SEQ ID NO: 1326655 - DNA, 25 bp, Homo sapien
taagtagctgtatggcacacaaagc

SEQ ID NO: 1326656 - DNA, 25 bp, Homo sapien
gccattcacgaagaagaactgaacc

SEQ ID NO: 1326657 - DNA, 25 bp, Homo sapien
gatgtttcacatattgtctacggct

SEQ ID NO: 1326658 - DNA, 25 bp, Homo sapien
cggaccaatatgtaattgctcagaa

SEQ ID NO: 1326659 - DNA, 25 bp, Homo sapien
caatacttgacataaatgtatacgc

SEQ ID NO: 1326660 - DNA, 25 bp, Homo sapien
cactgatactctaggaggtttgaga

SEQ ID NO: 1326661 - DNA, 25 bp, Homo sapien
gcatgtgacttctttcggaccaata

SEQ ID NO: 1326662 - DNA, 25 bp, Homo sapien
ctcccgtcttccagccttttaacag

SEQ ID NO: 1326663 - DNA, 25 bp, Homo sapien
gaagagtgcagagagctcagaagac

SEQ ID NO: 1326664 - DNA, 25 bp, Homo sapien
ccctacgctcgtatgtgtgagcaaa

SEQ ID NO: 1326665 - DNA, 25 bp, Homo sapien
agatgctgccttgcttcctataaag

SEQ ID NO: 1326666 - DNA, 25 bp, Homo sapien
tgttagcaaagaacctggtggcatt

SEQ ID NO: 1326667 - DNA, 25 bp, Homo sapien
gaaatcaccaccttaatcaatgtta

SEQ ID NO: 1326668 - DNA, 25 bp, Homo sapien
atgaaatcaccaccttaatcaatgt

SEQ ID NO: 1326669 - DNA, 25 bp, Homo sapien
tcttcaaaaggtcttaacggcttca

SEQ ID NO: 1326670 - DNA, 25 bp, Homo sapien
taacggcttcattaagatgtgttta

SEQ ID NO: 1326671 - DNA, 25 bp, Homo sapien
agcagagagaggttgtgtagggaaa

SEQ ID NO: 1326672 - DNA, 25 bp, Homo sapien
aagcagagagaggttgtgtagggaa

SEQ ID NO: 1326673 - DNA, 25 bp, Homo sapien
gcaagcagagagaggttgtgtaggg

SEQ ID NO: 1326674 - DNA, 25 bp, Homo sapien
caagcagagagaggttgtgtaggga

SEQ ID NO: 1326675 - DNA, 25 bp, Homo sapien
catctaagaccacctaagcctgaac

SEQ ID NO: 1326676 - DNA, 25 bp, Homo sapien
gcagctggcttaaattctcctcaga

SEQ ID NO: 1326677 - DNA, 25 bp, Homo sapien
tccaaactattccaaactctgcgtg

SEQ ID NO: 1326678 - DNA, 25 bp, Homo sapien
ctaagaccacctaagcctgaacttt

SEQ ID NO: 1326679 - DNA, 25 bp, Homo sapien
tataaggtcgaggaattgttcagcg

SEQ ID NO: 1326680 - DNA, 25 bp, Homo sapien
tcagcgtactcaatcgtgtagagat

SEQ ID NO: 1326681 - DNA, 25 bp, Homo sapien
atcgtgtagagattactattcagcc

SEQ ID NO: 1326682 - DNA, 25 bp, Homo sapien
gaattgttcagcgtactcaatcgtg

SEQ ID NO: 1326683 - DNA, 25 bp, Homo sapien
tacagagccactgaaaggcacatga

SEQ ID NO: 1326684 - DNA, 25 bp, Homo sapien
tatttacatgggatcttggaagctg

SEQ ID NO: 1326685 - DNA, 25 bp, Homo sapien
tccagaaaggttaggaaaggcttca

SEQ ID NO: 1326686 - DNA, 25 bp, Homo sapien
tcaccacagggcaactatatagaaa

SEQ ID NO: 1326687 - DNA, 25 bp, Homo sapien
tccatacaaacaagaagcatcatca

SEQ ID NO: 1326688 - DNA, 25 bp, Homo sapien
aacccgagatgccttagcaatacta

SEQ ID NO: 1326689 - DNA, 25 bp, Homo sapien
gaaaaagtgtgatgtggcactgaat

SEQ ID NO: 1326690 - DNA, 25 bp, Homo sapien
cagaatcagccagggtaagtagctc

SEQ ID NO: 1326691 - DNA, 25 bp, Homo sapien
caattatacgaaggtcaaaatacac

SEQ ID NO: 1326692 - DNA, 25 bp, Homo sapien
gagagaggcttctaacgtgcaataa

SEQ ID NO: 1326693 - DNA, 25 bp, Homo sapien
acaaaggtcaaaacagtggtttcag

SEQ ID NO: 1326694 - DNA, 25 bp, Homo sapien
gcttggtaacgctagaaagaaccca

SEQ ID NO: 1326695 - DNA, 25 bp, Homo sapien
tgtggatgctgggtacagagctatc

SEQ ID NO: 1326696 - DNA, 25 bp, Homo sapien
gtggatgctgggtacagagctatca

SEQ ID NO: 1326697 - DNA, 25 bp, Homo sapien
cagaagtggtggaagccaaacacat

SEQ ID NO: 1326698 - DNA, 25 bp, Homo sapien
acagaagtggtggaagccaaacaca

SEQ ID NO: 1326699 - DNA, 25 bp, Homo sapien
agtgcttataaagtctgcatcaatg

SEQ ID NO: 1326700 - DNA, 25 bp, Homo sapien
tcactgctcactcattgagagcaac

SEQ ID NO: 1326701 - DNA, 25 bp, Homo sapien
ttagggtagcctaggagtacagtgc

SEQ ID NO: 1326702 - DNA, 25 bp, Homo sapien
tctgcatcaatgtacagtaatgtcc

SEQ ID NO: 1326703 - DNA, 25 bp, Homo sapien
aatcaacaatactgagtgttttttt

SEQ ID NO: 1326704 - DNA, 25 bp, Homo sapien
taacattagggcatgttaccgaaca

SEQ ID NO: 1326705 - DNA, 25 bp, Homo sapien
catttaaagaattactgccaagcct

SEQ ID NO: 1326706 - DNA, 25 bp, Homo sapien
acactcttccgaaaaactgaaggag

SEQ ID NO: 1326707 - DNA, 25 bp, Homo sapien
gaaacatgcagatggtaacattagg

SEQ ID NO: 1326708 - DNA, 25 bp, Homo sapien
tttttcccttcttgcactggtagtc

SEQ ID NO: 1326709 - DNA, 25 bp, Homo sapien
ttttcccttcttgcactggtagtca

SEQ ID NO: 1326710 - DNA, 25 bp, Homo sapien
tttcccttcttgcactggtagtcaa

SEQ ID NO: 1326711 - DNA, 25 bp, Homo sapien
gtgaaggctttatggcaggaaaaac

SEQ ID NO: 1326712 - DNA, 25 bp, Homo sapien
tgaaggctttatggcaggaaaaacc

SEQ ID NO: 1326713 - DNA, 25 bp, Homo sapien
ctttctacaatctgcctggatggca

SEQ ID NO: 1326714 - DNA, 25 bp, Homo sapien
gtacaggtgtcttcaagtaccacat

SEQ ID NO: 1326715 - DNA, 25 bp, Homo sapien
ccctgaagtccagcatccgaggttg

SEQ ID NO: 1326716 - DNA, 25 bp, Homo sapien
caacagtacaggtgtcttcaagtac

SEQ ID NO: 1326717 - DNA, 25 bp, Homo sapien
gaagaggaagtaggagctgaagctg

SEQ ID NO: 1326718 - DNA, 25 bp, Homo sapien
ctggatgacttgctggattaaatgc

SEQ ID NO: 1326719 - DNA, 25 bp, Homo sapien
tggtatggtctcacctccatattca

SEQ ID NO: 1326720 - DNA, 25 bp, Homo sapien
tcctggtatggtctcacctccatat

SEQ ID NO: 1326721 - DNA, 25 bp, Homo sapien
gacttgagttctacttcctccataa

SEQ ID NO: 1326722 - DNA, 25 bp, Homo sapien
ttgagttctacttcctccataaaat

SEQ ID NO: 1326723 - DNA, 25 bp, Homo sapien
ggccagacttgagttctacttcctc

SEQ ID NO: 1326724 - DNA, 25 bp, Homo sapien
cagacttgagttctacttcctccat

SEQ ID NO: 1326725 - DNA, 25 bp, Homo sapien
ttcctgtggtattacaccattgata

SEQ ID NO: 1326726 - DNA, 25 bp, Homo sapien
cctgtggtattacaccattgatagc

SEQ ID NO: 1326727 - DNA, 25 bp, Homo sapien
gtggtattacaccattgatagctgc

SEQ ID NO: 1326728 - DNA, 25 bp, Homo sapien
tgtggtattacaccattgatagctg

SEQ ID NO: 1326729 - DNA, 25 bp, Homo sapien
tcgaatcctggaatgtagacagctt

SEQ ID NO: 1326730 - DNA, 25 bp, Homo sapien
gacagcttactgcagggtaacagag

SEQ ID NO: 1326731 - DNA, 25 bp, Homo sapien
gaacatagcacaggtatgacaggac

SEQ ID NO: 1326732 - DNA, 25 bp, Homo sapien
taagcaagcaggctgtcgaatcctg

SEQ ID NO: 1326733 - DNA, 25 bp, Homo sapien
cagctccaaagagacagcaaccatc

SEQ ID NO: 1326734 - DNA, 25 bp, Homo sapien
aaagagacagcaaccatcgagaatg

SEQ ID NO: 1326735 - DNA, 25 bp, Homo sapien
tccaaagagacagcaaccatcgaga

SEQ ID NO: 1326736 - DNA, 25 bp, Homo sapien
aacagctccaaagagacagcaacca

SEQ ID NO: 1326737 - DNA, 25 bp, Homo sapien
aatctggacagctgacattatatcc

SEQ ID NO: 1326738 - DNA, 25 bp, Homo sapien
tgtaactgagttgccaattattgac

SEQ ID NO: 1326739 - DNA, 25 bp, Homo sapien
atatcctgtaactgagttgccaatt

SEQ ID NO: 1326740 - DNA, 25 bp, Homo sapien
ttcttctaaatctggacagctgaca

SEQ ID NO: 1326741 - DNA, 25 bp, Homo sapien
gagaagttattccagactgcaaaga

SEQ ID NO: 1326742 - DNA, 25 bp, Homo sapien
ctactgaaatgatgccaactgatcc

SEQ ID NO: 1326743 - DNA, 25 bp, Homo sapien
aatgagaagttattccagactgcaa

SEQ ID NO: 1326744 - DNA, 25 bp, Homo sapien
gatcccaaatgaacttataagaata

SEQ ID NO: 1326745 - DNA, 25 bp, Homo sapien
gaatgtccacaacagtctcatcagt

SEQ ID NO: 1326746 - DNA, 25 bp, Homo sapien
gcatagtcagaatcttagaaagagg

SEQ ID NO: 1326747 - DNA, 25 bp, Homo sapien
tcagtagaactgacacagtcaagga

SEQ ID NO: 1326748 - DNA, 25 bp, Homo sapien
ttactagagctacagaaattactca

SEQ ID NO: 1326749 - DNA, 25 bp, Homo sapien
tctgcacaaatataacaccagtgtt

SEQ ID NO: 1326750 - DNA, 25 bp, Homo sapien
cagacatatccgaggttacaactca

SEQ ID NO: 1326751 - DNA, 25 bp, Homo sapien
caaaaatctggatgcactgtaagca

SEQ ID NO: 1326752 - DNA, 25 bp, Homo sapien
caattccagattgtagtgcctaact

SEQ ID NO: 1326753 - DNA, 25 bp, Homo sapien
tgacacaaccaatactgctccaatg

SEQ ID NO: 1326754 - DNA, 25 bp, Homo sapien
gattaattatcagtgaaggccccag

SEQ ID NO: 1326755 - DNA, 25 bp, Homo sapien
gggaagatgaaccataacacacagt

SEQ ID NO: 1326756 - DNA, 25 bp, Homo sapien
tgcctgaagtttctaaggaaaacca

SEQ ID NO: 1326757 - DNA, 25 bp, Homo sapien
caattattttgttcaagcaatgtaa

SEQ ID NO: 1326758 - DNA, 25 bp, Homo sapien
caatgtaatagcttcgtcaatgttt

SEQ ID NO: 1326759 - DNA, 25 bp, Homo sapien
tcaagcaatgtaatagcttcgtcaa

SEQ ID NO: 1326760 - DNA, 25 bp, Homo sapien
tttgttcaagcaatgtaatagcttc

SEQ ID NO: 1326761 - DNA, 25 bp, Homo sapien
cctatggtgacatcctaaaatccac

SEQ ID NO: 1326762 - DNA, 25 bp, Homo sapien
gaggtctttgagaggtaactaggac

SEQ ID NO: 1326763 - DNA, 25 bp, Homo sapien
gaatatctgtatcctcctatggtga

SEQ ID NO: 1326764 - DNA, 25 bp, Homo sapien
attagtgcccttacatggatgaatc

SEQ ID NO: 1326765 - DNA, 25 bp, Homo sapien
tgcagtgtccagtattggttgttcc

SEQ ID NO: 1326766 - DNA, 25 bp, Homo sapien
tgtccagtattggttgttcctttcc

SEQ ID NO: 1326767 - DNA, 25 bp, Homo sapien
tttgcagtgtccagtattggttgtt

SEQ ID NO: 1326768 - DNA, 25 bp, Homo sapien
cagtgtccagtattggttgttcctt

SEQ ID NO: 1326769 - DNA, 25 bp, Homo sapien
tttgaagatccccctttagctcgga

SEQ ID NO: 1326770 - DNA, 25 bp, Homo sapien
ttgaagatccccctttagctcggag

SEQ ID NO: 1326771 - DNA, 25 bp, Homo sapien
tgaagatccccctttagctcggaga

SEQ ID NO: 1326772 - DNA, 25 bp, Homo sapien
acatatgtgtaatgtcagaagtcaa

SEQ ID NO: 1326773 - DNA, 25 bp, Homo sapien
agtcaatgtactaagttatgctgaa

SEQ ID NO: 1326774 - DNA, 25 bp, Homo sapien
tactaagttatgctgaaaggtgagg

SEQ ID NO: 1326775 - DNA, 25 bp, Homo sapien
caaaactaacatatgtgtaatgtca

SEQ ID NO: 1326776 - DNA, 25 bp, Homo sapien
tgtgtctctatgtgccctaatctcc

SEQ ID NO: 1326777 - DNA, 25 bp, Homo sapien
ggtgtcagcagtttgcgtgtcttct

SEQ ID NO: 1326778 - DNA, 25 bp, Homo sapien
tgtcagcagtttgcgtgtcttctgg

SEQ ID NO: 1326779 - DNA, 25 bp, Homo sapien
cagcagtttgcgtgtcttctggggc

SEQ ID NO: 1326780 - DNA, 25 bp, Homo sapien
gccctgcttgagtccaacatccatg

SEQ ID NO: 1326781 - DNA, 25 bp, Homo sapien
ggttttcaggaacaagtcacctgcc

SEQ ID NO: 1326782 - DNA, 25 bp, Homo sapien
cctgcctagtaagtgagccctgctt

SEQ ID NO: 1326783 - DNA, 25 bp, Homo sapien
tctttggcacacagacgacaatttt

SEQ ID NO: 1326784 - DNA, 25 bp, Homo sapien
actagagtgcagtagcagggtatca

SEQ ID NO: 1326785 - DNA, 25 bp, Homo sapien
agagtgcagtagcagggtatcagct

SEQ ID NO: 1326786 - DNA, 25 bp, Homo sapien
agactagagtgcagtagcagggtat

SEQ ID NO: 1326787 - DNA, 25 bp, Homo sapien
tagagtgcagtagcagggtatcagc

SEQ ID NO: 1326788 - DNA, 25 bp, Homo sapien
taagctgttatcaaacacgtggtct

SEQ ID NO: 1326789 - DNA, 25 bp, Homo sapien
tatctatccagtcagcattggcaga

SEQ ID NO: 1326790 - DNA, 25 bp, Homo sapien
tattccaaagtaatcagtaagcatt

SEQ ID NO: 1326791 - DNA, 25 bp, Homo sapien
tcaacttgccactataccattatgt

SEQ ID NO: 1326792 - DNA, 25 bp, Homo sapien
gaggcagaccttaatgccttccagg

SEQ ID NO: 1326793 - DNA, 25 bp, Homo sapien
cttggctcacaagaaaaaagtccag

SEQ ID NO: 1326794 - DNA, 25 bp, Homo sapien
tgaaatcccataagccatcagggtc

SEQ ID NO: 1326795 - DNA, 25 bp, Homo sapien
tcttgtcagtgaattgaggcagacc

SEQ ID NO: 1326796 - DNA, 25 bp, Homo sapien
aaatgtcaggcgcaagagggtcaag

SEQ ID NO: 1326797 - DNA, 25 bp, Homo sapien
gctgccacatagaagatagatacca

SEQ ID NO: 1326798 - DNA, 25 bp, Homo sapien
taagccatcttttggcctagctgcc

SEQ ID NO: 1326799 - DNA, 25 bp, Homo sapien
ctaaaattggtcagggtggaatcct

SEQ ID NO: 1326800 - DNA, 25 bp, Homo sapien
aacagctacagccagtctacctaag

SEQ ID NO: 1326801 - DNA, 25 bp, Homo sapien
tacaatgttctaacaactgcccctt

SEQ ID NO: 1326802 - DNA, 25 bp, Homo sapien
gtgtaaccacatattgccacctagc

SEQ ID NO: 1326803 - DNA, 25 bp, Homo sapien
gccagtctacctaagtacaatgttc

SEQ ID NO: 1326804 - DNA, 25 bp, Homo sapien
gcttgtaaggccattaaaatctctg

SEQ ID NO: 1326805 - DNA, 25 bp, Homo sapien
gcagctggcctgcaagatatagttt

SEQ ID NO: 1326806 - DNA, 25 bp, Homo sapien
aaaatctctgtctcaactactcatc

SEQ ID NO: 1326807 - DNA, 25 bp, Homo sapien
aaaggtaaatgaacgggtatggctg

SEQ ID NO: 1326808 - DNA, 25 bp, Homo sapien
cactatgtgcattccaaggcttctg

SEQ ID NO: 1326809 - DNA, 25 bp, Homo sapien
ctaatctagagacactatgtgcatt

SEQ ID NO: 1326810 - DNA, 25 bp, Homo sapien
gacactatgtgcattccaaggcttc

SEQ ID NO: 1326811 - DNA, 25 bp, Homo sapien
tctagagacactatgtgcattccaa

SEQ ID NO: 1326812 - DNA, 25 bp, Homo sapien
atctgtttggatcaataccatttct

SEQ ID NO: 1326813 - DNA, 25 bp, Homo sapien
tatctgtttggatcaataccatttc

SEQ ID NO: 1326814 - DNA, 25 bp, Homo sapien
gattcatgttctctacttcagccta

SEQ ID NO: 1326815 - DNA, 25 bp, Homo sapien
ggagaagactctagaccaaaagaag

SEQ ID NO: 1326816 - DNA, 25 bp, Homo sapien
gctctggccagcaagaactgtaggt

SEQ ID NO: 1326817 - DNA, 25 bp, Homo sapien
ctgtctcgccaaaaagaaagaggtt

SEQ ID NO: 1326818 - DNA, 25 bp, Homo sapien
catggaaggtgaaagaataagcaaa

SEQ ID NO: 1326819 - DNA, 25 bp, Homo sapien
gaacaccaatgtttatggctgcatg

SEQ ID NO: 1326820 - DNA, 25 bp, Homo sapien
gattcacagtacctacaaggtagaa

SEQ ID NO: 1326821 - DNA, 25 bp, Homo sapien
tatggctgcatgattcacagtacct

SEQ ID NO: 1326822 - DNA, 25 bp, Homo sapien
gtcatccaagtatccgtatgccaag

SEQ ID NO: 1326823 - DNA, 25 bp, Homo sapien
tatgccaagtcttaagctgcaatcc

SEQ ID NO: 1326824 - DNA, 25 bp, Homo sapien
ctaacatatatgactcttgggcaca

SEQ ID NO: 1326825 - DNA, 25 bp, Homo sapien
agtctgagctgtaatcttccaccca

SEQ ID NO: 1326826 - DNA, 25 bp, Homo sapien
gatttcactgggtaaccaaaacagc

SEQ ID NO: 1326827 - DNA, 25 bp, Homo sapien
gcaaaaagcctcaggccaatcctaa

SEQ ID NO: 1326828 - DNA, 25 bp, Homo sapien
gaggttatggtttaatcaaactgta

SEQ ID NO: 1326829 - DNA, 25 bp, Homo sapien
aggacactcctttattagtttggag

SEQ ID NO: 1326830 - DNA, 25 bp, Homo sapien
caaacgctgggaagaagactccctt

SEQ ID NO: 1326831 - DNA, 25 bp, Homo sapien
cactgcagcgttcaaacgctgggaa

SEQ ID NO: 1326832 - DNA, 25 bp, Homo sapien
tgcagcgttcaaacgctgggaagaa

SEQ ID NO: 1326833 - DNA, 25 bp, Homo sapien
gcgttcaaacgctgggaagaagact

SEQ ID NO: 1326834 - DNA, 25 bp, Homo sapien
ctgggaggcagacggcacctcctgc

SEQ ID NO: 1326835 - DNA, 25 bp, Homo sapien
gccgagttccgcggctccgggagcg

SEQ ID NO: 1326836 - DNA, 25 bp, Homo sapien
ggcacctcctgcgaccgtcgccgcc

SEQ ID NO: 1326837 - DNA, 25 bp, Homo sapien
gagcgaagcgcgcacctgggaggca

SEQ ID NO: 1326838 - DNA, 25 bp, Homo sapien
gtctggatgtgggtccggtcttaca

SEQ ID NO: 1326839 - DNA, 25 bp, Homo sapien
cgggaagcgctaggcgctcatgcac

SEQ ID NO: 1326840 - DNA, 25 bp, Homo sapien
catgcactcggtaaccttcaggcgc

SEQ ID NO: 1326841 - DNA, 25 bp, Homo sapien
gcagcccggacaggaagattggtct

SEQ ID NO: 1326842 - DNA, 25 bp, Homo sapien
cagcgccacggctgtcgcacatttt

SEQ ID NO: 1326843 - DNA, 25 bp, Homo sapien
cctggttggccagcgccacggctgt

SEQ ID NO: 1326844 - DNA, 25 bp, Homo sapien
cacattttgcctgtcatcgaggtcg

SEQ ID NO: 1326845 - DNA, 25 bp, Homo sapien
atcgaggtcgcaaagcgccgctttg

SEQ ID NO: 1326846 - DNA, 25 bp, Homo sapien
tactgcttgaggatccgcttgccaa

SEQ ID NO: 1326847 - DNA, 25 bp, Homo sapien
acttcaagaagggtacagatactgc

SEQ ID NO: 1326848 - DNA, 25 bp, Homo sapien
tgaccactgggtgcatcatgcaacc

SEQ ID NO: 1326849 - DNA, 25 bp, Homo sapien
tgccaaaggccggttctaattagac

SEQ ID NO: 1326850 - DNA, 25 bp, Homo sapien
gaaggacgccgagtttacagagcgc

SEQ ID NO: 1326851 - DNA, 25 bp, Homo sapien
gactccctttatgccagctcgctgt

SEQ ID NO: 1326852 - DNA, 25 bp, Homo sapien
ctagcgctgaggaacgactcccttt

SEQ ID NO: 1326853 - DNA, 25 bp, Homo sapien
gcttagtggcagtccggatttttcc

SEQ ID NO: 1326854 - DNA, 25 bp, Homo sapien
cagaacttggcctacgtttcccagg

SEQ ID NO: 1326855 - DNA, 25 bp, Homo sapien
aactgtcactgggagcggtgcggcc

SEQ ID NO: 1326856 - DNA, 25 bp, Homo sapien
gcagctcaatgagtgcctacagcag

SEQ ID NO: 1326857 - DNA, 25 bp, Homo sapien
ttgtttcagcgaaaaaagcagcaag

SEQ ID NO: 1326858 - DNA, 25 bp, Homo sapien
tgcccagtgcagccgcaatgctgcc

SEQ ID NO: 1326859 - DNA, 25 bp, Homo sapien
cagcagtccgggctccgtagacgct

SEQ ID NO: 1326860 - DNA, 25 bp, Homo sapien
gggctccgtagacgctttccgcatc

SEQ ID NO: 1326861 - DNA, 25 bp, Homo sapien
tgaacgagctcggtcgtaggcggga

SEQ ID NO: 1326862 - DNA, 25 bp, Homo sapien
attagcccacggcttggcccggacg

SEQ ID NO: 1326863 - DNA, 25 bp, Homo sapien
ttcctgagcggcattagcccacggc

SEQ ID NO: 1326864 - DNA, 25 bp, Homo sapien
agcctccggagacgcgcgccgagcc

SEQ ID NO: 1326865 - DNA, 25 bp, Homo sapien
gggccggcatgacgggcttctcggg

SEQ ID NO: 1326866 - DNA, 25 bp, Homo sapien
tcccttcggcgagacggatggaaac

SEQ ID NO: 1326867 - DNA, 25 bp, Homo sapien
ggcgatcatcttttaaccctccgga

SEQ ID NO: 1326868 - DNA, 25 bp, Homo sapien
tctgcctacatctgacgtccggagt

SEQ ID NO: 1326869 - DNA, 25 bp, Homo sapien
gagcactgggcaatcgttacgacct

SEQ ID NO: 1326870 - DNA, 25 bp, Homo sapien
gaaaatcttacaacaggcttatgaa

SEQ ID NO: 1326871 - DNA, 25 bp, Homo sapien
acagttctgtcatatgttaagcagc

SEQ ID NO: 1326872 - DNA, 25 bp, Homo sapien
tgtgatttggccaggctctatggga

SEQ ID NO: 1326873 - DNA, 25 bp, Homo sapien
tctgaaactgcataagtgaaaatct

SEQ ID NO: 1326874 - DNA, 25 bp, Homo sapien
gagttatgtggtcccctctaggaaa

SEQ ID NO: 1326875 - DNA, 25 bp, Homo sapien
catattactctagctctgtgcggga

SEQ ID NO: 1326876 - DNA, 25 bp, Homo sapien
tataggatggatgaaacggtgctgc

SEQ ID NO: 1326877 - DNA, 25 bp, Homo sapien
cattcacgtcgggaaacttggtctc

SEQ ID NO: 1326878 - DNA, 25 bp, Homo sapien
gaggaattgcgcttggcctaataag

SEQ ID NO: 1326879 - DNA, 25 bp, Homo sapien
cacagactgaggaattgcgcttggc

SEQ ID NO: 1326880 - DNA, 25 bp, Homo sapien
tttttgctagataagctggcaatga

SEQ ID NO: 1326881 - DNA, 25 bp, Homo sapien
tctcatactgtcttattctaggcac

SEQ ID NO: 1326882 - DNA, 25 bp, Homo sapien
atcagaagcctgaaatggtcacact

SEQ ID NO: 1326883 - DNA, 25 bp, Homo sapien
aatcagaagcctgaaatggtcacac

SEQ ID NO: 1326884 - DNA, 25 bp, Homo sapien
tatggagcacctgatgtgactagct

SEQ ID NO: 1326885 - DNA, 25 bp, Homo sapien
gaatggatttatctgaacataaccc

SEQ ID NO: 1326886 - DNA, 25 bp, Homo sapien
tagtagccacatgtcactatggagc

SEQ ID NO: 1326887 - DNA, 25 bp, Homo sapien
tgaggagcatctatggtgtcttgtg

SEQ ID NO: 1326888 - DNA, 25 bp, Homo sapien
ccttccactgcccctattccttctc

SEQ ID NO: 1326889 - DNA, 25 bp, Homo sapien
tatgaatgtagatagctgtagaaat

SEQ ID NO: 1326890 - DNA, 25 bp, Homo sapien
aatgtagatagctgtagaaattcat

SEQ ID NO: 1326891 - DNA, 25 bp, Homo sapien
atgatatgaatgtagatagctgtag

SEQ ID NO: 1326892 - DNA, 25 bp, Homo sapien
gctggttggagggagcagatatgtt

SEQ ID NO: 1326893 - DNA, 25 bp, Homo sapien
ctggttggagggagcagatatgttt

SEQ ID NO: 1326894 - DNA, 25 bp, Homo sapien
ttgctggttggagggagcagatatg

SEQ ID NO: 1326895 - DNA, 25 bp, Homo sapien
ggttgctggttggagggagcagata

SEQ ID NO: 1326896 - DNA, 25 bp, Homo sapien
tgttagctcctctaggcagtaggac

SEQ ID NO: 1326897 - DNA, 25 bp, Homo sapien
gaattcagtgttagctcatcccaga

SEQ ID NO: 1326898 - DNA, 25 bp, Homo sapien
atttgggttctgagagctatgcggt

SEQ ID NO: 1326899 - DNA, 25 bp, Homo sapien
ctcatcccagacctcagtgttagct

SEQ ID NO: 1326900 - DNA, 25 bp, Homo sapien
ctatatcatttgaagtttatcattc

SEQ ID NO: 1326901 - DNA, 25 bp, Homo sapien
atcatttgaagtttatcattcagtt

SEQ ID NO: 1326902 - DNA, 25 bp, Homo sapien
tttgaagtttatcattcagttttac

SEQ ID NO: 1326903 - DNA, 25 bp, Homo sapien
atatcatttgaagtttatcattcag

SEQ ID NO: 1326904 - DNA, 25 bp, Homo sapien
ttggcatcagctttgtggttcctga

SEQ ID NO: 1326905 - DNA, 25 bp, Homo sapien
gtggttcctgatttgcaaacgaagg

SEQ ID NO: 1326906 - DNA, 25 bp, Homo sapien
gcaaacgaaggtaaggattattcga

SEQ ID NO: 1326907 - DNA, 25 bp, Homo sapien
tttgctttggcatcagctttgtggt

SEQ ID NO: 1326908 - DNA, 25 bp, Homo sapien
tgcatggataagaaaagattacggt

SEQ ID NO: 1326909 - DNA, 25 bp, Homo sapien
agaaaagattacggtactcttccat

SEQ ID NO: 1326910 - DNA, 25 bp, Homo sapien
tggataagaaaagattacggtactc

SEQ ID NO: 1326911 - DNA, 25 bp, Homo sapien
ttgtggttgcatggataagaaaaga

SEQ ID NO: 1326912 - DNA, 25 bp, Homo sapien
agcattccatttatgcatagaacta

SEQ ID NO: 1326913 - DNA, 25 bp, Homo sapien
cagcattccatttatgcatagaact

SEQ ID NO: 1326914 - DNA, 25 bp, Homo sapien
gcttccatgagtagcaatgatcagg

SEQ ID NO: 1326915 - DNA, 25 bp, Homo sapien
tgagtagcaatgatcaggggaaaag

SEQ ID NO: 1326916 - DNA, 25 bp, Homo sapien
agtggtccttgacatcctcgtagca

SEQ ID NO: 1326917 - DNA, 25 bp, Homo sapien
agatgatggcactgccccccagcat

SEQ ID NO: 1326918 - DNA, 25 bp, Homo sapien
gcttgtaatgcatgcttgatccctg

SEQ ID NO: 1326919 - DNA, 25 bp, Homo sapien
tagcagtttgcttgtaatgcatgct

SEQ ID NO: 1326920 - DNA, 25 bp, Homo sapien
tgtcatagagggtgtagcggtagtc

SEQ ID NO: 1326921 - DNA, 25 bp, Homo sapien
tcatagagggtgtagcggtagtcct

SEQ ID NO: 1326922 - DNA, 25 bp, Homo sapien
gagggtgtagcggtagtccttatat

SEQ ID NO: 1326923 - DNA, 25 bp, Homo sapien
gtagcggtagtccttatatggcagc

SEQ ID NO: 1326924 - DNA, 25 bp, Homo sapien
aggtggcatagaggttgttgacagt

SEQ ID NO: 1326925 - DNA, 25 bp, Homo sapien
aaaggtggcatagaggttgttgaca

SEQ ID NO: 1326926 - DNA, 25 bp, Homo sapien
caaaggtggcatagaggttgttgac

SEQ ID NO: 1326927 - DNA, 25 bp, Homo sapien
aaggtggcatagaggttgttgacag

SEQ ID NO: 1326928 - DNA, 25 bp, Homo sapien
acaccatcagagacggccacccctg

SEQ ID NO: 1326929 - DNA, 25 bp, Homo sapien
gacaccatcagagacggccacccct

SEQ ID NO: 1326930 - DNA, 25 bp, Homo sapien
taagacaatgtagcatttgccgcat

SEQ ID NO: 1326931 - DNA, 25 bp, Homo sapien
tccagagtgagagaatcacgtgagc

SEQ ID NO: 1326932 - DNA, 25 bp, Homo sapien
tcacgtgagcttgggcattctaaac

SEQ ID NO: 1326933 - DNA, 25 bp, Homo sapien
actttctggctaggcacgatggcac

SEQ ID NO: 1326934 - DNA, 25 bp, Homo sapien
aatggcagttatgattatacacact

SEQ ID NO: 1326935 - DNA, 25 bp, Homo sapien
agccacgtgggaggaagatgcggga

SEQ ID NO: 1326936 - DNA, 25 bp, Homo sapien
acactaacaactgtggctgggcact

SEQ ID NO: 1326937 - DNA, 25 bp, Homo sapien
ccagttctgtctaataaatggcagt

SEQ ID NO: 1326938 - DNA, 25 bp, Homo sapien
gtcagacccataatgtgctgacgtt

SEQ ID NO: 1326939 - DNA, 25 bp, Homo sapien
aagggcttgtgtcagtgttacccac

SEQ ID NO: 1326940 - DNA, 25 bp, Homo sapien
caagggcttgtgtcagtgttaccca

SEQ ID NO: 1326941 - DNA, 25 bp, Homo sapien
tcaagggcttgtgtcagtgttaccc

SEQ ID NO: 1326942 - DNA, 25 bp, Homo sapien
taagagtgttcagacccattcgagt

SEQ ID NO: 1326943 - DNA, 25 bp, Homo sapien
cattcgagtttaatatagccctacc

SEQ ID NO: 1326944 - DNA, 25 bp, Homo sapien
tagccctacctctaagaatcctttc

SEQ ID NO: 1326945 - DNA, 25 bp, Homo sapien
tagaatagggactgcagagtaagag

SEQ ID NO: 1326946 - DNA, 25 bp, Homo sapien
tatcaggaacaagccaggtatgatc

SEQ ID NO: 1326947 - DNA, 25 bp, Homo sapien
gctctatcaggaacaagccaggtat

SEQ ID NO: 1326948 - DNA, 25 bp, Homo sapien
ctctgggctctatcaggaacaagcc

SEQ ID NO: 1326949 - DNA, 25 bp, Homo sapien
tgggctctatcaggaacaagccagg

SEQ ID NO: 1326950 - DNA, 25 bp, Homo sapien
agcacgcacggcgcgatgacgcagt

SEQ ID NO: 1326951 - DNA, 25 bp, Homo sapien
acgcagtgcccgagccggcctcgtt

SEQ ID NO: 1326952 - DNA, 25 bp, Homo sapien
cacggcgcgatgacgcagtgcccga

SEQ ID NO: 1326953 - DNA, 25 bp, Homo sapien
agtgcccgagccggcctcgttctgg

SEQ ID NO: 1326954 - DNA, 25 bp, Homo sapien
cgtggggcggtggagtcgcctccgc

SEQ ID NO: 1326955 - DNA, 25 bp, Homo sapien
caccgtggggcggtggagtcgcctc

SEQ ID NO: 1326956 - DNA, 25 bp, Homo sapien
gcccgcggcccagccttgatccccc

SEQ ID NO: 1326957 - DNA, 25 bp, Homo sapien
ccctcggcggcaccgtggggcggtg

SEQ ID NO: 1326958 - DNA, 25 bp, Homo sapien
agatggggaactgcctcaaatcccc

SEQ ID NO: 1326959 - DNA, 25 bp, Homo sapien
atggggaactgcctcaaatccccca

SEQ ID NO: 1326960 - DNA, 25 bp, Homo sapien
tggggaactgcctcaaatcccccac

SEQ ID NO: 1326961 - DNA, 25 bp, Homo sapien
gaagatggggaactgcctcaaatcc

SEQ ID NO: 1326962 - DNA, 25 bp, Homo sapien
cgccgccgccatatcaggtagggga

SEQ ID NO: 1326963 - DNA, 25 bp, Homo sapien
agtccgaccgggctagctttggcga

SEQ ID NO: 1326964 - DNA, 25 bp, Homo sapien
tgcttcacgagtctcagtccgaccg

SEQ ID NO: 1326965 - DNA, 25 bp, Homo sapien
tgcccctggcttcggcaaggcctgg

SEQ ID NO: 1326966 - DNA, 25 bp, Homo sapien
agttctgggatcagagtatgtgatc

SEQ ID NO: 1326967 - DNA, 25 bp, Homo sapien
acatccccttggccagtgtctggtg

SEQ ID NO: 1326968 - DNA, 25 bp, Homo sapien
gatcagagtatgtgatcacatcccc

SEQ ID NO: 1326969 - DNA, 25 bp, Homo sapien
ggtggttcgcttgtggagtttggga

SEQ ID NO: 1326970 - DNA, 25 bp, Homo sapien
gtggtgattttaaccctagcgacat

SEQ ID NO: 1326971 - DNA, 25 bp, Homo sapien
tttttgttaattggatctggcaggt

SEQ ID NO: 1326972 - DNA, 25 bp, Homo sapien
ccctctgcttgggagacggatctcc

SEQ ID NO: 1326973 - DNA, 25 bp, Homo sapien
gagacggatctccaagtggtgattt

SEQ ID NO: 1326974 - DNA, 25 bp, Homo sapien
taaggtccagtcttgattgtggtat

SEQ ID NO: 1326975 - DNA, 25 bp, Homo sapien
gatcatatatatgctcgttttctga

SEQ ID NO: 1326976 - DNA, 25 bp, Homo sapien
cttctgggggcatttcatatatacc

SEQ ID NO: 1326977 - DNA, 25 bp, Homo sapien
catatataccagtaaggtccagtct

SEQ ID NO: 1326978 - DNA, 25 bp, Homo sapien
taattcgctttattttccttgtcta

SEQ ID NO: 1326979 - DNA, 25 bp, Homo sapien
cttgtctaaaaaccctatgttgtag

SEQ ID NO: 1326980 - DNA, 25 bp, Homo sapien
cgcttaattcgctttattttccttg

SEQ ID NO: 1326981 - DNA, 25 bp, Homo sapien
gtctaaaaaccctatgttgtagcca

SEQ ID NO: 1326982 - DNA, 25 bp, Homo sapien
tacagggatgaggtgcaccagtgca

SEQ ID NO: 1326983 - DNA, 25 bp, Homo sapien
agactctggcgtgggccttgatgag

SEQ ID NO: 1326984 - DNA, 25 bp, Homo sapien
tgaggtgcaccagtgcagagccgca

SEQ ID NO: 1326985 - DNA, 25 bp, Homo sapien
gagactctggcgtgggccttgatga

SEQ ID NO: 1326986 - DNA, 25 bp, Homo sapien
cagcacgggtctgcgtctgcactgg

SEQ ID NO: 1326987 - DNA, 25 bp, Homo sapien
tcatgtccttcaccaagcagcccag

SEQ ID NO: 1326988 - DNA, 25 bp, Homo sapien
gccccggccccgtctacggctgcga

SEQ ID NO: 1326989 - DNA, 25 bp, Homo sapien
gtccttcaccaagcagcccagcttg

SEQ ID NO: 1326990 - DNA, 25 bp, Homo sapien
aaacctccgcggaagccaccgcagt

SEQ ID NO: 1326991 - DNA, 25 bp, Homo sapien
ctccgggcccccccccgctgcactg

SEQ ID NO: 1326992 - DNA, 25 bp, Homo sapien
cgggcccccccccgctgcactggtg

SEQ ID NO: 1326993 - DNA, 25 bp, Homo sapien
tccgcggaagccaccgcagttcccc

SEQ ID NO: 1326994 - DNA, 25 bp, Homo sapien
tgttggcacattcatgagataattc

SEQ ID NO: 1326995 - DNA, 25 bp, Homo sapien
taaagcatacctctttggtgaccaa

SEQ ID NO: 1326996 - DNA, 25 bp, Homo sapien
cctaaataatttatcgaaacagtgg

SEQ ID NO: 1326997 - DNA, 25 bp, Homo sapien
ccaggcctgtagtacattggcacga

SEQ ID NO: 1326998 - DNA, 25 bp, Homo sapien
tagatacgttattataccctggagg

SEQ ID NO: 1326999 - DNA, 25 bp, Homo sapien
taacagaatagtgcatccagagtct

SEQ ID NO: 1327000 - DNA, 25 bp, Homo sapien
tcagactgattctcaacctggccct

SEQ ID NO: 1327001 - DNA, 25 bp, Homo sapien
ccagagtctttaattatgtaggaca

SEQ ID NO: 1327002 - DNA, 25 bp, Homo sapien
taagatttgcagcatgaaatgggcc

SEQ ID NO: 1327003 - DNA, 25 bp, Homo sapien
taagaatccgtgagaggcaatccca

SEQ ID NO: 1327004 - DNA, 25 bp, Homo sapien
gagtgagctcctgtcattgctgcca

SEQ ID NO: 1327005 - DNA, 25 bp, Homo sapien
gaaatagctttcattggactgcata

SEQ ID NO: 1327006 - DNA, 25 bp, Homo sapien
caaacaaccggaatgcttcagagat

SEQ ID NO: 1327007 - DNA, 25 bp, Homo sapien
catccatcattttataggtgcttca

SEQ ID NO: 1327008 - DNA, 25 bp, Homo sapien
agggcccgatacattcttgacaaca

SEQ ID NO: 1327009 - DNA, 25 bp, Homo sapien
tcagagatttttcgcatcagatcag

SEQ ID NO: 1327010 - DNA, 25 bp, Homo sapien
agctgggataacagagctaaatgac

SEQ ID NO: 1327011 - DNA, 25 bp, Homo sapien
tgggataacagagctaaatgactgc

SEQ ID NO: 1327012 - DNA, 25 bp, Homo sapien
gggataacagagctaaatgactgca

SEQ ID NO: 1327013 - DNA, 25 bp, Homo sapien
gataacagagctaaatgactgcatc

SEQ ID NO: 1327014 - DNA, 25 bp, Homo sapien
tgtgtgccagataccgtgctgagta

SEQ ID NO: 1327015 - DNA, 25 bp, Homo sapien
tatgttgagtcccaactgtgtgcca

SEQ ID NO: 1327016 - DNA, 25 bp, Homo sapien
tatcagactacccacatagcccgga

SEQ ID NO: 1327017 - DNA, 25 bp, Homo sapien
ctgtgccaggcgcattagcaatttt

SEQ ID NO: 1327018 - DNA, 25 bp, Homo sapien
agtggtctcaacctaacatcagaag

SEQ ID NO: 1327019 - DNA, 25 bp, Homo sapien
aatttccttatgagccccatgatgg

SEQ ID NO: 1327020 - DNA, 25 bp, Homo sapien
gcaccgtggtgagacctaatgagaa

SEQ ID NO: 1327021 - DNA, 25 bp, Homo sapien
tgagattgaattatgccaccacgtt

SEQ ID NO: 1327022 - DNA, 25 bp, Homo sapien
gaagacgatttgacccgtccttctg

SEQ ID NO: 1327023 - DNA, 25 bp, Homo sapien
gatagaagacgatttgacccgtcct

SEQ ID NO: 1327024 - DNA, 25 bp, Homo sapien
cgatttgacccgtccttctgtactt

SEQ ID NO: 1327025 - DNA, 25 bp, Homo sapien
gaagagatagaagacgatttgaccc

SEQ ID NO: 1327026 - DNA, 25 bp, Homo sapien
caaatgaggtgcaggaataggctac

SEQ ID NO: 1327027 - DNA, 25 bp, Homo sapien
gcttagctgaactgggtaaacacat

SEQ ID NO: 1327028 - DNA, 25 bp, Homo sapien
gatcctctatgcaaaagcttagctg

SEQ ID NO: 1327029 - DNA, 25 bp, Homo sapien
tgtagtgttaccctgacacgaggaa

SEQ ID NO: 1327030 - DNA, 25 bp, Homo sapien
ttaaactttgagttaatggctttga

SEQ ID NO: 1327031 - DNA, 25 bp, Homo sapien
taagaaatcctggtcctgggcatgg

SEQ ID NO: 1327032 - DNA, 25 bp, Homo sapien
ggtcctgggcatggattttaataaa

SEQ ID NO: 1327033 - DNA, 25 bp, Homo sapien
ttaatggctttgaagatatacttga

SEQ ID NO: 1327034 - DNA, 25 bp, Homo sapien
aaatgtgatgtgcttagccaagcac

SEQ ID NO: 1327035 - DNA, 25 bp, Homo sapien
gggccactttgacccacaaatgtga

SEQ ID NO: 1327036 - DNA, 25 bp, Homo sapien
ccgtgggccactttgacccacaaat

SEQ ID NO: 1327037 - DNA, 25 bp, Homo sapien
tagccaagcactcataagtgcttaa

SEQ ID NO: 1327038 - DNA, 25 bp, Homo sapien
tctccagcggttgagctattagtca

SEQ ID NO: 1327039 - DNA, 25 bp, Homo sapien
gctttttgcaagttaggccctctcc

SEQ ID NO: 1327040 - DNA, 25 bp, Homo sapien
tcatccctcgatgattttctgagca

SEQ ID NO: 1327041 - DNA, 25 bp, Homo sapien
tcatgatgccaagtgccaaagggag

SEQ ID NO: 1327042 - DNA, 25 bp, Homo sapien
cctgccaccacgcccacttaatttt

SEQ ID NO: 1327043 - DNA, 25 bp, Homo sapien
aagctccaccaaccgggttcaagca

SEQ ID NO: 1327044 - DNA, 25 bp, Homo sapien
tgagtagcagggactacaggtgcct

SEQ ID NO: 1327045 - DNA, 25 bp, Homo sapien
ttcaagcaattctgcctcagcctcc

SEQ ID NO: 1327046 - DNA, 25 bp, Homo sapien
aaggcccttggctacactggtgaaa

SEQ ID NO: 1327047 - DNA, 25 bp, Homo sapien
ggaccttccgtcacacaagctgaga

SEQ ID NO: 1327048 - DNA, 25 bp, Homo sapien
tagaaagggctacacagctcttcca

SEQ ID NO: 1327049 - DNA, 25 bp, Homo sapien
gcttctgcacggatacactatgttg

SEQ ID NO: 1327050 - DNA, 25 bp, Homo sapien
catggagtaattcttgtagttttgc

SEQ ID NO: 1327051 - DNA, 25 bp, Homo sapien
caaggacactgatgagaccatggat

SEQ ID NO: 1327052 - DNA, 25 bp, Homo sapien
tgtggctgcctggattcgaaagtgt

SEQ ID NO: 1327053 - DNA, 25 bp, Homo sapien
cctggattcgaaagtgtgtccttga

SEQ ID NO: 1327054 - DNA, 25 bp, Homo sapien
tgatggcctcttcgtttctgtcttg

SEQ ID NO: 1327055 - DNA, 25 bp, Homo sapien
caagtagtggtcatatttaatcttc

SEQ ID NO: 1327056 - DNA, 25 bp, Homo sapien
ctccagcagggcgtttgggatcaag

SEQ ID NO: 1327057 - DNA, 25 bp, Homo sapien
ggcctcttcgtttctgtcttgctcc

SEQ ID NO: 1327058 - DNA, 25 bp, Homo sapien
tcagacacaggcctttcaacaattt

SEQ ID NO: 1327059 - DNA, 25 bp, Homo sapien
acaatttcaccaagcactcgtcatc

SEQ ID NO: 1327060 - DNA, 25 bp, Homo sapien
caggcctttcaacaatttcaccaag

SEQ ID NO: 1327061 - DNA, 25 bp, Homo sapien
tcgtcatccactgagtactcgttct

SEQ ID NO: 1327062 - DNA, 25 bp, Homo sapien
ggcaggcccaagggcctgagggaag

SEQ ID NO: 1327063 - DNA, 25 bp, Homo sapien
ggcccaagggcctgagggaagtcac

SEQ ID NO: 1327064 - DNA, 25 bp, Homo sapien
caggcccaagggcctgagggaagtc

SEQ ID NO: 1327065 - DNA, 25 bp, Homo sapien
ctagcatggcaggcccaagggcctg

SEQ ID NO: 1327066 - DNA, 25 bp, Homo sapien
cggcgtagccgttccagatgtacat

SEQ ID NO: 1327067 - DNA, 25 bp, Homo sapien
gataatctcaagtatcccatccgtg

SEQ ID NO: 1327068 - DNA, 25 bp, Homo sapien
tatcccatccgtgagtttcggctgc

SEQ ID NO: 1327069 - DNA, 25 bp, Homo sapien
ctcttcagccttagtgataatctca

SEQ ID NO: 1327070 - DNA, 25 bp, Homo sapien
caatcctatacccggagggcagcgc

SEQ ID NO: 1327071 - DNA, 25 bp, Homo sapien
acaatcctatacccggagggcagcg

SEQ ID NO: 1327072 - DNA, 25 bp, Homo sapien
cacaatcctatacccggagggcagc

SEQ ID NO: 1327073 - DNA, 25 bp, Homo sapien
ccacaatcctatacccggagggcag

SEQ ID NO: 1327074 - DNA, 25 bp, Homo sapien
tctctgtgggtagagatttcccagc

SEQ ID NO: 1327075 - DNA, 25 bp, Homo sapien
cactggcagcgagatagggttggag

SEQ ID NO: 1327076 - DNA, 25 bp, Homo sapien
ggacttccggatggcaaacttctct

SEQ ID NO: 1327077 - DNA, 25 bp, Homo sapien
ttggaggagaagtagcgccgggact

SEQ ID NO: 1327078 - DNA, 25 bp, Homo sapien
tgtctcaggttaactcagcagagtg

SEQ ID NO: 1327079 - DNA, 25 bp, Homo sapien
tactgtccacatgaaagagactcgg

SEQ ID NO: 1327080 - DNA, 25 bp, Homo sapien
gctggtctgtccatagcggcctaca

SEQ ID NO: 1327081 - DNA, 25 bp, Homo sapien
ggcctacacagtgggagcacgatgt

SEQ ID NO: 1327082 - DNA, 25 bp, Homo sapien
cttcgtcgtccccgaacggcttgtg

SEQ ID NO: 1327083 - DNA, 25 bp, Homo sapien
tcccaaacatgctgaggtaggcggc

SEQ ID NO: 1327084 - DNA, 25 bp, Homo sapien
caaacatgctgaggtaggcggcctt

SEQ ID NO: 1327085 - DNA, 25 bp, Homo sapien
acatgctgaggtaggcggccttcat

SEQ ID NO: 1327086 - DNA, 25 bp, Homo sapien
aatgaaggtaagaagctgaagcaac

SEQ ID NO: 1327087 - DNA, 25 bp, Homo sapien
tgaaggtaagaagctgaagcaactt

SEQ ID NO: 1327088 - DNA, 25 bp, Homo sapien
ggtaagaagctgaagcaacttgaag

SEQ ID NO: 1327089 - DNA, 25 bp, Homo sapien
taagaagctgaagcaacttgaagac

SEQ ID NO: 1327090 - DNA, 25 bp, Homo sapien
tgcccctgacgtggagacaccaagt

SEQ ID NO: 1327091 - DNA, 25 bp, Homo sapien
caggctacccgggatgtctttctgc

SEQ ID NO: 1327092 - DNA, 25 bp, Homo sapien
tctcattatcggactgccaccatct

SEQ ID NO: 1327093 - DNA, 25 bp, Homo sapien
gtacacattgtctcctatctccctg

SEQ ID NO: 1327094 - DNA, 25 bp, Homo sapien
ccaatgtgggtcagttctaacggct

SEQ ID NO: 1327095 - DNA, 25 bp, Homo sapien
taaataaatgcaagcgtggcaggct

SEQ ID NO: 1327096 - DNA, 25 bp, Homo sapien
cagggaaggtatctaaggtcacagc

SEQ ID NO: 1327097 - DNA, 25 bp, Homo sapien
tttcatctttggtaggcgggcatct

SEQ ID NO: 1327098 - DNA, 25 bp, Homo sapien
cacatcagctcccagtagcacatgt

SEQ ID NO: 1327099 - DNA, 25 bp, Homo sapien
gggcctcacagcactcctcgaaacg

SEQ ID NO: 1327100 - DNA, 25 bp, Homo sapien
agtagcacatgtggtggaactgctt

SEQ ID NO: 1327101 - DNA, 25 bp, Homo sapien
caggtcggcgtagaagtaggacatc

SEQ ID NO: 1327102 - DNA, 25 bp, Homo sapien
taagtcttacatgacgttgggctca

SEQ ID NO: 1327103 - DNA, 25 bp, Homo sapien
tatatctcccagtcaaaatcccagg

SEQ ID NO: 1327104 - DNA, 25 bp, Homo sapien
aatcgtcatgccctaaacagatggg

SEQ ID NO: 1327105 - DNA, 25 bp, Homo sapien
tgtccctgagtatgtcacatgtgcc

SEQ ID NO: 1327106 - DNA, 25 bp, Homo sapien
cttcaatcctccctgcaaagaacag

SEQ ID NO: 1327107 - DNA, 25 bp, Homo sapien
cctttaatgacttcaatcctccctg

SEQ ID NO: 1327108 - DNA, 25 bp, Homo sapien
tcaatcctccctgcaaagaacagga

SEQ ID NO: 1327109 - DNA, 25 bp, Homo sapien
tgcctttaatgacttcaatcctccc

SEQ ID NO: 1327110 - DNA, 25 bp, Homo sapien
tgtgggtccgtggggtctgtgggtg

SEQ ID NO: 1327111 - DNA, 25 bp, Homo sapien
tctcggcctcctcgatgttgacgtt

SEQ ID NO: 1327112 - DNA, 25 bp, Homo sapien
ccggttcaggtagggcttcaagagc

SEQ ID NO: 1327113 - DNA, 25 bp, Homo sapien
taccggttcaggtagggcttcaaga

SEQ ID NO: 1327114 - DNA, 25 bp, Homo sapien
tcctcgatgttgacgttcccagtac

SEQ ID NO: 1327115 - DNA, 25 bp, Homo sapien
agatggtgggggagacacagaacat

SEQ ID NO: 1327116 - DNA, 25 bp, Homo sapien
ggagacacagaacatgtcaccaccc

SEQ ID NO: 1327117 - DNA, 25 bp, Homo sapien
gtgggggagacacagaacatgtcac

SEQ ID NO: 1327118 - DNA, 25 bp, Homo sapien
ggggagacacagaacatgtcaccac

SEQ ID NO: 1327119 - DNA, 25 bp, Homo sapien
gaaggtgtggtagcacagcaggagc

SEQ ID NO: 1327120 - DNA, 25 bp, Homo sapien
cgagcacgaaggtgaggaaggtgtg

SEQ ID NO: 1327121 - DNA, 25 bp, Homo sapien
acagcaggagcatgacacagagcac

SEQ ID NO: 1327122 - DNA, 25 bp, Homo sapien
gagcacagagcggaagctgtgccct

SEQ ID NO: 1327123 - DNA, 25 bp, Homo sapien
cctgcgatgggtattgagggcccaa

SEQ ID NO: 1327124 - DNA, 25 bp, Homo sapien
gcctccctgtagtcacgggcttggc

SEQ ID NO: 1327125 - DNA, 25 bp, Homo sapien
gcttggccgccctgcgatgggtatt

SEQ ID NO: 1327126 - DNA, 25 bp, Homo sapien
tgtagtcacgggcttggccgccctg

SEQ ID NO: 1327127 - DNA, 25 bp, Homo sapien
ctgaaaaccccacaaactccaacag

SEQ ID NO: 1327128 - DNA, 25 bp, Homo sapien
agcctcaggatcctagtaggaagca

SEQ ID NO: 1327129 - DNA, 25 bp, Homo sapien
tgaaaaccccacaaactccaacagc

SEQ ID NO: 1327130 - DNA, 25 bp, Homo sapien
tcccccactccatgcaggaacaaga

SEQ ID NO: 1327131 - DNA, 25 bp, Homo sapien
cttcccccactccatgcaggaacaa

SEQ ID NO: 1327132 - DNA, 25 bp, Homo sapien
taggaaaccttcccccactccatgc

SEQ ID NO: 1327133 - DNA, 25 bp, Homo sapien
cccactccatgcaggaacaagactt

SEQ ID NO: 1327134 - DNA, 25 bp, Homo sapien
gttgaaggcccctacaccaagcttc

SEQ ID NO: 1327135 - DNA, 25 bp, Homo sapien
tggttctcacccttgcagtattgtg

SEQ ID NO: 1327136 - DNA, 25 bp, Homo sapien
cagtattgtgaggactgaacaaggc

SEQ ID NO: 1327137 - DNA, 25 bp, Homo sapien
gcttcactcctccttcaaagtgcgg

SEQ ID NO: 1327138 - DNA, 25 bp, Homo sapien
gcagagagatgccaagtcctgtttc

SEQ ID NO: 1327139 - DNA, 25 bp, Homo sapien
cagagagatgccaagtcctgtttca

SEQ ID NO: 1327140 - DNA, 25 bp, Homo sapien
gccgtatgggccctggcacactcag

SEQ ID NO: 1327141 - DNA, 25 bp, Homo sapien
catttgttcgtattccacatcctat

SEQ ID NO: 1327142 - DNA, 25 bp, Homo sapien
cccctgaatttcagccgtatgggcc

SEQ ID NO: 1327143 - DNA, 25 bp, Homo sapien
gcagcttctggacatttgttcgtat

SEQ ID NO: 1327144 - DNA, 25 bp, Homo sapien
tcgaactttgatgccgcctttgatg

SEQ ID NO: 1327145 - DNA, 25 bp, Homo sapien
ttgatgccgcctttgatgaagctca

SEQ ID NO: 1327146 - DNA, 25 bp, Homo sapien
tagctgtttcgaactttgatgccgc

SEQ ID NO: 1327147 - DNA, 25 bp, Homo sapien
tgtaggtctggtagctgtttcgaac

SEQ ID NO: 1327148 - DNA, 25 bp, Homo sapien
aggaaaagatgctgacggcctggcc

SEQ ID NO: 1327149 - DNA, 25 bp, Homo sapien
tgcaggaggaaaagatgctgacggc

SEQ ID NO: 1327150 - DNA, 25 bp, Homo sapien
aaaagatgctgacggcctggcccag

SEQ ID NO: 1327151 - DNA, 25 bp, Homo sapien
ctgcaggaggaaaagatgctgacgg

SEQ ID NO: 1327152 - DNA, 25 bp, Homo sapien
gatcatgcaaggctctgggcctgac

SEQ ID NO: 1327153 - DNA, 25 bp, Homo sapien
gcctgactgcccctccgtgtgagga

SEQ ID NO: 1327154 - DNA, 25 bp, Homo sapien
ctgcaggcgtgagagggatcatgca

SEQ ID NO: 1327155 - DNA, 25 bp, Homo sapien
ctgactgcccctccgtgtgaggaac

SEQ ID NO: 1327156 - DNA, 25 bp, Homo sapien
ctctgcatagcagacctcagcgtgg

SEQ ID NO: 1327157 - DNA, 25 bp, Homo sapien
tgcatagcagacctcagcgtggatt

SEQ ID NO: 1327158 - DNA, 25 bp, Homo sapien
tctgcatagcagacctcagcgtgga

SEQ ID NO: 1327159 - DNA, 25 bp, Homo sapien
ctgcatagcagacctcagcgtggat

SEQ ID NO: 1327160 - DNA, 25 bp, Homo sapien
ggcccagcgtggggcggttcaccag

SEQ ID NO: 1327161 - DNA, 25 bp, Homo sapien
ctgaaggaatctgttacagaagact

SEQ ID NO: 1327162 - DNA, 25 bp, Homo sapien
agcgtggggcggttcaccaggctgc

SEQ ID NO: 1327163 - DNA, 25 bp, Homo sapien
gaaggaatctgttacagaagacttc

SEQ ID NO: 1327164 - DNA, 25 bp, Homo sapien
gcatatgtcagtgagtggtacatgc

SEQ ID NO: 1327165 - DNA, 25 bp, Homo sapien
ccttcatcatgttgccggcaagcag

SEQ ID NO: 1327166 - DNA, 25 bp, Homo sapien
ccaggatggtggcatatgtcagtga

SEQ ID NO: 1327167 - DNA, 25 bp, Homo sapien
ttgccggcaagcaggatgtcctgag

SEQ ID NO: 1327168 - DNA, 25 bp, Homo sapien
gctggtcctgggcagctcatctcca

SEQ ID NO: 1327169 - DNA, 25 bp, Homo sapien
cttatagagccccagaggcagctgg

SEQ ID NO: 1327170 - DNA, 25 bp, Homo sapien
gcagctggtcctgggcagctcatct

SEQ ID NO: 1327171 - DNA, 25 bp, Homo sapien
ctggtcctgggcagctcatctccac

SEQ ID NO: 1327172 - DNA, 25 bp, Homo sapien
cccagaccggctgtcaggataggga

SEQ ID NO: 1327173 - DNA, 25 bp, Homo sapien
tccactttctggtcctttcagaccc

SEQ ID NO: 1327174 - DNA, 25 bp, Homo sapien
cttcttgggcccagaccggctgtca

SEQ ID NO: 1327175 - DNA, 25 bp, Homo sapien
tctggtcctttcagaccccacttca

SEQ ID NO: 1327176 - DNA, 25 bp, Homo sapien
aagaggtccagggcggtcatgcact

SEQ ID NO: 1327177 - DNA, 25 bp, Homo sapien
ctgggcttgaggtagctgagtgctt

SEQ ID NO: 1327178 - DNA, 25 bp, Homo sapien
gcttgaggtagctgagtgcttctga

SEQ ID NO: 1327179 - DNA, 25 bp, Homo sapien
tccagggcggtcatgcactggtcca

SEQ ID NO: 1327180 - DNA, 25 bp, Homo sapien
agggggagcagaagggaatgtcatc

SEQ ID NO: 1327181 - DNA, 25 bp, Homo sapien
ctcttggtgttcccaagggtgggag

SEQ ID NO: 1327182 - DNA, 25 bp, Homo sapien
gggagcagaagggaatgtcatcaga

SEQ ID NO: 1327183 - DNA, 25 bp, Homo sapien
agcagaagggaatgtcatcagagat

SEQ ID NO: 1327184 - DNA, 25 bp, Homo sapien
aaagggagtctttgtggcccttctg

SEQ ID NO: 1327185 - DNA, 25 bp, Homo sapien
gagtctttgtggcccttctggccca

SEQ ID NO: 1327186 - DNA, 25 bp, Homo sapien
gggagtctttgtggcccttctggcc

SEQ ID NO: 1327187 - DNA, 25 bp, Homo sapien
cacaagggtaaagggagtctttgtg

SEQ ID NO: 1327188 - DNA, 25 bp, Homo sapien
agccactaaatcccacagccccttt

SEQ ID NO: 1327189 - DNA, 25 bp, Homo sapien
gaaaaggtcctgtctacttggtcta

SEQ ID NO: 1327190 - DNA, 25 bp, Homo sapien
gccggatggacagtcagtgcagaca

SEQ ID NO: 1327191 - DNA, 25 bp, Homo sapien
ccggcacctcttctgcttaactggg

SEQ ID NO: 1327192 - DNA, 25 bp, Homo sapien
ctcttctgcttaactgggatgaggc

SEQ ID NO: 1327193 - DNA, 25 bp, Homo sapien
agatccaggccggatggacagtcag

SEQ ID NO: 1327194 - DNA, 25 bp, Homo sapien
gcacagtggtggcggctctctcatt

SEQ ID NO: 1327195 - DNA, 25 bp, Homo sapien
aggtgacatctattcctgcggtgat

SEQ ID NO: 1327196 - DNA, 25 bp, Homo sapien
agagggacgcggagaagaggtgctg

SEQ ID NO: 1327197 - DNA, 25 bp, Homo sapien
cacttgaggcccaaacgagaaggga

SEQ ID NO: 1327198 - DNA, 25 bp, Homo sapien
gatttgttcaccaatgaccatctgg

SEQ ID NO: 1327199 - DNA, 25 bp, Homo sapien
ccagcgtgagaagagcaagcttgct

SEQ ID NO: 1327200 - DNA, 25 bp, Homo sapien
caggtacggttctgcataaggaaga

SEQ ID NO: 1327201 - DNA, 25 bp, Homo sapien
ccaggatgacactagccagggttgg

SEQ ID NO: 1327202 - DNA, 25 bp, Homo sapien
tgggtgaccgatgacaagtcactta

SEQ ID NO: 1327203 - DNA, 25 bp, Homo sapien
ccacaggagtgaacgccacgaggca

SEQ ID NO: 1327204 - DNA, 25 bp, Homo sapien
ctcctgggtgaccgatgacaagtca

SEQ ID NO: 1327205 - DNA, 25 bp, Homo sapien
ggctgctctgaacgtgtctgtgact

SEQ ID NO: 1327206 - DNA, 25 bp, Homo sapien
ctggggcgccgccagccgaggtcat

SEQ ID NO: 1327207 - DNA, 25 bp, Homo sapien
cctggggcgccgccagccgaggtca

SEQ ID NO: 1327208 - DNA, 25 bp, Homo sapien
ccagccggacgccaatcgcggccca

SEQ ID NO: 1327209 - DNA, 25 bp, Homo sapien
ggcgctgtgcggtcgcggacgcggc

SEQ ID NO: 1327210 - DNA, 25 bp, Homo sapien
ccgggcgctgtgcggtcgcggacgc

SEQ ID NO: 1327211 - DNA, 25 bp, Homo sapien
ccggacgccaatcgcggcccaggtg

SEQ ID NO: 1327212 - DNA, 25 bp, Homo sapien
gcaagctaggactggaatccatccc

SEQ ID NO: 1327213 - DNA, 25 bp, Homo sapien
cccaaatgtccactgtgcaccgagc

SEQ ID NO: 1327214 - DNA, 25 bp, Homo sapien
acccacaacgctccccaaatgtcca

SEQ ID NO: 1327215 - DNA, 25 bp, Homo sapien
caacgctccccaaatgtccactgtg

SEQ ID NO: 1327216 - DNA, 25 bp, Homo sapien
ggatgtggacaacccctcaagcaca

SEQ ID NO: 1327217 - DNA, 25 bp, Homo sapien
cacacttggctcatgcagacctgag

SEQ ID NO: 1327218 - DNA, 25 bp, Homo sapien
cagacctgaggagaaccaggtgaga

SEQ ID NO: 1327219 - DNA, 25 bp, Homo sapien
agctgacttcgcagatagcccgcgt

SEQ ID NO: 1327220 - DNA, 25 bp, Homo sapien
cagcatggacataatcagagaacca

SEQ ID NO: 1327221 - DNA, 25 bp, Homo sapien
taatctgtgctgattgtatgtacct

SEQ ID NO: 1327222 - DNA, 25 bp, Homo sapien
gattgtatgtacctactcctccttg

SEQ ID NO: 1327223 - DNA, 25 bp, Homo sapien
acacagcatggacataatcagagaa

SEQ ID NO: 1327224 - DNA, 25 bp, Homo sapien
taattacaggctacaacttagaggt

SEQ ID NO: 1327225 - DNA, 25 bp, Homo sapien
tagctctgggcaatacttatctgtc

SEQ ID NO: 1327226 - DNA, 25 bp, Homo sapien
cctggagccagagtcaacaacataa

SEQ ID NO: 1327227 - DNA, 25 bp, Homo sapien
tcctacacaagcgagcacatataca

SEQ ID NO: 1327228 - DNA, 25 bp, Homo sapien
taggtcactggattcgtttatcaaa

SEQ ID NO: 1327229 - DNA, 25 bp, Homo sapien
tcagcccttgcttcatatgtatgac

SEQ ID NO: 1327230 - DNA, 25 bp, Homo sapien
ctttaatattatgttggtccacggg

SEQ ID NO: 1327231 - DNA, 25 bp, Homo sapien
taagccttgtgattatgattcagcc

SEQ ID NO: 1327232 - DNA, 25 bp, Homo sapien
taagaactaaacaggacagggccac

SEQ ID NO: 1327233 - DNA, 25 bp, Homo sapien
tcatcagaataactacagaacaggg

SEQ ID NO: 1327234 - DNA, 25 bp, Homo sapien
tctctatattccagaaggcagaagc

SEQ ID NO: 1327235 - DNA, 25 bp, Homo sapien
acaagtaaaatagcacaggcaggca

SEQ ID NO: 1327236 - DNA, 25 bp, Homo sapien
cattcgatcatatcttcttcagagg

SEQ ID NO: 1327237 - DNA, 25 bp, Homo sapien
tgctgatttagtcgggcaagcctct

SEQ ID NO: 1327238 - DNA, 25 bp, Homo sapien
tcagatttgctgagtgcaatagcca

SEQ ID NO: 1327239 - DNA, 25 bp, Homo sapien
tgcaatagccagttctaagtcttct

SEQ ID NO: 1327240 - DNA, 25 bp, Homo sapien
catttaaaagatcgatgaacaaacg

SEQ ID NO: 1327241 - DNA, 25 bp, Homo sapien
agatcgatgaacaaacgaataaata

SEQ ID NO: 1327242 - DNA, 25 bp, Homo sapien
taaaagatcgatgaacaaacgaata

SEQ ID NO: 1327243 - DNA, 25 bp, Homo sapien
ctgccatttaaaagatcgatgaaca

SEQ ID NO: 1327244 - DNA, 25 bp, Homo sapien
ggctgggtgctatggagcaatcttg

SEQ ID NO: 1327245 - DNA, 25 bp, Homo sapien
tcggcctcccaagaacctaatcata

SEQ ID NO: 1327246 - DNA, 25 bp, Homo sapien
gcctcccaagaacctaatcatattt

SEQ ID NO: 1327247 - DNA, 25 bp, Homo sapien
gctgggtgctatggagcaatcttgg

SEQ ID NO: 1327248 - DNA, 25 bp, Homo sapien
cagtggcactatatcagctcccgca

SEQ ID NO: 1327249 - DNA, 25 bp, Homo sapien
agtggcactatatcagctcccgcaa

SEQ ID NO: 1327250 - DNA, 25 bp, Homo sapien
gtggcactatatcagctcccgcaac

SEQ ID NO: 1327251 - DNA, 25 bp, Homo sapien
aataaagcaattggttgaatggccc

SEQ ID NO: 1327252 - DNA, 25 bp, Homo sapien
tgaatggcccaatgctacactgagg

SEQ ID NO: 1327253 - DNA, 25 bp, Homo sapien
aaatattaggcagagttacctggcc

SEQ ID NO: 1327254 - DNA, 25 bp, Homo sapien
gatacctccatggttggttgcccca

SEQ ID NO: 1327255 - DNA, 25 bp, Homo sapien
gcagaagtgaatggatcacaaaata

SEQ ID NO: 1327256 - DNA, 25 bp, Homo sapien
ctctttattggtagtggtagtagca

SEQ ID NO: 1327257 - DNA, 25 bp, Homo sapien
tggtagtagcagaagtgaatggatc

SEQ ID NO: 1327258 - DNA, 25 bp, Homo sapien
gcctctttattggtagtggtagtag

SEQ ID NO: 1327259 - DNA, 25 bp, Homo sapien
tcattcagtttaaagggatcaggag

SEQ ID NO: 1327260 - DNA, 25 bp, Homo sapien
gaaatggatcattcagtttaaaggg

SEQ ID NO: 1327261 - DNA, 25 bp, Homo sapien
gggatcaggagaatccaatttgttg

SEQ ID NO: 1327262 - DNA, 25 bp, Homo sapien
tccaatttgttgatggatcttttcc

SEQ ID NO: 1327263 - DNA, 25 bp, Homo sapien
tggagttccgatctttggtggcagt

SEQ ID NO: 1327264 - DNA, 25 bp, Homo sapien
tcttgttggagttccgatctttggt

SEQ ID NO: 1327265 - DNA, 25 bp, Homo sapien
gcagggtcttgttggagttccgatc

SEQ ID NO: 1327266 - DNA, 25 bp, Homo sapien
tcatcttcacttttgaccgatgttt

SEQ ID NO: 1327267 - DNA, 25 bp, Homo sapien
tacgttgctgacagagctcgatgtg

SEQ ID NO: 1327268 - DNA, 25 bp, Homo sapien
acattttttgtaatcactacgttgc

SEQ ID NO: 1327269 - DNA, 25 bp, Homo sapien
cagagctcgatgtggctgaacgaaa

SEQ ID NO: 1327270 - DNA, 25 bp, Homo sapien
aacgaaaaggatcttcattgttgac

SEQ ID NO: 1327271 - DNA, 25 bp, Homo sapien
agcaaatccacctccaaatgattca

SEQ ID NO: 1327272 - DNA, 25 bp, Homo sapien
aatcaatgtttcacaggcctgagaa

SEQ ID NO: 1327273 - DNA, 25 bp, Homo sapien
ttaatcaatgtttcacaggcctgag

SEQ ID NO: 1327274 - DNA, 25 bp, Homo sapien
atttaatcaatgtttcacaggcctg

SEQ ID NO: 1327275 - DNA, 25 bp, Homo sapien
caatgtttcacaggcctgagaagtt

SEQ ID NO: 1327276 - DNA, 25 bp, Homo sapien
ggaatgaatgatctactctgagata

SEQ ID NO: 1327277 - DNA, 25 bp, Homo sapien
tgcctgatacaggaagatggaaaga

SEQ ID NO: 1327278 - DNA, 25 bp, Homo sapien
agaatgtttataggaattgctgcct

SEQ ID NO: 1327279 - DNA, 25 bp, Homo sapien
gggctaccaataacgtcaaagaatg

SEQ ID NO: 1327280 - DNA, 25 bp, Homo sapien
caggtgtaagggctaccaataacgt

SEQ ID NO: 1327281 - DNA, 25 bp, Homo sapien
tgctggggggagttccagaaacact

SEQ ID NO: 1327282 - DNA, 25 bp, Homo sapien
ccagaaacacttttagagaaaccat

SEQ ID NO: 1327283 - DNA, 25 bp, Homo sapien
ggagttccagaaacacttttagaga

SEQ ID NO: 1327284 - DNA, 25 bp, Homo sapien
ctgctggggggagttccagaaacac

SEQ ID NO: 1327285 - DNA, 25 bp, Homo sapien
gccaatcgttattttagtgttcacc

SEQ ID NO: 1327286 - DNA, 25 bp, Homo sapien
tgttatcgtaagagatgacagcttc

SEQ ID NO: 1327287 - DNA, 25 bp, Homo sapien
gttaattgaaaaagagcctcaggca

SEQ ID NO: 1327288 - DNA, 25 bp, Homo sapien
ccttctacatatacaacaaataagt

SEQ ID NO: 1327289 - DNA, 25 bp, Homo sapien
gccccgcaagctccgttcatggtta

SEQ ID NO: 1327290 - DNA, 25 bp, Homo sapien
gttaagtgtcctatacagatgtacc

SEQ ID NO: 1327291 - DNA, 25 bp, Homo sapien
cattcactattacttgactcactga

SEQ ID NO: 1327292 - DNA, 25 bp, Homo sapien
ataaatttagtgtagtgcaagtgta

SEQ ID NO: 1327293 - DNA, 25 bp, Homo sapien
tatgacgaatagcctaggttgtgta

SEQ ID NO: 1327294 - DNA, 25 bp, Homo sapien
atgacgaatagcctaggttgtgtag

SEQ ID NO: 1327295 - DNA, 25 bp, Homo sapien
tgacgaatagcctaggttgtgtagt

SEQ ID NO: 1327296 - DNA, 25 bp, Homo sapien
agtgtggtggatcatttcaaccgaa

SEQ ID NO: 1327297 - DNA, 25 bp, Homo sapien
taagtagtcttcacaggagttgctg

SEQ ID NO: 1327298 - DNA, 25 bp, Homo sapien
tgtgtgtcaagatgtcagagctggc

SEQ ID NO: 1327299 - DNA, 25 bp, Homo sapien
ctactgctggagtttgtgggttgca

SEQ ID NO: 1327300 - DNA, 25 bp, Homo sapien
gggtattttactcctgctggagtca

SEQ ID NO: 1327301 - DNA, 25 bp, Homo sapien
gggagatcatgagctcccttctata

SEQ ID NO: 1327302 - DNA, 25 bp, Homo sapien
tagcctgagtcattgcctgtaaaaa

SEQ ID NO: 1327303 - DNA, 25 bp, Homo sapien
tgaacacatatacgtttagcctgag

SEQ ID NO: 1327304 - DNA, 25 bp, Homo sapien
acaattcccctgttccgtaggatca

SEQ ID NO: 1327305 - DNA, 25 bp, Homo sapien
caattcccctgttccgtaggatcaa

SEQ ID NO: 1327306 - DNA, 25 bp, Homo sapien
tagttgacagcactttaaagcacca

SEQ ID NO: 1327307 - DNA, 25 bp, Homo sapien
ggcccacaggatgtctaaggtttct

SEQ ID NO: 1327308 - DNA, 25 bp, Homo sapien
ccaaggaaggagttgtaagatacac

SEQ ID NO: 1327309 - DNA, 25 bp, Homo sapien
ggaaaagaacccatgctgggccagg

SEQ ID NO: 1327310 - DNA, 25 bp, Homo sapien
gaagaacattccatgttcatgggta

SEQ ID NO: 1327311 - DNA, 25 bp, Homo sapien
tgctcaatgaaataaaagaggatac

SEQ ID NO: 1327312 - DNA, 25 bp, Homo sapien
tcttcaaggagaactacaaaccact

SEQ ID NO: 1327313 - DNA, 25 bp, Homo sapien
caacttacaagggacatgagggacc

SEQ ID NO: 1327314 - DNA, 25 bp, Homo sapien
acacaccatggcctttcgtgggttg

SEQ ID NO: 1327315 - DNA, 25 bp, Homo sapien
acaccatggcctttcgtgggttggg

SEQ ID NO: 1327316 - DNA, 25 bp, Homo sapien
tcacacaccatggcctttcgtgggt

SEQ ID NO: 1327317 - DNA, 25 bp, Homo sapien
atcacacaccatggcctttcgtggg

SEQ ID NO: 1327318 - DNA, 25 bp, Homo sapien
aagtctcacttgctctcattctaag

SEQ ID NO: 1327319 - DNA, 25 bp, Homo sapien
tagtacccctagcaatataatcagc

SEQ ID NO: 1327320 - DNA, 25 bp, Homo sapien
tccaacccgaaaacaatgcactctg

SEQ ID NO: 1327321 - DNA, 25 bp, Homo sapien
tcttgctactcatgttgggagttaa

SEQ ID NO: 1327322 - DNA, 25 bp, Homo sapien
taacttagaccaagatccgtaacag

SEQ ID NO: 1327323 - DNA, 25 bp, Homo sapien
aagatccgtaacagtcaatgctgac

SEQ ID NO: 1327324 - DNA, 25 bp, Homo sapien
gaccaagatccgtaacagtcaatgc

SEQ ID NO: 1327325 - DNA, 25 bp, Homo sapien
atcttttaacttagaccaagatccg

SEQ ID NO: 1327326 - DNA, 25 bp, Homo sapien
catattctagtgtaatattcaacat

SEQ ID NO: 1327327 - DNA, 25 bp, Homo sapien
gatatacaaatgcttattattggta

SEQ ID NO: 1327328 - DNA, 25 bp, Homo sapien
aattactattggatataattatgca

SEQ ID NO: 1327329 - DNA, 25 bp, Homo sapien
tactgatactgggtagagttcatat

SEQ ID NO: 1327330 - DNA, 25 bp, Homo sapien
tgttccaccaggagcaaaaggatca

SEQ ID NO: 1327331 - DNA, 25 bp, Homo sapien
gcaacaactgttccaccaggagcaa

SEQ ID NO: 1327332 - DNA, 25 bp, Homo sapien
gagcaaaaggatcattgtgcttcaa

SEQ ID NO: 1327333 - DNA, 25 bp, Homo sapien
tgaatcgcttgctgcaacaactgtt

SEQ ID NO: 1327334 - DNA, 25 bp, Homo sapien
cacctggcctcaacttaacctacgt

SEQ ID NO: 1327335 - DNA, 25 bp, Homo sapien
cacacctggcctcaacttaacctac

SEQ ID NO: 1327336 - DNA, 25 bp, Homo sapien
acacctggcctcaacttaacctacg

SEQ ID NO: 1327337 - DNA, 25 bp, Homo sapien
ccacacctggcctcaacttaaccta

SEQ ID NO: 1327338 - DNA, 25 bp, Homo sapien
tttgaaaggatcaccaccaaatgga

SEQ ID NO: 1327339 - DNA, 25 bp, Homo sapien
tattgttggctgcactgaaagggtc

SEQ ID NO: 1327340 - DNA, 25 bp, Homo sapien
caaatggatctgaacctttgaaagg

SEQ ID NO: 1327341 - DNA, 25 bp, Homo sapien
gcaaaaggatcagtagattgcctga

SEQ ID NO: 1327342 - DNA, 25 bp, Homo sapien
tttccaaaaggatcatccttgaaag

SEQ ID NO: 1327343 - DNA, 25 bp, Homo sapien
gatttttccaaaaggatcatccttg

SEQ ID NO: 1327344 - DNA, 25 bp, Homo sapien
caaaaggatcatccttgaaaggatc

SEQ ID NO: 1327345 - DNA, 25 bp, Homo sapien
cgatttttccaaaaggatcatcctt

SEQ ID NO: 1327346 - DNA, 25 bp, Homo sapien
tcattgaccttatgaaatatacagc

SEQ ID NO: 1327347 - DNA, 25 bp, Homo sapien
tcacaagttgaggttacggatggag

SEQ ID NO: 1327348 - DNA, 25 bp, Homo sapien
gtggtgacaccactacttaaagagt

SEQ ID NO: 1327349 - DNA, 25 bp, Homo sapien
tatacagccaactatacttaccttg

SEQ ID NO: 1327350 - DNA, 25 bp, Homo sapien
aactggacctgtcagcgaacttgag

SEQ ID NO: 1327351 - DNA, 25 bp, Homo sapien
cgaacttgagtctacattaaatgga

SEQ ID NO: 1327352 - DNA, 25 bp, Homo sapien
gacctgtcagcgaacttgagtctac

SEQ ID NO: 1327353 - DNA, 25 bp, Homo sapien
tatctgcaactggacctgtcagcga

SEQ ID NO: 1327354 - DNA, 25 bp, Homo sapien
tccttcaccttaacatatttttctc

SEQ ID NO: 1327355 - DNA, 25 bp, Homo sapien
tattattgtcgagttcagaacaaac

SEQ ID NO: 1327356 - DNA, 25 bp, Homo sapien
atgtctattattgtcgagttcagaa

SEQ ID NO: 1327357 - DNA, 25 bp, Homo sapien
acaccagaaggcagtagttcaggac

SEQ ID NO: 1327358 - DNA, 25 bp, Homo sapien
caccagaaggcagtagttcaggact

SEQ ID NO: 1327359 - DNA, 25 bp, Homo sapien
attaaggttggctgtttcactgctg

SEQ ID NO: 1327360 - DNA, 25 bp, Homo sapien
gattcctggtgtatgggctcagact

SEQ ID NO: 1327361 - DNA, 25 bp, Homo sapien
tgtagctccgtttacaagaatgctg

SEQ ID NO: 1327362 - DNA, 25 bp, Homo sapien
agaatgctgtgtgggctactgcacc

SEQ ID NO: 1327363 - DNA, 25 bp, Homo sapien
tattgagtacctacactgggacaag

SEQ ID NO: 1327364 - DNA, 25 bp, Homo sapien
gaccaaaaccatgactctgctaggg

SEQ ID NO: 1327365 - DNA, 25 bp, Homo sapien
taataactgagcacactggactggg

SEQ ID NO: 1327366 - DNA, 25 bp, Homo sapien
gtaggtaggtactcagctgccagat

SEQ ID NO: 1327367 - DNA, 25 bp, Homo sapien
taagtggagatctgcgattcctgac

SEQ ID NO: 1327368 - DNA, 25 bp, Homo sapien
ctgttgtgaatcttgtaggtgctgc

SEQ ID NO: 1327369 - DNA, 25 bp, Homo sapien
cgattcctgactagttaattcagct

SEQ ID NO: 1327370 - DNA, 25 bp, Homo sapien
gctgtttcttgctgtagacggctca

SEQ ID NO: 1327371 - DNA, 25 bp, Homo sapien
cagttgggcctcctcagcacatttc

SEQ ID NO: 1327372 - DNA, 25 bp, Homo sapien
cctcctcagcacatttctttctgac

SEQ ID NO: 1327373 - DNA, 25 bp, Homo sapien
gttgggcctcctcagcacatttctt

SEQ ID NO: 1327374 - DNA, 25 bp, Homo sapien
ggcctcctcagcacatttctttctg

SEQ ID NO: 1327375 - DNA, 25 bp, Homo sapien
tttgcagattagtattctccctttg

SEQ ID NO: 1327376 - DNA, 25 bp, Homo sapien
gattagtattctccctttgaacttc

SEQ ID NO: 1327377 - DNA, 25 bp, Homo sapien
tgggcctgtagtttttgcagattag

SEQ ID NO: 1327378 - DNA, 25 bp, Homo sapien
tagtttttgcagattagtattctcc

SEQ ID NO: 1327379 - DNA, 25 bp, Homo sapien
cctcacttgtcctctgtttaatagt

SEQ ID NO: 1327380 - DNA, 25 bp, Homo sapien
ttgtcctctgtttaatagtatcttc

SEQ ID NO: 1327381 - DNA, 25 bp, Homo sapien
cacttgtcctctgtttaatagtatc

SEQ ID NO: 1327382 - DNA, 25 bp, Homo sapien
tctgtttaatagtatcttccttctc

SEQ ID NO: 1327383 - DNA, 25 bp, Homo sapien
gaagaccagcaaacaatgcaagaat

SEQ ID NO: 1327384 - DNA, 25 bp, Homo sapien
ctagaagaccagcaaacaatgcaag

SEQ ID NO: 1327385 - DNA, 25 bp, Homo sapien
tcagctacagctggtatggttatcc

SEQ ID NO: 1327386 - DNA, 25 bp, Homo sapien
ggttatccatcctcctaatcctgaa

SEQ ID NO: 1327387 - DNA, 25 bp, Homo sapien
aaaaatcaatataagctccatttgt

SEQ ID NO: 1327388 - DNA, 25 bp, Homo sapien
aatcaatataagctccatttgtaaa

SEQ ID NO: 1327389 - DNA, 25 bp, Homo sapien
aaatcaatataagctccatttgtaa

SEQ ID NO: 1327390 - DNA, 25 bp, Homo sapien
ataaaaatcaatataagctccattt

SEQ ID NO: 1327391 - DNA, 25 bp, Homo sapien
tttgtcagatgggtcgcaatgtggg

SEQ ID NO: 1327392 - DNA, 25 bp, Homo sapien
ttaaacagtcccttaccatgagaat

SEQ ID NO: 1327393 - DNA, 25 bp, Homo sapien
tcagatgggtcgcaatgtgggtcgc

SEQ ID NO: 1327394 - DNA, 25 bp, Homo sapien
aatgtgggtcgcgatgttgtgattt

SEQ ID NO: 1327395 - DNA, 25 bp, Homo sapien
gacataatggtttctaatgatattt

SEQ ID NO: 1327396 - DNA, 25 bp, Homo sapien
cacatcaagttggatcataagcaaa

SEQ ID NO: 1327397 - DNA, 25 bp, Homo sapien
gcaatgaactctccagacataatgg

SEQ ID NO: 1327398 - DNA, 25 bp, Homo sapien
gcaaaagagctccagatttgataat

SEQ ID NO: 1327399 - DNA, 25 bp, Homo sapien
tatcaaggaatgctttaagccagcc

SEQ ID NO: 1327400 - DNA, 25 bp, Homo sapien
caccacgaagtgttttttgccctgg

SEQ ID NO: 1327401 - DNA, 25 bp, Homo sapien
cttagaataaagtagtcctgggatc

SEQ ID NO: 1327402 - DNA, 25 bp, Homo sapien
cctgggatcaggtatcagctctgca

SEQ ID NO: 1327403 - DNA, 25 bp, Homo sapien
ttcattgttaagagtatctagttcc

SEQ ID NO: 1327404 - DNA, 25 bp, Homo sapien
gcaacaggacttgatcctatgatgt

SEQ ID NO: 1327405 - DNA, 25 bp, Homo sapien
tagttccttaatagcagagaaatct

SEQ ID NO: 1327406 - DNA, 25 bp, Homo sapien
ctctgtaggtcaactatttcattgt

SEQ ID NO: 1327407 - DNA, 25 bp, Homo sapien
ccttctgggtggcatcactttcagc

SEQ ID NO: 1327408 - DNA, 25 bp, Homo sapien
gataagatagcagtgataaattccc

SEQ ID NO: 1327409 - DNA, 25 bp, Homo sapien
cacaacttaagggactcatgtcata

SEQ ID NO: 1327410 - DNA, 25 bp, Homo sapien
tataagtaactctccatacctggta

SEQ ID NO: 1327411 - DNA, 25 bp, Homo sapien
gcccttgattaacttctgactgatt

SEQ ID NO: 1327412 - DNA, 25 bp, Homo sapien
taagaacgtgaggaggatcaatgcc

SEQ ID NO: 1327413 - DNA, 25 bp, Homo sapien
ctgattaagtgaaaagccaaggcaa

SEQ ID NO: 1327414 - DNA, 25 bp, Homo sapien
aaagccaaggcaaactgatcctttg

SEQ ID NO: 1327415 - DNA, 25 bp, Homo sapien
ctaagtttctctttacaaccatgtg

SEQ ID NO: 1327416 - DNA, 25 bp, Homo sapien
gataacctctggtatcgttaggtgg

SEQ ID NO: 1327417 - DNA, 25 bp, Homo sapien
tgacgtttctgcctcttgaaaacct

SEQ ID NO: 1327418 - DNA, 25 bp, Homo sapien
tggccccacttgtgacgtttctgcc

SEQ ID NO: 1327419 - DNA, 25 bp, Homo sapien
caaatccgtccatatctttatcagt

SEQ ID NO: 1327420 - DNA, 25 bp, Homo sapien
tgttttcaagaatatttcacggacc

SEQ ID NO: 1327421 - DNA, 25 bp, Homo sapien
catatatgggctagtaaggtagaag

SEQ ID NO: 1327422 - DNA, 25 bp, Homo sapien
tatttcacggacctccaatccagac

SEQ ID NO: 1327423 - DNA, 25 bp, Homo sapien
gacccagcagtgttaaccatagcca

SEQ ID NO: 1327424 - DNA, 25 bp, Homo sapien
ccatgttagcatggagcatcttcca

SEQ ID NO: 1327425 - DNA, 25 bp, Homo sapien
tctaactttaattccagggagatca

SEQ ID NO: 1327426 - DNA, 25 bp, Homo sapien
aaagccttggacaacccagaattca

SEQ ID NO: 1327427 - DNA, 25 bp, Homo sapien
gattccttggctgatgctgaagagg

SEQ ID NO: 1327428 - DNA, 25 bp, Homo sapien
gggatcaaccgcacagagcctgata

SEQ ID NO: 1327429 - DNA, 25 bp, Homo sapien
gctttggtaggtaaaatgcctacag

SEQ ID NO: 1327430 - DNA, 25 bp, Homo sapien
tgcctacagatggtaaggagtggta

SEQ ID NO: 1327431 - DNA, 25 bp, Homo sapien
ggctggaggcaaggacattggcaca

SEQ ID NO: 1327432 - DNA, 25 bp, Homo sapien
gatagccttgaataatgctaaccag

SEQ ID NO: 1327433 - DNA, 25 bp, Homo sapien
gctctcatagtgaaaaggtatccaa

SEQ ID NO: 1327434 - DNA, 25 bp, Homo sapien
ggtgccttcaggcatataattgcca

SEQ ID NO: 1327435 - DNA, 25 bp, Homo sapien
tatggtatactctacactgggaagt

SEQ ID NO: 1327436 - DNA, 25 bp, Homo sapien
catttaccttagcatgcactactgt

SEQ ID NO: 1327437 - DNA, 25 bp, Homo sapien
tggttaacaagtaaatctaggagaa

SEQ ID NO: 1327438 - DNA, 25 bp, Homo sapien
cactttgtgggtcatgtcagtactc

SEQ ID NO: 1327439 - DNA, 25 bp, Homo sapien
gggtaagggaatgaatcacaagttg

SEQ ID NO: 1327440 - DNA, 25 bp, Homo sapien
tatggaatcccactaaacctgtatt

SEQ ID NO: 1327441 - DNA, 25 bp, Homo sapien
gaaacataatactcatctccgagaa

SEQ ID NO: 1327442 - DNA, 25 bp, Homo sapien
cccaagacttggagtgagtaaagag

SEQ ID NO: 1327443 - DNA, 25 bp, Homo sapien
gaacaaccacgaaagagagtatcac

SEQ ID NO: 1327444 - DNA, 25 bp, Homo sapien
agaatgttcaaccagccgggcacag

SEQ ID NO: 1327445 - DNA, 25 bp, Homo sapien
ttcctctaaggatgaactaaaagag

SEQ ID NO: 1327446 - DNA, 25 bp, Homo sapien
tacgttcctatgtaccttaaagcca

SEQ ID NO: 1327447 - DNA, 25 bp, Homo sapien
aaagttcacccaataatctgatgag

SEQ ID NO: 1327448 - DNA, 25 bp, Homo sapien
aactgcaaactcatctctgtcaagc

SEQ ID NO: 1327449 - DNA, 25 bp, Homo sapien
ctctgtcaagcattccatcatggtc

SEQ ID NO: 1327450 - DNA, 25 bp, Homo sapien
ttccatcatggtcaatatcactcaa

SEQ ID NO: 1327451 - DNA, 25 bp, Homo sapien
ggtcaatatcactcaactcccaaac

SEQ ID NO: 1327452 - DNA, 25 bp, Homo sapien
gagacatggctttctaatgacttgc

SEQ ID NO: 1327453 - DNA, 25 bp, Homo sapien
tcatagcagctagcattcaaagagt

SEQ ID NO: 1327454 - DNA, 25 bp, Homo sapien
gcagccaggatttgaccctatgtaa

SEQ ID NO: 1327455 - DNA, 25 bp, Homo sapien
caggtaattaaagaaagggcagccg

SEQ ID NO: 1327456 - DNA, 25 bp, Homo sapien
gatggtctctagaaattaactcaag

SEQ ID NO: 1327457 - DNA, 25 bp, Homo sapien
ccacagagtaagtggcagacataaa

SEQ ID NO: 1327458 - DNA, 25 bp, Homo sapien
taaagacaggaagtacaagttagag

SEQ ID NO: 1327459 - DNA, 25 bp, Homo sapien
gccaagaagtcagatttaaaggtct

SEQ ID NO: 1327460 - DNA, 25 bp, Homo sapien
tgagcaacactggtttcactttatc

SEQ ID NO: 1327461 - DNA, 25 bp, Homo sapien
tatcaccagacagaaatccattcac

SEQ ID NO: 1327462 - DNA, 25 bp, Homo sapien
cacaggtaacttagagttgagcaac

SEQ ID NO: 1327463 - DNA, 25 bp, Homo sapien
ttcactgggcttaaactatcaaata

SEQ ID NO: 1327464 - DNA, 25 bp, Homo sapien
cactgattagcaaaggactactggt

SEQ ID NO: 1327465 - DNA, 25 bp, Homo sapien
ggttccactgattagcaaaggacta

SEQ ID NO: 1327466 - DNA, 25 bp, Homo sapien
ttagcaaaggactactggtatcatg

SEQ ID NO: 1327467 - DNA, 25 bp, Homo sapien
cagaggttccactgattagcaaagg

SEQ ID NO: 1327468 - DNA, 25 bp, Homo sapien
tacatatataatcactctggaagga

SEQ ID NO: 1327469 - DNA, 25 bp, Homo sapien
taattttcaaataacgtggtgtcac

SEQ ID NO: 1327470 - DNA, 25 bp, Homo sapien
caagtagctgagtgaaagggccaaa

SEQ ID NO: 1327471 - DNA, 25 bp, Homo sapien
tcaaataacgtggtgtcacttttta

SEQ ID NO: 1327472 - DNA, 25 bp, Homo sapien
ttagtgaaacttccaatccattctg

SEQ ID NO: 1327473 - DNA, 25 bp, Homo sapien
gcacatgccacaagacgcaaagcaa

SEQ ID NO: 1327474 - DNA, 25 bp, Homo sapien
caggttcaaactacttagtgaaact

SEQ ID NO: 1327475 - DNA, 25 bp, Homo sapien
ggcacatgccacaagacgcaaagca

SEQ ID NO: 1327476 - DNA, 25 bp, Homo sapien
ccatctgtgtcggctaaatcccaaa

SEQ ID NO: 1327477 - DNA, 25 bp, Homo sapien
ttgccatctgtgtcggctaaatccc

SEQ ID NO: 1327478 - DNA, 25 bp, Homo sapien
tgccatctgtgtcggctaaatccca

SEQ ID NO: 1327479 - DNA, 25 bp, Homo sapien
catctgtgtcggctaaatcccaaat

SEQ ID NO: 1327480 - DNA, 25 bp, Homo sapien
ctttccaagtatcaagtctggaagc

SEQ ID NO: 1327481 - DNA, 25 bp, Homo sapien
cccttccagtattgcctgtatcaac

SEQ ID NO: 1327482 - DNA, 25 bp, Homo sapien
agcagcatcagaagccaacaccctt

SEQ ID NO: 1327483 - DNA, 25 bp, Homo sapien
tccaagtatcaagtctggaagccct

SEQ ID NO: 1327484 - DNA, 25 bp, Homo sapien
tgccttccatccctgtgatttggga

SEQ ID NO: 1327485 - DNA, 25 bp, Homo sapien
gatttcttctggtaaatttgtctaa

SEQ ID NO: 1327486 - DNA, 25 bp, Homo sapien
gacaagcattttttcacgtgcctgt

SEQ ID NO: 1327487 - DNA, 25 bp, Homo sapien
gtgatgacaagcattttttcacgtg

SEQ ID NO: 1327488 - DNA, 25 bp, Homo sapien
catcctctctaacatctgtttcctg

SEQ ID NO: 1327489 - DNA, 25 bp, Homo sapien
gtctgtctcactgatctgactaatg

SEQ ID NO: 1327490 - DNA, 25 bp, Homo sapien
ctgtctgtctcactgatctgactaa

SEQ ID NO: 1327491 - DNA, 25 bp, Homo sapien
taactgtctgtctcactgatctgac

SEQ ID NO: 1327492 - DNA, 25 bp, Homo sapien
aactgtctgtctcactgatctgact

SEQ ID NO: 1327493 - DNA, 25 bp, Homo sapien
tttttcatatacaggattcccactt

SEQ ID NO: 1327494 - DNA, 25 bp, Homo sapien
tatttttcatatacaggattcccac

SEQ ID NO: 1327495 - DNA, 25 bp, Homo sapien
atttttcatatacaggattcccact

SEQ ID NO: 1327496 - DNA, 25 bp, Homo sapien
ggggacagcagcacatataaagtat

SEQ ID NO: 1327497 - DNA, 25 bp, Homo sapien
tggggacagcagcacatataaagta

SEQ ID NO: 1327498 - DNA, 25 bp, Homo sapien
gggacagcagcacatataaagtatg

SEQ ID NO: 1327499 - DNA, 25 bp, Homo sapien
cacattacaggttcattggttacta

SEQ ID NO: 1327500 - DNA, 25 bp, Homo sapien
cacataggagaagatattagctcac

SEQ ID NO: 1327501 - DNA, 25 bp, Homo sapien
cagctaagtgagaatggaaaaagcc

SEQ ID NO: 1327502 - DNA, 25 bp, Homo sapien
tgttctaaagtacaccctgtgctga

SEQ ID NO: 1327503 - DNA, 25 bp, Homo sapien
tgaaaggtgacatggactagtccaa

SEQ ID NO: 1327504 - DNA, 25 bp, Homo sapien
tcagaacttgagtaacagtcactgg

SEQ ID NO: 1327505 - DNA, 25 bp, Homo sapien
caattatgcccagaatcagacagac

SEQ ID NO: 1327506 - DNA, 25 bp, Homo sapien
tgtgacatatgacagtggacacttc

SEQ ID NO: 1327507 - DNA, 25 bp, Homo sapien
ggtacgtatcaaagagtcctcccag

SEQ ID NO: 1327508 - DNA, 25 bp, Homo sapien
atttagctcttcacggacacttggg

SEQ ID NO: 1327509 - DNA, 25 bp, Homo sapien
gacaaagcagtccacatcagacact

SEQ ID NO: 1327510 - DNA, 25 bp, Homo sapien
tttacgcccttctaccatatgagga

SEQ ID NO: 1327511 - DNA, 25 bp, Homo sapien
gaggcgaaagcgagcatgttgccca

SEQ ID NO: 1327512 - DNA, 25 bp, Homo sapien
catgaccttagatttgccaaaagac

SEQ ID NO: 1327513 - DNA, 25 bp, Homo sapien
tcaagacagtgttgtactgcacagg

SEQ ID NO: 1327514 - DNA, 25 bp, Homo sapien
gtcacaagcaaaagatatccactag

SEQ ID NO: 1327515 - DNA, 25 bp, Homo sapien
tccagtctgggtgacagaggaagac

SEQ ID NO: 1327516 - DNA, 25 bp, Homo sapien
tgggagatggaagttgcagtgggct

SEQ ID NO: 1327517 - DNA, 25 bp, Homo sapien
tctgggtgacagaggaagactccat

SEQ ID NO: 1327518 - DNA, 25 bp, Homo sapien
gtgggctgagatcacgtcactgtac

SEQ ID NO: 1327519 - DNA, 25 bp, Homo sapien
ttcctatgctctatggtcaaagtta

SEQ ID NO: 1327520 - DNA, 25 bp, Homo sapien
tatgctctatggtcaaagttaaaaa

SEQ ID NO: 1327521 - DNA, 25 bp, Homo sapien
cacagatcttttgaagtctatcctt

SEQ ID NO: 1327522 - DNA, 25 bp, Homo sapien
tgaagtctatccttgagtccccttc

SEQ ID NO: 1327523 - DNA, 25 bp, Homo sapien
ccactgcagcatagttgtaacaaaa

SEQ ID NO: 1327524 - DNA, 25 bp, Homo sapien
catgtaaaagagtatccactgcagc

SEQ ID NO: 1327525 - DNA, 25 bp, Homo sapien
tcctctggcccaaaaattacaccta

SEQ ID NO: 1327526 - DNA, 25 bp, Homo sapien
tgtccagcattaggtggccagtaaa

SEQ ID NO: 1327527 - DNA, 25 bp, Homo sapien
gaaggcataccttgttgattcaact

SEQ ID NO: 1327528 - DNA, 25 bp, Homo sapien
ccatgctactataaaattttagtgt

SEQ ID NO: 1327529 - DNA, 25 bp, Homo sapien
cttaactgggttagatcatttgtct

SEQ ID NO: 1327530 - DNA, 25 bp, Homo sapien
ccaggctttcttctacgcatgctta

SEQ ID NO: 1327531 - DNA, 25 bp, Homo sapien
gaagggttagatatctctctcaaga

SEQ ID NO: 1327532 - DNA, 25 bp, Homo sapien
gagatttcctgagtatatcgaacca

SEQ ID NO: 1327533 - DNA, 25 bp, Homo sapien
tatgacaacctctcccaagtgctga

SEQ ID NO: 1327534 - DNA, 25 bp, Homo sapien
ctgagagacttgctattggatgaac

SEQ ID NO: 1327535 - DNA, 25 bp, Homo sapien
catttaaggctgtaaagcactaaag

SEQ ID NO: 1327536 - DNA, 25 bp, Homo sapien
cagaacacctagtaaagacaactga

SEQ ID NO: 1327537 - DNA, 25 bp, Homo sapien
ttgacaagaagtaaacagaacacct

SEQ ID NO: 1327538 - DNA, 25 bp, Homo sapien
tgtaaagcactaaagaacccagaga

SEQ ID NO: 1327539 - DNA, 25 bp, Homo sapien
gcattgggggtctgacccagaagga

SEQ ID NO: 1327540 - DNA, 25 bp, Homo sapien
tggacagcgatcaggcgtgagcccc

SEQ ID NO: 1327541 - DNA, 25 bp, Homo sapien
tgaagtggaagcagacgtgggtggc

SEQ ID NO: 1327542 - DNA, 25 bp, Homo sapien
ctggacagcgatcaggcgtgagccc

SEQ ID NO: 1327543 - DNA, 25 bp, Homo sapien
gagagagctgggccgccgcagccat

SEQ ID NO: 1327544 - DNA, 25 bp, Homo sapien
tcagagagagctgggccgccgcagc

SEQ ID NO: 1327545 - DNA, 25 bp, Homo sapien
cagagagagctgggccgccgcagcc

SEQ ID NO: 1327546 - DNA, 25 bp, Homo sapien
agagagagctgggccgccgcagcca

SEQ ID NO: 1327547 - DNA, 25 bp, Homo sapien
tgtttccatcatgcaagggagggga

SEQ ID NO: 1327548 - DNA, 25 bp, Homo sapien
gtttccatcatgcaagggaggggaa

SEQ ID NO: 1327549 - DNA, 25 bp, Homo sapien
ggtgtttccatcatgcaagggaggg

SEQ ID NO: 1327550 - DNA, 25 bp, Homo sapien
gtgtttccatcatgcaagggagggg

SEQ ID NO: 1327551 - DNA, 25 bp, Homo sapien
gggagcggccgcaggcgaggccggg

SEQ ID NO: 1327552 - DNA, 25 bp, Homo sapien
aggcggagggagcggccgcaggcga

SEQ ID NO: 1327553 - DNA, 25 bp, Homo sapien
ggagggagcggccgcaggcgaggcc

SEQ ID NO: 1327554 - DNA, 25 bp, Homo sapien
ggaggcggagggagcggccgcaggc

SEQ ID NO: 1327555 - DNA, 25 bp, Homo sapien
ggctgcggaggcgactgcagattga

SEQ ID NO: 1327556 - DNA, 25 bp, Homo sapien
gggctgcggaggcgactgcagattg

SEQ ID NO: 1327557 - DNA, 25 bp, Homo sapien
gctgcggaggcgactgcagattgac

SEQ ID NO: 1327558 - DNA, 25 bp, Homo sapien
gaatgctgagacatcatcaaattaa

SEQ ID NO: 1327559 - DNA, 25 bp, Homo sapien
gctgagacatcatcaaattaagaag

SEQ ID NO: 1327560 - DNA, 25 bp, Homo sapien
catgtgtgaatgctgagacatcatc

SEQ ID NO: 1327561 - DNA, 25 bp, Homo sapien
gtgtgaatgctgagacatcatcaaa

SEQ ID NO: 1327562 - DNA, 25 bp, Homo sapien
tccttgtgtaggagtcaagccaatt

SEQ ID NO: 1327563 - DNA, 25 bp, Homo sapien
tgtaggagtcaagccaattttctct

SEQ ID NO: 1327564 - DNA, 25 bp, Homo sapien
ttgtgtaggagtcaagccaattttc

SEQ ID NO: 1327565 - DNA, 25 bp, Homo sapien
tcatccttgtgtaggagtcaagcca

SEQ ID NO: 1327566 - DNA, 25 bp, Homo sapien
tggggatggtcagcatagtgctgcc

SEQ ID NO: 1327567 - DNA, 25 bp, Homo sapien
ttagtccagaagctgtgttagagaa

SEQ ID NO: 1327568 - DNA, 25 bp, Homo sapien
ggtggggatggtcagcatagtgctg

SEQ ID NO: 1327569 - DNA, 25 bp, Homo sapien
gtggggatggtcagcatagtgctgc

SEQ ID NO: 1327570 - DNA, 25 bp, Homo sapien
cacaacaggaagactctcaggctgt

SEQ ID NO: 1327571 - DNA, 25 bp, Homo sapien
acaacaggaagactctcaggctgta

SEQ ID NO: 1327572 - DNA, 25 bp, Homo sapien
aggctgtagaaattggtataaagtc

SEQ ID NO: 1327573 - DNA, 25 bp, Homo sapien
tgtagaaattggtataaagtcaagt

SEQ ID NO: 1327574 - DNA, 25 bp, Homo sapien
ttaaaagttagggcacaaaacagca

SEQ ID NO: 1327575 - DNA, 25 bp, Homo sapien
tgacaattatttaaaagttagggca

SEQ ID NO: 1327576 - DNA, 25 bp, Homo sapien
aaagttagggcacaaaacagcagaa

SEQ ID NO: 1327577 - DNA, 25 bp, Homo sapien
cttatgttagggggaaatctagttg

SEQ ID NO: 1327578 - DNA, 25 bp, Homo sapien
tccacaagtataaccatcagcactg

SEQ ID NO: 1327579 - DNA, 25 bp, Homo sapien
ccacaagtataaccatcagcactgc

SEQ ID NO: 1327580 - DNA, 25 bp, Homo sapien
cacaagtataaccatcagcactgct

SEQ ID NO: 1327581 - DNA, 25 bp, Homo sapien
aacatcatctgtccacaagtataac

SEQ ID NO: 1327582 - DNA, 25 bp, Homo sapien
gatcactccctttctactaataagg

SEQ ID NO: 1327583 - DNA, 25 bp, Homo sapien
cttgggtgtcctgggataaattgaa

SEQ ID NO: 1327584 - DNA, 25 bp, Homo sapien
taatccctacaacctcataaaacag

SEQ ID NO: 1327585 - DNA, 25 bp, Homo sapien
gatagtagtgatagcaaccattttt

SEQ ID NO: 1327586 - DNA, 25 bp, Homo sapien
taccaacctcatgaatatttctcct

SEQ ID NO: 1327587 - DNA, 25 bp, Homo sapien
caaattgtaccaacctcatgaatat

SEQ ID NO: 1327588 - DNA, 25 bp, Homo sapien
tccccaaattgtaccaacctcatga

SEQ ID NO: 1327589 - DNA, 25 bp, Homo sapien
tgctccccaaattgtaccaacctca

SEQ ID NO: 1327590 - DNA, 25 bp, Homo sapien
cagttcacccttctggtcaacaagg

SEQ ID NO: 1327591 - DNA, 25 bp, Homo sapien
acatttgcctccacaatcccagtta

SEQ ID NO: 1327592 - DNA, 25 bp, Homo sapien
acaatcccagttacagttcaccctt

SEQ ID NO: 1327593 - DNA, 25 bp, Homo sapien
cccttctggtcaacaaggacttcct

SEQ ID NO: 1327594 - DNA, 25 bp, Homo sapien
gggatccaattcatttccctcttct

SEQ ID NO: 1327595 - DNA, 25 bp, Homo sapien
cctggctctgtagtgggatccaatt

SEQ ID NO: 1327596 - DNA, 25 bp, Homo sapien
tcatttcctggctctgtagtgggat

SEQ ID NO: 1327597 - DNA, 25 bp, Homo sapien
tgtagtgggatccaattcatttccc

SEQ ID NO: 1327598 - DNA, 25 bp, Homo sapien
agacaaagactatgtggctgatttt

SEQ ID NO: 1327599 - DNA, 25 bp, Homo sapien
tgagacaaagactatgtggctgatt

SEQ ID NO: 1327600 - DNA, 25 bp, Homo sapien
tctcagggccgagtgaccaaaaatg

SEQ ID NO: 1327601 - DNA, 25 bp, Homo sapien
aatagtgaacaactgaggagtcaga

SEQ ID NO: 1327602 - DNA, 25 bp, Homo sapien
tttttgagcaaactcttcatcattt

SEQ ID NO: 1327603 - DNA, 25 bp, Homo sapien
ttttgagcaaactcttcatcatttg

SEQ ID NO: 1327604 - DNA, 25 bp, Homo sapien
tttgagcaaactcttcatcatttgt

SEQ ID NO: 1327605 - DNA, 25 bp, Homo sapien
gatctgggctgccagagcatctgaa

SEQ ID NO: 1327606 - DNA, 25 bp, Homo sapien
ggctgggaccaaggagggatgggga

SEQ ID NO: 1327607 - DNA, 25 bp, Homo sapien
gatggggaggggatctgggctgcca

SEQ ID NO: 1327608 - DNA, 25 bp, Homo sapien
taggctgggaccaaggagggatggg

SEQ ID NO: 1327609 - DNA, 25 bp, Homo sapien
gattttcaatgatccaaggtttcca

SEQ ID NO: 1327610 - DNA, 25 bp, Homo sapien
taatagtgacaaatggtggcgtcag

SEQ ID NO: 1327611 - DNA, 25 bp, Homo sapien
ggatgaatctactccccctggtaat

SEQ ID NO: 1327612 - DNA, 25 bp, Homo sapien
cgtcaggcttatatttagggttgtc

SEQ ID NO: 1327613 - DNA, 25 bp, Homo sapien
gatccaggatgtattcaaagtcttc

SEQ ID NO: 1327614 - DNA, 25 bp, Homo sapien
catagcctccttccagttatctggc

SEQ ID NO: 1327615 - DNA, 25 bp, Homo sapien
cttccagttatctggcttcttggct

SEQ ID NO: 1327616 - DNA, 25 bp, Homo sapien
ttcggatttggcatcagaggccttt

SEQ ID NO: 1327617 - DNA, 25 bp, Homo sapien
cagatcctctatgtgcaggcgttca

SEQ ID NO: 1327618 - DNA, 25 bp, Homo sapien
gtcttccagatcctctatgtgcagg

SEQ ID NO: 1327619 - DNA, 25 bp, Homo sapien
tatgtgcaggcgttcatcccatttc

SEQ ID NO: 1327620 - DNA, 25 bp, Homo sapien
cctctatgtgcaggcgttcatccca

SEQ ID NO: 1327621 - DNA, 25 bp, Homo sapien
ggaggcaagaagtcccagtcctcct

SEQ ID NO: 1327622 - DNA, 25 bp, Homo sapien
ctgggaggcaagaagtcccagtcct

SEQ ID NO: 1327623 - DNA, 25 bp, Homo sapien
agtcctcctccagagccccagctgc

SEQ ID NO: 1327624 - DNA, 25 bp, Homo sapien
cagtcctcctccagagccccagctg

SEQ ID NO: 1327625 - DNA, 25 bp, Homo sapien
ttttaacctcataagtagcattggg

SEQ ID NO: 1327626 - DNA, 25 bp, Homo sapien
tagcattggggcgaataatcagagt

SEQ ID NO: 1327627 - DNA, 25 bp, Homo sapien
tcaattttaacctcataagtagcat

SEQ ID NO: 1327628 - DNA, 25 bp, Homo sapien
cagagtgtacaggtgagggtcttta

SEQ ID NO: 1327629 - DNA, 25 bp, Homo sapien
gttctcatggtatttctctcagtaa

SEQ ID NO: 1327630 - DNA, 25 bp, Homo sapien
cctgcacttgatggtcttgttctca

SEQ ID NO: 1327631 - DNA, 25 bp, Homo sapien
cacttgatggtcttgttctcatggt

SEQ ID NO: 1327632 - DNA, 25 bp, Homo sapien
atttctctcagtaatgagggatgac

SEQ ID NO: 1327633 - DNA, 25 bp, Homo sapien
tgtactttgttgttgccaaagccac

SEQ ID NO: 1327634 - DNA, 25 bp, Homo sapien
tttgttgttgccaaagccacaaatg

SEQ ID NO: 1327635 - DNA, 25 bp, Homo sapien
tactttgttgttgccaaagccacaa

SEQ ID NO: 1327636 - DNA, 25 bp, Homo sapien
gttgttgccaaagccacaaatgtca

SEQ ID NO: 1327637 - DNA, 25 bp, Homo sapien
atttcttaatatggtaccatgtgcc

SEQ ID NO: 1327638 - DNA, 25 bp, Homo sapien
ggtctacgtagctgatgacctcctt

SEQ ID NO: 1327639 - DNA, 25 bp, Homo sapien
ctgtgagagggtctacgtagctgat

SEQ ID NO: 1327640 - DNA, 25 bp, Homo sapien
taacattcaggtttagagttgcttt

SEQ ID NO: 1327641 - DNA, 25 bp, Homo sapien
gatcctgagtgcatatcctcctggt

SEQ ID NO: 1327642 - DNA, 25 bp, Homo sapien
ggcaggaaagagttttacatatccg

SEQ ID NO: 1327643 - DNA, 25 bp, Homo sapien
caaacatgatgtgatacttggatcc

SEQ ID NO: 1327644 - DNA, 25 bp, Homo sapien
gagttttacatatccgccaccacaa

SEQ ID NO: 1327645 - DNA, 25 bp, Homo sapien
aaaacttggcatgttcactggtttg

SEQ ID NO: 1327646 - DNA, 25 bp, Homo sapien
aacttggcatgttcactggtttgga

SEQ ID NO: 1327647 - DNA, 25 bp, Homo sapien
ttggcatgttcactggtttggagac

SEQ ID NO: 1327648 - DNA, 25 bp, Homo sapien
tggttgagaaggcataaaacttggc

SEQ ID NO: 1327649 - DNA, 25 bp, Homo sapien
taaaattatcctgcagcgagctgaa

SEQ ID NO: 1327650 - DNA, 25 bp, Homo sapien
aaaattatcctgcagcgagctgaaa

SEQ ID NO: 1327651 - DNA, 25 bp, Homo sapien
tgtttagactgcacccatcgttttt

SEQ ID NO: 1327652 - DNA, 25 bp, Homo sapien
tgcacccatcgttttttccattcat

SEQ ID NO: 1327653 - DNA, 25 bp, Homo sapien
ccggctgatgtttagactgcaccca

SEQ ID NO: 1327654 - DNA, 25 bp, Homo sapien
cataatccggctgatgtttagactg

SEQ ID NO: 1327655 - DNA, 25 bp, Homo sapien
cctccatgacaattaagagctgaaa

SEQ ID NO: 1327656 - DNA, 25 bp, Homo sapien
tgtccaattgtctgaatcccactat

SEQ ID NO: 1327657 - DNA, 25 bp, Homo sapien
catgtggagtggcttgaataccaag

SEQ ID NO: 1327658 - DNA, 25 bp, Homo sapien
gaataccaagtagttgaggcacttc

SEQ ID NO: 1327659 - DNA, 25 bp, Homo sapien
tattctcataaaagtagatggaaaa

SEQ ID NO: 1327660 - DNA, 25 bp, Homo sapien
aataaaatcagctcaccaagtaaag

SEQ ID NO: 1327661 - DNA, 25 bp, Homo sapien
tgtgcttagagggactcatccctta

SEQ ID NO: 1327662 - DNA, 25 bp, Homo sapien
ccttcttgaattagtaatgatgaca

SEQ ID NO: 1327663 - DNA, 25 bp, Homo sapien
cgctgggacaggtgacaggcaaggg

SEQ ID NO: 1327664 - DNA, 25 bp, Homo sapien
tggagtctgttctatagtcgctgcc

SEQ ID NO: 1327665 - DNA, 25 bp, Homo sapien
ggacaggtgacaggcaagggcgtgg

SEQ ID NO: 1327666 - DNA, 25 bp, Homo sapien
tctgttctatagtcgctgcctgcca

SEQ ID NO: 1327667 - DNA, 25 bp, Homo sapien
cagcgctgggcgcacgttcccaggg

SEQ ID NO: 1327668 - DNA, 25 bp, Homo sapien
gaactcctcgcgcaggtagacccag

SEQ ID NO: 1327669 - DNA, 25 bp, Homo sapien
ctttgaactcctcgcgcaggtagac

SEQ ID NO: 1327670 - DNA, 25 bp, Homo sapien
ccgtctttgaactcctcgcgcaggt

SEQ ID NO: 1327671 - DNA, 25 bp, Homo sapien
ctctgtagctagtggaaagggtgaa

SEQ ID NO: 1327672 - DNA, 25 bp, Homo sapien
tgctgctaagcagattgcctgcggc

SEQ ID NO: 1327673 - DNA, 25 bp, Homo sapien
gagaaccaggcactcaatgagtaga

SEQ ID NO: 1327674 - DNA, 25 bp, Homo sapien
tagatgcaataggttgtcccagaca

SEQ ID NO: 1327675 - DNA, 25 bp, Homo sapien
tagtgagactctacctgtataaaaa

SEQ ID NO: 1327676 - DNA, 25 bp, Homo sapien
tgagaggctgaggcaggcagatccc

SEQ ID NO: 1327677 - DNA, 25 bp, Homo sapien
atacctgtaatcctatcactttgag

SEQ ID NO: 1327678 - DNA, 25 bp, Homo sapien
aagaaaggcggggcacggtggctca

SEQ ID NO: 1327679 - DNA, 25 bp, Homo sapien
tgtttgggttaattttgcattctaa

SEQ ID NO: 1327680 - DNA, 25 bp, Homo sapien
tgggttaattttgcattctaacctc

SEQ ID NO: 1327681 - DNA, 25 bp, Homo sapien
ggttaattttgcattctaacctcat

SEQ ID NO: 1327682 - DNA, 25 bp, Homo sapien
cttgtttgggttaattttgcattct

SEQ ID NO: 1327683 - DNA, 25 bp, Homo sapien
aaatttgacgctaattagccgggag

SEQ ID NO: 1327684 - DNA, 25 bp, Homo sapien
caaacaattgtaccctagagccatt

SEQ ID NO: 1327685 - DNA, 25 bp, Homo sapien
agttttaactgaatagtgcctacca

SEQ ID NO: 1327686 - DNA, 25 bp, Homo sapien
gccacagacacatagctaatataag

SEQ ID NO: 1327687 - DNA, 25 bp, Homo sapien
aaagcatttccctacctttgtatat

SEQ ID NO: 1327688 - DNA, 25 bp, Homo sapien
aaaaaatgcatggaagtaggctgtg

SEQ ID NO: 1327689 - DNA, 25 bp, Homo sapien
gacttgcatggtataggagggtata

SEQ ID NO: 1327690 - DNA, 25 bp, Homo sapien
cacatactataaagtccttaatgac

SEQ ID NO: 1327691 - DNA, 25 bp, Homo sapien
cattttcattgtcataccaggaatt

SEQ ID NO: 1327692 - DNA, 25 bp, Homo sapien
ccaccaccctgttggtgtagccaga

SEQ ID NO: 1327693 - DNA, 25 bp, Homo sapien
cctgttggtgtagccagattcattt

SEQ ID NO: 1327694 - DNA, 25 bp, Homo sapien
ttttcattgtcataccaggaattga

SEQ ID NO: 1327695 - DNA, 25 bp, Homo sapien
tggtcattgagggcagtggtggccc

SEQ ID NO: 1327696 - DNA, 25 bp, Homo sapien
agtggtggccccatcatggaaggtg

SEQ ID NO: 1327697 - DNA, 25 bp, Homo sapien
aaagtggtcattgagggcagtggtg

SEQ ID NO: 1327698 - DNA, 25 bp, Homo sapien
gcagtggtggccccatcatggaagg

SEQ ID NO: 1327699 - DNA, 25 bp, Homo sapien
ctgcttcaataccttcttaatgtca

SEQ ID NO: 1327700 - DNA, 25 bp, Homo sapien
atcagatctgacatgtaggtggtgg

SEQ ID NO: 1327701 - DNA, 25 bp, Homo sapien
gagcctcatggtcgtcatgccacag

SEQ ID NO: 1327702 - DNA, 25 bp, Homo sapien
acccgggtgttcagtatagctcagg

SEQ ID NO: 1327703 - DNA, 25 bp, Homo sapien
gagtgtggttatgagtccctccaca

SEQ ID NO: 1327704 - DNA, 25 bp, Homo sapien
gttatgagtccctccacaatgccag

SEQ ID NO: 1327705 - DNA, 25 bp, Homo sapien
ttatgagtccctccacaatgccaga

SEQ ID NO: 1327706 - DNA, 25 bp, Homo sapien
ggcatggagtgtggttatgagtccc

SEQ ID NO: 1327707 - DNA, 25 bp, Homo sapien
tggtagtgaagttgttgatggaccc

SEQ ID NO: 1327708 - DNA, 25 bp, Homo sapien
tagtgaagttgttgatggacccaac

SEQ ID NO: 1327709 - DNA, 25 bp, Homo sapien
caacaacatagtcagcaccagtgtc

SEQ ID NO: 1327710 - DNA, 25 bp, Homo sapien
gttgatggacccaacaacatagtca

SEQ ID NO: 1327711 - DNA, 25 bp, Homo sapien
gaagatggtgatgggatttcccttg

SEQ ID NO: 1327712 - DNA, 25 bp, Homo sapien
atggtgatgggatttcccttgatga

SEQ ID NO: 1327713 - DNA, 25 bp, Homo sapien
tggaagatggtgatgggatttccct

SEQ ID NO: 1327714 - DNA, 25 bp, Homo sapien
agatggtgatgggatttcccttgat

SEQ ID NO: 1327715 - DNA, 25 bp, Homo sapien
ttgatgctgccatggaacttgccat

SEQ ID NO: 1327716 - DNA, 25 bp, Homo sapien
cattctcagccttgatgctgccatg

SEQ ID NO: 1327717 - DNA, 25 bp, Homo sapien
gccttgatgctgccatggaacttgc

SEQ ID NO: 1327718 - DNA, 25 bp, Homo sapien
gatgctgccatggaacttgccatgg

SEQ ID NO: 1327719 - DNA, 25 bp, Homo sapien
actgatgacaacaatacctgctttg

SEQ ID NO: 1327720 - DNA, 25 bp, Homo sapien
ctgatgacaacaatacctgctttgc

SEQ ID NO: 1327721 - DNA, 25 bp, Homo sapien
agcgacccgagttgagccagtcaag

SEQ ID NO: 1327722 - DNA, 25 bp, Homo sapien
gcattgccctcgctatttccaagag

SEQ ID NO: 1327723 - DNA, 25 bp, Homo sapien
tggcgacaccgtacaaaggcgtggt

SEQ ID NO: 1327724 - DNA, 25 bp, Homo sapien
ccagtaagcagattgtggcgacacc

SEQ ID NO: 1327725 - DNA, 25 bp, Homo sapien
gcctggcagccaacgttgggaaatt

SEQ ID NO: 1327726 - DNA, 25 bp, Homo sapien
ttctgggaggcgtgcataagcatgc

SEQ ID NO: 1327727 - DNA, 25 bp, Homo sapien
gcatatagtgggagctcaaaggcct

SEQ ID NO: 1327728 - DNA, 25 bp, Homo sapien
ggataagtacaagcaggtccttctg

SEQ ID NO: 1327729 - DNA, 25 bp, Homo sapien
cttgcagtgggtaccagtagagaca

SEQ ID NO: 1327730 - DNA, 25 bp, Homo sapien
tttgggtgattctctgtcgaggtcc

SEQ ID NO: 1327731 - DNA, 25 bp, Homo sapien
catcgcgctgtttgtgcagtgtgcc

SEQ ID NO: 1327732 - DNA, 25 bp, Homo sapien
caagagcggaaaaggagctagtcct

SEQ ID NO: 1327733 - DNA, 25 bp, Homo sapien
ccacgcgacacaactttccggaagt

SEQ ID NO: 1327734 - DNA, 25 bp, Homo sapien
cgacacaactttccggaagtaagca

SEQ ID NO: 1327735 - DNA, 25 bp, Homo sapien
gaagtaagcaaaatccgttatcaag

SEQ ID NO: 1327736 - DNA, 25 bp, Homo sapien
aatccgttatcaaggtgaaactccg

SEQ ID NO: 1327737 - DNA, 25 bp, Homo sapien
ggccttggcgaatggctttcttgct

SEQ ID NO: 1327738 - DNA, 25 bp, Homo sapien
cacttgcggagtgagtagaccccga

SEQ ID NO: 1327739 - DNA, 25 bp, Homo sapien
gccggagcgcgaatgtcgtgctcac

SEQ ID NO: 1327740 - DNA, 25 bp, Homo sapien
gaaaaaggggtgctcgggagcagcc

SEQ ID NO: 1327741 - DNA, 25 bp, Homo sapien
cttccttgggagttctcagttcctc

SEQ ID NO: 1327742 - DNA, 25 bp, Homo sapien
gggtgagtaggacgacgtggctgcc

SEQ ID NO: 1327743 - DNA, 25 bp, Homo sapien
cctggggtgagtaggacgacgtggc

SEQ ID NO: 1327744 - DNA, 25 bp, Homo sapien
agtaggacgacgtggctgcccgggc

SEQ ID NO: 1327745 - DNA, 25 bp, Homo sapien
gttattctgcttactccgttgtttc

SEQ ID NO: 1327746 - DNA, 25 bp, Homo sapien
tgctgtattgactgaacaactcgtt

SEQ ID NO: 1327747 - DNA, 25 bp, Homo sapien
cccaaaatgtgccacttcaattaag

SEQ ID NO: 1327748 - DNA, 25 bp, Homo sapien
ctttaggaacttggcttctttgctg

SEQ ID NO: 1327749 - DNA, 25 bp, Homo sapien
ttattctcggttcctcaggttgccc

SEQ ID NO: 1327750 - DNA, 25 bp, Homo sapien
taatttccggattctggactcaaga

SEQ ID NO: 1327751 - DNA, 25 bp, Homo sapien
caatgttattactcagccttcctgt

SEQ ID NO: 1327752 - DNA, 25 bp, Homo sapien
taaaagctcctactctgcctcagga

SEQ ID NO: 1327753 - DNA, 25 bp, Homo sapien
tagaagccattactaagtcccaggt

SEQ ID NO: 1327754 - DNA, 25 bp, Homo sapien
tattcaacacctatcagccaggcac

SEQ ID NO: 1327755 - DNA, 25 bp, Homo sapien
gcaagtctacttacagggaaatgga

SEQ ID NO: 1327756 - DNA, 25 bp, Homo sapien
aaggttacaaagatccaggccctgc

SEQ ID NO: 1327757 - DNA, 25 bp, Homo sapien
tatcaaaagaagataatgataataa

SEQ ID NO: 1327758 - DNA, 25 bp, Homo sapien
atagacaattatcaaaagaagataa

SEQ ID NO: 1327759 - DNA, 25 bp, Homo sapien
tgataataaaataaatggttggccg

SEQ ID NO: 1327760 - DNA, 25 bp, Homo sapien
ggacatgaatagacaattatcaaaa

SEQ ID NO: 1327761 - DNA, 25 bp, Homo sapien
agaaaacgtggcatatatatactgt

SEQ ID NO: 1327762 - DNA, 25 bp, Homo sapien
acgtggcatatatatactgtggaat

SEQ ID NO: 1327763 - DNA, 25 bp, Homo sapien
gatgttgatgtggatatggtggaaa

SEQ ID NO: 1327764 - DNA, 25 bp, Homo sapien
cagaatagagatgccgtaaagaact

SEQ ID NO: 1327765 - DNA, 25 bp, Homo sapien
cctctgtggcagttacgattttgac

SEQ ID NO: 1327766 - DNA, 25 bp, Homo sapien
tactggactttctgacgcagatgaa

SEQ ID NO: 1327767 - DNA, 25 bp, Homo sapien
gaaactctgcgctctagtactgctg

SEQ ID NO: 1327768 - DNA, 25 bp, Homo sapien
aattacagtggttcctatctcaggg

SEQ ID NO: 1327769 - DNA, 25 bp, Homo sapien
ggaagccaattatttggcaaccttg

SEQ ID NO: 1327770 - DNA, 25 bp, Homo sapien
tattttggaattgaactattattaa

SEQ ID NO: 1327771 - DNA, 25 bp, Homo sapien
aattattcttagtgcttaaggcttc

SEQ ID NO: 1327772 - DNA, 25 bp, Homo sapien
aatcctggattacagtttaattaat

SEQ ID NO: 1327773 - DNA, 25 bp, Homo sapien
gtctttagcccctgccaggcaattc

SEQ ID NO: 1327774 - DNA, 25 bp, Homo sapien
ctttagcccctgccaggcaattccc

SEQ ID NO: 1327775 - DNA, 25 bp, Homo sapien
tgtctttagcccctgccaggcaatt

SEQ ID NO: 1327776 - DNA, 25 bp, Homo sapien
ctgtctttagcccctgccaggcaat

SEQ ID NO: 1327777 - DNA, 25 bp, Homo sapien
gtatttatagatccccaccccacag

SEQ ID NO: 1327778 - DNA, 25 bp, Homo sapien
tgtatttatagatccccaccccaca

SEQ ID NO: 1327779 - DNA, 25 bp, Homo sapien
tgtgtatttatagatccccacccca

SEQ ID NO: 1327780 - DNA, 25 bp, Homo sapien
atgttttattgccttagagggtttg

SEQ ID NO: 1327781 - DNA, 25 bp, Homo sapien
cagcagatggctcattctgaaggga

SEQ ID NO: 1327782 - DNA, 25 bp, Homo sapien
cagcagcagatggctcattctgaag

SEQ ID NO: 1327783 - DNA, 25 bp, Homo sapien
ttctgaagggaaatacagaactata

SEQ ID NO: 1327784 - DNA, 25 bp, Homo sapien
cacagcagcagatggctcattctga

SEQ ID NO: 1327785 - DNA, 25 bp, Homo sapien
caaaacttcaatggaagccctaagg

SEQ ID NO: 1327786 - DNA, 25 bp, Homo sapien
aggctttctggtctcgcttggccca

SEQ ID NO: 1327787 - DNA, 25 bp, Homo sapien
caaatgctatgatgccagtgcaaaa

SEQ ID NO: 1327788 - DNA, 25 bp, Homo sapien
tcaatatactggttacgtaaggcct

SEQ ID NO: 1327789 - DNA, 25 bp, Homo sapien
tacaatctgccagcagaggagaggt

SEQ ID NO: 1327790 - DNA, 25 bp, Homo sapien
gttgagtgttgttgtgaaagccctg

SEQ ID NO: 1327791 - DNA, 25 bp, Homo sapien
tgatatcagtaatggggatgataca

SEQ ID NO: 1327792 - DNA, 25 bp, Homo sapien
gaatttgaatcctcactagaagggg

SEQ ID NO: 1327793 - DNA, 25 bp, Homo sapien
aatggatggagttagttaaacatac

SEQ ID NO: 1327794 - DNA, 25 bp, Homo sapien
taaatgacaaccctagaatggatgg

SEQ ID NO: 1327795 - DNA, 25 bp, Homo sapien
gataaccacccaaactcactcagta

SEQ ID NO: 1327796 - DNA, 25 bp, Homo sapien
gaaaaatatgctgaccagatttagg

SEQ ID NO: 1327797 - DNA, 25 bp, Homo sapien
ccttgaaccagttgaccaggtctga

SEQ ID NO: 1327798 - DNA, 25 bp, Homo sapien
gaacgctgagcattttacttcctgg

SEQ ID NO: 1327799 - DNA, 25 bp, Homo sapien
gccctctatgggccttgaaccagtt

SEQ ID NO: 1327800 - DNA, 25 bp, Homo sapien
caggtctgattttgagaatgacttc

SEQ ID NO: 1327801 - DNA, 25 bp, Homo sapien
attcaagaagaaagatagctcttaa

SEQ ID NO: 1327802 - DNA, 25 bp, Homo sapien
tgccttcacattttataccaatcat

SEQ ID NO: 1327803 - DNA, 25 bp, Homo sapien
gctctctggcatgccttcacatttt

SEQ ID NO: 1327804 - DNA, 25 bp, Homo sapien
aaaacgatgatgaagctctctggca

SEQ ID NO: 1327805 - DNA, 25 bp, Homo sapien
cttccagaccaaaacgatgatgaag

SEQ ID NO: 1327806 - DNA, 25 bp, Homo sapien
gccacctaaggtgctagagaggcca

SEQ ID NO: 1327807 - DNA, 25 bp, Homo sapien
ggtaaggattagcacccagctcacg

SEQ ID NO: 1327808 - DNA, 25 bp, Homo sapien
ggtagctgcataccacggcttgagg

SEQ ID NO: 1327809 - DNA, 25 bp, Homo sapien
caggaagtgagcgagtaatcaggcc

SEQ ID NO: 1327810 - DNA, 25 bp, Homo sapien
tcacactccttcagcttgatgagag

SEQ ID NO: 1327811 - DNA, 25 bp, Homo sapien
caaggcggtcaaagaggtactgctg

SEQ ID NO: 1327812 - DNA, 25 bp, Homo sapien
cattccagttcctatccacctcctc

SEQ ID NO: 1327813 - DNA, 25 bp, Homo sapien
ggtactgctgtgtaaccacttcatt

SEQ ID NO: 1327814 - DNA, 25 bp, Homo sapien
aaagaaagatgctcaggtgaggcaa

SEQ ID NO: 1327815 - DNA, 25 bp, Homo sapien
accaaaaagaaagatgctcaggtga

SEQ ID NO: 1327816 - DNA, 25 bp, Homo sapien
tgttcccaccaaaaagaaagatgct

SEQ ID NO: 1327817 - DNA, 25 bp, Homo sapien
aagatgctcaggtgaggcaacatac

SEQ ID NO: 1327818 - DNA, 25 bp, Homo sapien
catgccagtataagaggcacggatg

SEQ ID NO: 1327819 - DNA, 25 bp, Homo sapien
gctgcaaagctcaaaaactggccgg

SEQ ID NO: 1327820 - DNA, 25 bp, Homo sapien
gcacggatgaagctagggagacact

SEQ ID NO: 1327821 - DNA, 25 bp, Homo sapien
ccggcttgtgatggacatgccagta

SEQ ID NO: 1327822 - DNA, 25 bp, Homo sapien
aagatttgtatctgggggcttgtgt

SEQ ID NO: 1327823 - DNA, 25 bp, Homo sapien
tgtatctgggggcttgtgtgggcca

SEQ ID NO: 1327824 - DNA, 25 bp, Homo sapien
ttaagatttgtatctgggggcttgt

SEQ ID NO: 1327825 - DNA, 25 bp, Homo sapien
ctgttaagatttgtatctgggggct

SEQ ID NO: 1327826 - DNA, 25 bp, Homo sapien
cagtgaggttctcaatcttctcctc

SEQ ID NO: 1327827 - DNA, 25 bp, Homo sapien
tatcttcttatcaacaacttcagaa

SEQ ID NO: 1327828 - DNA, 25 bp, Homo sapien
tgggtgttgaatgcctcttcagtga

SEQ ID NO: 1327829 - DNA, 25 bp, Homo sapien
ctcctcaaagctagaaagaaactct

SEQ ID NO: 1327830 - DNA, 25 bp, Homo sapien
taaggaaacacatgtagcccctact

SEQ ID NO: 1327831 - DNA, 25 bp, Homo sapien
aacctgcttggtcagggttgcccaa

SEQ ID NO: 1327832 - DNA, 25 bp, Homo sapien
catgtatgaccattccaaagctgaa

SEQ ID NO: 1327833 - DNA, 25 bp, Homo sapien
aagggccactggaactattgatcag

SEQ ID NO: 1327834 - DNA, 25 bp, Homo sapien
gaaaatcctagaatcccggatgtgt

SEQ ID NO: 1327835 - DNA, 25 bp, Homo sapien
tgtgttcctacaggtagggtagaca

SEQ ID NO: 1327836 - DNA, 25 bp, Homo sapien
acagaaaatcctagaatcccggatg

SEQ ID NO: 1327837 - DNA, 25 bp, Homo sapien
aaatcctagaatcccggatgtgttc

SEQ ID NO: 1327838 - DNA, 25 bp, Homo sapien
gaacagcctgcaaagtaagccctag

SEQ ID NO: 1327839 - DNA, 25 bp, Homo sapien
ggaaggaagctctaacaggctgctc

SEQ ID NO: 1327840 - DNA, 25 bp, Homo sapien
taaatatcaccctatgagatggaag

SEQ ID NO: 1327841 - DNA, 25 bp, Homo sapien
gccctaggcccttatttgagctcag

SEQ ID NO: 1327842 - DNA, 25 bp, Homo sapien
ccaagggtctgcttggttcgaagga

SEQ ID NO: 1327843 - DNA, 25 bp, Homo sapien
caagggtctgcttggttcgaaggaa

SEQ ID NO: 1327844 - DNA, 25 bp, Homo sapien
aagggtctgcttggttcgaaggaag

SEQ ID NO: 1327845 - DNA, 25 bp, Homo sapien
caaaacaaggttcttccatgtgcat

SEQ ID NO: 1327846 - DNA, 25 bp, Homo sapien
tcaaaacaaggttcttccatgtgca

SEQ ID NO: 1327847 - DNA, 25 bp, Homo sapien
ctctccccagagtgtttcacatacc

SEQ ID NO: 1327848 - DNA, 25 bp, Homo sapien
ttttcctaattggcccaggcttata

SEQ ID NO: 1327849 - DNA, 25 bp, Homo sapien
tctcaccttcaaatcacagatctct

SEQ ID NO: 1327850 - DNA, 25 bp, Homo sapien
ctcagcatctcctttatgcacttac

SEQ ID NO: 1327851 - DNA, 25 bp, Homo sapien
tgggtgagaacagtaaatgaccatc

SEQ ID NO: 1327852 - DNA, 25 bp, Homo sapien
caggcagaaaaggccgggcctcata

SEQ ID NO: 1327853 - DNA, 25 bp, Homo sapien
cacaagcagctccataagcgtatat

SEQ ID NO: 1327854 - DNA, 25 bp, Homo sapien
cataagcgtatattctcttagactc

SEQ ID NO: 1327855 - DNA, 25 bp, Homo sapien
gcagctccataagcgtatattctct

SEQ ID NO: 1327856 - DNA, 25 bp, Homo sapien
cgtatattctcttagactcctggta

SEQ ID NO: 1327857 - DNA, 25 bp, Homo sapien
tgaccatttgtactcccggcactag

SEQ ID NO: 1327858 - DNA, 25 bp, Homo sapien
ccagactgaaggtctatgaggacag

SEQ ID NO: 1327859 - DNA, 25 bp, Homo sapien
aagagaaggttgtcaggccaactga

SEQ ID NO: 1327860 - DNA, 25 bp, Homo sapien
gacaggagtcatgcttgaccatttg

SEQ ID NO: 1327861 - DNA, 25 bp, Homo sapien
aattaagtacttgcaactcaaagcc

SEQ ID NO: 1327862 - DNA, 25 bp, Homo sapien
gatcctgtcagaggacacattctaa

SEQ ID NO: 1327863 - DNA, 25 bp, Homo sapien
ttctaaaattaagtacttgcaactc

SEQ ID NO: 1327864 - DNA, 25 bp, Homo sapien
aaaattaagtacttgcaactcaaag

SEQ ID NO: 1327865 - DNA, 25 bp, Homo sapien
gctttgggaccacatgctagctgcc

SEQ ID NO: 1327866 - DNA, 25 bp, Homo sapien
tcctgccgaaaatgagtactcctgt

SEQ ID NO: 1327867 - DNA, 25 bp, Homo sapien
tagtgccacacaacaagaaccagtg

SEQ ID NO: 1327868 - DNA, 25 bp, Homo sapien
gatgttgctagtgcctcccagagtc

SEQ ID NO: 1327869 - DNA, 25 bp, Homo sapien
gtagtacacagtgacttcagagttg

SEQ ID NO: 1327870 - DNA, 25 bp, Homo sapien
gctccagaggcttgaagtttagttt

SEQ ID NO: 1327871 - DNA, 25 bp, Homo sapien
gcatcacccttgttcagagctttca

SEQ ID NO: 1327872 - DNA, 25 bp, Homo sapien
tctaccacctggaactgcacaggca

SEQ ID NO: 1327873 - DNA, 25 bp, Homo sapien
catatttcaggaaatccatagattc

SEQ ID NO: 1327874 - DNA, 25 bp, Homo sapien
tcaacaacatatttcaggaaatcca

SEQ ID NO: 1327875 - DNA, 25 bp, Homo sapien
caacatatttcaggaaatccataga

SEQ ID NO: 1327876 - DNA, 25 bp, Homo sapien
caacaacatatttcaggaaatccat

SEQ ID NO: 1327877 - DNA, 25 bp, Homo sapien
tctgtatcaaaagcccttgcctggt

SEQ ID NO: 1327878 - DNA, 25 bp, Homo sapien
tcctgggcccattgacatagaacct

SEQ ID NO: 1327879 - DNA, 25 bp, Homo sapien
ttcaacggtgctcggaaaaacaggc

SEQ ID NO: 1327880 - DNA, 25 bp, Homo sapien
tggtttacccaactaggctgtggcc

SEQ ID NO: 1327881 - DNA, 25 bp, Homo sapien
agcccagcagtcttcatcttaagaa

SEQ ID NO: 1327882 - DNA, 25 bp, Homo sapien
cagcccagcagtcttcatcttaaga

SEQ ID NO: 1327883 - DNA, 25 bp, Homo sapien
gacctggcctacagagcatctcaca

SEQ ID NO: 1327884 - DNA, 25 bp, Homo sapien
ttcagacctggcctacagagcatct

SEQ ID NO: 1327885 - DNA, 25 bp, Homo sapien
tggcctacagagcatctcacactca

SEQ ID NO: 1327886 - DNA, 25 bp, Homo sapien
cagacctggcctacagagcatctca

SEQ ID NO: 1327887 - DNA, 25 bp, Homo sapien
gaattctttgacgaagctcagcaga

SEQ ID NO: 1327888 - DNA, 25 bp, Homo sapien
tagaccaacgggcatattccaagat

SEQ ID NO: 1327889 - DNA, 25 bp, Homo sapien
tgtgacattcccttgtaccaggccc

SEQ ID NO: 1327890 - DNA, 25 bp, Homo sapien
gagactcaagggaaaggccgtccat

SEQ ID NO: 1327891 - DNA, 25 bp, Homo sapien
tgtacagagggcagaaaaaaaacac

SEQ ID NO: 1327892 - DNA, 25 bp, Homo sapien
aatgaatcttcagaataaagaaatg

SEQ ID NO: 1327893 - DNA, 25 bp, Homo sapien
caaagttctataaaggatgtgtttc

SEQ ID NO: 1327894 - DNA, 25 bp, Homo sapien
gagaccatttttatcacaatgtaag

SEQ ID NO: 1327895 - DNA, 25 bp, Homo sapien
gagtcaagtttacttagttgtacac

SEQ ID NO: 1327896 - DNA, 25 bp, Homo sapien
ttaattactagaagccatcatttgg

SEQ ID NO: 1327897 - DNA, 25 bp, Homo sapien
taatacaggtaacggctctggtcca

SEQ ID NO: 1327898 - DNA, 25 bp, Homo sapien
ctgcagtgacaatataatacaggta

SEQ ID NO: 1327899 - DNA, 25 bp, Homo sapien
tcagttatcattgtaaagacagctg

SEQ ID NO: 1327900 - DNA, 25 bp, Homo sapien
aaagtctcgggcttgatgaggatgt

SEQ ID NO: 1327901 - DNA, 25 bp, Homo sapien
ttaaagtaggtcttcttcaactgct

SEQ ID NO: 1327902 - DNA, 25 bp, Homo sapien
acagctggtgtggaattgaactcag

SEQ ID NO: 1327903 - DNA, 25 bp, Homo sapien
tcattataacctcgaatgcctaggc

SEQ ID NO: 1327904 - DNA, 25 bp, Homo sapien
attcattataacctcgaatgcctag

SEQ ID NO: 1327905 - DNA, 25 bp, Homo sapien
tggtactatcgactgtaattcatta

SEQ ID NO: 1327906 - DNA, 25 bp, Homo sapien
gcagtggtactatcgactgtaattc

SEQ ID NO: 1327907 - DNA, 25 bp, Homo sapien
tagtcttttgaccagccatatcaca

SEQ ID NO: 1327908 - DNA, 25 bp, Homo sapien
gacacgatcatagctaagtatcctc

SEQ ID NO: 1327909 - DNA, 25 bp, Homo sapien
tcatactccggaggagttgggacca

SEQ ID NO: 1327910 - DNA, 25 bp, Homo sapien
cagttaatgtaatgtccgctgatag

SEQ ID NO: 1327911 - DNA, 25 bp, Homo sapien
ttcataagctggttccgcaaggtta

SEQ ID NO: 1327912 - DNA, 25 bp, Homo sapien
caaggttatgcgtaaggatattgac

SEQ ID NO: 1327913 - DNA, 25 bp, Homo sapien
taaaccatgttctccagctaccagt

SEQ ID NO: 1327914 - DNA, 25 bp, Homo sapien
taccagtttatactccagctgtgcc

SEQ ID NO: 1327915 - DNA, 25 bp, Homo sapien
ctaagaagtacaaaatgcaaatggc

SEQ ID NO: 1327916 - DNA, 25 bp, Homo sapien
taagaagtacaaaatgcaaatggca

SEQ ID NO: 1327917 - DNA, 25 bp, Homo sapien
aagaagtacaaaatgcaaatggcat

SEQ ID NO: 1327918 - DNA, 25 bp, Homo sapien
gaaaagaaagaagaaatgcaccaac

SEQ ID NO: 1327919 - DNA, 25 bp, Homo sapien
ggaaaagaaagaagaaatgcaccaa

SEQ ID NO: 1327920 - DNA, 25 bp, Homo sapien
gtaggaaaagaaagaagaaatgcac

SEQ ID NO: 1327921 - DNA, 25 bp, Homo sapien
taggaaaagaaagaagaaatgcacc

SEQ ID NO: 1327922 - DNA, 25 bp, Homo sapien
caagtatctcctacgttcagacaca

SEQ ID NO: 1327923 - DNA, 25 bp, Homo sapien
ccaagtatctcctacgttcagacac

SEQ ID NO: 1327924 - DNA, 25 bp, Homo sapien
caagtatctcctaggttcagacaca

SEQ ID NO: 1327925 - DNA, 25 bp, Homo sapien
aagtatctcctaggttcagacacat

SEQ ID NO: 1327926 - DNA, 25 bp, Homo sapien
tcagacacatttccgaagtatcaac

SEQ ID NO: 1327927 - DNA, 25 bp, Homo sapien
ttcagacacatttccgaagtatcaa

SEQ ID NO: 1327928 - DNA, 25 bp, Homo sapien
tttccgaaatatcaactacattcag

SEQ ID NO: 1327929 - DNA, 25 bp, Homo sapien
cacatttccgaaatatcaactacat

SEQ ID NO: 1327930 - DNA, 25 bp, Homo sapien
tcagacacatttccgaaatatcaac

SEQ ID NO: 1327931 - DNA, 25 bp, Homo sapien
gaaatatcaactacattcagacaca

SEQ ID NO: 1327932 - DNA, 25 bp, Homo sapien
gaaattagatggaaacgtatatatg

SEQ ID NO: 1327933 - DNA, 25 bp, Homo sapien
tctgtatcaacggtgaaattagatg

SEQ ID NO: 1327934 - DNA, 25 bp, Homo sapien
tcaacggtgaaattagatggaaacg

SEQ ID NO: 1327935 - DNA, 25 bp, Homo sapien
gcagatttctgtatcaacggtgaaa

SEQ ID NO: 1327936 - DNA, 25 bp, Homo sapien
gacactggagtgtccataaggattt

SEQ ID NO: 1327937 - DNA, 25 bp, Homo sapien
tggacactggagtgtccataaggat

SEQ ID NO: 1327938 - DNA, 25 bp, Homo sapien
tcatttcctggacactggagtgtcc

SEQ ID NO: 1327939 - DNA, 25 bp, Homo sapien
cctggacactggagtgtccataagg

SEQ ID NO: 1327940 - DNA, 25 bp, Homo sapien
caggcaaccttgtggagtattcaca

SEQ ID NO: 1327941 - DNA, 25 bp, Homo sapien
taactgggtattctgtttccgggca

SEQ ID NO: 1327942 - DNA, 25 bp, Homo sapien
tccgggcaatcgaaagccttcaacg

SEQ ID NO: 1327943 - DNA, 25 bp, Homo sapien
tgtctttcttataccacaggcaacc

SEQ ID NO: 1327944 - DNA, 25 bp, Homo sapien
tttccctaatgaaagggagattcac

SEQ ID NO: 1327945 - DNA, 25 bp, Homo sapien
tccctaatgaaagggagattcacat

SEQ ID NO: 1327946 - DNA, 25 bp, Homo sapien
ttccctaatgaaagggagattcaca

SEQ ID NO: 1327947 - DNA, 25 bp, Homo sapien
gccaacctcagaatgttactgggaa

SEQ ID NO: 1327948 - DNA, 25 bp, Homo sapien
aaatataatgtgctatacaggtgcc

SEQ ID NO: 1327949 - DNA, 25 bp, Homo sapien
tctggcaagataatggcaatcccta

SEQ ID NO: 1327950 - DNA, 25 bp, Homo sapien
gaaaggatcagctactctatacaag

SEQ ID NO: 1327951 - DNA, 25 bp, Homo sapien
tggatttaattcgaaattactattc

SEQ ID NO: 1327952 - DNA, 25 bp, Homo sapien
taattcgaaattactattccacagt

SEQ ID NO: 1327953 - DNA, 25 bp, Homo sapien
tcgaaattactattccacagttcag

SEQ ID NO: 1327954 - DNA, 25 bp, Homo sapien
gatttaattcgaaattactattcca

SEQ ID NO: 1327955 - DNA, 25 bp, Homo sapien
tctatactatattgagttccaaacc

SEQ ID NO: 1327956 - DNA, 25 bp, Homo sapien
cctcattagcaccagacagtaaaac

SEQ ID NO: 1327957 - DNA, 25 bp, Homo sapien
gaggaactagctgattcaaggcttc

SEQ ID NO: 1327958 - DNA, 25 bp, Homo sapien
agttccaaaccatttctccttgagg

SEQ ID NO: 1327959 - DNA, 25 bp, Homo sapien
aatgtcctgcaatgggtacagctgc

SEQ ID NO: 1327960 - DNA, 25 bp, Homo sapien
gaatgtcctgcaatgggtacagctg

SEQ ID NO: 1327961 - DNA, 25 bp, Homo sapien
agaatgtcctgcaatgggtacagct

SEQ ID NO: 1327962 - DNA, 25 bp, Homo sapien
gagaatgtcctgcaatgggtacagc

SEQ ID NO: 1327963 - DNA, 25 bp, Homo sapien
attatcctcaattttccgaatctct

SEQ ID NO: 1327964 - DNA, 25 bp, Homo sapien
cattatcctcaattttccgaatctc

SEQ ID NO: 1327965 - DNA, 25 bp, Homo sapien
caattttccgaatctcttcaaaaat

SEQ ID NO: 1327966 - DNA, 25 bp, Homo sapien
gactgcccacatatgtgtaaagcct

SEQ ID NO: 1327967 - DNA, 25 bp, Homo sapien
tgaagcctcaaatataccaggactg

SEQ ID NO: 1327968 - DNA, 25 bp, Homo sapien
aatttctgcctacttgagggagaag

SEQ ID NO: 1327969 - DNA, 25 bp, Homo sapien
gcgtgaaaataaagggactgcccac

SEQ ID NO: 1327970 - DNA, 25 bp, Homo sapien
taaatactgaaagacagtgtaagca

SEQ ID NO: 1327971 - DNA, 25 bp, Homo sapien
cttttttctgggcctagcttctgca

SEQ ID NO: 1327972 - DNA, 25 bp, Homo sapien
aatactgaaagacagtgtaagcaac

SEQ ID NO: 1327973 - DNA, 25 bp, Homo sapien
tttaaatactgaaagacagtgtaag

SEQ ID NO: 1327974 - DNA, 25 bp, Homo sapien
aacactgaataagtagaattttgct

SEQ ID NO: 1327975 - DNA, 25 bp, Homo sapien
aatgtaatagaaatgctgaacactg

SEQ ID NO: 1327976 - DNA, 25 bp, Homo sapien
agaattttgctcaaatcctgtctca

SEQ ID NO: 1327977 - DNA, 25 bp, Homo sapien
gaaatgctgaacactgaataagtag

SEQ ID NO: 1327978 - DNA, 25 bp, Homo sapien
taggcttcctggcagctaaagtaaa

SEQ ID NO: 1327979 - DNA, 25 bp, Homo sapien
caacaatgggctaaaaggtggctta

SEQ ID NO: 1327980 - DNA, 25 bp, Homo sapien
caggtgctttaatgcttaggaaaca

SEQ ID NO: 1327981 - DNA, 25 bp, Homo sapien
gaaaggttgtgcacagctcaaagca

SEQ ID NO: 1327982 - DNA, 25 bp, Homo sapien
tcatgtccaaccagccaggatatat

SEQ ID NO: 1327983 - DNA, 25 bp, Homo sapien
ggatatataatgaagtggcttcacc

SEQ ID NO: 1327984 - DNA, 25 bp, Homo sapien
caaccagccaggatatataatgaag

SEQ ID NO: 1327985 - DNA, 25 bp, Homo sapien
tgccttcatgtccaaccagccagga

SEQ ID NO: 1327986 - DNA, 25 bp, Homo sapien
tgtgatggtcagagcatgaattttt

SEQ ID NO: 1327987 - DNA, 25 bp, Homo sapien
ccatgtgatggtcagagcatgaatt

SEQ ID NO: 1327988 - DNA, 25 bp, Homo sapien
gtgcccatgtgatggtcagagcatg

SEQ ID NO: 1327989 - DNA, 25 bp, Homo sapien
gaagtgcccatgtgatggtcagagc

SEQ ID NO: 1327990 - DNA, 25 bp, Homo sapien
cagggcaccagaatcaatcgatctg

SEQ ID NO: 1327991 - DNA, 25 bp, Homo sapien
ttggcagcttcaattaggttataga

SEQ ID NO: 1327992 - DNA, 25 bp, Homo sapien
cagctagtcagtggtctgctatcta

SEQ ID NO: 1327993 - DNA, 25 bp, Homo sapien
ctcttcatggtaagatttaagggtg

SEQ ID NO: 1327994 - DNA, 25 bp, Homo sapien
aagtttgttaaatgctggtgtgtca

SEQ ID NO: 1327995 - DNA, 25 bp, Homo sapien
tgctggtgtgtcaaatggatccgtt

SEQ ID NO: 1327996 - DNA, 25 bp, Homo sapien
cgttaaatggccaaagtttggtctg

SEQ ID NO: 1327997 - DNA, 25 bp, Homo sapien
caaatggatccgttaaatggccaaa

SEQ ID NO: 1327998 - DNA, 25 bp, Homo sapien
ttggtatctgagagaagatttcagt

SEQ ID NO: 1327999 - DNA, 25 bp, Homo sapien
gagaagatttcagtcacccactttt

SEQ ID NO: 1328000 - DNA, 25 bp, Homo sapien
tgtttggtatctgagagaagatttc

SEQ ID NO: 1328001 - DNA, 25 bp, Homo sapien
aagatttcagtcacccacttttcca

SEQ ID NO: 1328002 - DNA, 25 bp, Homo sapien
aatgacattattcaaggtagaaatg

SEQ ID NO: 1328003 - DNA, 25 bp, Homo sapien
caatgacattattcaaggtagaaat

SEQ ID NO: 1328004 - DNA, 25 bp, Homo sapien
aattagatttctcagagatctttag

SEQ ID NO: 1328005 - DNA, 25 bp, Homo sapien
gttttacatctaagagccaagtcag

SEQ ID NO: 1328006 - DNA, 25 bp, Homo sapien
gaactcattttgatcataaatgcga

SEQ ID NO: 1328007 - DNA, 25 bp, Homo sapien
gagccaagtcagatttgatcttaat

SEQ ID NO: 1328008 - DNA, 25 bp, Homo sapien
cataaatgcgaaaatgttttacatc

SEQ ID NO: 1328009 - DNA, 25 bp, Homo sapien
tcttggctcatgcttgagcgtctca

SEQ ID NO: 1328010 - DNA, 25 bp, Homo sapien
taatgagaagagtagtaacgcatcc

SEQ ID NO: 1328011 - DNA, 25 bp, Homo sapien
tctcaatctagcatgtgtatcaata

SEQ ID NO: 1328012 - DNA, 25 bp, Homo sapien
ttgaaccactaaagtcatgtaatga

SEQ ID NO: 1328013 - DNA, 25 bp, Homo sapien
ggatgtccaggtctagcaaggcttc

SEQ ID NO: 1328014 - DNA, 25 bp, Homo sapien
atgtccaggtctagcaaggcttcca

SEQ ID NO: 1328015 - DNA, 25 bp, Homo sapien
taggatgtccaggtctagcaaggct

SEQ ID NO: 1328016 - DNA, 25 bp, Homo sapien
ttcctttctgtttgcatcagaaggc

SEQ ID NO: 1328017 - DNA, 25 bp, Homo sapien
atggtctagagataaagaaggataa

SEQ ID NO: 1328018 - DNA, 25 bp, Homo sapien
tcattagtgggtggatgaagaactg

SEQ ID NO: 1328019 - DNA, 25 bp, Homo sapien
aacttcacggtcaattgcatctctg

SEQ ID NO: 1328020 - DNA, 25 bp, Homo sapien
ctctgatcattagtgggtggatgaa

SEQ ID NO: 1328021 - DNA, 25 bp, Homo sapien
caacagcttcaacttcacggtcaat

SEQ ID NO: 1328022 - DNA, 25 bp, Homo sapien
cgtttttgttcactttcatcaatca

SEQ ID NO: 1328023 - DNA, 25 bp, Homo sapien
ggagatttagttcacaatcctaagt

SEQ ID NO: 1328024 - DNA, 25 bp, Homo sapien
tataaactacacctgagtggcccac

SEQ ID NO: 1328025 - DNA, 25 bp, Homo sapien
actaatatctacatgttactttaac

SEQ ID NO: 1328026 - DNA, 25 bp, Homo sapien
ggataatttctgttgacttaaataa

SEQ ID NO: 1328027 - DNA, 25 bp, Homo sapien
ttaactacctgctagatatattggg

SEQ ID NO: 1328028 - DNA, 25 bp, Homo sapien
tacttggtatgattaatgatgggtt

SEQ ID NO: 1328029 - DNA, 25 bp, Homo sapien
cttaactacctgctagatatattgg

SEQ ID NO: 1328030 - DNA, 25 bp, Homo sapien
gcgttcacaatcagttgaggcatta

SEQ ID NO: 1328031 - DNA, 25 bp, Homo sapien
gacagtgcgttcacaatcagttgag

SEQ ID NO: 1328032 - DNA, 25 bp, Homo sapien
aatcagttgaggcattatcactacc

SEQ ID NO: 1328033 - DNA, 25 bp, Homo sapien
aaactgaaagacagtgcgttcacaa

SEQ ID NO: 1328034 - DNA, 25 bp, Homo sapien
tgctcatgttacttttatactaaaa

SEQ ID NO: 1328035 - DNA, 25 bp, Homo sapien
cacctgaccctaaataatactttct

SEQ ID NO: 1328036 - DNA, 25 bp, Homo sapien
tttgtaactttctattatgctcatg

SEQ ID NO: 1328037 - DNA, 25 bp, Homo sapien
ccacacctgaccctaaataatactt

SEQ ID NO: 1328038 - DNA, 25 bp, Homo sapien
atctggatcagcgaaactcccaact

SEQ ID NO: 1328039 - DNA, 25 bp, Homo sapien
gaaactcccaactccaacacaaaga

SEQ ID NO: 1328040 - DNA, 25 bp, Homo sapien
tgtgctccaaaaagtgtgccagccc

SEQ ID NO: 1328041 - DNA, 25 bp, Homo sapien
ggatcagcgaaactcccaactccaa

SEQ ID NO: 1328042 - DNA, 25 bp, Homo sapien
ctggagtaattagaacacatacaaa

SEQ ID NO: 1328043 - DNA, 25 bp, Homo sapien
tagaacacatacaaatagttgagtc

SEQ ID NO: 1328044 - DNA, 25 bp, Homo sapien
tggagtaattagaacacatacaaat

SEQ ID NO: 1328045 - DNA, 25 bp, Homo sapien
acacatacaaatagttgagtcaacc

SEQ ID NO: 1328046 - DNA, 25 bp, Homo sapien
gctcctccgcttgccatcctgccaa

SEQ ID NO: 1328047 - DNA, 25 bp, Homo sapien
ctccgcttgccatcctgccaaatgc

SEQ ID NO: 1328048 - DNA, 25 bp, Homo sapien
tcctccgcttgccatcctgccaaat

SEQ ID NO: 1328049 - DNA, 25 bp, Homo sapien
ccgcttgccatcctgccaaatgctg

SEQ ID NO: 1328050 - DNA, 25 bp, Homo sapien
gcataaagtctagccatgtgtcaga

SEQ ID NO: 1328051 - DNA, 25 bp, Homo sapien
taaaagctttgtgttgagtgactca

SEQ ID NO: 1328052 - DNA, 25 bp, Homo sapien
gaagaaccaaacagcctcacttgat

SEQ ID NO: 1328053 - DNA, 25 bp, Homo sapien
aaaattgatggccaagaggtacacc

SEQ ID NO: 1328054 - DNA, 25 bp, Homo sapien
ttctgtgatgttttaataggtgcct

SEQ ID NO: 1328055 - DNA, 25 bp, Homo sapien
tctgtgatgttttaataggtgccta

SEQ ID NO: 1328056 - DNA, 25 bp, Homo sapien
tgtgatgttttaataggtgcctaac

SEQ ID NO: 1328057 - DNA, 25 bp, Homo sapien
ctgttctgtgatgttttaataggtg

SEQ ID NO: 1328058 - DNA, 25 bp, Homo sapien
tttcagctccaactaccccataaag

SEQ ID NO: 1328059 - DNA, 25 bp, Homo sapien
ataaagatttcttgtctcgaccagc

SEQ ID NO: 1328060 - DNA, 25 bp, Homo sapien
ccaactaccccataaagatttcttg

SEQ ID NO: 1328061 - DNA, 25 bp, Homo sapien
tctcgaccagcagggttgaagacat

SEQ ID NO: 1328062 - DNA, 25 bp, Homo sapien
agtctatcagtcagctttgaccaca

SEQ ID NO: 1328063 - DNA, 25 bp, Homo sapien
tgaataagttgacttaaaccacagt

SEQ ID NO: 1328064 - DNA, 25 bp, Homo sapien
cacagtctatcagtcagctttgacc

SEQ ID NO: 1328065 - DNA, 25 bp, Homo sapien
gaataagttgacttaaaccacagtc

SEQ ID NO: 1328066 - DNA, 25 bp, Homo sapien
taggttccactgtcccggtaggata

SEQ ID NO: 1328067 - DNA, 25 bp, Homo sapien
gaccctgctgctagaaaagatcaac

SEQ ID NO: 1328068 - DNA, 25 bp, Homo sapien
cactagtgaacccattgcttctgaa

SEQ ID NO: 1328069 - DNA, 25 bp, Homo sapien
taaaaacgatcactagactctgacc

SEQ ID NO: 1328070 - DNA, 25 bp, Homo sapien
ggtcaattccactgtactggctccg

SEQ ID NO: 1328071 - DNA, 25 bp, Homo sapien
gagccctaggcccatgtaaagattt

SEQ ID NO: 1328072 - DNA, 25 bp, Homo sapien
taatccaggctaagaattctgcagc

SEQ ID NO: 1328073 - DNA, 25 bp, Homo sapien
tgggtactccctactatgaaaatgg

SEQ ID NO: 1328074 - DNA, 25 bp, Homo sapien
tctagcttctgctctctcttctaat

SEQ ID NO: 1328075 - DNA, 25 bp, Homo sapien
ctgctctctcttctaattcttccaa

SEQ ID NO: 1328076 - DNA, 25 bp, Homo sapien
tttttctagcttctgctctctcttc

SEQ ID NO: 1328077 - DNA, 25 bp, Homo sapien
ttctgctctctcttctaattcttcc

SEQ ID NO: 1328078 - DNA, 25 bp, Homo sapien
tcatcaaaaccctcttcatcgtcat

SEQ ID NO: 1328079 - DNA, 25 bp, Homo sapien
ttccatattacttaggtctgaaatc

SEQ ID NO: 1328080 - DNA, 25 bp, Homo sapien
cttccatattacttaggtctgaaat

SEQ ID NO: 1328081 - DNA, 25 bp, Homo sapien
cttattgtgccaggcgagcagaccc

SEQ ID NO: 1328082 - DNA, 25 bp, Homo sapien
ggtcctctttgcgtagcatcctgaa

SEQ ID NO: 1328083 - DNA, 25 bp, Homo sapien
agtgtggttatgtccttattgtgcc

SEQ ID NO: 1328084 - DNA, 25 bp, Homo sapien
gcgtagcatcctgaaaataaatgcc

SEQ ID NO: 1328085 - DNA, 25 bp, Homo sapien
tgcgccatggcactccagcatgggt

SEQ ID NO: 1328086 - DNA, 25 bp, Homo sapien
ctccagcatgggtgacagatggaga

SEQ ID NO: 1328087 - DNA, 25 bp, Homo sapien
ccagcatgggtgacagatggagact

SEQ ID NO: 1328088 - DNA, 25 bp, Homo sapien
attgcgccatggcactccagcatgg

SEQ ID NO: 1328089 - DNA, 25 bp, Homo sapien
aaaaattggcatgaagtaaactgtg

SEQ ID NO: 1328090 - DNA, 25 bp, Homo sapien
aattggcatgaagtaaactgtgtaa

SEQ ID NO: 1328091 - DNA, 25 bp, Homo sapien
gcatgaagtaaactgtgtaagatta

SEQ ID NO: 1328092 - DNA, 25 bp, Homo sapien
ttggcatgaagtaaactgtgtaaga

SEQ ID NO: 1328093 - DNA, 25 bp, Homo sapien
attgtaaggtgatccagatttggcc

SEQ ID NO: 1328094 - DNA, 25 bp, Homo sapien
gggttacagactatggtgcctactc

SEQ ID NO: 1328095 - DNA, 25 bp, Homo sapien
gctttgtctgtaccgagacagaagg

SEQ ID NO: 1328096 - DNA, 25 bp, Homo sapien
agagccccagcttatctgctttgtc

SEQ ID NO: 1328097 - DNA, 25 bp, Homo sapien
agtgctacctacaagaaccttcctt

SEQ ID NO: 1328098 - DNA, 25 bp, Homo sapien
taataaggaacagagaagtgctacc

SEQ ID NO: 1328099 - DNA, 25 bp, Homo sapien
gtgtctagaataataaggaacagag

SEQ ID NO: 1328100 - DNA, 25 bp, Homo sapien
cagagaagtgctacctacaagaacc

SEQ ID NO: 1328101 - DNA, 25 bp, Homo sapien
tctgcctccataccattcctttgaa

SEQ ID NO: 1328102 - DNA, 25 bp, Homo sapien
tcatccttaactcactacaacctgg

SEQ ID NO: 1328103 - DNA, 25 bp, Homo sapien
ggattcagtcctagtactgcttgac

SEQ ID NO: 1328104 - DNA, 25 bp, Homo sapien
tcgagtctccaaaagggattcagtc

SEQ ID NO: 1328105 - DNA, 25 bp, Homo sapien
agacaagtgagagtgcaaaacaaaa

SEQ ID NO: 1328106 - DNA, 25 bp, Homo sapien
gaatgaagcattacggttccaggag

SEQ ID NO: 1328107 - DNA, 25 bp, Homo sapien
tgaatctcgtgaagtaatacctagg

SEQ ID NO: 1328108 - DNA, 25 bp, Homo sapien
gactaaggaattgtcaatctcatgg

SEQ ID NO: 1328109 - DNA, 25 bp, Homo sapien
ttcaggctgcgttcctcaaagaaac

SEQ ID NO: 1328110 - DNA, 25 bp, Homo sapien
ttcctcagattcatccgctcctaga

SEQ ID NO: 1328111 - DNA, 25 bp, Homo sapien
tgttctcgcccagatcctgtccatt

SEQ ID NO: 1328112 - DNA, 25 bp, Homo sapien
cagctgcaggtagacttcgccttgt

SEQ ID NO: 1328113 - DNA, 25 bp, Homo sapien
cctagacgggcaacccggctgttct

SEQ ID NO: 1328114 - DNA, 25 bp, Homo sapien
agcagcagagtcttcgcaccgaccc

SEQ ID NO: 1328115 - DNA, 25 bp, Homo sapien
cttcctccgggtggcacagactgca

SEQ ID NO: 1328116 - DNA, 25 bp, Homo sapien
cccgcgtttcgattccccagagcgc

SEQ ID NO: 1328117 - DNA, 25 bp, Homo sapien
ctccgggtggcacagactgcagcaa

SEQ ID NO: 1328118 - DNA, 25 bp, Homo sapien
tcatgaggcaagaaagtagtcacgc

SEQ ID NO: 1328119 - DNA, 25 bp, Homo sapien
cggccgccgatgacgctactgattt

SEQ ID NO: 1328120 - DNA, 25 bp, Homo sapien
gtagtcacgctcacgtaagcaacca

SEQ ID NO: 1328121 - DNA, 25 bp, Homo sapien
caccaagctggagcgatggacatcc

SEQ ID NO: 1328122 - DNA, 25 bp, Homo sapien
gaagaactttaatgcatataccatc

SEQ ID NO: 1328123 - DNA, 25 bp, Homo sapien
caattcagaagaactttaatgcata

SEQ ID NO: 1328124 - DNA, 25 bp, Homo sapien
tttaatgcatataccatcattgcca

SEQ ID NO: 1328125 - DNA, 25 bp, Homo sapien
tcagaagaactttaatgcatatacc

SEQ ID NO: 1328126 - DNA, 25 bp, Homo sapien
tgtagtgccaacatcacacgttcgg

SEQ ID NO: 1328127 - DNA, 25 bp, Homo sapien
ttttctgaatgtcggagggcacctc

SEQ ID NO: 1328128 - DNA, 25 bp, Homo sapien
gaaactatctggtctaagctcctga

SEQ ID NO: 1328129 - DNA, 25 bp, Homo sapien
tcagaattaggactgcccactgcgg

SEQ ID NO: 1328130 - DNA, 25 bp, Homo sapien
taagagattgccattgaggctggat

SEQ ID NO: 1328131 - DNA, 25 bp, Homo sapien
catggctatggctcactgtattctt

SEQ ID NO: 1328132 - DNA, 25 bp, Homo sapien
tataggtgcaggctactttgcccag

SEQ ID NO: 1328133 - DNA, 25 bp, Homo sapien
gtggctcatacgtacaatcctagtg

SEQ ID NO: 1328134 - DNA, 25 bp, Homo sapien
gacagaatggactagagtggagtaa

SEQ ID NO: 1328135 - DNA, 25 bp, Homo sapien
taaaaccctaggatctgctgctaga

SEQ ID NO: 1328136 - DNA, 25 bp, Homo sapien
tgctgctagattagacaaggaggct

SEQ ID NO: 1328137 - DNA, 25 bp, Homo sapien
aatgttaggaactctgtggtagctc

SEQ ID NO: 1328138 - DNA, 25 bp, Homo sapien
gaggaaactcctgctaccatatgga

SEQ ID NO: 1328139 - DNA, 25 bp, Homo sapien
gaatccttgggagcctggtactacc

SEQ ID NO: 1328140 - DNA, 25 bp, Homo sapien
aaatatccaggcgtcatgaggacct

SEQ ID NO: 1328141 - DNA, 25 bp, Homo sapien
tcataggaccttgcaggcagggatc

SEQ ID NO: 1328142 - DNA, 25 bp, Homo sapien
tcaaaagtggaaagtaactggccca

SEQ ID NO: 1328143 - DNA, 25 bp, Homo sapien
catgacatcagagttggccgagaca

SEQ ID NO: 1328144 - DNA, 25 bp, Homo sapien
gaaaagaaaactggcgagagactcc

SEQ ID NO: 1328145 - DNA, 25 bp, Homo sapien
ccctgtggccaagcaagctagaata

SEQ ID NO: 1328146 - DNA, 25 bp, Homo sapien
aaaggcaagtcccaggagtcatgat

SEQ ID NO: 1328147 - DNA, 25 bp, Homo sapien
cagactaggtaaatttgggcatccc

SEQ ID NO: 1328148 - DNA, 25 bp, Homo sapien
aaatagtctgaagacgtcacagggc

SEQ ID NO: 1328149 - DNA, 25 bp, Homo sapien
gcagatttgagctcgatacaaggaa

SEQ ID NO: 1328150 - DNA, 25 bp, Homo sapien
agattagctcttcctgtcgccacag

SEQ ID NO: 1328151 - DNA, 25 bp, Homo sapien
ggattagctatgcaggcgagcctca

SEQ ID NO: 1328152 - DNA, 25 bp, Homo sapien
gacttgtagtgagagaaagccccgc

SEQ ID NO: 1328153 - DNA, 25 bp, Homo sapien
gggagcccgataggaaacaagcacg

SEQ ID NO: 1328154 - DNA, 25 bp, Homo sapien
ccgagagacgcgtgttcttggagga

SEQ ID NO: 1328155 - DNA, 25 bp, Homo sapien
aggagcccagcatcgacgggtctgt

SEQ ID NO: 1328156 - DNA, 25 bp, Homo sapien
tgtccagcgaatcagacatcttgtc

SEQ ID NO: 1328157 - DNA, 25 bp, Homo sapien
tacactgatgttctcctttgcactg

SEQ ID NO: 1328158 - DNA, 25 bp, Homo sapien
tccagctgacagcctctcctgtggc

SEQ ID NO: 1328159 - DNA, 25 bp, Homo sapien
cagctgacagcctctcctgtggccc

SEQ ID NO: 1328160 - DNA, 25 bp, Homo sapien
ctgacagcctctcctgtggcccatc

SEQ ID NO: 1328161 - DNA, 25 bp, Homo sapien
gacagcctctcctgtggcccatctc

SEQ ID NO: 1328162 - DNA, 25 bp, Homo sapien
aacactgctccagaacatgtctcct

SEQ ID NO: 1328163 - DNA, 25 bp, Homo sapien
aacatgtctcctccacggttcagat

SEQ ID NO: 1328164 - DNA, 25 bp, Homo sapien
cccaacactgctccagaacatgtct

SEQ ID NO: 1328165 - DNA, 25 bp, Homo sapien
tcctccacggttcagatcccttctc

SEQ ID NO: 1328166 - DNA, 25 bp, Homo sapien
cagtgggaacaaccctctcttcctc

SEQ ID NO: 1328167 - DNA, 25 bp, Homo sapien
agctggcccttctcagtgggaacaa

SEQ ID NO: 1328168 - DNA, 25 bp, Homo sapien
ctcagtgggaacaaccctctcttcc

SEQ ID NO: 1328169 - DNA, 25 bp, Homo sapien
gagctggcccttctcagtgggaaca

SEQ ID NO: 1328170 - DNA, 25 bp, Homo sapien
gtcttggacagcattgaaggactct

SEQ ID NO: 1328171 - DNA, 25 bp, Homo sapien
tcttggacagcattgaaggactctt

SEQ ID NO: 1328172 - DNA, 25 bp, Homo sapien
cagtcttggacagcattgaaggact

SEQ ID NO: 1328173 - DNA, 25 bp, Homo sapien
cttggacagcattgaaggactcttc

SEQ ID NO: 1328174 - DNA, 25 bp, Homo sapien
ggccccacggtaataggctgttgtg

SEQ ID NO: 1328175 - DNA, 25 bp, Homo sapien
ccacggtaataggctgttgtgatgg

SEQ ID NO: 1328176 - DNA, 25 bp, Homo sapien
gccccacggtaataggctgttgtga

SEQ ID NO: 1328177 - DNA, 25 bp, Homo sapien
ccccacggtaataggctgttgtgat

SEQ ID NO: 1328178 - DNA, 25 bp, Homo sapien
acaatctcttagaaagtctgctttg

SEQ ID NO: 1328179 - DNA, 25 bp, Homo sapien
aaacaatctcttagaaagtctgctt

SEQ ID NO: 1328180 - DNA, 25 bp, Homo sapien
aagaaacaatctcttagaaagtctg

SEQ ID NO: 1328181 - DNA, 25 bp, Homo sapien
gaaacaatctcttagaaagtctgct

SEQ ID NO: 1328182 - DNA, 25 bp, Homo sapien
ggattaaggttttgtgccactgtgc

SEQ ID NO: 1328183 - DNA, 25 bp, Homo sapien
cccaggctgagagccctggcacaat

SEQ ID NO: 1328184 - DNA, 25 bp, Homo sapien
actgcaagtttgaatttctgggctg

SEQ ID NO: 1328185 - DNA, 25 bp, Homo sapien
gctgagagccctggcacaatcatag

SEQ ID NO: 1328186 - DNA, 25 bp, Homo sapien
ccttggagagcatatgaatcaccat

SEQ ID NO: 1328187 - DNA, 25 bp, Homo sapien
ctccttggagagcatatgaatcacc

SEQ ID NO: 1328188 - DNA, 25 bp, Homo sapien
tccttggagagcatatgaatcacca

SEQ ID NO: 1328189 - DNA, 25 bp, Homo sapien
cctccttggagagcatatgaatcac

SEQ ID NO: 1328190 - DNA, 25 bp, Homo sapien
ctttagcccccaagatcctctgcag

SEQ ID NO: 1328191 - DNA, 25 bp, Homo sapien
tgcagcctcccaatacaggaagtcc

SEQ ID NO: 1328192 - DNA, 25 bp, Homo sapien
ccaatacaggaagtcctctaaccat

SEQ ID NO: 1328193 - DNA, 25 bp, Homo sapien
gcctcccaatacaggaagtcctcta

SEQ ID NO: 1328194 - DNA, 25 bp, Homo sapien
ttgaagaggtgaatgacaggaaatc

SEQ ID NO: 1328195 - DNA, 25 bp, Homo sapien
tcttcacttggtactgattctgtgc

SEQ ID NO: 1328196 - DNA, 25 bp, Homo sapien
gccaagcattggttaggtcctgaag

SEQ ID NO: 1328197 - DNA, 25 bp, Homo sapien
aaaacggcaacttaggcttgaagag

SEQ ID NO: 1328198 - DNA, 25 bp, Homo sapien
ggaagtccttcaggaccctgtctaa

SEQ ID NO: 1328199 - DNA, 25 bp, Homo sapien
gaagtccttcaggaccctgtctaaa

SEQ ID NO: 1328200 - DNA, 25 bp, Homo sapien
ccttcaggaccctgtctaaattcat

SEQ ID NO: 1328201 - DNA, 25 bp, Homo sapien
agtccttcaggaccctgtctaaatt

SEQ ID NO: 1328202 - DNA, 25 bp, Homo sapien
tcttcctccccatgttctagctgaa

SEQ ID NO: 1328203 - DNA, 25 bp, Homo sapien
cttcctccccatgttctagctgaag

SEQ ID NO: 1328204 - DNA, 25 bp, Homo sapien
tctggattgttctcttgatcagcac

SEQ ID NO: 1328205 - DNA, 25 bp, Homo sapien
tcaatcctctggattgttctcttga

SEQ ID NO: 1328206 - DNA, 25 bp, Homo sapien
ggattgttctcttgatcagcaccag

SEQ ID NO: 1328207 - DNA, 25 bp, Homo sapien
tcctctggattgttctcttgatcag

SEQ ID NO: 1328208 - DNA, 25 bp, Homo sapien
tgaaacagcattaatgcctgatgct

SEQ ID NO: 1328209 - DNA, 25 bp, Homo sapien
tgcctgatgctgtaaggcccagaag

SEQ ID NO: 1328210 - DNA, 25 bp, Homo sapien
taatgcctgatgctgtaaggcccag

SEQ ID NO: 1328211 - DNA, 25 bp, Homo sapien
cagcattaatgcctgatgctgtaag

SEQ ID NO: 1328212 - DNA, 25 bp, Homo sapien
taagcccttgtactggcaggccagc

SEQ ID NO: 1328213 - DNA, 25 bp, Homo sapien
ccttgtactggcaggccagccgctt

SEQ ID NO: 1328214 - DNA, 25 bp, Homo sapien
ctctaagcccttgtactggcaggcc

SEQ ID NO: 1328215 - DNA, 25 bp, Homo sapien
tactggcaggccagccgcttctcag

SEQ ID NO: 1328216 - DNA, 25 bp, Homo sapien
ggtgaacgtgtcatcagcatagcgg

SEQ ID NO: 1328217 - DNA, 25 bp, Homo sapien
gccaatgataagcagtttaaacatg

SEQ ID NO: 1328218 - DNA, 25 bp, Homo sapien
tctcgtgacggtagactgtcttcac

SEQ ID NO: 1328219 - DNA, 25 bp, Homo sapien
tctgcagtttcacccgcttctcgtg

SEQ ID NO: 1328220 - DNA, 25 bp, Homo sapien
gagtcactcaggaacagaccttcgg

SEQ ID NO: 1328221 - DNA, 25 bp, Homo sapien
tcactcaggaacagaccttcggtgt

SEQ ID NO: 1328222 - DNA, 25 bp, Homo sapien
caggaacagaccttcggtgtcaccc

SEQ ID NO: 1328223 - DNA, 25 bp, Homo sapien
ctagagtcactcaggaacagacctt

SEQ ID NO: 1328224 - DNA, 25 bp, Homo sapien
tgaaggcccagggaccatctgggaa

SEQ ID NO: 1328225 - DNA, 25 bp, Homo sapien
atgatagagctatctccgtgacaag

SEQ ID NO: 1328226 - DNA, 25 bp, Homo sapien
tccgtgacaagcaatacagatgaag

SEQ ID NO: 1328227 - DNA, 25 bp, Homo sapien
gcaatacagatgaaggcccagggac

SEQ ID NO: 1328228 - DNA, 25 bp, Homo sapien
actttttctgtccacgattctctta

SEQ ID NO: 1328229 - DNA, 25 bp, Homo sapien
ccgtgtaacaaggtccagtgcctgg

SEQ ID NO: 1328230 - DNA, 25 bp, Homo sapien
gactacagaacagagttggatgact

SEQ ID NO: 1328231 - DNA, 25 bp, Homo sapien
caaagttgcttccatgcttggacta

SEQ ID NO: 1328232 - DNA, 25 bp, Homo sapien
gctgcgggatggtctggtccggtca

SEQ ID NO: 1328233 - DNA, 25 bp, Homo sapien
acggtcggcgggacggcaggacctg

SEQ ID NO: 1328234 - DNA, 25 bp, Homo sapien
gcaggacctggcgtcgggagggcgc

SEQ ID NO: 1328235 - DNA, 25 bp, Homo sapien
ctggtccggtcaggtcctcacagtg

SEQ ID NO: 1328236 - DNA, 25 bp, Homo sapien
agctgctgtttacgaggtgaaagtg

SEQ ID NO: 1328237 - DNA, 25 bp, Homo sapien
cagctgctgtttacgaggtgaaagt

SEQ ID NO: 1328238 - DNA, 25 bp, Homo sapien
gctgtttacgaggtgaaagtggttc

SEQ ID NO: 1328239 - DNA, 25 bp, Homo sapien
ctgctgtttacgaggtgaaagtggt

SEQ ID NO: 1328240 - DNA, 25 bp, Homo sapien
cagctagcaaatatctcccgaacac

SEQ ID NO: 1328241 - DNA, 25 bp, Homo sapien
ctagcaaatatctcccgaacacctg

SEQ ID NO: 1328242 - DNA, 25 bp, Homo sapien
gctagcaaatatctcccgaacacct

SEQ ID NO: 1328243 - DNA, 25 bp, Homo sapien
ccagctagcaaatatctcccgaaca

SEQ ID NO: 1328244 - DNA, 25 bp, Homo sapien
ctgtgcagagacgaataacatatgg

SEQ ID NO: 1328245 - DNA, 25 bp, Homo sapien
tccttggtctcacatcatccaccac

SEQ ID NO: 1328246 - DNA, 25 bp, Homo sapien
ttccttggtctcacatcatccacca

SEQ ID NO: 1328247 - DNA, 25 bp, Homo sapien
tcatccaccactgaccagacccctt

SEQ ID NO: 1328248 - DNA, 25 bp, Homo sapien
atcatccaccactgaccagacccct

SEQ ID NO: 1328249 - DNA, 25 bp, Homo sapien
aaggtaagtctcatactccctcttg

SEQ ID NO: 1328250 - DNA, 25 bp, Homo sapien
ggaactgtactctctctggactgac

SEQ ID NO: 1328251 - DNA, 25 bp, Homo sapien
cttgtgtccgaaattggaactgtac

SEQ ID NO: 1328252 - DNA, 25 bp, Homo sapien
tactccctcttgtgtccgaaattgg

SEQ ID NO: 1328253 - DNA, 25 bp, Homo sapien
tcacagggctgttaggagtactaaa

SEQ ID NO: 1328254 - DNA, 25 bp, Homo sapien
cttcaatgtaaagtggtccagggct

SEQ ID NO: 1328255 - DNA, 25 bp, Homo sapien
cagcatgttgtcaggagaactcaaa

SEQ ID NO: 1328256 - DNA, 25 bp, Homo sapien
tacagtagtacctttatcacagggc

SEQ ID NO: 1328257 - DNA, 25 bp, Homo sapien
tttcctgcttcagcctcccgagtaa

SEQ ID NO: 1328258 - DNA, 25 bp, Homo sapien
ttcctgcttcagcctcccgagtaac

SEQ ID NO: 1328259 - DNA, 25 bp, Homo sapien
catccggctaattttgttgtttttg

SEQ ID NO: 1328260 - DNA, 25 bp, Homo sapien
cacatccggctaattttgttgtttt

SEQ ID NO: 1328261 - DNA, 25 bp, Homo sapien
ttgttaatgccagtacaaaaataca

SEQ ID NO: 1328262 - DNA, 25 bp, Homo sapien
gttaatgccagtacaaaaatacagt

SEQ ID NO: 1328263 - DNA, 25 bp, Homo sapien
acaaaaatacagttgatgacttgac

SEQ ID NO: 1328264 - DNA, 25 bp, Homo sapien
ttttgttaatgccagtacaaaaata

SEQ ID NO: 1328265 - DNA, 25 bp, Homo sapien
gaggagtaaacatccaagtggctca

SEQ ID NO: 1328266 - DNA, 25 bp, Homo sapien
gaatgaggtttcctggtcggcttaa

SEQ ID NO: 1328267 - DNA, 25 bp, Homo sapien
gaagaagcccacaattattcccagg

SEQ ID NO: 1328268 - DNA, 25 bp, Homo sapien
gagagcgctccttccagtgtaggta

SEQ ID NO: 1328269 - DNA, 25 bp, Homo sapien
ggcatcacccgtcagcctttcctga

SEQ ID NO: 1328270 - DNA, 25 bp, Homo sapien
tgaaggcatcacccgtcagcctttc

SEQ ID NO: 1328271 - DNA, 25 bp, Homo sapien
aaggcatcacccgtcagcctttcct

SEQ ID NO: 1328272 - DNA, 25 bp, Homo sapien
tctgaaggcatcacccgtcagcctt

SEQ ID NO: 1328273 - DNA, 25 bp, Homo sapien
tacctcagtcacttgtgtgcctcag

SEQ ID NO: 1328274 - DNA, 25 bp, Homo sapien
tactttcctatcacagaccttgcat

SEQ ID NO: 1328275 - DNA, 25 bp, Homo sapien
tacttaactatgaaactatgggcaa

SEQ ID NO: 1328276 - DNA, 25 bp, Homo sapien
ggatctggccaaaagctatagacat

SEQ ID NO: 1328277 - DNA, 25 bp, Homo sapien
tcaggatgcaccttgccactgggat

SEQ ID NO: 1328278 - DNA, 25 bp, Homo sapien
gatgatttcaggatgcaccttgcca

SEQ ID NO: 1328279 - DNA, 25 bp, Homo sapien
aaatacttgtagctggggtttccat

SEQ ID NO: 1328280 - DNA, 25 bp, Homo sapien
ctcattgatgatttcaggatgcacc

SEQ ID NO: 1328281 - DNA, 25 bp, Homo sapien
ggtacatcgggccctctgggaaata

SEQ ID NO: 1328282 - DNA, 25 bp, Homo sapien
gtacatcgggccctctgggaaataa

SEQ ID NO: 1328283 - DNA, 25 bp, Homo sapien
tggtacatcgggccctctgggaaat

SEQ ID NO: 1328284 - DNA, 25 bp, Homo sapien
ctggtacatcgggccctctgggaaa

SEQ ID NO: 1328285 - DNA, 25 bp, Homo sapien
attcgtggaatataacccccgtcag

SEQ ID NO: 1328286 - DNA, 25 bp, Homo sapien
gattcgtggaatataacccccgtca

SEQ ID NO: 1328287 - DNA, 25 bp, Homo sapien
tggaatataacccccgtcagggctg

SEQ ID NO: 1328288 - DNA, 25 bp, Homo sapien
tataacccccgtcagggctgaaatc

SEQ ID NO: 1328289 - DNA, 25 bp, Homo sapien
ttaagtcagataacgtcctctctct

SEQ ID NO: 1328290 - DNA, 25 bp, Homo sapien
taaatgtaaaccttaagtcagataa

SEQ ID NO: 1328291 - DNA, 25 bp, Homo sapien
aagtcagataacgtcctctctctcc

SEQ ID NO: 1328292 - DNA, 25 bp, Homo sapien
agattaaatgtaaaccttaagtcag

SEQ ID NO: 1328293 - DNA, 25 bp, Homo sapien
ttttacagaaacgtatggctagcgg

SEQ ID NO: 1328294 - DNA, 25 bp, Homo sapien
cctgaaagagagcacggctaggtga

SEQ ID NO: 1328295 - DNA, 25 bp, Homo sapien
caagcaggttgcacatataagccca

SEQ ID NO: 1328296 - DNA, 25 bp, Homo sapien
ggctagcggtatcatcatagagcat

SEQ ID NO: 1328297 - DNA, 25 bp, Homo sapien
caaaattatgggagagttctgaaat

SEQ ID NO: 1328298 - DNA, 25 bp, Homo sapien
ctgaaatttccgtagattctgcaaa

SEQ ID NO: 1328299 - DNA, 25 bp, Homo sapien
aaaattatgggagagttctgaaatt

SEQ ID NO: 1328300 - DNA, 25 bp, Homo sapien
gattctgcaaatttgggctttagag

SEQ ID NO: 1328301 - DNA, 25 bp, Homo sapien
caagctccacaccaggatttatgaa

SEQ ID NO: 1328302 - DNA, 25 bp, Homo sapien
ctttgcaagctccacaccaggattt

SEQ ID NO: 1328303 - DNA, 25 bp, Homo sapien
tgcaagctccacaccaggatttatg

SEQ ID NO: 1328304 - DNA, 25 bp, Homo sapien
gctccacaccaggatttatgaataa

SEQ ID NO: 1328305 - DNA, 25 bp, Homo sapien
gatttatctgtgaactcggtcccag

SEQ ID NO: 1328306 - DNA, 25 bp, Homo sapien
cttatgctgtaaacccaaggcctgg

SEQ ID NO: 1328307 - DNA, 25 bp, Homo sapien
taaagtggagtggagatcagaagcc

SEQ ID NO: 1328308 - DNA, 25 bp, Homo sapien
tagcccaagtaggatccaatctagg

SEQ ID NO: 1328309 - DNA, 25 bp, Homo sapien
tcagtgcaggctctggctcaaatac

SEQ ID NO: 1328310 - DNA, 25 bp, Homo sapien
gaaacatgttggccagttgcggcaa

SEQ ID NO: 1328311 - DNA, 25 bp, Homo sapien
catgttggccagttgcggcaagttc

SEQ ID NO: 1328312 - DNA, 25 bp, Homo sapien
tgttggccagttgcggcaagttctc

SEQ ID NO: 1328313 - DNA, 25 bp, Homo sapien
ggccagttgcggcaagttctcattg

SEQ ID NO: 1328314 - DNA, 25 bp, Homo sapien
taaaccgcaagtgctctgtggtacc

SEQ ID NO: 1328315 - DNA, 25 bp, Homo sapien
taaaaggcaccggacccatgctttg

SEQ ID NO: 1328316 - DNA, 25 bp, Homo sapien
aataaactggcgacgaaggcgactc

SEQ ID NO: 1328317 - DNA, 25 bp, Homo sapien
tgacctggtccaactggtgcagaaa

SEQ ID NO: 1328318 - DNA, 25 bp, Homo sapien
tacagagtccgcagtatgcagttcc

SEQ ID NO: 1328319 - DNA, 25 bp, Homo sapien
cagttccttgggtacgtcggcctgg

SEQ ID NO: 1328320 - DNA, 25 bp, Homo sapien
tgggcacttccatttactacagagt

SEQ ID NO: 1328321 - DNA, 25 bp, Homo sapien
gtcacaagagctggagactccgcag

SEQ ID NO: 1328322 - DNA, 25 bp, Homo sapien
tcacactgacgttccggccagggtt

SEQ ID NO: 1328323 - DNA, 25 bp, Homo sapien
gcagtagagctcgtaacggaaacct

SEQ ID NO: 1328324 - DNA, 25 bp, Homo sapien
gccgtacgcagtagaccaggcagag

SEQ ID NO: 1328325 - DNA, 25 bp, Homo sapien
tgtagttaagcgagtccaggatgac

SEQ ID NO: 1328326 - DNA, 25 bp, Homo sapien
ctctcagggagcgaccattggcaac

SEQ ID NO: 1328327 - DNA, 25 bp, Homo sapien
taagccggaagtgcaaactgctctt

SEQ ID NO: 1328328 - DNA, 25 bp, Homo sapien
tacgcgtctccgacgtaagccggaa

SEQ ID NO: 1328329 - DNA, 25 bp, Homo sapien
gcgctgcgccaacttccgggttgta

SEQ ID NO: 1328330 - DNA, 25 bp, Homo sapien
gaggtagaacaggcaggcacacttg

SEQ ID NO: 1328331 - DNA, 25 bp, Homo sapien
ggcacatatcttagaagggtccatg

SEQ ID NO: 1328332 - DNA, 25 bp, Homo sapien
tgtttctatacaataccaatctttt

SEQ ID NO: 1328333 - DNA, 25 bp, Homo sapien
cagggcacatatcttagaagggtcc

SEQ ID NO: 1328334 - DNA, 25 bp, Homo sapien
aatggattcatctggccaggccaga

SEQ ID NO: 1328335 - DNA, 25 bp, Homo sapien
tttacgcaattggtccttacgctgg

SEQ ID NO: 1328336 - DNA, 25 bp, Homo sapien
ttgaaacgacaagcaactacctgtg

SEQ ID NO: 1328337 - DNA, 25 bp, Homo sapien
ttggcatagctacagtgacaacttc

SEQ ID NO: 1328338 - DNA, 25 bp, Homo sapien
taacgttaagttgatagctgaaaag

SEQ ID NO: 1328339 - DNA, 25 bp, Homo sapien
ctgaaattaacgttaagttgatagc

SEQ ID NO: 1328340 - DNA, 25 bp, Homo sapien
aattaacgttaagttgatagctgaa

SEQ ID NO: 1328341 - DNA, 25 bp, Homo sapien
gaaattaacgttaagttgatagctg

SEQ ID NO: 1328342 - DNA, 25 bp, Homo sapien
ctggcagctgcttctttcttcccat

SEQ ID NO: 1328343 - DNA, 25 bp, Homo sapien
ttccagtgtcctccaatgaatatga

SEQ ID NO: 1328344 - DNA, 25 bp, Homo sapien
ctttagaggagtttctgcactgaga

SEQ ID NO: 1328345 - DNA, 25 bp, Homo sapien
taaaaacattgtccatctcataggg

SEQ ID NO: 1328346 - DNA, 25 bp, Homo sapien
gagactggaatggtatgctggttaa

SEQ ID NO: 1328347 - DNA, 25 bp, Homo sapien
gaagagcacaagaaccactcccaat

SEQ ID NO: 1328348 - DNA, 25 bp, Homo sapien
ctgcaagctgaaaaaggacaggaat

SEQ ID NO: 1328349 - DNA, 25 bp, Homo sapien
ggacaggaatcacaattatcatgtt

SEQ ID NO: 1328350 - DNA, 25 bp, Homo sapien
agctgaaaaaggacaggaatcacaa

SEQ ID NO: 1328351 - DNA, 25 bp, Homo sapien
cagactgcaagctgaaaaaggacag

SEQ ID NO: 1328352 - DNA, 25 bp, Homo sapien
gaacggaggctttgagagttaagaa

SEQ ID NO: 1328353 - DNA, 25 bp, Homo sapien
aaactcagatctaggcctggcgcag

SEQ ID NO: 1328354 - DNA, 25 bp, Homo sapien
ggtattacctacacctaacacagta

SEQ ID NO: 1328355 - DNA, 25 bp, Homo sapien
cagtaacttgaacagagcaaattat

SEQ ID NO: 1328356 - DNA, 25 bp, Homo sapien
cccattatgtccatcagaagagatg

SEQ ID NO: 1328357 - DNA, 25 bp, Homo sapien
cagcaaacaggtggccccgagacga

SEQ ID NO: 1328358 - DNA, 25 bp, Homo sapien
ctttccaagcccattatgtccatca

SEQ ID NO: 1328359 - DNA, 25 bp, Homo sapien
agcccattatgtccatcagaagaga

SEQ ID NO: 1328360 - DNA, 25 bp, Homo sapien
tctactcagggatgatgcaaccaac

SEQ ID NO: 1328361 - DNA, 25 bp, Homo sapien
gattcgtgaggtcagtcgctcccaa

SEQ ID NO: 1328362 - DNA, 25 bp, Homo sapien
gacacaacagaacgctcgggagact

SEQ ID NO: 1328363 - DNA, 25 bp, Homo sapien
tattgcaaaactgacttaggtggac

SEQ ID NO: 1328364 - DNA, 25 bp, Homo sapien
tgaatgtgcttgttatttggtaatc

SEQ ID NO: 1328365 - DNA, 25 bp, Homo sapien
gaattcttaggcagacttacagagt

SEQ ID NO: 1328366 - DNA, 25 bp, Homo sapien
gcgcctggccaataaccagcttttt

SEQ ID NO: 1328367 - DNA, 25 bp, Homo sapien
tacagagtatcatccagaaccaaat

SEQ ID NO: 1328368 - DNA, 25 bp, Homo sapien
tatcttgaggtattttgccactggc

SEQ ID NO: 1328369 - DNA, 25 bp, Homo sapien
catatctttggtatggttgccttag

SEQ ID NO: 1328370 - DNA, 25 bp, Homo sapien
cttcatgctggagtaatgggtaaca

SEQ ID NO: 1328371 - DNA, 25 bp, Homo sapien
tagattaacttacctagtcagaccc

SEQ ID NO: 1328372 - DNA, 25 bp, Homo sapien
atgaaatggtactggccctaggagg

SEQ ID NO: 1328373 - DNA, 25 bp, Homo sapien
agtgcctaatccctccttttgtaag

SEQ ID NO: 1328374 - DNA, 25 bp, Homo sapien
gaaaataggccatagactcatctcc

SEQ ID NO: 1328375 - DNA, 25 bp, Homo sapien
tcaaactggaatagctagcatgtgc

SEQ ID NO: 1328376 - DNA, 25 bp, Homo sapien
cacccagcccaaatgagatgtttct

SEQ ID NO: 1328377 - DNA, 25 bp, Homo sapien
gcctctcttgtgtacaatgagccaa

SEQ ID NO: 1328378 - DNA, 25 bp, Homo sapien
taacaattcttaatggctggcctct

SEQ ID NO: 1328379 - DNA, 25 bp, Homo sapien
tagaggatctctggccaagtattcc

SEQ ID NO: 1328380 - DNA, 25 bp, Homo sapien
gctgctgcggtgcacaacttcggga

SEQ ID NO: 1328381 - DNA, 25 bp, Homo sapien
gcgtgttatctcctaagctatggct

SEQ ID NO: 1328382 - DNA, 25 bp, Homo sapien
gcaatgatggccttgctctctgagc

SEQ ID NO: 1328383 - DNA, 25 bp, Homo sapien
actgcagtgtgaatagtgtcctcca

SEQ ID NO: 1328384 - DNA, 25 bp, Homo sapien
ctaaggattctgtactaagactgaa

SEQ ID NO: 1328385 - DNA, 25 bp, Homo sapien
cctgtaggatggagctagaacactc

SEQ ID NO: 1328386 - DNA, 25 bp, Homo sapien
tcagatgctaatggacccttggact

SEQ ID NO: 1328387 - DNA, 25 bp, Homo sapien
ccttggactgaacgatcctgtagga

SEQ ID NO: 1328388 - DNA, 25 bp, Homo sapien
gccaggtacaagcagtggaagctat

SEQ ID NO: 1328389 - DNA, 25 bp, Homo sapien
cattcccctttcctttctccactca

SEQ ID NO: 1328390 - DNA, 25 bp, Homo sapien
ccagtgcttctatgcactttccctg

SEQ ID NO: 1328391 - DNA, 25 bp, Homo sapien
gcttctatgcactttccctgtggcc

SEQ ID NO: 1328392 - DNA, 25 bp, Homo sapien
tctcatctttgtggctctctttcag

SEQ ID NO: 1328393 - DNA, 25 bp, Homo sapien
tcatctttgtggctctctttcaggt

SEQ ID NO: 1328394 - DNA, 25 bp, Homo sapien
cgtgagagtcaaacggagattccct

SEQ ID NO: 1328395 - DNA, 25 bp, Homo sapien
gaacgttcacgtatcttcgggagag

SEQ ID NO: 1328396 - DNA, 25 bp, Homo sapien
cgggtccgagtgacaagaacgttca

SEQ ID NO: 1328397 - DNA, 25 bp, Homo sapien
cgctggaggcttcgctgaggatccc

SEQ ID NO: 1328398 - DNA, 25 bp, Homo sapien
tgagattctttaacctggcatacag

SEQ ID NO: 1328399 - DNA, 25 bp, Homo sapien
ttggttccaagctgatcattcctcc

SEQ ID NO: 1328400 - DNA, 25 bp, Homo sapien
ggcatacagccttcatgatttggtt

SEQ ID NO: 1328401 - DNA, 25 bp, Homo sapien
gtcactcatggaaatttctgctcag

SEQ ID NO: 1328402 - DNA, 25 bp, Homo sapien
cagcctccccagcagttgggatgac

SEQ ID NO: 1328403 - DNA, 25 bp, Homo sapien
ctccccagcagttgggatgacaggt

SEQ ID NO: 1328404 - DNA, 25 bp, Homo sapien
ctcagcctccccagcagttgggatg

SEQ ID NO: 1328405 - DNA, 25 bp, Homo sapien
gcctccccagcagttgggatgacag

SEQ ID NO: 1328406 - DNA, 25 bp, Homo sapien
tttttggacatatattcagacacca

SEQ ID NO: 1328407 - DNA, 25 bp, Homo sapien
tcagacaccaactttgggacacttt

SEQ ID NO: 1328408 - DNA, 25 bp, Homo sapien
cagacaccaactttgggacactttc

SEQ ID NO: 1328409 - DNA, 25 bp, Homo sapien
tggacatatattcagacaccaactt

SEQ ID NO: 1328410 - DNA, 25 bp, Homo sapien
tcttcacctgaagcggctactctag

SEQ ID NO: 1328411 - DNA, 25 bp, Homo sapien
acctgaagcggctactctagccacc

SEQ ID NO: 1328412 - DNA, 25 bp, Homo sapien
tgaagcggctactctagccaccacg

SEQ ID NO: 1328413 - DNA, 25 bp, Homo sapien
ggctactctagccaccacgctgatg

SEQ ID NO: 1328414 - DNA, 25 bp, Homo sapien
tagtccatagagtcgggcaccgtgt

SEQ ID NO: 1328415 - DNA, 25 bp, Homo sapien
aatagtccatagagtcgggcaccgt

SEQ ID NO: 1328416 - DNA, 25 bp, Homo sapien
caaaggaatagtccatagagtcggg

SEQ ID NO: 1328417 - DNA, 25 bp, Homo sapien
ggaatagtccatagagtcgggcacc

SEQ ID NO: 1328418 - DNA, 25 bp, Homo sapien
tatcatagtaagaatctcgacgtct

SEQ ID NO: 1328419 - DNA, 25 bp, Homo sapien
atcatagtaagaatctcgacgtctg

SEQ ID NO: 1328420 - DNA, 25 bp, Homo sapien
tcaaaggtccatatcaagaacatac

SEQ ID NO: 1328421 - DNA, 25 bp, Homo sapien
tcacgaagatctctgtctgttgtgt

SEQ ID NO: 1328422 - DNA, 25 bp, Homo sapien
ccaaacactctaaggcaagtgttgg

SEQ ID NO: 1328423 - DNA, 25 bp, Homo sapien
gatttgcccttctgccagtgtgtct

SEQ ID NO: 1328424 - DNA, 25 bp, Homo sapien
tctgttgtgtacaaactaaggccaa

SEQ ID NO: 1328425 - DNA, 25 bp, Homo sapien
aatgacttcggctccttcactgcca

SEQ ID NO: 1328426 - DNA, 25 bp, Homo sapien
gaatgacttcggctccttcactgcc

SEQ ID NO: 1328427 - DNA, 25 bp, Homo sapien
ggtgtatatgagctacttcgtctcc

SEQ ID NO: 1328428 - DNA, 25 bp, Homo sapien
tacttcgtctcctgtgagagtggta

SEQ ID NO: 1328429 - DNA, 25 bp, Homo sapien
cgtcgatgagaatgcctccttgaca

SEQ ID NO: 1328430 - DNA, 25 bp, Homo sapien
tgtgtaacgtcgatgagaatgcctc

SEQ ID NO: 1328431 - DNA, 25 bp, Homo sapien
ggatcaagtgtgtaacgtcgatgag

SEQ ID NO: 1328432 - DNA, 25 bp, Homo sapien
tcaagtgtgtaacgtcgatgagaat

SEQ ID NO: 1328433 - DNA, 25 bp, Homo sapien
taactttctgatccttaatactttc

SEQ ID NO: 1328434 - DNA, 25 bp, Homo sapien
ctgatccttaatactttccattagc

SEQ ID NO: 1328435 - DNA, 25 bp, Homo sapien
ctttctgatccttaatactttccat

SEQ ID NO: 1328436 - DNA, 25 bp, Homo sapien
ccccattcaattttaactttctgat

SEQ ID NO: 1328437 - DNA, 25 bp, Homo sapien
tgaacattaactatgcccttgaagt

SEQ ID NO: 1328438 - DNA, 25 bp, Homo sapien
agttgttctcctctacatcactcat

SEQ ID NO: 1328439 - DNA, 25 bp, Homo sapien
ttcttcatgaacattaactatgccc

SEQ ID NO: 1328440 - DNA, 25 bp, Homo sapien
actatgcccttgaagttgttctcct

SEQ ID NO: 1328441 - DNA, 25 bp, Homo sapien
atagcctgattgctgagaattgttt

SEQ ID NO: 1328442 - DNA, 25 bp, Homo sapien
tgttttacgttgatgtccctctgca

SEQ ID NO: 1328443 - DNA, 25 bp, Homo sapien
gcctgattgctgagaattgttttca

SEQ ID NO: 1328444 - DNA, 25 bp, Homo sapien
gggttccttcataatacctgtatgt

SEQ ID NO: 1328445 - DNA, 25 bp, Homo sapien
caattcttacatatctgtgccagct

SEQ ID NO: 1328446 - DNA, 25 bp, Homo sapien
tcagtgatacgggacagagtatgtg

SEQ ID NO: 1328447 - DNA, 25 bp, Homo sapien
tgctattaatttatttccgaggccc

SEQ ID NO: 1328448 - DNA, 25 bp, Homo sapien
ttacacttcaggcaaagatctggtc

SEQ ID NO: 1328449 - DNA, 25 bp, Homo sapien
tcaggctgcttgaaattgtttcacg

SEQ ID NO: 1328450 - DNA, 25 bp, Homo sapien
aacttcttgtataagttctggctcc

SEQ ID NO: 1328451 - DNA, 25 bp, Homo sapien
tttttatacagacaaggcctcgcag

SEQ ID NO: 1328452 - DNA, 25 bp, Homo sapien
cattctgattttaccagttgggtgc

SEQ ID NO: 1328453 - DNA, 25 bp, Homo sapien
cacagagtgcactaatattttacaa

SEQ ID NO: 1328454 - DNA, 25 bp, Homo sapien
tacaactcttgactacaaaacagaa

SEQ ID NO: 1328455 - DNA, 25 bp, Homo sapien
taaaatttacaactcttgactacaa

SEQ ID NO: 1328456 - DNA, 25 bp, Homo sapien
cagaaacatgccgttaacaaattgt

SEQ ID NO: 1328457 - DNA, 25 bp, Homo sapien
tgtcagtgaagcagagtaattgctc

SEQ ID NO: 1328458 - DNA, 25 bp, Homo sapien
tatgatcgtccctgtgaatagtcac

SEQ ID NO: 1328459 - DNA, 25 bp, Homo sapien
cagtggagcgattggctgactatga

SEQ ID NO: 1328460 - DNA, 25 bp, Homo sapien
tctaaagcaactagttaaagcctat

SEQ ID NO: 1328461 - DNA, 25 bp, Homo sapien
ggccccgttgtcatggaactcatct

SEQ ID NO: 1328462 - DNA, 25 bp, Homo sapien
ggttaagtggcttacccagtgcctc

SEQ ID NO: 1328463 - DNA, 25 bp, Homo sapien
gataagtgatcacccagaaaagagg

SEQ ID NO: 1328464 - DNA, 25 bp, Homo sapien
caagtggtcaggaggagtaaacaac

SEQ ID NO: 1328465 - DNA, 25 bp, Homo sapien
tcaggattgctggagatctgcccgt

SEQ ID NO: 1328466 - DNA, 25 bp, Homo sapien
tccagtttcggaagggcaactcagt

SEQ ID NO: 1328467 - DNA, 25 bp, Homo sapien
tgaatgctgatggaatacacccagg

SEQ ID NO: 1328468 - DNA, 25 bp, Homo sapien
tgaagtgaatcgaagactcaagggc

SEQ ID NO: 1328469 - DNA, 25 bp, Homo sapien
taatgacttgatatccatctgcccc

SEQ ID NO: 1328470 - DNA, 25 bp, Homo sapien
gaaagtgtcccgttaaattagcatg

SEQ ID NO: 1328471 - DNA, 25 bp, Homo sapien
ccagctttacaggttgcacttggta

SEQ ID NO: 1328472 - DNA, 25 bp, Homo sapien
tttccaattctagcgcattctccag

SEQ ID NO: 1328473 - DNA, 25 bp, Homo sapien
gcttatcctgccctagccctggaat

SEQ ID NO: 1328474 - DNA, 25 bp, Homo sapien
tgcagtattagtacagctccaagaa

SEQ ID NO: 1328475 - DNA, 25 bp, Homo sapien
aagaattccctggaagctagcgcag

SEQ ID NO: 1328476 - DNA, 25 bp, Homo sapien
ggagccctggcttcttttaatggga

SEQ ID NO: 1328477 - DNA, 25 bp, Homo sapien
caggaccgagccctggtaaccacta

SEQ ID NO: 1328478 - DNA, 25 bp, Homo sapien
cgagccctggtaaccactacctcca

SEQ ID NO: 1328479 - DNA, 25 bp, Homo sapien
tcaggaccgagccctggtaaccact

SEQ ID NO: 1328480 - DNA, 25 bp, Homo sapien
gagccctggtaaccactacctccaa

SEQ ID NO: 1328481 - DNA, 25 bp, Homo sapien
ggaaaacaaggcttcaaaatccaga

SEQ ID NO: 1328482 - DNA, 25 bp, Homo sapien
gcagctgcccttacttaagggacaa

SEQ ID NO: 1328483 - DNA, 25 bp, Homo sapien
aagtcttttaggagctgcccacaaa

SEQ ID NO: 1328484 - DNA, 25 bp, Homo sapien
caaagtcttttaggagctgcccaca

SEQ ID NO: 1328485 - DNA, 25 bp, Homo sapien
cgtaaccctcttaggaagcactggg

SEQ ID NO: 1328486 - DNA, 25 bp, Homo sapien
aatgatttgggttgtagctggctcc

SEQ ID NO: 1328487 - DNA, 25 bp, Homo sapien
tactaccagtgacgcatgcatgcct

SEQ ID NO: 1328488 - DNA, 25 bp, Homo sapien
ttgtctgggacaggctaccactggc

SEQ ID NO: 1328489 - DNA, 25 bp, Homo sapien
actcctctcctggtgctggccatcg

SEQ ID NO: 1328490 - DNA, 25 bp, Homo sapien
tgactcctctcctggtgctggccat

SEQ ID NO: 1328491 - DNA, 25 bp, Homo sapien
ctgactcctctcctggtgctggcca

SEQ ID NO: 1328492 - DNA, 25 bp, Homo sapien
ctcctctcctggtgctggccatcgg

SEQ ID NO: 1328493 - DNA, 25 bp, Homo sapien
ggtgcaaagcacaagaagtcagtct

SEQ ID NO: 1328494 - DNA, 25 bp, Homo sapien
tcccagttctactgaggaacatcag

SEQ ID NO: 1328495 - DNA, 25 bp, Homo sapien
tcatagatgagaaactcctaggttt

SEQ ID NO: 1328496 - DNA, 25 bp, Homo sapien
cagtctaaactgcagtgaaaacaca

SEQ ID NO: 1328497 - DNA, 25 bp, Homo sapien
ccagaaccagccagttctcagtgac

SEQ ID NO: 1328498 - DNA, 25 bp, Homo sapien
ttctcagtgaccatctgcacatcct

SEQ ID NO: 1328499 - DNA, 25 bp, Homo sapien
tccagaaccagccagttctcagtga

SEQ ID NO: 1328500 - DNA, 25 bp, Homo sapien
ctccagaaccagccagttctcagtg

SEQ ID NO: 1328501 - DNA, 25 bp, Homo sapien
ccccggtgggcttccttccatccag

SEQ ID NO: 1328502 - DNA, 25 bp, Homo sapien
cttcacctccagcttccccccggtg

SEQ ID NO: 1328503 - DNA, 25 bp, Homo sapien
ccggtgggcttccttccatccagga

SEQ ID NO: 1328504 - DNA, 25 bp, Homo sapien
cggtgggcttccttccatccaggac

SEQ ID NO: 1328505 - DNA, 25 bp, Homo sapien
tgtggaatccattgagttcatggaa

SEQ ID NO: 1328506 - DNA, 25 bp, Homo sapien
ctgtggaatccattgagttcatgga

SEQ ID NO: 1328507 - DNA, 25 bp, Homo sapien
tggaatccattgagttcatggaaac

SEQ ID NO: 1328508 - DNA, 25 bp, Homo sapien
gtggaatccattgagttcatggaaa

SEQ ID NO: 1328509 - DNA, 25 bp, Homo sapien
tcaggtgtgctgtgccaaccagctt

SEQ ID NO: 1328510 - DNA, 25 bp, Homo sapien
cagcttgtcgcttctgaagaaggac

SEQ ID NO: 1328511 - DNA, 25 bp, Homo sapien
tgtgccaaccagcttgtcgcttctg

SEQ ID NO: 1328512 - DNA, 25 bp, Homo sapien
cacaatttctctgatctcacactca

SEQ ID NO: 1328513 - DNA, 25 bp, Homo sapien
tggtttcggttgatgtttagtttga

SEQ ID NO: 1328514 - DNA, 25 bp, Homo sapien
gatcaccctcttgaagccccggtgg

SEQ ID NO: 1328515 - DNA, 25 bp, Homo sapien
gatgtttagtttgaagagttgatca

SEQ ID NO: 1328516 - DNA, 25 bp, Homo sapien
tgcctttgctctggatcaccctctt

SEQ ID NO: 1328517 - DNA, 25 bp, Homo sapien
aaggaggggcttggctctcgggatt

SEQ ID NO: 1328518 - DNA, 25 bp, Homo sapien
gggagaaagcaaggaggggcttggc

SEQ ID NO: 1328519 - DNA, 25 bp, Homo sapien
ggaggggcttggctctcgggatttc

SEQ ID NO: 1328520 - DNA, 25 bp, Homo sapien
ctggcaaagggggagaaagcaagga

SEQ ID NO: 1328521 - DNA, 25 bp, Homo sapien
gttcttcaccacagctgttttgctt

SEQ ID NO: 1328522 - DNA, 25 bp, Homo sapien
gtttgtgttcttcaccacagctgtt

SEQ ID NO: 1328523 - DNA, 25 bp, Homo sapien
ttgtgttcttcaccacagctgtttt

SEQ ID NO: 1328524 - DNA, 25 bp, Homo sapien
tcttcaccacagctgttttgctttt

SEQ ID NO: 1328525 - DNA, 25 bp, Homo sapien
gtcaggacagcgtataaacaaagag

SEQ ID NO: 1328526 - DNA, 25 bp, Homo sapien
agaagtcaggacagcgtataaacaa

SEQ ID NO: 1328527 - DNA, 25 bp, Homo sapien
aatgcaaggcgggtttcagaggatc

SEQ ID NO: 1328528 - DNA, 25 bp, Homo sapien
cctggaatgcaaggcgggtttcaga

SEQ ID NO: 1328529 - DNA, 25 bp, Homo sapien
agcatccaggtcatcgggagtcacc

SEQ ID NO: 1328530 - DNA, 25 bp, Homo sapien
ggtagtgaaactcaaaccgcacaaa

SEQ ID NO: 1328531 - DNA, 25 bp, Homo sapien
aagcatccaggtcatcgggagtcac

SEQ ID NO: 1328532 - DNA, 25 bp, Homo sapien
ttagggtagtgaaactcaaaccgca

SEQ ID NO: 1328533 - DNA, 25 bp, Homo sapien
gggaggttcattccccggacaatga

SEQ ID NO: 1328534 - DNA, 25 bp, Homo sapien
gttcattccccggacaatgatcaga

SEQ ID NO: 1328535 - DNA, 25 bp, Homo sapien
tccccggacaatgatcagatgcatt

SEQ ID NO: 1328536 - DNA, 25 bp, Homo sapien
gctgggaggttcattccccggacaa

SEQ ID NO: 1328537 - DNA, 25 bp, Homo sapien
tgtttcttgcggtcctgagcaagct

SEQ ID NO: 1328538 - DNA, 25 bp, Homo sapien
tcttcaactcaaagtggtgggtggg

SEQ ID NO: 1328539 - DNA, 25 bp, Homo sapien
cagctgtttcttgcggtcctgagca

SEQ ID NO: 1328540 - DNA, 25 bp, Homo sapien
cttcaactcaaagtggtgggtggga

SEQ ID NO: 1328541 - DNA, 25 bp, Homo sapien
atgaactgcttggagaacagcaggc

SEQ ID NO: 1328542 - DNA, 25 bp, Homo sapien
cgggtggtctcagccacgttgccct

SEQ ID NO: 1328543 - DNA, 25 bp, Homo sapien
cgttgccctggtgcatgaactgctt

SEQ ID NO: 1328544 - DNA, 25 bp, Homo sapien
gccacgttgccctggtgcatgaact

SEQ ID NO: 1328545 - DNA, 25 bp, Homo sapien
agtgactcccgagcccagagcagga

SEQ ID NO: 1328546 - DNA, 25 bp, Homo sapien
agagtgactcccgagcccagagcag

SEQ ID NO: 1328547 - DNA, 25 bp, Homo sapien
cttggttggcattcaaggctagact

SEQ ID NO: 1328548 - DNA, 25 bp, Homo sapien
cattcaaggctagacttctcaaagc

SEQ ID NO: 1328549 - DNA, 25 bp, Homo sapien
cacaatgttctttccctcttctctg

SEQ ID NO: 1328550 - DNA, 25 bp, Homo sapien
aatgttctttccctcttctctgttg

SEQ ID NO: 1328551 - DNA, 25 bp, Homo sapien
tgttctttccctcttctctgttgtt

SEQ ID NO: 1328552 - DNA, 25 bp, Homo sapien
caatgttctttccctcttctctgtt

SEQ ID NO: 1328553 - DNA, 25 bp, Homo sapien
ttctgggagagtcgcaggtcctcat

SEQ ID NO: 1328554 - DNA, 25 bp, Homo sapien
ccgccttctgggagagtcgcaggtc

SEQ ID NO: 1328555 - DNA, 25 bp, Homo sapien
cctcctcatccgtcaagggcgaagg

SEQ ID NO: 1328556 - DNA, 25 bp, Homo sapien
gaggatgaagtcaccctcctcatcc

SEQ ID NO: 1328557 - DNA, 25 bp, Homo sapien
cacaaggcccctcgggccccaagag

SEQ ID NO: 1328558 - DNA, 25 bp, Homo sapien
cccctcgggccccaagagtcagatt

SEQ ID NO: 1328559 - DNA, 25 bp, Homo sapien
tcacaaggcccctcgggccccaaga

SEQ ID NO: 1328560 - DNA, 25 bp, Homo sapien
tcgggccccaagagtcagattactc

SEQ ID NO: 1328561 - DNA, 25 bp, Homo sapien
gatcaacaggtctgccagatcgggc

SEQ ID NO: 1328562 - DNA, 25 bp, Homo sapien
caagccatttggctacccgcagata

SEQ ID NO: 1328563 - DNA, 25 bp, Homo sapien
gcctggatgatctgagcctcaagcc

SEQ ID NO: 1328564 - DNA, 25 bp, Homo sapien
gatactgcagtttccgtgcctccag

SEQ ID NO: 1328565 - DNA, 25 bp, Homo sapien
ggccgtgcaggtttcttggccactg

SEQ ID NO: 1328566 - DNA, 25 bp, Homo sapien
gactcggtgactccttagaacttga

SEQ ID NO: 1328567 - DNA, 25 bp, Homo sapien
gcaggcgctgggatgaagggactgt

SEQ ID NO: 1328568 - DNA, 25 bp, Homo sapien
ggatgaagggactgtgggccgtgca

SEQ ID NO: 1328569 - DNA, 25 bp, Homo sapien
tgtgttccctagcatagtcatggcg

SEQ ID NO: 1328570 - DNA, 25 bp, Homo sapien
tgggtcctaaaagatctgagagcta

SEQ ID NO: 1328571 - DNA, 25 bp, Homo sapien
tgggctgtcttcctaacactgtact

SEQ ID NO: 1328572 - DNA, 25 bp, Homo sapien
gtactacatcgctgtgtgacctgag

SEQ ID NO: 1328573 - DNA, 25 bp, Homo sapien
tgcagctgccaatgtcgctgccact

SEQ ID NO: 1328574 - DNA, 25 bp, Homo sapien
ctcgtcctcgtctttatcagccggg

SEQ ID NO: 1328575 - DNA, 25 bp, Homo sapien
cctcaacacccatagtggactccag

SEQ ID NO: 1328576 - DNA, 25 bp, Homo sapien
agctgccaatgtcgctgccactgcg

SEQ ID NO: 1328577 - DNA, 25 bp, Homo sapien
ggatggatggctccacagaggggag

SEQ ID NO: 1328578 - DNA, 25 bp, Homo sapien
aggcagacgcatgagaagtgggaat

SEQ ID NO: 1328579 - DNA, 25 bp, Homo sapien
gagaagcacaaagctacccggggcc

SEQ ID NO: 1328580 - DNA, 25 bp, Homo sapien
acagagcccctaggccatgccccac

SEQ ID NO: 1328581 - DNA, 25 bp, Homo sapien
caaagttgactttccgtcctgctcg

SEQ ID NO: 1328582 - DNA, 25 bp, Homo sapien
tcctgctcggtgtgctcgaatagca

SEQ ID NO: 1328583 - DNA, 25 bp, Homo sapien
tttccgtcctgctcggtgtgctcga

SEQ ID NO: 1328584 - DNA, 25 bp, Homo sapien
ggtgtgctcgaatagcatcttgata

SEQ ID NO: 1328585 - DNA, 25 bp, Homo sapien
catgacacacagtggggcaaggaga

SEQ ID NO: 1328586 - DNA, 25 bp, Homo sapien
gcccaacatgacacacagtggggca

SEQ ID NO: 1328587 - DNA, 25 bp, Homo sapien
ggagagggagactggtgggaagaca

SEQ ID NO: 1328588 - DNA, 25 bp, Homo sapien
gcctgtggtcggcagcagcccacag

SEQ ID NO: 1328589 - DNA, 25 bp, Homo sapien
tcatgcatccgagccttgcgctcgt

SEQ ID NO: 1328590 - DNA, 25 bp, Homo sapien
cttggcaatgcgctcatgcatccga

SEQ ID NO: 1328591 - DNA, 25 bp, Homo sapien
tggatgcccgcctcgcggtacttgt

SEQ ID NO: 1328592 - DNA, 25 bp, Homo sapien
tgcgctcatgcatccgagccttgcg

SEQ ID NO: 1328593 - DNA, 25 bp, Homo sapien
tgctgggacgtcaggggccatcact

SEQ ID NO: 1328594 - DNA, 25 bp, Homo sapien
ggacgtcaggggccatcactggctg

SEQ ID NO: 1328595 - DNA, 25 bp, Homo sapien
acgtcaggggccatcactggctgca

SEQ ID NO: 1328596 - DNA, 25 bp, Homo sapien
tgggacgtcaggggccatcactggc

SEQ ID NO: 1328597 - DNA, 25 bp, Homo sapien
agcctgagaagcctgctggggcttc

SEQ ID NO: 1328598 - DNA, 25 bp, Homo sapien
gcatggcactcagatccacgggctg

SEQ ID NO: 1328599 - DNA, 25 bp, Homo sapien
gggcatggcactcagatccacgggc

SEQ ID NO: 1328600 - DNA, 25 bp, Homo sapien
atggcactcagatccacgggctgcc

SEQ ID NO: 1328601 - DNA, 25 bp, Homo sapien
tgccgggggcatggcactcagatcc

SEQ ID NO: 1328602 - DNA, 25 bp, Homo sapien
gagctctcgggcacggtctagctct

SEQ ID NO: 1328603 - DNA, 25 bp, Homo sapien
tctccagcccgcttggcactgaggg

SEQ ID NO: 1328604 - DNA, 25 bp, Homo sapien
tctcgggcacggtctagctctccag

SEQ ID NO: 1328605 - DNA, 25 bp, Homo sapien
ctttgtactctctctgtcgggatga

SEQ ID NO: 1328606 - DNA, 25 bp, Homo sapien
ctggtctcaggttgggaggggttgt

SEQ ID NO: 1328607 - DNA, 25 bp, Homo sapien
ggaggctggtctcaggttgggaggg

SEQ ID NO: 1328608 - DNA, 25 bp, Homo sapien
ctgggcagaaatgccagggaggctg

SEQ ID NO: 1328609 - DNA, 25 bp, Homo sapien
agggaggctggtctcaggttgggag

SEQ ID NO: 1328610 - DNA, 25 bp, Homo sapien
tcctcacagaggctagctgcgactc

SEQ ID NO: 1328611 - DNA, 25 bp, Homo sapien
atctcatcctcattgatctttctgc

SEQ ID NO: 1328612 - DNA, 25 bp, Homo sapien
cacagaggctagctgcgactccaag

SEQ ID NO: 1328613 - DNA, 25 bp, Homo sapien
ctttcctaaggccactggaggtggg

SEQ ID NO: 1328614 - DNA, 25 bp, Homo sapien
agcgtgtagcccctgagatgctccg

SEQ ID NO: 1328615 - DNA, 25 bp, Homo sapien
ggtagttgtgaatccgttcctccag

SEQ ID NO: 1328616 - DNA, 25 bp, Homo sapien
gcactggccgcagcctctcggtagt

SEQ ID NO: 1328617 - DNA, 25 bp, Homo sapien
tgaatccgttcctccagcaaagcgt

SEQ ID NO: 1328618 - DNA, 25 bp, Homo sapien
cacacgtgttacgtctgggcgcaca

SEQ ID NO: 1328619 - DNA, 25 bp, Homo sapien
tctgcggaagctgccctagaagatg

SEQ ID NO: 1328620 - DNA, 25 bp, Homo sapien
tacagagccccacttggtggaagcc

SEQ ID NO: 1328621 - DNA, 25 bp, Homo sapien
gactccaggagaaagaagagcctaa

SEQ ID NO: 1328622 - DNA, 25 bp, Homo sapien
tcgtccacacctaagacctcctgca

SEQ ID NO: 1328623 - DNA, 25 bp, Homo sapien
tcatcaccatccaggggctcagtct

SEQ ID NO: 1328624 - DNA, 25 bp, Homo sapien
ggttcagtgtcttctaggccgttct

SEQ ID NO: 1328625 - DNA, 25 bp, Homo sapien
gaagctgtcaggacggctgtctgca

SEQ ID NO: 1328626 - DNA, 25 bp, Homo sapien
ctgcatcttcctccagcccttcctc

SEQ ID NO: 1328627 - DNA, 25 bp, Homo sapien
catcttcctccagcccttcctcctc

SEQ ID NO: 1328628 - DNA, 25 bp, Homo sapien
tgcatcttcctccagcccttcctcc

SEQ ID NO: 1328629 - DNA, 25 bp, Homo sapien
ttcctccagcccttcctcctcctcc

SEQ ID NO: 1328630 - DNA, 25 bp, Homo sapien
tctgccgccaacttctcgatgtggg

SEQ ID NO: 1328631 - DNA, 25 bp, Homo sapien
aacttctcgatgtgggccatgggca

SEQ ID NO: 1328632 - DNA, 25 bp, Homo sapien
atcccgcatacagtctgccgccaac

SEQ ID NO: 1328633 - DNA, 25 bp, Homo sapien
acagtctgccgccaacttctcgatg

SEQ ID NO: 1328634 - DNA, 25 bp, Homo sapien
cctgacatagacatggccatccact

SEQ ID NO: 1328635 - DNA, 25 bp, Homo sapien
ctgcacctctgcctacggtagcctg

SEQ ID NO: 1328636 - DNA, 25 bp, Homo sapien
acctctgcctacggtagcctgacat

SEQ ID NO: 1328637 - DNA, 25 bp, Homo sapien
gcctgacatagacatggccatccac

SEQ ID NO: 1328638 - DNA, 25 bp, Homo sapien
gtgggagtgcggcagatgggtattg

SEQ ID NO: 1328639 - DNA, 25 bp, Homo sapien
tggtgggagtgcggcagatgggtat

SEQ ID NO: 1328640 - DNA, 25 bp, Homo sapien
cttggtgggagtgcggcagatgggt

SEQ ID NO: 1328641 - DNA, 25 bp, Homo sapien
ctcttggtgggagtgcggcagatgg

SEQ ID NO: 1328642 - DNA, 25 bp, Homo sapien
ggccaaactccataaagagccccat

SEQ ID NO: 1328643 - DNA, 25 bp, Homo sapien
ttcttgcctgtggtttgtgcttccc

SEQ ID NO: 1328644 - DNA, 25 bp, Homo sapien
gggccaaactccataaagagcccca

SEQ ID NO: 1328645 - DNA, 25 bp, Homo sapien
ttgcctgtggtttgtgcttcccctg

SEQ ID NO: 1328646 - DNA, 25 bp, Homo sapien
agagccagacttggggctctccaag

SEQ ID NO: 1328647 - DNA, 25 bp, Homo sapien
caacaagcagggtagggtccagctc

SEQ ID NO: 1328648 - DNA, 25 bp, Homo sapien
tctccaagtcccaatcagtggctcc

SEQ ID NO: 1328649 - DNA, 25 bp, Homo sapien
aaccacacaacaagcagggtagggt

SEQ ID NO: 1328650 - DNA, 25 bp, Homo sapien
ccagtagcctagaaggctaagttcc

SEQ ID NO: 1328651 - DNA, 25 bp, Homo sapien
cagtagcctagaaggctaagttcca

SEQ ID NO: 1328652 - DNA, 25 bp, Homo sapien
tagcctagaaggctaagttccatac

SEQ ID NO: 1328653 - DNA, 25 bp, Homo sapien
agtagcctagaaggctaagttccat

SEQ ID NO: 1328654 - DNA, 25 bp, Homo sapien
ctgagggcccttccgaggtcttggc

SEQ ID NO: 1328655 - DNA, 25 bp, Homo sapien
aggtcttggccctggcatcatggca

SEQ ID NO: 1328656 - DNA, 25 bp, Homo sapien
tgcttggcagcggccaccccttggc

SEQ ID NO: 1328657 - DNA, 25 bp, Homo sapien
ctctggcctgagggcccttccgagg

SEQ ID NO: 1328658 - DNA, 25 bp, Homo sapien
cgcggtgaatccgagccaaaccccg

SEQ ID NO: 1328659 - DNA, 25 bp, Homo sapien
cgagccaaaccccggccttgtctca

SEQ ID NO: 1328660 - DNA, 25 bp, Homo sapien
ctcgcggtgaatccgagccaaaccc

SEQ ID NO: 1328661 - DNA, 25 bp, Homo sapien
gagccaaaccccggccttgtctcac

SEQ ID NO: 1328662 - DNA, 25 bp, Homo sapien
gccctgggccgcagcggtagcgaca

SEQ ID NO: 1328663 - DNA, 25 bp, Homo sapien
cagcggtagcgacaggaagcgccag

SEQ ID NO: 1328664 - DNA, 25 bp, Homo sapien
aggtggctcgcgcgcaacacgtgac

SEQ ID NO: 1328665 - DNA, 25 bp, Homo sapien
aacacgtgaccccactggccggcgg

SEQ ID NO: 1328666 - DNA, 25 bp, Homo sapien
taagatagacacgtacctgaacgcc

SEQ ID NO: 1328667 - DNA, 25 bp, Homo sapien
cctgaagaccatccggaacggcgtt

SEQ ID NO: 1328668 - DNA, 25 bp, Homo sapien
ggaacggcgttcataagatagacac

SEQ ID NO: 1328669 - DNA, 25 bp, Homo sapien
acacgtacctgaacgccgccttgga

SEQ ID NO: 1328670 - DNA, 25 bp, Homo sapien
aaaccctccccaccgaatggatgtg

SEQ ID NO: 1328671 - DNA, 25 bp, Homo sapien
taaatgcagtgacggatctaagcct

SEQ ID NO: 1328672 - DNA, 25 bp, Homo sapien
gcgaggacggtctctgccagtataa

SEQ ID NO: 1328673 - DNA, 25 bp, Homo sapien
gatgtggctctccactgtttggcgt

SEQ ID NO: 1328674 - DNA, 25 bp, Homo sapien
gtttatatagtgcatttagctctca

SEQ ID NO: 1328675 - DNA, 25 bp, Homo sapien
ccaggacccagtcaaggtttatata

SEQ ID NO: 1328676 - DNA, 25 bp, Homo sapien
ctcctttggtgtagaatagttcctc

SEQ ID NO: 1328677 - DNA, 25 bp, Homo sapien
cattatgaatctcctaagaacagca

SEQ ID NO: 1328678 - DNA, 25 bp, Homo sapien
tagagattacttatgatttatatta

SEQ ID NO: 1328679 - DNA, 25 bp, Homo sapien
ctagagattacttatgatttatatt

SEQ ID NO: 1328680 - DNA, 25 bp, Homo sapien
gctagagattacttatgatttatat

SEQ ID NO: 1328681 - DNA, 25 bp, Homo sapien
ggctagagattacttatgatttata

SEQ ID NO: 1328682 - DNA, 25 bp, Homo sapien
tgacatacagtgaaaagtcctcctc

SEQ ID NO: 1328683 - DNA, 25 bp, Homo sapien
ttccagaggtaatcagtgtaaccag

SEQ ID NO: 1328684 - DNA, 25 bp, Homo sapien
gaaacttaagacagataatgacata

SEQ ID NO: 1328685 - DNA, 25 bp, Homo sapien
tgcatactctcccagaactatttta

SEQ ID NO: 1328686 - DNA, 25 bp, Homo sapien
ttataatgtaataacttcacaaaca

SEQ ID NO: 1328687 - DNA, 25 bp, Homo sapien
tataatgtaataacttcacaaacac

SEQ ID NO: 1328688 - DNA, 25 bp, Homo sapien
attataatgtaataacttcacaaac

SEQ ID NO: 1328689 - DNA, 25 bp, Homo sapien
gctttgtagactagcttggcaacat

SEQ ID NO: 1328690 - DNA, 25 bp, Homo sapien
cagatgctttgtagactagcttggc

SEQ ID NO: 1328691 - DNA, 25 bp, Homo sapien
aaatcagatgctttgtagactagct

SEQ ID NO: 1328692 - DNA, 25 bp, Homo sapien
ttccaaaatcagatgctttgtagac

SEQ ID NO: 1328693 - DNA, 25 bp, Homo sapien
gcacccgaaggagcagatcgttcct

SEQ ID NO: 1328694 - DNA, 25 bp, Homo sapien
gtctttcagcgcatacagcacatca

SEQ ID NO: 1328695 - DNA, 25 bp, Homo sapien
gctccacaagcaggaggcgacagga

SEQ ID NO: 1328696 - DNA, 25 bp, Homo sapien
catcctggctgacgttgagccgcac

SEQ ID NO: 1328697 - DNA, 25 bp, Homo sapien
ctgttgaaacgtggcttcctccagt

SEQ ID NO: 1328698 - DNA, 25 bp, Homo sapien
tgcgaggatggctctcaggaagctc

SEQ ID NO: 1328699 - DNA, 25 bp, Homo sapien
tgatcgacggaactctgcgaggatg

SEQ ID NO: 1328700 - DNA, 25 bp, Homo sapien
ctccagtcctgatcgacggaactct

SEQ ID NO: 1328701 - DNA, 25 bp, Homo sapien
gcaccgtcgtgcatctccagacagt

SEQ ID NO: 1328702 - DNA, 25 bp, Homo sapien
ctgggagaactcacagatctctgtg

SEQ ID NO: 1328703 - DNA, 25 bp, Homo sapien
gatggccgtgatgtatgatgatgaa

SEQ ID NO: 1328704 - DNA, 25 bp, Homo sapien
tctgtggcacgcctgcagatgtcca

SEQ ID NO: 1328705 - DNA, 25 bp, Homo sapien
tgagaggacaaccaagacaactgtg

SEQ ID NO: 1328706 - DNA, 25 bp, Homo sapien
tgtggaaagtctctaacgatgcaag

SEQ ID NO: 1328707 - DNA, 25 bp, Homo sapien
tatgcatgccaaactggaagacctc

SEQ ID NO: 1328708 - DNA, 25 bp, Homo sapien
ggaagacctcttctgtacctgacac

SEQ ID NO: 1328709 - DNA, 25 bp, Homo sapien
gctggctatatgtatagggctggaa

SEQ ID NO: 1328710 - DNA, 25 bp, Homo sapien
ttgagccgggaccttaggatctgct

SEQ ID NO: 1328711 - DNA, 25 bp, Homo sapien
atatgtatagggctggaagcacatc

SEQ ID NO: 1328712 - DNA, 25 bp, Homo sapien
cgggaccttaggatctgctgcagct

SEQ ID NO: 1328713 - DNA, 25 bp, Homo sapien
taattaaacctccatggtttggtgc

SEQ ID NO: 1328714 - DNA, 25 bp, Homo sapien
gcagtttaaaagtccacgagcagca

SEQ ID NO: 1328715 - DNA, 25 bp, Homo sapien
tccaacatagaaactacaagcattg

SEQ ID NO: 1328716 - DNA, 25 bp, Homo sapien
catgcaatggttacatattccaaca

SEQ ID NO: 1328717 - DNA, 25 bp, Homo sapien
tgagtgggccagtcaaagagattgt

SEQ ID NO: 1328718 - DNA, 25 bp, Homo sapien
cattatgtcttgtttgtgagtccac

SEQ ID NO: 1328719 - DNA, 25 bp, Homo sapien
tggacacccggttcatcatgattcg

SEQ ID NO: 1328720 - DNA, 25 bp, Homo sapien
caagccgggcctccttatgagtggg

SEQ ID NO: 1328721 - DNA, 25 bp, Homo sapien
ggtgcagaattgctttgccagcagt

SEQ ID NO: 1328722 - DNA, 25 bp, Homo sapien
cctgaggtgaccctcgggtgcagaa

SEQ ID NO: 1328723 - DNA, 25 bp, Homo sapien
gcatggttggctgttgctttttggc

SEQ ID NO: 1328724 - DNA, 25 bp, Homo sapien
gcagttctgccgcatggttggctgt

SEQ ID NO: 1328725 - DNA, 25 bp, Homo sapien
ctcaatgtattgaaagggaggaaca

SEQ ID NO: 1328726 - DNA, 25 bp, Homo sapien
gaacatcattggcttgggctgcctg

SEQ ID NO: 1328727 - DNA, 25 bp, Homo sapien
cagggacaccggagatgtacatgca

SEQ ID NO: 1328728 - DNA, 25 bp, Homo sapien
gctgcaggcagcgtatcacttcatg

SEQ ID NO: 1328729 - DNA, 25 bp, Homo sapien
cctccggtatggtcaaggagtttgc

SEQ ID NO: 1328730 - DNA, 25 bp, Homo sapien
ctccggtatggtcaaggagtttgct

SEQ ID NO: 1328731 - DNA, 25 bp, Homo sapien
gggaagagactcaggtacagcagaa

SEQ ID NO: 1328732 - DNA, 25 bp, Homo sapien
ctgttcccgacagggaagagactca

SEQ ID NO: 1328733 - DNA, 25 bp, Homo sapien
gagactcaggtacagcagaaacatg

SEQ ID NO: 1328734 - DNA, 25 bp, Homo sapien
ctcaggtacagcagaaacatgcagc

SEQ ID NO: 1328735 - DNA, 25 bp, Homo sapien
ctgggcagccaggcttcgactacgg

SEQ ID NO: 1328736 - DNA, 25 bp, Homo sapien
gggcagccaggcttcgactacggat

SEQ ID NO: 1328737 - DNA, 25 bp, Homo sapien
tgggcagccaggcttcgactacgga

SEQ ID NO: 1328738 - DNA, 25 bp, Homo sapien
gcggcacaacgtggcgttctaggct

SEQ ID NO: 1328739 - DNA, 25 bp, Homo sapien
aggagcggcacaacgtggcgttcta

SEQ ID NO: 1328740 - DNA, 25 bp, Homo sapien
ctgaggagcggcacaacgtggcgtt

SEQ ID NO: 1328741 - DNA, 25 bp, Homo sapien
cacaacgtggcgttctaggcttgag

SEQ ID NO: 1328742 - DNA, 25 bp, Homo sapien
accagcaaatgtgatttgtgctgat

SEQ ID NO: 1328743 - DNA, 25 bp, Homo sapien
acaccagcaaatgtgatttgtgctg

SEQ ID NO: 1328744 - DNA, 25 bp, Homo sapien
caccagcaaatgtgatttgtgctga

SEQ ID NO: 1328745 - DNA, 25 bp, Homo sapien
ggaagttcagctcttggccatctga

SEQ ID NO: 1328746 - DNA, 25 bp, Homo sapien
aagttcagctcttggccatctgatt

SEQ ID NO: 1328747 - DNA, 25 bp, Homo sapien
ccctcaggaagttcagctcttggcc

SEQ ID NO: 1328748 - DNA, 25 bp, Homo sapien
ttccctcaggaagttcagctcttgg

SEQ ID NO: 1328749 - DNA, 25 bp, Homo sapien
cttcgtgagggtatgtaaggatgac

SEQ ID NO: 1328750 - DNA, 25 bp, Homo sapien
cgcaggttcctggacacagttctgg

SEQ ID NO: 1328751 - DNA, 25 bp, Homo sapien
tcttcgtcactgctagagtctgaaa

SEQ ID NO: 1328752 - DNA, 25 bp, Homo sapien
gacttcaaggaagatcgcaggttcc

SEQ ID NO: 1328753 - DNA, 25 bp, Homo sapien
cgaagctgctgcctaatccgattca

SEQ ID NO: 1328754 - DNA, 25 bp, Homo sapien
gctgcctaatccgattcatagtcaa

SEQ ID NO: 1328755 - DNA, 25 bp, Homo sapien
taatccgattcatagtcaagacaga

SEQ ID NO: 1328756 - DNA, 25 bp, Homo sapien
gattcatagtcaagacagaactctt

SEQ ID NO: 1328757 - DNA, 25 bp, Homo sapien
ctgcggatacgatggggagtagagg

SEQ ID NO: 1328758 - DNA, 25 bp, Homo sapien
atggggagtagaggtcgcttcattc

SEQ ID NO: 1328759 - DNA, 25 bp, Homo sapien
tacgatggggagtagaggtcgcttc

SEQ ID NO: 1328760 - DNA, 25 bp, Homo sapien
agtagaggtcgcttcattctgggct

SEQ ID NO: 1328761 - DNA, 25 bp, Homo sapien
caatgatccccaaataacagctcgg

SEQ ID NO: 1328762 - DNA, 25 bp, Homo sapien
caaatacagattcctagggccagtg

SEQ ID NO: 1328763 - DNA, 25 bp, Homo sapien
gctcggtatactggaaccatctgaa

SEQ ID NO: 1328764 - DNA, 25 bp, Homo sapien
caatttgctctgtgggtaatgtccc

SEQ ID NO: 1328765 - DNA, 25 bp, Homo sapien
tcctcagtataagagagtccagtct

SEQ ID NO: 1328766 - DNA, 25 bp, Homo sapien
gattatgcgatgttcaggtgaagcc

SEQ ID NO: 1328767 - DNA, 25 bp, Homo sapien
ggatggcaccactgaagatctctgt

SEQ ID NO: 1328768 - DNA, 25 bp, Homo sapien
gaagctgcaattcgggttctcagga

SEQ ID NO: 1328769 - DNA, 25 bp, Homo sapien
tggagacaaggtttgaagtttatca

SEQ ID NO: 1328770 - DNA, 25 bp, Homo sapien
ttatcaggctgagatctcttagaag

SEQ ID NO: 1328771 - DNA, 25 bp, Homo sapien
tagaaggtgaggtgatctccgagaa

SEQ ID NO: 1328772 - DNA, 25 bp, Homo sapien
ttgaagtttatcaggctgagatctc

SEQ ID NO: 1328773 - DNA, 25 bp, Homo sapien
caaggaggcacatgaagtctgctgg

SEQ ID NO: 1328774 - DNA, 25 bp, Homo sapien
ctgggacatctgagggttacctaag

SEQ ID NO: 1328775 - DNA, 25 bp, Homo sapien
tgggacatctgagggttacctaagt

SEQ ID NO: 1328776 - DNA, 25 bp, Homo sapien
ctggagaatccaaggaggcacatga

SEQ ID NO: 1328777 - DNA, 25 bp, Homo sapien
gcggagtgccttgattcaatccttt

SEQ ID NO: 1328778 - DNA, 25 bp, Homo sapien
atttggaggcggagtgccttgattc

SEQ ID NO: 1328779 - DNA, 25 bp, Homo sapien
gagtttggcgagatttggaggcgga

SEQ ID NO: 1328780 - DNA, 25 bp, Homo sapien
gaggatgggtaggagtttggcgaga

SEQ ID NO: 1328781 - DNA, 25 bp, Homo sapien
gattcgtcggtaccacatcctttgg

SEQ ID NO: 1328782 - DNA, 25 bp, Homo sapien
tcttggctctcacgggtttctggca

SEQ ID NO: 1328783 - DNA, 25 bp, Homo sapien
cattccaggatagtttcacaaagag

SEQ ID NO: 1328784 - DNA, 25 bp, Homo sapien
ggcacttggctgcactctcttgtgg

SEQ ID NO: 1328785 - DNA, 25 bp, Homo sapien
caaatgccgtttacaggcagggact

SEQ ID NO: 1328786 - DNA, 25 bp, Homo sapien
cacaggccgggtaatcataccagaa

SEQ ID NO: 1328787 - DNA, 25 bp, Homo sapien
accagaatatttcctgtgcaccagg

SEQ ID NO: 1328788 - DNA, 25 bp, Homo sapien
gaatcggacaaaccactgtactcga

SEQ ID NO: 1328789 - DNA, 25 bp, Homo sapien
cagcaatagctccaaccgaaagaac

SEQ ID NO: 1328790 - DNA, 25 bp, Homo sapien
taaagtcatccaatggagcaccaag

SEQ ID NO: 1328791 - DNA, 25 bp, Homo sapien
ttccctgcttagctttcttcagaga

SEQ ID NO: 1328792 - DNA, 25 bp, Homo sapien
gagaaagactaaagtcatccaatgg

SEQ ID NO: 1328793 - DNA, 25 bp, Homo sapien
catacgggttttcatcatcatcccc

SEQ ID NO: 1328794 - DNA, 25 bp, Homo sapien
ttcaatcaacacaaactgtccaatc

SEQ ID NO: 1328795 - DNA, 25 bp, Homo sapien
gcaacatacgggttttcatcatcat

SEQ ID NO: 1328796 - DNA, 25 bp, Homo sapien
caatttagcaacatacgggttttca

SEQ ID NO: 1328797 - DNA, 25 bp, Homo sapien
aacaaccttctgttttcacacacat

SEQ ID NO: 1328798 - DNA, 25 bp, Homo sapien
caaccttctgttttcacacacattt

SEQ ID NO: 1328799 - DNA, 25 bp, Homo sapien
accttctgttttcacacacatttct

SEQ ID NO: 1328800 - DNA, 25 bp, Homo sapien
tcggtggaacaaccttctgttttca

SEQ ID NO: 1328801 - DNA, 25 bp, Homo sapien
ttttcgatccaacaagggcctgcca

SEQ ID NO: 1328802 - DNA, 25 bp, Homo sapien
ggtagtgcagttttcgatccaacaa

SEQ ID NO: 1328803 - DNA, 25 bp, Homo sapien
tgcagttttcgatccaacaagggcc

SEQ ID NO: 1328804 - DNA, 25 bp, Homo sapien
ctataggtttggtagtgcagttttc

SEQ ID NO: 1328805 - DNA, 25 bp, Homo sapien
ctgtggaagagtccaaactctgagt

SEQ ID NO: 1328806 - DNA, 25 bp, Homo sapien
aagagtccaaactctgagttaccat

SEQ ID NO: 1328807 - DNA, 25 bp, Homo sapien
tggaagagtccaaactctgagttac

SEQ ID NO: 1328808 - DNA, 25 bp, Homo sapien
tgtggaagagtccaaactctgagtt

SEQ ID NO: 1328809 - DNA, 25 bp, Homo sapien
cgggccgaaagccaggaccaaagcg

SEQ ID NO: 1328810 - DNA, 25 bp, Homo sapien
aaaacttcgcgccaatcggcgtggc

SEQ ID NO: 1328811 - DNA, 25 bp, Homo sapien
gctccttctacaactacgggccgaa

SEQ ID NO: 1328812 - DNA, 25 bp, Homo sapien
gaccaaagcgtgtgtctcactagaa

SEQ ID NO: 1328813 - DNA, 25 bp, Homo sapien
tctacctccacaattgcagctttct

SEQ ID NO: 1328814 - DNA, 25 bp, Homo sapien
cccacagccataaatggtagcatgg

SEQ ID NO: 1328815 - DNA, 25 bp, Homo sapien
aatatgtatgatgttcccacagcca

SEQ ID NO: 1328816 - DNA, 25 bp, Homo sapien
ggtagcatgggaacttgaactcagg

SEQ ID NO: 1328817 - DNA, 25 bp, Homo sapien
gcctgggcgacagagcaagactcca

SEQ ID NO: 1328818 - DNA, 25 bp, Homo sapien
agccgagatcacgccgctgtattcc

SEQ ID NO: 1328819 - DNA, 25 bp, Homo sapien
ccgagatcacgccgctgtattccag

SEQ ID NO: 1328820 - DNA, 25 bp, Homo sapien
ttgaaccaggaggcggagattgtag

SEQ ID NO: 1328821 - DNA, 25 bp, Homo sapien
tccagtgcgccaacctaggctttct

SEQ ID NO: 1328822 - DNA, 25 bp, Homo sapien
gagggtgctagagttacgtgacaaa

SEQ ID NO: 1328823 - DNA, 25 bp, Homo sapien
tagccaaagcgagtcatgtcaccag

SEQ ID NO: 1328824 - DNA, 25 bp, Homo sapien
tcctaaagttagaatgggagggtgc

SEQ ID NO: 1328825 - DNA, 25 bp, Homo sapien
atcggcggcacagatcccgttccaa

SEQ ID NO: 1328826 - DNA, 25 bp, Homo sapien
agatcggcggcacagatcccgttcc

SEQ ID NO: 1328827 - DNA, 25 bp, Homo sapien
cgagatcggcggcacagatcccgtt

SEQ ID NO: 1328828 - DNA, 25 bp, Homo sapien
cggcggcacagatcccgttccaagt

SEQ ID NO: 1328829 - DNA, 25 bp, Homo sapien
gactgtattcaaacttatgagagta

SEQ ID NO: 1328830 - DNA, 25 bp, Homo sapien
tttgacccaactaaccttgactgta

SEQ ID NO: 1328831 - DNA, 25 bp, Homo sapien
tatgagagtataaaggatctggagg

SEQ ID NO: 1328832 - DNA, 25 bp, Homo sapien
tcataatcaacatcagtttttgacc

SEQ ID NO: 1328833 - DNA, 25 bp, Homo sapien
atagaagtcacctattgaaaactgg

SEQ ID NO: 1328834 - DNA, 25 bp, Homo sapien
gtttaacatagcgatctaggccaga

SEQ ID NO: 1328835 - DNA, 25 bp, Homo sapien
ccataaagttggagatagggaccag

SEQ ID NO: 1328836 - DNA, 25 bp, Homo sapien
gaaatgcacacaacagaaccatagg

SEQ ID NO: 1328837 - DNA, 25 bp, Homo sapien
tgaggtaccacagccaatcaatagc

SEQ ID NO: 1328838 - DNA, 25 bp, Homo sapien
aaagaaatgtcttctggcatggaca

SEQ ID NO: 1328839 - DNA, 25 bp, Homo sapien
tatgtggaccaaaattgaggtacca

SEQ ID NO: 1328840 - DNA, 25 bp, Homo sapien
ggaccaaccaagctgtcatccagta

SEQ ID NO: 1328841 - DNA, 25 bp, Homo sapien
attcaagtttgaatgttcaatatac

SEQ ID NO: 1328842 - DNA, 25 bp, Homo sapien
ttcaagtttgaatgttcaatataca

SEQ ID NO: 1328843 - DNA, 25 bp, Homo sapien
cattcaagtttgaatgttcaatata

SEQ ID NO: 1328844 - DNA, 25 bp, Homo sapien
ccattcaagtttgaatgttcaatat

SEQ ID NO: 1328845 - DNA, 25 bp, Homo sapien
caaccaaagtatgaatacagctaat

SEQ ID NO: 1328846 - DNA, 25 bp, Homo sapien
acaatatataaagtctgaagcaacc

SEQ ID NO: 1328847 - DNA, 25 bp, Homo sapien
aagtttttggcactacaaggttctg

SEQ ID NO: 1328848 - DNA, 25 bp, Homo sapien
cactcaatttggtgatactagtaaa

SEQ ID NO: 1328849 - DNA, 25 bp, Homo sapien
atgtaactgacattgaggtacggat

SEQ ID NO: 1328850 - DNA, 25 bp, Homo sapien
aatgtaactgacattgaggtacgga

SEQ ID NO: 1328851 - DNA, 25 bp, Homo sapien
tgtaactgacattgaggtacggata

SEQ ID NO: 1328852 - DNA, 25 bp, Homo sapien
gtaactgacattgaggtacggatac

SEQ ID NO: 1328853 - DNA, 25 bp, Homo sapien
gagacagcaggattggctggttgct

SEQ ID NO: 1328854 - DNA, 25 bp, Homo sapien
tggttgctgtgcatcggtagaccag

SEQ ID NO: 1328855 - DNA, 25 bp, Homo sapien
caggattggctggttgctgtgcatc

SEQ ID NO: 1328856 - DNA, 25 bp, Homo sapien
attggctggttgctgtgcatcggta

SEQ ID NO: 1328857 - DNA, 25 bp, Homo sapien
gtgggtggggacaacgctctctaca

SEQ ID NO: 1328858 - DNA, 25 bp, Homo sapien
ccgacacgtttcctcttggtgggtg

SEQ ID NO: 1328859 - DNA, 25 bp, Homo sapien
ctacaccgacgggtggcacatctgt

SEQ ID NO: 1328860 - DNA, 25 bp, Homo sapien
actccgacacgtttcctcttggtgg

SEQ ID NO: 1328861 - DNA, 25 bp, Homo sapien
tataacaagcctgagaccataccag

SEQ ID NO: 1328862 - DNA, 25 bp, Homo sapien
tgccactctacaatacagggatgcc

SEQ ID NO: 1328863 - DNA, 25 bp, Homo sapien
aataggaggtgataaagcatgctgc

SEQ ID NO: 1328864 - DNA, 25 bp, Homo sapien
cagggatgccccagtagtatatggg

SEQ ID NO: 1328865 - DNA, 25 bp, Homo sapien
actaagttaacaaagagctgaaggc

SEQ ID NO: 1328866 - DNA, 25 bp, Homo sapien
ccaagtgttctgaactaagttaaca

SEQ ID NO: 1328867 - DNA, 25 bp, Homo sapien
gaactcctagtttaactatactgac

SEQ ID NO: 1328868 - DNA, 25 bp, Homo sapien
ttgaactcctagtttaactatactg

SEQ ID NO: 1328869 - DNA, 25 bp, Homo sapien
taattaggtccccaatgctcagtaa

SEQ ID NO: 1328870 - DNA, 25 bp, Homo sapien
ttagtactacaatagcaccagcaga

SEQ ID NO: 1328871 - DNA, 25 bp, Homo sapien
tatggtctaagcctaccctctctag

SEQ ID NO: 1328872 - DNA, 25 bp, Homo sapien
taagaacaaatacctctgaggcaag

SEQ ID NO: 1328873 - DNA, 25 bp, Homo sapien
gcctgttaactaatttgtaagcagt

SEQ ID NO: 1328874 - DNA, 25 bp, Homo sapien
ccaagcctgttaactaatttgtaag

SEQ ID NO: 1328875 - DNA, 25 bp, Homo sapien
ttaactaatttgtaagcagtggtac

SEQ ID NO: 1328876 - DNA, 25 bp, Homo sapien
tgttaactaatttgtaagcagtggt

SEQ ID NO: 1328877 - DNA, 25 bp, Homo sapien
gaagttttgatgcaaaccataaggc

SEQ ID NO: 1328878 - DNA, 25 bp, Homo sapien
ttgagtatagaaaggtttgttgggc

SEQ ID NO: 1328879 - DNA, 25 bp, Homo sapien
tgatgcaaaccataaggccacgaag

SEQ ID NO: 1328880 - DNA, 25 bp, Homo sapien
ttgggctggaatcgggcatttccct

SEQ ID NO: 1328881 - DNA, 25 bp, Homo sapien
aatggggacgcggtgcatgttccca

SEQ ID NO: 1328882 - DNA, 25 bp, Homo sapien
attggaggagtcagtcctcgaaagc

SEQ ID NO: 1328883 - DNA, 25 bp, Homo sapien
ggagtcagtcctcgaaagcctggct

SEQ ID NO: 1328884 - DNA, 25 bp, Homo sapien
cgcggtgcatgttcccaaggaattg

SEQ ID NO: 1328885 - DNA, 25 bp, Homo sapien
caatctgcaacatagagacaggagt

SEQ ID NO: 1328886 - DNA, 25 bp, Homo sapien
taaagacaatgccaactatcccaga

SEQ ID NO: 1328887 - DNA, 25 bp, Homo sapien
gagatcctattacaagcttgaggca

SEQ ID NO: 1328888 - DNA, 25 bp, Homo sapien
ggagtatcatgtacaaaagcctgaa

SEQ ID NO: 1328889 - DNA, 25 bp, Homo sapien
acaactaagggctgaatctgaaggg

SEQ ID NO: 1328890 - DNA, 25 bp, Homo sapien
gaaagtaagcaaaccagctagttca

SEQ ID NO: 1328891 - DNA, 25 bp, Homo sapien
taatactatataacaggaacatggc

SEQ ID NO: 1328892 - DNA, 25 bp, Homo sapien
aagttcagtctaatgggttatgcag

SEQ ID NO: 1328893 - DNA, 25 bp, Homo sapien
ccggcctgtgtatgtttaagtgtgt

SEQ ID NO: 1328894 - DNA, 25 bp, Homo sapien
agtgccggcctgtgtatgtttaagt

SEQ ID NO: 1328895 - DNA, 25 bp, Homo sapien
gcctgtgtatgtttaagtgtgtata

SEQ ID NO: 1328896 - DNA, 25 bp, Homo sapien
acagtgccggcctgtgtatgtttaa

SEQ ID NO: 1328897 - DNA, 25 bp, Homo sapien
gaattccccactgcaccactgttta

SEQ ID NO: 1328898 - DNA, 25 bp, Homo sapien
ctgaattccccactgcaccactgtt

SEQ ID NO: 1328899 - DNA, 25 bp, Homo sapien
tgaattccccactgcaccactgttt

SEQ ID NO: 1328900 - DNA, 25 bp, Homo sapien
aattccccactgcaccactgtttac

SEQ ID NO: 1328901 - DNA, 25 bp, Homo sapien
ggccagtgtccatcgtgagacgtgt

SEQ ID NO: 1328902 - DNA, 25 bp, Homo sapien
aatttggagccacagtacggggcca

SEQ ID NO: 1328903 - DNA, 25 bp, Homo sapien
tcgtgagacgtgttagggattgcca

SEQ ID NO: 1328904 - DNA, 25 bp, Homo sapien
tagggattgccacaggtctggcagc

SEQ ID NO: 1328905 - DNA, 25 bp, Homo sapien
cactgcctggtgcagagtggatcac

SEQ ID NO: 1328906 - DNA, 25 bp, Homo sapien
gatgctgggatcatttaggccaata

SEQ ID NO: 1328907 - DNA, 25 bp, Homo sapien
taggccaatattgctgggggcactg

SEQ ID NO: 1328908 - DNA, 25 bp, Homo sapien
tgggccatggatgggccaggacggg

SEQ ID NO: 1328909 - DNA, 25 bp, Homo sapien
tattgtgcatgggagaatactgagc

SEQ ID NO: 1328910 - DNA, 25 bp, Homo sapien
ggcaacaatcccatattgtgcatgg

SEQ ID NO: 1328911 - DNA, 25 bp, Homo sapien
caatcccatattgtgcatgggagaa

SEQ ID NO: 1328912 - DNA, 25 bp, Homo sapien
gtgcattggcaacaatcccatattg

SEQ ID NO: 1328913 - DNA, 25 bp, Homo sapien
gatgaaggctgagtaatagcagctg

SEQ ID NO: 1328914 - DNA, 25 bp, Homo sapien
gccaagcttaggttgggatcctggc

SEQ ID NO: 1328915 - DNA, 25 bp, Homo sapien
atgaaggctgagtaatagcagctga

SEQ ID NO: 1328916 - DNA, 25 bp, Homo sapien
aggtgggccaagcttaggttgggat

SEQ ID NO: 1328917 - DNA, 25 bp, Homo sapien
tgaggagaataagatggtgattcag

SEQ ID NO: 1328918 - DNA, 25 bp, Homo sapien
gaggagaataagatggtgattcaga

SEQ ID NO: 1328919 - DNA, 25 bp, Homo sapien
ctgaggagaataagatggtgattca

SEQ ID NO: 1328920 - DNA, 25 bp, Homo sapien
tcactaggtatccacaggtcaagct

SEQ ID NO: 1328921 - DNA, 25 bp, Homo sapien
taatgaaatcccagagcaggaacac

SEQ ID NO: 1328922 - DNA, 25 bp, Homo sapien
tgatgagagacaggaacagtggctc

SEQ ID NO: 1328923 - DNA, 25 bp, Homo sapien
gaaacgagagcccagacatggttcc

SEQ ID NO: 1328924 - DNA, 25 bp, Homo sapien
tgaaccagccacctgttgagcattt

SEQ ID NO: 1328925 - DNA, 25 bp, Homo sapien
cattctgatgactgtctagtcctta

SEQ ID NO: 1328926 - DNA, 25 bp, Homo sapien
tctagtccttatggactgatcaccc

SEQ ID NO: 1328927 - DNA, 25 bp, Homo sapien
atttacaaggttgcggaccagctgg

SEQ ID NO: 1328928 - DNA, 25 bp, Homo sapien
tataaaacatctgaggtctctcggg

SEQ ID NO: 1328929 - DNA, 25 bp, Homo sapien
taaagtctcgagtatcgtggaggtc

SEQ ID NO: 1328930 - DNA, 25 bp, Homo sapien
gggcactcccttcgtacatgtccag

SEQ ID NO: 1328931 - DNA, 25 bp, Homo sapien
ctattcctctgacgggccagcttga

SEQ ID NO: 1328932 - DNA, 25 bp, Homo sapien
gaacctgggagactataattcgtag

SEQ ID NO: 1328933 - DNA, 25 bp, Homo sapien
tgtgagatcctcagcaagaacccaa

SEQ ID NO: 1328934 - DNA, 25 bp, Homo sapien
tgagtcacagaacaaactatgcagg

SEQ ID NO: 1328935 - DNA, 25 bp, Homo sapien
taacaaaaggactaacatgcccatc

SEQ ID NO: 1328936 - DNA, 25 bp, Homo sapien
cctattacaaaattccactcaaatg

SEQ ID NO: 1328937 - DNA, 25 bp, Homo sapien
tagctacaaattggcctctcattta

SEQ ID NO: 1328938 - DNA, 25 bp, Homo sapien
agaagatactattataccacatgca

SEQ ID NO: 1328939 - DNA, 25 bp, Homo sapien
tctgaacataattatagctacaaat

SEQ ID NO: 1328940 - DNA, 25 bp, Homo sapien
agttctccatctgttaatactctgg

SEQ ID NO: 1328941 - DNA, 25 bp, Homo sapien
ccttttagggcagtctttcatgtag

SEQ ID NO: 1328942 - DNA, 25 bp, Homo sapien
gcagtctttcatgtagtggcctatt

SEQ ID NO: 1328943 - DNA, 25 bp, Homo sapien
acggcaacatctatcattgggagcc

SEQ ID NO: 1328944 - DNA, 25 bp, Homo sapien
aactcatgctttctgctatatcggg

SEQ ID NO: 1328945 - DNA, 25 bp, Homo sapien
caaaattgcctgtaggctaggtgca

SEQ ID NO: 1328946 - DNA, 25 bp, Homo sapien
tatatcgggctacttctggaaagga

SEQ ID NO: 1328947 - DNA, 25 bp, Homo sapien
tcatttgcccatagaaaaaacaggt

SEQ ID NO: 1328948 - DNA, 25 bp, Homo sapien
ggaagtggagattgcagtaagcaaa

SEQ ID NO: 1328949 - DNA, 25 bp, Homo sapien
gaggaagagacaggagagttgcttg

SEQ ID NO: 1328950 - DNA, 25 bp, Homo sapien
agtggagattgcagtaagcaaagat

SEQ ID NO: 1328951 - DNA, 25 bp, Homo sapien
aatccaggaagtggagattgcagta

SEQ ID NO: 1328952 - DNA, 25 bp, Homo sapien
cctggacgaagtggcgaaactctgt

SEQ ID NO: 1328953 - DNA, 25 bp, Homo sapien
tagttggtcctaacagtgtccatcc

SEQ ID NO: 1328954 - DNA, 25 bp, Homo sapien
cactgtcacgaagactagttggtcc

SEQ ID NO: 1328955 - DNA, 25 bp, Homo sapien
gataaaagtataagagacacgccca

SEQ ID NO: 1328956 - DNA, 25 bp, Homo sapien
gacacagcaattacactattaagta

SEQ ID NO: 1328957 - DNA, 25 bp, Homo sapien
agtggattagtggtttgagaagagg

SEQ ID NO: 1328958 - DNA, 25 bp, Homo sapien
gtaaagtagcacagccactttagaa

SEQ ID NO: 1328959 - DNA, 25 bp, Homo sapien
aatgacacagcaattacactattaa

SEQ ID NO: 1328960 - DNA, 25 bp, Homo sapien
gatactacgtactgtctcagaggaa

SEQ ID NO: 1328961 - DNA, 25 bp, Homo sapien
agttagggcggcctacacctgaggc

SEQ ID NO: 1328962 - DNA, 25 bp, Homo sapien
ttttgccaggacaacataaaggtct

SEQ ID NO: 1328963 - DNA, 25 bp, Homo sapien
gaggaaaagcatccactggagtgag

SEQ ID NO: 1328964 - DNA, 25 bp, Homo sapien
caagttcaaggacattcactatgca

SEQ ID NO: 1328965 - DNA, 25 bp, Homo sapien
ttccagtgaacataaggcaagcaga

SEQ ID NO: 1328966 - DNA, 25 bp, Homo sapien
tattattaccccataagaggctaga

SEQ ID NO: 1328967 - DNA, 25 bp, Homo sapien
caatttcattggactgaagcacaca

SEQ ID NO: 1328968 - DNA, 25 bp, Homo sapien
gaaggaaacttctcggttccatgcc

SEQ ID NO: 1328969 - DNA, 25 bp, Homo sapien
taggtgaaccttacagacatgaatc

SEQ ID NO: 1328970 - DNA, 25 bp, Homo sapien
gaggaatgtgtgacactctcccacc

SEQ ID NO: 1328971 - DNA, 25 bp, Homo sapien
tatttggtacatccaatgcgccaga

SEQ ID NO: 1328972 - DNA, 25 bp, Homo sapien
aatgctttcatgatgaaattggtca

SEQ ID NO: 1328973 - DNA, 25 bp, Homo sapien
agcttctctgccaatgagtggataa

SEQ ID NO: 1328974 - DNA, 25 bp, Homo sapien
ttccttccattgataaatgctttca

SEQ ID NO: 1328975 - DNA, 25 bp, Homo sapien
aaaagtttccttccattgataaatg

SEQ ID NO: 1328976 - DNA, 25 bp, Homo sapien
caaggttatgattcaagtcaaaagg

SEQ ID NO: 1328977 - DNA, 25 bp, Homo sapien
tccagcaccaaggttatgattcaag

SEQ ID NO: 1328978 - DNA, 25 bp, Homo sapien
ttctggaaactccagcaccaaggtt

SEQ ID NO: 1328979 - DNA, 25 bp, Homo sapien
gaaactccagcaccaaggttatgat

SEQ ID NO: 1328980 - DNA, 25 bp, Homo sapien
tgtgttctttccaagtgaaggtaaa

SEQ ID NO: 1328981 - DNA, 25 bp, Homo sapien
gctttttctgccgaatgctaattac

SEQ ID NO: 1328982 - DNA, 25 bp, Homo sapien
gtatagaaacgaagcagtcccagcc

SEQ ID NO: 1328983 - DNA, 25 bp, Homo sapien
caaagctcccctaatgattctgtgt

SEQ ID NO: 1328984 - DNA, 25 bp, Homo sapien
agaaagcattccatccatcaaccat

SEQ ID NO: 1328985 - DNA, 25 bp, Homo sapien
tcaaccattctctgtggaatctgtt

SEQ ID NO: 1328986 - DNA, 25 bp, Homo sapien
catatgaagataaacttcccctgga

SEQ ID NO: 1328987 - DNA, 25 bp, Homo sapien
tggaagcatccccaatgtcacatcg

SEQ ID NO: 1328988 - DNA, 25 bp, Homo sapien
cctggaagcatccccaatgtcacat

SEQ ID NO: 1328989 - DNA, 25 bp, Homo sapien
ctggaagcatccccaatgtcacatc

SEQ ID NO: 1328990 - DNA, 25 bp, Homo sapien
aatctgacattagttatgtttcatt

SEQ ID NO: 1328991 - DNA, 25 bp, Homo sapien
tatcatgaacaaagcagatcattaa

SEQ ID NO: 1328992 - DNA, 25 bp, Homo sapien
acaaatctgacattagttatgtttc

SEQ ID NO: 1328993 - DNA, 25 bp, Homo sapien
tgaacaaagcagatcattaattttt

SEQ ID NO: 1328994 - DNA, 25 bp, Homo sapien
actgcactctaggatcaatagctgc

SEQ ID NO: 1328995 - DNA, 25 bp, Homo sapien
ctagcattcttgtgttatgttgagc

SEQ ID NO: 1328996 - DNA, 25 bp, Homo sapien
aacactttcatagtatatcccaaat

SEQ ID NO: 1328997 - DNA, 25 bp, Homo sapien
tcaatagctgcataagtagctagca

SEQ ID NO: 1328998 - DNA, 25 bp, Homo sapien
ggcagtagttataggcaaaatgttt

SEQ ID NO: 1328999 - DNA, 25 bp, Homo sapien
acgtattatataaactgatatcgcc

SEQ ID NO: 1329000 - DNA, 25 bp, Homo sapien
tactataggcactttggcagtagtt

SEQ ID NO: 1329001 - DNA, 25 bp, Homo sapien
aactgatatcgccttctaacccact

SEQ ID NO: 1329002 - DNA, 25 bp, Homo sapien
ttttcatatatgctaaaaaaattta

SEQ ID NO: 1329003 - DNA, 25 bp, Homo sapien
catatatgctaaaaaaatttatttt

SEQ ID NO: 1329004 - DNA, 25 bp, Homo sapien
cttcagtaggttaaataattttcat

SEQ ID NO: 1329005 - DNA, 25 bp, Homo sapien
taattttcatatatgctaaaaaaat

SEQ ID NO: 1329006 - DNA, 25 bp, Homo sapien
tgccaaattttcaattatttcctta

SEQ ID NO: 1329007 - DNA, 25 bp, Homo sapien
ctggatgtctcttaagaatttttgc

SEQ ID NO: 1329008 - DNA, 25 bp, Homo sapien
gatgtctcttaagaatttttgccaa

SEQ ID NO: 1329009 - DNA, 25 bp, Homo sapien
tgtctcttaagaatttttgccaaat

SEQ ID NO: 1329010 - DNA, 25 bp, Homo sapien
caatttccagccataaagctctata

SEQ ID NO: 1329011 - DNA, 25 bp, Homo sapien
tacagtatcagcataatctggaaac

SEQ ID NO: 1329012 - DNA, 25 bp, Homo sapien
ccaagtaagtgattcatagacctac

SEQ ID NO: 1329013 - DNA, 25 bp, Homo sapien
aaatgcagaatctgaggaccctccc

SEQ ID NO: 1329014 - DNA, 25 bp, Homo sapien
taggctccaaattgagacaaacctg

SEQ ID NO: 1329015 - DNA, 25 bp, Homo sapien
tatactgattaagtacataggctcc

SEQ ID NO: 1329016 - DNA, 25 bp, Homo sapien
gggcaaaacaatatactgattaagt

SEQ ID NO: 1329017 - DNA, 25 bp, Homo sapien
gattaagtacataggctccaaattg

SEQ ID NO: 1329018 - DNA, 25 bp, Homo sapien
tgacaccactacagatgccagaagc

SEQ ID NO: 1329019 - DNA, 25 bp, Homo sapien
catgagagcaggagccattgcagct

SEQ ID NO: 1329020 - DNA, 25 bp, Homo sapien
tcccagtaggaatggcacagattat

SEQ ID NO: 1329021 - DNA, 25 bp, Homo sapien
taacagaggcgatactgacaccact

SEQ ID NO: 1329022 - DNA, 25 bp, Homo sapien
tttgctagttgctgttgagaaggcc

SEQ ID NO: 1329023 - DNA, 25 bp, Homo sapien
cataaataacaatagctaggctggt

SEQ ID NO: 1329024 - DNA, 25 bp, Homo sapien
gagaaggcctgggacacttcttccc

SEQ ID NO: 1329025 - DNA, 25 bp, Homo sapien
taaaggactgaacatctacaaggat

SEQ ID NO: 1329026 - DNA, 25 bp, Homo sapien
tcttactgctgaaattgcacttggg

SEQ ID NO: 1329027 - DNA, 25 bp, Homo sapien
cagacctgggttacgaatcccggct

SEQ ID NO: 1329028 - DNA, 25 bp, Homo sapien
cagtttcagaaagcagtggttaggt

SEQ ID NO: 1329029 - DNA, 25 bp, Homo sapien
catctcacggtggaactcagaaagc

SEQ ID NO: 1329030 - DNA, 25 bp, Homo sapien
taaacatagaatcgtcattgggaga

SEQ ID NO: 1329031 - DNA, 25 bp, Homo sapien
aataaacatagaatcgtcattggga

SEQ ID NO: 1329032 - DNA, 25 bp, Homo sapien
aacatagaatcgtcattgggagaaa

SEQ ID NO: 1329033 - DNA, 25 bp, Homo sapien
tagaatcgtcattgggagaaaataa

SEQ ID NO: 1329034 - DNA, 25 bp, Homo sapien
gccaaataagcacaaccttgccttt

SEQ ID NO: 1329035 - DNA, 25 bp, Homo sapien
ccagatcactatcacgaaatccaaa

SEQ ID NO: 1329036 - DNA, 25 bp, Homo sapien
cttagaagagccaaataagcacaac

SEQ ID NO: 1329037 - DNA, 25 bp, Homo sapien
tacaaatatccagatcactatcacg

SEQ ID NO: 1329038 - DNA, 25 bp, Homo sapien
tctttcaaagcacaattcatgtagg

SEQ ID NO: 1329039 - DNA, 25 bp, Homo sapien
tgggcctggctcttcctattaattc

SEQ ID NO: 1329040 - DNA, 25 bp, Homo sapien
tcaccttagtatacgatgctcttcc

SEQ ID NO: 1329041 - DNA, 25 bp, Homo sapien
cagtgtcatccaataacagctacca

SEQ ID NO: 1329042 - DNA, 25 bp, Homo sapien
gttctgatgctctacttgaaatttc

SEQ ID NO: 1329043 - DNA, 25 bp, Homo sapien
agttctgatgctctacttgaaattt

SEQ ID NO: 1329044 - DNA, 25 bp, Homo sapien
ttctgatgctctacttgaaatttca

SEQ ID NO: 1329045 - DNA, 25 bp, Homo sapien
tataatagagacttagatttggtca

SEQ ID NO: 1329046 - DNA, 25 bp, Homo sapien
cagcaaataaaactgagcatgattt

SEQ ID NO: 1329047 - DNA, 25 bp, Homo sapien
ggtcaatactttatatactcctata

SEQ ID NO: 1329048 - DNA, 25 bp, Homo sapien
aaagaagctatactcatcagcaaat

SEQ ID NO: 1329049 - DNA, 25 bp, Homo sapien
ataatgggtcatcttgtaaaagtac

SEQ ID NO: 1329050 - DNA, 25 bp, Homo sapien
ctgattaaagtcaacttttatcctt

SEQ ID NO: 1329051 - DNA, 25 bp, Homo sapien
taatgggtcatcttgtaaaagtaca

SEQ ID NO: 1329052 - DNA, 25 bp, Homo sapien
ttctgattaaagtcaacttttatcc

SEQ ID NO: 1329053 - DNA, 25 bp, Homo sapien
tttgctccctgttgtgttgttcaga

SEQ ID NO: 1329054 - DNA, 25 bp, Homo sapien
tgctccctgttgtgttgttcagaac

SEQ ID NO: 1329055 - DNA, 25 bp, Homo sapien
ttgctccctgttgtgttgttcagaa

SEQ ID NO: 1329056 - DNA, 25 bp, Homo sapien
cataaatgttactggggaagggtct

SEQ ID NO: 1329057 - DNA, 25 bp, Homo sapien
aggaaaacagaatctgaaaacatct

SEQ ID NO: 1329058 - DNA, 25 bp, Homo sapien
ttacttacagtttgttcattatttg

SEQ ID NO: 1329059 - DNA, 25 bp, Homo sapien
tctctgactttaaaaccataaatgt

SEQ ID NO: 1329060 - DNA, 25 bp, Homo sapien
ctagtgttcaggtcttggtttctaa

SEQ ID NO: 1329061 - DNA, 25 bp, Homo sapien
tctgagatggcctcaaagcagtgac

SEQ ID NO: 1329062 - DNA, 25 bp, Homo sapien
gacagcccagtaacagcaagcacat

SEQ ID NO: 1329063 - DNA, 25 bp, Homo sapien
tggacaaatgcctaattctaggagt

SEQ ID NO: 1329064 - DNA, 25 bp, Homo sapien
gagtaaaggtgactcccaggtactc

SEQ ID NO: 1329065 - DNA, 25 bp, Homo sapien
agtaaaggtgactcccaggtactct

SEQ ID NO: 1329066 - DNA, 25 bp, Homo sapien
aaaacatcttttacatactaaatca

SEQ ID NO: 1329067 - DNA, 25 bp, Homo sapien
aacatcttttacatactaaatcaag

SEQ ID NO: 1329068 - DNA, 25 bp, Homo sapien
agatgctgcatactatcgttggtgg

SEQ ID NO: 1329069 - DNA, 25 bp, Homo sapien
cagatgctgcatactatcgttggtg

SEQ ID NO: 1329070 - DNA, 25 bp, Homo sapien
gtgggctaattaacagtactacaag

SEQ ID NO: 1329071 - DNA, 25 bp, Homo sapien
aatgacatatttaggcaggaaactc

SEQ ID NO: 1329072 - DNA, 25 bp, Homo sapien
gttagcctggacatttatatagcca

SEQ ID NO: 1329073 - DNA, 25 bp, Homo sapien
taatatgcctacatcctaaagtgtc

SEQ ID NO: 1329074 - DNA, 25 bp, Homo sapien
gatggataggtttgtggcattgaca

SEQ ID NO: 1329075 - DNA, 25 bp, Homo sapien
caaacacatccagttgtagacatta

SEQ ID NO: 1329076 - DNA, 25 bp, Homo sapien
tctggagatctgtacagattaataa

SEQ ID NO: 1329077 - DNA, 25 bp, Homo sapien
gctagccataccttaataaagcaga

SEQ ID NO: 1329078 - DNA, 25 bp, Homo sapien
tatacatagtcatacaacaaccaca

SEQ ID NO: 1329079 - DNA, 25 bp, Homo sapien
tacatagtcatacaacaaccacaaa

SEQ ID NO: 1329080 - DNA, 25 bp, Homo sapien
atatacatagtcatacaacaaccac

SEQ ID NO: 1329081 - DNA, 25 bp, Homo sapien
atacatagtcatacaacaaccacaa

SEQ ID NO: 1329082 - DNA, 25 bp, Homo sapien
aacatattcgtaaaccagctggctg

SEQ ID NO: 1329083 - DNA, 25 bp, Homo sapien
gaagagtcctgtccgtggtcagcaa

SEQ ID NO: 1329084 - DNA, 25 bp, Homo sapien
cacccttcgtctgaggacaggcaaa

SEQ ID NO: 1329085 - DNA, 25 bp, Homo sapien
gatttatctgggtcaggcgacttag

SEQ ID NO: 1329086 - DNA, 25 bp, Homo sapien
tcaatggctattcgccttttaggcc

SEQ ID NO: 1329087 - DNA, 25 bp, Homo sapien
tggctattcgccttttaggccagtt

SEQ ID NO: 1329088 - DNA, 25 bp, Homo sapien
aatggctattcgccttttaggccag

SEQ ID NO: 1329089 - DNA, 25 bp, Homo sapien
cttcaatggctattcgccttttagg

SEQ ID NO: 1329090 - DNA, 25 bp, Homo sapien
gacatattcctccaaagcaaaatcc

SEQ ID NO: 1329091 - DNA, 25 bp, Homo sapien
cccgatttggtgtttccaatgctaa

SEQ ID NO: 1329092 - DNA, 25 bp, Homo sapien
actgtcccaaggatacccgatttgg

SEQ ID NO: 1329093 - DNA, 25 bp, Homo sapien
ccagtgtgtagaatttaagcagctc

SEQ ID NO: 1329094 - DNA, 25 bp, Homo sapien
caactgaaaggatgcagtgcaaaca

SEQ ID NO: 1329095 - DNA, 25 bp, Homo sapien
gaagggcatgatctggcttaagttt

SEQ ID NO: 1329096 - DNA, 25 bp, Homo sapien
cagggaaacctgttaggaggctata

SEQ ID NO: 1329097 - DNA, 25 bp, Homo sapien
gctatagtagtatcccaggccagag

SEQ ID NO: 1329098 - DNA, 25 bp, Homo sapien
catccattctttttgggtcaaagcc

SEQ ID NO: 1329099 - DNA, 25 bp, Homo sapien
agctttgttttcctcagcaattgag

SEQ ID NO: 1329100 - DNA, 25 bp, Homo sapien
ctcagttgcactacttgaattacat

SEQ ID NO: 1329101 - DNA, 25 bp, Homo sapien
tctactatgcccttcagctgaaagt

SEQ ID NO: 1329102 - DNA, 25 bp, Homo sapien
agcaaaacagtaagaagggattcca

SEQ ID NO: 1329103 - DNA, 25 bp, Homo sapien
acagtaagaagggattccaccatca

SEQ ID NO: 1329104 - DNA, 25 bp, Homo sapien
cagtttgggagtcaatatagcacaa

SEQ ID NO: 1329105 - DNA, 25 bp, Homo sapien
ggattccaccatcagtttgggagtc

SEQ ID NO: 1329106 - DNA, 25 bp, Homo sapien
ttaacaatatatcaagaaagtccct

SEQ ID NO: 1329107 - DNA, 25 bp, Homo sapien
gtatattactcttctcccttaacaa

SEQ ID NO: 1329108 - DNA, 25 bp, Homo sapien
tgtagttattttactgtggacacat

SEQ ID NO: 1329109 - DNA, 25 bp, Homo sapien
gaaagtccctttaagtcagttagca

SEQ ID NO: 1329110 - DNA, 25 bp, Homo sapien
taaatatgcttatttcagacactca

SEQ ID NO: 1329111 - DNA, 25 bp, Homo sapien
tctgcatctgcacattcaatcaact

SEQ ID NO: 1329112 - DNA, 25 bp, Homo sapien
tatgcttatttcagacactcagccc

SEQ ID NO: 1329113 - DNA, 25 bp, Homo sapien
aatatgcttatttcagacactcagc

SEQ ID NO: 1329114 - DNA, 25 bp, Homo sapien
ggatactgaggacaactatacacct

SEQ ID NO: 1329115 - DNA, 25 bp, Homo sapien
tgaaggttagatacaaataacacac

SEQ ID NO: 1329116 - DNA, 25 bp, Homo sapien
taacacacagtttgtataagggact

SEQ ID NO: 1329117 - DNA, 25 bp, Homo sapien
cttgagcgtcctcaaattttggtat

SEQ ID NO: 1329118 - DNA, 25 bp, Homo sapien
cttagcccagtagcgaaaggctaac

SEQ ID NO: 1329119 - DNA, 25 bp, Homo sapien
tcagtagtgagacatgccatatcgt

SEQ ID NO: 1329120 - DNA, 25 bp, Homo sapien
taagtaaatcagtagtgagacatgc

SEQ ID NO: 1329121 - DNA, 25 bp, Homo sapien
caccaagggaataaagacaggttct

SEQ ID NO: 1329122 - DNA, 25 bp, Homo sapien
acaggaactttagcgtgaaaatcag

SEQ ID NO: 1329123 - DNA, 25 bp, Homo sapien
aactttagcgtgaaaatcagattcc

SEQ ID NO: 1329124 - DNA, 25 bp, Homo sapien
ccacaacaggaactttagcgtgaaa

SEQ ID NO: 1329125 - DNA, 25 bp, Homo sapien
tgcacaccacaacaggaactttagc

SEQ ID NO: 1329126 - DNA, 25 bp, Homo sapien
cccaagtacttttatcagaagatct

SEQ ID NO: 1329127 - DNA, 25 bp, Homo sapien
taaaatcccaagtacttttatcaga

SEQ ID NO: 1329128 - DNA, 25 bp, Homo sapien
ttatcagaagatctggatgattcat

SEQ ID NO: 1329129 - DNA, 25 bp, Homo sapien
aaatcccaagtacttttatcagaag

SEQ ID NO: 1329130 - DNA, 25 bp, Homo sapien
gatgagccatacaacctaagtgaac

SEQ ID NO: 1329131 - DNA, 25 bp, Homo sapien
gagcaaatctagtcagagatgagcc

SEQ ID NO: 1329132 - DNA, 25 bp, Homo sapien
tcagagatgagccatacaacctaag

SEQ ID NO: 1329133 - DNA, 25 bp, Homo sapien
agcaaatctagtcagagatgagcca

SEQ ID NO: 1329134 - DNA, 25 bp, Homo sapien
ggtggcagagaacgaagctcacttt

SEQ ID NO: 1329135 - DNA, 25 bp, Homo sapien
acttaaagcagccaagtgggcaggg

SEQ ID NO: 1329136 - DNA, 25 bp, Homo sapien
aatttcctgacggactctgaggtca

SEQ ID NO: 1329137 - DNA, 25 bp, Homo sapien
gttcttttgctaattcaatgactgc

SEQ ID NO: 1329138 - DNA, 25 bp, Homo sapien
ctttgttccaatcatactagactta

SEQ ID NO: 1329139 - DNA, 25 bp, Homo sapien
gaagcttataagtttcttaattgtc

SEQ ID NO: 1329140 - DNA, 25 bp, Homo sapien
agttactcatatgccatgccttttc

SEQ ID NO: 1329141 - DNA, 25 bp, Homo sapien
ttctaggccactcacctttttgcca

SEQ ID NO: 1329142 - DNA, 25 bp, Homo sapien
caccactgcctagaagtagcacaca

SEQ ID NO: 1329143 - DNA, 25 bp, Homo sapien
gaaacctcccctgttctagatcaag

SEQ ID NO: 1329144 - DNA, 25 bp, Homo sapien
catcagttggatggactaattgtac

SEQ ID NO: 1329145 - DNA, 25 bp, Homo sapien
ttctaaaggatgagcaaaccggtct

SEQ ID NO: 1329146 - DNA, 25 bp, Homo sapien
tcttatgtcgtttctcctttatatg

SEQ ID NO: 1329147 - DNA, 25 bp, Homo sapien
tttatatgtttatgagccccctgga

SEQ ID NO: 1329148 - DNA, 25 bp, Homo sapien
gtttgcatagataccgacaattggt

SEQ ID NO: 1329149 - DNA, 25 bp, Homo sapien
gacaattggtatattctggtgatcg

SEQ ID NO: 1329150 - DNA, 25 bp, Homo sapien
gtcagcaagtttcgtctataaaggg

SEQ ID NO: 1329151 - DNA, 25 bp, Homo sapien
tgatgagtgcctaaatcagaggtca

SEQ ID NO: 1329152 - DNA, 25 bp, Homo sapien
gccatataagctctgtgacaactac

SEQ ID NO: 1329153 - DNA, 25 bp, Homo sapien
tgggcctggccgtgatttgtgattc

SEQ ID NO: 1329154 - DNA, 25 bp, Homo sapien
caaataactaaaacaacatagtata

SEQ ID NO: 1329155 - DNA, 25 bp, Homo sapien
ttatgaaacacacatttccccccaa

SEQ ID NO: 1329156 - DNA, 25 bp, Homo sapien
tgaaacacacatttccccccaaata

SEQ ID NO: 1329157 - DNA, 25 bp, Homo sapien
ccaaataactaaaacaacatagtat

SEQ ID NO: 1329158 - DNA, 25 bp, Homo sapien
gatctctttctaagcgttcttctgc

SEQ ID NO: 1329159 - DNA, 25 bp, Homo sapien
ttttcaagtcgaaagatgtgatctc

SEQ ID NO: 1329160 - DNA, 25 bp, Homo sapien
tggcattttctaagtagtccatctc

SEQ ID NO: 1329161 - DNA, 25 bp, Homo sapien
gcattttctaagtagtccatctctg

SEQ ID NO: 1329162 - DNA, 25 bp, Homo sapien
tcaatattcactttgtccacagaag

SEQ ID NO: 1329163 - DNA, 25 bp, Homo sapien
cttctgagatcgtggtgagttttgc

SEQ ID NO: 1329164 - DNA, 25 bp, Homo sapien
caattcctgaagcactatcatcaga

SEQ ID NO: 1329165 - DNA, 25 bp, Homo sapien
cgtccgatacgtcttcaattcctga

SEQ ID NO: 1329166 - DNA, 25 bp, Homo sapien
gcttttgcctgtaaactggttgcct

SEQ ID NO: 1329167 - DNA, 25 bp, Homo sapien
tgccttttcggctttcaccggtgaa

SEQ ID NO: 1329168 - DNA, 25 bp, Homo sapien
gctttgcaatgactttgatctcgaa

SEQ ID NO: 1329169 - DNA, 25 bp, Homo sapien
tgatctcgaaggactaaccccaaat

SEQ ID NO: 1329170 - DNA, 25 bp, Homo sapien
tgtttctttccaattgtgatattat

SEQ ID NO: 1329171 - DNA, 25 bp, Homo sapien
aaattgcttcaagtccagtttaggc

SEQ ID NO: 1329172 - DNA, 25 bp, Homo sapien
cttcaagtccagtttaggcaagcaa

SEQ ID NO: 1329173 - DNA, 25 bp, Homo sapien
agtagtttaaattgcttcaagtcca

SEQ ID NO: 1329174 - DNA, 25 bp, Homo sapien
gaccaatatgataaaatcccacctc

SEQ ID NO: 1329175 - DNA, 25 bp, Homo sapien
tatatgagaaggagttacagtgcac

SEQ ID NO: 1329176 - DNA, 25 bp, Homo sapien
gaagtaaaggttgtctcatatttct

SEQ ID NO: 1329177 - DNA, 25 bp, Homo sapien
acacaagaattccaatcttggctgg

SEQ ID NO: 1329178 - DNA, 25 bp, Homo sapien
tagatcaatgtacccggagagtccc

SEQ ID NO: 1329179 - DNA, 25 bp, Homo sapien
aatatagatcaatgtacccggagag

SEQ ID NO: 1329180 - DNA, 25 bp, Homo sapien
tatagatcaatgtacccggagagtc

SEQ ID NO: 1329181 - DNA, 25 bp, Homo sapien
ctaatatagatcaatgtacccggag

SEQ ID NO: 1329182 - DNA, 25 bp, Homo sapien
attaccacgcctgcctctaatctgt

SEQ ID NO: 1329183 - DNA, 25 bp, Homo sapien
taccacgcctgcctctaatctgttt

SEQ ID NO: 1329184 - DNA, 25 bp, Homo sapien
ggattaccacgcctgcctctaatct

SEQ ID NO: 1329185 - DNA, 25 bp, Homo sapien
cacgcctgcctctaatctgttttta

SEQ ID NO: 1329186 - DNA, 25 bp, Homo sapien
gaaaacttctaggatgatctctttg

SEQ ID NO: 1329187 - DNA, 25 bp, Homo sapien
gaaatttccaagcaataagcctgct

SEQ ID NO: 1329188 - DNA, 25 bp, Homo sapien
catagtcatcttgttgcatagtcag

SEQ ID NO: 1329189 - DNA, 25 bp, Homo sapien
taagcctgctgtagatatctcctca

SEQ ID NO: 1329190 - DNA, 25 bp, Homo sapien
tcacttgcacttgggaggtgaaggc

SEQ ID NO: 1329191 - DNA, 25 bp, Homo sapien
ctacagtgagctgcaatcatgccac

SEQ ID NO: 1329192 - DNA, 25 bp, Homo sapien
gggaggatcacttgcacttgggagg

SEQ ID NO: 1329193 - DNA, 25 bp, Homo sapien
tgcactccagcctaggcaacagagc

SEQ ID NO: 1329194 - DNA, 25 bp, Homo sapien
tattttttggcagtgacaaagtctc

SEQ ID NO: 1329195 - DNA, 25 bp, Homo sapien
acagtggcgcaactgtgcctcactg

SEQ ID NO: 1329196 - DNA, 25 bp, Homo sapien
cactatgctgctcagactgatatca

SEQ ID NO: 1329197 - DNA, 25 bp, Homo sapien
tggccaggccctacaggtaagtgtt

SEQ ID NO: 1329198 - DNA, 25 bp, Homo sapien
cacactagccaagtgaaaaactgca

SEQ ID NO: 1329199 - DNA, 25 bp, Homo sapien
acactagccaagtgaaaaactgcaa

SEQ ID NO: 1329200 - DNA, 25 bp, Homo sapien
cactagccaagtgaaaaactgcaag

SEQ ID NO: 1329201 - DNA, 25 bp, Homo sapien
tcaagtgctacaaacatttcgctgc

SEQ ID NO: 1329202 - DNA, 25 bp, Homo sapien
gaaataaaaggccatctgatccact

SEQ ID NO: 1329203 - DNA, 25 bp, Homo sapien
catacatgagttctaagcctaaaga

SEQ ID NO: 1329204 - DNA, 25 bp, Homo sapien
gactaatcagtactacgatgcagtg

SEQ ID NO: 1329205 - DNA, 25 bp, Homo sapien
tcaaaaccgcgcattaccacctttc

SEQ ID NO: 1329206 - DNA, 25 bp, Homo sapien
caaaaccgcgcattaccacctttcg

SEQ ID NO: 1329207 - DNA, 25 bp, Homo sapien
gcgaggcccgcgagctacaggcgcg

SEQ ID NO: 1329208 - DNA, 25 bp, Homo sapien
gaggcccgcgagctacaggcgcgcg

SEQ ID NO: 1329209 - DNA, 25 bp, Homo sapien
tgcgaggcccgcgagctacaggcgc

SEQ ID NO: 1329210 - DNA, 25 bp, Homo sapien
ctgcgaggcccgcgagctacaggcg

SEQ ID NO: 1329211 - DNA, 25 bp, Homo sapien
aggccgggacacgactagctcagga

SEQ ID NO: 1329212 - DNA, 25 bp, Homo sapien
tgccgccgctggaggccgggacacg

SEQ ID NO: 1329213 - DNA, 25 bp, Homo sapien
ctggaggccgggacacgactagctc

SEQ ID NO: 1329214 - DNA, 25 bp, Homo sapien
gggacacgactagctcaggactcca

SEQ ID NO: 1329215 - DNA, 25 bp, Homo sapien
cgccgcgccgcgaactgcattgtgg

SEQ ID NO: 1329216 - DNA, 25 bp, Homo sapien
gagggggcgagggagagcggttgcc

SEQ ID NO: 1329217 - DNA, 25 bp, Homo sapien
agggggcgagggagagcggttgccg

SEQ ID NO: 1329218 - DNA, 25 bp, Homo sapien
cgcgaactgcattgtgggggggaag

SEQ ID NO: 1329219 - DNA, 25 bp, Homo sapien
agtttgctttctccagtaggtctgc

SEQ ID NO: 1329220 - DNA, 25 bp, Homo sapien
ccagtaggtctgcaaaacttccgct

SEQ ID NO: 1329221 - DNA, 25 bp, Homo sapien
tgcaaaacttccgcttcttatttcc

SEQ ID NO: 1329222 - DNA, 25 bp, Homo sapien
atcttgtttctgaggaagtttgctt

SEQ ID NO: 1329223 - DNA, 25 bp, Homo sapien
ccccggagaaacatggagagcctga

SEQ ID NO: 1329224 - DNA, 25 bp, Homo sapien
tggaagacccgagtttaacatggac

SEQ ID NO: 1329225 - DNA, 25 bp, Homo sapien
catagaacagtaacttgctggttgg

SEQ ID NO: 1329226 - DNA, 25 bp, Homo sapien
taacatggaccctcggagaaacatg

SEQ ID NO: 1329227 - DNA, 25 bp, Homo sapien
cacaaatagtggtcatgatactaac

SEQ ID NO: 1329228 - DNA, 25 bp, Homo sapien
aatagtggtcatgatactaactttc

SEQ ID NO: 1329229 - DNA, 25 bp, Homo sapien
ctcaggatattaacacagaacatca

SEQ ID NO: 1329230 - DNA, 25 bp, Homo sapien
acagaatcacaaatagtggtcatga

SEQ ID NO: 1329231 - DNA, 25 bp, Homo sapien
ttaaccagccccagttccaggctgt

SEQ ID NO: 1329232 - DNA, 25 bp, Homo sapien
cattaaccagccccagttccaggct

SEQ ID NO: 1329233 - DNA, 25 bp, Homo sapien
tgcattaaccagccccagttccagg

SEQ ID NO: 1329234 - DNA, 25 bp, Homo sapien
ctgcattaaccagccccagttccag

SEQ ID NO: 1329235 - DNA, 25 bp, Homo sapien
ccacaggagaaaagttcacgggaag

SEQ ID NO: 1329236 - DNA, 25 bp, Homo sapien
aaaatggccctatttgatgctaaaa

SEQ ID NO: 1329237 - DNA, 25 bp, Homo sapien
gataggagaaaatggccctatttga

SEQ ID NO: 1329238 - DNA, 25 bp, Homo sapien
cagagagcaggcctaaaaaggacac

SEQ ID NO: 1329239 - DNA, 25 bp, Homo sapien
gaaagaatgcctttgccagtgccat

SEQ ID NO: 1329240 - DNA, 25 bp, Homo sapien
tggagttgcaatctcatcgctggaa

SEQ ID NO: 1329241 - DNA, 25 bp, Homo sapien
ccagcagttgaacaaactgagaaag

SEQ ID NO: 1329242 - DNA, 25 bp, Homo sapien
tcttcgagtcatacacgtggcagaa

SEQ ID NO: 1329243 - DNA, 25 bp, Homo sapien
agcatgtgggctaacttcagtcagg

SEQ ID NO: 1329244 - DNA, 25 bp, Homo sapien
gtttgtgagtactgttcctggaaaa

SEQ ID NO: 1329245 - DNA, 25 bp, Homo sapien
ccagcatgtgggctaacttcagtca

SEQ ID NO: 1329246 - DNA, 25 bp, Homo sapien
agcaaggagacccagacactggttt

SEQ ID NO: 1329247 - DNA, 25 bp, Homo sapien
gagtccagacttttagccaacacac

SEQ ID NO: 1329248 - DNA, 25 bp, Homo sapien
acctagcatggtacttggccctcaa

SEQ ID NO: 1329249 - DNA, 25 bp, Homo sapien
ccaagcagttggtgtgagtccagac

SEQ ID NO: 1329250 - DNA, 25 bp, Homo sapien
tctcaggttttggaatggctcatcc

SEQ ID NO: 1329251 - DNA, 25 bp, Homo sapien
cagctttcaactcatctctagctcc

SEQ ID NO: 1329252 - DNA, 25 bp, Homo sapien
ctggatcttcaaaggcttgccccat

SEQ ID NO: 1329253 - DNA, 25 bp, Homo sapien
cctggatcttcaaaggcttgcccca

SEQ ID NO: 1329254 - DNA, 25 bp, Homo sapien
tcctggatcttcaaaggcttgcccc

SEQ ID NO: 1329255 - DNA, 25 bp, Homo sapien
taaatgtttactactgctaataggc

SEQ ID NO: 1329256 - DNA, 25 bp, Homo sapien
ggctatagatataagagtctggcca

SEQ ID NO: 1329257 - DNA, 25 bp, Homo sapien
cgttctgtgggaataaagtggccat

SEQ ID NO: 1329258 - DNA, 25 bp, Homo sapien
tccaaaactgagctcttgattttcc

SEQ ID NO: 1329259 - DNA, 25 bp, Homo sapien
aatttccagccgatgataatccagg

SEQ ID NO: 1329260 - DNA, 25 bp, Homo sapien
gagctcttgaccagtgaatcaccag

SEQ ID NO: 1329261 - DNA, 25 bp, Homo sapien
gaatcaccagccgatacgaacgtct

SEQ ID NO: 1329262 - DNA, 25 bp, Homo sapien
gaaatacctgtgaaagtgcctaggc

SEQ ID NO: 1329263 - DNA, 25 bp, Homo sapien
aagagagctggttgcaaacgggcac

SEQ ID NO: 1329264 - DNA, 25 bp, Homo sapien
aatctatatggacagagagcagagc

SEQ ID NO: 1329265 - DNA, 25 bp, Homo sapien
cagagcagtggtacctaaggcaagg

SEQ ID NO: 1329266 - DNA, 25 bp, Homo sapien
aaacgggcacagtaggcggagatac

SEQ ID NO: 1329267 - DNA, 25 bp, Homo sapien
gttggtgtaaagatagataatgaaa

SEQ ID NO: 1329268 - DNA, 25 bp, Homo sapien
aatactacacatagttggtgtaaag

SEQ ID NO: 1329269 - DNA, 25 bp, Homo sapien
tagttggtgtaaagatagataatga

SEQ ID NO: 1329270 - DNA, 25 bp, Homo sapien
gaagaaagtaatactacacatagtt

SEQ ID NO: 1329271 - DNA, 25 bp, Homo sapien
tgcatattggtaagaaaacccacga

SEQ ID NO: 1329272 - DNA, 25 bp, Homo sapien
gatgttcacatagagtccatggagc

SEQ ID NO: 1329273 - DNA, 25 bp, Homo sapien
catagctctgtaataagtgtctgca

SEQ ID NO: 1329274 - DNA, 25 bp, Homo sapien
gactacatgacatacaggatgggta

SEQ ID NO: 1329275 - DNA, 25 bp, Homo sapien
tggcatgctttagtggctcagacaa

SEQ ID NO: 1329276 - DNA, 25 bp, Homo sapien
ccctggaaactctgacgtggcatgc

SEQ ID NO: 1329277 - DNA, 25 bp, Homo sapien
aaggctctagggtgactcttcctgg

SEQ ID NO: 1329278 - DNA, 25 bp, Homo sapien
tgtgaccccaaggtggctaaaggct

SEQ ID NO: 1329279 - DNA, 25 bp, Homo sapien
attggcgctctcataggcctgtccg

SEQ ID NO: 1329280 - DNA, 25 bp, Homo sapien
tcgccttcattgttaccgcctgtgt

SEQ ID NO: 1329281 - DNA, 25 bp, Homo sapien
cctgtccgtagcagcagtggttctt

SEQ ID NO: 1329282 - DNA, 25 bp, Homo sapien
gtgtgctctgctacctgttcatcag

SEQ ID NO: 1329283 - DNA, 25 bp, Homo sapien
gcccaaggtaagcaccagagaagtc

SEQ ID NO: 1329284 - DNA, 25 bp, Homo sapien
gtgcactgcccaaggtaagcaccag

SEQ ID NO: 1329285 - DNA, 25 bp, Homo sapien
cagtgcactgcccaaggtaagcacc

SEQ ID NO: 1329286 - DNA, 25 bp, Homo sapien
gcactgcccaaggtaagcaccagag

SEQ ID NO: 1329287 - DNA, 25 bp, Homo sapien
aggactgtggagacgcagctcagca

SEQ ID NO: 1329288 - DNA, 25 bp, Homo sapien
tcagacagtgacatgacctgctgct

SEQ ID NO: 1329289 - DNA, 25 bp, Homo sapien
taggcttcgccttcggaatgcaaga

SEQ ID NO: 1329290 - DNA, 25 bp, Homo sapien
tgctctcctaactttggcgatggct

SEQ ID NO: 1329291 - DNA, 25 bp, Homo sapien
atgctgggtgggctgatacgcagac

SEQ ID NO: 1329292 - DNA, 25 bp, Homo sapien
ggtgggctgatacgcagacagaaat

SEQ ID NO: 1329293 - DNA, 25 bp, Homo sapien
gggctgatacgcagacagaaatagt

SEQ ID NO: 1329294 - DNA, 25 bp, Homo sapien
ctgggtgggctgatacgcagacaga

SEQ ID NO: 1329295 - DNA, 25 bp, Homo sapien
cttgtaaattgctttcccggttatg

SEQ ID NO: 1329296 - DNA, 25 bp, Homo sapien
cacatcgaccggcaattatttcttg

SEQ ID NO: 1329297 - DNA, 25 bp, Homo sapien
ctttcccggttatgttcagaacatg

SEQ ID NO: 1329298 - DNA, 25 bp, Homo sapien
ccaagcacacatcgaccggcaatta

SEQ ID NO: 1329299 - DNA, 25 bp, Homo sapien
aagggctccttgcataccttctcca

SEQ ID NO: 1329300 - DNA, 25 bp, Homo sapien
tctccatccctcacaggatcaaggc

SEQ ID NO: 1329301 - DNA, 25 bp, Homo sapien
ctcacaggatcaaggccacccagag

SEQ ID NO: 1329302 - DNA, 25 bp, Homo sapien
agttgactgaagacacactgtgggc

SEQ ID NO: 1329303 - DNA, 25 bp, Homo sapien
tgaagagtaggtttgacccgtgaaa

SEQ ID NO: 1329304 - DNA, 25 bp, Homo sapien
gagatgaagagtaggtttgacccgt

SEQ ID NO: 1329305 - DNA, 25 bp, Homo sapien
tagagatgaagagtaggtttgaccc

SEQ ID NO: 1329306 - DNA, 25 bp, Homo sapien
gatgaagagtaggtttgacccgtga

SEQ ID NO: 1329307 - DNA, 25 bp, Homo sapien
cccaggttgctaatgcatcaggtag

SEQ ID NO: 1329308 - DNA, 25 bp, Homo sapien
ccgatggagctgcttcataaaatgt

SEQ ID NO: 1329309 - DNA, 25 bp, Homo sapien
atgcatcaggtagccatgtattccg

SEQ ID NO: 1329310 - DNA, 25 bp, Homo sapien
gccatgtattccgatggagctgctt

SEQ ID NO: 1329311 - DNA, 25 bp, Homo sapien
tacatagctaatgtgtgggcccaga

SEQ ID NO: 1329312 - DNA, 25 bp, Homo sapien
tctgaggcccacaggtaggtactgg

SEQ ID NO: 1329313 - DNA, 25 bp, Homo sapien
ggctttgcacgtccagaaaattctg

SEQ ID NO: 1329314 - DNA, 25 bp, Homo sapien
cctggatagaccaaacatgtgtggc

SEQ ID NO: 1329315 - DNA, 25 bp, Homo sapien
agaggtgatgagactagaacttggg

SEQ ID NO: 1329316 - DNA, 25 bp, Homo sapien
ccagagaggtgatgagactagaact

SEQ ID NO: 1329317 - DNA, 25 bp, Homo sapien
agagaggtgatgagactagaacttg

SEQ ID NO: 1329318 - DNA, 25 bp, Homo sapien
aggtgatgagactagaacttgggca

SEQ ID NO: 1329319 - DNA, 25 bp, Homo sapien
tcacagaagcagggtcactggcaga

SEQ ID NO: 1329320 - DNA, 25 bp, Homo sapien
tccaacccagctctgccgcatattc

SEQ ID NO: 1329321 - DNA, 25 bp, Homo sapien
ttgggtaagttctcagtatctctga

SEQ ID NO: 1329322 - DNA, 25 bp, Homo sapien
ggtcttgagagtgctcttctctcct

SEQ ID NO: 1329323 - DNA, 25 bp, Homo sapien
tgccactgatgtctggagtccactg

SEQ ID NO: 1329324 - DNA, 25 bp, Homo sapien
ctggaacctgatcggacaccgtcat

SEQ ID NO: 1329325 - DNA, 25 bp, Homo sapien
ctcctggaacctgatcggacaccgt

SEQ ID NO: 1329326 - DNA, 25 bp, Homo sapien
tcaaggtcaaagcttgatgccactg

SEQ ID NO: 1329327 - DNA, 25 bp, Homo sapien
aacagttcagagttcttgtccccat

SEQ ID NO: 1329328 - DNA, 25 bp, Homo sapien
tccttgcttgacaggccttagctca

SEQ ID NO: 1329329 - DNA, 25 bp, Homo sapien
cctagatgcccaagctaaacctgtt

SEQ ID NO: 1329330 - DNA, 25 bp, Homo sapien
aatatgaatagctccactgtccacc

SEQ ID NO: 1329331 - DNA, 25 bp, Homo sapien
gaataagagttctggttgctccaac

SEQ ID NO: 1329332 - DNA, 25 bp, Homo sapien
cacctgtctatcttctttgctgaga

SEQ ID NO: 1329333 - DNA, 25 bp, Homo sapien
tcccaccaaagaggtacatttgcag

SEQ ID NO: 1329334 - DNA, 25 bp, Homo sapien
ttttccagaatacatcccagtgtca

SEQ ID NO: 1329335 - DNA, 25 bp, Homo sapien
tgccaggcgactacactggaggtgc

SEQ ID NO: 1329336 - DNA, 25 bp, Homo sapien
ttacaaactcctagctgaagctgcc

SEQ ID NO: 1329337 - DNA, 25 bp, Homo sapien
gaacatactctctacggtacctgga

SEQ ID NO: 1329338 - DNA, 25 bp, Homo sapien
ttcacagggacagttaaaaaggctc

SEQ ID NO: 1329339 - DNA, 25 bp, Homo sapien
cagcaaccctgaagcataacagcct

SEQ ID NO: 1329340 - DNA, 25 bp, Homo sapien
ccctgaagcataacagcctttaagc

SEQ ID NO: 1329341 - DNA, 25 bp, Homo sapien
gcctttaagctgtatgttgcacgtc

SEQ ID NO: 1329342 - DNA, 25 bp, Homo sapien
tatgttgcacgtccctcttgatctc

SEQ ID NO: 1329343 - DNA, 25 bp, Homo sapien
tgtaggctatactccagtagctggg

SEQ ID NO: 1329344 - DNA, 25 bp, Homo sapien
aacgaagcccacaccaatgattatg

SEQ ID NO: 1329345 - DNA, 25 bp, Homo sapien
gcctcaagcagtttgttgcctggga

SEQ ID NO: 1329346 - DNA, 25 bp, Homo sapien
tccagcaggttgaccttcaagggct

SEQ ID NO: 1329347 - DNA, 25 bp, Homo sapien
gaggccaacgttgtgacatgctgct

SEQ ID NO: 1329348 - DNA, 25 bp, Homo sapien
gaagcaactggaagtatagccacca

SEQ ID NO: 1329349 - DNA, 25 bp, Homo sapien
cacaggctttcatggagtatttaca

SEQ ID NO: 1329350 - DNA, 25 bp, Homo sapien
gattttttagcacctcggccttggc

SEQ ID NO: 1329351 - DNA, 25 bp, Homo sapien
cagtctgagaaacagaacaagatcc

SEQ ID NO: 1329352 - DNA, 25 bp, Homo sapien
taagcatgggggcacgtgcctatag

SEQ ID NO: 1329353 - DNA, 25 bp, Homo sapien
attagctaagcatgggggcacgtgc

SEQ ID NO: 1329354 - DNA, 25 bp, Homo sapien
gagttatgattttatcactgcactc

SEQ ID NO: 1329355 - DNA, 25 bp, Homo sapien
tttgtagcagctatcactgtgctgg

SEQ ID NO: 1329356 - DNA, 25 bp, Homo sapien
gatcccttccaaatagtccaccagc

SEQ ID NO: 1329357 - DNA, 25 bp, Homo sapien
gttaaacttcaacaccttggcagcc

SEQ ID NO: 1329358 - DNA, 25 bp, Homo sapien
ttttccagtcacatagtaggccccc

SEQ ID NO: 1329359 - DNA, 25 bp, Homo sapien
tctgttcaccgatggatccccagtc

SEQ ID NO: 1329360 - DNA, 25 bp, Homo sapien
actagcttggaagctccacgagggc

SEQ ID NO: 1329361 - DNA, 25 bp, Homo sapien
gactccccgcactagcttggaagct

SEQ ID NO: 1329362 - DNA, 25 bp, Homo sapien
gtttcatctgttcaccgatggatcc

SEQ ID NO: 1329363 - DNA, 25 bp, Homo sapien
ccgacgcgtcgccgggctgcgctgg

SEQ ID NO: 1329364 - DNA, 25 bp, Homo sapien
cgacgcgtcgccgggctgcgctgga

SEQ ID NO: 1329365 - DNA, 25 bp, Homo sapien
ccccgacgcgtcgccgggctgcgct

SEQ ID NO: 1329366 - DNA, 25 bp, Homo sapien
ctccccgacgcgtcgccgggctgcg

SEQ ID NO: 1329367 - DNA, 25 bp, Homo sapien
gggtccttctcgtggtagcagtggt

SEQ ID NO: 1329368 - DNA, 25 bp, Homo sapien
ggtagcagtggtagttgcactccac

SEQ ID NO: 1329369 - DNA, 25 bp, Homo sapien
gcagtggtagttgcactccacctcc

SEQ ID NO: 1329370 - DNA, 25 bp, Homo sapien
ggtccttctcgtggtagcagtggta

SEQ ID NO: 1329371 - DNA, 25 bp, Homo sapien
gttcgcgccggcccaaagacggtca

SEQ ID NO: 1329372 - DNA, 25 bp, Homo sapien
gcgccggcccaaagacggtcacgtg

SEQ ID NO: 1329373 - DNA, 25 bp, Homo sapien
ccaaagacggtcacgtgagccggcg

SEQ ID NO: 1329374 - DNA, 25 bp, Homo sapien
ggcccaaagacggtcacgtgagccg

SEQ ID NO: 1329375 - DNA, 25 bp, Homo sapien
acgtttgctgtgaggtcactttgga

SEQ ID NO: 1329376 - DNA, 25 bp, Homo sapien
ctgagattggtgctcgtgtctaaac

SEQ ID NO: 1329377 - DNA, 25 bp, Homo sapien
aaacggacccgatctttctgagtgg

SEQ ID NO: 1329378 - DNA, 25 bp, Homo sapien
cctcgggactctcagcattttgtgg

SEQ ID NO: 1329379 - DNA, 25 bp, Homo sapien
ttatcggatgtcctcgctcggttcg

SEQ ID NO: 1329380 - DNA, 25 bp, Homo sapien
cccatttccttctacgggcttcagg

SEQ ID NO: 1329381 - DNA, 25 bp, Homo sapien
gatgtcctcgctcggttcgccgtcg

SEQ ID NO: 1329382 - DNA, 25 bp, Homo sapien
ccatttccttctacgggcttcaggg

SEQ ID NO: 1329383 - DNA, 25 bp, Homo sapien
ctaagcaggaacaatttgaggactg

SEQ ID NO: 1329384 - DNA, 25 bp, Homo sapien
aatttgaggactgttgcttcccggg

SEQ ID NO: 1329385 - DNA, 25 bp, Homo sapien
gaacaatttgaggactgttgcttcc

SEQ ID NO: 1329386 - DNA, 25 bp, Homo sapien
tttgaggactgttgcttcccgggag

SEQ ID NO: 1329387 - DNA, 25 bp, Homo sapien
tggctgatcgactgcttcggaccat

SEQ ID NO: 1329388 - DNA, 25 bp, Homo sapien
gaacctggagtattcccacaggagg

SEQ ID NO: 1329389 - DNA, 25 bp, Homo sapien
gacaagatggaacattgtgtctgca

SEQ ID NO: 1329390 - DNA, 25 bp, Homo sapien
aggtggctgatcgactgcttcggac

SEQ ID NO: 1329391 - DNA, 25 bp, Homo sapien
aatcattttattgcttgagtacaca

SEQ ID NO: 1329392 - DNA, 25 bp, Homo sapien
tcattttattgcttgagtacacaga

SEQ ID NO: 1329393 - DNA, 25 bp, Homo sapien
attttattgcttgagtacacagaca

SEQ ID NO: 1329394 - DNA, 25 bp, Homo sapien
ttattgcttgagtacacagacaaat

SEQ ID NO: 1329395 - DNA, 25 bp, Homo sapien
tgagccaaacggtgaatctggctct

SEQ ID NO: 1329396 - DNA, 25 bp, Homo sapien
tagatgattcatatttccaactggg

SEQ ID NO: 1329397 - DNA, 25 bp, Homo sapien
cttggtcttataatattgagccaaa

SEQ ID NO: 1329398 - DNA, 25 bp, Homo sapien
cttataatattgagccaaacggtga

SEQ ID NO: 1329399 - DNA, 25 bp, Homo sapien
aatttagcatccttatcctttctgt

SEQ ID NO: 1329400 - DNA, 25 bp, Homo sapien
tcagatggaatttagcatccttatc

SEQ ID NO: 1329401 - DNA, 25 bp, Homo sapien
tagcatccttatcctttctgttcct

SEQ ID NO: 1329402 - DNA, 25 bp, Homo sapien
tttagcatccttatcctttctgttc

SEQ ID NO: 1329403 - DNA, 25 bp, Homo sapien
ttctcaggagcacgcatacgaccca

SEQ ID NO: 1329404 - DNA, 25 bp, Homo sapien
ccttctcaggagcacgcatacgacc

SEQ ID NO: 1329405 - DNA, 25 bp, Homo sapien
gcccttctcaggagcacgcatacga

SEQ ID NO: 1329406 - DNA, 25 bp, Homo sapien
aggcccttctcaggagcacgcatac

SEQ ID NO: 1329407 - DNA, 25 bp, Homo sapien
tttacatgtatccctgcacaggggt

SEQ ID NO: 1329408 - DNA, 25 bp, Homo sapien
acatgtatccctgcacaggggtcat

SEQ ID NO: 1329409 - DNA, 25 bp, Homo sapien
caaatttacatgtatccctgcacag

SEQ ID NO: 1329410 - DNA, 25 bp, Homo sapien
aatttacatgtatccctgcacaggg

SEQ ID NO: 1329411 - DNA, 25 bp, Homo sapien
gaaagtaggcatttaggtctggatg

SEQ ID NO: 1329412 - DNA, 25 bp, Homo sapien
aaagaaagtaggcatttaggtctgg

SEQ ID NO: 1329413 - DNA, 25 bp, Homo sapien
ctgagttaaaagaaagtaggcattt

SEQ ID NO: 1329414 - DNA, 25 bp, Homo sapien
actgagttaaaagaaagtaggcatt

SEQ ID NO: 1329415 - DNA, 25 bp, Homo sapien
ccttctttactcagaataacttctt

SEQ ID NO: 1329416 - DNA, 25 bp, Homo sapien
gcatggtggcttttttgcacgccta

SEQ ID NO: 1329417 - DNA, 25 bp, Homo sapien
aaatatgtaaaagcaagggtgggcg

SEQ ID NO: 1329418 - DNA, 25 bp, Homo sapien
atagttgaagcatccaaaatatgta

SEQ ID NO: 1329419 - DNA, 25 bp, Homo sapien
gcctttgcagttgggatggttccta

SEQ ID NO: 1329420 - DNA, 25 bp, Homo sapien
tctcagtggctagaggtgctgtttc

SEQ ID NO: 1329421 - DNA, 25 bp, Homo sapien
cacaatttagactagggttgaacca

SEQ ID NO: 1329422 - DNA, 25 bp, Homo sapien
tagttagaatctacaaggcctcctt

SEQ ID NO: 1329423 - DNA, 25 bp, Homo sapien
ctttaggaagttgcccttacaggtg

SEQ ID NO: 1329424 - DNA, 25 bp, Homo sapien
gattagtttaccctcaagccgatga

SEQ ID NO: 1329425 - DNA, 25 bp, Homo sapien
tagtggcactagtcaccttaagtag

SEQ ID NO: 1329426 - DNA, 25 bp, Homo sapien
gaataaagctgcatgggaatttgct

SEQ ID NO: 1329427 - DNA, 25 bp, Homo sapien
cagtgcctggtcttagctgtgtttt

SEQ ID NO: 1329428 - DNA, 25 bp, Homo sapien
gctgtgtttttaattatgccatgca

SEQ ID NO: 1329429 - DNA, 25 bp, Homo sapien
tatcccttcctatcccatatgttta

SEQ ID NO: 1329430 - DNA, 25 bp, Homo sapien
tgccatgcatcaacataacaccggg

SEQ ID NO: 1329431 - DNA, 25 bp, Homo sapien
tgtttagtccttatcatttgctgtg

SEQ ID NO: 1329432 - DNA, 25 bp, Homo sapien
tgcagtattcactcacgaactgttt

SEQ ID NO: 1329433 - DNA, 25 bp, Homo sapien
tccctctcaaatccatggtagtagt

SEQ ID NO: 1329434 - DNA, 25 bp, Homo sapien
caaatgagtttgtggataatggatg

SEQ ID NO: 1329435 - DNA, 25 bp, Homo sapien
gatatggtacactcctaattatgca

SEQ ID NO: 1329436 - DNA, 25 bp, Homo sapien
ctaattatgcattctttggtttcca

SEQ ID NO: 1329437 - DNA, 25 bp, Homo sapien
ccaaatcttaatctaagatactttg

SEQ ID NO: 1329438 - DNA, 25 bp, Homo sapien
ttagtatttcatagactttgcatga

SEQ ID NO: 1329439 - DNA, 25 bp, Homo sapien
gataacgtaacattgagcaggcctt

SEQ ID NO: 1329440 - DNA, 25 bp, Homo sapien
ggtgcccctctcagttgtgctaaga

SEQ ID NO: 1329441 - DNA, 25 bp, Homo sapien
tgctagcaggcccactgtagggact

SEQ ID NO: 1329442 - DNA, 25 bp, Homo sapien
tgacatcccctacccttgagtgtgg

SEQ ID NO: 1329443 - DNA, 25 bp, Homo sapien
gcgggtataagaataagagttctga

SEQ ID NO: 1329444 - DNA, 25 bp, Homo sapien
catcaagggagttggattgtgggtt

SEQ ID NO: 1329445 - DNA, 25 bp, Homo sapien
ttaggctagcttgaggcggaggcgg

SEQ ID NO: 1329446 - DNA, 25 bp, Homo sapien
gaggcgggtataagaataagagttc

SEQ ID NO: 1329447 - DNA, 25 bp, Homo sapien
tgaccgaagatgtgctgaagcatat

SEQ ID NO: 1329448 - DNA, 25 bp, Homo sapien
attttgctgcaggtatcatagccca

SEQ ID NO: 1329449 - DNA, 25 bp, Homo sapien
tcagagagctctcttccaagctggt

SEQ ID NO: 1329450 - DNA, 25 bp, Homo sapien
caacagtttactctgtagcagggaa

SEQ ID NO: 1329451 - DNA, 25 bp, Homo sapien
gatatcccgtgacttccagaggcgt

SEQ ID NO: 1329452 - DNA, 25 bp, Homo sapien
ccagaggcgtactcttctccaagat

SEQ ID NO: 1329453 - DNA, 25 bp, Homo sapien
tctccaagatctggtacaggaacca

SEQ ID NO: 1329454 - DNA, 25 bp, Homo sapien
tcttgactttatcgctttaggaatc

SEQ ID NO: 1329455 - DNA, 25 bp, Homo sapien
ggttatacagcaagtaactggcaga

SEQ ID NO: 1329456 - DNA, 25 bp, Homo sapien
gacacatgttcaaccgatgtcagag

SEQ ID NO: 1329457 - DNA, 25 bp, Homo sapien
gagtgcctgataactgagagaggtc

SEQ ID NO: 1329458 - DNA, 25 bp, Homo sapien
aacaatttgtccacggttatacagc

SEQ ID NO: 1329459 - DNA, 25 bp, Homo sapien
tcaagtagagagacaggcattttcc

SEQ ID NO: 1329460 - DNA, 25 bp, Homo sapien
ggttccaggcatcacgccagtcatt

SEQ ID NO: 1329461 - DNA, 25 bp, Homo sapien
tggtaggatcagcaccttggttcca

SEQ ID NO: 1329462 - DNA, 25 bp, Homo sapien
tatttctagccagggtgaagctaag

SEQ ID NO: 1329463 - DNA, 25 bp, Homo sapien
ttgccaacaaatttgggagtccgct

SEQ ID NO: 1329464 - DNA, 25 bp, Homo sapien
aaatttgggagtccgcttctccctg

SEQ ID NO: 1329465 - DNA, 25 bp, Homo sapien
caacaaatttgggagtccgcttctc

SEQ ID NO: 1329466 - DNA, 25 bp, Homo sapien
tgggagtccgcttctccctgaaggc

SEQ ID NO: 1329467 - DNA, 25 bp, Homo sapien
ggatgaaccccagtacattagatgg

SEQ ID NO: 1329468 - DNA, 25 bp, Homo sapien
ggccacaggcccaaaaagagttgct

SEQ ID NO: 1329469 - DNA, 25 bp, Homo sapien
taataggtcagtcccaagtgtacag

SEQ ID NO: 1329470 - DNA, 25 bp, Homo sapien
tgcaaaggtataagcctccgtggct

SEQ ID NO: 1329471 - DNA, 25 bp, Homo sapien
atagcacatcccttcaatggccatc

SEQ ID NO: 1329472 - DNA, 25 bp, Homo sapien
tgggcatagcacatcccttcaatgg

SEQ ID NO: 1329473 - DNA, 25 bp, Homo sapien
ggcatagcacatcccttcaatggcc

SEQ ID NO: 1329474 - DNA, 25 bp, Homo sapien
ctgggcatagcacatcccttcaatg

SEQ ID NO: 1329475 - DNA, 25 bp, Homo sapien
gattggtctgaccttgtccatcttc

SEQ ID NO: 1329476 - DNA, 25 bp, Homo sapien
gctccctggattggtctgaccttgt

SEQ ID NO: 1329477 - DNA, 25 bp, Homo sapien
tggtctgaccttgtccatcttcacc

SEQ ID NO: 1329478 - DNA, 25 bp, Homo sapien
ttgtccatcttcacccacactggaa

SEQ ID NO: 1329479 - DNA, 25 bp, Homo sapien
caaatcttgcagcatggactggcag

SEQ ID NO: 1329480 - DNA, 25 bp, Homo sapien
tttctgaacctttatgacctgggcc

SEQ ID NO: 1329481 - DNA, 25 bp, Homo sapien
gaagagcaggtctttgaacccagac

SEQ ID NO: 1329482 - DNA, 25 bp, Homo sapien
gacagatggattagccacacccaag

SEQ ID NO: 1329483 - DNA, 25 bp, Homo sapien
gttcctcggtcaatggctactttgc

SEQ ID NO: 1329484 - DNA, 25 bp, Homo sapien
tcctcggtcaatggctactttgccc

SEQ ID NO: 1329485 - DNA, 25 bp, Homo sapien
actttgcccagccgcacggcaatgg

SEQ ID NO: 1329486 - DNA, 25 bp, Homo sapien
ctccgttcctcggtcaatggctact

SEQ ID NO: 1329487 - DNA, 25 bp, Homo sapien
gcaaatgccagcctctgcggtaagg

SEQ ID NO: 1329488 - DNA, 25 bp, Homo sapien
tgggctttcaagtcgacagggctgt

SEQ ID NO: 1329489 - DNA, 25 bp, Homo sapien
ggtgctacccacacttctaggctgg

SEQ ID NO: 1329490 - DNA, 25 bp, Homo sapien
tatgcctactactgccgagactggg

SEQ ID NO: 1329491 - DNA, 25 bp, Homo sapien
tgggccagtgctcgtgcccgctggt

SEQ ID NO: 1329492 - DNA, 25 bp, Homo sapien
gccccagtacgtgggcctcagttcc

SEQ ID NO: 1329493 - DNA, 25 bp, Homo sapien
ctcgttctgggccacagcgtgattc

SEQ ID NO: 1329494 - DNA, 25 bp, Homo sapien
gtcgtcggcccgtgaagatgagctc

SEQ ID NO: 1329495 - DNA, 25 bp, Homo sapien
gggcgggtgctgtagttgcgattac

SEQ ID NO: 1329496 - DNA, 25 bp, Homo sapien
gaaagcagcgaaggaccctggatgg

SEQ ID NO: 1329497 - DNA, 25 bp, Homo sapien
aattgggcgggtgctgtagttgcga

SEQ ID NO: 1329498 - DNA, 25 bp, Homo sapien
ctgggactcagccaagacttctcag

SEQ ID NO: 1329499 - DNA, 25 bp, Homo sapien
gagccctcgcgtggtctcaatcagt

SEQ ID NO: 1329500 - DNA, 25 bp, Homo sapien
aggagccctcgcgtggtctcaatca

SEQ ID NO: 1329501 - DNA, 25 bp, Homo sapien
ggagccctcgcgtggtctcaatcag

SEQ ID NO: 1329502 - DNA, 25 bp, Homo sapien
agccctcgcgtggtctcaatcagtc

SEQ ID NO: 1329503 - DNA, 25 bp, Homo sapien
gagaaacttgccttgactgacgcac

SEQ ID NO: 1329504 - DNA, 25 bp, Homo sapien
taactgcatccaagaaggctgctcc

SEQ ID NO: 1329505 - DNA, 25 bp, Homo sapien
tcagagagccgctaaggatcacacg

SEQ ID NO: 1329506 - DNA, 25 bp, Homo sapien
cacgaggtacgacgcttggaacaag

SEQ ID NO: 1329507 - DNA, 25 bp, Homo sapien
gaatgggaagactggacattgctct

SEQ ID NO: 1329508 - DNA, 25 bp, Homo sapien
gctctgaggttggtcaaatattccc

SEQ ID NO: 1329509 - DNA, 25 bp, Homo sapien
aaggaagcaggttctgacaggtcac

SEQ ID NO: 1329510 - DNA, 25 bp, Homo sapien
tgacctccttggctcgtaacagcaa

SEQ ID NO: 1329511 - DNA, 25 bp, Homo sapien
ttttggttggaagccaagaacagtg

SEQ ID NO: 1329512 - DNA, 25 bp, Homo sapien
tgccttgccttagttttgcttttgg

SEQ ID NO: 1329513 - DNA, 25 bp, Homo sapien
ctgcagaatgtccagactcaccctg

SEQ ID NO: 1329514 - DNA, 25 bp, Homo sapien
accctgtttcactcacccctgactc

SEQ ID NO: 1329515 - DNA, 25 bp, Homo sapien
aacccatccatagccgcaatggtgg

SEQ ID NO: 1329516 - DNA, 25 bp, Homo sapien
catccatagccgcaatggtgggtgc

SEQ ID NO: 1329517 - DNA, 25 bp, Homo sapien
tccatagccgcaatggtgggtgcag

SEQ ID NO: 1329518 - DNA, 25 bp, Homo sapien
aggcaaacccatccatagccgcaat

SEQ ID NO: 1329519 - DNA, 25 bp, Homo sapien
ctgtggagaggaagaaaggctcagc

SEQ ID NO: 1329520 - DNA, 25 bp, Homo sapien
ctgcaaagccctggtgggaccagga

SEQ ID NO: 1329521 - DNA, 25 bp, Homo sapien
gtgggaccaggacagagactcaagg

SEQ ID NO: 1329522 - DNA, 25 bp, Homo sapien
ccctggtgggaccaggacagagact

SEQ ID NO: 1329523 - DNA, 25 bp, Homo sapien
ctggtgggaccaggacagagactca

SEQ ID NO: 1329524 - DNA, 25 bp, Homo sapien
ctggggaggggcaagctggttggga

SEQ ID NO: 1329525 - DNA, 25 bp, Homo sapien
ggtctggggacattacatggaacct

SEQ ID NO: 1329526 - DNA, 25 bp, Homo sapien
aggtctggggacattacatggaacc

SEQ ID NO: 1329527 - DNA, 25 bp, Homo sapien
gcagccaggttatctcagaagccaa

SEQ ID NO: 1329528 - DNA, 25 bp, Homo sapien
tatctcaggcaaaggtaacagcaat

SEQ ID NO: 1329529 - DNA, 25 bp, Homo sapien
tgtatcaggcattattgacccagga

SEQ ID NO: 1329530 - DNA, 25 bp, Homo sapien
actgctttggaatggccaggcttga

SEQ ID NO: 1329531 - DNA, 25 bp, Homo sapien
agagaactgccctcggtcatcctcc

SEQ ID NO: 1329532 - DNA, 25 bp, Homo sapien
gagaactgccctcggtcatcctcct

SEQ ID NO: 1329533 - DNA, 25 bp, Homo sapien
tgagagaactgccctcggtcatcct

SEQ ID NO: 1329534 - DNA, 25 bp, Homo sapien
ctgagagaactgccctcggtcatcc

SEQ ID NO: 1329535 - DNA, 25 bp, Homo sapien
cagaaagaagactctccttagatgc

SEQ ID NO: 1329536 - DNA, 25 bp, Homo sapien
gaagactctccttagatgctggtgg

SEQ ID NO: 1329537 - DNA, 25 bp, Homo sapien
aaagaagactctccttagatgctgg

SEQ ID NO: 1329538 - DNA, 25 bp, Homo sapien
caaacagaaagaagactctccttag

SEQ ID NO: 1329539 - DNA, 25 bp, Homo sapien
tgtcattcatcaggccccggagtcg

SEQ ID NO: 1329540 - DNA, 25 bp, Homo sapien
aggccccggagtcgctggacaaaca

SEQ ID NO: 1329541 - DNA, 25 bp, Homo sapien
catcaggccccggagtcgctggaca

SEQ ID NO: 1329542 - DNA, 25 bp, Homo sapien
atgtcattcatcaggccccggagtc

SEQ ID NO: 1329543 - DNA, 25 bp, Homo sapien
caaaacaacccaattcagaaatggg

SEQ ID NO: 1329544 - DNA, 25 bp, Homo sapien
cctcggtgacgagcaagactccgtt

SEQ ID NO: 1329545 - DNA, 25 bp, Homo sapien
ctgataaaggtttaatatctaggat

SEQ ID NO: 1329546 - DNA, 25 bp, Homo sapien
tataaagaacttctccaactaaaca

SEQ ID NO: 1329547 - DNA, 25 bp, Homo sapien
ctgcacagaacacgcccttcactcc

SEQ ID NO: 1329548 - DNA, 25 bp, Homo sapien
ccttcactccacttctgaagagcag

SEQ ID NO: 1329549 - DNA, 25 bp, Homo sapien
cttctgaagagcaggacacgcactt

SEQ ID NO: 1329550 - DNA, 25 bp, Homo sapien
agcaggacacgcacttgccggtcct

SEQ ID NO: 1329551 - DNA, 25 bp, Homo sapien
agacattccccaaggcattgcgggc

SEQ ID NO: 1329552 - DNA, 25 bp, Homo sapien
gcattgcgggcagaaggtctgttca

SEQ ID NO: 1329553 - DNA, 25 bp, Homo sapien
tgcgggcagaaggtctgttcatcag

SEQ ID NO: 1329554 - DNA, 25 bp, Homo sapien
ccccaaggcattgcgggcagaaggt

SEQ ID NO: 1329555 - DNA, 25 bp, Homo sapien
tgaccagagtgacttgccacaagtc

SEQ ID NO: 1329556 - DNA, 25 bp, Homo sapien
gagaaaaacccttgctctttctgcc

SEQ ID NO: 1329557 - DNA, 25 bp, Homo sapien
acactcaggcaggcctcaattttcc

SEQ ID NO: 1329558 - DNA, 25 bp, Homo sapien
agcagctggctctgcctaatcctgg

SEQ ID NO: 1329559 - DNA, 25 bp, Homo sapien
acagtgactaccacagtagcccttg

SEQ ID NO: 1329560 - DNA, 25 bp, Homo sapien
agtgactaccacagtagcccttgcc

SEQ ID NO: 1329561 - DNA, 25 bp, Homo sapien
actaccacagtagcccttgcctgct

SEQ ID NO: 1329562 - DNA, 25 bp, Homo sapien
tgactaccacagtagcccttgcctg

SEQ ID NO: 1329563 - DNA, 25 bp, Homo sapien
gacttatagtaatcacctctgtgta

SEQ ID NO: 1329564 - DNA, 25 bp, Homo sapien
cacatgccctgactcaatcgtagct

SEQ ID NO: 1329565 - DNA, 25 bp, Homo sapien
gaggagttatgataaggcaaatacc

SEQ ID NO: 1329566 - DNA, 25 bp, Homo sapien
agccaccgcggccttaatcttttct

SEQ ID NO: 1329567 - DNA, 25 bp, Homo sapien
gaacctacactgatgcactgtcgcc

SEQ ID NO: 1329568 - DNA, 25 bp, Homo sapien
tgtttggcaagacagtaatcctggc

SEQ ID NO: 1329569 - DNA, 25 bp, Homo sapien
gaggcacgtgttgcaactgacgaac

SEQ ID NO: 1329570 - DNA, 25 bp, Homo sapien
tatcacccaggtgtgcatccttagg

SEQ ID NO: 1329571 - DNA, 25 bp, Homo sapien
tagacaccgtgattccagagaccag

SEQ ID NO: 1329572 - DNA, 25 bp, Homo sapien
ggacagactcaaggcctgtcctcat

SEQ ID NO: 1329573 - DNA, 25 bp, Homo sapien
taagtgcgtaagttccttaaggcca

SEQ ID NO: 1329574 - DNA, 25 bp, Homo sapien
tcaggtgatgcctctgcactccttc

SEQ ID NO: 1329575 - DNA, 25 bp, Homo sapien
ggcagtggcctttaagctgagagct

SEQ ID NO: 1329576 - DNA, 25 bp, Homo sapien
cagcaatgagttatcagaggaggca

SEQ ID NO: 1329577 - DNA, 25 bp, Homo sapien
taatctggcataggctctttcctgc

SEQ ID NO: 1329578 - DNA, 25 bp, Homo sapien
tgatatctcaactggtatgtcctgc

SEQ ID NO: 1329579 - DNA, 25 bp, Homo sapien
tgcagatggccataaggtcgcttcc

SEQ ID NO: 1329580 - DNA, 25 bp, Homo sapien
tcagagcagtctagatccaaggtcc

SEQ ID NO: 1329581 - DNA, 25 bp, Homo sapien
gaactgtaacattcaggcaaactgg

SEQ ID NO: 1329582 - DNA, 25 bp, Homo sapien
gactgcagtggatagagagatgcca

SEQ ID NO: 1329583 - DNA, 25 bp, Homo sapien
tggacagtaatcagccaaggtccct

SEQ ID NO: 1329584 - DNA, 25 bp, Homo sapien
cagatactagggcaagtctcggacc

SEQ ID NO: 1329585 - DNA, 25 bp, Homo sapien
tttggctgccgacattcaattgtgc

SEQ ID NO: 1329586 - DNA, 25 bp, Homo sapien
tagccccgatgctgggaacattgcc

SEQ ID NO: 1329587 - DNA, 25 bp, Homo sapien
gaagagagacaagttcagacacacg

SEQ ID NO: 1329588 - DNA, 25 bp, Homo sapien
ctgacgcccggaaacaaggaggatt

SEQ ID NO: 1329589 - DNA, 25 bp, Homo sapien
gacacacgaaacataaaaggacagt

SEQ ID NO: 1329590 - DNA, 25 bp, Homo sapien
gactcttaaagagctaacagcctag

SEQ ID NO: 1329591 - DNA, 25 bp, Homo sapien
ccttgatattggacagccttgacct

SEQ ID NO: 1329592 - DNA, 25 bp, Homo sapien
ggtattcccgattgttatcatagga

SEQ ID NO: 1329593 - DNA, 25 bp, Homo sapien
gaaaaaagttcagtgtaacacagcc

SEQ ID NO: 1329594 - DNA, 25 bp, Homo sapien
catgggttaaacacctttgggctca

SEQ ID NO: 1329595 - DNA, 25 bp, Homo sapien
gtacagtgttatagagtctatagta

SEQ ID NO: 1329596 - DNA, 25 bp, Homo sapien
agctccccatggcttgaattaccac

SEQ ID NO: 1329597 - DNA, 25 bp, Homo sapien
tttgtaaagcaaatttagtgtagcc

SEQ ID NO: 1329598 - DNA, 25 bp, Homo sapien
aggaatctaggttgttgcgagctcc

SEQ ID NO: 1329599 - DNA, 25 bp, Homo sapien
tattcagcccggtaccatgctgtcc

SEQ ID NO: 1329600 - DNA, 25 bp, Homo sapien
ccatttatggtaactgcccagtaca

SEQ ID NO: 1329601 - DNA, 25 bp, Homo sapien
acagtattcagcccggtaccatgct

SEQ ID NO: 1329602 - DNA, 25 bp, Homo sapien
gcccagtacaggtgtactatttaaa

SEQ ID NO: 1329603 - DNA, 25 bp, Homo sapien
cagtgattacctaatggttgagaac

SEQ ID NO: 1329604 - DNA, 25 bp, Homo sapien
tcactgaattactagaagagccagt

SEQ ID NO: 1329605 - DNA, 25 bp, Homo sapien
ggctttgaaatcagacctggttcaa

SEQ ID NO: 1329606 - DNA, 25 bp, Homo sapien
tacctaatggttgagaacacaggct

SEQ ID NO: 1329607 - DNA, 25 bp, Homo sapien
gatcgaatccttcaacgcactgagc

SEQ ID NO: 1329608 - DNA, 25 bp, Homo sapien
cgaatccttcaacgcactgagcggc

SEQ ID NO: 1329609 - DNA, 25 bp, Homo sapien
gggatcgaatccttcaacgcactga

SEQ ID NO: 1329610 - DNA, 25 bp, Homo sapien
gagggactggggatcgaatccttca

SEQ ID NO: 1329611 - DNA, 25 bp, Homo sapien
ggcctagtcccagtcgcgtcatgcg

SEQ ID NO: 1329612 - DNA, 25 bp, Homo sapien
cgccgccccggaactgcacatttac

SEQ ID NO: 1329613 - DNA, 25 bp, Homo sapien
tgcctccggcctagtcccagtcgcg

SEQ ID NO: 1329614 - DNA, 25 bp, Homo sapien
gcgtcatgcgccgccccggaactgc

SEQ ID NO: 1329615 - DNA, 25 bp, Homo sapien
gcaggaggcacagaacgcgcagcat

SEQ ID NO: 1329616 - DNA, 25 bp, Homo sapien
gggcgcaggaggcacagaacgcgca

SEQ ID NO: 1329617 - DNA, 25 bp, Homo sapien
cgccagggcgcgcacttggatctct

SEQ ID NO: 1329618 - DNA, 25 bp, Homo sapien
ggcgcgcacttggatctctgagccc

SEQ ID NO: 1329619 - DNA, 25 bp, Homo sapien
gctgagagctcgcagttccggcgtc

SEQ ID NO: 1329620 - DNA, 25 bp, Homo sapien
aggtgcttctccggccctgcaccgt

SEQ ID NO: 1329621 - DNA, 25 bp, Homo sapien
cgcagttccggcgtcgggcgaagcc

SEQ ID NO: 1329622 - DNA, 25 bp, Homo sapien
cttctccggccctgcaccgtctcgg

SEQ ID NO: 1329623 - DNA, 25 bp, Homo sapien
cactgtgcctcgctgctttttgtct

SEQ ID NO: 1329624 - DNA, 25 bp, Homo sapien
gcaggtggagaagctttcaatattt

SEQ ID NO: 1329625 - DNA, 25 bp, Homo sapien
tggtatacttattcatgccacaaag

SEQ ID NO: 1329626 - DNA, 25 bp, Homo sapien
gcttaaattcacaggtcgactaatg

SEQ ID NO: 1329627 - DNA, 25 bp, Homo sapien
tcctgaaaggatccgttcagatcgg

SEQ ID NO: 1329628 - DNA, 25 bp, Homo sapien
tccttaatgccaaactgcctttcgt

SEQ ID NO: 1329629 - DNA, 25 bp, Homo sapien
tgtttgtaccgtgtatcttcacctg

SEQ ID NO: 1329630 - DNA, 25 bp, Homo sapien
gtttctccccggacgcagttgtctg

SEQ ID NO: 1329631 - DNA, 25 bp, Homo sapien
gaggtttgcgaatcagtttagtgga

SEQ ID NO: 1329632 - DNA, 25 bp, Homo sapien
gggaggtttgcgaatcagtttagtg

SEQ ID NO: 1329633 - DNA, 25 bp, Homo sapien
ggaggtttgcgaatcagtttagtgg

SEQ ID NO: 1329634 - DNA, 25 bp, Homo sapien
aggtttgcgaatcagtttagtggac

SEQ ID NO: 1329635 - DNA, 25 bp, Homo sapien
gcgagcagcttttatagccagttgc

SEQ ID NO: 1329636 - DNA, 25 bp, Homo sapien
tgcgagcagcttttatagccagttg

SEQ ID NO: 1329637 - DNA, 25 bp, Homo sapien
gagcagcttttatagccagttgctt

SEQ ID NO: 1329638 - DNA, 25 bp, Homo sapien
cttgcgagcagcttttatagccagt

SEQ ID NO: 1329639 - DNA, 25 bp, Homo sapien
cagtggttcatttcgggcagtcagc

SEQ ID NO: 1329640 - DNA, 25 bp, Homo sapien
agtggttcatttcgggcagtcagct

SEQ ID NO: 1329641 - DNA, 25 bp, Homo sapien
gcctcccgagtattacaggtgtgca

SEQ ID NO: 1329642 - DNA, 25 bp, Homo sapien
cctcccgagtattacaggtgtgcat

SEQ ID NO: 1329643 - DNA, 25 bp, Homo sapien
ccgagtattacaggtgtgcatgcta

SEQ ID NO: 1329644 - DNA, 25 bp, Homo sapien
tcccgagtattacaggtgtgcatgc

SEQ ID NO: 1329645 - DNA, 25 bp, Homo sapien
tgggtacaaccaagaccagaccagc

SEQ ID NO: 1329646 - DNA, 25 bp, Homo sapien
cctgaagctatacaagggtatgctc

SEQ ID NO: 1329647 - DNA, 25 bp, Homo sapien
taacaatcaatatctagcagggaat

SEQ ID NO: 1329648 - DNA, 25 bp, Homo sapien
cagaccagcaagtaaaagttctacc

SEQ ID NO: 1329649 - DNA, 25 bp, Homo sapien
ttcacagaaaggactagccagcttc

SEQ ID NO: 1329650 - DNA, 25 bp, Homo sapien
tctaaggctagaaaggtaccaacaa

SEQ ID NO: 1329651 - DNA, 25 bp, Homo sapien
cagataatctttgaagcagccttag

SEQ ID NO: 1329652 - DNA, 25 bp, Homo sapien
catggtgatcatttgtctaaggcta

SEQ ID NO: 1329653 - DNA, 25 bp, Homo sapien
gttgccgtgctaactgccgtccttc

SEQ ID NO: 1329654 - DNA, 25 bp, Homo sapien
ccttaagttgccgtgctaactgccg

SEQ ID NO: 1329655 - DNA, 25 bp, Homo sapien
aagttgccgtgctaactgccgtcct

SEQ ID NO: 1329656 - DNA, 25 bp, Homo sapien
ttaagttgccgtgctaactgccgtc

SEQ ID NO: 1329657 - DNA, 25 bp, Homo sapien
ctttgatgatccagatctgctttat

SEQ ID NO: 1329658 - DNA, 25 bp, Homo sapien
tgcctctatctgtgactgaaaagac

SEQ ID NO: 1329659 - DNA, 25 bp, Homo sapien
caattaaaatcattgggaactcatc

SEQ ID NO: 1329660 - DNA, 25 bp, Homo sapien
catcacgatcctttactctgagaat

SEQ ID NO: 1329661 - DNA, 25 bp, Homo sapien
tcgccagtcctcatatactgttctc

SEQ ID NO: 1329662 - DNA, 25 bp, Homo sapien
tggttggatcataatccgttacaaa

SEQ ID NO: 1329663 - DNA, 25 bp, Homo sapien
ctgtcatctatcacacactgctttg

SEQ ID NO: 1329664 - DNA, 25 bp, Homo sapien
ctctgtcatctatcacacactgctt

SEQ ID NO: 1329665 - DNA, 25 bp, Homo sapien
ggatcataatccgttacaaaatagg

SEQ ID NO: 1329666 - DNA, 25 bp, Homo sapien
tagtattcctaagctatgttttgga

SEQ ID NO: 1329667 - DNA, 25 bp, Homo sapien
tgtaatatgattgaagactcctgca

SEQ ID NO: 1329668 - DNA, 25 bp, Homo sapien
tgcatgcctcctcaataatattccc

SEQ ID NO: 1329669 - DNA, 25 bp, Homo sapien
ggtaatcaatatcctgaatttggta

SEQ ID NO: 1329670 - DNA, 25 bp, Homo sapien
gtgccctgattgcatcatgaacacc

SEQ ID NO: 1329671 - DNA, 25 bp, Homo sapien
cctgattgcatcatgaacaccctca

SEQ ID NO: 1329672 - DNA, 25 bp, Homo sapien
tgcatcatgaacaccctcagtgtgg

SEQ ID NO: 1329673 - DNA, 25 bp, Homo sapien
ggtcgagccctacaacatcaccctc

SEQ ID NO: 1329674 - DNA, 25 bp, Homo sapien
gatgacttgaacacgagcagtaccc

SEQ ID NO: 1329675 - DNA, 25 bp, Homo sapien
tagctactaactgactaacgggtgg

SEQ ID NO: 1329676 - DNA, 25 bp, Homo sapien
tgtatgcacatctgaatcgccactt

SEQ ID NO: 1329677 - DNA, 25 bp, Homo sapien
taccacttggatatgctgggcaaag

SEQ ID NO: 1329678 - DNA, 25 bp, Homo sapien
tggatgtgagggcactactgtattt

SEQ ID NO: 1329679 - DNA, 25 bp, Homo sapien
ggatgtgagggcactactgtatttt

SEQ ID NO: 1329680 - DNA, 25 bp, Homo sapien
gatgtgagggcactactgtatttta

SEQ ID NO: 1329681 - DNA, 25 bp, Homo sapien
catggatgtgagggcactactgtat

SEQ ID NO: 1329682 - DNA, 25 bp, Homo sapien
tatgtatacatggagacacacttct

SEQ ID NO: 1329683 - DNA, 25 bp, Homo sapien
tccaacaaaggatatgagacacact

SEQ ID NO: 1329684 - DNA, 25 bp, Homo sapien
caagccggaatacctcacagtctaa

SEQ ID NO: 1329685 - DNA, 25 bp, Homo sapien
taacccggctgtagcttttgacatt

SEQ ID NO: 1329686 - DNA, 25 bp, Homo sapien
ttcagccaggcaacgctaagctctg

SEQ ID NO: 1329687 - DNA, 25 bp, Homo sapien
tacacattggcaaatagcgtgggat

SEQ ID NO: 1329688 - DNA, 25 bp, Homo sapien
gatggtatactactgctttgcggaa

SEQ ID NO: 1329689 - DNA, 25 bp, Homo sapien
tttgcggaattgcatacaactgtgc

SEQ ID NO: 1329690 - DNA, 25 bp, Homo sapien
ttcttctttgatgatgaggcataac

SEQ ID NO: 1329691 - DNA, 25 bp, Homo sapien
tcagccctcagctcaaagtaggagg

SEQ ID NO: 1329692 - DNA, 25 bp, Homo sapien
gccttcatcaaggtccttcagatgg

SEQ ID NO: 1329693 - DNA, 25 bp, Homo sapien
ccatagctatttgggactctactgc

SEQ ID NO: 1329694 - DNA, 25 bp, Homo sapien
gggcccaagacccagtctactctag

SEQ ID NO: 1329695 - DNA, 25 bp, Homo sapien
agcccgtggactgccctgggaaaga

SEQ ID NO: 1329696 - DNA, 25 bp, Homo sapien
tgggggttctgctccctcatgtcca

SEQ ID NO: 1329697 - DNA, 25 bp, Homo sapien
actcttagggcccaagacccagtct

SEQ ID NO: 1329698 - DNA, 25 bp, Homo sapien
agccggtgctggtactgagccctga

SEQ ID NO: 1329699 - DNA, 25 bp, Homo sapien
ccgaagagaacgaatttgcggagga

SEQ ID NO: 1329700 - DNA, 25 bp, Homo sapien
agcctgagccccgaagagaacgaat

SEQ ID NO: 1329701 - DNA, 25 bp, Homo sapien
gagccccgaagagaacgaatttgcg

SEQ ID NO: 1329702 - DNA, 25 bp, Homo sapien
tggcaggacacaggcacttttccaa

SEQ ID NO: 1329703 - DNA, 25 bp, Homo sapien
tgggcagtcactctgctaagagtcc

SEQ ID NO: 1329704 - DNA, 25 bp, Homo sapien
cagctgcacctaggagacacctttg

SEQ ID NO: 1329705 - DNA, 25 bp, Homo sapien
gcacttttccaatgggcaagcccag

SEQ ID NO: 1329706 - DNA, 25 bp, Homo sapien
gagaagaatgtgtgatcctggcccc

SEQ ID NO: 1329707 - DNA, 25 bp, Homo sapien
ccacttggacgcacaggcctttggg

SEQ ID NO: 1329708 - DNA, 25 bp, Homo sapien
ggcttgcctacctattccatgggag

SEQ ID NO: 1329709 - DNA, 25 bp, Homo sapien
tcttgaccttaacgtgagaccttgg

SEQ ID NO: 1329710 - DNA, 25 bp, Homo sapien
cagtggttcagactcgcagcgggca

SEQ ID NO: 1329711 - DNA, 25 bp, Homo sapien
tcactggcttggtctcgcagggcag

SEQ ID NO: 1329712 - DNA, 25 bp, Homo sapien
cagccattctgctgggctgccacga

SEQ ID NO: 1329713 - DNA, 25 bp, Homo sapien
ggaggcctcggctacactcttcaca

SEQ ID NO: 1329714 - DNA, 25 bp, Homo sapien
gttaatcatggtgcggaaacggtcc

SEQ ID NO: 1329715 - DNA, 25 bp, Homo sapien
agcgcatcacccagcacgttaatca

SEQ ID NO: 1329716 - DNA, 25 bp, Homo sapien
aaatccttccgacatatatgggcca

SEQ ID NO: 1329717 - DNA, 25 bp, Homo sapien
tgtgtcccgggcaaaatccttccga

SEQ ID NO: 1329718 - DNA, 25 bp, Homo sapien
cccagtcaacggcaatgatgagggt

SEQ ID NO: 1329719 - DNA, 25 bp, Homo sapien
gccagctgccccaatgctggctgca

SEQ ID NO: 1329720 - DNA, 25 bp, Homo sapien
atgtcatcggtgggcagtcccacgg

SEQ ID NO: 1329721 - DNA, 25 bp, Homo sapien
tgagcacgatgaccatggtgacgag

SEQ ID NO: 1329722 - DNA, 25 bp, Homo sapien
cctcaggagaatccctgggaactgt

SEQ ID NO: 1329723 - DNA, 25 bp, Homo sapien
ttcgttggctcctgccacacgggcg

SEQ ID NO: 1329724 - DNA, 25 bp, Homo sapien
tgggagcctgggaatccccaaggcc

SEQ ID NO: 1329725 - DNA, 25 bp, Homo sapien
gcctctgggacagccatttggtgcg

SEQ ID NO: 1329726 - DNA, 25 bp, Homo sapien
tgcgccggtcgatgtggttgttctc

SEQ ID NO: 1329727 - DNA, 25 bp, Homo sapien
ggccaaagtccagctcgtagttgtt

SEQ ID NO: 1329728 - DNA, 25 bp, Homo sapien
cgtagttgttgacctgggcgatgaa

SEQ ID NO: 1329729 - DNA, 25 bp, Homo sapien
gagcgcagtgccgtccatgttgatg

SEQ ID NO: 1329730 - DNA, 25 bp, Homo sapien
tacggttagaggggccggtgtctgc

SEQ ID NO: 1329731 - DNA, 25 bp, Homo sapien
ctacggttagaggggccggtgtctg

SEQ ID NO: 1329732 - DNA, 25 bp, Homo sapien
gttagaggggccggtgtctgcccag

SEQ ID NO: 1329733 - DNA, 25 bp, Homo sapien
agaggggccggtgtctgcccagcac

SEQ ID NO: 1329734 - DNA, 25 bp, Homo sapien
aggaccgcgggcactgcagtgctct

SEQ ID NO: 1329735 - DNA, 25 bp, Homo sapien
gccaccccgccaggagtgtttgtgc

SEQ ID NO: 1329736 - DNA, 25 bp, Homo sapien
gaccgcgggcactgcagtgctctca

SEQ ID NO: 1329737 - DNA, 25 bp, Homo sapien
tgtcgggaagctcacccctccccag

SEQ ID NO: 1329738 - DNA, 25 bp, Homo sapien
caccacggtgactgagtagaagccc

SEQ ID NO: 1329739 - DNA, 25 bp, Homo sapien
ggatcttacccgcaatgaggaacac

SEQ ID NO: 1329740 - DNA, 25 bp, Homo sapien
gcaggataaagagcccgtggagcac

SEQ ID NO: 1329741 - DNA, 25 bp, Homo sapien
ccacggatgaagacgatgggattct

SEQ ID NO: 1329742 - DNA, 25 bp, Homo sapien
gcagccaggctcaggaaccaggcag

SEQ ID NO: 1329743 - DNA, 25 bp, Homo sapien
aggcaggcagacacaccccggcccc

SEQ ID NO: 1329744 - DNA, 25 bp, Homo sapien
caggcagacacaccccggccccagc

SEQ ID NO: 1329745 - DNA, 25 bp, Homo sapien
caggctcaggaaccaggcaggcaga

SEQ ID NO: 1329746 - DNA, 25 bp, Homo sapien
tcatgaccgactcattgaggcactg

SEQ ID NO: 1329747 - DNA, 25 bp, Homo sapien
acagccaccgccacgatcttcatga

SEQ ID NO: 1329748 - DNA, 25 bp, Homo sapien
cacgatcttcatgaccgactcattg

SEQ ID NO: 1329749 - DNA, 25 bp, Homo sapien
accgccacgatcttcatgaccgact

SEQ ID NO: 1329750 - DNA, 25 bp, Homo sapien
gagcagagcactctctacagctgcc

SEQ ID NO: 1329751 - DNA, 25 bp, Homo sapien
ggtgagaccgacgtggggagcagag

SEQ ID NO: 1329752 - DNA, 25 bp, Homo sapien
ggagcagagcactctctacagctgc

SEQ ID NO: 1329753 - DNA, 25 bp, Homo sapien
tcctggtgagaccgacgtggggagc

SEQ ID NO: 1329754 - DNA, 25 bp, Homo sapien
ctggtatctgcaccaacaggcacag

SEQ ID NO: 1329755 - DNA, 25 bp, Homo sapien
actggtatctgcaccaacaggcaca

SEQ ID NO: 1329756 - DNA, 25 bp, Homo sapien
gaaagaccaggcacacgctgatgcg

SEQ ID NO: 1329757 - DNA, 25 bp, Homo sapien
aagaccaggcacacgctgatgcggg

SEQ ID NO: 1329758 - DNA, 25 bp, Homo sapien
cagatgtgggcacacgcaggcatga

SEQ ID NO: 1329759 - DNA, 25 bp, Homo sapien
cacgctgatgcggggacacaggaat

SEQ ID NO: 1329760 - DNA, 25 bp, Homo sapien
aagagctccattacccattgtcacc

SEQ ID NO: 1329761 - DNA, 25 bp, Homo sapien
cgttttggcccagatgagaagagct

SEQ ID NO: 1329762 - DNA, 25 bp, Homo sapien
tgtcacccagccgtccacccatctc

SEQ ID NO: 1329763 - DNA, 25 bp, Homo sapien
cagatgagaagagctccattaccca

SEQ ID NO: 1329764 - DNA, 25 bp, Homo sapien
tgctgtagccacggcagcggtgggc

SEQ ID NO: 1329765 - DNA, 25 bp, Homo sapien
gctgtagccacggcagcggtgggct

SEQ ID NO: 1329766 - DNA, 25 bp, Homo sapien
ggatggagacaagcccgtcagcctg

SEQ ID NO: 1329767 - DNA, 25 bp, Homo sapien
agacaagcccgtcagcctgtatggg

SEQ ID NO: 1329768 - DNA, 25 bp, Homo sapien
gggtggatggagacaagcccgtcag

SEQ ID NO: 1329769 - DNA, 25 bp, Homo sapien
ggagacaagcccgtcagcctgtatg

SEQ ID NO: 1329770 - DNA, 25 bp, Homo sapien
gggcctcctctggtgccaccttggg

SEQ ID NO: 1329771 - DNA, 25 bp, Homo sapien
ctcctggaccccgtagatgaggatc

SEQ ID NO: 1329772 - DNA, 25 bp, Homo sapien
ggtccagggcgaagttctgcacatg

SEQ ID NO: 1329773 - DNA, 25 bp, Homo sapien
tctgacttgtaaacgacctcgggcg

SEQ ID NO: 1329774 - DNA, 25 bp, Homo sapien
aatgggaccgtgatagcatctactg

SEQ ID NO: 1329775 - DNA, 25 bp, Homo sapien
gataaggccaaccactcaggaaaca

SEQ ID NO: 1329776 - DNA, 25 bp, Homo sapien
gccccaagccttgttaatgagatga

SEQ ID NO: 1329777 - DNA, 25 bp, Homo sapien
tttttgaagaagcatagcctgcccc

SEQ ID NO: 1329778 - DNA, 25 bp, Homo sapien
tgaatgtggcttctactaggttggc

SEQ ID NO: 1329779 - DNA, 25 bp, Homo sapien
ctgtttgaatgtggcttctactagg

SEQ ID NO: 1329780 - DNA, 25 bp, Homo sapien
tggcttctactaggttggctgggaa

SEQ ID NO: 1329781 - DNA, 25 bp, Homo sapien
tactaggttggctgggaacatgttc

SEQ ID NO: 1329782 - DNA, 25 bp, Homo sapien
aatgggacctgccatcaagctctga

SEQ ID NO: 1329783 - DNA, 25 bp, Homo sapien
cagggacagctagttgcctatgcag

SEQ ID NO: 1329784 - DNA, 25 bp, Homo sapien
tcaagactcagtttacacacacgga

SEQ ID NO: 1329785 - DNA, 25 bp, Homo sapien
catctggtaagaggcttccgttgca

SEQ ID NO: 1329786 - DNA, 25 bp, Homo sapien
tcagccaggaccctttggtccgttc

SEQ ID NO: 1329787 - DNA, 25 bp, Homo sapien
agccttcacgggaagacttttctgc

SEQ ID NO: 1329788 - DNA, 25 bp, Homo sapien
tcttttggctttgagccttcacggg

SEQ ID NO: 1329789 - DNA, 25 bp, Homo sapien
tttgattattaaatggggaaatgta

SEQ ID NO: 1329790 - DNA, 25 bp, Homo sapien
ctttgattattaaatggggaaatgt

SEQ ID NO: 1329791 - DNA, 25 bp, Homo sapien
tttgcgtgctgcactgtgagcaggc

SEQ ID NO: 1329792 - DNA, 25 bp, Homo sapien
gttttgcgtgctgcactgtgagcag

SEQ ID NO: 1329793 - DNA, 25 bp, Homo sapien
ttctgttttgcgtgctgcactgtga

SEQ ID NO: 1329794 - DNA, 25 bp, Homo sapien
tgttttgcgtgctgcactgtgagca

SEQ ID NO: 1329795 - DNA, 25 bp, Homo sapien
cagggacatggcctgttgtgttcct

SEQ ID NO: 1329796 - DNA, 25 bp, Homo sapien
tcttggagggtcatccagggacatg

SEQ ID NO: 1329797 - DNA, 25 bp, Homo sapien
gaattcctgtcttggagggtcatcc

SEQ ID NO: 1329798 - DNA, 25 bp, Homo sapien
gcctgttgtgttcctctggagtcat

SEQ ID NO: 1329799 - DNA, 25 bp, Homo sapien
gtgtgccttatgtccccacgcagtg

SEQ ID NO: 1329800 - DNA, 25 bp, Homo sapien
gatgcagatctttgcccctgtggtg

SEQ ID NO: 1329801 - DNA, 25 bp, Homo sapien
gtggtgtgccttatgtccccacgca

SEQ ID NO: 1329802 - DNA, 25 bp, Homo sapien
cacctggtaggcacctgttctgggc

SEQ ID NO: 1329803 - DNA, 25 bp, Homo sapien
accttctgaattggatcatgccgct

SEQ ID NO: 1329804 - DNA, 25 bp, Homo sapien
tgtggcctttaggatgcaacttagc

SEQ ID NO: 1329805 - DNA, 25 bp, Homo sapien
gatcatgccgcttctctgtataaaa

SEQ ID NO: 1329806 - DNA, 25 bp, Homo sapien
gatccctggtcagattgaaccttct

SEQ ID NO: 1329807 - DNA, 25 bp, Homo sapien
ccctgtctgctcgtgggtctgacca

SEQ ID NO: 1329808 - DNA, 25 bp, Homo sapien
cctgtctgctcgtgggtctgaccac

SEQ ID NO: 1329809 - DNA, 25 bp, Homo sapien
tccctgtctgctcgtgggtctgacc

SEQ ID NO: 1329810 - DNA, 25 bp, Homo sapien
ctgtctgctcgtgggtctgaccact

SEQ ID NO: 1329811 - DNA, 25 bp, Homo sapien
ctggtgagggagcgaatgcacgaag

SEQ ID NO: 1329812 - DNA, 25 bp, Homo sapien
agatgtctgctctgcgcccatccac

SEQ ID NO: 1329813 - DNA, 25 bp, Homo sapien
tctgcgcccatccacaggcagagag

SEQ ID NO: 1329814 - DNA, 25 bp, Homo sapien
gggcagaccccgtccaggctgcaag

SEQ ID NO: 1329815 - DNA, 25 bp, Homo sapien
gtccaggctgcaaggtgcttctagc

SEQ ID NO: 1329816 - DNA, 25 bp, Homo sapien
catcggctgagctcatgatgggctt

SEQ ID NO: 1329817 - DNA, 25 bp, Homo sapien
agtacgccacggtgaggacgcccag

SEQ ID NO: 1329818 - DNA, 25 bp, Homo sapien
gatgaggtccaacagggcatcggct

SEQ ID NO: 1329819 - DNA, 25 bp, Homo sapien
catgaaggtggtccacaggtagtac

SEQ ID NO: 1329820 - DNA, 25 bp, Homo sapien
ggagccctagagcaacgcttcttgc

SEQ ID NO: 1329821 - DNA, 25 bp, Homo sapien
gcaggtcagccccagagtactggcg

SEQ ID NO: 1329822 - DNA, 25 bp, Homo sapien
agagtactggcgtcctggagccctg

SEQ ID NO: 1329823 - DNA, 25 bp, Homo sapien
gagccctagagcaacgcttcttgca

SEQ ID NO: 1329824 - DNA, 25 bp, Homo sapien
aatgtattgatcaggcacaggcagt

SEQ ID NO: 1329825 - DNA, 25 bp, Homo sapien
cattgaaaatgtattgatcaggcac

SEQ ID NO: 1329826 - DNA, 25 bp, Homo sapien
caaatgctgatggtgagactttccc

SEQ ID NO: 1329827 - DNA, 25 bp, Homo sapien
aagttcagctcctaactgtcctcca

SEQ ID NO: 1329828 - DNA, 25 bp, Homo sapien
gcagacagaactgcctgccaagggt

SEQ ID NO: 1329829 - DNA, 25 bp, Homo sapien
cttcgttgctgggtaaagaagccca

SEQ ID NO: 1329830 - DNA, 25 bp, Homo sapien
cagatcacatgatcgcttgtggtgg

SEQ ID NO: 1329831 - DNA, 25 bp, Homo sapien
tgtgacaccagggtccatacaatgg

SEQ ID NO: 1329832 - DNA, 25 bp, Homo sapien
catcaggagctctccagggaactgg

SEQ ID NO: 1329833 - DNA, 25 bp, Homo sapien
ctggagaccaccagtggcaggatca

SEQ ID NO: 1329834 - DNA, 25 bp, Homo sapien
ttcagcatcctcatcaggagctctc

SEQ ID NO: 1329835 - DNA, 25 bp, Homo sapien
ccaccagtggcaggatcatcatctt

SEQ ID NO: 1329836 - DNA, 25 bp, Homo sapien
gccgggtcctcaagaagaagccgag

SEQ ID NO: 1329837 - DNA, 25 bp, Homo sapien
aagccgaggaggcagcccacgatga

SEQ ID NO: 1329838 - DNA, 25 bp, Homo sapien
ccccgtgccaagatggcatgcggca

SEQ ID NO: 1329839 - DNA, 25 bp, Homo sapien
atgaggagtccattccgcctgcaca

SEQ ID NO: 1329840 - DNA, 25 bp, Homo sapien
tcggagttgctaaacaccagtcgcc

SEQ ID NO: 1329841 - DNA, 25 bp, Homo sapien
gcaggtggtcggagttgctaaacac

SEQ ID NO: 1329842 - DNA, 25 bp, Homo sapien
gagttgctaaacaccagtcgccagc

SEQ ID NO: 1329843 - DNA, 25 bp, Homo sapien
attccacgcatgagagcccggccgg

SEQ ID NO: 1329844 - DNA, 25 bp, Homo sapien
gaaatccaggcacatctgaagtaca

SEQ ID NO: 1329845 - DNA, 25 bp, Homo sapien
aggcacatctgaagtacattctctc

SEQ ID NO: 1329846 - DNA, 25 bp, Homo sapien
ctgaagtacattctctcagacagca

SEQ ID NO: 1329847 - DNA, 25 bp, Homo sapien
tccaggcacatctgaagtacattct

SEQ ID NO: 1329848 - DNA, 25 bp, Homo sapien
taaagactggcatcacagctgctaa

SEQ ID NO: 1329849 - DNA, 25 bp, Homo sapien
gatgacttccccattaaggaccttg

SEQ ID NO: 1329850 - DNA, 25 bp, Homo sapien
taacctcattatcgccaaggatggc

SEQ ID NO: 1329851 - DNA, 25 bp, Homo sapien
gtcacggtgcagaaactcaacttcg

SEQ ID NO: 1329852 - DNA, 25 bp, Homo sapien
cactggccccgttacacagcaagtt

SEQ ID NO: 1329853 - DNA, 25 bp, Homo sapien
cagcaagttagtagtaagactgaga

SEQ ID NO: 1329854 - DNA, 25 bp, Homo sapien
gtaagactgagattcgaaccctggt

SEQ ID NO: 1329855 - DNA, 25 bp, Homo sapien
gaaccctggtcaaacagactttcca

SEQ ID NO: 1329856 - DNA, 25 bp, Homo sapien
gttcatgacaactggataggctgca

SEQ ID NO: 1329857 - DNA, 25 bp, Homo sapien
tgtgcatagaggtagagccttcccc

SEQ ID NO: 1329858 - DNA, 25 bp, Homo sapien
ggccagggctttgaccgacacttgt

SEQ ID NO: 1329859 - DNA, 25 bp, Homo sapien
tcatcatgaaaactgggaggccggg

SEQ ID NO: 1329860 - DNA, 25 bp, Homo sapien
aagggcatttaatcaggaggaaagg

SEQ ID NO: 1329861 - DNA, 25 bp, Homo sapien
aaaactaactcaggtgtatttattg

SEQ ID NO: 1329862 - DNA, 25 bp, Homo sapien
cacgaattcttatttgtggagggag

SEQ ID NO: 1329863 - DNA, 25 bp, Homo sapien
taagttcaggtaacagtacgtcacc

SEQ ID NO: 1329864 - DNA, 25 bp, Homo sapien
caacagcaagttcagtaagttcagg

SEQ ID NO: 1329865 - DNA, 25 bp, Homo sapien
tgggatcgcggtttcatctctgtaa

SEQ ID NO: 1329866 - DNA, 25 bp, Homo sapien
gtttcgtatagccaccaggagacaa

SEQ ID NO: 1329867 - DNA, 25 bp, Homo sapien
gagacaagggtcaaaggaacgagcc

SEQ ID NO: 1329868 - DNA, 25 bp, Homo sapien
tctgctgcttagagtactttgtcct

SEQ ID NO: 1329869 - DNA, 25 bp, Homo sapien
tctcagttcttaagggcaactggga

SEQ ID NO: 1329870 - DNA, 25 bp, Homo sapien
ggtgacctcatagattcccacagac

SEQ ID NO: 1329871 - DNA, 25 bp, Homo sapien
tgacctcatagattcccacagactc

SEQ ID NO: 1329872 - DNA, 25 bp, Homo sapien
acctcatagattcccacagactcct

SEQ ID NO: 1329873 - DNA, 25 bp, Homo sapien
gtgacctcatagattcccacagact

SEQ ID NO: 1329874 - DNA, 25 bp, Homo sapien
ttagcctcacaacgcagaatgcagc

SEQ ID NO: 1329875 - DNA, 25 bp, Homo sapien
gaacatgtatgaccctgaacagagc

SEQ ID NO: 1329876 - DNA, 25 bp, Homo sapien
tgaacagagccagatagctcaggcc

SEQ ID NO: 1329877 - DNA, 25 bp, Homo sapien
gcagccatgtggagagcagaaaact

SEQ ID NO: 1329878 - DNA, 25 bp, Homo sapien
actgaaggctgtccctgactccaca

SEQ ID NO: 1329879 - DNA, 25 bp, Homo sapien
cctgcagattaatgtcactgaaggc

SEQ ID NO: 1329880 - DNA, 25 bp, Homo sapien
ctcctgcagattaatgtcactgaag

SEQ ID NO: 1329881 - DNA, 25 bp, Homo sapien
gcagattaatgtcactgaaggctgt

SEQ ID NO: 1329882 - DNA, 25 bp, Homo sapien
gcactcaaactccactattgtcttg

SEQ ID NO: 1329883 - DNA, 25 bp, Homo sapien
tcaaggccccggcactcaaactcca

SEQ ID NO: 1329884 - DNA, 25 bp, Homo sapien
ctcaaactccactattgtcttgaag

SEQ ID NO: 1329885 - DNA, 25 bp, Homo sapien
ccccggcactcaaactccactattg

SEQ ID NO: 1329886 - DNA, 25 bp, Homo sapien
cacatctctggcactggtaaggcac

SEQ ID NO: 1329887 - DNA, 25 bp, Homo sapien
taaaggatgggatgcaccaaacgac

SEQ ID NO: 1329888 - DNA, 25 bp, Homo sapien
tatgggcttagggaccacaagtgcc

SEQ ID NO: 1329889 - DNA, 25 bp, Homo sapien
tattatgtacgtgaaggcgagtcct

SEQ ID NO: 1329890 - DNA, 25 bp, Homo sapien
tccctgccactacagcagcaaactt

SEQ ID NO: 1329891 - DNA, 25 bp, Homo sapien
catccctgccactacagcagcaaac

SEQ ID NO: 1329892 - DNA, 25 bp, Homo sapien
cctgccactacagcagcaaacttac

SEQ ID NO: 1329893 - DNA, 25 bp, Homo sapien
ccctgccactacagcagcaaactta

SEQ ID NO: 1329894 - DNA, 25 bp, Homo sapien
aggcttgatggtgctgcttaaaatc

SEQ ID NO: 1329895 - DNA, 25 bp, Homo sapien
taaggcttgatggtgctgcttaaaa

SEQ ID NO: 1329896 - DNA, 25 bp, Homo sapien
attgtaaggcttgatggtgctgctt

SEQ ID NO: 1329897 - DNA, 25 bp, Homo sapien
tgtaaggcttgatggtgctgcttaa

SEQ ID NO: 1329898 - DNA, 25 bp, Homo sapien
gttgacttgagtccataccctcgcc

SEQ ID NO: 1329899 - DNA, 25 bp, Homo sapien
caccctcaggtaacatgagtctact

SEQ ID NO: 1329900 - DNA, 25 bp, Homo sapien
aagatcacgctgtacaggtgtcggc

SEQ ID NO: 1329901 - DNA, 25 bp, Homo sapien
catgtggccctgaaaaagatcacgc

SEQ ID NO: 1329902 - DNA, 25 bp, Homo sapien
cagcttgcacttctggaccatggaa

SEQ ID NO: 1329903 - DNA, 25 bp, Homo sapien
acttctggaccatggaagcactgcc

SEQ ID NO: 1329904 - DNA, 25 bp, Homo sapien
gcacacagcttgcacttctggacca

SEQ ID NO: 1329905 - DNA, 25 bp, Homo sapien
tggaccatggaagcactgccacggc

SEQ ID NO: 1329906 - DNA, 25 bp, Homo sapien
tactaggacaagactcctgggaagg

SEQ ID NO: 1329907 - DNA, 25 bp, Homo sapien
aagatgcctattgaatccagtgctg

SEQ ID NO: 1329908 - DNA, 25 bp, Homo sapien
aaatccctgcccagaagtgtatgtg

SEQ ID NO: 1329909 - DNA, 25 bp, Homo sapien
gagatcgagcccaccatttattgtc

SEQ ID NO: 1329910 - DNA, 25 bp, Homo sapien
catcagccggatgtactgccacttg

SEQ ID NO: 1329911 - DNA, 25 bp, Homo sapien
tactgccacttgtccgaaatctcac

SEQ ID NO: 1329912 - DNA, 25 bp, Homo sapien
gccggatgtactgccacttgtccga

SEQ ID NO: 1329913 - DNA, 25 bp, Homo sapien
ggatgtactgccacttgtccgaaat

SEQ ID NO: 1329914 - DNA, 25 bp, Homo sapien
agaaggctccggttcagcactgaga

SEQ ID NO: 1329915 - DNA, 25 bp, Homo sapien
catgccactagggtaccagctttac

SEQ ID NO: 1329916 - DNA, 25 bp, Homo sapien
agattctcccaagtaagccctggta

SEQ ID NO: 1329917 - DNA, 25 bp, Homo sapien
aaacaaaagtagtccggaggcagct

SEQ ID NO: 1329918 - DNA, 25 bp, Homo sapien
ttggtgatgttctccagcgtggctt

SEQ ID NO: 1329919 - DNA, 25 bp, Homo sapien
tgttctccagcgtggctttgagttg

SEQ ID NO: 1329920 - DNA, 25 bp, Homo sapien
tgatgttctccagcgtggctttgag

SEQ ID NO: 1329921 - DNA, 25 bp, Homo sapien
tggctttgagttgcagcgcgatttt

SEQ ID NO: 1329922 - DNA, 25 bp, Homo sapien
agagcgactgcgtcagccgtgcctg

SEQ ID NO: 1329923 - DNA, 25 bp, Homo sapien
ccctcccgcattcccagccgtgggt

SEQ ID NO: 1329924 - DNA, 25 bp, Homo sapien
gggagggccagagcgactgcgtcag

SEQ ID NO: 1329925 - DNA, 25 bp, Homo sapien
gccgtgcctgcgcagccccacgcct

SEQ ID NO: 1329926 - DNA, 25 bp, Homo sapien
agaccctcgccacctcccctccgtg

SEQ ID NO: 1329927 - DNA, 25 bp, Homo sapien
tcctcctggcgcgagctgttgcctc

SEQ ID NO: 1329928 - DNA, 25 bp, Homo sapien
atctcctcctggcgcgagctgttgc

SEQ ID NO: 1329929 - DNA, 25 bp, Homo sapien
cctggcgcgagctgttgcctcccag

SEQ ID NO: 1329930 - DNA, 25 bp, Homo sapien
cctctccgcccggtgctggctgcgg

SEQ ID NO: 1329931 - DNA, 25 bp, Homo sapien
ggtagccctctccgcccggtgctgg

SEQ ID NO: 1329932 - DNA, 25 bp, Homo sapien
tgctggctgcggcccttgccgttgc

SEQ ID NO: 1329933 - DNA, 25 bp, Homo sapien
ctggctgcggcccttgccgttgctt

SEQ ID NO: 1329934 - DNA, 25 bp, Homo sapien
gcctcctgtccaggctacatctgag

SEQ ID NO: 1329935 - DNA, 25 bp, Homo sapien
gtccaggctacatctgagaccatgc

SEQ ID NO: 1329936 - DNA, 25 bp, Homo sapien
tggcctcctgtccaggctacatctg

SEQ ID NO: 1329937 - DNA, 25 bp, Homo sapien
caggctacatctgagaccatgcagg

SEQ ID NO: 1329938 - DNA, 25 bp, Homo sapien
tgttcaggtctttataaaataataa

SEQ ID NO: 1329939 - DNA, 25 bp, Homo sapien
acatgttcaggtctttataaaataa

SEQ ID NO: 1329940 - DNA, 25 bp, Homo sapien
catgttcaggtctttataaaataat

SEQ ID NO: 1329941 - DNA, 25 bp, Homo sapien
cacatgttcaggtctttataaaata

SEQ ID NO: 1329942 - DNA, 25 bp, Homo sapien
ttcataaaaaaatactgccctgata

SEQ ID NO: 1329943 - DNA, 25 bp, Homo sapien
tactgccctgatatacacaaaattt

SEQ ID NO: 1329944 - DNA, 25 bp, Homo sapien
gccctgatatacacaaaattttcta

SEQ ID NO: 1329945 - DNA, 25 bp, Homo sapien
aaaaatactgccctgatatacacaa

SEQ ID NO: 1329946 - DNA, 25 bp, Homo sapien
gataataaaatactcgtaagccttc

SEQ ID NO: 1329947 - DNA, 25 bp, Homo sapien
taaaatactcgtaagccttctggat

SEQ ID NO: 1329948 - DNA, 25 bp, Homo sapien
tcaggtcctggacaagataataaaa

SEQ ID NO: 1329949 - DNA, 25 bp, Homo sapien
caaacacttcaggtcctggacaaga

SEQ ID NO: 1329950 - DNA, 25 bp, Homo sapien
ttaggcattaaaactttgacccatc

SEQ ID NO: 1329951 - DNA, 25 bp, Homo sapien
tactgcaagatagtaataatggttg

SEQ ID NO: 1329952 - DNA, 25 bp, Homo sapien
ctgagtttttaatatagggaaatgc

SEQ ID NO: 1329953 - DNA, 25 bp, Homo sapien
gataaacttgtggatgattttcccc

SEQ ID NO: 1329954 - DNA, 25 bp, Homo sapien
tgtgtgtcaacaagaagctcgcagt

SEQ ID NO: 1329955 - DNA, 25 bp, Homo sapien
caaaagtaataggagcaagtcctca

SEQ ID NO: 1329956 - DNA, 25 bp, Homo sapien
gaaagctattcagactcggtgactc

SEQ ID NO: 1329957 - DNA, 25 bp, Homo sapien
taagatgtgccagtctcaacagtca

SEQ ID NO: 1329958 - DNA, 25 bp, Homo sapien
ataagggaaccaatttttgatgttg

SEQ ID NO: 1329959 - DNA, 25 bp, Homo sapien
tgctgggcactagaaacaagagata

SEQ ID NO: 1329960 - DNA, 25 bp, Homo sapien
caagggcagttcactctgagcacta

SEQ ID NO: 1329961 - DNA, 25 bp, Homo sapien
cacagaaggattaatcatttgccaa

SEQ ID NO: 1329962 - DNA, 25 bp, Homo sapien
aaggccctaccatttctcagatttg

SEQ ID NO: 1329963 - DNA, 25 bp, Homo sapien
ttcaaaaagtatctatgtgtagcct

SEQ ID NO: 1329964 - DNA, 25 bp, Homo sapien
tgtctgggcaacttggctaaacctc

SEQ ID NO: 1329965 - DNA, 25 bp, Homo sapien
acagtgacatgagtaccataacctt

SEQ ID NO: 1329966 - DNA, 25 bp, Homo sapien
tctaatctatctaggcaacttccag

SEQ ID NO: 1329967 - DNA, 25 bp, Homo sapien
cagaaaatcgaaaaaactgagatgt

SEQ ID NO: 1329968 - DNA, 25 bp, Homo sapien
tcctgggctcatgctatactgcacc

SEQ ID NO: 1329969 - DNA, 25 bp, Homo sapien
tacaaagtttatgtccatctcccat

SEQ ID NO: 1329970 - DNA, 25 bp, Homo sapien
tgtatcccgatttgttccactcttg

SEQ ID NO: 1329971 - DNA, 25 bp, Homo sapien
gagttacacagatctagctcattag

SEQ ID NO: 1329972 - DNA, 25 bp, Homo sapien
agtattttaaatgctgccagatgcc

SEQ ID NO: 1329973 - DNA, 25 bp, Homo sapien
catattagccacttgtttgatcttg

SEQ ID NO: 1329974 - DNA, 25 bp, Homo sapien
cctggcctagacgtggtagtgtgct

SEQ ID NO: 1329975 - DNA, 25 bp, Homo sapien
tctctacccagaaataatacaagtc

SEQ ID NO: 1329976 - DNA, 25 bp, Homo sapien
tgttccattggtttagctgtcaatt

SEQ ID NO: 1329977 - DNA, 25 bp, Homo sapien
cattaatgtgaaagtccacctctgt

SEQ ID NO: 1329978 - DNA, 25 bp, Homo sapien
aattcgttcttttcccattaatgtg

SEQ ID NO: 1329979 - DNA, 25 bp, Homo sapien
tgtaagatttctgcactacaggata

SEQ ID NO: 1329980 - DNA, 25 bp, Homo sapien
gtaagtgagataggcaacaaaagct

SEQ ID NO: 1329981 - DNA, 25 bp, Homo sapien
taggatggtagcagtcaagagtgaa

SEQ ID NO: 1329982 - DNA, 25 bp, Homo sapien
taattcagttcaatatgacagtggc

SEQ ID NO: 1329983 - DNA, 25 bp, Homo sapien
ccggcccactcggtcaggaggaggc

SEQ ID NO: 1329984 - DNA, 25 bp, Homo sapien
cccactcggtcaggaggaggccaca

SEQ ID NO: 1329985 - DNA, 25 bp, Homo sapien
ctgccggcccactcggtcaggagga

SEQ ID NO: 1329986 - DNA, 25 bp, Homo sapien
ggcccactcggtcaggaggaggcca

SEQ ID NO: 1329987 - DNA, 25 bp, Homo sapien
caacctcggcatgatgcaggtgagg

SEQ ID NO: 1329988 - DNA, 25 bp, Homo sapien
gaagtatccagtaactgcacctcag

SEQ ID NO: 1329989 - DNA, 25 bp, Homo sapien
tgagggacacggtcagaagtatcca

SEQ ID NO: 1329990 - DNA, 25 bp, Homo sapien
tcctggtacatcctgttcacatggc

SEQ ID NO: 1329991 - DNA, 25 bp, Homo sapien
agggttaaataagatgccacgcctg

SEQ ID NO: 1329992 - DNA, 25 bp, Homo sapien
ctaggtaatacactcctgaggagca

SEQ ID NO: 1329993 - DNA, 25 bp, Homo sapien
tcagggttcaaaccaaggtatgtca

SEQ ID NO: 1329994 - DNA, 25 bp, Homo sapien
catcacatgggcttacaatcagggt

SEQ ID NO: 1329995 - DNA, 25 bp, Homo sapien
tcttgtaattgctgttgttggcata

SEQ ID NO: 1329996 - DNA, 25 bp, Homo sapien
ctgttgttggcatatcttaacttcc

SEQ ID NO: 1329997 - DNA, 25 bp, Homo sapien
gacatcattcttgtaattgctgttg

SEQ ID NO: 1329998 - DNA, 25 bp, Homo sapien
aattgctgttgttggcatatcttaa

SEQ ID NO: 1329999 - DNA, 25 bp, Homo sapien
tatttactcttaaggtatttcaaca

SEQ ID NO: 1330000 - DNA, 25 bp, Homo sapien
aaggcatcagcagttgcccaaaatg

SEQ ID NO: 1330001 - DNA, 25 bp, Homo sapien
catcaataccatgccaaggcatcag

SEQ ID NO: 1330002 - DNA, 25 bp, Homo sapien
aaatgtatctaacttgctaaaagtg

SEQ ID NO: 1330003 - DNA, 25 bp, Homo sapien
actccaggaactcgtggccgaactt

SEQ ID NO: 1330004 - DNA, 25 bp, Homo sapien
tccggtcgaaactcaaactccagga

SEQ ID NO: 1330005 - DNA, 25 bp, Homo sapien
caaactccaggaactcgtggccgaa

SEQ ID NO: 1330006 - DNA, 25 bp, Homo sapien
cgtccggtcgaaactcaaactccag

SEQ ID NO: 1330007 - DNA, 25 bp, Homo sapien
gtctgcgcccgacactgacgtttgc

SEQ ID NO: 1330008 - DNA, 25 bp, Homo sapien
aaagacaaccgagcctgaacttcca

SEQ ID NO: 1330009 - DNA, 25 bp, Homo sapien
gaagtgacgtcaggtcccgtcgtcg

SEQ ID NO: 1330010 - DNA, 25 bp, Homo sapien
gcgtggaggggttccttctcgctaa

SEQ ID NO: 1330011 - DNA, 25 bp, Homo sapien
gcaccgcgtacagaagctaacggaa

SEQ ID NO: 1330012 - DNA, 25 bp, Homo sapien
tatagctagtgagatgcagcacccc

SEQ ID NO: 1330013 - DNA, 25 bp, Homo sapien
taagaggctctcgacaacatggcat

SEQ ID NO: 1330014 - DNA, 25 bp, Homo sapien
tgtgcaattcctaaagtccctgtgc

SEQ ID NO: 1330015 - DNA, 25 bp, Homo sapien
catactgagataactggagggatca

SEQ ID NO: 1330016 - DNA, 25 bp, Homo sapien
ggatcaataggacttactgccatac

SEQ ID NO: 1330017 - DNA, 25 bp, Homo sapien
tccactggaggaaaggtagaccata

SEQ ID NO: 1330018 - DNA, 25 bp, Homo sapien
gttcaggcagcccaaaatagtcttc

SEQ ID NO: 1330019 - DNA, 25 bp, Homo sapien
ccttccagctctatagtccagtgac

SEQ ID NO: 1330020 - DNA, 25 bp, Homo sapien
gaggaaacgcactgggactggcttc

SEQ ID NO: 1330021 - DNA, 25 bp, Homo sapien
tgtaaagggttgctcccattgctgc

SEQ ID NO: 1330022 - DNA, 25 bp, Homo sapien
tatttactgccgtccaacacatgaa

SEQ ID NO: 1330023 - DNA, 25 bp, Homo sapien
tgtatgtccagaccccattcatcat

SEQ ID NO: 1330024 - DNA, 25 bp, Homo sapien
gttgtagcatatgcaggaaacatga

SEQ ID NO: 1330025 - DNA, 25 bp, Homo sapien
gagatctcaggctgtatgtccagac

SEQ ID NO: 1330026 - DNA, 25 bp, Homo sapien
tttcattgtcattttgagatctcag

SEQ ID NO: 1330027 - DNA, 25 bp, Homo sapien
aagtttagaaactatgccttagcca

SEQ ID NO: 1330028 - DNA, 25 bp, Homo sapien
gaatgccaggatcttactgaaagtt

SEQ ID NO: 1330029 - DNA, 25 bp, Homo sapien
aactatgccttagccactgttatca

SEQ ID NO: 1330030 - DNA, 25 bp, Homo sapien
gccaggatcttactgaaagtttaga

SEQ ID NO: 1330031 - DNA, 25 bp, Homo sapien
taggtacaggatgctagaactccag

SEQ ID NO: 1330032 - DNA, 25 bp, Homo sapien
tcaaagggtatcaagctggtgagac

SEQ ID NO: 1330033 - DNA, 25 bp, Homo sapien
ggagaccccacaagtagaaaagagc

SEQ ID NO: 1330034 - DNA, 25 bp, Homo sapien
gattatgcaaaacacactgcccaag

SEQ ID NO: 1330035 - DNA, 25 bp, Homo sapien
acaaagcagtaaaccaaattcctgt

SEQ ID NO: 1330036 - DNA, 25 bp, Homo sapien
tacaaagcagtaaaccaaattcctg

SEQ ID NO: 1330037 - DNA, 25 bp, Homo sapien
caaagcagtaaaccaaattcctgtg

SEQ ID NO: 1330038 - DNA, 25 bp, Homo sapien
aattcctcatgggtagtgcaaccag

SEQ ID NO: 1330039 - DNA, 25 bp, Homo sapien
tagctctgtaaggatggcacccttc

SEQ ID NO: 1330040 - DNA, 25 bp, Homo sapien
ggaaacgtctccacttagctctgta

SEQ ID NO: 1330041 - DNA, 25 bp, Homo sapien
gactgaattccatgaggcacgaagg

SEQ ID NO: 1330042 - DNA, 25 bp, Homo sapien
tcagggtagtccatcatcttcaagg

SEQ ID NO: 1330043 - DNA, 25 bp, Homo sapien
catcttcaaggcttaatgccactcg

SEQ ID NO: 1330044 - DNA, 25 bp, Homo sapien
cagggtagtccatcatcttcaaggc

SEQ ID NO: 1330045 - DNA, 25 bp, Homo sapien
catcatcttcaaggcttaatgccac

SEQ ID NO: 1330046 - DNA, 25 bp, Homo sapien
cttggatttgacgacaggcagctcg

SEQ ID NO: 1330047 - DNA, 25 bp, Homo sapien
tggatttgacgacaggcagctcgga

SEQ ID NO: 1330048 - DNA, 25 bp, Homo sapien
gatttgacgacaggcagctcggaaa

SEQ ID NO: 1330049 - DNA, 25 bp, Homo sapien
ttggatttgacgacaggcagctcgg

SEQ ID NO: 1330050 - DNA, 25 bp, Homo sapien
tgtgaccttggttcccccggcaaga

SEQ ID NO: 1330051 - DNA, 25 bp, Homo sapien
cttcgggagttggtgcagctgtgac

SEQ ID NO: 1330052 - DNA, 25 bp, Homo sapien
gctctgcccacagtgggcgatcaaa

SEQ ID NO: 1330053 - DNA, 25 bp, Homo sapien
cagtgggcgatcaaagctgctgatt

SEQ ID NO: 1330054 - DNA, 25 bp, Homo sapien
caggtatccactcatgcacaggagg

SEQ ID NO: 1330055 - DNA, 25 bp, Homo sapien
tgcaggatagacatggccaatctga

SEQ ID NO: 1330056 - DNA, 25 bp, Homo sapien
tagactgggttgtcaaaattcatgc

SEQ ID NO: 1330057 - DNA, 25 bp, Homo sapien
ccagtttctccagatcaggtatcca

SEQ ID NO: 1330058 - DNA, 25 bp, Homo sapien
caaaggtgaggctccacctgaagaa

SEQ ID NO: 1330059 - DNA, 25 bp, Homo sapien
actaggtgcctagtaacatgtgctg

SEQ ID NO: 1330060 - DNA, 25 bp, Homo sapien
gagggcaacacaagctctgatttag

SEQ ID NO: 1330061 - DNA, 25 bp, Homo sapien
ttaatgattaaaggaggaagctctc

SEQ ID NO: 1330062 - DNA, 25 bp, Homo sapien
tatttattgtcttagagatctagct

SEQ ID NO: 1330063 - DNA, 25 bp, Homo sapien
agttaatcaagaatcaacataaaag

SEQ ID NO: 1330064 - DNA, 25 bp, Homo sapien
tagctatgcagtaaggccagaaaaa

SEQ ID NO: 1330065 - DNA, 25 bp, Homo sapien
ccaaactgttattaacagctatttg

SEQ ID NO: 1330066 - DNA, 25 bp, Homo sapien
gccgtctttttaatcagcaacaacc

SEQ ID NO: 1330067 - DNA, 25 bp, Homo sapien
tagccgtctttttaatcagcaacaa

SEQ ID NO: 1330068 - DNA, 25 bp, Homo sapien
attagccgtctttttaatcagcaac

SEQ ID NO: 1330069 - DNA, 25 bp, Homo sapien
agcccgggcaagatggtgagccctg

SEQ ID NO: 1330070 - DNA, 25 bp, Homo sapien
cacgatgatcccgataacagcggca

SEQ ID NO: 1330071 - DNA, 25 bp, Homo sapien
gatcccgataacagcggcagtgact

SEQ ID NO: 1330072 - DNA, 25 bp, Homo sapien
ctatgggcacgatgatcccgataac

SEQ ID NO: 1330073 - DNA, 25 bp, Homo sapien
ataacagcggcagtgactgttgagc

SEQ ID NO: 1330074 - DNA, 25 bp, Homo sapien
tagacgggctgatgctgggagccct

SEQ ID NO: 1330075 - DNA, 25 bp, Homo sapien
agggtagacgggctgatgctgggag

SEQ ID NO: 1330076 - DNA, 25 bp, Homo sapien
cttagggtagacgggctgatgctgg

SEQ ID NO: 1330077 - DNA, 25 bp, Homo sapien
agtgctgggagtggttgctggttgc

SEQ ID NO: 1330078 - DNA, 25 bp, Homo sapien
aggtggatctgtggacggtggtccc

SEQ ID NO: 1330079 - DNA, 25 bp, Homo sapien
tcatggtagaagctaacgtcgtagt

SEQ ID NO: 1330080 - DNA, 25 bp, Homo sapien
gtactgtcctcgtcatggtagaagc

SEQ ID NO: 1330081 - DNA, 25 bp, Homo sapien
aacgtcgtagttgaggtagattgag

SEQ ID NO: 1330082 - DNA, 25 bp, Homo sapien
aaggcacaggtattcacagcctcca

SEQ ID NO: 1330083 - DNA, 25 bp, Homo sapien
caggaaggcacaggtattcacagcc

SEQ ID NO: 1330084 - DNA, 25 bp, Homo sapien
caggtattcacagcctccattaggc

SEQ ID NO: 1330085 - DNA, 25 bp, Homo sapien
gtattcacagcctccattaggctgg

SEQ ID NO: 1330086 - DNA, 25 bp, Homo sapien
gcatgccaccatacaagggtcattt

SEQ ID NO: 1330087 - DNA, 25 bp, Homo sapien
tactttccagcaccatacctagtgt

SEQ ID NO: 1330088 - DNA, 25 bp, Homo sapien
tgttgcctagactaagtgcagcagt

SEQ ID NO: 1330089 - DNA, 25 bp, Homo sapien
gggacgttacatcccagactgacaa

SEQ ID NO: 1330090 - DNA, 25 bp, Homo sapien
gacttattatatggccctcggatac

SEQ ID NO: 1330091 - DNA, 25 bp, Homo sapien
gcttatactactgcagaatggctac

SEQ ID NO: 1330092 - DNA, 25 bp, Homo sapien
cttaaattgaggtcggctgggctcc

SEQ ID NO: 1330093 - DNA, 25 bp, Homo sapien
tggcagccaacacttcagttacagt

SEQ ID NO: 1330094 - DNA, 25 bp, Homo sapien
tgacaatgtcatgtgggttgttgag

SEQ ID NO: 1330095 - DNA, 25 bp, Homo sapien
ggttgttgaggttctcagccaggat

SEQ ID NO: 1330096 - DNA, 25 bp, Homo sapien
gaaaatggcctcgttctccaggtct

SEQ ID NO: 1330097 - DNA, 25 bp, Homo sapien
gccattgagccgatttgcactgaaa

SEQ ID NO: 1330098 - DNA, 25 bp, Homo sapien
tacccagtacaagcgctggctcagc

SEQ ID NO: 1330099 - DNA, 25 bp, Homo sapien
ttgcctccactgaagtcaatgctgg

SEQ ID NO: 1330100 - DNA, 25 bp, Homo sapien
tcaatgctggacagttggtgtagct

SEQ ID NO: 1330101 - DNA, 25 bp, Homo sapien
caaaagggtggctcaggaagtcagt

SEQ ID NO: 1330102 - DNA, 25 bp, Homo sapien
ttgagcccagatttctcaatcttgg

SEQ ID NO: 1330103 - DNA, 25 bp, Homo sapien
tgacaccagtgtttgccggtccaca

SEQ ID NO: 1330104 - DNA, 25 bp, Homo sapien
gccattcaatattgtctgacaccag

SEQ ID NO: 1330105 - DNA, 25 bp, Homo sapien
cagggtgattccgttgggccattca

SEQ ID NO: 1330106 - DNA, 25 bp, Homo sapien
caaaataacccaatttgccttcttg

SEQ ID NO: 1330107 - DNA, 25 bp, Homo sapien
tcactgaggttacggctgaagagag

SEQ ID NO: 1330108 - DNA, 25 bp, Homo sapien
ttattgcccgagtcagtccagtaga

SEQ ID NO: 1330109 - DNA, 25 bp, Homo sapien
actgctcgtcaatgaggacctcctg

SEQ ID NO: 1330110 - DNA, 25 bp, Homo sapien
tctttcgggtcactggccttgtcca

SEQ ID NO: 1330111 - DNA, 25 bp, Homo sapien
tagtgccacgacattcttgagcatg

SEQ ID NO: 1330112 - DNA, 25 bp, Homo sapien
gaatagttccgcttcaccaggtcga

SEQ ID NO: 1330113 - DNA, 25 bp, Homo sapien
tagatgcgattggtggcaacttcca

SEQ ID NO: 1330114 - DNA, 25 bp, Homo sapien
gatcttacggtaggagaggtcacac

SEQ ID NO: 1330115 - DNA, 25 bp, Homo sapien
tgtttctagatgtattgggccactc

SEQ ID NO: 1330116 - DNA, 25 bp, Homo sapien
taccattacctagccatggatgggc

SEQ ID NO: 1330117 - DNA, 25 bp, Homo sapien
caaaaggtcctatgagctgggtgag

SEQ ID NO: 1330118 - DNA, 25 bp, Homo sapien
gagactaattcaaagcagggtggga

SEQ ID NO: 1330119 - DNA, 25 bp, Homo sapien
taaaatagcccttgtaattgacaca

SEQ ID NO: 1330120 - DNA, 25 bp, Homo sapien
acagatctggctgcaggcatctggg

SEQ ID NO: 1330121 - DNA, 25 bp, Homo sapien
tctgggtccttgcactcatcaatgt

SEQ ID NO: 1330122 - DNA, 25 bp, Homo sapien
ttgcagttcttggtcagtaggtcca

SEQ ID NO: 1330123 - DNA, 25 bp, Homo sapien
aagccaatcttgaggtcagtgcaga

SEQ ID NO: 1330124 - DNA, 25 bp, Homo sapien
ttcaaagccaatcttgaggtcagtg

SEQ ID NO: 1330125 - DNA, 25 bp, Homo sapien
gcagatgtgtgagcagccgccattg

SEQ ID NO: 1330126 - DNA, 25 bp, Homo sapien
ctgctgggcacgtgcattcaaagcc

SEQ ID NO: 1330127 - DNA, 25 bp, Homo sapien
tcctcgtgacctcagagttgaaggg

SEQ ID NO: 1330128 - DNA, 25 bp, Homo sapien
tgtgtgtcacatccaaccctcagga

SEQ ID NO: 1330129 - DNA, 25 bp, Homo sapien
gtaggacctagagcagaagcagagc

SEQ ID NO: 1330130 - DNA, 25 bp, Homo sapien
tagagtggaaccagaacttaggtcc

SEQ ID NO: 1330131 - DNA, 25 bp, Homo sapien
ctgtttcccaggaatgttggcggaa

SEQ ID NO: 1330132 - DNA, 25 bp, Homo sapien
atgcatccactcgcctccttcctct

SEQ ID NO: 1330133 - DNA, 25 bp, Homo sapien
ccatcatgcatccactcgcctcctt

SEQ ID NO: 1330134 - DNA, 25 bp, Homo sapien
atcatgcatccactcgcctccttcc

SEQ ID NO: 1330135 - DNA, 25 bp, Homo sapien
tcatgcatccactcgcctccttcct

SEQ ID NO: 1330136 - DNA, 25 bp, Homo sapien
cctggctactccaaatctgggtgtt

SEQ ID NO: 1330137 - DNA, 25 bp, Homo sapien
ttggtgtgtcatgcaaacgacgaga

SEQ ID NO: 1330138 - DNA, 25 bp, Homo sapien
catgcaaacgacgagagagaagaga

SEQ ID NO: 1330139 - DNA, 25 bp, Homo sapien
gagagggattagtaggacagtagtc

SEQ ID NO: 1330140 - DNA, 25 bp, Homo sapien
agcaggggaggaacaccgaggaaga

SEQ ID NO: 1330141 - DNA, 25 bp, Homo sapien
aggggaggaacaccgaggaagagag

SEQ ID NO: 1330142 - DNA, 25 bp, Homo sapien
caggggaggaacaccgaggaagaga

SEQ ID NO: 1330143 - DNA, 25 bp, Homo sapien
gcaggggaggaacaccgaggaagag

SEQ ID NO: 1330144 - DNA, 25 bp, Homo sapien
cttgccactcttacactgaaatctg

SEQ ID NO: 1330145 - DNA, 25 bp, Homo sapien
ccactcttacactgaaatctgcggg

SEQ ID NO: 1330146 - DNA, 25 bp, Homo sapien
tttcccgccgtccacgcgcttgcca

SEQ ID NO: 1330147 - DNA, 25 bp, Homo sapien
gccgtccacgcgcttgccactctta

SEQ ID NO: 1330148 - DNA, 25 bp, Homo sapien
tgggccggacaagagagtggacagt

SEQ ID NO: 1330149 - DNA, 25 bp, Homo sapien
gtggacagtgcctgtgagaccttgg

SEQ ID NO: 1330150 - DNA, 25 bp, Homo sapien
gccggacaagagagtggacagtgcc

SEQ ID NO: 1330151 - DNA, 25 bp, Homo sapien
ctgttgggccggacaagagagtgga

SEQ ID NO: 1330152 - DNA, 25 bp, Homo sapien
tcctcacagaggatgtgttctgtgc

SEQ ID NO: 1330153 - DNA, 25 bp, Homo sapien
gcatcctcacagaggatgtgttctg

SEQ ID NO: 1330154 - DNA, 25 bp, Homo sapien
cagagcctagggcatcctcacagag

SEQ ID NO: 1330155 - DNA, 25 bp, Homo sapien
acagaggatgtgttctgtgccctga

SEQ ID NO: 1330156 - DNA, 25 bp, Homo sapien
tgctcctggttgcagtgcttgattg

SEQ ID NO: 1330157 - DNA, 25 bp, Homo sapien
cagtgcttgattgcaaggacacatg

SEQ ID NO: 1330158 - DNA, 25 bp, Homo sapien
gcttcatcactcccatctggacagt

SEQ ID NO: 1330159 - DNA, 25 bp, Homo sapien
actggaactcgtccccacggcaggt

SEQ ID NO: 1330160 - DNA, 25 bp, Homo sapien
gagcggttgccgcactggaactcgt

SEQ ID NO: 1330161 - DNA, 25 bp, Homo sapien
agctcggctgcctcgtccgagcggt

SEQ ID NO: 1330162 - DNA, 25 bp, Homo sapien
tttgtctttgcagtcgcggtcgccg

SEQ ID NO: 1330163 - DNA, 25 bp, Homo sapien
gcggtcctcgcagtcaaactggcgg

SEQ ID NO: 1330164 - DNA, 25 bp, Homo sapien
ggacagagagccggtcggcccgccg

SEQ ID NO: 1330165 - DNA, 25 bp, Homo sapien
gggacagagagccggtcggcccgcc

SEQ ID NO: 1330166 - DNA, 25 bp, Homo sapien
cgggacagagagccggtcggcccgc

SEQ ID NO: 1330167 - DNA, 25 bp, Homo sapien
gtggtggtggcagcaccagatcttt

SEQ ID NO: 1330168 - DNA, 25 bp, Homo sapien
ggtaggccccggtggggcactgatg

SEQ ID NO: 1330169 - DNA, 25 bp, Homo sapien
gcagcaccagatctttccacgtggg

SEQ ID NO: 1330170 - DNA, 25 bp, Homo sapien
ggctgtggccaaaggtgaggtggtg

SEQ ID NO: 1330171 - DNA, 25 bp, Homo sapien
agaccctggagatctgaccccagac

SEQ ID NO: 1330172 - DNA, 25 bp, Homo sapien
gcagaccctggagatctgaccccag

SEQ ID NO: 1330173 - DNA, 25 bp, Homo sapien
cagaccctggagatctgaccccaga

SEQ ID NO: 1330174 - DNA, 25 bp, Homo sapien
gaccctggagatctgaccccagact

SEQ ID NO: 1330175 - DNA, 25 bp, Homo sapien
aggcaggtacacacttgtggctggt

SEQ ID NO: 1330176 - DNA, 25 bp, Homo sapien
ttctctgcaggacacacctgcttgg

SEQ ID NO: 1330177 - DNA, 25 bp, Homo sapien
agcgccacgaggcaggtacacactt

SEQ ID NO: 1330178 - DNA, 25 bp, Homo sapien
gtcgcagcgccacgaggcaggtaca

SEQ ID NO: 1330179 - DNA, 25 bp, Homo sapien
atacttgcattctttcatttgattc

SEQ ID NO: 1330180 - DNA, 25 bp, Homo sapien
ttgcattctttcatttgattctcac

SEQ ID NO: 1330181 - DNA, 25 bp, Homo sapien
cttgcattctttcatttgattctca

SEQ ID NO: 1330182 - DNA, 25 bp, Homo sapien
ccagcgatgatacttgcattctttc

SEQ ID NO: 1330183 - DNA, 25 bp, Homo sapien
tcaactgtgaaaagcgggcctggga

SEQ ID NO: 1330184 - DNA, 25 bp, Homo sapien
cacaggaagtgggtatcatggctct

SEQ ID NO: 1330185 - DNA, 25 bp, Homo sapien
gcttgcccgaggtctaacaggttaa

SEQ ID NO: 1330186 - DNA, 25 bp, Homo sapien
gacgccttatgaaacctcagagagc

SEQ ID NO: 1330187 - DNA, 25 bp, Homo sapien
gcctagccctcaggtagcaaggcag

SEQ ID NO: 1330188 - DNA, 25 bp, Homo sapien
gataaccacgatgaggctcctctcc

SEQ ID NO: 1330189 - DNA, 25 bp, Homo sapien
gagcctagccctcaggtagcaaggc

SEQ ID NO: 1330190 - DNA, 25 bp, Homo sapien
cccctctgataaccacgatgaggct

SEQ ID NO: 1330191 - DNA, 25 bp, Homo sapien
aaatgagggctccttgtctcgggtg

SEQ ID NO: 1330192 - DNA, 25 bp, Homo sapien
cagccacggcgttagatgggactcc

SEQ ID NO: 1330193 - DNA, 25 bp, Homo sapien
tgctaggagacaaggaaacccagtt

SEQ ID NO: 1330194 - DNA, 25 bp, Homo sapien
ccttcaggacggcatggagtttggc

SEQ ID NO: 1330195 - DNA, 25 bp, Homo sapien
ggtgtaagtttgctttgaggattag

SEQ ID NO: 1330196 - DNA, 25 bp, Homo sapien
gtaagtttgctttgaggattagggc

SEQ ID NO: 1330197 - DNA, 25 bp, Homo sapien
ctgccgggtgtaagtttgctttgag

SEQ ID NO: 1330198 - DNA, 25 bp, Homo sapien
ccgggtgtaagtttgctttgaggat

SEQ ID NO: 1330199 - DNA, 25 bp, Homo sapien
gggtccaacctacaagagggctgtg

SEQ ID NO: 1330200 - DNA, 25 bp, Homo sapien
cactggcactcctggaattatggtc

SEQ ID NO: 1330201 - DNA, 25 bp, Homo sapien
gagagcttagcacacgataaaggct

SEQ ID NO: 1330202 - DNA, 25 bp, Homo sapien
tatatctgtttaccaggagcgccct

SEQ ID NO: 1330203 - DNA, 25 bp, Homo sapien
cgttgtcacaggtgaagtcactgtc

SEQ ID NO: 1330204 - DNA, 25 bp, Homo sapien
cgtcacacttccaccgttcgtggat

SEQ ID NO: 1330205 - DNA, 25 bp, Homo sapien
tgcaagtggcctcggactcatcgga

SEQ ID NO: 1330206 - DNA, 25 bp, Homo sapien
cgtggatgcagtggccgttgtcaca

SEQ ID NO: 1330207 - DNA, 25 bp, Homo sapien
gctctagatcatcactgattgcgag

SEQ ID NO: 1330208 - DNA, 25 bp, Homo sapien
gattgcgagtccaacatggtttgct

SEQ ID NO: 1330209 - DNA, 25 bp, Homo sapien
ttttgatgacctctgctctagatca

SEQ ID NO: 1330210 - DNA, 25 bp, Homo sapien
caggcctgtggcctgtattttgatg

SEQ ID NO: 1330211 - DNA, 25 bp, Homo sapien
cacctttattcaaatctacccacag

SEQ ID NO: 1330212 - DNA, 25 bp, Homo sapien
acctttattcaaatctacccacagg

SEQ ID NO: 1330213 - DNA, 25 bp, Homo sapien
ccacctttattcaaatctacccaca

SEQ ID NO: 1330214 - DNA, 25 bp, Homo sapien
ttctacgttctgcactgagaacaca

SEQ ID NO: 1330215 - DNA, 25 bp, Homo sapien
tgaaccttgcttctgttctacgttc

SEQ ID NO: 1330216 - DNA, 25 bp, Homo sapien
gtgcaagcttcagttccacattcaa

SEQ ID NO: 1330217 - DNA, 25 bp, Homo sapien
gaacacagaatcagcccagcccagt

SEQ ID NO: 1330218 - DNA, 25 bp, Homo sapien
ccagaagtccacatgcggacagtct

SEQ ID NO: 1330219 - DNA, 25 bp, Homo sapien
gaaggcgaacggttcccacagtgtc

SEQ ID NO: 1330220 - DNA, 25 bp, Homo sapien
cacatgcggacagtctctgactact

SEQ ID NO: 1330221 - DNA, 25 bp, Homo sapien
agatgtcgataagctgcggatggca

SEQ ID NO: 1330222 - DNA, 25 bp, Homo sapien
cccattcggaatgaagaggctgcag

SEQ ID NO: 1330223 - DNA, 25 bp, Homo sapien
aagggctccagccaaaggattcacc

SEQ ID NO: 1330224 - DNA, 25 bp, Homo sapien
tgcagcggaaggagcactttttggt

SEQ ID NO: 1330225 - DNA, 25 bp, Homo sapien
ggagggagacacacgaagggctcca

SEQ ID NO: 1330226 - DNA, 25 bp, Homo sapien
tcaggtgaacacatctctaagggcc

SEQ ID NO: 1330227 - DNA, 25 bp, Homo sapien
caaacatgaaacaagtggtccacct

SEQ ID NO: 1330228 - DNA, 25 bp, Homo sapien
ttgcaaagatcaggaggcccgagga

SEQ ID NO: 1330229 - DNA, 25 bp, Homo sapien
tcccaagaaacaagtggtccaaaca

SEQ ID NO: 1330230 - DNA, 25 bp, Homo sapien
ggtgctgttccaagtccttccaaag

SEQ ID NO: 1330231 - DNA, 25 bp, Homo sapien
tgctctcagatactgccggaccctg

SEQ ID NO: 1330232 - DNA, 25 bp, Homo sapien
tcatctggggcttcccacaaccaag

SEQ ID NO: 1330233 - DNA, 25 bp, Homo sapien
attagtgaccccgtcacacggaggg

SEQ ID NO: 1330234 - DNA, 25 bp, Homo sapien
gcccttgctggggtatgtaggcctc

SEQ ID NO: 1330235 - DNA, 25 bp, Homo sapien
cccttgctggggtatgtaggcctcc

SEQ ID NO: 1330236 - DNA, 25 bp, Homo sapien
ttccacctccatgggcaaaactctc

SEQ ID NO: 1330237 - DNA, 25 bp, Homo sapien
caggtgcttttgctcacgcagctcc

SEQ ID NO: 1330238 - DNA, 25 bp, Homo sapien
agctgttcatggtgtctgacaatgc

SEQ ID NO: 1330239 - DNA, 25 bp, Homo sapien
tgatggccagctcaagcatcagctg

SEQ ID NO: 1330240 - DNA, 25 bp, Homo sapien
gaacaacctgtatgattataggtga

SEQ ID NO: 1330241 - DNA, 25 bp, Homo sapien
gagccgtactacagcaggtgatcca

SEQ ID NO: 1330242 - DNA, 25 bp, Homo sapien
gctgggttgcctccccgttcgaatg

SEQ ID NO: 1330243 - DNA, 25 bp, Homo sapien
gtagagctcttgtcaatcatgcggc

SEQ ID NO: 1330244 - DNA, 25 bp, Homo sapien
gaagcttctaatctaatccaggcac

SEQ ID NO: 1330245 - DNA, 25 bp, Homo sapien
cagcccttggatttcatacatgaga

SEQ ID NO: 1330246 - DNA, 25 bp, Homo sapien
tgttcccaccgctgacatatggcca

SEQ ID NO: 1330247 - DNA, 25 bp, Homo sapien
caaaactgccgctgaagagactgga

SEQ ID NO: 1330248 - DNA, 25 bp, Homo sapien
gaaaggcaggcccacgcgcagccac

SEQ ID NO: 1330249 - DNA, 25 bp, Homo sapien
ccacgcgcagccactggactgcttg

SEQ ID NO: 1330250 - DNA, 25 bp, Homo sapien
gcccactgcagaaaggctcagtgag

SEQ ID NO: 1330251 - DNA, 25 bp, Homo sapien
ctgggagacagccatgccaaagtgg

SEQ ID NO: 1330252 - DNA, 25 bp, Homo sapien
gggatggttcatggccacaagcccc

SEQ ID NO: 1330253 - DNA, 25 bp, Homo sapien
gctcagcacctccaaccagagctgg

SEQ ID NO: 1330254 - DNA, 25 bp, Homo sapien
agctgggcagaaggggacagacatg

SEQ ID NO: 1330255 - DNA, 25 bp, Homo sapien
cagggccagcagtatggggatggtt

SEQ ID NO: 1330256 - DNA, 25 bp, Homo sapien
tataaagtagaaggcctgttccttg

SEQ ID NO: 1330257 - DNA, 25 bp, Homo sapien
aaagtagaaggcctgttccttggag

SEQ ID NO: 1330258 - DNA, 25 bp, Homo sapien
ctccatgtataaagtagaaggcctg

SEQ ID NO: 1330259 - DNA, 25 bp, Homo sapien
catgtataaagtagaaggcctgttc

SEQ ID NO: 1330260 - DNA, 25 bp, Homo sapien
cacaatggttataacgccaagcggg

SEQ ID NO: 1330261 - DNA, 25 bp, Homo sapien
ggctacttcagaagcctcgtccctg

SEQ ID NO: 1330262 - DNA, 25 bp, Homo sapien
acagtgcaggctacttcagaagcct

SEQ ID NO: 1330263 - DNA, 25 bp, Homo sapien
tcgtccctggctaacaccacaatgg

SEQ ID NO: 1330264 - DNA, 25 bp, Homo sapien
tctgtcaaatgagggcaaggatgcc

SEQ ID NO: 1330265 - DNA, 25 bp, Homo sapien
cgcatgtacttgcagatgggcaccc

SEQ ID NO: 1330266 - DNA, 25 bp, Homo sapien
gaacgggatgttcacagagcacaga

SEQ ID NO: 1330267 - DNA, 25 bp, Homo sapien
tatacagaatgtacagcccaggaca

SEQ ID NO: 1330268 - DNA, 25 bp, Homo sapien
cttgctcctgtgaagcttggaccag

SEQ ID NO: 1330269 - DNA, 25 bp, Homo sapien
aagcttggaccagtgttccagaggc

SEQ ID NO: 1330270 - DNA, 25 bp, Homo sapien
gagggcaagttctggtctagctgca

SEQ ID NO: 1330271 - DNA, 25 bp, Homo sapien
cctgtgaagcttggaccagtgttcc

SEQ ID NO: 1330272 - DNA, 25 bp, Homo sapien
gtgcagcagcccagtaaggatgggg

SEQ ID NO: 1330273 - DNA, 25 bp, Homo sapien
tgcagcagcccagtaaggatgggga

SEQ ID NO: 1330274 - DNA, 25 bp, Homo sapien
ctgcctcgctggaaaggagagccat

SEQ ID NO: 1330275 - DNA, 25 bp, Homo sapien
gatgtccatcctagcattgcacaga

SEQ ID NO: 1330276 - DNA, 25 bp, Homo sapien
caaatgcacaaggatggagttcaag

SEQ ID NO: 1330277 - DNA, 25 bp, Homo sapien
tctagagagcagaacggcaatgatg

SEQ ID NO: 1330278 - DNA, 25 bp, Homo sapien
ccatccaaggattacggcaggttga

SEQ ID NO: 1330279 - DNA, 25 bp, Homo sapien
gagaactaccttcgtccaagctgga

SEQ ID NO: 1330280 - DNA, 25 bp, Homo sapien
cgtggactcctagacagactggcag

SEQ ID NO: 1330281 - DNA, 25 bp, Homo sapien
gaagtcccctgtggtacctcaaggc

SEQ ID NO: 1330282 - DNA, 25 bp, Homo sapien
ggaaagttgtcaagtcggccaccag

SEQ ID NO: 1330283 - DNA, 25 bp, Homo sapien
gaaagttgtcaagtcggccaccagc

SEQ ID NO: 1330284 - DNA, 25 bp, Homo sapien
aaagttgtcaagtcggccaccagca

SEQ ID NO: 1330285 - DNA, 25 bp, Homo sapien
ggtccagtgtcaggagcacacgtcc

SEQ ID NO: 1330286 - DNA, 25 bp, Homo sapien
tattctctggatagttgggagcccc

SEQ ID NO: 1330287 - DNA, 25 bp, Homo sapien
ccagctaatgaactctcagccatgg

SEQ ID NO: 1330288 - DNA, 25 bp, Homo sapien
catgggagacctccctgtggccact

SEQ ID NO: 1330289 - DNA, 25 bp, Homo sapien
ggacgagccaacagctctctctcct

SEQ ID NO: 1330290 - DNA, 25 bp, Homo sapien
gcagggagaacagttcaaagaaatt

SEQ ID NO: 1330291 - DNA, 25 bp, Homo sapien
ctctcctgcagggagaacagttcaa

SEQ ID NO: 1330292 - DNA, 25 bp, Homo sapien
ctcctgcagggagaacagttcaaag

SEQ ID NO: 1330293 - DNA, 25 bp, Homo sapien
agagggtgcctgtccaagtgtcccg

SEQ ID NO: 1330294 - DNA, 25 bp, Homo sapien
aaaacgattcaacagagagggtgcc

SEQ ID NO: 1330295 - DNA, 25 bp, Homo sapien
tggcacagttaatggtcagcacaca

SEQ ID NO: 1330296 - DNA, 25 bp, Homo sapien
tcagtctagttctgccacgcacaag

SEQ ID NO: 1330297 - DNA, 25 bp, Homo sapien
gcccggagctgcgtggaactttgaa

SEQ ID NO: 1330298 - DNA, 25 bp, Homo sapien
agcaggaaaaggagcgcagtgcggc

SEQ ID NO: 1330299 - DNA, 25 bp, Homo sapien
ggaactttgaaacacgcgcgcgtcc

SEQ ID NO: 1330300 - DNA, 25 bp, Homo sapien
gcaagagtccgagagggccgtgttt

SEQ ID NO: 1330301 - DNA, 25 bp, Homo sapien
ttcagtctccccagcatggtgcgcc

SEQ ID NO: 1330302 - DNA, 25 bp, Homo sapien
ccccagcatggtgcgccttcctcct

SEQ ID NO: 1330303 - DNA, 25 bp, Homo sapien
cccacagctccggttcagtctcccc

SEQ ID NO: 1330304 - DNA, 25 bp, Homo sapien
ctttgcagggactgccgcgtccccg

SEQ ID NO: 1330305 - DNA, 25 bp, Homo sapien
caagtcccgcgcaggtggcagcgcg

SEQ ID NO: 1330306 - DNA, 25 bp, Homo sapien
agccacgtgcgcgccaagcatggtg

SEQ ID NO: 1330307 - DNA, 25 bp, Homo sapien
gtgcccaggcggtttcccggtcgca

SEQ ID NO: 1330308 - DNA, 25 bp, Homo sapien
tccgggtcgctaagagccacccggc

SEQ ID NO: 1330309 - DNA, 25 bp, Homo sapien
gtccttttcgcaatccttggccggc

SEQ ID NO: 1330310 - DNA, 25 bp, Homo sapien
tggtctaagcagtcatcgtcctcgt

SEQ ID NO: 1330311 - DNA, 25 bp, Homo sapien
gggatgcagcgctcgttccggcact

SEQ ID NO: 1330312 - DNA, 25 bp, Homo sapien
tcgttccggcactggaattggtcct

SEQ ID NO: 1330313 - DNA, 25 bp, Homo sapien
ccaccatgcagtccgggccacccgg

SEQ ID NO: 1330314 - DNA, 25 bp, Homo sapien
catgcagtccgggccacccggaagg

SEQ ID NO: 1330315 - DNA, 25 bp, Homo sapien
tccccaccatgcagtccgggccacc

SEQ ID NO: 1330316 - DNA, 25 bp, Homo sapien
tgcagtccgggccacccggaaggac

SEQ ID NO: 1330317 - DNA, 25 bp, Homo sapien
tgggtataccctccattcagacgca

SEQ ID NO: 1330318 - DNA, 25 bp, Homo sapien
gggtataccctccattcagacgcac

SEQ ID NO: 1330319 - DNA, 25 bp, Homo sapien
ctgggtataccctccattcagacgc

SEQ ID NO: 1330320 - DNA, 25 bp, Homo sapien
gatctgctcagatacagcccatagg

SEQ ID NO: 1330321 - DNA, 25 bp, Homo sapien
gcacacgcgacccatagtcagagat

SEQ ID NO: 1330322 - DNA, 25 bp, Homo sapien
gacccatagtcagagatctgctcag

SEQ ID NO: 1330323 - DNA, 25 bp, Homo sapien
tcagagatctgctcagatacagccc

SEQ ID NO: 1330324 - DNA, 25 bp, Homo sapien
caggcagccccctctctctccgccg

SEQ ID NO: 1330325 - DNA, 25 bp, Homo sapien
gcagccccctctctctccgccgcgc

SEQ ID NO: 1330326 - DNA, 25 bp, Homo sapien
accctggcaggcagccccctctctc

SEQ ID NO: 1330327 - DNA, 25 bp, Homo sapien
caccctggcaggcagccccctctct

SEQ ID NO: 1330328 - DNA, 25 bp, Homo sapien
gccgctgccgccgcaagatgctgga

SEQ ID NO: 1330329 - DNA, 25 bp, Homo sapien
ccgctgccgccgcaagatgctggag

SEQ ID NO: 1330330 - DNA, 25 bp, Homo sapien
cgccgagcagcggatcagccgctgc

SEQ ID NO: 1330331 - DNA, 25 bp, Homo sapien
ccgccgagcagcggatcagccgctg

SEQ ID NO: 1330332 - DNA, 25 bp, Homo sapien
gcagcgccagaagccggagagggcc

SEQ ID NO: 1330333 - DNA, 25 bp, Homo sapien
agaagccggagagggcccggctcgg

SEQ ID NO: 1330334 - DNA, 25 bp, Homo sapien
cagcagcagcgccagaagccggaga

SEQ ID NO: 1330335 - DNA, 25 bp, Homo sapien
gccagaagccggagagggcccggct

SEQ ID NO: 1330336 - DNA, 25 bp, Homo sapien
tcctcggctgcatttcaagcaggtt

SEQ ID NO: 1330337 - DNA, 25 bp, Homo sapien
tgcatttcaagcaggttcggtgacg

SEQ ID NO: 1330338 - DNA, 25 bp, Homo sapien
ttcaagcaggttcggtgacgctcgg

SEQ ID NO: 1330339 - DNA, 25 bp, Homo sapien
gcgtctcagccctccgagtccttgc

SEQ ID NO: 1330340 - DNA, 25 bp, Homo sapien
cacttctcactgcctgtggagccat

SEQ ID NO: 1330341 - DNA, 25 bp, Homo sapien
ccacttctcactgcctgtggagcca

SEQ ID NO: 1330342 - DNA, 25 bp, Homo sapien
gtcctctcctccacttctcactgcc

SEQ ID NO: 1330343 - DNA, 25 bp, Homo sapien
tctcctccacttctcactgcctgtg

SEQ ID NO: 1330344 - DNA, 25 bp, Homo sapien
tgaagtaaatgctggcgaatgctgc

SEQ ID NO: 1330345 - DNA, 25 bp, Homo sapien
cttcgctgggaactggtttcatcct

SEQ ID NO: 1330346 - DNA, 25 bp, Homo sapien
tggactgttcacaagagagggcatg

SEQ ID NO: 1330347 - DNA, 25 bp, Homo sapien
taaagggaggtatgaagtaaatgct

SEQ ID NO: 1330348 - DNA, 25 bp, Homo sapien
tgaggcatcagtccacagagcagag

SEQ ID NO: 1330349 - DNA, 25 bp, Homo sapien
ggccagggagctcgtgtgaggcatc

SEQ ID NO: 1330350 - DNA, 25 bp, Homo sapien
ctgcagatctgtgggaagagcctgg

SEQ ID NO: 1330351 - DNA, 25 bp, Homo sapien
cagggagctcgtgtgaggcatcagt

SEQ ID NO: 1330352 - DNA, 25 bp, Homo sapien
ctactgtgtgccacaggatgcgccg

SEQ ID NO: 1330353 - DNA, 25 bp, Homo sapien
ctgtgtgccacaggatgcgccgctt

SEQ ID NO: 1330354 - DNA, 25 bp, Homo sapien
tgtgccacaggatgcgccgcttctc

SEQ ID NO: 1330355 - DNA, 25 bp, Homo sapien
tactgtgtgccacaggatgcgccgc

SEQ ID NO: 1330356 - DNA, 25 bp, Homo sapien
gagggcccacttgcataatacagga

SEQ ID NO: 1330357 - DNA, 25 bp, Homo sapien
gactggccactgaaggcatgctgct

SEQ ID NO: 1330358 - DNA, 25 bp, Homo sapien
tgtggctggttccaaaggtcccttc

SEQ ID NO: 1330359 - DNA, 25 bp, Homo sapien
ctcaggatcaccgtgctggctggaa

SEQ ID NO: 1330360 - DNA, 25 bp, Homo sapien
gtctcccaaaagactcaatgtctat

SEQ ID NO: 1330361 - DNA, 25 bp, Homo sapien
gtacaagttaggagctctcactcag

SEQ ID NO: 1330362 - DNA, 25 bp, Homo sapien
tgccttgggtctgatatgaatctgc

SEQ ID NO: 1330363 - DNA, 25 bp, Homo sapien
taaagtggtacacagaggcctaact

SEQ ID NO: 1330364 - DNA, 25 bp, Homo sapien
tgtcgggaatgctggggagagggct

SEQ ID NO: 1330365 - DNA, 25 bp, Homo sapien
aatgggcaagggaatacctgtcctg

SEQ ID NO: 1330366 - DNA, 25 bp, Homo sapien
caagggaatacctgtcctgctcctc

SEQ ID NO: 1330367 - DNA, 25 bp, Homo sapien
tgggcaagggaatacctgtcctgct

SEQ ID NO: 1330368 - DNA, 25 bp, Homo sapien
tgttgccgttatttgtgatggtgac

SEQ ID NO: 1330369 - DNA, 25 bp, Homo sapien
acaatggcagtctcgcagagggagc

SEQ ID NO: 1330370 - DNA, 25 bp, Homo sapien
cacttgttgccgttatttgtgatgg

SEQ ID NO: 1330371 - DNA, 25 bp, Homo sapien
gggagccgagtcttctgtgtgactt

SEQ ID NO: 1330372 - DNA, 25 bp, Homo sapien
tgcttgcccagtgggccactggtcg

SEQ ID NO: 1330373 - DNA, 25 bp, Homo sapien
tcaagatcatgtaatccaccaaggc

SEQ ID NO: 1330374 - DNA, 25 bp, Homo sapien
tcccaattgtgcagtctgggtgccc

SEQ ID NO: 1330375 - DNA, 25 bp, Homo sapien
gagcaggaacgtgaaaagacaccag

SEQ ID NO: 1330376 - DNA, 25 bp, Homo sapien
gctcctagggcatgaaccccattta

SEQ ID NO: 1330377 - DNA, 25 bp, Homo sapien
tgcagagggcttgtccgaacacaat

SEQ ID NO: 1330378 - DNA, 25 bp, Homo sapien
gccatctcggaaaaagctcctaggg

SEQ ID NO: 1330379 - DNA, 25 bp, Homo sapien
tgataaataggacccgccatctcgg

SEQ ID NO: 1330380 - DNA, 25 bp, Homo sapien
tccagaccctcatgggctggaagga

SEQ ID NO: 1330381 - DNA, 25 bp, Homo sapien
ttgtccagaccctcatgggctggaa

SEQ ID NO: 1330382 - DNA, 25 bp, Homo sapien
cttgtccagaccctcatgggctgga

SEQ ID NO: 1330383 - DNA, 25 bp, Homo sapien
tgtccagaccctcatgggctggaag

SEQ ID NO: 1330384 - DNA, 25 bp, Homo sapien
tagagggtggtagtcacatagtccc

SEQ ID NO: 1330385 - DNA, 25 bp, Homo sapien
caaaacctcacttagagggtggtag

SEQ ID NO: 1330386 - DNA, 25 bp, Homo sapien
caggcccgcctgcattccgggtagt

SEQ ID NO: 1330387 - DNA, 25 bp, Homo sapien
ggtagttgggtagagctcctttctg

SEQ ID NO: 1330388 - DNA, 25 bp, Homo sapien
cattttggtagatggactgcccttc

SEQ ID NO: 1330389 - DNA, 25 bp, Homo sapien
tgtcggccttgtcccacagaggtgt

SEQ ID NO: 1330390 - DNA, 25 bp, Homo sapien
tccacatgcaagaagagaaaaggtc

SEQ ID NO: 1330391 - DNA, 25 bp, Homo sapien
gatggtacagctccctggcaaaaac

SEQ ID NO: 1330392 - DNA, 25 bp, Homo sapien
tgggtctactttccttcttgtgttc

SEQ ID NO: 1330393 - DNA, 25 bp, Homo sapien
caactcctccatggttgggtctact

SEQ ID NO: 1330394 - DNA, 25 bp, Homo sapien
tgttgtggcgtcaatgccagtgtgc

SEQ ID NO: 1330395 - DNA, 25 bp, Homo sapien
agtgtgccttgtctacacatctgcc

SEQ ID NO: 1330396 - DNA, 25 bp, Homo sapien
cagaggcttgatgctttgcttaaga

SEQ ID NO: 1330397 - DNA, 25 bp, Homo sapien
aaaattggtagtggctctttgaaat

SEQ ID NO: 1330398 - DNA, 25 bp, Homo sapien
ggatttttccagtatacagcatttg

SEQ ID NO: 1330399 - DNA, 25 bp, Homo sapien
tttatcagcggcaaatcagaggctt

SEQ ID NO: 1330400 - DNA, 25 bp, Homo sapien
gtctaaggttagtgtacatccatcc

SEQ ID NO: 1330401 - DNA, 25 bp, Homo sapien
ggctttgcagatctctgaattagta

SEQ ID NO: 1330402 - DNA, 25 bp, Homo sapien
tccaaaagccctgtaccttctgtgc

SEQ ID NO: 1330403 - DNA, 25 bp, Homo sapien
gctatataacaagcactgattttta

SEQ ID NO: 1330404 - DNA, 25 bp, Homo sapien
tggccaggcgttcctctagaacctc

SEQ ID NO: 1330405 - DNA, 25 bp, Homo sapien
acacaagatcttccaaacgcctaaa

SEQ ID NO: 1330406 - DNA, 25 bp, Homo sapien
tcttccaaacgcctaaaccgcagtg

SEQ ID NO: 1330407 - DNA, 25 bp, Homo sapien
tagaggcagccaagtagcaacatat

SEQ ID NO: 1330408 - DNA, 25 bp, Homo sapien
tttccccaatcagagatgtgaaggc

SEQ ID NO: 1330409 - DNA, 25 bp, Homo sapien
tcactgaaacatctaccaaattaag

SEQ ID NO: 1330410 - DNA, 25 bp, Homo sapien
gagattttccctccaaagtcaccaa

SEQ ID NO: 1330411 - DNA, 25 bp, Homo sapien
aagacagttctgacatacttaaacc

SEQ ID NO: 1330412 - DNA, 25 bp, Homo sapien
tctattgagatgaacaccgtgtacc

SEQ ID NO: 1330413 - DNA, 25 bp, Homo sapien
agcattgtttgcacgcgattcccca

SEQ ID NO: 1330414 - DNA, 25 bp, Homo sapien
tattgagttaaagcaaccacgccaa

SEQ ID NO: 1330415 - DNA, 25 bp, Homo sapien
cactgtggctagagcggttcagaac

SEQ ID NO: 1330416 - DNA, 25 bp, Homo sapien
cagcttgaaatagaccttgaccagg

SEQ ID NO: 1330417 - DNA, 25 bp, Homo sapien
cagaagacgccacgaaggtgatgcc

SEQ ID NO: 1330418 - DNA, 25 bp, Homo sapien
tagataaaccactgcagggccgtga

SEQ ID NO: 1330419 - DNA, 25 bp, Homo sapien
gtgaaccccagtcttcggaggacgc

SEQ ID NO: 1330420 - DNA, 25 bp, Homo sapien
ctaccgtgcgctcgaagcaggcgaa

SEQ ID NO: 1330421 - DNA, 25 bp, Homo sapien
ttcatcatggtgtaggggatctgcc

SEQ ID NO: 1330422 - DNA, 25 bp, Homo sapien
cgtgcgctcgaagcaggcgaacttc

SEQ ID NO: 1330423 - DNA, 25 bp, Homo sapien
catcatggtgtaggggatctgcctc

SEQ ID NO: 1330424 - DNA, 25 bp, Homo sapien
agaaggcccacaggccctcctcgcc

SEQ ID NO: 1330425 - DNA, 25 bp, Homo sapien
ttgtagaaggcccacaggccctcct

SEQ ID NO: 1330426 - DNA, 25 bp, Homo sapien
cttgtagaaggcccacaggccctcc

SEQ ID NO: 1330427 - DNA, 25 bp, Homo sapien
gtagaaggcccacaggccctcctcg

SEQ ID NO: 1330428 - DNA, 25 bp, Homo sapien
ggctcgcagggtgctggcgtagccc

SEQ ID NO: 1330429 - DNA, 25 bp, Homo sapien
tagcccggtcgcgtctgcacgcgga

SEQ ID NO: 1330430 - DNA, 25 bp, Homo sapien
ggtgctggcgtagcccggtcgcgtc

SEQ ID NO: 1330431 - DNA, 25 bp, Homo sapien
tggcgtagcccggtcgcgtctgcac

SEQ ID NO: 1330432 - DNA, 25 bp, Homo sapien
atgggctccagcgagacatcgggga

SEQ ID NO: 1330433 - DNA, 25 bp, Homo sapien
ccagcgagacatcggggaagaactc

SEQ ID NO: 1330434 - DNA, 25 bp, Homo sapien
tgggctccagcgagacatcggggaa

SEQ ID NO: 1330435 - DNA, 25 bp, Homo sapien
gctccagcgagacatcggggaagaa

SEQ ID NO: 1330436 - DNA, 25 bp, Homo sapien
aaaggccgaacttgaagaagccctg

SEQ ID NO: 1330437 - DNA, 25 bp, Homo sapien
gatcttgaagacctcgtaaaggccg

SEQ ID NO: 1330438 - DNA, 25 bp, Homo sapien
caggcgaaaaggtacaggccggctc

SEQ ID NO: 1330439 - DNA, 25 bp, Homo sapien
agtagccgaagaaggtctgagcgca

SEQ ID NO: 1330440 - DNA, 25 bp, Homo sapien
cacacaacggcccaggcgaggggat

SEQ ID NO: 1330441 - DNA, 25 bp, Homo sapien
agcgtcgtgaacctccctcgcgagt

SEQ ID NO: 1330442 - DNA, 25 bp, Homo sapien
tgtgcctgtgcagtccgcggtgtga

SEQ ID NO: 1330443 - DNA, 25 bp, Homo sapien
cccctccaggcgcactcactcaggg

SEQ ID NO: 1330444 - DNA, 25 bp, Homo sapien
gtcccagagctcaccttcggcggtg

SEQ ID NO: 1330445 - DNA, 25 bp, Homo sapien
tgtacaaacacgagtaaacgcagga

SEQ ID NO: 1330446 - DNA, 25 bp, Homo sapien
taaagagtcgccatgcactgttgcc

SEQ ID NO: 1330447 - DNA, 25 bp, Homo sapien
ccttcaggtcaatgggctcctggta

SEQ ID NO: 1330448 - DNA, 25 bp, Homo sapien
aatgtagtttatagggacgtgtgcc

SEQ ID NO: 1330449 - DNA, 25 bp, Homo sapien
gacgtgtgcctctcgtattttcaga

SEQ ID NO: 1330450 - DNA, 25 bp, Homo sapien
gcttttaccagagaacagtaccttg

SEQ ID NO: 1330451 - DNA, 25 bp, Homo sapien
gtgtagtgagctatgctcgcgccac

SEQ ID NO: 1330452 - DNA, 25 bp, Homo sapien
tcacacgactccaggatgggaggat

SEQ ID NO: 1330453 - DNA, 25 bp, Homo sapien
tgatgaatctccagaaattggtcgg

SEQ ID NO: 1330454 - DNA, 25 bp, Homo sapien
gatttctcatttcccctgtaggcct

SEQ ID NO: 1330455 - DNA, 25 bp, Homo sapien
aattggtcggcatctttcctggagc

SEQ ID NO: 1330456 - DNA, 25 bp, Homo sapien
ccctggtaggtggtagacccctgct

SEQ ID NO: 1330457 - DNA, 25 bp, Homo sapien
agcccaagccatgatccctgaatgc

SEQ ID NO: 1330458 - DNA, 25 bp, Homo sapien
caagccatgatccctgaatgcccag

SEQ ID NO: 1330459 - DNA, 25 bp, Homo sapien
gcccaagccatgatccctgaatgcc

SEQ ID NO: 1330460 - DNA, 25 bp, Homo sapien
ctagatggtcttttgaacagctgtt

SEQ ID NO: 1330461 - DNA, 25 bp, Homo sapien
tgttttaggatgtagtctttggggc

SEQ ID NO: 1330462 - DNA, 25 bp, Homo sapien
ttttaggatgtagtctttggggcga

SEQ ID NO: 1330463 - DNA, 25 bp, Homo sapien
tgtagtctttggggcgaggcttcct

SEQ ID NO: 1330464 - DNA, 25 bp, Homo sapien
atgacgttgctcacattcacccatg

SEQ ID NO: 1330465 - DNA, 25 bp, Homo sapien
tgaatatgacgttgctcacattcac

SEQ ID NO: 1330466 - DNA, 25 bp, Homo sapien
ccttctctgctacagggtactctgg

SEQ ID NO: 1330467 - DNA, 25 bp, Homo sapien
tacagggtactctgggggcatcctg

SEQ ID NO: 1330468 - DNA, 25 bp, Homo sapien
caagatcgagggaatgttacagggc

SEQ ID NO: 1330469 - DNA, 25 bp, Homo sapien
gcccagctcaagctcggatggcggc

SEQ ID NO: 1330470 - DNA, 25 bp, Homo sapien
cctgctaggtgcacggagggtggga

SEQ ID NO: 1330471 - DNA, 25 bp, Homo sapien
tattttatatacacgaggtctgtga

SEQ ID NO: 1330472 - DNA, 25 bp, Homo sapien
ctggacaccacatcttcagatggct

SEQ ID NO: 1330473 - DNA, 25 bp, Homo sapien
cccaggcagtggtcaaaggctccat

SEQ ID NO: 1330474 - DNA, 25 bp, Homo sapien
aggcagtggtcaaaggctccattgg

SEQ ID NO: 1330475 - DNA, 25 bp, Homo sapien
gccgctggacaccacatcttcagat

SEQ ID NO: 1330476 - DNA, 25 bp, Homo sapien
gcatgaggcctcagccagggcctca

SEQ ID NO: 1330477 - DNA, 25 bp, Homo sapien
ctgtggggcatgaggcctcagccag

SEQ ID NO: 1330478 - DNA, 25 bp, Homo sapien
tgaggcctcagccagggcctcatag

SEQ ID NO: 1330479 - DNA, 25 bp, Homo sapien
gaggcctcagccagggcctcatagc

SEQ ID NO: 1330480 - DNA, 25 bp, Homo sapien
cctgcggtgggattcactatcctat

SEQ ID NO: 1330481 - DNA, 25 bp, Homo sapien
gggattcactatcctattgtacagc

SEQ ID NO: 1330482 - DNA, 25 bp, Homo sapien
cacaatgctcccctgcggtgggatt

SEQ ID NO: 1330483 - DNA, 25 bp, Homo sapien
tgcctaaggtcacagtgtgagtaag

SEQ ID NO: 1330484 - DNA, 25 bp, Homo sapien
tcgccataggggaagcaactctgga

SEQ ID NO: 1330485 - DNA, 25 bp, Homo sapien
gctggttcagccatccggtagcagt

SEQ ID NO: 1330486 - DNA, 25 bp, Homo sapien
tgtggcaggcaagggcgtgctgagg

SEQ ID NO: 1330487 - DNA, 25 bp, Homo sapien
gctgtggtagccattgggccgcagg

SEQ ID NO: 1330488 - DNA, 25 bp, Homo sapien
gtcactgtctcctcgttcctctggg

SEQ ID NO: 1330489 - DNA, 25 bp, Homo sapien
gcctcccccactaggtcactgtctc

SEQ ID NO: 1330490 - DNA, 25 bp, Homo sapien
ctaggtcactgtctcctcgttcctc

SEQ ID NO: 1330491 - DNA, 25 bp, Homo sapien
aggtcactgtctcctcgttcctctg

SEQ ID NO: 1330492 - DNA, 25 bp, Homo sapien
gggctgggcagaggcgggggtggag

SEQ ID NO: 1330493 - DNA, 25 bp, Homo sapien
tgggcagaggcgggggtggagggct

SEQ ID NO: 1330494 - DNA, 25 bp, Homo sapien
cttgtgggctgggcagaggcggggg

SEQ ID NO: 1330495 - DNA, 25 bp, Homo sapien
tgtgggctgggcagaggcgggggtg

SEQ ID NO: 1330496 - DNA, 25 bp, Homo sapien
tcagggggctgactattggtgagag

SEQ ID NO: 1330497 - DNA, 25 bp, Homo sapien
cttcagggggctgactattggtgag

SEQ ID NO: 1330498 - DNA, 25 bp, Homo sapien
aagggtgggtaggacggcttgctgg

SEQ ID NO: 1330499 - DNA, 25 bp, Homo sapien
ctggccccccggagaatggctctga

SEQ ID NO: 1330500 - DNA, 25 bp, Homo sapien
tggccaactattttgggcaagctgc

SEQ ID NO: 1330501 - DNA, 25 bp, Homo sapien
tcaaacccctaattgctccgttggc

SEQ ID NO: 1330502 - DNA, 25 bp, Homo sapien
caccgggcacgctgcagtgttcatt

SEQ ID NO: 1330503 - DNA, 25 bp, Homo sapien
tgttcattacctgctgggtgcccgg

SEQ ID NO: 1330504 - DNA, 25 bp, Homo sapien
aacctcactagcctggcagactgag

SEQ ID NO: 1330505 - DNA, 25 bp, Homo sapien
tccacagcagacatgacgcctgagg

SEQ ID NO: 1330506 - DNA, 25 bp, Homo sapien
aaatcccagagattaacagcattgc

SEQ ID NO: 1330507 - DNA, 25 bp, Homo sapien
tatttttgcttcaactggaacctat

SEQ ID NO: 1330508 - DNA, 25 bp, Homo sapien
ctattcggcgtcttctctgagccag

SEQ ID NO: 1330509 - DNA, 25 bp, Homo sapien
ttctgtcaagctatttaaacgtccc

SEQ ID NO: 1330510 - DNA, 25 bp, Homo sapien
gaagtcaggccctcttagcatattt

SEQ ID NO: 1330511 - DNA, 25 bp, Homo sapien
tctgagccagggtaaataaatttgg

SEQ ID NO: 1330512 - DNA, 25 bp, Homo sapien
gcaggaggcccgatgcaagtccgtt

SEQ ID NO: 1330513 - DNA, 25 bp, Homo sapien
gaggcccgatgcaagtccgttatgg

SEQ ID NO: 1330514 - DNA, 25 bp, Homo sapien
ccgggtgctctcagccatgggcaga

SEQ ID NO: 1330515 - DNA, 25 bp, Homo sapien
tgcctggaaggtacgtcgtgcgctg

SEQ ID NO: 1330516 - DNA, 25 bp, Homo sapien
tagaatcctgatcaatcctgcacct

SEQ ID NO: 1330517 - DNA, 25 bp, Homo sapien
ccaaagtcacagagtaggcggctca

SEQ ID NO: 1330518 - DNA, 25 bp, Homo sapien
cagctgaggcctcggctctggtgca

SEQ ID NO: 1330519 - DNA, 25 bp, Homo sapien
cagggctaggagtggctccagctca

SEQ ID NO: 1330520 - DNA, 25 bp, Homo sapien
ggatgggcctggcagataagctccc

SEQ ID NO: 1330521 - DNA, 25 bp, Homo sapien
atgggcctggcagataagctcccag

SEQ ID NO: 1330522 - DNA, 25 bp, Homo sapien
tgggcctggcagataagctcccagg

SEQ ID NO: 1330523 - DNA, 25 bp, Homo sapien
gatgggcctggcagataagctccca

SEQ ID NO: 1330524 - DNA, 25 bp, Homo sapien
tgagggagcatcctgcaattggaca

SEQ ID NO: 1330525 - DNA, 25 bp, Homo sapien
tgcagaagagaactggtccctactt

SEQ ID NO: 1330526 - DNA, 25 bp, Homo sapien
gcatcctgcaattggacaatggaaa

SEQ ID NO: 1330527 - DNA, 25 bp, Homo sapien
tggtccctacttgagggagcatcct

SEQ ID NO: 1330528 - DNA, 25 bp, Homo sapien
cagacactcggtcaggacgtcggcc

SEQ ID NO: 1330529 - DNA, 25 bp, Homo sapien
ccacccttgccgtcgctggcagcca

SEQ ID NO: 1330530 - DNA, 25 bp, Homo sapien
acgtcggcctcggtgtcagggcccg

SEQ ID NO: 1330531 - DNA, 25 bp, Homo sapien
actcggtcaggacgtcggcctcggt

SEQ ID NO: 1330532 - DNA, 25 bp, Homo sapien
gctgaatgggccttgacgtgcttgc

SEQ ID NO: 1330533 - DNA, 25 bp, Homo sapien
gtctgtgtagcgcttggagcagcca

SEQ ID NO: 1330534 - DNA, 25 bp, Homo sapien
cagggatctgacaggcgtacggctt

SEQ ID NO: 1330535 - DNA, 25 bp, Homo sapien
cttcttacgcacctgctgctctttg

SEQ ID NO: 1330536 - DNA, 25 bp, Homo sapien
cctcctgccaatagctgtgagaggc

SEQ ID NO: 1330537 - DNA, 25 bp, Homo sapien
ctcctgccaatagctgtgagaggct

SEQ ID NO: 1330538 - DNA, 25 bp, Homo sapien
ccacaagaaaccaggtcctcctgcc

SEQ ID NO: 1330539 - DNA, 25 bp, Homo sapien
gatcttgaggttctccagccgtgag

SEQ ID NO: 1330540 - DNA, 25 bp, Homo sapien
ccgtgtggctcctcaggtggatctt

SEQ ID NO: 1330541 - DNA, 25 bp, Homo sapien
ggtgctggcacaggtacggcttctc

SEQ ID NO: 1330542 - DNA, 25 bp, Homo sapien
gccttctggcaacccgggtgctggc

SEQ ID NO: 1330543 - DNA, 25 bp, Homo sapien
cagcccggtgggcaccccaaccctg

SEQ ID NO: 1330544 - DNA, 25 bp, Homo sapien
gcccggtgggcaccccaaccctgca

SEQ ID NO: 1330545 - DNA, 25 bp, Homo sapien
ctggtgaggggaactcccagcccgg

SEQ ID NO: 1330546 - DNA, 25 bp, Homo sapien
cccggtgggcaccccaaccctgcat

SEQ ID NO: 1330547 - DNA, 25 bp, Homo sapien
agattagggcccatgggaccctgcc

SEQ ID NO: 1330548 - DNA, 25 bp, Homo sapien
cagattagggcccatgggaccctgc

SEQ ID NO: 1330549 - DNA, 25 bp, Homo sapien
ccagattagggcccatgggaccctg

SEQ ID NO: 1330550 - DNA, 25 bp, Homo sapien
gatgagctggtagcagccgtgttac

SEQ ID NO: 1330551 - DNA, 25 bp, Homo sapien
gccgtgttacccgaggactggcgct

SEQ ID NO: 1330552 - DNA, 25 bp, Homo sapien
gctcttcacatcctttctctggggc

SEQ ID NO: 1330553 - DNA, 25 bp, Homo sapien
tggcgctcccaaagcctgctcttca

SEQ ID NO: 1330554 - DNA, 25 bp, Homo sapien
aacatggacccaactgcctctccca

SEQ ID NO: 1330555 - DNA, 25 bp, Homo sapien
ttccaacatggacccaactgcctct

SEQ ID NO: 1330556 - DNA, 25 bp, Homo sapien
catggacccaactgcctctcccatg

SEQ ID NO: 1330557 - DNA, 25 bp, Homo sapien
tcttccaacatggacccaactgcct

SEQ ID NO: 1330558 - DNA, 25 bp, Homo sapien
taatggcaccacgacccgagggcat

SEQ ID NO: 1330559 - DNA, 25 bp, Homo sapien
ttcaggtaatggcaccacgacccga

SEQ ID NO: 1330560 - DNA, 25 bp, Homo sapien
cccgagggcatcgtaatgattccat

SEQ ID NO: 1330561 - DNA, 25 bp, Homo sapien
accacgacccgagggcatcgtaatg

SEQ ID NO: 1330562 - DNA, 25 bp, Homo sapien
gggccttcctgacatcccggtcgcc

SEQ ID NO: 1330563 - DNA, 25 bp, Homo sapien
atggtacatttgtcctggacagaca

SEQ ID NO: 1330564 - DNA, 25 bp, Homo sapien
cctcaggctctatggtacatttgtc

SEQ ID NO: 1330565 - DNA, 25 bp, Homo sapien
atcccggtcgcctcaggctctatgg

SEQ ID NO: 1330566 - DNA, 25 bp, Homo sapien
ggctctcgagggtctggtgtttggg

SEQ ID NO: 1330567 - DNA, 25 bp, Homo sapien
ccgggctctttgatttggaccgtga

SEQ ID NO: 1330568 - DNA, 25 bp, Homo sapien
tgatttggaccgtgaggctctcgag

SEQ ID NO: 1330569 - DNA, 25 bp, Homo sapien
tctttgatttggaccgtgaggctct

SEQ ID NO: 1330570 - DNA, 25 bp, Homo sapien
gttcctgtctgggcaagaaatgggt

SEQ ID NO: 1330571 - DNA, 25 bp, Homo sapien
cttctctggcaaaagttcctgtctg

SEQ ID NO: 1330572 - DNA, 25 bp, Homo sapien
gctcttctctggcaaaagttcctgt

SEQ ID NO: 1330573 - DNA, 25 bp, Homo sapien
gggctcttctctggcaaaagttcct

SEQ ID NO: 1330574 - DNA, 25 bp, Homo sapien
ctcgcagggtgacgccaccaagctc

SEQ ID NO: 1330575 - DNA, 25 bp, Homo sapien
ggtgcctcctcgcagggtgacgcca

SEQ ID NO: 1330576 - DNA, 25 bp, Homo sapien
cgatgcactgaaggatgtgggtgcc

SEQ ID NO: 1330577 - DNA, 25 bp, Homo sapien
gatgtgggtgcctcctcgcagggtg

SEQ ID NO: 1330578 - DNA, 25 bp, Homo sapien
ccttggcgagcacacattgtgcttc

SEQ ID NO: 1330579 - DNA, 25 bp, Homo sapien
tggctcgtccggaagatgtagatga

SEQ ID NO: 1330580 - DNA, 25 bp, Homo sapien
ggcgagcacacattgtgcttcaaaa

SEQ ID NO: 1330581 - DNA, 25 bp, Homo sapien
ctggctggctgagaatggctcgtcc

SEQ ID NO: 1330582 - DNA, 25 bp, Homo sapien
gtctgtagaaatggcggcaagggca

SEQ ID NO: 1330583 - DNA, 25 bp, Homo sapien
tagatggatgtaaggaggtgaggaa

SEQ ID NO: 1330584 - DNA, 25 bp, Homo sapien
gactgggtcatcagcccttggtgac

SEQ ID NO: 1330585 - DNA, 25 bp, Homo sapien
cccttggtgactggctagatggatg

SEQ ID NO: 1330586 - DNA, 25 bp, Homo sapien
tctgctccccctcagggtcgagccc

SEQ ID NO: 1330587 - DNA, 25 bp, Homo sapien
tgctccccctcagggtcgagcccag

SEQ ID NO: 1330588 - DNA, 25 bp, Homo sapien
tccccctcagggtcgagcccagccg

SEQ ID NO: 1330589 - DNA, 25 bp, Homo sapien
gctctgctccccctcagggtcgagc

SEQ ID NO: 1330590 - DNA, 25 bp, Homo sapien
gagcccctgcgagcctctgttgcag

SEQ ID NO: 1330591 - DNA, 25 bp, Homo sapien
ctgagcccctgcgagcctctgttgc

SEQ ID NO: 1330592 - DNA, 25 bp, Homo sapien
ggtcctgagcccctgcgagcctctg

SEQ ID NO: 1330593 - DNA, 25 bp, Homo sapien
tcctgagcccctgcgagcctctgtt

SEQ ID NO: 1330594 - DNA, 25 bp, Homo sapien
gacaaagaagagccagctttgccca

SEQ ID NO: 1330595 - DNA, 25 bp, Homo sapien
ggggcagcagctgtgttgactcatc

SEQ ID NO: 1330596 - DNA, 25 bp, Homo sapien
gggcagcagctgtgttgactcatct

SEQ ID NO: 1330597 - DNA, 25 bp, Homo sapien
cacctgaaggggcaatacaccacac

SEQ ID NO: 1330598 - DNA, 25 bp, Homo sapien
cctgaaggggcaatacaccacactt

SEQ ID NO: 1330599 - DNA, 25 bp, Homo sapien
gggcaatacaccacactttttcctg

SEQ ID NO: 1330600 - DNA, 25 bp, Homo sapien
tgaaggggcaatacaccacactttt

SEQ ID NO: 1330601 - DNA, 25 bp, Homo sapien
taataaagatcagcgcagtcactgg

SEQ ID NO: 1330602 - DNA, 25 bp, Homo sapien
taggagcaactacatcaggtggcac

SEQ ID NO: 1330603 - DNA, 25 bp, Homo sapien
tacttatgcaaatcctggtgtctcc

SEQ ID NO: 1330604 - DNA, 25 bp, Homo sapien
tattgggagctcatcctattgcagc

SEQ ID NO: 1330605 - DNA, 25 bp, Homo sapien
ctattggacacatatgagctctggg

SEQ ID NO: 1330606 - DNA, 25 bp, Homo sapien
gcacaggaacctattggacacatat

SEQ ID NO: 1330607 - DNA, 25 bp, Homo sapien
gaacctattggacacatatgagctc

SEQ ID NO: 1330608 - DNA, 25 bp, Homo sapien
caggatggcacaggaacctattgga

SEQ ID NO: 1330609 - DNA, 25 bp, Homo sapien
tgagggctggaactcaagctgaatt

SEQ ID NO: 1330610 - DNA, 25 bp, Homo sapien
cagcagtttatgggtccatcttctt

SEQ ID NO: 1330611 - DNA, 25 bp, Homo sapien
gagggctggaactcaagctgaatta

SEQ ID NO: 1330612 - DNA, 25 bp, Homo sapien
ctagctgaggcaccttctgttgtcc

SEQ ID NO: 1330613 - DNA, 25 bp, Homo sapien
tgaggcaccttctgttgtcctggac

SEQ ID NO: 1330614 - DNA, 25 bp, Homo sapien
agctgaggcaccttctgttgtcctg

SEQ ID NO: 1330615 - DNA, 25 bp, Homo sapien
gaggcaccttctgttgtcctggact

SEQ ID NO: 1330616 - DNA, 25 bp, Homo sapien
ctgctgtctgagcttatgtcccaac

SEQ ID NO: 1330617 - DNA, 25 bp, Homo sapien
gagcttatgtcccaacatggcagga

SEQ ID NO: 1330618 - DNA, 25 bp, Homo sapien
tctgagcttatgtcccaacatggca

SEQ ID NO: 1330619 - DNA, 25 bp, Homo sapien
tgtctgagcttatgtcccaacatgg

SEQ ID NO: 1330620 - DNA, 25 bp, Homo sapien
aatctaaccgggaggaacacacctg

SEQ ID NO: 1330621 - DNA, 25 bp, Homo sapien
ggcctcaagaccaggaactacattt

SEQ ID NO: 1330622 - DNA, 25 bp, Homo sapien
cagccctgactagggcaacagtgcc

SEQ ID NO: 1330623 - DNA, 25 bp, Homo sapien
tgaaagtgccctgtctgtactcaga

SEQ ID NO: 1330624 - DNA, 25 bp, Homo sapien
aaggctgcatggctagtgagcagca

SEQ ID NO: 1330625 - DNA, 25 bp, Homo sapien
gagctgggatgagtctccaactcca

SEQ ID NO: 1330626 - DNA, 25 bp, Homo sapien
gaagcctctccttgttaagcccaag

SEQ ID NO: 1330627 - DNA, 25 bp, Homo sapien
ggacgaggctctgacctaattgcaa

SEQ ID NO: 1330628 - DNA, 25 bp, Homo sapien
catgaaagaactgtggaaacggctg

SEQ ID NO: 1330629 - DNA, 25 bp, Homo sapien
tcatgaaagaactgtggaaacggct

SEQ ID NO: 1330630 - DNA, 25 bp, Homo sapien
ctcatgaaagaactgtggaaacggc

SEQ ID NO: 1330631 - DNA, 25 bp, Homo sapien
tgtctattacagtgcatggtagcag

SEQ ID NO: 1330632 - DNA, 25 bp, Homo sapien
tctattacagtgcatggtagcagag

SEQ ID NO: 1330633 - DNA, 25 bp, Homo sapien
tattacagtgcatggtagcagaggc

SEQ ID NO: 1330634 - DNA, 25 bp, Homo sapien
cctttgtctattacagtgcatggta

SEQ ID NO: 1330635 - DNA, 25 bp, Homo sapien
caagggccatgggaggtccaggtct

SEQ ID NO: 1330636 - DNA, 25 bp, Homo sapien
tgtggaatcaagtgagatcctggca

SEQ ID NO: 1330637 - DNA, 25 bp, Homo sapien
ccagtgtaagccagtgtcctgtgaa

SEQ ID NO: 1330638 - DNA, 25 bp, Homo sapien
tggaatcaagtgagatcctggcagc

SEQ ID NO: 1330639 - DNA, 25 bp, Homo sapien
tcatggctgtccgtcgatgcagggc

SEQ ID NO: 1330640 - DNA, 25 bp, Homo sapien
tctgaaaactcatccgcgggttcct

SEQ ID NO: 1330641 - DNA, 25 bp, Homo sapien
ggcttcaagttgcaagctgccctca

SEQ ID NO: 1330642 - DNA, 25 bp, Homo sapien
agaagcaggtgaagtcctcgccctt

SEQ ID NO: 1330643 - DNA, 25 bp, Homo sapien
ggactcctgtttgatgtgttgtgtg

SEQ ID NO: 1330644 - DNA, 25 bp, Homo sapien
ggctgccgttcacatacgtggcctg

SEQ ID NO: 1330645 - DNA, 25 bp, Homo sapien
tgtgtggttgggaggctgccgttca

SEQ ID NO: 1330646 - DNA, 25 bp, Homo sapien
ttggtagtcgggcaaggactcctgt

SEQ ID NO: 1330647 - DNA, 25 bp, Homo sapien
ccctcagcaaggtccaggtccagca

SEQ ID NO: 1330648 - DNA, 25 bp, Homo sapien
ggtacggtgtccgtagctcccattc

SEQ ID NO: 1330649 - DNA, 25 bp, Homo sapien
gtacggtgtccgtagctcccattca

SEQ ID NO: 1330650 - DNA, 25 bp, Homo sapien
gccctcagcaaggtccaggtccagc

SEQ ID NO: 1330651 - DNA, 25 bp, Homo sapien
cggtggaccgggttagctgagacct

SEQ ID NO: 1330652 - DNA, 25 bp, Homo sapien
tggaccgggttagctgagacctgct

SEQ ID NO: 1330653 - DNA, 25 bp, Homo sapien
gcccggtggaccgggttagctgaga

SEQ ID NO: 1330654 - DNA, 25 bp, Homo sapien
gaccgggttagctgagacctgctgc

SEQ ID NO: 1330655 - DNA, 25 bp, Homo sapien
gacttctccggaataacacatctag

SEQ ID NO: 1330656 - DNA, 25 bp, Homo sapien
cctatgggaactgtacacaccttga

SEQ ID NO: 1330657 - DNA, 25 bp, Homo sapien
tcctgggaggtacgggacatttaca

SEQ ID NO: 1330658 - DNA, 25 bp, Homo sapien
tgatgacagtcataccaggattcga

SEQ ID NO: 1330659 - DNA, 25 bp, Homo sapien
ttcagaccagcgctgacatcgcagt

SEQ ID NO: 1330660 - DNA, 25 bp, Homo sapien
cagcatcttgtcttcagaccagcgc

SEQ ID NO: 1330661 - DNA, 25 bp, Homo sapien
ctgtacttctgacgccagctcagtg

SEQ ID NO: 1330662 - DNA, 25 bp, Homo sapien
cgctgacatcgcagtgtaccacctt

SEQ ID NO: 1330663 - DNA, 25 bp, Homo sapien
cgtaaacattctgtggcagacgcag

SEQ ID NO: 1330664 - DNA, 25 bp, Homo sapien
aacattctgtggcagacgcagctcc

SEQ ID NO: 1330665 - DNA, 25 bp, Homo sapien
taaacattctgtggcagacgcagct

SEQ ID NO: 1330666 - DNA, 25 bp, Homo sapien
acattctgtggcagacgcagctcca

SEQ ID NO: 1330667 - DNA, 25 bp, Homo sapien
tggctctcatccgcagctgggccgg

SEQ ID NO: 1330668 - DNA, 25 bp, Homo sapien
ggctctcatccgcagctgggccggc

SEQ ID NO: 1330669 - DNA, 25 bp, Homo sapien
gcaaaggcccattaacatggacata

SEQ ID NO: 1330670 - DNA, 25 bp, Homo sapien
ctgcaaaggcccattaacatggaca

SEQ ID NO: 1330671 - DNA, 25 bp, Homo sapien
aaaggcccattaacatggacataaa

SEQ ID NO: 1330672 - DNA, 25 bp, Homo sapien
tgcaaaggcccattaacatggacat

SEQ ID NO: 1330673 - DNA, 25 bp, Homo sapien
gacaatgggtacactatccctttgc

SEQ ID NO: 1330674 - DNA, 25 bp, Homo sapien
caggcccggagtgagggccgctctt

SEQ ID NO: 1330675 - DNA, 25 bp, Homo sapien
agtgagggccgctcttaggaatggc

SEQ ID NO: 1330676 - DNA, 25 bp, Homo sapien
tgggtacactatccctttgcttcct

SEQ ID NO: 1330677 - DNA, 25 bp, Homo sapien
tcaaagcagatgtgccaaattgaac

SEQ ID NO: 1330678 - DNA, 25 bp, Homo sapien
caaattgaacctcccgcttgctgct

SEQ ID NO: 1330679 - DNA, 25 bp, Homo sapien
gcgcttgtggagatgcgtggaattc

SEQ ID NO: 1330680 - DNA, 25 bp, Homo sapien
aaatgggaccccagtactagacatg

SEQ ID NO: 1330681 - DNA, 25 bp, Homo sapien
ttctagtctcgctgcctgacagcac

SEQ ID NO: 1330682 - DNA, 25 bp, Homo sapien
acactgttaattcttctagtctcgc

SEQ ID NO: 1330683 - DNA, 25 bp, Homo sapien
cccacactgttaattcttctagtct

SEQ ID NO: 1330684 - DNA, 25 bp, Homo sapien
acagcacctggctcttaatggtgcc

SEQ ID NO: 1330685 - DNA, 25 bp, Homo sapien
ctttatgctgcaggcaatacaaaga

SEQ ID NO: 1330686 - DNA, 25 bp, Homo sapien
ttccagtaattgctatccaacattc

SEQ ID NO: 1330687 - DNA, 25 bp, Homo sapien
aattgctatccaacattcaagaaag

SEQ ID NO: 1330688 - DNA, 25 bp, Homo sapien
ctgagacaacactttatgctgcagg

SEQ ID NO: 1330689 - DNA, 25 bp, Homo sapien
attacactaagggagctgcgggctg

SEQ ID NO: 1330690 - DNA, 25 bp, Homo sapien
tggcagggcgatggcatatccagaa

SEQ ID NO: 1330691 - DNA, 25 bp, Homo sapien
tgcagagtacccacatgacactggc

SEQ ID NO: 1330692 - DNA, 25 bp, Homo sapien
agaaagtgccagtgggctccaccag

SEQ ID NO: 1330693 - DNA, 25 bp, Homo sapien
tctgtgatggattaccaggaagaca

SEQ ID NO: 1330694 - DNA, 25 bp, Homo sapien
gacttctgtagaacacggattccat

SEQ ID NO: 1330695 - DNA, 25 bp, Homo sapien
tagacttctcctcgtgcgatttgca

SEQ ID NO: 1330696 - DNA, 25 bp, Homo sapien
tctgccagcctctagtatttacaag

SEQ ID NO: 1330697 - DNA, 25 bp, Homo sapien
ggcctcagacgttcatctgtcgcag

SEQ ID NO: 1330698 - DNA, 25 bp, Homo sapien
tctgtcgcaggggatgttcttccct

SEQ ID NO: 1330699 - DNA, 25 bp, Homo sapien
gggcctcagacgttcatctgtcgca

SEQ ID NO: 1330700 - DNA, 25 bp, Homo sapien
ttccctggttgatgtgccgtgtgag

SEQ ID NO: 1330701 - DNA, 25 bp, Homo sapien
tttccctctgtgagctatagcctgg

SEQ ID NO: 1330702 - DNA, 25 bp, Homo sapien
ttttccctctgtgagctatagcctg

SEQ ID NO: 1330703 - DNA, 25 bp, Homo sapien
ttccctctgtgagctatagcctggg

SEQ ID NO: 1330704 - DNA, 25 bp, Homo sapien
ccctctgtgagctatagcctgggat

SEQ ID NO: 1330705 - DNA, 25 bp, Homo sapien
cagccaccagctttgcttgactggg

SEQ ID NO: 1330706 - DNA, 25 bp, Homo sapien
actccagcatcctgaaattccccaa

SEQ ID NO: 1330707 - DNA, 25 bp, Homo sapien
taactccagcatcctgaaattcccc

SEQ ID NO: 1330708 - DNA, 25 bp, Homo sapien
cagctttgcttgactggggttacgg

SEQ ID NO: 1330709 - DNA, 25 bp, Homo sapien
tgcgggccctctggccttgctaagg

SEQ ID NO: 1330710 - DNA, 25 bp, Homo sapien
gtcctgcgggccctctggccttgct

SEQ ID NO: 1330711 - DNA, 25 bp, Homo sapien
gccctctggccttgctaaggctgat

SEQ ID NO: 1330712 - DNA, 25 bp, Homo sapien
gggccctctggccttgctaaggctg

SEQ ID NO: 1330713 - DNA, 25 bp, Homo sapien
ccagagggcccccttgcacgaagaa

SEQ ID NO: 1330714 - DNA, 25 bp, Homo sapien
tgatgatgtccccaacagatgtccc

SEQ ID NO: 1330715 - DNA, 25 bp, Homo sapien
gctgagctgcagctcgccgcagatg

SEQ ID NO: 1330716 - DNA, 25 bp, Homo sapien
ttgctgtagagccacgctgagctgc

SEQ ID NO: 1330717 - DNA, 25 bp, Homo sapien
aagttgggctcgtggccactgcagc

SEQ ID NO: 1330718 - DNA, 25 bp, Homo sapien
caggcccaggtctgaagttgggctc

SEQ ID NO: 1330719 - DNA, 25 bp, Homo sapien
caccaggcccaggtctgaagttggg

SEQ ID NO: 1330720 - DNA, 25 bp, Homo sapien
tgaagttgggctcgtggccactgca

SEQ ID NO: 1330721 - DNA, 25 bp, Homo sapien
atctccctccactacctccaggcca

SEQ ID NO: 1330722 - DNA, 25 bp, Homo sapien
tctccctccactacctccaggccac

SEQ ID NO: 1330723 - DNA, 25 bp, Homo sapien
ccctccactacctccaggccaccct

SEQ ID NO: 1330724 - DNA, 25 bp, Homo sapien
tcatctccctccactacctccaggc

SEQ ID NO: 1330725 - DNA, 25 bp, Homo sapien
ggccacatgtctttgaactcctcaa

SEQ ID NO: 1330726 - DNA, 25 bp, Homo sapien
ccatccaggccacatgtctttgaac

SEQ ID NO: 1330727 - DNA, 25 bp, Homo sapien
tccaggccacatgtctttgaactcc

SEQ ID NO: 1330728 - DNA, 25 bp, Homo sapien
cacatgtctttgaactcctcaaggt

SEQ ID NO: 1330729 - DNA, 25 bp, Homo sapien
aataactcctcatggaagacccgag

SEQ ID NO: 1330730 - DNA, 25 bp, Homo sapien
tgtcgggtggttctgtgcgttctct

SEQ ID NO: 1330731 - DNA, 25 bp, Homo sapien
cgtgtcaggcctcgcacagttgagc

SEQ ID NO: 1330732 - DNA, 25 bp, Homo sapien
caaaccacaaggtctgcttacatgc

SEQ ID NO: 1330733 - DNA, 25 bp, Homo sapien
atccccacgggctcatcgctccctc

SEQ ID NO: 1330734 - DNA, 25 bp, Homo sapien
caaacatccccacgggctcatcgct

SEQ ID NO: 1330735 - DNA, 25 bp, Homo sapien
gcaaacatccccacgggctcatcgc

SEQ ID NO: 1330736 - DNA, 25 bp, Homo sapien
aacatccccacgggctcatcgctcc

SEQ ID NO: 1330737 - DNA, 25 bp, Homo sapien
caagatctgcactgtgacctttctg

SEQ ID NO: 1330738 - DNA, 25 bp, Homo sapien
cagcaagatctgcactgtgaccttt

SEQ ID NO: 1330739 - DNA, 25 bp, Homo sapien
aagatctgcactgtgacctttctgc

SEQ ID NO: 1330740 - DNA, 25 bp, Homo sapien
gcaagatctgcactgtgacctttct

SEQ ID NO: 1330741 - DNA, 25 bp, Homo sapien
tctgattacaagcagtcccggcctc

SEQ ID NO: 1330742 - DNA, 25 bp, Homo sapien
catcataaagcaggcgctctggcgg

SEQ ID NO: 1330743 - DNA, 25 bp, Homo sapien
gaaggcaatctgattacaagcagtc

SEQ ID NO: 1330744 - DNA, 25 bp, Homo sapien
ccccgcccacagatccaaatttcca

SEQ ID NO: 1330745 - DNA, 25 bp, Homo sapien
gcttttgactgcagccttccctgta

SEQ ID NO: 1330746 - DNA, 25 bp, Homo sapien
agcttttgactgcagccttccctgt

SEQ ID NO: 1330747 - DNA, 25 bp, Homo sapien
tccgggtagaccgaggctgctgcca

SEQ ID NO: 1330748 - DNA, 25 bp, Homo sapien
tgggtccgggtagaccgaggctgct

SEQ ID NO: 1330749 - DNA, 25 bp, Homo sapien
ctgggtccgggtagaccgaggctgc

SEQ ID NO: 1330750 - DNA, 25 bp, Homo sapien
ggtccgggtagaccgaggctgctgc

SEQ ID NO: 1330751 - DNA, 25 bp, Homo sapien
caaatagatcaaggcaataggacag

SEQ ID NO: 1330752 - DNA, 25 bp, Homo sapien
ttccaaatagatcaaggcaatagga

SEQ ID NO: 1330753 - DNA, 25 bp, Homo sapien
ccaaatagatcaaggcaataggaca

SEQ ID NO: 1330754 - DNA, 25 bp, Homo sapien
tccaaatagatcaaggcaataggac

SEQ ID NO: 1330755 - DNA, 25 bp, Homo sapien
cctaacagcattgcgccaaagagtg

SEQ ID NO: 1330756 - DNA, 25 bp, Homo sapien
cacgtacctaacagcattgcgccaa

SEQ ID NO: 1330757 - DNA, 25 bp, Homo sapien
ccaacacgtacctaacagcattgcg

SEQ ID NO: 1330758 - DNA, 25 bp, Homo sapien
cagcattgcgccaaagagtgaagga

SEQ ID NO: 1330759 - DNA, 25 bp, Homo sapien
caataaacaaaggttgtagcataaa

SEQ ID NO: 1330760 - DNA, 25 bp, Homo sapien
agtcaataaacaaaggttgtagcat

SEQ ID NO: 1330761 - DNA, 25 bp, Homo sapien
aacaaaggttgtagcataaatctac

SEQ ID NO: 1330762 - DNA, 25 bp, Homo sapien
taaacaaaggttgtagcataaatct

SEQ ID NO: 1330763 - DNA, 25 bp, Homo sapien
gcaggatcagtttgaaaacgaccac

SEQ ID NO: 1330764 - DNA, 25 bp, Homo sapien
ctctgccccatcgttggcagaaaca

SEQ ID NO: 1330765 - DNA, 25 bp, Homo sapien
tgcctctgccccatcgttggcagaa

SEQ ID NO: 1330766 - DNA, 25 bp, Homo sapien
gcaagaagctctcttgggcaggatc

SEQ ID NO: 1330767 - DNA, 25 bp, Homo sapien
ctggtgccccctgaaggtgggcacc

SEQ ID NO: 1330768 - DNA, 25 bp, Homo sapien
tgccccctgaaggtgggcaccacag

SEQ ID NO: 1330769 - DNA, 25 bp, Homo sapien
acagcagccctggccgaaggcagct

SEQ ID NO: 1330770 - DNA, 25 bp, Homo sapien
cccctgaaggtgggcaccacagcag

SEQ ID NO: 1330771 - DNA, 25 bp, Homo sapien
tcccaattgttagccacctagagag

SEQ ID NO: 1330772 - DNA, 25 bp, Homo sapien
gacctgtcctagagttcccaattgt

SEQ ID NO: 1330773 - DNA, 25 bp, Homo sapien
cacagcgggcatccgataaatatgg

SEQ ID NO: 1330774 - DNA, 25 bp, Homo sapien
caaatgataaggtgctgatgccgca

SEQ ID NO: 1330775 - DNA, 25 bp, Homo sapien
gacgtgtagcaaccactcgtagctg

SEQ ID NO: 1330776 - DNA, 25 bp, Homo sapien
tagctgctctttaagccacaagatg

SEQ ID NO: 1330777 - DNA, 25 bp, Homo sapien
agaaatctgggtgagacgtgtagca

SEQ ID NO: 1330778 - DNA, 25 bp, Homo sapien
tgagacgcgtgtcacagtacttggg

SEQ ID NO: 1330779 - DNA, 25 bp, Homo sapien
gagtccatgcgcacaatctacaatt

SEQ ID NO: 1330780 - DNA, 25 bp, Homo sapien
ggatgcatccagtctcagtacacag

SEQ ID NO: 1330781 - DNA, 25 bp, Homo sapien
tctatgagggatgcgctagccttcc

SEQ ID NO: 1330782 - DNA, 25 bp, Homo sapien
gaaattcaaccaggtggtaccacca

SEQ ID NO: 1330783 - DNA, 25 bp, Homo sapien
gatgctaggaagtgatgcctataac

SEQ ID NO: 1330784 - DNA, 25 bp, Homo sapien
atgctaggaagtgatgcctataacc

SEQ ID NO: 1330785 - DNA, 25 bp, Homo sapien
ctgatgctaggaagtgatgcctata

SEQ ID NO: 1330786 - DNA, 25 bp, Homo sapien
gctgatgctaggaagtgatgcctat

SEQ ID NO: 1330787 - DNA, 25 bp, Homo sapien
aggcacgttggcagggccgaactca

SEQ ID NO: 1330788 - DNA, 25 bp, Homo sapien
tccgaagaaagttccaccaagctct

SEQ ID NO: 1330789 - DNA, 25 bp, Homo sapien
gagaaactgaggaactccgaagaaa

SEQ ID NO: 1330790 - DNA, 25 bp, Homo sapien
tagtcccaaacaataagagagaaac

SEQ ID NO: 1330791 - DNA, 25 bp, Homo sapien
cggccttggatggaccgtagtctcg

SEQ ID NO: 1330792 - DNA, 25 bp, Homo sapien
ccggaggaggtcgtgggcgcgcggt

SEQ ID NO: 1330793 - DNA, 25 bp, Homo sapien
ggcggcggcggccttggatggaccg

SEQ ID NO: 1330794 - DNA, 25 bp, Homo sapien
aggcggccgggctagcaggtcccgc

SEQ ID NO: 1330795 - DNA, 25 bp, Homo sapien
tgcctcagccacctcgcaatgcatg

SEQ ID NO: 1330796 - DNA, 25 bp, Homo sapien
cctccttaggcctcttgtccgagtg

SEQ ID NO: 1330797 - DNA, 25 bp, Homo sapien
taggcctcttgtccgagtgtgcctc

SEQ ID NO: 1330798 - DNA, 25 bp, Homo sapien
gcctcttgtccgagtgtgcctcagc

SEQ ID NO: 1330799 - DNA, 25 bp, Homo sapien
gcaaaagccccctcgctcaggagcg

SEQ ID NO: 1330800 - DNA, 25 bp, Homo sapien
cctcgctcaggagcggttcgccctt

SEQ ID NO: 1330801 - DNA, 25 bp, Homo sapien
aaagccccctcgctcaggagcggtt

SEQ ID NO: 1330802 - DNA, 25 bp, Homo sapien
ttccacgcaaaagccccctcgctca

SEQ ID NO: 1330803 - DNA, 25 bp, Homo sapien
ggcggcaacgaggattcccagagca

SEQ ID NO: 1330804 - DNA, 25 bp, Homo sapien
taggtcacgggctgcgcgcttcgtc

SEQ ID NO: 1330805 - DNA, 25 bp, Homo sapien
ctttgcacgaatggtgaaactgagg

SEQ ID NO: 1330806 - DNA, 25 bp, Homo sapien
gaaaccagcctcctttgcacgaatg

SEQ ID NO: 1330807 - DNA, 25 bp, Homo sapien
caggagtcccaagctgggcgctgaa

SEQ ID NO: 1330808 - DNA, 25 bp, Homo sapien
acaggagtcccaagctgggcgctga

SEQ ID NO: 1330809 - DNA, 25 bp, Homo sapien
ggagtcccaagctgggcgctgaatc

SEQ ID NO: 1330810 - DNA, 25 bp, Homo sapien
tggaaaacaggagtcccaagctggg

SEQ ID NO: 1330811 - DNA, 25 bp, Homo sapien
tggtcagacgctcagcagcgcacaa

SEQ ID NO: 1330812 - DNA, 25 bp, Homo sapien
gcgcacaaccacacagtcccacgct

SEQ ID NO: 1330813 - DNA, 25 bp, Homo sapien
actgccgctggtcagacgctcagca

SEQ ID NO: 1330814 - DNA, 25 bp, Homo sapien
gccgctggtcagacgctcagcagcg

SEQ ID NO: 1330815 - DNA, 25 bp, Homo sapien
ccaagctgccggggttcgagcgtcg

SEQ ID NO: 1330816 - DNA, 25 bp, Homo sapien
tccgcgctccctgcgccatccccaa

SEQ ID NO: 1330817 - DNA, 25 bp, Homo sapien
gctccctgcgccatccccaagctgc

SEQ ID NO: 1330818 - DNA, 25 bp, Homo sapien
gggcgggcccgcgtctgcccaacag

SEQ ID NO: 1330819 - DNA, 25 bp, Homo sapien
gccgcccggctcaggccaatcgcgg

SEQ ID NO: 1330820 - DNA, 25 bp, Homo sapien
ccgcccggctcaggccaatcgcggc

SEQ ID NO: 1330821 - DNA, 25 bp, Homo sapien
gggcccgcgtctgcccaacagccgc

SEQ ID NO: 1330822 - DNA, 25 bp, Homo sapien
tccatagagactcaatgcaaaggtg

SEQ ID NO: 1330823 - DNA, 25 bp, Homo sapien
taatgaaataccccagttacctctc

SEQ ID NO: 1330824 - DNA, 25 bp, Homo sapien
ctcaatgcaaaggtggaaaaagtaa

SEQ ID NO: 1330825 - DNA, 25 bp, Homo sapien
gagactcaatgcaaaggtggaaaaa

SEQ ID NO: 1330826 - DNA, 25 bp, Homo sapien
agagcatgaccacttgagggcggtc

SEQ ID NO: 1330827 - DNA, 25 bp, Homo sapien
gggagagcatgaccacttgagggcg

SEQ ID NO: 1330828 - DNA, 25 bp, Homo sapien
agcatgaccacttgagggcggtcca

SEQ ID NO: 1330829 - DNA, 25 bp, Homo sapien
atgaccacttgagggcggtccagcc

SEQ ID NO: 1330830 - DNA, 25 bp, Homo sapien
tttctaggacaatttcccagttctc

SEQ ID NO: 1330831 - DNA, 25 bp, Homo sapien
ttttctacccaatccagtatcaacg

SEQ ID NO: 1330832 - DNA, 25 bp, Homo sapien
caaattgttgcttatccatgtccac

SEQ ID NO: 1330833 - DNA, 25 bp, Homo sapien
caggatgacacaccaaacaattacc

SEQ ID NO: 1330834 - DNA, 25 bp, Homo sapien
tacagcattagtgggctcatagaca

SEQ ID NO: 1330835 - DNA, 25 bp, Homo sapien
ccataagggtcaagcaaacatgcta

SEQ ID NO: 1330836 - DNA, 25 bp, Homo sapien
taacaccctggttccaacagatggt

SEQ ID NO: 1330837 - DNA, 25 bp, Homo sapien
aatggcaaaaacctaacctagctgg

SEQ ID NO: 1330838 - DNA, 25 bp, Homo sapien
caggacccggagctaaaatattcaa

SEQ ID NO: 1330839 - DNA, 25 bp, Homo sapien
tgctccctttgagagaccagacaag

SEQ ID NO: 1330840 - DNA, 25 bp, Homo sapien
atttcagtccaaagccagtccagtg

SEQ ID NO: 1330841 - DNA, 25 bp, Homo sapien
cacagtgatatgctcaaggccagta

SEQ ID NO: 1330842 - DNA, 25 bp, Homo sapien
gtcccatctgtagttgtatcagcag

SEQ ID NO: 1330843 - DNA, 25 bp, Homo sapien
cacacacaaaaagcaatcggtacag

SEQ ID NO: 1330844 - DNA, 25 bp, Homo sapien
tgctgaacatttactgtcccatctg

SEQ ID NO: 1330845 - DNA, 25 bp, Homo sapien
gcaaccaccacgacaaaggaagcat

SEQ ID NO: 1330846 - DNA, 25 bp, Homo sapien
ctattctttgaactccaagaactgt

SEQ ID NO: 1330847 - DNA, 25 bp, Homo sapien
ttctttgaactccaagaactgttga

SEQ ID NO: 1330848 - DNA, 25 bp, Homo sapien
ctttgaactccaagaactgttgaag

SEQ ID NO: 1330849 - DNA, 25 bp, Homo sapien
tgaactccaagaactgttgaagtct

SEQ ID NO: 1330850 - DNA, 25 bp, Homo sapien
tgctttcttgaaccatgtacctcca

SEQ ID NO: 1330851 - DNA, 25 bp, Homo sapien
tctagttcttgaataggtcaccgct

SEQ ID NO: 1330852 - DNA, 25 bp, Homo sapien
tctaggtgctagtgaggctgtcttc

SEQ ID NO: 1330853 - DNA, 25 bp, Homo sapien
ttactgtacaaagatgccctctagg

SEQ ID NO: 1330854 - DNA, 25 bp, Homo sapien
gctgcctttgacatacacacaagaa

SEQ ID NO: 1330855 - DNA, 25 bp, Homo sapien
taatgtataacatgacgactatggc

SEQ ID NO: 1330856 - DNA, 25 bp, Homo sapien
gaatgaatgtctccaatgagtgggc

SEQ ID NO: 1330857 - DNA, 25 bp, Homo sapien
gaaagttgcacatatgtaggatgaa

SEQ ID NO: 1330858 - DNA, 25 bp, Homo sapien
aattaatctcgaatacaatgtcccc

SEQ ID NO: 1330859 - DNA, 25 bp, Homo sapien
gttacagtcctgctatttatccagc

SEQ ID NO: 1330860 - DNA, 25 bp, Homo sapien
ggaacttcaaattaatctcgaatac

SEQ ID NO: 1330861 - DNA, 25 bp, Homo sapien
gaatgttacagtcctgctatttatc

SEQ ID NO: 1330862 - DNA, 25 bp, Homo sapien
ttctggaatactttgctcaccccaa

SEQ ID NO: 1330863 - DNA, 25 bp, Homo sapien
aggcttggcatttgtggttttctct

SEQ ID NO: 1330864 - DNA, 25 bp, Homo sapien
ttgctcaccccaagtcttcagtttg

SEQ ID NO: 1330865 - DNA, 25 bp, Homo sapien
tcaaggtgttgtgatctgttggtgt

SEQ ID NO: 1330866 - DNA, 25 bp, Homo sapien
tatatgaagtgtccacaaggcttcc

SEQ ID NO: 1330867 - DNA, 25 bp, Homo sapien
tcagatgttcaccaaatgtagtagt

SEQ ID NO: 1330868 - DNA, 25 bp, Homo sapien
gatagatggcagttttcagtgatgc

SEQ ID NO: 1330869 - DNA, 25 bp, Homo sapien
gaagcttaaagtacttgtcgactgc

SEQ ID NO: 1330870 - DNA, 25 bp, Homo sapien
tccaactaggaaacagtagaagctg

SEQ ID NO: 1330871 - DNA, 25 bp, Homo sapien
tcatagaaaccgagaatagactctg

SEQ ID NO: 1330872 - DNA, 25 bp, Homo sapien
gccattctatcgtgaaaaaggaggt

SEQ ID NO: 1330873 - DNA, 25 bp, Homo sapien
taatctaaaagggtggcctgcgaag

SEQ ID NO: 1330874 - DNA, 25 bp, Homo sapien
ggtagtgtcgtctggacaactccaa

SEQ ID NO: 1330875 - DNA, 25 bp, Homo sapien
ctcttgcagtgtcaacaaagtatta

SEQ ID NO: 1330876 - DNA, 25 bp, Homo sapien
caaagtattaaggatagctggtagt

SEQ ID NO: 1330877 - DNA, 25 bp, Homo sapien
gatgctgctactaagtgcgacagac

SEQ ID NO: 1330878 - DNA, 25 bp, Homo sapien
ggcctctgagcaacatttaagcact

SEQ ID NO: 1330879 - DNA, 25 bp, Homo sapien
tgttgcgtaataatatgtgccagga

SEQ ID NO: 1330880 - DNA, 25 bp, Homo sapien
aaaaaacatgtggtaagggcataca

SEQ ID NO: 1330881 - DNA, 25 bp, Homo sapien
aaagtactcaattgcattagtaatg

SEQ ID NO: 1330882 - DNA, 25 bp, Homo sapien
attaacagggcgtggtggtatgcaa

SEQ ID NO: 1330883 - DNA, 25 bp, Homo sapien
ccaccgcaactggcccacaaaaaag

SEQ ID NO: 1330884 - DNA, 25 bp, Homo sapien
caccgcaactggcccacaaaaaagt

SEQ ID NO: 1330885 - DNA, 25 bp, Homo sapien
cgtggtggtatgcaactgtggcccc

SEQ ID NO: 1330886 - DNA, 25 bp, Homo sapien
tctgaaaaaacagcctgaatggagg

SEQ ID NO: 1330887 - DNA, 25 bp, Homo sapien
gaaaaaacagcctgaatggaggcct

SEQ ID NO: 1330888 - DNA, 25 bp, Homo sapien
tgaaaaaacagcctgaatggaggcc

SEQ ID NO: 1330889 - DNA, 25 bp, Homo sapien
ctgaaaaaacagcctgaatggaggc

SEQ ID NO: 1330890 - DNA, 25 bp, Homo sapien
tctaccatcaactcattgtgtggcc

SEQ ID NO: 1330891 - DNA, 25 bp, Homo sapien
tactcaacccacctcagagatcagt

SEQ ID NO: 1330892 - DNA, 25 bp, Homo sapien
tataataaagcactctaccatcaac

SEQ ID NO: 1330893 - DNA, 25 bp, Homo sapien
agagatcagttctgagatcacttaa

SEQ ID NO: 1330894 - DNA, 25 bp, Homo sapien
gcttgcagtgagcccgagcttgcag

SEQ ID NO: 1330895 - DNA, 25 bp, Homo sapien
gcccagatcgcgccaccgcactcca

SEQ ID NO: 1330896 - DNA, 25 bp, Homo sapien
tgcagtgagcccgagcttgcagtga

SEQ ID NO: 1330897 - DNA, 25 bp, Homo sapien
gcctgggcgacagagcgagactccg

SEQ ID NO: 1330898 - DNA, 25 bp, Homo sapien
taatggctagttgggtggatcgtcc

SEQ ID NO: 1330899 - DNA, 25 bp, Homo sapien
cagggttgctcagacctcttttcca

SEQ ID NO: 1330900 - DNA, 25 bp, Homo sapien
cctctaatgggcagaccagggtgga

SEQ ID NO: 1330901 - DNA, 25 bp, Homo sapien
tttccaccagagtatgactccgaaa

SEQ ID NO: 1330902 - DNA, 25 bp, Homo sapien
agcacccgttttgacaagaaattct

SEQ ID NO: 1330903 - DNA, 25 bp, Homo sapien
atcagcacccgttttgacaagaaat

SEQ ID NO: 1330904 - DNA, 25 bp, Homo sapien
tacattatcagcacccgttttgaca

SEQ ID NO: 1330905 - DNA, 25 bp, Homo sapien
atacattatcagcacccgttttgac

SEQ ID NO: 1330906 - DNA, 25 bp, Homo sapien
tcacgtttattctgaatccatgaat

SEQ ID NO: 1330907 - DNA, 25 bp, Homo sapien
gttcacgtttattctgaatccatga

SEQ ID NO: 1330908 - DNA, 25 bp, Homo sapien
tgttcacgtttattctgaatccatg

SEQ ID NO: 1330909 - DNA, 25 bp, Homo sapien
ctgttcacgtttattctgaatccat

SEQ ID NO: 1330910 - DNA, 25 bp, Homo sapien
cagcactaatagaggtagatggaga

SEQ ID NO: 1330911 - DNA, 25 bp, Homo sapien
tcagcactaatagaggtagatggag

SEQ ID NO: 1330912 - DNA, 25 bp, Homo sapien
ctcagcactaatagaggtagatgga

SEQ ID NO: 1330913 - DNA, 25 bp, Homo sapien
cctcagcactaatagaggtagatgg

SEQ ID NO: 1330914 - DNA, 25 bp, Homo sapien
tagctgaggactttgcggtgaccca

SEQ ID NO: 1330915 - DNA, 25 bp, Homo sapien
ccaaatgggctcacaacatcaggtg

SEQ ID NO: 1330916 - DNA, 25 bp, Homo sapien
gattcattacactagagccaaatgg

SEQ ID NO: 1330917 - DNA, 25 bp, Homo sapien
tgttttaactaatggtggcactgaa

SEQ ID NO: 1330918 - DNA, 25 bp, Homo sapien
tgaatgctccatatttggtcagact

SEQ ID NO: 1330919 - DNA, 25 bp, Homo sapien
ataatgaatgctccatatttggtca

SEQ ID NO: 1330920 - DNA, 25 bp, Homo sapien
aatgctccatatttggtcagactca

SEQ ID NO: 1330921 - DNA, 25 bp, Homo sapien
aatgaatgctccatatttggtcaga

SEQ ID NO: 1330922 - DNA, 25 bp, Homo sapien
gttcacatatgggatccaaagtccc

SEQ ID NO: 1330923 - DNA, 25 bp, Homo sapien
aagcagggctaaccaacagcttccc

SEQ ID NO: 1330924 - DNA, 25 bp, Homo sapien
catatgggaacaatgaagcagggct

SEQ ID NO: 1330925 - DNA, 25 bp, Homo sapien
gctatgaccccaccagagtactgat

SEQ ID NO: 1330926 - DNA, 25 bp, Homo sapien
gatgaagacactctcccattcgtag

SEQ ID NO: 1330927 - DNA, 25 bp, Homo sapien
ttaggttccactgggtaagatgaag

SEQ ID NO: 1330928 - DNA, 25 bp, Homo sapien
tcccattcgtagcagcagcttcttg

SEQ ID NO: 1330929 - DNA, 25 bp, Homo sapien
ttcttaggttccactgggtaagatg

SEQ ID NO: 1330930 - DNA, 25 bp, Homo sapien
catttaaaagattcaaacactccct

SEQ ID NO: 1330931 - DNA, 25 bp, Homo sapien
tcaaacactcccttgaaatggctgt

SEQ ID NO: 1330932 - DNA, 25 bp, Homo sapien
aaatggctgtccaattgtggggatg

SEQ ID NO: 1330933 - DNA, 25 bp, Homo sapien
cttgaaatggctgtccaattgtggg

SEQ ID NO: 1330934 - DNA, 25 bp, Homo sapien
attgagaaagcaacatcaggtcctg

SEQ ID NO: 1330935 - DNA, 25 bp, Homo sapien
acatcaggtcctgcaaggctaaata

SEQ ID NO: 1330936 - DNA, 25 bp, Homo sapien
cttcttgtcttcgtgaaggagaata

SEQ ID NO: 1330937 - DNA, 25 bp, Homo sapien
ggctgaaaacttcttgtcttcgtga

SEQ ID NO: 1330938 - DNA, 25 bp, Homo sapien
aacacttttggaaggcactcatctg

SEQ ID NO: 1330939 - DNA, 25 bp, Homo sapien
gctatttaacacttttggaaggcac

SEQ ID NO: 1330940 - DNA, 25 bp, Homo sapien
ggaggattgctatttaacacttttg

SEQ ID NO: 1330941 - DNA, 25 bp, Homo sapien
aaatggtggttgaacaggaaacaca

SEQ ID NO: 1330942 - DNA, 25 bp, Homo sapien
cagacatggtagagtaacgagagat

SEQ ID NO: 1330943 - DNA, 25 bp, Homo sapien
gagagatttaagaggccactcactg

SEQ ID NO: 1330944 - DNA, 25 bp, Homo sapien
taccaagtcgtcaggagaaagacac

SEQ ID NO: 1330945 - DNA, 25 bp, Homo sapien
cactgtgtcaagtggcctatgaacc

SEQ ID NO: 1330946 - DNA, 25 bp, Homo sapien
gaaggttcatagcagtgctaatcca

SEQ ID NO: 1330947 - DNA, 25 bp, Homo sapien
gcagtgctaatccaagctttgggaa

SEQ ID NO: 1330948 - DNA, 25 bp, Homo sapien
tcatctatgtgaaggttcatagcag

SEQ ID NO: 1330949 - DNA, 25 bp, Homo sapien
tcatagcagtgctaatccaagcttt

SEQ ID NO: 1330950 - DNA, 25 bp, Homo sapien
gaaagattgttcacaactactatga

SEQ ID NO: 1330951 - DNA, 25 bp, Homo sapien
acacctttacgcacataaactgcca

SEQ ID NO: 1330952 - DNA, 25 bp, Homo sapien
ctgaaatatgaaagattgttcacaa

SEQ ID NO: 1330953 - DNA, 25 bp, Homo sapien
tcacaactactatgaacaacacctt

SEQ ID NO: 1330954 - DNA, 25 bp, Homo sapien
caactgtgtttaactaataagagca

SEQ ID NO: 1330955 - DNA, 25 bp, Homo sapien
gaaatttctaaccaggaacagtgat

SEQ ID NO: 1330956 - DNA, 25 bp, Homo sapien
aacagtgattccacacaactgtgtt

SEQ ID NO: 1330957 - DNA, 25 bp, Homo sapien
gatctcctaaaacgcaagaacttgt

SEQ ID NO: 1330958 - DNA, 25 bp, Homo sapien
gataaaggcaatagaactggtttta

SEQ ID NO: 1330959 - DNA, 25 bp, Homo sapien
tgataaaggcaatagaactggtttt

SEQ ID NO: 1330960 - DNA, 25 bp, Homo sapien
ttagtagtgtaggcaagtttaaaga

SEQ ID NO: 1330961 - DNA, 25 bp, Homo sapien
tagtagtgtaggcaagtttaaagaa

SEQ ID NO: 1330962 - DNA, 25 bp, Homo sapien
taccagtgggacaaagattgagact

SEQ ID NO: 1330963 - DNA, 25 bp, Homo sapien
cactttggaaagctacctgacaggt

SEQ ID NO: 1330964 - DNA, 25 bp, Homo sapien
catcacatcgcgctctatagagggt

SEQ ID NO: 1330965 - DNA, 25 bp, Homo sapien
ccatgggatggtcaaggaaacattc

SEQ ID NO: 1330966 - DNA, 25 bp, Homo sapien
gagagagagacacggtctagccatg

SEQ ID NO: 1330967 - DNA, 25 bp, Homo sapien
agagagagacacggtctagccatgt

SEQ ID NO: 1330968 - DNA, 25 bp, Homo sapien
gagagagacacggtctagccatgtt

SEQ ID NO: 1330969 - DNA, 25 bp, Homo sapien
ttaacaaaatacaggaggctatagc

SEQ ID NO: 1330970 - DNA, 25 bp, Homo sapien
ggctatagctatagcccataaatgc

SEQ ID NO: 1330971 - DNA, 25 bp, Homo sapien
ggaagatagttcatgttgttaacaa

SEQ ID NO: 1330972 - DNA, 25 bp, Homo sapien
aatggaagatagttcatgttgttaa

SEQ ID NO: 1330973 - DNA, 25 bp, Homo sapien
tctgctccctggaacttcactgcca

SEQ ID NO: 1330974 - DNA, 25 bp, Homo sapien
tgctgccttctgctccctggaactt

SEQ ID NO: 1330975 - DNA, 25 bp, Homo sapien
tgctccctggaacttcactgccacc

SEQ ID NO: 1330976 - DNA, 25 bp, Homo sapien
ctccctggaacttcactgccacctc

SEQ ID NO: 1330977 - DNA, 25 bp, Homo sapien
tgtactggccctgggttatcactgc

SEQ ID NO: 1330978 - DNA, 25 bp, Homo sapien
tctggagcaaggaatagaaggcaca

SEQ ID NO: 1330979 - DNA, 25 bp, Homo sapien
gaatgatcttccctatcagagctag

SEQ ID NO: 1330980 - DNA, 25 bp, Homo sapien
gaaccacaagaaagctgtactggcc

SEQ ID NO: 1330981 - DNA, 25 bp, Homo sapien
attacataggaactatacaggtcac

SEQ ID NO: 1330982 - DNA, 25 bp, Homo sapien
ggaactatacaggtcactgaaagaa

SEQ ID NO: 1330983 - DNA, 25 bp, Homo sapien
aaaagattacataggaactatacag

SEQ ID NO: 1330984 - DNA, 25 bp, Homo sapien
catagaactccacattgaaaatact

SEQ ID NO: 1330985 - DNA, 25 bp, Homo sapien
agccactgtataggatgaaacaaat

SEQ ID NO: 1330986 - DNA, 25 bp, Homo sapien
acaatacttgcaactatcctccagc

SEQ ID NO: 1330987 - DNA, 25 bp, Homo sapien
actgtggtgcagatgggtagaaata

SEQ ID NO: 1330988 - DNA, 25 bp, Homo sapien
tagcactgaccaaacaatacttgca

SEQ ID NO: 1330989 - DNA, 25 bp, Homo sapien
tacccttgcgtaaaactccgcctca

SEQ ID NO: 1330990 - DNA, 25 bp, Homo sapien
cgtaaaactccgcctcactccctat

SEQ ID NO: 1330991 - DNA, 25 bp, Homo sapien
ttgcgtaaaactccgcctcactccc

SEQ ID NO: 1330992 - DNA, 25 bp, Homo sapien
cccttgcgtaaaactccgcctcact

SEQ ID NO: 1330993 - DNA, 25 bp, Homo sapien
gcgccacagtatgtcccgcgacctg

SEQ ID NO: 1330994 - DNA, 25 bp, Homo sapien
cagtatgtcccgcgacctgccggcg

SEQ ID NO: 1330995 - DNA, 25 bp, Homo sapien
gccacagtatgtcccgcgacctgcc

SEQ ID NO: 1330996 - DNA, 25 bp, Homo sapien
gtatgtcccgcgacctgccggcgca

SEQ ID NO: 1330997 - DNA, 25 bp, Homo sapien
cccgccaccgcagttcaaaggcagg

SEQ ID NO: 1330998 - DNA, 25 bp, Homo sapien
tagtctagggcgtacaggagaccgt

SEQ ID NO: 1330999 - DNA, 25 bp, Homo sapien
atggcggcccctagtctagggcgta

SEQ ID NO: 1331000 - DNA, 25 bp, Homo sapien
gcccctagtctagggcgtacaggag

SEQ ID NO: 1331001 - DNA, 25 bp, Homo sapien
ccatccctgcgaggcttcgtctgga

SEQ ID NO: 1331002 - DNA, 25 bp, Homo sapien
cctgcgaggcttcgtctggacaagc

SEQ ID NO: 1331003 - DNA, 25 bp, Homo sapien
gaggcttcgtctggacaagctcaac

SEQ ID NO: 1331004 - DNA, 25 bp, Homo sapien
gctccaacccatccctgcgaggctt

SEQ ID NO: 1331005 - DNA, 25 bp, Homo sapien
agacacgtcccgcaaacgcggctgt

SEQ ID NO: 1331006 - DNA, 25 bp, Homo sapien
tctggcgaccaaacggtcccttcga

SEQ ID NO: 1331007 - DNA, 25 bp, Homo sapien
tcccttcgaagcagggtccagcggg

SEQ ID NO: 1331008 - DNA, 25 bp, Homo sapien
tgtaactccaggaaccgccctctgg

SEQ ID NO: 1331009 - DNA, 25 bp, Homo sapien
catgaagtatttcctgttgaattcc

SEQ ID NO: 1331010 - DNA, 25 bp, Homo sapien
ggaattctaccccttattgaataca

SEQ ID NO: 1331011 - DNA, 25 bp, Homo sapien
tccatgaagtatttcctgttgaatt

SEQ ID NO: 1331012 - DNA, 25 bp, Homo sapien
tcctggaattctaccccttattgaa

SEQ ID NO: 1331013 - DNA, 25 bp, Homo sapien
gatacttaacatcaccttggcaaac

SEQ ID NO: 1331014 - DNA, 25 bp, Homo sapien
ctcgaggatacttaacatcaccttg

SEQ ID NO: 1331015 - DNA, 25 bp, Homo sapien
aggatacttaacatcaccttggcaa

SEQ ID NO: 1331016 - DNA, 25 bp, Homo sapien
acttaacatcaccttggcaaacctc

SEQ ID NO: 1331017 - DNA, 25 bp, Homo sapien
cagctgtccagtatcaggttaccaa

SEQ ID NO: 1331018 - DNA, 25 bp, Homo sapien
tgagcatgcctaacctattccctgg

SEQ ID NO: 1331019 - DNA, 25 bp, Homo sapien
tactgttcggctacttcaggatggc

SEQ ID NO: 1331020 - DNA, 25 bp, Homo sapien
tgctcgcaatgatcatccatgggtg

SEQ ID NO: 1331021 - DNA, 25 bp, Homo sapien
gattaggcgccagtgtggcaccatc

SEQ ID NO: 1331022 - DNA, 25 bp, Homo sapien
tcattctgctttcctgcagtggatg

SEQ ID NO: 1331023 - DNA, 25 bp, Homo sapien
taatttctgcttgttaaacgggtga

SEQ ID NO: 1331024 - DNA, 25 bp, Homo sapien
taaacgggtgattaggcgccagtgt

SEQ ID NO: 1331025 - DNA, 25 bp, Homo sapien
taattttgatgctaaaagtagagct

SEQ ID NO: 1331026 - DNA, 25 bp, Homo sapien
ccggagcagtctgctgccaccaatt

SEQ ID NO: 1331027 - DNA, 25 bp, Homo sapien
gatataactcccaacaccggagcag

SEQ ID NO: 1331028 - DNA, 25 bp, Homo sapien
caccccgacaggaaagagctacatt

SEQ ID NO: 1331029 - DNA, 25 bp, Homo sapien
ttcagcaaggagagggtatctcaag

SEQ ID NO: 1331030 - DNA, 25 bp, Homo sapien
aaggagagggtatctcaagtgagtc

SEQ ID NO: 1331031 - DNA, 25 bp, Homo sapien
tcagcaaggagagggtatctcaagt

SEQ ID NO: 1331032 - DNA, 25 bp, Homo sapien
agcaaggagagggtatctcaagtga

SEQ ID NO: 1331033 - DNA, 25 bp, Homo sapien
tatgatattggcacaatgatgaaac

SEQ ID NO: 1331034 - DNA, 25 bp, Homo sapien
cataagtgtgttgtaagctatacca

SEQ ID NO: 1331035 - DNA, 25 bp, Homo sapien
gatgaaactgcctaatgacgcatgt

SEQ ID NO: 1331036 - DNA, 25 bp, Homo sapien
ggctatcccacataagtgtgttgta

SEQ ID NO: 1331037 - DNA, 25 bp, Homo sapien
cccctctactgggaccaaaggcagg

SEQ ID NO: 1331038 - DNA, 25 bp, Homo sapien
tagtcagccattagtgtttcaagca

SEQ ID NO: 1331039 - DNA, 25 bp, Homo sapien
gagacattgtagtatacagtggaca

SEQ ID NO: 1331040 - DNA, 25 bp, Homo sapien
cagatggacacatgattagtcagcc

SEQ ID NO: 1331041 - DNA, 25 bp, Homo sapien
acagcaaaataaaaatagaatctct

SEQ ID NO: 1331042 - DNA, 25 bp, Homo sapien
cacagcaaaataaaaatagaatctc

SEQ ID NO: 1331043 - DNA, 25 bp, Homo sapien
gcaaaataaaaatagaatctcttac

SEQ ID NO: 1331044 - DNA, 25 bp, Homo sapien
cagcaaaataaaaatagaatctctt

SEQ ID NO: 1331045 - DNA, 25 bp, Homo sapien
gacttggctgcagcaactgtttggt

SEQ ID NO: 1331046 - DNA, 25 bp, Homo sapien
ttagctggacttggctgcagcaact

SEQ ID NO: 1331047 - DNA, 25 bp, Homo sapien
gtagttgttgggagatggtccatct

SEQ ID NO: 1331048 - DNA, 25 bp, Homo sapien
ccatctctggtgcatcaaaaaagta

SEQ ID NO: 1331049 - DNA, 25 bp, Homo sapien
aaagaatatacgactgaacccatac

SEQ ID NO: 1331050 - DNA, 25 bp, Homo sapien
aaaagaatatacgactgaacccata

SEQ ID NO: 1331051 - DNA, 25 bp, Homo sapien
caaaagaatatacgactgaacccat

SEQ ID NO: 1331052 - DNA, 25 bp, Homo sapien
ttgtggccaatgcaacgcgtcggtt

SEQ ID NO: 1331053 - DNA, 25 bp, Homo sapien
tgccaagagagatcctgagatgccc

SEQ ID NO: 1331054 - DNA, 25 bp, Homo sapien
gcccagggcaatcatgactagaatc

SEQ ID NO: 1331055 - DNA, 25 bp, Homo sapien
tcggttatcctcacgaacagctggc

SEQ ID NO: 1331056 - DNA, 25 bp, Homo sapien
taatgatggtaggtcaaattcttgg

SEQ ID NO: 1331057 - DNA, 25 bp, Homo sapien
cagcatgtagactgaggcatatgct

SEQ ID NO: 1331058 - DNA, 25 bp, Homo sapien
gaagaacatgagtattgcgctggaa

SEQ ID NO: 1331059 - DNA, 25 bp, Homo sapien
gcccaagatccaatgaaggcactag

SEQ ID NO: 1331060 - DNA, 25 bp, Homo sapien
gagacgatgttcataactttgctgt

SEQ ID NO: 1331061 - DNA, 25 bp, Homo sapien
cagaaatgaataggagacgatgttc

SEQ ID NO: 1331062 - DNA, 25 bp, Homo sapien
ggaatatccatagacacacacaatc

SEQ ID NO: 1331063 - DNA, 25 bp, Homo sapien
tgaagagggaatatccatagacaca

SEQ ID NO: 1331064 - DNA, 25 bp, Homo sapien
tagatgatggtagctgctatggaca

SEQ ID NO: 1331065 - DNA, 25 bp, Homo sapien
aaccccagagtgcaagaggaaccag

SEQ ID NO: 1331066 - DNA, 25 bp, Homo sapien
ccagccaggcataggcatagatgat

SEQ ID NO: 1331067 - DNA, 25 bp, Homo sapien
cataggcatagatgatggtagctgc

SEQ ID NO: 1331068 - DNA, 25 bp, Homo sapien
gacaggacacaagtttcaatctcca

SEQ ID NO: 1331069 - DNA, 25 bp, Homo sapien
tgaggatgacaggacacaagtttca

SEQ ID NO: 1331070 - DNA, 25 bp, Homo sapien
ctgaggatgacaggacacaagtttc

SEQ ID NO: 1331071 - DNA, 25 bp, Homo sapien
ggatgacaggacacaagtttcaatc

SEQ ID NO: 1331072 - DNA, 25 bp, Homo sapien
taaataaataattccgccactgtgg

SEQ ID NO: 1331073 - DNA, 25 bp, Homo sapien
gccactgtggcaaaaatgctattga

SEQ ID NO: 1331074 - DNA, 25 bp, Homo sapien
tgccttgggtagagattaacttgct

SEQ ID NO: 1331075 - DNA, 25 bp, Homo sapien
cagcaacgttcagcatattcctgta

SEQ ID NO: 1331076 - DNA, 25 bp, Homo sapien
ctagtagcagcacgccctggaggat

SEQ ID NO: 1331077 - DNA, 25 bp, Homo sapien
tagcagcacgccctggaggattccc

SEQ ID NO: 1331078 - DNA, 25 bp, Homo sapien
tcctcttcctctagtagcagcacgc

SEQ ID NO: 1331079 - DNA, 25 bp, Homo sapien
ttcctctagtagcagcacgccctgg

SEQ ID NO: 1331080 - DNA, 25 bp, Homo sapien
gcaaagaccaacgtggcacatatcc

SEQ ID NO: 1331081 - DNA, 25 bp, Homo sapien
tcggaattcgggcacataatggtac

SEQ ID NO: 1331082 - DNA, 25 bp, Homo sapien
ggaaagattcccactaattgctatg

SEQ ID NO: 1331083 - DNA, 25 bp, Homo sapien
tctcccagatggatcaagaagttgg

SEQ ID NO: 1331084 - DNA, 25 bp, Homo sapien
gtaaacaaatcagtactaaacatac

SEQ ID NO: 1331085 - DNA, 25 bp, Homo sapien
ctgaaatacggtaaacaaatcagta

SEQ ID NO: 1331086 - DNA, 25 bp, Homo sapien
tcaactgaaatacggtaaacaaatc

SEQ ID NO: 1331087 - DNA, 25 bp, Homo sapien
cggtaaacaaatcagtactaaacat

SEQ ID NO: 1331088 - DNA, 25 bp, Homo sapien
gcggatatataacctcacaaagttt

SEQ ID NO: 1331089 - DNA, 25 bp, Homo sapien
ccgggtattggcaaaagagatcctt

SEQ ID NO: 1331090 - DNA, 25 bp, Homo sapien
catagagatctggattgctgcggat

SEQ ID NO: 1331091 - DNA, 25 bp, Homo sapien
ttcccgggtattggcaaaagagatc

SEQ ID NO: 1331092 - DNA, 25 bp, Homo sapien
gtccacatcaaagaatgtttggtag

SEQ ID NO: 1331093 - DNA, 25 bp, Homo sapien
gaggccatgtgtcatttacctctga

SEQ ID NO: 1331094 - DNA, 25 bp, Homo sapien
ccatgtgtcatttacctctgagctg

SEQ ID NO: 1331095 - DNA, 25 bp, Homo sapien
gaaagtaatggtctgtttgcctgtt

SEQ ID NO: 1331096 - DNA, 25 bp, Homo sapien
ggaaagtaatggtctgtttgcctgt

SEQ ID NO: 1331097 - DNA, 25 bp, Homo sapien
tggtggcatctgggtttgctgtcag

SEQ ID NO: 1331098 - DNA, 25 bp, Homo sapien
ctcttggggatcctggctgatgttt

SEQ ID NO: 1331099 - DNA, 25 bp, Homo sapien
ggcatctgggtttgctgtcagagaa

SEQ ID NO: 1331100 - DNA, 25 bp, Homo sapien
tggcatctgggtttgctgtcagaga

SEQ ID NO: 1331101 - DNA, 25 bp, Homo sapien
gctctgtgctggttattcttgtcca

SEQ ID NO: 1331102 - DNA, 25 bp, Homo sapien
ctgctctgtgctggttattcttgtc

SEQ ID NO: 1331103 - DNA, 25 bp, Homo sapien
catgacgactcttcacacagtctgc

SEQ ID NO: 1331104 - DNA, 25 bp, Homo sapien
cctaacatgacgactcttcacacag

SEQ ID NO: 1331105 - DNA, 25 bp, Homo sapien
catccaatactaccgttcctccccg

SEQ ID NO: 1331106 - DNA, 25 bp, Homo sapien
tttcatccaatactaccgttcctcc

SEQ ID NO: 1331107 - DNA, 25 bp, Homo sapien
tcatccaatactaccgttcctcccc

SEQ ID NO: 1331108 - DNA, 25 bp, Homo sapien
ttttcatccaatactaccgttcctc

SEQ ID NO: 1331109 - DNA, 25 bp, Homo sapien
ccaccatccgtgatctggaacacaa

SEQ ID NO: 1331110 - DNA, 25 bp, Homo sapien
tttccccaccatccgtgatctggaa

SEQ ID NO: 1331111 - DNA, 25 bp, Homo sapien
gtcagctttccccaccatccgtgat

SEQ ID NO: 1331112 - DNA, 25 bp, Homo sapien
catccgtgatctggaacacaagtgt

SEQ ID NO: 1331113 - DNA, 25 bp, Homo sapien
caaattgcaagtcatctactgctgc

SEQ ID NO: 1331114 - DNA, 25 bp, Homo sapien
tcaaattgcaagtcatctactgctg

SEQ ID NO: 1331115 - DNA, 25 bp, Homo sapien
aaattgcaagtcatctactgctgcc

SEQ ID NO: 1331116 - DNA, 25 bp, Homo sapien
cttcaaattgcaagtcatctactgc

SEQ ID NO: 1331117 - DNA, 25 bp, Homo sapien
tcggccagtgagtcttctcccaatt

SEQ ID NO: 1331118 - DNA, 25 bp, Homo sapien
gtcttctcccaattatgaggaagaa

SEQ ID NO: 1331119 - DNA, 25 bp, Homo sapien
gaatgtttagagagcaggtgcagcc

SEQ ID NO: 1331120 - DNA, 25 bp, Homo sapien
cagagctgggtttgattcccgattc

SEQ ID NO: 1331121 - DNA, 25 bp, Homo sapien
ttctctgctgtatgcgcgctcctcg

SEQ ID NO: 1331122 - DNA, 25 bp, Homo sapien
ttcagcctagccagtggttaaaggc

SEQ ID NO: 1331123 - DNA, 25 bp, Homo sapien
ccagttgccggaagccggagatccg

SEQ ID NO: 1331124 - DNA, 25 bp, Homo sapien
ttgctccgcgccggtttcggtccag

SEQ ID NO: 1331125 - DNA, 25 bp, Homo sapien
gtcccgagaaggctcgggcctcagt

SEQ ID NO: 1331126 - DNA, 25 bp, Homo sapien
gcccagttgccggaagccggagatc

SEQ ID NO: 1331127 - DNA, 25 bp, Homo sapien
tgctgcttatttcaccgccactcat

SEQ ID NO: 1331128 - DNA, 25 bp, Homo sapien
gccagagtgatcttcaagtgtaaat

SEQ ID NO: 1331129 - DNA, 25 bp, Homo sapien
aaatctggttattacatggccctac

SEQ ID NO: 1331130 - DNA, 25 bp, Homo sapien
cagtcaggttctggcttgtaagcaa

SEQ ID NO: 1331131 - DNA, 25 bp, Homo sapien
aaaggtgttgagtgctttccagaaa

SEQ ID NO: 1331132 - DNA, 25 bp, Homo sapien
caagatagcgccatcccactccggc

SEQ ID NO: 1331133 - DNA, 25 bp, Homo sapien
ccaagatagcgccatcccactccgg

SEQ ID NO: 1331134 - DNA, 25 bp, Homo sapien
agccaagatagcgccatcccactcc

SEQ ID NO: 1331135 - DNA, 25 bp, Homo sapien
tgagccaagatagcgccatcccact

SEQ ID NO: 1331136 - DNA, 25 bp, Homo sapien
aataaagtatatcagtgacaacttc

SEQ ID NO: 1331137 - DNA, 25 bp, Homo sapien
caacttcctgtttaaatatattgtt

SEQ ID NO: 1331138 - DNA, 25 bp, Homo sapien
aaaatcatgcaagagcattttgtta

SEQ ID NO: 1331139 - DNA, 25 bp, Homo sapien
tattgttaaaaaatcatgcaagagc

SEQ ID NO: 1331140 - DNA, 25 bp, Homo sapien
gttccttctgcagaaacgctatgca

SEQ ID NO: 1331141 - DNA, 25 bp, Homo sapien
tatgaggaaagatttgagactactg

SEQ ID NO: 1331142 - DNA, 25 bp, Homo sapien
ctgcagaaacgctatgcacagatgc

SEQ ID NO: 1331143 - DNA, 25 bp, Homo sapien
aaagatttgagactactgttccttc

SEQ ID NO: 1331144 - DNA, 25 bp, Homo sapien
tcaagtaagtagcggagccatcatg

SEQ ID NO: 1331145 - DNA, 25 bp, Homo sapien
agtaagtagcggagccatcatgtgc

SEQ ID NO: 1331146 - DNA, 25 bp, Homo sapien
caagtaagtagcggagccatcatgt

SEQ ID NO: 1331147 - DNA, 25 bp, Homo sapien
aagtaagtagcggagccatcatgtg

SEQ ID NO: 1331148 - DNA, 25 bp, Homo sapien
gaaacagcttgatgcaagagtaata

SEQ ID NO: 1331149 - DNA, 25 bp, Homo sapien
caagcagttagcaaaagaaacagct

SEQ ID NO: 1331150 - DNA, 25 bp, Homo sapien
cagctacatataatagttgtggtac

SEQ ID NO: 1331151 - DNA, 25 bp, Homo sapien
gtacatatcagctaaataccagcct

SEQ ID NO: 1331152 - DNA, 25 bp, Homo sapien
taaaagctataagtatgtttacaac

SEQ ID NO: 1331153 - DNA, 25 bp, Homo sapien
cagaatacgctaccctgaagcatga

SEQ ID NO: 1331154 - DNA, 25 bp, Homo sapien
ccttgcacccagtaattctattcct

SEQ ID NO: 1331155 - DNA, 25 bp, Homo sapien
tcctttggttaatgttgcctcagaa

SEQ ID NO: 1331156 - DNA, 25 bp, Homo sapien
agcaaagcccaatggaatgttgtcg

SEQ ID NO: 1331157 - DNA, 25 bp, Homo sapien
gaatgttgtcgaaaaatactggttg

SEQ ID NO: 1331158 - DNA, 25 bp, Homo sapien
ctctttggcttatttgttgctgatc

SEQ ID NO: 1331159 - DNA, 25 bp, Homo sapien
tctctctttggcttatttgttgctg

SEQ ID NO: 1331160 - DNA, 25 bp, Homo sapien
tgccgtcactctctatgaaaggtaa

SEQ ID NO: 1331161 - DNA, 25 bp, Homo sapien
tcaattttggcatcgcgaccctttt

SEQ ID NO: 1331162 - DNA, 25 bp, Homo sapien
gaaatttattaactatgactatgga

SEQ ID NO: 1331163 - DNA, 25 bp, Homo sapien
aagtctaaatacattgtgcaggtta

SEQ ID NO: 1331164 - DNA, 25 bp, Homo sapien
agctgcccctctgtgtgtaccaaat

SEQ ID NO: 1331165 - DNA, 25 bp, Homo sapien
aagctgcccctctgtgtgtaccaaa

SEQ ID NO: 1331166 - DNA, 25 bp, Homo sapien
tcattttgaagctgcccctctgtgt

SEQ ID NO: 1331167 - DNA, 25 bp, Homo sapien
atttcttcattttgaagctgcccct

SEQ ID NO: 1331168 - DNA, 25 bp, Homo sapien
tgtacacaatgtaaaagccccgtag

SEQ ID NO: 1331169 - DNA, 25 bp, Homo sapien
caaatttgaaatcctacttgatggt

SEQ ID NO: 1331170 - DNA, 25 bp, Homo sapien
aaatcagtaatctgctttacccctt

SEQ ID NO: 1331171 - DNA, 25 bp, Homo sapien
tctagtcctgcttcctagaagtaaa

SEQ ID NO: 1331172 - DNA, 25 bp, Homo sapien
tatgccagacactagttcaccaaaa

SEQ ID NO: 1331173 - DNA, 25 bp, Homo sapien
tgtgtcacaaggatcattaaagtca

SEQ ID NO: 1331174 - DNA, 25 bp, Homo sapien
gaagcagctttgtattcaaacctgg

SEQ ID NO: 1331175 - DNA, 25 bp, Homo sapien
caccaaagtgcagctagatgagaaa

SEQ ID NO: 1331176 - DNA, 25 bp, Homo sapien
tggctctttagacgtgcttttttca

SEQ ID NO: 1331177 - DNA, 25 bp, Homo sapien
cattgtaaacaaagtaagtaaagtg

SEQ ID NO: 1331178 - DNA, 25 bp, Homo sapien
ggaagggagatcagccaattttatc

SEQ ID NO: 1331179 - DNA, 25 bp, Homo sapien
gactctatcacctggattcatttac

SEQ ID NO: 1331180 - DNA, 25 bp, Homo sapien
ggggctaacctctgtggactctatc

SEQ ID NO: 1331181 - DNA, 25 bp, Homo sapien
tgttctgtgccatgaggggctaacc

SEQ ID NO: 1331182 - DNA, 25 bp, Homo sapien
tagccttacctggagcaccaaaaaa

SEQ ID NO: 1331183 - DNA, 25 bp, Homo sapien
tcgaatttgcagtttgagagaggcc

SEQ ID NO: 1331184 - DNA, 25 bp, Homo sapien
gagtcttatgttcctaatagggcct

SEQ ID NO: 1331185 - DNA, 25 bp, Homo sapien
gagaggccaactgagctcaaggcat

SEQ ID NO: 1331186 - DNA, 25 bp, Homo sapien
ggattacaagcctttcaatccttac

SEQ ID NO: 1331187 - DNA, 25 bp, Homo sapien
gaaacattcctgtggtggtccaaaa

SEQ ID NO: 1331188 - DNA, 25 bp, Homo sapien
tgtggtggtccaaaacgtttctgga

SEQ ID NO: 1331189 - DNA, 25 bp, Homo sapien
gtaactttggattacaagcctttca

SEQ ID NO: 1331190 - DNA, 25 bp, Homo sapien
gctctcctaactcaaaattctgggt

SEQ ID NO: 1331191 - DNA, 25 bp, Homo sapien
tgcctcatgtttttctttggatgct

SEQ ID NO: 1331192 - DNA, 25 bp, Homo sapien
atgacatctaactaggccgggcgcg

SEQ ID NO: 1331193 - DNA, 25 bp, Homo sapien
ttggatgctttcaatgaacataacc

SEQ ID NO: 1331194 - DNA, 25 bp, Homo sapien
gagttaacctagtgtagcacaaaga

SEQ ID NO: 1331195 - DNA, 25 bp, Homo sapien
gcacaaagatccctgaagtacaagt

SEQ ID NO: 1331196 - DNA, 25 bp, Homo sapien
gacacgagtgtcagttgattctgcc

SEQ ID NO: 1331197 - DNA, 25 bp, Homo sapien
cttattccccaagattactgtgagg

SEQ ID NO: 1331198 - DNA, 25 bp, Homo sapien
taaagatgacaactacgcttcaagg

SEQ ID NO: 1331199 - DNA, 25 bp, Homo sapien
tacatgggcttcaagatatgcaaag

SEQ ID NO: 1331200 - DNA, 25 bp, Homo sapien
taagtcccgccagtcctacaattag

SEQ ID NO: 1331201 - DNA, 25 bp, Homo sapien
cgcttcaaggaagaggctgagttgc

SEQ ID NO: 1331202 - DNA, 25 bp, Homo sapien
tcaagggattcaccgatttaagact

SEQ ID NO: 1331203 - DNA, 25 bp, Homo sapien
tgttataaaacacagtccaagtact

SEQ ID NO: 1331204 - DNA, 25 bp, Homo sapien
caagagttcagtttaggcattataa

SEQ ID NO: 1331205 - DNA, 25 bp, Homo sapien
ttcagaaatggtaccaaaagtggat

SEQ ID NO: 1331206 - DNA, 25 bp, Homo sapien
ttcggacccttcagagctcagacag

SEQ ID NO: 1331207 - DNA, 25 bp, Homo sapien
tgtagctaaaatcacttcggaccct

SEQ ID NO: 1331208 - DNA, 25 bp, Homo sapien
ccatcaatgatattttcaggtgggt

SEQ ID NO: 1331209 - DNA, 25 bp, Homo sapien
gctcagacagagatcaatttttctc

SEQ ID NO: 1331210 - DNA, 25 bp, Homo sapien
tcaaagagtttcgtgggctggtagt

SEQ ID NO: 1331211 - DNA, 25 bp, Homo sapien
gggggtcaagacgctatttctggcc

SEQ ID NO: 1331212 - DNA, 25 bp, Homo sapien
tcgtgggctggtagtggcgcttcca

SEQ ID NO: 1331213 - DNA, 25 bp, Homo sapien
tctggcctcaaagagtttcgtgggc

SEQ ID NO: 1331214 - DNA, 25 bp, Homo sapien
accgctgagtttccgggcgcgcgct

SEQ ID NO: 1331215 - DNA, 25 bp, Homo sapien
gggtcgcgcgcgctccaactctgaa

SEQ ID NO: 1331216 - DNA, 25 bp, Homo sapien
tgggactcccgttagctctgggcgc

SEQ ID NO: 1331217 - DNA, 25 bp, Homo sapien
ccaactctgaaatcttcgcgccacg

SEQ ID NO: 1331218 - DNA, 25 bp, Homo sapien
tgcgagttccaaaccctcggccctc

SEQ ID NO: 1331219 - DNA, 25 bp, Homo sapien
ctcggccctcgggtcgcctgccctg

SEQ ID NO: 1331220 - DNA, 25 bp, Homo sapien
ctctgcgagttccaaaccctcggcc

SEQ ID NO: 1331221 - DNA, 25 bp, Homo sapien
tcggccctcgggtcgcctgccctgg

SEQ ID NO: 1331222 - DNA, 25 bp, Homo sapien
gccatgggttggcagatgttctcct

SEQ ID NO: 1331223 - DNA, 25 bp, Homo sapien
gataaaccaaaagtgtctgcagcct

SEQ ID NO: 1331224 - DNA, 25 bp, Homo sapien
tgcagccttgggatgaaggccatgg

SEQ ID NO: 1331225 - DNA, 25 bp, Homo sapien
ggcagatgttctcctggtatatgga

SEQ ID NO: 1331226 - DNA, 25 bp, Homo sapien
taggtgtaaccccactgatcctaac

SEQ ID NO: 1331227 - DNA, 25 bp, Homo sapien
agaccatctgtacctagctgtcagg

SEQ ID NO: 1331228 - DNA, 25 bp, Homo sapien
caactctgtgattggaaggtggaaa

SEQ ID NO: 1331229 - DNA, 25 bp, Homo sapien
caggctggtgattagtttgagtaca

SEQ ID NO: 1331230 - DNA, 25 bp, Homo sapien
ttagcatagtaagcagatatttcta

SEQ ID NO: 1331231 - DNA, 25 bp, Homo sapien
atttctacttttgtggtgtgggagg

SEQ ID NO: 1331232 - DNA, 25 bp, Homo sapien
atggcattagcatagtaagcagata

SEQ ID NO: 1331233 - DNA, 25 bp, Homo sapien
gggaatgctatggaagtatgtaata

SEQ ID NO: 1331234 - DNA, 25 bp, Homo sapien
ctctttggttcgactacacacccat

SEQ ID NO: 1331235 - DNA, 25 bp, Homo sapien
ttagatgggcgccaggctttacaaa

SEQ ID NO: 1331236 - DNA, 25 bp, Homo sapien
tcgactacacacccatcaaccttgt

SEQ ID NO: 1331237 - DNA, 25 bp, Homo sapien
gggcgccaggctttacaaaatcctc

SEQ ID NO: 1331238 - DNA, 25 bp, Homo sapien
ggcagcaacggcgatggccggagcc

SEQ ID NO: 1331239 - DNA, 25 bp, Homo sapien
ctccccctggcagcaacggcgatgg

SEQ ID NO: 1331240 - DNA, 25 bp, Homo sapien
ccctggcagcaacggcgatggccgg

SEQ ID NO: 1331241 - DNA, 25 bp, Homo sapien
agcaacggcgatggccggagccggg

SEQ ID NO: 1331242 - DNA, 25 bp, Homo sapien
ctgggggcaaccggcagcagtttta

SEQ ID NO: 1331243 - DNA, 25 bp, Homo sapien
tgggggcaaccggcagcagttttac

SEQ ID NO: 1331244 - DNA, 25 bp, Homo sapien
tcaagttcaatatggggatgagagc

SEQ ID NO: 1331245 - DNA, 25 bp, Homo sapien
aagttcaatatggggatgagagctt

SEQ ID NO: 1331246 - DNA, 25 bp, Homo sapien
ccaactcaagttcaatatggggatg

SEQ ID NO: 1331247 - DNA, 25 bp, Homo sapien
actcaagttcaatatggggatgaga

SEQ ID NO: 1331248 - DNA, 25 bp, Homo sapien
catctttgggctggtccctttcttc

SEQ ID NO: 1331249 - DNA, 25 bp, Homo sapien
cttctactttgaccttgagtggccc

SEQ ID NO: 1331250 - DNA, 25 bp, Homo sapien
tcagaatccctgtgatagccacctg

SEQ ID NO: 1331251 - DNA, 25 bp, Homo sapien
attcttttaaggtctcaagagaaat

SEQ ID NO: 1331252 - DNA, 25 bp, Homo sapien
caaaggcatgtcgtacagggcgcca

SEQ ID NO: 1331253 - DNA, 25 bp, Homo sapien
ggtgaacactatgtgggaaaccgcc

SEQ ID NO: 1331254 - DNA, 25 bp, Homo sapien
ttcgcggtgagcttacaggtcttaa

SEQ ID NO: 1331255 - DNA, 25 bp, Homo sapien
tggattcgtcatctccctggcttag

SEQ ID NO: 1331256 - DNA, 25 bp, Homo sapien
taatcacactggtagctggaaagcc

SEQ ID NO: 1331257 - DNA, 25 bp, Homo sapien
tctttcagaatatgggtgtcacact

SEQ ID NO: 1331258 - DNA, 25 bp, Homo sapien
gctgactttgctctatgattctgga

SEQ ID NO: 1331259 - DNA, 25 bp, Homo sapien
tgccctggccaaggtataatcacac

SEQ ID NO: 1331260 - DNA, 25 bp, Homo sapien
tgcttcctgcccttgtgcgctagga

SEQ ID NO: 1331261 - DNA, 25 bp, Homo sapien
gccagccttccatgctggcctgagt

SEQ ID NO: 1331262 - DNA, 25 bp, Homo sapien
tgcccttgtgcgctaggatttgatt

SEQ ID NO: 1331263 - DNA, 25 bp, Homo sapien
cttgtgcgctaggatttgattttca

SEQ ID NO: 1331264 - DNA, 25 bp, Homo sapien
tcatcggaccagtcggagcagtgct

SEQ ID NO: 1331265 - DNA, 25 bp, Homo sapien
cagtacttgaagaaggttgaaggac

SEQ ID NO: 1331266 - DNA, 25 bp, Homo sapien
cagtgctgtacatggtcgcggcaga

SEQ ID NO: 1331267 - DNA, 25 bp, Homo sapien
gagatgcctcggtatacagtcgcag

SEQ ID NO: 1331268 - DNA, 25 bp, Homo sapien
gcatcagcatgatgtgagtcctggg

SEQ ID NO: 1331269 - DNA, 25 bp, Homo sapien
tcggcatcagcatgatgtgagtcct

SEQ ID NO: 1331270 - DNA, 25 bp, Homo sapien
cctttcggcatcagcatgatgtgag

SEQ ID NO: 1331271 - DNA, 25 bp, Homo sapien
cacatgcctgattcctgatgtcccc

SEQ ID NO: 1331272 - DNA, 25 bp, Homo sapien
gggagccctagagattccctgctca

SEQ ID NO: 1331273 - DNA, 25 bp, Homo sapien
ttggagtggtagtgagtaccccatc

SEQ ID NO: 1331274 - DNA, 25 bp, Homo sapien
cacaggatgtattcaagcaggggta

SEQ ID NO: 1331275 - DNA, 25 bp, Homo sapien
tcctaggatgcagggaagcatgcaa

SEQ ID NO: 1331276 - DNA, 25 bp, Homo sapien
tctccacagtgggccacaaggaagt

SEQ ID NO: 1331277 - DNA, 25 bp, Homo sapien
tcatctgaacagtccccgcagttgt

SEQ ID NO: 1331278 - DNA, 25 bp, Homo sapien
tccacagtgggccacaaggaagtgg

SEQ ID NO: 1331279 - DNA, 25 bp, Homo sapien
tttttggtctgagtagatccaggag

SEQ ID NO: 1331280 - DNA, 25 bp, Homo sapien
gtacaggtgcgaacgccatcacaga

SEQ ID NO: 1331281 - DNA, 25 bp, Homo sapien
catggcacaagaagcctgtcctgtt

SEQ ID NO: 1331282 - DNA, 25 bp, Homo sapien
gtcagtgttatacaagcttgggctc

SEQ ID NO: 1331283 - DNA, 25 bp, Homo sapien
ctcgtcctcgccgtgggtacaggtg

SEQ ID NO: 1331284 - DNA, 25 bp, Homo sapien
caagaatggtgaccaaggcgatgag

SEQ ID NO: 1331285 - DNA, 25 bp, Homo sapien
caggccccgcgacgtgagcagcaga

SEQ ID NO: 1331286 - DNA, 25 bp, Homo sapien
ggtgcatgatgggagtccaagaatg

SEQ ID NO: 1331287 - DNA, 25 bp, Homo sapien
aatggtgaccaaggcgatgagggcc

SEQ ID NO: 1331288 - DNA, 25 bp, Homo sapien
attcagcagcagtgtagccattctc

SEQ ID NO: 1331289 - DNA, 25 bp, Homo sapien
gggctttggattcagcagcagtgta

SEQ ID NO: 1331290 - DNA, 25 bp, Homo sapien
ccctccagggtgggctttggattca

SEQ ID NO: 1331291 - DNA, 25 bp, Homo sapien
ggattcagcagcagtgtagccattc

SEQ ID NO: 1331292 - DNA, 25 bp, Homo sapien
tgtgcagagagctcagcacgggttc

SEQ ID NO: 1331293 - DNA, 25 bp, Homo sapien
agagagctcagcacgggttccctgc

SEQ ID NO: 1331294 - DNA, 25 bp, Homo sapien
agaccttgttcatgtcttcggtttc

SEQ ID NO: 1331295 - DNA, 25 bp, Homo sapien
gtcttcggtttcctgctgcccgact

SEQ ID NO: 1331296 - DNA, 25 bp, Homo sapien
gaaacagtccacagtaggatcagag

SEQ ID NO: 1331297 - DNA, 25 bp, Homo sapien
gcaagaggcagtaaaataagcccaa

SEQ ID NO: 1331298 - DNA, 25 bp, Homo sapien
gcatgatggtacacctggaggtaac

SEQ ID NO: 1331299 - DNA, 25 bp, Homo sapien
caattacgaatataggaaacagtcc

SEQ ID NO: 1331300 - DNA, 25 bp, Homo sapien
gcaagagcacgctggcttcctagag

SEQ ID NO: 1331301 - DNA, 25 bp, Homo sapien
caggctgtgaccaggactcagagac

SEQ ID NO: 1331302 - DNA, 25 bp, Homo sapien
gaccagtcctaggtttaccatccag

SEQ ID NO: 1331303 - DNA, 25 bp, Homo sapien
tcctagagactggttggcaaacgta

SEQ ID NO: 1331304 - DNA, 25 bp, Homo sapien
cgtaccctgaccctagactctagtg

SEQ ID NO: 1331305 - DNA, 25 bp, Homo sapien
tgcctgctaaatatcaagaatgtct

SEQ ID NO: 1331306 - DNA, 25 bp, Homo sapien
aatctttatcactgtacgtaccctg

SEQ ID NO: 1331307 - DNA, 25 bp, Homo sapien
tataaggaattctctcaacaagagg

SEQ ID NO: 1331308 - DNA, 25 bp, Homo sapien
cttgatatgctatctaacagagaaa

SEQ ID NO: 1331309 - DNA, 25 bp, Homo sapien
aattctgtatcacaagagtctaatt

SEQ ID NO: 1331310 - DNA, 25 bp, Homo sapien
tattaagctctgtattattgcaggt

SEQ ID NO: 1331311 - DNA, 25 bp, Homo sapien
tttggaaacactcatcaaacaaaaa

SEQ ID NO: 1331312 - DNA, 25 bp, Homo sapien
taaatattcagcttgttaactaagg

SEQ ID NO: 1331313 - DNA, 25 bp, Homo sapien
gatttgtgggccattcctgagcaga

SEQ ID NO: 1331314 - DNA, 25 bp, Homo sapien
tgagcagaagcatcatttctactaa

SEQ ID NO: 1331315 - DNA, 25 bp, Homo sapien
gcaatgatcagctcatagctaagaa

SEQ ID NO: 1331316 - DNA, 25 bp, Homo sapien
cttaaggcctatatccaatgaaacc

SEQ ID NO: 1331317 - DNA, 25 bp, Homo sapien
ttttatagtgatttcttaaggccta

SEQ ID NO: 1331318 - DNA, 25 bp, Homo sapien
gctctatgaggagtggaattttaga

SEQ ID NO: 1331319 - DNA, 25 bp, Homo sapien
ttaaaagctctatgaggagtggaat

SEQ ID NO: 1331320 - DNA, 25 bp, Homo sapien
tttcagaatgagcaagattcacttt

SEQ ID NO: 1331321 - DNA, 25 bp, Homo sapien
gaagaagctggatatctgtttagct

SEQ ID NO: 1331322 - DNA, 25 bp, Homo sapien
ttagatctaacaaccacaagagaag

SEQ ID NO: 1331323 - DNA, 25 bp, Homo sapien
tcacttttgtaggtagaggccctgc

SEQ ID NO: 1331324 - DNA, 25 bp, Homo sapien
ctcccaatggatggccaaagaaagc

SEQ ID NO: 1331325 - DNA, 25 bp, Homo sapien
caaagtgttgtagatatgtgattca

SEQ ID NO: 1331326 - DNA, 25 bp, Homo sapien
cacgtctcaagttaaaatcctcagg

SEQ ID NO: 1331327 - DNA, 25 bp, Homo sapien
tagtctggataattaggaacctctc

SEQ ID NO: 1331328 - DNA, 25 bp, Homo sapien
tctccactaagaaacggcataggct

SEQ ID NO: 1331329 - DNA, 25 bp, Homo sapien
tgtgttctactggacggttgcctca

SEQ ID NO: 1331330 - DNA, 25 bp, Homo sapien
tagctttaagacaagttcaggccag

SEQ ID NO: 1331331 - DNA, 25 bp, Homo sapien
gatggatctgatatagcaggcctcc

SEQ ID NO: 1331332 - DNA, 25 bp, Homo sapien
gggttagataccagaatataacaac

SEQ ID NO: 1331333 - DNA, 25 bp, Homo sapien
tcaaaatcaaacactccagcatttt

SEQ ID NO: 1331334 - DNA, 25 bp, Homo sapien
tactttggaggcataagaaaactaa

SEQ ID NO: 1331335 - DNA, 25 bp, Homo sapien
tcagttggattagatgttgacagcc

SEQ ID NO: 1331336 - DNA, 25 bp, Homo sapien
tgtagttaaaatccacccagagtta

SEQ ID NO: 1331337 - DNA, 25 bp, Homo sapien
tccaaagcaataccatcaccgagag

SEQ ID NO: 1331338 - DNA, 25 bp, Homo sapien
tccacagctgtagcaacagttgcac

SEQ ID NO: 1331339 - DNA, 25 bp, Homo sapien
catcaccgagaggacaagagttgta

SEQ ID NO: 1331340 - DNA, 25 bp, Homo sapien
aaatatcttaagacagaaggccagt

SEQ ID NO: 1331341 - DNA, 25 bp, Homo sapien
tattacattaggttggcataaagtc

SEQ ID NO: 1331342 - DNA, 25 bp, Homo sapien
tatataaggcaagtgaaagtgtcct

SEQ ID NO: 1331343 - DNA, 25 bp, Homo sapien
gaaggccagttatgagaatcagcaa

SEQ ID NO: 1331344 - DNA, 25 bp, Homo sapien
ggtttcacagaactatcaaactgca

SEQ ID NO: 1331345 - DNA, 25 bp, Homo sapien
ccgcactcggccaaaagaataattt

SEQ ID NO: 1331346 - DNA, 25 bp, Homo sapien
aactgcccttttttggacaagctca

SEQ ID NO: 1331347 - DNA, 25 bp, Homo sapien
gagatagaacagtccactagaatga

SEQ ID NO: 1331348 - DNA, 25 bp, Homo sapien
ctctcaccctcataaggcttgatat

SEQ ID NO: 1331349 - DNA, 25 bp, Homo sapien
gagggcatatggtacccctactctc

SEQ ID NO: 1331350 - DNA, 25 bp, Homo sapien
tttcataaaacctgcctctcaccct

SEQ ID NO: 1331351 - DNA, 25 bp, Homo sapien
gaccatatctgaactccttggagaa

SEQ ID NO: 1331352 - DNA, 25 bp, Homo sapien
ggcatagagctgatattccttagta

SEQ ID NO: 1331353 - DNA, 25 bp, Homo sapien
cattacccttaaaaactcttggcat

SEQ ID NO: 1331354 - DNA, 25 bp, Homo sapien
caaagcccttcttaatctagagtct

SEQ ID NO: 1331355 - DNA, 25 bp, Homo sapien
ttatccagctcttctagcgtcaaat

SEQ ID NO: 1331356 - DNA, 25 bp, Homo sapien
aatctgatccctaaaccattcaaac

SEQ ID NO: 1331357 - DNA, 25 bp, Homo sapien
tctgatccctaaaccattcaaacat

SEQ ID NO: 1331358 - DNA, 25 bp, Homo sapien
aaaatctgatccctaaaccattcaa

SEQ ID NO: 1331359 - DNA, 25 bp, Homo sapien
acaaaaatctgatccctaaaccatt

SEQ ID NO: 1331360 - DNA, 25 bp, Homo sapien
cctgtgcgcttgtgaatttctcatt

SEQ ID NO: 1331361 - DNA, 25 bp, Homo sapien
aattcctgtgcgcttgtgaatttct

SEQ ID NO: 1331362 - DNA, 25 bp, Homo sapien
gaaaattcctgtgcgcttgtgaatt

SEQ ID NO: 1331363 - DNA, 25 bp, Homo sapien
aagaaaattcctgtgcgcttgtgaa

SEQ ID NO: 1331364 - DNA, 25 bp, Homo sapien
tatgaggaaatttcacaaggtgagt

SEQ ID NO: 1331365 - DNA, 25 bp, Homo sapien
tgtaccagtttctctagcacatcaa

SEQ ID NO: 1331366 - DNA, 25 bp, Homo sapien
tgctttctgcttaattacatgtgag

SEQ ID NO: 1331367 - DNA, 25 bp, Homo sapien
tattccaaaagctagtctcacatga

SEQ ID NO: 1331368 - DNA, 25 bp, Homo sapien
cattttgcttagagatgattctctc

SEQ ID NO: 1331369 - DNA, 25 bp, Homo sapien
atgtggtgcgtactggatttctggc

SEQ ID NO: 1331370 - DNA, 25 bp, Homo sapien
ctccaaatgtggtgcgtactggatt

SEQ ID NO: 1331371 - DNA, 25 bp, Homo sapien
caaatttgtaggctcctgctccaaa

SEQ ID NO: 1331372 - DNA, 25 bp, Homo sapien
gagctaatctcctatctaatgagga

SEQ ID NO: 1331373 - DNA, 25 bp, Homo sapien
tcactctgagagtcaacttatgcct

SEQ ID NO: 1331374 - DNA, 25 bp, Homo sapien
ctaatgaggaatgaatgagggcttc

SEQ ID NO: 1331375 - DNA, 25 bp, Homo sapien
cataccagccatacattaagccact

SEQ ID NO: 1331376 - DNA, 25 bp, Homo sapien
tcatcggcttgaagataaaaagtcc

SEQ ID NO: 1331377 - DNA, 25 bp, Homo sapien
tgacctcaccagagttagaggaaag

SEQ ID NO: 1331378 - DNA, 25 bp, Homo sapien
ggttatgaagctctgtgcggagtcc

SEQ ID NO: 1331379 - DNA, 25 bp, Homo sapien
tataactatttttccgtcatcggct

SEQ ID NO: 1331380 - DNA, 25 bp, Homo sapien
tgggcctctctaaagcacaagtgtg

SEQ ID NO: 1331381 - DNA, 25 bp, Homo sapien
taaccttggctacattcaagaggga

SEQ ID NO: 1331382 - DNA, 25 bp, Homo sapien
gtagacatctgacaacacgacaggg

SEQ ID NO: 1331383 - DNA, 25 bp, Homo sapien
gataagattttaatggcccagcgtg

SEQ ID NO: 1331384 - DNA, 25 bp, Homo sapien
gatggcattggagcagtaatcagga

SEQ ID NO: 1331385 - DNA, 25 bp, Homo sapien
caagtcagtgccatctaagcaggct

SEQ ID NO: 1331386 - DNA, 25 bp, Homo sapien
gaaatgattatctgagttaaggcaa

SEQ ID NO: 1331387 - DNA, 25 bp, Homo sapien
taagcaggctagtttgaaaggcagt

SEQ ID NO: 1331388 - DNA, 25 bp, Homo sapien
ggcaagcatattgctcatcagattg

SEQ ID NO: 1331389 - DNA, 25 bp, Homo sapien
cagttcagcgaatggcagctgattc

SEQ ID NO: 1331390 - DNA, 25 bp, Homo sapien
tgattctggcaaccaagatggcaag

SEQ ID NO: 1331391 - DNA, 25 bp, Homo sapien
gattgggaatatgcttctgtacatg

SEQ ID NO: 1331392 - DNA, 25 bp, Homo sapien
tacttaaaaaggtttcatcaatgtg

SEQ ID NO: 1331393 - DNA, 25 bp, Homo sapien
agagaaaaatagtcaaattacaaga

SEQ ID NO: 1331394 - DNA, 25 bp, Homo sapien
atacttaaaaaggtttcatcaatgt

SEQ ID NO: 1331395 - DNA, 25 bp, Homo sapien
tagtcaaattacaagaaacaaaaga

SEQ ID NO: 1331396 - DNA, 25 bp, Homo sapien
tctaatgttgaaatgggtctctacc

SEQ ID NO: 1331397 - DNA, 25 bp, Homo sapien
gaaaatgcactggattggcatcctg

SEQ ID NO: 1331398 - DNA, 25 bp, Homo sapien
taagaagtaagggtatgcacatggc

SEQ ID NO: 1331399 - DNA, 25 bp, Homo sapien
tattaattatacacccaggctctgg

SEQ ID NO: 1331400 - DNA, 25 bp, Homo sapien
cacattccaatttagttcgatttaa

SEQ ID NO: 1331401 - DNA, 25 bp, Homo sapien
ttgaaaacagcctgcaacctctctg

SEQ ID NO: 1331402 - DNA, 25 bp, Homo sapien
agtcaattccatcatccacaaactg

SEQ ID NO: 1331403 - DNA, 25 bp, Homo sapien
tctgacatgcgtacaactcctcttc

SEQ ID NO: 1331404 - DNA, 25 bp, Homo sapien
aaactaatagtgacaggccaggtgc

SEQ ID NO: 1331405 - DNA, 25 bp, Homo sapien
gataggagccagttgatactcaaga

SEQ ID NO: 1331406 - DNA, 25 bp, Homo sapien
aacacaacggtgatataactagaac

SEQ ID NO: 1331407 - DNA, 25 bp, Homo sapien
tgttgtcctagtactcagtaggctg

SEQ ID NO: 1331408 - DNA, 25 bp, Homo sapien
gaaagcttaagacaggatggacatc

SEQ ID NO: 1331409 - DNA, 25 bp, Homo sapien
cctcaataatttggaagctatttcc

SEQ ID NO: 1331410 - DNA, 25 bp, Homo sapien
attttacctgtctaagaatctcagc

SEQ ID NO: 1331411 - DNA, 25 bp, Homo sapien
gctatttccagtatagtgcctggga

SEQ ID NO: 1331412 - DNA, 25 bp, Homo sapien
tatgtgatccactgtgtacaaactg

SEQ ID NO: 1331413 - DNA, 25 bp, Homo sapien
atccactgtgtacaaactggcagac

SEQ ID NO: 1331414 - DNA, 25 bp, Homo sapien
tgtgatccactgtgtacaaactggc

SEQ ID NO: 1331415 - DNA, 25 bp, Homo sapien
tgatccactgtgtacaaactggcag

SEQ ID NO: 1331416 - DNA, 25 bp, Homo sapien
gatgcctgcagtctaatattaaata

SEQ ID NO: 1331417 - DNA, 25 bp, Homo sapien
aaatttacgcagcagcaacaatcca

SEQ ID NO: 1331418 - DNA, 25 bp, Homo sapien
agatgcctgcagtctaatattaaat

SEQ ID NO: 1331419 - DNA, 25 bp, Homo sapien
tctttccagcaaaaggattagtaaa

SEQ ID NO: 1331420 - DNA, 25 bp, Homo sapien
catggtgaaaagagccgaggtttca

SEQ ID NO: 1331421 - DNA, 25 bp, Homo sapien
caatttcggaaaaccatatggcatg

SEQ ID NO: 1331422 - DNA, 25 bp, Homo sapien
gaaacatctggtatggagcaggcac

SEQ ID NO: 1331423 - DNA, 25 bp, Homo sapien
taagtcatccagtaccaatttcgga

SEQ ID NO: 1331424 - DNA, 25 bp, Homo sapien
tctcgtttttcaaacgctatgtgag

SEQ ID NO: 1331425 - DNA, 25 bp, Homo sapien
cccagcctaaaacgagatttctatc

SEQ ID NO: 1331426 - DNA, 25 bp, Homo sapien
acaagcgtgcgccatgttcggctaa

SEQ ID NO: 1331427 - DNA, 25 bp, Homo sapien
aacgctatgtgagtttgaaaattca

SEQ ID NO: 1331428 - DNA, 25 bp, Homo sapien
gactggcgtgcactggcgacatttc

SEQ ID NO: 1331429 - DNA, 25 bp, Homo sapien
ggcgtgcactggcgacatttcggct

SEQ ID NO: 1331430 - DNA, 25 bp, Homo sapien
cgtgcactggcgacatttcggctca

SEQ ID NO: 1331431 - DNA, 25 bp, Homo sapien
ctggcgtgcactggcgacatttcgg

SEQ ID NO: 1331432 - DNA, 25 bp, Homo sapien
cacaaaattgccgagaaaatcccaa

SEQ ID NO: 1331433 - DNA, 25 bp, Homo sapien
tccaggacctatagggagccagatg

SEQ ID NO: 1331434 - DNA, 25 bp, Homo sapien
tccaggccaaatcaatattaatgag

SEQ ID NO: 1331435 - DNA, 25 bp, Homo sapien
agtaagtctcaacccaattccaggc

SEQ ID NO: 1331436 - DNA, 25 bp, Homo sapien
ttaggctgaaaaaccaacgtgaaga

SEQ ID NO: 1331437 - DNA, 25 bp, Homo sapien
aaaagctctcataaaacaacgtggg

SEQ ID NO: 1331438 - DNA, 25 bp, Homo sapien
tcaaatcatacatgggaaaggtgtg

SEQ ID NO: 1331439 - DNA, 25 bp, Homo sapien
aaggtgtggtgggaatcatcaagca

SEQ ID NO: 1331440 - DNA, 25 bp, Homo sapien
gccgatttaacagccaggttgccag

SEQ ID NO: 1331441 - DNA, 25 bp, Homo sapien
gacaaacttccggtaatgacagcag

SEQ ID NO: 1331442 - DNA, 25 bp, Homo sapien
ccccgagaggcgcttagtaaacaag

SEQ ID NO: 1331443 - DNA, 25 bp, Homo sapien
tatcacagggtagtgcaggacaaac

SEQ ID NO: 1331444 - DNA, 25 bp, Homo sapien
atgcttcagccgaagcggtccccga

SEQ ID NO: 1331445 - DNA, 25 bp, Homo sapien
ggcccggtggcaagacgccgtatca

SEQ ID NO: 1331446 - DNA, 25 bp, Homo sapien
gtatcacccaagaccgagtcaaatg

SEQ ID NO: 1331447 - DNA, 25 bp, Homo sapien
taggtcaactgacaggcccggtggc

SEQ ID NO: 1331448 - DNA, 25 bp, Homo sapien
ggagccccagttgggtcctcaccca

SEQ ID NO: 1331449 - DNA, 25 bp, Homo sapien
ggcgggagccccagttgggtcctca

SEQ ID NO: 1331450 - DNA, 25 bp, Homo sapien
gccccagttgggtcctcacccagag

SEQ ID NO: 1331451 - DNA, 25 bp, Homo sapien
gcgggagccccagttgggtcctcac

SEQ ID NO: 1331452 - DNA, 25 bp, Homo sapien
acccgccagaaactgccgcctcctg

SEQ ID NO: 1331453 - DNA, 25 bp, Homo sapien
cttctccgccccaccgaccgttgct

SEQ ID NO: 1331454 - DNA, 25 bp, Homo sapien
cctcacccgccagaaactgccgcct

SEQ ID NO: 1331455 - DNA, 25 bp, Homo sapien
tccgccctcacccgccagaaactgc

SEQ ID NO: 1331456 - DNA, 25 bp, Homo sapien
catcgcaagcgttagcgcgaagcgg

SEQ ID NO: 1331457 - DNA, 25 bp, Homo sapien
gggaattcaaccatcgcaagcgtta

SEQ ID NO: 1331458 - DNA, 25 bp, Homo sapien
tctgggactacgaacttcttctcct

SEQ ID NO: 1331459 - DNA, 25 bp, Homo sapien
tcttctcctaggctggcgtgaggag

SEQ ID NO: 1331460 - DNA, 25 bp, Homo sapien
aacacagacgactgggcttgggagc

SEQ ID NO: 1331461 - DNA, 25 bp, Homo sapien
gaagcgtctgtttagtttcaacaca

SEQ ID NO: 1331462 - DNA, 25 bp, Homo sapien
tttagtttcaacacagacgactggg

SEQ ID NO: 1331463 - DNA, 25 bp, Homo sapien
gaggaagcgtctgtttagtttcaac

SEQ ID NO: 1331464 - DNA, 25 bp, Homo sapien
cttcttgcccatactcacttgattg

SEQ ID NO: 1331465 - DNA, 25 bp, Homo sapien
tccactttaagttcagaatcatact

SEQ ID NO: 1331466 - DNA, 25 bp, Homo sapien
tcatctagagcagtgctatggtctg

SEQ ID NO: 1331467 - DNA, 25 bp, Homo sapien
ctgttgacttgtctccctgcctttg

SEQ ID NO: 1331468 - DNA, 25 bp, Homo sapien
cacctcagggtttatttgaatacgc

SEQ ID NO: 1331469 - DNA, 25 bp, Homo sapien
aatgaaatatctctacacaggcctg

SEQ ID NO: 1331470 - DNA, 25 bp, Homo sapien
catgctgaggctactaatgaggaac

SEQ ID NO: 1331471 - DNA, 25 bp, Homo sapien
aatacgctggcgctctcagtttagg

SEQ ID NO: 1331472 - DNA, 25 bp, Homo sapien
ctttggaaggagtcccattgctgct

SEQ ID NO: 1331473 - DNA, 25 bp, Homo sapien
aggcctttggaaggagtcccattgc

SEQ ID NO: 1331474 - DNA, 25 bp, Homo sapien
tcagttagtgaggcctttggaagga

SEQ ID NO: 1331475 - DNA, 25 bp, Homo sapien
gcctttggaaggagtcccattgctg

SEQ ID NO: 1331476 - DNA, 25 bp, Homo sapien
gagagatggtggtacgtgggcggac

SEQ ID NO: 1331477 - DNA, 25 bp, Homo sapien
gcttggtcgtggtctggacgaaatt

SEQ ID NO: 1331478 - DNA, 25 bp, Homo sapien
gtacgtgggcggacagagctggatg

SEQ ID NO: 1331479 - DNA, 25 bp, Homo sapien
ttagtgcaccacactccgtggcttg

SEQ ID NO: 1331480 - DNA, 25 bp, Homo sapien
cacaagatggcgctgtgtccaacgc

SEQ ID NO: 1331481 - DNA, 25 bp, Homo sapien
aaaccggcgccactcggctgtggcg

SEQ ID NO: 1331482 - DNA, 25 bp, Homo sapien
tggtgccacggagccctccttgtgg

SEQ ID NO: 1331483 - DNA, 25 bp, Homo sapien
ctgtggcgtctgtgggtgtgtgggt

SEQ ID NO: 1331484 - DNA, 25 bp, Homo sapien
gacacacggacacgcggctcacaaa

SEQ ID NO: 1331485 - DNA, 25 bp, Homo sapien
gctcacaaacttgagctcgggctgc

SEQ ID NO: 1331486 - DNA, 25 bp, Homo sapien
cacataggagggaacgcccgggaat

SEQ ID NO: 1331487 - DNA, 25 bp, Homo sapien
tccggtctggacatctgacaccagc

SEQ ID NO: 1331488 - DNA, 25 bp, Homo sapien
cagtcagtcatgagttcctggaaga

SEQ ID NO: 1331489 - DNA, 25 bp, Homo sapien
gtgggcacaacaggcaggccagtca

SEQ ID NO: 1331490 - DNA, 25 bp, Homo sapien
ctctgagctctgacaaggcacctgc

SEQ ID NO: 1331491 - DNA, 25 bp, Homo sapien
tggtgcctgcgtgggcacaacaggc

SEQ ID NO: 1331492 - DNA, 25 bp, Homo sapien
accagccaaccatttcctgatccat

SEQ ID NO: 1331493 - DNA, 25 bp, Homo sapien
ccaccagccaaccatttcctgatcc

SEQ ID NO: 1331494 - DNA, 25 bp, Homo sapien
caccagccaaccatttcctgatcca

SEQ ID NO: 1331495 - DNA, 25 bp, Homo sapien
tgttatgggtccctaagctgcctcc

SEQ ID NO: 1331496 - DNA, 25 bp, Homo sapien
gaatgactgtccctaggaaatggag

SEQ ID NO: 1331497 - DNA, 25 bp, Homo sapien
atggtcaccaagtcagcaagtcccc

SEQ ID NO: 1331498 - DNA, 25 bp, Homo sapien
gctcagagagggatatgacctgcca

SEQ ID NO: 1331499 - DNA, 25 bp, Homo sapien
taaccatgaggattccagccaggat

SEQ ID NO: 1331500 - DNA, 25 bp, Homo sapien
tgagaagtcgatgtacagcacgctg

SEQ ID NO: 1331501 - DNA, 25 bp, Homo sapien
tcacagcggacctcgtactcatgga

SEQ ID NO: 1331502 - DNA, 25 bp, Homo sapien
gacgatgtcactggtatcctgggcc

SEQ ID NO: 1331503 - DNA, 25 bp, Homo sapien
acagggtactcatcacacctgaagg

SEQ ID NO: 1331504 - DNA, 25 bp, Homo sapien
cagtaggtatcctgccgttgagccc

SEQ ID NO: 1331505 - DNA, 25 bp, Homo sapien
tgtccccggtgctgtatggcttccc

SEQ ID NO: 1331506 - DNA, 25 bp, Homo sapien
cttaggagctttgtccccggtgctg

SEQ ID NO: 1331507 - DNA, 25 bp, Homo sapien
tctcccgatgatatctgcagtaggt

SEQ ID NO: 1331508 - DNA, 25 bp, Homo sapien
aggtagaccttggtccgctccagcg

SEQ ID NO: 1331509 - DNA, 25 bp, Homo sapien
ccagcgcctgcgtggagatcaggat

SEQ ID NO: 1331510 - DNA, 25 bp, Homo sapien
tgccgcaggtatcaaagcgggcctg

SEQ ID NO: 1331511 - DNA, 25 bp, Homo sapien
agtccgtgcgggagcagctcacgtt

SEQ ID NO: 1331512 - DNA, 25 bp, Homo sapien
tagtggaaacaagcgggagccgtac

SEQ ID NO: 1331513 - DNA, 25 bp, Homo sapien
tagttctgaatgatacaagcagggc

SEQ ID NO: 1331514 - DNA, 25 bp, Homo sapien
tcttgaacatggatgcgatgcctgg

SEQ ID NO: 1331515 - DNA, 25 bp, Homo sapien
gttgagcccctggaccaatacagca

SEQ ID NO: 1331516 - DNA, 25 bp, Homo sapien
gaaggccgccagatggtcaaagtca

SEQ ID NO: 1331517 - DNA, 25 bp, Homo sapien
tggagaagttgccccgcatggccat

SEQ ID NO: 1331518 - DNA, 25 bp, Homo sapien
gtcttggtcaggctgttgggctcct

SEQ ID NO: 1331519 - DNA, 25 bp, Homo sapien
gcatggccatgtatacctcctggca

SEQ ID NO: 1331520 - DNA, 25 bp, Homo sapien
gaagccacggcctccgatgttgaag

SEQ ID NO: 1331521 - DNA, 25 bp, Homo sapien
gaagtagtaggccttgaagccacgg

SEQ ID NO: 1331522 - DNA, 25 bp, Homo sapien
cagtggcactccatgctgttcgggt

SEQ ID NO: 1331523 - DNA, 25 bp, Homo sapien
caagcacagccacgtagtcataggt

SEQ ID NO: 1331524 - DNA, 25 bp, Homo sapien
ctttctccttgtggctcccagtttc

SEQ ID NO: 1331525 - DNA, 25 bp, Homo sapien
ttctccttgtggctcccagtttcct

SEQ ID NO: 1331526 - DNA, 25 bp, Homo sapien
ttctttctccttgtggctcccagtt

SEQ ID NO: 1331527 - DNA, 25 bp, Homo sapien
gacctttctttctccttgtggctcc

SEQ ID NO: 1331528 - DNA, 25 bp, Homo sapien
acattgcctttattttttattgcct

SEQ ID NO: 1331529 - DNA, 25 bp, Homo sapien
cattgcctttattttttattgcctt

SEQ ID NO: 1331530 - DNA, 25 bp, Homo sapien
gggattaacataaggttccatttga

SEQ ID NO: 1331531 - DNA, 25 bp, Homo sapien
cattctacaaatctaagggtctaaa

SEQ ID NO: 1331532 - DNA, 25 bp, Homo sapien
gactttgatatcctaacattctaca

SEQ ID NO: 1331533 - DNA, 25 bp, Homo sapien
tatgattagatcagcctatggttct

SEQ ID NO: 1331534 - DNA, 25 bp, Homo sapien
ttggcggaccctgggaaccagtagc

SEQ ID NO: 1331535 - DNA, 25 bp, Homo sapien
gttaacatcagtgaggtctttggtt

SEQ ID NO: 1331536 - DNA, 25 bp, Homo sapien
tctactgtttgagttaacatcagtg

SEQ ID NO: 1331537 - DNA, 25 bp, Homo sapien
ctgagtcccccaggattgctgttgg

SEQ ID NO: 1331538 - DNA, 25 bp, Homo sapien
ttgagcctttgcacagaacctggag

SEQ ID NO: 1331539 - DNA, 25 bp, Homo sapien
tgacgactctaggagaaacggaggc

SEQ ID NO: 1331540 - DNA, 25 bp, Homo sapien
tgggaaccccagctacaagcatggt

SEQ ID NO: 1331541 - DNA, 25 bp, Homo sapien
caaggattcccaagccgtgaagtgg

SEQ ID NO: 1331542 - DNA, 25 bp, Homo sapien
cactgcaacaggtccctaaggcccc

SEQ ID NO: 1331543 - DNA, 25 bp, Homo sapien
ggtactctaggtcaaaggcatggaa

SEQ ID NO: 1331544 - DNA, 25 bp, Homo sapien
gaagctgcaggtgtcgtggtactct

SEQ ID NO: 1331545 - DNA, 25 bp, Homo sapien
gttgcccttgtctggtgaggcccca

SEQ ID NO: 1331546 - DNA, 25 bp, Homo sapien
tctggtagcccgcagaaaagccatg

SEQ ID NO: 1331547 - DNA, 25 bp, Homo sapien
gccctgggcccagcagtgccactgc

SEQ ID NO: 1331548 - DNA, 25 bp, Homo sapien
agcagcaggcaagccccccactctg

SEQ ID NO: 1331549 - DNA, 25 bp, Homo sapien
cttccatggcttgggcctggagccc

SEQ ID NO: 1331550 - DNA, 25 bp, Homo sapien
ctgggcccagcagtgccactgccag

SEQ ID NO: 1331551 - DNA, 25 bp, Homo sapien
gtctgccgagctcaggtaggccagg

SEQ ID NO: 1331552 - DNA, 25 bp, Homo sapien
aggtctgccgagctcaggtaggcca

SEQ ID NO: 1331553 - DNA, 25 bp, Homo sapien
acaggtctgccgagctcaggtaggc

SEQ ID NO: 1331554 - DNA, 25 bp, Homo sapien
caggtctgccgagctcaggtaggcc

SEQ ID NO: 1331555 - DNA, 25 bp, Homo sapien
tagtaagccgatccctgggtacttc

SEQ ID NO: 1331556 - DNA, 25 bp, Homo sapien
gcccctagaattagtaagccgatcc

SEQ ID NO: 1331557 - DNA, 25 bp, Homo sapien
catgaataattcaccggcccctaga

SEQ ID NO: 1331558 - DNA, 25 bp, Homo sapien
tgaaagggcctccaagttaatggtg

SEQ ID NO: 1331559 - DNA, 25 bp, Homo sapien
gtaaagtgacggatctggtgtcacc

SEQ ID NO: 1331560 - DNA, 25 bp, Homo sapien
ctggtgtcaccaggtttacacgttc

SEQ ID NO: 1331561 - DNA, 25 bp, Homo sapien
tgcaccgaccacactatcaggaagg

SEQ ID NO: 1331562 - DNA, 25 bp, Homo sapien
tacacgttctgagatctgcaccgac

SEQ ID NO: 1331563 - DNA, 25 bp, Homo sapien
ttgaacatcgtatgtgccaggcccc

SEQ ID NO: 1331564 - DNA, 25 bp, Homo sapien
cgagaatatggaatgcccgctcctt

SEQ ID NO: 1331565 - DNA, 25 bp, Homo sapien
ctttttcacgcaagaatgcagcagg

SEQ ID NO: 1331566 - DNA, 25 bp, Homo sapien
tatttagtgggacacgcaggacaac

SEQ ID NO: 1331567 - DNA, 25 bp, Homo sapien
tgcccaggtgatagcaaggtgctgc

SEQ ID NO: 1331568 - DNA, 25 bp, Homo sapien
tctgctggtgtatagatctgtgccc

SEQ ID NO: 1331569 - DNA, 25 bp, Homo sapien
tctgtgcccgagtgtgtggagcttt

SEQ ID NO: 1331570 - DNA, 25 bp, Homo sapien
gggtacacatctgcatacctctgtg

SEQ ID NO: 1331571 - DNA, 25 bp, Homo sapien
agacagctttgagaacacggttgca

SEQ ID NO: 1331572 - DNA, 25 bp, Homo sapien
gacagctttgagaacacggttgcag

SEQ ID NO: 1331573 - DNA, 25 bp, Homo sapien
agctttgagaacacggttgcagctc

SEQ ID NO: 1331574 - DNA, 25 bp, Homo sapien
acagctttgagaacacggttgcagc

SEQ ID NO: 1331575 - DNA, 25 bp, Homo sapien
catcttccaggagcaagtatgggcc

SEQ ID NO: 1331576 - DNA, 25 bp, Homo sapien
tcaccggtggctcatcagcatcttc

SEQ ID NO: 1331577 - DNA, 25 bp, Homo sapien
ttccaggagcaagtatgggcctgtg

SEQ ID NO: 1331578 - DNA, 25 bp, Homo sapien
tcttccaggagcaagtatgggcctg

SEQ ID NO: 1331579 - DNA, 25 bp, Homo sapien
gaggagctgatatggctcacctgcc

SEQ ID NO: 1331580 - DNA, 25 bp, Homo sapien
gcagaggagctgatatggctcacct

SEQ ID NO: 1331581 - DNA, 25 bp, Homo sapien
ggcagaggagctgatatggctcacc

SEQ ID NO: 1331582 - DNA, 25 bp, Homo sapien
agctgatatggctcacctgccttct

SEQ ID NO: 1331583 - DNA, 25 bp, Homo sapien
cagaggtcaaccatgagtcagggca

SEQ ID NO: 1331584 - DNA, 25 bp, Homo sapien
gaggttcacagagcccaagttactt

SEQ ID NO: 1331585 - DNA, 25 bp, Homo sapien
tgccataggtcacaggatcagtaag

SEQ ID NO: 1331586 - DNA, 25 bp, Homo sapien
tcacacaaccccaggagacagtgtt

SEQ ID NO: 1331587 - DNA, 25 bp, Homo sapien
tctcaagtttccaggcgacaggagc

SEQ ID NO: 1331588 - DNA, 25 bp, Homo sapien
gaattcattaactgcagtgcgctgc

SEQ ID NO: 1331589 - DNA, 25 bp, Homo sapien
tatgggtacagcgacagaaaagcac

SEQ ID NO: 1331590 - DNA, 25 bp, Homo sapien
taggctgtaagttccccgatggaca

SEQ ID NO: 1331591 - DNA, 25 bp, Homo sapien
ctaggctttggaagagaggccaggg

SEQ ID NO: 1331592 - DNA, 25 bp, Homo sapien
tcagtgaggcctgcgcacagtaagc

SEQ ID NO: 1331593 - DNA, 25 bp, Homo sapien
cagtgaggcctgcgcacagtaagca

SEQ ID NO: 1331594 - DNA, 25 bp, Homo sapien
ctcagtgaggcctgcgcacagtaag

SEQ ID NO: 1331595 - DNA, 25 bp, Homo sapien
agtgaggcctgcgcacagtaagcac

SEQ ID NO: 1331596 - DNA, 25 bp, Homo sapien
ttggtgaactcagccgagccacaga

SEQ ID NO: 1331597 - DNA, 25 bp, Homo sapien
gaccagtgcgaatggctttctccga

SEQ ID NO: 1331598 - DNA, 25 bp, Homo sapien
gcagctgaccagctctttaattagg

SEQ ID NO: 1331599 - DNA, 25 bp, Homo sapien
tttctccgacagcagctgaccagct

SEQ ID NO: 1331600 - DNA, 25 bp, Homo sapien
aacattttattggagtacaacatat

SEQ ID NO: 1331601 - DNA, 25 bp, Homo sapien
atcattaagtatacagttagccctc

SEQ ID NO: 1331602 - DNA, 25 bp, Homo sapien
caacatatgtgtagaaaagtataca

SEQ ID NO: 1331603 - DNA, 25 bp, Homo sapien
ggagtacaacatatgtgtagaaaag

SEQ ID NO: 1331604 - DNA, 25 bp, Homo sapien
cagtataagagctatttactcaaca

SEQ ID NO: 1331605 - DNA, 25 bp, Homo sapien
ggacaactatatatagtctgaagaa

SEQ ID NO: 1331606 - DNA, 25 bp, Homo sapien
catcactctgcagatcctatgaagg

SEQ ID NO: 1331607 - DNA, 25 bp, Homo sapien
tatcaaggactcgagcatcctcaga

SEQ ID NO: 1331608 - DNA, 25 bp, Homo sapien
acttgcaaccataggcagacccatg

SEQ ID NO: 1331609 - DNA, 25 bp, Homo sapien
gagactcttgaggatgctgcagctg

SEQ ID NO: 1331610 - DNA, 25 bp, Homo sapien
gaactttaacggaaatgccacctgc

SEQ ID NO: 1331611 - DNA, 25 bp, Homo sapien
tagggtcagatctgcctttaggact

SEQ ID NO: 1331612 - DNA, 25 bp, Homo sapien
agaaacgggcctgctcttggaggaa

SEQ ID NO: 1331613 - DNA, 25 bp, Homo sapien
tgtgatgctctgcaggataggcacc

SEQ ID NO: 1331614 - DNA, 25 bp, Homo sapien
gtcttgaagcaaccgaccagagtga

SEQ ID NO: 1331615 - DNA, 25 bp, Homo sapien
gaaggttttcaggtagatgctctca

SEQ ID NO: 1331616 - DNA, 25 bp, Homo sapien
gttcgagaccaacgtggcaaaactc

SEQ ID NO: 1331617 - DNA, 25 bp, Homo sapien
tcgagaccaacgtggcaaaactccg

SEQ ID NO: 1331618 - DNA, 25 bp, Homo sapien
gagttcgagaccaacgtggcaaaac

SEQ ID NO: 1331619 - DNA, 25 bp, Homo sapien
cgagaccaacgtggcaaaactccgt

SEQ ID NO: 1331620 - DNA, 25 bp, Homo sapien
tatagaagaaatctccgaaaggtcc

SEQ ID NO: 1331621 - DNA, 25 bp, Homo sapien
tactctccaggactcaacataccgg

SEQ ID NO: 1331622 - DNA, 25 bp, Homo sapien
ggactcaacataccgggacatcagc

SEQ ID NO: 1331623 - DNA, 25 bp, Homo sapien
aaggtcctcgccagaaagctgtgtc

SEQ ID NO: 1331624 - DNA, 25 bp, Homo sapien
aagccagtttgcaggtttcagtcca

SEQ ID NO: 1331625 - DNA, 25 bp, Homo sapien
ttaacacacagtctcagcatcaggg

SEQ ID NO: 1331626 - DNA, 25 bp, Homo sapien
gattaaccattaatgtggagcccgt

SEQ ID NO: 1331627 - DNA, 25 bp, Homo sapien
taaagccttcagcatagaggtccca

SEQ ID NO: 1331628 - DNA, 25 bp, Homo sapien
cacagagtaaatgtttaatacatac

SEQ ID NO: 1331629 - DNA, 25 bp, Homo sapien
gcacagagtaaatgtttaatacata

SEQ ID NO: 1331630 - DNA, 25 bp, Homo sapien
tggcacagagtaaatgtttaataca

SEQ ID NO: 1331631 - DNA, 25 bp, Homo sapien
ggcacagagtaaatgtttaatacat

SEQ ID NO: 1331632 - DNA, 25 bp, Homo sapien
gaacttttgtccttccatttggatc

SEQ ID NO: 1331633 - DNA, 25 bp, Homo sapien
ccttgagacaaatgatgtcatcttt

SEQ ID NO: 1331634 - DNA, 25 bp, Homo sapien
ccttccatttggatcatattaccca

SEQ ID NO: 1331635 - DNA, 25 bp, Homo sapien
tggatcatattacccaagaggcctt

SEQ ID NO: 1331636 - DNA, 25 bp, Homo sapien
ggccactgccaatttgtactccttc

SEQ ID NO: 1331637 - DNA, 25 bp, Homo sapien
gaagacttgttctatttcacccctc

SEQ ID NO: 1331638 - DNA, 25 bp, Homo sapien
tggctctcaggctgggtatagttcc

SEQ ID NO: 1331639 - DNA, 25 bp, Homo sapien
cctagaatgccatttacggccactg

SEQ ID NO: 1331640 - DNA, 25 bp, Homo sapien
tatccttctgcgttggcagggctga

SEQ ID NO: 1331641 - DNA, 25 bp, Homo sapien
tgggcgtataggctctctgaatttc

SEQ ID NO: 1331642 - DNA, 25 bp, Homo sapien
gctgatgggcgtataggctctctga

SEQ ID NO: 1331643 - DNA, 25 bp, Homo sapien
cttaattaacacttcaaagtatcct

SEQ ID NO: 1331644 - DNA, 25 bp, Homo sapien
cagcaaacccttttaaggctgggca

SEQ ID NO: 1331645 - DNA, 25 bp, Homo sapien
ctgagaaacagaagtgtgcagtcag

SEQ ID NO: 1331646 - DNA, 25 bp, Homo sapien
aaacagaagtgtgcagtcagtcagc

SEQ ID NO: 1331647 - DNA, 25 bp, Homo sapien
acagaagtgtgcagtcagtcagcca

SEQ ID NO: 1331648 - DNA, 25 bp, Homo sapien
tgtcactatgtctatcttgaagatg

SEQ ID NO: 1331649 - DNA, 25 bp, Homo sapien
ttaagggagagtacgctagttggtc

SEQ ID NO: 1331650 - DNA, 25 bp, Homo sapien
gaactctctgagtcatgtgtcacta

SEQ ID NO: 1331651 - DNA, 25 bp, Homo sapien
tcaaggccagcagctagcaaatagc

SEQ ID NO: 1331652 - DNA, 25 bp, Homo sapien
taggtgtccttagtgagcctgtcca

SEQ ID NO: 1331653 - DNA, 25 bp, Homo sapien
aagctggctgttcccgggtagagca

SEQ ID NO: 1331654 - DNA, 25 bp, Homo sapien
tagagcaaaccggacacggtaggtg

SEQ ID NO: 1331655 - DNA, 25 bp, Homo sapien
aggccaagctggctgttcccgggta

SEQ ID NO: 1331656 - DNA, 25 bp, Homo sapien
gacctctgtttgcaactttaaatgt

SEQ ID NO: 1331657 - DNA, 25 bp, Homo sapien
tgtgaggcaccacgctggacctctg

SEQ ID NO: 1331658 - DNA, 25 bp, Homo sapien
gaggcaccacgctggacctctgttt

SEQ ID NO: 1331659 - DNA, 25 bp, Homo sapien
tggacctctgtttgcaactttaaat

SEQ ID NO: 1331660 - DNA, 25 bp, Homo sapien
ggcccacgcagcaggctcctgtcct

SEQ ID NO: 1331661 - DNA, 25 bp, Homo sapien
gcccacgcagcaggctcctgtcctt

SEQ ID NO: 1331662 - DNA, 25 bp, Homo sapien
caccttgccagatctcggtgataga

SEQ ID NO: 1331663 - DNA, 25 bp, Homo sapien
agggtgagcagccactgccgcagca

SEQ ID NO: 1331664 - DNA, 25 bp, Homo sapien
gatctcggtgatagaggtcaaacac

SEQ ID NO: 1331665 - DNA, 25 bp, Homo sapien
gcaagggttctgtgggccgtagctg

SEQ ID NO: 1331666 - DNA, 25 bp, Homo sapien
caggcttcctcagtgtcgtcgtcct

SEQ ID NO: 1331667 - DNA, 25 bp, Homo sapien
ccaggcttcctcagtgtcgtcgtcc

SEQ ID NO: 1331668 - DNA, 25 bp, Homo sapien
gcagcctagaaggaacaactgggtg

SEQ ID NO: 1331669 - DNA, 25 bp, Homo sapien
aggccaggctctatgagaccacggg

SEQ ID NO: 1331670 - DNA, 25 bp, Homo sapien
tctatgagaccacgggcgcaggccc

SEQ ID NO: 1331671 - DNA, 25 bp, Homo sapien
agaaggaacaactgggtgctcttcc

SEQ ID NO: 1331672 - DNA, 25 bp, Homo sapien
tacaggcatgagccaccatgtctgg

SEQ ID NO: 1331673 - DNA, 25 bp, Homo sapien
agtctcccaaagtgctgagattaca

SEQ ID NO: 1331674 - DNA, 25 bp, Homo sapien
caggcatgagccaccatgtctggcc

SEQ ID NO: 1331675 - DNA, 25 bp, Homo sapien
aagtgatcttctcatctcagtctcc

SEQ ID NO: 1331676 - DNA, 25 bp, Homo sapien
gactgtaggacttctccacgtttta

SEQ ID NO: 1331677 - DNA, 25 bp, Homo sapien
ttttaaagagttggttcatgcgtcc

SEQ ID NO: 1331678 - DNA, 25 bp, Homo sapien
gaaaagttggccacgtcagtcatga

SEQ ID NO: 1331679 - DNA, 25 bp, Homo sapien
cgttttaacagtcccactttctctg

SEQ ID NO: 1331680 - DNA, 25 bp, Homo sapien
cctgcgcttcacctcacgtgaggat

SEQ ID NO: 1331681 - DNA, 25 bp, Homo sapien
gggagcgcttagcaggtatcaccta

SEQ ID NO: 1331682 - DNA, 25 bp, Homo sapien
gcttagcaggtatcacctataagaa

SEQ ID NO: 1331683 - DNA, 25 bp, Homo sapien
gcgcttcacctcacgtgaggatttt

SEQ ID NO: 1331684 - DNA, 25 bp, Homo sapien
ctgcgtgagcggaggacccctctga

SEQ ID NO: 1331685 - DNA, 25 bp, Homo sapien
tatatttgcatggtgctgcgtgagc

SEQ ID NO: 1331686 - DNA, 25 bp, Homo sapien
gaaagtttttagctctatatttgca

SEQ ID NO: 1331687 - DNA, 25 bp, Homo sapien
tctgaatcctgaaacccctcttgcc

SEQ ID NO: 1331688 - DNA, 25 bp, Homo sapien
ccacattccccaaacatgtcaggaa

SEQ ID NO: 1331689 - DNA, 25 bp, Homo sapien
ccaacccacattccccaaacatgtc

SEQ ID NO: 1331690 - DNA, 25 bp, Homo sapien
actccaacccacattccccaaacat

SEQ ID NO: 1331691 - DNA, 25 bp, Homo sapien
acccacattccccaaacatgtcagg

SEQ ID NO: 1331692 - DNA, 25 bp, Homo sapien
tatcgtacacaaactacaatgtatc

SEQ ID NO: 1331693 - DNA, 25 bp, Homo sapien
cgttatcaacatatatcgtacacaa

SEQ ID NO: 1331694 - DNA, 25 bp, Homo sapien
aataaaacgttatcaacatatatcg

SEQ ID NO: 1331695 - DNA, 25 bp, Homo sapien
catatatcgtacacaaactacaatg

SEQ ID NO: 1331696 - DNA, 25 bp, Homo sapien
gactggagccagcacgtctgtttgg

SEQ ID NO: 1331697 - DNA, 25 bp, Homo sapien
tcgggaccagaacgcggaggtcact

SEQ ID NO: 1331698 - DNA, 25 bp, Homo sapien
tggaaatcaagctagaacaaacgcg

SEQ ID NO: 1331699 - DNA, 25 bp, Homo sapien
cccaagtggaaaacggtgactgcct

SEQ ID NO: 1331700 - DNA, 25 bp, Homo sapien
gggctctcacacctagactagcttt

SEQ ID NO: 1331701 - DNA, 25 bp, Homo sapien
cacctagactagcttttctggtgga

SEQ ID NO: 1331702 - DNA, 25 bp, Homo sapien
tctcacacctagactagcttttctg

SEQ ID NO: 1331703 - DNA, 25 bp, Homo sapien
tgtgggctctcacacctagactagc

SEQ ID NO: 1331704 - DNA, 25 bp, Homo sapien
aaagcatagaggttgattggggtgg

SEQ ID NO: 1331705 - DNA, 25 bp, Homo sapien
aagcatagaggttgattggggtggg

SEQ ID NO: 1331706 - DNA, 25 bp, Homo sapien
agcatagaggttgattggggtgggg

SEQ ID NO: 1331707 - DNA, 25 bp, Homo sapien
aaagtgtcatgtacagaaaaggtcc

SEQ ID NO: 1331708 - DNA, 25 bp, Homo sapien
caaaaaagtgtcatgtacagaaaag

SEQ ID NO: 1331709 - DNA, 25 bp, Homo sapien
ttttctggtcactgacttgaaatac

SEQ ID NO: 1331710 - DNA, 25 bp, Homo sapien
tcatgtacagaaaaggtcctttggg

SEQ ID NO: 1331711 - DNA, 25 bp, Homo sapien
cactcatcgtcatgcttggagaata

SEQ ID NO: 1331712 - DNA, 25 bp, Homo sapien
tcacacactcatcgtcatgcttgga

SEQ ID NO: 1331713 - DNA, 25 bp, Homo sapien
cacacactcatcgtcatgcttggag

SEQ ID NO: 1331714 - DNA, 25 bp, Homo sapien
cacactcatcgtcatgcttggagaa

SEQ ID NO: 1331715 - DNA, 25 bp, Homo sapien
atgccacttatgttgttaggagaat

SEQ ID NO: 1331716 - DNA, 25 bp, Homo sapien
tttggaagtccgtctatgtcgcctg

SEQ ID NO: 1331717 - DNA, 25 bp, Homo sapien
ttggaagtccgtctatgtcgcctga

SEQ ID NO: 1331718 - DNA, 25 bp, Homo sapien
ttttggaagtccgtctatgtcgcct

SEQ ID NO: 1331719 - DNA, 25 bp, Homo sapien
ggaagtccgtctatgtcgcctgacc

SEQ ID NO: 1331720 - DNA, 25 bp, Homo sapien
tgtgcggcatccctctcaggatcgt

SEQ ID NO: 1331721 - DNA, 25 bp, Homo sapien
gcatccctctcaggatcgtcctgtg

SEQ ID NO: 1331722 - DNA, 25 bp, Homo sapien
ctttctgtgcggcatccctctcagg

SEQ ID NO: 1331723 - DNA, 25 bp, Homo sapien
ctctcaggatcgtcctgtgtgccca

SEQ ID NO: 1331724 - DNA, 25 bp, Homo sapien
gctgaggcacagagctggctgccca

SEQ ID NO: 1331725 - DNA, 25 bp, Homo sapien
agctgagccaggagctgaggcacag

SEQ ID NO: 1331726 - DNA, 25 bp, Homo sapien
caagcccagctgagccaggagctga

SEQ ID NO: 1331727 - DNA, 25 bp, Homo sapien
ccagctgagccaggagctgaggcac

SEQ ID NO: 1331728 - DNA, 25 bp, Homo sapien
gcccatcggaccgtccgagccggga

SEQ ID NO: 1331729 - DNA, 25 bp, Homo sapien
taatgatccattcatgtggtgtggc

SEQ ID NO: 1331730 - DNA, 25 bp, Homo sapien
gtggtgtggctccatgccacccatg

SEQ ID NO: 1331731 - DNA, 25 bp, Homo sapien
catgccacccatgccgcccatcgga

SEQ ID NO: 1331732 - DNA, 25 bp, Homo sapien
gaacgtttccataacctcagaaaga

SEQ ID NO: 1331733 - DNA, 25 bp, Homo sapien
agagcatataactgacccatttaag

SEQ ID NO: 1331734 - DNA, 25 bp, Homo sapien
cacaaccaattttgaacgtttccat

SEQ ID NO: 1331735 - DNA, 25 bp, Homo sapien
agaaatcctgtacccgactgcagtc

SEQ ID NO: 1331736 - DNA, 25 bp, Homo sapien
caacaatctcttacgtcttcagtgg

SEQ ID NO: 1331737 - DNA, 25 bp, Homo sapien
tagcagttttcatggcaagccaaca

SEQ ID NO: 1331738 - DNA, 25 bp, Homo sapien
tctatggccagcaatgatagtcatc

SEQ ID NO: 1331739 - DNA, 25 bp, Homo sapien
caaattaactgtgtactgtctgcca

SEQ ID NO: 1331740 - DNA, 25 bp, Homo sapien
tagccatgacttcaggcagcccttg

SEQ ID NO: 1331741 - DNA, 25 bp, Homo sapien
gggcaatgcatctgttactgaaagt

SEQ ID NO: 1331742 - DNA, 25 bp, Homo sapien
gggtcagcactactgtaaaggggca

SEQ ID NO: 1331743 - DNA, 25 bp, Homo sapien
tgaaagtccctcgtcctttggttca

SEQ ID NO: 1331744 - DNA, 25 bp, Homo sapien
tgtaaaggggcaatgcatctgttac

SEQ ID NO: 1331745 - DNA, 25 bp, Homo sapien
ttcccagtgatgcctgggtcacgct

SEQ ID NO: 1331746 - DNA, 25 bp, Homo sapien
cagtgatgcctgggtcacgctggtg

SEQ ID NO: 1331747 - DNA, 25 bp, Homo sapien
gtcacgctggtgctgtcattgtcac

SEQ ID NO: 1331748 - DNA, 25 bp, Homo sapien
ccagtgatgcctgggtcacgctggt

SEQ ID NO: 1331749 - DNA, 25 bp, Homo sapien
gagctgcaacatcacccaagggctg

SEQ ID NO: 1331750 - DNA, 25 bp, Homo sapien
gacagtgaccactcgaggcagatca

SEQ ID NO: 1331751 - DNA, 25 bp, Homo sapien
caagggctgcaactctgagaggcaa

SEQ ID NO: 1331752 - DNA, 25 bp, Homo sapien
tggtcacaccagtgaggaccctggc

SEQ ID NO: 1331753 - DNA, 25 bp, Homo sapien
tgctttcccctcagctgatgaagtt

SEQ ID NO: 1331754 - DNA, 25 bp, Homo sapien
aattatgatttgttatggtgtctga

SEQ ID NO: 1331755 - DNA, 25 bp, Homo sapien
gatttgttatggtgtctgatatgta

SEQ ID NO: 1331756 - DNA, 25 bp, Homo sapien
tcccctcagctgatgaagttaatta

SEQ ID NO: 1331757 - DNA, 25 bp, Homo sapien
cattgtgtagatgttgtcactggaa

SEQ ID NO: 1331758 - DNA, 25 bp, Homo sapien
tccaggcggcactggattaatcatt

SEQ ID NO: 1331759 - DNA, 25 bp, Homo sapien
caggcggcactggattaatcattgt

SEQ ID NO: 1331760 - DNA, 25 bp, Homo sapien
ggcggcactggattaatcattgtgt

SEQ ID NO: 1331761 - DNA, 25 bp, Homo sapien
actgggcataatgggtgttcctgga

SEQ ID NO: 1331762 - DNA, 25 bp, Homo sapien
taatgggtgttcctggaggaccgcc

SEQ ID NO: 1331763 - DNA, 25 bp, Homo sapien
ctggaggaccgccaccaccaggggg

SEQ ID NO: 1331764 - DNA, 25 bp, Homo sapien
tgcgggactgggcataatgggtgtt

SEQ ID NO: 1331765 - DNA, 25 bp, Homo sapien
gtaccaggtgatgaggaggagtatg

SEQ ID NO: 1331766 - DNA, 25 bp, Homo sapien
taggtaccaggtgatgaggaggagt

SEQ ID NO: 1331767 - DNA, 25 bp, Homo sapien
ccaggtgatgaggaggagtatggaa

SEQ ID NO: 1331768 - DNA, 25 bp, Homo sapien
cacataggtaccaggtgatgaggag

SEQ ID NO: 1331769 - DNA, 25 bp, Homo sapien
gagtcactgagtgccctcagctgcc

SEQ ID NO: 1331770 - DNA, 25 bp, Homo sapien
aaacaagatgtcagggagccccacg

SEQ ID NO: 1331771 - DNA, 25 bp, Homo sapien
agccccacgtcagagtcactgagtg

SEQ ID NO: 1331772 - DNA, 25 bp, Homo sapien
agatgtcagggagccccacgtcaga

SEQ ID NO: 1331773 - DNA, 25 bp, Homo sapien
tgagttagcactgttaggattgggc

SEQ ID NO: 1331774 - DNA, 25 bp, Homo sapien
cactgttaggattgggccagggtct

SEQ ID NO: 1331775 - DNA, 25 bp, Homo sapien
taggattgggccagggtctgccagc

SEQ ID NO: 1331776 - DNA, 25 bp, Homo sapien
ttagcactgttaggattgggccagg

SEQ ID NO: 1331777 - DNA, 25 bp, Homo sapien
tgggtggtggtctcatgccgctgcc

SEQ ID NO: 1331778 - DNA, 25 bp, Homo sapien
atggcggggccgagggagttgggtg

SEQ ID NO: 1331779 - DNA, 25 bp, Homo sapien
tgttaatcccgggcatggcggggcc

SEQ ID NO: 1331780 - DNA, 25 bp, Homo sapien
ggcatggcggggccgagggagttgg

SEQ ID NO: 1331781 - DNA, 25 bp, Homo sapien
caacattcagtgcattttcaggagc

SEQ ID NO: 1331782 - DNA, 25 bp, Homo sapien
gaccacaatgacaagccagcacaga

SEQ ID NO: 1331783 - DNA, 25 bp, Homo sapien
ggtgggaaccaagtcacagggacca

SEQ ID NO: 1331784 - DNA, 25 bp, Homo sapien
gcacagagggacagtcacaacattc

SEQ ID NO: 1331785 - DNA, 25 bp, Homo sapien
ttggtcttggaacccattgagaggc

SEQ ID NO: 1331786 - DNA, 25 bp, Homo sapien
tggacttggtcttggaacccattga

SEQ ID NO: 1331787 - DNA, 25 bp, Homo sapien
ccctgggctcaggcgggtaagaggg

SEQ ID NO: 1331788 - DNA, 25 bp, Homo sapien
gggatggacttggtcttggaaccca

SEQ ID NO: 1331789 - DNA, 25 bp, Homo sapien
tgatgctgggaagccggagaaaact

SEQ ID NO: 1331790 - DNA, 25 bp, Homo sapien
tccatttctgcactcagggatcatc

SEQ ID NO: 1331791 - DNA, 25 bp, Homo sapien
tgggagcaggcactcctgagaagcc

SEQ ID NO: 1331792 - DNA, 25 bp, Homo sapien
gtagtcctaccccacccatgtgtca

SEQ ID NO: 1331793 - DNA, 25 bp, Homo sapien
attataggcgcccacgaccatgtcg

SEQ ID NO: 1331794 - DNA, 25 bp, Homo sapien
ccagcagtccagattcagctcagga

SEQ ID NO: 1331795 - DNA, 25 bp, Homo sapien
tgggtcaaggcaccaggcctcgtat

SEQ ID NO: 1331796 - DNA, 25 bp, Homo sapien
gcccagccaatgtttgagagaaaag

SEQ ID NO: 1331797 - DNA, 25 bp, Homo sapien
tctacacagaactcacgaagtccca

SEQ ID NO: 1331798 - DNA, 25 bp, Homo sapien
gtgaagctgtacaagggtcggttac

SEQ ID NO: 1331799 - DNA, 25 bp, Homo sapien
ttaccaaccaggtatccctctgcca

SEQ ID NO: 1331800 - DNA, 25 bp, Homo sapien
cggttaccaaccaggtatccctctg

SEQ ID NO: 1331801 - DNA, 25 bp, Homo sapien
gaagctgtacaagggtcggttacca

SEQ ID NO: 1331802 - DNA, 25 bp, Homo sapien
cccgggctgtggcagtaggcagggc

SEQ ID NO: 1331803 - DNA, 25 bp, Homo sapien
cgggctgtggcagtaggcagggctc

SEQ ID NO: 1331804 - DNA, 25 bp, Homo sapien
ggctgtggcagtaggcagggctccc

SEQ ID NO: 1331805 - DNA, 25 bp, Homo sapien
ccgggctgtggcagtaggcagggct

SEQ ID NO: 1331806 - DNA, 25 bp, Homo sapien
gcatcacattgagaacttgacctgg

SEQ ID NO: 1331807 - DNA, 25 bp, Homo sapien
aacacaaatagcctccttagcggga

SEQ ID NO: 1331808 - DNA, 25 bp, Homo sapien
gaatctcagtgttacgatggtccta

SEQ ID NO: 1331809 - DNA, 25 bp, Homo sapien
tgctctcaaatagcctgacatctgt

SEQ ID NO: 1331810 - DNA, 25 bp, Homo sapien
agggttcattctctgcattgatcct

SEQ ID NO: 1331811 - DNA, 25 bp, Homo sapien
agaattgggcagcaatggctgtgtc

SEQ ID NO: 1331812 - DNA, 25 bp, Homo sapien
tgtgtcccaggaactcctcccggag

SEQ ID NO: 1331813 - DNA, 25 bp, Homo sapien
atggctgtgtcccaggaactcctcc

SEQ ID NO: 1331814 - DNA, 25 bp, Homo sapien
gcagcaatggctgtgtcccaggaac

SEQ ID NO: 1331815 - DNA, 25 bp, Homo sapien
agaccaagttctctaggtcttgctc

SEQ ID NO: 1331816 - DNA, 25 bp, Homo sapien
tgtagcaccaaccaccttcctctca

SEQ ID NO: 1331817 - DNA, 25 bp, Homo sapien
gagaccaagttctctaggtcttgct

SEQ ID NO: 1331818 - DNA, 25 bp, Homo sapien
tggctgtagcaccaaccaccttcct

SEQ ID NO: 1331819 - DNA, 25 bp, Homo sapien
cacctggcctacaaagtggcattta

SEQ ID NO: 1331820 - DNA, 25 bp, Homo sapien
ctgctgtttccgtctgcctgggggt

SEQ ID NO: 1331821 - DNA, 25 bp, Homo sapien
ggggtgctcagcgtctgtctttcca

SEQ ID NO: 1331822 - DNA, 25 bp, Homo sapien
ctgggggtgctcagcgtctgtcttt

SEQ ID NO: 1331823 - DNA, 25 bp, Homo sapien
tggaggtcgcgtccctcactgaggt

SEQ ID NO: 1331824 - DNA, 25 bp, Homo sapien
cctatgtgtcggaactccaggagca

SEQ ID NO: 1331825 - DNA, 25 bp, Homo sapien
tcatgagtcacccagtgcaggacca

SEQ ID NO: 1331826 - DNA, 25 bp, Homo sapien
tctctccaggtagcccaatgctgac

SEQ ID NO: 1331827 - DNA, 25 bp, Homo sapien
tgttaactggcagacccaacgaggg

SEQ ID NO: 1331828 - DNA, 25 bp, Homo sapien
caacgagggcactcttcaagaaagc

SEQ ID NO: 1331829 - DNA, 25 bp, Homo sapien
ttacccgtcacaggagagaactgag

SEQ ID NO: 1331830 - DNA, 25 bp, Homo sapien
gaactgagctaactcgggtggcaca

SEQ ID NO: 1331831 - DNA, 25 bp, Homo sapien
gatgatggatttatcccccatttgc

SEQ ID NO: 1331832 - DNA, 25 bp, Homo sapien
catgcttagttgctgagtagaaata

SEQ ID NO: 1331833 - DNA, 25 bp, Homo sapien
agcctccgactcctaggtcccagcg

SEQ ID NO: 1331834 - DNA, 25 bp, Homo sapien
gtgtaatacaaagtacagatgatgg

SEQ ID NO: 1331835 - DNA, 25 bp, Homo sapien
tagaattgccaaccctaatgggcca

SEQ ID NO: 1331836 - DNA, 25 bp, Homo sapien
tgatctaagcattcctacgggccat

SEQ ID NO: 1331837 - DNA, 25 bp, Homo sapien
tctggaatgggctgtccaaagggcc

SEQ ID NO: 1331838 - DNA, 25 bp, Homo sapien
tctagaatagccgaaaccctgcaat

SEQ ID NO: 1331839 - DNA, 25 bp, Homo sapien
cctggggccgcctgcgtatcgcggt

SEQ ID NO: 1331840 - DNA, 25 bp, Homo sapien
ctgcgtatcgcggtgacataaaagg

SEQ ID NO: 1331841 - DNA, 25 bp, Homo sapien
ggccgcctgcgtatcgcggtgacat

SEQ ID NO: 1331842 - DNA, 25 bp, Homo sapien
tttcccattctgatcgggggcctgg

SEQ ID NO: 1331843 - DNA, 25 bp, Homo sapien
atgacagcctgccctactgcacagt

SEQ ID NO: 1331844 - DNA, 25 bp, Homo sapien
aatgacagcctgccctactgcacag

SEQ ID NO: 1331845 - DNA, 25 bp, Homo sapien
tgacagcctgccctactgcacagtg

SEQ ID NO: 1331846 - DNA, 25 bp, Homo sapien
ttgtcaataaagactcgcaggcagt

SEQ ID NO: 1331847 - DNA, 25 bp, Homo sapien
tcaataaagactcgcaggcagtggc

SEQ ID NO: 1331848 - DNA, 25 bp, Homo sapien
aagactcgcaggcagtggctagagc

SEQ ID NO: 1331849 - DNA, 25 bp, Homo sapien
taaagactcgcaggcagtggctaga

SEQ ID NO: 1331850 - DNA, 25 bp, Homo sapien
catcatgctgctaggattgtgaggt

SEQ ID NO: 1331851 - DNA, 25 bp, Homo sapien
ccatcatgctgctaggattgtgagg

SEQ ID NO: 1331852 - DNA, 25 bp, Homo sapien
gggtcccatcatgctgctaggattg

SEQ ID NO: 1331853 - DNA, 25 bp, Homo sapien
tcccatcatgctgctaggattgtga

SEQ ID NO: 1331854 - DNA, 25 bp, Homo sapien
tttggtcgccggctcaacggtgtaa

SEQ ID NO: 1331855 - DNA, 25 bp, Homo sapien
tagaggcaggttatagatcacagca

SEQ ID NO: 1331856 - DNA, 25 bp, Homo sapien
cagcacatggagaagcgcagaagca

SEQ ID NO: 1331857 - DNA, 25 bp, Homo sapien
acacgggagtacagtcctggacaca

SEQ ID NO: 1331858 - DNA, 25 bp, Homo sapien
gagcaccgagatgccgggtgctgac

SEQ ID NO: 1331859 - DNA, 25 bp, Homo sapien
ggacttgggagagcaccgagatgcc

SEQ ID NO: 1331860 - DNA, 25 bp, Homo sapien
tgggagagcaccgagatgccgggtg

SEQ ID NO: 1331861 - DNA, 25 bp, Homo sapien
gaaggacttgggagagcaccgagat

SEQ ID NO: 1331862 - DNA, 25 bp, Homo sapien
gaggcacatcagacttgtcctgacc

SEQ ID NO: 1331863 - DNA, 25 bp, Homo sapien
tctggaggcacatcagacttgtcct

SEQ ID NO: 1331864 - DNA, 25 bp, Homo sapien
gggtctggaggcacatcagacttgt

SEQ ID NO: 1331865 - DNA, 25 bp, Homo sapien
gcacatcagacttgtcctgaccctg

SEQ ID NO: 1331866 - DNA, 25 bp, Homo sapien
cgaaaactccgaagtgtggacactg

SEQ ID NO: 1331867 - DNA, 25 bp, Homo sapien
tgatggttagtgaaaaagcctttac

SEQ ID NO: 1331868 - DNA, 25 bp, Homo sapien
tggacactgatggttagtgaaaaag

SEQ ID NO: 1331869 - DNA, 25 bp, Homo sapien
cacgaaaactccgaagtgtggacac

SEQ ID NO: 1331870 - DNA, 25 bp, Homo sapien
tcccactgtaaaacggattcaagga

SEQ ID NO: 1331871 - DNA, 25 bp, Homo sapien
cacactgacagcgtggggagcagag

SEQ ID NO: 1331872 - DNA, 25 bp, Homo sapien
ccactgtaaaacggattcaaggact

SEQ ID NO: 1331873 - DNA, 25 bp, Homo sapien
cattcccactgtaaaacggattcaa

SEQ ID NO: 1331874 - DNA, 25 bp, Homo sapien
ggcccaaacagagcagcagggctga

SEQ ID NO: 1331875 - DNA, 25 bp, Homo sapien
tgaggcagcaggcgaccacactgcc

SEQ ID NO: 1331876 - DNA, 25 bp, Homo sapien
ggctgaggcagcaggcgaccacact

SEQ ID NO: 1331877 - DNA, 25 bp, Homo sapien
aggcagcaggcgaccacactgccat

SEQ ID NO: 1331878 - DNA, 25 bp, Homo sapien
ccagccttgagttcttttggcaggt

SEQ ID NO: 1331879 - DNA, 25 bp, Homo sapien
tggctggtcacaaccctccttgctg

SEQ ID NO: 1331880 - DNA, 25 bp, Homo sapien
cagcacaaatattctgggagcttga

SEQ ID NO: 1331881 - DNA, 25 bp, Homo sapien
cccttgtttgccagcacaaatattc

SEQ ID NO: 1331882 - DNA, 25 bp, Homo sapien
gccaccaggaagcatggatcacctt

SEQ ID NO: 1331883 - DNA, 25 bp, Homo sapien
aagcatggatcaccttcacagaagg

SEQ ID NO: 1331884 - DNA, 25 bp, Homo sapien
ggaagcatggatcaccttcacagaa

SEQ ID NO: 1331885 - DNA, 25 bp, Homo sapien
caggaagcatggatcaccttcacag

SEQ ID NO: 1331886 - DNA, 25 bp, Homo sapien
cagccgccactcctgctcgggccat

SEQ ID NO: 1331887 - DNA, 25 bp, Homo sapien
ccagccgccactcctgctcgggcca

SEQ ID NO: 1331888 - DNA, 25 bp, Homo sapien
tctaatatcagagtggccggctgca

SEQ ID NO: 1331889 - DNA, 25 bp, Homo sapien
tgtaagcaggcctactccggaaatg

SEQ ID NO: 1331890 - DNA, 25 bp, Homo sapien
caaggccctgtgttgcttaccgagg

SEQ ID NO: 1331891 - DNA, 25 bp, Homo sapien
cgccttggaaacctggacgtggaag

SEQ ID NO: 1331892 - DNA, 25 bp, Homo sapien
tgcacgctgtacctctctaagatgg

SEQ ID NO: 1331893 - DNA, 25 bp, Homo sapien
gaactcgggcggattctcaaactca

SEQ ID NO: 1331894 - DNA, 25 bp, Homo sapien
gatggcattccccagtctcaagttg

SEQ ID NO: 1331895 - DNA, 25 bp, Homo sapien
taaatcacatgaaccgccgaggaga

SEQ ID NO: 1331896 - DNA, 25 bp, Homo sapien
tcccggcatcccatcgttgggggga

SEQ ID NO: 1331897 - DNA, 25 bp, Homo sapien
ctcccggcatcccatcgttgggggg

SEQ ID NO: 1331898 - DNA, 25 bp, Homo sapien
ccggcatcccatcgttggggggaat

SEQ ID NO: 1331899 - DNA, 25 bp, Homo sapien
ggcctcccggcatcccatcgttggg

SEQ ID NO: 1331900 - DNA, 25 bp, Homo sapien
tgagctggagctccattaaggcgct

SEQ ID NO: 1331901 - DNA, 25 bp, Homo sapien
gagagacctgttatctgagcccaca

SEQ ID NO: 1331902 - DNA, 25 bp, Homo sapien
tagagatctcctagctgggagccca

SEQ ID NO: 1331903 - DNA, 25 bp, Homo sapien
tgacattgggttctaaccgcccagg

SEQ ID NO: 1331904 - DNA, 25 bp, Homo sapien
tgacactgtggatgtccaaggagct

SEQ ID NO: 1331905 - DNA, 25 bp, Homo sapien
cactgtggatgtccaaggagctctt

SEQ ID NO: 1331906 - DNA, 25 bp, Homo sapien
ccagtgacactgtggatgtccaagg

SEQ ID NO: 1331907 - DNA, 25 bp, Homo sapien
cagtgacactgtggatgtccaagga

SEQ ID NO: 1331908 - DNA, 25 bp, Homo sapien
gccacgtatagacaacaaaagcctc

SEQ ID NO: 1331909 - DNA, 25 bp, Homo sapien
ctgaaaagggccacgtatagacaac

SEQ ID NO: 1331910 - DNA, 25 bp, Homo sapien
gaaaagggccacgtatagacaacaa

SEQ ID NO: 1331911 - DNA, 25 bp, Homo sapien
acgtatagacaacaaaagcctcaac

SEQ ID NO: 1331912 - DNA, 25 bp, Homo sapien
tgttggatctaactggcaaattacc

SEQ ID NO: 1331913 - DNA, 25 bp, Homo sapien
caagatcccactgaagagtctgttg

SEQ ID NO: 1331914 - DNA, 25 bp, Homo sapien
tgtgtgtcaaggaatgcaagatccc

SEQ ID NO: 1331915 - DNA, 25 bp, Homo sapien
cactgaagagtctgttggatctaac

SEQ ID NO: 1331916 - DNA, 25 bp, Homo sapien
agatgacaggttgcaggtctgccct

SEQ ID NO: 1331917 - DNA, 25 bp, Homo sapien
ggatgcaaggagttgtggtgacaga

SEQ ID NO: 1331918 - DNA, 25 bp, Homo sapien
caggaggatgcaaggagttgtggtg

SEQ ID NO: 1331919 - DNA, 25 bp, Homo sapien
cagagcagatgacaggttgcaggtc

SEQ ID NO: 1331920 - DNA, 25 bp, Homo sapien
gcgcacacgctcagttccaatgaca

SEQ ID NO: 1331921 - DNA, 25 bp, Homo sapien
aaccacaaacatgtcatagtaggcc

SEQ ID NO: 1331922 - DNA, 25 bp, Homo sapien
cgctcagttccaatgacaacttaat

SEQ ID NO: 1331923 - DNA, 25 bp, Homo sapien
tagtaggccagtgacagctccttaa

SEQ ID NO: 1331924 - DNA, 25 bp, Homo sapien
cagtctgacaagttcacccgggtcc

SEQ ID NO: 1331925 - DNA, 25 bp, Homo sapien
tgtgtaaatgaacagtcgggagccc

SEQ ID NO: 1331926 - DNA, 25 bp, Homo sapien
cctcagtgagcatcaaatttagtgg

SEQ ID NO: 1331927 - DNA, 25 bp, Homo sapien
ggcgcataattcaaacccaacactg

SEQ ID NO: 1331928 - DNA, 25 bp, Homo sapien
actgcctgcctcacacgacttgtga

SEQ ID NO: 1331929 - DNA, 25 bp, Homo sapien
cttggctgtgtcatctagaaaacga

SEQ ID NO: 1331930 - DNA, 25 bp, Homo sapien
tgctgcatcccctggaacagtgcct

SEQ ID NO: 1331931 - DNA, 25 bp, Homo sapien
gtgcctggcacgcatccatcaggtg

SEQ ID NO: 1331932 - DNA, 25 bp, Homo sapien
ggaccagctgggtatcactctccgg

SEQ ID NO: 1331933 - DNA, 25 bp, Homo sapien
ctgggtatcactctccggcagacca

SEQ ID NO: 1331934 - DNA, 25 bp, Homo sapien
cagctgggtatcactctccggcaga

SEQ ID NO: 1331935 - DNA, 25 bp, Homo sapien
gggtatcactctccggcagaccaga

SEQ ID NO: 1331936 - DNA, 25 bp, Homo sapien
gatcaaacccagatcgctcacacgg

SEQ ID NO: 1331937 - DNA, 25 bp, Homo sapien
tctgccatctagacacggacatgag

SEQ ID NO: 1331938 - DNA, 25 bp, Homo sapien
taagggagcgccacagaagataagg

SEQ ID NO: 1331939 - DNA, 25 bp, Homo sapien
cagacactggaatgctcctatcaca

SEQ ID NO: 1331940 - DNA, 25 bp, Homo sapien
tgaaccccatcaggaaatccactga

SEQ ID NO: 1331941 - DNA, 25 bp, Homo sapien
ctgaaccccatcaggaaatccactg

SEQ ID NO: 1331942 - DNA, 25 bp, Homo sapien
aatgtgggcggttcagagacgcacc

SEQ ID NO: 1331943 - DNA, 25 bp, Homo sapien
tttacactcacacggtcctgcatgg

SEQ ID NO: 1331944 - DNA, 25 bp, Homo sapien
tatgcactgggttccatgctgagcc

SEQ ID NO: 1331945 - DNA, 25 bp, Homo sapien
tatgaggtgcacataagctcggagg

SEQ ID NO: 1331946 - DNA, 25 bp, Homo sapien
catcttcaactcttacctcggtcat

SEQ ID NO: 1331947 - DNA, 25 bp, Homo sapien
ctgaggccatcttcaactcttacct

SEQ ID NO: 1331948 - DNA, 25 bp, Homo sapien
gaggccatcttcaactcttacctcg

SEQ ID NO: 1331949 - DNA, 25 bp, Homo sapien
ggccatcttcaactcttacctcggt

SEQ ID NO: 1331950 - DNA, 25 bp, Homo sapien
aagaggccgggtgctgacatctgta

SEQ ID NO: 1331951 - DNA, 25 bp, Homo sapien
aggccgggtgctgacatctgtagtt

SEQ ID NO: 1331952 - DNA, 25 bp, Homo sapien
ccgggtgctgacatctgtagttcca

SEQ ID NO: 1331953 - DNA, 25 bp, Homo sapien
aataacaaagaagaggccgggtgct

SEQ ID NO: 1331954 - DNA, 25 bp, Homo sapien
agaaatcagctccagatgcaggcca

SEQ ID NO: 1331955 - DNA, 25 bp, Homo sapien
ttccaccgacaaacaagcatctggg

SEQ ID NO: 1331956 - DNA, 25 bp, Homo sapien
tctgcctcgccagacaatggaaggc

SEQ ID NO: 1331957 - DNA, 25 bp, Homo sapien
tctgatacagtctagggctcctgct

SEQ ID NO: 1331958 - DNA, 25 bp, Homo sapien
caaggaagtgtatgcgggcacacat

SEQ ID NO: 1331959 - DNA, 25 bp, Homo sapien
gcaaaaagggcgaaggactcctcca

SEQ ID NO: 1331960 - DNA, 25 bp, Homo sapien
aataagcagttctgaggacctacca

SEQ ID NO: 1331961 - DNA, 25 bp, Homo sapien
catgtagcgcaaactccagagggaa

SEQ ID NO: 1331962 - DNA, 25 bp, Homo sapien
accacttggtactatgagaagcaca

SEQ ID NO: 1331963 - DNA, 25 bp, Homo sapien
gacttggtgtttggtacagaaagta

SEQ ID NO: 1331964 - DNA, 25 bp, Homo sapien
gcagatggacttggtgtttggtaca

SEQ ID NO: 1331965 - DNA, 25 bp, Homo sapien
agtagaaaagtcggagttataacat

SEQ ID NO: 1331966 - DNA, 25 bp, Homo sapien
tctgcaactcccatccaggtctaca

SEQ ID NO: 1331967 - DNA, 25 bp, Homo sapien
caggtctacacctggcactatgtag

SEQ ID NO: 1331968 - DNA, 25 bp, Homo sapien
tgggagttgcagagtgacccgctct

SEQ ID NO: 1331969 - DNA, 25 bp, Homo sapien
tgtaggtacataagacatctgcctg

SEQ ID NO: 1331970 - DNA, 25 bp, Homo sapien
ccgtaattgtcccaggacaaaactg

SEQ ID NO: 1331971 - DNA, 25 bp, Homo sapien
tgacaaataataactcgtactccat

SEQ ID NO: 1331972 - DNA, 25 bp, Homo sapien
taattgtcccaggacaaaactgaca

SEQ ID NO: 1331973 - DNA, 25 bp, Homo sapien
actgacaaataataactcgtactcc

SEQ ID NO: 1331974 - DNA, 25 bp, Homo sapien
ctggaaggctgcagatctaccctcc

SEQ ID NO: 1331975 - DNA, 25 bp, Homo sapien
ggacactccctcgaaagcctggaag

SEQ ID NO: 1331976 - DNA, 25 bp, Homo sapien
taggccagagcaggataaagtacag

SEQ ID NO: 1331977 - DNA, 25 bp, Homo sapien
tacagcagccccttaagactgacat

SEQ ID NO: 1331978 - DNA, 25 bp, Homo sapien
taggcccaagcatcatgggattcac

SEQ ID NO: 1331979 - DNA, 25 bp, Homo sapien
ctctaggcccaagcatcatgggatt

SEQ ID NO: 1331980 - DNA, 25 bp, Homo sapien
tctaggcccaagcatcatgggattc

SEQ ID NO: 1331981 - DNA, 25 bp, Homo sapien
ggcccaagcatcatgggattcacca

SEQ ID NO: 1331982 - DNA, 25 bp, Homo sapien
tgtgggctacactcatctgtccaga

SEQ ID NO: 1331983 - DNA, 25 bp, Homo sapien
tttaaacacgaagaagagtctccca

SEQ ID NO: 1331984 - DNA, 25 bp, Homo sapien
ccaaatatagttccgtaagccagcg

SEQ ID NO: 1331985 - DNA, 25 bp, Homo sapien
taagtacgagttatcctgttctgca

SEQ ID NO: 1331986 - DNA, 25 bp, Homo sapien
tgtaaggccacgcgcagagggattt

SEQ ID NO: 1331987 - DNA, 25 bp, Homo sapien
taaggccacgcgcagagggatttcc

SEQ ID NO: 1331988 - DNA, 25 bp, Homo sapien
tgtgtaaggccacgcgcagagggat

SEQ ID NO: 1331989 - DNA, 25 bp, Homo sapien
aggccacgcgcagagggatttcctg

SEQ ID NO: 1331990 - DNA, 25 bp, Homo sapien
tatctacggccccataaaggttaca

SEQ ID NO: 1331991 - DNA, 25 bp, Homo sapien
gctgctataatcaaaccacacggtg

SEQ ID NO: 1331992 - DNA, 25 bp, Homo sapien
taaaacggacactaagaggccatgc

SEQ ID NO: 1331993 - DNA, 25 bp, Homo sapien
tgggtgaacaacatcagagctcagt

SEQ ID NO: 1331994 - DNA, 25 bp, Homo sapien
tatgttcaagacacttctgtgggtg

SEQ ID NO: 1331995 - DNA, 25 bp, Homo sapien
gcttctgcccaaagtaggctcttga

SEQ ID NO: 1331996 - DNA, 25 bp, Homo sapien
gaatgaatgattcaagccactccca

SEQ ID NO: 1331997 - DNA, 25 bp, Homo sapien
cactcggtgtcgtcagtacaggcaa

SEQ ID NO: 1331998 - DNA, 25 bp, Homo sapien
tcacagcactgaggagacgtataat

SEQ ID NO: 1331999 - DNA, 25 bp, Homo sapien
gcagacagtgcccattagtccacgt

SEQ ID NO: 1332000 - DNA, 25 bp, Homo sapien
tgcggaaattctcctgatacacggg

SEQ ID NO: 1332001 - DNA, 25 bp, Homo sapien
tagtccacgtgcgtacagctgtaaa

SEQ ID NO: 1332002 - DNA, 25 bp, Homo sapien
cggatgggaaacttctgcaagggaa

SEQ ID NO: 1332003 - DNA, 25 bp, Homo sapien
ctctgctcggatgggaaacttctgc

SEQ ID NO: 1332004 - DNA, 25 bp, Homo sapien
ctgctcggatgggaaacttctgcaa

SEQ ID NO: 1332005 - DNA, 25 bp, Homo sapien
gctcggatgggaaacttctgcaagg

SEQ ID NO: 1332006 - DNA, 25 bp, Homo sapien
gcagcaacgctggaagataagagaa

SEQ ID NO: 1332007 - DNA, 25 bp, Homo sapien
gattatatgactccgtgcaaccaac

SEQ ID NO: 1332008 - DNA, 25 bp, Homo sapien
tgtgtgcactgttgccacttcagga

SEQ ID NO: 1332009 - DNA, 25 bp, Homo sapien
catgggcagatgctcctctagaacc

SEQ ID NO: 1332010 - DNA, 25 bp, Homo sapien
tctagcgtgatcagcactgtgctca

SEQ ID NO: 1332011 - DNA, 25 bp, Homo sapien
tgccgtttgaccatgcgagcatcta

SEQ ID NO: 1332012 - DNA, 25 bp, Homo sapien
gaagaagctgcgtcttgccgtttga

SEQ ID NO: 1332013 - DNA, 25 bp, Homo sapien
caatgctaacagaaacgtgcagaca

SEQ ID NO: 1332014 - DNA, 25 bp, Homo sapien
gatcttatctagaaagcctggagcc

SEQ ID NO: 1332015 - DNA, 25 bp, Homo sapien
gttttcaagtatccaggtgacccag

SEQ ID NO: 1332016 - DNA, 25 bp, Homo sapien
gactagaaaccgaactggacccaga

SEQ ID NO: 1332017 - DNA, 25 bp, Homo sapien
gaaaccagtctgaggtccagcaatg

SEQ ID NO: 1332018 - DNA, 25 bp, Homo sapien
tccagttgtctgatgggcgccgtct

SEQ ID NO: 1332019 - DNA, 25 bp, Homo sapien
catatctacaagtcatcgggtgtcc

SEQ ID NO: 1332020 - DNA, 25 bp, Homo sapien
tggcaactcccaagcgcaggagctg

SEQ ID NO: 1332021 - DNA, 25 bp, Homo sapien
taggagctgcaaagggagccgacat

SEQ ID NO: 1332022 - DNA, 25 bp, Homo sapien
tcttgcgaacaaggtccctgatgcc

SEQ ID NO: 1332023 - DNA, 25 bp, Homo sapien
gatacagtgccacgcataccagagg

SEQ ID NO: 1332024 - DNA, 25 bp, Homo sapien
tcagggacgtaaaaagcattcagac

SEQ ID NO: 1332025 - DNA, 25 bp, Homo sapien
taccagccatcgttttggagtcagg

SEQ ID NO: 1332026 - DNA, 25 bp, Homo sapien
gggccaggcaattaacccagggcca

SEQ ID NO: 1332027 - DNA, 25 bp, Homo sapien
caggggccaggcaattaacccaggg

SEQ ID NO: 1332028 - DNA, 25 bp, Homo sapien
tgatgaagagcaaaccaacgggctg

SEQ ID NO: 1332029 - DNA, 25 bp, Homo sapien
caccactgacggctgaagggaaatt

SEQ ID NO: 1332030 - DNA, 25 bp, Homo sapien
agggaaattttcaacagcctctggg

SEQ ID NO: 1332031 - DNA, 25 bp, Homo sapien
aatggcaacagtcttgggagcaagg

SEQ ID NO: 1332032 - DNA, 25 bp, Homo sapien
tatcgctaatccttgcttaaagagg

SEQ ID NO: 1332033 - DNA, 25 bp, Homo sapien
gctctgttacagtttgcgcgtccat

SEQ ID NO: 1332034 - DNA, 25 bp, Homo sapien
cttttagtccaaggcgctgacagcc

SEQ ID NO: 1332035 - DNA, 25 bp, Homo sapien
taacaaatatgggtgcttcgctacc

SEQ ID NO: 1332036 - DNA, 25 bp, Homo sapien
tcatagtcagccaggttgcttttga

SEQ ID NO: 1332037 - DNA, 25 bp, Homo sapien
gtcagccaggttgcttttgatggct

SEQ ID NO: 1332038 - DNA, 25 bp, Homo sapien
ttgttcatagtcagccaggttgctt

SEQ ID NO: 1332039 - DNA, 25 bp, Homo sapien
tagtcagccaggttgcttttgatgg

SEQ ID NO: 1332040 - DNA, 25 bp, Homo sapien
tgtcaccatcggcagggacagtagg

SEQ ID NO: 1332041 - DNA, 25 bp, Homo sapien
aagcaaatctgacatccacgcccag

SEQ ID NO: 1332042 - DNA, 25 bp, Homo sapien
tctgaaaagcaggtgaggtcgacca

SEQ ID NO: 1332043 - DNA, 25 bp, Homo sapien
ttgagggagacatgatcccaccaca

SEQ ID NO: 1332044 - DNA, 25 bp, Homo sapien
gaagcaggccacaatcggctttgga

SEQ ID NO: 1332045 - DNA, 25 bp, Homo sapien
tgtcctcgtggaaagaacgccgtgc

SEQ ID NO: 1332046 - DNA, 25 bp, Homo sapien
tgggcacctgaaagcttccttaaag

SEQ ID NO: 1332047 - DNA, 25 bp, Homo sapien
cgtgccgacacatgctccgagttaa

SEQ ID NO: 1332048 - DNA, 25 bp, Homo sapien
tcctctctggctaatggtggcccca

SEQ ID NO: 1332049 - DNA, 25 bp, Homo sapien
cacgtctccagagtaggcctgggca

SEQ ID NO: 1332050 - DNA, 25 bp, Homo sapien
ctgagcgcagatccctagatgaggc

SEQ ID NO: 1332051 - DNA, 25 bp, Homo sapien
acatgggcctccagttgtcgacaca

SEQ ID NO: 1332052 - DNA, 25 bp, Homo sapien
gggcactggccagaaaaaagcctga

SEQ ID NO: 1332053 - DNA, 25 bp, Homo sapien
gaagacacttcatacaacactgggt

SEQ ID NO: 1332054 - DNA, 25 bp, Homo sapien
ctttcaactaaatccaacgtgggct

SEQ ID NO: 1332055 - DNA, 25 bp, Homo sapien
caatgattcgactgcttaaagctga

SEQ ID NO: 1332056 - DNA, 25 bp, Homo sapien
ttcacacacgtcactcaagaagtgg

SEQ ID NO: 1332057 - DNA, 25 bp, Homo sapien
tctgcattcatctcaccgagaagca

SEQ ID NO: 1332058 - DNA, 25 bp, Homo sapien
ccgagaagcaaactgtcactgacat

SEQ ID NO: 1332059 - DNA, 25 bp, Homo sapien
aattcaacactacatgtcactggct

SEQ ID NO: 1332060 - DNA, 25 bp, Homo sapien
taatgacttcataacaacgggctca

SEQ ID NO: 1332061 - DNA, 25 bp, Homo sapien
tgttaccgggattaaatgccatgcc

SEQ ID NO: 1332062 - DNA, 25 bp, Homo sapien
ggatgatttccggactcgctgtcca

SEQ ID NO: 1332063 - DNA, 25 bp, Homo sapien
ggagaaatgaggtcataacagcccc

SEQ ID NO: 1332064 - DNA, 25 bp, Homo sapien
cagttcttccgtcacgaaatgggag

SEQ ID NO: 1332065 - DNA, 25 bp, Homo sapien
gaataacagaacttaactcacaggg

SEQ ID NO: 1332066 - DNA, 25 bp, Homo sapien
aattgtattggcttccccgatgctg

SEQ ID NO: 1332067 - DNA, 25 bp, Homo sapien
tacattgtccaacagggagatacct

SEQ ID NO: 1332068 - DNA, 25 bp, Homo sapien
taacgtggtggctgaaattccctgt

SEQ ID NO: 1332069 - DNA, 25 bp, Homo sapien
caattggccaattcggagataacgt

SEQ ID NO: 1332070 - DNA, 25 bp, Homo sapien
taaaatccccttttgaagcggctca

SEQ ID NO: 1332071 - DNA, 25 bp, Homo sapien
aacacaagcgggctccgagtgggat

SEQ ID NO: 1332072 - DNA, 25 bp, Homo sapien
ctgccaagaggaagagcctccagag

SEQ ID NO: 1332073 - DNA, 25 bp, Homo sapien
tgccaagaggaagagcctccagaga

SEQ ID NO: 1332074 - DNA, 25 bp, Homo sapien
gcctccagagagaggagaacatttt

SEQ ID NO: 1332075 - DNA, 25 bp, Homo sapien
agagcctccagagagaggagaacat

SEQ ID NO: 1332076 - DNA, 25 bp, Homo sapien
tactggaagccgtctaaaagccggc

SEQ ID NO: 1332077 - DNA, 25 bp, Homo sapien
agcagagaccggcagtgcgcacacg

SEQ ID NO: 1332078 - DNA, 25 bp, Homo sapien
ctcagcaccggctggatggccaaag

SEQ ID NO: 1332079 - DNA, 25 bp, Homo sapien
gcaccggctggatggccaaaggcca

SEQ ID NO: 1332080 - DNA, 25 bp, Homo sapien
agcattttcacgtgctctcacccaa

SEQ ID NO: 1332081 - DNA, 25 bp, Homo sapien
aaaggggaccacaactcacaaagca

SEQ ID NO: 1332082 - DNA, 25 bp, Homo sapien
agacacgggcgccagcctcttaggt

SEQ ID NO: 1332083 - DNA, 25 bp, Homo sapien
aggggcagaaaaaagccggccactg

SEQ ID NO: 1332084 - DNA, 25 bp, Homo sapien
ggtcatccaagtccaaatcccatgt

SEQ ID NO: 1332085 - DNA, 25 bp, Homo sapien
atctaatggcaaagcccggcaggca

SEQ ID NO: 1332086 - DNA, 25 bp, Homo sapien
gcagcgggcaataactgcccaccaa

SEQ ID NO: 1332087 - DNA, 25 bp, Homo sapien
gcccacaacactgcatctaatggca

SEQ ID NO: 1332088 - DNA, 25 bp, Homo sapien
tatcaatcactgagaacactgccca

SEQ ID NO: 1332089 - DNA, 25 bp, Homo sapien
ccagagagctgatcaacagggaagc

SEQ ID NO: 1332090 - DNA, 25 bp, Homo sapien
tgacagtagaatcctttgaagccag

SEQ ID NO: 1332091 - DNA, 25 bp, Homo sapien
catgatggttcacgcttcacaggca

SEQ ID NO: 1332092 - DNA, 25 bp, Homo sapien
tgccagggcaggatacataccaaag

SEQ ID NO: 1332093 - DNA, 25 bp, Homo sapien
acatctcagagacgccatttatcag

SEQ ID NO: 1332094 - DNA, 25 bp, Homo sapien
catatgcaggagtgggacaggacca

SEQ ID NO: 1332095 - DNA, 25 bp, Homo sapien
tagattcctactgatgccaagctgc

SEQ ID NO: 1332096 - DNA, 25 bp, Homo sapien
tggaactccatgtccatttcactcc

SEQ ID NO: 1332097 - DNA, 25 bp, Homo sapien
gagggaggagtcagcagtcttgttg

SEQ ID NO: 1332098 - DNA, 25 bp, Homo sapien
cagcctcactgaggtggagcacaca

SEQ ID NO: 1332099 - DNA, 25 bp, Homo sapien
agatgaaagggaactcaggtcttca

SEQ ID NO: 1332100 - DNA, 25 bp, Homo sapien
agaccagaagtaccattcatcagct

SEQ ID NO: 1332101 - DNA, 25 bp, Homo sapien
gaccagaagtaccattcatcagctt

SEQ ID NO: 1332102 - DNA, 25 bp, Homo sapien
cagaccagaagtaccattcatcagc

SEQ ID NO: 1332103 - DNA, 25 bp, Homo sapien
cttttgcttcacttgaatgttcaca

SEQ ID NO: 1332104 - DNA, 25 bp, Homo sapien
aatgttcacaagtgtctctcctttc

SEQ ID NO: 1332105 - DNA, 25 bp, Homo sapien
ttcaggagctgcacagtaaaggtcc

SEQ ID NO: 1332106 - DNA, 25 bp, Homo sapien
caggagctgcacagtaaaggtccca

SEQ ID NO: 1332107 - DNA, 25 bp, Homo sapien
aagcctgggtcatttgctcagtgtc

SEQ ID NO: 1332108 - DNA, 25 bp, Homo sapien
gctcagtgtcaaatcgcacaaacca

SEQ ID NO: 1332109 - DNA, 25 bp, Homo sapien
agtgtcaaatcgcacaaaccaactt

SEQ ID NO: 1332110 - DNA, 25 bp, Homo sapien
agcctgggtcatttgctcagtgtca

SEQ ID NO: 1332111 - DNA, 25 bp, Homo sapien
accaccacgagtgcaaaaacccagg

SEQ ID NO: 1332112 - DNA, 25 bp, Homo sapien
acccaggcggttctcccaacgtgat

SEQ ID NO: 1332113 - DNA, 25 bp, Homo sapien
acgtgatgtttttttcccatcgaat

SEQ ID NO: 1332114 - DNA, 25 bp, Homo sapien
caccaccacgagtgcaaaaacccag

SEQ ID NO: 1332115 - DNA, 25 bp, Homo sapien
tagaggagcagagacggggtgggct

SEQ ID NO: 1332116 - DNA, 25 bp, Homo sapien
ctgggggcttcccagagccaaaagg

SEQ ID NO: 1332117 - DNA, 25 bp, Homo sapien
cttagaggagcagagacggggtggg

SEQ ID NO: 1332118 - DNA, 25 bp, Homo sapien
ggctgggggcttcccagagccaaaa

SEQ ID NO: 1332119 - DNA, 25 bp, Homo sapien
tgctcctacgtgcagtaaatattcg

SEQ ID NO: 1332120 - DNA, 25 bp, Homo sapien
tgtgcagatttctgtgctcctacgt

SEQ ID NO: 1332121 - DNA, 25 bp, Homo sapien
ctgtgcagatttctgtgctcctacg

SEQ ID NO: 1332122 - DNA, 25 bp, Homo sapien
cgtgcagtaaatattcgtagacgta

SEQ ID NO: 1332123 - DNA, 25 bp, Homo sapien
aggttcctcaaactcgcaagccact

SEQ ID NO: 1332124 - DNA, 25 bp, Homo sapien
cagctttggaggtccgaggagactc

SEQ ID NO: 1332125 - DNA, 25 bp, Homo sapien
tcgctacgctctcgccagctttgga

SEQ ID NO: 1332126 - DNA, 25 bp, Homo sapien
ttgcctttcccgacccactgctcgc

SEQ ID NO: 1332127 - DNA, 25 bp, Homo sapien
ctggagagggcagcaaagcgccacc

SEQ ID NO: 1332128 - DNA, 25 bp, Homo sapien
cgcgggcggacaaaaggaggcttcg

SEQ ID NO: 1332129 - DNA, 25 bp, Homo sapien
tgacgaagccgaggacagggaaggg

SEQ ID NO: 1332130 - DNA, 25 bp, Homo sapien
cggcgtccgaggacgcggagccggt

SEQ ID NO: 1332131 - DNA, 25 bp, Homo sapien
ctgcccatccgagggcaccgccgag

SEQ ID NO: 1332132 - DNA, 25 bp, Homo sapien
cgccgctggtctacttggagctcaa

SEQ ID NO: 1332133 - DNA, 25 bp, Homo sapien
ccgctggtctacttggagctcaacc

SEQ ID NO: 1332134 - DNA, 25 bp, Homo sapien
gccgccgctggtctacttggagctc

SEQ ID NO: 1332135 - DNA, 25 bp, Homo sapien
ccgccgccgctggtctacttggagc

SEQ ID NO: 1332136 - DNA, 25 bp, Homo sapien
aacaattaaaggataggtcagtgtc

SEQ ID NO: 1332137 - DNA, 25 bp, Homo sapien
gtaggaaaactcagaactagatttc

SEQ ID NO: 1332138 - DNA, 25 bp, Homo sapien
taacatgcctcgcaccaaacaatta

SEQ ID NO: 1332139 - DNA, 25 bp, Homo sapien
taactgcgctgttccaataaacaag

SEQ ID NO: 1332140 - DNA, 25 bp, Homo sapien
gcctctgtctcacgagttccagtga

SEQ ID NO: 1332141 - DNA, 25 bp, Homo sapien
cttgctgtgtcgctccgtttggagt

SEQ ID NO: 1332142 - DNA, 25 bp, Homo sapien
ctctgtctcacgagttccagtgatt

SEQ ID NO: 1332143 - DNA, 25 bp, Homo sapien
ctgtgtcgctccgtttggagtgcag

SEQ ID NO: 1332144 - DNA, 25 bp, Homo sapien
gaatggcgcagcacacccctgtctg

SEQ ID NO: 1332145 - DNA, 25 bp, Homo sapien
ccctgtctgagcatcagaggttccc

SEQ ID NO: 1332146 - DNA, 25 bp, Homo sapien
tctcgggctattcttcctgttatcc

SEQ ID NO: 1332147 - DNA, 25 bp, Homo sapien
cttcctctcgggctattcttcctgt

SEQ ID NO: 1332148 - DNA, 25 bp, Homo sapien
aggtctgcagtcaactgggcagctc

SEQ ID NO: 1332149 - DNA, 25 bp, Homo sapien
gggtacagcttgagtctgtcccatg

SEQ ID NO: 1332150 - DNA, 25 bp, Homo sapien
tctgcagtcaactgggcagctctgc

SEQ ID NO: 1332151 - DNA, 25 bp, Homo sapien
cttcagggtacagcttgagtctgtc

SEQ ID NO: 1332152 - DNA, 25 bp, Homo sapien
agcaaaaggtaaggtgatgaaataa

SEQ ID NO: 1332153 - DNA, 25 bp, Homo sapien
gtgtaacagaggatcaaggaagacc

SEQ ID NO: 1332154 - DNA, 25 bp, Homo sapien
gcaaaaggtaaggtgatgaaataat

SEQ ID NO: 1332155 - DNA, 25 bp, Homo sapien
agtgtaacagaggatcaaggaagac

SEQ ID NO: 1332156 - DNA, 25 bp, Homo sapien
gaagagctttcgaataaaattgtct

SEQ ID NO: 1332157 - DNA, 25 bp, Homo sapien
ctgaagagctttcgaataaaattgt

SEQ ID NO: 1332158 - DNA, 25 bp, Homo sapien
gagctttcgaataaaattgtctaat

SEQ ID NO: 1332159 - DNA, 25 bp, Homo sapien
aattgtctaataaaggtagtaagat

SEQ ID NO: 1332160 - DNA, 25 bp, Homo sapien
tggaggtagacaatcaactgatttg

SEQ ID NO: 1332161 - DNA, 25 bp, Homo sapien
ggaggtagacaatcaactgatttgt

SEQ ID NO: 1332162 - DNA, 25 bp, Homo sapien
cggcctttcccttgcctcttgaaat

SEQ ID NO: 1332163 - DNA, 25 bp, Homo sapien
cttcataagcaccttcatctacagg

SEQ ID NO: 1332164 - DNA, 25 bp, Homo sapien
ctggtgttagatccggcctttccct

SEQ ID NO: 1332165 - DNA, 25 bp, Homo sapien
ttcttcataagcaccttcatctaca

SEQ ID NO: 1332166 - DNA, 25 bp, Homo sapien
tgcagagcgactgcggcttccggct

SEQ ID NO: 1332167 - DNA, 25 bp, Homo sapien
agcacattttctccatcccgtaatg

SEQ ID NO: 1332168 - DNA, 25 bp, Homo sapien
tgtctgcagagcgactgcggcttcc

SEQ ID NO: 1332169 - DNA, 25 bp, Homo sapien
ccgtaatgagctgtttccaccaggg

SEQ ID NO: 1332170 - DNA, 25 bp, Homo sapien
ctgtgccatcctgccagcttcctac

SEQ ID NO: 1332171 - DNA, 25 bp, Homo sapien
gccatcctgccagcttcctaccaac

SEQ ID NO: 1332172 - DNA, 25 bp, Homo sapien
ccctgtgccatcctgccagcttcct

SEQ ID NO: 1332173 - DNA, 25 bp, Homo sapien
gtgccatcctgccagcttcctacca

SEQ ID NO: 1332174 - DNA, 25 bp, Homo sapien
ctcagggggcctgagagggaccccg

SEQ ID NO: 1332175 - DNA, 25 bp, Homo sapien
ggcctgagagggaccccgccggcat

SEQ ID NO: 1332176 - DNA, 25 bp, Homo sapien
tcagggggcctgagagggaccccgc

SEQ ID NO: 1332177 - DNA, 25 bp, Homo sapien
gggcctgagagggaccccgccggca

SEQ ID NO: 1332178 - DNA, 25 bp, Homo sapien
tattccacagagttttgatgcaggc

SEQ ID NO: 1332179 - DNA, 25 bp, Homo sapien
gagggtctgggccatattccacaga

SEQ ID NO: 1332180 - DNA, 25 bp, Homo sapien
gaccgagggtctgggccatattcca

SEQ ID NO: 1332181 - DNA, 25 bp, Homo sapien
gtgggaccgagggtctgggccatat

SEQ ID NO: 1332182 - DNA, 25 bp, Homo sapien
tggaagaacaggtagaagttgaaag

SEQ ID NO: 1332183 - DNA, 25 bp, Homo sapien
agaacaggtagaagttgaaagcatg

SEQ ID NO: 1332184 - DNA, 25 bp, Homo sapien
ggaagaacaggtagaagttgaaagc

SEQ ID NO: 1332185 - DNA, 25 bp, Homo sapien
acaggtagaagttgaaagcatggaa

SEQ ID NO: 1332186 - DNA, 25 bp, Homo sapien
gacgaggccaggagtagtatgtgca

SEQ ID NO: 1332187 - DNA, 25 bp, Homo sapien
gcacggctgggtggttgacgaggcc

SEQ ID NO: 1332188 - DNA, 25 bp, Homo sapien
catggcagaggacccgcagaagctg

SEQ ID NO: 1332189 - DNA, 25 bp, Homo sapien
tcacatggcagaggacccgcagaag

SEQ ID NO: 1332190 - DNA, 25 bp, Homo sapien
gaggctggacaagaaggctctgttt

SEQ ID NO: 1332191 - DNA, 25 bp, Homo sapien
gctctgtttctcgaggttcctggct

SEQ ID NO: 1332192 - DNA, 25 bp, Homo sapien
tcaggaacaagctgtaatgtcccag

SEQ ID NO: 1332193 - DNA, 25 bp, Homo sapien
cgtagcctgccattttcattcgaga

SEQ ID NO: 1332194 - DNA, 25 bp, Homo sapien
gtggtggggaggaaggagaaagatc

SEQ ID NO: 1332195 - DNA, 25 bp, Homo sapien
gtggggaggaaggagaaagatctaa

SEQ ID NO: 1332196 - DNA, 25 bp, Homo sapien
tggggaggaaggagaaagatctaaa

SEQ ID NO: 1332197 - DNA, 25 bp, Homo sapien
tggtggggaggaaggagaaagatct

SEQ ID NO: 1332198 - DNA, 25 bp, Homo sapien
gattagtaatacagccgattcttcc

SEQ ID NO: 1332199 - DNA, 25 bp, Homo sapien
taatacagccgattcttccctgcaa

SEQ ID NO: 1332200 - DNA, 25 bp, Homo sapien
ctagcctgattagtaatacagccga

SEQ ID NO: 1332201 - DNA, 25 bp, Homo sapien
cctgattagtaatacagccgattct

SEQ ID NO: 1332202 - DNA, 25 bp, Homo sapien
catgggcagcaggtaggtgatgggg

SEQ ID NO: 1332203 - DNA, 25 bp, Homo sapien
ccatgggcagcaggtaggtgatggg

SEQ ID NO: 1332204 - DNA, 25 bp, Homo sapien
ctgtagtggatattggtagtttgcc

SEQ ID NO: 1332205 - DNA, 25 bp, Homo sapien
tattggtagtttgcctcctggtcct

SEQ ID NO: 1332206 - DNA, 25 bp, Homo sapien
agtttgcctcctggtccttatccag

SEQ ID NO: 1332207 - DNA, 25 bp, Homo sapien
cttagaacactgtagtggatattgg

SEQ ID NO: 1332208 - DNA, 25 bp, Homo sapien
tgcagggagctgcaacggctcatgt

SEQ ID NO: 1332209 - DNA, 25 bp, Homo sapien
tctgacagcccgttcaaatgcttgc

SEQ ID NO: 1332210 - DNA, 25 bp, Homo sapien
caaagcctgcagtcatgatggagtt

SEQ ID NO: 1332211 - DNA, 25 bp, Homo sapien
gggtgcctcagaaccaactcatgga

SEQ ID NO: 1332212 - DNA, 25 bp, Homo sapien
ctgtggtcctgtgcaaatgtcttag

SEQ ID NO: 1332213 - DNA, 25 bp, Homo sapien
ctgtgaacttgatggcctggcagtc

SEQ ID NO: 1332214 - DNA, 25 bp, Homo sapien
tgtgaacttgatggcctggcagtcg

SEQ ID NO: 1332215 - DNA, 25 bp, Homo sapien
gagcctggtagggggaaactgactc

SEQ ID NO: 1332216 - DNA, 25 bp, Homo sapien
aggaggtggttatgagcctggtagg

SEQ ID NO: 1332217 - DNA, 25 bp, Homo sapien
tttttgagacggcagccttctttag

SEQ ID NO: 1332218 - DNA, 25 bp, Homo sapien
cctcatgaagcatttgtatgggaag

SEQ ID NO: 1332219 - DNA, 25 bp, Homo sapien
attggaagttataatagaagctagg

SEQ ID NO: 1332220 - DNA, 25 bp, Homo sapien
ggagccatgtaagctgagatccagg

SEQ ID NO: 1332221 - DNA, 25 bp, Homo sapien
gatgtgggccttccccaacgtggcc

SEQ ID NO: 1332222 - DNA, 25 bp, Homo sapien
tgtgggccttccccaacgtggccat

SEQ ID NO: 1332223 - DNA, 25 bp, Homo sapien
agatgtgggccttccccaacgtggc

SEQ ID NO: 1332224 - DNA, 25 bp, Homo sapien
cagatgtgggccttccccaacgtgg

SEQ ID NO: 1332225 - DNA, 25 bp, Homo sapien
tcctctccgctaggcgggcactgga

SEQ ID NO: 1332226 - DNA, 25 bp, Homo sapien
tcgtccttcctctccgctaggcggg

SEQ ID NO: 1332227 - DNA, 25 bp, Homo sapien
ccgctaggcgggcactggagctttc

SEQ ID NO: 1332228 - DNA, 25 bp, Homo sapien
cgctaggcgggcactggagctttct

SEQ ID NO: 1332229 - DNA, 25 bp, Homo sapien
ttggaaggagaaatcgcagaacccc

SEQ ID NO: 1332230 - DNA, 25 bp, Homo sapien
ggccttgtggtgcttcatgctcaga

SEQ ID NO: 1332231 - DNA, 25 bp, Homo sapien
tagagtggaatcaccttcagcaagt

SEQ ID NO: 1332232 - DNA, 25 bp, Homo sapien
tatcagcagcaatctccaaacaagc

SEQ ID NO: 1332233 - DNA, 25 bp, Homo sapien
aagggtactgacaccatcacggcct

SEQ ID NO: 1332234 - DNA, 25 bp, Homo sapien
gaaaagggtactgacaccatcacgg

SEQ ID NO: 1332235 - DNA, 25 bp, Homo sapien
catgctggaaaagggtactgacacc

SEQ ID NO: 1332236 - DNA, 25 bp, Homo sapien
ctggaccatgctggaaaagggtact

SEQ ID NO: 1332237 - DNA, 25 bp, Homo sapien
agaagtcttccatcgtttctgggga

SEQ ID NO: 1332238 - DNA, 25 bp, Homo sapien
aagtcttccatcgtttctggggact

SEQ ID NO: 1332239 - DNA, 25 bp, Homo sapien
gtcttccatcgtttctggggacttc

SEQ ID NO: 1332240 - DNA, 25 bp, Homo sapien
ccagaagtcttccatcgtttctggg

SEQ ID NO: 1332241 - DNA, 25 bp, Homo sapien
tggctcccgtggcatagggtccaac

SEQ ID NO: 1332242 - DNA, 25 bp, Homo sapien
tcccgtggcatagggtccaacagga

SEQ ID NO: 1332243 - DNA, 25 bp, Homo sapien
ccgtggcatagggtccaacaggaag

SEQ ID NO: 1332244 - DNA, 25 bp, Homo sapien
gctcccgtggcatagggtccaacag

SEQ ID NO: 1332245 - DNA, 25 bp, Homo sapien
tccgccctgaggtccgctggcccac

SEQ ID NO: 1332246 - DNA, 25 bp, Homo sapien
cccgtgggaagcctccgccctgagg

SEQ ID NO: 1332247 - DNA, 25 bp, Homo sapien
ccacagccctagctgccagcaatgc

SEQ ID NO: 1332248 - DNA, 25 bp, Homo sapien
tagccctggggtagcctgtagtaga

SEQ ID NO: 1332249 - DNA, 25 bp, Homo sapien
gatgccagcagcctgcctatggctc

SEQ ID NO: 1332250 - DNA, 25 bp, Homo sapien
cctgtagtagactcgggtcctgtcc

SEQ ID NO: 1332251 - DNA, 25 bp, Homo sapien
caaggctggagaggcgtgccagcaa

SEQ ID NO: 1332252 - DNA, 25 bp, Homo sapien
gctccgctatttgcaaatggatgcc

SEQ ID NO: 1332253 - DNA, 25 bp, Homo sapien
gctatttgcaaatggatgccccagt

SEQ ID NO: 1332254 - DNA, 25 bp, Homo sapien
gaacaatgggcacggggttttcagc

SEQ ID NO: 1332255 - DNA, 25 bp, Homo sapien
tttaccgctgccctggacgtcagga

SEQ ID NO: 1332256 - DNA, 25 bp, Homo sapien
attcagaccgtcatccccaggcagc

SEQ ID NO: 1332257 - DNA, 25 bp, Homo sapien
agccactccacattcagaccgtcat

SEQ ID NO: 1332258 - DNA, 25 bp, Homo sapien
ttgttgctgttttaccgctgccctg

SEQ ID NO: 1332259 - DNA, 25 bp, Homo sapien
gttatcccggacgtagagcagatct

SEQ ID NO: 1332260 - DNA, 25 bp, Homo sapien
gtcatagtagacttggtggacagca

SEQ ID NO: 1332261 - DNA, 25 bp, Homo sapien
agatgtcatagtagacttggtggac

SEQ ID NO: 1332262 - DNA, 25 bp, Homo sapien
gatcttccaccgacatggggtccga

SEQ ID NO: 1332263 - DNA, 25 bp, Homo sapien
gacatgtagaaggtggtccagcctg

SEQ ID NO: 1332264 - DNA, 25 bp, Homo sapien
caccatggaagaccgtacagggaag

SEQ ID NO: 1332265 - DNA, 25 bp, Homo sapien
tagggtagccttgggatacttctcc

SEQ ID NO: 1332266 - DNA, 25 bp, Homo sapien
ccaccatggcttgggtgtacgtcct

SEQ ID NO: 1332267 - DNA, 25 bp, Homo sapien
cctttaagatgtcagcgttgatcca

SEQ ID NO: 1332268 - DNA, 25 bp, Homo sapien
atgttcttgaagtccagtttgatgc

SEQ ID NO: 1332269 - DNA, 25 bp, Homo sapien
gatgttcttgaagtccagtttgatg

SEQ ID NO: 1332270 - DNA, 25 bp, Homo sapien
gccctttaagatgtcagcgttgatc

SEQ ID NO: 1332271 - DNA, 25 bp, Homo sapien
gccatgatgggaactcctgtctcat

SEQ ID NO: 1332272 - DNA, 25 bp, Homo sapien
gtgggggggtgtgccatgatgggaa

SEQ ID NO: 1332273 - DNA, 25 bp, Homo sapien
cgtcagcctccaggactgtgatgtt

SEQ ID NO: 1332274 - DNA, 25 bp, Homo sapien
tcagcctccaggactgtgatgttgc

SEQ ID NO: 1332275 - DNA, 25 bp, Homo sapien
ctacattgacgtcagcctccaggac

SEQ ID NO: 1332276 - DNA, 25 bp, Homo sapien
gacgtcagcctccaggactgtgatg

SEQ ID NO: 1332277 - DNA, 25 bp, Homo sapien
gctgcgtggtaccaggtgacctcca

SEQ ID NO: 1332278 - DNA, 25 bp, Homo sapien
ttggctgcgtggtaccaggtgacct

SEQ ID NO: 1332279 - DNA, 25 bp, Homo sapien
ctgttggctgcgtggtaccaggtga

SEQ ID NO: 1332280 - DNA, 25 bp, Homo sapien
tggctgcgtggtaccaggtgacctc

SEQ ID NO: 1332281 - DNA, 25 bp, Homo sapien
gggtgatggcaaggactattgcggc

SEQ ID NO: 1332282 - DNA, 25 bp, Homo sapien
gacacacaggtaatgccggcaaaca

SEQ ID NO: 1332283 - DNA, 25 bp, Homo sapien
cagggtgatggcaaggactattgcg

SEQ ID NO: 1332284 - DNA, 25 bp, Homo sapien
cacacaggtaatgccggcaaacacc

SEQ ID NO: 1332285 - DNA, 25 bp, Homo sapien
tgctctgcagccctgtaatatcccc

SEQ ID NO: 1332286 - DNA, 25 bp, Homo sapien
cagcagcacctaattctccaccggg

SEQ ID NO: 1332287 - DNA, 25 bp, Homo sapien
gggaatgcccccaactccgtgcggc

SEQ ID NO: 1332288 - DNA, 25 bp, Homo sapien
ccccaactccgtgcggcccagagtc

SEQ ID NO: 1332289 - DNA, 25 bp, Homo sapien
ggctcaggactgagatcagggccaa

SEQ ID NO: 1332290 - DNA, 25 bp, Homo sapien
ggactgagatcagggccaaagacaa

SEQ ID NO: 1332291 - DNA, 25 bp, Homo sapien
gaggctgtgggctcaggactgagat

SEQ ID NO: 1332292 - DNA, 25 bp, Homo sapien
gtgtcaatgggaaggtcaagaagaa

SEQ ID NO: 1332293 - DNA, 25 bp, Homo sapien
ccaacctcaaattaataggactgca

SEQ ID NO: 1332294 - DNA, 25 bp, Homo sapien
gcaagctagacaagagggtgattta

SEQ ID NO: 1332295 - DNA, 25 bp, Homo sapien
caaattaataggactgcagaccaac

SEQ ID NO: 1332296 - DNA, 25 bp, Homo sapien
aaaacaagcaataaatgagtatgga

SEQ ID NO: 1332297 - DNA, 25 bp, Homo sapien
aacctccacaccctagattcaagcg

SEQ ID NO: 1332298 - DNA, 25 bp, Homo sapien
atttccttctcttttcaaggtggag

SEQ ID NO: 1332299 - DNA, 25 bp, Homo sapien
ccttctcttttcaaggtggagtctt

SEQ ID NO: 1332300 - DNA, 25 bp, Homo sapien
ctgcaacctccacaccctagattca

SEQ ID NO: 1332301 - DNA, 25 bp, Homo sapien
cacctccacacccagctattttttt

SEQ ID NO: 1332302 - DNA, 25 bp, Homo sapien
ggaattataggcatgcacctccaca

SEQ ID NO: 1332303 - DNA, 25 bp, Homo sapien
agagattctcctgcatcggcctccc

SEQ ID NO: 1332304 - DNA, 25 bp, Homo sapien
tgcaacctccaccttagggggttca

SEQ ID NO: 1332305 - DNA, 25 bp, Homo sapien
ggaatatgggactctgactgcttct

SEQ ID NO: 1332306 - DNA, 25 bp, Homo sapien
ttattgtctgctagggtaaacctcc

SEQ ID NO: 1332307 - DNA, 25 bp, Homo sapien
tggctgctggtactttgggaaccaa

SEQ ID NO: 1332308 - DNA, 25 bp, Homo sapien
gaggtacctggtgccatcagttcct

SEQ ID NO: 1332309 - DNA, 25 bp, Homo sapien
actccatcgctaaagggaccatctg

SEQ ID NO: 1332310 - DNA, 25 bp, Homo sapien
acagcaactgacctgagcggcaccc

SEQ ID NO: 1332311 - DNA, 25 bp, Homo sapien
ctccatcgctaaagggaccatctgc

SEQ ID NO: 1332312 - DNA, 25 bp, Homo sapien
gcaactgacctgagcggcaccctgg

SEQ ID NO: 1332313 - DNA, 25 bp, Homo sapien
taacgagtgtaggacttcctggaga

SEQ ID NO: 1332314 - DNA, 25 bp, Homo sapien
gtgagaggcgatggtagtgggagct

SEQ ID NO: 1332315 - DNA, 25 bp, Homo sapien
gccaggtagtacaggctcaggccat

SEQ ID NO: 1332316 - DNA, 25 bp, Homo sapien
cctggtagcaagacttggtaacgag

SEQ ID NO: 1332317 - DNA, 25 bp, Homo sapien
cggcagcagcgtgtttccaggagcc

SEQ ID NO: 1332318 - DNA, 25 bp, Homo sapien
gcggcagcagcgtgtttccaggagc

SEQ ID NO: 1332319 - DNA, 25 bp, Homo sapien
gctgcggcagcagcgtgtttccagg

SEQ ID NO: 1332320 - DNA, 25 bp, Homo sapien
tgcggcagcagcgtgtttccaggag

SEQ ID NO: 1332321 - DNA, 25 bp, Homo sapien
cacagtggcatatggcagatcctca

SEQ ID NO: 1332322 - DNA, 25 bp, Homo sapien
tgactgcacattacaatcagctggg

SEQ ID NO: 1332323 - DNA, 25 bp, Homo sapien
ttagaaaacctgatgctgtccgggc

SEQ ID NO: 1332324 - DNA, 25 bp, Homo sapien
tccaatgtgcaagggtaagatcctc

SEQ ID NO: 1332325 - DNA, 25 bp, Homo sapien
gaaaaccactattcagagctgccag

SEQ ID NO: 1332326 - DNA, 25 bp, Homo sapien
tcagatatggacatgcagagaccct

SEQ ID NO: 1332327 - DNA, 25 bp, Homo sapien
gaggctgtttagcaggtggaaccac

SEQ ID NO: 1332328 - DNA, 25 bp, Homo sapien
agctcaccatcaacaagaggcagga

SEQ ID NO: 1332329 - DNA, 25 bp, Homo sapien
aaaggcccgtggtcaaactgatacg

SEQ ID NO: 1332330 - DNA, 25 bp, Homo sapien
tgttagaacgaacaccaaggctgca

SEQ ID NO: 1332331 - DNA, 25 bp, Homo sapien
taagccgtcttaacagggccaggtc

SEQ ID NO: 1332332 - DNA, 25 bp, Homo sapien
tcactagtgagttggcggcagtcag

SEQ ID NO: 1332333 - DNA, 25 bp, Homo sapien
cagggccctcttgccagcgattatc

SEQ ID NO: 1332334 - DNA, 25 bp, Homo sapien
tacagctgccctatgagctcggagg

SEQ ID NO: 1332335 - DNA, 25 bp, Homo sapien
cagatgggtcctgtcgtccaggagc

SEQ ID NO: 1332336 - DNA, 25 bp, Homo sapien
acctcaaaatgtgcagggtcctcca

SEQ ID NO: 1332337 - DNA, 25 bp, Homo sapien
ttcatgtaaaactctcggccacgga

SEQ ID NO: 1332338 - DNA, 25 bp, Homo sapien
caagcagggcagttcatttgtgaca

SEQ ID NO: 1332339 - DNA, 25 bp, Homo sapien
catcggcctggaccttgacaaatgg

SEQ ID NO: 1332340 - DNA, 25 bp, Homo sapien
gagcttctccatggcacggacggta

SEQ ID NO: 1332341 - DNA, 25 bp, Homo sapien
ccgcaagaccaccgccgtgccgggc

SEQ ID NO: 1332342 - DNA, 25 bp, Homo sapien
cagcccacgcctcccgcaagaccac

SEQ ID NO: 1332343 - DNA, 25 bp, Homo sapien
ccagcccacgcctcccgcaagacca

SEQ ID NO: 1332344 - DNA, 25 bp, Homo sapien
agaccaccgccgtgccgggccagcg

SEQ ID NO: 1332345 - DNA, 25 bp, Homo sapien
tccaagagtgtaaaattccaagatg

SEQ ID NO: 1332346 - DNA, 25 bp, Homo sapien
taatgagcgaggatatgagcaaagc

SEQ ID NO: 1332347 - DNA, 25 bp, Homo sapien
gattctacgactatgattccaagag

SEQ ID NO: 1332348 - DNA, 25 bp, Homo sapien
cagtggatatgtgagatgcaatgca

SEQ ID NO: 1332349 - DNA, 25 bp, Homo sapien
tctgggtgggcgtttcaaaccgcgc

SEQ ID NO: 1332350 - DNA, 25 bp, Homo sapien
tcataaggatagagtgtggcctacc

SEQ ID NO: 1332351 - DNA, 25 bp, Homo sapien
gccttttgggccaagcggaccaaga

SEQ ID NO: 1332352 - DNA, 25 bp, Homo sapien
ctaccggagtccaaagacaggcact

SEQ ID NO: 1332353 - DNA, 25 bp, Homo sapien
tagaatgagacagcccggcggtccc

SEQ ID NO: 1332354 - DNA, 25 bp, Homo sapien
tccatggtctcgaagagcagccgca

SEQ ID NO: 1332355 - DNA, 25 bp, Homo sapien
ccctagaatgagacagcccggcggt

SEQ ID NO: 1332356 - DNA, 25 bp, Homo sapien
cctcgcgctccatggtctcgaagag

SEQ ID NO: 1332357 - DNA, 25 bp, Homo sapien
cgcgttggcgtcctcgcccttgatg

SEQ ID NO: 1332358 - DNA, 25 bp, Homo sapien
cgtccacgcccatatagtagtagac

SEQ ID NO: 1332359 - DNA, 25 bp, Homo sapien
ttgatgcgcaggcacttgccgcgca

SEQ ID NO: 1332360 - DNA, 25 bp, Homo sapien
tccactgcgcgcttgaagcaggcgg

SEQ ID NO: 1332361 - DNA, 25 bp, Homo sapien
aggtggttcctgtcaggcatgcccc

SEQ ID NO: 1332362 - DNA, 25 bp, Homo sapien
caggtacgccttgaagcctgggcac

SEQ ID NO: 1332363 - DNA, 25 bp, Homo sapien
atcttggcccgcttgaggtcatgca

SEQ ID NO: 1332364 - DNA, 25 bp, Homo sapien
catgcaggtaggctctgatgtggat

SEQ ID NO: 1332365 - DNA, 25 bp, Homo sapien
gaataataaccacatccacgacagt

SEQ ID NO: 1332366 - DNA, 25 bp, Homo sapien
gactcttcggcttgcagtgaagtaa

SEQ ID NO: 1332367 - DNA, 25 bp, Homo sapien
taaactgggagctccgagtcggctt

SEQ ID NO: 1332368 - DNA, 25 bp, Homo sapien
ccaagactgggagtagatttgccac

SEQ ID NO: 1332369 - DNA, 25 bp, Homo sapien
cacccgtgccaatccagaagaggct

SEQ ID NO: 1332370 - DNA, 25 bp, Homo sapien
cactcaaaaaccttacagggctggg

SEQ ID NO: 1332371 - DNA, 25 bp, Homo sapien
gctgaatgactatgcagtggactgc

SEQ ID NO: 1332372 - DNA, 25 bp, Homo sapien
tttgccaaaggtcccgtagcacgtg

SEQ ID NO: 1332373 - DNA, 25 bp, Homo sapien
gcccttgtgcagtacgcctgccagt

SEQ ID NO: 1332374 - DNA, 25 bp, Homo sapien
gagttctggatctcgtaggacatcc

SEQ ID NO: 1332375 - DNA, 25 bp, Homo sapien
gttggttcttggcaatctcaatggc

SEQ ID NO: 1332376 - DNA, 25 bp, Homo sapien
gaagtagaagatttttgccaggcga

SEQ ID NO: 1332377 - DNA, 25 bp, Homo sapien
tacagccgtatcaacatggtgccct

SEQ ID NO: 1332378 - DNA, 25 bp, Homo sapien
taagttgtcacatcacgaagcccca

SEQ ID NO: 1332379 - DNA, 25 bp, Homo sapien
ggaaccccatctttggatacagccg

SEQ ID NO: 1332380 - DNA, 25 bp, Homo sapien
taaacagtgctgaaccacaggaacc

SEQ ID NO: 1332381 - DNA, 25 bp, Homo sapien
gaagcagtctagagggtcggtccct

SEQ ID NO: 1332382 - DNA, 25 bp, Homo sapien
tacccgcagtcatggacgcccatgg

SEQ ID NO: 1332383 - DNA, 25 bp, Homo sapien
agcagcatcccgaggtagcaccagg

SEQ ID NO: 1332384 - DNA, 25 bp, Homo sapien
gtcggtccctgagtacccgcagtca

SEQ ID NO: 1332385 - DNA, 25 bp, Homo sapien
caggtcatgagctgcagacgggcaa

SEQ ID NO: 1332386 - DNA, 25 bp, Homo sapien
tattctgtgctcaatgtgtcatcgg

SEQ ID NO: 1332387 - DNA, 25 bp, Homo sapien
agtgggatcactgagggcaacacag

SEQ ID NO: 1332388 - DNA, 25 bp, Homo sapien
taatttcaggtacgtaggtctcttc

SEQ ID NO: 1332389 - DNA, 25 bp, Homo sapien
ccagcgtgcggttgaaggcaggcag

SEQ ID NO: 1332390 - DNA, 25 bp, Homo sapien
acttgccggagtagggccagcgtgc

SEQ ID NO: 1332391 - DNA, 25 bp, Homo sapien
tcctcggacttcagcacttgccgga

SEQ ID NO: 1332392 - DNA, 25 bp, Homo sapien
gggtcctcggacttcagcacttgcc

SEQ ID NO: 1332393 - DNA, 25 bp, Homo sapien
gtggccgagaaggagatgtggttgg

SEQ ID NO: 1332394 - DNA, 25 bp, Homo sapien
ctgtggccgagaaggagatgtggtt

SEQ ID NO: 1332395 - DNA, 25 bp, Homo sapien
tgtggccgagaaggagatgtggttg

SEQ ID NO: 1332396 - DNA, 25 bp, Homo sapien
tgaaataccagccccttttctcctc

SEQ ID NO: 1332397 - DNA, 25 bp, Homo sapien
aataccagccccttttctcctccat

SEQ ID NO: 1332398 - DNA, 25 bp, Homo sapien
ctttctctcattcgatccttatcac

SEQ ID NO: 1332399 - DNA, 25 bp, Homo sapien
tccttatcacaatcccgtgggctgg

SEQ ID NO: 1332400 - DNA, 25 bp, Homo sapien
ccttatcacaatcccgtgggctggg

SEQ ID NO: 1332401 - DNA, 25 bp, Homo sapien
tctctcattcgatccttatcacaat

SEQ ID NO: 1332402 - DNA, 25 bp, Homo sapien
ttagcagatgagcagctgttcacag

SEQ ID NO: 1332403 - DNA, 25 bp, Homo sapien
cagctgttcacagttcttcagcagc

SEQ ID NO: 1332404 - DNA, 25 bp, Homo sapien
ttcagcagctctttgtcctttgagg

SEQ ID NO: 1332405 - DNA, 25 bp, Homo sapien
tgtcctttgaggtccagaggctctt

SEQ ID NO: 1332406 - DNA, 25 bp, Homo sapien
acatcaatcttggttgtgccttcca

SEQ ID NO: 1332407 - DNA, 25 bp, Homo sapien
ctgctgtcatgaccgcattcaacac

SEQ ID NO: 1332408 - DNA, 25 bp, Homo sapien
tcttgttgacctcatgcaatcagtg

SEQ ID NO: 1332409 - DNA, 25 bp, Homo sapien
gccttccactgaaggtagcctggca

SEQ ID NO: 1332410 - DNA, 25 bp, Homo sapien
tcctccaggtagaatgcgaaagcgc

SEQ ID NO: 1332411 - DNA, 25 bp, Homo sapien
tagcctagcgccttgtcgtagagcg

SEQ ID NO: 1332412 - DNA, 25 bp, Homo sapien
gagcgcggctcgaagttcaactgca

SEQ ID NO: 1332413 - DNA, 25 bp, Homo sapien
tacacgtgtgccagattggcccagg

SEQ ID NO: 1332414 - DNA, 25 bp, Homo sapien
tcaggactggccgttctagctgcgg

SEQ ID NO: 1332415 - DNA, 25 bp, Homo sapien
tagacgctgacattgcacaaccagg

SEQ ID NO: 1332416 - DNA, 25 bp, Homo sapien
caaacctcggtgcaaggcaaaaggc

SEQ ID NO: 1332417 - DNA, 25 bp, Homo sapien
caagtaggtagacctggaaccccag

SEQ ID NO: 1332418 - DNA, 25 bp, Homo sapien
gagaatcagacagcagtctggtcca

SEQ ID NO: 1332419 - DNA, 25 bp, Homo sapien
taatgtttgtacaggaggtttcacc

SEQ ID NO: 1332420 - DNA, 25 bp, Homo sapien
aaagggtagggattatgctcagtgc

SEQ ID NO: 1332421 - DNA, 25 bp, Homo sapien
ccaaagtcattgttagtaaacggca

SEQ ID NO: 1332422 - DNA, 25 bp, Homo sapien
tgggctggaatatccttagcctggc

SEQ ID NO: 1332423 - DNA, 25 bp, Homo sapien
tcagccaggtgccataagcgtgtgg

SEQ ID NO: 1332424 - DNA, 25 bp, Homo sapien
gaagaacgaagccaggtgaatcagg

SEQ ID NO: 1332425 - DNA, 25 bp, Homo sapien
gcatcaggtacatgaaggagggctc

SEQ ID NO: 1332426 - DNA, 25 bp, Homo sapien
cttgcttcttctcataggtcttgat

SEQ ID NO: 1332427 - DNA, 25 bp, Homo sapien
gatgccaggttcatggcttgaggtt

SEQ ID NO: 1332428 - DNA, 25 bp, Homo sapien
caggtagtgaacagattgttgacac

SEQ ID NO: 1332429 - DNA, 25 bp, Homo sapien
gcttgaggtttgtaaggcagctgct

SEQ ID NO: 1332430 - DNA, 25 bp, Homo sapien
ttactggagcaacataaccggaggg

SEQ ID NO: 1332431 - DNA, 25 bp, Homo sapien
cagatgtgacgctgaacgggaagca

SEQ ID NO: 1332432 - DNA, 25 bp, Homo sapien
tgtgaccagtgctcaactcagatga

SEQ ID NO: 1332433 - DNA, 25 bp, Homo sapien
ttatatgactaagggcgacagaggc

SEQ ID NO: 1332434 - DNA, 25 bp, Homo sapien
gtgtctgtctctccaggcgggctcc

SEQ ID NO: 1332435 - DNA, 25 bp, Homo sapien
tctgtctctccaggcgggctccagc

SEQ ID NO: 1332436 - DNA, 25 bp, Homo sapien
tgtctgtctctccaggcgggctcca

SEQ ID NO: 1332437 - DNA, 25 bp, Homo sapien
acgtgtctgtctctccaggcgggct

SEQ ID NO: 1332438 - DNA, 25 bp, Homo sapien
gcttctctcgcagcttgtggtacaa

SEQ ID NO: 1332439 - DNA, 25 bp, Homo sapien
tgtggtacaaggagccatcaaacat

SEQ ID NO: 1332440 - DNA, 25 bp, Homo sapien
cccggttcatgtagcagtcggcata

SEQ ID NO: 1332441 - DNA, 25 bp, Homo sapien
tgcagatcttgtcgtacacctcggg

SEQ ID NO: 1332442 - DNA, 25 bp, Homo sapien
atgcacgctgcggacaaacttctcc

SEQ ID NO: 1332443 - DNA, 25 bp, Homo sapien
tcaaagtgtttcacacgcggctccc

SEQ ID NO: 1332444 - DNA, 25 bp, Homo sapien
atatgctccaatgtcgatgtagagc

SEQ ID NO: 1332445 - DNA, 25 bp, Homo sapien
cgatgtagagctctgcctcatttcc

SEQ ID NO: 1332446 - DNA, 25 bp, Homo sapien
tgggcaggatgaacggacacagcca

SEQ ID NO: 1332447 - DNA, 25 bp, Homo sapien
ggcaggatgaacggacacagccaga

SEQ ID NO: 1332448 - DNA, 25 bp, Homo sapien
ctgggcaggatgaacggacacagcc

SEQ ID NO: 1332449 - DNA, 25 bp, Homo sapien
caggatgaacggacacagccagatg

SEQ ID NO: 1332450 - DNA, 25 bp, Homo sapien
gcaccacgtggtgctgctcgtacag

SEQ ID NO: 1332451 - DNA, 25 bp, Homo sapien
tccagccaaagaggtagcggaagat

SEQ ID NO: 1332452 - DNA, 25 bp, Homo sapien
tacagcttgcgcagggtctcaccct

SEQ ID NO: 1332453 - DNA, 25 bp, Homo sapien
gatgtcgttttggaaggtgtgcagg

SEQ ID NO: 1332454 - DNA, 25 bp, Homo sapien
tccttcagaaggaaacgactgtgtt

SEQ ID NO: 1332455 - DNA, 25 bp, Homo sapien
tcaccgtggctagaggctaaccctt

SEQ ID NO: 1332456 - DNA, 25 bp, Homo sapien
cctcaagggcggaacaggtctgtgt

SEQ ID NO: 1332457 - DNA, 25 bp, Homo sapien
tacagtgttaactgtccgggctccc

SEQ ID NO: 1332458 - DNA, 25 bp, Homo sapien
tggtagtagtgtctcaagggaatgt

SEQ ID NO: 1332459 - DNA, 25 bp, Homo sapien
gaatgtactccaggccctctcggtt

SEQ ID NO: 1332460 - DNA, 25 bp, Homo sapien
gaaccacggcttgtagtaattgcca

SEQ ID NO: 1332461 - DNA, 25 bp, Homo sapien
tgtcttcagatagttctccacatgc

SEQ ID NO: 1332462 - DNA, 25 bp, Homo sapien
agagcagcccttccacgaagtggtt

SEQ ID NO: 1332463 - DNA, 25 bp, Homo sapien
caggaccagggtacggcatagaaca

SEQ ID NO: 1332464 - DNA, 25 bp, Homo sapien
cagcttgacgtacttcttggcaggg

SEQ ID NO: 1332465 - DNA, 25 bp, Homo sapien
gtcataatgacagcctcatccaggg

SEQ ID NO: 1332466 - DNA, 25 bp, Homo sapien
ggagtgcatcgcacaaagctgccat

SEQ ID NO: 1332467 - DNA, 25 bp, Homo sapien
ccaggaccagctcgtaagcagtgca

SEQ ID NO: 1332468 - DNA, 25 bp, Homo sapien
tgtgttggaacaggccgtacttgtg

SEQ ID NO: 1332469 - DNA, 25 bp, Homo sapien
cttgtgggatgatgactcgatgcct

SEQ ID NO: 1332470 - DNA, 25 bp, Homo sapien
ctgcagagacatcacacacagtgtc

SEQ ID NO: 1332471 - DNA, 25 bp, Homo sapien
tgcagagacatcacacacagtgtca

SEQ ID NO: 1332472 - DNA, 25 bp, Homo sapien
tcacacacagtgtcagcagggagag

SEQ ID NO: 1332473 - DNA, 25 bp, Homo sapien
gacatcacacacagtgtcagcaggg

SEQ ID NO: 1332474 - DNA, 25 bp, Homo sapien
gagtccagccaatggaggtcagcag

SEQ ID NO: 1332475 - DNA, 25 bp, Homo sapien
gaggtcatcaagctcaggcaacacg

SEQ ID NO: 1332476 - DNA, 25 bp, Homo sapien
gcaacacggggagagtccagccaat

SEQ ID NO: 1332477 - DNA, 25 bp, Homo sapien
ggtcatcaagctcaggcaacacggg

SEQ ID NO: 1332478 - DNA, 25 bp, Homo sapien
gcgccccgtgcacatgaaggtcttg

SEQ ID NO: 1332479 - DNA, 25 bp, Homo sapien
tacttcccgacacgtagtgagacag

SEQ ID NO: 1332480 - DNA, 25 bp, Homo sapien
tcttggtgtccacttccagaatgtc

SEQ ID NO: 1332481 - DNA, 25 bp, Homo sapien
atgtccatcaggttgatcatgatgt

SEQ ID NO: 1332482 - DNA, 25 bp, Homo sapien
agtgcttcgcacctccccctcttcc

SEQ ID NO: 1332483 - DNA, 25 bp, Homo sapien
ctccctccaggtacccgcatatgcc

SEQ ID NO: 1332484 - DNA, 25 bp, Homo sapien
ctgagtgcttcgcacctccccctct

SEQ ID NO: 1332485 - DNA, 25 bp, Homo sapien
catctccctccaggtacccgcatat

SEQ ID NO: 1332486 - DNA, 25 bp, Homo sapien
tatcgaagataagcgagagcggcag

SEQ ID NO: 1332487 - DNA, 25 bp, Homo sapien
cccaggcgcgcacgtagtagtagat

SEQ ID NO: 1332488 - DNA, 25 bp, Homo sapien
gagcgctgctgagcttgaacaccac

SEQ ID NO: 1332489 - DNA, 25 bp, Homo sapien
gtggatgagcacgaactccagcccc

SEQ ID NO: 1332490 - DNA, 25 bp, Homo sapien
gggttcgcgcctcctgtcactgccg

SEQ ID NO: 1332491 - DNA, 25 bp, Homo sapien
ctggcccgctctgcgcctgtagccc

SEQ ID NO: 1332492 - DNA, 25 bp, Homo sapien
gcgcggtaagcgctgcgggttcgcg

SEQ ID NO: 1332493 - DNA, 25 bp, Homo sapien
cctgtagcccacagcccggggagcc

SEQ ID NO: 1332494 - DNA, 25 bp, Homo sapien
gatacagaatagttccaccacccca

SEQ ID NO: 1332495 - DNA, 25 bp, Homo sapien
ccaggtaaggaaagcagtcacttga

SEQ ID NO: 1332496 - DNA, 25 bp, Homo sapien
ccttttatagtttgaccacgtagca

SEQ ID NO: 1332497 - DNA, 25 bp, Homo sapien
tgatggagcatgcagacagtcagaa

SEQ ID NO: 1332498 - DNA, 25 bp, Homo sapien
ctgcggaatgagtgaaagctgaagt

SEQ ID NO: 1332499 - DNA, 25 bp, Homo sapien
tagtggctgcggaatgagtgaaagc

SEQ ID NO: 1332500 - DNA, 25 bp, Homo sapien
gcggaatgagtgaaagctgaagttc

SEQ ID NO: 1332501 - DNA, 25 bp, Homo sapien
ctggcatagtggctgcggaatgagt

SEQ ID NO: 1332502 - DNA, 25 bp, Homo sapien
caaacgtggggctcaaacccatgac

SEQ ID NO: 1332503 - DNA, 25 bp, Homo sapien
ccaaacgtggggctcaaacccatga

SEQ ID NO: 1332504 - DNA, 25 bp, Homo sapien
gcaccaaacgtggggctcaaaccca

SEQ ID NO: 1332505 - DNA, 25 bp, Homo sapien
tgaccctgagattaagagtctcatg

SEQ ID NO: 1332506 - DNA, 25 bp, Homo sapien
tataacatgcaattaagactgctag

SEQ ID NO: 1332507 - DNA, 25 bp, Homo sapien
gggttgccagaatgatgtccagtct

SEQ ID NO: 1332508 - DNA, 25 bp, Homo sapien
ctttttagatggatcagaggcccct

SEQ ID NO: 1332509 - DNA, 25 bp, Homo sapien
taaaattgctaagagccagcattat

SEQ ID NO: 1332510 - DNA, 25 bp, Homo sapien
gtagggtcgctcagccctggcgtcc

SEQ ID NO: 1332511 - DNA, 25 bp, Homo sapien
tggtagggtcgctcagccctggcgt

SEQ ID NO: 1332512 - DNA, 25 bp, Homo sapien
agggtcgctcagccctggcgtcctc

SEQ ID NO: 1332513 - DNA, 25 bp, Homo sapien
tagggtcgctcagccctggcgtcct

SEQ ID NO: 1332514 - DNA, 25 bp, Homo sapien
ccagagacaaaaatgccgtgccttc

SEQ ID NO: 1332515 - DNA, 25 bp, Homo sapien
agccaagtggatcgagggatgccct

SEQ ID NO: 1332516 - DNA, 25 bp, Homo sapien
tttctgcggagacgacaccgagtgc

SEQ ID NO: 1332517 - DNA, 25 bp, Homo sapien
taaaggctcctagcaggtcctgaat

SEQ ID NO: 1332518 - DNA, 25 bp, Homo sapien
caaaatgttaggcccccactaatca

SEQ ID NO: 1332519 - DNA, 25 bp, Homo sapien
gcccccactaatcacatccatgaga

SEQ ID NO: 1332520 - DNA, 25 bp, Homo sapien
atgttaggcccccactaatcacatc

SEQ ID NO: 1332521 - DNA, 25 bp, Homo sapien
taggcccccactaatcacatccatg

SEQ ID NO: 1332522 - DNA, 25 bp, Homo sapien
gacctcagagcactgatgcaaatcg

SEQ ID NO: 1332523 - DNA, 25 bp, Homo sapien
tcacaccgtgaatttgtagcagagc

SEQ ID NO: 1332524 - DNA, 25 bp, Homo sapien
tgcaaatcgggtgcatgcccttggg

SEQ ID NO: 1332525 - DNA, 25 bp, Homo sapien
ttggactttgcatctcctcagtgag

SEQ ID NO: 1332526 - DNA, 25 bp, Homo sapien
ggcgaaaatctggactagcaaatag

SEQ ID NO: 1332527 - DNA, 25 bp, Homo sapien
tgtgaccagcgacacgatctatgct

SEQ ID NO: 1332528 - DNA, 25 bp, Homo sapien
tggagaccatcaacctaagttcagc

SEQ ID NO: 1332529 - DNA, 25 bp, Homo sapien
tgtgagcaacgctggccactaggaa

SEQ ID NO: 1332530 - DNA, 25 bp, Homo sapien
ttaagatcggcctcactaagggagc

SEQ ID NO: 1332531 - DNA, 25 bp, Homo sapien
cacacacctcgatgttagcagggaa

SEQ ID NO: 1332532 - DNA, 25 bp, Homo sapien
tgtcagcaatcaagtggttaccagc

SEQ ID NO: 1332533 - DNA, 25 bp, Homo sapien
tgttccaagctcagaaggtaactgc

SEQ ID NO: 1332534 - DNA, 25 bp, Homo sapien
gaaatatgtgggtgtaaacctctcc

SEQ ID NO: 1332535 - DNA, 25 bp, Homo sapien
caaaacagggccgaaaatgtgagca

SEQ ID NO: 1332536 - DNA, 25 bp, Homo sapien
ggcaggacctgtaactaaaggcaaa

SEQ ID NO: 1332537 - DNA, 25 bp, Homo sapien
ggcacttcctaaggctccctagttc

SEQ ID NO: 1332538 - DNA, 25 bp, Homo sapien
caataactatgaaactcacaagcag

SEQ ID NO: 1332539 - DNA, 25 bp, Homo sapien
cacaagcagtgtgtaccaactcaaa

SEQ ID NO: 1332540 - DNA, 25 bp, Homo sapien
ttcatatacaaccaataccaagggt

SEQ ID NO: 1332541 - DNA, 25 bp, Homo sapien
tttaagcaaaagcaaacgattgcag

SEQ ID NO: 1332542 - DNA, 25 bp, Homo sapien
aaagataattctgtgaagttaaact

SEQ ID NO: 1332543 - DNA, 25 bp, Homo sapien
gtttattcaatatgtctccaagcat

SEQ ID NO: 1332544 - DNA, 25 bp, Homo sapien
cagtttattcaatatgtctccaagc

SEQ ID NO: 1332545 - DNA, 25 bp, Homo sapien
aagataattctgtgaagttaaactc

SEQ ID NO: 1332546 - DNA, 25 bp, Homo sapien
tcaagatccaagcttatgcataggg

SEQ ID NO: 1332547 - DNA, 25 bp, Homo sapien
tgatcctggtaacctttcatcaaga

SEQ ID NO: 1332548 - DNA, 25 bp, Homo sapien
tcttcaagagcttagtatttcccaa

SEQ ID NO: 1332549 - DNA, 25 bp, Homo sapien
ggttctcatctagacccatctgaaa

SEQ ID NO: 1332550 - DNA, 25 bp, Homo sapien
gcaacagctttatgctcactcttgt

SEQ ID NO: 1332551 - DNA, 25 bp, Homo sapien
cccacatatctaaaagcagcttgct

SEQ ID NO: 1332552 - DNA, 25 bp, Homo sapien
tgttcgtgtaacaaaaaagtctgcc

SEQ ID NO: 1332553 - DNA, 25 bp, Homo sapien
tttgtagcatcgtagagaaagcaac

SEQ ID NO: 1332554 - DNA, 25 bp, Homo sapien
tgagaaatacacgatccgcccaagt

SEQ ID NO: 1332555 - DNA, 25 bp, Homo sapien
gattctgattccaagaaggtgctga

SEQ ID NO: 1332556 - DNA, 25 bp, Homo sapien
gtattgtgtcttgactcctctcagg

SEQ ID NO: 1332557 - DNA, 25 bp, Homo sapien
tcttccaaagggttcgagattctga

SEQ ID NO: 1332558 - DNA, 25 bp, Homo sapien
caccaatcatcatgggagattctga

SEQ ID NO: 1332559 - DNA, 25 bp, Homo sapien
tcaactcaccaatcatcatgggaga

SEQ ID NO: 1332560 - DNA, 25 bp, Homo sapien
caatcatcatgggagattctgaacc

SEQ ID NO: 1332561 - DNA, 25 bp, Homo sapien
acttctcaactcaccaatcatcatg

SEQ ID NO: 1332562 - DNA, 25 bp, Homo sapien
agagaaaaggttttctatgctgact

SEQ ID NO: 1332563 - DNA, 25 bp, Homo sapien
tagagaaaaggttttctatgctgac

SEQ ID NO: 1332564 - DNA, 25 bp, Homo sapien
ttagagaaaaggttttctatgctga

SEQ ID NO: 1332565 - DNA, 25 bp, Homo sapien
gttagagaaaaggttttctatgctg

SEQ ID NO: 1332566 - DNA, 25 bp, Homo sapien
ggacagtctctctaaagtgacaacc

SEQ ID NO: 1332567 - DNA, 25 bp, Homo sapien
agtgacaacctaagctgagtgagag

SEQ ID NO: 1332568 - DNA, 25 bp, Homo sapien
tctgaatactcaccgtgtgccatgg

SEQ ID NO: 1332569 - DNA, 25 bp, Homo sapien
ttggcttacacacttggcgaatcgt

SEQ ID NO: 1332570 - DNA, 25 bp, Homo sapien
ctggtgagagcaaacgagggacttt

SEQ ID NO: 1332571 - DNA, 25 bp, Homo sapien
ctataatgattggtattaaagctgt

SEQ ID NO: 1332572 - DNA, 25 bp, Homo sapien
tacttcaagagcacgggagcttttc

SEQ ID NO: 1332573 - DNA, 25 bp, Homo sapien
aattttcttggactcccctggcaag

SEQ ID NO: 1332574 - DNA, 25 bp, Homo sapien
cacacggttagtgcatatgctgagc

SEQ ID NO: 1332575 - DNA, 25 bp, Homo sapien
aagtgaacaagctggaacgaatccc

SEQ ID NO: 1332576 - DNA, 25 bp, Homo sapien
tggcttcatcgggactacctgcagg

SEQ ID NO: 1332577 - DNA, 25 bp, Homo sapien
tactcagccctgtaaacacacggtt

SEQ ID NO: 1332578 - DNA, 25 bp, Homo sapien
tgctgtagatgcctgtctccgttct

SEQ ID NO: 1332579 - DNA, 25 bp, Homo sapien
ttcaacaaagctgtggcatacgcta

SEQ ID NO: 1332580 - DNA, 25 bp, Homo sapien
aagctgtggcatacgctaacgtgtc

SEQ ID NO: 1332581 - DNA, 25 bp, Homo sapien
ctcattggcaggactactctccgac

SEQ ID NO: 1332582 - DNA, 25 bp, Homo sapien
ttcatctgaccttcagtgggaccgg

SEQ ID NO: 1332583 - DNA, 25 bp, Homo sapien
accgccagggaagactacctttcat

SEQ ID NO: 1332584 - DNA, 25 bp, Homo sapien
cacaagacgacaaagttagggccca

SEQ ID NO: 1332585 - DNA, 25 bp, Homo sapien
accttcagtgggaccggaggcctga

SEQ ID NO: 1332586 - DNA, 25 bp, Homo sapien
tgatttagaccacgcaaaaacaaga

SEQ ID NO: 1332587 - DNA, 25 bp, Homo sapien
tcttctcagaggttgcagtttctga

SEQ ID NO: 1332588 - DNA, 25 bp, Homo sapien
cacactgaaaatcctccataagtga

SEQ ID NO: 1332589 - DNA, 25 bp, Homo sapien
gcacaaatttgtgtaagtgtacacc

SEQ ID NO: 1332590 - DNA, 25 bp, Homo sapien
tgatgtttcattagagacattactc

SEQ ID NO: 1332591 - DNA, 25 bp, Homo sapien
gctgaaatggttcgctgaaaggttt

SEQ ID NO: 1332592 - DNA, 25 bp, Homo sapien
tgtttcattagagacattactctgt

SEQ ID NO: 1332593 - DNA, 25 bp, Homo sapien
ctgagctgaaatggttcgctgaaag

SEQ ID NO: 1332594 - DNA, 25 bp, Homo sapien
aagcatcccaagtagggtacaagtc

SEQ ID NO: 1332595 - DNA, 25 bp, Homo sapien
gatattgagtcttaaaagcatccca

SEQ ID NO: 1332596 - DNA, 25 bp, Homo sapien
tgccatcagaggtgacaaataagcc

SEQ ID NO: 1332597 - DNA, 25 bp, Homo sapien
taaagcgattcaagacctcagtcaa

SEQ ID NO: 1332598 - DNA, 25 bp, Homo sapien
gaagtactccttagctgcaggacac

SEQ ID NO: 1332599 - DNA, 25 bp, Homo sapien
caaggttcttgacacggtgcctggg

SEQ ID NO: 1332600 - DNA, 25 bp, Homo sapien
tgggttcacaagtgctcaggagcta

SEQ ID NO: 1332601 - DNA, 25 bp, Homo sapien
gagtcagtcttcaataggtccagag

SEQ ID NO: 1332602 - DNA, 25 bp, Homo sapien
tacaggtgacatgatttgaaaggct

SEQ ID NO: 1332603 - DNA, 25 bp, Homo sapien
gacacactggtagcagcgactactg

SEQ ID NO: 1332604 - DNA, 25 bp, Homo sapien
gaaatttgacacactggtagcagcg

SEQ ID NO: 1332605 - DNA, 25 bp, Homo sapien
gcagcgactactgtccacatgatta

SEQ ID NO: 1332606 - DNA, 25 bp, Homo sapien
actggtagcagcgactactgtccac

SEQ ID NO: 1332607 - DNA, 25 bp, Homo sapien
attcacatttcatgagcctgacaac

SEQ ID NO: 1332608 - DNA, 25 bp, Homo sapien
gagcctgacaacatcctgcgtctca

SEQ ID NO: 1332609 - DNA, 25 bp, Homo sapien
gcctgacaacatcctgcgtctcagg

SEQ ID NO: 1332610 - DNA, 25 bp, Homo sapien
cattcacatttcatgagcctgacaa

SEQ ID NO: 1332611 - DNA, 25 bp, Homo sapien
agaggagaaatgtgtagggtgagaa

SEQ ID NO: 1332612 - DNA, 25 bp, Homo sapien
gaggagaaatgtgtagggtgagaag

SEQ ID NO: 1332613 - DNA, 25 bp, Homo sapien
gagaaatgtgtagggtgagaagatc

SEQ ID NO: 1332614 - DNA, 25 bp, Homo sapien
aaatgtgtagggtgagaagatccct

SEQ ID NO: 1332615 - DNA, 25 bp, Homo sapien
aatgagggagcccagtggccctgac

SEQ ID NO: 1332616 - DNA, 25 bp, Homo sapien
gaatgagggagcccagtggccctga

SEQ ID NO: 1332617 - DNA, 25 bp, Homo sapien
agaatgagggagcccagtggccctg

SEQ ID NO: 1332618 - DNA, 25 bp, Homo sapien
cagaatgagggagcccagtggccct

SEQ ID NO: 1332619 - DNA, 25 bp, Homo sapien
ggcagaactggccagaacaatagat

SEQ ID NO: 1332620 - DNA, 25 bp, Homo sapien
gacttctactgtatcagtcactgta

SEQ ID NO: 1332621 - DNA, 25 bp, Homo sapien
gtagatcccaccgagagtagcagga

SEQ ID NO: 1332622 - DNA, 25 bp, Homo sapien
ggccagaacaatagattatccacat

SEQ ID NO: 1332623 - DNA, 25 bp, Homo sapien
atagacatttgtgcataagaccagg

SEQ ID NO: 1332624 - DNA, 25 bp, Homo sapien
tagacatttgtgcataagaccaggc

SEQ ID NO: 1332625 - DNA, 25 bp, Homo sapien
tatagacatttgtgcataagaccag

SEQ ID NO: 1332626 - DNA, 25 bp, Homo sapien
aaacacaaatttgactcgctctact

SEQ ID NO: 1332627 - DNA, 25 bp, Homo sapien
cgctctacttgtataggatcttcaa

SEQ ID NO: 1332628 - DNA, 25 bp, Homo sapien
aatttgactcgctctacttgtatag

SEQ ID NO: 1332629 - DNA, 25 bp, Homo sapien
gactcgctctacttgtataggatct

SEQ ID NO: 1332630 - DNA, 25 bp, Homo sapien
ttcatgaagtagttggaacgtattc

SEQ ID NO: 1332631 - DNA, 25 bp, Homo sapien
ggaacgtattctttaactcatgagg

SEQ ID NO: 1332632 - DNA, 25 bp, Homo sapien
tcatgaggtggagccgtttctagtt

SEQ ID NO: 1332633 - DNA, 25 bp, Homo sapien
tctttaactcatgaggtggagccgt

SEQ ID NO: 1332634 - DNA, 25 bp, Homo sapien
tgtcagctcccgcaaagcaaacatt

SEQ ID NO: 1332635 - DNA, 25 bp, Homo sapien
gcagtacactaccatctcaatgagt

SEQ ID NO: 1332636 - DNA, 25 bp, Homo sapien
ctcattacagaaacagcagtacact

SEQ ID NO: 1332637 - DNA, 25 bp, Homo sapien
atctcaatgagtgccaagagcgagc

SEQ ID NO: 1332638 - DNA, 25 bp, Homo sapien
agggcttgagggagcaatgctaatg

SEQ ID NO: 1332639 - DNA, 25 bp, Homo sapien
tacctcctcatggaggggcaacaga

SEQ ID NO: 1332640 - DNA, 25 bp, Homo sapien
ggtcgttgcttaaatatgccaggag

SEQ ID NO: 1332641 - DNA, 25 bp, Homo sapien
agcaatgctaatgggtggtcgttgc

SEQ ID NO: 1332642 - DNA, 25 bp, Homo sapien
gattcccaaattctcgtgcttgtgc

SEQ ID NO: 1332643 - DNA, 25 bp, Homo sapien
gccactgtattgtgaagattcccaa

SEQ ID NO: 1332644 - DNA, 25 bp, Homo sapien
gcaaaacaagtaacgccactgtatt

SEQ ID NO: 1332645 - DNA, 25 bp, Homo sapien
gcttgtgctgaactccatcgacgta

SEQ ID NO: 1332646 - DNA, 25 bp, Homo sapien
gccgactggcccctaggaggaagct

SEQ ID NO: 1332647 - DNA, 25 bp, Homo sapien
tggcccctaggaggaagctgatcat

SEQ ID NO: 1332648 - DNA, 25 bp, Homo sapien
tgttttgccgactggcccctaggag

SEQ ID NO: 1332649 - DNA, 25 bp, Homo sapien
gattgttttgccgactggcccctag

SEQ ID NO: 1332650 - DNA, 25 bp, Homo sapien
tgaatgcctcagaagaagatctcca

SEQ ID NO: 1332651 - DNA, 25 bp, Homo sapien
aagaagatctccagccctaattcct

SEQ ID NO: 1332652 - DNA, 25 bp, Homo sapien
gctgaatgcctcagaagaagatctc

SEQ ID NO: 1332653 - DNA, 25 bp, Homo sapien
gtgccgcagagctgaatgcctcaga

SEQ ID NO: 1332654 - DNA, 25 bp, Homo sapien
tttgtacaaaagtgttgaacaggaa

SEQ ID NO: 1332655 - DNA, 25 bp, Homo sapien
aacagagcaagtagtacctccagta

SEQ ID NO: 1332656 - DNA, 25 bp, Homo sapien
agcaagtagtacctccagtaactga

SEQ ID NO: 1332657 - DNA, 25 bp, Homo sapien
cttttgtacaaaagtgttgaacagg

SEQ ID NO: 1332658 - DNA, 25 bp, Homo sapien
tggccacagcaactcgtacttctct

SEQ ID NO: 1332659 - DNA, 25 bp, Homo sapien
aaggcactgtctagggttttctcca

SEQ ID NO: 1332660 - DNA, 25 bp, Homo sapien
agcaactcgtacttctctcacattg

SEQ ID NO: 1332661 - DNA, 25 bp, Homo sapien
cacattgcactccagtaagaaaatc

SEQ ID NO: 1332662 - DNA, 25 bp, Homo sapien
tattcctgctaactgtaatgccaca

SEQ ID NO: 1332663 - DNA, 25 bp, Homo sapien
gcttatgggccaagtggagctttcc

SEQ ID NO: 1332664 - DNA, 25 bp, Homo sapien
ccataatgttcagctctagaggtac

SEQ ID NO: 1332665 - DNA, 25 bp, Homo sapien
catgataggtcccatctaatagcca

SEQ ID NO: 1332666 - DNA, 25 bp, Homo sapien
taatgcaaactctaaagggacaggc

SEQ ID NO: 1332667 - DNA, 25 bp, Homo sapien
gaaaaaagggagcagactagcaggc

SEQ ID NO: 1332668 - DNA, 25 bp, Homo sapien
cacgctgatgtctgaaggagaagcc

SEQ ID NO: 1332669 - DNA, 25 bp, Homo sapien
gcaacatccgttagactgggtgact

SEQ ID NO: 1332670 - DNA, 25 bp, Homo sapien
gttgaacttccaaggacaagagaag

SEQ ID NO: 1332671 - DNA, 25 bp, Homo sapien
ctttctcagtgaagtcgagcggtaa

SEQ ID NO: 1332672 - DNA, 25 bp, Homo sapien
cattcatagtgattggagcattctg

SEQ ID NO: 1332673 - DNA, 25 bp, Homo sapien
tgctggaaccccacataaatgttga

SEQ ID NO: 1332674 - DNA, 25 bp, Homo sapien
ttcaatggtagcaatccattcttca

SEQ ID NO: 1332675 - DNA, 25 bp, Homo sapien
aactttttgaaagcaatgcttcaat

SEQ ID NO: 1332676 - DNA, 25 bp, Homo sapien
tttgaaagcaatgcttcaatggtag

SEQ ID NO: 1332677 - DNA, 25 bp, Homo sapien
taaaatattcaactaaccactgaca

SEQ ID NO: 1332678 - DNA, 25 bp, Homo sapien
cttccttctgcatcttcatcaaaca

SEQ ID NO: 1332679 - DNA, 25 bp, Homo sapien
ttccttctgcatcttcatcaaacaa

SEQ ID NO: 1332680 - DNA, 25 bp, Homo sapien
tctttgtccgtagataagtttgaaa

SEQ ID NO: 1332681 - DNA, 25 bp, Homo sapien
gaatagcaagctgtaagctcacctt

SEQ ID NO: 1332682 - DNA, 25 bp, Homo sapien
ctttgccatgcaaggataatatgga

SEQ ID NO: 1332683 - DNA, 25 bp, Homo sapien
aaaaaggaattgaatagcaagctgt

SEQ ID NO: 1332684 - DNA, 25 bp, Homo sapien
aaacttgaggttctcatctctcacc

SEQ ID NO: 1332685 - DNA, 25 bp, Homo sapien
aataatcactactgtatacatctct

SEQ ID NO: 1332686 - DNA, 25 bp, Homo sapien
taaacttgaggttctcatctctcac

SEQ ID NO: 1332687 - DNA, 25 bp, Homo sapien
tcactactgtatacatctctattct

SEQ ID NO: 1332688 - DNA, 25 bp, Homo sapien
tgtgcctgccaatcatgagtgtgta

SEQ ID NO: 1332689 - DNA, 25 bp, Homo sapien
ctgtgtcgtggcataaaaggttcat

SEQ ID NO: 1332690 - DNA, 25 bp, Homo sapien
tgtaagacgatgtagccccagtggt

SEQ ID NO: 1332691 - DNA, 25 bp, Homo sapien
cagtggtacaactaatccagcagaa

SEQ ID NO: 1332692 - DNA, 25 bp, Homo sapien
aatagacagccggtcattgttcggc

SEQ ID NO: 1332693 - DNA, 25 bp, Homo sapien
ggtaagaatagacagccggtcattg

SEQ ID NO: 1332694 - DNA, 25 bp, Homo sapien
ttctccacaaacagtcctttcttct

SEQ ID NO: 1332695 - DNA, 25 bp, Homo sapien
ttttaaccagcttggtaagaataga

SEQ ID NO: 1332696 - DNA, 25 bp, Homo sapien
ctgaggtgaaatttctggtgaagat

SEQ ID NO: 1332697 - DNA, 25 bp, Homo sapien
gatgactgaggtgaaatttctggtg

SEQ ID NO: 1332698 - DNA, 25 bp, Homo sapien
ctatggggccgaggggatgactgag

SEQ ID NO: 1332699 - DNA, 25 bp, Homo sapien
aggggatgactgaggtgaaatttct

SEQ ID NO: 1332700 - DNA, 25 bp, Homo sapien
gggagttctgatcagacaccctttg

SEQ ID NO: 1332701 - DNA, 25 bp, Homo sapien
tagaaaagcatataggcattccagt

SEQ ID NO: 1332702 - DNA, 25 bp, Homo sapien
tgccgtacaacgctgactcgacttt

SEQ ID NO: 1332703 - DNA, 25 bp, Homo sapien
tcttcggcgcacatcagtgtatggg

SEQ ID NO: 1332704 - DNA, 25 bp, Homo sapien
tataacaagacattaagaaacacat

SEQ ID NO: 1332705 - DNA, 25 bp, Homo sapien
taagaaacacatctgtaaataaaag

SEQ ID NO: 1332706 - DNA, 25 bp, Homo sapien
caagacattaagaaacacatctgta

SEQ ID NO: 1332707 - DNA, 25 bp, Homo sapien
agacattaagaaacacatctgtaaa

SEQ ID NO: 1332708 - DNA, 25 bp, Homo sapien
caaattcttctataactgtgtcatt

SEQ ID NO: 1332709 - DNA, 25 bp, Homo sapien
cattcatactccagggtctcgtcat

SEQ ID NO: 1332710 - DNA, 25 bp, Homo sapien
ccagggtctcgtcatttaggtcaaa

SEQ ID NO: 1332711 - DNA, 25 bp, Homo sapien
tactccagggtctcgtcatttaggt

SEQ ID NO: 1332712 - DNA, 25 bp, Homo sapien
tctgtgagggcaaccttttttcgtg

SEQ ID NO: 1332713 - DNA, 25 bp, Homo sapien
tgcccactgtgtacgatgacaccga

SEQ ID NO: 1332714 - DNA, 25 bp, Homo sapien
ccttaatgaaggaatagtagtggcc

SEQ ID NO: 1332715 - DNA, 25 bp, Homo sapien
gacaccgacaagttcatagttttct

SEQ ID NO: 1332716 - DNA, 25 bp, Homo sapien
tctcattaggtgaattaccaagacg

SEQ ID NO: 1332717 - DNA, 25 bp, Homo sapien
taccaagacgctaggtaaagattta

SEQ ID NO: 1332718 - DNA, 25 bp, Homo sapien
tcatcatatttaatggagcgtccgc

SEQ ID NO: 1332719 - DNA, 25 bp, Homo sapien
tacaggtccttttcactgttattct

SEQ ID NO: 1332720 - DNA, 25 bp, Homo sapien
gacaagaagtcactcctagattgag

SEQ ID NO: 1332721 - DNA, 25 bp, Homo sapien
tttacacttttcacagtagtacgca

SEQ ID NO: 1332722 - DNA, 25 bp, Homo sapien
gtagtacgcattacttccttctaga

SEQ ID NO: 1332723 - DNA, 25 bp, Homo sapien
acttctcctctaacaaattggtcca

SEQ ID NO: 1332724 - DNA, 25 bp, Homo sapien
ttctgatcagagtagatgccctgaa

SEQ ID NO: 1332725 - DNA, 25 bp, Homo sapien
agatcttctgatcagagtagatgcc

SEQ ID NO: 1332726 - DNA, 25 bp, Homo sapien
gaggacagtctttacagatcttctg

SEQ ID NO: 1332727 - DNA, 25 bp, Homo sapien
ctgtgaggacagtctttacagatct

SEQ ID NO: 1332728 - DNA, 25 bp, Homo sapien
tgaggtattcatccatctgatcaat

SEQ ID NO: 1332729 - DNA, 25 bp, Homo sapien
gtaaagaattcatatgcatcctgct

SEQ ID NO: 1332730 - DNA, 25 bp, Homo sapien
tattcatccatctgatcaatgagac

SEQ ID NO: 1332731 - DNA, 25 bp, Homo sapien
gatcaatgagactagtaaagaattc

SEQ ID NO: 1332732 - DNA, 25 bp, Homo sapien
cttggtaaaacacgctatcatctgg

SEQ ID NO: 1332733 - DNA, 25 bp, Homo sapien
tcaggtacatagtactgcagcttgc

SEQ ID NO: 1332734 - DNA, 25 bp, Homo sapien
ggtacatagtactgcagcttgcttt

SEQ ID NO: 1332735 - DNA, 25 bp, Homo sapien
agactgcacttggtaaaacacgcta

SEQ ID NO: 1332736 - DNA, 25 bp, Homo sapien
caggttgcatatacagctgctggaa

SEQ ID NO: 1332737 - DNA, 25 bp, Homo sapien
ctgctggaagactgcattcatataa

SEQ ID NO: 1332738 - DNA, 25 bp, Homo sapien
aaccctgaactggacctgctatcca

SEQ ID NO: 1332739 - DNA, 25 bp, Homo sapien
cattcatataacaagttgcaccacc

SEQ ID NO: 1332740 - DNA, 25 bp, Homo sapien
aaggacttcataggctgccaatcgg

SEQ ID NO: 1332741 - DNA, 25 bp, Homo sapien
atttgaaggtgaactatcagccaac

SEQ ID NO: 1332742 - DNA, 25 bp, Homo sapien
gaactatcagccaacatcacaagga

SEQ ID NO: 1332743 - DNA, 25 bp, Homo sapien
caatcggctattcgctgtactacac

SEQ ID NO: 1332744 - DNA, 25 bp, Homo sapien
cactgcctgcctggtagtataaacc

SEQ ID NO: 1332745 - DNA, 25 bp, Homo sapien
tagggaggtgccatttacacaggct

SEQ ID NO: 1332746 - DNA, 25 bp, Homo sapien
ggatagccaacctctgagtgaaaca

SEQ ID NO: 1332747 - DNA, 25 bp, Homo sapien
tatgaggcttttagaccagcacgac

SEQ ID NO: 1332748 - DNA, 25 bp, Homo sapien
ataattctagaagctcggaaaagga

SEQ ID NO: 1332749 - DNA, 25 bp, Homo sapien
ctaacaatggtttaatgagtgatga

SEQ ID NO: 1332750 - DNA, 25 bp, Homo sapien
tggatgaaagtcctgttgactgatg

SEQ ID NO: 1332751 - DNA, 25 bp, Homo sapien
aaaaggaagtcatctaacaatggtt

SEQ ID NO: 1332752 - DNA, 25 bp, Homo sapien
tacatggcaaagcttgtggggtaga

SEQ ID NO: 1332753 - DNA, 25 bp, Homo sapien
acacagtactggcaataaccgagca

SEQ ID NO: 1332754 - DNA, 25 bp, Homo sapien
gcactgaagaatctgccatgtgata

SEQ ID NO: 1332755 - DNA, 25 bp, Homo sapien
ggcaataaccgagcactgaagaatc

SEQ ID NO: 1332756 - DNA, 25 bp, Homo sapien
actgaagaatctgccatgtgataag

SEQ ID NO: 1332757 - DNA, 25 bp, Homo sapien
cattcagctgtacgattaggttcaa

SEQ ID NO: 1332758 - DNA, 25 bp, Homo sapien
tcatcttcaagcatcgtagctgggc

SEQ ID NO: 1332759 - DNA, 25 bp, Homo sapien
tagctgggctgatccttaactgctc

SEQ ID NO: 1332760 - DNA, 25 bp, Homo sapien
tcttgatgaggcgtaagtgccctgc

SEQ ID NO: 1332761 - DNA, 25 bp, Homo sapien
cagatcatctaataactggcatctc

SEQ ID NO: 1332762 - DNA, 25 bp, Homo sapien
tgtcagatcatctaataactggcat

SEQ ID NO: 1332763 - DNA, 25 bp, Homo sapien
ttgtcagatcatctaataactggca

SEQ ID NO: 1332764 - DNA, 25 bp, Homo sapien
gtcagatcatctaataactggcatc

SEQ ID NO: 1332765 - DNA, 25 bp, Homo sapien
taaaggattacaccccatgaacaag

SEQ ID NO: 1332766 - DNA, 25 bp, Homo sapien
tgaacaagtgggattgactcctgga

SEQ ID NO: 1332767 - DNA, 25 bp, Homo sapien
gtatggtccatggtacgaaaatcta

SEQ ID NO: 1332768 - DNA, 25 bp, Homo sapien
gactcctggaattcaagtatggtcc

SEQ ID NO: 1332769 - DNA, 25 bp, Homo sapien
gatttggcttctgcacatctggatg

SEQ ID NO: 1332770 - DNA, 25 bp, Homo sapien
ctgtctgactaagagtgtacagctg

SEQ ID NO: 1332771 - DNA, 25 bp, Homo sapien
gctgatcacaggcaacccggcgaat

SEQ ID NO: 1332772 - DNA, 25 bp, Homo sapien
gcagctgagccgtgaggattacgcc

SEQ ID NO: 1332773 - DNA, 25 bp, Homo sapien
gatccgagcagaatatcaatgatga

SEQ ID NO: 1332774 - DNA, 25 bp, Homo sapien
acacagggcaagttatagaaagatg

SEQ ID NO: 1332775 - DNA, 25 bp, Homo sapien
acttggtgatccgagcagaatatca

SEQ ID NO: 1332776 - DNA, 25 bp, Homo sapien
tcaatgatgaaatcagcaacacagg

SEQ ID NO: 1332777 - DNA, 25 bp, Homo sapien
gattcccgcatgcagggctactggt

SEQ ID NO: 1332778 - DNA, 25 bp, Homo sapien
gcacgtaacaagaagagacaaagcc

SEQ ID NO: 1332779 - DNA, 25 bp, Homo sapien
tggctccgaagctgtaggcacgtaa

SEQ ID NO: 1332780 - DNA, 25 bp, Homo sapien
tctttggtggatacagactgttgtc

SEQ ID NO: 1332781 - DNA, 25 bp, Homo sapien
gctggctactcccaacaagatcaag

SEQ ID NO: 1332782 - DNA, 25 bp, Homo sapien
caggacacagggaattactttcttt

SEQ ID NO: 1332783 - DNA, 25 bp, Homo sapien
gacaatctcatgaagcaagccacag

SEQ ID NO: 1332784 - DNA, 25 bp, Homo sapien
tgagtctgtttcgaattccagcagg

SEQ ID NO: 1332785 - DNA, 25 bp, Homo sapien
tatagttatttctaccctagcgatc

SEQ ID NO: 1332786 - DNA, 25 bp, Homo sapien
cacaggtgaaggaaattattctgcc

SEQ ID NO: 1332787 - DNA, 25 bp, Homo sapien
tgtctctagtttgcacatgtgctcc

SEQ ID NO: 1332788 - DNA, 25 bp, Homo sapien
tattctgcctcctttgaagacacac

SEQ ID NO: 1332789 - DNA, 25 bp, Homo sapien
taacgtgggcattgtttgtccgaca

SEQ ID NO: 1332790 - DNA, 25 bp, Homo sapien
tagaagacctatcagacacggacaa

SEQ ID NO: 1332791 - DNA, 25 bp, Homo sapien
tgtattgcaactcgagcagcaggga

SEQ ID NO: 1332792 - DNA, 25 bp, Homo sapien
gaggtcttcatctaataacgtgggc

SEQ ID NO: 1332793 - DNA, 25 bp, Homo sapien
ggaataaacaccctgccttgtttca

SEQ ID NO: 1332794 - DNA, 25 bp, Homo sapien
gatggaataaacaccctgccttgtt

SEQ ID NO: 1332795 - DNA, 25 bp, Homo sapien
agacagatggaataaacaccctgcc

SEQ ID NO: 1332796 - DNA, 25 bp, Homo sapien
cagatggaataaacaccctgccttg

SEQ ID NO: 1332797 - DNA, 25 bp, Homo sapien
tttaactcagatcatggcactcctc

SEQ ID NO: 1332798 - DNA, 25 bp, Homo sapien
tttgagaatgggaaacactgcctca

SEQ ID NO: 1332799 - DNA, 25 bp, Homo sapien
tattttcaaaagacccatcagggtg

SEQ ID NO: 1332800 - DNA, 25 bp, Homo sapien
taagcttcctaactattctccctgc

SEQ ID NO: 1332801 - DNA, 25 bp, Homo sapien
gagagatctctatgccctgacgcta

SEQ ID NO: 1332802 - DNA, 25 bp, Homo sapien
ccaagctagaaaccacagggccatt

SEQ ID NO: 1332803 - DNA, 25 bp, Homo sapien
taattctcggcttagtaactgcctg

SEQ ID NO: 1332804 - DNA, 25 bp, Homo sapien
gaggttcccaagacaggcgatgcgt

SEQ ID NO: 1332805 - DNA, 25 bp, Homo sapien
tatgtcgccccgtacgatctcaaac

SEQ ID NO: 1332806 - DNA, 25 bp, Homo sapien
aagaaacagatacagcctcctggct

SEQ ID NO: 1332807 - DNA, 25 bp, Homo sapien
tgcactggtgctattactgctcact

SEQ ID NO: 1332808 - DNA, 25 bp, Homo sapien
gcacaatatggatttacagcgataa

SEQ ID NO: 1332809 - DNA, 25 bp, Homo sapien
ggcacagcttctggccatgtcatca

SEQ ID NO: 1332810 - DNA, 25 bp, Homo sapien
tcacagaaggatttggcacagcttc

SEQ ID NO: 1332811 - DNA, 25 bp, Homo sapien
tcaaaccgccagctttgaggaagtt

SEQ ID NO: 1332812 - DNA, 25 bp, Homo sapien
ttggcatgagtttggagcttagaac

SEQ ID NO: 1332813 - DNA, 25 bp, Homo sapien
ttccgttctagagaaagctggtgtg

SEQ ID NO: 1332814 - DNA, 25 bp, Homo sapien
cagaccctcaggcttagataagaac

SEQ ID NO: 1332815 - DNA, 25 bp, Homo sapien
taaatgttgcacactgtttttcccc

SEQ ID NO: 1332816 - DNA, 25 bp, Homo sapien
gcaaacatgaaagtctcagaccctc

SEQ ID NO: 1332817 - DNA, 25 bp, Homo sapien
tctaagttgtagagcactctgaagg

SEQ ID NO: 1332818 - DNA, 25 bp, Homo sapien
tttgaggactgagaacttgattcag

SEQ ID NO: 1332819 - DNA, 25 bp, Homo sapien
tgagaacttgattcagacagcaatg

SEQ ID NO: 1332820 - DNA, 25 bp, Homo sapien
gcactctgaaggtagacattcccgg

SEQ ID NO: 1332821 - DNA, 25 bp, Homo sapien
gaaacagatcttagtacacgtccta

SEQ ID NO: 1332822 - DNA, 25 bp, Homo sapien
aatactacgtgaatgcttttgagca

SEQ ID NO: 1332823 - DNA, 25 bp, Homo sapien
tgtattctaagcaacacctgagaag

SEQ ID NO: 1332824 - DNA, 25 bp, Homo sapien
gctaaagtggtaggcttgaaaaatc

SEQ ID NO: 1332825 - DNA, 25 bp, Homo sapien
gatggtatcatatgaccttgatgtg

SEQ ID NO: 1332826 - DNA, 25 bp, Homo sapien
tatgggaaagatggtatcatatgac

SEQ ID NO: 1332827 - DNA, 25 bp, Homo sapien
aaacattatgggaaagatggtatca

SEQ ID NO: 1332828 - DNA, 25 bp, Homo sapien
tcatatgaccttgatgtgatttcag

SEQ ID NO: 1332829 - DNA, 25 bp, Homo sapien
tcagtgggtatcaagagcagaagct

SEQ ID NO: 1332830 - DNA, 25 bp, Homo sapien
gagcagaagcttccgtactcgtaga

SEQ ID NO: 1332831 - DNA, 25 bp, Homo sapien
aagcttccgtactcgtagagttatc

SEQ ID NO: 1332832 - DNA, 25 bp, Homo sapien
ctggatcagtgggtatcaagagcag

SEQ ID NO: 1332833 - DNA, 25 bp, Homo sapien
caaatacgttacatacgagagccat

SEQ ID NO: 1332834 - DNA, 25 bp, Homo sapien
ccagattggcgagctgataaagcat

SEQ ID NO: 1332835 - DNA, 25 bp, Homo sapien
gataaagcatgtcaaatacgttaca

SEQ ID NO: 1332836 - DNA, 25 bp, Homo sapien
catcactacaccagggagggatttc

SEQ ID NO: 1332837 - DNA, 25 bp, Homo sapien
tgctgaactcccagatggggtccca

SEQ ID NO: 1332838 - DNA, 25 bp, Homo sapien
tcactgtaaggatttgttcatcaga

SEQ ID NO: 1332839 - DNA, 25 bp, Homo sapien
cagttggtggagtagcttttgatct

SEQ ID NO: 1332840 - DNA, 25 bp, Homo sapien
tgaagaactaaaaaccccactgctg

SEQ ID NO: 1332841 - DNA, 25 bp, Homo sapien
ttattcatatcaggctaaatattta

SEQ ID NO: 1332842 - DNA, 25 bp, Homo sapien
ttcatcaaaactgcttatttaaacc

SEQ ID NO: 1332843 - DNA, 25 bp, Homo sapien
aaaggaagaggaaattattcatatc

SEQ ID NO: 1332844 - DNA, 25 bp, Homo sapien
agtggtttcttaattattgagagga

SEQ ID NO: 1332845 - DNA, 25 bp, Homo sapien
cggacactccctatggtttcattac

SEQ ID NO: 1332846 - DNA, 25 bp, Homo sapien
attttccaccggacactccctatgg

SEQ ID NO: 1332847 - DNA, 25 bp, Homo sapien
ttggctattttccaccggacactcc

SEQ ID NO: 1332848 - DNA, 25 bp, Homo sapien
accggacactccctatggtttcatt

SEQ ID NO: 1332849 - DNA, 25 bp, Homo sapien
ggcttcccttctgctataattatgt

SEQ ID NO: 1332850 - DNA, 25 bp, Homo sapien
ccttgcttgcctttgtacctgttct

SEQ ID NO: 1332851 - DNA, 25 bp, Homo sapien
ccatcaagcgtggaatgagacctca

SEQ ID NO: 1332852 - DNA, 25 bp, Homo sapien
aacacgttgtgagagaattcattta

SEQ ID NO: 1332853 - DNA, 25 bp, Homo sapien
tagaatagttcgtggaacagagtaa

SEQ ID NO: 1332854 - DNA, 25 bp, Homo sapien
tagactcataggtaacattaagggt

SEQ ID NO: 1332855 - DNA, 25 bp, Homo sapien
cagtgaaggtatctttggtagactc

SEQ ID NO: 1332856 - DNA, 25 bp, Homo sapien
catgaggtagaatagttcgtggaac

SEQ ID NO: 1332857 - DNA, 25 bp, Homo sapien
caatctctcaattattacaagttta

SEQ ID NO: 1332858 - DNA, 25 bp, Homo sapien
tctcaattattacaagtttagtaga

SEQ ID NO: 1332859 - DNA, 25 bp, Homo sapien
gatcacatagcgctctgccagaagc

SEQ ID NO: 1332860 - DNA, 25 bp, Homo sapien
tctatagtgatcacatagcgctctg

SEQ ID NO: 1332861 - DNA, 25 bp, Homo sapien
ggagactgaactgaggttgctacag

SEQ ID NO: 1332862 - DNA, 25 bp, Homo sapien
tctggtcacagcatgtgttagagtg

SEQ ID NO: 1332863 - DNA, 25 bp, Homo sapien
gcatggcagttgctgtaagcatttt

SEQ ID NO: 1332864 - DNA, 25 bp, Homo sapien
tgaggttgctacagttggcatggca

SEQ ID NO: 1332865 - DNA, 25 bp, Homo sapien
aatcttgtgtagcaatcagcaatga

SEQ ID NO: 1332866 - DNA, 25 bp, Homo sapien
tctaatcttgtgtagcaatcagcaa

SEQ ID NO: 1332867 - DNA, 25 bp, Homo sapien
taatcttgtgtagcaatcagcaatg

SEQ ID NO: 1332868 - DNA, 25 bp, Homo sapien
cttgtgtagcaatcagcaatgaatt

SEQ ID NO: 1332869 - DNA, 25 bp, Homo sapien
gtaactatagtttatgattagctga

SEQ ID NO: 1332870 - DNA, 25 bp, Homo sapien
ctaggatttagattaatgtaactat

SEQ ID NO: 1332871 - DNA, 25 bp, Homo sapien
atcaggtgattccatggctattttc

SEQ ID NO: 1332872 - DNA, 25 bp, Homo sapien
tcatcaggtgattccatggctattt

SEQ ID NO: 1332873 - DNA, 25 bp, Homo sapien
caatcgatgatcacaaagattcaca

SEQ ID NO: 1332874 - DNA, 25 bp, Homo sapien
tttcaatcgatgatcacaaagattc

SEQ ID NO: 1332875 - DNA, 25 bp, Homo sapien
tcaatcgatgatcacaaagattcac

SEQ ID NO: 1332876 - DNA, 25 bp, Homo sapien
cttttcaatcgatgatcacaaagat

SEQ ID NO: 1332877 - DNA, 25 bp, Homo sapien
aagccagagacgacagatcacagtg

SEQ ID NO: 1332878 - DNA, 25 bp, Homo sapien
acattatgccttagtacaatgaaag

SEQ ID NO: 1332879 - DNA, 25 bp, Homo sapien
tatggtatacccacacagtggaata

SEQ ID NO: 1332880 - DNA, 25 bp, Homo sapien
atgctacaacctgggcgaaccctga

SEQ ID NO: 1332881 - DNA, 25 bp, Homo sapien
ctgctgaacatcactctcaagatca

SEQ ID NO: 1332882 - DNA, 25 bp, Homo sapien
ctcaagatcatgctgtccttttgta

SEQ ID NO: 1332883 - DNA, 25 bp, Homo sapien
gaacatcactctcaagatcatgctg

SEQ ID NO: 1332884 - DNA, 25 bp, Homo sapien
gatttcatatgactccaatttaaga

SEQ ID NO: 1332885 - DNA, 25 bp, Homo sapien
cagatacagagtagcttcttgcaag

SEQ ID NO: 1332886 - DNA, 25 bp, Homo sapien
caagacactcccagatctccttggc

SEQ ID NO: 1332887 - DNA, 25 bp, Homo sapien
aaacatcctggccagttacaagaca

SEQ ID NO: 1332888 - DNA, 25 bp, Homo sapien
ccttggcacgattccagcccagata

SEQ ID NO: 1332889 - DNA, 25 bp, Homo sapien
gtgtcgagccacttaagcctccagg

SEQ ID NO: 1332890 - DNA, 25 bp, Homo sapien
cagcagctgcaagccgatgacaagc

SEQ ID NO: 1332891 - DNA, 25 bp, Homo sapien
gatgacaagcgatcaaacttcccgt

SEQ ID NO: 1332892 - DNA, 25 bp, Homo sapien
tcccggtaagtgtaccggccatcca

SEQ ID NO: 1332893 - DNA, 25 bp, Homo sapien
taatttcatggagctgacgcaaagc

SEQ ID NO: 1332894 - DNA, 25 bp, Homo sapien
tggagctgacgcaaagctggtacca

SEQ ID NO: 1332895 - DNA, 25 bp, Homo sapien
gaatgagcgagtaatttcatggagc

SEQ ID NO: 1332896 - DNA, 25 bp, Homo sapien
gttttatgaatgagcgagtaatttc

SEQ ID NO: 1332897 - DNA, 25 bp, Homo sapien
ggcagggagacataatccccagtca

SEQ ID NO: 1332898 - DNA, 25 bp, Homo sapien
tggcagggagacataatccccagtc

SEQ ID NO: 1332899 - DNA, 25 bp, Homo sapien
cctggcagggagacataatccccag

SEQ ID NO: 1332900 - DNA, 25 bp, Homo sapien
gcctggcagggagacataatcccca

SEQ ID NO: 1332901 - DNA, 25 bp, Homo sapien
tttccaaacctgaccattctccagg

SEQ ID NO: 1332902 - DNA, 25 bp, Homo sapien
tgagccagttcccagagtacgtcta

SEQ ID NO: 1332903 - DNA, 25 bp, Homo sapien
tatgcacttgatgatgtagctcctc

SEQ ID NO: 1332904 - DNA, 25 bp, Homo sapien
gcctgctgaataaggctactgggca

SEQ ID NO: 1332905 - DNA, 25 bp, Homo sapien
cactaaggattgtcaggtgctcctc

SEQ ID NO: 1332906 - DNA, 25 bp, Homo sapien
tagaaaaatccatttgattctcctg

SEQ ID NO: 1332907 - DNA, 25 bp, Homo sapien
ctagaaaaatccatttgattctcct

SEQ ID NO: 1332908 - DNA, 25 bp, Homo sapien
agaaaaatccatttgattctcctgc

SEQ ID NO: 1332909 - DNA, 25 bp, Homo sapien
cagaagtggtctcaaagcgagcttc

SEQ ID NO: 1332910 - DNA, 25 bp, Homo sapien
tattcgtccaatcaggctcaaaagc

SEQ ID NO: 1332911 - DNA, 25 bp, Homo sapien
tctcaaagcgagcttcccggcctat

SEQ ID NO: 1332912 - DNA, 25 bp, Homo sapien
gagcttcccggcctattcgtccaat

SEQ ID NO: 1332913 - DNA, 25 bp, Homo sapien
taatagtatgaatgttctcaatcac

SEQ ID NO: 1332914 - DNA, 25 bp, Homo sapien
caaacaaatgattaagctgatctga

SEQ ID NO: 1332915 - DNA, 25 bp, Homo sapien
caatcacagtagatgattgtcctga

SEQ ID NO: 1332916 - DNA, 25 bp, Homo sapien
tctcaatcacagtagatgattgtcc

SEQ ID NO: 1332917 - DNA, 25 bp, Homo sapien
gactagattctgactgatacagtga

SEQ ID NO: 1332918 - DNA, 25 bp, Homo sapien
gcatagtttctacttcctgactaga

SEQ ID NO: 1332919 - DNA, 25 bp, Homo sapien
cctgtaatgaattccctttgcttga

SEQ ID NO: 1332920 - DNA, 25 bp, Homo sapien
tgatacagtcaaagagtgctccagg

SEQ ID NO: 1332921 - DNA, 25 bp, Homo sapien
tgctctctcatcacccttttcgctc

SEQ ID NO: 1332922 - DNA, 25 bp, Homo sapien
catcacccttttcgctctcctgtag

SEQ ID NO: 1332923 - DNA, 25 bp, Homo sapien
tctcatcacccttttcgctctcctg

SEQ ID NO: 1332924 - DNA, 25 bp, Homo sapien
cccttttcgctctcctgtagtccaa

SEQ ID NO: 1332925 - DNA, 25 bp, Homo sapien
catctaacgacaatttactacccaa

SEQ ID NO: 1332926 - DNA, 25 bp, Homo sapien
cagtattgtgcttggtctatgttgc

SEQ ID NO: 1332927 - DNA, 25 bp, Homo sapien
taattccctttatacggtcacagta

SEQ ID NO: 1332928 - DNA, 25 bp, Homo sapien
ttccaaattttagtgagttcatcta

SEQ ID NO: 1332929 - DNA, 25 bp, Homo sapien
gatatagtgaacactgactctctaa

SEQ ID NO: 1332930 - DNA, 25 bp, Homo sapien
taagatcatttaaagactaatacag

SEQ ID NO: 1332931 - DNA, 25 bp, Homo sapien
gagagaaagtcagatatagtgaaca

SEQ ID NO: 1332932 - DNA, 25 bp, Homo sapien
cagtcaaagcaacaattttgtatac

SEQ ID NO: 1332933 - DNA, 25 bp, Homo sapien
cagaactgagttttcaactagccaa

SEQ ID NO: 1332934 - DNA, 25 bp, Homo sapien
actagccaatctaataatctgtctg

SEQ ID NO: 1332935 - DNA, 25 bp, Homo sapien
tgtctgtatctatagcattcttcac

SEQ ID NO: 1332936 - DNA, 25 bp, Homo sapien
cttccagtgcaatcgacagaactga

SEQ ID NO: 1332937 - DNA, 25 bp, Homo sapien
ttacaatgtgcttcaataactagcc

SEQ ID NO: 1332938 - DNA, 25 bp, Homo sapien
gataagattattgtgactgagtcta

SEQ ID NO: 1332939 - DNA, 25 bp, Homo sapien
gaagttaacagactaccatttgtga

SEQ ID NO: 1332940 - DNA, 25 bp, Homo sapien
tatcaaaggccagttataagaagtt

SEQ ID NO: 1332941 - DNA, 25 bp, Homo sapien
caggcactccctccaaattttatat

SEQ ID NO: 1332942 - DNA, 25 bp, Homo sapien
ggaccactgctaattggctcaggga

SEQ ID NO: 1332943 - DNA, 25 bp, Homo sapien
catggagtcattcttacagctgtca

SEQ ID NO: 1332944 - DNA, 25 bp, Homo sapien
acatctaacccaaacctcaatcagg

SEQ ID NO: 1332945 - DNA, 25 bp, Homo sapien
tccctctccggtgatgggaactgca

SEQ ID NO: 1332946 - DNA, 25 bp, Homo sapien
gagtgagtcagtccctctccggtga

SEQ ID NO: 1332947 - DNA, 25 bp, Homo sapien
tgaaacatcggatctattcattgtc

SEQ ID NO: 1332948 - DNA, 25 bp, Homo sapien
aactgcaggatgtgaaacatcggat

SEQ ID NO: 1332949 - DNA, 25 bp, Homo sapien
agaaaagcagggacaagacttggac

SEQ ID NO: 1332950 - DNA, 25 bp, Homo sapien
tggacagagtcctgacagtggtcag

SEQ ID NO: 1332951 - DNA, 25 bp, Homo sapien
aaaagcagggacaagacttggacag

SEQ ID NO: 1332952 - DNA, 25 bp, Homo sapien
ttggacagagtcctgacagtggtca

SEQ ID NO: 1332953 - DNA, 25 bp, Homo sapien
tataactgaactgcattggctccat

SEQ ID NO: 1332954 - DNA, 25 bp, Homo sapien
tcttgtctggctagtaaacctttca

SEQ ID NO: 1332955 - DNA, 25 bp, Homo sapien
tcttggcagaacttagtatctgtgc

SEQ ID NO: 1332956 - DNA, 25 bp, Homo sapien
tttgctttgaccaacactgctgcag

SEQ ID NO: 1332957 - DNA, 25 bp, Homo sapien
tgtggtgatttcagcatgcgcaata

SEQ ID NO: 1332958 - DNA, 25 bp, Homo sapien
gcatgcgcaatagaatatctagtcg

SEQ ID NO: 1332959 - DNA, 25 bp, Homo sapien
caattgtcaccagatccggttggaa

SEQ ID NO: 1332960 - DNA, 25 bp, Homo sapien
tatctagtcgaaggtcatccacaat

SEQ ID NO: 1332961 - DNA, 25 bp, Homo sapien
cttaacggcagacaagagctcaggg

SEQ ID NO: 1332962 - DNA, 25 bp, Homo sapien
taacggcagacaagagctcagggat

SEQ ID NO: 1332963 - DNA, 25 bp, Homo sapien
agagctcagggatgctaaccaatct

SEQ ID NO: 1332964 - DNA, 25 bp, Homo sapien
gacaagagctcagggatgctaacca

SEQ ID NO: 1332965 - DNA, 25 bp, Homo sapien
tttctcttctacactccgtacatcc

SEQ ID NO: 1332966 - DNA, 25 bp, Homo sapien
tctacactccgtacatcctggattg

SEQ ID NO: 1332967 - DNA, 25 bp, Homo sapien
cactccgtacatcctggattgtagt

SEQ ID NO: 1332968 - DNA, 25 bp, Homo sapien
cttctacactccgtacatcctggat

SEQ ID NO: 1332969 - DNA, 25 bp, Homo sapien
taccacggaggaattgaggtactct

SEQ ID NO: 1332970 - DNA, 25 bp, Homo sapien
taagggctgaatcagtgctgagaca

SEQ ID NO: 1332971 - DNA, 25 bp, Homo sapien
ctaagggctgaatcagtgctgagac

SEQ ID NO: 1332972 - DNA, 25 bp, Homo sapien
ctgtaccacggaggaattgaggtac

SEQ ID NO: 1332973 - DNA, 25 bp, Homo sapien
agcttggcttggattgctgcaaatc

SEQ ID NO: 1332974 - DNA, 25 bp, Homo sapien
agttctatatcttctgaatggagct

SEQ ID NO: 1332975 - DNA, 25 bp, Homo sapien
ttatttaccaaatccacaacccatc

SEQ ID NO: 1332976 - DNA, 25 bp, Homo sapien
cttatttaccaaatccacaacccat

SEQ ID NO: 1332977 - DNA, 25 bp, Homo sapien
tatttaccaaatccacaacccatcc

SEQ ID NO: 1332978 - DNA, 25 bp, Homo sapien
atttaccaaatccacaacccatcca

SEQ ID NO: 1332979 - DNA, 25 bp, Homo sapien
gaagctcattctagcagggtcaaca

SEQ ID NO: 1332980 - DNA, 25 bp, Homo sapien
gaacgccagtgcagtgtctagatag

SEQ ID NO: 1332981 - DNA, 25 bp, Homo sapien
gatataaattggagggccatcggca

SEQ ID NO: 1332982 - DNA, 25 bp, Homo sapien
tagatcatggagacacttacagacc

SEQ ID NO: 1332983 - DNA, 25 bp, Homo sapien
tttaaaatggtattcattatcagga

SEQ ID NO: 1332984 - DNA, 25 bp, Homo sapien
tccaaacacttctgcccaattcctt

SEQ ID NO: 1332985 - DNA, 25 bp, Homo sapien
aacacttctgcccaattcctttgag

SEQ ID NO: 1332986 - DNA, 25 bp, Homo sapien
cttttggaaagtcgatacaggtgaa

SEQ ID NO: 1332987 - DNA, 25 bp, Homo sapien
attgtaagcacacccaggagaccag

SEQ ID NO: 1332988 - DNA, 25 bp, Homo sapien
tgaatttcagtaccccacttgtgaa

SEQ ID NO: 1332989 - DNA, 25 bp, Homo sapien
cacttgtgaacagcacttgatgtca

SEQ ID NO: 1332990 - DNA, 25 bp, Homo sapien
tctgcgaccagttctattaatagca

SEQ ID NO: 1332991 - DNA, 25 bp, Homo sapien
acccatctgtagttctagtgactta

SEQ ID NO: 1332992 - DNA, 25 bp, Homo sapien
tacatattggacaaaaatgggtgtc

SEQ ID NO: 1332993 - DNA, 25 bp, Homo sapien
tgagcaattgcacccggccttaact

SEQ ID NO: 1332994 - DNA, 25 bp, Homo sapien
gataaacgcaaacattacccatctg

SEQ ID NO: 1332995 - DNA, 25 bp, Homo sapien
cataaaccttctacaattctcatca

SEQ ID NO: 1332996 - DNA, 25 bp, Homo sapien
caattctcatcagactcggaaagac

SEQ ID NO: 1332997 - DNA, 25 bp, Homo sapien
tttttaaatgcttcaggcatacacc

SEQ ID NO: 1332998 - DNA, 25 bp, Homo sapien
gcatacacctgtccataaaccttct

SEQ ID NO: 1332999 - DNA, 25 bp, Homo sapien
ctaggtaggtagatgccaacaggca

SEQ ID NO: 1333000 - DNA, 25 bp, Homo sapien
gatcagtcaaaacacggctttccag

SEQ ID NO: 1333001 - DNA, 25 bp, Homo sapien
tcttctcgcttgtaagggatggacc

SEQ ID NO: 1333002 - DNA, 25 bp, Homo sapien
ggcatttgcctagtgattcttctcg

SEQ ID NO: 1333003 - DNA, 25 bp, Homo sapien
aatatggtaagatatactactaaca

SEQ ID NO: 1333004 - DNA, 25 bp, Homo sapien
acctcgccaggccaagaaaacatta

SEQ ID NO: 1333005 - DNA, 25 bp, Homo sapien
actaacaaatgtatgctaacaaatt

SEQ ID NO: 1333006 - DNA, 25 bp, Homo sapien
gaaaacattaccactgaccttacag

SEQ ID NO: 1333007 - DNA, 25 bp, Homo sapien
catacgttgctatccatatccagaa

SEQ ID NO: 1333008 - DNA, 25 bp, Homo sapien
tctacctaatccttgcaaatgagct

SEQ ID NO: 1333009 - DNA, 25 bp, Homo sapien
tagagataagctcctgtctgcccac

SEQ ID NO: 1333010 - DNA, 25 bp, Homo sapien
ggtacctaccacctgctagtttaga

SEQ ID NO: 1333011 - DNA, 25 bp, Homo sapien
cttggtgccctcaatgtactccaga

SEQ ID NO: 1333012 - DNA, 25 bp, Homo sapien
ttggtgccctcaatgtactccagat

SEQ ID NO: 1333013 - DNA, 25 bp, Homo sapien
tggtgccctcaatgtactccagatt

SEQ ID NO: 1333014 - DNA, 25 bp, Homo sapien
tacattataaagacaccggcaatag

SEQ ID NO: 1333015 - DNA, 25 bp, Homo sapien
ctggcaaacagtcctactaaaggct

SEQ ID NO: 1333016 - DNA, 25 bp, Homo sapien
tactaacgtagagctcacctaagtg

SEQ ID NO: 1333017 - DNA, 25 bp, Homo sapien
taatacaaggtaaacactgtgacag

SEQ ID NO: 1333018 - DNA, 25 bp, Homo sapien
tccgcgtccaccacctcgtggtagg

SEQ ID NO: 1333019 - DNA, 25 bp, Homo sapien
ctccgcgtccaccacctcgtggtag

SEQ ID NO: 1333020 - DNA, 25 bp, Homo sapien
tccaccacctcgtggtaggcgggcg

SEQ ID NO: 1333021 - DNA, 25 bp, Homo sapien
gcgtccaccacctcgtggtaggcgg

SEQ ID NO: 1333022 - DNA, 25 bp, Homo sapien
gccgccgtcacctccgccgtcgccc

SEQ ID NO: 1333023 - DNA, 25 bp, Homo sapien
cgccgtcacctccgccgtcgccccg

SEQ ID NO: 1333024 - DNA, 25 bp, Homo sapien
tcacctccgccgtcgccccgcgggc

SEQ ID NO: 1333025 - DNA, 25 bp, Homo sapien
tccatgggctcgtagccgccgtagt

SEQ ID NO: 1333026 - DNA, 25 bp, Homo sapien
catgggctcgtagccgccgtagtcg

SEQ ID NO: 1333027 - DNA, 25 bp, Homo sapien
tgtccatgggctcgtagccgccgta

SEQ ID NO: 1333028 - DNA, 25 bp, Homo sapien
ggctcgtagccgccgtagtcgaggc

SEQ ID NO: 1333029 - DNA, 25 bp, Homo sapien
agcgtggtcatgtgctgctcctcct

SEQ ID NO: 1333030 - DNA, 25 bp, Homo sapien
cttgggtcctgcgagccgagctagt

SEQ ID NO: 1333031 - DNA, 25 bp, Homo sapien
cctcgttaatgtcgttcttggccag

SEQ ID NO: 1333032 - DNA, 25 bp, Homo sapien
ccagcgcacggcgaagctacgggtc

SEQ ID NO: 1333033 - DNA, 25 bp, Homo sapien
ccagcccgaaatctaaatcccagtt

SEQ ID NO: 1333034 - DNA, 25 bp, Homo sapien
cgaaatctaaatcccagttctctgt

SEQ ID NO: 1333035 - DNA, 25 bp, Homo sapien
tatatttttccagcccgaaatctaa

SEQ ID NO: 1333036 - DNA, 25 bp, Homo sapien
tttccagcccgaaatctaaatccca

SEQ ID NO: 1333037 - DNA, 25 bp, Homo sapien
ggactcgttcgaacatcgtggacat

SEQ ID NO: 1333038 - DNA, 25 bp, Homo sapien
ggccacggactcgttcgaacatcgt

SEQ ID NO: 1333039 - DNA, 25 bp, Homo sapien
cttcggccacggactcgttcgaaca

SEQ ID NO: 1333040 - DNA, 25 bp, Homo sapien
ttccttcggccacggactcgttcga

SEQ ID NO: 1333041 - DNA, 25 bp, Homo sapien
ttcggatatcccttcattcttgctg

SEQ ID NO: 1333042 - DNA, 25 bp, Homo sapien
gctgagttcatctcctatgcctatt

SEQ ID NO: 1333043 - DNA, 25 bp, Homo sapien
taacgctaatggtagctgatgaaac

SEQ ID NO: 1333044 - DNA, 25 bp, Homo sapien
catagttctctaggttattttccca

SEQ ID NO: 1333045 - DNA, 25 bp, Homo sapien
caacaagcggttgggaatacatata

SEQ ID NO: 1333046 - DNA, 25 bp, Homo sapien
tgtgtctgataacttccatacctgg

SEQ ID NO: 1333047 - DNA, 25 bp, Homo sapien
taaaaactatagagatgacctgagg

SEQ ID NO: 1333048 - DNA, 25 bp, Homo sapien
taagcaacttaagtcctgctgtgcc

SEQ ID NO: 1333049 - DNA, 25 bp, Homo sapien
ctcaaaaccctcctgctcagattgg

SEQ ID NO: 1333050 - DNA, 25 bp, Homo sapien
aattgcatagtttctagcagaagac

SEQ ID NO: 1333051 - DNA, 25 bp, Homo sapien
tcagatttcagcaattgcatagttt

SEQ ID NO: 1333052 - DNA, 25 bp, Homo sapien
tctgccagtccagcccctcaaaacc

SEQ ID NO: 1333053 - DNA, 25 bp, Homo sapien
ctctgaaccttcatgctgtatacca

SEQ ID NO: 1333054 - DNA, 25 bp, Homo sapien
aatagcttagctgatcctggtgtct

SEQ ID NO: 1333055 - DNA, 25 bp, Homo sapien
tgtctgctctgaaccttcatgctgt

SEQ ID NO: 1333056 - DNA, 25 bp, Homo sapien
aatacaatctccaaatagcttagct

SEQ ID NO: 1333057 - DNA, 25 bp, Homo sapien
ctttaccaatgccaggaacataggt

SEQ ID NO: 1333058 - DNA, 25 bp, Homo sapien
ttaccaatgccaggaacataggtgc

SEQ ID NO: 1333059 - DNA, 25 bp, Homo sapien
caatgccaggaacataggtgcatgc

SEQ ID NO: 1333060 - DNA, 25 bp, Homo sapien
caggaacataggtgcatgctaaata

SEQ ID NO: 1333061 - DNA, 25 bp, Homo sapien
cagtaggcagcccagatttgaagta

SEQ ID NO: 1333062 - DNA, 25 bp, Homo sapien
tttgaagtaactgccccaggtctgg

SEQ ID NO: 1333063 - DNA, 25 bp, Homo sapien
ccaaggaattcaggcaaaggttgat

SEQ ID NO: 1333064 - DNA, 25 bp, Homo sapien
tggccaaagaagagctgacttagct

SEQ ID NO: 1333065 - DNA, 25 bp, Homo sapien
tccatccacagggacgagcttttgt

SEQ ID NO: 1333066 - DNA, 25 bp, Homo sapien
tgttcctggcaaagcctgatgtgca

SEQ ID NO: 1333067 - DNA, 25 bp, Homo sapien
gacgagcttttgtgacatggcatcc

SEQ ID NO: 1333068 - DNA, 25 bp, Homo sapien
gacatggcatcctcggtctggatgt

SEQ ID NO: 1333069 - DNA, 25 bp, Homo sapien
cccgacctctgtaggggccgctggg

SEQ ID NO: 1333070 - DNA, 25 bp, Homo sapien
gcaacaaaggctgcttgtccagtcc

SEQ ID NO: 1333071 - DNA, 25 bp, Homo sapien
tgacacttagggatctgggcccgac

SEQ ID NO: 1333072 - DNA, 25 bp, Homo sapien
tcactttccaagtgggaaatccagg

SEQ ID NO: 1333073 - DNA, 25 bp, Homo sapien
tataaaatacccacctgcaaacagt

SEQ ID NO: 1333074 - DNA, 25 bp, Homo sapien
aatgccgggcagcagaagtgagcca

SEQ ID NO: 1333075 - DNA, 25 bp, Homo sapien
tagggtactctcttgcaatgccggg

SEQ ID NO: 1333076 - DNA, 25 bp, Homo sapien
gcttcgtgtttgatgagtttgccta

SEQ ID NO: 1333077 - DNA, 25 bp, Homo sapien
gaattacatcggtagagaacatctg

SEQ ID NO: 1333078 - DNA, 25 bp, Homo sapien
caaattggaaggtggaatggcaagc

SEQ ID NO: 1333079 - DNA, 25 bp, Homo sapien
gatgggatccaaaatagcaccaaaa

SEQ ID NO: 1333080 - DNA, 25 bp, Homo sapien
cattaacacaagatggcaagcatca

SEQ ID NO: 1333081 - DNA, 25 bp, Homo sapien
tgtcgcaggtttccagggcagcgga

SEQ ID NO: 1333082 - DNA, 25 bp, Homo sapien
tccagggcagcggaggccctagaaa

SEQ ID NO: 1333083 - DNA, 25 bp, Homo sapien
gggcagcggaggccctagaaaccat

SEQ ID NO: 1333084 - DNA, 25 bp, Homo sapien
ggtttccagggcagcggaggcccta

SEQ ID NO: 1333085 - DNA, 25 bp, Homo sapien
tctaaattgtcacagatgacttgct

SEQ ID NO: 1333086 - DNA, 25 bp, Homo sapien
acagatgacttgctgacaacaaaaa

SEQ ID NO: 1333087 - DNA, 25 bp, Homo sapien
gatgacttgctgacaacaaaaatat

SEQ ID NO: 1333088 - DNA, 25 bp, Homo sapien
tgacttgctgacaacaaaaatattg

SEQ ID NO: 1333089 - DNA, 25 bp, Homo sapien
gccaggcgttgtcttgaaaaaccat

SEQ ID NO: 1333090 - DNA, 25 bp, Homo sapien
atggagttctccctaagtgcagaga

SEQ ID NO: 1333091 - DNA, 25 bp, Homo sapien
gcagcctgattgaaccagtttatgg

SEQ ID NO: 1333092 - DNA, 25 bp, Homo sapien
tgtcttgaggcatccatcatcctgg

SEQ ID NO: 1333093 - DNA, 25 bp, Homo sapien
caaggtactccgtagcaagggctgc

SEQ ID NO: 1333094 - DNA, 25 bp, Homo sapien
atggctgggcaaggtcaaggtactc

SEQ ID NO: 1333095 - DNA, 25 bp, Homo sapien
gggaaggagtctagacccaatagat

SEQ ID NO: 1333096 - DNA, 25 bp, Homo sapien
aagggctgcccagtggaccacctgg

SEQ ID NO: 1333097 - DNA, 25 bp, Homo sapien
gcctgtctcattttacctctctttc

SEQ ID NO: 1333098 - DNA, 25 bp, Homo sapien
ctgtctcattttacctctctttcct

SEQ ID NO: 1333099 - DNA, 25 bp, Homo sapien
ctgcctgtctcattttacctctctt

SEQ ID NO: 1333100 - DNA, 25 bp, Homo sapien
tgtctcattttacctctctttcctc

SEQ ID NO: 1333101 - DNA, 25 bp, Homo sapien
gtgtgaacggaagattcatgagaac

SEQ ID NO: 1333102 - DNA, 25 bp, Homo sapien
gattcatgagaactgtcataatttt

SEQ ID NO: 1333103 - DNA, 25 bp, Homo sapien
tgaacggaagattcatgagaactgt

SEQ ID NO: 1333104 - DNA, 25 bp, Homo sapien
cggaagattcatgagaactgtcata

SEQ ID NO: 1333105 - DNA, 25 bp, Homo sapien
tgcattaatgatctgtgtgctcata

SEQ ID NO: 1333106 - DNA, 25 bp, Homo sapien
tgatctgtgtgctcatattagttat

SEQ ID NO: 1333107 - DNA, 25 bp, Homo sapien
tagccctgcattaatgatctgtgtg

SEQ ID NO: 1333108 - DNA, 25 bp, Homo sapien
caaaatgccactagccctgcattaa

SEQ ID NO: 1333109 - DNA, 25 bp, Homo sapien
ggagccatctttgcactatcggacc

SEQ ID NO: 1333110 - DNA, 25 bp, Homo sapien
gggagccatctttgcactatcggac

SEQ ID NO: 1333111 - DNA, 25 bp, Homo sapien
gttgtgggggtcaatgtccagccct

SEQ ID NO: 1333112 - DNA, 25 bp, Homo sapien
gataatcagctggaaggggcacagc

SEQ ID NO: 1333113 - DNA, 25 bp, Homo sapien
tagatgtgatgccatccagagtcgt

SEQ ID NO: 1333114 - DNA, 25 bp, Homo sapien
ggatggcggtgggtgataatcagct

SEQ ID NO: 1333115 - DNA, 25 bp, Homo sapien
aaactttaagacaagcagcctctgc

SEQ ID NO: 1333116 - DNA, 25 bp, Homo sapien
ggcctgctccctagtgacggtgatc

SEQ ID NO: 1333117 - DNA, 25 bp, Homo sapien
cggtgatcacatgtgctaatgccat

SEQ ID NO: 1333118 - DNA, 25 bp, Homo sapien
tgagagtctacaaggtgtactttct

SEQ ID NO: 1333119 - DNA, 25 bp, Homo sapien
tttcgtggtctaatctgggagccag

SEQ ID NO: 1333120 - DNA, 25 bp, Homo sapien
gaacgctctgagcttggaataaagt

SEQ ID NO: 1333121 - DNA, 25 bp, Homo sapien
ctggttagtggattgattctctggg

SEQ ID NO: 1333122 - DNA, 25 bp, Homo sapien
aaccactttttcgtggtctaatctg

SEQ ID NO: 1333123 - DNA, 25 bp, Homo sapien
tcatggcctccagctgagtgtactt

SEQ ID NO: 1333124 - DNA, 25 bp, Homo sapien
catggcctccagctgagtgtactta

SEQ ID NO: 1333125 - DNA, 25 bp, Homo sapien
ctacacactagtcatggcctccagc

SEQ ID NO: 1333126 - DNA, 25 bp, Homo sapien
cacactagtcatggcctccagctga

SEQ ID NO: 1333127 - DNA, 25 bp, Homo sapien
ttcccctgcaaaacctccacctcca

SEQ ID NO: 1333128 - DNA, 25 bp, Homo sapien
aacctccacctccagggctctttct

SEQ ID NO: 1333129 - DNA, 25 bp, Homo sapien
cctccacctccagggctctttctag

SEQ ID NO: 1333130 - DNA, 25 bp, Homo sapien
tccacctccagggctctttctagca

SEQ ID NO: 1333131 - DNA, 25 bp, Homo sapien
aagggttgttgttgctgacagcgtt

SEQ ID NO: 1333132 - DNA, 25 bp, Homo sapien
ggcactggctgggaaaaatttcaga

SEQ ID NO: 1333133 - DNA, 25 bp, Homo sapien
gctgacagcgtttgtgaaaggccac

SEQ ID NO: 1333134 - DNA, 25 bp, Homo sapien
aggccacaaagctgttgacatctgc

SEQ ID NO: 1333135 - DNA, 25 bp, Homo sapien
aggttaatgctagttagctctatag

SEQ ID NO: 1333136 - DNA, 25 bp, Homo sapien
gttaatgctagttagctctatagtg

SEQ ID NO: 1333137 - DNA, 25 bp, Homo sapien
ggttaatgctagttagctctatagt

SEQ ID NO: 1333138 - DNA, 25 bp, Homo sapien
gattgattgtagtaaagacctggcc

SEQ ID NO: 1333139 - DNA, 25 bp, Homo sapien
gattatcaacttcaagtagccacag

SEQ ID NO: 1333140 - DNA, 25 bp, Homo sapien
ggcctaatgatacacggctcatgaa

SEQ ID NO: 1333141 - DNA, 25 bp, Homo sapien
gcattttagaggtaccagttcaaga

SEQ ID NO: 1333142 - DNA, 25 bp, Homo sapien
gaagatagaaagggttctaacatgt

SEQ ID NO: 1333143 - DNA, 25 bp, Homo sapien
gatagaaagggttctaacatgtaaa

SEQ ID NO: 1333144 - DNA, 25 bp, Homo sapien
gcaaagttatatgattattttacta

SEQ ID NO: 1333145 - DNA, 25 bp, Homo sapien
agatagaaagggttctaacatgtaa

SEQ ID NO: 1333146 - DNA, 25 bp, Homo sapien
tatagccacgattggctgtgattgc

SEQ ID NO: 1333147 - DNA, 25 bp, Homo sapien
accggggatttatagccacgattgg

SEQ ID NO: 1333148 - DNA, 25 bp, Homo sapien
gggatttatagccacgattggctgt

SEQ ID NO: 1333149 - DNA, 25 bp, Homo sapien
gatttatagccacgattggctgtga

SEQ ID NO: 1333150 - DNA, 25 bp, Homo sapien
ggtgtgagggcctgattccgggttg

SEQ ID NO: 1333151 - DNA, 25 bp, Homo sapien
tcatagcacatgctgggtgtgaggg

SEQ ID NO: 1333152 - DNA, 25 bp, Homo sapien
gagggcctgattccgggttgggcca

SEQ ID NO: 1333153 - DNA, 25 bp, Homo sapien
tgattccgggttgggccaaggagcc

SEQ ID NO: 1333154 - DNA, 25 bp, Homo sapien
cctcctctgccggagatggtcgttc

SEQ ID NO: 1333155 - DNA, 25 bp, Homo sapien
aggcccatgaaaaacgctacctcct

SEQ ID NO: 1333156 - DNA, 25 bp, Homo sapien
aatgcgatcccagccatcctgcagg

SEQ ID NO: 1333157 - DNA, 25 bp, Homo sapien
ctcctgaatgcgatcccagccatcc

SEQ ID NO: 1333158 - DNA, 25 bp, Homo sapien
cctgcaggcccatgaaaaacgctac

SEQ ID NO: 1333159 - DNA, 25 bp, Homo sapien
ctgtagcgtgcttgcacagatggcc

SEQ ID NO: 1333160 - DNA, 25 bp, Homo sapien
ctgtgaaagtggataagtcccctgt

SEQ ID NO: 1333161 - DNA, 25 bp, Homo sapien
gccataccacggatgcagcagtgat

SEQ ID NO: 1333162 - DNA, 25 bp, Homo sapien
cacagatggccataccacggatgca

SEQ ID NO: 1333163 - DNA, 25 bp, Homo sapien
cactttctgcagttttaccagcatc

SEQ ID NO: 1333164 - DNA, 25 bp, Homo sapien
gcagttttaccagcatctacctctc

SEQ ID NO: 1333165 - DNA, 25 bp, Homo sapien
tggatcggccccactcatttcctga

SEQ ID NO: 1333166 - DNA, 25 bp, Homo sapien
tccttccaggaggagtcgctgttgc

SEQ ID NO: 1333167 - DNA, 25 bp, Homo sapien
cttgaatcccagttcgtttggcaag

SEQ ID NO: 1333168 - DNA, 25 bp, Homo sapien
tcccagttcgtttggcaagagtcct

SEQ ID NO: 1333169 - DNA, 25 bp, Homo sapien
agttcgtttggcaagagtcctgaca

SEQ ID NO: 1333170 - DNA, 25 bp, Homo sapien
tgaatcccagttcgtttggcaagag

SEQ ID NO: 1333171 - DNA, 25 bp, Homo sapien
ttcttcctcccttccccaggctata

SEQ ID NO: 1333172 - DNA, 25 bp, Homo sapien
tcttcctcccttccccaggctataa

SEQ ID NO: 1333173 - DNA, 25 bp, Homo sapien
tccccaggctataaaaaacattata

SEQ ID NO: 1333174 - DNA, 25 bp, Homo sapien
cccaggctataaaaaacattatatt

SEQ ID NO: 1333175 - DNA, 25 bp, Homo sapien
cagtaaaggtgagcaaaggtgccga

SEQ ID NO: 1333176 - DNA, 25 bp, Homo sapien
caaaggtgccgatgatactgccgat

SEQ ID NO: 1333177 - DNA, 25 bp, Homo sapien
tactgccgatgatattgagataggg

SEQ ID NO: 1333178 - DNA, 25 bp, Homo sapien
gatgatactgccgatgatattgaga

SEQ ID NO: 1333179 - DNA, 25 bp, Homo sapien
tgactatgacccacatcttcctcgt

SEQ ID NO: 1333180 - DNA, 25 bp, Homo sapien
aatcttgactatgacccacatcttc

SEQ ID NO: 1333181 - DNA, 25 bp, Homo sapien
acatcttcctcgtccccagggtcca

SEQ ID NO: 1333182 - DNA, 25 bp, Homo sapien
catcttcctcgtccccagggtccaa

SEQ ID NO: 1333183 - DNA, 25 bp, Homo sapien
tttcttctatttcctggcccactgg

SEQ ID NO: 1333184 - DNA, 25 bp, Homo sapien
gaaagattgtgtttcttctatttcc

SEQ ID NO: 1333185 - DNA, 25 bp, Homo sapien
tcttctatttcctggcccactgggg

SEQ ID NO: 1333186 - DNA, 25 bp, Homo sapien
ttgaaagattgtgtttcttctattt

SEQ ID NO: 1333187 - DNA, 25 bp, Homo sapien
agaagagggtgggatctgagcccgt

SEQ ID NO: 1333188 - DNA, 25 bp, Homo sapien
gggatctgagcccgtgatggaccat

SEQ ID NO: 1333189 - DNA, 25 bp, Homo sapien
tttgtgcattcccataaagggcccc

SEQ ID NO: 1333190 - DNA, 25 bp, Homo sapien
ttgtgcattcccataaagggcccca

SEQ ID NO: 1333191 - DNA, 25 bp, Homo sapien
tttagagctttcaattttgtgttcc

SEQ ID NO: 1333192 - DNA, 25 bp, Homo sapien
ttccttctattgtccccctgctgtt

SEQ ID NO: 1333193 - DNA, 25 bp, Homo sapien
gaccggtcagtgtctgcaagcttcc

SEQ ID NO: 1333194 - DNA, 25 bp, Homo sapien
tgggtgtcactgaccggtcagtgtc

SEQ ID NO: 1333195 - DNA, 25 bp, Homo sapien
tagttgtaaacaccattgcccttgg

SEQ ID NO: 1333196 - DNA, 25 bp, Homo sapien
taaaggcttgtcaggagaagcagtg

SEQ ID NO: 1333197 - DNA, 25 bp, Homo sapien
gttgtaaacaccattgcccttggac

SEQ ID NO: 1333198 - DNA, 25 bp, Homo sapien
gtaaacaccattgcccttggaccag

SEQ ID NO: 1333199 - DNA, 25 bp, Homo sapien
gagccttcctccaggtatagaaaca

SEQ ID NO: 1333200 - DNA, 25 bp, Homo sapien
acctggagccttcctccaggtatag

SEQ ID NO: 1333201 - DNA, 25 bp, Homo sapien
tggagccttcctccaggtatagaaa

SEQ ID NO: 1333202 - DNA, 25 bp, Homo sapien
gccttcctccaggtatagaaacatg

SEQ ID NO: 1333203 - DNA, 25 bp, Homo sapien
ttcattcctcatctccgtaacatcc

SEQ ID NO: 1333204 - DNA, 25 bp, Homo sapien
ttccccatctccaccgtcacagccc

SEQ ID NO: 1333205 - DNA, 25 bp, Homo sapien
cacctgggcaccaacatccctgact

SEQ ID NO: 1333206 - DNA, 25 bp, Homo sapien
tcctcaggatccctgaattcatcca

SEQ ID NO: 1333207 - DNA, 25 bp, Homo sapien
tgaggaggataaatgcgggtaagaa

SEQ ID NO: 1333208 - DNA, 25 bp, Homo sapien
aagttggggcacattaatctgtgca

SEQ ID NO: 1333209 - DNA, 25 bp, Homo sapien
agcaagttggggcacattaatctgt

SEQ ID NO: 1333210 - DNA, 25 bp, Homo sapien
taaatgcgggtaagaagcaagttgg

SEQ ID NO: 1333211 - DNA, 25 bp, Homo sapien
aataaaaacaagggctctctggcat

SEQ ID NO: 1333212 - DNA, 25 bp, Homo sapien
gaataaaaacaagggctctctggca

SEQ ID NO: 1333213 - DNA, 25 bp, Homo sapien
ctactgctcagaggaatcctatctc

SEQ ID NO: 1333214 - DNA, 25 bp, Homo sapien
ctgggtctttgcacgtacattccct

SEQ ID NO: 1333215 - DNA, 25 bp, Homo sapien
gggtctttgcacgtacattcccttc

SEQ ID NO: 1333216 - DNA, 25 bp, Homo sapien
tctgggtctttgcacgtacattccc

SEQ ID NO: 1333217 - DNA, 25 bp, Homo sapien
tgggtctttgcacgtacattccctt

SEQ ID NO: 1333218 - DNA, 25 bp, Homo sapien
aatgccatatagagccttgtgcttc

SEQ ID NO: 1333219 - DNA, 25 bp, Homo sapien
gcacctacggcataagcagtcacca

SEQ ID NO: 1333220 - DNA, 25 bp, Homo sapien
tcaacgtaggtaaatcccatgaatg

SEQ ID NO: 1333221 - DNA, 25 bp, Homo sapien
gcttccaagatgcacctacggcata

SEQ ID NO: 1333222 - DNA, 25 bp, Homo sapien
ggattcgtcatttacagccttaaag

SEQ ID NO: 1333223 - DNA, 25 bp, Homo sapien
ggaagtctgagcatcactttttcca

SEQ ID NO: 1333224 - DNA, 25 bp, Homo sapien
tcctcatacccctgaattcaggaag

SEQ ID NO: 1333225 - DNA, 25 bp, Homo sapien
tctctggagcccactaggatttagg

SEQ ID NO: 1333226 - DNA, 25 bp, Homo sapien
acatgatcccggagtaggcttttcc

SEQ ID NO: 1333227 - DNA, 25 bp, Homo sapien
catgatcccggagtaggcttttccc

SEQ ID NO: 1333228 - DNA, 25 bp, Homo sapien
aacatgatcccggagtaggcttttc

SEQ ID NO: 1333229 - DNA, 25 bp, Homo sapien
cagtctggggatagccctgggaatt

SEQ ID NO: 1333230 - DNA, 25 bp, Homo sapien
ctgggaattggctccgagtttgtca

SEQ ID NO: 1333231 - DNA, 25 bp, Homo sapien
ccctatctgatgttggttattgcat

SEQ ID NO: 1333232 - DNA, 25 bp, Homo sapien
cataagtctagggtcagcagtctgg

SEQ ID NO: 1333233 - DNA, 25 bp, Homo sapien
catttcatggcatttccagcagttc

SEQ ID NO: 1333234 - DNA, 25 bp, Homo sapien
acagcatttcatggcatttccagca

SEQ ID NO: 1333235 - DNA, 25 bp, Homo sapien
agcatttcatggcatttccagcagt

SEQ ID NO: 1333236 - DNA, 25 bp, Homo sapien
cacagcatttcatggcatttccagc

SEQ ID NO: 1333237 - DNA, 25 bp, Homo sapien
gactgtacatgtcatgggttttgga

SEQ ID NO: 1333238 - DNA, 25 bp, Homo sapien
gggactgtacatgtcatgggttttg

SEQ ID NO: 1333239 - DNA, 25 bp, Homo sapien
ggactgtacatgtcatgggttttgg

SEQ ID NO: 1333240 - DNA, 25 bp, Homo sapien
ctgtacatgtcatgggttttggagc

SEQ ID NO: 1333241 - DNA, 25 bp, Homo sapien
taagtagctgttaaggtccctcctc

SEQ ID NO: 1333242 - DNA, 25 bp, Homo sapien
aagtagctgttaaggtccctcctca

SEQ ID NO: 1333243 - DNA, 25 bp, Homo sapien
tcttaagtagctgttaaggtccctc

SEQ ID NO: 1333244 - DNA, 25 bp, Homo sapien
ttctcccattgcactagggtctgtt

SEQ ID NO: 1333245 - DNA, 25 bp, Homo sapien
ctcccattgcactagggtctgtttc

SEQ ID NO: 1333246 - DNA, 25 bp, Homo sapien
tcccattgcactagggtctgtttcc

SEQ ID NO: 1333247 - DNA, 25 bp, Homo sapien
tctcccattgcactagggtctgttt

SEQ ID NO: 1333248 - DNA, 25 bp, Homo sapien
taataaaccatggattcaacttttc

SEQ ID NO: 1333249 - DNA, 25 bp, Homo sapien
tggattctccatagccttgagtaca

SEQ ID NO: 1333250 - DNA, 25 bp, Homo sapien
tagccttgagtacatccagggtaaa

SEQ ID NO: 1333251 - DNA, 25 bp, Homo sapien
tgtgtaataaaccatggattcaact

SEQ ID NO: 1333252 - DNA, 25 bp, Homo sapien
catgggaagcctgttgggctcaaag

SEQ ID NO: 1333253 - DNA, 25 bp, Homo sapien
gagacacatgggaagcctgttgggc

SEQ ID NO: 1333254 - DNA, 25 bp, Homo sapien
gacacatgggaagcctgttgggctc

SEQ ID NO: 1333255 - DNA, 25 bp, Homo sapien
cacatgggaagcctgttgggctcaa

SEQ ID NO: 1333256 - DNA, 25 bp, Homo sapien
tagatcctgttgttacaagccagag

SEQ ID NO: 1333257 - DNA, 25 bp, Homo sapien
cagaaagagaataagcatggagggc

SEQ ID NO: 1333258 - DNA, 25 bp, Homo sapien
caacgactctgtcaagagggtaaca

SEQ ID NO: 1333259 - DNA, 25 bp, Homo sapien
tgataccaggtatcagaaaaagcct

SEQ ID NO: 1333260 - DNA, 25 bp, Homo sapien
tagtgtagatcaaacacattgggtg

SEQ ID NO: 1333261 - DNA, 25 bp, Homo sapien
catgctccacggcacggtcttcatt

SEQ ID NO: 1333262 - DNA, 25 bp, Homo sapien
taggaagtgtatggtaacagagtag

SEQ ID NO: 1333263 - DNA, 25 bp, Homo sapien
gagtccataaaacgacacctccttg

SEQ ID NO: 1333264 - DNA, 25 bp, Homo sapien
gggcaccctgagtgttccaaccgat

SEQ ID NO: 1333265 - DNA, 25 bp, Homo sapien
tttttcataacagacctccaaacca

SEQ ID NO: 1333266 - DNA, 25 bp, Homo sapien
gttccaaccgatggcctctgagtct

SEQ ID NO: 1333267 - DNA, 25 bp, Homo sapien
caaaccaaattgcaccgaggggcac

SEQ ID NO: 1333268 - DNA, 25 bp, Homo sapien
gatggaatgatattttacgtcacct

SEQ ID NO: 1333269 - DNA, 25 bp, Homo sapien
tgcaccagttgggagtatttcagga

SEQ ID NO: 1333270 - DNA, 25 bp, Homo sapien
tttgatgtaccataaaggcccattt

SEQ ID NO: 1333271 - DNA, 25 bp, Homo sapien
atacagttatgagcctttgatgtac

SEQ ID NO: 1333272 - DNA, 25 bp, Homo sapien
gctgatgccttttacatagccagct

SEQ ID NO: 1333273 - DNA, 25 bp, Homo sapien
gagtgggaggttggatggaccttcc

SEQ ID NO: 1333274 - DNA, 25 bp, Homo sapien
atctgatgattcttatccccttggc

SEQ ID NO: 1333275 - DNA, 25 bp, Homo sapien
gattcttatccccttggctgatgcc

SEQ ID NO: 1333276 - DNA, 25 bp, Homo sapien
catcagtggtccctatgtctccagg

SEQ ID NO: 1333277 - DNA, 25 bp, Homo sapien
tcagatgtggccactttctggtgta

SEQ ID NO: 1333278 - DNA, 25 bp, Homo sapien
tttctggtgtatacacatcagtggt

SEQ ID NO: 1333279 - DNA, 25 bp, Homo sapien
gctgaagtccaagcttattcacctg

SEQ ID NO: 1333280 - DNA, 25 bp, Homo sapien
gagaatagttgagggatgtctccct

SEQ ID NO: 1333281 - DNA, 25 bp, Homo sapien
taacaaaggtcacatgggagaatag

SEQ ID NO: 1333282 - DNA, 25 bp, Homo sapien
cagccacaagaatgaggatgtcttg

SEQ ID NO: 1333283 - DNA, 25 bp, Homo sapien
aacagccacaagaatgaggatgtct

SEQ ID NO: 1333284 - DNA, 25 bp, Homo sapien
ggacaacaatcccaatcttttgttc

SEQ ID NO: 1333285 - DNA, 25 bp, Homo sapien
tttggacaacaatcccaatcttttg

SEQ ID NO: 1333286 - DNA, 25 bp, Homo sapien
caacaatcccaatcttttgttctgt

SEQ ID NO: 1333287 - DNA, 25 bp, Homo sapien
tgctttggacaacaatcccaatctt

SEQ ID NO: 1333288 - DNA, 25 bp, Homo sapien
tcatttccacgcaaaacagaaaatc

SEQ ID NO: 1333289 - DNA, 25 bp, Homo sapien
ttccctggatttggcatctagctgt

SEQ ID NO: 1333290 - DNA, 25 bp, Homo sapien
tttggcatctagctgtttcctggaa

SEQ ID NO: 1333291 - DNA, 25 bp, Homo sapien
cgcaaaacagaaaatctcttgcaat

SEQ ID NO: 1333292 - DNA, 25 bp, Homo sapien
gaagaccgagggatcaaatgcacat

SEQ ID NO: 1333293 - DNA, 25 bp, Homo sapien
aagaccgagggatcaaatgcacatg

SEQ ID NO: 1333294 - DNA, 25 bp, Homo sapien
ttgaagaccgagggatcaaatgcac

SEQ ID NO: 1333295 - DNA, 25 bp, Homo sapien
agaccgagggatcaaatgcacatga

SEQ ID NO: 1333296 - DNA, 25 bp, Homo sapien
agagccaagggcggtccatggtcaa

SEQ ID NO: 1333297 - DNA, 25 bp, Homo sapien
caagggcggtccatggtcaagttct

SEQ ID NO: 1333298 - DNA, 25 bp, Homo sapien
agggcggtccatggtcaagttcttg

SEQ ID NO: 1333299 - DNA, 25 bp, Homo sapien
agccaagggcggtccatggtcaagt

SEQ ID NO: 1333300 - DNA, 25 bp, Homo sapien
tattgcccatgatacttatagtcac

SEQ ID NO: 1333301 - DNA, 25 bp, Homo sapien
ttgtgtgcatagcaatctagtttca

SEQ ID NO: 1333302 - DNA, 25 bp, Homo sapien
tgtcactgaaacttctaaccacagg

SEQ ID NO: 1333303 - DNA, 25 bp, Homo sapien
acagagccgcctcaatttgtgtgca

SEQ ID NO: 1333304 - DNA, 25 bp, Homo sapien
taatccattggtcttggaaggactc

SEQ ID NO: 1333305 - DNA, 25 bp, Homo sapien
cataattcttagataatccattggt

SEQ ID NO: 1333306 - DNA, 25 bp, Homo sapien
tcatagaataaaggtaaagttgaca

SEQ ID NO: 1333307 - DNA, 25 bp, Homo sapien
aaggactcttatagagatctgtttc

SEQ ID NO: 1333308 - DNA, 25 bp, Homo sapien
ccttcaggaacacttgatcactttt

SEQ ID NO: 1333309 - DNA, 25 bp, Homo sapien
cttcaggaacacttgatcacttttc

SEQ ID NO: 1333310 - DNA, 25 bp, Homo sapien
aatgtttgagaagcaccaaccagct

SEQ ID NO: 1333311 - DNA, 25 bp, Homo sapien
tttgagaagcaccaaccagctgtac

SEQ ID NO: 1333312 - DNA, 25 bp, Homo sapien
tgtttgagaagcaccaaccagctgt

SEQ ID NO: 1333313 - DNA, 25 bp, Homo sapien
gagaagcaccaaccagctgtaccct

SEQ ID NO: 1333314 - DNA, 25 bp, Homo sapien
catggccttgaatagtaagcaggaa

SEQ ID NO: 1333315 - DNA, 25 bp, Homo sapien
tgagcatggccttgaatagtaagca

SEQ ID NO: 1333316 - DNA, 25 bp, Homo sapien
gcagagtatgagcatggccttgaat

SEQ ID NO: 1333317 - DNA, 25 bp, Homo sapien
gagtatgagcatggccttgaatagt

SEQ ID NO: 1333318 - DNA, 25 bp, Homo sapien
gttgcaagtgcttgctgtgcccaag

SEQ ID NO: 1333319 - DNA, 25 bp, Homo sapien
ttgcaagtgcttgctgtgcccaagt

SEQ ID NO: 1333320 - DNA, 25 bp, Homo sapien
aagttgcaagtgcttgctgtgccca

SEQ ID NO: 1333321 - DNA, 25 bp, Homo sapien
agttgcaagtgcttgctgtgcccaa

SEQ ID NO: 1333322 - DNA, 25 bp, Homo sapien
atcagaagcctcattgacttttttt

SEQ ID NO: 1333323 - DNA, 25 bp, Homo sapien
tatcagaagcctcattgactttttt

SEQ ID NO: 1333324 - DNA, 25 bp, Homo sapien
tttatcagaagcctcattgactttt

SEQ ID NO: 1333325 - DNA, 25 bp, Homo sapien
cgtttatcagaagcctcattgactt

SEQ ID NO: 1333326 - DNA, 25 bp, Homo sapien
tgatgaagggccaaggatctacggc

SEQ ID NO: 1333327 - DNA, 25 bp, Homo sapien
caaacaacaacggtgggaggcaaga

SEQ ID NO: 1333328 - DNA, 25 bp, Homo sapien
caggagtcatagtcaggtcaccagc

SEQ ID NO: 1333329 - DNA, 25 bp, Homo sapien
tctaattgatgagttcgcccaccac

SEQ ID NO: 1333330 - DNA, 25 bp, Homo sapien
caacccatcaaaactctgattaggc

SEQ ID NO: 1333331 - DNA, 25 bp, Homo sapien
cttgaaagcttccaatcctggctgg

SEQ ID NO: 1333332 - DNA, 25 bp, Homo sapien
taggcatttgaaagggtggagcatt

SEQ ID NO: 1333333 - DNA, 25 bp, Homo sapien
aatgattgacaatggcttctatctc

SEQ ID NO: 1333334 - DNA, 25 bp, Homo sapien
tactgtaagggtatgggagactgcc

SEQ ID NO: 1333335 - DNA, 25 bp, Homo sapien
tggtgctgcccaacgtaggaatgtt

SEQ ID NO: 1333336 - DNA, 25 bp, Homo sapien
tattgagcacgcacgtatactgggt

SEQ ID NO: 1333337 - DNA, 25 bp, Homo sapien
catttctgaagacagccatgagggc

SEQ ID NO: 1333338 - DNA, 25 bp, Homo sapien
atatgttcactaccagacatagcaa

SEQ ID NO: 1333339 - DNA, 25 bp, Homo sapien
gccattcatatgttcactaccagac

SEQ ID NO: 1333340 - DNA, 25 bp, Homo sapien
tctgtgccattcatatgttcactac

SEQ ID NO: 1333341 - DNA, 25 bp, Homo sapien
ttttctgtgccattcatatgttcac

SEQ ID NO: 1333342 - DNA, 25 bp, Homo sapien
gagagtggaccttttgattgggtcc

SEQ ID NO: 1333343 - DNA, 25 bp, Homo sapien
tttgattgggtcctggtttcaatac

SEQ ID NO: 1333344 - DNA, 25 bp, Homo sapien
tggcctggagagtggaccttttgat

SEQ ID NO: 1333345 - DNA, 25 bp, Homo sapien
gattgggtcctggtttcaataccca

SEQ ID NO: 1333346 - DNA, 25 bp, Homo sapien
ctagtatgttgtcgtagacatagtc

SEQ ID NO: 1333347 - DNA, 25 bp, Homo sapien
tgatctagtatgttgtcgtagacat

SEQ ID NO: 1333348 - DNA, 25 bp, Homo sapien
tatgttgtcgtagacatagtcccag

SEQ ID NO: 1333349 - DNA, 25 bp, Homo sapien
gtatgttgtcgtagacatagtccca

SEQ ID NO: 1333350 - DNA, 25 bp, Homo sapien
aaggcttggagattgtattgcagag

SEQ ID NO: 1333351 - DNA, 25 bp, Homo sapien
gccaaggagccaaggcttggagatt

SEQ ID NO: 1333352 - DNA, 25 bp, Homo sapien
tggagattgtattgcagaggtgtaa

SEQ ID NO: 1333353 - DNA, 25 bp, Homo sapien
gccaaggcttggagattgtattgca

SEQ ID NO: 1333354 - DNA, 25 bp, Homo sapien
ccagttatcagagtattctgtgata

SEQ ID NO: 1333355 - DNA, 25 bp, Homo sapien
atatgtaaaccagttatcagagtat

SEQ ID NO: 1333356 - DNA, 25 bp, Homo sapien
taaaccagttatcagagtattctgt

SEQ ID NO: 1333357 - DNA, 25 bp, Homo sapien
tgtaaaccagttatcagagtattct

SEQ ID NO: 1333358 - DNA, 25 bp, Homo sapien
tatgtactgctcaatgtcacaatag

SEQ ID NO: 1333359 - DNA, 25 bp, Homo sapien
ctcaatgtcacaatagatgacacac

SEQ ID NO: 1333360 - DNA, 25 bp, Homo sapien
ctgctcaatgtcacaatagatgaca

SEQ ID NO: 1333361 - DNA, 25 bp, Homo sapien
ctatgtactgctcaatgtcacaata

SEQ ID NO: 1333362 - DNA, 25 bp, Homo sapien
gcatagtccaacttggggcttgggc

SEQ ID NO: 1333363 - DNA, 25 bp, Homo sapien
atattagagatgtagcagtaaagga

SEQ ID NO: 1333364 - DNA, 25 bp, Homo sapien
tagagatgtagcagtaaaggaacca

SEQ ID NO: 1333365 - DNA, 25 bp, Homo sapien
tagcagtaaaggaaccataaggcat

SEQ ID NO: 1333366 - DNA, 25 bp, Homo sapien
tgcaaatgagtcataacctttccca

SEQ ID NO: 1333367 - DNA, 25 bp, Homo sapien
gcaaatgagtcataacctttcccat

SEQ ID NO: 1333368 - DNA, 25 bp, Homo sapien
aaggccatattcttcccaggttgct

SEQ ID NO: 1333369 - DNA, 25 bp, Homo sapien
taggcctgccccatacagaattctg

SEQ ID NO: 1333370 - DNA, 25 bp, Homo sapien
ccaggttgctcccagtctaagtctt

SEQ ID NO: 1333371 - DNA, 25 bp, Homo sapien
tacttccatgttcatgtcaaggcca

SEQ ID NO: 1333372 - DNA, 25 bp, Homo sapien
gctgtgagtgacttattccttccaa

SEQ ID NO: 1333373 - DNA, 25 bp, Homo sapien
gagtaggttccatgaacatggggca

SEQ ID NO: 1333374 - DNA, 25 bp, Homo sapien
cttttgtagcaatttagcaaagtat

SEQ ID NO: 1333375 - DNA, 25 bp, Homo sapien
ggttccatgaacatggggcagaagc

SEQ ID NO: 1333376 - DNA, 25 bp, Homo sapien
cctgtatagggctagggttcagcgt

SEQ ID NO: 1333377 - DNA, 25 bp, Homo sapien
tatagggctagggttcagcgtggcc

SEQ ID NO: 1333378 - DNA, 25 bp, Homo sapien
atagggctagggttcagcgtggcca

SEQ ID NO: 1333379 - DNA, 25 bp, Homo sapien
tgtatagggctagggttcagcgtgg

SEQ ID NO: 1333380 - DNA, 25 bp, Homo sapien
tgacatttctcactgataaggatta

SEQ ID NO: 1333381 - DNA, 25 bp, Homo sapien
catttctcactgataaggattaaga

SEQ ID NO: 1333382 - DNA, 25 bp, Homo sapien
atgacatttctcactgataaggatt

SEQ ID NO: 1333383 - DNA, 25 bp, Homo sapien
ttctcactgataaggattaagatgc

SEQ ID NO: 1333384 - DNA, 25 bp, Homo sapien
ttaaggaatagcagactgcctgtca

SEQ ID NO: 1333385 - DNA, 25 bp, Homo sapien
ttccattcagctggtacttggccat

SEQ ID NO: 1333386 - DNA, 25 bp, Homo sapien
cctgtcagaggtgccgaaccatttc

SEQ ID NO: 1333387 - DNA, 25 bp, Homo sapien
ttccccatccatgaaagtcgtcagg

SEQ ID NO: 1333388 - DNA, 25 bp, Homo sapien
atcacagggatcatcagcagctgcc

SEQ ID NO: 1333389 - DNA, 25 bp, Homo sapien
ctcgagcctcttgtaagccggggga

SEQ ID NO: 1333390 - DNA, 25 bp, Homo sapien
agcctcttgtaagccgggggaagct

SEQ ID NO: 1333391 - DNA, 25 bp, Homo sapien
tctgatcacagggatcatcagcagc

SEQ ID NO: 1333392 - DNA, 25 bp, Homo sapien
cactggaggcttcttaagacctagc

SEQ ID NO: 1333393 - DNA, 25 bp, Homo sapien
gaatttacttcatacctgtggcaag

SEQ ID NO: 1333394 - DNA, 25 bp, Homo sapien
tagcacagtatacctgagcacaggt

SEQ ID NO: 1333395 - DNA, 25 bp, Homo sapien
aatctaggtggactctgagggcagc

SEQ ID NO: 1333396 - DNA, 25 bp, Homo sapien
ttgttcttttatctatgcagtcagc

SEQ ID NO: 1333397 - DNA, 25 bp, Homo sapien
gaccctcttgttcttttatctatgc

SEQ ID NO: 1333398 - DNA, 25 bp, Homo sapien
tggatttgaccctcttgttctttta

SEQ ID NO: 1333399 - DNA, 25 bp, Homo sapien
atggatttgaccctcttgttctttt

SEQ ID NO: 1333400 - DNA, 25 bp, Homo sapien
atgtgcccatggcacactgcagagc

SEQ ID NO: 1333401 - DNA, 25 bp, Homo sapien
catgtgcccatggcacactgcagag

SEQ ID NO: 1333402 - DNA, 25 bp, Homo sapien
ctcatgtgcccatggcacactgcag

SEQ ID NO: 1333403 - DNA, 25 bp, Homo sapien
tcatgtgcccatggcacactgcaga

SEQ ID NO: 1333404 - DNA, 25 bp, Homo sapien
tcaagttatgtatcaatagcctcct

SEQ ID NO: 1333405 - DNA, 25 bp, Homo sapien
gattgagtcagtcagtatgacccac

SEQ ID NO: 1333406 - DNA, 25 bp, Homo sapien
aaagcacaggagcaactcttatgtg

SEQ ID NO: 1333407 - DNA, 25 bp, Homo sapien
gtttcctccctgatccgtgtcttgc

SEQ ID NO: 1333408 - DNA, 25 bp, Homo sapien
tcagtgttagaattccaagaaggct

SEQ ID NO: 1333409 - DNA, 25 bp, Homo sapien
ttatggaatacctactaagcggcag

SEQ ID NO: 1333410 - DNA, 25 bp, Homo sapien
cactgattattaactggcatgcttt

SEQ ID NO: 1333411 - DNA, 25 bp, Homo sapien
taagcggcaggtactatatttggga

SEQ ID NO: 1333412 - DNA, 25 bp, Homo sapien
gaattgggaatgtgcgtttgggctg

SEQ ID NO: 1333413 - DNA, 25 bp, Homo sapien
cacaggaattgggaatgtgcgtttg

SEQ ID NO: 1333414 - DNA, 25 bp, Homo sapien
tacacaggaattgggaatgtgcgtt

SEQ ID NO: 1333415 - DNA, 25 bp, Homo sapien
gtagtacacaggaattgggaatgtg

SEQ ID NO: 1333416 - DNA, 25 bp, Homo sapien
cattccagaagtagtttccatccat

SEQ ID NO: 1333417 - DNA, 25 bp, Homo sapien
tagtccataacattgacttcctcac

SEQ ID NO: 1333418 - DNA, 25 bp, Homo sapien
taaggtgcaagtcctatagatgtga

SEQ ID NO: 1333419 - DNA, 25 bp, Homo sapien
cattggtatgggcagaccaggtgaa

SEQ ID NO: 1333420 - DNA, 25 bp, Homo sapien
cttcctcactgtttagtaaggtgca

SEQ ID NO: 1333421 - DNA, 25 bp, Homo sapien
agctccattggtaatactccctaaa

SEQ ID NO: 1333422 - DNA, 25 bp, Homo sapien
gctccattggtaatactccctaaaa

SEQ ID NO: 1333423 - DNA, 25 bp, Homo sapien
aagctccattggtaatactccctaa

SEQ ID NO: 1333424 - DNA, 25 bp, Homo sapien
tgatggttcttggatagtattccca

SEQ ID NO: 1333425 - DNA, 25 bp, Homo sapien
cttgatggttcttggatagtattcc

SEQ ID NO: 1333426 - DNA, 25 bp, Homo sapien
ctcttgatggttcttggatagtatt

SEQ ID NO: 1333427 - DNA, 25 bp, Homo sapien
gatggttcttggatagtattcccaa

SEQ ID NO: 1333428 - DNA, 25 bp, Homo sapien
ccagtgtggtcagctatattgtgcg

SEQ ID NO: 1333429 - DNA, 25 bp, Homo sapien
tgcaactttcccaagcgctgagctg

SEQ ID NO: 1333430 - DNA, 25 bp, Homo sapien
cttatcaagtgcagaccagtgtggt

SEQ ID NO: 1333431 - DNA, 25 bp, Homo sapien
gaagtgcctatttatggaaccccac

SEQ ID NO: 1333432 - DNA, 25 bp, Homo sapien
tgccttcagggtgccggtcaaatag

SEQ ID NO: 1333433 - DNA, 25 bp, Homo sapien
ggtcaaatagctggagttcagccac

SEQ ID NO: 1333434 - DNA, 25 bp, Homo sapien
tcagggtgccggtcaaatagctgga

SEQ ID NO: 1333435 - DNA, 25 bp, Homo sapien
gggaaatccacatggttttgatgat

SEQ ID NO: 1333436 - DNA, 25 bp, Homo sapien
tacttgtacatctcacaaagcacaa

SEQ ID NO: 1333437 - DNA, 25 bp, Homo sapien
gcttgcttacaagggtgatcctgcc

SEQ ID NO: 1333438 - DNA, 25 bp, Homo sapien
aaaaacccaacagccgatacagtgc

SEQ ID NO: 1333439 - DNA, 25 bp, Homo sapien
tatgcctttgcttagactgttttga

SEQ ID NO: 1333440 - DNA, 25 bp, Homo sapien
tgaataactgggcactcttgcctag

SEQ ID NO: 1333441 - DNA, 25 bp, Homo sapien
gagttgccaccacagtagctctgga

SEQ ID NO: 1333442 - DNA, 25 bp, Homo sapien
cagggtcccaatagcatcgagttgc

SEQ ID NO: 1333443 - DNA, 25 bp, Homo sapien
tcaaagggtaagaaggcccacaggc

SEQ ID NO: 1333444 - DNA, 25 bp, Homo sapien
ttgagcaattttccgggtaacattg

SEQ ID NO: 1333445 - DNA, 25 bp, Homo sapien
aagatgatttttgagcaattttccg

SEQ ID NO: 1333446 - DNA, 25 bp, Homo sapien
acaggatatgctggcagaagaagta

SEQ ID NO: 1333447 - DNA, 25 bp, Homo sapien
ccgggtaacattgagggataggaca

SEQ ID NO: 1333448 - DNA, 25 bp, Homo sapien
gcacaggtcttgtagtggcaaattc

SEQ ID NO: 1333449 - DNA, 25 bp, Homo sapien
ggcacaggtcttgtagtggcaaatt

SEQ ID NO: 1333450 - DNA, 25 bp, Homo sapien
cacaggtcttgtagtggcaaattct

SEQ ID NO: 1333451 - DNA, 25 bp, Homo sapien
aggaagcgtcttctccattggcagt

SEQ ID NO: 1333452 - DNA, 25 bp, Homo sapien
ccaggaagcgtcttctccattggca

SEQ ID NO: 1333453 - DNA, 25 bp, Homo sapien
caggaagcgtcttctccattggcag

SEQ ID NO: 1333454 - DNA, 25 bp, Homo sapien
aatctggagagatcttttatttggt

SEQ ID NO: 1333455 - DNA, 25 bp, Homo sapien
cagcatcaaggggttagaacacatg

SEQ ID NO: 1333456 - DNA, 25 bp, Homo sapien
cacatattgtacagcatcaaggggt

SEQ ID NO: 1333457 - DNA, 25 bp, Homo sapien
acagtaaatctctaaatctggagag

SEQ ID NO: 1333458 - DNA, 25 bp, Homo sapien
ttgtggccgattggcccatgattat

SEQ ID NO: 1333459 - DNA, 25 bp, Homo sapien
tgtggccgattggcccatgattatt

SEQ ID NO: 1333460 - DNA, 25 bp, Homo sapien
attgtggccgattggcccatgatta

SEQ ID NO: 1333461 - DNA, 25 bp, Homo sapien
gaattttccccgagtgtggattgct

SEQ ID NO: 1333462 - DNA, 25 bp, Homo sapien
gtggattgctatgtatttcttcggg

SEQ ID NO: 1333463 - DNA, 25 bp, Homo sapien
atctgttaatgtgcaggaaccttgg

SEQ ID NO: 1333464 - DNA, 25 bp, Homo sapien
gacttcttgtcacccatccacatgg

SEQ ID NO: 1333465 - DNA, 25 bp, Homo sapien
ggcctggggatgggatataacccac

SEQ ID NO: 1333466 - DNA, 25 bp, Homo sapien
tagaggaagaatcagcaccccactc

SEQ ID NO: 1333467 - DNA, 25 bp, Homo sapien
ccactctgcatgctcaaacttcctt

SEQ ID NO: 1333468 - DNA, 25 bp, Homo sapien
gctgtagaggaagaatcagcacccc

SEQ ID NO: 1333469 - DNA, 25 bp, Homo sapien
ttttacatctatacccaacttacca

SEQ ID NO: 1333470 - DNA, 25 bp, Homo sapien
gatggaaaccttggtacatcacatt

SEQ ID NO: 1333471 - DNA, 25 bp, Homo sapien
gaggggtctcagtccttgacagctg

SEQ ID NO: 1333472 - DNA, 25 bp, Homo sapien
cttaccaacaattccttgaggacag

SEQ ID NO: 1333473 - DNA, 25 bp, Homo sapien
caagatacatcctgagctgtgacag

SEQ ID NO: 1333474 - DNA, 25 bp, Homo sapien
taaagaggactccataggaaagcgc

SEQ ID NO: 1333475 - DNA, 25 bp, Homo sapien
tgagtgtgggagtcagcttccagcc

SEQ ID NO: 1333476 - DNA, 25 bp, Homo sapien
ctgtgacagctgatggaaaccgggc

SEQ ID NO: 1333477 - DNA, 25 bp, Homo sapien
tccagtgtctggttaagtcttctct

SEQ ID NO: 1333478 - DNA, 25 bp, Homo sapien
gtctggttaagtcttctctgaaatt

SEQ ID NO: 1333479 - DNA, 25 bp, Homo sapien
cagtgtctggttaagtcttctctga

SEQ ID NO: 1333480 - DNA, 25 bp, Homo sapien
tcctccagtgtctggttaagtcttc

SEQ ID NO: 1333481 - DNA, 25 bp, Homo sapien
tagaatctgggtttgaggggggcag

SEQ ID NO: 1333482 - DNA, 25 bp, Homo sapien
tgacagttgatggtgagggcaggtg

SEQ ID NO: 1333483 - DNA, 25 bp, Homo sapien
tagtggggcacagtgagagtgagac

SEQ ID NO: 1333484 - DNA, 25 bp, Homo sapien
gatataaacttggtgctgttagtgg

SEQ ID NO: 1333485 - DNA, 25 bp, Homo sapien
agcagtcattacagtggggtactca

SEQ ID NO: 1333486 - DNA, 25 bp, Homo sapien
tatggcactgggtactgcagtcagc

SEQ ID NO: 1333487 - DNA, 25 bp, Homo sapien
ttccctgcacaatatggtgtgacaa

SEQ ID NO: 1333488 - DNA, 25 bp, Homo sapien
gaagcttccctgaaaggtctcccat

SEQ ID NO: 1333489 - DNA, 25 bp, Homo sapien
cgttaatccccacaccctgagagga

SEQ ID NO: 1333490 - DNA, 25 bp, Homo sapien
tagctatagagatcaagagtcgcat

SEQ ID NO: 1333491 - DNA, 25 bp, Homo sapien
aagagacctatttgccagttatggg

SEQ ID NO: 1333492 - DNA, 25 bp, Homo sapien
tgaacctcggcatacctcaggatcc

SEQ ID NO: 1333493 - DNA, 25 bp, Homo sapien
tcataggccaagatgtgggttctgg

SEQ ID NO: 1333494 - DNA, 25 bp, Homo sapien
accagcggttgagagggaatctgac

SEQ ID NO: 1333495 - DNA, 25 bp, Homo sapien
ggaaccagtgaacaaccagcggttg

SEQ ID NO: 1333496 - DNA, 25 bp, Homo sapien
ctttcataggccaagatgtgggttc

SEQ ID NO: 1333497 - DNA, 25 bp, Homo sapien
aataggcccacatggagcaagggag

SEQ ID NO: 1333498 - DNA, 25 bp, Homo sapien
tgagctgaaaatggaagggtatcgc

SEQ ID NO: 1333499 - DNA, 25 bp, Homo sapien
tctctcttaccctgtttgggaggcc

SEQ ID NO: 1333500 - DNA, 25 bp, Homo sapien
ccccagatcatgctctgttttgcca

SEQ ID NO: 1333501 - DNA, 25 bp, Homo sapien
ctctacccacagctgctggatctga

SEQ ID NO: 1333502 - DNA, 25 bp, Homo sapien
cagctgctggatctgatcttcatcc

SEQ ID NO: 1333503 - DNA, 25 bp, Homo sapien
cacagtagtaatgagaagcaggact

SEQ ID NO: 1333504 - DNA, 25 bp, Homo sapien
cagtccacagtagtaatgagaagca

SEQ ID NO: 1333505 - DNA, 25 bp, Homo sapien
aaattaccaggtatgactgagcagg

SEQ ID NO: 1333506 - DNA, 25 bp, Homo sapien
gagggaacctcatgattttgaatcc

SEQ ID NO: 1333507 - DNA, 25 bp, Homo sapien
gagagtcagggaacacgatcaccta

SEQ ID NO: 1333508 - DNA, 25 bp, Homo sapien
caccaacttttccaagggagcagtt

SEQ ID NO: 1333509 - DNA, 25 bp, Homo sapien
tgattcctctagagagtcctccttc

SEQ ID NO: 1333510 - DNA, 25 bp, Homo sapien
gattcctctagagagtcctccttcc

SEQ ID NO: 1333511 - DNA, 25 bp, Homo sapien
attcctctagagagtcctccttcct

SEQ ID NO: 1333512 - DNA, 25 bp, Homo sapien
cagtgaactcggtagagacctccat

SEQ ID NO: 1333513 - DNA, 25 bp, Homo sapien
cctttactcccagtgaactcggtag

SEQ ID NO: 1333514 - DNA, 25 bp, Homo sapien
tactcccagtgaactcggtagagac

SEQ ID NO: 1333515 - DNA, 25 bp, Homo sapien
tcccagtgaactcggtagagacctc

SEQ ID NO: 1333516 - DNA, 25 bp, Homo sapien
tatctcgcagtacatggacaagatc

SEQ ID NO: 1333517 - DNA, 25 bp, Homo sapien
caagtcattctggaatatctcgcag

SEQ ID NO: 1333518 - DNA, 25 bp, Homo sapien
tctcatgggagctataacacaggcc

SEQ ID NO: 1333519 - DNA, 25 bp, Homo sapien
ttcccgcctgtgagatgcagccgtt

SEQ ID NO: 1333520 - DNA, 25 bp, Homo sapien
tatggttacctgactgccaagagcc

SEQ ID NO: 1333521 - DNA, 25 bp, Homo sapien
ttagccagagcctcatccctgaaaa

SEQ ID NO: 1333522 - DNA, 25 bp, Homo sapien
tgcagcctggtgtgatgctataccc

SEQ ID NO: 1333523 - DNA, 25 bp, Homo sapien
ggcaccccttcccaattagccagag

SEQ ID NO: 1333524 - DNA, 25 bp, Homo sapien
tatggagcaagtacacagggcatgc

SEQ ID NO: 1333525 - DNA, 25 bp, Homo sapien
tgtgtctacatagaacataagggcc

SEQ ID NO: 1333526 - DNA, 25 bp, Homo sapien
tacaaccccataacaatagcaacta

SEQ ID NO: 1333527 - DNA, 25 bp, Homo sapien
tcttttgctgcttaacttacaaccc

SEQ ID NO: 1333528 - DNA, 25 bp, Homo sapien
gcttgaataggactggaggacccac

SEQ ID NO: 1333529 - DNA, 25 bp, Homo sapien
agtgcttctctcttagggtgtccca

SEQ ID NO: 1333530 - DNA, 25 bp, Homo sapien
aaatgtcagccacgaagtttcagtc

SEQ ID NO: 1333531 - DNA, 25 bp, Homo sapien
caaaaattcaggaggtgagtgcttc

SEQ ID NO: 1333532 - DNA, 25 bp, Homo sapien
gagtcatagcgatagcactgttctg

SEQ ID NO: 1333533 - DNA, 25 bp, Homo sapien
gaaatgagtcatagcgatagcactg

SEQ ID NO: 1333534 - DNA, 25 bp, Homo sapien
tcatagcgatagcactgttctgtac

SEQ ID NO: 1333535 - DNA, 25 bp, Homo sapien
gcagaaatgagtcatagcgatagca

SEQ ID NO: 1333536 - DNA, 25 bp, Homo sapien
tattttagactcaggtgaacatgtg

SEQ ID NO: 1333537 - DNA, 25 bp, Homo sapien
cagtaggtcccaaagtctgttgttt

SEQ ID NO: 1333538 - DNA, 25 bp, Homo sapien
ttcttgatttgggtctcatcttaga

SEQ ID NO: 1333539 - DNA, 25 bp, Homo sapien
tgggtctcatcttagacgttgttga

SEQ ID NO: 1333540 - DNA, 25 bp, Homo sapien
catcttagacgttgttgatgtatag

SEQ ID NO: 1333541 - DNA, 25 bp, Homo sapien
tcttactatctatgagcatgtaata

SEQ ID NO: 1333542 - DNA, 25 bp, Homo sapien
cttgcagcttcgtgatactgggtcc

SEQ ID NO: 1333543 - DNA, 25 bp, Homo sapien
tgttaggctcagctcacttcctggt

SEQ ID NO: 1333544 - DNA, 25 bp, Homo sapien
tatgttcctgtgagcacatgtaggc

SEQ ID NO: 1333545 - DNA, 25 bp, Homo sapien
catgtaggcagttaaggtttgatcc

SEQ ID NO: 1333546 - DNA, 25 bp, Homo sapien
ttcaaaaatatcatgggaatcagtg

SEQ ID NO: 1333547 - DNA, 25 bp, Homo sapien
gcaagagattaattttagaacacca

SEQ ID NO: 1333548 - DNA, 25 bp, Homo sapien
gaaatacatgcaacccagacacctt

SEQ ID NO: 1333549 - DNA, 25 bp, Homo sapien
tgagaatgacacagaaatacatgca

SEQ ID NO: 1333550 - DNA, 25 bp, Homo sapien
tctagtgatttattaacaacaacgt

SEQ ID NO: 1333551 - DNA, 25 bp, Homo sapien
tgcccgccttactttgtgatcctca

SEQ ID NO: 1333552 - DNA, 25 bp, Homo sapien
tgttaggatttacagtatgcctctt

SEQ ID NO: 1333553 - DNA, 25 bp, Homo sapien
gagtaaactatcatttctgcccgcc

SEQ ID NO: 1333554 - DNA, 25 bp, Homo sapien
ttttgtagatctcagtttccatctg

SEQ ID NO: 1333555 - DNA, 25 bp, Homo sapien
tatagtgcaggtctgtggatgacac

SEQ ID NO: 1333556 - DNA, 25 bp, Homo sapien
atagtgcaggtctgtggatgacaca

SEQ ID NO: 1333557 - DNA, 25 bp, Homo sapien
attttgtagatctcagtttccatct

SEQ ID NO: 1333558 - DNA, 25 bp, Homo sapien
gatggaaatatgctcctcagtgtca

SEQ ID NO: 1333559 - DNA, 25 bp, Homo sapien
tgaagcaccagaaacgatgggcttg

SEQ ID NO: 1333560 - DNA, 25 bp, Homo sapien
ggcagaccagcagctaccgatagag

SEQ ID NO: 1333561 - DNA, 25 bp, Homo sapien
tctctgtcaggagaatcactgtgca

SEQ ID NO: 1333562 - DNA, 25 bp, Homo sapien
ccactcagtggtcattcctacccat

SEQ ID NO: 1333563 - DNA, 25 bp, Homo sapien
gtgagctgctgaccagtcttccatg

SEQ ID NO: 1333564 - DNA, 25 bp, Homo sapien
cagtggtcattcctacccattcagt

SEQ ID NO: 1333565 - DNA, 25 bp, Homo sapien
gtgtgagctgctgaccagtcttcca

SEQ ID NO: 1333566 - DNA, 25 bp, Homo sapien
ggctcagtaacaatcagaacccatg

SEQ ID NO: 1333567 - DNA, 25 bp, Homo sapien
taggagtagcttcaatggtagcagc

SEQ ID NO: 1333568 - DNA, 25 bp, Homo sapien
caaagacacaagctgctagcagaag

SEQ ID NO: 1333569 - DNA, 25 bp, Homo sapien
aggatggaggtcaaccctgggctca

SEQ ID NO: 1333570 - DNA, 25 bp, Homo sapien
cagcaaaaaacttaagaacatcctc

SEQ ID NO: 1333571 - DNA, 25 bp, Homo sapien
tgggttcctgcagcaaaaaacttaa

SEQ ID NO: 1333572 - DNA, 25 bp, Homo sapien
cctgcagcaaaaaacttaagaacat

SEQ ID NO: 1333573 - DNA, 25 bp, Homo sapien
taaatgggttcctgcagcaaaaaac

SEQ ID NO: 1333574 - DNA, 25 bp, Homo sapien
acaaggcccctcttgggtcgtggct

SEQ ID NO: 1333575 - DNA, 25 bp, Homo sapien
ctgagccttcgtgggtctgcatcca

SEQ ID NO: 1333576 - DNA, 25 bp, Homo sapien
tacggtaaccgctgaggccttctct

SEQ ID NO: 1333577 - DNA, 25 bp, Homo sapien
cctcttgggtcgtggctgcctgagc

SEQ ID NO: 1333578 - DNA, 25 bp, Homo sapien
gcattcaggcgtgaaatctctttca

SEQ ID NO: 1333579 - DNA, 25 bp, Homo sapien
ggccagagtctggtgcaagtgacaa

SEQ ID NO: 1333580 - DNA, 25 bp, Homo sapien
cccagttcccttgataatgtacaga

SEQ ID NO: 1333581 - DNA, 25 bp, Homo sapien
tggtcgtttgtttccccgatggaga

SEQ ID NO: 1333582 - DNA, 25 bp, Homo sapien
gttccagaaggaaagatattgtgat

SEQ ID NO: 1333583 - DNA, 25 bp, Homo sapien
aaggaaagatattgtgatttgggaa

SEQ ID NO: 1333584 - DNA, 25 bp, Homo sapien
agatattgtgatttgggaagggggg

SEQ ID NO: 1333585 - DNA, 25 bp, Homo sapien
gaaagatattgtgatttgggaaggg

SEQ ID NO: 1333586 - DNA, 25 bp, Homo sapien
taatttagcttctgcatatccttct

SEQ ID NO: 1333587 - DNA, 25 bp, Homo sapien
tgtaatttagcttctgcatatcctt

SEQ ID NO: 1333588 - DNA, 25 bp, Homo sapien
gtaatttagcttctgcatatccttc

SEQ ID NO: 1333589 - DNA, 25 bp, Homo sapien
gaagaacaaagtggactgccggctg

SEQ ID NO: 1333590 - DNA, 25 bp, Homo sapien
agttgtccccaaagcgatccatcga

SEQ ID NO: 1333591 - DNA, 25 bp, Homo sapien
gatccatcgattcagtgtaatgtcc

SEQ ID NO: 1333592 - DNA, 25 bp, Homo sapien
tgttagatccaacaccacaggcagg

SEQ ID NO: 1333593 - DNA, 25 bp, Homo sapien
tggccccaaggatacttgacagatc

SEQ ID NO: 1333594 - DNA, 25 bp, Homo sapien
ttgacagatcaaattgaaccaggcc

SEQ ID NO: 1333595 - DNA, 25 bp, Homo sapien
caatctggcaatctgtctggcccca

SEQ ID NO: 1333596 - DNA, 25 bp, Homo sapien
catattggccttggtgcctgcagct

SEQ ID NO: 1333597 - DNA, 25 bp, Homo sapien
caccaggattatttgtggctataac

SEQ ID NO: 1333598 - DNA, 25 bp, Homo sapien
tctgttgcaattttccaccaggatt

SEQ ID NO: 1333599 - DNA, 25 bp, Homo sapien
tgttgcaattttccaccaggattat

SEQ ID NO: 1333600 - DNA, 25 bp, Homo sapien
tgtggctataacaagcaagaccacg

SEQ ID NO: 1333601 - DNA, 25 bp, Homo sapien
tccatgaacacttgccaaaaggcag

SEQ ID NO: 1333602 - DNA, 25 bp, Homo sapien
ttttgcctggctcgaaacaaggcac

SEQ ID NO: 1333603 - DNA, 25 bp, Homo sapien
ggagactcccagttataagtcagga

SEQ ID NO: 1333604 - DNA, 25 bp, Homo sapien
tcttagagaattcaaggactcctcg

SEQ ID NO: 1333605 - DNA, 25 bp, Homo sapien
tctggtctgccttctatggtgtctg

SEQ ID NO: 1333606 - DNA, 25 bp, Homo sapien
tctttccagtggacttgatccagaa

SEQ ID NO: 1333607 - DNA, 25 bp, Homo sapien
cataatcccagaccaaaaattgctt

SEQ ID NO: 1333608 - DNA, 25 bp, Homo sapien
tattccaagactctgcatgttctcg

SEQ ID NO: 1333609 - DNA, 25 bp, Homo sapien
cttcaaattgaagtgaaggtgtaac

SEQ ID NO: 1333610 - DNA, 25 bp, Homo sapien
aaattgaagtgaaggtgtaacctgc

SEQ ID NO: 1333611 - DNA, 25 bp, Homo sapien
caaataacttcaaattgaagtgaag

SEQ ID NO: 1333612 - DNA, 25 bp, Homo sapien
tgaagtgaaggtgtaacctgctctc

SEQ ID NO: 1333613 - DNA, 25 bp, Homo sapien
tggaattcacattttcatacttgac

SEQ ID NO: 1333614 - DNA, 25 bp, Homo sapien
ttgactatggcaggccagtgtccag

SEQ ID NO: 1333615 - DNA, 25 bp, Homo sapien
catctggcggctgcaaaaacagtga

SEQ ID NO: 1333616 - DNA, 25 bp, Homo sapien
tcatccacatctggcggctgcaaaa

SEQ ID NO: 1333617 - DNA, 25 bp, Homo sapien
ggatgccaatatggaggcctcgaag

SEQ ID NO: 1333618 - DNA, 25 bp, Homo sapien
aacacttgtgtttttccgatggagc

SEQ ID NO: 1333619 - DNA, 25 bp, Homo sapien
caccagtgaagtcgacctcaggaaa

SEQ ID NO: 1333620 - DNA, 25 bp, Homo sapien
agtaatcgaagcctacccaccagtg

SEQ ID NO: 1333621 - DNA, 25 bp, Homo sapien
catgagaagtaagccagaactcgta

SEQ ID NO: 1333622 - DNA, 25 bp, Homo sapien
tgtgataatagcatgagaagtaagc

SEQ ID NO: 1333623 - DNA, 25 bp, Homo sapien
cttggcagatgtgataatagcatga

SEQ ID NO: 1333624 - DNA, 25 bp, Homo sapien
taagccagaactcgtagattggcca

SEQ ID NO: 1333625 - DNA, 25 bp, Homo sapien
tatgatgctaagagtcgctcttctg

SEQ ID NO: 1333626 - DNA, 25 bp, Homo sapien
gaggcaagcaaatagtgtcttctgc

SEQ ID NO: 1333627 - DNA, 25 bp, Homo sapien
caagcaaatagtgtcttctgccttc

SEQ ID NO: 1333628 - DNA, 25 bp, Homo sapien
gctcttctgcgtcatccagaggcaa

SEQ ID NO: 1333629 - DNA, 25 bp, Homo sapien
cctggacagactcccataagccagt

SEQ ID NO: 1333630 - DNA, 25 bp, Homo sapien
taagctctcgggataaatggttcag

SEQ ID NO: 1333631 - DNA, 25 bp, Homo sapien
catccttggggctcttaagctctcg

SEQ ID NO: 1333632 - DNA, 25 bp, Homo sapien
gacagactcccataagccagtgcct

SEQ ID NO: 1333633 - DNA, 25 bp, Homo sapien
tatacatagaatccttttcatgtca

SEQ ID NO: 1333634 - DNA, 25 bp, Homo sapien
gcactatattttggtgtcgaaaaga

SEQ ID NO: 1333635 - DNA, 25 bp, Homo sapien
gacttttttggtgcaggtttactgc

SEQ ID NO: 1333636 - DNA, 25 bp, Homo sapien
tcgaaaagaagtatgccgccattct

SEQ ID NO: 1333637 - DNA, 25 bp, Homo sapien
tcttcctggcaaagtctagtgtcag

SEQ ID NO: 1333638 - DNA, 25 bp, Homo sapien
tagtgtcaggtttcaagggcaccat

SEQ ID NO: 1333639 - DNA, 25 bp, Homo sapien
tgcataaaagtcagctgttatcttc

SEQ ID NO: 1333640 - DNA, 25 bp, Homo sapien
gagttggaagtaggttaatatcttc

SEQ ID NO: 1333641 - DNA, 25 bp, Homo sapien
gcattgtccactaatgacggagcag

SEQ ID NO: 1333642 - DNA, 25 bp, Homo sapien
gacttaggcacatcaggttttaccc

SEQ ID NO: 1333643 - DNA, 25 bp, Homo sapien
taacttggataagacacgtggcccc

SEQ ID NO: 1333644 - DNA, 25 bp, Homo sapien
gaaaatctgtgcaaggaaacgtctg

SEQ ID NO: 1333645 - DNA, 25 bp, Homo sapien
ttttagctctgtaatgaaagggccc

SEQ ID NO: 1333646 - DNA, 25 bp, Homo sapien
aatatttgggcactgtgatccaccc

SEQ ID NO: 1333647 - DNA, 25 bp, Homo sapien
gcaatgataccccagtagcagagag

SEQ ID NO: 1333648 - DNA, 25 bp, Homo sapien
cagagactccaatagatgaagatag

SEQ ID NO: 1333649 - DNA, 25 bp, Homo sapien
cgagaatctcttgttgtcagaaaac

SEQ ID NO: 1333650 - DNA, 25 bp, Homo sapien
gaggtactcaaagattgatggcgaa

SEQ ID NO: 1333651 - DNA, 25 bp, Homo sapien
gaacataggaattggtttgaaggaa

SEQ ID NO: 1333652 - DNA, 25 bp, Homo sapien
aaatataaggtaagtcgagaatctc

SEQ ID NO: 1333653 - DNA, 25 bp, Homo sapien
gcttttatcggaatgctgagaccaa

SEQ ID NO: 1333654 - DNA, 25 bp, Homo sapien
gtaatatatgatttggctgctccca

SEQ ID NO: 1333655 - DNA, 25 bp, Homo sapien
cataggaaactgtcccaatttgggc

SEQ ID NO: 1333656 - DNA, 25 bp, Homo sapien
cccaactgtatagggtgggcaaatt

SEQ ID NO: 1333657 - DNA, 25 bp, Homo sapien
aatggtggctttaatctacaaagac

SEQ ID NO: 1333658 - DNA, 25 bp, Homo sapien
taatttagacagttatacagcttgt

SEQ ID NO: 1333659 - DNA, 25 bp, Homo sapien
ctacaaagactgatttatcttagtc

SEQ ID NO: 1333660 - DNA, 25 bp, Homo sapien
taagtaatttagacagttatacagc

SEQ ID NO: 1333661 - DNA, 25 bp, Homo sapien
gattcgtatcttcgtgctccaacaa

SEQ ID NO: 1333662 - DNA, 25 bp, Homo sapien
agtgtgaaaaactctcccctctgct

SEQ ID NO: 1333663 - DNA, 25 bp, Homo sapien
tctgctctgcagtgaactggaaaag

SEQ ID NO: 1333664 - DNA, 25 bp, Homo sapien
gttctacagggccacatctgccgag

SEQ ID NO: 1333665 - DNA, 25 bp, Homo sapien
tctgctaaagacctttggaggtccc

SEQ ID NO: 1333666 - DNA, 25 bp, Homo sapien
caagcagtcttaaagcgaaaagtcc

SEQ ID NO: 1333667 - DNA, 25 bp, Homo sapien
ggaggtcccaagcagtcttaaagcg

SEQ ID NO: 1333668 - DNA, 25 bp, Homo sapien
cttccaatagggtgcttgcttgcat

SEQ ID NO: 1333669 - DNA, 25 bp, Homo sapien
gccgacttgtggagagaaggcaaat

SEQ ID NO: 1333670 - DNA, 25 bp, Homo sapien
agaaggcaaataaagtgggatggct

SEQ ID NO: 1333671 - DNA, 25 bp, Homo sapien
gaggccgacttgtggagagaaggca

SEQ ID NO: 1333672 - DNA, 25 bp, Homo sapien
aggcaaataaagtgggatggctttc

SEQ ID NO: 1333673 - DNA, 25 bp, Homo sapien
ttttgttgactgctaggttgctttt

SEQ ID NO: 1333674 - DNA, 25 bp, Homo sapien
cttttgttgactgctaggttgcttt

SEQ ID NO: 1333675 - DNA, 25 bp, Homo sapien
acttttgttgactgctaggttgctt

SEQ ID NO: 1333676 - DNA, 25 bp, Homo sapien
gacttttgttgactgctaggttgct

SEQ ID NO: 1333677 - DNA, 25 bp, Homo sapien
tctggctcaaagcatgaggacgctc

SEQ ID NO: 1333678 - DNA, 25 bp, Homo sapien
tgttgggctgccatagagaatgacc

SEQ ID NO: 1333679 - DNA, 25 bp, Homo sapien
tgacctgggctaagtttcctggaaa

SEQ ID NO: 1333680 - DNA, 25 bp, Homo sapien
cagccaggtgttccatcaagctgaa

SEQ ID NO: 1333681 - DNA, 25 bp, Homo sapien
gggcttggcttgttcagaatcttga

SEQ ID NO: 1333682 - DNA, 25 bp, Homo sapien
agggcttggcttgttcagaatcttg

SEQ ID NO: 1333683 - DNA, 25 bp, Homo sapien
tatgcctggatgttgtgtaaacacg

SEQ ID NO: 1333684 - DNA, 25 bp, Homo sapien
ttgaggaagacactacaccctggag

SEQ ID NO: 1333685 - DNA, 25 bp, Homo sapien
tgtaaacacgtctccttagagcttg

SEQ ID NO: 1333686 - DNA, 25 bp, Homo sapien
ttgaatggagctgactgagtggcca

SEQ ID NO: 1333687 - DNA, 25 bp, Homo sapien
cccagacccatgcagccttccacgc

SEQ ID NO: 1333688 - DNA, 25 bp, Homo sapien
cttccacgcagcccgttctgacttc

SEQ ID NO: 1333689 - DNA, 25 bp, Homo sapien
ttccacgcagcccgttctgacttcc

SEQ ID NO: 1333690 - DNA, 25 bp, Homo sapien
tcacttgaagcagaaccgcaggagt

SEQ ID NO: 1333691 - DNA, 25 bp, Homo sapien
gcataagtgttattccagctagttc

SEQ ID NO: 1333692 - DNA, 25 bp, Homo sapien
tttccactccgcagaggactccagt

SEQ ID NO: 1333693 - DNA, 25 bp, Homo sapien
gggcctcgtgcattcccattgcata

SEQ ID NO: 1333694 - DNA, 25 bp, Homo sapien
ttggaaacatggcaaaccattcacc

SEQ ID NO: 1333695 - DNA, 25 bp, Homo sapien
gaaacatggcaaaccattcacctgg

SEQ ID NO: 1333696 - DNA, 25 bp, Homo sapien
attcacctggtggggaaactcttgc

SEQ ID NO: 1333697 - DNA, 25 bp, Homo sapien
tggaattggaaacatggcaaaccat

SEQ ID NO: 1333698 - DNA, 25 bp, Homo sapien
gcttcctgtaccgtgcagctctggg

SEQ ID NO: 1333699 - DNA, 25 bp, Homo sapien
aatcctattacatgaggctctagca

SEQ ID NO: 1333700 - DNA, 25 bp, Homo sapien
gctggtctctgagacgagacttcct

SEQ ID NO: 1333701 - DNA, 25 bp, Homo sapien
gatctttccaaaggctaatcctatt

SEQ ID NO: 1333702 - DNA, 25 bp, Homo sapien
aggagctgtcctcttccagaccatc

SEQ ID NO: 1333703 - DNA, 25 bp, Homo sapien
ccctagaggatatgtctgaggaaac

SEQ ID NO: 1333704 - DNA, 25 bp, Homo sapien
atctgaaatactggccccagaattc

SEQ ID NO: 1333705 - DNA, 25 bp, Homo sapien
gaaacactcagccactaaggagctg

SEQ ID NO: 1333706 - DNA, 25 bp, Homo sapien
aactatggtatgaatgggattgtac

SEQ ID NO: 1333707 - DNA, 25 bp, Homo sapien
tgagttcttgacattcttgtgcacc

SEQ ID NO: 1333708 - DNA, 25 bp, Homo sapien
aacatataagttgataaagaagggt

SEQ ID NO: 1333709 - DNA, 25 bp, Homo sapien
ttgtacaaagtagctaccagagtct

SEQ ID NO: 1333710 - DNA, 25 bp, Homo sapien
tgaacttgaggcagatccggtcaga

SEQ ID NO: 1333711 - DNA, 25 bp, Homo sapien
gggaaaagcctgaagttgctaaaga

SEQ ID NO: 1333712 - DNA, 25 bp, Homo sapien
aggcaccagcaaaggcccggtactc

SEQ ID NO: 1333713 - DNA, 25 bp, Homo sapien
aagaagggttgaaactgaacttgag

SEQ ID NO: 1333714 - DNA, 25 bp, Homo sapien
tccctcagaagctatccctgagtca

SEQ ID NO: 1333715 - DNA, 25 bp, Homo sapien
ccctcagaagctatccctgagtcac

SEQ ID NO: 1333716 - DNA, 25 bp, Homo sapien
ctatccctcagaagctatccctgag

SEQ ID NO: 1333717 - DNA, 25 bp, Homo sapien
tatccctcagaagctatccctgagt

SEQ ID NO: 1333718 - DNA, 25 bp, Homo sapien
tttcccgtgattgaccttgctagcc

SEQ ID NO: 1333719 - DNA, 25 bp, Homo sapien
gaccttgggtaggacatgcagctcc

SEQ ID NO: 1333720 - DNA, 25 bp, Homo sapien
tgtctatgtctaaaagcctgcagga

SEQ ID NO: 1333721 - DNA, 25 bp, Homo sapien
gttggaccactctctaaccagtgcg

SEQ ID NO: 1333722 - DNA, 25 bp, Homo sapien
taaagggtagggacatggtattcac

SEQ ID NO: 1333723 - DNA, 25 bp, Homo sapien
tgtagctcttatatctgaatggcag

SEQ ID NO: 1333724 - DNA, 25 bp, Homo sapien
taaatatttagcaacggaagatcag

SEQ ID NO: 1333725 - DNA, 25 bp, Homo sapien
tatatcgttaagcagaaaagctggt

SEQ ID NO: 1333726 - DNA, 25 bp, Homo sapien
ccccttcgtgtctgctggctggtaa

SEQ ID NO: 1333727 - DNA, 25 bp, Homo sapien
aagcagggtgcccacgcagatctgt

SEQ ID NO: 1333728 - DNA, 25 bp, Homo sapien
ggtgccgccttctggtcaattccca

SEQ ID NO: 1333729 - DNA, 25 bp, Homo sapien
catgaaagctaagccgtggtgccgc

SEQ ID NO: 1333730 - DNA, 25 bp, Homo sapien
acgggagttgacatcctctggcccc

SEQ ID NO: 1333731 - DNA, 25 bp, Homo sapien
cattgttggagaccaggcggcgcag

SEQ ID NO: 1333732 - DNA, 25 bp, Homo sapien
tccaccgaagctgatggttcgtcat

SEQ ID NO: 1333733 - DNA, 25 bp, Homo sapien
tctctgtctgtgttccgcacacggg

SEQ ID NO: 1333734 - DNA, 25 bp, Homo sapien
gagtcaacccttaatcttttgtcaa

SEQ ID NO: 1333735 - DNA, 25 bp, Homo sapien
tgcggactgaaaacacgacaaacca

SEQ ID NO: 1333736 - DNA, 25 bp, Homo sapien
caccaaagtgcattgagtcaaccct

SEQ ID NO: 1333737 - DNA, 25 bp, Homo sapien
cccctgtgccgctcagagtgtagac

SEQ ID NO: 1333738 - DNA, 25 bp, Homo sapien
cagaactttcataactggctgtaga

SEQ ID NO: 1333739 - DNA, 25 bp, Homo sapien
tgtttttgccttttggaagcttcca

SEQ ID NO: 1333740 - DNA, 25 bp, Homo sapien
tggctgtagagttattgtttttgcc

SEQ ID NO: 1333741 - DNA, 25 bp, Homo sapien
caaaacagaactttcataactggct

SEQ ID NO: 1333742 - DNA, 25 bp, Homo sapien
cattttgctagaatcggccttgctg

SEQ ID NO: 1333743 - DNA, 25 bp, Homo sapien
gcattttgctagaatcggccttgct

SEQ ID NO: 1333744 - DNA, 25 bp, Homo sapien
tgctagaatcggccttgctgtccac

SEQ ID NO: 1333745 - DNA, 25 bp, Homo sapien
ttttgctagaatcggccttgctgtc

SEQ ID NO: 1333746 - DNA, 25 bp, Homo sapien
taattcggcttctcggaaacaggga

SEQ ID NO: 1333747 - DNA, 25 bp, Homo sapien
cataacactctgcttcaggagttcc

SEQ ID NO: 1333748 - DNA, 25 bp, Homo sapien
aaagacctggttagcccagcttggc

SEQ ID NO: 1333749 - DNA, 25 bp, Homo sapien
taaggatgaaacatgtctgtggctt

SEQ ID NO: 1333750 - DNA, 25 bp, Homo sapien
gtagtacagccccagcacttctcat

SEQ ID NO: 1333751 - DNA, 25 bp, Homo sapien
tctcattaaggcacacagaaaatgt

SEQ ID NO: 1333752 - DNA, 25 bp, Homo sapien
ggccccatgttcattcccttgtatg

SEQ ID NO: 1333753 - DNA, 25 bp, Homo sapien
ggcccctggaagcaattcccagaat

SEQ ID NO: 1333754 - DNA, 25 bp, Homo sapien
aacccctctggaaactgttgcagtg

SEQ ID NO: 1333755 - DNA, 25 bp, Homo sapien
gtttgacaccccctgagggatctgt

SEQ ID NO: 1333756 - DNA, 25 bp, Homo sapien
ccaacaacccctctggaaactgttg

SEQ ID NO: 1333757 - DNA, 25 bp, Homo sapien
tggaaactgttgcagtgatcctttt

SEQ ID NO: 1333758 - DNA, 25 bp, Homo sapien
tagcaagcctactcccaggtcatca

SEQ ID NO: 1333759 - DNA, 25 bp, Homo sapien
tgcctgtagcaagcctactcccagg

SEQ ID NO: 1333760 - DNA, 25 bp, Homo sapien
catcacccccaatttcgtcatcctt

SEQ ID NO: 1333761 - DNA, 25 bp, Homo sapien
ctgtagcaagcctactcccaggtca

SEQ ID NO: 1333762 - DNA, 25 bp, Homo sapien
gccagggtttgagtatataaataca

SEQ ID NO: 1333763 - DNA, 25 bp, Homo sapien
gaccattggcaatactcttatcatg

SEQ ID NO: 1333764 - DNA, 25 bp, Homo sapien
tctaaagaaattagagaccattggc

SEQ ID NO: 1333765 - DNA, 25 bp, Homo sapien
ccatctgggccacgtaatttattag

SEQ ID NO: 1333766 - DNA, 25 bp, Homo sapien
cagactggtgaaattagtcactcag

SEQ ID NO: 1333767 - DNA, 25 bp, Homo sapien
gactggtgaaattagtcactcagcc

SEQ ID NO: 1333768 - DNA, 25 bp, Homo sapien
actggtgaaattagtcactcagcca

SEQ ID NO: 1333769 - DNA, 25 bp, Homo sapien
ctcagactggtgaaattagtcactc

SEQ ID NO: 1333770 - DNA, 25 bp, Homo sapien
tcagctaccagcaaggctagaataa

SEQ ID NO: 1333771 - DNA, 25 bp, Homo sapien
ctaccagcaaggctagaataaagca

SEQ ID NO: 1333772 - DNA, 25 bp, Homo sapien
caggcttacaaaatgcggtaggccc

SEQ ID NO: 1333773 - DNA, 25 bp, Homo sapien
gaaaggtcccatgcaagtgaagcgc

SEQ ID NO: 1333774 - DNA, 25 bp, Homo sapien
gattttgtgagacccatcctcccta

SEQ ID NO: 1333775 - DNA, 25 bp, Homo sapien
ctggaacgcctttgaatctgtagct

SEQ ID NO: 1333776 - DNA, 25 bp, Homo sapien
agctcccttcttattctccaaggag

SEQ ID NO: 1333777 - DNA, 25 bp, Homo sapien
tccaaggagtggaaagcgttgctga

SEQ ID NO: 1333778 - DNA, 25 bp, Homo sapien
ttctggacgaaagcctctcccgtca

SEQ ID NO: 1333779 - DNA, 25 bp, Homo sapien
aaagcgttgctgagttctggacgaa

SEQ ID NO: 1333780 - DNA, 25 bp, Homo sapien
gtgactccagggcaatatctggtgg

SEQ ID NO: 1333781 - DNA, 25 bp, Homo sapien
ccagggcaatatctggtggagacag

SEQ ID NO: 1333782 - DNA, 25 bp, Homo sapien
ctccagggcaatatctggtggagac

SEQ ID NO: 1333783 - DNA, 25 bp, Homo sapien
gactccagggcaatatctggtggag

SEQ ID NO: 1333784 - DNA, 25 bp, Homo sapien
aaagcggccggcagaacaatgagcc

SEQ ID NO: 1333785 - DNA, 25 bp, Homo sapien
gcatttgcattctaaaccgtcccgg

SEQ ID NO: 1333786 - DNA, 25 bp, Homo sapien
gctacaaaagcagcccgcatttgca

SEQ ID NO: 1333787 - DNA, 25 bp, Homo sapien
aaaatgaagtcaaagcggccggcag

SEQ ID NO: 1333788 - DNA, 25 bp, Homo sapien
gcctcgtcgggctcggtggactggc

SEQ ID NO: 1333789 - DNA, 25 bp, Homo sapien
ctcggtggactggccccgcccgagc

SEQ ID NO: 1333790 - DNA, 25 bp, Homo sapien
gtcgggctcggtggactggccccgc

SEQ ID NO: 1333791 - DNA, 25 bp, Homo sapien
ctccggggccgtccgagcctcgtcg

SEQ ID NO: 1333792 - DNA, 25 bp, Homo sapien
cagaaacgcagggagatgttccacc

SEQ ID NO: 1333793 - DNA, 25 bp, Homo sapien
ggaggaaaccgaccaagtgggctgc

SEQ ID NO: 1333794 - DNA, 25 bp, Homo sapien
tgatgtcctcagaaacgcagggaga

SEQ ID NO: 1333795 - DNA, 25 bp, Homo sapien
aaagaaaccacgtgcgctgatgtcc

SEQ ID NO: 1333796 - DNA, 25 bp, Homo sapien
ggtctaaactcccttgccactcgaa

SEQ ID NO: 1333797 - DNA, 25 bp, Homo sapien
gccactcgaacccataggtgtacgc

SEQ ID NO: 1333798 - DNA, 25 bp, Homo sapien
gcccatagggacacaacaatccgtt

SEQ ID NO: 1333799 - DNA, 25 bp, Homo sapien
ataaaagtcaacactccagccgcag

SEQ ID NO: 1333800 - DNA, 25 bp, Homo sapien
ggtcatgaaactcctttgccaataa

SEQ ID NO: 1333801 - DNA, 25 bp, Homo sapien
cttccaactgagcagacataacatc

SEQ ID NO: 1333802 - DNA, 25 bp, Homo sapien
tgccaataaaggtggaccccagaca

SEQ ID NO: 1333803 - DNA, 25 bp, Homo sapien
cccagacagcatcccatgaatcaag

SEQ ID NO: 1333804 - DNA, 25 bp, Homo sapien
atgaaagctgcttggaccacatatt

SEQ ID NO: 1333805 - DNA, 25 bp, Homo sapien
cttccatagcaagagtttctgaatg

SEQ ID NO: 1333806 - DNA, 25 bp, Homo sapien
atagcaagagtttctgaatgaaagc

SEQ ID NO: 1333807 - DNA, 25 bp, Homo sapien
ccatagcaagagtttctgaatgaaa

SEQ ID NO: 1333808 - DNA, 25 bp, Homo sapien
gcgtcaggattttgcacataaacag

SEQ ID NO: 1333809 - DNA, 25 bp, Homo sapien
tgcatgaaagtacctgcgtcaggat

SEQ ID NO: 1333810 - DNA, 25 bp, Homo sapien
tctaactggcaggaatcttatgcag

SEQ ID NO: 1333811 - DNA, 25 bp, Homo sapien
tttacctatcaaccaacttctcttc

SEQ ID NO: 1333812 - DNA, 25 bp, Homo sapien
taagaggttaccgatgtctgcaccc

SEQ ID NO: 1333813 - DNA, 25 bp, Homo sapien
tcagtgccaggcagacatgcaggat

SEQ ID NO: 1333814 - DNA, 25 bp, Homo sapien
ttattgtgcatgtagatcacctggg

SEQ ID NO: 1333815 - DNA, 25 bp, Homo sapien
attgccgggaactattcagtgccag

SEQ ID NO: 1333816 - DNA, 25 bp, Homo sapien
caaatggagcatccctggctggatt

SEQ ID NO: 1333817 - DNA, 25 bp, Homo sapien
aaccagacatgagccacttgggtct

SEQ ID NO: 1333818 - DNA, 25 bp, Homo sapien
gccaaatggagcatccctggctgga

SEQ ID NO: 1333819 - DNA, 25 bp, Homo sapien
gcaagaaaccagacatgagccactt

SEQ ID NO: 1333820 - DNA, 25 bp, Homo sapien
cagggtggattaaacatggagcctc

SEQ ID NO: 1333821 - DNA, 25 bp, Homo sapien
ggttcccgaaatatggccatgtctt

SEQ ID NO: 1333822 - DNA, 25 bp, Homo sapien
tagagagcaatgtattccagggtgg

SEQ ID NO: 1333823 - DNA, 25 bp, Homo sapien
ggtactctgaataatggttcccgaa

SEQ ID NO: 1333824 - DNA, 25 bp, Homo sapien
agctctttagaagagcctgagatga

SEQ ID NO: 1333825 - DNA, 25 bp, Homo sapien
tttagaatacaaaagctctttagaa

SEQ ID NO: 1333826 - DNA, 25 bp, Homo sapien
ttatctagagtgagggctgcttatc

SEQ ID NO: 1333827 - DNA, 25 bp, Homo sapien
ttctcagccttcctttgatgtgggc

SEQ ID NO: 1333828 - DNA, 25 bp, Homo sapien
gacatcggtatctaccctatgacca

SEQ ID NO: 1333829 - DNA, 25 bp, Homo sapien
atgaggcaagcccactcaaagaggc

SEQ ID NO: 1333830 - DNA, 25 bp, Homo sapien
gaaagagcagggcagacatcggtat

SEQ ID NO: 1333831 - DNA, 25 bp, Homo sapien
tacccacacacctgagacaaacatc

SEQ ID NO: 1333832 - DNA, 25 bp, Homo sapien
taacccatatgttctgcccagcaga

SEQ ID NO: 1333833 - DNA, 25 bp, Homo sapien
ggcacgcagcaaggatttcaaggga

SEQ ID NO: 1333834 - DNA, 25 bp, Homo sapien
tgcccggtgattgacgtgcacaaca

SEQ ID NO: 1333835 - DNA, 25 bp, Homo sapien
ggctcaaccccaagacaatagtgct

SEQ ID NO: 1333836 - DNA, 25 bp, Homo sapien
aaggatttccttccggatagcaggg

SEQ ID NO: 1333837 - DNA, 25 bp, Homo sapien
gcagggagagcgtcgtcttagtctt

SEQ ID NO: 1333838 - DNA, 25 bp, Homo sapien
tcctgtcaataatgtccacaggtga

SEQ ID NO: 1333839 - DNA, 25 bp, Homo sapien
tgttgtggtgattgttcctgtcaat

SEQ ID NO: 1333840 - DNA, 25 bp, Homo sapien
ctttgaatagggaaggacaacagag

SEQ ID NO: 1333841 - DNA, 25 bp, Homo sapien
aagcacaaatcagagatcgaagtca

SEQ ID NO: 1333842 - DNA, 25 bp, Homo sapien
gatcgaagtcagtaactgacatcgg

SEQ ID NO: 1333843 - DNA, 25 bp, Homo sapien
gacaacagagatcatatcatcaagg

SEQ ID NO: 1333844 - DNA, 25 bp, Homo sapien
taagcggcagctatcagtcatgtaa

SEQ ID NO: 1333845 - DNA, 25 bp, Homo sapien
cacttgcaaaggtgtgaggatggca

SEQ ID NO: 1333846 - DNA, 25 bp, Homo sapien
catttgagccatttagcaacaggag

SEQ ID NO: 1333847 - DNA, 25 bp, Homo sapien
cagggtgtaaccgaaaaagatcagc

SEQ ID NO: 1333848 - DNA, 25 bp, Homo sapien
gcaagtggcaggaatataacttcct

SEQ ID NO: 1333849 - DNA, 25 bp, Homo sapien
tcaatccaaaaatcatgttaggcat

SEQ ID NO: 1333850 - DNA, 25 bp, Homo sapien
aagtgacttgccctgacagcctacc

SEQ ID NO: 1333851 - DNA, 25 bp, Homo sapien
tgcttcgtcagctcatccatcttag

SEQ ID NO: 1333852 - DNA, 25 bp, Homo sapien
gcctatccgaccctaagtgcttgtg

SEQ ID NO: 1333853 - DNA, 25 bp, Homo sapien
ctcatggtctatctgggctgtggcc

SEQ ID NO: 1333854 - DNA, 25 bp, Homo sapien
ggtaaaagttctcggctgtcatgcc

SEQ ID NO: 1333855 - DNA, 25 bp, Homo sapien
ggatctaccctcaacagacccaggt

SEQ ID NO: 1333856 - DNA, 25 bp, Homo sapien
agaagagaactttgctccttcctgg

SEQ ID NO: 1333857 - DNA, 25 bp, Homo sapien
tgagtaagaagagaactttgctcct

SEQ ID NO: 1333858 - DNA, 25 bp, Homo sapien
tgggacagcggccctgattcgtggg

SEQ ID NO: 1333859 - DNA, 25 bp, Homo sapien
ccattcaatacagccatagttgtga

SEQ ID NO: 1333860 - DNA, 25 bp, Homo sapien
tgcttgtggtctgatacgcgagaca

SEQ ID NO: 1333861 - DNA, 25 bp, Homo sapien
cgagacagtcccgtgtagaaggcca

SEQ ID NO: 1333862 - DNA, 25 bp, Homo sapien
agtcccgtgtagaaggccatcatga

SEQ ID NO: 1333863 - DNA, 25 bp, Homo sapien
tctgatacgcgagacagtcccgtgt

SEQ ID NO: 1333864 - DNA, 25 bp, Homo sapien
gggccggagcaggcgggctcctcgc

SEQ ID NO: 1333865 - DNA, 25 bp, Homo sapien
gggctcctcgccaagtgaagcgggc

SEQ ID NO: 1333866 - DNA, 25 bp, Homo sapien
aggaggggccggagcaggcgggctc

SEQ ID NO: 1333867 - DNA, 25 bp, Homo sapien
gaggggccggagcaggcgggctcct

SEQ ID NO: 1333868 - DNA, 25 bp, Homo sapien
tatgtaaatggccttagcacactgc

SEQ ID NO: 1333869 - DNA, 25 bp, Homo sapien
taattaaagagcagtaaccagggct

SEQ ID NO: 1333870 - DNA, 25 bp, Homo sapien
cctaaagatagacctgtggcagtgc

SEQ ID NO: 1333871 - DNA, 25 bp, Homo sapien
tatataatccctacactacctggtg

SEQ ID NO: 1333872 - DNA, 25 bp, Homo sapien
ttttgccagtgtagaacccagttca

SEQ ID NO: 1333873 - DNA, 25 bp, Homo sapien
ggtttgggcctcactaggatcagtg

SEQ ID NO: 1333874 - DNA, 25 bp, Homo sapien
gatcagtgagtacattctggagcct

SEQ ID NO: 1333875 - DNA, 25 bp, Homo sapien
ggattgatgaaaggatacgatgacc

SEQ ID NO: 1333876 - DNA, 25 bp, Homo sapien
tgcagttctcttctccttctttgtc

SEQ ID NO: 1333877 - DNA, 25 bp, Homo sapien
tctgtcagtgcagttctcttctcct

SEQ ID NO: 1333878 - DNA, 25 bp, Homo sapien
gcagttctcttctccttctttgtcc

SEQ ID NO: 1333879 - DNA, 25 bp, Homo sapien
gttctcttctccttctttgtcctac

SEQ ID NO: 1333880 - DNA, 25 bp, Homo sapien
tagggtcttgtggaattccaacaaa

SEQ ID NO: 1333881 - DNA, 25 bp, Homo sapien
gaactagggtcttgtggaattccaa

SEQ ID NO: 1333882 - DNA, 25 bp, Homo sapien
ccttagaaaggtccgactgaacttg

SEQ ID NO: 1333883 - DNA, 25 bp, Homo sapien
ttcagaactagggtcttgtggaatt

SEQ ID NO: 1333884 - DNA, 25 bp, Homo sapien
tacagcatagtgtacatggagaagg

SEQ ID NO: 1333885 - DNA, 25 bp, Homo sapien
cagcatagtgtacatggagaaggag

SEQ ID NO: 1333886 - DNA, 25 bp, Homo sapien
aatacagcatagtgtacatggagaa

SEQ ID NO: 1333887 - DNA, 25 bp, Homo sapien
catagtgtacatggagaaggaggca

SEQ ID NO: 1333888 - DNA, 25 bp, Homo sapien
tcagggttgcagacactcaagaagt

SEQ ID NO: 1333889 - DNA, 25 bp, Homo sapien
caggcgccctatggacactttggca

SEQ ID NO: 1333890 - DNA, 25 bp, Homo sapien
gggttctgaatcgtcgaccgcgact

SEQ ID NO: 1333891 - DNA, 25 bp, Homo sapien
tgcttatagagtgctgccacgtagg

SEQ ID NO: 1333892 - DNA, 25 bp, Homo sapien
cttgtgctgacattggccatggtga

SEQ ID NO: 1333893 - DNA, 25 bp, Homo sapien
tagctatgatgtcacagggtctgag

SEQ ID NO: 1333894 - DNA, 25 bp, Homo sapien
tcaacgacaaggtaaagggtagcta

SEQ ID NO: 1333895 - DNA, 25 bp, Homo sapien
acaatgacctgactctagtaagggc

SEQ ID NO: 1333896 - DNA, 25 bp, Homo sapien
gaaatgacctggatcacagaaagtg

SEQ ID NO: 1333897 - DNA, 25 bp, Homo sapien
gaaacttgtagtacgatgcccttca

SEQ ID NO: 1333898 - DNA, 25 bp, Homo sapien
taatctacatcctccaagctttggc

SEQ ID NO: 1333899 - DNA, 25 bp, Homo sapien
gctccataaaaggaggctgctcacc

SEQ ID NO: 1333900 - DNA, 25 bp, Homo sapien
cagattttagagtgaatgagcaaca

SEQ ID NO: 1333901 - DNA, 25 bp, Homo sapien
tgaagccatttagcagacacatgac

SEQ ID NO: 1333902 - DNA, 25 bp, Homo sapien
gacccacagcagactacactgagat

SEQ ID NO: 1333903 - DNA, 25 bp, Homo sapien
tcattatgaaccaggcggacttggc

SEQ ID NO: 1333904 - DNA, 25 bp, Homo sapien
gctttatgggtaagtcagaactcca

SEQ ID NO: 1333905 - DNA, 25 bp, Homo sapien
tagttctgctcaagatgccaccaag

SEQ ID NO: 1333906 - DNA, 25 bp, Homo sapien
tctaagttcctgctagccacagagg

SEQ ID NO: 1333907 - DNA, 25 bp, Homo sapien
tggttgaaattagcagtggctgccc

SEQ ID NO: 1333908 - DNA, 25 bp, Homo sapien
gaaaactcgactagcctttaatgag

SEQ ID NO: 1333909 - DNA, 25 bp, Homo sapien
gaaaatttagtgcactctccatgcc

SEQ ID NO: 1333910 - DNA, 25 bp, Homo sapien
gaaggattaatgtggcctctctctg

SEQ ID NO: 1333911 - DNA, 25 bp, Homo sapien
gggtctcccactaatgcaccactgg

SEQ ID NO: 1333912 - DNA, 25 bp, Homo sapien
ctggttgtgctgaggttcactactg

SEQ ID NO: 1333913 - DNA, 25 bp, Homo sapien
gtggtgaacacctgacacatcatag

SEQ ID NO: 1333914 - DNA, 25 bp, Homo sapien
cataggcccttgataagtaattgtg

SEQ ID NO: 1333915 - DNA, 25 bp, Homo sapien
tgccttggcctatgacagtttgtat

SEQ ID NO: 1333916 - DNA, 25 bp, Homo sapien
tttaggttctgagcgaggcaagcac

SEQ ID NO: 1333917 - DNA, 25 bp, Homo sapien
gagattcatccgtgactcaaccatg

SEQ ID NO: 1333918 - DNA, 25 bp, Homo sapien
caaggcagggataggaaccattgct

SEQ ID NO: 1333919 - DNA, 25 bp, Homo sapien
cactcaagttgggacatgtacctaa

SEQ ID NO: 1333920 - DNA, 25 bp, Homo sapien
ctgaatgggagcaggggcatccaac

SEQ ID NO: 1333921 - DNA, 25 bp, Homo sapien
ggggcatccaactcagtcaaggcct

SEQ ID NO: 1333922 - DNA, 25 bp, Homo sapien
ggcatccaactcagtcaaggcctct

SEQ ID NO: 1333923 - DNA, 25 bp, Homo sapien
caggggcatccaactcagtcaaggc

SEQ ID NO: 1333924 - DNA, 25 bp, Homo sapien
accctccacgtctgtcactcttgcc

SEQ ID NO: 1333925 - DNA, 25 bp, Homo sapien
ctgacattcagcaggagaaggctca

SEQ ID NO: 1333926 - DNA, 25 bp, Homo sapien
gatggttcaatttccagctctgggc

SEQ ID NO: 1333927 - DNA, 25 bp, Homo sapien
ggctcaggactgcaagcagcaggat

SEQ ID NO: 1333928 - DNA, 25 bp, Homo sapien
actgcctatccccttgagcagttca

SEQ ID NO: 1333929 - DNA, 25 bp, Homo sapien
ggacaggttagccttcctgaactgt

SEQ ID NO: 1333930 - DNA, 25 bp, Homo sapien
ctaactgcctatccccttgagcagt

SEQ ID NO: 1333931 - DNA, 25 bp, Homo sapien
tcatttggacaggttagccttcctg

SEQ ID NO: 1333932 - DNA, 25 bp, Homo sapien
gaggatggcaatgacgatccccacg

SEQ ID NO: 1333933 - DNA, 25 bp, Homo sapien
cattgcagtaaaaccctcggtggta

SEQ ID NO: 1333934 - DNA, 25 bp, Homo sapien
tgtctcaccagttttcagtgggtac

SEQ ID NO: 1333935 - DNA, 25 bp, Homo sapien
ggcacagagcacagcgtcatttatt

SEQ ID NO: 1333936 - DNA, 25 bp, Homo sapien
gaaaggtgatgctgtagacatctaa

SEQ ID NO: 1333937 - DNA, 25 bp, Homo sapien
atgctgtagacatctaagggaatgg

SEQ ID NO: 1333938 - DNA, 25 bp, Homo sapien
agaatctatgagaaaggtgatgctg

SEQ ID NO: 1333939 - DNA, 25 bp, Homo sapien
ttggccacgtatatgagaatctatg

SEQ ID NO: 1333940 - DNA, 25 bp, Homo sapien
cagggatgtaattttgtaactcaat

SEQ ID NO: 1333941 - DNA, 25 bp, Homo sapien
tgctgtggataggacaaccctcacc

SEQ ID NO: 1333942 - DNA, 25 bp, Homo sapien
attgagcaagactggagccgttcca

SEQ ID NO: 1333943 - DNA, 25 bp, Homo sapien
tgggagcacactccccattcccagt

SEQ ID NO: 1333944 - DNA, 25 bp, Homo sapien
ggcttcaatctcagttagggctgaa

SEQ ID NO: 1333945 - DNA, 25 bp, Homo sapien
cctcctgcttggtgacttccccggg

SEQ ID NO: 1333946 - DNA, 25 bp, Homo sapien
ccatcatggaagcagctgaaccggc

SEQ ID NO: 1333947 - DNA, 25 bp, Homo sapien
gctgaaaccaatgctgttgccattt

SEQ ID NO: 1333948 - DNA, 25 bp, Homo sapien
tcagcgtatcctgagcttgaacccc

SEQ ID NO: 1333949 - DNA, 25 bp, Homo sapien
agctttcagaaacctcaatgtgagg

SEQ ID NO: 1333950 - DNA, 25 bp, Homo sapien
aaccccatattgctctgcgctgcag

SEQ ID NO: 1333951 - DNA, 25 bp, Homo sapien
gaactctgatgccttggcagcagaa

SEQ ID NO: 1333952 - DNA, 25 bp, Homo sapien
gatttgaacttgaacctgcacaagg

SEQ ID NO: 1333953 - DNA, 25 bp, Homo sapien
tatgttaaggtacaaatgactgtag

SEQ ID NO: 1333954 - DNA, 25 bp, Homo sapien
tccattgtgtaaagggatgctttaa

SEQ ID NO: 1333955 - DNA, 25 bp, Homo sapien
tgactgtagattactgacacatggg

SEQ ID NO: 1333956 - DNA, 25 bp, Homo sapien
ggatatgaattttggcagaacacag

SEQ ID NO: 1333957 - DNA, 25 bp, Homo sapien
tgttctcatatgatggaagggcaga

SEQ ID NO: 1333958 - DNA, 25 bp, Homo sapien
aaagatggccccttctagctgtgtt

SEQ ID NO: 1333959 - DNA, 25 bp, Homo sapien
tcagaccatagcagttagtaacaaa

SEQ ID NO: 1333960 - DNA, 25 bp, Homo sapien
tattgaccgctgcaaactctagcaa

SEQ ID NO: 1333961 - DNA, 25 bp, Homo sapien
taatagaagctatcatggttagcac

SEQ ID NO: 1333962 - DNA, 25 bp, Homo sapien
cacactgacttacaggaagcaggcc

SEQ ID NO: 1333963 - DNA, 25 bp, Homo sapien
ctgtaccagtggctacctcaggatt

SEQ ID NO: 1333964 - DNA, 25 bp, Homo sapien
caaacagctactttgggagagtgtc

SEQ ID NO: 1333965 - DNA, 25 bp, Homo sapien
catttaatgaaggagctgcatccgc

SEQ ID NO: 1333966 - DNA, 25 bp, Homo sapien
ccattaaggctaagatgacagcaag

SEQ ID NO: 1333967 - DNA, 25 bp, Homo sapien
gaggccaaattgacccaaacagcta

SEQ ID NO: 1333968 - DNA, 25 bp, Homo sapien
tcaaaatttagagctgatggtccat

SEQ ID NO: 1333969 - DNA, 25 bp, Homo sapien
tatgacacatctagaagacatctgt

SEQ ID NO: 1333970 - DNA, 25 bp, Homo sapien
gaaagccttctataggatccaggac

SEQ ID NO: 1333971 - DNA, 25 bp, Homo sapien
gatggtccattctagggtgtccagc

SEQ ID NO: 1333972 - DNA, 25 bp, Homo sapien
ggtaaatgtggagttaccataggac

SEQ ID NO: 1333973 - DNA, 25 bp, Homo sapien
aaaggtaaatgtggagttaccatag

SEQ ID NO: 1333974 - DNA, 25 bp, Homo sapien
aaggtaaatgtggagttaccatagg

SEQ ID NO: 1333975 - DNA, 25 bp, Homo sapien
aggtaaatgtggagttaccatagga

SEQ ID NO: 1333976 - DNA, 25 bp, Homo sapien
gatgttcaagaacctgacctagcct

SEQ ID NO: 1333977 - DNA, 25 bp, Homo sapien
tcttcactgtgctgctagagtaggc

SEQ ID NO: 1333978 - DNA, 25 bp, Homo sapien
tagagtaggccctcccttaaggctc

SEQ ID NO: 1333979 - DNA, 25 bp, Homo sapien
catctgcagaagacaaggcttatac

SEQ ID NO: 1333980 - DNA, 25 bp, Homo sapien
gaccacgtgtctaaattctctccca

SEQ ID NO: 1333981 - DNA, 25 bp, Homo sapien
agttgaccctaaaacagaccacgtg

SEQ ID NO: 1333982 - DNA, 25 bp, Homo sapien
gaatgacccaagtgagagttgaccc

SEQ ID NO: 1333983 - DNA, 25 bp, Homo sapien
ggaagaatgcaaccaccaaagccta

SEQ ID NO: 1333984 - DNA, 25 bp, Homo sapien
gcacaaacttcaatatctcaaaaga

SEQ ID NO: 1333985 - DNA, 25 bp, Homo sapien
cactcatgcacaaacttcaatatct

SEQ ID NO: 1333986 - DNA, 25 bp, Homo sapien
tggcaacttcaattacatagagttc

SEQ ID NO: 1333987 - DNA, 25 bp, Homo sapien
catagagttcggtttacaaccagaa

SEQ ID NO: 1333988 - DNA, 25 bp, Homo sapien
ctttgcactgaaagacacaggacac

SEQ ID NO: 1333989 - DNA, 25 bp, Homo sapien
ttagcctcttggcattagaaacaac

SEQ ID NO: 1333990 - DNA, 25 bp, Homo sapien
aaacaacaccaagtctttgcactga

SEQ ID NO: 1333991 - DNA, 25 bp, Homo sapien
cattagaaacaacaccaagtctttg

SEQ ID NO: 1333992 - DNA, 25 bp, Homo sapien
tccattcggaagaattcttgcaaac

SEQ ID NO: 1333993 - DNA, 25 bp, Homo sapien
catccaggggtaattttccattcgg

SEQ ID NO: 1333994 - DNA, 25 bp, Homo sapien
attttccattcggaagaattcttgc

SEQ ID NO: 1333995 - DNA, 25 bp, Homo sapien
tgcatccaggggtaattttccattc

SEQ ID NO: 1333996 - DNA, 25 bp, Homo sapien
tgaaaggacacatccggcgtaggaa

SEQ ID NO: 1333997 - DNA, 25 bp, Homo sapien
tatgtcaagtctctaacgtcaagcc

SEQ ID NO: 1333998 - DNA, 25 bp, Homo sapien
aatttttccaaagctgtacagtgca

SEQ ID NO: 1333999 - DNA, 25 bp, Homo sapien
caacgtggaacctgaagcttctgac

SEQ ID NO: 1334000 - DNA, 25 bp, Homo sapien
gatattgtaattggcctgtgctcag

SEQ ID NO: 1334001 - DNA, 25 bp, Homo sapien
tacatggtcctgacgccttattgct

SEQ ID NO: 1334002 - DNA, 25 bp, Homo sapien
tcctgttaaaggtgtttgagagaca

SEQ ID NO: 1334003 - DNA, 25 bp, Homo sapien
ccctgaaaacaagtagctatgtgcc

SEQ ID NO: 1334004 - DNA, 25 bp, Homo sapien
gcagttaagtggcacacccagcaag

SEQ ID NO: 1334005 - DNA, 25 bp, Homo sapien
caaatccgagttcctaatgcgggaa

SEQ ID NO: 1334006 - DNA, 25 bp, Homo sapien
gaagtctctggtctgcaaaatctgc

SEQ ID NO: 1334007 - DNA, 25 bp, Homo sapien
ttaagggaactgaattgggaacaca

SEQ ID NO: 1334008 - DNA, 25 bp, Homo sapien
gcttccaacgtggagacgactttta

SEQ ID NO: 1334009 - DNA, 25 bp, Homo sapien
gacgacttttactgagctggtttaa

SEQ ID NO: 1334010 - DNA, 25 bp, Homo sapien
ccagacccactcaagtacaggccaa

SEQ ID NO: 1334011 - DNA, 25 bp, Homo sapien
taacagttgcccacgaacgcttaag

SEQ ID NO: 1334012 - DNA, 25 bp, Homo sapien
cgccgttcttgctctccgggacgat

SEQ ID NO: 1334013 - DNA, 25 bp, Homo sapien
gctttgtcgtacttgtagttttgca

SEQ ID NO: 1334014 - DNA, 25 bp, Homo sapien
cagaagaggtcgaggcagatgagca

SEQ ID NO: 1334015 - DNA, 25 bp, Homo sapien
ctcctcgggttgttgttgagcgccg

SEQ ID NO: 1334016 - DNA, 25 bp, Homo sapien
gaagacgtcccgcaacagcagccac

SEQ ID NO: 1334017 - DNA, 25 bp, Homo sapien
cgccccgcgaagacgtcccgcaaca

SEQ ID NO: 1334018 - DNA, 25 bp, Homo sapien
gacgtcccgcaacagcagccacaca

SEQ ID NO: 1334019 - DNA, 25 bp, Homo sapien
ccgcgaagacgtcccgcaacagcag

SEQ ID NO: 1334020 - DNA, 25 bp, Homo sapien
gccgaggctgctgcggatagtggcg

SEQ ID NO: 1334021 - DNA, 25 bp, Homo sapien
gaggctgctgcggatagtggcgggt

SEQ ID NO: 1334022 - DNA, 25 bp, Homo sapien
gatagtggcgggtcggccccggctc

SEQ ID NO: 1334023 - DNA, 25 bp, Homo sapien
gctgcggatagtggcgggtcggccc

SEQ ID NO: 1334024 - DNA, 25 bp, Homo sapien
gccagatcccgagcagaaacttttg

SEQ ID NO: 1334025 - DNA, 25 bp, Homo sapien
ccaactgcagaaggtggtgttttct

SEQ ID NO: 1334026 - DNA, 25 bp, Homo sapien
tccgcagctggttccttaatgaatg

SEQ ID NO: 1334027 - DNA, 25 bp, Homo sapien
taatgaatgggagctgcgctgagcc

SEQ ID NO: 1334028 - DNA, 25 bp, Homo sapien
tgggattccgaaagcacagcccctt

SEQ ID NO: 1334029 - DNA, 25 bp, Homo sapien
taagacgtaggataattaaggccac

SEQ ID NO: 1334030 - DNA, 25 bp, Homo sapien
gagggacctccttacttggctcgga

SEQ ID NO: 1334031 - DNA, 25 bp, Homo sapien
tactctcaaaccagagaaaccggga

SEQ ID NO: 1334032 - DNA, 25 bp, Homo sapien
ctgatgaggcagagtgagtaagctt

SEQ ID NO: 1334033 - DNA, 25 bp, Homo sapien
gaggcagagtgagtaagcttgtttc

SEQ ID NO: 1334034 - DNA, 25 bp, Homo sapien
aactgatgaggcagagtgagtaagc

SEQ ID NO: 1334035 - DNA, 25 bp, Homo sapien
gtggaactgatgaggcagagtgagt

SEQ ID NO: 1334036 - DNA, 25 bp, Homo sapien
aagagggtgccatatggatcttttt

SEQ ID NO: 1334037 - DNA, 25 bp, Homo sapien
agagggtgccatatggatctttttt

SEQ ID NO: 1334038 - DNA, 25 bp, Homo sapien
ccccggaagctgaaattggcaagga

SEQ ID NO: 1334039 - DNA, 25 bp, Homo sapien
tgcgcctggcttaaggatctttaga

SEQ ID NO: 1334040 - DNA, 25 bp, Homo sapien
aagaacattaccttcctcagcccgg

SEQ ID NO: 1334041 - DNA, 25 bp, Homo sapien
tcaggtggaccctaaatccaaggat

SEQ ID NO: 1334042 - DNA, 25 bp, Homo sapien
taattcactttatttttcttgtata

SEQ ID NO: 1334043 - DNA, 25 bp, Homo sapien
cgcttaattcactttatttttcttg

SEQ ID NO: 1334044 - DNA, 25 bp, Homo sapien
agcctgagtccgctgcatggagact

SEQ ID NO: 1334045 - DNA, 25 bp, Homo sapien
ggagcctgagtccgctgcatggaga

SEQ ID NO: 1334046 - DNA, 25 bp, Homo sapien
ctggagcctgagtccgctgcatgga

SEQ ID NO: 1334047 - DNA, 25 bp, Homo sapien
cctgagtccgctgcatggagactct

SEQ ID NO: 1334048 - DNA, 25 bp, Homo sapien
atggcatcaaaggtattgctttatc

SEQ ID NO: 1334049 - DNA, 25 bp, Homo sapien
tctgtttatcaataacatcactacc

SEQ ID NO: 1334050 - DNA, 25 bp, Homo sapien
tcactaccaacattttgtggcagga

SEQ ID NO: 1334051 - DNA, 25 bp, Homo sapien
gctttatctgtttatcaataacatc

SEQ ID NO: 1334052 - DNA, 25 bp, Homo sapien
gatggtgacctacaatactttacag

SEQ ID NO: 1334053 - DNA, 25 bp, Homo sapien
taatatttgttactagggtacctgc

SEQ ID NO: 1334054 - DNA, 25 bp, Homo sapien
tgttgagataccttggatggtgacc

SEQ ID NO: 1334055 - DNA, 25 bp, Homo sapien
gctcatgaaggaagtctgatccaaa

SEQ ID NO: 1334056 - DNA, 25 bp, Homo sapien
gattcctagatgatacttgtcagca

SEQ ID NO: 1334057 - DNA, 25 bp, Homo sapien
ttttctcaaaattgccagcgaggta

SEQ ID NO: 1334058 - DNA, 25 bp, Homo sapien
ccagcgaggtagagtgattcctaga

SEQ ID NO: 1334059 - DNA, 25 bp, Homo sapien
ggaatgacccttaaccagatgaaag

SEQ ID NO: 1334060 - DNA, 25 bp, Homo sapien
ctgggcccgaagcgcccagcgccct

SEQ ID NO: 1334061 - DNA, 25 bp, Homo sapien
tgggcccgaagcgcccagcgccctc

SEQ ID NO: 1334062 - DNA, 25 bp, Homo sapien
ggcccgaagcgcccagcgccctctc

SEQ ID NO: 1334063 - DNA, 25 bp, Homo sapien
gggcccgaagcgcccagcgccctct

SEQ ID NO: 1334064 - DNA, 25 bp, Homo sapien
tcacgttccaggactctcggttgtt

SEQ ID NO: 1334065 - DNA, 25 bp, Homo sapien
ggtgttgtttaacgctggaatgcag

SEQ ID NO: 1334066 - DNA, 25 bp, Homo sapien
tccaggggccagaggttgtgagtct

SEQ ID NO: 1334067 - DNA, 25 bp, Homo sapien
cgttccaggactctcggttgttggg

SEQ ID NO: 1334068 - DNA, 25 bp, Homo sapien
tcttgaaagcatttggtactgcttt

SEQ ID NO: 1334069 - DNA, 25 bp, Homo sapien
gttagctttcttgaaagcatttggt

SEQ ID NO: 1334070 - DNA, 25 bp, Homo sapien
agcatttggtactgctttgtaataa

SEQ ID NO: 1334071 - DNA, 25 bp, Homo sapien
agctttcttgaaagcatttggtact

SEQ ID NO: 1334072 - DNA, 25 bp, Homo sapien
tattccctagacagtttgtactcag

SEQ ID NO: 1334073 - DNA, 25 bp, Homo sapien
tagacagtttgtactcagggaatac

SEQ ID NO: 1334074 - DNA, 25 bp, Homo sapien
tttcttattccctagacagtttgta

SEQ ID NO: 1334075 - DNA, 25 bp, Homo sapien
ctatgtcagggtattggctatatgt

SEQ ID NO: 1334076 - DNA, 25 bp, Homo sapien
aaattatccggtgtggtgacaggct

SEQ ID NO: 1334077 - DNA, 25 bp, Homo sapien
aattttatgtgattcttatagcaca

SEQ ID NO: 1334078 - DNA, 25 bp, Homo sapien
attttatgtgattcttatagcacaa

SEQ ID NO: 1334079 - DNA, 25 bp, Homo sapien
ttaaaacatgattcttcttataatt

SEQ ID NO: 1334080 - DNA, 25 bp, Homo sapien
gtgtcatgacaatcataatatagga

SEQ ID NO: 1334081 - DNA, 25 bp, Homo sapien
catttcatagttacagattcttcct

SEQ ID NO: 1334082 - DNA, 25 bp, Homo sapien
aatccataggttgatacattgaccc

SEQ ID NO: 1334083 - DNA, 25 bp, Homo sapien
cctaattaatgtttgcaccatatga

SEQ ID NO: 1334084 - DNA, 25 bp, Homo sapien
tttatttctcttattgacatgcagt

SEQ ID NO: 1334085 - DNA, 25 bp, Homo sapien
tcttattgacatgcagtgcacctca

SEQ ID NO: 1334086 - DNA, 25 bp, Homo sapien
tctcttattgacatgcagtgcacct

SEQ ID NO: 1334087 - DNA, 25 bp, Homo sapien
tttctcttattgacatgcagtgcac

SEQ ID NO: 1334088 - DNA, 25 bp, Homo sapien
ttgggcacttcttaaaatgatgggt

SEQ ID NO: 1334089 - DNA, 25 bp, Homo sapien
tgttcttattttggacaaaaagatg

SEQ ID NO: 1334090 - DNA, 25 bp, Homo sapien
aatgatgggtgaatttaggaataaa

SEQ ID NO: 1334091 - DNA, 25 bp, Homo sapien
ttgaatagttatttgggcatagaca

SEQ ID NO: 1334092 - DNA, 25 bp, Homo sapien
tttctgcaaactattcccaaaagaa

SEQ ID NO: 1334093 - DNA, 25 bp, Homo sapien
ttctgcaaactattcccaaaagaaa

SEQ ID NO: 1334094 - DNA, 25 bp, Homo sapien
tctgcaaactattcccaaaagaaac

SEQ ID NO: 1334095 - DNA, 25 bp, Homo sapien
taagattataccttaaacttgagta

SEQ ID NO: 1334096 - DNA, 25 bp, Homo sapien
aagaccttggttacactgtttactg

SEQ ID NO: 1334097 - DNA, 25 bp, Homo sapien
tagaagcaaactaaccatctgcaca

SEQ ID NO: 1334098 - DNA, 25 bp, Homo sapien
caagtttgagtgcacaacatctaga

SEQ ID NO: 1334099 - DNA, 25 bp, Homo sapien
tgctcaaatgctaacacatactgtt

SEQ ID NO: 1334100 - DNA, 25 bp, Homo sapien
gatttctaactttggatatggctca

SEQ ID NO: 1334101 - DNA, 25 bp, Homo sapien
ctaggtgccataaggcatgatttct

SEQ ID NO: 1334102 - DNA, 25 bp, Homo sapien
ggctcattaaataagtgctcaaatg

SEQ ID NO: 1334103 - DNA, 25 bp, Homo sapien
taagttcagaacgaaagtttccaca

SEQ ID NO: 1334104 - DNA, 25 bp, Homo sapien
gacattgaaagataaccttttagga

SEQ ID NO: 1334105 - DNA, 25 bp, Homo sapien
ttttgacatgtaaactgaaactgat

SEQ ID NO: 1334106 - DNA, 25 bp, Homo sapien
taggagtaaaaccaacatctaaatg

SEQ ID NO: 1334107 - DNA, 25 bp, Homo sapien
ctaggatcttaggactagttctcct

SEQ ID NO: 1334108 - DNA, 25 bp, Homo sapien
gcagtccatagcatttgatcttgat

SEQ ID NO: 1334109 - DNA, 25 bp, Homo sapien
ccatagcatttgatcttgatttttc

SEQ ID NO: 1334110 - DNA, 25 bp, Homo sapien
taggatcttaggactagttctcctt

SEQ ID NO: 1334111 - DNA, 25 bp, Homo sapien
tctagatgttcaatgagcacatatc

SEQ ID NO: 1334112 - DNA, 25 bp, Homo sapien
tcttctccaggacttattggcaaat

SEQ ID NO: 1334113 - DNA, 25 bp, Homo sapien
tgttcggtggtatcaatgacttcca

SEQ ID NO: 1334114 - DNA, 25 bp, Homo sapien
gcctttagaattacgacatatcact

SEQ ID NO: 1334115 - DNA, 25 bp, Homo sapien
ggaacaggccactgctgtattgatg

SEQ ID NO: 1334116 - DNA, 25 bp, Homo sapien
gcatgcattagccatcctttctaat

SEQ ID NO: 1334117 - DNA, 25 bp, Homo sapien
cagaccattcttgcatagttgttat

SEQ ID NO: 1334118 - DNA, 25 bp, Homo sapien
tatttaattgtactagaatgagccc

SEQ ID NO: 1334119 - DNA, 25 bp, Homo sapien
tgactagttaaataacacatacagg

SEQ ID NO: 1334120 - DNA, 25 bp, Homo sapien
tatagtaaccccaatcagctttggt

SEQ ID NO: 1334121 - DNA, 25 bp, Homo sapien
tggcacaagtgagctatacaacgtt

SEQ ID NO: 1334122 - DNA, 25 bp, Homo sapien
tcaaggaaacccactacaggtaata

SEQ ID NO: 1334123 - DNA, 25 bp, Homo sapien
tcaagtaacatcagggttgcagtag

SEQ ID NO: 1334124 - DNA, 25 bp, Homo sapien
ctgttcttttctaagttttgcttct

SEQ ID NO: 1334125 - DNA, 25 bp, Homo sapien
attctgttcttttctaagttttgct

SEQ ID NO: 1334126 - DNA, 25 bp, Homo sapien
cttttcattctgttcttttctaagt

SEQ ID NO: 1334127 - DNA, 25 bp, Homo sapien
tcattctgttcttttctaagttttg

SEQ ID NO: 1334128 - DNA, 25 bp, Homo sapien
gaagagctctccagtttgctgaatg

SEQ ID NO: 1334129 - DNA, 25 bp, Homo sapien
actacttattgcctgagatgccatc

SEQ ID NO: 1334130 - DNA, 25 bp, Homo sapien
tcaaattcattggtgtatctgcctg

SEQ ID NO: 1334131 - DNA, 25 bp, Homo sapien
gggatcacaagtctacatggttcaa

SEQ ID NO: 1334132 - DNA, 25 bp, Homo sapien
gccccatgtcctagcaattgagaag

SEQ ID NO: 1334133 - DNA, 25 bp, Homo sapien
tcttagagagggaagttcttacacc

SEQ ID NO: 1334134 - DNA, 25 bp, Homo sapien
catgaatgcaggttagatcttgact

SEQ ID NO: 1334135 - DNA, 25 bp, Homo sapien
gaaagtacctcatatcctgccccat

SEQ ID NO: 1334136 - DNA, 25 bp, Homo sapien
tgattcttcagcaccgtttttctct

SEQ ID NO: 1334137 - DNA, 25 bp, Homo sapien
gattcttcagcaccgtttttctctt

SEQ ID NO: 1334138 - DNA, 25 bp, Homo sapien
ttctgattcttcagcaccgtttttc

SEQ ID NO: 1334139 - DNA, 25 bp, Homo sapien
ctgattcttcagcaccgtttttctc

SEQ ID NO: 1334140 - DNA, 25 bp, Homo sapien
caagtggcaggccatatttggtcct

SEQ ID NO: 1334141 - DNA, 25 bp, Homo sapien
catggaaccatcaacacttcatggg

SEQ ID NO: 1334142 - DNA, 25 bp, Homo sapien
gctgacccctgatgtgtggtaatcc

SEQ ID NO: 1334143 - DNA, 25 bp, Homo sapien
gagatcagcctgcttataatcacat

SEQ ID NO: 1334144 - DNA, 25 bp, Homo sapien
taacattagtgattccaggcaaaag

SEQ ID NO: 1334145 - DNA, 25 bp, Homo sapien
caggagctgtaagaatatctgtggc

SEQ ID NO: 1334146 - DNA, 25 bp, Homo sapien
gtatgtgtcaggtcttatgctaagc

SEQ ID NO: 1334147 - DNA, 25 bp, Homo sapien
tccattgtgaaacaaggctaagcca

SEQ ID NO: 1334148 - DNA, 25 bp, Homo sapien
taagtcgaatgataggttcagggca

SEQ ID NO: 1334149 - DNA, 25 bp, Homo sapien
gacaggagctcaaagtgcagtgtgc

SEQ ID NO: 1334150 - DNA, 25 bp, Homo sapien
gttcagggcaattcgttttaccatg

SEQ ID NO: 1334151 - DNA, 25 bp, Homo sapien
cagtgctatgcacttgtagttccag

SEQ ID NO: 1334152 - DNA, 25 bp, Homo sapien
aataagacatggatgcccactctct

SEQ ID NO: 1334153 - DNA, 25 bp, Homo sapien
tcactcaggtctacatcatcataaa

SEQ ID NO: 1334154 - DNA, 25 bp, Homo sapien
tttttcactcaggtctacatcatca

SEQ ID NO: 1334155 - DNA, 25 bp, Homo sapien
ctctttttcactcaggtctacatca

SEQ ID NO: 1334156 - DNA, 25 bp, Homo sapien
ctcaggtctacatcatcataaataa

SEQ ID NO: 1334157 - DNA, 25 bp, Homo sapien
tagggtcaagacagaatcaaaatag

SEQ ID NO: 1334158 - DNA, 25 bp, Homo sapien
agggtcaagacagaatcaaaatagt

SEQ ID NO: 1334159 - DNA, 25 bp, Homo sapien
ctagggtcaagacagaatcaaaata

SEQ ID NO: 1334160 - DNA, 25 bp, Homo sapien
agtgtgatgtcccagtatctcaaaa

SEQ ID NO: 1334161 - DNA, 25 bp, Homo sapien
tagtgagaggtcttttcttaactcc

SEQ ID NO: 1334162 - DNA, 25 bp, Homo sapien
gcatcttcaggtctgttttagcaaa

SEQ ID NO: 1334163 - DNA, 25 bp, Homo sapien
gttccagaaaaatatgagttgctca

SEQ ID NO: 1334164 - DNA, 25 bp, Homo sapien
ctaaatcaggcagcaaaatggaaaa

SEQ ID NO: 1334165 - DNA, 25 bp, Homo sapien
taaatcaggcagcaaaatggaaaat

SEQ ID NO: 1334166 - DNA, 25 bp, Homo sapien
atcaggcagcaaaatggaaaatgca

SEQ ID NO: 1334167 - DNA, 25 bp, Homo sapien
aatcaggcagcaaaatggaaaatgc

SEQ ID NO: 1334168 - DNA, 25 bp, Homo sapien
gaattgctgcagtcttttgagtgct

SEQ ID NO: 1334169 - DNA, 25 bp, Homo sapien
gaagaattgctgcagtcttttgagt

SEQ ID NO: 1334170 - DNA, 25 bp, Homo sapien
ttcttgaagaattgctgcagtcttt

SEQ ID NO: 1334171 - DNA, 25 bp, Homo sapien
cttttgagtgcttcttttccatcta

SEQ ID NO: 1334172 - DNA, 25 bp, Homo sapien
tgtagacatcttcatacagttctct

SEQ ID NO: 1334173 - DNA, 25 bp, Homo sapien
ttgttttgtagacatcttcatacag

SEQ ID NO: 1334174 - DNA, 25 bp, Homo sapien
agacatcttcatacagttctctatt

SEQ ID NO: 1334175 - DNA, 25 bp, Homo sapien
tcttcatacagttctctattttctt

SEQ ID NO: 1334176 - DNA, 25 bp, Homo sapien
gtgagctagagtagttcagcttcgg

SEQ ID NO: 1334177 - DNA, 25 bp, Homo sapien
caagtgagctagagtagttcagctt

SEQ ID NO: 1334178 - DNA, 25 bp, Homo sapien
tgaggcaagtgagctagagtagttc

SEQ ID NO: 1334179 - DNA, 25 bp, Homo sapien
ggcaagtgagctagagtagttcagc

SEQ ID NO: 1334180 - DNA, 25 bp, Homo sapien
acatcatcatatatctcctccgaga

SEQ ID NO: 1334181 - DNA, 25 bp, Homo sapien
tagagacccctaggtctggagtttc

SEQ ID NO: 1334182 - DNA, 25 bp, Homo sapien
cgagatggaacttgtcttagagacc

SEQ ID NO: 1334183 - DNA, 25 bp, Homo sapien
ctctttcctggagtactcgacatca

SEQ ID NO: 1334184 - DNA, 25 bp, Homo sapien
caacatgttccttctacctgtgtgg

SEQ ID NO: 1334185 - DNA, 25 bp, Homo sapien
tacctgtgtggacgttggtcatctg

SEQ ID NO: 1334186 - DNA, 25 bp, Homo sapien
tgtggacgttggtcatctgaatttt

SEQ ID NO: 1334187 - DNA, 25 bp, Homo sapien
tcaatcatggcctcttgctttccag

SEQ ID NO: 1334188 - DNA, 25 bp, Homo sapien
gtgtttttaggtttcaattcacatg

SEQ ID NO: 1334189 - DNA, 25 bp, Homo sapien
tgtttttaggtttcaattcacatgg

SEQ ID NO: 1334190 - DNA, 25 bp, Homo sapien
gtttgaatatggttccttttctgtg

SEQ ID NO: 1334191 - DNA, 25 bp, Homo sapien
tctgtgtttttaggtttcaattcac

SEQ ID NO: 1334192 - DNA, 25 bp, Homo sapien
tgttaaacttccatagcagtgataa

SEQ ID NO: 1334193 - DNA, 25 bp, Homo sapien
cactaaaaatcaaggcagaactatc

SEQ ID NO: 1334194 - DNA, 25 bp, Homo sapien
catctatctatggatctatctccag

SEQ ID NO: 1334195 - DNA, 25 bp, Homo sapien
tgtgtaatccatgataggaaaagct

SEQ ID NO: 1334196 - DNA, 25 bp, Homo sapien
ctaggttctggatagggaaaattct

SEQ ID NO: 1334197 - DNA, 25 bp, Homo sapien
ctggatagggaaaattcttcccagg

SEQ ID NO: 1334198 - DNA, 25 bp, Homo sapien
tctggatagggaaaattcttcccag

SEQ ID NO: 1334199 - DNA, 25 bp, Homo sapien
ggattgaggccagcagtgattctgc

SEQ ID NO: 1334200 - DNA, 25 bp, Homo sapien
gcctggccaagaatacaccatttta

SEQ ID NO: 1334201 - DNA, 25 bp, Homo sapien
tctgcttgggccctaatcaggttgc

SEQ ID NO: 1334202 - DNA, 25 bp, Homo sapien
tagaggacacatctaagtctcagag

SEQ ID NO: 1334203 - DNA, 25 bp, Homo sapien
gttcttcaattccaacttcataagt

SEQ ID NO: 1334204 - DNA, 25 bp, Homo sapien
tggagttcttcaattccaacttcat

SEQ ID NO: 1334205 - DNA, 25 bp, Homo sapien
cttttggagttcttcaattccaact

SEQ ID NO: 1334206 - DNA, 25 bp, Homo sapien
tcttcaattccaacttcataagttg

SEQ ID NO: 1334207 - DNA, 25 bp, Homo sapien
agctctatctagaaagtttgggaaa

SEQ ID NO: 1334208 - DNA, 25 bp, Homo sapien
agctcagaaggcaaacgtgaaagga

SEQ ID NO: 1334209 - DNA, 25 bp, Homo sapien
gcctaaatcccacttcaacaaaatg

SEQ ID NO: 1334210 - DNA, 25 bp, Homo sapien
tacagtcgatgaagcatgtgaaacc

SEQ ID NO: 1334211 - DNA, 25 bp, Homo sapien
tcctccaactgctagtgtcacaaca

SEQ ID NO: 1334212 - DNA, 25 bp, Homo sapien
tccactgattagttttattgtgcag

SEQ ID NO: 1334213 - DNA, 25 bp, Homo sapien
acaacacggtcatgtcttggaggcc

SEQ ID NO: 1334214 - DNA, 25 bp, Homo sapien
gaaaggacaaatatctgaagatggt

SEQ ID NO: 1334215 - DNA, 25 bp, Homo sapien
gctgtgtttcttctattgagctgcc

SEQ ID NO: 1334216 - DNA, 25 bp, Homo sapien
ctatggcaattggtccaacaccatt

SEQ ID NO: 1334217 - DNA, 25 bp, Homo sapien
ctgtgtttcttctattgagctgcct

SEQ ID NO: 1334218 - DNA, 25 bp, Homo sapien
atggcaattggtccaacaccatttt

SEQ ID NO: 1334219 - DNA, 25 bp, Homo sapien
actcacaaaaatgtcccgagcattg

SEQ ID NO: 1334220 - DNA, 25 bp, Homo sapien
tgtcccgagcattgtcagcaatgcc

SEQ ID NO: 1334221 - DNA, 25 bp, Homo sapien
cccgagcattgtcagcaatgccaga

SEQ ID NO: 1334222 - DNA, 25 bp, Homo sapien
ttactcacaaaaatgtcccgagcat

SEQ ID NO: 1334223 - DNA, 25 bp, Homo sapien
caggttaatggagttgccagagtgt

SEQ ID NO: 1334224 - DNA, 25 bp, Homo sapien
tgttgcctcgtaattatgtggttct

SEQ ID NO: 1334225 - DNA, 25 bp, Homo sapien
tctcagatatgaaattgttgcctcg

SEQ ID NO: 1334226 - DNA, 25 bp, Homo sapien
tttgcagtgcacaggttaatggagt

SEQ ID NO: 1334227 - DNA, 25 bp, Homo sapien
tgaaaggtccccgcagaatccctca

SEQ ID NO: 1334228 - DNA, 25 bp, Homo sapien
gaaaggtccccgcagaatccctcat

SEQ ID NO: 1334229 - DNA, 25 bp, Homo sapien
agcgctatggcccacatcataatca

SEQ ID NO: 1334230 - DNA, 25 bp, Homo sapien
tcttttgcctgtcactctttcagcg

SEQ ID NO: 1334231 - DNA, 25 bp, Homo sapien
tcccatgaaggtgccctaagttttc

SEQ ID NO: 1334232 - DNA, 25 bp, Homo sapien
tcatctcccatgaaggtgccctaag

SEQ ID NO: 1334233 - DNA, 25 bp, Homo sapien
tggagacagggagccctcttccaca

SEQ ID NO: 1334234 - DNA, 25 bp, Homo sapien
gacagggagccctcttccacagtca

SEQ ID NO: 1334235 - DNA, 25 bp, Homo sapien
gagacagggagccctcttccacagt

SEQ ID NO: 1334236 - DNA, 25 bp, Homo sapien
ctggagacagggagccctcttccac

SEQ ID NO: 1334237 - DNA, 25 bp, Homo sapien
cttccccctgagtcttgggaacagc

SEQ ID NO: 1334238 - DNA, 25 bp, Homo sapien
acccagggagtcgatggagggcaat

SEQ ID NO: 1334239 - DNA, 25 bp, Homo sapien
gaaaggcctggaggttcacgatggg

SEQ ID NO: 1334240 - DNA, 25 bp, Homo sapien
aggtggtgatgcctgacatctggct

SEQ ID NO: 1334241 - DNA, 25 bp, Homo sapien
gattgagtcacctctaacagcagag

SEQ ID NO: 1334242 - DNA, 25 bp, Homo sapien
tggcaagctcacactcatagatggg

SEQ ID NO: 1334243 - DNA, 25 bp, Homo sapien
caccctttggagaaacacctgctgg

SEQ ID NO: 1334244 - DNA, 25 bp, Homo sapien
ggccaccacgtgcttctgggaagga

SEQ ID NO: 1334245 - DNA, 25 bp, Homo sapien
gaggtggagcatcaagattttgaaa

SEQ ID NO: 1334246 - DNA, 25 bp, Homo sapien
gaaatttggctcgaagttccttgaa

SEQ ID NO: 1334247 - DNA, 25 bp, Homo sapien
gaagaggtggagcatcaagattttg

SEQ ID NO: 1334248 - DNA, 25 bp, Homo sapien
gattttgaaatttggctcgaagttc

SEQ ID NO: 1334249 - DNA, 25 bp, Homo sapien
tgttctgtcatcttttgctttcgca

SEQ ID NO: 1334250 - DNA, 25 bp, Homo sapien
aagtaggacaatgtctaatggagcc

SEQ ID NO: 1334251 - DNA, 25 bp, Homo sapien
gattttgtaaatgtgttctgtcatc

SEQ ID NO: 1334252 - DNA, 25 bp, Homo sapien
tcccactaaactgcattagattttg

SEQ ID NO: 1334253 - DNA, 25 bp, Homo sapien
ccctgagcaaagccagtgtgagcag

SEQ ID NO: 1334254 - DNA, 25 bp, Homo sapien
actggctgacacctgacatgtttat

SEQ ID NO: 1334255 - DNA, 25 bp, Homo sapien
gcactggctgacacctgacatgttt

SEQ ID NO: 1334256 - DNA, 25 bp, Homo sapien
cactggctgacacctgacatgttta

SEQ ID NO: 1334257 - DNA, 25 bp, Homo sapien
ggcagcacacacaagcagtttttcc

SEQ ID NO: 1334258 - DNA, 25 bp, Homo sapien
gcagcacacacaagcagtttttccc

SEQ ID NO: 1334259 - DNA, 25 bp, Homo sapien
gctagccagggagcaatcacttccc

SEQ ID NO: 1334260 - DNA, 25 bp, Homo sapien
ctagccagggagcaatcacttccca

SEQ ID NO: 1334261 - DNA, 25 bp, Homo sapien
tgccccatctgggccgaggctcctc

SEQ ID NO: 1334262 - DNA, 25 bp, Homo sapien
gccccatctgggccgaggctcctcc

SEQ ID NO: 1334263 - DNA, 25 bp, Homo sapien
agcttggcttagaccagcacctgca

SEQ ID NO: 1334264 - DNA, 25 bp, Homo sapien
cagggcatttgtgcccaggcagcag

SEQ ID NO: 1334265 - DNA, 25 bp, Homo sapien
tccggctggtctgacagtcactcac

SEQ ID NO: 1334266 - DNA, 25 bp, Homo sapien
tcagcaagcggctcttcccgttgct

SEQ ID NO: 1334267 - DNA, 25 bp, Homo sapien
tgttgagatcaaaggaacgccattc

SEQ ID NO: 1334268 - DNA, 25 bp, Homo sapien
cacaaaatccgcaggtcagttggta

SEQ ID NO: 1334269 - DNA, 25 bp, Homo sapien
tgaaagcagccctagggatcgtacc

SEQ ID NO: 1334270 - DNA, 25 bp, Homo sapien
tcacagtcgaggagtctggagcaag

SEQ ID NO: 1334271 - DNA, 25 bp, Homo sapien
agctagtgccagtgatgcccctgca

SEQ ID NO: 1334272 - DNA, 25 bp, Homo sapien
tggacccatcacaagtggcattcac

SEQ ID NO: 1334273 - DNA, 25 bp, Homo sapien
tcccttaaccttccagagctagtgc

SEQ ID NO: 1334274 - DNA, 25 bp, Homo sapien
tatccatatggtagcctctgtgagt

SEQ ID NO: 1334275 - DNA, 25 bp, Homo sapien
cattaagaacatgacagagccttga

SEQ ID NO: 1334276 - DNA, 25 bp, Homo sapien
aatgggaatgaaccttatggcttgc

SEQ ID NO: 1334277 - DNA, 25 bp, Homo sapien
tctaggtaccagacaattgtgcaaa

SEQ ID NO: 1334278 - DNA, 25 bp, Homo sapien
tcatccactttgtttaggtcaccca

SEQ ID NO: 1334279 - DNA, 25 bp, Homo sapien
cataagaaatctgggaattaagtat

SEQ ID NO: 1334280 - DNA, 25 bp, Homo sapien
ttttctagataatgaggatcagact

SEQ ID NO: 1334281 - DNA, 25 bp, Homo sapien
tgtacagtagtatctcacattcagt

SEQ ID NO: 1334282 - DNA, 25 bp, Homo sapien
tgtgacaggtctttcccctatatca

SEQ ID NO: 1334283 - DNA, 25 bp, Homo sapien
cagccccttttctgattaccctggg

SEQ ID NO: 1334284 - DNA, 25 bp, Homo sapien
tttcagcaagcccacagctgttgtt

SEQ ID NO: 1334285 - DNA, 25 bp, Homo sapien
ttggtcccagggagattcccacaga

SEQ ID NO: 1334286 - DNA, 25 bp, Homo sapien
tgttgttataaaggccatggatttg

SEQ ID NO: 1334287 - DNA, 25 bp, Homo sapien
tcaaatcgagttaaaaattcctcat

SEQ ID NO: 1334288 - DNA, 25 bp, Homo sapien
gggaagtccatcaaatcgagttaaa

SEQ ID NO: 1334289 - DNA, 25 bp, Homo sapien
tttcaccttagtgaagggaagtcca

SEQ ID NO: 1334290 - DNA, 25 bp, Homo sapien
tagtgaagggaagtccatcaaatcg

SEQ ID NO: 1334291 - DNA, 25 bp, Homo sapien
acaattcctggctggtagtcaatat

SEQ ID NO: 1334292 - DNA, 25 bp, Homo sapien
gtaaggtgaggattacaaagatgct

SEQ ID NO: 1334293 - DNA, 25 bp, Homo sapien
aaaattgtagagtgagtaaggtgag

SEQ ID NO: 1334294 - DNA, 25 bp, Homo sapien
gctggtagtcaatatgagtgaaata

SEQ ID NO: 1334295 - DNA, 25 bp, Homo sapien
gctggcatgagttcttgagggctca

SEQ ID NO: 1334296 - DNA, 25 bp, Homo sapien
ttgtatgtagcccactgctgtatca

SEQ ID NO: 1334297 - DNA, 25 bp, Homo sapien
taaacagcttgcatggcactgcctt

SEQ ID NO: 1334298 - DNA, 25 bp, Homo sapien
cttgcatgaactccaggtggaaact

SEQ ID NO: 1334299 - DNA, 25 bp, Homo sapien
ctaggagcagtcaagtgtttctgaa

SEQ ID NO: 1334300 - DNA, 25 bp, Homo sapien
tttgaggaggtggattgttacactg

SEQ ID NO: 1334301 - DNA, 25 bp, Homo sapien
attccacttcccatcaatgggggta

SEQ ID NO: 1334302 - DNA, 25 bp, Homo sapien
gaggaggtggattgttacactgcct

SEQ ID NO: 1334303 - DNA, 25 bp, Homo sapien
aagatgagagggtggacaaccttga

SEQ ID NO: 1334304 - DNA, 25 bp, Homo sapien
tgctaggggcatggttgaggtgcaa

SEQ ID NO: 1334305 - DNA, 25 bp, Homo sapien
ggtgcaagatgagagggtggacaac

SEQ ID NO: 1334306 - DNA, 25 bp, Homo sapien
gaagatgactgctaggggcatggtt

SEQ ID NO: 1334307 - DNA, 25 bp, Homo sapien
ggtcaagtatcttgctccaggtcag

SEQ ID NO: 1334308 - DNA, 25 bp, Homo sapien
tgaggcataaagaggtcaagtatct

SEQ ID NO: 1334309 - DNA, 25 bp, Homo sapien
tatgatcatattcatcttacaggca

SEQ ID NO: 1334310 - DNA, 25 bp, Homo sapien
aatccaagctgagtttaagcactca

SEQ ID NO: 1334311 - DNA, 25 bp, Homo sapien
tgtgccatttccatattgaacagta

SEQ ID NO: 1334312 - DNA, 25 bp, Homo sapien
gagagctcttatgtgttaaactggc

SEQ ID NO: 1334313 - DNA, 25 bp, Homo sapien
taaactggccaaagaatttgagatc

SEQ ID NO: 1334314 - DNA, 25 bp, Homo sapien
ggaagggatcttaatgatagccaag

SEQ ID NO: 1334315 - DNA, 25 bp, Homo sapien
cattgatatttctctaacatgaagc

SEQ ID NO: 1334316 - DNA, 25 bp, Homo sapien
aaaagccacgcattgatatttctct

SEQ ID NO: 1334317 - DNA, 25 bp, Homo sapien
gccacgcattgatatttctctaaca

SEQ ID NO: 1334318 - DNA, 25 bp, Homo sapien
cacgcattgatatttctctaacatg

SEQ ID NO: 1334319 - DNA, 25 bp, Homo sapien
gtttcctagtatccagccccacact

SEQ ID NO: 1334320 - DNA, 25 bp, Homo sapien
agtttaagcaggatggatctcaggt

SEQ ID NO: 1334321 - DNA, 25 bp, Homo sapien
ggatggatctcaggtttcctagtat

SEQ ID NO: 1334322 - DNA, 25 bp, Homo sapien
aatcaatccatcagttattaaatga

SEQ ID NO: 1334323 - DNA, 25 bp, Homo sapien
aggagacctcacaggctaggccttg

SEQ ID NO: 1334324 - DNA, 25 bp, Homo sapien
cctcacaggctaggccttgggatcc

SEQ ID NO: 1334325 - DNA, 25 bp, Homo sapien
cacaggctaggccttgggatccaac

SEQ ID NO: 1334326 - DNA, 25 bp, Homo sapien
agacctcacaggctaggccttggga

SEQ ID NO: 1334327 - DNA, 25 bp, Homo sapien
ttccttggcagggagcacagtggca

SEQ ID NO: 1334328 - DNA, 25 bp, Homo sapien
tttccttggcagggagcacagtggc

SEQ ID NO: 1334329 - DNA, 25 bp, Homo sapien
aggacagggactccatttccttggc

SEQ ID NO: 1334330 - DNA, 25 bp, Homo sapien
tttcaggacagggactccatttcct

SEQ ID NO: 1334331 - DNA, 25 bp, Homo sapien
gctgtcactagttcatacagaggct

SEQ ID NO: 1334332 - DNA, 25 bp, Homo sapien
ctggaataggcaaaatctgtggctg

SEQ ID NO: 1334333 - DNA, 25 bp, Homo sapien
tcactagttcatacagaggctccac

SEQ ID NO: 1334334 - DNA, 25 bp, Homo sapien
tggaataggcaaaatctgtggctgt

SEQ ID NO: 1334335 - DNA, 25 bp, Homo sapien
gtgggcaaagcaaggccccttggtg

SEQ ID NO: 1334336 - DNA, 25 bp, Homo sapien
ccagtgggcaaagcaaggccccttg

SEQ ID NO: 1334337 - DNA, 25 bp, Homo sapien
ggcaaagcaaggccccttggtggtc

SEQ ID NO: 1334338 - DNA, 25 bp, Homo sapien
tgctccagtgggcaaagcaaggccc

SEQ ID NO: 1334339 - DNA, 25 bp, Homo sapien
agcttgctttacaccaatgaagagc

SEQ ID NO: 1334340 - DNA, 25 bp, Homo sapien
tggtcaatgaattgatccagaggct

SEQ ID NO: 1334341 - DNA, 25 bp, Homo sapien
tgtggtcaatgaattgatccagagg

SEQ ID NO: 1334342 - DNA, 25 bp, Homo sapien
aaagaggggagcttgctttacacca

SEQ ID NO: 1334343 - DNA, 25 bp, Homo sapien
taagacatgcctttacacatacatc

SEQ ID NO: 1334344 - DNA, 25 bp, Homo sapien
atcactgtccctttaataggtagaa

SEQ ID NO: 1334345 - DNA, 25 bp, Homo sapien
cattgggtgttgttggatgaaaagc

SEQ ID NO: 1334346 - DNA, 25 bp, Homo sapien
catacatctttaccaacttgtcaaa

SEQ ID NO: 1334347 - DNA, 25 bp, Homo sapien
taggtcctcagaagctattttctgg

SEQ ID NO: 1334348 - DNA, 25 bp, Homo sapien
gaaaggatgggtagagcagcgttgt

SEQ ID NO: 1334349 - DNA, 25 bp, Homo sapien
cctcagaagctattttctgggtgga

SEQ ID NO: 1334350 - DNA, 25 bp, Homo sapien
tcatggtaggtcctcagaagctatt

SEQ ID NO: 1334351 - DNA, 25 bp, Homo sapien
tcacttgcccctcctcgtaccagga

SEQ ID NO: 1334352 - DNA, 25 bp, Homo sapien
gttgtactgcacagcgtctccccac

SEQ ID NO: 1334353 - DNA, 25 bp, Homo sapien
ccaggaccaccaagtcctccaccat

SEQ ID NO: 1334354 - DNA, 25 bp, Homo sapien
tgcatcaggtccgccgtcggcagct

SEQ ID NO: 1334355 - DNA, 25 bp, Homo sapien
caatttgggtacaccatattcactg

SEQ ID NO: 1334356 - DNA, 25 bp, Homo sapien
gaagatatccctttgccccctagaa

SEQ ID NO: 1334357 - DNA, 25 bp, Homo sapien
tgctgcaacccaaccaacaatttgg

SEQ ID NO: 1334358 - DNA, 25 bp, Homo sapien
cacagagctagcaggtcacagaaga

SEQ ID NO: 1334359 - DNA, 25 bp, Homo sapien
tgaaggtacttaccagacggccctg

SEQ ID NO: 1334360 - DNA, 25 bp, Homo sapien
caggtaaagtgtagtggagctcacc

SEQ ID NO: 1334361 - DNA, 25 bp, Homo sapien
tattttgacttacggagttgcccag

SEQ ID NO: 1334362 - DNA, 25 bp, Homo sapien
cagatagcaattttaggagcccagc

SEQ ID NO: 1334363 - DNA, 25 bp, Homo sapien
gacatagttggcctagaagttggga

SEQ ID NO: 1334364 - DNA, 25 bp, Homo sapien
gtgtggaagtcacaagcccctgtca

SEQ ID NO: 1334365 - DNA, 25 bp, Homo sapien
tgttgtaatcaccagaggcactagg

SEQ ID NO: 1334366 - DNA, 25 bp, Homo sapien
caacactaagtcatgttagttagcg

SEQ ID NO: 1334367 - DNA, 25 bp, Homo sapien
aatcatttttggcacaggcatggac

SEQ ID NO: 1334368 - DNA, 25 bp, Homo sapien
ctcttcaatggcaccaccaatttta

SEQ ID NO: 1334369 - DNA, 25 bp, Homo sapien
caggcatggacgttgttaagagtat

SEQ ID NO: 1334370 - DNA, 25 bp, Homo sapien
cagactgacgtagacctcttcaatg

SEQ ID NO: 1334371 - DNA, 25 bp, Homo sapien
tacttcaaggtcagagcgtgcatgc

SEQ ID NO: 1334372 - DNA, 25 bp, Homo sapien
taacgagggtgtattcataaatgcc

SEQ ID NO: 1334373 - DNA, 25 bp, Homo sapien
gaagagatctctgtattccccgtag

SEQ ID NO: 1334374 - DNA, 25 bp, Homo sapien
tgggtcccaaaatcacggaagagat

SEQ ID NO: 1334375 - DNA, 25 bp, Homo sapien
tgctaacctgcaaaagtgcccgctt

SEQ ID NO: 1334376 - DNA, 25 bp, Homo sapien
ccgtgcaagaaagagtaaaagtggt

SEQ ID NO: 1334377 - DNA, 25 bp, Homo sapien
aactctggaaaaaaagccgtgcaag

SEQ ID NO: 1334378 - DNA, 25 bp, Homo sapien
tgcccgctttgctgatgcctgtaaa

SEQ ID NO: 1334379 - DNA, 25 bp, Homo sapien
aagaaggccctcactatatgtggca

SEQ ID NO: 1334380 - DNA, 25 bp, Homo sapien
tctgtctcctgcatgtacttcctca

SEQ ID NO: 1334381 - DNA, 25 bp, Homo sapien
tagttgtaacgtggaatatagacac

SEQ ID NO: 1334382 - DNA, 25 bp, Homo sapien
gggcatgtcatttccaaaggatcca

SEQ ID NO: 1334383 - DNA, 25 bp, Homo sapien
tgtgacattgcgttcaaaatctgag

SEQ ID NO: 1334384 - DNA, 25 bp, Homo sapien
aactgaaaccagacttgcttgccat

SEQ ID NO: 1334385 - DNA, 25 bp, Homo sapien
cctaatatagtgtttgcctcgatca

SEQ ID NO: 1334386 - DNA, 25 bp, Homo sapien
gatcactttgactactgatgccaag

SEQ ID NO: 1334387 - DNA, 25 bp, Homo sapien
ctccctccactgctacctggctgtc

SEQ ID NO: 1334388 - DNA, 25 bp, Homo sapien
taatgcggggagcatccacctgcat

SEQ ID NO: 1334389 - DNA, 25 bp, Homo sapien
taatacctgtgatcaagaactgggc

SEQ ID NO: 1334390 - DNA, 25 bp, Homo sapien
ggccctcaaaactgtttgtgaacaa

SEQ ID NO: 1334391 - DNA, 25 bp, Homo sapien
aacctcgtgttcaggatgtaatgcg

SEQ ID NO: 1334392 - DNA, 25 bp, Homo sapien
gactgtcagaccctactgaacgaaa

SEQ ID NO: 1334393 - DNA, 25 bp, Homo sapien
tgtggtaggtactgttccctgcgcc

SEQ ID NO: 1334394 - DNA, 25 bp, Homo sapien
gaggcttgctcttgctccagtctac

SEQ ID NO: 1334395 - DNA, 25 bp, Homo sapien
cagcttcatttatggccgcccttaa

SEQ ID NO: 1334396 - DNA, 25 bp, Homo sapien
agaagtctgcggtttacacaccttc

SEQ ID NO: 1334397 - DNA, 25 bp, Homo sapien
agactgccaattccccagtattggt

SEQ ID NO: 1334398 - DNA, 25 bp, Homo sapien
tcattgtccccattgcaaagaagtc

SEQ ID NO: 1334399 - DNA, 25 bp, Homo sapien
caattccccagtattggtccatttc

SEQ ID NO: 1334400 - DNA, 25 bp, Homo sapien
taagggagccaacagtctacaaaga

SEQ ID NO: 1334401 - DNA, 25 bp, Homo sapien
taactgccctatgtaaccgttctag

SEQ ID NO: 1334402 - DNA, 25 bp, Homo sapien
taaggcctgacccaacatttctgac

SEQ ID NO: 1334403 - DNA, 25 bp, Homo sapien
cacttgatgcttataacagacctgt

SEQ ID NO: 1334404 - DNA, 25 bp, Homo sapien
ttccgcatggtctgttggtaacaca

SEQ ID NO: 1334405 - DNA, 25 bp, Homo sapien
tgtcagagaagttgcacggttcccc

SEQ ID NO: 1334406 - DNA, 25 bp, Homo sapien
ggctggagcaagtaggcatacctgt

SEQ ID NO: 1334407 - DNA, 25 bp, Homo sapien
ttccccatggaactgagagggctgg

SEQ ID NO: 1334408 - DNA, 25 bp, Homo sapien
tatcccctagcctgttctcaaggag

SEQ ID NO: 1334409 - DNA, 25 bp, Homo sapien
catgcaaacttaggagaagcccaag

SEQ ID NO: 1334410 - DNA, 25 bp, Homo sapien
gagtgctttgcacactcatcgggag

SEQ ID NO: 1334411 - DNA, 25 bp, Homo sapien
cacagtgcaatgagtgccatgacag

SEQ ID NO: 1334412 - DNA, 25 bp, Homo sapien
caaagggtcattctttctagaaggc

SEQ ID NO: 1334413 - DNA, 25 bp, Homo sapien
tccaggctccaaaggcaaagtgggt

SEQ ID NO: 1334414 - DNA, 25 bp, Homo sapien
gataaccagctgagggaacgtctgc

SEQ ID NO: 1334415 - DNA, 25 bp, Homo sapien
gggacaaggcttgcagagaacactg

SEQ ID NO: 1334416 - DNA, 25 bp, Homo sapien
ttgttctcagaagtaggatcctggg

SEQ ID NO: 1334417 - DNA, 25 bp, Homo sapien
ggatctggggaaatagcaaccattc

SEQ ID NO: 1334418 - DNA, 25 bp, Homo sapien
ttctctggcatatctattgttctca

SEQ ID NO: 1334419 - DNA, 25 bp, Homo sapien
ctttagagtctaagcccatggctgg

SEQ ID NO: 1334420 - DNA, 25 bp, Homo sapien
actggaagaaccctatacaaggaat

SEQ ID NO: 1334421 - DNA, 25 bp, Homo sapien
tgaatgacagatattgcggaaattg

SEQ ID NO: 1334422 - DNA, 25 bp, Homo sapien
cggaaattgagtgtgttcactggaa

SEQ ID NO: 1334423 - DNA, 25 bp, Homo sapien
gaagaaccctatacaaggaatactg

SEQ ID NO: 1334424 - DNA, 25 bp, Homo sapien
tgagtttgaggtctgcatttactac

SEQ ID NO: 1334425 - DNA, 25 bp, Homo sapien
tactaggtgaactcaagaagccatt

SEQ ID NO: 1334426 - DNA, 25 bp, Homo sapien
agccatttatctgctctgatttcct

SEQ ID NO: 1334427 - DNA, 25 bp, Homo sapien
gcatttactactaggtgaactcaag

SEQ ID NO: 1334428 - DNA, 25 bp, Homo sapien
cttttcttctgacaggggtcacatg

SEQ ID NO: 1334429 - DNA, 25 bp, Homo sapien
ggtccaagaggaccaactagacagc

SEQ ID NO: 1334430 - DNA, 25 bp, Homo sapien
atgtggtccaagaggaccaactaga

SEQ ID NO: 1334431 - DNA, 25 bp, Homo sapien
ctgacaggggtcacatgtggtccaa

SEQ ID NO: 1334432 - DNA, 25 bp, Homo sapien
gggcatcagggtaacatccacactc

SEQ ID NO: 1334433 - DNA, 25 bp, Homo sapien
gggtaacatccacactccgcatctg

SEQ ID NO: 1334434 - DNA, 25 bp, Homo sapien
atcagggtaacatccacactccgca

SEQ ID NO: 1334435 - DNA, 25 bp, Homo sapien
aatcaatgggcatcagggtaacatc

SEQ ID NO: 1334436 - DNA, 25 bp, Homo sapien
catttgacccaaaggaatgtggcct

SEQ ID NO: 1334437 - DNA, 25 bp, Homo sapien
tgactgcatttgacccaaaggaatg

SEQ ID NO: 1334438 - DNA, 25 bp, Homo sapien
cttagcaaagctcttgttgactgca

SEQ ID NO: 1334439 - DNA, 25 bp, Homo sapien
ctgcatttgacccaaaggaatgtgg

SEQ ID NO: 1334440 - DNA, 25 bp, Homo sapien
gagaagaaatagctccaccggcgcc

SEQ ID NO: 1334441 - DNA, 25 bp, Homo sapien
agaagaaatagctccaccggcgccc

SEQ ID NO: 1334442 - DNA, 25 bp, Homo sapien
cctgtgctgtgagtgccactgtcag

SEQ ID NO: 1334443 - DNA, 25 bp, Homo sapien
cccaatgtgacaggagatgccacag

SEQ ID NO: 1334444 - DNA, 25 bp, Homo sapien
gccacagaggctgctagacccataa

SEQ ID NO: 1334445 - DNA, 25 bp, Homo sapien
gctagacccataacaagcctgtgct

SEQ ID NO: 1334446 - DNA, 25 bp, Homo sapien
cctggaggacagaatctatctccct

SEQ ID NO: 1334447 - DNA, 25 bp, Homo sapien
tcagtgtctgggaaatgccgacgtc

SEQ ID NO: 1334448 - DNA, 25 bp, Homo sapien
aaatgccgacgtctactgtttccac

SEQ ID NO: 1334449 - DNA, 25 bp, Homo sapien
ttgttctagagccttaatcagtgtc

SEQ ID NO: 1334450 - DNA, 25 bp, Homo sapien
gtgaatgacaataaactaagggctc

SEQ ID NO: 1334451 - DNA, 25 bp, Homo sapien
cttggttggagagcaattagaatct

SEQ ID NO: 1334452 - DNA, 25 bp, Homo sapien
tccttaatttgtaaagccccagtga

SEQ ID NO: 1334453 - DNA, 25 bp, Homo sapien
tgcatgcatgcttgctctctctcat

SEQ ID NO: 1334454 - DNA, 25 bp, Homo sapien
cagaagtacagttcccagccctgga

SEQ ID NO: 1334455 - DNA, 25 bp, Homo sapien
ctggaggcaggctggctacacctgt

SEQ ID NO: 1334456 - DNA, 25 bp, Homo sapien
gaggcaggctggctacacctgtgtc

SEQ ID NO: 1334457 - DNA, 25 bp, Homo sapien
ctgcagaagtacagttcccagccct

SEQ ID NO: 1334458 - DNA, 25 bp, Homo sapien
gggaggataagattgctaacaacca

SEQ ID NO: 1334459 - DNA, 25 bp, Homo sapien
tagggaggataagattgctaacaac

SEQ ID NO: 1334460 - DNA, 25 bp, Homo sapien
gaggataagattgctaacaaccagc

SEQ ID NO: 1334461 - DNA, 25 bp, Homo sapien
gctgcacagggtagtgctattggca

SEQ ID NO: 1334462 - DNA, 25 bp, Homo sapien
gaagaatgcataaagtgcagggtgc

SEQ ID NO: 1334463 - DNA, 25 bp, Homo sapien
cctgagttagtaaagtcattggctg

SEQ ID NO: 1334464 - DNA, 25 bp, Homo sapien
tggtcttgcccaacccgttttcaca

SEQ ID NO: 1334465 - DNA, 25 bp, Homo sapien
tgtaaggtacgcaagggtctggtct

SEQ ID NO: 1334466 - DNA, 25 bp, Homo sapien
caggtctccttgtggaaccatggcc

SEQ ID NO: 1334467 - DNA, 25 bp, Homo sapien
gggtttggagatagctttatcatct

SEQ ID NO: 1334468 - DNA, 25 bp, Homo sapien
tcatctcgactcagaacaggtctcc

SEQ ID NO: 1334469 - DNA, 25 bp, Homo sapien
ggagatagcattgtcccagcaggtg

SEQ ID NO: 1334470 - DNA, 25 bp, Homo sapien
gaaggtgcccagtacattacatgat

SEQ ID NO: 1334471 - DNA, 25 bp, Homo sapien
ggtctagaaaggtactgcaacagtc

SEQ ID NO: 1334472 - DNA, 25 bp, Homo sapien
tcctgggacaggatacggtgcttcc

SEQ ID NO: 1334473 - DNA, 25 bp, Homo sapien
cactgggatgagtacgagctatcaa

SEQ ID NO: 1334474 - DNA, 25 bp, Homo sapien
ttaatgcatcacttgggcatctatc

SEQ ID NO: 1334475 - DNA, 25 bp, Homo sapien
cacttgggcatctatcttcttgaag

SEQ ID NO: 1334476 - DNA, 25 bp, Homo sapien
cttgaagttcagagccagttacatt

SEQ ID NO: 1334477 - DNA, 25 bp, Homo sapien
ttcagagccagttacattttcaatc

SEQ ID NO: 1334478 - DNA, 25 bp, Homo sapien
caacaggtgatagctacagagggag

SEQ ID NO: 1334479 - DNA, 25 bp, Homo sapien
cactagctgctgattggccaactgc

SEQ ID NO: 1334480 - DNA, 25 bp, Homo sapien
tcttctgagcgagttccattgggca

SEQ ID NO: 1334481 - DNA, 25 bp, Homo sapien
ccatattgagggagaagatagcacc

SEQ ID NO: 1334482 - DNA, 25 bp, Homo sapien
ttttacaaatatgaacctagcacag

SEQ ID NO: 1334483 - DNA, 25 bp, Homo sapien
gcacagtaggtcctcaatgagagtc

SEQ ID NO: 1334484 - DNA, 25 bp, Homo sapien
tactgaatgattataatgctgtttc

SEQ ID NO: 1334485 - DNA, 25 bp, Homo sapien
gatccctttgtcctaaatacactcc

SEQ ID NO: 1334486 - DNA, 25 bp, Homo sapien
acagggtaattaatgccacactgca

SEQ ID NO: 1334487 - DNA, 25 bp, Homo sapien
gataatcccaaagtctgacactgtg

SEQ ID NO: 1334488 - DNA, 25 bp, Homo sapien
caaaagcctaaatggaatcgcacat

SEQ ID NO: 1334489 - DNA, 25 bp, Homo sapien
agatttgtccacgtctctgccctgc

SEQ ID NO: 1334490 - DNA, 25 bp, Homo sapien
tcagaagtgaagaacaaccaaaagg

SEQ ID NO: 1334491 - DNA, 25 bp, Homo sapien
tcagcaatacagctcaggcaaggag

SEQ ID NO: 1334492 - DNA, 25 bp, Homo sapien
tagaacgtagacaccaggcaaaggg

SEQ ID NO: 1334493 - DNA, 25 bp, Homo sapien
catgctaagtagcatggaccatgcc

SEQ ID NO: 1334494 - DNA, 25 bp, Homo sapien
cactgggctcaccaaatggatcact

SEQ ID NO: 1334495 - DNA, 25 bp, Homo sapien
tgggctcaccaaatggatcactgtt

SEQ ID NO: 1334496 - DNA, 25 bp, Homo sapien
ccaaatggatcactgttggatgagg

SEQ ID NO: 1334497 - DNA, 25 bp, Homo sapien
tcaccaaatggatcactgttggatg

SEQ ID NO: 1334498 - DNA, 25 bp, Homo sapien
gaggatgctacaccacaaatgtgga

SEQ ID NO: 1334499 - DNA, 25 bp, Homo sapien
gagaacttatgagattgagccagca

SEQ ID NO: 1334500 - DNA, 25 bp, Homo sapien
gacacctggatatactttcatgcag

SEQ ID NO: 1334501 - DNA, 25 bp, Homo sapien
tttcatgcagcacaatcagttattg

SEQ ID NO: 1334502 - DNA, 25 bp, Homo sapien
cttgctcttcgcttttgctgggact

SEQ ID NO: 1334503 - DNA, 25 bp, Homo sapien
catctgtggtaggatcactggcatg

SEQ ID NO: 1334504 - DNA, 25 bp, Homo sapien
tgcagatgatttggatggagagctc

SEQ ID NO: 1334505 - DNA, 25 bp, Homo sapien
gctgggactttcaaagccctcttca

SEQ ID NO: 1334506 - DNA, 25 bp, Homo sapien
agtattggccatgcagtgatccata

SEQ ID NO: 1334507 - DNA, 25 bp, Homo sapien
tattggccatgcagtgatccatatc

SEQ ID NO: 1334508 - DNA, 25 bp, Homo sapien
gtattggccatgcagtgatccatat

SEQ ID NO: 1334509 - DNA, 25 bp, Homo sapien
ttggccatgcagtgatccatatcac

SEQ ID NO: 1334510 - DNA, 25 bp, Homo sapien
catgtgctcaagtgtatctggattc

SEQ ID NO: 1334511 - DNA, 25 bp, Homo sapien
tgtgtcaaacaagtgtacatgtgct

SEQ ID NO: 1334512 - DNA, 25 bp, Homo sapien
accttccctgaattgtgtcaaacaa

SEQ ID NO: 1334513 - DNA, 25 bp, Homo sapien
tgtacatgtgctcaagtgtatctgg

SEQ ID NO: 1334514 - DNA, 25 bp, Homo sapien
tatgtcttaagtgaggggcactcac

SEQ ID NO: 1334515 - DNA, 25 bp, Homo sapien
ttatgtcttaagtgaggggcactca

SEQ ID NO: 1334516 - DNA, 25 bp, Homo sapien
gtatcctgtgccaccccgactttgt

SEQ ID NO: 1334517 - DNA, 25 bp, Homo sapien
gacttgacctggtggagtcactcgt

SEQ ID NO: 1334518 - DNA, 25 bp, Homo sapien
atgaccatctgctgttggacgaggg

SEQ ID NO: 1334519 - DNA, 25 bp, Homo sapien
catcacctgagcgactggtggctgg

SEQ ID NO: 1334520 - DNA, 25 bp, Homo sapien
catgctcaagtcacagatgtacccg

SEQ ID NO: 1334521 - DNA, 25 bp, Homo sapien
tttcctcgcaaggtgcccatttcct

SEQ ID NO: 1334522 - DNA, 25 bp, Homo sapien
tagagccaatattcaaggcctggtc

SEQ ID NO: 1334523 - DNA, 25 bp, Homo sapien
catctgactgatacaggctagagcc

SEQ ID NO: 1334524 - DNA, 25 bp, Homo sapien
gaataaaacaatgatgtcaacaaac

SEQ ID NO: 1334525 - DNA, 25 bp, Homo sapien
aatggagaatatcttgtaagaccac

SEQ ID NO: 1334526 - DNA, 25 bp, Homo sapien
gaatatcttgtaagaccactttgtc

SEQ ID NO: 1334527 - DNA, 25 bp, Homo sapien
tatcttgtaagaccactttgtccaa

SEQ ID NO: 1334528 - DNA, 25 bp, Homo sapien
cctcggcctgtgagttaaggctgtc

SEQ ID NO: 1334529 - DNA, 25 bp, Homo sapien
gctctcctcggcctgtgagttaagg

SEQ ID NO: 1334530 - DNA, 25 bp, Homo sapien
cctgtgagttaaggctgtctggcca

SEQ ID NO: 1334531 - DNA, 25 bp, Homo sapien
agttaaggctgtctggccacatggt

SEQ ID NO: 1334532 - DNA, 25 bp, Homo sapien
ttgtgcatgagcgaagggacacgtc

SEQ ID NO: 1334533 - DNA, 25 bp, Homo sapien
ccactgcagccacttaacagcttgt

SEQ ID NO: 1334534 - DNA, 25 bp, Homo sapien
agggacacgtcagcagcaggacagt

SEQ ID NO: 1334535 - DNA, 25 bp, Homo sapien
gacagtggtggcactggacagaggg

SEQ ID NO: 1334536 - DNA, 25 bp, Homo sapien
taattgcacagctgtgcatatgcca

SEQ ID NO: 1334537 - DNA, 25 bp, Homo sapien
tatgccatgctcccaaaagctgcac

SEQ ID NO: 1334538 - DNA, 25 bp, Homo sapien
acagctgtgcatatgccatgctccc

SEQ ID NO: 1334539 - DNA, 25 bp, Homo sapien
ctgtgcatatgccatgctcccaaaa

SEQ ID NO: 1334540 - DNA, 25 bp, Homo sapien
agtaacatcccagagctctggaccc

SEQ ID NO: 1334541 - DNA, 25 bp, Homo sapien
tccaggccagtaacatcccagagct

SEQ ID NO: 1334542 - DNA, 25 bp, Homo sapien
ctcctcctctaaatagcttctcaat

SEQ ID NO: 1334543 - DNA, 25 bp, Homo sapien
aacatagaatcttgagctgtctggg

SEQ ID NO: 1334544 - DNA, 25 bp, Homo sapien
tacagcagcagtgccgaaaggtaca

SEQ ID NO: 1334545 - DNA, 25 bp, Homo sapien
cagtgccgaaaggtacagaactaaa

SEQ ID NO: 1334546 - DNA, 25 bp, Homo sapien
cacatctgcactcgctggaagggtc

SEQ ID NO: 1334547 - DNA, 25 bp, Homo sapien
gaagatgggataaaggcatcacctg

SEQ ID NO: 1334548 - DNA, 25 bp, Homo sapien
tatttggcactcaccctttagaggt

SEQ ID NO: 1334549 - DNA, 25 bp, Homo sapien
gcctagtcggtgctggaattccaaa

SEQ ID NO: 1334550 - DNA, 25 bp, Homo sapien
gaggtggccaactcaaactgaaata

SEQ ID NO: 1334551 - DNA, 25 bp, Homo sapien
tttagcaagtggtgcacagaccctt

SEQ ID NO: 1334552 - DNA, 25 bp, Homo sapien
tggacatgtccccaaaaagttctaa

SEQ ID NO: 1334553 - DNA, 25 bp, Homo sapien
gtgtggacatgtccccaaaaagttc

SEQ ID NO: 1334554 - DNA, 25 bp, Homo sapien
ttatatcagggggtgtggacatgtc

SEQ ID NO: 1334555 - DNA, 25 bp, Homo sapien
gaggttatatcagggggtgtggaca

SEQ ID NO: 1334556 - DNA, 25 bp, Homo sapien
gaaaggcatcaaaaacaacccagtg

SEQ ID NO: 1334557 - DNA, 25 bp, Homo sapien
tgtatacaccattaatcactcctag

SEQ ID NO: 1334558 - DNA, 25 bp, Homo sapien
caaaaacaacccagtgtatacacca

SEQ ID NO: 1334559 - DNA, 25 bp, Homo sapien
caacccagtgtatacaccattaatc

SEQ ID NO: 1334560 - DNA, 25 bp, Homo sapien
tcgttgcctcaaaaatctcatcaaa

SEQ ID NO: 1334561 - DNA, 25 bp, Homo sapien
tctcatcaaagtctgtgggcaggtt

SEQ ID NO: 1334562 - DNA, 25 bp, Homo sapien
tcatcaaagtctgtgggcaggtttc

SEQ ID NO: 1334563 - DNA, 25 bp, Homo sapien
cttcgttgcctcaaaaatctcatca

SEQ ID NO: 1334564 - DNA, 25 bp, Homo sapien
gcaaaccgttcttcaaaatcctcaa

SEQ ID NO: 1334565 - DNA, 25 bp, Homo sapien
agcaaaccgttcttcaaaatcctca

SEQ ID NO: 1334566 - DNA, 25 bp, Homo sapien
caaaatcctcaaacgaatagccatt

SEQ ID NO: 1334567 - DNA, 25 bp, Homo sapien
cgttcttcaaaatcctcaaacgaat

SEQ ID NO: 1334568 - DNA, 25 bp, Homo sapien
aaaagggagtgaattagaatcacag

SEQ ID NO: 1334569 - DNA, 25 bp, Homo sapien
taatgtgaaattggctcccatcagc

SEQ ID NO: 1334570 - DNA, 25 bp, Homo sapien
gatggcatccaaatggtaacaagaa

SEQ ID NO: 1334571 - DNA, 25 bp, Homo sapien
gttaccactgcggtccagatggcat

SEQ ID NO: 1334572 - DNA, 25 bp, Homo sapien
taccaggctgagcatttttacagag

SEQ ID NO: 1334573 - DNA, 25 bp, Homo sapien
tgagaagtgccacaacaagggtacc

SEQ ID NO: 1334574 - DNA, 25 bp, Homo sapien
cattgtggctgtgctgttcccggga

SEQ ID NO: 1334575 - DNA, 25 bp, Homo sapien
gacactatgcctatcctgtgagcac

SEQ ID NO: 1334576 - DNA, 25 bp, Homo sapien
tcaggccttggcataagacctttcc

SEQ ID NO: 1334577 - DNA, 25 bp, Homo sapien
ggccttggcataagacctttcctct

SEQ ID NO: 1334578 - DNA, 25 bp, Homo sapien
caggccttggcataagacctttcct

SEQ ID NO: 1334579 - DNA, 25 bp, Homo sapien
tctcaggccttggcataagaccttt

SEQ ID NO: 1334580 - DNA, 25 bp, Homo sapien
tatctctagtcagctcttcaaaacc

SEQ ID NO: 1334581 - DNA, 25 bp, Homo sapien
ccctagaggacatgttatctctagt

SEQ ID NO: 1334582 - DNA, 25 bp, Homo sapien
gatgactacccttggcatcacacat

SEQ ID NO: 1334583 - DNA, 25 bp, Homo sapien
tgaccctcaggatggattagatgac

SEQ ID NO: 1334584 - DNA, 25 bp, Homo sapien
actatagcctatggccttgtagaga

SEQ ID NO: 1334585 - DNA, 25 bp, Homo sapien
tctactatagcctatggccttgtag

SEQ ID NO: 1334586 - DNA, 25 bp, Homo sapien
ccttgtagagactctagttcctcat

SEQ ID NO: 1334587 - DNA, 25 bp, Homo sapien
tcttttctactatagcctatggcct

SEQ ID NO: 1334588 - DNA, 25 bp, Homo sapien
gcctagctcagtgcttgacacacag

SEQ ID NO: 1334589 - DNA, 25 bp, Homo sapien
cagtggacactagaccttatttgaa

SEQ ID NO: 1334590 - DNA, 25 bp, Homo sapien
gaatgaatgcttgagcagagcaatg

SEQ ID NO: 1334591 - DNA, 25 bp, Homo sapien
tgacttgtacctgtgcctagctcag

SEQ ID NO: 1334592 - DNA, 25 bp, Homo sapien
gaccagtggcctgcattgtagcaga

SEQ ID NO: 1334593 - DNA, 25 bp, Homo sapien
tactagtaggttttgaggctccaac

SEQ ID NO: 1334594 - DNA, 25 bp, Homo sapien
tatagcaggataccaggcatgtttc

SEQ ID NO: 1334595 - DNA, 25 bp, Homo sapien
gcaggcaactgcatatgcgaccact

SEQ ID NO: 1334596 - DNA, 25 bp, Homo sapien
tgatgttgtcattctaacacctgaa

SEQ ID NO: 1334597 - DNA, 25 bp, Homo sapien
ccacaagccaccagaggtacactga

SEQ ID NO: 1334598 - DNA, 25 bp, Homo sapien
tcagcaccacatttcagaccctttg

SEQ ID NO: 1334599 - DNA, 25 bp, Homo sapien
gtgacttcctaacagctcccagatt

SEQ ID NO: 1334600 - DNA, 25 bp, Homo sapien
tggtaatacgaggaccccaggacat

SEQ ID NO: 1334601 - DNA, 25 bp, Homo sapien
caggccatgggcttgcatctggtaa

SEQ ID NO: 1334602 - DNA, 25 bp, Homo sapien
ttgcatctggtaatacgaggacccc

SEQ ID NO: 1334603 - DNA, 25 bp, Homo sapien
ccccaggacattcaaggaagtaata

SEQ ID NO: 1334604 - DNA, 25 bp, Homo sapien
tccaggagaagggtttccttccgca

SEQ ID NO: 1334605 - DNA, 25 bp, Homo sapien
ctggcagtggagaggagatgtactt

SEQ ID NO: 1334606 - DNA, 25 bp, Homo sapien
ggcagtggagaggagatgtacttac

SEQ ID NO: 1334607 - DNA, 25 bp, Homo sapien
tggcagtggagaggagatgtactta

SEQ ID NO: 1334608 - DNA, 25 bp, Homo sapien
gcacatcataaacaccttccttctt

SEQ ID NO: 1334609 - DNA, 25 bp, Homo sapien
aggttgactttttggcacatcataa

SEQ ID NO: 1334610 - DNA, 25 bp, Homo sapien
ttttggcacatcataaacaccttcc

SEQ ID NO: 1334611 - DNA, 25 bp, Homo sapien
gactttttggcacatcataaacacc

SEQ ID NO: 1334612 - DNA, 25 bp, Homo sapien
cgtttcgggatcacggattggctcg

SEQ ID NO: 1334613 - DNA, 25 bp, Homo sapien
cttccgtttcgggatcacggattgg

SEQ ID NO: 1334614 - DNA, 25 bp, Homo sapien
ttggctcgtgtccagcctcaaacac

SEQ ID NO: 1334615 - DNA, 25 bp, Homo sapien
tcacggattggctcgtgtccagcct

SEQ ID NO: 1334616 - DNA, 25 bp, Homo sapien
cgatgccggccaaacttctgttagt

SEQ ID NO: 1334617 - DNA, 25 bp, Homo sapien
tgggatcaaacttttacagactgtg

SEQ ID NO: 1334618 - DNA, 25 bp, Homo sapien
gcaagaagggagaagcggatctcca

SEQ ID NO: 1334619 - DNA, 25 bp, Homo sapien
caaatcccaagataccgatgccggc

SEQ ID NO: 1334620 - DNA, 25 bp, Homo sapien
ggtacacaggatcttcaacatcctc

SEQ ID NO: 1334621 - DNA, 25 bp, Homo sapien
ctggtacacaggatcttcaacatcc

SEQ ID NO: 1334622 - DNA, 25 bp, Homo sapien
atcttcaacatcctcttccaatatt

SEQ ID NO: 1334623 - DNA, 25 bp, Homo sapien
cttcaacatcctcttccaatattgt

SEQ ID NO: 1334624 - DNA, 25 bp, Homo sapien
tctccagcgcaaggataaattcaca

SEQ ID NO: 1334625 - DNA, 25 bp, Homo sapien
tgtttatttgaaggcccgatctcca

SEQ ID NO: 1334626 - DNA, 25 bp, Homo sapien
caattgtgtttcttgggtcctccac

SEQ ID NO: 1334627 - DNA, 25 bp, Homo sapien
gaagagaaggcctgactgtcagttt

SEQ ID NO: 1334628 - DNA, 25 bp, Homo sapien
aaagagatctctcaagtccagaata

SEQ ID NO: 1334629 - DNA, 25 bp, Homo sapien
gatctctcaagtccagaataacagg

SEQ ID NO: 1334630 - DNA, 25 bp, Homo sapien
gagatctctcaagtccagaataaca

SEQ ID NO: 1334631 - DNA, 25 bp, Homo sapien
ctctcaagtccagaataacaggttc

SEQ ID NO: 1334632 - DNA, 25 bp, Homo sapien
caatgtaggatatttcatgaacagc

SEQ ID NO: 1334633 - DNA, 25 bp, Homo sapien
tctgtaatgtcctttgcaatgtagg

SEQ ID NO: 1334634 - DNA, 25 bp, Homo sapien
gggctgtttttatggccacaaatct

SEQ ID NO: 1334635 - DNA, 25 bp, Homo sapien
aaacatatccaaaggcccggtgatc

SEQ ID NO: 1334636 - DNA, 25 bp, Homo sapien
aaaaccagcctcctggcacagtggg

SEQ ID NO: 1334637 - DNA, 25 bp, Homo sapien
tcctggcacagtgggcctctggatt

SEQ ID NO: 1334638 - DNA, 25 bp, Homo sapien
ggcacagtgggcctctggatttcac

SEQ ID NO: 1334639 - DNA, 25 bp, Homo sapien
tacaaaaccagcctcctggcacagt

SEQ ID NO: 1334640 - DNA, 25 bp, Homo sapien
gtcatcgccgtagttctagaccact

SEQ ID NO: 1334641 - DNA, 25 bp, Homo sapien
tctagaccactgatcttctaaaatg

SEQ ID NO: 1334642 - DNA, 25 bp, Homo sapien
agaccactgatcttctaaaatgtcc

SEQ ID NO: 1334643 - DNA, 25 bp, Homo sapien
gatggtcatcgccgtagttctagac

SEQ ID NO: 1334644 - DNA, 25 bp, Homo sapien
cccttggccggatgcaatctttcca

SEQ ID NO: 1334645 - DNA, 25 bp, Homo sapien
cttggccggatgcaatctttccagg

SEQ ID NO: 1334646 - DNA, 25 bp, Homo sapien
ttggccggatgcaatctttccaggc

SEQ ID NO: 1334647 - DNA, 25 bp, Homo sapien
ccttggccggatgcaatctttccag

SEQ ID NO: 1334648 - DNA, 25 bp, Homo sapien
cagcccatggtcctagggcataaga

SEQ ID NO: 1334649 - DNA, 25 bp, Homo sapien
catcccaggagtgcttctgcagtca

SEQ ID NO: 1334650 - DNA, 25 bp, Homo sapien
tggtcctagggcataagaactgctc

SEQ ID NO: 1334651 - DNA, 25 bp, Homo sapien
gccttgcaggtagttccggaggtgg

SEQ ID NO: 1334652 - DNA, 25 bp, Homo sapien
aatatctgcccttgaattctaagcc

SEQ ID NO: 1334653 - DNA, 25 bp, Homo sapien
ggagacgccagcaggtaagatcttc

SEQ ID NO: 1334654 - DNA, 25 bp, Homo sapien
gtttttggccatcaacagatttggg

SEQ ID NO: 1334655 - DNA, 25 bp, Homo sapien
taagtacccttgcagtaaactccaa

SEQ ID NO: 1334656 - DNA, 25 bp, Homo sapien
atctcaccggctcacagaagacgct

SEQ ID NO: 1334657 - DNA, 25 bp, Homo sapien
gaaggtcctcagtaagaagtgggca

SEQ ID NO: 1334658 - DNA, 25 bp, Homo sapien
tactctagaacagcccagtctgaaa

SEQ ID NO: 1334659 - DNA, 25 bp, Homo sapien
tctccagtgagtgtagcattgtggc

SEQ ID NO: 1334660 - DNA, 25 bp, Homo sapien
tacacatgttccgtatacatgctcc

SEQ ID NO: 1334661 - DNA, 25 bp, Homo sapien
catgttccgtatacatgctccagga

SEQ ID NO: 1334662 - DNA, 25 bp, Homo sapien
agttcatccttacacatgttccgta

SEQ ID NO: 1334663 - DNA, 25 bp, Homo sapien
catccttacacatgttccgtataca

SEQ ID NO: 1334664 - DNA, 25 bp, Homo sapien
aatgacacgtatgtcaagctcttac

SEQ ID NO: 1334665 - DNA, 25 bp, Homo sapien
tcaagtatgaaatgacacgtatgtc

SEQ ID NO: 1334666 - DNA, 25 bp, Homo sapien
tgaaatgacacgtatgtcaagctct

SEQ ID NO: 1334667 - DNA, 25 bp, Homo sapien
tatgaaatgacacgtatgtcaagct

SEQ ID NO: 1334668 - DNA, 25 bp, Homo sapien
caatcctggttacccagtccctggg

SEQ ID NO: 1334669 - DNA, 25 bp, Homo sapien
ctggcaaaatagtaagcgtgatcat

SEQ ID NO: 1334670 - DNA, 25 bp, Homo sapien
tattgttttcattggcgttttcctc

SEQ ID NO: 1334671 - DNA, 25 bp, Homo sapien
aaatctagccctttgtctgcaacac

SEQ ID NO: 1334672 - DNA, 25 bp, Homo sapien
cagtatgacacagatgatcatgtgc

SEQ ID NO: 1334673 - DNA, 25 bp, Homo sapien
tcatgtgctaggatacagcaagcag

SEQ ID NO: 1334674 - DNA, 25 bp, Homo sapien
tgaagtagggacatcataaaaggct

SEQ ID NO: 1334675 - DNA, 25 bp, Homo sapien
gagtgtgagtcaactcagtatgaca

SEQ ID NO: 1334676 - DNA, 25 bp, Homo sapien
cctttctcaacctcagttgctctct

SEQ ID NO: 1334677 - DNA, 25 bp, Homo sapien
aacaccaggtcccagtgtgacgttc

SEQ ID NO: 1334678 - DNA, 25 bp, Homo sapien
aaccttgctcaaaacatccagtttg

SEQ ID NO: 1334679 - DNA, 25 bp, Homo sapien
ttctgagtcccagagaacaccaggt

SEQ ID NO: 1334680 - DNA, 25 bp, Homo sapien
agttgatcaagtttgtcagttgctt

SEQ ID NO: 1334681 - DNA, 25 bp, Homo sapien
atgtgtttttatgcttgttgtatat

SEQ ID NO: 1334682 - DNA, 25 bp, Homo sapien
agagttgatcaagtttgtcagttgc

SEQ ID NO: 1334683 - DNA, 25 bp, Homo sapien
tcagagttgatcaagtttgtcagtt

SEQ ID NO: 1334684 - DNA, 25 bp, Homo sapien
tttctgtttgtgttctcctttggaa

SEQ ID NO: 1334685 - DNA, 25 bp, Homo sapien
tctcctttggaacgagcgccagcaa

SEQ ID NO: 1334686 - DNA, 25 bp, Homo sapien
tgtgttctcctttggaacgagcgcc

SEQ ID NO: 1334687 - DNA, 25 bp, Homo sapien
tggaacgagcgccagcaacaacgcc

SEQ ID NO: 1334688 - DNA, 25 bp, Homo sapien
tctcatctgatctcatgcacgagtc

SEQ ID NO: 1334689 - DNA, 25 bp, Homo sapien
tcatgcacgagtcatgggtcctact

SEQ ID NO: 1334690 - DNA, 25 bp, Homo sapien
catgggtcctactctgggcaagggc

SEQ ID NO: 1334691 - DNA, 25 bp, Homo sapien
cagggggatctgcagttgtccaaca

SEQ ID NO: 1334692 - DNA, 25 bp, Homo sapien
tattccataatgcacataagtgaac

SEQ ID NO: 1334693 - DNA, 25 bp, Homo sapien
gtctttgtgggattgtggattattt

SEQ ID NO: 1334694 - DNA, 25 bp, Homo sapien
aaatattccataatgcacataagtg

SEQ ID NO: 1334695 - DNA, 25 bp, Homo sapien
tgtctttgtgggattgtggattatt

SEQ ID NO: 1334696 - DNA, 25 bp, Homo sapien
catcatggaatcttgacataacttg

SEQ ID NO: 1334697 - DNA, 25 bp, Homo sapien
aaagtggcttcactgcgatcctgac

SEQ ID NO: 1334698 - DNA, 25 bp, Homo sapien
tgacataacttgtctccccgagctg

SEQ ID NO: 1334699 - DNA, 25 bp, Homo sapien
gcggaaacttcatcaatcccgatca

SEQ ID NO: 1334700 - DNA, 25 bp, Homo sapien
ctctgtgttctgctacagaatttag

SEQ ID NO: 1334701 - DNA, 25 bp, Homo sapien
tgtgttctgctacagaatttagcct

SEQ ID NO: 1334702 - DNA, 25 bp, Homo sapien
tgttctgctacagaatttagcctca

SEQ ID NO: 1334703 - DNA, 25 bp, Homo sapien
gttctgctacagaatttagcctcat

SEQ ID NO: 1334704 - DNA, 25 bp, Homo sapien
ccattttccacagacctcgaagatt

SEQ ID NO: 1334705 - DNA, 25 bp, Homo sapien
ctgaatttaaatccagccgattctt

SEQ ID NO: 1334706 - DNA, 25 bp, Homo sapien
aaatgtagaattctgagtagtcatc

SEQ ID NO: 1334707 - DNA, 25 bp, Homo sapien
gaaaggatgttctgaaagaagaagt

SEQ ID NO: 1334708 - DNA, 25 bp, Homo sapien
ccagcatcgtaacatgtaaatgtag

SEQ ID NO: 1334709 - DNA, 25 bp, Homo sapien
ctagtgaccagcatcgtaacatgta

SEQ ID NO: 1334710 - DNA, 25 bp, Homo sapien
tgtatttaatcacccagtccatgcc

SEQ ID NO: 1334711 - DNA, 25 bp, Homo sapien
tagcatgcatagacagcaaggatgg

SEQ ID NO: 1334712 - DNA, 25 bp, Homo sapien
caaggatggagctaacatttcagcc

SEQ ID NO: 1334713 - DNA, 25 bp, Homo sapien
gagggccagcgtgttcagagatcac

SEQ ID NO: 1334714 - DNA, 25 bp, Homo sapien
tggtattaaagccagcaacagcttc

SEQ ID NO: 1334715 - DNA, 25 bp, Homo sapien
agtaaggatggtattaaagccagca

SEQ ID NO: 1334716 - DNA, 25 bp, Homo sapien
ccccaaagcagtgtgaataccaagt

SEQ ID NO: 1334717 - DNA, 25 bp, Homo sapien
cagtgtgaataccaagtaaggatgg

SEQ ID NO: 1334718 - DNA, 25 bp, Homo sapien
tgttattccatagtaccctgggcat

SEQ ID NO: 1334719 - DNA, 25 bp, Homo sapien
tggaggcctgaagaccagttacaac

SEQ ID NO: 1334720 - DNA, 25 bp, Homo sapien
gtgtacatgcttctggcttgaatac

SEQ ID NO: 1334721 - DNA, 25 bp, Homo sapien
tgccaccaggtaacagaaagtctgg

SEQ ID NO: 1334722 - DNA, 25 bp, Homo sapien
gctaatcccagtttgtctcagcgct

SEQ ID NO: 1334723 - DNA, 25 bp, Homo sapien
gtctcagcgctgattgagtcactga

SEQ ID NO: 1334724 - DNA, 25 bp, Homo sapien
ccagtttgtctcagcgctgattgag

SEQ ID NO: 1334725 - DNA, 25 bp, Homo sapien
caaggagagagagaccccgcaagga

SEQ ID NO: 1334726 - DNA, 25 bp, Homo sapien
tccagaggcacaggccacatagggc

SEQ ID NO: 1334727 - DNA, 25 bp, Homo sapien
aacccacacagagacttcagcaagg

SEQ ID NO: 1334728 - DNA, 25 bp, Homo sapien
taaaaaacccacacagagacttcag

SEQ ID NO: 1334729 - DNA, 25 bp, Homo sapien
aaaaacccacacagagacttcagca

SEQ ID NO: 1334730 - DNA, 25 bp, Homo sapien
caggtctgtaactaagatccgttta

SEQ ID NO: 1334731 - DNA, 25 bp, Homo sapien
tgtaactaagatccgtttacctgca

SEQ ID NO: 1334732 - DNA, 25 bp, Homo sapien
agaggccaggtctgtaactaagatc

SEQ ID NO: 1334733 - DNA, 25 bp, Homo sapien
taagatccgtttacctgcattcact

SEQ ID NO: 1334734 - DNA, 25 bp, Homo sapien
aaggaagacagtcacttcagataaa

SEQ ID NO: 1334735 - DNA, 25 bp, Homo sapien
aggaagacagtcacttcagataaat

SEQ ID NO: 1334736 - DNA, 25 bp, Homo sapien
gaagacagtcacttcagataaatgc

SEQ ID NO: 1334737 - DNA, 25 bp, Homo sapien
ggaagacagtcacttcagataaatg

SEQ ID NO: 1334738 - DNA, 25 bp, Homo sapien
gctgctgctctcaaaaatggcatgt

SEQ ID NO: 1334739 - DNA, 25 bp, Homo sapien
taggctctgagctaaacttactgtg

SEQ ID NO: 1334740 - DNA, 25 bp, Homo sapien
catgacactgcccatccatgctgct

SEQ ID NO: 1334741 - DNA, 25 bp, Homo sapien
aatggcatgtgtgacaaggacagcc

SEQ ID NO: 1334742 - DNA, 25 bp, Homo sapien
tctactctctgagcgtagccatggg

SEQ ID NO: 1334743 - DNA, 25 bp, Homo sapien
tctagagcagtggacaaaataggcg

SEQ ID NO: 1334744 - DNA, 25 bp, Homo sapien
gcagaatcacaattaccaaggagga

SEQ ID NO: 1334745 - DNA, 25 bp, Homo sapien
tcagaaaggttctcggcaccagagt

SEQ ID NO: 1334746 - DNA, 25 bp, Homo sapien
agggatacagtgagggatgagcatc

SEQ ID NO: 1334747 - DNA, 25 bp, Homo sapien
gatacagtgagggatgagcatctgc

SEQ ID NO: 1334748 - DNA, 25 bp, Homo sapien
ttcagaaatgcagctatgagcagtt

SEQ ID NO: 1334749 - DNA, 25 bp, Homo sapien
aatgcagctatgagcagttagcact

SEQ ID NO: 1334750 - DNA, 25 bp, Homo sapien
cctgtaatataattcacatctccca

SEQ ID NO: 1334751 - DNA, 25 bp, Homo sapien
caaggtaagaggaccaccctgtaat

SEQ ID NO: 1334752 - DNA, 25 bp, Homo sapien
gaggaccaccctgtaatataattca

SEQ ID NO: 1334753 - DNA, 25 bp, Homo sapien
ttcaaggtaagaggaccaccctgta

SEQ ID NO: 1334754 - DNA, 25 bp, Homo sapien
tacactacttgacgtaaggcaggac

SEQ ID NO: 1334755 - DNA, 25 bp, Homo sapien
aacagctatttactgggccatccag

SEQ ID NO: 1334756 - DNA, 25 bp, Homo sapien
gcaggactgggatttctactcaggt

SEQ ID NO: 1334757 - DNA, 25 bp, Homo sapien
gataacgatattgaaagaactgcct

SEQ ID NO: 1334758 - DNA, 25 bp, Homo sapien
tgtaatggatacacccagagagggt

SEQ ID NO: 1334759 - DNA, 25 bp, Homo sapien
tggaaggagctttgagtaacacagt

SEQ ID NO: 1334760 - DNA, 25 bp, Homo sapien
tacacgagacccattgtcataggga

SEQ ID NO: 1334761 - DNA, 25 bp, Homo sapien
ggaacccaagggcatagtctgtcct

SEQ ID NO: 1334762 - DNA, 25 bp, Homo sapien
tctgaatgctcctgcagaagatctc

SEQ ID NO: 1334763 - DNA, 25 bp, Homo sapien
gccaaaatgcctctcctccttcagt

SEQ ID NO: 1334764 - DNA, 25 bp, Homo sapien
gatctccaccagctgacatgtaggg

SEQ ID NO: 1334765 - DNA, 25 bp, Homo sapien
gggctctttcataacttccttttgc

SEQ ID NO: 1334766 - DNA, 25 bp, Homo sapien
tggcagaaccaacccgaaacatctt

SEQ ID NO: 1334767 - DNA, 25 bp, Homo sapien
gcaggaagatgctgtacgaacacct

SEQ ID NO: 1334768 - DNA, 25 bp, Homo sapien
ctttagtggattcgcagacagcagc

SEQ ID NO: 1334769 - DNA, 25 bp, Homo sapien
gaacaccttgcagtatggcagaacc

SEQ ID NO: 1334770 - DNA, 25 bp, Homo sapien
caggagcttcttggatggttaacat

SEQ ID NO: 1334771 - DNA, 25 bp, Homo sapien
ggattggaactttcagccaggcccc

SEQ ID NO: 1334772 - DNA, 25 bp, Homo sapien
gacagaagaggctactgtggcccac

SEQ ID NO: 1334773 - DNA, 25 bp, Homo sapien
taacatatcaaggacacctagggac

SEQ ID NO: 1334774 - DNA, 25 bp, Homo sapien
tcaggtaagcctctgggttctaggc

SEQ ID NO: 1334775 - DNA, 25 bp, Homo sapien
caggtaagcctctgggttctaggct

SEQ ID NO: 1334776 - DNA, 25 bp, Homo sapien
tagcttaaacctgaggcttcaggta

SEQ ID NO: 1334777 - DNA, 25 bp, Homo sapien
taaacctgaggcttcaggtaagcct

SEQ ID NO: 1334778 - DNA, 25 bp, Homo sapien
catcagctggagagtcaccagggcc

SEQ ID NO: 1334779 - DNA, 25 bp, Homo sapien
gtttttgtttatcggagctgtgctg

SEQ ID NO: 1334780 - DNA, 25 bp, Homo sapien
gatttcgatgagcttttctcccaaa

SEQ ID NO: 1334781 - DNA, 25 bp, Homo sapien
tctcttgtaacacatcgagatcatg

SEQ ID NO: 1334782 - DNA, 25 bp, Homo sapien
taaattgttcgacaggatttgctcg

SEQ ID NO: 1334783 - DNA, 25 bp, Homo sapien
gctagcccaattacgcaaatgatcc

SEQ ID NO: 1334784 - DNA, 25 bp, Homo sapien
gatccaaatccttttgaatctggtt

SEQ ID NO: 1334785 - DNA, 25 bp, Homo sapien
tgtactttgaactacatttaccatc

SEQ ID NO: 1334786 - DNA, 25 bp, Homo sapien
tcacaagcaatgatggatgccaagg

SEQ ID NO: 1334787 - DNA, 25 bp, Homo sapien
tggatatgtgtgctgtgctctcaag

SEQ ID NO: 1334788 - DNA, 25 bp, Homo sapien
cagagagggcggcagtagaattcta

SEQ ID NO: 1334789 - DNA, 25 bp, Homo sapien
taccaagaataggaaagatgaccag

SEQ ID NO: 1334790 - DNA, 25 bp, Homo sapien
gaagtcaagggcatcccagtttgca

SEQ ID NO: 1334791 - DNA, 25 bp, Homo sapien
caagcccacattgacagatttcaag

SEQ ID NO: 1334792 - DNA, 25 bp, Homo sapien
ctgagagagagctctgtcaatcctc

SEQ ID NO: 1334793 - DNA, 25 bp, Homo sapien
agagctctgtcaatcctctcccatg

SEQ ID NO: 1334794 - DNA, 25 bp, Homo sapien
tctggagtctttcttggcgctggtt

SEQ ID NO: 1334795 - DNA, 25 bp, Homo sapien
tggagtctttcttggcgctggtttt

SEQ ID NO: 1334796 - DNA, 25 bp, Homo sapien
ctggagtctttcttggcgctggttt

SEQ ID NO: 1334797 - DNA, 25 bp, Homo sapien
ggttttcacagctacttgaagttct

SEQ ID NO: 1334798 - DNA, 25 bp, Homo sapien
gacactctgagctgcacatttcatt

SEQ ID NO: 1334799 - DNA, 25 bp, Homo sapien
taatccttagtccacttcacacaga

SEQ ID NO: 1334800 - DNA, 25 bp, Homo sapien
tcggccaggctcattgaggactctt

SEQ ID NO: 1334801 - DNA, 25 bp, Homo sapien
agaaagactcctcccttcagaaatg

SEQ ID NO: 1334802 - DNA, 25 bp, Homo sapien
agaggtccaccatcattgcagcaga

SEQ ID NO: 1334803 - DNA, 25 bp, Homo sapien
cccaatggcagcagttctataaagc

SEQ ID NO: 1334804 - DNA, 25 bp, Homo sapien
taaggctttgcaggaacccaatggc

SEQ ID NO: 1334805 - DNA, 25 bp, Homo sapien
gagacgctgtatctttctgctaaca

SEQ ID NO: 1334806 - DNA, 25 bp, Homo sapien
gcttttggagactgaacgccctgta

SEQ ID NO: 1334807 - DNA, 25 bp, Homo sapien
tccacagagtgtttgagtaacacga

SEQ ID NO: 1334808 - DNA, 25 bp, Homo sapien
tcattttaaccctactccataccag

SEQ ID NO: 1334809 - DNA, 25 bp, Homo sapien
ggaaggcttactgtgtttatttgct

SEQ ID NO: 1334810 - DNA, 25 bp, Homo sapien
tgtgcttgacgggaagcaacccaat

SEQ ID NO: 1334811 - DNA, 25 bp, Homo sapien
tttctccacaaaaggatctgtgctt

SEQ ID NO: 1334812 - DNA, 25 bp, Homo sapien
ggatggctcaaattttctccacaaa

SEQ ID NO: 1334813 - DNA, 25 bp, Homo sapien
caaaaggatctgtgcttgacgggaa

SEQ ID NO: 1334814 - DNA, 25 bp, Homo sapien
ttcatcattaactccttttgccttc

SEQ ID NO: 1334815 - DNA, 25 bp, Homo sapien
ggtgagaatttctaaaagctcccaa

SEQ ID NO: 1334816 - DNA, 25 bp, Homo sapien
caagggcctttctgacatttcatca

SEQ ID NO: 1334817 - DNA, 25 bp, Homo sapien
gctcccaagggcctttctgacattt

SEQ ID NO: 1334818 - DNA, 25 bp, Homo sapien
tcccatttaacaggaagacaacaaa

SEQ ID NO: 1334819 - DNA, 25 bp, Homo sapien
tgagcttgtgtaggcttcaagtgga

SEQ ID NO: 1334820 - DNA, 25 bp, Homo sapien
ctgcagggtagcaaaggtgagcttg

SEQ ID NO: 1334821 - DNA, 25 bp, Homo sapien
tgaggcccaaacaactcgctttctc

SEQ ID NO: 1334822 - DNA, 25 bp, Homo sapien
cctcgggtccctctttgtgcactca

SEQ ID NO: 1334823 - DNA, 25 bp, Homo sapien
ctcgggtccctctttgtgcactcat

SEQ ID NO: 1334824 - DNA, 25 bp, Homo sapien
gaaaggatcttgcagttttttagga

SEQ ID NO: 1334825 - DNA, 25 bp, Homo sapien
cacacttggcctaatggaacagaga

SEQ ID NO: 1334826 - DNA, 25 bp, Homo sapien
tgctcattatctcagagttccaggg

SEQ ID NO: 1334827 - DNA, 25 bp, Homo sapien
ctttaacaaggtcacggcagcgctt

SEQ ID NO: 1334828 - DNA, 25 bp, Homo sapien
tgtgcagggaaatgagggccaaact

SEQ ID NO: 1334829 - DNA, 25 bp, Homo sapien
taaagccaattgagaatgaggcctc

SEQ ID NO: 1334830 - DNA, 25 bp, Homo sapien
tgaggcctcaaggtatggcaggaaa

SEQ ID NO: 1334831 - DNA, 25 bp, Homo sapien
gtatggcaggaaaatagcacaggtt

SEQ ID NO: 1334832 - DNA, 25 bp, Homo sapien
ggtaaagccaattgagaatgaggcc

SEQ ID NO: 1334833 - DNA, 25 bp, Homo sapien
gacaaatgccaggctacagaaggtg

SEQ ID NO: 1334834 - DNA, 25 bp, Homo sapien
acaaatgccaggctacagaaggtgt

SEQ ID NO: 1334835 - DNA, 25 bp, Homo sapien
cggacaaatgccaggctacagaagg

SEQ ID NO: 1334836 - DNA, 25 bp, Homo sapien
ggacaaatgccaggctacagaaggt

SEQ ID NO: 1334837 - DNA, 25 bp, Homo sapien
tagaacattctcaggggtcgtggca

SEQ ID NO: 1334838 - DNA, 25 bp, Homo sapien
tagaagtgttgcatggccccagggc

SEQ ID NO: 1334839 - DNA, 25 bp, Homo sapien
agaagtgttgcatggccccagggct

SEQ ID NO: 1334840 - DNA, 25 bp, Homo sapien
gatcttattgaaccaccttgtcttt

SEQ ID NO: 1334841 - DNA, 25 bp, Homo sapien
cctaatgcggtgcttggtacagagc

SEQ ID NO: 1334842 - DNA, 25 bp, Homo sapien
gaattcgactaagtaattgcttgac

SEQ ID NO: 1334843 - DNA, 25 bp, Homo sapien
gaacaattcacgaaatcaagaactg

SEQ ID NO: 1334844 - DNA, 25 bp, Homo sapien
gaaccactgtgtataaagtacctaa

SEQ ID NO: 1334845 - DNA, 25 bp, Homo sapien
tgtttgctacccatgatggctgttg

SEQ ID NO: 1334846 - DNA, 25 bp, Homo sapien
tgctacccatgatggctgttgcatc

SEQ ID NO: 1334847 - DNA, 25 bp, Homo sapien
aggttgtttgctacccatgatggct

SEQ ID NO: 1334848 - DNA, 25 bp, Homo sapien
ggttgtttgctacccatgatggctg

SEQ ID NO: 1334849 - DNA, 25 bp, Homo sapien
tactgcatgggggtaaccatcccca

SEQ ID NO: 1334850 - DNA, 25 bp, Homo sapien
catgagagtactgcatgggggtaac

SEQ ID NO: 1334851 - DNA, 25 bp, Homo sapien
gaatttgtcatgctgctacgaagaa

SEQ ID NO: 1334852 - DNA, 25 bp, Homo sapien
tccttctcacgtggcggcaggagag

SEQ ID NO: 1334853 - DNA, 25 bp, Homo sapien
catacaagccatcactaatgacaag

SEQ ID NO: 1334854 - DNA, 25 bp, Homo sapien
taatgacaagattgatagctcagga

SEQ ID NO: 1334855 - DNA, 25 bp, Homo sapien
gataagcccatgtcaatactactca

SEQ ID NO: 1334856 - DNA, 25 bp, Homo sapien
gatagctcaggagggcaagtcattt

SEQ ID NO: 1334857 - DNA, 25 bp, Homo sapien
gattggtccaccttgataatccaag

SEQ ID NO: 1334858 - DNA, 25 bp, Homo sapien
gaactaacaatctaagggcagacta

SEQ ID NO: 1334859 - DNA, 25 bp, Homo sapien
ttccgaggattagggcatgacatct

SEQ ID NO: 1334860 - DNA, 25 bp, Homo sapien
taacatcttcataggttccgaggat

SEQ ID NO: 1334861 - DNA, 25 bp, Homo sapien
aattataacaggcatctcctccctc

SEQ ID NO: 1334862 - DNA, 25 bp, Homo sapien
ctccctcagagtcccatgggcctct

SEQ ID NO: 1334863 - DNA, 25 bp, Homo sapien
tgtttcccagtcctcgtgtaggtgg

SEQ ID NO: 1334864 - DNA, 25 bp, Homo sapien
tcatcctagacagccctgttccttg

SEQ ID NO: 1334865 - DNA, 25 bp, Homo sapien
atcagaccaacatcagacccaacgg

SEQ ID NO: 1334866 - DNA, 25 bp, Homo sapien
ggcagagagcttcgaaaaccacttg

SEQ ID NO: 1334867 - DNA, 25 bp, Homo sapien
caacacaggcagtgctttgttcaaa

SEQ ID NO: 1334868 - DNA, 25 bp, Homo sapien
agtacgttccccttcttctatcaga

SEQ ID NO: 1334869 - DNA, 25 bp, Homo sapien
tctcctggtattgaagtccttcttc

SEQ ID NO: 1334870 - DNA, 25 bp, Homo sapien
tttgtttataaatgggcttttcaca

SEQ ID NO: 1334871 - DNA, 25 bp, Homo sapien
taaatgggcttttcacagctcttcc

SEQ ID NO: 1334872 - DNA, 25 bp, Homo sapien
gaaatgcagtccgactcctggccgg

SEQ ID NO: 1334873 - DNA, 25 bp, Homo sapien
aagtccatgcaagaaacatacagcg

SEQ ID NO: 1334874 - DNA, 25 bp, Homo sapien
agcgcattcatattgcagcattgat

SEQ ID NO: 1334875 - DNA, 25 bp, Homo sapien
gagactggaaacaccgttacagagt

SEQ ID NO: 1334876 - DNA, 25 bp, Homo sapien
gagtgtctgcaagtccatgcaagaa

SEQ ID NO: 1334877 - DNA, 25 bp, Homo sapien
gatgtatagccaatgaattttctgt

SEQ ID NO: 1334878 - DNA, 25 bp, Homo sapien
gctagacgctaatgaaaacccaaag

SEQ ID NO: 1334879 - DNA, 25 bp, Homo sapien
tccacagtaactactaagttgctca

SEQ ID NO: 1334880 - DNA, 25 bp, Homo sapien
tatgacattcactcaattccacagt

SEQ ID NO: 1334881 - DNA, 25 bp, Homo sapien
gactccccatatgtgatggcacatg

SEQ ID NO: 1334882 - DNA, 25 bp, Homo sapien
tgggactccccatatgtgatggcac

SEQ ID NO: 1334883 - DNA, 25 bp, Homo sapien
gggactccccatatgtgatggcaca

SEQ ID NO: 1334884 - DNA, 25 bp, Homo sapien
ctgggactccccatatgtgatggca

SEQ ID NO: 1334885 - DNA, 25 bp, Homo sapien
agcttgccttgccaatacagagtcc

SEQ ID NO: 1334886 - DNA, 25 bp, Homo sapien
tgccttgccaatacagagtccaccg

SEQ ID NO: 1334887 - DNA, 25 bp, Homo sapien
gcttgccttgccaatacagagtcca

SEQ ID NO: 1334888 - DNA, 25 bp, Homo sapien
ttgccaatacagagtccaccgccag

SEQ ID NO: 1334889 - DNA, 25 bp, Homo sapien
tagcagcaccgttcccaagaagatg

SEQ ID NO: 1334890 - DNA, 25 bp, Homo sapien
tttaattgccaactcgatgtgtaga

SEQ ID NO: 1334891 - DNA, 25 bp, Homo sapien
gatcctcccagcgttgccaaatagt

SEQ ID NO: 1334892 - DNA, 25 bp, Homo sapien
aacatatttgcacttcccacttcgg

SEQ ID NO: 1334893 - DNA, 25 bp, Homo sapien
tccgcccgccgccaagagcggagcg

SEQ ID NO: 1334894 - DNA, 25 bp, Homo sapien
ccgccgccaagagcggagcggtagc

SEQ ID NO: 1334895 - DNA, 25 bp, Homo sapien
agagcggagcggtagccaagcgccc

SEQ ID NO: 1334896 - DNA, 25 bp, Homo sapien
ccgccaagagcggagcggtagccaa

SEQ ID NO: 1334897 - DNA, 25 bp, Homo sapien
tatgagccgaaccacagagatttaa

SEQ ID NO: 1334898 - DNA, 25 bp, Homo sapien
tctgcatccaagtcagagcgtcgag

SEQ ID NO: 1334899 - DNA, 25 bp, Homo sapien
gttgacaccctcttgtgtgcctgct

SEQ ID NO: 1334900 - DNA, 25 bp, Homo sapien
tctgggttctctcggcggttgacac

SEQ ID NO: 1334901 - DNA, 25 bp, Homo sapien
cacagaggatccgaagaaaggccgg

SEQ ID NO: 1334902 - DNA, 25 bp, Homo sapien
gaggaacgcgggatccagttctcac

SEQ ID NO: 1334903 - DNA, 25 bp, Homo sapien
cagagtccacagaggatccgaagaa

SEQ ID NO: 1334904 - DNA, 25 bp, Homo sapien
gggacgagcggcagagaacagagtc

SEQ ID NO: 1334905 - DNA, 25 bp, Homo sapien
tcggccgaatgaggaaaagggtctg

SEQ ID NO: 1334906 - DNA, 25 bp, Homo sapien
ttcgagaggtcgaagccgaatctca

SEQ ID NO: 1334907 - DNA, 25 bp, Homo sapien
tactgggatagagtcggtttttcga

SEQ ID NO: 1334908 - DNA, 25 bp, Homo sapien
gaatctcagcgctacggaggagtag

SEQ ID NO: 1334909 - DNA, 25 bp, Homo sapien
gctcgaggtccgatatagccaggac

SEQ ID NO: 1334910 - DNA, 25 bp, Homo sapien
gaaggcaggctcgaggtccgatata

SEQ ID NO: 1334911 - DNA, 25 bp, Homo sapien
atatagccaggaccgcaggaggaaa

SEQ ID NO: 1334912 - DNA, 25 bp, Homo sapien
gtccgatatagccaggaccgcagga

SEQ ID NO: 1334913 - DNA, 25 bp, Homo sapien
cagccgcccaggaagcggctcccca

SEQ ID NO: 1334914 - DNA, 25 bp, Homo sapien
agcccagagcatcctcctccgctgc

SEQ ID NO: 1334915 - DNA, 25 bp, Homo sapien
ctcgcctagcccagagcatcctcct

SEQ ID NO: 1334916 - DNA, 25 bp, Homo sapien
ctgccgcagccgcccaggaagcggc

SEQ ID NO: 1334917 - DNA, 25 bp, Homo sapien
ggcgcgctctgcagcccggggaagc

SEQ ID NO: 1334918 - DNA, 25 bp, Homo sapien
cactcaggcgcgctctgcagcccgg

SEQ ID NO: 1334919 - DNA, 25 bp, Homo sapien
actcaggcgcgctctgcagcccggg

SEQ ID NO: 1334920 - DNA, 25 bp, Homo sapien
cggcactcaggcgcgctctgcagcc

SEQ ID NO: 1334921 - DNA, 25 bp, Homo sapien
agacttttatacgacggacagctag

SEQ ID NO: 1334922 - DNA, 25 bp, Homo sapien
tttatacgacggacagctagctcag

SEQ ID NO: 1334923 - DNA, 25 bp, Homo sapien
gacagctagctcagtaagtttgttt

SEQ ID NO: 1334924 - DNA, 25 bp, Homo sapien
gagtatgcattgcagcaccacatta

SEQ ID NO: 1334925 - DNA, 25 bp, Homo sapien
ttgcatgtgtagttccctcagtgtg

SEQ ID NO: 1334926 - DNA, 25 bp, Homo sapien
agttccctcagtgtgattcctgtta

SEQ ID NO: 1334927 - DNA, 25 bp, Homo sapien
cctcagtgtgattcctgttaaatgc

SEQ ID NO: 1334928 - DNA, 25 bp, Homo sapien
tgtagttccctcagtgtgattcctg

SEQ ID NO: 1334929 - DNA, 25 bp, Homo sapien
gatccctgccatgtgttggagccat

SEQ ID NO: 1334930 - DNA, 25 bp, Homo sapien
tacctacttctaatcttgatccctg

SEQ ID NO: 1334931 - DNA, 25 bp, Homo sapien
tggatcccccactgagattgtaatc

SEQ ID NO: 1334932 - DNA, 25 bp, Homo sapien
gattgtaatctcttagagtagatgc

SEQ ID NO: 1334933 - DNA, 25 bp, Homo sapien
catgaaagaatttggcaacactgct

SEQ ID NO: 1334934 - DNA, 25 bp, Homo sapien
ctggtattcaaacttcctaaaatag

SEQ ID NO: 1334935 - DNA, 25 bp, Homo sapien
tagaaacgtaatttagaccctgatg

SEQ ID NO: 1334936 - DNA, 25 bp, Homo sapien
tcttctgccatgaacctggaccaag

SEQ ID NO: 1334937 - DNA, 25 bp, Homo sapien
gccatagccatctcttgctgagtac

SEQ ID NO: 1334938 - DNA, 25 bp, Homo sapien
gaccctgatgataacgtgttgaaaa

SEQ ID NO: 1334939 - DNA, 25 bp, Homo sapien
tgtcagccagggactactgtcaacc

SEQ ID NO: 1334940 - DNA, 25 bp, Homo sapien
ttgtgtgattagatgagacccaccc

SEQ ID NO: 1334941 - DNA, 25 bp, Homo sapien
tgagcagaccagactaaagtatctg

SEQ ID NO: 1334942 - DNA, 25 bp, Homo sapien
aactttttgttctgccacaagccag

SEQ ID NO: 1334943 - DNA, 25 bp, Homo sapien
tctctagagtgggtcctaaggattt

SEQ ID NO: 1334944 - DNA, 25 bp, Homo sapien
caaaggtaagaatcagtcgtagaat

SEQ ID NO: 1334945 - DNA, 25 bp, Homo sapien
gtcgtagaattctgactacccaggg

SEQ ID NO: 1334946 - DNA, 25 bp, Homo sapien
ctacccagggtatcaaattcactga

SEQ ID NO: 1334947 - DNA, 25 bp, Homo sapien
gtaccttactactcaactgaggtcc

SEQ ID NO: 1334948 - DNA, 25 bp, Homo sapien
cactaccttaggaataatggaccca

SEQ ID NO: 1334949 - DNA, 25 bp, Homo sapien
ccacaggccagcagtattatcacca

SEQ ID NO: 1334950 - DNA, 25 bp, Homo sapien
tactatcccctaaagtcagaatttg

SEQ ID NO: 1334951 - DNA, 25 bp, Homo sapien
gcatgtttgagagaagacttgaaga

SEQ ID NO: 1334952 - DNA, 25 bp, Homo sapien
cacagtgctagatggtatatgaatg

SEQ ID NO: 1334953 - DNA, 25 bp, Homo sapien
tagatactctcactatcattgggtg

SEQ ID NO: 1334954 - DNA, 25 bp, Homo sapien
aagatcatgttactttacagtgggc

SEQ ID NO: 1334955 - DNA, 25 bp, Homo sapien
gaagagaggtatcacagccatccaa

SEQ ID NO: 1334956 - DNA, 25 bp, Homo sapien
tggtatccccttcagcacaatagtg

SEQ ID NO: 1334957 - DNA, 25 bp, Homo sapien
aattctgtcccaatagagctctgag

SEQ ID NO: 1334958 - DNA, 25 bp, Homo sapien
tgagcatagcaacttcgagagagaa

SEQ ID NO: 1334959 - DNA, 25 bp, Homo sapien
tccacatcagcaggttactagctac

SEQ ID NO: 1334960 - DNA, 25 bp, Homo sapien
gcagaactctagagcctaggatagt

SEQ ID NO: 1334961 - DNA, 25 bp, Homo sapien
caaacatagctttaaccctactggg

SEQ ID NO: 1334962 - DNA, 25 bp, Homo sapien
tagccaccgtatttcacagcagaac

SEQ ID NO: 1334963 - DNA, 25 bp, Homo sapien
ggcatgacccatttccgtggatggt

SEQ ID NO: 1334964 - DNA, 25 bp, Homo sapien
actggaagcattgcctggaccccag

SEQ ID NO: 1334965 - DNA, 25 bp, Homo sapien
tggcattcagacaggcatcatgaga

SEQ ID NO: 1334966 - DNA, 25 bp, Homo sapien
aatgaggaggtgaatgagattcccg

SEQ ID NO: 1334967 - DNA, 25 bp, Homo sapien
gaaagtcatctcaatagtcctcttc

SEQ ID NO: 1334968 - DNA, 25 bp, Homo sapien
aagaactggatagtcaaccagattg

SEQ ID NO: 1334969 - DNA, 25 bp, Homo sapien
gaaaagaactggatagtcaaccaga

SEQ ID NO: 1334970 - DNA, 25 bp, Homo sapien
atatttgaagcaaggtatttatttc

SEQ ID NO: 1334971 - DNA, 25 bp, Homo sapien
tgccatatcctctggatttttcagt

SEQ ID NO: 1334972 - DNA, 25 bp, Homo sapien
gcttctcagatctgtatcacctaga

SEQ ID NO: 1334973 - DNA, 25 bp, Homo sapien
gatctgtatcacctagagcacagct

SEQ ID NO: 1334974 - DNA, 25 bp, Homo sapien
tagagcacagctgccatatcctctg

SEQ ID NO: 1334975 - DNA, 25 bp, Homo sapien
ctgtctcagaccgattccttatcca

SEQ ID NO: 1334976 - DNA, 25 bp, Homo sapien
tcctccttggtgattggactgattt

SEQ ID NO: 1334977 - DNA, 25 bp, Homo sapien
cctccttggtgattggactgatttt

SEQ ID NO: 1334978 - DNA, 25 bp, Homo sapien
gaccgattccttatccagatggact

SEQ ID NO: 1334979 - DNA, 25 bp, Homo sapien
tccctggaattttgaccagcagcag

SEQ ID NO: 1334980 - DNA, 25 bp, Homo sapien
gcagcaggaagagtgctctctcggt

SEQ ID NO: 1334981 - DNA, 25 bp, Homo sapien
caggaagagtgctctctcggtttat

SEQ ID NO: 1334982 - DNA, 25 bp, Homo sapien
gaagagtgctctctcggtttatcat

SEQ ID NO: 1334983 - DNA, 25 bp, Homo sapien
ttggttttagctcctccacagcttt

SEQ ID NO: 1334984 - DNA, 25 bp, Homo sapien
tttttggttttagctcctccacagc

SEQ ID NO: 1334985 - DNA, 25 bp, Homo sapien
acagctttctctttacttcctctgc

SEQ ID NO: 1334986 - DNA, 25 bp, Homo sapien
gttttagctcctccacagctttctc

SEQ ID NO: 1334987 - DNA, 25 bp, Homo sapien
tgggatctttctcacaattgggaca

SEQ ID NO: 1334988 - DNA, 25 bp, Homo sapien
tgtacatcgcagtaagcagggcagt

SEQ ID NO: 1334989 - DNA, 25 bp, Homo sapien
cagggcagtgctactgtcttctggc

SEQ ID NO: 1334990 - DNA, 25 bp, Homo sapien
ttacaatggacattgctacagccag

SEQ ID NO: 1334991 - DNA, 25 bp, Homo sapien
tggtaccaggcttctttggcatgaa

SEQ ID NO: 1334992 - DNA, 25 bp, Homo sapien
catgaagcatgtccactgtgcaggt

SEQ ID NO: 1334993 - DNA, 25 bp, Homo sapien
tcatgccagggactcgtaaatcaaa

SEQ ID NO: 1334994 - DNA, 25 bp, Homo sapien
gctgagggatcttcagatgcatcta

SEQ ID NO: 1334995 - DNA, 25 bp, Homo sapien
ttatgagctgataggagcctcctcc

SEQ ID NO: 1334996 - DNA, 25 bp, Homo sapien
ctcctcatgggtgctggatgtggca

SEQ ID NO: 1334997 - DNA, 25 bp, Homo sapien
ggagagctggatcctgtttcccgct

SEQ ID NO: 1334998 - DNA, 25 bp, Homo sapien
gtttcccgctccacagggtccgatg

SEQ ID NO: 1334999 - DNA, 25 bp, Homo sapien
tctgtagtagacagcttgggctgcc

SEQ ID NO: 1335000 - DNA, 25 bp, Homo sapien
ttacttgcctcctacagggccctgt

SEQ ID NO: 1335001 - DNA, 25 bp, Homo sapien
ggagagagctctggtactcttctga

SEQ ID NO: 1335002 - DNA, 25 bp, Homo sapien
caagtctaagatgacggtgttagca

SEQ ID NO: 1335003 - DNA, 25 bp, Homo sapien
tggcttcttgataagtgtacacaaa

SEQ ID NO: 1335004 - DNA, 25 bp, Homo sapien
caagatagctataaaagacgcacag

SEQ ID NO: 1335005 - DNA, 25 bp, Homo sapien
tccatgttatagaaagtgtccgaat

SEQ ID NO: 1335006 - DNA, 25 bp, Homo sapien
gaccatgggtgcacaaatcaaacta

SEQ ID NO: 1335007 - DNA, 25 bp, Homo sapien
ttacaaatctgccatctaatcaaga

SEQ ID NO: 1335008 - DNA, 25 bp, Homo sapien
gtcacatccaccctggttacaaatc

SEQ ID NO: 1335009 - DNA, 25 bp, Homo sapien
tggttacaaatctgccatctaatca

SEQ ID NO: 1335010 - DNA, 25 bp, Homo sapien
atcaagaagccatacagcaaatcaa

SEQ ID NO: 1335011 - DNA, 25 bp, Homo sapien
cacgtgggaccaaatcgactctgtc

SEQ ID NO: 1335012 - DNA, 25 bp, Homo sapien
tatatgtagaacacctggagagcag

SEQ ID NO: 1335013 - DNA, 25 bp, Homo sapien
cagggtctgggcttggaattccaca

SEQ ID NO: 1335014 - DNA, 25 bp, Homo sapien
gaaatagccgttataatgcagggtc

SEQ ID NO: 1335015 - DNA, 25 bp, Homo sapien
cttcagagcgccaaggtgaacaggg

SEQ ID NO: 1335016 - DNA, 25 bp, Homo sapien
gagctctggcattcaagtataaaac

SEQ ID NO: 1335017 - DNA, 25 bp, Homo sapien
ttcatcacaggtggttaaacaaggc

SEQ ID NO: 1335018 - DNA, 25 bp, Homo sapien
tcttggaaattcaccttcagagcgc

SEQ ID NO: 1335019 - DNA, 25 bp, Homo sapien
tatgactccataagacttcagtgtg

SEQ ID NO: 1335020 - DNA, 25 bp, Homo sapien
actgccctgaagaagccatgcgctg

SEQ ID NO: 1335021 - DNA, 25 bp, Homo sapien
tcagcacatgctggcgtttccctgg

SEQ ID NO: 1335022 - DNA, 25 bp, Homo sapien
ttcctgtcacctcaatgggtatgac

SEQ ID NO: 1335023 - DNA, 25 bp, Homo sapien
tcagggagacatggccactcctccg

SEQ ID NO: 1335024 - DNA, 25 bp, Homo sapien
tcctccgcatggaggaaatgggact

SEQ ID NO: 1335025 - DNA, 25 bp, Homo sapien
tctccaggtgttcacttgaagccgc

SEQ ID NO: 1335026 - DNA, 25 bp, Homo sapien
tgaagccgcttcactagggttcgtg

SEQ ID NO: 1335027 - DNA, 25 bp, Homo sapien
tcttcccacggaaggagtggcccag

SEQ ID NO: 1335028 - DNA, 25 bp, Homo sapien
gaaggtctctgtcgaatttgttgaa

SEQ ID NO: 1335029 - DNA, 25 bp, Homo sapien
gttggcatgccatcaaacgagcctg

SEQ ID NO: 1335030 - DNA, 25 bp, Homo sapien
tgttctgatcaagcaaagccgcctg

SEQ ID NO: 1335031 - DNA, 25 bp, Homo sapien
tgtgccatggctggcgcatcctgga

SEQ ID NO: 1335032 - DNA, 25 bp, Homo sapien
agtgtgccatggctggcgcatcctg

SEQ ID NO: 1335033 - DNA, 25 bp, Homo sapien
ccatggctggcgcatcctggaccat

SEQ ID NO: 1335034 - DNA, 25 bp, Homo sapien
tgccatggctggcgcatcctggacc

SEQ ID NO: 1335035 - DNA, 25 bp, Homo sapien
tagagatgtttgaggatacagatgg

SEQ ID NO: 1335036 - DNA, 25 bp, Homo sapien
agttgccagcagacatccaatagag

SEQ ID NO: 1335037 - DNA, 25 bp, Homo sapien
ccaatagagatgtttgaggatacag

SEQ ID NO: 1335038 - DNA, 25 bp, Homo sapien
gtttgagttgccagcagacatccaa

SEQ ID NO: 1335039 - DNA, 25 bp, Homo sapien
tacaggaatatctcagttgccaaat

SEQ ID NO: 1335040 - DNA, 25 bp, Homo sapien
taatccatcctgtaggagccagcaa

SEQ ID NO: 1335041 - DNA, 25 bp, Homo sapien
tattttcaatggagtgttgtcagcg

SEQ ID NO: 1335042 - DNA, 25 bp, Homo sapien
taaagatatgcacagggaatcgtgg

SEQ ID NO: 1335043 - DNA, 25 bp, Homo sapien
acttggaatagtcaggctttagagg

SEQ ID NO: 1335044 - DNA, 25 bp, Homo sapien
gtgaagttggaagctcttggtttca

SEQ ID NO: 1335045 - DNA, 25 bp, Homo sapien
aatacttggaatagtcaggctttag

SEQ ID NO: 1335046 - DNA, 25 bp, Homo sapien
ctcttggtttcagcggttccatcaa

SEQ ID NO: 1335047 - DNA, 25 bp, Homo sapien
ctgcagaagcatggcacgagaggaa

SEQ ID NO: 1335048 - DNA, 25 bp, Homo sapien
agcatggcacgagaggaagtagagg

SEQ ID NO: 1335049 - DNA, 25 bp, Homo sapien
cagaagcatggcacgagaggaagta

SEQ ID NO: 1335050 - DNA, 25 bp, Homo sapien
gaagcatggcacgagaggaagtaga

SEQ ID NO: 1335051 - DNA, 25 bp, Homo sapien
tgaggagcctgatttggaagttcaa

SEQ ID NO: 1335052 - DNA, 25 bp, Homo sapien
catgaggagcctgatttggaagttc

SEQ ID NO: 1335053 - DNA, 25 bp, Homo sapien
atttggaagttcaaaagaggcgaga

SEQ ID NO: 1335054 - DNA, 25 bp, Homo sapien
ttggaagttcaaaagaggcgagaaa

SEQ ID NO: 1335055 - DNA, 25 bp, Homo sapien
ttctccaagggtaggctttgcttac

SEQ ID NO: 1335056 - DNA, 25 bp, Homo sapien
cttctccaagggtaggctttgctta

SEQ ID NO: 1335057 - DNA, 25 bp, Homo sapien
taacgtccccctagagaagtcttca

SEQ ID NO: 1335058 - DNA, 25 bp, Homo sapien
ccatgtaaataacgtccccctagag

SEQ ID NO: 1335059 - DNA, 25 bp, Homo sapien
tagagaagtcttcaggtcaacattt

SEQ ID NO: 1335060 - DNA, 25 bp, Homo sapien
tcttcaggtcaacatttgctcttcc

SEQ ID NO: 1335061 - DNA, 25 bp, Homo sapien
ccaccagtctgtgattcattcagca

SEQ ID NO: 1335062 - DNA, 25 bp, Homo sapien
tgctgctaattaaaagtgttggaag

SEQ ID NO: 1335063 - DNA, 25 bp, Homo sapien
ataggcgttttcaattgtggattcc

SEQ ID NO: 1335064 - DNA, 25 bp, Homo sapien
cagcattatccccagtaaacaagaa

SEQ ID NO: 1335065 - DNA, 25 bp, Homo sapien
agactgagagtcagggctcaccacc

SEQ ID NO: 1335066 - DNA, 25 bp, Homo sapien
aatcatgaagactgagagtcagggc

SEQ ID NO: 1335067 - DNA, 25 bp, Homo sapien
tgaagactgagagtcagggctcacc

SEQ ID NO: 1335068 - DNA, 25 bp, Homo sapien
gctcaccaccatgtcttgctgagtg

SEQ ID NO: 1335069 - DNA, 25 bp, Homo sapien
tgcccagcactgtatactagcagct

SEQ ID NO: 1335070 - DNA, 25 bp, Homo sapien
gaggcaaaatacaagatatgatttc

SEQ ID NO: 1335071 - DNA, 25 bp, Homo sapien
tagcagctgtctgacgcaataaacc

SEQ ID NO: 1335072 - DNA, 25 bp, Homo sapien
taaaccaagaatcagattttcttgc

SEQ ID NO: 1335073 - DNA, 25 bp, Homo sapien
ctccgagtgatacaaggatttgaca

SEQ ID NO: 1335074 - DNA, 25 bp, Homo sapien
tccatttaaacttgatgctgaagtc

SEQ ID NO: 1335075 - DNA, 25 bp, Homo sapien
tggaggcctaatctgagcatgatac

SEQ ID NO: 1335076 - DNA, 25 bp, Homo sapien
aaaggcaattggttgagtgtgaaaa

SEQ ID NO: 1335077 - DNA, 25 bp, Homo sapien
tgatacaagcacatgtttccatcac

SEQ ID NO: 1335078 - DNA, 25 bp, Homo sapien
catttcatcatgatacaagcacatg

SEQ ID NO: 1335079 - DNA, 25 bp, Homo sapien
agggcctctaatctgcatttcatca

SEQ ID NO: 1335080 - DNA, 25 bp, Homo sapien
tctcgctgcattaaagcatgctttc

SEQ ID NO: 1335081 - DNA, 25 bp, Homo sapien
ccagcacggctgctaattttctggt

SEQ ID NO: 1335082 - DNA, 25 bp, Homo sapien
gccagcacggctgctaattttctgg

SEQ ID NO: 1335083 - DNA, 25 bp, Homo sapien
aggagccagcacggctgctaatttt

SEQ ID NO: 1335084 - DNA, 25 bp, Homo sapien
gagccagcacggctgctaattttct

SEQ ID NO: 1335085 - DNA, 25 bp, Homo sapien
atttctttcagggtctgaccaattt

SEQ ID NO: 1335086 - DNA, 25 bp, Homo sapien
tttctttcagggtctgaccaatttc

SEQ ID NO: 1335087 - DNA, 25 bp, Homo sapien
ttctttcagggtctgaccaatttct

SEQ ID NO: 1335088 - DNA, 25 bp, Homo sapien
ttatttctttcagggtctgaccaat

SEQ ID NO: 1335089 - DNA, 25 bp, Homo sapien
cagccctcccttggctcttgatttc

SEQ ID NO: 1335090 - DNA, 25 bp, Homo sapien
ccagccctcccttggctcttgattt

SEQ ID NO: 1335091 - DNA, 25 bp, Homo sapien
cctcccttggctcttgatttctgac

SEQ ID NO: 1335092 - DNA, 25 bp, Homo sapien
gccctcccttggctcttgatttctg

SEQ ID NO: 1335093 - DNA, 25 bp, Homo sapien
ccagtcagcttcctcaagcaactcc

SEQ ID NO: 1335094 - DNA, 25 bp, Homo sapien
ttcccagtcagcttcctcaagcaac

SEQ ID NO: 1335095 - DNA, 25 bp, Homo sapien
cttcccagtcagcttcctcaagcaa

SEQ ID NO: 1335096 - DNA, 25 bp, Homo sapien
tcccagtcagcttcctcaagcaact

SEQ ID NO: 1335097 - DNA, 25 bp, Homo sapien
tgactgatgggcaagaaagagttct

SEQ ID NO: 1335098 - DNA, 25 bp, Homo sapien
tggagcactcatacgtgactgatgg

SEQ ID NO: 1335099 - DNA, 25 bp, Homo sapien
ccaattgaggggattggagcactca

SEQ ID NO: 1335100 - DNA, 25 bp, Homo sapien
catacgtgactgatgggcaagaaag

SEQ ID NO: 1335101 - DNA, 25 bp, Homo sapien
ttcttctactacattgatatctgta

SEQ ID NO: 1335102 - DNA, 25 bp, Homo sapien
tactacattgatatctgtatcaggg

SEQ ID NO: 1335103 - DNA, 25 bp, Homo sapien
cttctactacattgatatctgtatc

SEQ ID NO: 1335104 - DNA, 25 bp, Homo sapien
tctactacattgatatctgtatcag

SEQ ID NO: 1335105 - DNA, 25 bp, Homo sapien
gaagattcgatgaggtactcacaga

SEQ ID NO: 1335106 - DNA, 25 bp, Homo sapien
ggtctggattccgatgtcttttgtt

SEQ ID NO: 1335107 - DNA, 25 bp, Homo sapien
gtcttttgttcctcggcatcttgct

SEQ ID NO: 1335108 - DNA, 25 bp, Homo sapien
gcatcttgctccttgggctgtccac

SEQ ID NO: 1335109 - DNA, 25 bp, Homo sapien
tgaggcgtgttctccatttaagcac

SEQ ID NO: 1335110 - DNA, 25 bp, Homo sapien
caggtgtgaggcgtgttctccattt

SEQ ID NO: 1335111 - DNA, 25 bp, Homo sapien
tggcaggtgtgaggcgtgttctcca

SEQ ID NO: 1335112 - DNA, 25 bp, Homo sapien
gcacagaaactatggccgaggacat

SEQ ID NO: 1335113 - DNA, 25 bp, Homo sapien
tttatctttgtatctgtaccgcctg

SEQ ID NO: 1335114 - DNA, 25 bp, Homo sapien
gtgagaggcttgaaggtagaggtca

SEQ ID NO: 1335115 - DNA, 25 bp, Homo sapien
aggtagaggtcatatccctttatct

SEQ ID NO: 1335116 - DNA, 25 bp, Homo sapien
tctttgtatctgtaccgcctgacat

SEQ ID NO: 1335117 - DNA, 25 bp, Homo sapien
cagagtcaagtcaacccaggtttgt

SEQ ID NO: 1335118 - DNA, 25 bp, Homo sapien
cacgtgggcccagattccaaatgtc

SEQ ID NO: 1335119 - DNA, 25 bp, Homo sapien
gacatgttcatctctacacaacgga

SEQ ID NO: 1335120 - DNA, 25 bp, Homo sapien
ctgcccttggcattgtgacacgtgg

SEQ ID NO: 1335121 - DNA, 25 bp, Homo sapien
agccatgggtgcctgagacttcact

SEQ ID NO: 1335122 - DNA, 25 bp, Homo sapien
gcctgagacttcactgactctaaca

SEQ ID NO: 1335123 - DNA, 25 bp, Homo sapien
ggcacaaagccagccatgggtgcct

SEQ ID NO: 1335124 - DNA, 25 bp, Homo sapien
ttgaccaagggcacaaagccagcca

SEQ ID NO: 1335125 - DNA, 25 bp, Homo sapien
ttccagcaggagcacctacagggag

SEQ ID NO: 1335126 - DNA, 25 bp, Homo sapien
tttccagcaggagcacctacaggga

SEQ ID NO: 1335127 - DNA, 25 bp, Homo sapien
atttccagcaggagcacctacaggg

SEQ ID NO: 1335128 - DNA, 25 bp, Homo sapien
ttgtctcttgctcatagcagagggc

SEQ ID NO: 1335129 - DNA, 25 bp, Homo sapien
tgtctcttgctcatagcagagggcc

SEQ ID NO: 1335130 - DNA, 25 bp, Homo sapien
gtctcttgctcatagcagagggcct

SEQ ID NO: 1335131 - DNA, 25 bp, Homo sapien
agtttcatgctatccactgccaagg

SEQ ID NO: 1335132 - DNA, 25 bp, Homo sapien
tccttgtgacacagcgtgagcactg

SEQ ID NO: 1335133 - DNA, 25 bp, Homo sapien
tagaatatcagaagaggagcatctc

SEQ ID NO: 1335134 - DNA, 25 bp, Homo sapien
tatccgtaggttagtgccaataaac

SEQ ID NO: 1335135 - DNA, 25 bp, Homo sapien
tcagcttcctgtatatcttgaacta

SEQ ID NO: 1335136 - DNA, 25 bp, Homo sapien
gcttcctgtatatcttgaactacag

SEQ ID NO: 1335137 - DNA, 25 bp, Homo sapien
tcctgtatatcttgaactacaggtg

SEQ ID NO: 1335138 - DNA, 25 bp, Homo sapien
tgtatatcttgaactacaggtgcat

SEQ ID NO: 1335139 - DNA, 25 bp, Homo sapien
tgaacagcctatgagaatggtaaac

SEQ ID NO: 1335140 - DNA, 25 bp, Homo sapien
tgggccctagatggaacagatcttg

SEQ ID NO: 1335141 - DNA, 25 bp, Homo sapien
tcttgccttgctgacagaggactgt

SEQ ID NO: 1335142 - DNA, 25 bp, Homo sapien
gaataattgcagcttgcctactgaa

SEQ ID NO: 1335143 - DNA, 25 bp, Homo sapien
gaatgccacaccacttttcttagag

SEQ ID NO: 1335144 - DNA, 25 bp, Homo sapien
tagcatgccctaactttcttggtag

SEQ ID NO: 1335145 - DNA, 25 bp, Homo sapien
tagagccagcttattgcaaagtaag

SEQ ID NO: 1335146 - DNA, 25 bp, Homo sapien
gcaaagtaaggcacccatatgtagt

SEQ ID NO: 1335147 - DNA, 25 bp, Homo sapien
agccgagatggcttttctggtctgt

SEQ ID NO: 1335148 - DNA, 25 bp, Homo sapien
acagaacttccctaagcagccgaga

SEQ ID NO: 1335149 - DNA, 25 bp, Homo sapien
ggagaaagctatggcctgtataaac

SEQ ID NO: 1335150 - DNA, 25 bp, Homo sapien
ctcctcttgctaagaacctattttt

SEQ ID NO: 1335151 - DNA, 25 bp, Homo sapien
tcagtcctagtccaaagtcattctt

SEQ ID NO: 1335152 - DNA, 25 bp, Homo sapien
ctgaagcacttgggataattctctc

SEQ ID NO: 1335153 - DNA, 25 bp, Homo sapien
gtcagtcctagtccaaagtcattct

SEQ ID NO: 1335154 - DNA, 25 bp, Homo sapien
gcaaaattgtttaatacggtcagac

SEQ ID NO: 1335155 - DNA, 25 bp, Homo sapien
gagagcacaacccagagtgcctggt

SEQ ID NO: 1335156 - DNA, 25 bp, Homo sapien
aaattgggcctgaaatagccacacg

SEQ ID NO: 1335157 - DNA, 25 bp, Homo sapien
ccacacgatgaagggtaataaggca

SEQ ID NO: 1335158 - DNA, 25 bp, Homo sapien
acagttcagtcaatgtgtccaggct

SEQ ID NO: 1335159 - DNA, 25 bp, Homo sapien
gatgtcttcccaagattgccggggc

SEQ ID NO: 1335160 - DNA, 25 bp, Homo sapien
gggccacgagtcaggaatcgtcatg

SEQ ID NO: 1335161 - DNA, 25 bp, Homo sapien
tcaggaatcgtcatggagagaagcc

SEQ ID NO: 1335162 - DNA, 25 bp, Homo sapien
gccaagttgatgcacatcaccagaa

SEQ ID NO: 1335163 - DNA, 25 bp, Homo sapien
aagttgatgcacatcaccagaatgt

SEQ ID NO: 1335164 - DNA, 25 bp, Homo sapien
caagttgatgcacatcaccagaatg

SEQ ID NO: 1335165 - DNA, 25 bp, Homo sapien
agccaagttgatgcacatcaccaga

SEQ ID NO: 1335166 - DNA, 25 bp, Homo sapien
gaccacgacattggatgattaatgc

SEQ ID NO: 1335167 - DNA, 25 bp, Homo sapien
gtagggccccgaccacgacattgga

SEQ ID NO: 1335168 - DNA, 25 bp, Homo sapien
ggatgattaatgctaatttgaaatg

SEQ ID NO: 1335169 - DNA, 25 bp, Homo sapien
tggctttcactgtagggccccgacc

SEQ ID NO: 1335170 - DNA, 25 bp, Homo sapien
caatcagctaggaagacgaggtgct

SEQ ID NO: 1335171 - DNA, 25 bp, Homo sapien
taataaccgcagaaagcatttgcta

SEQ ID NO: 1335172 - DNA, 25 bp, Homo sapien
tttgctattgttctgaggagctggg

SEQ ID NO: 1335173 - DNA, 25 bp, Homo sapien
ctgctgcgggttcccaattaataac

SEQ ID NO: 1335174 - DNA, 25 bp, Homo sapien
aattcatggcttgttagttcaggca

SEQ ID NO: 1335175 - DNA, 25 bp, Homo sapien
aggcgctgaattcatggcttgttag

SEQ ID NO: 1335176 - DNA, 25 bp, Homo sapien
gcgctgaattcatggcttgttagtt

SEQ ID NO: 1335177 - DNA, 25 bp, Homo sapien
tcaggcgctgaattcatggcttgtt

SEQ ID NO: 1335178 - DNA, 25 bp, Homo sapien
caagcagcccaacagccgatttaac

SEQ ID NO: 1335179 - DNA, 25 bp, Homo sapien
caacaagcagcccaacagccgattt

SEQ ID NO: 1335180 - DNA, 25 bp, Homo sapien
agcccaacagccgatttaaccaata

SEQ ID NO: 1335181 - DNA, 25 bp, Homo sapien
cagccgatttaaccaatatagattt

SEQ ID NO: 1335182 - DNA, 25 bp, Homo sapien
caagtggcaccccatcggacctcag

SEQ ID NO: 1335183 - DNA, 25 bp, Homo sapien
tcagcttcagtcatacagagtccac

SEQ ID NO: 1335184 - DNA, 25 bp, Homo sapien
ccatcggacctcagcttcagtcata

SEQ ID NO: 1335185 - DNA, 25 bp, Homo sapien
tacagagtccactcagcattctcat

SEQ ID NO: 1335186 - DNA, 25 bp, Homo sapien
taatggcaggctagactaaacaccc

SEQ ID NO: 1335187 - DNA, 25 bp, Homo sapien
tgaggcccaaagacggaaaatgact

SEQ ID NO: 1335188 - DNA, 25 bp, Homo sapien
gagactatatgattgacggcctggg

SEQ ID NO: 1335189 - DNA, 25 bp, Homo sapien
ccatggatggttacccaagagtcac

SEQ ID NO: 1335190 - DNA, 25 bp, Homo sapien
agccactgctgtttgatctccatta

SEQ ID NO: 1335191 - DNA, 25 bp, Homo sapien
gactttgttgagcacagccaccctt

SEQ ID NO: 1335192 - DNA, 25 bp, Homo sapien
tgaaaatgagcctaacacatgtggg

SEQ ID NO: 1335193 - DNA, 25 bp, Homo sapien
aatcatatcctgaggatgtaggtgc

SEQ ID NO: 1335194 - DNA, 25 bp, Homo sapien
ttagcctctctgatgtgccatgaac

SEQ ID NO: 1335195 - DNA, 25 bp, Homo sapien
gatgtgccatgaaccttgaggctca

SEQ ID NO: 1335196 - DNA, 25 bp, Homo sapien
tctctgatgtgccatgaaccttgag

SEQ ID NO: 1335197 - DNA, 25 bp, Homo sapien
cctctctgatgtgccatgaaccttg

SEQ ID NO: 1335198 - DNA, 25 bp, Homo sapien
gtgtataatgaatgccgcacacatt

SEQ ID NO: 1335199 - DNA, 25 bp, Homo sapien
catttggcagtgcttctgtgcaccg

SEQ ID NO: 1335200 - DNA, 25 bp, Homo sapien
gtgcaccgtgtcattataagctgta

SEQ ID NO: 1335201 - DNA, 25 bp, Homo sapien
aaacaagtcacatattctccctgcg

SEQ ID NO: 1335202 - DNA, 25 bp, Homo sapien
ctgtatgcagctttgctcgactgcc

SEQ ID NO: 1335203 - DNA, 25 bp, Homo sapien
tatgcagctttgctcgactgccatc

SEQ ID NO: 1335204 - DNA, 25 bp, Homo sapien
tgtatgcagctttgctcgactgcca

SEQ ID NO: 1335205 - DNA, 25 bp, Homo sapien
tgcagctttgctcgactgccatctg

SEQ ID NO: 1335206 - DNA, 25 bp, Homo sapien
cccagcgtctggttggtttgcgtgc

SEQ ID NO: 1335207 - DNA, 25 bp, Homo sapien
gtttttattgtgtttgctcaaccaa

SEQ ID NO: 1335208 - DNA, 25 bp, Homo sapien
caagtccaccagtgaaatattaata

SEQ ID NO: 1335209 - DNA, 25 bp, Homo sapien
gtttgcgtgcttgggatgatatcca

SEQ ID NO: 1335210 - DNA, 25 bp, Homo sapien
tgcaagcagcgtagtgagaaaacca

SEQ ID NO: 1335211 - DNA, 25 bp, Homo sapien
gagtatacttgggatgcgatcgcat

SEQ ID NO: 1335212 - DNA, 25 bp, Homo sapien
gccaggtgtgtacttaggaacccaa

SEQ ID NO: 1335213 - DNA, 25 bp, Homo sapien
gaggtcctgaccacatacatgcggc

SEQ ID NO: 1335214 - DNA, 25 bp, Homo sapien
caggatcctggtcactgagacttct

SEQ ID NO: 1335215 - DNA, 25 bp, Homo sapien
gacttcttttctgcacaaacttcat

SEQ ID NO: 1335216 - DNA, 25 bp, Homo sapien
tcctggtcactgagacttcttttct

SEQ ID NO: 1335217 - DNA, 25 bp, Homo sapien
tggtcactgagacttcttttctgca

SEQ ID NO: 1335218 - DNA, 25 bp, Homo sapien
aaaggagtaggccagagaacgctct

SEQ ID NO: 1335219 - DNA, 25 bp, Homo sapien
agagaacgctctctagagctgctga

SEQ ID NO: 1335220 - DNA, 25 bp, Homo sapien
ggtggaagggagattggatgcccga

SEQ ID NO: 1335221 - DNA, 25 bp, Homo sapien
cccgagttgagaaggtcaagtcaag

SEQ ID NO: 1335222 - DNA, 25 bp, Homo sapien
atttagggtgatttccagctattcc

SEQ ID NO: 1335223 - DNA, 25 bp, Homo sapien
tagggtgatttccagctattcctcc

SEQ ID NO: 1335224 - DNA, 25 bp, Homo sapien
ttagggtgatttccagctattcctc

SEQ ID NO: 1335225 - DNA, 25 bp, Homo sapien
gggtgatttccagctattcctccat

SEQ ID NO: 1335226 - DNA, 25 bp, Homo sapien
aaatcacacgtgacaatggatggcc

SEQ ID NO: 1335227 - DNA, 25 bp, Homo sapien
tatggaggagctcatgacaatgtct

SEQ ID NO: 1335228 - DNA, 25 bp, Homo sapien
taagttcttaagcttcaagtgcctg

SEQ ID NO: 1335229 - DNA, 25 bp, Homo sapien
tcaccagggcatagtaggaactcaa

SEQ ID NO: 1335230 - DNA, 25 bp, Homo sapien
ggaaatattgttggtcatcactgtc

SEQ ID NO: 1335231 - DNA, 25 bp, Homo sapien
tcaacttagattgaaagtccactgg

SEQ ID NO: 1335232 - DNA, 25 bp, Homo sapien
gtccactgggtcattgctttttgac

SEQ ID NO: 1335233 - DNA, 25 bp, Homo sapien
actggcatctgtggatgcttcccgg

SEQ ID NO: 1335234 - DNA, 25 bp, Homo sapien
tcagtccatgggccagagaaaggat

SEQ ID NO: 1335235 - DNA, 25 bp, Homo sapien
cagtccatgggccagagaaaggatg

SEQ ID NO: 1335236 - DNA, 25 bp, Homo sapien
atcatagcggttcggtgtgtgaata

SEQ ID NO: 1335237 - DNA, 25 bp, Homo sapien
catagcggttcggtgtgtgaataaa

SEQ ID NO: 1335238 - DNA, 25 bp, Homo sapien
tcaatcatagcggttcggtgtgtga

SEQ ID NO: 1335239 - DNA, 25 bp, Homo sapien
caatcatagcggttcggtgtgtgaa

SEQ ID NO: 1335240 - DNA, 25 bp, Homo sapien
gagcctcttgctacaaacacaacag

SEQ ID NO: 1335241 - DNA, 25 bp, Homo sapien
ccaagaattctcagagcaattacag

SEQ ID NO: 1335242 - DNA, 25 bp, Homo sapien
aacagaaccttcttcaaagcgccac

SEQ ID NO: 1335243 - DNA, 25 bp, Homo sapien
cacatgcttggaagaacacacacat

SEQ ID NO: 1335244 - DNA, 25 bp, Homo sapien
ttcacctcttctgactcttggctca

SEQ ID NO: 1335245 - DNA, 25 bp, Homo sapien
acctcttctgactcttggctcattt

SEQ ID NO: 1335246 - DNA, 25 bp, Homo sapien
tgactcttggctcattttcccatct

SEQ ID NO: 1335247 - DNA, 25 bp, Homo sapien
ctgactcttggctcattttcccatc

SEQ ID NO: 1335248 - DNA, 25 bp, Homo sapien
cactcaaaagagtgctttgatgaac

SEQ ID NO: 1335249 - DNA, 25 bp, Homo sapien
cctgttcatctaaccggtcactgat

SEQ ID NO: 1335250 - DNA, 25 bp, Homo sapien
gctccacactcaaaagagtgctttg

SEQ ID NO: 1335251 - DNA, 25 bp, Homo sapien
ttagcctgttcatctaaccggtcac

SEQ ID NO: 1335252 - DNA, 25 bp, Homo sapien
ttgatagggcacgatagtaataaaa

SEQ ID NO: 1335253 - DNA, 25 bp, Homo sapien
tagggcacgatagtaataaaaggaa

SEQ ID NO: 1335254 - DNA, 25 bp, Homo sapien
ttcataagcatctccaaccaaatta

SEQ ID NO: 1335255 - DNA, 25 bp, Homo sapien
taattgatagggcacgatagtaata

SEQ ID NO: 1335256 - DNA, 25 bp, Homo sapien
tagccaccttggtttcacagtttgg

SEQ ID NO: 1335257 - DNA, 25 bp, Homo sapien
tggcaaagtattggcctccaccgcc

SEQ ID NO: 1335258 - DNA, 25 bp, Homo sapien
tattggcctccaccgccataggggc

SEQ ID NO: 1335259 - DNA, 25 bp, Homo sapien
accttggtttcacagtttggcaaag

SEQ ID NO: 1335260 - DNA, 25 bp, Homo sapien
atggcttctcaggttctcatcagtg

SEQ ID NO: 1335261 - DNA, 25 bp, Homo sapien
ttctcatcagtggtgtcaaagctca

SEQ ID NO: 1335262 - DNA, 25 bp, Homo sapien
ggcttctcaggttctcatcagtggt

SEQ ID NO: 1335263 - DNA, 25 bp, Homo sapien
caggttctcatcagtggtgtcaaag

SEQ ID NO: 1335264 - DNA, 25 bp, Homo sapien
cggcggcatccacgggcagaaagga

SEQ ID NO: 1335265 - DNA, 25 bp, Homo sapien
acgatgcttcttcggcggcatccac

SEQ ID NO: 1335266 - DNA, 25 bp, Homo sapien
cttagacaggatggcagggagaaga

SEQ ID NO: 1335267 - DNA, 25 bp, Homo sapien
gcatccacgggcagaaaggagcaag

SEQ ID NO: 1335268 - DNA, 25 bp, Homo sapien
gagaatagcctgtcttcagtcttta

SEQ ID NO: 1335269 - DNA, 25 bp, Homo sapien
ctccagagaatagcctgtcttcagt

SEQ ID NO: 1335270 - DNA, 25 bp, Homo sapien
agagaatagcctgtcttcagtcttt

SEQ ID NO: 1335271 - DNA, 25 bp, Homo sapien
ttttctccagagaatagcctgtctt

SEQ ID NO: 1335272 - DNA, 25 bp, Homo sapien
acccgcaggtctaaatcgggatggg

SEQ ID NO: 1335273 - DNA, 25 bp, Homo sapien
tcgaatgacgaatgtcttaatggcc

SEQ ID NO: 1335274 - DNA, 25 bp, Homo sapien
gctgcggccttcactatgtttcgaa

SEQ ID NO: 1335275 - DNA, 25 bp, Homo sapien
ttgggcacgcatcgggcacagttag

SEQ ID NO: 1335276 - DNA, 25 bp, Homo sapien
aggctggggagagcacacatccggg

SEQ ID NO: 1335277 - DNA, 25 bp, Homo sapien
cacaccaagccaggaggagcaggct

SEQ ID NO: 1335278 - DNA, 25 bp, Homo sapien
agcaggatttttcatgtagtgcagg

SEQ ID NO: 1335279 - DNA, 25 bp, Homo sapien
ctggggagagcacacatccgggaaa

SEQ ID NO: 1335280 - DNA, 25 bp, Homo sapien
aatgaagtggttggatctgcagttt

SEQ ID NO: 1335281 - DNA, 25 bp, Homo sapien
cgagtgttgtaagtgagtgtgcaca

SEQ ID NO: 1335282 - DNA, 25 bp, Homo sapien
aacagagaagcatgcctcgagtgtt

SEQ ID NO: 1335283 - DNA, 25 bp, Homo sapien
caagtcccagggtaaactgccaatt

SEQ ID NO: 1335284 - DNA, 25 bp, Homo sapien
aactgccaattctcggctttctggg

SEQ ID NO: 1335285 - DNA, 25 bp, Homo sapien
tcacattacaacgtggaacatctgg

SEQ ID NO: 1335286 - DNA, 25 bp, Homo sapien
tggttcctcggcaggggaatgccac

SEQ ID NO: 1335287 - DNA, 25 bp, Homo sapien
ccatgacatcacattacaacgtgga

SEQ ID NO: 1335288 - DNA, 25 bp, Homo sapien
tacaacgtggaacatctggttcctc

SEQ ID NO: 1335289 - DNA, 25 bp, Homo sapien
agaccttccatacaactatccttgc

SEQ ID NO: 1335290 - DNA, 25 bp, Homo sapien
caagaccttccatacaactatcctt

SEQ ID NO: 1335291 - DNA, 25 bp, Homo sapien
accttccatacaactatccttgctt

SEQ ID NO: 1335292 - DNA, 25 bp, Homo sapien
cttccatacaactatccttgcttcc

SEQ ID NO: 1335293 - DNA, 25 bp, Homo sapien
ggttgaggggcttaaatgatgttca

SEQ ID NO: 1335294 - DNA, 25 bp, Homo sapien
gggcttaaatgatgttcagggcttt

SEQ ID NO: 1335295 - DNA, 25 bp, Homo sapien
tttgctttagcattcgggttgaggg

SEQ ID NO: 1335296 - DNA, 25 bp, Homo sapien
tattgtctgtttgctttagcattcg

SEQ ID NO: 1335297 - DNA, 25 bp, Homo sapien
gcaccgtcatctcctttctgtggct

SEQ ID NO: 1335298 - DNA, 25 bp, Homo sapien
gggcaccgtcatctcctttctgtgg

SEQ ID NO: 1335299 - DNA, 25 bp, Homo sapien
tgttagggggcaccgtcatctcctt

SEQ ID NO: 1335300 - DNA, 25 bp, Homo sapien
ctgtgggtgttagggggcaccgtca

SEQ ID NO: 1335301 - DNA, 25 bp, Homo sapien
tgaaaactgccagcacccagtgttt

SEQ ID NO: 1335302 - DNA, 25 bp, Homo sapien
ggcactgttttcgtgaaaactgcca

SEQ ID NO: 1335303 - DNA, 25 bp, Homo sapien
tgttttcgtgaaaactgccagcacc

SEQ ID NO: 1335304 - DNA, 25 bp, Homo sapien
gtgaaaactgccagcacccagtgtt

SEQ ID NO: 1335305 - DNA, 25 bp, Homo sapien
aattgcatcggcagtaaaagcaagt

SEQ ID NO: 1335306 - DNA, 25 bp, Homo sapien
tcgcagctgcaaattgcatcggcag

SEQ ID NO: 1335307 - DNA, 25 bp, Homo sapien
gcaagtcgggggcacagattacact

SEQ ID NO: 1335308 - DNA, 25 bp, Homo sapien
ctagactcaacatcgcagctgcaaa

SEQ ID NO: 1335309 - DNA, 25 bp, Homo sapien
tgacggatattgttaagtatcccac

SEQ ID NO: 1335310 - DNA, 25 bp, Homo sapien
cctgacggatattgttaagtatccc

SEQ ID NO: 1335311 - DNA, 25 bp, Homo sapien
tcctgacggatattgttaagtatcc

SEQ ID NO: 1335312 - DNA, 25 bp, Homo sapien
ttcctgacggatattgttaagtatc

SEQ ID NO: 1335313 - DNA, 25 bp, Homo sapien
gaagatgtactgaatgaagatctct

SEQ ID NO: 1335314 - DNA, 25 bp, Homo sapien
tactgaatgaagatctctgtgtcct

SEQ ID NO: 1335315 - DNA, 25 bp, Homo sapien
gcctgaaggtaccaattatcatatc

SEQ ID NO: 1335316 - DNA, 25 bp, Homo sapien
tcctcagcttttacatagaagttga

SEQ ID NO: 1335317 - DNA, 25 bp, Homo sapien
gattcccacgggcagttccaaaata

SEQ ID NO: 1335318 - DNA, 25 bp, Homo sapien
caggattcccacgggcagttccaaa

SEQ ID NO: 1335319 - DNA, 25 bp, Homo sapien
ctaggtccctggcacaagaccctag

SEQ ID NO: 1335320 - DNA, 25 bp, Homo sapien
tggcacaagaccctagctgtctttc

SEQ ID NO: 1335321 - DNA, 25 bp, Homo sapien
gggccatcagattcctgaggttcat

SEQ ID NO: 1335322 - DNA, 25 bp, Homo sapien
cccatcatgcttgccacaggccctt

SEQ ID NO: 1335323 - DNA, 25 bp, Homo sapien
tcagattcctgaggttcattccagc

SEQ ID NO: 1335324 - DNA, 25 bp, Homo sapien
cctccaggatccaggtttgcaggtc

SEQ ID NO: 1335325 - DNA, 25 bp, Homo sapien
gatagaactgtttggatcttatggg

SEQ ID NO: 1335326 - DNA, 25 bp, Homo sapien
tgggtacttcactggatagaactgt

SEQ ID NO: 1335327 - DNA, 25 bp, Homo sapien
gccatttgagggtgggtacttcact

SEQ ID NO: 1335328 - DNA, 25 bp, Homo sapien
tttccaagaggctctactgccattt

SEQ ID NO: 1335329 - DNA, 25 bp, Homo sapien
catgtgagatcaagccctgcaaaag

SEQ ID NO: 1335330 - DNA, 25 bp, Homo sapien
ctttcaaaaagggaatgtcgcacat

SEQ ID NO: 1335331 - DNA, 25 bp, Homo sapien
tgtgctttggcactcccatgtgaga

SEQ ID NO: 1335332 - DNA, 25 bp, Homo sapien
taaagtcttgtgatttgcgaccaca

SEQ ID NO: 1335333 - DNA, 25 bp, Homo sapien
ctggtccagggatggcccattctgg

SEQ ID NO: 1335334 - DNA, 25 bp, Homo sapien
atcagggactctccctagaacttta

SEQ ID NO: 1335335 - DNA, 25 bp, Homo sapien
catggttgattggtcctggtccagg

SEQ ID NO: 1335336 - DNA, 25 bp, Homo sapien
ccattctgggccaatcagggactct

SEQ ID NO: 1335337 - DNA, 25 bp, Homo sapien
taaggattgttggtagccattcttc

SEQ ID NO: 1335338 - DNA, 25 bp, Homo sapien
agttgtgtccttaaggattgttggt

SEQ ID NO: 1335339 - DNA, 25 bp, Homo sapien
ttgtgtccttaaggattgttggtag

SEQ ID NO: 1335340 - DNA, 25 bp, Homo sapien
ccttaaggattgttggtagccattc

SEQ ID NO: 1335341 - DNA, 25 bp, Homo sapien
atggtgtccttcccgaattcctcca

SEQ ID NO: 1335342 - DNA, 25 bp, Homo sapien
gtgatgcccaggtgaatggtgtcct

SEQ ID NO: 1335343 - DNA, 25 bp, Homo sapien
gtgtccttcccgaattcctccactg

SEQ ID NO: 1335344 - DNA, 25 bp, Homo sapien
tggtggctcgtgatgcccaggtgaa

SEQ ID NO: 1335345 - DNA, 25 bp, Homo sapien
tcatttgccattagcaaacttcgga

SEQ ID NO: 1335346 - DNA, 25 bp, Homo sapien
tgacacaggcctgtatcatttgcca

SEQ ID NO: 1335347 - DNA, 25 bp, Homo sapien
tagcaaacttcggattcctccaagt

SEQ ID NO: 1335348 - DNA, 25 bp, Homo sapien
gacacaggcctgtatcatttgccat

SEQ ID NO: 1335349 - DNA, 25 bp, Homo sapien
tgaagcacaaatggcaaaaaaaact

SEQ ID NO: 1335350 - DNA, 25 bp, Homo sapien
ctgaagcacaaatggcaaaaaaaac

SEQ ID NO: 1335351 - DNA, 25 bp, Homo sapien
agagaaatagccagagctgccccag

SEQ ID NO: 1335352 - DNA, 25 bp, Homo sapien
aaacctgagtctccactcattgctg

SEQ ID NO: 1335353 - DNA, 25 bp, Homo sapien
gaaacctgagtctccactcattgct

SEQ ID NO: 1335354 - DNA, 25 bp, Homo sapien
aacctgagtctccactcattgctgt

SEQ ID NO: 1335355 - DNA, 25 bp, Homo sapien
acaacagagcatccatgacagccct

SEQ ID NO: 1335356 - DNA, 25 bp, Homo sapien
ctgaaaataggacaacagagcatcc

SEQ ID NO: 1335357 - DNA, 25 bp, Homo sapien
gacaacagagcatccatgacagccc

SEQ ID NO: 1335358 - DNA, 25 bp, Homo sapien
aaataggacaacagagcatccatga

SEQ ID NO: 1335359 - DNA, 25 bp, Homo sapien
tctctccatcctgattgctggtccc

SEQ ID NO: 1335360 - DNA, 25 bp, Homo sapien
aaaagtggatatgccttccaaatag

SEQ ID NO: 1335361 - DNA, 25 bp, Homo sapien
tggaaaagtggatatgccttccaaa

SEQ ID NO: 1335362 - DNA, 25 bp, Homo sapien
tctccatcctgattgctggtcccag

SEQ ID NO: 1335363 - DNA, 25 bp, Homo sapien
gccagcatgaggatcatctgcacca

SEQ ID NO: 1335364 - DNA, 25 bp, Homo sapien
tgtcatgaatgatagccaatacttc

SEQ ID NO: 1335365 - DNA, 25 bp, Homo sapien
gttctgccagcatgaggatcatctg

SEQ ID NO: 1335366 - DNA, 25 bp, Homo sapien
gtcatgaatgatagccaatacttca

SEQ ID NO: 1335367 - DNA, 25 bp, Homo sapien
gcaggctgtacaggcgtcttcttct

SEQ ID NO: 1335368 - DNA, 25 bp, Homo sapien
catatcatgaatctaggagggaccc

SEQ ID NO: 1335369 - DNA, 25 bp, Homo sapien
ttgaatcaaggccaggagacagcac

SEQ ID NO: 1335370 - DNA, 25 bp, Homo sapien
gacagcacctggtctgtaaaggtag

SEQ ID NO: 1335371 - DNA, 25 bp, Homo sapien
gccgtttccaaagcttcacatttgc

SEQ ID NO: 1335372 - DNA, 25 bp, Homo sapien
catttcctactttgttggtgataga

SEQ ID NO: 1335373 - DNA, 25 bp, Homo sapien
gagatttataacatgcaaaagccgt

SEQ ID NO: 1335374 - DNA, 25 bp, Homo sapien
ctcttgaaatgcgagatttataaca

SEQ ID NO: 1335375 - DNA, 25 bp, Homo sapien
tttggcctggaacctgtgtcccctc

SEQ ID NO: 1335376 - DNA, 25 bp, Homo sapien
attgctctactttctactccatggg

SEQ ID NO: 1335377 - DNA, 25 bp, Homo sapien
tgccttagggcacacagtaaagtaa

SEQ ID NO: 1335378 - DNA, 25 bp, Homo sapien
tacactaagaaaagggatcgtcaga

SEQ ID NO: 1335379 - DNA, 25 bp, Homo sapien
gctaccacgtttgggagccctggca

SEQ ID NO: 1335380 - DNA, 25 bp, Homo sapien
tactgattagaaactccggtggtga

SEQ ID NO: 1335381 - DNA, 25 bp, Homo sapien
cacctgggcacttattggaaatgga

SEQ ID NO: 1335382 - DNA, 25 bp, Homo sapien
caaagttgtccctagacctgtagca

SEQ ID NO: 1335383 - DNA, 25 bp, Homo sapien
gtgaatttgcatttaggtaaaatac

SEQ ID NO: 1335384 - DNA, 25 bp, Homo sapien
ttcttcttggactcacactctccaa

SEQ ID NO: 1335385 - DNA, 25 bp, Homo sapien
catttaggtaaaatacgaagactgg

SEQ ID NO: 1335386 - DNA, 25 bp, Homo sapien
ttcttggactcacactctccaaggc

SEQ ID NO: 1335387 - DNA, 25 bp, Homo sapien
cacatctttcatcttatttgatttt

SEQ ID NO: 1335388 - DNA, 25 bp, Homo sapien
tttacaaagtacttccacatctttc

SEQ ID NO: 1335389 - DNA, 25 bp, Homo sapien
tgatttacaaagtacttccacatct

SEQ ID NO: 1335390 - DNA, 25 bp, Homo sapien
catctttcatcttatttgattttcc

SEQ ID NO: 1335391 - DNA, 25 bp, Homo sapien
tataattttgtgtacattgtgctct

SEQ ID NO: 1335392 - DNA, 25 bp, Homo sapien
tgtgtacattgtgctctcagaggcc

SEQ ID NO: 1335393 - DNA, 25 bp, Homo sapien
gctgaggccagcgtgaggaaatggt

SEQ ID NO: 1335394 - DNA, 25 bp, Homo sapien
gggcaccagcctgtgtgataacatt

SEQ ID NO: 1335395 - DNA, 25 bp, Homo sapien
ttaagtgatcctctaatattagcca

SEQ ID NO: 1335396 - DNA, 25 bp, Homo sapien
tctatgtactgccttagctggaccc

SEQ ID NO: 1335397 - DNA, 25 bp, Homo sapien
taatattagccaccagagtaactgg

SEQ ID NO: 1335398 - DNA, 25 bp, Homo sapien
tttcatagaggcgagctctcactat

SEQ ID NO: 1335399 - DNA, 25 bp, Homo sapien
agagtatgatattgagatctccaac

SEQ ID NO: 1335400 - DNA, 25 bp, Homo sapien
tagttggcctatcaattattaagag

SEQ ID NO: 1335401 - DNA, 25 bp, Homo sapien
tgttggatggagtgctctaagatac

SEQ ID NO: 1335402 - DNA, 25 bp, Homo sapien
tgcttgaaaagaatatgcattctgc

SEQ ID NO: 1335403 - DNA, 25 bp, Homo sapien
ggattctagagattacccctggtaa

SEQ ID NO: 1335404 - DNA, 25 bp, Homo sapien
gatcaacagggatagtggcagctta

SEQ ID NO: 1335405 - DNA, 25 bp, Homo sapien
ccctggtaagcatagtgtagtgatc

SEQ ID NO: 1335406 - DNA, 25 bp, Homo sapien
gcacctatgtgtgtagccttccaga

SEQ ID NO: 1335407 - DNA, 25 bp, Homo sapien
cacaagtttgattgagattcccaag

SEQ ID NO: 1335408 - DNA, 25 bp, Homo sapien
tccaatagtaccagccatgaagtga

SEQ ID NO: 1335409 - DNA, 25 bp, Homo sapien
ggcaggactaagcagaaatgccacc

SEQ ID NO: 1335410 - DNA, 25 bp, Homo sapien
catcatatcatggtaggcaggacta

SEQ ID NO: 1335411 - DNA, 25 bp, Homo sapien
gaaatgtgttgtcagtcagcaaatc

SEQ ID NO: 1335412 - DNA, 25 bp, Homo sapien
tatattcacctactgacatgtgcaa

SEQ ID NO: 1335413 - DNA, 25 bp, Homo sapien
tatcataactaccaacagaggctgt

SEQ ID NO: 1335414 - DNA, 25 bp, Homo sapien
ctttactagaggtatggacttcctc

SEQ ID NO: 1335415 - DNA, 25 bp, Homo sapien
taccaaaggtccataaacagaaatg

SEQ ID NO: 1335416 - DNA, 25 bp, Homo sapien
catagcgctctttctaagtttttgc

SEQ ID NO: 1335417 - DNA, 25 bp, Homo sapien
tctggaagttgacaaatgtacactt

SEQ ID NO: 1335418 - DNA, 25 bp, Homo sapien
gaatactgatctctggacatagcgc

SEQ ID NO: 1335419 - DNA, 25 bp, Homo sapien
ccatgaggactttgaactgatatcc

SEQ ID NO: 1335420 - DNA, 25 bp, Homo sapien
gatatccgatctcctgctttctcaa

SEQ ID NO: 1335421 - DNA, 25 bp, Homo sapien
catttcatggggaagtccaaattta

SEQ ID NO: 1335422 - DNA, 25 bp, Homo sapien
tttgaactgatatccgatctcctgc

SEQ ID NO: 1335423 - DNA, 25 bp, Homo sapien
gaggagtgcagcctctatagcaaca

SEQ ID NO: 1335424 - DNA, 25 bp, Homo sapien
gatgctacactggttcatggcttcc

SEQ ID NO: 1335425 - DNA, 25 bp, Homo sapien
taattgagactctagggaccaccaa

SEQ ID NO: 1335426 - DNA, 25 bp, Homo sapien
tgactaacagagcacagcagaagtg

SEQ ID NO: 1335427 - DNA, 25 bp, Homo sapien
tccacaggtaggttatgtctctgtg

SEQ ID NO: 1335428 - DNA, 25 bp, Homo sapien
tgtgacagcaaaacatctgtttgat

SEQ ID NO: 1335429 - DNA, 25 bp, Homo sapien
aggtaggttatgtctctgtgacagc

SEQ ID NO: 1335430 - DNA, 25 bp, Homo sapien
ctgtgacagcaaaacatctgtttga

SEQ ID NO: 1335431 - DNA, 25 bp, Homo sapien
cttaaaccaattgcttagtgccaca

SEQ ID NO: 1335432 - DNA, 25 bp, Homo sapien
cactattaactgagcattgtgctgg

SEQ ID NO: 1335433 - DNA, 25 bp, Homo sapien
tgccacatgggccaaaagaaaagag

SEQ ID NO: 1335434 - DNA, 25 bp, Homo sapien
ggtcaagaagatcctgcccttaaga

SEQ ID NO: 1335435 - DNA, 25 bp, Homo sapien
aaagagttcttggtgcagattttgc

SEQ ID NO: 1335436 - DNA, 25 bp, Homo sapien
gattcacttataagccaagttctgc

SEQ ID NO: 1335437 - DNA, 25 bp, Homo sapien
tggcctttcagttactccttgaggg

SEQ ID NO: 1335438 - DNA, 25 bp, Homo sapien
ggaatcctaacagcccttgtactga

SEQ ID NO: 1335439 - DNA, 25 bp, Homo sapien
gcttgtgctccttggactctgtctc

SEQ ID NO: 1335440 - DNA, 25 bp, Homo sapien
actacaggtgagtacgcaagggccc

SEQ ID NO: 1335441 - DNA, 25 bp, Homo sapien
ctggaggcagaccagaaccccgaaa

SEQ ID NO: 1335442 - DNA, 25 bp, Homo sapien
tctgcctgcattttatgagcaaaaa

SEQ ID NO: 1335443 - DNA, 25 bp, Homo sapien
gaaacctgggctggtaccagtgtat

SEQ ID NO: 1335444 - DNA, 25 bp, Homo sapien
ctctgtccttgaatctgagattgaa

SEQ ID NO: 1335445 - DNA, 25 bp, Homo sapien
tgaatctgagattgaaacctgggct

SEQ ID NO: 1335446 - DNA, 25 bp, Homo sapien
ctggtaccagtgtattgtctggtta

SEQ ID NO: 1335447 - DNA, 25 bp, Homo sapien
tgtacaatataaggcatccagatgc

SEQ ID NO: 1335448 - DNA, 25 bp, Homo sapien
gcaaagaacagaccccatgggaatc

SEQ ID NO: 1335449 - DNA, 25 bp, Homo sapien
ggtgctaataaagtgcacgatatta

SEQ ID NO: 1335450 - DNA, 25 bp, Homo sapien
aaagtgcacgatattactctggtaa

SEQ ID NO: 1335451 - DNA, 25 bp, Homo sapien
tctaagcacagagcgataggttttg

SEQ ID NO: 1335452 - DNA, 25 bp, Homo sapien
tattgattgccattaagtaccaggc

SEQ ID NO: 1335453 - DNA, 25 bp, Homo sapien
tctggcacagtgtccaccaatgtct

SEQ ID NO: 1335454 - DNA, 25 bp, Homo sapien
caatgtcttccggaggaacccagtg

SEQ ID NO: 1335455 - DNA, 25 bp, Homo sapien
ggtggttatgcaaacaagacagaaa

SEQ ID NO: 1335456 - DNA, 25 bp, Homo sapien
ccagtccaggtagacataaccagca

SEQ ID NO: 1335457 - DNA, 25 bp, Homo sapien
tgatggcataggtggttatgcaaac

SEQ ID NO: 1335458 - DNA, 25 bp, Homo sapien
tccaggtagacataaccagcaagag

SEQ ID NO: 1335459 - DNA, 25 bp, Homo sapien
aatgcaatcaaatatgctgctagat

SEQ ID NO: 1335460 - DNA, 25 bp, Homo sapien
ccctttgactcaaggagagctggat

SEQ ID NO: 1335461 - DNA, 25 bp, Homo sapien
tatgggacatagaacctgacctcag

SEQ ID NO: 1335462 - DNA, 25 bp, Homo sapien
tatcccggataaaaagtaagctgcc

SEQ ID NO: 1335463 - DNA, 25 bp, Homo sapien
taaaaacaaccaatgtcagtgctgg

SEQ ID NO: 1335464 - DNA, 25 bp, Homo sapien
caaaactttgcgcacactgcagccg

SEQ ID NO: 1335465 - DNA, 25 bp, Homo sapien
tcagggagcaagagccgcttgtctc

SEQ ID NO: 1335466 - DNA, 25 bp, Homo sapien
tggcgctccggccacaacttgggcg

SEQ ID NO: 1335467 - DNA, 25 bp, Homo sapien
ggcgcccgacccacagtaggcagtg

SEQ ID NO: 1335468 - DNA, 25 bp, Homo sapien
gccctctcgactcatcctccggctg

SEQ ID NO: 1335469 - DNA, 25 bp, Homo sapien
ggcgagcgggctccgcttttgttcc

SEQ ID NO: 1335470 - DNA, 25 bp, Homo sapien
cctccggctgcagtagagggcgagc

SEQ ID NO: 1335471 - DNA, 25 bp, Homo sapien
gccgaggaccacactctccgctcag

SEQ ID NO: 1335472 - DNA, 25 bp, Homo sapien
ccagggcgcgcgggagacgccgcgg

SEQ ID NO: 1335473 - DNA, 25 bp, Homo sapien
tggcaggtccgtgtggggccagggc

SEQ ID NO: 1335474 - DNA, 25 bp, Homo sapien
gcaggtccgtgtggggccagggcgc

SEQ ID NO: 1335475 - DNA, 25 bp, Homo sapien
agggcgcgcgggagacgccgcggag

SEQ ID NO: 1335476 - DNA, 25 bp, Homo sapien
agaggggatgctcactcctagcggc

SEQ ID NO: 1335477 - DNA, 25 bp, Homo sapien
tagcggctccgctggcagcagtagt

SEQ ID NO: 1335478 - DNA, 25 bp, Homo sapien
cagcagtagagatagtgccggctct

SEQ ID NO: 1335479 - DNA, 25 bp, Homo sapien
agtagagatagtgccggctctctgc

SEQ ID NO: 1335480 - DNA, 25 bp, Homo sapien
cactaccgcattcccccgaataggg

SEQ ID NO: 1335481 - DNA, 25 bp, Homo sapien
atcactaccgcattcccccgaatag

SEQ ID NO: 1335482 - DNA, 25 bp, Homo sapien
cttatacatcactaccgcattcccc

SEQ ID NO: 1335483 - DNA, 25 bp, Homo sapien
acatcactaccgcattcccccgaat

SEQ ID NO: 1335484 - DNA, 25 bp, Homo sapien
gaagaggtggcgcggcctgaccgac

SEQ ID NO: 1335485 - DNA, 25 bp, Homo sapien
tcgcagactcccttctccgctacgg

SEQ ID NO: 1335486 - DNA, 25 bp, Homo sapien
tacggtcacagtgaggtctacaact

SEQ ID NO: 1335487 - DNA, 25 bp, Homo sapien
tgaggtctacaacttgcagccattc

SEQ ID NO: 1335488 - DNA, 25 bp, Homo sapien
ccttctccgctacggtcacagtgag

SEQ ID NO: 1335489 - DNA, 25 bp, Homo sapien
gggtgatcactgcacaagctctgca

SEQ ID NO: 1335490 - DNA, 25 bp, Homo sapien
ctccctctccagtgcaagtttaaga

SEQ ID NO: 1335491 - DNA, 25 bp, Homo sapien
tctccagtgcaagtttaagagaacg

SEQ ID NO: 1335492 - DNA, 25 bp, Homo sapien
tccctctccagtgcaagtttaagag

SEQ ID NO: 1335493 - DNA, 25 bp, Homo sapien
cctctccagtgcaagtttaagagaa

SEQ ID NO: 1335494 - DNA, 25 bp, Homo sapien
caatgcctttataggcttctggcag

SEQ ID NO: 1335495 - DNA, 25 bp, Homo sapien
tctttctccagtcttgtgtgccatc

SEQ ID NO: 1335496 - DNA, 25 bp, Homo sapien
tgtgtgccatctacccattttccaa

SEQ ID NO: 1335497 - DNA, 25 bp, Homo sapien
agcagccagccagcgcaatgccttt

SEQ ID NO: 1335498 - DNA, 25 bp, Homo sapien
ccagcattgttacggcgggtgtctt

SEQ ID NO: 1335499 - DNA, 25 bp, Homo sapien
gataggcactcatcagctctcctgt

SEQ ID NO: 1335500 - DNA, 25 bp, Homo sapien
ggtgtcttcgcacaccaggaggagt

SEQ ID NO: 1335501 - DNA, 25 bp, Homo sapien
catatgcattcaaggataatttggg

SEQ ID NO: 1335502 - DNA, 25 bp, Homo sapien
aaagcctatgtactctttgtgggaa

SEQ ID NO: 1335503 - DNA, 25 bp, Homo sapien
gttgaaagcctatgtactctttgtg

SEQ ID NO: 1335504 - DNA, 25 bp, Homo sapien
aagaagttgaaagcctatgtactct

SEQ ID NO: 1335505 - DNA, 25 bp, Homo sapien
tttgtatatcaatgttcatagtagc

SEQ ID NO: 1335506 - DNA, 25 bp, Homo sapien
cgtgacccaccgcgcccagccgatg

SEQ ID NO: 1335507 - DNA, 25 bp, Homo sapien
gtgacccaccgcgcccagccgatgc

SEQ ID NO: 1335508 - DNA, 25 bp, Homo sapien
tgacccaccgcgcccagccgatgca

SEQ ID NO: 1335509 - DNA, 25 bp, Homo sapien
ttctctttcttagcttgacactggg

SEQ ID NO: 1335510 - DNA, 25 bp, Homo sapien
gaatggctctgccaatactctgtat

SEQ ID NO: 1335511 - DNA, 25 bp, Homo sapien
catatgggaacttgggaatttggct

SEQ ID NO: 1335512 - DNA, 25 bp, Homo sapien
tactctgtatcacttggctttgaca

SEQ ID NO: 1335513 - DNA, 25 bp, Homo sapien
tttactccaaatgacgtaaatgtgt

SEQ ID NO: 1335514 - DNA, 25 bp, Homo sapien
tcttttactccaaatgacgtaaatg

SEQ ID NO: 1335515 - DNA, 25 bp, Homo sapien
ttttactccaaatgacgtaaatgtg

SEQ ID NO: 1335516 - DNA, 25 bp, Homo sapien
ttactccaaatgacgtaaatgtgtt

SEQ ID NO: 1335517 - DNA, 25 bp, Homo sapien
gccttgcggctgctcataaaaacca

SEQ ID NO: 1335518 - DNA, 25 bp, Homo sapien
accaataaattaaacttgctgacca

SEQ ID NO: 1335519 - DNA, 25 bp, Homo sapien
ataaattaaacttgctgaccatggc

SEQ ID NO: 1335520 - DNA, 25 bp, Homo sapien
aaacaaagaattgatgggacaagcc

SEQ ID NO: 1335521 - DNA, 25 bp, Homo sapien
gtgtccacagtggtatagagccttc

SEQ ID NO: 1335522 - DNA, 25 bp, Homo sapien
tagagccttctggtagatactcaga

SEQ ID NO: 1335523 - DNA, 25 bp, Homo sapien
ctcagacaaagagcaatggttgatt

SEQ ID NO: 1335524 - DNA, 25 bp, Homo sapien
cctcccaaaggacccagtaatatga

SEQ ID NO: 1335525 - DNA, 25 bp, Homo sapien
caaattatcaacactatactcttta

SEQ ID NO: 1335526 - DNA, 25 bp, Homo sapien
tgcagaaggagcctatgcctctcca

SEQ ID NO: 1335527 - DNA, 25 bp, Homo sapien
gcagaaggagcctatgcctctccag

SEQ ID NO: 1335528 - DNA, 25 bp, Homo sapien
taggaatgagatggggtataaacaa

SEQ ID NO: 1335529 - DNA, 25 bp, Homo sapien
taggtctggatgcaatttgtcactg

SEQ ID NO: 1335530 - DNA, 25 bp, Homo sapien
gatgcaatttgtcactgcacacatg

SEQ ID NO: 1335531 - DNA, 25 bp, Homo sapien
tgcggcagacattctgtaggtctgg

SEQ ID NO: 1335532 - DNA, 25 bp, Homo sapien
caggtgcggcagacattctgtaggt

SEQ ID NO: 1335533 - DNA, 25 bp, Homo sapien
tgggaagagtccgaggactagaact

SEQ ID NO: 1335534 - DNA, 25 bp, Homo sapien
tgataagttagaaagagtgggaaga

SEQ ID NO: 1335535 - DNA, 25 bp, Homo sapien
gtccgaggactagaactgagccaaa

SEQ ID NO: 1335536 - DNA, 25 bp, Homo sapien
ctggagatgataagttagaaagagt

SEQ ID NO: 1335537 - DNA, 25 bp, Homo sapien
tgtccaaaccagagatgcgtgatat

SEQ ID NO: 1335538 - DNA, 25 bp, Homo sapien
acagaaagttgggtgttaaccacat

SEQ ID NO: 1335539 - DNA, 25 bp, Homo sapien
aataggagccaaagcatcatagctg

SEQ ID NO: 1335540 - DNA, 25 bp, Homo sapien
tggtactcaaatctcaaggcaggac

SEQ ID NO: 1335541 - DNA, 25 bp, Homo sapien
gagtcgtatttactcactctcccag

SEQ ID NO: 1335542 - DNA, 25 bp, Homo sapien
gattgagtcgtatttactcactctc

SEQ ID NO: 1335543 - DNA, 25 bp, Homo sapien
tcactctcccagcaagtgacgcccc

SEQ ID NO: 1335544 - DNA, 25 bp, Homo sapien
atttactcactctcccagcaagtga

SEQ ID NO: 1335545 - DNA, 25 bp, Homo sapien
ccctactcccgttttcatagttcag

SEQ ID NO: 1335546 - DNA, 25 bp, Homo sapien
ctgcttctccaaccctactcccgtt

SEQ ID NO: 1335547 - DNA, 25 bp, Homo sapien
ccgttttcatagttcaggtcctcac

SEQ ID NO: 1335548 - DNA, 25 bp, Homo sapien
agccctgcttctccaaccctactcc

SEQ ID NO: 1335549 - DNA, 25 bp, Homo sapien
tgggctctaagcctccgcactgtcc

SEQ ID NO: 1335550 - DNA, 25 bp, Homo sapien
tcggcttgactctgcttgatctgca

SEQ ID NO: 1335551 - DNA, 25 bp, Homo sapien
agcatcggcttgactctgcttgatc

SEQ ID NO: 1335552 - DNA, 25 bp, Homo sapien
ctccagcagcatcggcttgactctg

SEQ ID NO: 1335553 - DNA, 25 bp, Homo sapien
acttttgaaatggagcagaatggtt

SEQ ID NO: 1335554 - DNA, 25 bp, Homo sapien
cttttgaaatggagcagaatggttt

SEQ ID NO: 1335555 - DNA, 25 bp, Homo sapien
aatggttttcaggggcattcaagac

SEQ ID NO: 1335556 - DNA, 25 bp, Homo sapien
tggttttcaggggcattcaagactc

SEQ ID NO: 1335557 - DNA, 25 bp, Homo sapien
taagagaggaaattagtggtccagt

SEQ ID NO: 1335558 - DNA, 25 bp, Homo sapien
gaaaattgtgatggtattgctgaca

SEQ ID NO: 1335559 - DNA, 25 bp, Homo sapien
tgccagggacataattggtataact

SEQ ID NO: 1335560 - DNA, 25 bp, Homo sapien
caagcatcagtgattaaaggggtaa

SEQ ID NO: 1335561 - DNA, 25 bp, Homo sapien
agtccggcccatacagacactaaat

SEQ ID NO: 1335562 - DNA, 25 bp, Homo sapien
tgattaggcctaactggatgataga

SEQ ID NO: 1335563 - DNA, 25 bp, Homo sapien
cctaactggatgatagatacggcag

SEQ ID NO: 1335564 - DNA, 25 bp, Homo sapien
tgatagatacggcagtccggcccat

SEQ ID NO: 1335565 - DNA, 25 bp, Homo sapien
ggtttgagtatctgagctcctgggt

SEQ ID NO: 1335566 - DNA, 25 bp, Homo sapien
tgagtatctgagctcctgggttgct

SEQ ID NO: 1335567 - DNA, 25 bp, Homo sapien
tttgagtatctgagctcctgggttg

SEQ ID NO: 1335568 - DNA, 25 bp, Homo sapien
ttgagtatctgagctcctgggttgc

SEQ ID NO: 1335569 - DNA, 25 bp, Homo sapien
cacatcccaggatgcaagtcactga

SEQ ID NO: 1335570 - DNA, 25 bp, Homo sapien
catcccaggatgcaagtcactgagc

SEQ ID NO: 1335571 - DNA, 25 bp, Homo sapien
tcccaggatgcaagtcactgagcat

SEQ ID NO: 1335572 - DNA, 25 bp, Homo sapien
cccaggatgcaagtcactgagcatg

SEQ ID NO: 1335573 - DNA, 25 bp, Homo sapien
atggaaggatttgttattagtgacc

SEQ ID NO: 1335574 - DNA, 25 bp, Homo sapien
aaataggcatcttccttgccacatg

SEQ ID NO: 1335575 - DNA, 25 bp, Homo sapien
agtgaccacaaataggcatcttcct

SEQ ID NO: 1335576 - DNA, 25 bp, Homo sapien
ggcatcttccttgccacatgcagga

SEQ ID NO: 1335577 - DNA, 25 bp, Homo sapien
agccctgaaccatgcctccagttct

SEQ ID NO: 1335578 - DNA, 25 bp, Homo sapien
tgactctgctaaaccagtcgatctc

SEQ ID NO: 1335579 - DNA, 25 bp, Homo sapien
ctggcaatatcaataccatatgact

SEQ ID NO: 1335580 - DNA, 25 bp, Homo sapien
tgacctctcttggacaagctacaag

SEQ ID NO: 1335581 - DNA, 25 bp, Homo sapien
agtaatcttccaattgggctggtgg

SEQ ID NO: 1335582 - DNA, 25 bp, Homo sapien
tccaattgggctggtggtcccggct

SEQ ID NO: 1335583 - DNA, 25 bp, Homo sapien
tgtgccctattaggctttccagcca

SEQ ID NO: 1335584 - DNA, 25 bp, Homo sapien
aatcttccaattgggctggtggtcc

SEQ ID NO: 1335585 - DNA, 25 bp, Homo sapien
ggcagaaatcctgttgaagtccctg

SEQ ID NO: 1335586 - DNA, 25 bp, Homo sapien
tgatccagccctgggcgtttccggc

SEQ ID NO: 1335587 - DNA, 25 bp, Homo sapien
ggaaggcagtccctgcttaacgagg

SEQ ID NO: 1335588 - DNA, 25 bp, Homo sapien
gaggacatgatccagccctgggcgt

SEQ ID NO: 1335589 - DNA, 25 bp, Homo sapien
cactgagggtcctgtttagccaagg

SEQ ID NO: 1335590 - DNA, 25 bp, Homo sapien
gaattcctttatcccagagcaagag

SEQ ID NO: 1335591 - DNA, 25 bp, Homo sapien
gttttggagccattcccatagccgg

SEQ ID NO: 1335592 - DNA, 25 bp, Homo sapien
ccatagccggcttgagaacctgtac

SEQ ID NO: 1335593 - DNA, 25 bp, Homo sapien
ttaggtgtaggttccactgggctct

SEQ ID NO: 1335594 - DNA, 25 bp, Homo sapien
gctgcccttggggatacatgcatat

SEQ ID NO: 1335595 - DNA, 25 bp, Homo sapien
ggtgtaggttccactgggctctttc

SEQ ID NO: 1335596 - DNA, 25 bp, Homo sapien
tgggctctttcaaagtccctggctg

SEQ ID NO: 1335597 - DNA, 25 bp, Homo sapien
ctctcttatagctttgctgcaaaat

SEQ ID NO: 1335598 - DNA, 25 bp, Homo sapien
ctgcaaaatagaaagtccaagagtt

SEQ ID NO: 1335599 - DNA, 25 bp, Homo sapien
tctcttatagctttgctgcaaaata

SEQ ID NO: 1335600 - DNA, 25 bp, Homo sapien
aaatagaaagtccaagagttgccat

SEQ ID NO: 1335601 - DNA, 25 bp, Homo sapien
tttgcaagcaaagccgtaatgctct

SEQ ID NO: 1335602 - DNA, 25 bp, Homo sapien
taatgcacccacatggatggtggca

SEQ ID NO: 1335603 - DNA, 25 bp, Homo sapien
cagcaaggctgggttaatatattca

SEQ ID NO: 1335604 - DNA, 25 bp, Homo sapien
tatgtgtctattatcaccatcatcg

SEQ ID NO: 1335605 - DNA, 25 bp, Homo sapien
cataatgattaaccttgccacttgt

SEQ ID NO: 1335606 - DNA, 25 bp, Homo sapien
tctgtagtttattgtgacaagacaa

SEQ ID NO: 1335607 - DNA, 25 bp, Homo sapien
caatgcaataaggagggaggtaatc

SEQ ID NO: 1335608 - DNA, 25 bp, Homo sapien
tgagagtgacaagaacggagcccat

SEQ ID NO: 1335609 - DNA, 25 bp, Homo sapien
ttcacgtgacgacatcagggaagag

SEQ ID NO: 1335610 - DNA, 25 bp, Homo sapien
tcctctttgcaagccgactcataca

SEQ ID NO: 1335611 - DNA, 25 bp, Homo sapien
gactcatacagtacccggaggcgag

SEQ ID NO: 1335612 - DNA, 25 bp, Homo sapien
tgcctgtgctcccatgtgtggataa

SEQ ID NO: 1335613 - DNA, 25 bp, Homo sapien
gaaatagcagatgccctcaaggact

SEQ ID NO: 1335614 - DNA, 25 bp, Homo sapien
tttgacattgttccctgagcactcc

SEQ ID NO: 1335615 - DNA, 25 bp, Homo sapien
tccaaaaccatcaaagacttccagt

SEQ ID NO: 1335616 - DNA, 25 bp, Homo sapien
tccagtgaaggagccttagtatcat

SEQ ID NO: 1335617 - DNA, 25 bp, Homo sapien
gctgtgaggtgtggacctggagatg

SEQ ID NO: 1335618 - DNA, 25 bp, Homo sapien
acctggagatgccagtgaccatgtt

SEQ ID NO: 1335619 - DNA, 25 bp, Homo sapien
atgccagtgaccatgttccctccat

SEQ ID NO: 1335620 - DNA, 25 bp, Homo sapien
agctgtgaggtgtggacctggagat

SEQ ID NO: 1335621 - DNA, 25 bp, Homo sapien
tattaagcaggtaacctcaggctgt

SEQ ID NO: 1335622 - DNA, 25 bp, Homo sapien
tcagatatgtggtcatcggtggtca

SEQ ID NO: 1335623 - DNA, 25 bp, Homo sapien
caatagcatacaacttagccagact

SEQ ID NO: 1335624 - DNA, 25 bp, Homo sapien
tgctttagattttcacccagaagac

SEQ ID NO: 1335625 - DNA, 25 bp, Homo sapien
agcccaggagaggatgcgaccattc

SEQ ID NO: 1335626 - DNA, 25 bp, Homo sapien
taaactccatatcaggcagcccttg

SEQ ID NO: 1335627 - DNA, 25 bp, Homo sapien
ggtgatgggcaaggctaaccctagc

SEQ ID NO: 1335628 - DNA, 25 bp, Homo sapien
ggagaggaccttagaaacatgaacc

SEQ ID NO: 1335629 - DNA, 25 bp, Homo sapien
taagaaagttttggccaggtcaaca

SEQ ID NO: 1335630 - DNA, 25 bp, Homo sapien
gagagccttcagaccatgatgtgag

SEQ ID NO: 1335631 - DNA, 25 bp, Homo sapien
gatgaagcagaaacattccgcctgg

SEQ ID NO: 1335632 - DNA, 25 bp, Homo sapien
catttgtcagtcatgcatgccacag

SEQ ID NO: 1335633 - DNA, 25 bp, Homo sapien
tggatccaggcagaatcgtagcagc

SEQ ID NO: 1335634 - DNA, 25 bp, Homo sapien
tttgattgagcgaacctactgcccc

SEQ ID NO: 1335635 - DNA, 25 bp, Homo sapien
gggcccatgcggttctattccagaa

SEQ ID NO: 1335636 - DNA, 25 bp, Homo sapien
tactcggctgcccagtgtcaagagc

SEQ ID NO: 1335637 - DNA, 25 bp, Homo sapien
tctgtgttctggatgaagctgttga

SEQ ID NO: 1335638 - DNA, 25 bp, Homo sapien
tcacatttcaactccgacagatttc

SEQ ID NO: 1335639 - DNA, 25 bp, Homo sapien
gactggtgtgtcttcctagcctgcg

SEQ ID NO: 1335640 - DNA, 25 bp, Homo sapien
gagcgttaactctgcaatctgttct

SEQ ID NO: 1335641 - DNA, 25 bp, Homo sapien
tagtggtgtaaaaccccttgcacgc

SEQ ID NO: 1335642 - DNA, 25 bp, Homo sapien
tagatgggtagaacactgacagagt

SEQ ID NO: 1335643 - DNA, 25 bp, Homo sapien
gcagtctcctaaacagctagtgtgg

SEQ ID NO: 1335644 - DNA, 25 bp, Homo sapien
cacctgggcatgagtctagacacac

SEQ ID NO: 1335645 - DNA, 25 bp, Homo sapien
cttttgagggacagtgccttgcctt

SEQ ID NO: 1335646 - DNA, 25 bp, Homo sapien
tcttgttgatatctgctgctcagga

SEQ ID NO: 1335647 - DNA, 25 bp, Homo sapien
ggtaatctcatggagcaaccaaatg

SEQ ID NO: 1335648 - DNA, 25 bp, Homo sapien
ttcttctctgggaacccgagattcc

SEQ ID NO: 1335649 - DNA, 25 bp, Homo sapien
taacgacccagacttagaaatccag

SEQ ID NO: 1335650 - DNA, 25 bp, Homo sapien
aaggaaattctctatcctgaggccc

SEQ ID NO: 1335651 - DNA, 25 bp, Homo sapien
ggaacacgctgtatctctgtggaaa

SEQ ID NO: 1335652 - DNA, 25 bp, Homo sapien
gatttcagtgcaccaggaacacgct

SEQ ID NO: 1335653 - DNA, 25 bp, Homo sapien
aacattcttcatatatcttgtgtct

SEQ ID NO: 1335654 - DNA, 25 bp, Homo sapien
cttcatatatcttgtgtctcataaa

SEQ ID NO: 1335655 - DNA, 25 bp, Homo sapien
tatcttgtgtctcataaattttaat

SEQ ID NO: 1335656 - DNA, 25 bp, Homo sapien
cattcttcatatatcttgtgtctca

SEQ ID NO: 1335657 - DNA, 25 bp, Homo sapien
tgtttcttcgtgatatttaggtctt

SEQ ID NO: 1335658 - DNA, 25 bp, Homo sapien
tgtatgttaatggtatttgctcctg

SEQ ID NO: 1335659 - DNA, 25 bp, Homo sapien
gaaaatgcttcgtgctgagtttgaa

SEQ ID NO: 1335660 - DNA, 25 bp, Homo sapien
gaataggaagagtatccattttctg

SEQ ID NO: 1335661 - DNA, 25 bp, Homo sapien
agacagtggtggacaattacacatc

SEQ ID NO: 1335662 - DNA, 25 bp, Homo sapien
ctggattagacagtggtggacaatt

SEQ ID NO: 1335663 - DNA, 25 bp, Homo sapien
ggattagacagtggtggacaattac

SEQ ID NO: 1335664 - DNA, 25 bp, Homo sapien
attagacagtggtggacaattacac

SEQ ID NO: 1335665 - DNA, 25 bp, Homo sapien
ttcagtaatccctaatatgctccat

SEQ ID NO: 1335666 - DNA, 25 bp, Homo sapien
cacataaaagagaaccactgaaaaa

SEQ ID NO: 1335667 - DNA, 25 bp, Homo sapien
aaaggtatcttgattataacacata

SEQ ID NO: 1335668 - DNA, 25 bp, Homo sapien
ctaatatgctccatgtaaaacaaag

SEQ ID NO: 1335669 - DNA, 25 bp, Homo sapien
tggcaatgagagatgcaaagcaaca

SEQ ID NO: 1335670 - DNA, 25 bp, Homo sapien
tatggagtccagcaggtaacaactg

SEQ ID NO: 1335671 - DNA, 25 bp, Homo sapien
caacaaagagaggaataggatgcca

SEQ ID NO: 1335672 - DNA, 25 bp, Homo sapien
tgtttaagcactgcactggcatcag

SEQ ID NO: 1335673 - DNA, 25 bp, Homo sapien
tctgtgtttaactccacgcactgca

SEQ ID NO: 1335674 - DNA, 25 bp, Homo sapien
gacagcaggaccttacctacagaaa

SEQ ID NO: 1335675 - DNA, 25 bp, Homo sapien
tctatgtgcctttcactgcgtgagg

SEQ ID NO: 1335676 - DNA, 25 bp, Homo sapien
taaaatgtctatgccaaagagaggg

SEQ ID NO: 1335677 - DNA, 25 bp, Homo sapien
aaatgactgcggtaacttgggagga

SEQ ID NO: 1335678 - DNA, 25 bp, Homo sapien
catcgtgaggtgaaaagtgacaaca

SEQ ID NO: 1335679 - DNA, 25 bp, Homo sapien
agcagtggcgaagttgagaagccca

SEQ ID NO: 1335680 - DNA, 25 bp, Homo sapien
tggccaaattacgtgcctggaagac

SEQ ID NO: 1335681 - DNA, 25 bp, Homo sapien
tctgatgattggaaccataactttg

SEQ ID NO: 1335682 - DNA, 25 bp, Homo sapien
tgctttacatgtgcggaattttaat

SEQ ID NO: 1335683 - DNA, 25 bp, Homo sapien
aacaggcagtgttcagttacgtgaa

SEQ ID NO: 1335684 - DNA, 25 bp, Homo sapien
gttcattgattacaagccatcctct

SEQ ID NO: 1335685 - DNA, 25 bp, Homo sapien
gcacccggcccttcaacatacttaa

SEQ ID NO: 1335686 - DNA, 25 bp, Homo sapien
tgcacccggcccttcaacatactta

SEQ ID NO: 1335687 - DNA, 25 bp, Homo sapien
aataatgccacatgtctacaactat

SEQ ID NO: 1335688 - DNA, 25 bp, Homo sapien
atgccacatgtctacaactatctga

SEQ ID NO: 1335689 - DNA, 25 bp, Homo sapien
aaataatgccacatgtctacaacta

SEQ ID NO: 1335690 - DNA, 25 bp, Homo sapien
taatgccacatgtctacaactatct

SEQ ID NO: 1335691 - DNA, 25 bp, Homo sapien
acagcctccaccgaaagttttacag

SEQ ID NO: 1335692 - DNA, 25 bp, Homo sapien
ttatcatgccagcttcaggtggcac

SEQ ID NO: 1335693 - DNA, 25 bp, Homo sapien
ggaacaatgagcatttcagaggctt

SEQ ID NO: 1335694 - DNA, 25 bp, Homo sapien
gcttctatgttcttgccgccttgcc

SEQ ID NO: 1335695 - DNA, 25 bp, Homo sapien
acaatgttactgtcaggcttcctgg

SEQ ID NO: 1335696 - DNA, 25 bp, Homo sapien
ggcttcctggctttatatgattcag

SEQ ID NO: 1335697 - DNA, 25 bp, Homo sapien
ttagacaatgttactgtcaggcttc

SEQ ID NO: 1335698 - DNA, 25 bp, Homo sapien
ttcctggctttatatgattcagaag

SEQ ID NO: 1335699 - DNA, 25 bp, Homo sapien
caactcgattgccatgagaagggtg

SEQ ID NO: 1335700 - DNA, 25 bp, Homo sapien
agggtgtgtagataaccattctggc

SEQ ID NO: 1335701 - DNA, 25 bp, Homo sapien
caagtactcaactcgattgccatga

SEQ ID NO: 1335702 - DNA, 25 bp, Homo sapien
ctgaggtataagtctatccaagtac

SEQ ID NO: 1335703 - DNA, 25 bp, Homo sapien
ggctatcaacgaactccatttgctg

SEQ ID NO: 1335704 - DNA, 25 bp, Homo sapien
cactgaactggctcttatgtctgca

SEQ ID NO: 1335705 - DNA, 25 bp, Homo sapien
gaactggctcttatgtctgcacaag

SEQ ID NO: 1335706 - DNA, 25 bp, Homo sapien
cttgggttggccatgcaggctatca

SEQ ID NO: 1335707 - DNA, 25 bp, Homo sapien
cattttccaatattgctgatggcat

SEQ ID NO: 1335708 - DNA, 25 bp, Homo sapien
aatgtctccatccttatcttcacac

SEQ ID NO: 1335709 - DNA, 25 bp, Homo sapien
atcatcataaatgtctccatcctta

SEQ ID NO: 1335710 - DNA, 25 bp, Homo sapien
taaatgtctccatccttatcttcac

SEQ ID NO: 1335711 - DNA, 25 bp, Homo sapien
tcacactgagtagactgagaaggaa

SEQ ID NO: 1335712 - DNA, 25 bp, Homo sapien
tagcagcaactcatatgggtctcat

SEQ ID NO: 1335713 - DNA, 25 bp, Homo sapien
tagagttgcagctatgacttcacaa

SEQ ID NO: 1335714 - DNA, 25 bp, Homo sapien
aggtaccacagttaattctatgcag

SEQ ID NO: 1335715 - DNA, 25 bp, Homo sapien
aatttactggagagaaagctgctca

SEQ ID NO: 1335716 - DNA, 25 bp, Homo sapien
tcggcctccaattttctgctgtatg

SEQ ID NO: 1335717 - DNA, 25 bp, Homo sapien
tctgctgtatggtctattaaacata

SEQ ID NO: 1335718 - DNA, 25 bp, Homo sapien
agtccaattttgtcagcttcggcct

SEQ ID NO: 1335719 - DNA, 25 bp, Homo sapien
ctttgcagcaagcagtagtccaatt

SEQ ID NO: 1335720 - DNA, 25 bp, Homo sapien
tgcaatttagactgtatccactggc

SEQ ID NO: 1335721 - DNA, 25 bp, Homo sapien
gaaaatcatacctaggaaatccaac

SEQ ID NO: 1335722 - DNA, 25 bp, Homo sapien
caaaagtgccaagctatctcgagga

SEQ ID NO: 1335723 - DNA, 25 bp, Homo sapien
caaatggcccaaatcattgtgagga

SEQ ID NO: 1335724 - DNA, 25 bp, Homo sapien
tctactactgttcttgcactgatag

SEQ ID NO: 1335725 - DNA, 25 bp, Homo sapien
gaatataaggcactgaactagatgc

SEQ ID NO: 1335726 - DNA, 25 bp, Homo sapien
gatgacaatacactgaatataaggc

SEQ ID NO: 1335727 - DNA, 25 bp, Homo sapien
tcttgcactgatagagatgacaata

SEQ ID NO: 1335728 - DNA, 25 bp, Homo sapien
tgcccaagtactgcatgtgctattt

SEQ ID NO: 1335729 - DNA, 25 bp, Homo sapien
agaaagttgatgaatatcggttaca

SEQ ID NO: 1335730 - DNA, 25 bp, Homo sapien
tgaatatcggttacactatttaaaa

SEQ ID NO: 1335731 - DNA, 25 bp, Homo sapien
aagttgatgaatatcggttacacta

SEQ ID NO: 1335732 - DNA, 25 bp, Homo sapien
gttgatgaatatcggttacactatt

SEQ ID NO: 1335733 - DNA, 25 bp, Homo sapien
cacttctttaacagccaggtatcgg

SEQ ID NO: 1335734 - DNA, 25 bp, Homo sapien
ggaatcaaccacatgaataacccaa

SEQ ID NO: 1335735 - DNA, 25 bp, Homo sapien
gagagatccctggaacatctttatt

SEQ ID NO: 1335736 - DNA, 25 bp, Homo sapien
gaagcacgaaggcattaataattgg

SEQ ID NO: 1335737 - DNA, 25 bp, Homo sapien
ctggagagaaaatgacctctgtccc

SEQ ID NO: 1335738 - DNA, 25 bp, Homo sapien
tgaggctactggacatgaattcgaa

SEQ ID NO: 1335739 - DNA, 25 bp, Homo sapien
gccatgccaaagctgtcaagtgagg

SEQ ID NO: 1335740 - DNA, 25 bp, Homo sapien
ccagtaaagccaagcaatgggcgca

SEQ ID NO: 1335741 - DNA, 25 bp, Homo sapien
tattccagttccgataaaagtctga

SEQ ID NO: 1335742 - DNA, 25 bp, Homo sapien
ttccccaataatagtagcttgctcc

SEQ ID NO: 1335743 - DNA, 25 bp, Homo sapien
ccttcttgttaggaggaagtgcctg

SEQ ID NO: 1335744 - DNA, 25 bp, Homo sapien
gattggacttacttccaggtgagta

SEQ ID NO: 1335745 - DNA, 25 bp, Homo sapien
ccgtggagaagtatggaaattccta

SEQ ID NO: 1335746 - DNA, 25 bp, Homo sapien
aggaaccggagcagcttgaaaccgt

SEQ ID NO: 1335747 - DNA, 25 bp, Homo sapien
taagaatcatcaacaagagaggaac

SEQ ID NO: 1335748 - DNA, 25 bp, Homo sapien
cagcttgaaaccgtggagaagtatg

SEQ ID NO: 1335749 - DNA, 25 bp, Homo sapien
cagactagggactgctgtaacttct

SEQ ID NO: 1335750 - DNA, 25 bp, Homo sapien
gacagactagggactgctgtaactt

SEQ ID NO: 1335751 - DNA, 25 bp, Homo sapien
tgacagactagggactgctgtaact

SEQ ID NO: 1335752 - DNA, 25 bp, Homo sapien
actgacagactagggactgctgtaa

SEQ ID NO: 1335753 - DNA, 25 bp, Homo sapien
acatttgctggtaatcctccaaatt

SEQ ID NO: 1335754 - DNA, 25 bp, Homo sapien
tacatttgctggtaatcctccaaat

SEQ ID NO: 1335755 - DNA, 25 bp, Homo sapien
tttggtacttgagaggcctcctgtt

SEQ ID NO: 1335756 - DNA, 25 bp, Homo sapien
tggtacttgagaggcctcctgttct

SEQ ID NO: 1335757 - DNA, 25 bp, Homo sapien
taacttgtacttgatgacagccccg

SEQ ID NO: 1335758 - DNA, 25 bp, Homo sapien
tacattttctccagttagacagtga

SEQ ID NO: 1335759 - DNA, 25 bp, Homo sapien
acctgtcacactgatttactcccag

SEQ ID NO: 1335760 - DNA, 25 bp, Homo sapien
ccccgtgaggtggatgctaatgtgt

SEQ ID NO: 1335761 - DNA, 25 bp, Homo sapien
cacagggcatcaatgaggtatgcaa

SEQ ID NO: 1335762 - DNA, 25 bp, Homo sapien
tatcaatcagtggaaactaactcct

SEQ ID NO: 1335763 - DNA, 25 bp, Homo sapien
gcaagcagcaagatatgtgatccac

SEQ ID NO: 1335764 - DNA, 25 bp, Homo sapien
ggtatgcaataacttcaagtggcct

SEQ ID NO: 1335765 - DNA, 25 bp, Homo sapien
aacctgggaggcaagagactgcagt

SEQ ID NO: 1335766 - DNA, 25 bp, Homo sapien
gaacctgggaggcaagagactgcag

SEQ ID NO: 1335767 - DNA, 25 bp, Homo sapien
tacactccggcgtgggcaacagaat

SEQ ID NO: 1335768 - DNA, 25 bp, Homo sapien
gagccaaaattgtgccactacactc

SEQ ID NO: 1335769 - DNA, 25 bp, Homo sapien
attcttaaaaagacatccatgagta

SEQ ID NO: 1335770 - DNA, 25 bp, Homo sapien
cattcttaaaaagacatccatgagt

SEQ ID NO: 1335771 - DNA, 25 bp, Homo sapien
gcattcttaaaaagacatccatgag

SEQ ID NO: 1335772 - DNA, 25 bp, Homo sapien
ttcttaaaaagacatccatgagtag

SEQ ID NO: 1335773 - DNA, 25 bp, Homo sapien
tgtggcaggtcaacaaacatagctg

SEQ ID NO: 1335774 - DNA, 25 bp, Homo sapien
caactgatcatactgcactgcgaag

SEQ ID NO: 1335775 - DNA, 25 bp, Homo sapien
aattggacggcagcagacttggttc

SEQ ID NO: 1335776 - DNA, 25 bp, Homo sapien
gaaggtataagcaaaagccccaaca

SEQ ID NO: 1335777 - DNA, 25 bp, Homo sapien
tcggaaaagctggggaaaagcgtca

SEQ ID NO: 1335778 - DNA, 25 bp, Homo sapien
gcgaaagcggtgacaccgcagaccc

SEQ ID NO: 1335779 - DNA, 25 bp, Homo sapien
gaagcgaaagcggtgacaccgcaga

SEQ ID NO: 1335780 - DNA, 25 bp, Homo sapien
aaagcggtgacaccgcagacccgac

SEQ ID NO: 1335781 - DNA, 25 bp, Homo sapien
agcagaagcgaaagcggtgacaccg

SEQ ID NO: 1335782 - DNA, 25 bp, Homo sapien
tgtcgaacttggtgtggtcatccaa

SEQ ID NO: 1335783 - DNA, 25 bp, Homo sapien
atccaatcaacatagcacacagcag

SEQ ID NO: 1335784 - DNA, 25 bp, Homo sapien
aatgtagtgtctactcaaacacgcg

SEQ ID NO: 1335785 - DNA, 25 bp, Homo sapien
gagagttttgatttgcaccatttct

SEQ ID NO: 1335786 - DNA, 25 bp, Homo sapien
ccgtcaaagcacttcagtgactcag

SEQ ID NO: 1335787 - DNA, 25 bp, Homo sapien
ggaaagcacccagtgagacctagag

SEQ ID NO: 1335788 - DNA, 25 bp, Homo sapien
ggttaggtcacaggtgatcaccaag

SEQ ID NO: 1335789 - DNA, 25 bp, Homo sapien
tcaccaaggtcacttccgtcaaagc

SEQ ID NO: 1335790 - DNA, 25 bp, Homo sapien
tggtaagtcttatttgaccctggaa

SEQ ID NO: 1335791 - DNA, 25 bp, Homo sapien
ggagtttctcccttgatgagtggca

SEQ ID NO: 1335792 - DNA, 25 bp, Homo sapien
gactttgagatctctggcaatccca

SEQ ID NO: 1335793 - DNA, 25 bp, Homo sapien
gtaggagagcctgctcacatccacc

SEQ ID NO: 1335794 - DNA, 25 bp, Homo sapien
aatagtaaaaatccctgggtgcagt

SEQ ID NO: 1335795 - DNA, 25 bp, Homo sapien
gggacaagtggctagtttttacagc

SEQ ID NO: 1335796 - DNA, 25 bp, Homo sapien
gagggacaagtggctagtttttaca

SEQ ID NO: 1335797 - DNA, 25 bp, Homo sapien
gacaagtggctagtttttacagcta

SEQ ID NO: 1335798 - DNA, 25 bp, Homo sapien
tcttaggacacaccagagtagcaac

SEQ ID NO: 1335799 - DNA, 25 bp, Homo sapien
gataagccttgtttagagatgacca

SEQ ID NO: 1335800 - DNA, 25 bp, Homo sapien
cactggccagttaggatatcttagg

SEQ ID NO: 1335801 - DNA, 25 bp, Homo sapien
tcttagagccacaacgctttgagat

SEQ ID NO: 1335802 - DNA, 25 bp, Homo sapien
aagacatccaaactgcgttcaggca

SEQ ID NO: 1335803 - DNA, 25 bp, Homo sapien
taaatagactgagtttccgggcaat

SEQ ID NO: 1335804 - DNA, 25 bp, Homo sapien
taaatgaggctactacataggccca

SEQ ID NO: 1335805 - DNA, 25 bp, Homo sapien
tacttgcaaacgatcccgggttgtc

SEQ ID NO: 1335806 - DNA, 25 bp, Homo sapien
taaacctggtgtgtgcgcaaaaggg

SEQ ID NO: 1335807 - DNA, 25 bp, Homo sapien
cgaggaatcaggaagcgtgactcac

SEQ ID NO: 1335808 - DNA, 25 bp, Homo sapien
gaaaggataaacgtctcctttgcgc

SEQ ID NO: 1335809 - DNA, 25 bp, Homo sapien
gaggccaggatctattaaacctggt

SEQ ID NO: 1335810 - DNA, 25 bp, Homo sapien
tgggtctgggacgataccgaaatcc

SEQ ID NO: 1335811 - DNA, 25 bp, Homo sapien
tctgggacgataccgaaatccggta

SEQ ID NO: 1335812 - DNA, 25 bp, Homo sapien
tctccaccttcttgtacttccccga

SEQ ID NO: 1335813 - DNA, 25 bp, Homo sapien
cccagttccttgatctccaccttct

SEQ ID NO: 1335814 - DNA, 25 bp, Homo sapien
tttctcaactcccccagttccttga

SEQ ID NO: 1335815 - DNA, 25 bp, Homo sapien
gatctccaccttcttgtacttcccc

SEQ ID NO: 1335816 - DNA, 25 bp, Homo sapien
cggttggtgatcaccaggacggcca

SEQ ID NO: 1335817 - DNA, 25 bp, Homo sapien
ggcggtgaggcgcttcatggagaac

SEQ ID NO: 1335818 - DNA, 25 bp, Homo sapien
cgatgacggcgatgaggccggcggt

SEQ ID NO: 1335819 - DNA, 25 bp, Homo sapien
atgccggcgacgagggccaccacga

SEQ ID NO: 1335820 - DNA, 25 bp, Homo sapien
gggaatctcgtccaggtaatagatg

SEQ ID NO: 1335821 - DNA, 25 bp, Homo sapien
ggtaatagatgagcgtgcgctccac

SEQ ID NO: 1335822 - DNA, 25 bp, Homo sapien
ccaggtaatagatgagcgtgcgctc

SEQ ID NO: 1335823 - DNA, 25 bp, Homo sapien
tcgggggaatctcgtccaggtaata

SEQ ID NO: 1335824 - DNA, 25 bp, Homo sapien
ggcggcatcgccgatatccacgtca

SEQ ID NO: 1335825 - DNA, 25 bp, Homo sapien
gccctggaatagagactcgcccttg

SEQ ID NO: 1335826 - DNA, 25 bp, Homo sapien
caccggcggccttctgagacgtgtt

SEQ ID NO: 1335827 - DNA, 25 bp, Homo sapien
ccttgatgtccctctcgaagtagta

SEQ ID NO: 1335828 - DNA, 25 bp, Homo sapien
ggtcgtagaggccatcgttgtccac

SEQ ID NO: 1335829 - DNA, 25 bp, Homo sapien
catcttgttggtgggacacgtgcag

SEQ ID NO: 1335830 - DNA, 25 bp, Homo sapien
acaccgacgtctggttgcactggcg

SEQ ID NO: 1335831 - DNA, 25 bp, Homo sapien
tcatcgcagcgtaggctcaggtcgc

SEQ ID NO: 1335832 - DNA, 25 bp, Homo sapien
cgctccctccggctcttatactcta

SEQ ID NO: 1335833 - DNA, 25 bp, Homo sapien
acgcggaccggacgcgggcggatga

SEQ ID NO: 1335834 - DNA, 25 bp, Homo sapien
tcgggctccggcgtctgggatggtc

SEQ ID NO: 1335835 - DNA, 25 bp, Homo sapien
ccgcgataggatcagaacagggaag

SEQ ID NO: 1335836 - DNA, 25 bp, Homo sapien
tgacaggtagggactatcagacccg

SEQ ID NO: 1335837 - DNA, 25 bp, Homo sapien
gctctcccggcagaaagtctaaaga

SEQ ID NO: 1335838 - DNA, 25 bp, Homo sapien
tcattgcaaagtgtggctcgcgact

SEQ ID NO: 1335839 - DNA, 25 bp, Homo sapien
gttctcacagtagcacacgtttata

SEQ ID NO: 1335840 - DNA, 25 bp, Homo sapien
tctactgagagattcataatacccg

SEQ ID NO: 1335841 - DNA, 25 bp, Homo sapien
tgcatctccatggtcaagaaggtgg

SEQ ID NO: 1335842 - DNA, 25 bp, Homo sapien
ggtttaacatggtccctgggcactc

SEQ ID NO: 1335843 - DNA, 25 bp, Homo sapien
cactctgagtggatgtctactgaga

SEQ ID NO: 1335844 - DNA, 25 bp, Homo sapien
cttttgtgctctgtagatttctatg

SEQ ID NO: 1335845 - DNA, 25 bp, Homo sapien
tctgttatcacacttgggcaataag

SEQ ID NO: 1335846 - DNA, 25 bp, Homo sapien
gttatcacacttgggcaataagcac

SEQ ID NO: 1335847 - DNA, 25 bp, Homo sapien
tcacacttgggcaataagcaccata

SEQ ID NO: 1335848 - DNA, 25 bp, Homo sapien
gaccagggctaaagtggtgaggaca

SEQ ID NO: 1335849 - DNA, 25 bp, Homo sapien
aattgtgcatgctgcaggagggacc

SEQ ID NO: 1335850 - DNA, 25 bp, Homo sapien
gcacagaatcaaaggagcagtggga

SEQ ID NO: 1335851 - DNA, 25 bp, Homo sapien
agcagtgggaattgtgcatgctgca

SEQ ID NO: 1335852 - DNA, 25 bp, Homo sapien
tataagtgggcacactattagcaac

SEQ ID NO: 1335853 - DNA, 25 bp, Homo sapien
caccagaaccgccagctttcagaat

SEQ ID NO: 1335854 - DNA, 25 bp, Homo sapien
taagtgggcacactattagcaactt

SEQ ID NO: 1335855 - DNA, 25 bp, Homo sapien
agcaactttacaccagaaccgccag

SEQ ID NO: 1335856 - DNA, 25 bp, Homo sapien
ctgggtgggtgtctgcttaatgcca

SEQ ID NO: 1335857 - DNA, 25 bp, Homo sapien
tgggtgggtgtctgcttaatgccat

SEQ ID NO: 1335858 - DNA, 25 bp, Homo sapien
gcaattcctggttgtggcctttcat

SEQ ID NO: 1335859 - DNA, 25 bp, Homo sapien
tcagaagtacagagaaagggatcct

SEQ ID NO: 1335860 - DNA, 25 bp, Homo sapien
cctatcgcattggagaagtgtgggc

SEQ ID NO: 1335861 - DNA, 25 bp, Homo sapien
gatctaagtaatgatggcccggaac

SEQ ID NO: 1335862 - DNA, 25 bp, Homo sapien
ggttactcatgagattacgtagcct

SEQ ID NO: 1335863 - DNA, 25 bp, Homo sapien
tcatgagattacgtagcctagtaaa

SEQ ID NO: 1335864 - DNA, 25 bp, Homo sapien
tactcatgagattacgtagcctagt

SEQ ID NO: 1335865 - DNA, 25 bp, Homo sapien
agaggttactcatgagattacgtag

SEQ ID NO: 1335866 - DNA, 25 bp, Homo sapien
agaaggctgctaggatgcttgcgaa

SEQ ID NO: 1335867 - DNA, 25 bp, Homo sapien
gctaggatgcttgcgaacacgacat

SEQ ID NO: 1335868 - DNA, 25 bp, Homo sapien
aaggctgctaggatgcttgcgaaca

SEQ ID NO: 1335869 - DNA, 25 bp, Homo sapien
gctgctaggatgcttgcgaacacga

SEQ ID NO: 1335870 - DNA, 25 bp, Homo sapien
tgagtggggtggtttgagtgtggta

SEQ ID NO: 1335871 - DNA, 25 bp, Homo sapien
ctatgagtggggtggtttgagtgtg

SEQ ID NO: 1335872 - DNA, 25 bp, Homo sapien
gtggggtggtttgagtgtggtaggc

SEQ ID NO: 1335873 - DNA, 25 bp, Homo sapien
ggtggtttgagtgtggtaggcttgc

SEQ ID NO: 1335874 - DNA, 25 bp, Homo sapien
tcaagggttccccggtgatgtcatc

SEQ ID NO: 1335875 - DNA, 25 bp, Homo sapien
aagggttccccggtgatgtcatctt

SEQ ID NO: 1335876 - DNA, 25 bp, Homo sapien
gatcaagggttccccggtgatgtca

SEQ ID NO: 1335877 - DNA, 25 bp, Homo sapien
ggatcaagggttccccggtgatgtc

SEQ ID NO: 1335878 - DNA, 25 bp, Homo sapien
tcgtggtaggaacggccactcttgg

SEQ ID NO: 1335879 - DNA, 25 bp, Homo sapien
cttttggagggttgaactcctcgtg

SEQ ID NO: 1335880 - DNA, 25 bp, Homo sapien
ttgaactcctcgtggtaggaacggc

SEQ ID NO: 1335881 - DNA, 25 bp, Homo sapien
ttggagggttgaactcctcgtggta

SEQ ID NO: 1335882 - DNA, 25 bp, Homo sapien
cttcggatcagcagagagtctggga

SEQ ID NO: 1335883 - DNA, 25 bp, Homo sapien
agtctgggatgctgaattcaatcac

SEQ ID NO: 1335884 - DNA, 25 bp, Homo sapien
cagagagtctgggatgctgaattca

SEQ ID NO: 1335885 - DNA, 25 bp, Homo sapien
gagagtctgggatgctgaattcaat

SEQ ID NO: 1335886 - DNA, 25 bp, Homo sapien
tcttctccatgaggtcatcgagcat

SEQ ID NO: 1335887 - DNA, 25 bp, Homo sapien
tttcctcttctccatgaggtcatcg

SEQ ID NO: 1335888 - DNA, 25 bp, Homo sapien
cctgcctcacagtccgagggaagcc

SEQ ID NO: 1335889 - DNA, 25 bp, Homo sapien
gaggtcatcgagcatttctgcctgc

SEQ ID NO: 1335890 - DNA, 25 bp, Homo sapien
cagaagttttcagccaatctgggtg

SEQ ID NO: 1335891 - DNA, 25 bp, Homo sapien
aatggcagacacagaagttttcagc

SEQ ID NO: 1335892 - DNA, 25 bp, Homo sapien
tgggtgcctgggtgcctttaccggc

SEQ ID NO: 1335893 - DNA, 25 bp, Homo sapien
tttcagccaatctgggtgcctgggt

SEQ ID NO: 1335894 - DNA, 25 bp, Homo sapien
cagcagcacagcctttaggacactc

SEQ ID NO: 1335895 - DNA, 25 bp, Homo sapien
agcagcacagcctttaggacactcg

SEQ ID NO: 1335896 - DNA, 25 bp, Homo sapien
gggcatgtagctattacctgtagca

SEQ ID NO: 1335897 - DNA, 25 bp, Homo sapien
tcctgtactcactgggcatggagcc

SEQ ID NO: 1335898 - DNA, 25 bp, Homo sapien
agcaactggggctttagggcatgta

SEQ ID NO: 1335899 - DNA, 25 bp, Homo sapien
ctcctgtactcactgggcatggagc

SEQ ID NO: 1335900 - DNA, 25 bp, Homo sapien
taactgacttcttaagagacgagga

SEQ ID NO: 1335901 - DNA, 25 bp, Homo sapien
tacatggctgttttgtgagcacaaa

SEQ ID NO: 1335902 - DNA, 25 bp, Homo sapien
tgctgacttgcgactggatggcttc

SEQ ID NO: 1335903 - DNA, 25 bp, Homo sapien
gatggcttcaactcaggtgctcatg

SEQ ID NO: 1335904 - DNA, 25 bp, Homo sapien
tgtgcttacagtctgcatgtcacag

SEQ ID NO: 1335905 - DNA, 25 bp, Homo sapien
tctgactgtgcttacagtctgcatg

SEQ ID NO: 1335906 - DNA, 25 bp, Homo sapien
agtctgcatgtcacagacctcaacc

SEQ ID NO: 1335907 - DNA, 25 bp, Homo sapien
ggaaggtaatgcagaggagacctgc

SEQ ID NO: 1335908 - DNA, 25 bp, Homo sapien
gatctataaccgtggaaactgcagt

SEQ ID NO: 1335909 - DNA, 25 bp, Homo sapien
caaaactacagattagggactgacc

SEQ ID NO: 1335910 - DNA, 25 bp, Homo sapien
tttccctttcaagtgtggcacgagt

SEQ ID NO: 1335911 - DNA, 25 bp, Homo sapien
gcacagtacctaaggcccacagttt

SEQ ID NO: 1335912 - DNA, 25 bp, Homo sapien
tatcctcggtagtagcccaaggctg

SEQ ID NO: 1335913 - DNA, 25 bp, Homo sapien
gagacatagtccaaatcccaagctg

SEQ ID NO: 1335914 - DNA, 25 bp, Homo sapien
tagtgtcgatttccattagccaagc

SEQ ID NO: 1335915 - DNA, 25 bp, Homo sapien
cagtaaaggactagaacaccgtggt

SEQ ID NO: 1335916 - DNA, 25 bp, Homo sapien
cagagtcttcctcatacactccaaa

SEQ ID NO: 1335917 - DNA, 25 bp, Homo sapien
cataaagcaattggtcactttgctc

SEQ ID NO: 1335918 - DNA, 25 bp, Homo sapien
gtacagttctcttcggttactccat

SEQ ID NO: 1335919 - DNA, 25 bp, Homo sapien
tcagtcaagaattcttcagccataa

SEQ ID NO: 1335920 - DNA, 25 bp, Homo sapien
aaaatgaggatgctagctggagtct

SEQ ID NO: 1335921 - DNA, 25 bp, Homo sapien
ttacagaagcaaaacctagacgtga

SEQ ID NO: 1335922 - DNA, 25 bp, Homo sapien
tatgtgatgctttctacttcggacg

SEQ ID NO: 1335923 - DNA, 25 bp, Homo sapien
caaatgttgcagatctactagcctt

SEQ ID NO: 1335924 - DNA, 25 bp, Homo sapien
gtcaggtcagaatcccggcgaaaga

SEQ ID NO: 1335925 - DNA, 25 bp, Homo sapien
aaagattttatccatggggacgctg

SEQ ID NO: 1335926 - DNA, 25 bp, Homo sapien
cagaatcccggcgaaagattttatc

SEQ ID NO: 1335927 - DNA, 25 bp, Homo sapien
tcccggcgaaagattttatccatgg

SEQ ID NO: 1335928 - DNA, 25 bp, Homo sapien
cttttcaaatactaatccccactga

SEQ ID NO: 1335929 - DNA, 25 bp, Homo sapien
tttcaaatactaatccccactgagg

SEQ ID NO: 1335930 - DNA, 25 bp, Homo sapien
tttttctattatccatcttgtcttt

SEQ ID NO: 1335931 - DNA, 25 bp, Homo sapien
tctaacatctgctgtacttcaaatt

SEQ ID NO: 1335932 - DNA, 25 bp, Homo sapien
gacacagatgttaaaacccagcagg

SEQ ID NO: 1335933 - DNA, 25 bp, Homo sapien
ttttttcgatgaggacactacgtca

SEQ ID NO: 1335934 - DNA, 25 bp, Homo sapien
ctacgtcatagaaaggttaacctgc

SEQ ID NO: 1335935 - DNA, 25 bp, Homo sapien
gatcagatataaaaggcattggcag

SEQ ID NO: 1335936 - DNA, 25 bp, Homo sapien
gattatagggactaacaatcatccc

SEQ ID NO: 1335937 - DNA, 25 bp, Homo sapien
gccatctgggctaatttcctcactt

SEQ ID NO: 1335938 - DNA, 25 bp, Homo sapien
aatgaactttgcacctcctctggag

SEQ ID NO: 1335939 - DNA, 25 bp, Homo sapien
tcctcacttataaccaggcaggtaa

SEQ ID NO: 1335940 - DNA, 25 bp, Homo sapien
ctggtatttagcttgtgtgtcaata

SEQ ID NO: 1335941 - DNA, 25 bp, Homo sapien
tctcacactgtagtcctgtactcag

SEQ ID NO: 1335942 - DNA, 25 bp, Homo sapien
tatctcgtaaggaaggattaggatc

SEQ ID NO: 1335943 - DNA, 25 bp, Homo sapien
gataccatccaataacactgaagcc

SEQ ID NO: 1335944 - DNA, 25 bp, Homo sapien
tcctaacagaccaatcacttctgcc

SEQ ID NO: 1335945 - DNA, 25 bp, Homo sapien
ttcctcctaacagaccaatcacttc

SEQ ID NO: 1335946 - DNA, 25 bp, Homo sapien
ctaacagaccaatcacttctgccat

SEQ ID NO: 1335947 - DNA, 25 bp, Homo sapien
tcttcctcctaacagaccaatcact

SEQ ID NO: 1335948 - DNA, 25 bp, Homo sapien
tagattccttgtaaaagaggacagt

SEQ ID NO: 1335949 - DNA, 25 bp, Homo sapien
caaaatacacgtcttccatactctg

SEQ ID NO: 1335950 - DNA, 25 bp, Homo sapien
gacagttaagatccaaaatacacgt

SEQ ID NO: 1335951 - DNA, 25 bp, Homo sapien
tccttgtaaaagaggacagttaaga

SEQ ID NO: 1335952 - DNA, 25 bp, Homo sapien
agtgcttctgaagccactttcacct

SEQ ID NO: 1335953 - DNA, 25 bp, Homo sapien
gcttctgaagccactttcacctgaa

SEQ ID NO: 1335954 - DNA, 25 bp, Homo sapien
tattaaaagtgcttctgaagccact

SEQ ID NO: 1335955 - DNA, 25 bp, Homo sapien
ccattattaaaagtgcttctgaagc

SEQ ID NO: 1335956 - DNA, 25 bp, Homo sapien
caaggtatcagttggaagggatcaa

SEQ ID NO: 1335957 - DNA, 25 bp, Homo sapien
tatcagttggaagggatcaaacgag

SEQ ID NO: 1335958 - DNA, 25 bp, Homo sapien
tacaaggtatcagttggaagggatc

SEQ ID NO: 1335959 - DNA, 25 bp, Homo sapien
aaaattacaaggtatcagttggaag

SEQ ID NO: 1335960 - DNA, 25 bp, Homo sapien
tctttttgccaactcctcagcagag

SEQ ID NO: 1335961 - DNA, 25 bp, Homo sapien
ctttttgccaactcctcagcagaga

SEQ ID NO: 1335962 - DNA, 25 bp, Homo sapien
catactctacgaaacctgccctgat

SEQ ID NO: 1335963 - DNA, 25 bp, Homo sapien
actttgtgcatgcaaggcttactga

SEQ ID NO: 1335964 - DNA, 25 bp, Homo sapien
tattagaaatacaagccccttatgg

SEQ ID NO: 1335965 - DNA, 25 bp, Homo sapien
ggtgacttccagacaaattaacatg

SEQ ID NO: 1335966 - DNA, 25 bp, Homo sapien
agtcctttgcatcacaccagtttcc

SEQ ID NO: 1335967 - DNA, 25 bp, Homo sapien
ctaagtcctttgcatcacaccagtt

SEQ ID NO: 1335968 - DNA, 25 bp, Homo sapien
gtctcggaccctacgtctccttgta

SEQ ID NO: 1335969 - DNA, 25 bp, Homo sapien
ccatgggtctcggaccctacgtctc

SEQ ID NO: 1335970 - DNA, 25 bp, Homo sapien
tcgtactttgtcaactgtttgtggc

SEQ ID NO: 1335971 - DNA, 25 bp, Homo sapien
ggcaagttggtatgcttctactgca

SEQ ID NO: 1335972 - DNA, 25 bp, Homo sapien
ttctgtctctgattcgtactttgtc

SEQ ID NO: 1335973 - DNA, 25 bp, Homo sapien
atagactgcagacgctgggcaagtt

SEQ ID NO: 1335974 - DNA, 25 bp, Homo sapien
tgctgtaaggataaaaaatgtcgag

SEQ ID NO: 1335975 - DNA, 25 bp, Homo sapien
tattaaataatgttacagcacctct

SEQ ID NO: 1335976 - DNA, 25 bp, Homo sapien
actacttgaattctaaccatcatag

SEQ ID NO: 1335977 - DNA, 25 bp, Homo sapien
aatgtcgagtaaaagatgttgttgg

SEQ ID NO: 1335978 - DNA, 25 bp, Homo sapien
tcgaggtatgtatgaatccgtccaa

SEQ ID NO: 1335979 - DNA, 25 bp, Homo sapien
tccaatacaattaacatctccacag

SEQ ID NO: 1335980 - DNA, 25 bp, Homo sapien
cacatccaaaattgattgctcctat

SEQ ID NO: 1335981 - DNA, 25 bp, Homo sapien
ccacagttcttcaggccaggacgta

SEQ ID NO: 1335982 - DNA, 25 bp, Homo sapien
catagattccagttatcccaggacc

SEQ ID NO: 1335983 - DNA, 25 bp, Homo sapien
ctaattaagagacagaagtacaatt

SEQ ID NO: 1335984 - DNA, 25 bp, Homo sapien
tcttccccaatgttaaattcataga

SEQ ID NO: 1335985 - DNA, 25 bp, Homo sapien
attcagaaatttatgtacagacaca

SEQ ID NO: 1335986 - DNA, 25 bp, Homo sapien
gagggactgtcaataatcaatgaac

SEQ ID NO: 1335987 - DNA, 25 bp, Homo sapien
gaatgcttaagccagattattgtgc

SEQ ID NO: 1335988 - DNA, 25 bp, Homo sapien
taggctaggcctcactaagcagaat

SEQ ID NO: 1335989 - DNA, 25 bp, Homo sapien
taaggaagggacataatcaggattc

SEQ ID NO: 1335990 - DNA, 25 bp, Homo sapien
gaaggttaccgatttattatagcaa

SEQ ID NO: 1335991 - DNA, 25 bp, Homo sapien
ggaaggctttccatacaaaagagaa

SEQ ID NO: 1335992 - DNA, 25 bp, Homo sapien
taacaatagcaataggacaggaagg

SEQ ID NO: 1335993 - DNA, 25 bp, Homo sapien
gttacagcaggaagttaacaatagc

SEQ ID NO: 1335994 - DNA, 25 bp, Homo sapien
taaacggtactgacaatctagagaa

SEQ ID NO: 1335995 - DNA, 25 bp, Homo sapien
gtcctaggagactgcttcataaagc

SEQ ID NO: 1335996 - DNA, 25 bp, Homo sapien
tatatcttcctaacgctgtcctagg

SEQ ID NO: 1335997 - DNA, 25 bp, Homo sapien
tccaggcccacaatctaatgaatag

SEQ ID NO: 1335998 - DNA, 25 bp, Homo sapien
ctgttctggtggcttaagctcttct

SEQ ID NO: 1335999 - DNA, 25 bp, Homo sapien
taattttcaaatagcgttctggtgt

SEQ ID NO: 1336000 - DNA, 25 bp, Homo sapien
cgttctggtgttttagcttggcgcc

SEQ ID NO: 1336001 - DNA, 25 bp, Homo sapien
cttggcgcccctcaaaaaactcagg

SEQ ID NO: 1336002 - DNA, 25 bp, Homo sapien
cgtccccttaaacatgatggtgtcc

SEQ ID NO: 1336003 - DNA, 25 bp, Homo sapien
cattcaagttgggatcagcacgtcc

SEQ ID NO: 1336004 - DNA, 25 bp, Homo sapien
gaagacaactcgtccacctcatctg

SEQ ID NO: 1336005 - DNA, 25 bp, Homo sapien
gatggtgtccatgcctttgtccctt

SEQ ID NO: 1336006 - DNA, 25 bp, Homo sapien
ttggtccatcttcggccaaatttag

SEQ ID NO: 1336007 - DNA, 25 bp, Homo sapien
gtcttgcataactcttcacttgtaa

SEQ ID NO: 1336008 - DNA, 25 bp, Homo sapien
cagtgcggcttccaattagctttga

SEQ ID NO: 1336009 - DNA, 25 bp, Homo sapien
ttaaaatactgtcttgcataactct

SEQ ID NO: 1336010 - DNA, 25 bp, Homo sapien
tcttctatcgtccactttactgagt

SEQ ID NO: 1336011 - DNA, 25 bp, Homo sapien
caaacagctctttttcttctatcgt

SEQ ID NO: 1336012 - DNA, 25 bp, Homo sapien
cactttactgagtaactggctggtt

SEQ ID NO: 1336013 - DNA, 25 bp, Homo sapien
ggctggttttgtaggagagtgtacc

SEQ ID NO: 1336014 - DNA, 25 bp, Homo sapien
ggttccacaaatactatctctttag

SEQ ID NO: 1336015 - DNA, 25 bp, Homo sapien
gatgaagctcactaatttaagcaac

SEQ ID NO: 1336016 - DNA, 25 bp, Homo sapien
gagggtaacactaaaagacatcaaa

SEQ ID NO: 1336017 - DNA, 25 bp, Homo sapien
taatacattcccaaatcctgaaagg

SEQ ID NO: 1336018 - DNA, 25 bp, Homo sapien
caagccagactttttccggttgtga

SEQ ID NO: 1336019 - DNA, 25 bp, Homo sapien
ttattagaactagcctgatgaggcc

SEQ ID NO: 1336020 - DNA, 25 bp, Homo sapien
gttggttgtccaaggcaattcggga

SEQ ID NO: 1336021 - DNA, 25 bp, Homo sapien
agactggacaccctggtttaaatat

SEQ ID NO: 1336022 - DNA, 25 bp, Homo sapien
gaatccaaggatcttctctacctta

SEQ ID NO: 1336023 - DNA, 25 bp, Homo sapien
aatccatctagtaaacagtggcctc

SEQ ID NO: 1336024 - DNA, 25 bp, Homo sapien
taaaaatgcaagcttggacttaagg

SEQ ID NO: 1336025 - DNA, 25 bp, Homo sapien
taaacagttggctagtgacagaaac

SEQ ID NO: 1336026 - DNA, 25 bp, Homo sapien
gattcctcccacgtaacacctgtaa

SEQ ID NO: 1336027 - DNA, 25 bp, Homo sapien
tttcctcataatcattaaaggatac

SEQ ID NO: 1336028 - DNA, 25 bp, Homo sapien
tgatggtgttatccaaggtccaagg

SEQ ID NO: 1336029 - DNA, 25 bp, Homo sapien
ttcactgatggtgttatccaaggtc

SEQ ID NO: 1336030 - DNA, 25 bp, Homo sapien
cactgatggtgttatccaaggtcca

SEQ ID NO: 1336031 - DNA, 25 bp, Homo sapien
actgatggtgttatccaaggtccaa

SEQ ID NO: 1336032 - DNA, 25 bp, Homo sapien
aagatgaatcaagatagtgatcttt

SEQ ID NO: 1336033 - DNA, 25 bp, Homo sapien
caagatgaatcaagatagtgatctt

SEQ ID NO: 1336034 - DNA, 25 bp, Homo sapien
ccaagatgaatcaagatagtgatct

SEQ ID NO: 1336035 - DNA, 25 bp, Homo sapien
taagtcaacctgcttctcgggaagt

SEQ ID NO: 1336036 - DNA, 25 bp, Homo sapien
tgtggtaggcgaaatcggtgccctc

SEQ ID NO: 1336037 - DNA, 25 bp, Homo sapien
tagcaagccatagaacaagagtccc

SEQ ID NO: 1336038 - DNA, 25 bp, Homo sapien
catccggcaaaaggtgaaagcgacc

SEQ ID NO: 1336039 - DNA, 25 bp, Homo sapien
ccacatccgcctcttcagccgccat

SEQ ID NO: 1336040 - DNA, 25 bp, Homo sapien
taccacgtccccttcgatatccaca

SEQ ID NO: 1336041 - DNA, 25 bp, Homo sapien
gccgccgctaccacgtccccttcga

SEQ ID NO: 1336042 - DNA, 25 bp, Homo sapien
cccttcgatatccacatccgcctct

SEQ ID NO: 1336043 - DNA, 25 bp, Homo sapien
accttgaacttgctgtgattttccc

SEQ ID NO: 1336044 - DNA, 25 bp, Homo sapien
tgatttaatttcatgctcactgaag

SEQ ID NO: 1336045 - DNA, 25 bp, Homo sapien
tgttttcatttaagatgggaaggga

SEQ ID NO: 1336046 - DNA, 25 bp, Homo sapien
acagtcaccaacaccttgaacttgc

SEQ ID NO: 1336047 - DNA, 25 bp, Homo sapien
tttcttccgtctttctcttgcctcc

SEQ ID NO: 1336048 - DNA, 25 bp, Homo sapien
tagttcccccttagctttctctctc

SEQ ID NO: 1336049 - DNA, 25 bp, Homo sapien
cctttcttccgtctttctcttgcct

SEQ ID NO: 1336050 - DNA, 25 bp, Homo sapien
ctcctttcttccgtctttctcttgc

SEQ ID NO: 1336051 - DNA, 25 bp, Homo sapien
agtgatgagtgctggccctgtccca

SEQ ID NO: 1336052 - DNA, 25 bp, Homo sapien
gtttctccaagccaggcaaacctgc

SEQ ID NO: 1336053 - DNA, 25 bp, Homo sapien
taccgtccactatgacaggagtcag

SEQ ID NO: 1336054 - DNA, 25 bp, Homo sapien
tcaaagggtggcttctggtagatac

SEQ ID NO: 1336055 - DNA, 25 bp, Homo sapien
tactacgagtgggagggagcactaa

SEQ ID NO: 1336056 - DNA, 25 bp, Homo sapien
tctcctgctgggacaagatccttaa

SEQ ID NO: 1336057 - DNA, 25 bp, Homo sapien
tagcaggcccagtcaaagaatcttg

SEQ ID NO: 1336058 - DNA, 25 bp, Homo sapien
cattgcaggcatccaagaaggccca

SEQ ID NO: 1336059 - DNA, 25 bp, Homo sapien
gattcatctgagtttggatctctgc

SEQ ID NO: 1336060 - DNA, 25 bp, Homo sapien
ggatctctgcttgccattctttgtt

SEQ ID NO: 1336061 - DNA, 25 bp, Homo sapien
acaagaaattgactgagctttcaca

SEQ ID NO: 1336062 - DNA, 25 bp, Homo sapien
caacgaggcaacacctgaaagagca

SEQ ID NO: 1336063 - DNA, 25 bp, Homo sapien
tgagatgccgtcaccaaagtctggt

SEQ ID NO: 1336064 - DNA, 25 bp, Homo sapien
gagactcatcaatttccctgacagg

SEQ ID NO: 1336065 - DNA, 25 bp, Homo sapien
catgttctccctactaagatgagag

SEQ ID NO: 1336066 - DNA, 25 bp, Homo sapien
taacccaaggcctggtgctcttata

SEQ ID NO: 1336067 - DNA, 25 bp, Homo sapien
tttcaggtctgtgcctggtgagcgt

SEQ ID NO: 1336068 - DNA, 25 bp, Homo sapien
tcaaagggacacggtttcaggtctg

SEQ ID NO: 1336069 - DNA, 25 bp, Homo sapien
ctcttcgaatctttgcacagaaata

SEQ ID NO: 1336070 - DNA, 25 bp, Homo sapien
ggtgagcgtgctgcctcttcgaatc

SEQ ID NO: 1336071 - DNA, 25 bp, Homo sapien
gagggtattatgtccccactctgtt

SEQ ID NO: 1336072 - DNA, 25 bp, Homo sapien
catgaatcattcttaagctgagggt

SEQ ID NO: 1336073 - DNA, 25 bp, Homo sapien
cactctgtttcaaattcacctgctt

SEQ ID NO: 1336074 - DNA, 25 bp, Homo sapien
aatccatcctccaaactgttgccag

SEQ ID NO: 1336075 - DNA, 25 bp, Homo sapien
cttccgggttgctgacatcggcaaa

SEQ ID NO: 1336076 - DNA, 25 bp, Homo sapien
tacaaaggatccgaagctaacaagc

SEQ ID NO: 1336077 - DNA, 25 bp, Homo sapien
taacaagcctgtccaatctcttcca

SEQ ID NO: 1336078 - DNA, 25 bp, Homo sapien
caagaagtgttattacaaaggatcc

SEQ ID NO: 1336079 - DNA, 25 bp, Homo sapien
tcagtatataacttgggaagaaaaa

SEQ ID NO: 1336080 - DNA, 25 bp, Homo sapien
tagtaaagggaagcaattcaagatc

SEQ ID NO: 1336081 - DNA, 25 bp, Homo sapien
aagtagtaaagggaagcaattcaag

SEQ ID NO: 1336082 - DNA, 25 bp, Homo sapien
aaacttcagtatataacttgggaag

SEQ ID NO: 1336083 - DNA, 25 bp, Homo sapien
gcacatgccacttgatacaatccaa

SEQ ID NO: 1336084 - DNA, 25 bp, Homo sapien
ggagtataacctgaccatagcatca

SEQ ID NO: 1336085 - DNA, 25 bp, Homo sapien
gaaacatcgcactatcctttggtaa

SEQ ID NO: 1336086 - DNA, 25 bp, Homo sapien
gcaaaggccatctttttatctagga

SEQ ID NO: 1336087 - DNA, 25 bp, Homo sapien
ttctggaattttcagaaacaaaaca

SEQ ID NO: 1336088 - DNA, 25 bp, Homo sapien
tgtattttcttaaatatcctttctg

SEQ ID NO: 1336089 - DNA, 25 bp, Homo sapien
tattttcttaaatatcctttctgga

SEQ ID NO: 1336090 - DNA, 25 bp, Homo sapien
tatcctttctggaattttcagaaac

SEQ ID NO: 1336091 - DNA, 25 bp, Homo sapien
ggtaaactcagagtgctccaaatct

SEQ ID NO: 1336092 - DNA, 25 bp, Homo sapien
gtaaactcagagtgctccaaatctc

SEQ ID NO: 1336093 - DNA, 25 bp, Homo sapien
ggagtactacagaagcaatctacag

SEQ ID NO: 1336094 - DNA, 25 bp, Homo sapien
tacacagttaacgaaggcaggccag

SEQ ID NO: 1336095 - DNA, 25 bp, Homo sapien
cagtctctattgcagtttgtaaccc

SEQ ID NO: 1336096 - DNA, 25 bp, Homo sapien
ctgaatgagatcgaatgttaggtcc

SEQ ID NO: 1336097 - DNA, 25 bp, Homo sapien
ttctctccgtcgcaacttgtcaagt

SEQ ID NO: 1336098 - DNA, 25 bp, Homo sapien
tacccttggctttagttctcggaca

SEQ ID NO: 1336099 - DNA, 25 bp, Homo sapien
ttgtcaagttctcaagtctgtctct

SEQ ID NO: 1336100 - DNA, 25 bp, Homo sapien
gacgcaacccagtccaacttggata

SEQ ID NO: 1336101 - DNA, 25 bp, Homo sapien
tttgcaactgctgcgttagcatgag

SEQ ID NO: 1336102 - DNA, 25 bp, Homo sapien
tgcgttagcatgagttggcacccac

SEQ ID NO: 1336103 - DNA, 25 bp, Homo sapien
aatgtttgcaactgctgcgttagca

SEQ ID NO: 1336104 - DNA, 25 bp, Homo sapien
actgctgcgttagcatgagttggca

SEQ ID NO: 1336105 - DNA, 25 bp, Homo sapien
ttaacgtggttcatgactttctgtt

SEQ ID NO: 1336106 - DNA, 25 bp, Homo sapien
tgactttctgtttaagctgtgccac

SEQ ID NO: 1336107 - DNA, 25 bp, Homo sapien
tgttaacgtggttcatgactttctg

SEQ ID NO: 1336108 - DNA, 25 bp, Homo sapien
catgactttctgtttaagctgtgcc

SEQ ID NO: 1336109 - DNA, 25 bp, Homo sapien
tggacgccagctccgagttctgagc

SEQ ID NO: 1336110 - DNA, 25 bp, Homo sapien
catctcgggcactgtctgaggctcc

SEQ ID NO: 1336111 - DNA, 25 bp, Homo sapien
tgctcagcgcgcctgggttgaagtt

SEQ ID NO: 1336112 - DNA, 25 bp, Homo sapien
ggcagcgatgcggttcctcatgcgc

SEQ ID NO: 1336113 - DNA, 25 bp, Homo sapien
tcggccaggttcagggtcatgctct

SEQ ID NO: 1336114 - DNA, 25 bp, Homo sapien
cataaggtccgctctcggacgggag

SEQ ID NO: 1336115 - DNA, 25 bp, Homo sapien
tgagggcatcgtcatagaaggtcgt

SEQ ID NO: 1336116 - DNA, 25 bp, Homo sapien
tgatgtgcccgttgctggactggat

SEQ ID NO: 1336117 - DNA, 25 bp, Homo sapien
tccgtcacttcacgtgaggttagtt

SEQ ID NO: 1336118 - DNA, 25 bp, Homo sapien
agtccgtcacttcacgtgaggttag

SEQ ID NO: 1336119 - DNA, 25 bp, Homo sapien
cgtcacttcacgtgaggttagtttg

SEQ ID NO: 1336120 - DNA, 25 bp, Homo sapien
tcacttcacgtgaggttagtttggg

SEQ ID NO: 1336121 - DNA, 25 bp, Homo sapien
cacaagtttcggggccgcaacaggg

SEQ ID NO: 1336122 - DNA, 25 bp, Homo sapien
gcgcgcacaagtttcggggccgcaa

SEQ ID NO: 1336123 - DNA, 25 bp, Homo sapien
ctgcgcgcacaagtttcggggccgc

SEQ ID NO: 1336124 - DNA, 25 bp, Homo sapien
gcgcacaagtttcggggccgcaaca

SEQ ID NO: 1336125 - DNA, 25 bp, Homo sapien
gaaagtttctctaagagcgcacgca

SEQ ID NO: 1336126 - DNA, 25 bp, Homo sapien
tccagggagcgcagggttaattaag

SEQ ID NO: 1336127 - DNA, 25 bp, Homo sapien
attaagatgcctcccgcactcttac

SEQ ID NO: 1336128 - DNA, 25 bp, Homo sapien
aagagcgcacgcacccgctggctgt

SEQ ID NO: 1336129 - DNA, 25 bp, Homo sapien
cggctttgaaaagtcgcggtcactc

SEQ ID NO: 1336130 - DNA, 25 bp, Homo sapien
gatcagtgcggaccctgcagtggcc

SEQ ID NO: 1336131 - DNA, 25 bp, Homo sapien
tgagcgctcttcgtgcgcagcggtt

SEQ ID NO: 1336132 - DNA, 25 bp, Homo sapien
cggttcctcggagtccgcaggcgaa

SEQ ID NO: 1336133 - DNA, 25 bp, Homo sapien
gcggctcgcgctcgcccaagttcaa

SEQ ID NO: 1336134 - DNA, 25 bp, Homo sapien
cccaagttcaacaaccggtgcgagc

SEQ ID NO: 1336135 - DNA, 25 bp, Homo sapien
acaaccggtgcgagcgaagctgagc

SEQ ID NO: 1336136 - DNA, 25 bp, Homo sapien
gttcaacaaccggtgcgagcgaagc

SEQ ID NO: 1336137 - DNA, 25 bp, Homo sapien
ttgcgtggctctccgccgccttctg

SEQ ID NO: 1336138 - DNA, 25 bp, Homo sapien
gctctccgccgccttctggtcttta

SEQ ID NO: 1336139 - DNA, 25 bp, Homo sapien
tcttctcttgcgtggctctccgccg

SEQ ID NO: 1336140 - DNA, 25 bp, Homo sapien
tccttcttctcttgcgtggctctcc

SEQ ID NO: 1336141 - DNA, 25 bp, Homo sapien
gccgctgtcaacagcgcctgggcag

SEQ ID NO: 1336142 - DNA, 25 bp, Homo sapien
tgcaaaagttggctccgggactctg

SEQ ID NO: 1336143 - DNA, 25 bp, Homo sapien
cctaagacgcaggaaaggcttgcaa

SEQ ID NO: 1336144 - DNA, 25 bp, Homo sapien
gtgggtaccgctgctttccgccgct

SEQ ID NO: 1336145 - DNA, 25 bp, Homo sapien
aaatagcccatgatgtcaccccaag

SEQ ID NO: 1336146 - DNA, 25 bp, Homo sapien
agattcttctctgggcccgcggagg

SEQ ID NO: 1336147 - DNA, 25 bp, Homo sapien
tttgcagttcggactatactgccga

SEQ ID NO: 1336148 - DNA, 25 bp, Homo sapien
ctcacgggatgaggtaatgctccgc

SEQ ID NO: 1336149 - DNA, 25 bp, Homo sapien
tattgcccgaaactggacgctcagc

SEQ ID NO: 1336150 - DNA, 25 bp, Homo sapien
gacgctcagctgagtctccgttgca

SEQ ID NO: 1336151 - DNA, 25 bp, Homo sapien
gaagccgagagatttgtattgcccg

SEQ ID NO: 1336152 - DNA, 25 bp, Homo sapien
catctcggtcaagttcaggagcgac

SEQ ID NO: 1336153 - DNA, 25 bp, Homo sapien
cctgcactccacattccctccattc

SEQ ID NO: 1336154 - DNA, 25 bp, Homo sapien
ctgcactccacattccctccattcc

SEQ ID NO: 1336155 - DNA, 25 bp, Homo sapien
gctctgacagtttcctgtctttgca

SEQ ID NO: 1336156 - DNA, 25 bp, Homo sapien
cgctctgacagtttcctgtctttgc

SEQ ID NO: 1336157 - DNA, 25 bp, Homo sapien
ctctgacagtttcctgtctttgcat

SEQ ID NO: 1336158 - DNA, 25 bp, Homo sapien
tctgtcctccccattacagctgcca

SEQ ID NO: 1336159 - DNA, 25 bp, Homo sapien
cagctgccacccttacagttttcta

SEQ ID NO: 1336160 - DNA, 25 bp, Homo sapien
gatggcttttcctgcaactgctgac

SEQ ID NO: 1336161 - DNA, 25 bp, Homo sapien
tgttgcatgtgtgcgtagtttacaa

SEQ ID NO: 1336162 - DNA, 25 bp, Homo sapien
gctccttggtgcaacaaatctttga

SEQ ID NO: 1336163 - DNA, 25 bp, Homo sapien
gctgctccttggtgcaacaaatctt

SEQ ID NO: 1336164 - DNA, 25 bp, Homo sapien
tgctgctccttggtgcaacaaatct

SEQ ID NO: 1336165 - DNA, 25 bp, Homo sapien
cttggtgcaacaaatctttgacatc

SEQ ID NO: 1336166 - DNA, 25 bp, Homo sapien
gctttcaatgcagtgtggactccag

SEQ ID NO: 1336167 - DNA, 25 bp, Homo sapien
gaagacttgtgccagatcactggct

SEQ ID NO: 1336168 - DNA, 25 bp, Homo sapien
actggctttcaatgcagtgtggact

SEQ ID NO: 1336169 - DNA, 25 bp, Homo sapien
cactgctgaagacttgtgccagatc

SEQ ID NO: 1336170 - DNA, 25 bp, Homo sapien
ggctgagctgtttatcattgtggag

SEQ ID NO: 1336171 - DNA, 25 bp, Homo sapien
ctttgggaccaacgctgtttcgtct

SEQ ID NO: 1336172 - DNA, 25 bp, Homo sapien
taccatagttgtgatgttgtctaga

SEQ ID NO: 1336173 - DNA, 25 bp, Homo sapien
gtctgcagcaatggcgtgcctggct

SEQ ID NO: 1336174 - DNA, 25 bp, Homo sapien
catgcttgtggtttgtaccatagtt

SEQ ID NO: 1336175 - DNA, 25 bp, Homo sapien
agagcttcgaggtgaaaagaagtcc

SEQ ID NO: 1336176 - DNA, 25 bp, Homo sapien
cagctgtgcactaggcatttgggat

SEQ ID NO: 1336177 - DNA, 25 bp, Homo sapien
gatgtagatgggaaacatgcccttc

SEQ ID NO: 1336178 - DNA, 25 bp, Homo sapien
ccttcgtcttccttgagggtccctg

SEQ ID NO: 1336179 - DNA, 25 bp, Homo sapien
tacccatcactatagtataaggctg

SEQ ID NO: 1336180 - DNA, 25 bp, Homo sapien
cccatacccatcactatagtataag

SEQ ID NO: 1336181 - DNA, 25 bp, Homo sapien
ggcctctttcaagatatctctcact

SEQ ID NO: 1336182 - DNA, 25 bp, Homo sapien
catcactatagtataaggctgctga

SEQ ID NO: 1336183 - DNA, 25 bp, Homo sapien
gcctggttctcaaggtggccactta

SEQ ID NO: 1336184 - DNA, 25 bp, Homo sapien
cctggttctcaaggtggccacttac

SEQ ID NO: 1336185 - DNA, 25 bp, Homo sapien
tgcctggttctcaaggtggccactt

SEQ ID NO: 1336186 - DNA, 25 bp, Homo sapien
ctgcctggttctcaaggtggccact

SEQ ID NO: 1336187 - DNA, 25 bp, Homo sapien
gaacaacgatggcttcacttgccag

SEQ ID NO: 1336188 - DNA, 25 bp, Homo sapien
tgggaacaacgatggcttcacttgc

SEQ ID NO: 1336189 - DNA, 25 bp, Homo sapien
tcacttgccaggtcttttccccaga

SEQ ID NO: 1336190 - DNA, 25 bp, Homo sapien
cgatggcttcacttgccaggtcttt

SEQ ID NO: 1336191 - DNA, 25 bp, Homo sapien
gatttttgtcgctcagccagccaag

SEQ ID NO: 1336192 - DNA, 25 bp, Homo sapien
tgggcaaactgagacccggacgagt

SEQ ID NO: 1336193 - DNA, 25 bp, Homo sapien
cgagtcccattgagagagagaggca

SEQ ID NO: 1336194 - DNA, 25 bp, Homo sapien
gactgagatttctgggatccggctt

SEQ ID NO: 1336195 - DNA, 25 bp, Homo sapien
ctgagtaatcgcaggcaatcagcgc

SEQ ID NO: 1336196 - DNA, 25 bp, Homo sapien
gagtaatcgcaggcaatcagcgcgg

SEQ ID NO: 1336197 - DNA, 25 bp, Homo sapien
tgagtaatcgcaggcaatcagcgcg

SEQ ID NO: 1336198 - DNA, 25 bp, Homo sapien
agcgaaagggactcgcgggcgaacg

SEQ ID NO: 1336199 - DNA, 25 bp, Homo sapien
ccctcgtctgtgtacttagtgatct

SEQ ID NO: 1336200 - DNA, 25 bp, Homo sapien
gttccctcgtctgtgtacttagtga

SEQ ID NO: 1336201 - DNA, 25 bp, Homo sapien
cgtctgtgtacttagtgatcttcca

SEQ ID NO: 1336202 - DNA, 25 bp, Homo sapien
ctaagttccctcgtctgtgtactta

SEQ ID NO: 1336203 - DNA, 25 bp, Homo sapien
gctgtgagtccagggcttagtggaa

SEQ ID NO: 1336204 - DNA, 25 bp, Homo sapien
cacagccattaggatatttctcagg

SEQ ID NO: 1336205 - DNA, 25 bp, Homo sapien
agtggaaccctgtcttggcccacag

SEQ ID NO: 1336206 - DNA, 25 bp, Homo sapien
ccacagccattaggatatttctcag

SEQ ID NO: 1336207 - DNA, 25 bp, Homo sapien
cagacttagtacagagaatgcagta

SEQ ID NO: 1336208 - DNA, 25 bp, Homo sapien
tctctgatccagacccgatacttct

SEQ ID NO: 1336209 - DNA, 25 bp, Homo sapien
ttgtcagacttagtacagagaatgc

SEQ ID NO: 1336210 - DNA, 25 bp, Homo sapien
aatgaattggctcatgggtgatctc

SEQ ID NO: 1336211 - DNA, 25 bp, Homo sapien
gcaggggaggcagaaactgagtaag

SEQ ID NO: 1336212 - DNA, 25 bp, Homo sapien
cagcaggggaggcagaaactgagta

SEQ ID NO: 1336213 - DNA, 25 bp, Homo sapien
caggggaggcagaaactgagtaagc

SEQ ID NO: 1336214 - DNA, 25 bp, Homo sapien
ggggaggcagaaactgagtaagcat

SEQ ID NO: 1336215 - DNA, 25 bp, Homo sapien
tgcaccaatcctacggcacttccaa

SEQ ID NO: 1336216 - DNA, 25 bp, Homo sapien
ccaatcctacggcacttccaaccag

SEQ ID NO: 1336217 - DNA, 25 bp, Homo sapien
ctgcaccaatcctacggcacttcca

SEQ ID NO: 1336218 - DNA, 25 bp, Homo sapien
cctacggcacttccaaccagctctt

SEQ ID NO: 1336219 - DNA, 25 bp, Homo sapien
ctgtctgcctatcagtcctgtgctt

SEQ ID NO: 1336220 - DNA, 25 bp, Homo sapien
cccttggacaggactagggacgtgc

SEQ ID NO: 1336221 - DNA, 25 bp, Homo sapien
tggatctatttcatgacctctgtgt

SEQ ID NO: 1336222 - DNA, 25 bp, Homo sapien
ggacgtgcggtccaggcctttctct

SEQ ID NO: 1336223 - DNA, 25 bp, Homo sapien
tggaatagcactgccctccggaata

SEQ ID NO: 1336224 - DNA, 25 bp, Homo sapien
ctgtggattgattgataagatatgc

SEQ ID NO: 1336225 - DNA, 25 bp, Homo sapien
cctcagtaggtatttagtggctgtg

SEQ ID NO: 1336226 - DNA, 25 bp, Homo sapien
gggaacactacttgagcttagggat

SEQ ID NO: 1336227 - DNA, 25 bp, Homo sapien
tctaaccatattgaaagctcttgga

SEQ ID NO: 1336228 - DNA, 25 bp, Homo sapien
tcttccttggtattgagcccctttc

SEQ ID NO: 1336229 - DNA, 25 bp, Homo sapien
gtattgagcccctttcatgcaggaa

SEQ ID NO: 1336230 - DNA, 25 bp, Homo sapien
agaaagggtgcatgtatctgttttc

SEQ ID NO: 1336231 - DNA, 25 bp, Homo sapien
tacttagaaagggtgcatgtatctg

SEQ ID NO: 1336232 - DNA, 25 bp, Homo sapien
ctcctttatcagttgaattgctaaa

SEQ ID NO: 1336233 - DNA, 25 bp, Homo sapien
aggaatcatctctgcacttgggagg

SEQ ID NO: 1336234 - DNA, 25 bp, Homo sapien
tatccggtaggaatcatctctgcac

SEQ ID NO: 1336235 - DNA, 25 bp, Homo sapien
cctccaaggaccagtatccggtagg

SEQ ID NO: 1336236 - DNA, 25 bp, Homo sapien
taagtgagtaattatcatgtgtctt

SEQ ID NO: 1336237 - DNA, 25 bp, Homo sapien
ggcttataggcatatggtatttgga

SEQ ID NO: 1336238 - DNA, 25 bp, Homo sapien
tgaaagtgttatcttaaccagggag

SEQ ID NO: 1336239 - DNA, 25 bp, Homo sapien
agcaggtgatttttgcaattgcagg

SEQ ID NO: 1336240 - DNA, 25 bp, Homo sapien
taattgaaagtgttatcttaaccag

SEQ ID NO: 1336241 - DNA, 25 bp, Homo sapien
gaacactgaagggaacggtactatc

SEQ ID NO: 1336242 - DNA, 25 bp, Homo sapien
catttagaggacatggatcagcccc

SEQ ID NO: 1336243 - DNA, 25 bp, Homo sapien
catgagagagtcgtgagtcagcagc

SEQ ID NO: 1336244 - DNA, 25 bp, Homo sapien
cgcttaatgcaaccaagagaggcct

SEQ ID NO: 1336245 - DNA, 25 bp, Homo sapien
agtgcttcccagaaaccgcatgatc

SEQ ID NO: 1336246 - DNA, 25 bp, Homo sapien
cagtgcttcccagaaaccgcatgat

SEQ ID NO: 1336247 - DNA, 25 bp, Homo sapien
tccagtgcttcccagaaaccgcatg

SEQ ID NO: 1336248 - DNA, 25 bp, Homo sapien
gcttcccagaaaccgcatgatcttc

SEQ ID NO: 1336249 - DNA, 25 bp, Homo sapien
gatgaggggccccatttgattcagt

SEQ ID NO: 1336250 - DNA, 25 bp, Homo sapien
atttttatgttgagcttcctcctct

SEQ ID NO: 1336251 - DNA, 25 bp, Homo sapien
catttttatgttgagcttcctcctc

SEQ ID NO: 1336252 - DNA, 25 bp, Homo sapien
agacacccgagattcccgccttgag

SEQ ID NO: 1336253 - DNA, 25 bp, Homo sapien
ggttatctcgaagctgcagcctaaa

SEQ ID NO: 1336254 - DNA, 25 bp, Homo sapien
tgcatccttgatatcaggcttgttc

SEQ ID NO: 1336255 - DNA, 25 bp, Homo sapien
tctgtgtagacacccgagattcccg

SEQ ID NO: 1336256 - DNA, 25 bp, Homo sapien
gtcgtatctcaggagccagtgggct

SEQ ID NO: 1336257 - DNA, 25 bp, Homo sapien
gatgtcgtatctcaggagccagtgg

SEQ ID NO: 1336258 - DNA, 25 bp, Homo sapien
ggtctggatgtcgtatctcaggagc

SEQ ID NO: 1336259 - DNA, 25 bp, Homo sapien
tctggatgtcgtatctcaggagcca

SEQ ID NO: 1336260 - DNA, 25 bp, Homo sapien
caggattttcagttgatagccagtt

SEQ ID NO: 1336261 - DNA, 25 bp, Homo sapien
gcaggattttcagttgatagccagt

SEQ ID NO: 1336262 - DNA, 25 bp, Homo sapien
gttgatagccagttgccagggccat

SEQ ID NO: 1336263 - DNA, 25 bp, Homo sapien
ccctctccgagaggttttcaatgcc

SEQ ID NO: 1336264 - DNA, 25 bp, Homo sapien
ctctccgagaggttttcaatgccct

SEQ ID NO: 1336265 - DNA, 25 bp, Homo sapien
cctctccgagaggttttcaatgccc

SEQ ID NO: 1336266 - DNA, 25 bp, Homo sapien
gccctctccgagaggttttcaatgc

SEQ ID NO: 1336267 - DNA, 25 bp, Homo sapien
tgtggagggttggatttccttagca

SEQ ID NO: 1336268 - DNA, 25 bp, Homo sapien
cttgtggagggttggatttccttag

SEQ ID NO: 1336269 - DNA, 25 bp, Homo sapien
ctgccttgtggagggttggatttcc

SEQ ID NO: 1336270 - DNA, 25 bp, Homo sapien
tggagggttggatttccttagcaag

SEQ ID NO: 1336271 - DNA, 25 bp, Homo sapien
ggcccgtgatttcagtttccgaaga

SEQ ID NO: 1336272 - DNA, 25 bp, Homo sapien
cccgtgatttcagtttccgaagagt

SEQ ID NO: 1336273 - DNA, 25 bp, Homo sapien
ccgtgatttcagtttccgaagagtc

SEQ ID NO: 1336274 - DNA, 25 bp, Homo sapien
gcccgtgatttcagtttccgaagag

SEQ ID NO: 1336275 - DNA, 25 bp, Homo sapien
atagctgtaaccactagtgagctca

SEQ ID NO: 1336276 - DNA, 25 bp, Homo sapien
ggggaggagctcctaaccatattaa

SEQ ID NO: 1336277 - DNA, 25 bp, Homo sapien
gttctgctttgagggcattggagag

SEQ ID NO: 1336278 - DNA, 25 bp, Homo sapien
ctatgctgagccttacaatgtgagt

SEQ ID NO: 1336279 - DNA, 25 bp, Homo sapien
tccaggaagatttccatctgtacct

SEQ ID NO: 1336280 - DNA, 25 bp, Homo sapien
agatttccatctgtaccttgtctgc

SEQ ID NO: 1336281 - DNA, 25 bp, Homo sapien
ggaagatttccatctgtaccttgtc

SEQ ID NO: 1336282 - DNA, 25 bp, Homo sapien
caggaagatttccatctgtaccttg

SEQ ID NO: 1336283 - DNA, 25 bp, Homo sapien
acttcctcttgttagcattgggcca

SEQ ID NO: 1336284 - DNA, 25 bp, Homo sapien
cttgagggtccatatggtttgttgc

SEQ ID NO: 1336285 - DNA, 25 bp, Homo sapien
tttgttgcataagacgccaaagagg

SEQ ID NO: 1336286 - DNA, 25 bp, Homo sapien
cagttatgtaagagcttgagggtcc

SEQ ID NO: 1336287 - DNA, 25 bp, Homo sapien
tgggcatcagtttctatcttatttg

SEQ ID NO: 1336288 - DNA, 25 bp, Homo sapien
tccttttccctgagaagcctcaagc

SEQ ID NO: 1336289 - DNA, 25 bp, Homo sapien
agcttctgcgctgggaagattctga

SEQ ID NO: 1336290 - DNA, 25 bp, Homo sapien
tgtcatcagcttctgcgctgggaag

SEQ ID NO: 1336291 - DNA, 25 bp, Homo sapien
gtttcccagaagctcgaatttggtc

SEQ ID NO: 1336292 - DNA, 25 bp, Homo sapien
tggctctttcctatcacctgccatg

SEQ ID NO: 1336293 - DNA, 25 bp, Homo sapien
tcacctgccatgagacctggtaaca

SEQ ID NO: 1336294 - DNA, 25 bp, Homo sapien
cagaagctcgaatttggtccctgct

SEQ ID NO: 1336295 - DNA, 25 bp, Homo sapien
ccttgatgaagtctggaggggttcc

SEQ ID NO: 1336296 - DNA, 25 bp, Homo sapien
tggaaggtcacagtccccagtattc

SEQ ID NO: 1336297 - DNA, 25 bp, Homo sapien
cctttctctttagagacatccctgg

SEQ ID NO: 1336298 - DNA, 25 bp, Homo sapien
ccctgggattctgagcacctggaag

SEQ ID NO: 1336299 - DNA, 25 bp, Homo sapien
cccctccttgtgtcttgctatgcat

SEQ ID NO: 1336300 - DNA, 25 bp, Homo sapien
tggcccctccttgtgtcttgctatg

SEQ ID NO: 1336301 - DNA, 25 bp, Homo sapien
catggcccctccttgtgtcttgcta

SEQ ID NO: 1336302 - DNA, 25 bp, Homo sapien
tcccatggcccctccttgtgtcttg

SEQ ID NO: 1336303 - DNA, 25 bp, Homo sapien
ctggaaacttctaggtcgctggact

SEQ ID NO: 1336304 - DNA, 25 bp, Homo sapien
taaataaggcgtgtacactgtctgc

SEQ ID NO: 1336305 - DNA, 25 bp, Homo sapien
gccacatagagggtccttgtttcag

SEQ ID NO: 1336306 - DNA, 25 bp, Homo sapien
tgaacttcacccaagctgatgtgac

SEQ ID NO: 1336307 - DNA, 25 bp, Homo sapien
gccccttggctctaaatccttgcta

SEQ ID NO: 1336308 - DNA, 25 bp, Homo sapien
tggtggtggatccaatattgtctgt

SEQ ID NO: 1336309 - DNA, 25 bp, Homo sapien
tgatttgtaaccttttggtggtgga

SEQ ID NO: 1336310 - DNA, 25 bp, Homo sapien
taaatccttgctaatcaaagtgtgg

SEQ ID NO: 1336311 - DNA, 25 bp, Homo sapien
agatcctgaagaggtacgggtactg

SEQ ID NO: 1336312 - DNA, 25 bp, Homo sapien
cgggtactgcttgaacagtatacca

SEQ ID NO: 1336313 - DNA, 25 bp, Homo sapien
tactgcttgaacagtataccattca

SEQ ID NO: 1336314 - DNA, 25 bp, Homo sapien
gaagaggtacgggtactgcttgaac

SEQ ID NO: 1336315 - DNA, 25 bp, Homo sapien
gaactgccctgttatatccacacct

SEQ ID NO: 1336316 - DNA, 25 bp, Homo sapien
tacttcttctgtggaacgtccaaag

SEQ ID NO: 1336317 - DNA, 25 bp, Homo sapien
aactctgtacaacccactgagtggg

SEQ ID NO: 1336318 - DNA, 25 bp, Homo sapien
acgtccaaagtgatacagaactctg

SEQ ID NO: 1336319 - DNA, 25 bp, Homo sapien
taagctccatgaagtgggagagagc

SEQ ID NO: 1336320 - DNA, 25 bp, Homo sapien
aaatgaaaagatggacactttcagc

SEQ ID NO: 1336321 - DNA, 25 bp, Homo sapien
ataattaagctccatgaagtgggag

SEQ ID NO: 1336322 - DNA, 25 bp, Homo sapien
ggagagagcattagtgaatagtgaa

SEQ ID NO: 1336323 - DNA, 25 bp, Homo sapien
ggcctgatcgagctgcgcaagctgt

SEQ ID NO: 1336324 - DNA, 25 bp, Homo sapien
cgcaagctgtaagctgcggaggaca

SEQ ID NO: 1336325 - DNA, 25 bp, Homo sapien
gggacggcctgatcgagctgcgcaa

SEQ ID NO: 1336326 - DNA, 25 bp, Homo sapien
tcgagctgcgcaagctgtaagctgc

SEQ ID NO: 1336327 - DNA, 25 bp, Homo sapien
ctccagtttagagggctgttccagg

SEQ ID NO: 1336328 - DNA, 25 bp, Homo sapien
gcttctgagttgtgcgccaggcatt

SEQ ID NO: 1336329 - DNA, 25 bp, Homo sapien
ctgttccaggttccctcagtggtga

SEQ ID NO: 1336330 - DNA, 25 bp, Homo sapien
cattggaaactaagccaaggacaca

SEQ ID NO: 1336331 - DNA, 25 bp, Homo sapien
ccagttgagcaaagcagtaatcaca

SEQ ID NO: 1336332 - DNA, 25 bp, Homo sapien
tccccattcccttgaaactgattca

SEQ ID NO: 1336333 - DNA, 25 bp, Homo sapien
tttcatgtcaaccttctgcaccagt

SEQ ID NO: 1336334 - DNA, 25 bp, Homo sapien
aactgattcagccaagcctttcatg

SEQ ID NO: 1336335 - DNA, 25 bp, Homo sapien
cagtgggaaactaagtatcccctga

SEQ ID NO: 1336336 - DNA, 25 bp, Homo sapien
tcagtgggaaactaagtatcccctg

SEQ ID NO: 1336337 - DNA, 25 bp, Homo sapien
ccttcctgagcttcagtgggaaact

SEQ ID NO: 1336338 - DNA, 25 bp, Homo sapien
tcctgagcttcagtgggaaactaag

SEQ ID NO: 1336339 - DNA, 25 bp, Homo sapien
cagtggtacttgcaaaggagttaca

SEQ ID NO: 1336340 - DNA, 25 bp, Homo sapien
ggcagtggtacttgcaaaggagtta

SEQ ID NO: 1336341 - DNA, 25 bp, Homo sapien
gaagcgcctggcagaccccagtgtt

SEQ ID NO: 1336342 - DNA, 25 bp, Homo sapien
tgtttacaaacttcaggagcacctg

SEQ ID NO: 1336343 - DNA, 25 bp, Homo sapien
ggaagactagtgaaaattgagcctc

SEQ ID NO: 1336344 - DNA, 25 bp, Homo sapien
ggatttcaagagctgccaagacatt

SEQ ID NO: 1336345 - DNA, 25 bp, Homo sapien
cagcaatctagatgggagtgcttct

SEQ ID NO: 1336346 - DNA, 25 bp, Homo sapien
tgcgctgggactatgtggaaagaac

SEQ ID NO: 1336347 - DNA, 25 bp, Homo sapien
tagtcagactgggagggacattcca

SEQ ID NO: 1336348 - DNA, 25 bp, Homo sapien
gaggtccatcctagtgttagaagca

SEQ ID NO: 1336349 - DNA, 25 bp, Homo sapien
tatccagagattgccaagaggtcca

SEQ ID NO: 1336350 - DNA, 25 bp, Homo sapien
ccatcagaagatgcctagtcagact

SEQ ID NO: 1336351 - DNA, 25 bp, Homo sapien
gctcctgccctgcttcggccaacat

SEQ ID NO: 1336352 - DNA, 25 bp, Homo sapien
tgctcctgccctgcttcggccaaca

SEQ ID NO: 1336353 - DNA, 25 bp, Homo sapien
cacctgctcctgccctgcttcggcc

SEQ ID NO: 1336354 - DNA, 25 bp, Homo sapien
cctgctcctgccctgcttcggccaa

SEQ ID NO: 1336355 - DNA, 25 bp, Homo sapien
tcgcattggacagggcagaatagct

SEQ ID NO: 1336356 - DNA, 25 bp, Homo sapien
caatccattcgcattggacagggca

SEQ ID NO: 1336357 - DNA, 25 bp, Homo sapien
agccaatccattcgcattggacagg

SEQ ID NO: 1336358 - DNA, 25 bp, Homo sapien
tccattcgcattggacagggcagaa

SEQ ID NO: 1336359 - DNA, 25 bp, Homo sapien
atcctctgcctgcttctgttcatat

SEQ ID NO: 1336360 - DNA, 25 bp, Homo sapien
cttcatcctctgcctgcttctgttc

SEQ ID NO: 1336361 - DNA, 25 bp, Homo sapien
catgcacaccatcagcttcatcctc

SEQ ID NO: 1336362 - DNA, 25 bp, Homo sapien
tcatcctctgcctgcttctgttcat

SEQ ID NO: 1336363 - DNA, 25 bp, Homo sapien
cagggtcctgtcacatggcagtgaa

SEQ ID NO: 1336364 - DNA, 25 bp, Homo sapien
tgtaatagattgttcttgaccagca

SEQ ID NO: 1336365 - DNA, 25 bp, Homo sapien
gcattgggctctgcttgatatccaa

SEQ ID NO: 1336366 - DNA, 25 bp, Homo sapien
tgcttgatatccaagcctcaccttt

SEQ ID NO: 1336367 - DNA, 25 bp, Homo sapien
aactgttcactacggctttgtctgg

SEQ ID NO: 1336368 - DNA, 25 bp, Homo sapien
tttgtctggcttcatacatcctctg

SEQ ID NO: 1336369 - DNA, 25 bp, Homo sapien
tctgcttgctaactgttcactacgg

SEQ ID NO: 1336370 - DNA, 25 bp, Homo sapien
cttggcctcccttgggatacctcat

SEQ ID NO: 1336371 - DNA, 25 bp, Homo sapien
caaggcttctgcgatgatacctcta

SEQ ID NO: 1336372 - DNA, 25 bp, Homo sapien
tgaaagcacttcatctatgggcact

SEQ ID NO: 1336373 - DNA, 25 bp, Homo sapien
gtcttgaaagcacttcatctatggg

SEQ ID NO: 1336374 - DNA, 25 bp, Homo sapien
tgatacctctaggtgccagacagtc

SEQ ID NO: 1336375 - DNA, 25 bp, Homo sapien
caaaggccactgatacacggactga

SEQ ID NO: 1336376 - DNA, 25 bp, Homo sapien
gacttcacggacgtcacatcaagtg

SEQ ID NO: 1336377 - DNA, 25 bp, Homo sapien
tcggctccgtgctgatagctgcaga

SEQ ID NO: 1336378 - DNA, 25 bp, Homo sapien
acatcaagtgtcacccctagcagcg

SEQ ID NO: 1336379 - DNA, 25 bp, Homo sapien
aaggacccaaggcatgtgacaagag

SEQ ID NO: 1336380 - DNA, 25 bp, Homo sapien
atgtgacaagagataagcattgcac

SEQ ID NO: 1336381 - DNA, 25 bp, Homo sapien
caagagataagcattgcactgaagg

SEQ ID NO: 1336382 - DNA, 25 bp, Homo sapien
ggacccaaggcatgtgacaagagat

SEQ ID NO: 1336383 - DNA, 25 bp, Homo sapien
ctgctccctgagggtcctctgagtc

SEQ ID NO: 1336384 - DNA, 25 bp, Homo sapien
gctccctgagggtcctctgagtcat

SEQ ID NO: 1336385 - DNA, 25 bp, Homo sapien
tgctccctgagggtcctctgagtca

SEQ ID NO: 1336386 - DNA, 25 bp, Homo sapien
gttttgtagttctgcccgtactgca

SEQ ID NO: 1336387 - DNA, 25 bp, Homo sapien
tctgcccgtactgcagcattgtggg

SEQ ID NO: 1336388 - DNA, 25 bp, Homo sapien
aactgtagttttgtagttctgcccg

SEQ ID NO: 1336389 - DNA, 25 bp, Homo sapien
tagttctgcccgtactgcagcattg

SEQ ID NO: 1336390 - DNA, 25 bp, Homo sapien
gagaatctgactaaggtagcttggg

SEQ ID NO: 1336391 - DNA, 25 bp, Homo sapien
ctaaagagaatctgactaaggtagc

SEQ ID NO: 1336392 - DNA, 25 bp, Homo sapien
gaatctgactaaggtagcttgggtc

SEQ ID NO: 1336393 - DNA, 25 bp, Homo sapien
ttctactaaagagaatctgactaag

SEQ ID NO: 1336394 - DNA, 25 bp, Homo sapien
cttcagtgggaagggcaaccacaat

SEQ ID NO: 1336395 - DNA, 25 bp, Homo sapien
cccagagctctaggcataggttgga

SEQ ID NO: 1336396 - DNA, 25 bp, Homo sapien
gaatgccatgcaaaactgcttcagt

SEQ ID NO: 1336397 - DNA, 25 bp, Homo sapien
gggacattatctatggactcaggaa

SEQ ID NO: 1336398 - DNA, 25 bp, Homo sapien
atggtttcgtgcctctcggattggg

SEQ ID NO: 1336399 - DNA, 25 bp, Homo sapien
tcgtgcctctcggattgggctcttg

SEQ ID NO: 1336400 - DNA, 25 bp, Homo sapien
ctcggattgggctcttgtgtgtctc

SEQ ID NO: 1336401 - DNA, 25 bp, Homo sapien
tgcctctcggattgggctcttgtgt

SEQ ID NO: 1336402 - DNA, 25 bp, Homo sapien
gttctcccagtcaaggcccaggcaa

SEQ ID NO: 1336403 - DNA, 25 bp, Homo sapien
cagtcaaggcccaggcaaaatctta

SEQ ID NO: 1336404 - DNA, 25 bp, Homo sapien
ccagtcaaggcccaggcaaaatctt

SEQ ID NO: 1336405 - DNA, 25 bp, Homo sapien
ctcccagtcaaggcccaggcaaaat

SEQ ID NO: 1336406 - DNA, 25 bp, Homo sapien
aatggaattttcctgaagcacaggc

SEQ ID NO: 1336407 - DNA, 25 bp, Homo sapien
gataacagtgaagtgcagagaggca

SEQ ID NO: 1336408 - DNA, 25 bp, Homo sapien
caaagggttgaatgacaggtttcct

SEQ ID NO: 1336409 - DNA, 25 bp, Homo sapien
ggaggtccccgtcacaagctattga

SEQ ID NO: 1336410 - DNA, 25 bp, Homo sapien
tccgtccatatgaaacgactttacc

SEQ ID NO: 1336411 - DNA, 25 bp, Homo sapien
aatatggtccttcttattgctgggc

SEQ ID NO: 1336412 - DNA, 25 bp, Homo sapien
cttttcccaagtagaatatggtcct

SEQ ID NO: 1336413 - DNA, 25 bp, Homo sapien
ccttcttattgctgggctgttgcaa

SEQ ID NO: 1336414 - DNA, 25 bp, Homo sapien
ctgctgagtctagtcccttccaggg

SEQ ID NO: 1336415 - DNA, 25 bp, Homo sapien
gtctagtcccttccagggcacacag

SEQ ID NO: 1336416 - DNA, 25 bp, Homo sapien
gctgagtctagtcccttccagggca

SEQ ID NO: 1336417 - DNA, 25 bp, Homo sapien
gagtctagtcccttccagggcacac

SEQ ID NO: 1336418 - DNA, 25 bp, Homo sapien
ccaagcaggtcgttttctgactttc

SEQ ID NO: 1336419 - DNA, 25 bp, Homo sapien
cctccaagcaggtcgttttctgact

SEQ ID NO: 1336420 - DNA, 25 bp, Homo sapien
ctccaagcaggtcgttttctgactt

SEQ ID NO: 1336421 - DNA, 25 bp, Homo sapien
tccaagcaggtcgttttctgacttt

SEQ ID NO: 1336422 - DNA, 25 bp, Homo sapien
taatacataaataacacaatctgac

SEQ ID NO: 1336423 - DNA, 25 bp, Homo sapien
ttaatacataaataacacaatctga

SEQ ID NO: 1336424 - DNA, 25 bp, Homo sapien
ggtctgagcagccagaataggaaga

SEQ ID NO: 1336425 - DNA, 25 bp, Homo sapien
cccacaggggtgaatttctgaagcc

SEQ ID NO: 1336426 - DNA, 25 bp, Homo sapien
gttcttgcacgagcctgaagctcca

SEQ ID NO: 1336427 - DNA, 25 bp, Homo sapien
agaggtctgagcagccagaatagga

SEQ ID NO: 1336428 - DNA, 25 bp, Homo sapien
tctgtgaggttaccagagcctgact

SEQ ID NO: 1336429 - DNA, 25 bp, Homo sapien
tagaccctgaagctcctagcacagg

SEQ ID NO: 1336430 - DNA, 25 bp, Homo sapien
gttcttagaccctgaagctcctagc

SEQ ID NO: 1336431 - DNA, 25 bp, Homo sapien
ttcctctcattggatgctctccagc

SEQ ID NO: 1336432 - DNA, 25 bp, Homo sapien
ccttcaggagcaaaactcccctcat

SEQ ID NO: 1336433 - DNA, 25 bp, Homo sapien
tcctggtgctcgaatgaccacagaa

SEQ ID NO: 1336434 - DNA, 25 bp, Homo sapien
tgcttgacttctttaggtaattgac

SEQ ID NO: 1336435 - DNA, 25 bp, Homo sapien
cacagaaggagaataacttagaaca

SEQ ID NO: 1336436 - DNA, 25 bp, Homo sapien
gagcctcgacgtgtaccctggtaca

SEQ ID NO: 1336437 - DNA, 25 bp, Homo sapien
ggtcttgtattctttaatctagctt

SEQ ID NO: 1336438 - DNA, 25 bp, Homo sapien
cttgtattctttaatctagctttat

SEQ ID NO: 1336439 - DNA, 25 bp, Homo sapien
aaggtcttgtattctttaatctagc

SEQ ID NO: 1336440 - DNA, 25 bp, Homo sapien
tcttgtattctttaatctagcttta

SEQ ID NO: 1336441 - DNA, 25 bp, Homo sapien
ctctccatcgttactttgggttagg

SEQ ID NO: 1336442 - DNA, 25 bp, Homo sapien
ttacttgtgtatagtctggattcca

SEQ ID NO: 1336443 - DNA, 25 bp, Homo sapien
tgtgtatagtctggattccagcttc

SEQ ID NO: 1336444 - DNA, 25 bp, Homo sapien
acttgtgtatagtctggattccagc

SEQ ID NO: 1336445 - DNA, 25 bp, Homo sapien
atctgacctcaccagacaggtgaca

SEQ ID NO: 1336446 - DNA, 25 bp, Homo sapien
gagcatctgacctcaccagacaggt

SEQ ID NO: 1336447 - DNA, 25 bp, Homo sapien
ttgtcctgagcatctgacctcacca

SEQ ID NO: 1336448 - DNA, 25 bp, Homo sapien
gcatctgacctcaccagacaggtga

SEQ ID NO: 1336449 - DNA, 25 bp, Homo sapien
aggttcagcattcaatgactcagca

SEQ ID NO: 1336450 - DNA, 25 bp, Homo sapien
taaaggtggccgtgagtacaggctc

SEQ ID NO: 1336451 - DNA, 25 bp, Homo sapien
cacccatcgtctgcttgagtaaagg

SEQ ID NO: 1336452 - DNA, 25 bp, Homo sapien
tctttcttaggacagtattccgggc

SEQ ID NO: 1336453 - DNA, 25 bp, Homo sapien
tcagcacctgaaatttccatgtatt

SEQ ID NO: 1336454 - DNA, 25 bp, Homo sapien
tcaatcagcacctgaaatttccatg

SEQ ID NO: 1336455 - DNA, 25 bp, Homo sapien
caatcagcacctgaaatttccatgt

SEQ ID NO: 1336456 - DNA, 25 bp, Homo sapien
aatcagcacctgaaatttccatgta

SEQ ID NO: 1336457 - DNA, 25 bp, Homo sapien
ccccccaggacgagtgatagaggag

SEQ ID NO: 1336458 - DNA, 25 bp, Homo sapien
ggaccccccaggacgagtgatagag

SEQ ID NO: 1336459 - DNA, 25 bp, Homo sapien
cccccaggacgagtgatagaggaga

SEQ ID NO: 1336460 - DNA, 25 bp, Homo sapien
accccccaggacgagtgatagagga

SEQ ID NO: 1336461 - DNA, 25 bp, Homo sapien
tacttgttagttaaatcatccaaat

SEQ ID NO: 1336462 - DNA, 25 bp, Homo sapien
tcaatacttgttagttaaatcatcc

SEQ ID NO: 1336463 - DNA, 25 bp, Homo sapien
cttgttagttaaatcatccaaatgc

SEQ ID NO: 1336464 - DNA, 25 bp, Homo sapien
aatacttgttagttaaatcatccaa

SEQ ID NO: 1336465 - DNA, 25 bp, Homo sapien
ccacagggggcttacagtcgcttaa

SEQ ID NO: 1336466 - DNA, 25 bp, Homo sapien
cgcttaagataccagtcttctccct

SEQ ID NO: 1336467 - DNA, 25 bp, Homo sapien
cagtcgcttaagataccagtcttct

SEQ ID NO: 1336468 - DNA, 25 bp, Homo sapien
ggcttacagtcgcttaagataccag

SEQ ID NO: 1336469 - DNA, 25 bp, Homo sapien
ttcctaatctcaaacaatagccctt

SEQ ID NO: 1336470 - DNA, 25 bp, Homo sapien
tagcccttcttgcactgatcagagt

SEQ ID NO: 1336471 - DNA, 25 bp, Homo sapien
caaacaatagcccttcttgcactga

SEQ ID NO: 1336472 - DNA, 25 bp, Homo sapien
taatctcaaacaatagcccttcttg

SEQ ID NO: 1336473 - DNA, 25 bp, Homo sapien
attttcagtcgctttgtcactctgc

SEQ ID NO: 1336474 - DNA, 25 bp, Homo sapien
cattttcagtcgctttgtcactctg

SEQ ID NO: 1336475 - DNA, 25 bp, Homo sapien
ttttcagtcgctttgtcactctgct

SEQ ID NO: 1336476 - DNA, 25 bp, Homo sapien
ctttcatggttcaacacggctgctg

SEQ ID NO: 1336477 - DNA, 25 bp, Homo sapien
tcctgcattaggaatccacgcttct

SEQ ID NO: 1336478 - DNA, 25 bp, Homo sapien
gacaaacccaggtaagaatctcacc

SEQ ID NO: 1336479 - DNA, 25 bp, Homo sapien
gaatctcaccttcgccacttggctg

SEQ ID NO: 1336480 - DNA, 25 bp, Homo sapien
agtcgcctacaacagtcctggtgtt

SEQ ID NO: 1336481 - DNA, 25 bp, Homo sapien
cggagagtccgcctgggtaagctcc

SEQ ID NO: 1336482 - DNA, 25 bp, Homo sapien
tgagcagacgcagcgtagccgatct

SEQ ID NO: 1336483 - DNA, 25 bp, Homo sapien
tagtaaacggtctgacacacacacc

SEQ ID NO: 1336484 - DNA, 25 bp, Homo sapien
gcctttaattcacgtctggctaccg

SEQ ID NO: 1336485 - DNA, 25 bp, Homo sapien
taattcacgtctggctaccgaaggc

SEQ ID NO: 1336486 - DNA, 25 bp, Homo sapien
ggcatttgaggagcctttaattcac

SEQ ID NO: 1336487 - DNA, 25 bp, Homo sapien
attcacgtctggctaccgaaggcat

SEQ ID NO: 1336488 - DNA, 25 bp, Homo sapien
agaacatgcggtgttagaaaacctg

SEQ ID NO: 1336489 - DNA, 25 bp, Homo sapien
ccattttacgagtgtgacatatttc

SEQ ID NO: 1336490 - DNA, 25 bp, Homo sapien
aatttgaagagattaccatctgaac

SEQ ID NO: 1336491 - DNA, 25 bp, Homo sapien
acctgctaggattttaatggagttg

SEQ ID NO: 1336492 - DNA, 25 bp, Homo sapien
gaaggtaagcaatctgagtatcccc

SEQ ID NO: 1336493 - DNA, 25 bp, Homo sapien
ccaggcaggctgctagtgcaagacc

SEQ ID NO: 1336494 - DNA, 25 bp, Homo sapien
gactccacatgtcaatctcctctgg

SEQ ID NO: 1336495 - DNA, 25 bp, Homo sapien
cactcacatcaagggtggctcttcc

SEQ ID NO: 1336496 - DNA, 25 bp, Homo sapien
ggatcaatgagaccaagcacagtgt

SEQ ID NO: 1336497 - DNA, 25 bp, Homo sapien
catcatgtggctggaccatcgagca

SEQ ID NO: 1336498 - DNA, 25 bp, Homo sapien
atgtctgtggaaatgcaggccccga

SEQ ID NO: 1336499 - DNA, 25 bp, Homo sapien
tgaaggccaacgaccctatgaagtg

SEQ ID NO: 1336500 - DNA, 25 bp, Homo sapien
tggtgcgtgtaagccctgaaactct

SEQ ID NO: 1336501 - DNA, 25 bp, Homo sapien
gtgaaaattattggtcctggactat

SEQ ID NO: 1336502 - DNA, 25 bp, Homo sapien
catttgggaacaactggtgcgtgta

SEQ ID NO: 1336503 - DNA, 25 bp, Homo sapien
gactatcaccagtccctgttctggc

SEQ ID NO: 1336504 - DNA, 25 bp, Homo sapien
ccttcccacagcactgtctccttca

SEQ ID NO: 1336505 - DNA, 25 bp, Homo sapien
cttcccacagcactgtctccttcat

SEQ ID NO: 1336506 - DNA, 25 bp, Homo sapien
tccttcccacagcactgtctccttc

SEQ ID NO: 1336507 - DNA, 25 bp, Homo sapien
ctccttcccacagcactgtctcctt

SEQ ID NO: 1336508 - DNA, 25 bp, Homo sapien
atgcttttccatagggcaccccacg

SEQ ID NO: 1336509 - DNA, 25 bp, Homo sapien
ggatagagaattaatgcctcctttc

SEQ ID NO: 1336510 - DNA, 25 bp, Homo sapien
tggttgctacctctggatctcactc

SEQ ID NO: 1336511 - DNA, 25 bp, Homo sapien
gggtgtggagaggttgaggatgatc

SEQ ID NO: 1336512 - DNA, 25 bp, Homo sapien
tcctttactggattgtaccagcaag

SEQ ID NO: 1336513 - DNA, 25 bp, Homo sapien
tctgtccaatactgggtaaaggtcc

SEQ ID NO: 1336514 - DNA, 25 bp, Homo sapien
tcaggaaactggaccaattgggcaa

SEQ ID NO: 1336515 - DNA, 25 bp, Homo sapien
gaatgcctggtatgatctctgggaa

SEQ ID NO: 1336516 - DNA, 25 bp, Homo sapien
gaattgcggagctccatggcataga

SEQ ID NO: 1336517 - DNA, 25 bp, Homo sapien
caccactggagtactgcttttgaaa

SEQ ID NO: 1336518 - DNA, 25 bp, Homo sapien
gaaggcttgtcattagggtatccag

SEQ ID NO: 1336519 - DNA, 25 bp, Homo sapien
gggcagttccgcttttagtcagcag

SEQ ID NO: 1336520 - DNA, 25 bp, Homo sapien
tctgagtcaggcaaggaaagactct

SEQ ID NO: 1336521 - DNA, 25 bp, Homo sapien
tcaattctccctttggaaagagggc

SEQ ID NO: 1336522 - DNA, 25 bp, Homo sapien
ggaactcaggtccatagcaggcacc

SEQ ID NO: 1336523 - DNA, 25 bp, Homo sapien
caaaaatccagttgggaccagtgca

SEQ ID NO: 1336524 - DNA, 25 bp, Homo sapien
tctcctcctcagctgaaatgactca

SEQ ID NO: 1336525 - DNA, 25 bp, Homo sapien
gccgtctcctcctcagctgaaatga

SEQ ID NO: 1336526 - DNA, 25 bp, Homo sapien
cttgccgtctcctcctcagctgaaa

SEQ ID NO: 1336527 - DNA, 25 bp, Homo sapien
cgtctcctcctcagctgaaatgact

SEQ ID NO: 1336528 - DNA, 25 bp, Homo sapien
gcttaaatttcagtccaggctctct

SEQ ID NO: 1336529 - DNA, 25 bp, Homo sapien
tagcttaaatttcagtccaggctct

SEQ ID NO: 1336530 - DNA, 25 bp, Homo sapien
tgtagcttaaatttcagtccaggct

SEQ ID NO: 1336531 - DNA, 25 bp, Homo sapien
tgctgtagcttaaatttcagtccag

SEQ ID NO: 1336532 - DNA, 25 bp, Homo sapien
aagatggcacataatctgctgagtg

SEQ ID NO: 1336533 - DNA, 25 bp, Homo sapien
tggttttggtacaagtgagtcctga

SEQ ID NO: 1336534 - DNA, 25 bp, Homo sapien
gtctatgatggcaccttttggtttt

SEQ ID NO: 1336535 - DNA, 25 bp, Homo sapien
ttggtacaagtgagtcctgagtgga

SEQ ID NO: 1336536 - DNA, 25 bp, Homo sapien
aagtctatgatggcaccttttggtt

SEQ ID NO: 1336537 - DNA, 25 bp, Homo sapien
ttccctgctcttccttatgttctct

SEQ ID NO: 1336538 - DNA, 25 bp, Homo sapien
cttctgtttcatggggctgtctctt

SEQ ID NO: 1336539 - DNA, 25 bp, Homo sapien
tccttatgttctcttcccacggcag

SEQ ID NO: 1336540 - DNA, 25 bp, Homo sapien
acggcaggcaccctctgcccttctg

SEQ ID NO: 1336541 - DNA, 25 bp, Homo sapien
ccagttgtagacagagtcaaccaga

SEQ ID NO: 1336542 - DNA, 25 bp, Homo sapien
ccaccaggttgggtgttctgctaga

SEQ ID NO: 1336543 - DNA, 25 bp, Homo sapien
gaatgggtggcagatttttattgtt

SEQ ID NO: 1336544 - DNA, 25 bp, Homo sapien
tcctcatggttattgggagatagaa

SEQ ID NO: 1336545 - DNA, 25 bp, Homo sapien
ccaagagatgatgatgatgttgatg

SEQ ID NO: 1336546 - DNA, 25 bp, Homo sapien
gaagtagccaagagatgatgatgat

SEQ ID NO: 1336547 - DNA, 25 bp, Homo sapien
tcagaagtagccaagagatgatgat

SEQ ID NO: 1336548 - DNA, 25 bp, Homo sapien
gccaagagatgatgatgatgttgat

SEQ ID NO: 1336549 - DNA, 25 bp, Homo sapien
gccgttccttgggtgatgggacagt

SEQ ID NO: 1336550 - DNA, 25 bp, Homo sapien
tgtgtggaaaatcttaatctgactc

SEQ ID NO: 1336551 - DNA, 25 bp, Homo sapien
gaggtatgtgagtaggccgttcctt

SEQ ID NO: 1336552 - DNA, 25 bp, Homo sapien
tgtgtcaaagggatactgttcatgt

SEQ ID NO: 1336553 - DNA, 25 bp, Homo sapien
tgtcatgatgacagtcatagccacc

SEQ ID NO: 1336554 - DNA, 25 bp, Homo sapien
gtgccctttacttatggccgttgtc

SEQ ID NO: 1336555 - DNA, 25 bp, Homo sapien
gatgacagtcatagccacctggagc

SEQ ID NO: 1336556 - DNA, 25 bp, Homo sapien
tacttatggccgttgtcatgatgac

SEQ ID NO: 1336557 - DNA, 25 bp, Homo sapien
tcacactccttagattcgcagaagg

SEQ ID NO: 1336558 - DNA, 25 bp, Homo sapien
tccttagattcgcagaaggactgtt

SEQ ID NO: 1336559 - DNA, 25 bp, Homo sapien
gtgttcacactccttagattcgcag

SEQ ID NO: 1336560 - DNA, 25 bp, Homo sapien
ttagattcgcagaaggactgttttc

SEQ ID NO: 1336561 - DNA, 25 bp, Homo sapien
ccttgagaggcatcttaattggaat

SEQ ID NO: 1336562 - DNA, 25 bp, Homo sapien
ttcgtcaggtccacatgactggcaa

SEQ ID NO: 1336563 - DNA, 25 bp, Homo sapien
ggttttcctgaattcgtcaggtcca

SEQ ID NO: 1336564 - DNA, 25 bp, Homo sapien
ttccttgagaggcatcttaattgga

SEQ ID NO: 1336565 - DNA, 25 bp, Homo sapien
tataatagacgcgtgtcgttcttat

SEQ ID NO: 1336566 - DNA, 25 bp, Homo sapien
atttgttgagatatcatccttctgg

SEQ ID NO: 1336567 - DNA, 25 bp, Homo sapien
gaattgggctctgtcatttgttgag

SEQ ID NO: 1336568 - DNA, 25 bp, Homo sapien
tattggagtcaatgaattgggctct

SEQ ID NO: 1336569 - DNA, 25 bp, Homo sapien
ctggaagtgtggatttcctgttagt

SEQ ID NO: 1336570 - DNA, 25 bp, Homo sapien
ggaagtgtggatttcctgttagtac

SEQ ID NO: 1336571 - DNA, 25 bp, Homo sapien
cctggaagtgtggatttcctgttag

SEQ ID NO: 1336572 - DNA, 25 bp, Homo sapien
tggaagtgtggatttcctgttagta

SEQ ID NO: 1336573 - DNA, 25 bp, Homo sapien
ttctgtcttcgcgttgtttcagaat

SEQ ID NO: 1336574 - DNA, 25 bp, Homo sapien
ctgcaactctgtcggcgctgctatt

SEQ ID NO: 1336575 - DNA, 25 bp, Homo sapien
gtcttcgcgttgtttcagaatactc

SEQ ID NO: 1336576 - DNA, 25 bp, Homo sapien
cttcgcgttgtttcagaatactctc

SEQ ID NO: 1336577 - DNA, 25 bp, Homo sapien
aatcagttgctcttatctggcagac

SEQ ID NO: 1336578 - DNA, 25 bp, Homo sapien
ggcagacagactcctgattatccat

SEQ ID NO: 1336579 - DNA, 25 bp, Homo sapien
tatccatcaaatcttgaatcctgtt

SEQ ID NO: 1336580 - DNA, 25 bp, Homo sapien
tcggcctcccaatcagttgctctta

SEQ ID NO: 1336581 - DNA, 25 bp, Homo sapien
ttgccattgtactgacatccttttc

SEQ ID NO: 1336582 - DNA, 25 bp, Homo sapien
tgtaacttggcaacttgtcttccag

SEQ ID NO: 1336583 - DNA, 25 bp, Homo sapien
tcttgagctgtcaggttgggttgta

SEQ ID NO: 1336584 - DNA, 25 bp, Homo sapien
gatggagctgatccttgccattgta

SEQ ID NO: 1336585 - DNA, 25 bp, Homo sapien
ctggcagtaaccctcagtaagagga

SEQ ID NO: 1336586 - DNA, 25 bp, Homo sapien
ggcagtaaccctcagtaagaggaga

SEQ ID NO: 1336587 - DNA, 25 bp, Homo sapien
gatgaaatagatgatgaggcagtca

SEQ ID NO: 1336588 - DNA, 25 bp, Homo sapien
cagtaaccctcagtaagaggagagg

SEQ ID NO: 1336589 - DNA, 25 bp, Homo sapien
cagaccactggacggagagatagcc

SEQ ID NO: 1336590 - DNA, 25 bp, Homo sapien
gaatgatcccagagcaggacttgat

SEQ ID NO: 1336591 - DNA, 25 bp, Homo sapien
caggacttgatcacctgaaggccag

SEQ ID NO: 1336592 - DNA, 25 bp, Homo sapien
tcaactagaggagcagaatgatccc

SEQ ID NO: 1336593 - DNA, 25 bp, Homo sapien
ggaccgatatgtttagctatcaact

SEQ ID NO: 1336594 - DNA, 25 bp, Homo sapien
cagggaccgatatgtttagctatca

SEQ ID NO: 1336595 - DNA, 25 bp, Homo sapien
gggaccgatatgtttagctatcaac

SEQ ID NO: 1336596 - DNA, 25 bp, Homo sapien
tcagggaccgatatgtttagctatc

SEQ ID NO: 1336597 - DNA, 25 bp, Homo sapien
tcaggtctgaagtgaggcaaacatt

SEQ ID NO: 1336598 - DNA, 25 bp, Homo sapien
attttgtaatgccacagatgtgtac

SEQ ID NO: 1336599 - DNA, 25 bp, Homo sapien
ctggtgtctgtaatgctcaggtccc

SEQ ID NO: 1336600 - DNA, 25 bp, Homo sapien
tgatattttgaaggctctcccatgc

SEQ ID NO: 1336601 - DNA, 25 bp, Homo sapien
atgccaagtgttagcctagattcca

SEQ ID NO: 1336602 - DNA, 25 bp, Homo sapien
gttagcctagattccagacacttac

SEQ ID NO: 1336603 - DNA, 25 bp, Homo sapien
tgttagcctagattccagacactta

SEQ ID NO: 1336604 - DNA, 25 bp, Homo sapien
caagtgttagcctagattccagaca

SEQ ID NO: 1336605 - DNA, 25 bp, Homo sapien
ccttcattattgactgagcaagcag

SEQ ID NO: 1336606 - DNA, 25 bp, Homo sapien
gagcaagcagagcatttctgcctct

SEQ ID NO: 1336607 - DNA, 25 bp, Homo sapien
ttccaagcgggtgattatctcagac

SEQ ID NO: 1336608 - DNA, 25 bp, Homo sapien
gctttcagtgaattcccctgagcct

SEQ ID NO: 1336609 - DNA, 25 bp, Homo sapien
cagcatggtgaaggagatacgttac

SEQ ID NO: 1336610 - DNA, 25 bp, Homo sapien
cagtgcccctcattaatatcctcag

SEQ ID NO: 1336611 - DNA, 25 bp, Homo sapien
tttaacattatggtcccagcgctga

SEQ ID NO: 1336612 - DNA, 25 bp, Homo sapien
tatcctcagtagtacccacagcatg

SEQ ID NO: 1336613 - DNA, 25 bp, Homo sapien
ctttgttagcatgccagcaatgagc

SEQ ID NO: 1336614 - DNA, 25 bp, Homo sapien
taaagtcaaggtcagagcaaagtgg

SEQ ID NO: 1336615 - DNA, 25 bp, Homo sapien
tcctcctcattggtaaaaatctctg

SEQ ID NO: 1336616 - DNA, 25 bp, Homo sapien
tgagtgttctcgtgcctttgttagc

SEQ ID NO: 1336617 - DNA, 25 bp, Homo sapien
tgtgcagtagagctagtttttccct

SEQ ID NO: 1336618 - DNA, 25 bp, Homo sapien
tgccagaaacgagacatagccctaa

SEQ ID NO: 1336619 - DNA, 25 bp, Homo sapien
cctgctctggttaaaaatcctggtg

SEQ ID NO: 1336620 - DNA, 25 bp, Homo sapien
tcctttaagttgtgagatgtagcca

SEQ ID NO: 1336621 - DNA, 25 bp, Homo sapien
tagacattccctgagtgcatacgat

SEQ ID NO: 1336622 - DNA, 25 bp, Homo sapien
tgctttaaggcgctcacagtctagt

SEQ ID NO: 1336623 - DNA, 25 bp, Homo sapien
gttgattaatgggtcctcaggcacc

SEQ ID NO: 1336624 - DNA, 25 bp, Homo sapien
tacgatatgccagatgccgagtttg

SEQ ID NO: 1336625 - DNA, 25 bp, Homo sapien
aggcatagccccgagtgaaggtggg

SEQ ID NO: 1336626 - DNA, 25 bp, Homo sapien
ggcatagccccgagtgaaggtgggt

SEQ ID NO: 1336627 - DNA, 25 bp, Homo sapien
catagccccgagtgaaggtgggtgt

SEQ ID NO: 1336628 - DNA, 25 bp, Homo sapien
ttaggcatagccccgagtgaaggtg

SEQ ID NO: 1336629 - DNA, 25 bp, Homo sapien
aggaagcccagtgcattcatagatc

SEQ ID NO: 1336630 - DNA, 25 bp, Homo sapien
ggaagcccagtgcattcatagatcc

SEQ ID NO: 1336631 - DNA, 25 bp, Homo sapien
gaagcccagtgcattcatagatcct

SEQ ID NO: 1336632 - DNA, 25 bp, Homo sapien
aagcccagtgcattcatagatccta

SEQ ID NO: 1336633 - DNA, 25 bp, Homo sapien
ttctttcaagcaaactcgtatccaa

SEQ ID NO: 1336634 - DNA, 25 bp, Homo sapien
caagctccgggtgctggccattctt

SEQ ID NO: 1336635 - DNA, 25 bp, Homo sapien
tcgtatccaaaccaaacctgacctg

SEQ ID NO: 1336636 - DNA, 25 bp, Homo sapien
cagtgctcatgttgttgattgccaa

SEQ ID NO: 1336637 - DNA, 25 bp, Homo sapien
taagtgcggtcattggcattctcat

SEQ ID NO: 1336638 - DNA, 25 bp, Homo sapien
ctaagtgcggtcattggcattctca

SEQ ID NO: 1336639 - DNA, 25 bp, Homo sapien
gagtctaggttcttaccacatctaa

SEQ ID NO: 1336640 - DNA, 25 bp, Homo sapien
catctaaatctagggtggcatcttc

SEQ ID NO: 1336641 - DNA, 25 bp, Homo sapien
acatctaacagcttcttggctagcc

SEQ ID NO: 1336642 - DNA, 25 bp, Homo sapien
ccattagataactctgcaagatact

SEQ ID NO: 1336643 - DNA, 25 bp, Homo sapien
caatacttggcacacttaggcagaa

SEQ ID NO: 1336644 - DNA, 25 bp, Homo sapien
gctggagtaatgtggatacccctga

SEQ ID NO: 1336645 - DNA, 25 bp, Homo sapien
cagtggtgcatgatatacgcctaaa

SEQ ID NO: 1336646 - DNA, 25 bp, Homo sapien
tgaagtccagcgagtatgccaggtg

SEQ ID NO: 1336647 - DNA, 25 bp, Homo sapien
ggggtagactgccccaatgatttaa

SEQ ID NO: 1336648 - DNA, 25 bp, Homo sapien
atggggtagactgccccaatgattt

SEQ ID NO: 1336649 - DNA, 25 bp, Homo sapien
gggtagactgccccaatgatttaat

SEQ ID NO: 1336650 - DNA, 25 bp, Homo sapien
ggtagactgccccaatgatttaatt

SEQ ID NO: 1336651 - DNA, 25 bp, Homo sapien
gagtgatattccaggctccagaaat

SEQ ID NO: 1336652 - DNA, 25 bp, Homo sapien
atatactttgtgctgagtgatattc

SEQ ID NO: 1336653 - DNA, 25 bp, Homo sapien
ctgagtgatattccaggctccagaa

SEQ ID NO: 1336654 - DNA, 25 bp, Homo sapien
tattgagtatatactttgtgctgag

SEQ ID NO: 1336655 - DNA, 25 bp, Homo sapien
tctattttctaaatccccttgtgat

SEQ ID NO: 1336656 - DNA, 25 bp, Homo sapien
ttcatgttcatacatctctattttc

SEQ ID NO: 1336657 - DNA, 25 bp, Homo sapien
ttggcccattggttatttaagagta

SEQ ID NO: 1336658 - DNA, 25 bp, Homo sapien
ctgctttcattgtatctcatagatt

SEQ ID NO: 1336659 - DNA, 25 bp, Homo sapien
cactctttgctgctgacatgatctc

SEQ ID NO: 1336660 - DNA, 25 bp, Homo sapien
tgctgctgacgtccaattgcactct

SEQ ID NO: 1336661 - DNA, 25 bp, Homo sapien
gatctctctactagcatgactgcag

SEQ ID NO: 1336662 - DNA, 25 bp, Homo sapien
ctgcaggaactgtatgtctagatct

SEQ ID NO: 1336663 - DNA, 25 bp, Homo sapien
ctagcaggtcgtggacgccggctcc

SEQ ID NO: 1336664 - DNA, 25 bp, Homo sapien
ggagagccggtaggagggagtgtga

SEQ ID NO: 1336665 - DNA, 25 bp, Homo sapien
cgcgggtcgggcctggtaccgagct

SEQ ID NO: 1336666 - DNA, 25 bp, Homo sapien
agtgtgaaggtgtccgcggcgtcgt

SEQ ID NO: 1336667 - DNA, 25 bp, Homo sapien
ctgcctggtgccctaacagctggga

SEQ ID NO: 1336668 - DNA, 25 bp, Homo sapien
tcgtgcccttgaccgagagaatgcc

SEQ ID NO: 1336669 - DNA, 25 bp, Homo sapien
tcaaccagaggattcgacctgcctg

SEQ ID NO: 1336670 - DNA, 25 bp, Homo sapien
gatatgaaccaagcacccatcctct

SEQ ID NO: 1336671 - DNA, 25 bp, Homo sapien
taaagggtgtatccgaatctgctac

SEQ ID NO: 1336672 - DNA, 25 bp, Homo sapien
gacttccaatgttgagctaggcact

SEQ ID NO: 1336673 - DNA, 25 bp, Homo sapien
tttaagactgtcgtagaaacaaggc

SEQ ID NO: 1336674 - DNA, 25 bp, Homo sapien
tgaatgaccgtgcaaactgttgcct

SEQ ID NO: 1336675 - DNA, 25 bp, Homo sapien
ggcctacatgatctttgttgcaagt

SEQ ID NO: 1336676 - DNA, 25 bp, Homo sapien
catacatacctatcagcagtgtgtt

SEQ ID NO: 1336677 - DNA, 25 bp, Homo sapien
gccattatagagttaaagcagccat

SEQ ID NO: 1336678 - DNA, 25 bp, Homo sapien
tgaataccttatgctgtgacaacca

SEQ ID NO: 1336679 - DNA, 25 bp, Homo sapien
tgtacgtatggcagtgatgtctatg

SEQ ID NO: 1336680 - DNA, 25 bp, Homo sapien
ttttttcgatgaataaggctgtcaa

SEQ ID NO: 1336681 - DNA, 25 bp, Homo sapien
tctatacctatttctttctagggca

SEQ ID NO: 1336682 - DNA, 25 bp, Homo sapien
aaggtcctttctattttctatggca

SEQ ID NO: 1336683 - DNA, 25 bp, Homo sapien
aaccactgtccacgtcaaaggcgct

SEQ ID NO: 1336684 - DNA, 25 bp, Homo sapien
accactgtccacgtcaaaggcgctg

SEQ ID NO: 1336685 - DNA, 25 bp, Homo sapien
gtccacgtcaaaggcgctgcacatg

SEQ ID NO: 1336686 - DNA, 25 bp, Homo sapien
actgtccacgtcaaaggcgctgcac

SEQ ID NO: 1336687 - DNA, 25 bp, Homo sapien
ggccttctatttcataatccttatc

SEQ ID NO: 1336688 - DNA, 25 bp, Homo sapien
cgtgtactatcagtgttacctggcc

SEQ ID NO: 1336689 - DNA, 25 bp, Homo sapien
ttgcattggtattggggtcaaaact

SEQ ID NO: 1336690 - DNA, 25 bp, Homo sapien
ccaggttccctgggagttcatttgt

SEQ ID NO: 1336691 - DNA, 25 bp, Homo sapien
ttttgtcccaacacatctgagcaga

SEQ ID NO: 1336692 - DNA, 25 bp, Homo sapien
gatttggatctagttttctctgagt

SEQ ID NO: 1336693 - DNA, 25 bp, Homo sapien
taattcggacgagacagtagagctg

SEQ ID NO: 1336694 - DNA, 25 bp, Homo sapien
ccagtggtttcagaacacgtgccat

SEQ ID NO: 1336695 - DNA, 25 bp, Homo sapien
aacagcgcagaggcggtgactgact

SEQ ID NO: 1336696 - DNA, 25 bp, Homo sapien
ggtgatacccattctaaacttcagg

SEQ ID NO: 1336697 - DNA, 25 bp, Homo sapien
tgaaggtaaatttttgcataaggga

SEQ ID NO: 1336698 - DNA, 25 bp, Homo sapien
tggccaactgttctccgaggcatgc

SEQ ID NO: 1336699 - DNA, 25 bp, Homo sapien
aatgaagttgcagggtgtaggacca

SEQ ID NO: 1336700 - DNA, 25 bp, Homo sapien
tgtaggaccatagaagcggaaggcg

SEQ ID NO: 1336701 - DNA, 25 bp, Homo sapien
ggtccggcaggcgagcttccagaat

SEQ ID NO: 1336702 - DNA, 25 bp, Homo sapien
ggcaggcgagcttccagaatgaagt

SEQ ID NO: 1336703 - DNA, 25 bp, Homo sapien
ggtccctgtgcagcgccgtcaaatt

SEQ ID NO: 1336704 - DNA, 25 bp, Homo sapien
cagcgccgtcaaattggtcaggatc

SEQ ID NO: 1336705 - DNA, 25 bp, Homo sapien
aatggtccggattgaatgtgtcagg

SEQ ID NO: 1336706 - DNA, 25 bp, Homo sapien
tctccagaaaatggtccggattgaa

SEQ ID NO: 1336707 - DNA, 25 bp, Homo sapien
ttgtcccaggtggtcttaaatgtcc

SEQ ID NO: 1336708 - DNA, 25 bp, Homo sapien
cccaaagtttggcagatccctagtc

SEQ ID NO: 1336709 - DNA, 25 bp, Homo sapien
cattttagcattctagaaccccagg

SEQ ID NO: 1336710 - DNA, 25 bp, Homo sapien
gaaccccaggttcatgaagcagaat

SEQ ID NO: 1336711 - DNA, 25 bp, Homo sapien
gtagggcatggactcccgggcggct

SEQ ID NO: 1336712 - DNA, 25 bp, Homo sapien
gcaggtggtacccagccaaagtggt

SEQ ID NO: 1336713 - DNA, 25 bp, Homo sapien
caaagtggtatcaactgtcacttcc

SEQ ID NO: 1336714 - DNA, 25 bp, Homo sapien
gcattggtgtagggcatggactccc

SEQ ID NO: 1336715 - DNA, 25 bp, Homo sapien
gcccctggccaatcactctgtcaat

SEQ ID NO: 1336716 - DNA, 25 bp, Homo sapien
ctgcccctggccaatcactctgtca

SEQ ID NO: 1336717 - DNA, 25 bp, Homo sapien
tgcccctggccaatcactctgtcaa

SEQ ID NO: 1336718 - DNA, 25 bp, Homo sapien
cccctggccaatcactctgtcaatc

SEQ ID NO: 1336719 - DNA, 25 bp, Homo sapien
tctgggtagagggccatataaagca

SEQ ID NO: 1336720 - DNA, 25 bp, Homo sapien
gcccatcgcagagttgtggaagttg

SEQ ID NO: 1336721 - DNA, 25 bp, Homo sapien
tgtggaagttgtctcggttccggca

SEQ ID NO: 1336722 - DNA, 25 bp, Homo sapien
cggttccggcaaagaagaggtccag

SEQ ID NO: 1336723 - DNA, 25 bp, Homo sapien
gacatttctttaaggtaagcatcaa

SEQ ID NO: 1336724 - DNA, 25 bp, Homo sapien
tgtgtttgtcaatcatatgagaaac

SEQ ID NO: 1336725 - DNA, 25 bp, Homo sapien
ctgcaggattccaatcctttctgtg

SEQ ID NO: 1336726 - DNA, 25 bp, Homo sapien
gaagagagtttggtggggtccaggc

SEQ ID NO: 1336727 - DNA, 25 bp, Homo sapien
tgaagcctccaagtatgtgacttca

SEQ ID NO: 1336728 - DNA, 25 bp, Homo sapien
cagctgctgaaaccaactatcctgg

SEQ ID NO: 1336729 - DNA, 25 bp, Homo sapien
tcaaagcgttctccgaaggtgatgg

SEQ ID NO: 1336730 - DNA, 25 bp, Homo sapien
cattgttgatcttgaaatgagggtc

SEQ ID NO: 1336731 - DNA, 25 bp, Homo sapien
ccaaagttccttagtgctgtcagag

SEQ ID NO: 1336732 - DNA, 25 bp, Homo sapien
tcctgaatgcgttcctctaagctct

SEQ ID NO: 1336733 - DNA, 25 bp, Homo sapien
gagtgaaccttctttgctccttcca

SEQ ID NO: 1336734 - DNA, 25 bp, Homo sapien
tctaagctcttctttcctaaaccaa

SEQ ID NO: 1336735 - DNA, 25 bp, Homo sapien
tgggaaaaagaaagtcaacattaca

SEQ ID NO: 1336736 - DNA, 25 bp, Homo sapien
gaaaaagaaagtcaacattacagta

SEQ ID NO: 1336737 - DNA, 25 bp, Homo sapien
aaaaagaaagtcaacattacagtat

SEQ ID NO: 1336738 - DNA, 25 bp, Homo sapien
aaaagaaagtcaacattacagtatt

SEQ ID NO: 1336739 - DNA, 25 bp, Homo sapien
gattttcgtcctaattctctgccag

SEQ ID NO: 1336740 - DNA, 25 bp, Homo sapien
taaagaggctaaggctaagaaaggc

SEQ ID NO: 1336741 - DNA, 25 bp, Homo sapien
ggagaggtcctatctaacctggaca

SEQ ID NO: 1336742 - DNA, 25 bp, Homo sapien
gacaatgcccatactcttaaagagg

SEQ ID NO: 1336743 - DNA, 25 bp, Homo sapien
taagggcttctttgattaagggcaa

SEQ ID NO: 1336744 - DNA, 25 bp, Homo sapien
cccaaagttttggtccatgtggata

SEQ ID NO: 1336745 - DNA, 25 bp, Homo sapien
cttaaagatatgttctcgcataggg

SEQ ID NO: 1336746 - DNA, 25 bp, Homo sapien
taagggcaagccagtaataagaact

SEQ ID NO: 1336747 - DNA, 25 bp, Homo sapien
aatcgtaacagttgaatatgcacat

SEQ ID NO: 1336748 - DNA, 25 bp, Homo sapien
gttaaatcgtaacagttgaatatgc

SEQ ID NO: 1336749 - DNA, 25 bp, Homo sapien
taaatcgtaacagttgaatatgcac

SEQ ID NO: 1336750 - DNA, 25 bp, Homo sapien
aatagttaaatcgtaacagttgaat

SEQ ID NO: 1336751 - DNA, 25 bp, Homo sapien
gttcagaaatggaggatgtgtgtag

SEQ ID NO: 1336752 - DNA, 25 bp, Homo sapien
tgttcagaaatggaggatgtgtgta

SEQ ID NO: 1336753 - DNA, 25 bp, Homo sapien
gtgttcagaaatggaggatgtgtgt

SEQ ID NO: 1336754 - DNA, 25 bp, Homo sapien
acagtggtggcaggataggcacaaa

SEQ ID NO: 1336755 - DNA, 25 bp, Homo sapien
tagaggtaccgctgagtgtatgtgt

SEQ ID NO: 1336756 - DNA, 25 bp, Homo sapien
caaggtcctatagaggtaccgctga

SEQ ID NO: 1336757 - DNA, 25 bp, Homo sapien
gatatccaccaaggtcctatagagg

SEQ ID NO: 1336758 - DNA, 25 bp, Homo sapien
tctggggcccatgaactccttccaa

SEQ ID NO: 1336759 - DNA, 25 bp, Homo sapien
tggggctgcgctggtttctgagaac

SEQ ID NO: 1336760 - DNA, 25 bp, Homo sapien
ggctgcgctggtttctgagaacagg

SEQ ID NO: 1336761 - DNA, 25 bp, Homo sapien
tggggcccatgaactccttccaaga

SEQ ID NO: 1336762 - DNA, 25 bp, Homo sapien
gggagccctgataggagattattgt

SEQ ID NO: 1336763 - DNA, 25 bp, Homo sapien
gattattgtatagagacggaaagaa

SEQ ID NO: 1336764 - DNA, 25 bp, Homo sapien
cttgagatagggtttgatgtctgag

SEQ ID NO: 1336765 - DNA, 25 bp, Homo sapien
gaaaaccagtattggtttcttgaga

SEQ ID NO: 1336766 - DNA, 25 bp, Homo sapien
agggtcccaggtggttcagtcagga

SEQ ID NO: 1336767 - DNA, 25 bp, Homo sapien
aagggtcccaggtggttcagtcagg

SEQ ID NO: 1336768 - DNA, 25 bp, Homo sapien
ggtcccaggtggttcagtcaggagt

SEQ ID NO: 1336769 - DNA, 25 bp, Homo sapien
gaagggtcccaggtggttcagtcag

SEQ ID NO: 1336770 - DNA, 25 bp, Homo sapien
aaaattattacttagtgagagtgca

SEQ ID NO: 1336771 - DNA, 25 bp, Homo sapien
ccacgttgccggaacgtcccttgtg

SEQ ID NO: 1336772 - DNA, 25 bp, Homo sapien
ttaccagcgttagccacacctcttc

SEQ ID NO: 1336773 - DNA, 25 bp, Homo sapien
caggttaccagcgttagccacacct

SEQ ID NO: 1336774 - DNA, 25 bp, Homo sapien
ggttaccagcgttagccacacctct

SEQ ID NO: 1336775 - DNA, 25 bp, Homo sapien
tgggcgccgtcttttgagaaagtca

SEQ ID NO: 1336776 - DNA, 25 bp, Homo sapien
aaagtcagcagcgagcagaaaggcg

SEQ ID NO: 1336777 - DNA, 25 bp, Homo sapien
gcgactgctcgaagtccacaaggaa

SEQ ID NO: 1336778 - DNA, 25 bp, Homo sapien
gagagtccgaggatggaccactgcc

SEQ ID NO: 1336779 - DNA, 25 bp, Homo sapien
tcttctgcggtccaagcaggcggcg

SEQ ID NO: 1336780 - DNA, 25 bp, Homo sapien
tcctgctcttctgcggtccaagcag

SEQ ID NO: 1336781 - DNA, 25 bp, Homo sapien
gctcttctgcggtccaagcaggcgg

SEQ ID NO: 1336782 - DNA, 25 bp, Homo sapien
cctcctgctcttctgcggtccaagc

SEQ ID NO: 1336783 - DNA, 25 bp, Homo sapien
tctcaaaaggctgcaactaatggcc

SEQ ID NO: 1336784 - DNA, 25 bp, Homo sapien
tactcaaagctcattgttggccacc

SEQ ID NO: 1336785 - DNA, 25 bp, Homo sapien
gctacttacgtactccaggaatgga

SEQ ID NO: 1336786 - DNA, 25 bp, Homo sapien
catgtctatatcctagttgcaagag

SEQ ID NO: 1336787 - DNA, 25 bp, Homo sapien
gtgtgtgagtctcacatttttccag

SEQ ID NO: 1336788 - DNA, 25 bp, Homo sapien
ccaggtgtgtgagtctcacattttt

SEQ ID NO: 1336789 - DNA, 25 bp, Homo sapien
ctggccaggtgtgtgagtctcacat

SEQ ID NO: 1336790 - DNA, 25 bp, Homo sapien
ggccaggtgtgtgagtctcacattt

SEQ ID NO: 1336791 - DNA, 25 bp, Homo sapien
gggcatcccagttccgttaatcacc

SEQ ID NO: 1336792 - DNA, 25 bp, Homo sapien
ccagggagttccttgcagagtatgg

SEQ ID NO: 1336793 - DNA, 25 bp, Homo sapien
tgtgtggctccacggacagtgacac

SEQ ID NO: 1336794 - DNA, 25 bp, Homo sapien
ccagttccgttaatcaccattggct

SEQ ID NO: 1336795 - DNA, 25 bp, Homo sapien
cagctttgtgatgagcatgtgcctc

SEQ ID NO: 1336796 - DNA, 25 bp, Homo sapien
tggacatgtgtaaaaggcccgaggg

SEQ ID NO: 1336797 - DNA, 25 bp, Homo sapien
gaccaaccagcacatgcaggtcact

SEQ ID NO: 1336798 - DNA, 25 bp, Homo sapien
ccgagctgctccaaccaaggttcat

SEQ ID NO: 1336799 - DNA, 25 bp, Homo sapien
ttgaccgcagatttccttcgccttc

SEQ ID NO: 1336800 - DNA, 25 bp, Homo sapien
tgtgcgccccgaaatgcagtgactc

SEQ ID NO: 1336801 - DNA, 25 bp, Homo sapien
tgtgccggatgaaggcaccagccct

SEQ ID NO: 1336802 - DNA, 25 bp, Homo sapien
atgttaccgcgctctcggctgggag

SEQ ID NO: 1336803 - DNA, 25 bp, Homo sapien
tatctatcacacacaatgacgcagg

SEQ ID NO: 1336804 - DNA, 25 bp, Homo sapien
gcagatgtttggcaggctaactcca

SEQ ID NO: 1336805 - DNA, 25 bp, Homo sapien
tattaccaatcctggtggcgctgac

SEQ ID NO: 1336806 - DNA, 25 bp, Homo sapien
cgcacgggagtgcaatggttaccat

SEQ ID NO: 1336807 - DNA, 25 bp, Homo sapien
ctaaatacacaaggcgaaagtcggt

SEQ ID NO: 1336808 - DNA, 25 bp, Homo sapien
cggtggagggcgtaattgatttgct

SEQ ID NO: 1336809 - DNA, 25 bp, Homo sapien
atacacaaggcgaaagtcggtggag

SEQ ID NO: 1336810 - DNA, 25 bp, Homo sapien
gtcggtggagggcgtaattgatttg

SEQ ID NO: 1336811 - DNA, 25 bp, Homo sapien
aaatgataacgctccaaaacaagtt

SEQ ID NO: 1336812 - DNA, 25 bp, Homo sapien
taaatgataacgctccaaaacaagt

SEQ ID NO: 1336813 - DNA, 25 bp, Homo sapien
aatgataacgctccaaaacaagttg

SEQ ID NO: 1336814 - DNA, 25 bp, Homo sapien
cttaggcaatctagtaatccctggt

SEQ ID NO: 1336815 - DNA, 25 bp, Homo sapien
gggggcaccctatgagcatagctta

SEQ ID NO: 1336816 - DNA, 25 bp, Homo sapien
atccctggtttctagaaggtcatca

SEQ ID NO: 1336817 - DNA, 25 bp, Homo sapien
ttagtgggggcaccctatgagcata

SEQ ID NO: 1336818 - DNA, 25 bp, Homo sapien
gattatttctagtgttatctctcca

SEQ ID NO: 1336819 - DNA, 25 bp, Homo sapien
gaatagaggatccctttttctccga

SEQ ID NO: 1336820 - DNA, 25 bp, Homo sapien
tagaagctccctgtgaataggggaa

SEQ ID NO: 1336821 - DNA, 25 bp, Homo sapien
tctctccaatctgcaggtcaccgtt

SEQ ID NO: 1336822 - DNA, 25 bp, Homo sapien
ccagagcgtcgcttcctactgggaa

SEQ ID NO: 1336823 - DNA, 25 bp, Homo sapien
cacattacaaagtgattggtggatg

SEQ ID NO: 1336824 - DNA, 25 bp, Homo sapien
aacgctccaattccgcagcttcttt

SEQ ID NO: 1336825 - DNA, 25 bp, Homo sapien
ggaataatttgttataacgctccaa

SEQ ID NO: 1336826 - DNA, 25 bp, Homo sapien
ctggagaacaggcagctcttcccat

SEQ ID NO: 1336827 - DNA, 25 bp, Homo sapien
gcatctcatgtgtgtaggtaaccat

SEQ ID NO: 1336828 - DNA, 25 bp, Homo sapien
ggtaaccatagtttacaattgtcag

SEQ ID NO: 1336829 - DNA, 25 bp, Homo sapien
aaactcatgtctcagagtcactctt

SEQ ID NO: 1336830 - DNA, 25 bp, Homo sapien
gtcactcttatcttgctcgttctac

SEQ ID NO: 1336831 - DNA, 25 bp, Homo sapien
attggattcatgaggccaagacctg

SEQ ID NO: 1336832 - DNA, 25 bp, Homo sapien
cattggattcatgaggccaagacct

SEQ ID NO: 1336833 - DNA, 25 bp, Homo sapien
ccattggattcatgaggccaagacc

SEQ ID NO: 1336834 - DNA, 25 bp, Homo sapien
gccattggattcatgaggccaagac

SEQ ID NO: 1336835 - DNA, 25 bp, Homo sapien
gcctgtgaatttgcctggaatccat

SEQ ID NO: 1336836 - DNA, 25 bp, Homo sapien
tcagcctttgtcagagctcaatctg

SEQ ID NO: 1336837 - DNA, 25 bp, Homo sapien
cctttgtcagagctcaatctgcctg

SEQ ID NO: 1336838 - DNA, 25 bp, Homo sapien
caccatctgtttgcgattgtcctac

SEQ ID NO: 1336839 - DNA, 25 bp, Homo sapien
ttggaatccgcccatggattccacc

SEQ ID NO: 1336840 - DNA, 25 bp, Homo sapien
actgccagttggaatccgcccatgg

SEQ ID NO: 1336841 - DNA, 25 bp, Homo sapien
cactgccagttggaatccgcccatg

SEQ ID NO: 1336842 - DNA, 25 bp, Homo sapien
gccagttggaatccgcccatggatt

SEQ ID NO: 1336843 - DNA, 25 bp, Homo sapien
gccttttgcacagtcccgtggccaa

SEQ ID NO: 1336844 - DNA, 25 bp, Homo sapien
gatggctccacaaataatattgatg

SEQ ID NO: 1336845 - DNA, 25 bp, Homo sapien
tctttgtggaggtttcccattccca

SEQ ID NO: 1336846 - DNA, 25 bp, Homo sapien
accacgcttgatgctgggcttcccg

SEQ ID NO: 1336847 - DNA, 25 bp, Homo sapien
gttcccagaaggcagtgatgaagct

SEQ ID NO: 1336848 - DNA, 25 bp, Homo sapien
catgccagagtcctgaaaaccatct

SEQ ID NO: 1336849 - DNA, 25 bp, Homo sapien
agagtcctgaaaaccatctttgttc

SEQ ID NO: 1336850 - DNA, 25 bp, Homo sapien
tctttgttccagttcccagaaggca

SEQ ID NO: 1336851 - DNA, 25 bp, Homo sapien
aaagacaggaagatcttgttcctgg

SEQ ID NO: 1336852 - DNA, 25 bp, Homo sapien
gggctccacttagcagatgattgcc

SEQ ID NO: 1336853 - DNA, 25 bp, Homo sapien
tagcagatgattgccaggtgcccac

SEQ ID NO: 1336854 - DNA, 25 bp, Homo sapien
ctggcttgcagtcacctccagactt

SEQ ID NO: 1336855 - DNA, 25 bp, Homo sapien
cagtcggtgaaccatctgtgggctt

SEQ ID NO: 1336856 - DNA, 25 bp, Homo sapien
caggcatagcactgggcaatttgca

SEQ ID NO: 1336857 - DNA, 25 bp, Homo sapien
tgatgctctcaggtaagtagggact

SEQ ID NO: 1336858 - DNA, 25 bp, Homo sapien
gaaaaggcattcaaccatttggccc

SEQ ID NO: 1336859 - DNA, 25 bp, Homo sapien
catagaccgttgttcaaagtacttt

SEQ ID NO: 1336860 - DNA, 25 bp, Homo sapien
tccctatgccatttcacatagaccg

SEQ ID NO: 1336861 - DNA, 25 bp, Homo sapien
aagtactttggaagcttcttgaatg

SEQ ID NO: 1336862 - DNA, 25 bp, Homo sapien
gtagtagtggcctgacctccctatg

SEQ ID NO: 1336863 - DNA, 25 bp, Homo sapien
tatcagttgaccagtccttcacagg

SEQ ID NO: 1336864 - DNA, 25 bp, Homo sapien
cataggtctactaggttccaggcac

SEQ ID NO: 1336865 - DNA, 25 bp, Homo sapien
ggcagccagaaagtccaagggttct

SEQ ID NO: 1336866 - DNA, 25 bp, Homo sapien
tggaaaatacccctggagacagtgt

SEQ ID NO: 1336867 - DNA, 25 bp, Homo sapien
aaagcatctacaatagctgcatcgg

SEQ ID NO: 1336868 - DNA, 25 bp, Homo sapien
tgcatcggcctccactctgacaatg

SEQ ID NO: 1336869 - DNA, 25 bp, Homo sapien
cactttgaactgcttatgagtgagc

SEQ ID NO: 1336870 - DNA, 25 bp, Homo sapien
gggaaacatctgttctcacaatatg

SEQ ID NO: 1336871 - DNA, 25 bp, Homo sapien
tagttgtgaatgaggcgtctggctc

SEQ ID NO: 1336872 - DNA, 25 bp, Homo sapien
cgcagtgctggctccaagagcatat

SEQ ID NO: 1336873 - DNA, 25 bp, Homo sapien
caaggcctggtcgattttctgaggg

SEQ ID NO: 1336874 - DNA, 25 bp, Homo sapien
aagagcatattttctcccgaacgga

SEQ ID NO: 1336875 - DNA, 25 bp, Homo sapien
atcacacaggtagagggcattttcc

SEQ ID NO: 1336876 - DNA, 25 bp, Homo sapien
gcctgatctttaaaggtttcagagg

SEQ ID NO: 1336877 - DNA, 25 bp, Homo sapien
tgatctttaaaggtttcagaggatc

SEQ ID NO: 1336878 - DNA, 25 bp, Homo sapien
tggcctgatctttaaaggtttcaga

SEQ ID NO: 1336879 - DNA, 25 bp, Homo sapien
atctttaaaggtttcagaggatctt

SEQ ID NO: 1336880 - DNA, 25 bp, Homo sapien
ttttgctttgagacatctcggggac

SEQ ID NO: 1336881 - DNA, 25 bp, Homo sapien
tttgagacatctcggggacttcagg

SEQ ID NO: 1336882 - DNA, 25 bp, Homo sapien
gacatctcggggacttcaggctcca

SEQ ID NO: 1336883 - DNA, 25 bp, Homo sapien
tgctttgagacatctcggggacttc

SEQ ID NO: 1336884 - DNA, 25 bp, Homo sapien
ggcaggggctttcttttcattcttc

SEQ ID NO: 1336885 - DNA, 25 bp, Homo sapien
tggaggggcaggggctttcttttca

SEQ ID NO: 1336886 - DNA, 25 bp, Homo sapien
gcaggggctttcttttcattcttcc

SEQ ID NO: 1336887 - DNA, 25 bp, Homo sapien
ttctcagccctagccacgtgtgaaa

SEQ ID NO: 1336888 - DNA, 25 bp, Homo sapien
gcatcagaagagctactgctataat

SEQ ID NO: 1336889 - DNA, 25 bp, Homo sapien
cagaagagctactgctataatgttt

SEQ ID NO: 1336890 - DNA, 25 bp, Homo sapien
cattctcagccctagccacgtgtga

SEQ ID NO: 1336891 - DNA, 25 bp, Homo sapien
ggtcagatgaacagccacgtgacat

SEQ ID NO: 1336892 - DNA, 25 bp, Homo sapien
gcagccaccttcttagagccttaaa

SEQ ID NO: 1336893 - DNA, 25 bp, Homo sapien
gagccttaaattatgtcgcagtcca

SEQ ID NO: 1336894 - DNA, 25 bp, Homo sapien
tgtaagagatccaagtgcagccacc

SEQ ID NO: 1336895 - DNA, 25 bp, Homo sapien
tcagaagaagctctggtcagcatct

SEQ ID NO: 1336896 - DNA, 25 bp, Homo sapien
tcagcatctcaacaaaattctgcca

SEQ ID NO: 1336897 - DNA, 25 bp, Homo sapien
agaagctctggtcagcatctcaaca

SEQ ID NO: 1336898 - DNA, 25 bp, Homo sapien
aaatcagaagaagctctggtcagca

SEQ ID NO: 1336899 - DNA, 25 bp, Homo sapien
aataaaaactgtctccgtgccactg

SEQ ID NO: 1336900 - DNA, 25 bp, Homo sapien
gtttctgcagttgctactgctgttg

SEQ ID NO: 1336901 - DNA, 25 bp, Homo sapien
ataaaaactgtctccgtgccactgg

SEQ ID NO: 1336902 - DNA, 25 bp, Homo sapien
gcaggctcagggtcagatataatcc

SEQ ID NO: 1336903 - DNA, 25 bp, Homo sapien
taatccatgcttcccacatatagcc

SEQ ID NO: 1336904 - DNA, 25 bp, Homo sapien
caaatcttgatggttaagcaatgtt

SEQ ID NO: 1336905 - DNA, 25 bp, Homo sapien
tgatggttaagcaatgtttccagca

SEQ ID NO: 1336906 - DNA, 25 bp, Homo sapien
ctttcaggtgggcacattggtgttc

SEQ ID NO: 1336907 - DNA, 25 bp, Homo sapien
ggagttgaggtgtgatagtggctgc

SEQ ID NO: 1336908 - DNA, 25 bp, Homo sapien
agtcccgtgttcaggagtaagggag

SEQ ID NO: 1336909 - DNA, 25 bp, Homo sapien
tcttgtttccaatgtcccttgggct

SEQ ID NO: 1336910 - DNA, 25 bp, Homo sapien
ttcttgtttccaatgtcccttgggc

SEQ ID NO: 1336911 - DNA, 25 bp, Homo sapien
gagattgtctatgttgagtctgcca

SEQ ID NO: 1336912 - DNA, 25 bp, Homo sapien
ttcaaaatctccaacagactcctgt

SEQ ID NO: 1336913 - DNA, 25 bp, Homo sapien
gccagagaacgagcgatcttctttt

SEQ ID NO: 1336914 - DNA, 25 bp, Homo sapien
tctgccattggttgtccttagtgcc

SEQ ID NO: 1336915 - DNA, 25 bp, Homo sapien
tgccttttctatagaacagatattc

SEQ ID NO: 1336916 - DNA, 25 bp, Homo sapien
catgtgccttttctatagaacagat

SEQ ID NO: 1336917 - DNA, 25 bp, Homo sapien
ttttctatagaacagatattcatgt

SEQ ID NO: 1336918 - DNA, 25 bp, Homo sapien
tttctatagaacagatattcatgta

SEQ ID NO: 1336919 - DNA, 25 bp, Homo sapien
tgtggataatctgatgctgcactgt

SEQ ID NO: 1336920 - DNA, 25 bp, Homo sapien
ctgtggataatctgatgctgcactg

SEQ ID NO: 1336921 - DNA, 25 bp, Homo sapien
gccatgactctcagtttttctcagg

SEQ ID NO: 1336922 - DNA, 25 bp, Homo sapien
ctttggctatgagtgccatgactct

SEQ ID NO: 1336923 - DNA, 25 bp, Homo sapien
tcaggagaacccctcttagaaaatc

SEQ ID NO: 1336924 - DNA, 25 bp, Homo sapien
aagaaatcctgaagagattgggtcc

SEQ ID NO: 1336925 - DNA, 25 bp, Homo sapien
gacttcatgcttcaaaaagaggcgg

SEQ ID NO: 1336926 - DNA, 25 bp, Homo sapien
taactgttggtaactgtagagggac

SEQ ID NO: 1336927 - DNA, 25 bp, Homo sapien
agaaaagcgtcttcatttgttgtcc

SEQ ID NO: 1336928 - DNA, 25 bp, Homo sapien
ggcaagaagaaaagcgtcttcattt

SEQ ID NO: 1336929 - DNA, 25 bp, Homo sapien
ttcatttgttgtcccacttgggctc

SEQ ID NO: 1336930 - DNA, 25 bp, Homo sapien
gtcccacttgggctctggccaatat

SEQ ID NO: 1336931 - DNA, 25 bp, Homo sapien
caggttggtcagagctgcctctcac

SEQ ID NO: 1336932 - DNA, 25 bp, Homo sapien
ctcaggttggtcagagctgcctctc

SEQ ID NO: 1336933 - DNA, 25 bp, Homo sapien
tcaggttggtcagagctgcctctca

SEQ ID NO: 1336934 - DNA, 25 bp, Homo sapien
cacataggataaggactggtctccg

SEQ ID NO: 1336935 - DNA, 25 bp, Homo sapien
ccaaggaccagtctctaagctttct

SEQ ID NO: 1336936 - DNA, 25 bp, Homo sapien
ggtctccggttggtacagagctgca

SEQ ID NO: 1336937 - DNA, 25 bp, Homo sapien
gaccagtctctaagctttctcctgg

SEQ ID NO: 1336938 - DNA, 25 bp, Homo sapien
ctgtttgcccctgttagtagtttct

SEQ ID NO: 1336939 - DNA, 25 bp, Homo sapien
tcatctgccttgcattatcagtcat

SEQ ID NO: 1336940 - DNA, 25 bp, Homo sapien
tgctgatcagtgaagttaatgggaa

SEQ ID NO: 1336941 - DNA, 25 bp, Homo sapien
tatcagtcattggtttctggtgcat

SEQ ID NO: 1336942 - DNA, 25 bp, Homo sapien
tgttttcaagctgtcattctccttg

SEQ ID NO: 1336943 - DNA, 25 bp, Homo sapien
tttctgttttcaagctgtcattctc

SEQ ID NO: 1336944 - DNA, 25 bp, Homo sapien
tgtttgggtttctgttttcaagctg

SEQ ID NO: 1336945 - DNA, 25 bp, Homo sapien
tctgttttcaagctgtcattctcct

SEQ ID NO: 1336946 - DNA, 25 bp, Homo sapien
cagatctcacatttgatttggatta

SEQ ID NO: 1336947 - DNA, 25 bp, Homo sapien
gatctcacatttgatttggattaca

SEQ ID NO: 1336948 - DNA, 25 bp, Homo sapien
ctcacatttgatttggattacaccc

SEQ ID NO: 1336949 - DNA, 25 bp, Homo sapien
tctcacatttgatttggattacacc

SEQ ID NO: 1336950 - DNA, 25 bp, Homo sapien
cttctccacgaggtattgaaagtgt

SEQ ID NO: 1336951 - DNA, 25 bp, Homo sapien
agtgtttacttccaatgattttcac

SEQ ID NO: 1336952 - DNA, 25 bp, Homo sapien
ctgatccacggggagtcttccaggc

SEQ ID NO: 1336953 - DNA, 25 bp, Homo sapien
accatgatctcaggcattgcatctg

SEQ ID NO: 1336954 - DNA, 25 bp, Homo sapien
attcctttcaaaatcccttcagatc

SEQ ID NO: 1336955 - DNA, 25 bp, Homo sapien
gattcctttcaaaatcccttcagat

SEQ ID NO: 1336956 - DNA, 25 bp, Homo sapien
ttcctttcaaaatcccttcagatcc

SEQ ID NO: 1336957 - DNA, 25 bp, Homo sapien
ctcagaggtgcgcggtccgtgcttc

SEQ ID NO: 1336958 - DNA, 25 bp, Homo sapien
gcagctcagaggtgcgcggtccgtg

SEQ ID NO: 1336959 - DNA, 25 bp, Homo sapien
gaggtgcgcggtccgtgcttctccc

SEQ ID NO: 1336960 - DNA, 25 bp, Homo sapien
cagaggtgcgcggtccgtgcttctc

SEQ ID NO: 1336961 - DNA, 25 bp, Homo sapien
gcgtggggaccgagcccaggaatcc

SEQ ID NO: 1336962 - DNA, 25 bp, Homo sapien
ggcgtggggaccgagcccaggaatc

SEQ ID NO: 1336963 - DNA, 25 bp, Homo sapien
cgtggggaccgagcccaggaatccg

SEQ ID NO: 1336964 - DNA, 25 bp, Homo sapien
gcctgttccgccctggtcgctaagg

SEQ ID NO: 1336965 - DNA, 25 bp, Homo sapien
cgctaaggacgctgaaggctgtttc

SEQ ID NO: 1336966 - DNA, 25 bp, Homo sapien
cgccctggtcgctaaggacgctgaa

SEQ ID NO: 1336967 - DNA, 25 bp, Homo sapien
cctggtcgctaaggacgctgaaggc

SEQ ID NO: 1336968 - DNA, 25 bp, Homo sapien
tcccgcccttcctccgaaggcttca

SEQ ID NO: 1336969 - DNA, 25 bp, Homo sapien
tgtggtcacccttgtcccgcccttc

SEQ ID NO: 1336970 - DNA, 25 bp, Homo sapien
cccgcccttcctccgaaggcttcat

SEQ ID NO: 1336971 - DNA, 25 bp, Homo sapien
ctgtgtggtcacccttgtcccgccc

SEQ ID NO: 1336972 - DNA, 25 bp, Homo sapien
tacgagtcaccagagaaagattcca

SEQ ID NO: 1336973 - DNA, 25 bp, Homo sapien
ttacgagtcaccagagaaagattcc

SEQ ID NO: 1336974 - DNA, 25 bp, Homo sapien
agaaacatctccatccgagtcagca

SEQ ID NO: 1336975 - DNA, 25 bp, Homo sapien
tccatccgagtcagcactctctcct

SEQ ID NO: 1336976 - DNA, 25 bp, Homo sapien
atgcttcgattagaagtactaccca

SEQ ID NO: 1336977 - DNA, 25 bp, Homo sapien
tgcttcgattagaagtactacccaa

SEQ ID NO: 1336978 - DNA, 25 bp, Homo sapien
gcttcgattagaagtactacccaaa

SEQ ID NO: 1336979 - DNA, 25 bp, Homo sapien
aatgtttggctaccaaagcatgttt

SEQ ID NO: 1336980 - DNA, 25 bp, Homo sapien
gcatgtttagcagctaagctcctct

SEQ ID NO: 1336981 - DNA, 25 bp, Homo sapien
accaaagcatgtttagcagctaagc

SEQ ID NO: 1336982 - DNA, 25 bp, Homo sapien
ctttagagactcatgagaatgtttg

SEQ ID NO: 1336983 - DNA, 25 bp, Homo sapien
ccactggttctatttacgttgagag

SEQ ID NO: 1336984 - DNA, 25 bp, Homo sapien
ctggttctatttacgttgagagatg

SEQ ID NO: 1336985 - DNA, 25 bp, Homo sapien
ggttctatttacgttgagagatgca

SEQ ID NO: 1336986 - DNA, 25 bp, Homo sapien
ttctatttacgttgagagatgcatt

SEQ ID NO: 1336987 - DNA, 25 bp, Homo sapien
gtttccatacactgccaacctgttg

SEQ ID NO: 1336988 - DNA, 25 bp, Homo sapien
gaataaacaagaaactggtcacgaa

SEQ ID NO: 1336989 - DNA, 25 bp, Homo sapien
cctttctatggattgaataaacaag

SEQ ID NO: 1336990 - DNA, 25 bp, Homo sapien
cagtcactagcataattaacctttc

SEQ ID NO: 1336991 - DNA, 25 bp, Homo sapien
gaaatcctaggagatcagcagcttg

SEQ ID NO: 1336992 - DNA, 25 bp, Homo sapien
agggctcataaacactcttgcaagg

SEQ ID NO: 1336993 - DNA, 25 bp, Homo sapien
tcttgcaaggtagatgagctctcca

SEQ ID NO: 1336994 - DNA, 25 bp, Homo sapien
gcttggaagaccataacagccatgg

SEQ ID NO: 1336995 - DNA, 25 bp, Homo sapien
ttccttccttttattgtctgcgtgg

SEQ ID NO: 1336996 - DNA, 25 bp, Homo sapien
tccttccttttattgtctgcgtgga

SEQ ID NO: 1336997 - DNA, 25 bp, Homo sapien
tccttttattgtctgcgtggatcat

SEQ ID NO: 1336998 - DNA, 25 bp, Homo sapien
cttccttttattgtctgcgtggatc

SEQ ID NO: 1336999 - DNA, 25 bp, Homo sapien
gactgcacggatttgagctcctgaa

SEQ ID NO: 1337000 - DNA, 25 bp, Homo sapien
aattcttaggaagccagaaatcagc

SEQ ID NO: 1337001 - DNA, 25 bp, Homo sapien
gctggttcttgctgttttgactgca

SEQ ID NO: 1337002 - DNA, 25 bp, Homo sapien
gctgcattgcacatagaagggtaga

SEQ ID NO: 1337003 - DNA, 25 bp, Homo sapien
tacttccgtcgaaagaaattgccca

SEQ ID NO: 1337004 - DNA, 25 bp, Homo sapien
cagtatagggttgggaaatgcctcc

SEQ ID NO: 1337005 - DNA, 25 bp, Homo sapien
cattcagaacggagaagggctgtct

SEQ ID NO: 1337006 - DNA, 25 bp, Homo sapien
tgaatactcagcaagccgttaagtg

SEQ ID NO: 1337007 - DNA, 25 bp, Homo sapien
gaaagtctgagaaggctggtgagcc

SEQ ID NO: 1337008 - DNA, 25 bp, Homo sapien
ttagaaagtctgagaaggctggtga

SEQ ID NO: 1337009 - DNA, 25 bp, Homo sapien
aggtgccttccttagaaagtctgag

SEQ ID NO: 1337010 - DNA, 25 bp, Homo sapien
tcaggtgccttccttagaaagtctg

SEQ ID NO: 1337011 - DNA, 25 bp, Homo sapien
attcctggctgatctgtcttcttta

SEQ ID NO: 1337012 - DNA, 25 bp, Homo sapien
ttcctggctgatctgtcttctttac

SEQ ID NO: 1337013 - DNA, 25 bp, Homo sapien
cattcctggctgatctgtcttcttt

SEQ ID NO: 1337014 - DNA, 25 bp, Homo sapien
cttttaagatgtaggtcagcaacca

SEQ ID NO: 1337015 - DNA, 25 bp, Homo sapien
tcttggctgcattaagtgttccttc

SEQ ID NO: 1337016 - DNA, 25 bp, Homo sapien
ggctgcattaagtgttccttctcca

SEQ ID NO: 1337017 - DNA, 25 bp, Homo sapien
ttttaagatgtaggtcagcaaccat

SEQ ID NO: 1337018 - DNA, 25 bp, Homo sapien
gccaattccagcattcctggagtca

SEQ ID NO: 1337019 - DNA, 25 bp, Homo sapien
ccaattccagcattcctggagtcag

SEQ ID NO: 1337020 - DNA, 25 bp, Homo sapien
ttgtatttgccaattccagcattcc

SEQ ID NO: 1337021 - DNA, 25 bp, Homo sapien
tttgccaattccagcattcctggag

SEQ ID NO: 1337022 - DNA, 25 bp, Homo sapien
tattcaccttcgtgtggctcacaga

SEQ ID NO: 1337023 - DNA, 25 bp, Homo sapien
gcctgagcctaagcagatcaccgta

SEQ ID NO: 1337024 - DNA, 25 bp, Homo sapien
gcttcacaggtcctcgatgggagta

SEQ ID NO: 1337025 - DNA, 25 bp, Homo sapien
tgtaatggctattgcagcctgagcc

SEQ ID NO: 1337026 - DNA, 25 bp, Homo sapien
tacctcgtgtattgaatcacatctg

SEQ ID NO: 1337027 - DNA, 25 bp, Homo sapien
ttaaacagattctggcaatttcctg

SEQ ID NO: 1337028 - DNA, 25 bp, Homo sapien
taaacagattctggcaatttcctga

SEQ ID NO: 1337029 - DNA, 25 bp, Homo sapien
cctgaatactgtacctcgtgtattg

SEQ ID NO: 1337030 - DNA, 25 bp, Homo sapien
aatgaaatatagcaggagctgggag

SEQ ID NO: 1337031 - DNA, 25 bp, Homo sapien
cagcttcggtccaaaaatagtgaga

SEQ ID NO: 1337032 - DNA, 25 bp, Homo sapien
ctggaaccagcagcttcggtccaaa

SEQ ID NO: 1337033 - DNA, 25 bp, Homo sapien
aaaatagtgagaatgaaatatagca

SEQ ID NO: 1337034 - DNA, 25 bp, Homo sapien
ctgactgcctcctcactggcccctt

SEQ ID NO: 1337035 - DNA, 25 bp, Homo sapien
gcctcctcactggccccttggctac

SEQ ID NO: 1337036 - DNA, 25 bp, Homo sapien
actgcctcctcactggccccttggc

SEQ ID NO: 1337037 - DNA, 25 bp, Homo sapien
tgcctcctcactggccccttggcta

SEQ ID NO: 1337038 - DNA, 25 bp, Homo sapien
acaggtggcacagagacggcgtaca

SEQ ID NO: 1337039 - DNA, 25 bp, Homo sapien
cagcaaaccctctgggccaatccat

SEQ ID NO: 1337040 - DNA, 25 bp, Homo sapien
cagcttctcgggtttgccagtgcca

SEQ ID NO: 1337041 - DNA, 25 bp, Homo sapien
gatgggctcaatctgaccaggcaca

SEQ ID NO: 1337042 - DNA, 25 bp, Homo sapien
gccataaaaacatctgtcgtcaagg

SEQ ID NO: 1337043 - DNA, 25 bp, Homo sapien
aaaaacatctgtcgtcaaggtcacc

SEQ ID NO: 1337044 - DNA, 25 bp, Homo sapien
cataaaaacatctgtcgtcaaggtc

SEQ ID NO: 1337045 - DNA, 25 bp, Homo sapien
taaaaacatctgtcgtcaaggtcac

SEQ ID NO: 1337046 - DNA, 25 bp, Homo sapien
aagttacaggtttggtgagtaggat

SEQ ID NO: 1337047 - DNA, 25 bp, Homo sapien
gttacaggtttggtgagtaggataa

SEQ ID NO: 1337048 - DNA, 25 bp, Homo sapien
ctctgttaaagttacaggtttggtg

SEQ ID NO: 1337049 - DNA, 25 bp, Homo sapien
ctgttaaagttacaggtttggtgag

SEQ ID NO: 1337050 - DNA, 25 bp, Homo sapien
cagggacttactgattatcattgaa

SEQ ID NO: 1337051 - DNA, 25 bp, Homo sapien
gcaccatgggctttcagggacttac

SEQ ID NO: 1337052 - DNA, 25 bp, Homo sapien
gattatcattgaatggtgagatgag

SEQ ID NO: 1337053 - DNA, 25 bp, Homo sapien
ttatcggacaaatattgctggcacc

SEQ ID NO: 1337054 - DNA, 25 bp, Homo sapien
tcaccaaacaccatgcagaacatta

SEQ ID NO: 1337055 - DNA, 25 bp, Homo sapien
aacaccatgcagaacattaaagtgg

SEQ ID NO: 1337056 - DNA, 25 bp, Homo sapien
ccatgcagaacattaaagtggagct

SEQ ID NO: 1337057 - DNA, 25 bp, Homo sapien
ccaaacaccatgcagaacattaaag

SEQ ID NO: 1337058 - DNA, 25 bp, Homo sapien
ttttgtcaattggcttctcagtggc

SEQ ID NO: 1337059 - DNA, 25 bp, Homo sapien
ccctccagctgactggcaaggttag

SEQ ID NO: 1337060 - DNA, 25 bp, Homo sapien
accctgatgcccagaactacgccct

SEQ ID NO: 1337061 - DNA, 25 bp, Homo sapien
ctggcaaggttaggctttagctttt

SEQ ID NO: 1337062 - DNA, 25 bp, Homo sapien
ccagctgactggcaaggttaggctt

SEQ ID NO: 1337063 - DNA, 25 bp, Homo sapien
tcattgtcctccattactgaatctg

SEQ ID NO: 1337064 - DNA, 25 bp, Homo sapien
cagaacatccccagttcattgtcct

SEQ ID NO: 1337065 - DNA, 25 bp, Homo sapien
tctgtagactctgcctctcatatca

SEQ ID NO: 1337066 - DNA, 25 bp, Homo sapien
tagactctgcctctcatatcacaga

SEQ ID NO: 1337067 - DNA, 25 bp, Homo sapien
tcgtcctgcccttcctcaagctcgt

SEQ ID NO: 1337068 - DNA, 25 bp, Homo sapien
ttcgtcctgcccttcctcaagctcg

SEQ ID NO: 1337069 - DNA, 25 bp, Homo sapien
cgtcctgcccttcctcaagctcgtg

SEQ ID NO: 1337070 - DNA, 25 bp, Homo sapien
cttcgtcctgcccttcctcaagctc

SEQ ID NO: 1337071 - DNA, 25 bp, Homo sapien
cagctggttgggctgggatcttgtc

SEQ ID NO: 1337072 - DNA, 25 bp, Homo sapien
cttgtccaaatgcatgaaggtgact

SEQ ID NO: 1337073 - DNA, 25 bp, Homo sapien
gatcttgtccaaatgcatgaaggtg

SEQ ID NO: 1337074 - DNA, 25 bp, Homo sapien
gaaggactgacagcaaaactgcctt

SEQ ID NO: 1337075 - DNA, 25 bp, Homo sapien
agcataacaaggttctcgatgctcc

SEQ ID NO: 1337076 - DNA, 25 bp, Homo sapien
gaatcagttttgttccagagcataa

SEQ ID NO: 1337077 - DNA, 25 bp, Homo sapien
ctagaatcagttttgttccagagca

SEQ ID NO: 1337078 - DNA, 25 bp, Homo sapien
ataacaaggttctcgatgctcccat

SEQ ID NO: 1337079 - DNA, 25 bp, Homo sapien
tcactagggaatgagatgcaagtct

SEQ ID NO: 1337080 - DNA, 25 bp, Homo sapien
tgaaggtgctcccattctttagcat

SEQ ID NO: 1337081 - DNA, 25 bp, Homo sapien
gacagtgggcaaataaagaatcttc

SEQ ID NO: 1337082 - DNA, 25 bp, Homo sapien
gcattaacagttgtctcactaggga

SEQ ID NO: 1337083 - DNA, 25 bp, Homo sapien
gatttctcaagttgcttaattatgg

SEQ ID NO: 1337084 - DNA, 25 bp, Homo sapien
cacaggatttctcaagttgcttaat

SEQ ID NO: 1337085 - DNA, 25 bp, Homo sapien
tatgtaagcgttttccaaatttatc

SEQ ID NO: 1337086 - DNA, 25 bp, Homo sapien
aaatttatcgacctcacaggatttc

SEQ ID NO: 1337087 - DNA, 25 bp, Homo sapien
tcccatgtaatacgggctgctttct

SEQ ID NO: 1337088 - DNA, 25 bp, Homo sapien
caccatcccatgtaatacgggctgc

SEQ ID NO: 1337089 - DNA, 25 bp, Homo sapien
ccatcccatgtaatacgggctgctt

SEQ ID NO: 1337090 - DNA, 25 bp, Homo sapien
caacaccatcccatgtaatacgggc

SEQ ID NO: 1337091 - DNA, 25 bp, Homo sapien
ggctgtctgaattggcaaccatgct

SEQ ID NO: 1337092 - DNA, 25 bp, Homo sapien
ggcttgtcacatgttgaaaactccc

SEQ ID NO: 1337093 - DNA, 25 bp, Homo sapien
tgcatctggttccttagcagattcg

SEQ ID NO: 1337094 - DNA, 25 bp, Homo sapien
tagcagattcgacaggcctctgtgc

SEQ ID NO: 1337095 - DNA, 25 bp, Homo sapien
atttgttctaattccctgagctgca

SEQ ID NO: 1337096 - DNA, 25 bp, Homo sapien
aatgcatctacggccgcagcatttg

SEQ ID NO: 1337097 - DNA, 25 bp, Homo sapien
ttctaattccctgagctgcagtgag

SEQ ID NO: 1337098 - DNA, 25 bp, Homo sapien
atctacggccgcagcatttgttcta

SEQ ID NO: 1337099 - DNA, 25 bp, Homo sapien
gatgacagcagctgctgaaagcctg

SEQ ID NO: 1337100 - DNA, 25 bp, Homo sapien
cagatgacagcagctgctgaaagcc

SEQ ID NO: 1337101 - DNA, 25 bp, Homo sapien
tcagatgacagcagctgctgaaagc

SEQ ID NO: 1337102 - DNA, 25 bp, Homo sapien
tgacagcagctgctgaaagcctgct

SEQ ID NO: 1337103 - DNA, 25 bp, Homo sapien
gccttgcccctcactaggctttctg

SEQ ID NO: 1337104 - DNA, 25 bp, Homo sapien
ggttgacaactcactagccttgccc

SEQ ID NO: 1337105 - DNA, 25 bp, Homo sapien
taagaggttgacaactcactagcct

SEQ ID NO: 1337106 - DNA, 25 bp, Homo sapien
gagagggtaagaggttgacaactca

SEQ ID NO: 1337107 - DNA, 25 bp, Homo sapien
tatagcgaatataatatgtgggttc

SEQ ID NO: 1337108 - DNA, 25 bp, Homo sapien
tactttagtgttgctatatagcgaa

SEQ ID NO: 1337109 - DNA, 25 bp, Homo sapien
tgctatatagcgaatataatatgtg

SEQ ID NO: 1337110 - DNA, 25 bp, Homo sapien
tacctgtccctcatactttagtgtt

SEQ ID NO: 1337111 - DNA, 25 bp, Homo sapien
gatgtcttcccagtcagatctattt

SEQ ID NO: 1337112 - DNA, 25 bp, Homo sapien
tgtcttcccagtcagatctatttct

SEQ ID NO: 1337113 - DNA, 25 bp, Homo sapien
tgatgtcttcccagtcagatctatt

SEQ ID NO: 1337114 - DNA, 25 bp, Homo sapien
gtcttcccagtcagatctatttctc

SEQ ID NO: 1337115 - DNA, 25 bp, Homo sapien
catagtatctgacactttgctcaac

SEQ ID NO: 1337116 - DNA, 25 bp, Homo sapien
tcccttgctggcttgggtatcgcat

SEQ ID NO: 1337117 - DNA, 25 bp, Homo sapien
gacactttgctcaacctggctttca

SEQ ID NO: 1337118 - DNA, 25 bp, Homo sapien
ttgctggcttgggtatcgcatcact

SEQ ID NO: 1337119 - DNA, 25 bp, Homo sapien
ttcatcttccttaataggttttctc

SEQ ID NO: 1337120 - DNA, 25 bp, Homo sapien
tcctcacagaagataggtgggtaac

SEQ ID NO: 1337121 - DNA, 25 bp, Homo sapien
tttatgtctaagcttcacctgtgtg

SEQ ID NO: 1337122 - DNA, 25 bp, Homo sapien
catgaacacagcgattgatagttga

SEQ ID NO: 1337123 - DNA, 25 bp, Homo sapien
cacctgtgtgagaaatactgtagca

SEQ ID NO: 1337124 - DNA, 25 bp, Homo sapien
tttcatttctttatcagtcagcaat

SEQ ID NO: 1337125 - DNA, 25 bp, Homo sapien
gttttcatttctttatcagtcagca

SEQ ID NO: 1337126 - DNA, 25 bp, Homo sapien
tcatttctttatcagtcagcaatgg

SEQ ID NO: 1337127 - DNA, 25 bp, Homo sapien
cagttttcatttctttatcagtcag

SEQ ID NO: 1337128 - DNA, 25 bp, Homo sapien
tccctgggcaatcgcagatggataa

SEQ ID NO: 1337129 - DNA, 25 bp, Homo sapien
tagtgtgccatttagatcatccctg

SEQ ID NO: 1337130 - DNA, 25 bp, Homo sapien
tcagacagcaggtagaaaaaccact

SEQ ID NO: 1337131 - DNA, 25 bp, Homo sapien
tggatgatatatctcctgccaagag

SEQ ID NO: 1337132 - DNA, 25 bp, Homo sapien
agggatcttttacaacttgtggctc

SEQ ID NO: 1337133 - DNA, 25 bp, Homo sapien
gggatcttttacaacttgtggctct

SEQ ID NO: 1337134 - DNA, 25 bp, Homo sapien
aagggatcttttacaacttgtggct

SEQ ID NO: 1337135 - DNA, 25 bp, Homo sapien
tggaacactggccacgtcttcatgg

SEQ ID NO: 1337136 - DNA, 25 bp, Homo sapien
gatgatacaagctgaggacctgaag

SEQ ID NO: 1337137 - DNA, 25 bp, Homo sapien
gaaagggcttccagtagtggaacac

SEQ ID NO: 1337138 - DNA, 25 bp, Homo sapien
ggagggattttcagtcatccagggc

SEQ ID NO: 1337139 - DNA, 25 bp, Homo sapien
aaggcagtcacacgcgaggtcactt

SEQ ID NO: 1337140 - DNA, 25 bp, Homo sapien
ttctttcggagagcacttgattgtc

SEQ ID NO: 1337141 - DNA, 25 bp, Homo sapien
cttgattgtctatgtgtgccaagca

SEQ ID NO: 1337142 - DNA, 25 bp, Homo sapien
ccaagcacagtgcttcttattgcag

SEQ ID NO: 1337143 - DNA, 25 bp, Homo sapien
ctaattgtgaacatgaagcttgcct

SEQ ID NO: 1337144 - DNA, 25 bp, Homo sapien
gtggctctagccttaatgcttctaa

SEQ ID NO: 1337145 - DNA, 25 bp, Homo sapien
gctctagccttaatgcttctaattg

SEQ ID NO: 1337146 - DNA, 25 bp, Homo sapien
taattgtgaacatgaagcttgcctc

SEQ ID NO: 1337147 - DNA, 25 bp, Homo sapien
aataatatttgtatgcaggcatacg

SEQ ID NO: 1337148 - DNA, 25 bp, Homo sapien
tacacttatagttcactgccaactg

SEQ ID NO: 1337149 - DNA, 25 bp, Homo sapien
ggcatacggtaataagacctagtta

SEQ ID NO: 1337150 - DNA, 25 bp, Homo sapien
tgaaaaagaccatatgctgttatat

SEQ ID NO: 1337151 - DNA, 25 bp, Homo sapien
gatggttggtgggtaattcagcttt

SEQ ID NO: 1337152 - DNA, 25 bp, Homo sapien
ggtgggtaattcagcttttagcgcc

SEQ ID NO: 1337153 - DNA, 25 bp, Homo sapien
attcagcttttagcgccaaaacagg

SEQ ID NO: 1337154 - DNA, 25 bp, Homo sapien
ttagcgccaaaacaggaatgatcat

SEQ ID NO: 1337155 - DNA, 25 bp, Homo sapien
cattttttagtaagtagtgagaagc

SEQ ID NO: 1337156 - DNA, 25 bp, Homo sapien
ttctaacacaaatgcattaaaccgc

SEQ ID NO: 1337157 - DNA, 25 bp, Homo sapien
gaagcctattatcttattctcttca

SEQ ID NO: 1337158 - DNA, 25 bp, Homo sapien
ttcatttaaaacacgcatcttgtcc

SEQ ID NO: 1337159 - DNA, 25 bp, Homo sapien
tagctgcttcggcaaaagcctgact

SEQ ID NO: 1337160 - DNA, 25 bp, Homo sapien
tagtccaaggctagtgcaggtgctc

SEQ ID NO: 1337161 - DNA, 25 bp, Homo sapien
taagacatctggaggtagtccaagg

SEQ ID NO: 1337162 - DNA, 25 bp, Homo sapien
catcaattagagtggctttagctgc

SEQ ID NO: 1337163 - DNA, 25 bp, Homo sapien
aagagatgatctctctgcagttttc

SEQ ID NO: 1337164 - DNA, 25 bp, Homo sapien
gtaattggcttgaggcagaagagat

SEQ ID NO: 1337165 - DNA, 25 bp, Homo sapien
gaagagatgatctctctgcagtttt

SEQ ID NO: 1337166 - DNA, 25 bp, Homo sapien
ggcttgaggcagaagagatgatctc

SEQ ID NO: 1337167 - DNA, 25 bp, Homo sapien
tgaagagaaagcagacgcgtgcatg

SEQ ID NO: 1337168 - DNA, 25 bp, Homo sapien
gacctatcgctctccatctgtgttt

SEQ ID NO: 1337169 - DNA, 25 bp, Homo sapien
tctggtgaagcactatgcaaaaggg

SEQ ID NO: 1337170 - DNA, 25 bp, Homo sapien
gaagcactatgcaaaaggggataga

SEQ ID NO: 1337171 - DNA, 25 bp, Homo sapien
cttctggtgaagcactatgcaaaag

SEQ ID NO: 1337172 - DNA, 25 bp, Homo sapien
agcactatgcaaaaggggatagaaa

SEQ ID NO: 1337173 - DNA, 25 bp, Homo sapien
tagtgttggtgcaatgcatactgaa

SEQ ID NO: 1337174 - DNA, 25 bp, Homo sapien
cagtaattagtgttggtgcaatgca

SEQ ID NO: 1337175 - DNA, 25 bp, Homo sapien
ggtgcaatgcatactgaatagtcca

SEQ ID NO: 1337176 - DNA, 25 bp, Homo sapien
ttattagtgcagtaattagtgttgg

SEQ ID NO: 1337177 - DNA, 25 bp, Homo sapien
caccattgcatcttggatatgtttc

SEQ ID NO: 1337178 - DNA, 25 bp, Homo sapien
tgtggccaaacgtaaaaaagcacca

SEQ ID NO: 1337179 - DNA, 25 bp, Homo sapien
cagcattaggtctgctgtggccaaa

SEQ ID NO: 1337180 - DNA, 25 bp, Homo sapien
caagcccgacttcttggaagaccag

SEQ ID NO: 1337181 - DNA, 25 bp, Homo sapien
agacttttgaaaagccatagaaggc

SEQ ID NO: 1337182 - DNA, 25 bp, Homo sapien
cagaaggctggaagcgttcctttaa

SEQ ID NO: 1337183 - DNA, 25 bp, Homo sapien
gctgaagggttggaaagacttttga

SEQ ID NO: 1337184 - DNA, 25 bp, Homo sapien
tacaagtaactgtcctggagcaatc

SEQ ID NO: 1337185 - DNA, 25 bp, Homo sapien
tccttttggcaatactgagtctttt

SEQ ID NO: 1337186 - DNA, 25 bp, Homo sapien
ctgtggatacttccatctcttcaag

SEQ ID NO: 1337187 - DNA, 25 bp, Homo sapien
cctgatatctggatgaaggggacac

SEQ ID NO: 1337188 - DNA, 25 bp, Homo sapien
cacaggcccatgatgtttcctgata

SEQ ID NO: 1337189 - DNA, 25 bp, Homo sapien
gcccagcaactgcctccgtttccat

SEQ ID NO: 1337190 - DNA, 25 bp, Homo sapien
tcattcttagaagggtttgttccca

SEQ ID NO: 1337191 - DNA, 25 bp, Homo sapien
aattgggtggcaggtgtttcattct

SEQ ID NO: 1337192 - DNA, 25 bp, Homo sapien
acttttatgtgaagaattgggtggc

SEQ ID NO: 1337193 - DNA, 25 bp, Homo sapien
caaattgcccactgtatatctgcca

SEQ ID NO: 1337194 - DNA, 25 bp, Homo sapien
ttgcaggctcccaacatccctgtga

SEQ ID NO: 1337195 - DNA, 25 bp, Homo sapien
cagaagccaactgtgacaaagatgt

SEQ ID NO: 1337196 - DNA, 25 bp, Homo sapien
aattgctcctccagaagccaactgt

SEQ ID NO: 1337197 - DNA, 25 bp, Homo sapien
aacatccctgtgatcaattgctcct

SEQ ID NO: 1337198 - DNA, 25 bp, Homo sapien
ctatggttcctgttccttataatgg

SEQ ID NO: 1337199 - DNA, 25 bp, Homo sapien
cactaaggtgtgatgagactcggcg

SEQ ID NO: 1337200 - DNA, 25 bp, Homo sapien
tacatccgctaacatatgggtccat

SEQ ID NO: 1337201 - DNA, 25 bp, Homo sapien
gcacggaagcccatgtgagcagaag

SEQ ID NO: 1337202 - DNA, 25 bp, Homo sapien
gcgcggcatatccaccaggtgatgg

SEQ ID NO: 1337203 - DNA, 25 bp, Homo sapien
ctggcagggttggtatctggtgaga

SEQ ID NO: 1337204 - DNA, 25 bp, Homo sapien
tcactgtccttatgtggcctttgcg

SEQ ID NO: 1337205 - DNA, 25 bp, Homo sapien
ggttggtatctggtgagacctttct

SEQ ID NO: 1337206 - DNA, 25 bp, Homo sapien
tgccttctcactgtccttatgtggc

SEQ ID NO: 1337207 - DNA, 25 bp, Homo sapien
tcctgggcagttcacattgactggt

SEQ ID NO: 1337208 - DNA, 25 bp, Homo sapien
cctgggcagttcacattgactggtc

SEQ ID NO: 1337209 - DNA, 25 bp, Homo sapien
ttcctgggcagttcacattgactgg

SEQ ID NO: 1337210 - DNA, 25 bp, Homo sapien
ggagagatgtcaatgagagaaaacg

SEQ ID NO: 1337211 - DNA, 25 bp, Homo sapien
gggcctctttgttggagtcactgga

SEQ ID NO: 1337212 - DNA, 25 bp, Homo sapien
gcaacaatcggccaaacttcccttg

SEQ ID NO: 1337213 - DNA, 25 bp, Homo sapien
tgttggagtcactggaaatgtcact

SEQ ID NO: 1337214 - DNA, 25 bp, Homo sapien
tgggtggataagcagacccatccac

SEQ ID NO: 1337215 - DNA, 25 bp, Homo sapien
acagtctaacagttagaagatacag

SEQ ID NO: 1337216 - DNA, 25 bp, Homo sapien
gattcttagtcccaactctgacact

SEQ ID NO: 1337217 - DNA, 25 bp, Homo sapien
cactatttcatgtgtcctgaaatcc

SEQ ID NO: 1337218 - DNA, 25 bp, Homo sapien
tgcaagctccacctccagagtagct

SEQ ID NO: 1337219 - DNA, 25 bp, Homo sapien
catgcctggcttttttgtttgtttg

SEQ ID NO: 1337220 - DNA, 25 bp, Homo sapien
gcaagctccacctccagagtagctg

SEQ ID NO: 1337221 - DNA, 25 bp, Homo sapien
atgcctggcttttttgtttgtttgt

SEQ ID NO: 1337222 - DNA, 25 bp, Homo sapien
catgaagagctgatcataagcaaac

SEQ ID NO: 1337223 - DNA, 25 bp, Homo sapien
acatgaagagctgatcataagcaaa

SEQ ID NO: 1337224 - DNA, 25 bp, Homo sapien
taattgttgtcatactgcatctgca

SEQ ID NO: 1337225 - DNA, 25 bp, Homo sapien
gaatgatagttgctcttaaaacaag

SEQ ID NO: 1337226 - DNA, 25 bp, Homo sapien
taaggcacaatcaatataaagaatg

SEQ ID NO: 1337227 - DNA, 25 bp, Homo sapien
tacaaaggttctaataacatgagca

SEQ ID NO: 1337228 - DNA, 25 bp, Homo sapien
catctgttggatttggaagaggttc

SEQ ID NO: 1337229 - DNA, 25 bp, Homo sapien
atttgcctctcaggcatctgttgga

SEQ ID NO: 1337230 - DNA, 25 bp, Homo sapien
gttcccagattgagttgagaaatgg

SEQ ID NO: 1337231 - DNA, 25 bp, Homo sapien
gaagaggttcccagattgagttgag

SEQ ID NO: 1337232 - DNA, 25 bp, Homo sapien
tcatgagcaggccaggtaaagcccc

SEQ ID NO: 1337233 - DNA, 25 bp, Homo sapien
taaggagtttggacccagatgatgc

SEQ ID NO: 1337234 - DNA, 25 bp, Homo sapien
tagcagatgatccacaaaaagagaa

SEQ ID NO: 1337235 - DNA, 25 bp, Homo sapien
gagaattggcagtcaaaccaaagag

SEQ ID NO: 1337236 - DNA, 25 bp, Homo sapien
taggttggatattttgcatcatatg

SEQ ID NO: 1337237 - DNA, 25 bp, Homo sapien
ccactgttggatactttcaattaag

SEQ ID NO: 1337238 - DNA, 25 bp, Homo sapien
taagttttcatgtcagggctaggtt

SEQ ID NO: 1337239 - DNA, 25 bp, Homo sapien
catgtcagggctaggttggatattt

SEQ ID NO: 1337240 - DNA, 25 bp, Homo sapien
tgcatagtgttccattaacatcctc

SEQ ID NO: 1337241 - DNA, 25 bp, Homo sapien
aatcaaaagtatcctcaaggatatt

SEQ ID NO: 1337242 - DNA, 25 bp, Homo sapien
tgccccacacagtgactgccccttt

SEQ ID NO: 1337243 - DNA, 25 bp, Homo sapien
agtgactgcccctttgtactcactc

SEQ ID NO: 1337244 - DNA, 25 bp, Homo sapien
cttcctcacatatgccccacacagt

SEQ ID NO: 1337245 - DNA, 25 bp, Homo sapien
tttcctgacattgggcaatattcct

SEQ ID NO: 1337246 - DNA, 25 bp, Homo sapien
tcctgacattgggcaatattcctgt

SEQ ID NO: 1337247 - DNA, 25 bp, Homo sapien
taggtttcctgacattgggcaatat

SEQ ID NO: 1337248 - DNA, 25 bp, Homo sapien
ggtttcctgacattgggcaatattc

SEQ ID NO: 1337249 - DNA, 25 bp, Homo sapien
aaagcccagtatgattggcctttgc

SEQ ID NO: 1337250 - DNA, 25 bp, Homo sapien
acacctataaggtacaatggctttg

SEQ ID NO: 1337251 - DNA, 25 bp, Homo sapien
aagtcctgttcaaacgtcagcactg

SEQ ID NO: 1337252 - DNA, 25 bp, Homo sapien
catcttgtgactaaagggaagttaa

SEQ ID NO: 1337253 - DNA, 25 bp, Homo sapien
gctcacatgcctggtgcctggtgcc

SEQ ID NO: 1337254 - DNA, 25 bp, Homo sapien
tgtggccagccacgtagagtactta

SEQ ID NO: 1337255 - DNA, 25 bp, Homo sapien
ccatagagataactcataggagcag

SEQ ID NO: 1337256 - DNA, 25 bp, Homo sapien
cagacttgtctacttgacttccgta

SEQ ID NO: 1337257 - DNA, 25 bp, Homo sapien
cactgtctgcaacaccccaaaaatg

SEQ ID NO: 1337258 - DNA, 25 bp, Homo sapien
ctcacagcttttagactctatgatg

SEQ ID NO: 1337259 - DNA, 25 bp, Homo sapien
aaaaatgtccagtgtacatagagac

SEQ ID NO: 1337260 - DNA, 25 bp, Homo sapien
tgtacatagagacaggtgcaaatga

SEQ ID NO: 1337261 - DNA, 25 bp, Homo sapien
tcccaagaaattaagatgtgtacgt

SEQ ID NO: 1337262 - DNA, 25 bp, Homo sapien
tggagatacgccaaaatagcaaagg

SEQ ID NO: 1337263 - DNA, 25 bp, Homo sapien
tggtctaatttcaaagcagaagaag

SEQ ID NO: 1337264 - DNA, 25 bp, Homo sapien
gcaaaggcaggctaaacttggtcta

SEQ ID NO: 1337265 - DNA, 25 bp, Homo sapien
agccccaactggatgagaataagaa

SEQ ID NO: 1337266 - DNA, 25 bp, Homo sapien
tagataataggctcaagactccaaa

SEQ ID NO: 1337267 - DNA, 25 bp, Homo sapien
cagtgtgtgatacatagtggcattc

SEQ ID NO: 1337268 - DNA, 25 bp, Homo sapien
taagaatttgacagccgagaagcca

SEQ ID NO: 1337269 - DNA, 25 bp, Homo sapien
caaggtatctgcttaggctgcggtc

SEQ ID NO: 1337270 - DNA, 25 bp, Homo sapien
tcttgtagactgttgactgagggcc

SEQ ID NO: 1337271 - DNA, 25 bp, Homo sapien
gtgaacatctctagggtaccagtat

SEQ ID NO: 1337272 - DNA, 25 bp, Homo sapien
tcctcagagggtcatgaacctggct

SEQ ID NO: 1337273 - DNA, 25 bp, Homo sapien
cttcatcagagtgagtaagcagaga

SEQ ID NO: 1337274 - DNA, 25 bp, Homo sapien
ctcaagagtgccattccttcacttt

SEQ ID NO: 1337275 - DNA, 25 bp, Homo sapien
caagagtgccattccttcacttttg

SEQ ID NO: 1337276 - DNA, 25 bp, Homo sapien
gagagaaaaggtgtcaggaaggtgg

SEQ ID NO: 1337277 - DNA, 25 bp, Homo sapien
ctccctgcggtgctgactcagcaac

SEQ ID NO: 1337278 - DNA, 25 bp, Homo sapien
acaaatgggcccagtccacggcaat

SEQ ID NO: 1337279 - DNA, 25 bp, Homo sapien
cttacacacttgtctccctgcggtg

SEQ ID NO: 1337280 - DNA, 25 bp, Homo sapien
gaataatccatgttccttacacact

SEQ ID NO: 1337281 - DNA, 25 bp, Homo sapien
gagctctttgaaactaacaatattt

SEQ ID NO: 1337282 - DNA, 25 bp, Homo sapien
agctctttgaaactaacaatatttt

SEQ ID NO: 1337283 - DNA, 25 bp, Homo sapien
tgagctctttgaaactaacaatatt

SEQ ID NO: 1337284 - DNA, 25 bp, Homo sapien
ctgagctctttgaaactaacaatat

SEQ ID NO: 1337285 - DNA, 25 bp, Homo sapien
ctgataaggctcttaactgatgttt

SEQ ID NO: 1337286 - DNA, 25 bp, Homo sapien
catacctgataaggctcttaactga

SEQ ID NO: 1337287 - DNA, 25 bp, Homo sapien
tacctgataaggctcttaactgatg

SEQ ID NO: 1337288 - DNA, 25 bp, Homo sapien
cctgataaggctcttaactgatgtt

SEQ ID NO: 1337289 - DNA, 25 bp, Homo sapien
tggatgtcctagatcaaagtccagc

SEQ ID NO: 1337290 - DNA, 25 bp, Homo sapien
cctttgtcttcacatagcgtattag

SEQ ID NO: 1337291 - DNA, 25 bp, Homo sapien
gaactcagtttctggtagacgcact

SEQ ID NO: 1337292 - DNA, 25 bp, Homo sapien
tggcttgcagacatcccctttgtct

SEQ ID NO: 1337293 - DNA, 25 bp, Homo sapien
gaaaaattaatcctgccacactgtg

SEQ ID NO: 1337294 - DNA, 25 bp, Homo sapien
tcaagttgccaggtaagagccttcc

SEQ ID NO: 1337295 - DNA, 25 bp, Homo sapien
aaagaagaaatgagacgtcccaggg

SEQ ID NO: 1337296 - DNA, 25 bp, Homo sapien
caatgaacctagctaaaagactgcg

SEQ ID NO: 1337297 - DNA, 25 bp, Homo sapien
gaatgaaagcaatatactgatggtg

SEQ ID NO: 1337298 - DNA, 25 bp, Homo sapien
ggccctgaacatcttttgcatgagg

SEQ ID NO: 1337299 - DNA, 25 bp, Homo sapien
tatactgatggtggtaaagcagaaa

SEQ ID NO: 1337300 - DNA, 25 bp, Homo sapien
gccctgaacatcttttgcatgaggg

SEQ ID NO: 1337301 - DNA, 25 bp, Homo sapien
gattaccatcctgcaatacctgttg

SEQ ID NO: 1337302 - DNA, 25 bp, Homo sapien
tacatgggtcttgaatgctctgcca

SEQ ID NO: 1337303 - DNA, 25 bp, Homo sapien
tcctgggtgtagatatgagcttaac

SEQ ID NO: 1337304 - DNA, 25 bp, Homo sapien
caccacggtggattatggaagtcct

SEQ ID NO: 1337305 - DNA, 25 bp, Homo sapien
accgcgagattatatcttgcacctg

SEQ ID NO: 1337306 - DNA, 25 bp, Homo sapien
gcgcaccgcgagattatatcttgca

SEQ ID NO: 1337307 - DNA, 25 bp, Homo sapien
gcaccgcgagattatatcttgcacc

SEQ ID NO: 1337308 - DNA, 25 bp, Homo sapien
cttgcacctggctaggagggtccta

SEQ ID NO: 1337309 - DNA, 25 bp, Homo sapien
cacacaatgcagtctggcagggtga

SEQ ID NO: 1337310 - DNA, 25 bp, Homo sapien
tacattttcaatggtttacaagcac

SEQ ID NO: 1337311 - DNA, 25 bp, Homo sapien
agctaaacagcttgcctcaggtcac

SEQ ID NO: 1337312 - DNA, 25 bp, Homo sapien
tatgccccaggtactaatcaatttt

SEQ ID NO: 1337313 - DNA, 25 bp, Homo sapien
ggttacatggcatatgcagctctaa

SEQ ID NO: 1337314 - DNA, 25 bp, Homo sapien
ggtctgtgtgaacaatgcctcccat

SEQ ID NO: 1337315 - DNA, 25 bp, Homo sapien
tggaaaaccaaatcgatagcatagt

SEQ ID NO: 1337316 - DNA, 25 bp, Homo sapien
gaagtatgacgatgctggtctgtgt

SEQ ID NO: 1337317 - DNA, 25 bp, Homo sapien
tgtggcacaagaacgtacagagcct

SEQ ID NO: 1337318 - DNA, 25 bp, Homo sapien
caaggttgcccaactagtgagcagg

SEQ ID NO: 1337319 - DNA, 25 bp, Homo sapien
tcccaatggccagatagtgaggtag

SEQ ID NO: 1337320 - DNA, 25 bp, Homo sapien
tatacttcccggtaagtgcctggct

SEQ ID NO: 1337321 - DNA, 25 bp, Homo sapien
cataggcagtagaaacaggtggagt

SEQ ID NO: 1337322 - DNA, 25 bp, Homo sapien
catgaaaagcttcgcttggcaaagg

SEQ ID NO: 1337323 - DNA, 25 bp, Homo sapien
caacaatcctgtagtcatgaaaagc

SEQ ID NO: 1337324 - DNA, 25 bp, Homo sapien
gacaacttggcccttgccactgaac

SEQ ID NO: 1337325 - DNA, 25 bp, Homo sapien
ttccaaatcgctgtgattctgcctc

SEQ ID NO: 1337326 - DNA, 25 bp, Homo sapien
ttttccaaatcgctgtgattctgcc

SEQ ID NO: 1337327 - DNA, 25 bp, Homo sapien
cattttccaaatcgctgtgattctg

SEQ ID NO: 1337328 - DNA, 25 bp, Homo sapien
ccaaatcgctgtgattctgcctcag

SEQ ID NO: 1337329 - DNA, 25 bp, Homo sapien
acagcgccggcccttcagggaacaa

SEQ ID NO: 1337330 - DNA, 25 bp, Homo sapien
ctgccgtgccgcgagcagacttgta

SEQ ID NO: 1337331 - DNA, 25 bp, Homo sapien
gcatcttttctcagggacacatcag

SEQ ID NO: 1337332 - DNA, 25 bp, Homo sapien
cgcgagcagacttgtagcatctttt

SEQ ID NO: 1337333 - DNA, 25 bp, Homo sapien
tcatgtaccctgttatatcaataat

SEQ ID NO: 1337334 - DNA, 25 bp, Homo sapien
tttgagtggagattcatgtaccctg

SEQ ID NO: 1337335 - DNA, 25 bp, Homo sapien
tgtgttcctctcaactccctagggg

SEQ ID NO: 1337336 - DNA, 25 bp, Homo sapien
tcaccagagggctttgagtggagat

SEQ ID NO: 1337337 - DNA, 25 bp, Homo sapien
atcaacaagattaggcacagacatc

SEQ ID NO: 1337338 - DNA, 25 bp, Homo sapien
gaatcaacaagattaggcacagaca

SEQ ID NO: 1337339 - DNA, 25 bp, Homo sapien
gctgaatcaacaagattaggcacag

SEQ ID NO: 1337340 - DNA, 25 bp, Homo sapien
aacaagattaggcacagacatctgc

SEQ ID NO: 1337341 - DNA, 25 bp, Homo sapien
gatggaaaccctgttattaaatcaa

SEQ ID NO: 1337342 - DNA, 25 bp, Homo sapien
gatcaggacccaaaactaccccata

SEQ ID NO: 1337343 - DNA, 25 bp, Homo sapien
tactggagatgcgatggaaaccctg

SEQ ID NO: 1337344 - DNA, 25 bp, Homo sapien
ctcagtgccagatggaagcttggag

SEQ ID NO: 1337345 - DNA, 25 bp, Homo sapien
gactttgtgggaactttgctaactc

SEQ ID NO: 1337346 - DNA, 25 bp, Homo sapien
ggccatttgccaggtccactaggag

SEQ ID NO: 1337347 - DNA, 25 bp, Homo sapien
cagcctgccggttttggtgccaagg

SEQ ID NO: 1337348 - DNA, 25 bp, Homo sapien
gcttaaacctctcgcaaaggccatt

SEQ ID NO: 1337349 - DNA, 25 bp, Homo sapien
tcccactggtttgcaacccagccat

SEQ ID NO: 1337350 - DNA, 25 bp, Homo sapien
cagacagatcacaggatgggccagg

SEQ ID NO: 1337351 - DNA, 25 bp, Homo sapien
ggcatctgctacctccatggggcag

SEQ ID NO: 1337352 - DNA, 25 bp, Homo sapien
cagctcccactggtttgcaacccag

SEQ ID NO: 1337353 - DNA, 25 bp, Homo sapien
ctaatcattaagcacagccctttcc

SEQ ID NO: 1337354 - DNA, 25 bp, Homo sapien
ttccacaaacccctgaactgaatca

SEQ ID NO: 1337355 - DNA, 25 bp, Homo sapien
cctgaactgaatcagcagattcaac

SEQ ID NO: 1337356 - DNA, 25 bp, Homo sapien
caaacccctgaactgaatcagcaga

SEQ ID NO: 1337357 - DNA, 25 bp, Homo sapien
gatattgttcacgaagttggcatgc

SEQ ID NO: 1337358 - DNA, 25 bp, Homo sapien
aagttggcatgctttactggtcttc

SEQ ID NO: 1337359 - DNA, 25 bp, Homo sapien
ttttatgctgatattgttcacgaag

SEQ ID NO: 1337360 - DNA, 25 bp, Homo sapien
tcacgaagttggcatgctttactgg

SEQ ID NO: 1337361 - DNA, 25 bp, Homo sapien
cacaaacctccacaccggaaatcct

SEQ ID NO: 1337362 - DNA, 25 bp, Homo sapien
ttcacaaagaacctctggaaccctg

SEQ ID NO: 1337363 - DNA, 25 bp, Homo sapien
tcacaaagaacctctggaaccctgt

SEQ ID NO: 1337364 - DNA, 25 bp, Homo sapien
tgggctcgagcaattcatccatctc

SEQ ID NO: 1337365 - DNA, 25 bp, Homo sapien
ctcctgggctcgagcaattcatcca

SEQ ID NO: 1337366 - DNA, 25 bp, Homo sapien
gggctcgagcaattcatccatctcg

SEQ ID NO: 1337367 - DNA, 25 bp, Homo sapien
cctgggctcgagcaattcatccatc

SEQ ID NO: 1337368 - DNA, 25 bp, Homo sapien
caggcatatcctgtggtcaggagca

SEQ ID NO: 1337369 - DNA, 25 bp, Homo sapien
tcctggaccaggcatatcctgtggt

SEQ ID NO: 1337370 - DNA, 25 bp, Homo sapien
tggaccaggcatatcctgtggtcag

SEQ ID NO: 1337371 - DNA, 25 bp, Homo sapien
gaccaggcatatcctgtggtcagga

SEQ ID NO: 1337372 - DNA, 25 bp, Homo sapien
ctttcacagcagtccttttcactca

SEQ ID NO: 1337373 - DNA, 25 bp, Homo sapien
tgctcgtaaagcctcagtgtcagcc

SEQ ID NO: 1337374 - DNA, 25 bp, Homo sapien
aggtgggctcagatgtactttcaca

SEQ ID NO: 1337375 - DNA, 25 bp, Homo sapien
caaaaccaatgcctgctcgtaaagc

SEQ ID NO: 1337376 - DNA, 25 bp, Homo sapien
aaaacatctcttgtccattcaggtc

SEQ ID NO: 1337377 - DNA, 25 bp, Homo sapien
gtccattcaggtctcttcagagtag

SEQ ID NO: 1337378 - DNA, 25 bp, Homo sapien
ggaagaggaaaacatctcttgtcca

SEQ ID NO: 1337379 - DNA, 25 bp, Homo sapien
tcttttattatggtaaggaagagga

SEQ ID NO: 1337380 - DNA, 25 bp, Homo sapien
aaggttgctttgttcagccaccagg

SEQ ID NO: 1337381 - DNA, 25 bp, Homo sapien
tcccgaggcctgaaaggttgctttg

SEQ ID NO: 1337382 - DNA, 25 bp, Homo sapien
cccgaggcctgaaaggttgctttgt

SEQ ID NO: 1337383 - DNA, 25 bp, Homo sapien
aaaggttgctttgttcagccaccag

SEQ ID NO: 1337384 - DNA, 25 bp, Homo sapien
ttggaaacttcaaactgctcagtcc

SEQ ID NO: 1337385 - DNA, 25 bp, Homo sapien
gaaacttcaaactgctcagtcccca

SEQ ID NO: 1337386 - DNA, 25 bp, Homo sapien
tggaaacttcaaactgctcagtccc

SEQ ID NO: 1337387 - DNA, 25 bp, Homo sapien
cacacatgactggtaagctctgcag

SEQ ID NO: 1337388 - DNA, 25 bp, Homo sapien
gaccgaattaatgtagaaccctctg

SEQ ID NO: 1337389 - DNA, 25 bp, Homo sapien
tattaggcggtcactgggtgtttca

SEQ ID NO: 1337390 - DNA, 25 bp, Homo sapien
tagagataaatgcaacacggctctg

SEQ ID NO: 1337391 - DNA, 25 bp, Homo sapien
gcacactccggtgaattttcctgga

SEQ ID NO: 1337392 - DNA, 25 bp, Homo sapien
gctggctcggtggacaacaccagct

SEQ ID NO: 1337393 - DNA, 25 bp, Homo sapien
gaggagagctggctcggtggacaac

SEQ ID NO: 1337394 - DNA, 25 bp, Homo sapien
cactccggtgaattttcctggacca

SEQ ID NO: 1337395 - DNA, 25 bp, Homo sapien
aaccacagcaaggaattggaggctc

SEQ ID NO: 1337396 - DNA, 25 bp, Homo sapien
ggaggcttcgcttcaaaaaggtagc

SEQ ID NO: 1337397 - DNA, 25 bp, Homo sapien
tggaggctcctgatataatctgtat

SEQ ID NO: 1337398 - DNA, 25 bp, Homo sapien
aggtagctccaaccccggatctcaa

SEQ ID NO: 1337399 - DNA, 25 bp, Homo sapien
ttttcaatagtctcagctcggctca

SEQ ID NO: 1337400 - DNA, 25 bp, Homo sapien
gctcggctcacgttgctcacgatat

SEQ ID NO: 1337401 - DNA, 25 bp, Homo sapien
gatattagaggctgccgtgatgata

SEQ ID NO: 1337402 - DNA, 25 bp, Homo sapien
ggctgcagcataattgacagagaga

SEQ ID NO: 1337403 - DNA, 25 bp, Homo sapien
cctgggtctccccttatggcaagcg

SEQ ID NO: 1337404 - DNA, 25 bp, Homo sapien
ttgggttgctctgtaaatttaacac

SEQ ID NO: 1337405 - DNA, 25 bp, Homo sapien
tatggcaagcgagtctctccttggg

SEQ ID NO: 1337406 - DNA, 25 bp, Homo sapien
tctgtaaatttaacactgtcctcac

SEQ ID NO: 1337407 - DNA, 25 bp, Homo sapien
ctgatatacagattgccactggctg

SEQ ID NO: 1337408 - DNA, 25 bp, Homo sapien
tgatagttgcgcagctgacagctga

SEQ ID NO: 1337409 - DNA, 25 bp, Homo sapien
gaattctcttcggtcagatctcctc

SEQ ID NO: 1337410 - DNA, 25 bp, Homo sapien
cagtgtcactgctctttcctgatag

SEQ ID NO: 1337411 - DNA, 25 bp, Homo sapien
gatgtccaacagcttactactgagc

SEQ ID NO: 1337412 - DNA, 25 bp, Homo sapien
tgatgtccaacagcttactactgag

SEQ ID NO: 1337413 - DNA, 25 bp, Homo sapien
tgtccaacagcttactactgagcat

SEQ ID NO: 1337414 - DNA, 25 bp, Homo sapien
cttgatgtccaacagcttactactg

SEQ ID NO: 1337415 - DNA, 25 bp, Homo sapien
tgcagaactgagttcagttcctgga

SEQ ID NO: 1337416 - DNA, 25 bp, Homo sapien
tgagagagtttgttataatttttgt

SEQ ID NO: 1337417 - DNA, 25 bp, Homo sapien
ccttcattttgttatgtattcagta

SEQ ID NO: 1337418 - DNA, 25 bp, Homo sapien
cattttgttatgtattcagtagtca

SEQ ID NO: 1337419 - DNA, 25 bp, Homo sapien
gaccatatgtcagtggaagctccag

SEQ ID NO: 1337420 - DNA, 25 bp, Homo sapien
caagtcaggtaaggaagtggaaatc

SEQ ID NO: 1337421 - DNA, 25 bp, Homo sapien
gaccacccaaattagaacaagcaga

SEQ ID NO: 1337422 - DNA, 25 bp, Homo sapien
ccacttgaatttggtagaggctcaa

SEQ ID NO: 1337423 - DNA, 25 bp, Homo sapien
gaacatcgacatcatggcttggaac

SEQ ID NO: 1337424 - DNA, 25 bp, Homo sapien
ttgaagccgaatgtctatcctgagg

SEQ ID NO: 1337425 - DNA, 25 bp, Homo sapien
aaattctggtgaacatcgacatcat

SEQ ID NO: 1337426 - DNA, 25 bp, Homo sapien
acttcagtccatttgaagccgaatg

SEQ ID NO: 1337427 - DNA, 25 bp, Homo sapien
tgaagctagattgtctgagtttccc

SEQ ID NO: 1337428 - DNA, 25 bp, Homo sapien
aacagggttctagtaagagtgaagc

SEQ ID NO: 1337429 - DNA, 25 bp, Homo sapien
tgagtttcccaaccagcatactggg

SEQ ID NO: 1337430 - DNA, 25 bp, Homo sapien
agcacccagaacagggttctagtaa

SEQ ID NO: 1337431 - DNA, 25 bp, Homo sapien
tgaatgagtgtaggggttatttgcc

SEQ ID NO: 1337432 - DNA, 25 bp, Homo sapien
ggtggatacttcaagcttgtagtga

SEQ ID NO: 1337433 - DNA, 25 bp, Homo sapien
tgatgttggtggatacttcaagctt

SEQ ID NO: 1337434 - DNA, 25 bp, Homo sapien
aatagcaaattagagttgatgttgg

SEQ ID NO: 1337435 - DNA, 25 bp, Homo sapien
tgtgagtaaagagtttaaatcttaa

SEQ ID NO: 1337436 - DNA, 25 bp, Homo sapien
ttgtgagtaaagagtttaaatctta

SEQ ID NO: 1337437 - DNA, 25 bp, Homo sapien
gtgtcatccagatagatgtcctcga

SEQ ID NO: 1337438 - DNA, 25 bp, Homo sapien
catccagatagatgtcctcgagttt

SEQ ID NO: 1337439 - DNA, 25 bp, Homo sapien
gtcatccagatagatgtcctcgagt

SEQ ID NO: 1337440 - DNA, 25 bp, Homo sapien
tgtcatccagatagatgtcctcgag

SEQ ID NO: 1337441 - DNA, 25 bp, Homo sapien
atcagggaccaattctgtggaaggc

SEQ ID NO: 1337442 - DNA, 25 bp, Homo sapien
agatcattaagcatgagttagattc

SEQ ID NO: 1337443 - DNA, 25 bp, Homo sapien
aagaaaacccagatatgaggaataa

SEQ ID NO: 1337444 - DNA, 25 bp, Homo sapien
tgacactgagctggtccagtttccc

SEQ ID NO: 1337445 - DNA, 25 bp, Homo sapien
aataaaagcattcaaggcctggaaa

SEQ ID NO: 1337446 - DNA, 25 bp, Homo sapien
tggaaaacagatctcgtggcagtgg

SEQ ID NO: 1337447 - DNA, 25 bp, Homo sapien
gccagcaaagcaggtgaatagttta

SEQ ID NO: 1337448 - DNA, 25 bp, Homo sapien
gcgtacaaaatgaaccaagcccttc

SEQ ID NO: 1337449 - DNA, 25 bp, Homo sapien
cttgaggcttcaatatccacactga

SEQ ID NO: 1337450 - DNA, 25 bp, Homo sapien
tatgtaccagttatatttggaactg

SEQ ID NO: 1337451 - DNA, 25 bp, Homo sapien
tcatgttccttgagctgagcactgc

SEQ ID NO: 1337452 - DNA, 25 bp, Homo sapien
catgttccttgagctgagcactgca

SEQ ID NO: 1337453 - DNA, 25 bp, Homo sapien
gctgagcactgcacttctagagcac

SEQ ID NO: 1337454 - DNA, 25 bp, Homo sapien
ttgagctgagcactgcacttctaga

SEQ ID NO: 1337455 - DNA, 25 bp, Homo sapien
gtgtcacagtagtcataaatgttgg

SEQ ID NO: 1337456 - DNA, 25 bp, Homo sapien
gctccatagatatgatcagcaggat

SEQ ID NO: 1337457 - DNA, 25 bp, Homo sapien
cagacacctgctcattgacactttc

SEQ ID NO: 1337458 - DNA, 25 bp, Homo sapien
ttgaagtacagctccacgtttccag

SEQ ID NO: 1337459 - DNA, 25 bp, Homo sapien
tgcatctgccaagaaaggtgacaat

SEQ ID NO: 1337460 - DNA, 25 bp, Homo sapien
caaatatttgacgagaggtgttcag

SEQ ID NO: 1337461 - DNA, 25 bp, Homo sapien
taccacgagactctttaaaggctca

SEQ ID NO: 1337462 - DNA, 25 bp, Homo sapien
ggtacaaggcctcagagagatgcca

SEQ ID NO: 1337463 - DNA, 25 bp, Homo sapien
gataataattctggctatcgcctct

SEQ ID NO: 1337464 - DNA, 25 bp, Homo sapien
ttttcattggcaagctcagggcaag

SEQ ID NO: 1337465 - DNA, 25 bp, Homo sapien
gttcattcctagaagcagtctgtgc

SEQ ID NO: 1337466 - DNA, 25 bp, Homo sapien
aatgatgctgcagttacatatggca

SEQ ID NO: 1337467 - DNA, 25 bp, Homo sapien
tctgagtgaattctagtcctggcca

SEQ ID NO: 1337468 - DNA, 25 bp, Homo sapien
cattttctgaggacgcgtgttgggc

SEQ ID NO: 1337469 - DNA, 25 bp, Homo sapien
caaatcattactgccctcgttaggg

SEQ ID NO: 1337470 - DNA, 25 bp, Homo sapien
tacagatgttttaccgccgggaata

SEQ ID NO: 1337471 - DNA, 25 bp, Homo sapien
gacttgattttcctcgagtttggca

SEQ ID NO: 1337472 - DNA, 25 bp, Homo sapien
tgctgttacagatcgggcctgcttt

SEQ ID NO: 1337473 - DNA, 25 bp, Homo sapien
caggaacaggcgatggcgtttcttt

SEQ ID NO: 1337474 - DNA, 25 bp, Homo sapien
ccaactgtggtcatggcctgttagg

SEQ ID NO: 1337475 - DNA, 25 bp, Homo sapien
aaaaatagcattacggtggacgtat

SEQ ID NO: 1337476 - DNA, 25 bp, Homo sapien
tacggtggacgtatacagtttcgca

SEQ ID NO: 1337477 - DNA, 25 bp, Homo sapien
tatacagtttcgcaaggaaatgagc

SEQ ID NO: 1337478 - DNA, 25 bp, Homo sapien
gccaaactggaaggaataattagat

SEQ ID NO: 1337479 - DNA, 25 bp, Homo sapien
tagccatgcatgtctctctgtcgtc

SEQ ID NO: 1337480 - DNA, 25 bp, Homo sapien
tctgtcgtcccatgtagggcctctt

SEQ ID NO: 1337481 - DNA, 25 bp, Homo sapien
acccagaagcccaaatagccatgca

SEQ ID NO: 1337482 - DNA, 25 bp, Homo sapien
tcttatgctgagctgtcccttttcc

SEQ ID NO: 1337483 - DNA, 25 bp, Homo sapien
aaacagaaatcagatcacatgttgc

SEQ ID NO: 1337484 - DNA, 25 bp, Homo sapien
gatgttttagtctgtctttcccagt

SEQ ID NO: 1337485 - DNA, 25 bp, Homo sapien
gctgatgttttagtctgtctttccc

SEQ ID NO: 1337486 - DNA, 25 bp, Homo sapien
aagcgctgatgttttagtctgtctt

SEQ ID NO: 1337487 - DNA, 25 bp, Homo sapien
gcgctgatgttttagtctgtctttc

SEQ ID NO: 1337488 - DNA, 25 bp, Homo sapien
caatgtgttctacttgtcattccca

SEQ ID NO: 1337489 - DNA, 25 bp, Homo sapien
tcatcatagacgaaggcgccaggtt

SEQ ID NO: 1337490 - DNA, 25 bp, Homo sapien
gggctgggaccaaggaatcacgctt

SEQ ID NO: 1337491 - DNA, 25 bp, Homo sapien
aggttgggttgcctggcgggccact

SEQ ID NO: 1337492 - DNA, 25 bp, Homo sapien
tttctgaggattcttggaggggctt

SEQ ID NO: 1337493 - DNA, 25 bp, Homo sapien
gattcttggaggggcttgtgttctt

SEQ ID NO: 1337494 - DNA, 25 bp, Homo sapien
tcttggaggggcttgtgttcttacg

SEQ ID NO: 1337495 - DNA, 25 bp, Homo sapien
ttaagatttctgaggattcttggag

SEQ ID NO: 1337496 - DNA, 25 bp, Homo sapien
tcatccaggtctacaaggtcctttc

SEQ ID NO: 1337497 - DNA, 25 bp, Homo sapien
agtgccatctctgccttggcccatg

SEQ ID NO: 1337498 - DNA, 25 bp, Homo sapien
tcagtgccatctctgccttggccca

SEQ ID NO: 1337499 - DNA, 25 bp, Homo sapien
ctacaaggtcctttctcagtgccat

SEQ ID NO: 1337500 - DNA, 25 bp, Homo sapien
tccatgagagaggtcatttctattt

SEQ ID NO: 1337501 - DNA, 25 bp, Homo sapien
ccatgagagaggtcatttctattta

SEQ ID NO: 1337502 - DNA, 25 bp, Homo sapien
catttgtgagttcaggagatttttg

SEQ ID NO: 1337503 - DNA, 25 bp, Homo sapien
gcaaagcatttgtgagttcaggaga

SEQ ID NO: 1337504 - DNA, 25 bp, Homo sapien
cctagctttcagtggctgcgggtag

SEQ ID NO: 1337505 - DNA, 25 bp, Homo sapien
ttattctctcacaatgtgggaggcc

SEQ ID NO: 1337506 - DNA, 25 bp, Homo sapien
tcttggtgctctccaactggtatca

SEQ ID NO: 1337507 - DNA, 25 bp, Homo sapien
agtctgaaatcaaggcacgggcagg

SEQ ID NO: 1337508 - DNA, 25 bp, Homo sapien
cagagaggtaatgataatcagcagt

SEQ ID NO: 1337509 - DNA, 25 bp, Homo sapien
tgaaagagaccagatacagagaggt

SEQ ID NO: 1337510 - DNA, 25 bp, Homo sapien
atgtagtgaaagagaccagatacag

SEQ ID NO: 1337511 - DNA, 25 bp, Homo sapien
acagagaggtaatgataatcagcag

SEQ ID NO: 1337512 - DNA, 25 bp, Homo sapien
aggtgatcattatctgggttgcagc

SEQ ID NO: 1337513 - DNA, 25 bp, Homo sapien
tatttttgaagagtaaggtgatcat

SEQ ID NO: 1337514 - DNA, 25 bp, Homo sapien
cttgggcagtatttttgaagagtaa

SEQ ID NO: 1337515 - DNA, 25 bp, Homo sapien
tatctgggttgcagcatttttatca

SEQ ID NO: 1337516 - DNA, 25 bp, Homo sapien
gacataactgagatccctttagggc

SEQ ID NO: 1337517 - DNA, 25 bp, Homo sapien
acataactgagatccctttagggct

SEQ ID NO: 1337518 - DNA, 25 bp, Homo sapien
gagaccctttagcaagtgacaactg

SEQ ID NO: 1337519 - DNA, 25 bp, Homo sapien
cctttagcaagtgacaactgtttct

SEQ ID NO: 1337520 - DNA, 25 bp, Homo sapien
tttagcaagtgacaactgtttcttc

SEQ ID NO: 1337521 - DNA, 25 bp, Homo sapien
tccaggagaccctttagcaagtgac

SEQ ID NO: 1337522 - DNA, 25 bp, Homo sapien
gattcttctatatctgaagggatct

SEQ ID NO: 1337523 - DNA, 25 bp, Homo sapien
ctgggtactggtagattcttctata

SEQ ID NO: 1337524 - DNA, 25 bp, Homo sapien
tactggtagattcttctatatctga

SEQ ID NO: 1337525 - DNA, 25 bp, Homo sapien
tctatatctgaagggatcttatgca

SEQ ID NO: 1337526 - DNA, 25 bp, Homo sapien
ctgatagcaacaggtatcacaaagc

SEQ ID NO: 1337527 - DNA, 25 bp, Homo sapien
cctgatagcaacaggtatcacaaag

SEQ ID NO: 1337528 - DNA, 25 bp, Homo sapien
tctgaaagcattgaagcataatgca

SEQ ID NO: 1337529 - DNA, 25 bp, Homo sapien
tgaagcataatgcaggttttaccaa

SEQ ID NO: 1337530 - DNA, 25 bp, Homo sapien
cttggttgatgttgaggcactctga

SEQ ID NO: 1337531 - DNA, 25 bp, Homo sapien
cagtgccccagaggttcacggtggc

SEQ ID NO: 1337532 - DNA, 25 bp, Homo sapien
ggacagactttcttcagtgcaagag

SEQ ID NO: 1337533 - DNA, 25 bp, Homo sapien
tgcaagagcaatgcccgttccagcc

SEQ ID NO: 1337534 - DNA, 25 bp, Homo sapien
aatgagcggcacatcattttcctga

SEQ ID NO: 1337535 - DNA, 25 bp, Homo sapien
gacaacaggaacaatgagcggcaca

SEQ ID NO: 1337536 - DNA, 25 bp, Homo sapien
tgcatcggtacacggaaagatctct

SEQ ID NO: 1337537 - DNA, 25 bp, Homo sapien
tattcgcgcagagaactaacatcat

SEQ ID NO: 1337538 - DNA, 25 bp, Homo sapien
tttagggagccctcaactctgtttg

SEQ ID NO: 1337539 - DNA, 25 bp, Homo sapien
ggacccaagtccacgaagataactg

SEQ ID NO: 1337540 - DNA, 25 bp, Homo sapien
taacggctgttcattctggtggctt

SEQ ID NO: 1337541 - DNA, 25 bp, Homo sapien
gcaaatgttcaagagagttccacaa

SEQ ID NO: 1337542 - DNA, 25 bp, Homo sapien
ccacagttaggtggacagacagaat

SEQ ID NO: 1337543 - DNA, 25 bp, Homo sapien
ggaagaccaagctcaccttgaccag

SEQ ID NO: 1337544 - DNA, 25 bp, Homo sapien
agagatttctccagccagtacgcca

SEQ ID NO: 1337545 - DNA, 25 bp, Homo sapien
tcccacctctgctatgggagcacag

SEQ ID NO: 1337546 - DNA, 25 bp, Homo sapien
ctgcaggtcaagaatctgggttcat

SEQ ID NO: 1337547 - DNA, 25 bp, Homo sapien
tctgcaggtcaagaatctgggttca

SEQ ID NO: 1337548 - DNA, 25 bp, Homo sapien
tgcaggtcaagaatctgggttcatt

SEQ ID NO: 1337549 - DNA, 25 bp, Homo sapien
ctctgcaggtcaagaatctgggttc

SEQ ID NO: 1337550 - DNA, 25 bp, Homo sapien
tcacataaaaaaacgctcaaatcct

SEQ ID NO: 1337551 - DNA, 25 bp, Homo sapien
tctccaccttttgtaaatgtcatct

SEQ ID NO: 1337552 - DNA, 25 bp, Homo sapien
tgtcatctttggattcacataaaaa

SEQ ID NO: 1337553 - DNA, 25 bp, Homo sapien
tccacgtccctcagtagggaactgc

SEQ ID NO: 1337554 - DNA, 25 bp, Homo sapien
tgcttccagtgaacagtaacggtct

SEQ ID NO: 1337555 - DNA, 25 bp, Homo sapien
ggaaagttttctggcgataacaagc

SEQ ID NO: 1337556 - DNA, 25 bp, Homo sapien
cagtagagccaacccatgagacatc

SEQ ID NO: 1337557 - DNA, 25 bp, Homo sapien
tagcactgttcatacacaggcctgc

SEQ ID NO: 1337558 - DNA, 25 bp, Homo sapien
cttcagcattttcctgcagcttcct

SEQ ID NO: 1337559 - DNA, 25 bp, Homo sapien
gcattttcctgcagcttcctgttcc

SEQ ID NO: 1337560 - DNA, 25 bp, Homo sapien
tttcctgcagcttcctgttccctaa

SEQ ID NO: 1337561 - DNA, 25 bp, Homo sapien
attttcctgcagcttcctgttccct

SEQ ID NO: 1337562 - DNA, 25 bp, Homo sapien
tttcgcacccctttggacagggaga

SEQ ID NO: 1337563 - DNA, 25 bp, Homo sapien
cactttttcagagagctgtatcgtt

SEQ ID NO: 1337564 - DNA, 25 bp, Homo sapien
cactttctgcttgcaaggtgcttaa

SEQ ID NO: 1337565 - DNA, 25 bp, Homo sapien
tcagcaatgggagaattttcgcacc

SEQ ID NO: 1337566 - DNA, 25 bp, Homo sapien
taatgacatcagtacttctcgtggc

SEQ ID NO: 1337567 - DNA, 25 bp, Homo sapien
ttggttggtacaaggaggccctgct

SEQ ID NO: 1337568 - DNA, 25 bp, Homo sapien
tctcgtggcatatgaggcaccaaag

SEQ ID NO: 1337569 - DNA, 25 bp, Homo sapien
gcagggaaccctgatgactacacag

SEQ ID NO: 1337570 - DNA, 25 bp, Homo sapien
catgttctcaggagtgaagacagct

SEQ ID NO: 1337571 - DNA, 25 bp, Homo sapien
tcctcctggcacgtctgtgaaaatg

SEQ ID NO: 1337572 - DNA, 25 bp, Homo sapien
caatcgtctgcaggtctgactcagg

SEQ ID NO: 1337573 - DNA, 25 bp, Homo sapien
gaaaggtctgtctaccaccaacttg

SEQ ID NO: 1337574 - DNA, 25 bp, Homo sapien
ctcataatccgtgccactctggagg

SEQ ID NO: 1337575 - DNA, 25 bp, Homo sapien
gggaaggaccatcacctcctcataa

SEQ ID NO: 1337576 - DNA, 25 bp, Homo sapien
tttggattccggagtgacagtgtct

SEQ ID NO: 1337577 - DNA, 25 bp, Homo sapien
gattccggagtgacagtgtctcagg

SEQ ID NO: 1337578 - DNA, 25 bp, Homo sapien
aaataatcaaatcagtgccctcaga

SEQ ID NO: 1337579 - DNA, 25 bp, Homo sapien
atttaaggtccatcgggtttcactg

SEQ ID NO: 1337580 - DNA, 25 bp, Homo sapien
taggctggcgatgaaatataggctt

SEQ ID NO: 1337581 - DNA, 25 bp, Homo sapien
catttctaaccactgcaaattgcat

SEQ ID NO: 1337582 - DNA, 25 bp, Homo sapien
cgagtgctaagcacagcactaggtc

SEQ ID NO: 1337583 - DNA, 25 bp, Homo sapien
tgccatgtgctaatcgagtgctaag

SEQ ID NO: 1337584 - DNA, 25 bp, Homo sapien
gtttctttattagcccagtgctgga

SEQ ID NO: 1337585 - DNA, 25 bp, Homo sapien
tctgtaaatttaagaattctttgcc

SEQ ID NO: 1337586 - DNA, 25 bp, Homo sapien
gccagccggtcattgtatatttttg

SEQ ID NO: 1337587 - DNA, 25 bp, Homo sapien
ctgttcttcccaaaattgttggcct

SEQ ID NO: 1337588 - DNA, 25 bp, Homo sapien
tcttcccaaaattgttggcctgcct

SEQ ID NO: 1337589 - DNA, 25 bp, Homo sapien
tacttggggccagccggtcattgta

SEQ ID NO: 1337590 - DNA, 25 bp, Homo sapien
ctgatagatttctacctgccagccc

SEQ ID NO: 1337591 - DNA, 25 bp, Homo sapien
cccactgatagatttctacctgcca

SEQ ID NO: 1337592 - DNA, 25 bp, Homo sapien
cactgatagatttctacctgccagc

SEQ ID NO: 1337593 - DNA, 25 bp, Homo sapien
ggacccactgatagatttctacctg

SEQ ID NO: 1337594 - DNA, 25 bp, Homo sapien
gagatcatgcggtacttactacttt

SEQ ID NO: 1337595 - DNA, 25 bp, Homo sapien
tatatcagagtatcttgatggttgc

SEQ ID NO: 1337596 - DNA, 25 bp, Homo sapien
caaaaatgagatcatgcggtactta

SEQ ID NO: 1337597 - DNA, 25 bp, Homo sapien
tgcatggttttccaaggtatgtata

SEQ ID NO: 1337598 - DNA, 25 bp, Homo sapien
catctggtacacaggagtttatgca

SEQ ID NO: 1337599 - DNA, 25 bp, Homo sapien
gaagtgattttcactatatgacttg

SEQ ID NO: 1337600 - DNA, 25 bp, Homo sapien
tatatgacttgttctcaacccaagt

SEQ ID NO: 1337601 - DNA, 25 bp, Homo sapien
tatgcatatgaacaggcacgtgttg

SEQ ID NO: 1337602 - DNA, 25 bp, Homo sapien
gcttcttacctacatcatctcatta

SEQ ID NO: 1337603 - DNA, 25 bp, Homo sapien
actattccctcttttgagggatgag

SEQ ID NO: 1337604 - DNA, 25 bp, Homo sapien
tatcagacaggtaccactattccct

SEQ ID NO: 1337605 - DNA, 25 bp, Homo sapien
attctcacaatgactctatcagaca

SEQ ID NO: 1337606 - DNA, 25 bp, Homo sapien
cattgaacttgctaccttcattata

SEQ ID NO: 1337607 - DNA, 25 bp, Homo sapien
aagaaaacattgaacttgctacctt

SEQ ID NO: 1337608 - DNA, 25 bp, Homo sapien
cacgaattaatgtggagaacgaggc

SEQ ID NO: 1337609 - DNA, 25 bp, Homo sapien
ctgctgaactggtggaccacgaatt

SEQ ID NO: 1337610 - DNA, 25 bp, Homo sapien
gcagcgcaggaaacccgtttattta

SEQ ID NO: 1337611 - DNA, 25 bp, Homo sapien
gaaagtaaggatcggttctgccgcg

SEQ ID NO: 1337612 - DNA, 25 bp, Homo sapien
tgggcatctgatccaggacaactcg

SEQ ID NO: 1337613 - DNA, 25 bp, Homo sapien
tgcagtggaagatccccgtggtccg

SEQ ID NO: 1337614 - DNA, 25 bp, Homo sapien
ccgagtctgtagagtctttacagac

SEQ ID NO: 1337615 - DNA, 25 bp, Homo sapien
gactctgcgttaacctcagtcaatt

SEQ ID NO: 1337616 - DNA, 25 bp, Homo sapien
tttgcttgcaaatgatccgagtctg

SEQ ID NO: 1337617 - DNA, 25 bp, Homo sapien
gagtctttacagactctgcgttaac

SEQ ID NO: 1337618 - DNA, 25 bp, Homo sapien
accacgtctggctaactttagtaga

SEQ ID NO: 1337619 - DNA, 25 bp, Homo sapien
cacgtctggctaactttagtagaga

SEQ ID NO: 1337620 - DNA, 25 bp, Homo sapien
caacctcgcctcccgggtacaagcg

SEQ ID NO: 1337621 - DNA, 25 bp, Homo sapien
caccatgtgggtcaggctggtcgcg

SEQ ID NO: 1337622 - DNA, 25 bp, Homo sapien
tcgtacaatccaaagcacgcaaggc

SEQ ID NO: 1337623 - DNA, 25 bp, Homo sapien
gggactgccgaatcgattgcaactt

SEQ ID NO: 1337624 - DNA, 25 bp, Homo sapien
gcgtggttactatgcaaattgcagc

SEQ ID NO: 1337625 - DNA, 25 bp, Homo sapien
cagcgattgcggaaataaacaaggg

SEQ ID NO: 1337626 - DNA, 25 bp, Homo sapien
tcaagctgtcaaagctacaagcgct

SEQ ID NO: 1337627 - DNA, 25 bp, Homo sapien
cctgaattgtgggactgtagtgagc

SEQ ID NO: 1337628 - DNA, 25 bp, Homo sapien
aacgtgtggcttaaatcttgcctga

SEQ ID NO: 1337629 - DNA, 25 bp, Homo sapien
caagcgcttccggatttagcaagca

SEQ ID NO: 1337630 - DNA, 25 bp, Homo sapien
tcagttacatgttgggaccgtcagc

SEQ ID NO: 1337631 - DNA, 25 bp, Homo sapien
tccaaaagtcttacgaagggcgcca

SEQ ID NO: 1337632 - DNA, 25 bp, Homo sapien
tctatcgaggaaacttggagcgcat

SEQ ID NO: 1337633 - DNA, 25 bp, Homo sapien
gacaggagcctcctttgcgcagaga

SEQ ID NO: 1337634 - DNA, 25 bp, Homo sapien
cccctccgagagaggagagcctaga

SEQ ID NO: 1337635 - DNA, 25 bp, Homo sapien
ggcagattcccctgtgtgccagtgt

SEQ ID NO: 1337636 - DNA, 25 bp, Homo sapien
ttatgtcacctccaccgaagggcag

SEQ ID NO: 1337637 - DNA, 25 bp, Homo sapien
gcattttgcaaaccatcatgaggaa

SEQ ID NO: 1337638 - DNA, 25 bp, Homo sapien
aatggtagaggttctcttttggaga

SEQ ID NO: 1337639 - DNA, 25 bp, Homo sapien
taaatggtagaggttctcttttgga

SEQ ID NO: 1337640 - DNA, 25 bp, Homo sapien
ggtagaggttctcttttggagagta

SEQ ID NO: 1337641 - DNA, 25 bp, Homo sapien
tagaggttctcttttggagagtagt

SEQ ID NO: 1337642 - DNA, 25 bp, Homo sapien
tgctgttcaacagcgtaactattgt

SEQ ID NO: 1337643 - DNA, 25 bp, Homo sapien
acagcgtaactattgttgtgcattc

SEQ ID NO: 1337644 - DNA, 25 bp, Homo sapien
tttgtaacgatgctgttcaacagcg

SEQ ID NO: 1337645 - DNA, 25 bp, Homo sapien
tgagaatgaagtctttgtaacgatg

SEQ ID NO: 1337646 - DNA, 25 bp, Homo sapien
gtcattgcagtacttttattgtatg

SEQ ID NO: 1337647 - DNA, 25 bp, Homo sapien
tatgtgacaaggacttttattaaga

SEQ ID NO: 1337648 - DNA, 25 bp, Homo sapien
attgtatggcctcttaatatgtgac

SEQ ID NO: 1337649 - DNA, 25 bp, Homo sapien
acatacttttagaagtctctccttt

SEQ ID NO: 1337650 - DNA, 25 bp, Homo sapien
acatttgaggattctaagtccatgc

SEQ ID NO: 1337651 - DNA, 25 bp, Homo sapien
tcttttttacatttgaggattctaa

SEQ ID NO: 1337652 - DNA, 25 bp, Homo sapien
tacatttgaggattctaagtccatg

SEQ ID NO: 1337653 - DNA, 25 bp, Homo sapien
ttttacatttgaggattctaagtcc

SEQ ID NO: 1337654 - DNA, 25 bp, Homo sapien
gggagaaggtccacatatggtgcct

SEQ ID NO: 1337655 - DNA, 25 bp, Homo sapien
tcgtgctgacccttgagcaaggctg

SEQ ID NO: 1337656 - DNA, 25 bp, Homo sapien
taaagcagggcctcgaaggttggca

SEQ ID NO: 1337657 - DNA, 25 bp, Homo sapien
tagcgtgtgttctggacacggcacg

SEQ ID NO: 1337658 - DNA, 25 bp, Homo sapien
cactgtcagttgttaaggcatcttc

SEQ ID NO: 1337659 - DNA, 25 bp, Homo sapien
catcttctgataggtgaaaagcggt

SEQ ID NO: 1337660 - DNA, 25 bp, Homo sapien
tgtgtgcatcccacccaaataaaga

SEQ ID NO: 1337661 - DNA, 25 bp, Homo sapien
gaaactgtgcttagcaggaacaacg

SEQ ID NO: 1337662 - DNA, 25 bp, Homo sapien
cagagtaaagtgagtttcatatttt

SEQ ID NO: 1337663 - DNA, 25 bp, Homo sapien
gaacagagtaaagtgagtttcatat

SEQ ID NO: 1337664 - DNA, 25 bp, Homo sapien
acagagtaaagtgagtttcatattt

SEQ ID NO: 1337665 - DNA, 25 bp, Homo sapien
aacagagtaaagtgagtttcatatt

SEQ ID NO: 1337666 - DNA, 25 bp, Homo sapien
tgttctagctgtgtatgatcattgg

SEQ ID NO: 1337667 - DNA, 25 bp, Homo sapien
aggactgctggtgtagtgagttctt

SEQ ID NO: 1337668 - DNA, 25 bp, Homo sapien
gtgtatgatcattggccagtcgttc

SEQ ID NO: 1337669 - DNA, 25 bp, Homo sapien
cattggccagtcgttcagcttcttg

SEQ ID NO: 1337670 - DNA, 25 bp, Homo sapien
tggtttttacggcatcagagatacc

SEQ ID NO: 1337671 - DNA, 25 bp, Homo sapien
gagataccaaatgtacaacagacag

SEQ ID NO: 1337672 - DNA, 25 bp, Homo sapien
agtgaaatcagggagactagtggtt

SEQ ID NO: 1337673 - DNA, 25 bp, Homo sapien
ctctcagactgttagtgaaatcagg

SEQ ID NO: 1337674 - DNA, 25 bp, Homo sapien
gaccaccttagcattacatttgcta

SEQ ID NO: 1337675 - DNA, 25 bp, Homo sapien
caaaatattgttagtgttgaccacc

SEQ ID NO: 1337676 - DNA, 25 bp, Homo sapien
tagtgttgaccaccttagcattaca

SEQ ID NO: 1337677 - DNA, 25 bp, Homo sapien
tattgttagtgttgaccaccttagc

SEQ ID NO: 1337678 - DNA, 25 bp, Homo sapien
tcattatacaaaagcagggtggaga

SEQ ID NO: 1337679 - DNA, 25 bp, Homo sapien
tatggtgaccacaagattaacaggg

SEQ ID NO: 1337680 - DNA, 25 bp, Homo sapien
aatagcctgggatatggagaactca

SEQ ID NO: 1337681 - DNA, 25 bp, Homo sapien
gagaaagctagtatacagtgtccca

SEQ ID NO: 1337682 - DNA, 25 bp, Homo sapien
taaagtcagcgcctataatactggt

SEQ ID NO: 1337683 - DNA, 25 bp, Homo sapien
tccaaaccagaaaccgggcatcatc

SEQ ID NO: 1337684 - DNA, 25 bp, Homo sapien
cattaacacagcgatcatgctcagg

SEQ ID NO: 1337685 - DNA, 25 bp, Homo sapien
tgtttgcggccattctacttacagg

SEQ ID NO: 1337686 - DNA, 25 bp, Homo sapien
tacccatacgttgacataaggcctc

SEQ ID NO: 1337687 - DNA, 25 bp, Homo sapien
caatatgccataccaccgaggttga

SEQ ID NO: 1337688 - DNA, 25 bp, Homo sapien
gattccatggtccttccaatatgcc

SEQ ID NO: 1337689 - DNA, 25 bp, Homo sapien
tgagaggccaaaggatatgccacag

SEQ ID NO: 1337690 - DNA, 25 bp, Homo sapien
ggaacacgaagctaacatactgccg

SEQ ID NO: 1337691 - DNA, 25 bp, Homo sapien
catactgccgtataacctgatttca

SEQ ID NO: 1337692 - DNA, 25 bp, Homo sapien
caaagtgcaattatgaggaggatgt

SEQ ID NO: 1337693 - DNA, 25 bp, Homo sapien
tcccttaagcacagtaggaacacga

SEQ ID NO: 1337694 - DNA, 25 bp, Homo sapien
gcatctagaggctggctcttcactg

SEQ ID NO: 1337695 - DNA, 25 bp, Homo sapien
tattccctgataggtctggaggtgg

SEQ ID NO: 1337696 - DNA, 25 bp, Homo sapien
tgaaggtgttccgaggactggttcc

SEQ ID NO: 1337697 - DNA, 25 bp, Homo sapien
gggtcaagtcactgccgatttaatt

SEQ ID NO: 1337698 - DNA, 25 bp, Homo sapien
ccgttgaaagctgcatatctgaagc

SEQ ID NO: 1337699 - DNA, 25 bp, Homo sapien
agtggcaccgttgaaagctgcatat

SEQ ID NO: 1337700 - DNA, 25 bp, Homo sapien
aagctgcatatctgaagcttctttt

SEQ ID NO: 1337701 - DNA, 25 bp, Homo sapien
tcttttcaggagaatgtggatcatt

SEQ ID NO: 1337702 - DNA, 25 bp, Homo sapien
tccagagcagcaaataaagtcatag

SEQ ID NO: 1337703 - DNA, 25 bp, Homo sapien
gagcagcaaataaagtcatagtgga

SEQ ID NO: 1337704 - DNA, 25 bp, Homo sapien
cagagcagcaaataaagtcatagtg

SEQ ID NO: 1337705 - DNA, 25 bp, Homo sapien
agcagcaaataaagtcatagtggac

SEQ ID NO: 1337706 - DNA, 25 bp, Homo sapien
cgggcactatccgtattcttagttt

SEQ ID NO: 1337707 - DNA, 25 bp, Homo sapien
tgaaggaggcatcctagtaccaggg

SEQ ID NO: 1337708 - DNA, 25 bp, Homo sapien
ggttccacgggcactatccgtattc

SEQ ID NO: 1337709 - DNA, 25 bp, Homo sapien
ctagtaccagggttccacgggcact

SEQ ID NO: 1337710 - DNA, 25 bp, Homo sapien
tgtgaatggaagcagtgtatttggc

SEQ ID NO: 1337711 - DNA, 25 bp, Homo sapien
tgaatggaagcagtgtatttggcag

SEQ ID NO: 1337712 - DNA, 25 bp, Homo sapien
tagtcacgtgactggaatttaatta

SEQ ID NO: 1337713 - DNA, 25 bp, Homo sapien
cagtgccataaataatcttgtgaat

SEQ ID NO: 1337714 - DNA, 25 bp, Homo sapien
tgtcctcagccagtaacaatttatg

SEQ ID NO: 1337715 - DNA, 25 bp, Homo sapien
tcctcagccagtaacaatttatgtc

SEQ ID NO: 1337716 - DNA, 25 bp, Homo sapien
gtcctcagccagtaacaatttatgt

SEQ ID NO: 1337717 - DNA, 25 bp, Homo sapien
ctgtcctcagccagtaacaatttat

SEQ ID NO: 1337718 - DNA, 25 bp, Homo sapien
tctctggccagggctctgaagatat

SEQ ID NO: 1337719 - DNA, 25 bp, Homo sapien
tctggccagggctctgaagatattc

SEQ ID NO: 1337720 - DNA, 25 bp, Homo sapien
ctctctggccagggctctgaagata

SEQ ID NO: 1337721 - DNA, 25 bp, Homo sapien
ctctggccagggctctgaagatatt

SEQ ID NO: 1337722 - DNA, 25 bp, Homo sapien
tgcaagcgtgcctacacacacttca

SEQ ID NO: 1337723 - DNA, 25 bp, Homo sapien
aagcgtgcctacacacacttcacaa

SEQ ID NO: 1337724 - DNA, 25 bp, Homo sapien
ctgctccgaaagctgcaagcgtgcc

SEQ ID NO: 1337725 - DNA, 25 bp, Homo sapien
cgaaagctgcaagcgtgcctacaca

SEQ ID NO: 1337726 - DNA, 25 bp, Homo sapien
cctccacggagtgtgagcagcatgt

SEQ ID NO: 1337727 - DNA, 25 bp, Homo sapien
tgtggggaggacaccaatagtttct

SEQ ID NO: 1337728 - DNA, 25 bp, Homo sapien
gcttcaagttggacagcatgtctgc

SEQ ID NO: 1337729 - DNA, 25 bp, Homo sapien
gataaagatgcatccagactgatgc

SEQ ID NO: 1337730 - DNA, 25 bp, Homo sapien
ggtcattaatgatgcgccatgccaa

SEQ ID NO: 1337731 - DNA, 25 bp, Homo sapien
ggagtcctgtacctgcatgcatagc

SEQ ID NO: 1337732 - DNA, 25 bp, Homo sapien
gtgaaacagccaccattcaggtcat

SEQ ID NO: 1337733 - DNA, 25 bp, Homo sapien
caaatgaattagactggcaatcccc

SEQ ID NO: 1337734 - DNA, 25 bp, Homo sapien
aagcatcttagagttaattctgtct

SEQ ID NO: 1337735 - DNA, 25 bp, Homo sapien
ggaagcatcttagagttaattctgt

SEQ ID NO: 1337736 - DNA, 25 bp, Homo sapien
gaagcatcttagagttaattctgtc

SEQ ID NO: 1337737 - DNA, 25 bp, Homo sapien
agcatcttagagttaattctgtctt

SEQ ID NO: 1337738 - DNA, 25 bp, Homo sapien
acattcctctgtgatccccttgcac

SEQ ID NO: 1337739 - DNA, 25 bp, Homo sapien
aacattcctctgtgatccccttgca

SEQ ID NO: 1337740 - DNA, 25 bp, Homo sapien
tggcagggtggtttggctcattcaa

SEQ ID NO: 1337741 - DNA, 25 bp, Homo sapien
ccttgctctggaggaacaccgataa

SEQ ID NO: 1337742 - DNA, 25 bp, Homo sapien
tcgtcttgcgttaactgtggcaagg

SEQ ID NO: 1337743 - DNA, 25 bp, Homo sapien
caccgataaaccatcaggatgtctt

SEQ ID NO: 1337744 - DNA, 25 bp, Homo sapien
actgtgaaattgagccggagaagca

SEQ ID NO: 1337745 - DNA, 25 bp, Homo sapien
tgctttcaaaagagaggacgtcctg

SEQ ID NO: 1337746 - DNA, 25 bp, Homo sapien
gacagtgcctgagtgtatgccgaac

SEQ ID NO: 1337747 - DNA, 25 bp, Homo sapien
aaacgtacacgtgcgcaaacttggg

SEQ ID NO: 1337748 - DNA, 25 bp, Homo sapien
gctgtatttactcggccgcagccaa

SEQ ID NO: 1337749 - DNA, 25 bp, Homo sapien
cacgtgacatgccacgagggcacgc

SEQ ID NO: 1337750 - DNA, 25 bp, Homo sapien
aatcagccggcagtgccaagccacg

SEQ ID NO: 1337751 - DNA, 25 bp, Homo sapien
atggcggctgtatttactcggccgc

SEQ ID NO: 1337752 - DNA, 25 bp, Homo sapien
gaatgtgtctagcagactggcattt

SEQ ID NO: 1337753 - DNA, 25 bp, Homo sapien
tctctgagcacttgagctttgtgca

SEQ ID NO: 1337754 - DNA, 25 bp, Homo sapien
agtactttaccttgttttgcatgcc

SEQ ID NO: 1337755 - DNA, 25 bp, Homo sapien
ttgctacctccacagagtactttac

SEQ ID NO: 1337756 - DNA, 25 bp, Homo sapien
gaaaggcatggtcttctgtggccca

SEQ ID NO: 1337757 - DNA, 25 bp, Homo sapien
tgggctggcaaggtatggaggagac

SEQ ID NO: 1337758 - DNA, 25 bp, Homo sapien
cgggtcaaggaaaggcatggtcttc

SEQ ID NO: 1337759 - DNA, 25 bp, Homo sapien
taacgggtcaaggaaaggcatggtc

SEQ ID NO: 1337760 - DNA, 25 bp, Homo sapien
caccatgaggttggcggttccttta

SEQ ID NO: 1337761 - DNA, 25 bp, Homo sapien
atttgccagctgtttattatttctg

SEQ ID NO: 1337762 - DNA, 25 bp, Homo sapien
actaattaattctttccgcagcagc

SEQ ID NO: 1337763 - DNA, 25 bp, Homo sapien
gctttgcactaattaattctttccg

SEQ ID NO: 1337764 - DNA, 25 bp, Homo sapien
ttagacttcttgcaacaccaacttc

SEQ ID NO: 1337765 - DNA, 25 bp, Homo sapien
gatttagacttcttgcaacaccaac

SEQ ID NO: 1337766 - DNA, 25 bp, Homo sapien
aaaatcttagtcacatgatttagac

SEQ ID NO: 1337767 - DNA, 25 bp, Homo sapien
tcttagtcacatgatttagacttct

SEQ ID NO: 1337768 - DNA, 25 bp, Homo sapien
ctgatgggaatctgcaatataagcc

SEQ ID NO: 1337769 - DNA, 25 bp, Homo sapien
tatgagccattgtactaattttaat

SEQ ID NO: 1337770 - DNA, 25 bp, Homo sapien
taagtatcacataccctgatagcgt

SEQ ID NO: 1337771 - DNA, 25 bp, Homo sapien
gccaagatatgtagtaagatctcac

SEQ ID NO: 1337772 - DNA, 25 bp, Homo sapien
gaccagagtagaggagtcattccca

SEQ ID NO: 1337773 - DNA, 25 bp, Homo sapien
aatttcctgctgtactggagtagcc

SEQ ID NO: 1337774 - DNA, 25 bp, Homo sapien
cattgtgtaaaaagccgtcgtgtgt

SEQ ID NO: 1337775 - DNA, 25 bp, Homo sapien
ggaagccatcaatagccagctaggg

SEQ ID NO: 1337776 - DNA, 25 bp, Homo sapien
tgtcgacgttaagcagccacttggt

SEQ ID NO: 1337777 - DNA, 25 bp, Homo sapien
ttgaaaagggatctgcaaagtctcc

SEQ ID NO: 1337778 - DNA, 25 bp, Homo sapien
tagtcacctgacctcttggcagcca

SEQ ID NO: 1337779 - DNA, 25 bp, Homo sapien
taaagcctgggaagtaacatgtgcc

SEQ ID NO: 1337780 - DNA, 25 bp, Homo sapien
caattttgttttaattgattctcac

SEQ ID NO: 1337781 - DNA, 25 bp, Homo sapien
aattgattctcactcttaagtatgc

SEQ ID NO: 1337782 - DNA, 25 bp, Homo sapien
gttttaattgattctcactcttaag

SEQ ID NO: 1337783 - DNA, 25 bp, Homo sapien
cactcttaagtatgcaaccaatctg

SEQ ID NO: 1337784 - DNA, 25 bp, Homo sapien
ggtaattatttggtgatccattcaa

SEQ ID NO: 1337785 - DNA, 25 bp, Homo sapien
ggcatccaacttttatgacatacat

SEQ ID NO: 1337786 - DNA, 25 bp, Homo sapien
tgagttgtgagagaaaagtaggtaa

SEQ ID NO: 1337787 - DNA, 25 bp, Homo sapien
aaaggaaggcatccaacttttatga

SEQ ID NO: 1337788 - DNA, 25 bp, Homo sapien
caagaggcagaaaaacacatgcagt

SEQ ID NO: 1337789 - DNA, 25 bp, Homo sapien
gaggcagaaaaacacatgcagttcc

SEQ ID NO: 1337790 - DNA, 25 bp, Homo sapien
cagaaaaacacatgcagttcctttt

SEQ ID NO: 1337791 - DNA, 25 bp, Homo sapien
ggcagaaaaacacatgcagttcctt

SEQ ID NO: 1337792 - DNA, 25 bp, Homo sapien
gctttttctcttagtgctgtctgtt

SEQ ID NO: 1337793 - DNA, 25 bp, Homo sapien
tctcttagtgctgtctgtttcctca

SEQ ID NO: 1337794 - DNA, 25 bp, Homo sapien
tggttttgagttccagctttttctc

SEQ ID NO: 1337795 - DNA, 25 bp, Homo sapien
ttttctcttagtgctgtctgtttcc

SEQ ID NO: 1337796 - DNA, 25 bp, Homo sapien
ccataaagaagttcagtccagccat

SEQ ID NO: 1337797 - DNA, 25 bp, Homo sapien
ttttgaagttccataaagaagttca

SEQ ID NO: 1337798 - DNA, 25 bp, Homo sapien
ggattggtagttttgaagttccata

SEQ ID NO: 1337799 - DNA, 25 bp, Homo sapien
tattctgggattggtagttttgaag

SEQ ID NO: 1337800 - DNA, 25 bp, Homo sapien
catggcagaaatcattgtaccaaaa

SEQ ID NO: 1337801 - DNA, 25 bp, Homo sapien
atggcagaaatcattgtaccaaaat

SEQ ID NO: 1337802 - DNA, 25 bp, Homo sapien
agcacaggtcagaggctaaagcatg

SEQ ID NO: 1337803 - DNA, 25 bp, Homo sapien
tgtggaatgatatgctgagtaaatg

SEQ ID NO: 1337804 - DNA, 25 bp, Homo sapien
tctagcactcacagtagtgcttggc

SEQ ID NO: 1337805 - DNA, 25 bp, Homo sapien
tgattagagtatattatcaagaaat

SEQ ID NO: 1337806 - DNA, 25 bp, Homo sapien
ctagcactcacagtagtgcttggca

SEQ ID NO: 1337807 - DNA, 25 bp, Homo sapien
tttggcaagggttctaacacagaga

SEQ ID NO: 1337808 - DNA, 25 bp, Homo sapien
tggcaagggttctaacacagagaca

SEQ ID NO: 1337809 - DNA, 25 bp, Homo sapien
agactttggcaagggttctaacaca

SEQ ID NO: 1337810 - DNA, 25 bp, Homo sapien
actttggcaagggttctaacacaga

SEQ ID NO: 1337811 - DNA, 25 bp, Homo sapien
tccctgtccaactagtctgcttttt

SEQ ID NO: 1337812 - DNA, 25 bp, Homo sapien
taaactgggccatgtaactttacat

SEQ ID NO: 1337813 - DNA, 25 bp, Homo sapien
ttttcttgtactcccttaagactca

SEQ ID NO: 1337814 - DNA, 25 bp, Homo sapien
ctttacataaagtggatgcagctgt

SEQ ID NO: 1337815 - DNA, 25 bp, Homo sapien
caatccccatggtgccacgtctgtt

SEQ ID NO: 1337816 - DNA, 25 bp, Homo sapien
acaatccccatggtgccacgtctgt

SEQ ID NO: 1337817 - DNA, 25 bp, Homo sapien
atccccatggtgccacgtctgtttt

SEQ ID NO: 1337818 - DNA, 25 bp, Homo sapien
gaaatgtcagacatgggtttcccaa

SEQ ID NO: 1337819 - DNA, 25 bp, Homo sapien
atcctcacaatctgttcatctccca

SEQ ID NO: 1337820 - DNA, 25 bp, Homo sapien
gttttatcctcacaatctgttcatc

SEQ ID NO: 1337821 - DNA, 25 bp, Homo sapien
ttatcctcacaatctgttcatctcc

SEQ ID NO: 1337822 - DNA, 25 bp, Homo sapien
tttatcctcacaatctgttcatctc

SEQ ID NO: 1337823 - DNA, 25 bp, Homo sapien
acatcctgaattgttaaaagaggta

SEQ ID NO: 1337824 - DNA, 25 bp, Homo sapien
catcctgaattgttaaaagaggtat

SEQ ID NO: 1337825 - DNA, 25 bp, Homo sapien
cactgacccatagcttacattactt

SEQ ID NO: 1337826 - DNA, 25 bp, Homo sapien
tatttcctctataagaggcagtgcc

SEQ ID NO: 1337827 - DNA, 25 bp, Homo sapien
tcattgcaaaccactgacccatagc

SEQ ID NO: 1337828 - DNA, 25 bp, Homo sapien
tgtgattgtctttcgatcagcccca

SEQ ID NO: 1337829 - DNA, 25 bp, Homo sapien
tttcagaagtaccacccaacctcaa

SEQ ID NO: 1337830 - DNA, 25 bp, Homo sapien
caacctcaaaaacacatagtggtcc

SEQ ID NO: 1337831 - DNA, 25 bp, Homo sapien
gttattctataggaacagcaaatcc

SEQ ID NO: 1337832 - DNA, 25 bp, Homo sapien
gtctgtcttgacatatcagggtacg

SEQ ID NO: 1337833 - DNA, 25 bp, Homo sapien
ctagttgttcactatgtctgtgaat

SEQ ID NO: 1337834 - DNA, 25 bp, Homo sapien
tagtaattttatggagcccagtgcc

SEQ ID NO: 1337835 - DNA, 25 bp, Homo sapien
aatactctatagagttttccccagc

SEQ ID NO: 1337836 - DNA, 25 bp, Homo sapien
gagctctaacactttgtacgttgta

SEQ ID NO: 1337837 - DNA, 25 bp, Homo sapien
cctttgcagtcataggctcctagaa

SEQ ID NO: 1337838 - DNA, 25 bp, Homo sapien
ttaggaaatggtgcccattgcattc

SEQ ID NO: 1337839 - DNA, 25 bp, Homo sapien
ttgcattcctctcccgtggccttta

SEQ ID NO: 1337840 - DNA, 25 bp, Homo sapien
gctggagactgtgttatttcatcgg

SEQ ID NO: 1337841 - DNA, 25 bp, Homo sapien
gcaaggtaaccaacaagatgaaacg

SEQ ID NO: 1337842 - DNA, 25 bp, Homo sapien
tcttcataagcatacatggtttcct

SEQ ID NO: 1337843 - DNA, 25 bp, Homo sapien
gagtcacagaggtcacagacacaag

SEQ ID NO: 1337844 - DNA, 25 bp, Homo sapien
gaaacgattgcatgtgaagtcttca

SEQ ID NO: 1337845 - DNA, 25 bp, Homo sapien
cactgaagaagtcggagaagtctgg

SEQ ID NO: 1337846 - DNA, 25 bp, Homo sapien
accacactgaagaagtcggagaagt

SEQ ID NO: 1337847 - DNA, 25 bp, Homo sapien
ttgccaggaatgccatctccaacca

SEQ ID NO: 1337848 - DNA, 25 bp, Homo sapien
gaagaagtcggagaagtctggtttc

SEQ ID NO: 1337849 - DNA, 25 bp, Homo sapien
tttcaagtagtagctttttctcatc

SEQ ID NO: 1337850 - DNA, 25 bp, Homo sapien
ttttcaagtagtagctttttctcat

SEQ ID NO: 1337851 - DNA, 25 bp, Homo sapien
tgttttcaagtagtagctttttctc

SEQ ID NO: 1337852 - DNA, 25 bp, Homo sapien
ctgttttcaagtagtagctttttct

SEQ ID NO: 1337853 - DNA, 25 bp, Homo sapien
tcgttcagggttagttcaagtgcca

SEQ ID NO: 1337854 - DNA, 25 bp, Homo sapien
tcaagtgccagtgcctagcctaatg

SEQ ID NO: 1337855 - DNA, 25 bp, Homo sapien
cacctttaaggagcatggaacagag

SEQ ID NO: 1337856 - DNA, 25 bp, Homo sapien
taatctgccaacagacgcacggtgt

SEQ ID NO: 1337857 - DNA, 25 bp, Homo sapien
tatttaaaggagaaggctgtttagc

SEQ ID NO: 1337858 - DNA, 25 bp, Homo sapien
tcaggaagcgtgtaattaaaactgt

SEQ ID NO: 1337859 - DNA, 25 bp, Homo sapien
gctattactgcccagccaaaggaaa

SEQ ID NO: 1337860 - DNA, 25 bp, Homo sapien
gccagatacttagaaccagctatta

SEQ ID NO: 1337861 - DNA, 25 bp, Homo sapien
caccttttcaaattgtgtacgagta

SEQ ID NO: 1337862 - DNA, 25 bp, Homo sapien
cattaacccttgagaagtttgggtg

SEQ ID NO: 1337863 - DNA, 25 bp, Homo sapien
cccttatcagatattggaatcagta

SEQ ID NO: 1337864 - DNA, 25 bp, Homo sapien
ggaatcagtagtccctgatgaaatg

SEQ ID NO: 1337865 - DNA, 25 bp, Homo sapien
ggatatcacagaggggtaaagcctt

SEQ ID NO: 1337866 - DNA, 25 bp, Homo sapien
gttcctgtgaagagagtgacctgtt

SEQ ID NO: 1337867 - DNA, 25 bp, Homo sapien
tcacagaggggtaaagccttagtta

SEQ ID NO: 1337868 - DNA, 25 bp, Homo sapien
tcctgtgaagagagtgacctgttgg

SEQ ID NO: 1337869 - DNA, 25 bp, Homo sapien
gagatctaatgaattcaatccagga

SEQ ID NO: 1337870 - DNA, 25 bp, Homo sapien
gaattcaatccaggatttgctggtt

SEQ ID NO: 1337871 - DNA, 25 bp, Homo sapien
gccaagatcacatttctaataagag

SEQ ID NO: 1337872 - DNA, 25 bp, Homo sapien
aaatcatccataatccggctgggtg

SEQ ID NO: 1337873 - DNA, 25 bp, Homo sapien
gaagaactgttttagctatggcaca

SEQ ID NO: 1337874 - DNA, 25 bp, Homo sapien
ggaccacgggatccaagctttgtaa

SEQ ID NO: 1337875 - DNA, 25 bp, Homo sapien
ccagtgttagctagtgtgtgttccc

SEQ ID NO: 1337876 - DNA, 25 bp, Homo sapien
aatatccctcaacagacacaggtgg

SEQ ID NO: 1337877 - DNA, 25 bp, Homo sapien
aactgcattgtatctgaagccttcc

SEQ ID NO: 1337878 - DNA, 25 bp, Homo sapien
gggtcacagaaagtacagcatcagc

SEQ ID NO: 1337879 - DNA, 25 bp, Homo sapien
aaactgcattgtatctgaagccttc

SEQ ID NO: 1337880 - DNA, 25 bp, Homo sapien
taaactgcattgtatctgaagcctt

SEQ ID NO: 1337881 - DNA, 25 bp, Homo sapien
aaccctgtaggttgttccactgagc

SEQ ID NO: 1337882 - DNA, 25 bp, Homo sapien
cctgtaggttgttccactgagcatc

SEQ ID NO: 1337883 - DNA, 25 bp, Homo sapien
ctaaccctgtaggttgttccactga

SEQ ID NO: 1337884 - DNA, 25 bp, Homo sapien
tgtaggttgttccactgagcatcaa

SEQ ID NO: 1337885 - DNA, 25 bp, Homo sapien
tacaggcagcagtctaagtgtacca

SEQ ID NO: 1337886 - DNA, 25 bp, Homo sapien
tacgctaaattgtgcctgagaaggg

SEQ ID NO: 1337887 - DNA, 25 bp, Homo sapien
aagtgtaccattgcttctcttacgc

SEQ ID NO: 1337888 - DNA, 25 bp, Homo sapien
aagcctgtttaaattgggcacagct

SEQ ID NO: 1337889 - DNA, 25 bp, Homo sapien
ggactggcaggaagtgaatgcaccc

SEQ ID NO: 1337890 - DNA, 25 bp, Homo sapien
gactggcaggaagtgaatgcacccc

SEQ ID NO: 1337891 - DNA, 25 bp, Homo sapien
actggcaggaagtgaatgcacccct

SEQ ID NO: 1337892 - DNA, 25 bp, Homo sapien
tctgggggaacaggaggaaaagtca

SEQ ID NO: 1337893 - DNA, 25 bp, Homo sapien
ctgggggaacaggaggaaaagtcat

SEQ ID NO: 1337894 - DNA, 25 bp, Homo sapien
caggtttctctgggggaacaggagg

SEQ ID NO: 1337895 - DNA, 25 bp, Homo sapien
ttccaagggtagtaaagcacttgga

SEQ ID NO: 1337896 - DNA, 25 bp, Homo sapien
ccaagggtagtaaagcacttggact

SEQ ID NO: 1337897 - DNA, 25 bp, Homo sapien
tccaagggtagtaaagcacttggac

SEQ ID NO: 1337898 - DNA, 25 bp, Homo sapien
caagggtagtaaagcacttggactt

SEQ ID NO: 1337899 - DNA, 25 bp, Homo sapien
tggttcaatcctcctgagatacagg

SEQ ID NO: 1337900 - DNA, 25 bp, Homo sapien
cagtgggatctctatatgtgaagaa

SEQ ID NO: 1337901 - DNA, 25 bp, Homo sapien
caggattttataggcaatagtagca

SEQ ID NO: 1337902 - DNA, 25 bp, Homo sapien
aatagtagcattgagacctgtggtc

SEQ ID NO: 1337903 - DNA, 25 bp, Homo sapien
ttaccatttagctagggccatgctg

SEQ ID NO: 1337904 - DNA, 25 bp, Homo sapien
gaagtctgaagatgtaccaaactcc

SEQ ID NO: 1337905 - DNA, 25 bp, Homo sapien
atttaacctgatagactttgtgtgc

SEQ ID NO: 1337906 - DNA, 25 bp, Homo sapien
tctagatagtgctgaatattgctct

SEQ ID NO: 1337907 - DNA, 25 bp, Homo sapien
tcaagcaaacacgcttccaaagttg

SEQ ID NO: 1337908 - DNA, 25 bp, Homo sapien
caagcaaacacgcttccaaagttgg

SEQ ID NO: 1337909 - DNA, 25 bp, Homo sapien
caagaagcatagatccctgacaggg

SEQ ID NO: 1337910 - DNA, 25 bp, Homo sapien
taaggcccttcacggagactgtcaa

SEQ ID NO: 1337911 - DNA, 25 bp, Homo sapien
gctctgccaatcacgtatgctatgt

SEQ ID NO: 1337912 - DNA, 25 bp, Homo sapien
tacatgtccaggttgttggtaaggc

SEQ ID NO: 1337913 - DNA, 25 bp, Homo sapien
tccttagggactgttggtctgcatg

SEQ ID NO: 1337914 - DNA, 25 bp, Homo sapien
aatccttagggactgttggtctgca

SEQ ID NO: 1337915 - DNA, 25 bp, Homo sapien
ttaatccttagggactgttggtctg

SEQ ID NO: 1337916 - DNA, 25 bp, Homo sapien
cttagggactgttggtctgcatggc

SEQ ID NO: 1337917 - DNA, 25 bp, Homo sapien
ttgattggctctcaacctgagtcat

SEQ ID NO: 1337918 - DNA, 25 bp, Homo sapien
cttcctgcacaatccacactaaggt

SEQ ID NO: 1337919 - DNA, 25 bp, Homo sapien
tccacactaaggtctccttgattga

SEQ ID NO: 1337920 - DNA, 25 bp, Homo sapien
ctaaggtctccttgattgattggct

SEQ ID NO: 1337921 - DNA, 25 bp, Homo sapien
tccggctcccagagtcgtgcttcat

SEQ ID NO: 1337922 - DNA, 25 bp, Homo sapien
gggtctccggctcccagagtcgtgc

SEQ ID NO: 1337923 - DNA, 25 bp, Homo sapien
aatattccctttgaactgccgtgtc

SEQ ID NO: 1337924 - DNA, 25 bp, Homo sapien
attccctttgaactgccgtgtccac

SEQ ID NO: 1337925 - DNA, 25 bp, Homo sapien
ccaagtgtcacacccagttctggat

SEQ ID NO: 1337926 - DNA, 25 bp, Homo sapien
ggattccacattaacaacctccttc

SEQ ID NO: 1337927 - DNA, 25 bp, Homo sapien
tccgcagtgttaaactttgcccttg

SEQ ID NO: 1337928 - DNA, 25 bp, Homo sapien
tgtcacacccagttctggattccac

SEQ ID NO: 1337929 - DNA, 25 bp, Homo sapien
taacgcaggggttgaggccatggcc

SEQ ID NO: 1337930 - DNA, 25 bp, Homo sapien
accacattttggaagacggcccctg

SEQ ID NO: 1337931 - DNA, 25 bp, Homo sapien
cattttggaagacggcccctgtgtt

SEQ ID NO: 1337932 - DNA, 25 bp, Homo sapien
ttagagcatttgttgctaacgcagg

SEQ ID NO: 1337933 - DNA, 25 bp, Homo sapien
aatggaagagattggcaccgtcaga

SEQ ID NO: 1337934 - DNA, 25 bp, Homo sapien
gagattggcaccgtcagaggtacct

SEQ ID NO: 1337935 - DNA, 25 bp, Homo sapien
tgaggcgtacgaaatggaagagatt

SEQ ID NO: 1337936 - DNA, 25 bp, Homo sapien
accgtcagaggtaccttctgccatt

SEQ ID NO: 1337937 - DNA, 25 bp, Homo sapien
tgactactgtgagtattccagaatc

SEQ ID NO: 1337938 - DNA, 25 bp, Homo sapien
gtattccagaatcccagcggaatgg

SEQ ID NO: 1337939 - DNA, 25 bp, Homo sapien
ttcatggagctgtaaattaacgggc

SEQ ID NO: 1337940 - DNA, 25 bp, Homo sapien
aatgggattcgaactttcatggagc

SEQ ID NO: 1337941 - DNA, 25 bp, Homo sapien
tggtcaaattataggagtgaacaag

SEQ ID NO: 1337942 - DNA, 25 bp, Homo sapien
aagtagctgggttaattgtcatgaa

SEQ ID NO: 1337943 - DNA, 25 bp, Homo sapien
tgaaataagtactaatggtcaaatt

SEQ ID NO: 1337944 - DNA, 25 bp, Homo sapien
attagtgtgatgttgaaataagtac

SEQ ID NO: 1337945 - DNA, 25 bp, Homo sapien
tttcttgctaatgatagtcacgtct

SEQ ID NO: 1337946 - DNA, 25 bp, Homo sapien
tgctaatgatagtcacgtctgggtc

SEQ ID NO: 1337947 - DNA, 25 bp, Homo sapien
gtctggttgctcttagcaaccagac

SEQ ID NO: 1337948 - DNA, 25 bp, Homo sapien
ccagacatgatgtaacaccaggatg

SEQ ID NO: 1337949 - DNA, 25 bp, Homo sapien
tagaaccctttctgataccgtcaac

SEQ ID NO: 1337950 - DNA, 25 bp, Homo sapien
agcattggtttttgttaggccttgg

SEQ ID NO: 1337951 - DNA, 25 bp, Homo sapien
cctgaagcaacccaattagaaccct

SEQ ID NO: 1337952 - DNA, 25 bp, Homo sapien
aagaattcagaagcattggtttttg

SEQ ID NO: 1337953 - DNA, 25 bp, Homo sapien
acttattcttgtgtcgctattgacc

SEQ ID NO: 1337954 - DNA, 25 bp, Homo sapien
ctccacttattcttgtgtcgctatt

SEQ ID NO: 1337955 - DNA, 25 bp, Homo sapien
ccacttattcttgtgtcgctattga

SEQ ID NO: 1337956 - DNA, 25 bp, Homo sapien
cttattcttgtgtcgctattgacca

SEQ ID NO: 1337957 - DNA, 25 bp, Homo sapien
tgagatctgcaatatataacgggac

SEQ ID NO: 1337958 - DNA, 25 bp, Homo sapien
tggctagcggaggactacccttgct

SEQ ID NO: 1337959 - DNA, 25 bp, Homo sapien
catggtagcgtgagcattaggtgac

SEQ ID NO: 1337960 - DNA, 25 bp, Homo sapien
taagtatataacatggcccgcaagg

SEQ ID NO: 1337961 - DNA, 25 bp, Homo sapien
tatcagacacctcattgtaccagag

SEQ ID NO: 1337962 - DNA, 25 bp, Homo sapien
tgtaccagagattgtccagaagttt

SEQ ID NO: 1337963 - DNA, 25 bp, Homo sapien
cagatcaagggtacttgttagggaa

SEQ ID NO: 1337964 - DNA, 25 bp, Homo sapien
gaagtcactataatggattacgcca

SEQ ID NO: 1337965 - DNA, 25 bp, Homo sapien
tatagccagccagcatactttgcct

SEQ ID NO: 1337966 - DNA, 25 bp, Homo sapien
tattgtcctgtacggtcggtggcag

SEQ ID NO: 1337967 - DNA, 25 bp, Homo sapien
gatttttgaatgcacgtgcgcagga

SEQ ID NO: 1337968 - DNA, 25 bp, Homo sapien
tatttgaccaaagtcggtgctgcac

SEQ ID NO: 1337969 - DNA, 25 bp, Homo sapien
caagattgggcaaagatgagtccct

SEQ ID NO: 1337970 - DNA, 25 bp, Homo sapien
tctgatcattcgtgcgcagagggcc

SEQ ID NO: 1337971 - DNA, 25 bp, Homo sapien
cagtctagggtgataacgaacaggg

SEQ ID NO: 1337972 - DNA, 25 bp, Homo sapien
gacagttacgtgtggtcagcccgct

SEQ ID NO: 1337973 - DNA, 25 bp, Homo sapien
ggcataaaggactgacaaaacctgg

SEQ ID NO: 1337974 - DNA, 25 bp, Homo sapien
ggtagcaggcctccatagaacaaat

SEQ ID NO: 1337975 - DNA, 25 bp, Homo sapien
caccggctcagctttcattcaaaaa

SEQ ID NO: 1337976 - DNA, 25 bp, Homo sapien
tgtttgacagtaaacccgctctgcc

SEQ ID NO: 1337977 - DNA, 25 bp, Homo sapien
agctttatcaggttctaggaggtcc

SEQ ID NO: 1337978 - DNA, 25 bp, Homo sapien
tgagagaactaacggctcggtgcct

SEQ ID NO: 1337979 - DNA, 25 bp, Homo sapien
gaccatcgtctctgcactgcgaagg

SEQ ID NO: 1337980 - DNA, 25 bp, Homo sapien
gaaatctgtttttatgagccgggcc

SEQ ID NO: 1337981 - DNA, 25 bp, Homo sapien
ttgctgcttccacttccaccaccat

SEQ ID NO: 1337982 - DNA, 25 bp, Homo sapien
tccttggaatccctcaattgccaca

SEQ ID NO: 1337983 - DNA, 25 bp, Homo sapien
aattccttggaatccctcaattgcc

SEQ ID NO: 1337984 - DNA, 25 bp, Homo sapien
ccttggaatccctcaattgccacac

SEQ ID NO: 1337985 - DNA, 25 bp, Homo sapien
tctgaatggcatttcacttctttgc

SEQ ID NO: 1337986 - DNA, 25 bp, Homo sapien
gagcaagcccaaaggtctaaccgat

SEQ ID NO: 1337987 - DNA, 25 bp, Homo sapien
taaaagttgctggacaatggacacc

SEQ ID NO: 1337988 - DNA, 25 bp, Homo sapien
tctgcctgggcgtcactaatgtagc

SEQ ID NO: 1337989 - DNA, 25 bp, Homo sapien
tcagctctagggaagctactgacag

SEQ ID NO: 1337990 - DNA, 25 bp, Homo sapien
tgatctcaagtctacaggtgcagga

SEQ ID NO: 1337991 - DNA, 25 bp, Homo sapien
gcctggttctcaagggatggactaa

SEQ ID NO: 1337992 - DNA, 25 bp, Homo sapien
gaagcacatgatctaaaatctcagt

SEQ ID NO: 1337993 - DNA, 25 bp, Homo sapien
gagcaggtcattcaacccctctgtg

SEQ ID NO: 1337994 - DNA, 25 bp, Homo sapien
gatacacaggtcaacaaatatacag

SEQ ID NO: 1337995 - DNA, 25 bp, Homo sapien
cacgatacacaggtcaacaaatata

SEQ ID NO: 1337996 - DNA, 25 bp, Homo sapien
ctcctgtcacgatacacaggtcaac

SEQ ID NO: 1337997 - DNA, 25 bp, Homo sapien
tgtcacgatacacaggtcaacaaat

SEQ ID NO: 1337998 - DNA, 25 bp, Homo sapien
gaatggtggtttctcccgtaggagc

SEQ ID NO: 1337999 - DNA, 25 bp, Homo sapien
tatagcctggtgactgtaatttaca

SEQ ID NO: 1338000 - DNA, 25 bp, Homo sapien
gcatccataaaacctgcccacagag

SEQ ID NO: 1338001 - DNA, 25 bp, Homo sapien
gccatacctcaagaaagctgtgggt

SEQ ID NO: 1338002 - DNA, 25 bp, Homo sapien
gcccatacacgttagctactgttat

SEQ ID NO: 1338003 - DNA, 25 bp, Homo sapien
ctgttattacacaagttgaatatcc

SEQ ID NO: 1338004 - DNA, 25 bp, Homo sapien
ggaatatttgcatatctgtaatgag

SEQ ID NO: 1338005 - DNA, 25 bp, Homo sapien
cgtagatgcccatacacgttagcta

SEQ ID NO: 1338006 - DNA, 25 bp, Homo sapien
ccttgtctcatatctatccttttct

SEQ ID NO: 1338007 - DNA, 25 bp, Homo sapien
catgatagtcttatgttcaagagga

SEQ ID NO: 1338008 - DNA, 25 bp, Homo sapien
tgtgtagcctgctctatagttcacg

SEQ ID NO: 1338009 - DNA, 25 bp, Homo sapien
tatagttcacgaagtaccagcacct

SEQ ID NO: 1338010 - DNA, 25 bp, Homo sapien
ggaaactcaatccttctggccatgc

SEQ ID NO: 1338011 - DNA, 25 bp, Homo sapien
gaataaagcttccatcctgtgagtc

SEQ ID NO: 1338012 - DNA, 25 bp, Homo sapien
tcttggcttcacctgcctggagtag

SEQ ID NO: 1338013 - DNA, 25 bp, Homo sapien
ggtaaagggatgcattctggctcaa

SEQ ID NO: 1338014 - DNA, 25 bp, Homo sapien
attttatttgtccataagttgttgg

SEQ ID NO: 1338015 - DNA, 25 bp, Homo sapien
tcattcaggtcactgaaaatggtgt

SEQ ID NO: 1338016 - DNA, 25 bp, Homo sapien
ggtgcaccccatcacctatgtataa

SEQ ID NO: 1338017 - DNA, 25 bp, Homo sapien
aacaattcaattatgcccttttaga

SEQ ID NO: 1338018 - DNA, 25 bp, Homo sapien
tgtccttggccgatttttgatggga

SEQ ID NO: 1338019 - DNA, 25 bp, Homo sapien
gtccttggccgatttttgatgggat

SEQ ID NO: 1338020 - DNA, 25 bp, Homo sapien
ccttggccgatttttgatgggattg

SEQ ID NO: 1338021 - DNA, 25 bp, Homo sapien
tccttggccgatttttgatgggatt

SEQ ID NO: 1338022 - DNA, 25 bp, Homo sapien
gatgccctctggattggactgagag

SEQ ID NO: 1338023 - DNA, 25 bp, Homo sapien
tgagagggctcagtaatgttaatcc

SEQ ID NO: 1338024 - DNA, 25 bp, Homo sapien
tattctgctcaaccatattgatgcc

SEQ ID NO: 1338025 - DNA, 25 bp, Homo sapien
cctctcttctacacaagatctgaac

SEQ ID NO: 1338026 - DNA, 25 bp, Homo sapien
cccttactggacctaactgaagact

SEQ ID NO: 1338027 - DNA, 25 bp, Homo sapien
caggaaccagacccttactggacct

SEQ ID NO: 1338028 - DNA, 25 bp, Homo sapien
ctgatgaaggaccttgagttttgag

SEQ ID NO: 1338029 - DNA, 25 bp, Homo sapien
accagacccttactggacctaactg

SEQ ID NO: 1338030 - DNA, 25 bp, Homo sapien
ggtcctttagcatgtccatcatcca

SEQ ID NO: 1338031 - DNA, 25 bp, Homo sapien
gagtctaggagtgtcctgataagtg

SEQ ID NO: 1338032 - DNA, 25 bp, Homo sapien
tcagttgtgttagactggtatgttt

SEQ ID NO: 1338033 - DNA, 25 bp, Homo sapien
gtgtcaagatctggcacctcaatca

SEQ ID NO: 1338034 - DNA, 25 bp, Homo sapien
gactttctgaaatatcctcttggca

SEQ ID NO: 1338035 - DNA, 25 bp, Homo sapien
catgggcctgggagtgtctataact

SEQ ID NO: 1338036 - DNA, 25 bp, Homo sapien
gaatggtagagccagattgttcctc

SEQ ID NO: 1338037 - DNA, 25 bp, Homo sapien
cgctgcttaagacaagaagtaggca

SEQ ID NO: 1338038 - DNA, 25 bp, Homo sapien
ccacattctgaaaagtgctcatagg

SEQ ID NO: 1338039 - DNA, 25 bp, Homo sapien
tctgaaaagtgctcataggtgacat

SEQ ID NO: 1338040 - DNA, 25 bp, Homo sapien
cattctgaaaagtgctcataggtga

SEQ ID NO: 1338041 - DNA, 25 bp, Homo sapien
aaagtgctcataggtgacatggtct

SEQ ID NO: 1338042 - DNA, 25 bp, Homo sapien
tacctttgctaggtacaggcccgtc

SEQ ID NO: 1338043 - DNA, 25 bp, Homo sapien
cacaaatacctttgctaggtacagg

SEQ ID NO: 1338044 - DNA, 25 bp, Homo sapien
cctattcacattggtagccttggca

SEQ ID NO: 1338045 - DNA, 25 bp, Homo sapien
gtagccttggcagggaaagttccag

SEQ ID NO: 1338046 - DNA, 25 bp, Homo sapien
tgcacatgggctgattaaaccaaac

SEQ ID NO: 1338047 - DNA, 25 bp, Homo sapien
tgtgcacatgggctgattaaaccaa

SEQ ID NO: 1338048 - DNA, 25 bp, Homo sapien
agaatgtgcacatgggctgattaaa

SEQ ID NO: 1338049 - DNA, 25 bp, Homo sapien
catgggctgattaaaccaaacgacc

SEQ ID NO: 1338050 - DNA, 25 bp, Homo sapien
gctattaccttactgccgccatcca

SEQ ID NO: 1338051 - DNA, 25 bp, Homo sapien
tccgaaccgcagtgaggctgcgtgt

SEQ ID NO: 1338052 - DNA, 25 bp, Homo sapien
gaggctgcgtgtggtttatgtatca

SEQ ID NO: 1338053 - DNA, 25 bp, Homo sapien
tgtatcatgtactggagcccagaca

SEQ ID NO: 1338054 - DNA, 25 bp, Homo sapien
ggagcccagcagttgtgagctatga

SEQ ID NO: 1338055 - DNA, 25 bp, Homo sapien
gctctttgtgattgcagaacctggg

SEQ ID NO: 1338056 - DNA, 25 bp, Homo sapien
cacagtctcttcctcgttattacga

SEQ ID NO: 1338057 - DNA, 25 bp, Homo sapien
cagagagaacacagcattggcaatg

SEQ ID NO: 1338058 - DNA, 25 bp, Homo sapien
gttacagtagtggtctccggattca

SEQ ID NO: 1338059 - DNA, 25 bp, Homo sapien
tgatctctaaatagcatctatgatg

SEQ ID NO: 1338060 - DNA, 25 bp, Homo sapien
tatgatgatgcgcactgagctgaat

SEQ ID NO: 1338061 - DNA, 25 bp, Homo sapien
gaatagttacagtagtggtctccgg

SEQ ID NO: 1338062 - DNA, 25 bp, Homo sapien
acaagcttggttgatactgttccca

SEQ ID NO: 1338063 - DNA, 25 bp, Homo sapien
gatgataggtttccaagtatggtac

SEQ ID NO: 1338064 - DNA, 25 bp, Homo sapien
tcgtcatacttcataacttgggatg

SEQ ID NO: 1338065 - DNA, 25 bp, Homo sapien
gaattttgatcaaacacacatggcc

SEQ ID NO: 1338066 - DNA, 25 bp, Homo sapien
tctcagccgggggatctggctccac

SEQ ID NO: 1338067 - DNA, 25 bp, Homo sapien
cccagggcttctcagccgggggatc

SEQ ID NO: 1338068 - DNA, 25 bp, Homo sapien
ggcggccgccgcagagagcaggccc

SEQ ID NO: 1338069 - DNA, 25 bp, Homo sapien
cggcggccgccgcagagagcaggcc

SEQ ID NO: 1338070 - DNA, 25 bp, Homo sapien
tgccaatggttgctaaacttatgaa

SEQ ID NO: 1338071 - DNA, 25 bp, Homo sapien
gctcatgctgctctactccaaaaat

SEQ ID NO: 1338072 - DNA, 25 bp, Homo sapien
tctgctcatgctgctctactccaaa

SEQ ID NO: 1338073 - DNA, 25 bp, Homo sapien
aaaaatcaaacgctgcctggagcta

SEQ ID NO: 1338074 - DNA, 25 bp, Homo sapien
actccaaggagtggccaatgctcct

SEQ ID NO: 1338075 - DNA, 25 bp, Homo sapien
ccaaggagtggccaatgctccttac

SEQ ID NO: 1338076 - DNA, 25 bp, Homo sapien
tccaaggagtggccaatgctcctta

SEQ ID NO: 1338077 - DNA, 25 bp, Homo sapien
tcactccaaggagtggccaatgctc

SEQ ID NO: 1338078 - DNA, 25 bp, Homo sapien
aatatctgtacaacaacggtttttg

SEQ ID NO: 1338079 - DNA, 25 bp, Homo sapien
atctgtacaacaacggtttttgttg

SEQ ID NO: 1338080 - DNA, 25 bp, Homo sapien
atatctgtacaacaacggtttttgt

SEQ ID NO: 1338081 - DNA, 25 bp, Homo sapien
tcaacgcccgcaacgacgatgcgct

SEQ ID NO: 1338082 - DNA, 25 bp, Homo sapien
cgcaacgacgatgcgctgcggcagc

SEQ ID NO: 1338083 - DNA, 25 bp, Homo sapien
gggcgccgggcggtctgacttgcgc

SEQ ID NO: 1338084 - DNA, 25 bp, Homo sapien
tgacttgcgcgtcgtgcgggtgccc

SEQ ID NO: 1338085 - DNA, 25 bp, Homo sapien
caaaggcttcgtggacctgggtgac

SEQ ID NO: 1338086 - DNA, 25 bp, Homo sapien
aactgctcttcatcaacaacgcggg

SEQ ID NO: 1338087 - DNA, 25 bp, Homo sapien
tcaagtgaacaaagactgggcgctg

SEQ ID NO: 1338088 - DNA, 25 bp, Homo sapien
tgtgagggtgccgaattaggcccca

SEQ ID NO: 1338089 - DNA, 25 bp, Homo sapien
gttagcccggtagacctccatggac

SEQ ID NO: 1338090 - DNA, 25 bp, Homo sapien
gaggttagcccggtagacctccatg

SEQ ID NO: 1338091 - DNA, 25 bp, Homo sapien
atggacccagacatgcgaaaaggct

SEQ ID NO: 1338092 - DNA, 25 bp, Homo sapien
acccagacatgcgaaaaggctgcag

SEQ ID NO: 1338093 - DNA, 25 bp, Homo sapien
tgatgagcttccaggtcgctggcct

SEQ ID NO: 1338094 - DNA, 25 bp, Homo sapien
atgagcttccaggtcgctggcctta

SEQ ID NO: 1338095 - DNA, 25 bp, Homo sapien
gatgagcttccaggtcgctggcctt

SEQ ID NO: 1338096 - DNA, 25 bp, Homo sapien
tgagcttccaggtcgctggccttac

SEQ ID NO: 1338097 - DNA, 25 bp, Homo sapien
cagttgtcgagagtctggatgtggc

SEQ ID NO: 1338098 - DNA, 25 bp, Homo sapien
taggagagaggttatgggtattcat

SEQ ID NO: 1338099 - DNA, 25 bp, Homo sapien
taaagaattacgtattaggcaacag

SEQ ID NO: 1338100 - DNA, 25 bp, Homo sapien
taggcaacagaattaggcaaactag

SEQ ID NO: 1338101 - DNA, 25 bp, Homo sapien
tcaacaaccctttaagagtatagct

SEQ ID NO: 1338102 - DNA, 25 bp, Homo sapien
tttgaaacagacttactacctggcc

SEQ ID NO: 1338103 - DNA, 25 bp, Homo sapien
tatcacggtgaaaaagtaagttcca

SEQ ID NO: 1338104 - DNA, 25 bp, Homo sapien
tctgcaacctaaaggaacctcaggg

SEQ ID NO: 1338105 - DNA, 25 bp, Homo sapien
tcttgaggagtaccgacactagtaa

SEQ ID NO: 1338106 - DNA, 25 bp, Homo sapien
tggaaacatgacttacaatctgggc

SEQ ID NO: 1338107 - DNA, 25 bp, Homo sapien
taaatccatacactagaagttctct

SEQ ID NO: 1338108 - DNA, 25 bp, Homo sapien
tctctcatagagacagaagcccgag

SEQ ID NO: 1338109 - DNA, 25 bp, Homo sapien
gacaagtggcaacttgcctttgtaa

SEQ ID NO: 1338110 - DNA, 25 bp, Homo sapien
gaagcccgagaaacactattataca

SEQ ID NO: 1338111 - DNA, 25 bp, Homo sapien
tccttacatcttgagggtgtgtcac

SEQ ID NO: 1338112 - DNA, 25 bp, Homo sapien
caaatctgaatctggaatcccacct

SEQ ID NO: 1338113 - DNA, 25 bp, Homo sapien
gataatgcagatactggccttctca

SEQ ID NO: 1338114 - DNA, 25 bp, Homo sapien
ggtgtgtcactgttcaatcccatga

SEQ ID NO: 1338115 - DNA, 25 bp, Homo sapien
aaggatggtatctctgacttcagca

SEQ ID NO: 1338116 - DNA, 25 bp, Homo sapien
aagattatactgacccttagaggga

SEQ ID NO: 1338117 - DNA, 25 bp, Homo sapien
tagtagcagagtcctagaaaaccag

SEQ ID NO: 1338118 - DNA, 25 bp, Homo sapien
ttacagggaattcaggctttggact

SEQ ID NO: 1338119 - DNA, 25 bp, Homo sapien
caaagagtctgaagtgggaaccgaa

SEQ ID NO: 1338120 - DNA, 25 bp, Homo sapien
gagcgtggactaaaatgcttttcaa

SEQ ID NO: 1338121 - DNA, 25 bp, Homo sapien
tcaaaggattggagatgtttcaggc

SEQ ID NO: 1338122 - DNA, 25 bp, Homo sapien
aaccgaaggagccatgagcgtggac

SEQ ID NO: 1338123 - DNA, 25 bp, Homo sapien
cattagtaatactcagtcttgtaag

SEQ ID NO: 1338124 - DNA, 25 bp, Homo sapien
tctggttccatagtaatctataatg

SEQ ID NO: 1338125 - DNA, 25 bp, Homo sapien
ggatataattgcgtttttctaaatg

SEQ ID NO: 1338126 - DNA, 25 bp, Homo sapien
taatgtaactacttccatctgaagg

SEQ ID NO: 1338127 - DNA, 25 bp, Homo sapien
gctctagagtcacatattcccagct

SEQ ID NO: 1338128 - DNA, 25 bp, Homo sapien
tatactgggatagctcaaaggatca

SEQ ID NO: 1338129 - DNA, 25 bp, Homo sapien
caaggactgaattctgtgctccctg

SEQ ID NO: 1338130 - DNA, 25 bp, Homo sapien
taactaattgccaacagctctagag

SEQ ID NO: 1338131 - DNA, 25 bp, Homo sapien
agtaaagcatacctaccatccagga

SEQ ID NO: 1338132 - DNA, 25 bp, Homo sapien
gtgccaaacaaagggatagctcaaa

SEQ ID NO: 1338133 - DNA, 25 bp, Homo sapien
gcctgataccatgctacactggaag

SEQ ID NO: 1338134 - DNA, 25 bp, Homo sapien
ggataccccgagtcttatgatggca

SEQ ID NO: 1338135 - DNA, 25 bp, Homo sapien
tgccaacagggaacttattccagtg

SEQ ID NO: 1338136 - DNA, 25 bp, Homo sapien
cacaccatgtcaggtgctgttatgc

SEQ ID NO: 1338137 - DNA, 25 bp, Homo sapien
tgctagacattatacactaacagtg

SEQ ID NO: 1338138 - DNA, 25 bp, Homo sapien
aatggttagtgaagagttcatgcac

SEQ ID NO: 1338139 - DNA, 25 bp, Homo sapien
gcttaagccactacaaagtatcatc

SEQ ID NO: 1338140 - DNA, 25 bp, Homo sapien
ttttctatgaactatctggtcacag

SEQ ID NO: 1338141 - DNA, 25 bp, Homo sapien
aatagaataagctgatctgtacagt

SEQ ID NO: 1338142 - DNA, 25 bp, Homo sapien
gatacaaacacctcagcttaagcca

SEQ ID NO: 1338143 - DNA, 25 bp, Homo sapien
aatatcccatactggatgggaggct

SEQ ID NO: 1338144 - DNA, 25 bp, Homo sapien
atatcccatactggatgggaggctg

SEQ ID NO: 1338145 - DNA, 25 bp, Homo sapien
tatcccatactggatgggaggctga

SEQ ID NO: 1338146 - DNA, 25 bp, Homo sapien
taatctatccttcatgacatatata

SEQ ID NO: 1338147 - DNA, 25 bp, Homo sapien
tattatctaatctatccttcatgac

SEQ ID NO: 1338148 - DNA, 25 bp, Homo sapien
tttctgataaaaaactcgtattatc

SEQ ID NO: 1338149 - DNA, 25 bp, Homo sapien
aaaactcgtattatctaatctatcc

SEQ ID NO: 1338150 - DNA, 25 bp, Homo sapien
caatactagtatggagtgcctgtcc

SEQ ID NO: 1338151 - DNA, 25 bp, Homo sapien
tagttggaaacatgaccaggattcc

SEQ ID NO: 1338152 - DNA, 25 bp, Homo sapien
caaatcatatttgagcacgggatat

SEQ ID NO: 1338153 - DNA, 25 bp, Homo sapien
gaactactaactggtagagcacagt

SEQ ID NO: 1338154 - DNA, 25 bp, Homo sapien
aatgaaatcaattaggctcccaatt

SEQ ID NO: 1338155 - DNA, 25 bp, Homo sapien
caattccacaaaaccctacagtgca

SEQ ID NO: 1338156 - DNA, 25 bp, Homo sapien
aaatcaattaggctcccaattccac

SEQ ID NO: 1338157 - DNA, 25 bp, Homo sapien
cacaaaaccctacagtgcaaaactt

SEQ ID NO: 1338158 - DNA, 25 bp, Homo sapien
tgacaacaaaagtagttgctgggct

SEQ ID NO: 1338159 - DNA, 25 bp, Homo sapien
tggaccatagttaacatcacacgtt

SEQ ID NO: 1338160 - DNA, 25 bp, Homo sapien
cacacgtttggagtaagatatgctg

SEQ ID NO: 1338161 - DNA, 25 bp, Homo sapien
tgtaagtcactgtaatgattaaacc

SEQ ID NO: 1338162 - DNA, 25 bp, Homo sapien
cactatttccaagggtctcactgtg

SEQ ID NO: 1338163 - DNA, 25 bp, Homo sapien
ctcccaaaatgttgaaattacaagt

SEQ ID NO: 1338164 - DNA, 25 bp, Homo sapien
gtgttgcccaggttggtcttgaact

SEQ ID NO: 1338165 - DNA, 25 bp, Homo sapien
aaatgttgaaattacaagtgtgagt

SEQ ID NO: 1338166 - DNA, 25 bp, Homo sapien
tacaatgacctaaatgacatgcaat

SEQ ID NO: 1338167 - DNA, 25 bp, Homo sapien
tactccaggagtaggtaatatttac

SEQ ID NO: 1338168 - DNA, 25 bp, Homo sapien
tgtcacacccaatagtttcctcatg

SEQ ID NO: 1338169 - DNA, 25 bp, Homo sapien
gacatgcaatgacatacactgtaca

SEQ ID NO: 1338170 - DNA, 25 bp, Homo sapien
tacacgatcagctaaattgtcccct

SEQ ID NO: 1338171 - DNA, 25 bp, Homo sapien
tatgtcactatgttgtctctgctgg

SEQ ID NO: 1338172 - DNA, 25 bp, Homo sapien
gagctgaggacggagcataccttga

SEQ ID NO: 1338173 - DNA, 25 bp, Homo sapien
taaaggacccaactccatagcaaga

SEQ ID NO: 1338174 - DNA, 25 bp, Homo sapien
taagtcttcaataagggcaggcatg

SEQ ID NO: 1338175 - DNA, 25 bp, Homo sapien
taaataaagcatgatctctggagcc

SEQ ID NO: 1338176 - DNA, 25 bp, Homo sapien
cactagctgagtgtccttgggtaaa

SEQ ID NO: 1338177 - DNA, 25 bp, Homo sapien
tcttacctaagctgaactgttgggc

SEQ ID NO: 1338178 - DNA, 25 bp, Homo sapien
caaagcagggtatccaaggtaaaat

SEQ ID NO: 1338179 - DNA, 25 bp, Homo sapien
gtaaaatcgatctgctcccaaccat

SEQ ID NO: 1338180 - DNA, 25 bp, Homo sapien
gcgactgccactttgtaggaatagc

SEQ ID NO: 1338181 - DNA, 25 bp, Homo sapien
aaaagagacaatgcgactgccactt

SEQ ID NO: 1338182 - DNA, 25 bp, Homo sapien
gctgtgtagaatgccgggagccatt

SEQ ID NO: 1338183 - DNA, 25 bp, Homo sapien
tatccccgtgtagcttacaggctgg

SEQ ID NO: 1338184 - DNA, 25 bp, Homo sapien
gaatagggcaccaaactagaagcag

SEQ ID NO: 1338185 - DNA, 25 bp, Homo sapien
gaaaaagtagtaagtggcccagaga

SEQ ID NO: 1338186 - DNA, 25 bp, Homo sapien
caacttcgttcccagtaaaatgtgt

SEQ ID NO: 1338187 - DNA, 25 bp, Homo sapien
cttacaagttatgttgggtgctgga

SEQ ID NO: 1338188 - DNA, 25 bp, Homo sapien
aatgtgtttcattgccactggaatc

SEQ ID NO: 1338189 - DNA, 25 bp, Homo sapien
acatttcggcaagatatgggcttga

SEQ ID NO: 1338190 - DNA, 25 bp, Homo sapien
gcatatagtgagtacagaccaggga

SEQ ID NO: 1338191 - DNA, 25 bp, Homo sapien
tcactgaaaggagatcaacatggtt

SEQ ID NO: 1338192 - DNA, 25 bp, Homo sapien
agtgcacaagatagcctccccacaa

SEQ ID NO: 1338193 - DNA, 25 bp, Homo sapien
ttacccagtccaaaaaatcaatagc

SEQ ID NO: 1338194 - DNA, 25 bp, Homo sapien
tattcatagatgatataagtggaga

SEQ ID NO: 1338195 - DNA, 25 bp, Homo sapien
agtattcatagatgatataagtgga

SEQ ID NO: 1338196 - DNA, 25 bp, Homo sapien
ggcactagccaagaactatcaggta

SEQ ID NO: 1338197 - DNA, 25 bp, Homo sapien
tatggcactagccaagaactatcag

SEQ ID NO: 1338198 - DNA, 25 bp, Homo sapien
gctgtgtagtttgtacagttaactg

SEQ ID NO: 1338199 - DNA, 25 bp, Homo sapien
ttgcgtagcgtcatttatttttgga

SEQ ID NO: 1338200 - DNA, 25 bp, Homo sapien
cagttaactggttcttgcgtagcgt

SEQ ID NO: 1338201 - DNA, 25 bp, Homo sapien
catgagctgtgtagtttgtacagtt

SEQ ID NO: 1338202 - DNA, 25 bp, Homo sapien
atgttttactgaacaagtaagcaca

SEQ ID NO: 1338203 - DNA, 25 bp, Homo sapien
ccctagccagtcctgacggcagcga

SEQ ID NO: 1338204 - DNA, 25 bp, Homo sapien
tacagccctagccagtcctgacggc

SEQ ID NO: 1338205 - DNA, 25 bp, Homo sapien
acagccctagccagtcctgacggca

SEQ ID NO: 1338206 - DNA, 25 bp, Homo sapien
agccctagccagtcctgacggcagc

SEQ ID NO: 1338207 - DNA, 25 bp, Homo sapien
ctcgcctccatgggggggtgttctc

SEQ ID NO: 1338208 - DNA, 25 bp, Homo sapien
ttgaggtcctcgcacttaagcgact

SEQ ID NO: 1338209 - DNA, 25 bp, Homo sapien
ctccggagcagacggaccagacggc

SEQ ID NO: 1338210 - DNA, 25 bp, Homo sapien
tcctgtagtgactgagacgaaccac

SEQ ID NO: 1338211 - DNA, 25 bp, Homo sapien
aggacaccaacgagtctggccgtca

SEQ ID NO: 1338212 - DNA, 25 bp, Homo sapien
tggagaccgacactttctcgccact

SEQ ID NO: 1338213 - DNA, 25 bp, Homo sapien
gaagggcaacagggcgaggttctta

SEQ ID NO: 1338214 - DNA, 25 bp, Homo sapien
cttggagaccgacactttctcgcca

SEQ ID NO: 1338215 - DNA, 25 bp, Homo sapien
gagggagaagggcaacagggcgagg

SEQ ID NO: 1338216 - DNA, 25 bp, Homo sapien
tcttcgcgtgttcttctgcccgtga

SEQ ID NO: 1338217 - DNA, 25 bp, Homo sapien
gaggccagttccgtctcttcgcgtg

SEQ ID NO: 1338218 - DNA, 25 bp, Homo sapien
cgtgagcccgtggaatcacattggg

SEQ ID NO: 1338219 - DNA, 25 bp, Homo sapien
cattgggagacccttttaaaatatg

SEQ ID NO: 1338220 - DNA, 25 bp, Homo sapien
aggagctaaggttaatctttgagtg

SEQ ID NO: 1338221 - DNA, 25 bp, Homo sapien
ccttggaaggagctaaggttaatct

SEQ ID NO: 1338222 - DNA, 25 bp, Homo sapien
tggaaggagctaaggttaatctttg

SEQ ID NO: 1338223 - DNA, 25 bp, Homo sapien
gaaggagctaaggttaatctttgag

SEQ ID NO: 1338224 - DNA, 25 bp, Homo sapien
aggaaacgagtggtttaggcaatca

SEQ ID NO: 1338225 - DNA, 25 bp, Homo sapien
gaaacgagtggtttaggcaatcagg

SEQ ID NO: 1338226 - DNA, 25 bp, Homo sapien
acgagtggtttaggcaatcaggtgc

SEQ ID NO: 1338227 - DNA, 25 bp, Homo sapien
aacgagtggtttaggcaatcaggtg

SEQ ID NO: 1338228 - DNA, 25 bp, Homo sapien
gacaaagtgttaagcggattgaccc

SEQ ID NO: 1338229 - DNA, 25 bp, Homo sapien
tattttgcgtcagcgaatagagaaa

SEQ ID NO: 1338230 - DNA, 25 bp, Homo sapien
cggattgacccaacgctttcatcga

SEQ ID NO: 1338231 - DNA, 25 bp, Homo sapien
tgggtctcgctctacacgcaggcct

SEQ ID NO: 1338232 - DNA, 25 bp, Homo sapien
gaattcacctgcacgtaaacagcca

SEQ ID NO: 1338233 - DNA, 25 bp, Homo sapien
cgcgcccggtaggaattcacctgca

SEQ ID NO: 1338234 - DNA, 25 bp, Homo sapien
cgtaaacagccagggcaaccgtcct

SEQ ID NO: 1338235 - DNA, 25 bp, Homo sapien
ctgcacgtaaacagccagggcaacc

SEQ ID NO: 1338236 - DNA, 25 bp, Homo sapien
tgatctaaattctcgtcaacaggag

SEQ ID NO: 1338237 - DNA, 25 bp, Homo sapien
taattggctattgaatcaactggca

SEQ ID NO: 1338238 - DNA, 25 bp, Homo sapien
taaacaattggcctacagagcgggt

SEQ ID NO: 1338239 - DNA, 25 bp, Homo sapien
taccatgtgctaggccaaatgctct

SEQ ID NO: 1338240 - DNA, 25 bp, Homo sapien
tcagcaaagagactgtattgggacc

SEQ ID NO: 1338241 - DNA, 25 bp, Homo sapien
cctgtaacctataacctgtgggtag

SEQ ID NO: 1338242 - DNA, 25 bp, Homo sapien
gactgtattgggacctgtaacctat

SEQ ID NO: 1338243 - DNA, 25 bp, Homo sapien
aacctgtgggtagcattggcataga

SEQ ID NO: 1338244 - DNA, 25 bp, Homo sapien
ccaccttgcccaggcgtattttcct

SEQ ID NO: 1338245 - DNA, 25 bp, Homo sapien
caccttgcccaggcgtattttcctt

SEQ ID NO: 1338246 - DNA, 25 bp, Homo sapien
ttgcccaggcgtattttccttatga

SEQ ID NO: 1338247 - DNA, 25 bp, Homo sapien
ccttgcccaggcgtattttccttat

SEQ ID NO: 1338248 - DNA, 25 bp, Homo sapien
gtggtgtgattatggatcattgtag

SEQ ID NO: 1338249 - DNA, 25 bp, Homo sapien
aacactatttttatctctctcaaag

SEQ ID NO: 1338250 - DNA, 25 bp, Homo sapien
tctcccctcttgagtgactcaattt

SEQ ID NO: 1338251 - DNA, 25 bp, Homo sapien
tgagtgactcaatttttgccaaagc

SEQ ID NO: 1338252 - DNA, 25 bp, Homo sapien
ttttgccaaagctgatatttttgaa

SEQ ID NO: 1338253 - DNA, 25 bp, Homo sapien
tctggagttcccagttgagtgtgat

SEQ ID NO: 1338254 - DNA, 25 bp, Homo sapien
caaggtgtgatgatttgtgctcctc

SEQ ID NO: 1338255 - DNA, 25 bp, Homo sapien
tagtagataaagtcatagcccttcc

SEQ ID NO: 1338256 - DNA, 25 bp, Homo sapien
tagcccttcctagagtgtgccagag

SEQ ID NO: 1338257 - DNA, 25 bp, Homo sapien
cctccaccttgtttgtgagtgtcat

SEQ ID NO: 1338258 - DNA, 25 bp, Homo sapien
agcgtgttgcttccctctctgaggt

SEQ ID NO: 1338259 - DNA, 25 bp, Homo sapien
tcccttagacatttcctcactttgt

SEQ ID NO: 1338260 - DNA, 25 bp, Homo sapien
ccctgggcagtgtaccagagaacag

SEQ ID NO: 1338261 - DNA, 25 bp, Homo sapien
aagacagcttagtaatatgttcata

SEQ ID NO: 1338262 - DNA, 25 bp, Homo sapien
tctcacgtaggctgtaaaggtaacc

SEQ ID NO: 1338263 - DNA, 25 bp, Homo sapien
gagtaagactatttcagcccgaatg

SEQ ID NO: 1338264 - DNA, 25 bp, Homo sapien
cacttacacccgttgatcaggatgg

SEQ ID NO: 1338265 - DNA, 25 bp, Homo sapien
ccaatactattctagagggtgccct

SEQ ID NO: 1338266 - DNA, 25 bp, Homo sapien
tctgtgcttctgcatagcccatatc

SEQ ID NO: 1338267 - DNA, 25 bp, Homo sapien
cagaaaggcccaacagcttttctac

SEQ ID NO: 1338268 - DNA, 25 bp, Homo sapien
agaaaggcccaacagcttttctact

SEQ ID NO: 1338269 - DNA, 25 bp, Homo sapien
tgcttctgcatagcccatatctgag

SEQ ID NO: 1338270 - DNA, 25 bp, Homo sapien
ttgaacttctgtttcttaaggaagc

SEQ ID NO: 1338271 - DNA, 25 bp, Homo sapien
cctgtatggcttgaacttctgtttc

SEQ ID NO: 1338272 - DNA, 25 bp, Homo sapien
tgtttcttaaggaagctcttaaaca

SEQ ID NO: 1338273 - DNA, 25 bp, Homo sapien
tcttaaggaagctcttaaacaccat

SEQ ID NO: 1338274 - DNA, 25 bp, Homo sapien
tggtaaactactaaaatgatcggta

SEQ ID NO: 1338275 - DNA, 25 bp, Homo sapien
tatatactgtcctatctggctttgg

SEQ ID NO: 1338276 - DNA, 25 bp, Homo sapien
taaaatgatcggtaggagcatgtgt

SEQ ID NO: 1338277 - DNA, 25 bp, Homo sapien
ggtcatgagtgagatttgcctggaa

SEQ ID NO: 1338278 - DNA, 25 bp, Homo sapien
ccatccctagcctggtactcctttc

SEQ ID NO: 1338279 - DNA, 25 bp, Homo sapien
tgtcccatccctagcctggtactcc

SEQ ID NO: 1338280 - DNA, 25 bp, Homo sapien
cctgtcccatccctagcctggtact

SEQ ID NO: 1338281 - DNA, 25 bp, Homo sapien
gtcccatccctagcctggtactcct

SEQ ID NO: 1338282 - DNA, 25 bp, Homo sapien
tataaaaaaatgagcccggtgtgtg

SEQ ID NO: 1338283 - DNA, 25 bp, Homo sapien
aaaaatgagcccggtgtgtggtgcg

SEQ ID NO: 1338284 - DNA, 25 bp, Homo sapien
ataaaaaaatgagcccggtgtgtgg

SEQ ID NO: 1338285 - DNA, 25 bp, Homo sapien
aatgagcccggtgtgtggtgcgcac

SEQ ID NO: 1338286 - DNA, 25 bp, Homo sapien
tgaggcaggagaatcgcttgaacct

SEQ ID NO: 1338287 - DNA, 25 bp, Homo sapien
tgggagggggaggttacagtgagcc

SEQ ID NO: 1338288 - DNA, 25 bp, Homo sapien
attagcctagtgtggtggtgggcgc

SEQ ID NO: 1338289 - DNA, 25 bp, Homo sapien
ctgtaatcccagctactgaggaagc

SEQ ID NO: 1338290 - DNA, 25 bp, Homo sapien
agcagagtttctccagaggcctcgg

SEQ ID NO: 1338291 - DNA, 25 bp, Homo sapien
agcaagctgctttgcctttccactg

SEQ ID NO: 1338292 - DNA, 25 bp, Homo sapien
tggcactggaaaaaacatcaacagc

SEQ ID NO: 1338293 - DNA, 25 bp, Homo sapien
cataaacacccgtattggcactgga

SEQ ID NO: 1338294 - DNA, 25 bp, Homo sapien
agaatagaaacgtatgccgggcgca

SEQ ID NO: 1338295 - DNA, 25 bp, Homo sapien
aaccatttcccttgtagctaagtag

SEQ ID NO: 1338296 - DNA, 25 bp, Homo sapien
tagctaagtaggtaagaagatacaa

SEQ ID NO: 1338297 - DNA, 25 bp, Homo sapien
aaatatataatctagacagtggacg

SEQ ID NO: 1338298 - DNA, 25 bp, Homo sapien
ggcttttattatccacatgggccat

SEQ ID NO: 1338299 - DNA, 25 bp, Homo sapien
gggcttttattatccacatgggcca

SEQ ID NO: 1338300 - DNA, 25 bp, Homo sapien
gtggggcttttattatccacatggg

SEQ ID NO: 1338301 - DNA, 25 bp, Homo sapien
atttgtggggcttttattatccaca

SEQ ID NO: 1338302 - DNA, 25 bp, Homo sapien
gaaatgtaaattgtctggatccaga

SEQ ID NO: 1338303 - DNA, 25 bp, Homo sapien
taaaagccatgcatagtccgagtgt

SEQ ID NO: 1338304 - DNA, 25 bp, Homo sapien
cattagtgtcgcagggatcaccgca

SEQ ID NO: 1338305 - DNA, 25 bp, Homo sapien
tagcagtgtaaacactccctgggtc

SEQ ID NO: 1338306 - DNA, 25 bp, Homo sapien
tcctcggatgaggagattttctcca

SEQ ID NO: 1338307 - DNA, 25 bp, Homo sapien
tcacatcagagggagaaccctgttg

SEQ ID NO: 1338308 - DNA, 25 bp, Homo sapien
tctaactgttccgtaggcgcagagg

SEQ ID NO: 1338309 - DNA, 25 bp, Homo sapien
tgctttttcttcaggccagtggcct

SEQ ID NO: 1338310 - DNA, 25 bp, Homo sapien
ccctcaggctgtctccctgcagtac

SEQ ID NO: 1338311 - DNA, 25 bp, Homo sapien
tgatggtctgctctacttgcatctt

SEQ ID NO: 1338312 - DNA, 25 bp, Homo sapien
agtaccccctggtgccaagcacatg

SEQ ID NO: 1338313 - DNA, 25 bp, Homo sapien
tcatgatggtctgctctacttgcat

SEQ ID NO: 1338314 - DNA, 25 bp, Homo sapien
ccggagagtgaagtaccccctggtg

SEQ ID NO: 1338315 - DNA, 25 bp, Homo sapien
taaaagtaccatggccgggtgcagt

SEQ ID NO: 1338316 - DNA, 25 bp, Homo sapien
ttaatggcatttcagttggcaggca

SEQ ID NO: 1338317 - DNA, 25 bp, Homo sapien
catggactgcaagaacctaagggag

SEQ ID NO: 1338318 - DNA, 25 bp, Homo sapien
cttggccttatgcaaagtgggtgac

SEQ ID NO: 1338319 - DNA, 25 bp, Homo sapien
gagtttccccttcctgagtgtgaca

SEQ ID NO: 1338320 - DNA, 25 bp, Homo sapien
gatactgcctccagggataaaactg

SEQ ID NO: 1338321 - DNA, 25 bp, Homo sapien
gtatttgacaaagaggcgatctcca

SEQ ID NO: 1338322 - DNA, 25 bp, Homo sapien
tggcctccctgaacgtgaatctctt

SEQ ID NO: 1338323 - DNA, 25 bp, Homo sapien
tgtgccaccataatggtgcacataa

SEQ ID NO: 1338324 - DNA, 25 bp, Homo sapien
ggcaaaggctaggttcttattaggc

SEQ ID NO: 1338325 - DNA, 25 bp, Homo sapien
atggtgcacataaatgtcctggcag

SEQ ID NO: 1338326 - DNA, 25 bp, Homo sapien
cttattaggctttgctccaaagaca

SEQ ID NO: 1338327 - DNA, 25 bp, Homo sapien
tgtcgagtacctagtaaaattgatg

SEQ ID NO: 1338328 - DNA, 25 bp, Homo sapien
gagattgtcagtgcttgtcgagtac

SEQ ID NO: 1338329 - DNA, 25 bp, Homo sapien
tagggcagaggacataattaaagaa

SEQ ID NO: 1338330 - DNA, 25 bp, Homo sapien
gagactgactcctagacacatcttg

SEQ ID NO: 1338331 - DNA, 25 bp, Homo sapien
caggtcaggtcatgctctttcacat

SEQ ID NO: 1338332 - DNA, 25 bp, Homo sapien
taaactcctaggcatcgttatggct

SEQ ID NO: 1338333 - DNA, 25 bp, Homo sapien
tctgggaggcgtccttgactccctt

SEQ ID NO: 1338334 - DNA, 25 bp, Homo sapien
catccacctgccgttatatctaaac

SEQ ID NO: 1338335 - DNA, 25 bp, Homo sapien
tctaggtgaagggggtactaggctg

SEQ ID NO: 1338336 - DNA, 25 bp, Homo sapien
taggtgaagggggtactaggctgag

SEQ ID NO: 1338337 - DNA, 25 bp, Homo sapien
gtgaagggggtactaggctgagggc

SEQ ID NO: 1338338 - DNA, 25 bp, Homo sapien
tgaagggggtactaggctgagggcc

SEQ ID NO: 1338339 - DNA, 25 bp, Homo sapien
tacagcactttctgatgtggtctcc

SEQ ID NO: 1338340 - DNA, 25 bp, Homo sapien
gccattgcaaacttgtaacagacag

SEQ ID NO: 1338341 - DNA, 25 bp, Homo sapien
cactcaaacatggtagccacactga

SEQ ID NO: 1338342 - DNA, 25 bp, Homo sapien
gtgcctaactcacccgctggcgtag

SEQ ID NO: 1338343 - DNA, 25 bp, Homo sapien
taatggatacggctatgcaggtggc

SEQ ID NO: 1338344 - DNA, 25 bp, Homo sapien
tgtttggatgacaccgacgtacccc

SEQ ID NO: 1338345 - DNA, 25 bp, Homo sapien
gatgatgaaattgcggcccaaggag

SEQ ID NO: 1338346 - DNA, 25 bp, Homo sapien
ataaatgttcgcgaagcaccgggct

SEQ ID NO: 1338347 - DNA, 25 bp, Homo sapien
cgatggacaaagctgtgcggccagc

SEQ ID NO: 1338348 - DNA, 25 bp, Homo sapien
tatgggtgggtgacttcagagcgat

SEQ ID NO: 1338349 - DNA, 25 bp, Homo sapien
ggacctgccctgctccgcgtgggct

SEQ ID NO: 1338350 - DNA, 25 bp, Homo sapien
tcagagcgatggacaaagctgtgcg

SEQ ID NO: 1338351 - DNA, 25 bp, Homo sapien
tattccataacttcctttcagtgga

SEQ ID NO: 1338352 - DNA, 25 bp, Homo sapien
gtatgttgtttctaagtctctgcca

SEQ ID NO: 1338353 - DNA, 25 bp, Homo sapien
catgatatgctataagatgtttctc

SEQ ID NO: 1338354 - DNA, 25 bp, Homo sapien
catgaatttgcaatcctgtcctgtc

SEQ ID NO: 1338355 - DNA, 25 bp, Homo sapien
gggctcccacgcatgcaaataacta

SEQ ID NO: 1338356 - DNA, 25 bp, Homo sapien
cacggcaaagcactaaacgagtcag

SEQ ID NO: 1338357 - DNA, 25 bp, Homo sapien
cggggatagaatccagcggccatca

SEQ ID NO: 1338358 - DNA, 25 bp, Homo sapien
caaataactataaagcacggcaaag

SEQ ID NO: 1338359 - DNA, 25 bp, Homo sapien
taagcagcgcttgaaccatgtcctc

SEQ ID NO: 1338360 - DNA, 25 bp, Homo sapien
catgtcctccctgtcgtggctgact

SEQ ID NO: 1338361 - DNA, 25 bp, Homo sapien
ttgtcagtcaggctgctgtcgcagg

SEQ ID NO: 1338362 - DNA, 25 bp, Homo sapien
accatgagggccgaggatccatcgt

SEQ ID NO: 1338363 - DNA, 25 bp, Homo sapien
gcaaatgaccttttgaggagtcccc

SEQ ID NO: 1338364 - DNA, 25 bp, Homo sapien
catctatgatcactccaggggaaag

SEQ ID NO: 1338365 - DNA, 25 bp, Homo sapien
gttaaacatactccattcattcctg

SEQ ID NO: 1338366 - DNA, 25 bp, Homo sapien
ttcctgtaggttcaaaaaatgggca

SEQ ID NO: 1338367 - DNA, 25 bp, Homo sapien
gaagccaagggagtgatcattacgg

SEQ ID NO: 1338368 - DNA, 25 bp, Homo sapien
ctgagtagcttgaatgttcacattt

SEQ ID NO: 1338369 - DNA, 25 bp, Homo sapien
tgatcattacggcagtgtagccagc

SEQ ID NO: 1338370 - DNA, 25 bp, Homo sapien
tcattggtctctgcggaagccaagg

SEQ ID NO: 1338371 - DNA, 25 bp, Homo sapien
gaagcaatgggtgctgcaaaggctc

SEQ ID NO: 1338372 - DNA, 25 bp, Homo sapien
caagagaagcaatgggtgctgcaaa

SEQ ID NO: 1338373 - DNA, 25 bp, Homo sapien
agaagcaatgggtgctgcaaaggct

SEQ ID NO: 1338374 - DNA, 25 bp, Homo sapien
ctgcaagagaagcaatgggtgctgc

SEQ ID NO: 1338375 - DNA, 25 bp, Homo sapien
tctgaggatacccagcaagggaggc

SEQ ID NO: 1338376 - DNA, 25 bp, Homo sapien
aggtctgtccggctctggtgctcat

SEQ ID NO: 1338377 - DNA, 25 bp, Homo sapien
gtgggtcaggaacactcaggtctgt

SEQ ID NO: 1338378 - DNA, 25 bp, Homo sapien
gggccagagaagttacattgtccac

SEQ ID NO: 1338379 - DNA, 25 bp, Homo sapien
agtgaggctggacctcgtggaggta

SEQ ID NO: 1338380 - DNA, 25 bp, Homo sapien
ccgtgttcccgttgtgatcggccaa

SEQ ID NO: 1338381 - DNA, 25 bp, Homo sapien
ccacggcggggctagacgacttccg

SEQ ID NO: 1338382 - DNA, 25 bp, Homo sapien
tgatcggccaagttgacaagcagtt

SEQ ID NO: 1338383 - DNA, 25 bp, Homo sapien
cactcttgactgatggtgttcaagc

SEQ ID NO: 1338384 - DNA, 25 bp, Homo sapien
ctggagacgcggaaccactcttgac

SEQ ID NO: 1338385 - DNA, 25 bp, Homo sapien
gacgcggaaccactcttgactgatg

SEQ ID NO: 1338386 - DNA, 25 bp, Homo sapien
gaaccactcttgactgatggtgttc

SEQ ID NO: 1338387 - DNA, 25 bp, Homo sapien
aagaggttccccggccagcaagagt

SEQ ID NO: 1338388 - DNA, 25 bp, Homo sapien
gaggttccccggccagcaagagttc

SEQ ID NO: 1338389 - DNA, 25 bp, Homo sapien
agaggttccccggccagcaagagtt

SEQ ID NO: 1338390 - DNA, 25 bp, Homo sapien
caagaggttccccggccagcaagag

SEQ ID NO: 1338391 - DNA, 25 bp, Homo sapien
tacacaaggaaagacagctttggcc

SEQ ID NO: 1338392 - DNA, 25 bp, Homo sapien
catactttgtacttgtgcgatcagc

SEQ ID NO: 1338393 - DNA, 25 bp, Homo sapien
actttgtacttgtgcgatcagcccc

SEQ ID NO: 1338394 - DNA, 25 bp, Homo sapien
taggaatgcagcaacatactttgta

SEQ ID NO: 1338395 - DNA, 25 bp, Homo sapien
cagtgcccggcatgcattaagaaat

SEQ ID NO: 1338396 - DNA, 25 bp, Homo sapien
tcagtgcccggcatgcattaagaaa

SEQ ID NO: 1338397 - DNA, 25 bp, Homo sapien
agtgcccggcatgcattaagaaatt

SEQ ID NO: 1338398 - DNA, 25 bp, Homo sapien
cctcgcaggtgagatgggcatcttt

SEQ ID NO: 1338399 - DNA, 25 bp, Homo sapien
tgcttgtgatctgggccgtcacact

SEQ ID NO: 1338400 - DNA, 25 bp, Homo sapien
gatctgggccgtcacacttcttctc

SEQ ID NO: 1338401 - DNA, 25 bp, Homo sapien
ccagcctcgcaggtgagatgggcat

SEQ ID NO: 1338402 - DNA, 25 bp, Homo sapien
cgctggtctcctcacttgaggtggt

SEQ ID NO: 1338403 - DNA, 25 bp, Homo sapien
accgctggtctcctcacttgaggtg

SEQ ID NO: 1338404 - DNA, 25 bp, Homo sapien
ccgctggtctcctcacttgaggtgg

SEQ ID NO: 1338405 - DNA, 25 bp, Homo sapien
ctggtctcctcacttgaggtggtct

SEQ ID NO: 1338406 - DNA, 25 bp, Homo sapien
ttacctcctgcacggaagccatagt

SEQ ID NO: 1338407 - DNA, 25 bp, Homo sapien
tttaaggctggtcgatggggagatc

SEQ ID NO: 1338408 - DNA, 25 bp, Homo sapien
ccattacctcctgcacggaagccat

SEQ ID NO: 1338409 - DNA, 25 bp, Homo sapien
gtcccattacctcctgcacggaagc

SEQ ID NO: 1338410 - DNA, 25 bp, Homo sapien
caatgtgctcaacaggacaggaggc

SEQ ID NO: 1338411 - DNA, 25 bp, Homo sapien
gagcaaaggcaagagtagaggtccc

SEQ ID NO: 1338412 - DNA, 25 bp, Homo sapien
tactatgcaagaaccagagaggaac

SEQ ID NO: 1338413 - DNA, 25 bp, Homo sapien
tagatacacgagcaaggacacagat

SEQ ID NO: 1338414 - DNA, 25 bp, Homo sapien
gtgggtgagcctgggccgagtaggc

SEQ ID NO: 1338415 - DNA, 25 bp, Homo sapien
gccggtggctccttgggtgggtgag

SEQ ID NO: 1338416 - DNA, 25 bp, Homo sapien
aggaggaggccggtggctccttggg

SEQ ID NO: 1338417 - DNA, 25 bp, Homo sapien
ggtgggtgagcctgggccgagtagg

SEQ ID NO: 1338418 - DNA, 25 bp, Homo sapien
ggccagctccgggtacccatgctcc

SEQ ID NO: 1338419 - DNA, 25 bp, Homo sapien
gccagctccgggtacccatgctcca

SEQ ID NO: 1338420 - DNA, 25 bp, Homo sapien
gctgcttgatggcgctggccagctc

SEQ ID NO: 1338421 - DNA, 25 bp, Homo sapien
cttggaggctggctgcttgatggcg

SEQ ID NO: 1338422 - DNA, 25 bp, Homo sapien
cctgcaggagctcctggatcttctt

SEQ ID NO: 1338423 - DNA, 25 bp, Homo sapien
actgctcctgcaggagctcctggat

SEQ ID NO: 1338424 - DNA, 25 bp, Homo sapien
ccactgctcctgcaggagctcctgg

SEQ ID NO: 1338425 - DNA, 25 bp, Homo sapien
gcaggagctcctggatcttcttcac

SEQ ID NO: 1338426 - DNA, 25 bp, Homo sapien
cctgggagattggaactggtctcct

SEQ ID NO: 1338427 - DNA, 25 bp, Homo sapien
cgttggcgagcttggtggccttccc

SEQ ID NO: 1338428 - DNA, 25 bp, Homo sapien
ctgcccaatagtggcatccgttggc

SEQ ID NO: 1338429 - DNA, 25 bp, Homo sapien
caatagtggcatccgttggcgagct

SEQ ID NO: 1338430 - DNA, 25 bp, Homo sapien
catgctgcctagaaggttgacttca

SEQ ID NO: 1338431 - DNA, 25 bp, Homo sapien
agtccatggacagggtcagtgttca

SEQ ID NO: 1338432 - DNA, 25 bp, Homo sapien
tatcacacgactccctggtcaagag

SEQ ID NO: 1338433 - DNA, 25 bp, Homo sapien
gaagcacacgttctgctgggctctg

SEQ ID NO: 1338434 - DNA, 25 bp, Homo sapien
tgagctcgatttcttccaggaggag

SEQ ID NO: 1338435 - DNA, 25 bp, Homo sapien
tgtctttggcgttctcttggtgaaa

SEQ ID NO: 1338436 - DNA, 25 bp, Homo sapien
ggctacagtgaactccagctctcga

SEQ ID NO: 1338437 - DNA, 25 bp, Homo sapien
gaatctcgctgatgttgagctcgat

SEQ ID NO: 1338438 - DNA, 25 bp, Homo sapien
gaggtgatttggaaccttcaccaca

SEQ ID NO: 1338439 - DNA, 25 bp, Homo sapien
aatccgagttgatgctcgtgggctg

SEQ ID NO: 1338440 - DNA, 25 bp, Homo sapien
ccagctctggaatccgagttgatgc

SEQ ID NO: 1338441 - DNA, 25 bp, Homo sapien
tctagaactacaagcacattctgga

SEQ ID NO: 1338442 - DNA, 25 bp, Homo sapien
ccttctgcaggttcaaaggtgccat

SEQ ID NO: 1338443 - DNA, 25 bp, Homo sapien
aaaggtgccatcacagacactgcct

SEQ ID NO: 1338444 - DNA, 25 bp, Homo sapien
caaaagtgagctcggcatcctctgg

SEQ ID NO: 1338445 - DNA, 25 bp, Homo sapien
gggccgtccactcccaaaagtgagc

SEQ ID NO: 1338446 - DNA, 25 bp, Homo sapien
cagcgtggcaggcatgctggatgct

SEQ ID NO: 1338447 - DNA, 25 bp, Homo sapien
cactcccaaaagtgagctcggcatc

SEQ ID NO: 1338448 - DNA, 25 bp, Homo sapien
caagcggtggtgactggttttgctc

SEQ ID NO: 1338449 - DNA, 25 bp, Homo sapien
cattaccaagcggtggtgactggtt

SEQ ID NO: 1338450 - DNA, 25 bp, Homo sapien
tcccttggcaccacgggagaccagt

SEQ ID NO: 1338451 - DNA, 25 bp, Homo sapien
caccacgggagaccagttttggagg

SEQ ID NO: 1338452 - DNA, 25 bp, Homo sapien
ggtggctcttcggagggtctttctc

SEQ ID NO: 1338453 - DNA, 25 bp, Homo sapien
tggcccttctgtggataggaattct

SEQ ID NO: 1338454 - DNA, 25 bp, Homo sapien
gggtctccacagaataagggtggct

SEQ ID NO: 1338455 - DNA, 25 bp, Homo sapien
gaagtccaggtctaaatgaaagcca

SEQ ID NO: 1338456 - DNA, 25 bp, Homo sapien
ctcagtgtctcaggcactcttcatc

SEQ ID NO: 1338457 - DNA, 25 bp, Homo sapien
tgaccctcagtgtctcaggcactct

SEQ ID NO: 1338458 - DNA, 25 bp, Homo sapien
ccctcagtgtctcaggcactcttca

SEQ ID NO: 1338459 - DNA, 25 bp, Homo sapien
gaccctcagtgtctcaggcactctt

SEQ ID NO: 1338460 - DNA, 25 bp, Homo sapien
gccttgccctatccaggtggatgga

SEQ ID NO: 1338461 - DNA, 25 bp, Homo sapien
acaggccttgccctatccaggtgga

SEQ ID NO: 1338462 - DNA, 25 bp, Homo sapien
tccagcccgtttgccaagcagctgc

SEQ ID NO: 1338463 - DNA, 25 bp, Homo sapien
caggtggatggagccccaaagggca

SEQ ID NO: 1338464 - DNA, 25 bp, Homo sapien
gcaggcgatgctggcatgcaggagg

SEQ ID NO: 1338465 - DNA, 25 bp, Homo sapien
agctctgcagtctgcagcaggcgat

SEQ ID NO: 1338466 - DNA, 25 bp, Homo sapien
cagcaggcgatgctggcatgcagga

SEQ ID NO: 1338467 - DNA, 25 bp, Homo sapien
tctgcagtctgcagcaggcgatgct

SEQ ID NO: 1338468 - DNA, 25 bp, Homo sapien
aaccagatagcagcagttgagttac

SEQ ID NO: 1338469 - DNA, 25 bp, Homo sapien
gatagcagcagttgagttacacaga

SEQ ID NO: 1338470 - DNA, 25 bp, Homo sapien
atttaaccagatagcagcagttgag

SEQ ID NO: 1338471 - DNA, 25 bp, Homo sapien
gagttacacagatatccatttcata

SEQ ID NO: 1338472 - DNA, 25 bp, Homo sapien
tgcagaggccatgctgatcgtctct

SEQ ID NO: 1338473 - DNA, 25 bp, Homo sapien
catgaatttttgtgtcattccttgt

SEQ ID NO: 1338474 - DNA, 25 bp, Homo sapien
aatttttgtgtcattccttgtgcag

SEQ ID NO: 1338475 - DNA, 25 bp, Homo sapien
ttcatgaatttttgtgtcattcctt

SEQ ID NO: 1338476 - DNA, 25 bp, Homo sapien
aataaaagtgattccagggaaaatg

SEQ ID NO: 1338477 - DNA, 25 bp, Homo sapien
cttcagaaattttcctgcagctgaa

SEQ ID NO: 1338478 - DNA, 25 bp, Homo sapien
ataaaagtgattccagggaaaatgt

SEQ ID NO: 1338479 - DNA, 25 bp, Homo sapien
tggcttcagaaattttcctgcagct

SEQ ID NO: 1338480 - DNA, 25 bp, Homo sapien
tcctctggccctatttggtagatag

SEQ ID NO: 1338481 - DNA, 25 bp, Homo sapien
tagataggactttgcccaggcctca

SEQ ID NO: 1338482 - DNA, 25 bp, Homo sapien
ccctaaaggcttgcactccagggcg

SEQ ID NO: 1338483 - DNA, 25 bp, Homo sapien
agccgggtcactggctgcatctgat

SEQ ID NO: 1338484 - DNA, 25 bp, Homo sapien
ttaggaactaagacttgagtttggc

SEQ ID NO: 1338485 - DNA, 25 bp, Homo sapien
aactaagacttgagtttggcagccc

SEQ ID NO: 1338486 - DNA, 25 bp, Homo sapien
ggaactaagacttgagtttggcagc

SEQ ID NO: 1338487 - DNA, 25 bp, Homo sapien
gccccgaaggatgcccagggcaaga

SEQ ID NO: 1338488 - DNA, 25 bp, Homo sapien
cgtagcggccatgggctcgactttc

SEQ ID NO: 1338489 - DNA, 25 bp, Homo sapien
cagcgtagcggccatgggctcgact

SEQ ID NO: 1338490 - DNA, 25 bp, Homo sapien
gcgtagcggccatgggctcgacttt

SEQ ID NO: 1338491 - DNA, 25 bp, Homo sapien
acccagcgtagcggccatgggctcg

SEQ ID NO: 1338492 - DNA, 25 bp, Homo sapien
caaagtacccagtcacagatttgac

SEQ ID NO: 1338493 - DNA, 25 bp, Homo sapien
ggggtcaaagtacccagtcacagat

SEQ ID NO: 1338494 - DNA, 25 bp, Homo sapien
ggtcaaagtacccagtcacagattt

SEQ ID NO: 1338495 - DNA, 25 bp, Homo sapien
gtcaaagtacccagtcacagatttg

SEQ ID NO: 1338496 - DNA, 25 bp, Homo sapien
cgggctgggcaaagcgccctcggcg

SEQ ID NO: 1338497 - DNA, 25 bp, Homo sapien
attgcctccgcccaaggtcgcggcc

SEQ ID NO: 1338498 - DNA, 25 bp, Homo sapien
ggcgtctagagcactcggagctgcc

SEQ ID NO: 1338499 - DNA, 25 bp, Homo sapien
cacaggaggcatgcgggctgggcaa

SEQ ID NO: 1338500 - DNA, 25 bp, Homo sapien
gagcggcgcccacctttgggcagcc

SEQ ID NO: 1338501 - DNA, 25 bp, Homo sapien
gagcagccccgctccttttctgtcg

SEQ ID NO: 1338502 - DNA, 25 bp, Homo sapien
gctccttttctgtcgcagaccccag

SEQ ID NO: 1338503 - DNA, 25 bp, Homo sapien
gagagccaatctgggctggaaaggg

SEQ ID NO: 1338504 - DNA, 25 bp, Homo sapien
ccaggcgccctctggccgacggtct

SEQ ID NO: 1338505 - DNA, 25 bp, Homo sapien
tcggagcgcacgcaacctccgggtg

SEQ ID NO: 1338506 - DNA, 25 bp, Homo sapien
tccgggtgcactgtccgcgtcccag

SEQ ID NO: 1338507 - DNA, 25 bp, Homo sapien
gctgcggaagtcctgcgcgaggcgg

SEQ ID NO: 1338508 - DNA, 25 bp, Homo sapien
ccgcgtcgccagctgccaacagcgc

SEQ ID NO: 1338509 - DNA, 25 bp, Homo sapien
cagctgccaacagcgcccgagtccc

SEQ ID NO: 1338510 - DNA, 25 bp, Homo sapien
gcggcttcgccccgcgtcgccagct

SEQ ID NO: 1338511 - DNA, 25 bp, Homo sapien
cgcggcggatgcgggactggccagg

SEQ ID NO: 1338512 - DNA, 25 bp, Homo sapien
ggcgcggactttggtgtgtaggaag

SEQ ID NO: 1338513 - DNA, 25 bp, Homo sapien
cagaattgcgaaaccgaggggaggg

SEQ ID NO: 1338514 - DNA, 25 bp, Homo sapien
ggaaggggcagaattgcgaaaccga

SEQ ID NO: 1338515 - DNA, 25 bp, Homo sapien
gcggcgcggactttggtgtgtagga

SEQ ID NO: 1338516 - DNA, 25 bp, Homo sapien
ttcgtatgcgtttatctcggttcat

SEQ ID NO: 1338517 - DNA, 25 bp, Homo sapien
caaagtgctttcgtatgcgtttatc

SEQ ID NO: 1338518 - DNA, 25 bp, Homo sapien
tcccaaagtgctttcgtatgcgttt

SEQ ID NO: 1338519 - DNA, 25 bp, Homo sapien
gtgctttcgtatgcgtttatctcgg

SEQ ID NO: 1338520 - DNA, 25 bp, Homo sapien
tcatctctgcaatgatttttgcatt

SEQ ID NO: 1338521 - DNA, 25 bp, Homo sapien
catctctgcaatgatttttgcattg

SEQ ID NO: 1338522 - DNA, 25 bp, Homo sapien
atctctgcaatgatttttgcattgc

SEQ ID NO: 1338523 - DNA, 25 bp, Homo sapien
gaagaggaagcttgtccaatgtgga

SEQ ID NO: 1338524 - DNA, 25 bp, Homo sapien
ggaagaggaagcttgtccaatgtgg

SEQ ID NO: 1338525 - DNA, 25 bp, Homo sapien
aagaggaagcttgtccaatgtggag

SEQ ID NO: 1338526 - DNA, 25 bp, Homo sapien
cttccctgtaggctctatctcagga

SEQ ID NO: 1338527 - DNA, 25 bp, Homo sapien
cttttctgggagctcggcatcgagt

SEQ ID NO: 1338528 - DNA, 25 bp, Homo sapien
ggagctcggcatcgagtggtgtgaa

SEQ ID NO: 1338529 - DNA, 25 bp, Homo sapien
ctgggagctcggcatcgagtggtgt

SEQ ID NO: 1338530 - DNA, 25 bp, Homo sapien
ttttctgggagctcggcatcgagtg

SEQ ID NO: 1338531 - DNA, 25 bp, Homo sapien
ttgccaataacatcccaaaggtgac

SEQ ID NO: 1338532 - DNA, 25 bp, Homo sapien
aatgcaggcggttgcaattcagtgg

SEQ ID NO: 1338533 - DNA, 25 bp, Homo sapien
gagcatggagttaccttgccaataa

SEQ ID NO: 1338534 - DNA, 25 bp, Homo sapien
caggattcgggaactggctgctctg

SEQ ID NO: 1338535 - DNA, 25 bp, Homo sapien
gagatggctgcccactgtggtttac

SEQ ID NO: 1338536 - DNA, 25 bp, Homo sapien
tcatcttggtgtgacacagacttcc

SEQ ID NO: 1338537 - DNA, 25 bp, Homo sapien
gtgacacagacttcctggatgtcct

SEQ ID NO: 1338538 - DNA, 25 bp, Homo sapien
ccttcctgtggagctggctgagctc

SEQ ID NO: 1338539 - DNA, 25 bp, Homo sapien
tcaatatcagtgagagtgcagaacc

SEQ ID NO: 1338540 - DNA, 25 bp, Homo sapien
ctccctcccttgagcacactcagca

SEQ ID NO: 1338541 - DNA, 25 bp, Homo sapien
tccctcccttgagcacactcagcac

SEQ ID NO: 1338542 - DNA, 25 bp, Homo sapien
cattccttcattgggtcctcctaac

SEQ ID NO: 1338543 - DNA, 25 bp, Homo sapien
tcattccttcattgggtcctcctaa

SEQ ID NO: 1338544 - DNA, 25 bp, Homo sapien
gccttcgcaagctctgctagactga

SEQ ID NO: 1338545 - DNA, 25 bp, Homo sapien
actgggcaaaacacagctcagaggt

SEQ ID NO: 1338546 - DNA, 25 bp, Homo sapien
ttcagagcatttgcccggttgtgcc

SEQ ID NO: 1338547 - DNA, 25 bp, Homo sapien
gactgatgttctcatctgtgaccag

SEQ ID NO: 1338548 - DNA, 25 bp, Homo sapien
tgcatcatgggtgctgtctcctggt

SEQ ID NO: 1338549 - DNA, 25 bp, Homo sapien
tgaagcctcgctgtcagggctgacc

SEQ ID NO: 1338550 - DNA, 25 bp, Homo sapien
cagcactgggctccaggcgaaggac

SEQ ID NO: 1338551 - DNA, 25 bp, Homo sapien
aaatcgccattgctgcatcatgggt

SEQ ID NO: 1338552 - DNA, 25 bp, Homo sapien
tttgccccaggtaactgaagtgcac

SEQ ID NO: 1338553 - DNA, 25 bp, Homo sapien
gatttgccccaggtaactgaagtgc

SEQ ID NO: 1338554 - DNA, 25 bp, Homo sapien
tgatttgccccaggtaactgaagtg

SEQ ID NO: 1338555 - DNA, 25 bp, Homo sapien
catgatttgccccaggtaactgaag

SEQ ID NO: 1338556 - DNA, 25 bp, Homo sapien
ctccgctcaccaccttctgtaacag

SEQ ID NO: 1338557 - DNA, 25 bp, Homo sapien
ttctgtaacagtgggagctggtcca

SEQ ID NO: 1338558 - DNA, 25 bp, Homo sapien
gtcctccgctcaccaccttctgtaa

SEQ ID NO: 1338559 - DNA, 25 bp, Homo sapien
cgctcaccaccttctgtaacagtgg

SEQ ID NO: 1338560 - DNA, 25 bp, Homo sapien
cagctaggggctgctgaaagtcatt

SEQ ID NO: 1338561 - DNA, 25 bp, Homo sapien
cccactgagtgtcctgtttgtcact

SEQ ID NO: 1338562 - DNA, 25 bp, Homo sapien
gcccttcaggccataaggactcttc

SEQ ID NO: 1338563 - DNA, 25 bp, Homo sapien
gtcattgttattgcccttcaggcca

SEQ ID NO: 1338564 - DNA, 25 bp, Homo sapien
gagccaagaatccaagtaaagtcgt

SEQ ID NO: 1338565 - DNA, 25 bp, Homo sapien
caagtaaagtcgtatctgtgtattc

SEQ ID NO: 1338566 - DNA, 25 bp, Homo sapien
gctgatgtgcaaacattcaggcccc

SEQ ID NO: 1338567 - DNA, 25 bp, Homo sapien
tctgtgtattctctgagcactggct

SEQ ID NO: 1338568 - DNA, 25 bp, Homo sapien
caaagcagtccacgggtaaggagga

SEQ ID NO: 1338569 - DNA, 25 bp, Homo sapien
tatttttcatgcggggcggtccctg

SEQ ID NO: 1338570 - DNA, 25 bp, Homo sapien
ggtccctgaagtgcggaggtcaaag

SEQ ID NO: 1338571 - DNA, 25 bp, Homo sapien
cggaggtcaaagcagtccacgggta

SEQ ID NO: 1338572 - DNA, 25 bp, Homo sapien
tttactgtgggagagcccacttcca

SEQ ID NO: 1338573 - DNA, 25 bp, Homo sapien
cacaatcacggacaccacagggtgt

SEQ ID NO: 1338574 - DNA, 25 bp, Homo sapien
gggttgtccatatccagaacttagt

SEQ ID NO: 1338575 - DNA, 25 bp, Homo sapien
cagtgtgaagtatagccgtcccact

SEQ ID NO: 1338576 - DNA, 25 bp, Homo sapien
ggatgcattttgatataaggatgag

SEQ ID NO: 1338577 - DNA, 25 bp, Homo sapien
ctggagtggatgcattttgatataa

SEQ ID NO: 1338578 - DNA, 25 bp, Homo sapien
gcattttgatataaggatgagttcc

SEQ ID NO: 1338579 - DNA, 25 bp, Homo sapien
gagtggatgcattttgatataagga

SEQ ID NO: 1338580 - DNA, 25 bp, Homo sapien
atggaaacacttgttagaatgtttt

SEQ ID NO: 1338581 - DNA, 25 bp, Homo sapien
ctttgcaacatggagtttgctttct

SEQ ID NO: 1338582 - DNA, 25 bp, Homo sapien
tggaaacacttgttagaatgttttg

SEQ ID NO: 1338583 - DNA, 25 bp, Homo sapien
cctttgcaacatggagtttgctttc

SEQ ID NO: 1338584 - DNA, 25 bp, Homo sapien
cagctgagtttggctgaagccccag

SEQ ID NO: 1338585 - DNA, 25 bp, Homo sapien
tgacagtaggaacaagatcccagtc

SEQ ID NO: 1338586 - DNA, 25 bp, Homo sapien
tttgacagtaggaacaagatcccag

SEQ ID NO: 1338587 - DNA, 25 bp, Homo sapien
ctttgacagtaggaacaagatccca

SEQ ID NO: 1338588 - DNA, 25 bp, Homo sapien
ttgacagtaggaacaagatcccagt

SEQ ID NO: 1338589 - DNA, 25 bp, Homo sapien
cgggacgtaggatatgcatggcact

SEQ ID NO: 1338590 - DNA, 25 bp, Homo sapien
tgcacaatggctaagactgacctat

SEQ ID NO: 1338591 - DNA, 25 bp, Homo sapien
tactagaaaatgagacactgccact

SEQ ID NO: 1338592 - DNA, 25 bp, Homo sapien
gcagcagtgtgattcagagacgtca

SEQ ID NO: 1338593 - DNA, 25 bp, Homo sapien
tagtagtgggcattacactgcttct

SEQ ID NO: 1338594 - DNA, 25 bp, Homo sapien
aattgtcactagaagaatggagcac

SEQ ID NO: 1338595 - DNA, 25 bp, Homo sapien
taacgacagctatggattatttgcg

SEQ ID NO: 1338596 - DNA, 25 bp, Homo sapien
ggagcacaaagccaactaacgacag

SEQ ID NO: 1338597 - DNA, 25 bp, Homo sapien
actaagtaaagttctgcaattctaa

SEQ ID NO: 1338598 - DNA, 25 bp, Homo sapien
aaagttctgcaattctaaattcctg

SEQ ID NO: 1338599 - DNA, 25 bp, Homo sapien
cactggtattagttatccccgtatt

SEQ ID NO: 1338600 - DNA, 25 bp, Homo sapien
caagttaaggtgttgtcactggtat

SEQ ID NO: 1338601 - DNA, 25 bp, Homo sapien
tctctgccattgtcaataataaaaa

SEQ ID NO: 1338602 - DNA, 25 bp, Homo sapien
tctgccattgtcaataataaaaatt

SEQ ID NO: 1338603 - DNA, 25 bp, Homo sapien
taatttggggctatctatgattttt

SEQ ID NO: 1338604 - DNA, 25 bp, Homo sapien
tggggctatctatgatttttattct

SEQ ID NO: 1338605 - DNA, 25 bp, Homo sapien
tcacatatttaatagtacctttaaa

SEQ ID NO: 1338606 - DNA, 25 bp, Homo sapien
cattcacatatttaatagtaccttt

SEQ ID NO: 1338607 - DNA, 25 bp, Homo sapien
aacattcacatatttaatagtacct

SEQ ID NO: 1338608 - DNA, 25 bp, Homo sapien
aaacattcacatatttaatagtacc

SEQ ID NO: 1338609 - DNA, 25 bp, Homo sapien
tcacactcgatgttgaatacatggc

SEQ ID NO: 1338610 - DNA, 25 bp, Homo sapien
taccagaacattagaaaccatagcc

SEQ ID NO: 1338611 - DNA, 25 bp, Homo sapien
catagccatgattctcaagcgttaa

SEQ ID NO: 1338612 - DNA, 25 bp, Homo sapien
ttccaatagatcttttcacactcga

SEQ ID NO: 1338613 - DNA, 25 bp, Homo sapien
tttgcgaaggctcattcgactgaag

SEQ ID NO: 1338614 - DNA, 25 bp, Homo sapien
cgaaggctcattcgactgaaggaat

SEQ ID NO: 1338615 - DNA, 25 bp, Homo sapien
attttgcgaaggctcattcgactga

SEQ ID NO: 1338616 - DNA, 25 bp, Homo sapien
tgcgaaggctcattcgactgaagga

SEQ ID NO: 1338617 - DNA, 25 bp, Homo sapien
tgtggcaggtgacaggcaatactgc

SEQ ID NO: 1338618 - DNA, 25 bp, Homo sapien
ctttaaggcgatgatagtttctctc

SEQ ID NO: 1338619 - DNA, 25 bp, Homo sapien
gttgatcagtggctgtagggcctct

SEQ ID NO: 1338620 - DNA, 25 bp, Homo sapien
caatactgccttgtataactgaggg

SEQ ID NO: 1338621 - DNA, 25 bp, Homo sapien
gggcaaccgagtgggactatctgaa

SEQ ID NO: 1338622 - DNA, 25 bp, Homo sapien
tctttcagggatgtaatcatgctca

SEQ ID NO: 1338623 - DNA, 25 bp, Homo sapien
gagaaaagtatctggaccctgacag

SEQ ID NO: 1338624 - DNA, 25 bp, Homo sapien
gtacgcgcgcgctgagattgcatca

SEQ ID NO: 1338625 - DNA, 25 bp, Homo sapien
tggctaacagacacatgaacctctt

SEQ ID NO: 1338626 - DNA, 25 bp, Homo sapien
gaggatgaacctatgaaccagcaac

SEQ ID NO: 1338627 - DNA, 25 bp, Homo sapien
taaggtagacggatatttgagtagc

SEQ ID NO: 1338628 - DNA, 25 bp, Homo sapien
catccactagttggtaaaagttaca

SEQ ID NO: 1338629 - DNA, 25 bp, Homo sapien
cagagtcgcagtttattatgatgtc

SEQ ID NO: 1338630 - DNA, 25 bp, Homo sapien
tatgatgtctgaagagctttgggtc

SEQ ID NO: 1338631 - DNA, 25 bp, Homo sapien
gctttgggtcactaggtatttcaga

SEQ ID NO: 1338632 - DNA, 25 bp, Homo sapien
ctttaaagcagagtcgcagtttatt

SEQ ID NO: 1338633 - DNA, 25 bp, Homo sapien
tctgcgggatcctgatgtgttgcaa

SEQ ID NO: 1338634 - DNA, 25 bp, Homo sapien
actgtggtgcctacagatccctgga

SEQ ID NO: 1338635 - DNA, 25 bp, Homo sapien
tgtgttgcaaatgccaactcctgtg

SEQ ID NO: 1338636 - DNA, 25 bp, Homo sapien
cctggagtaccatctgaagcatttt

SEQ ID NO: 1338637 - DNA, 25 bp, Homo sapien
catgggcacggccatctaaagtaaa

SEQ ID NO: 1338638 - DNA, 25 bp, Homo sapien
catatgtgtcaaagtatggctccac

SEQ ID NO: 1338639 - DNA, 25 bp, Homo sapien
tgtacagtacatgaatcgacgaaga

SEQ ID NO: 1338640 - DNA, 25 bp, Homo sapien
taatataaggaaaggcatgagacgt

SEQ ID NO: 1338641 - DNA, 25 bp, Homo sapien
ttagagtctttgattacttcaacca

SEQ ID NO: 1338642 - DNA, 25 bp, Homo sapien
cacttgtctacaggattagagtctt

SEQ ID NO: 1338643 - DNA, 25 bp, Homo sapien
tgttaggatctaatttacacttgtc

SEQ ID NO: 1338644 - DNA, 25 bp, Homo sapien
gagtctttgattacttcaaccacat

SEQ ID NO: 1338645 - DNA, 25 bp, Homo sapien
agtttggttattgcaggctccttgt

SEQ ID NO: 1338646 - DNA, 25 bp, Homo sapien
ccaacacgaaaataggtgccaaaca

SEQ ID NO: 1338647 - DNA, 25 bp, Homo sapien
cacgaaaataggtgccaaacatccg

SEQ ID NO: 1338648 - DNA, 25 bp, Homo sapien
gcaagtttggttattgcaggctcct

SEQ ID NO: 1338649 - DNA, 25 bp, Homo sapien
gcaatgtaaatgtcaagaccctcca

SEQ ID NO: 1338650 - DNA, 25 bp, Homo sapien
gagtcaaagatagcacctggcatag

SEQ ID NO: 1338651 - DNA, 25 bp, Homo sapien
caaatagggctactaacaagtgact

SEQ ID NO: 1338652 - DNA, 25 bp, Homo sapien
gcagccctgtgccaataaattatta

SEQ ID NO: 1338653 - DNA, 25 bp, Homo sapien
tggtggagtgggaagttaaactcta

SEQ ID NO: 1338654 - DNA, 25 bp, Homo sapien
ctaatatatttgacacccgactcta

SEQ ID NO: 1338655 - DNA, 25 bp, Homo sapien
ctagacactggttaaccactttaca

SEQ ID NO: 1338656 - DNA, 25 bp, Homo sapien
ttgacacccgactctaagcattttt

SEQ ID NO: 1338657 - DNA, 25 bp, Homo sapien
tatgggtctataccagtcatcaggg

SEQ ID NO: 1338658 - DNA, 25 bp, Homo sapien
tcatcagggagtcactaactaccag

SEQ ID NO: 1338659 - DNA, 25 bp, Homo sapien
tatcaggtgctcagttatgggtcta

SEQ ID NO: 1338660 - DNA, 25 bp, Homo sapien
ttcaggcctcaagcgaggatcgcgc

SEQ ID NO: 1338661 - DNA, 25 bp, Homo sapien
tctttcagagttgatcgccctgctc

SEQ ID NO: 1338662 - DNA, 25 bp, Homo sapien
catagtagcatggtctcagcgcact

SEQ ID NO: 1338663 - DNA, 25 bp, Homo sapien
tactttctcctttagagtgtcacat

SEQ ID NO: 1338664 - DNA, 25 bp, Homo sapien
agtgtcacatttacccacttgacta

SEQ ID NO: 1338665 - DNA, 25 bp, Homo sapien
aaacttgtattagtgtacttctgaa

SEQ ID NO: 1338666 - DNA, 25 bp, Homo sapien
cagccttgatgcctggggtgaagca

SEQ ID NO: 1338667 - DNA, 25 bp, Homo sapien
aaagaagagttcaaaacatgctttt

SEQ ID NO: 1338668 - DNA, 25 bp, Homo sapien
ttcgtcactatttgataactgaaca

SEQ ID NO: 1338669 - DNA, 25 bp, Homo sapien
gatagtcatactccaactcctttga

SEQ ID NO: 1338670 - DNA, 25 bp, Homo sapien
ggagactcgataggatattttgcag

SEQ ID NO: 1338671 - DNA, 25 bp, Homo sapien
cagcagtaggtaacagtagggtagc

SEQ ID NO: 1338672 - DNA, 25 bp, Homo sapien
gacttaacaggatagcagccctatt

SEQ ID NO: 1338673 - DNA, 25 bp, Homo sapien
tctttgcatcccgattagcttcatg

SEQ ID NO: 1338674 - DNA, 25 bp, Homo sapien
tcttgaagtttaccatgaattgtgg

SEQ ID NO: 1338675 - DNA, 25 bp, Homo sapien
tcccgattagcttcatgaataggaa

SEQ ID NO: 1338676 - DNA, 25 bp, Homo sapien
tcatgaataggaataagtactttgt

SEQ ID NO: 1338677 - DNA, 25 bp, Homo sapien
ccccaatctaaatgcactattgtga

SEQ ID NO: 1338678 - DNA, 25 bp, Homo sapien
ttaaaagaggatcgacacctaatat

SEQ ID NO: 1338679 - DNA, 25 bp, Homo sapien
cccctgctagcttagacaagtgtag

SEQ ID NO: 1338680 - DNA, 25 bp, Homo sapien
ctggaattggaatggtcaaggtcct

SEQ ID NO: 1338681 - DNA, 25 bp, Homo sapien
aaatacacatgtcattgataattag

SEQ ID NO: 1338682 - DNA, 25 bp, Homo sapien
taaagaaaagtagggtcataagcca

SEQ ID NO: 1338683 - DNA, 25 bp, Homo sapien
cattgataattagaggtatgaaact

SEQ ID NO: 1338684 - DNA, 25 bp, Homo sapien
gaggtatgaaactgtgggaaaagaa

SEQ ID NO: 1338685 - DNA, 25 bp, Homo sapien
cacaagtcctgactcagtaaagtat

SEQ ID NO: 1338686 - DNA, 25 bp, Homo sapien
ctgagaccgcagattcttctaaaac

SEQ ID NO: 1338687 - DNA, 25 bp, Homo sapien
tggagataccacatcatctgagacc

SEQ ID NO: 1338688 - DNA, 25 bp, Homo sapien
ttgttccagtaatcccacaagtcct

SEQ ID NO: 1338689 - DNA, 25 bp, Homo sapien
acaggaagatatttccggtcctcca

SEQ ID NO: 1338690 - DNA, 25 bp, Homo sapien
tgagtggactagacactgtgcagct

SEQ ID NO: 1338691 - DNA, 25 bp, Homo sapien
tgaaatgttacacatcccacaggaa

SEQ ID NO: 1338692 - DNA, 25 bp, Homo sapien
ttgcttcgttctgagtgcttgcctg

SEQ ID NO: 1338693 - DNA, 25 bp, Homo sapien
gagaggtctggtaacccttggcaat

SEQ ID NO: 1338694 - DNA, 25 bp, Homo sapien
ggtcaatcgcagatctggagaggtc

SEQ ID NO: 1338695 - DNA, 25 bp, Homo sapien
tgcaaccaggtcaatcgcagatctg

SEQ ID NO: 1338696 - DNA, 25 bp, Homo sapien
ctggagaggtctggtaacccttggc

SEQ ID NO: 1338697 - DNA, 25 bp, Homo sapien
gatagctcgctcagagtttacctag

SEQ ID NO: 1338698 - DNA, 25 bp, Homo sapien
taactgtggcctatggaatggataa

SEQ ID NO: 1338699 - DNA, 25 bp, Homo sapien
gtatgaaaatgtcgctatgcaggcc

SEQ ID NO: 1338700 - DNA, 25 bp, Homo sapien
tatgcaggcctagagaaataactgt

SEQ ID NO: 1338701 - DNA, 25 bp, Homo sapien
atatggagattgaaaaccagatcct

SEQ ID NO: 1338702 - DNA, 25 bp, Homo sapien
tcacagtatcagaaagaatcatatg

SEQ ID NO: 1338703 - DNA, 25 bp, Homo sapien
atcagaaagaatcatatggagattg

SEQ ID NO: 1338704 - DNA, 25 bp, Homo sapien
tttcacagtatcagaaagaatcata

SEQ ID NO: 1338705 - DNA, 25 bp, Homo sapien
tgcccaccaaggaggatagtgacat

SEQ ID NO: 1338706 - DNA, 25 bp, Homo sapien
gtcaatatagtctttagagaacgtc

SEQ ID NO: 1338707 - DNA, 25 bp, Homo sapien
tacctgcattttaaccctggcaaag

SEQ ID NO: 1338708 - DNA, 25 bp, Homo sapien
gatcaggaaatgttgtttccctcaa

SEQ ID NO: 1338709 - DNA, 25 bp, Homo sapien
ctacagtgtcggagaagcctgaggc

SEQ ID NO: 1338710 - DNA, 25 bp, Homo sapien
cactggcgtgtgaccgtattgtacc

SEQ ID NO: 1338711 - DNA, 25 bp, Homo sapien
taccgatgctactgctacagtgtcg

SEQ ID NO: 1338712 - DNA, 25 bp, Homo sapien
tcattagtaggtaaagggaggcact

SEQ ID NO: 1338713 - DNA, 25 bp, Homo sapien
agcaaaacagtgttgtagataaact

SEQ ID NO: 1338714 - DNA, 25 bp, Homo sapien
tagcaaaacagtgttgtagataaac

SEQ ID NO: 1338715 - DNA, 25 bp, Homo sapien
gtgtagcaaaacagtgttgtagata

SEQ ID NO: 1338716 - DNA, 25 bp, Homo sapien
ctctgtgtagcaaaacagtgttgta

SEQ ID NO: 1338717 - DNA, 25 bp, Homo sapien
gctgtgtagtagcacttttagcact

SEQ ID NO: 1338718 - DNA, 25 bp, Homo sapien
tctctttggattccgttacagaaac

SEQ ID NO: 1338719 - DNA, 25 bp, Homo sapien
tagcactccaccaagaatgctctct

SEQ ID NO: 1338720 - DNA, 25 bp, Homo sapien
gtagcacttttagcactccaccaag

SEQ ID NO: 1338721 - DNA, 25 bp, Homo sapien
cagtgcttcgtgttcaatctctgct

SEQ ID NO: 1338722 - DNA, 25 bp, Homo sapien
ctgaacaacaatctctaatgtatct

SEQ ID NO: 1338723 - DNA, 25 bp, Homo sapien
aatgattaggtttgcttctgtagcc

SEQ ID NO: 1338724 - DNA, 25 bp, Homo sapien
caatctctaatgtatctaaaatgat

SEQ ID NO: 1338725 - DNA, 25 bp, Homo sapien
gacaggactaaagggctccctggga

SEQ ID NO: 1338726 - DNA, 25 bp, Homo sapien
aagtttacctgcagccacttgggca

SEQ ID NO: 1338727 - DNA, 25 bp, Homo sapien
ccagtgaagctacttgcgggctaac

SEQ ID NO: 1338728 - DNA, 25 bp, Homo sapien
taactgggagagtgctaggcaaacc

SEQ ID NO: 1338729 - DNA, 25 bp, Homo sapien
ttttgacgccagtgagtcatatctt

SEQ ID NO: 1338730 - DNA, 25 bp, Homo sapien
gttttgacgccagtgagtcatatct

SEQ ID NO: 1338731 - DNA, 25 bp, Homo sapien
tttgacgccagtgagtcatatcttt

SEQ ID NO: 1338732 - DNA, 25 bp, Homo sapien
ggaggagaagctattgtgtacgtac

SEQ ID NO: 1338733 - DNA, 25 bp, Homo sapien
ggtcaagctattcattcgttcaaac

SEQ ID NO: 1338734 - DNA, 25 bp, Homo sapien
cctatgctcccaagaatagcttctt

SEQ ID NO: 1338735 - DNA, 25 bp, Homo sapien
tcggcttcgccgtaccatttcttgc

SEQ ID NO: 1338736 - DNA, 25 bp, Homo sapien
gctttgctctcatgtcttttgattt

SEQ ID NO: 1338737 - DNA, 25 bp, Homo sapien
gtagacagatcaaaaggcttcgact

SEQ ID NO: 1338738 - DNA, 25 bp, Homo sapien
taatagccggtttagctgcaagact

SEQ ID NO: 1338739 - DNA, 25 bp, Homo sapien
tgcaagactgagagatctgtaaacc

SEQ ID NO: 1338740 - DNA, 25 bp, Homo sapien
gctgaaaaggtagtgtgttgcctgc

SEQ ID NO: 1338741 - DNA, 25 bp, Homo sapien
catacttccgctctcactttcataa

SEQ ID NO: 1338742 - DNA, 25 bp, Homo sapien
tggcaacggtctggcttatcatact

SEQ ID NO: 1338743 - DNA, 25 bp, Homo sapien
actgccaggccttgttagttgaggg

SEQ ID NO: 1338744 - DNA, 25 bp, Homo sapien
gatgtccctgcgattgccatggcaa

SEQ ID NO: 1338745 - DNA, 25 bp, Homo sapien
caatcagaggtagatacaacatggc

SEQ ID NO: 1338746 - DNA, 25 bp, Homo sapien
aatcatacagctgaggtacagtttc

SEQ ID NO: 1338747 - DNA, 25 bp, Homo sapien
taaaatcatacagctgaggtacagt

SEQ ID NO: 1338748 - DNA, 25 bp, Homo sapien
tgtaaaatcatacagctgaggtaca

SEQ ID NO: 1338749 - DNA, 25 bp, Homo sapien
gactggagagtaaattgtgtaccat

SEQ ID NO: 1338750 - DNA, 25 bp, Homo sapien
tgtgtaccatattgatgactttctt

SEQ ID NO: 1338751 - DNA, 25 bp, Homo sapien
tgactttcttatgcaatccaaacag

SEQ ID NO: 1338752 - DNA, 25 bp, Homo sapien
agtaccgcgggtctgagtcgtgact

SEQ ID NO: 1338753 - DNA, 25 bp, Homo sapien
aaggcacggataattcaaacatatt

SEQ ID NO: 1338754 - DNA, 25 bp, Homo sapien
aataatgctgttggcggaaaggcac

SEQ ID NO: 1338755 - DNA, 25 bp, Homo sapien
gcaatcttttggtcttgtacattcg

SEQ ID NO: 1338756 - DNA, 25 bp, Homo sapien
atcagggtctaaaatgacagccagc

SEQ ID NO: 1338757 - DNA, 25 bp, Homo sapien
cagatgattcgtagaaaatccagcc

SEQ ID NO: 1338758 - DNA, 25 bp, Homo sapien
ggacaccagaacactgggattcggt

SEQ ID NO: 1338759 - DNA, 25 bp, Homo sapien
gtaatgagtaaagctttgaagacac

SEQ ID NO: 1338760 - DNA, 25 bp, Homo sapien
taagtaagctgcagggtaagtttaa

SEQ ID NO: 1338761 - DNA, 25 bp, Homo sapien
gtattgagtctctcaaccatttctg

SEQ ID NO: 1338762 - DNA, 25 bp, Homo sapien
tctgtccataacagacaacagatca

SEQ ID NO: 1338763 - DNA, 25 bp, Homo sapien
gcttgtattgagtctctcaaccatt

SEQ ID NO: 1338764 - DNA, 25 bp, Homo sapien
caaggcttgtattgagtctctcaac

SEQ ID NO: 1338765 - DNA, 25 bp, Homo sapien
tccttggagcctcaagtttatcatt

SEQ ID NO: 1338766 - DNA, 25 bp, Homo sapien
tcgtgctgacaagagctgcaatgtc

SEQ ID NO: 1338767 - DNA, 25 bp, Homo sapien
tccatgaaacgttctggaaaacgac

SEQ ID NO: 1338768 - DNA, 25 bp, Homo sapien
ttaaagtataaatggtgcaccatgc

SEQ ID NO: 1338769 - DNA, 25 bp, Homo sapien
tgctgaggaccaccctatgacatac

SEQ ID NO: 1338770 - DNA, 25 bp, Homo sapien
cgaaggtgaagaagacggtcccaag

SEQ ID NO: 1338771 - DNA, 25 bp, Homo sapien
caagtttatatgtacaggtgaccct

SEQ ID NO: 1338772 - DNA, 25 bp, Homo sapien
ccacagggcagtactggcatattgt

SEQ ID NO: 1338773 - DNA, 25 bp, Homo sapien
gattcccgaacgctgccactgcaaa

SEQ ID NO: 1338774 - DNA, 25 bp, Homo sapien
ctgattcccgaacgctgccactgca

SEQ ID NO: 1338775 - DNA, 25 bp, Homo sapien
aagctgattcccgaacgctgccact

SEQ ID NO: 1338776 - DNA, 25 bp, Homo sapien
aaccaggcttgttgcaaagctgatt

SEQ ID NO: 1338777 - DNA, 25 bp, Homo sapien
taatgtttgtaagaaacttgacgtc

SEQ ID NO: 1338778 - DNA, 25 bp, Homo sapien
gaaacttgacgtctctgtgtgcgaa

SEQ ID NO: 1338779 - DNA, 25 bp, Homo sapien
tacgattacaacttcgatccatagc

SEQ ID NO: 1338780 - DNA, 25 bp, Homo sapien
tgtgcgaagacatacgattacaact

SEQ ID NO: 1338781 - DNA, 25 bp, Homo sapien
cgtgctacccctaaagaagaaactg

SEQ ID NO: 1338782 - DNA, 25 bp, Homo sapien
tctggtattgagtcttatagcacgg

SEQ ID NO: 1338783 - DNA, 25 bp, Homo sapien
aattgctattaaagacgtgctaccc

SEQ ID NO: 1338784 - DNA, 25 bp, Homo sapien
catgcagtattagctatcaagcaac

SEQ ID NO: 1338785 - DNA, 25 bp, Homo sapien
caccagtgttaacccaggaattgga

SEQ ID NO: 1338786 - DNA, 25 bp, Homo sapien
cccaggaattggagcgatctaaacc

SEQ ID NO: 1338787 - DNA, 25 bp, Homo sapien
tgattctgcacttggactggggttg

SEQ ID NO: 1338788 - DNA, 25 bp, Homo sapien
gggcagcttttggaccaccagtgtt

SEQ ID NO: 1338789 - DNA, 25 bp, Homo sapien
gtgcagcgccctaccttaaaacaat

SEQ ID NO: 1338790 - DNA, 25 bp, Homo sapien
gacatgagtacagacccaaaccaga

SEQ ID NO: 1338791 - DNA, 25 bp, Homo sapien
cctcaagggcttaggtttcaggaga

SEQ ID NO: 1338792 - DNA, 25 bp, Homo sapien
cagtaactaacaaatgtgcagcgcc

SEQ ID NO: 1338793 - DNA, 25 bp, Homo sapien
taagggctctcttgaggtttatttc

SEQ ID NO: 1338794 - DNA, 25 bp, Homo sapien
catgtttagctgcacagatgctgac

SEQ ID NO: 1338795 - DNA, 25 bp, Homo sapien
caatcaccatggtatttctcaagac

SEQ ID NO: 1338796 - DNA, 25 bp, Homo sapien
cccaatagcattaagggctctcttg

SEQ ID NO: 1338797 - DNA, 25 bp, Homo sapien
atgattgcccacagacattaagctg

SEQ ID NO: 1338798 - DNA, 25 bp, Homo sapien
agagaacattaagggggtgagacac

SEQ ID NO: 1338799 - DNA, 25 bp, Homo sapien
cagcctgatgggaataattataatg

SEQ ID NO: 1338800 - DNA, 25 bp, Homo sapien
cattaagctggctaaggaagaagag

SEQ ID NO: 1338801 - DNA, 25 bp, Homo sapien
catagtactcaggttactctgcagt

SEQ ID NO: 1338802 - DNA, 25 bp, Homo sapien
gacaaattctcatcttgcaatggct

SEQ ID NO: 1338803 - DNA, 25 bp, Homo sapien
tataaataatgctacgtactacctg

SEQ ID NO: 1338804 - DNA, 25 bp, Homo sapien
gaaccttaaggaaatgctgtctata

SEQ ID NO: 1338805 - DNA, 25 bp, Homo sapien
ccgatgattgatcgaacttcatcat

SEQ ID NO: 1338806 - DNA, 25 bp, Homo sapien
tactcccgatgattgatcgaacttc

SEQ ID NO: 1338807 - DNA, 25 bp, Homo sapien
ctcccgatgattgatcgaacttcat

SEQ ID NO: 1338808 - DNA, 25 bp, Homo sapien
cttactcccgatgattgatcgaact

SEQ ID NO: 1338809 - DNA, 25 bp, Homo sapien
cccagatatatctggattgctatta

SEQ ID NO: 1338810 - DNA, 25 bp, Homo sapien
tctggattgctattactaaggcttc

SEQ ID NO: 1338811 - DNA, 25 bp, Homo sapien
gattgctattactaaggcttcgaga

SEQ ID NO: 1338812 - DNA, 25 bp, Homo sapien
tatatctggattgctattactaagg

SEQ ID NO: 1338813 - DNA, 25 bp, Homo sapien
gcataatgcactgatcctcccaaac

SEQ ID NO: 1338814 - DNA, 25 bp, Homo sapien
tgtggcataatgcactgatcctccc

SEQ ID NO: 1338815 - DNA, 25 bp, Homo sapien
aatgcactgatcctcccaaaccccc

SEQ ID NO: 1338816 - DNA, 25 bp, Homo sapien
ggcataatgcactgatcctcccaaa

SEQ ID NO: 1338817 - DNA, 25 bp, Homo sapien
gacaataacaagtcgagtctccagt

SEQ ID NO: 1338818 - DNA, 25 bp, Homo sapien
cacacattcatgtcctcaagtggta

SEQ ID NO: 1338819 - DNA, 25 bp, Homo sapien
tatcaccagtggtacacaaaagaca

SEQ ID NO: 1338820 - DNA, 25 bp, Homo sapien
tgaccacgaagagatcagaactttc

SEQ ID NO: 1338821 - DNA, 25 bp, Homo sapien
tccaagtttttgtgaagtcgattta

SEQ ID NO: 1338822 - DNA, 25 bp, Homo sapien
ttggtaggcggaaaacataatgaat

SEQ ID NO: 1338823 - DNA, 25 bp, Homo sapien
ctggtgatgatgaattagggtaagt

SEQ ID NO: 1338824 - DNA, 25 bp, Homo sapien
gtcgatttataattgatgccatggc

SEQ ID NO: 1338825 - DNA, 25 bp, Homo sapien
ttgtctcccagaattgcttcattaa

SEQ ID NO: 1338826 - DNA, 25 bp, Homo sapien
gccctctcctatgtaagagtgatct

SEQ ID NO: 1338827 - DNA, 25 bp, Homo sapien
catgctaaaatgtctccactctttt

SEQ ID NO: 1338828 - DNA, 25 bp, Homo sapien
catgtttagatgctgatttctctca

SEQ ID NO: 1338829 - DNA, 25 bp, Homo sapien
cacgtctcatccccaaacaaaagta

SEQ ID NO: 1338830 - DNA, 25 bp, Homo sapien
tcacgtctcatccccaaacaaaagt

SEQ ID NO: 1338831 - DNA, 25 bp, Homo sapien
cattgaccagagcaaaaaatttgtc

SEQ ID NO: 1338832 - DNA, 25 bp, Homo sapien
cactggttccagctgggatgaattc

SEQ ID NO: 1338833 - DNA, 25 bp, Homo sapien
gaagatgaagaaatcggaccactgg

SEQ ID NO: 1338834 - DNA, 25 bp, Homo sapien
gaacaggtgttcatccagagcattg

SEQ ID NO: 1338835 - DNA, 25 bp, Homo sapien
aaacacctttgtgattatctaccca

SEQ ID NO: 1338836 - DNA, 25 bp, Homo sapien
ttgtgtatggatagacgaaacagca

SEQ ID NO: 1338837 - DNA, 25 bp, Homo sapien
cctttgtgattatctacccatttca

SEQ ID NO: 1338838 - DNA, 25 bp, Homo sapien
tggatagacgaaacagcaacaactt

SEQ ID NO: 1338839 - DNA, 25 bp, Homo sapien
tggctagtcaaaggcacaaccacag

SEQ ID NO: 1338840 - DNA, 25 bp, Homo sapien
ctggctagtcaaaggcacaaccaca

SEQ ID NO: 1338841 - DNA, 25 bp, Homo sapien
gcactggctagtcaaaggcacaacc

SEQ ID NO: 1338842 - DNA, 25 bp, Homo sapien
cactggctagtcaaaggcacaacca

SEQ ID NO: 1338843 - DNA, 25 bp, Homo sapien
tgatcttttgagtttacattccatg

SEQ ID NO: 1338844 - DNA, 25 bp, Homo sapien
ttaagtagaagaaatggcaagagtt

SEQ ID NO: 1338845 - DNA, 25 bp, Homo sapien
ttcctccagtcttttagtgaaatgt

SEQ ID NO: 1338846 - DNA, 25 bp, Homo sapien
gaagtttctcaagttacagtatgaa

SEQ ID NO: 1338847 - DNA, 25 bp, Homo sapien
tcttcaaccgtccattctgaagcat

SEQ ID NO: 1338848 - DNA, 25 bp, Homo sapien
ggtttttccaatgagactggcaagc

SEQ ID NO: 1338849 - DNA, 25 bp, Homo sapien
tggccagtcttcaaccgtccattct

SEQ ID NO: 1338850 - DNA, 25 bp, Homo sapien
gacagtacagaataagcctgtggtg

SEQ ID NO: 1338851 - DNA, 25 bp, Homo sapien
tgttgacaactaacatgataaaaag

SEQ ID NO: 1338852 - DNA, 25 bp, Homo sapien
taaaaagcaagtgatgatggtcagt

SEQ ID NO: 1338853 - DNA, 25 bp, Homo sapien
tggtcagttaaagtagcaggaagct

SEQ ID NO: 1338854 - DNA, 25 bp, Homo sapien
tagcaggaagcttaaccttgatttc

SEQ ID NO: 1338855 - DNA, 25 bp, Homo sapien
ctgttatgatatactacggctgtat

SEQ ID NO: 1338856 - DNA, 25 bp, Homo sapien
actacggctgtataggcttcctttg

SEQ ID NO: 1338857 - DNA, 25 bp, Homo sapien
gaacagctagatttaccaaagatta

SEQ ID NO: 1338858 - DNA, 25 bp, Homo sapien
tatgatatactacggctgtataggc

SEQ ID NO: 1338859 - DNA, 25 bp, Homo sapien
cataactatgtaagaatttgtctga

SEQ ID NO: 1338860 - DNA, 25 bp, Homo sapien
tcagcccaatgaagaacaatgtgcc

SEQ ID NO: 1338861 - DNA, 25 bp, Homo sapien
actttgttgtagtaaatgctggatg

SEQ ID NO: 1338862 - DNA, 25 bp, Homo sapien
tgtctgatttaataactatttgaga

SEQ ID NO: 1338863 - DNA, 25 bp, Homo sapien
ttttgcaacatttcaagcaggctct

SEQ ID NO: 1338864 - DNA, 25 bp, Homo sapien
taactgtcggtataggatgggtgca

SEQ ID NO: 1338865 - DNA, 25 bp, Homo sapien
tatcttaggacccatttaaacagcc

SEQ ID NO: 1338866 - DNA, 25 bp, Homo sapien
caaagagggagaggtctaactgtcg

SEQ ID NO: 1338867 - DNA, 25 bp, Homo sapien
gcatggcattgcttggatcctctcc

SEQ ID NO: 1338868 - DNA, 25 bp, Homo sapien
tggcattgcttggatcctctccata

SEQ ID NO: 1338869 - DNA, 25 bp, Homo sapien
gcattgcttggatcctctccataca

SEQ ID NO: 1338870 - DNA, 25 bp, Homo sapien
cggcatggcattgcttggatcctct

SEQ ID NO: 1338871 - DNA, 25 bp, Homo sapien
gaaccttgacgattggcaaaattaa

SEQ ID NO: 1338872 - DNA, 25 bp, Homo sapien
ctagcagaaccttgacgattggcaa

SEQ ID NO: 1338873 - DNA, 25 bp, Homo sapien
ttggcaaaattaagactctgagggt

SEQ ID NO: 1338874 - DNA, 25 bp, Homo sapien
ctgagggtatatgtagagaagattt

SEQ ID NO: 1338875 - DNA, 25 bp, Homo sapien
gaaagggcacccatacagaagacag

SEQ ID NO: 1338876 - DNA, 25 bp, Homo sapien
gattctacgttcagacagagacaga

SEQ ID NO: 1338877 - DNA, 25 bp, Homo sapien
tgccagtgaaccatcatatgagagg

SEQ ID NO: 1338878 - DNA, 25 bp, Homo sapien
ggttgccaaacggtaatatcctgtc

SEQ ID NO: 1338879 - DNA, 25 bp, Homo sapien
cacagcattgagagccgtaacacca

SEQ ID NO: 1338880 - DNA, 25 bp, Homo sapien
ggtagtcaccatagcattgaatgtg

SEQ ID NO: 1338881 - DNA, 25 bp, Homo sapien
caatatacaaggatggttaagacat

SEQ ID NO: 1338882 - DNA, 25 bp, Homo sapien
gatttatacagagtaccagaggaac

SEQ ID NO: 1338883 - DNA, 25 bp, Homo sapien
tgatctatcgctgcaaaccagtgaa

SEQ ID NO: 1338884 - DNA, 25 bp, Homo sapien
gactttgtccataagacgaagggcc

SEQ ID NO: 1338885 - DNA, 25 bp, Homo sapien
caaaacttgaaagcctcctagaaga

SEQ ID NO: 1338886 - DNA, 25 bp, Homo sapien
caatggcctccttcagttgggacat

SEQ ID NO: 1338887 - DNA, 25 bp, Homo sapien
gctgtgattctaatacattcgtgta

SEQ ID NO: 1338888 - DNA, 25 bp, Homo sapien
cagaggactggtaattgtacagttc

SEQ ID NO: 1338889 - DNA, 25 bp, Homo sapien
agttactgaacgtttaaacagcctg

SEQ ID NO: 1338890 - DNA, 25 bp, Homo sapien
taaaaatcgtcagcacagagtatgt

SEQ ID NO: 1338891 - DNA, 25 bp, Homo sapien
tgcatgtttatcgacatcacaacag

SEQ ID NO: 1338892 - DNA, 25 bp, Homo sapien
catgtttatcgacatcacaacagat

SEQ ID NO: 1338893 - DNA, 25 bp, Homo sapien
ttgcatgtttatcgacatcacaaca

SEQ ID NO: 1338894 - DNA, 25 bp, Homo sapien
gcatgtttatcgacatcacaacaga

SEQ ID NO: 1338895 - DNA, 25 bp, Homo sapien
tatactcacggttgagcgacctcaa

SEQ ID NO: 1338896 - DNA, 25 bp, Homo sapien
tatcacaggattcacaagacgacca

SEQ ID NO: 1338897 - DNA, 25 bp, Homo sapien
gacgaccacaaggtaccatggtaca

SEQ ID NO: 1338898 - DNA, 25 bp, Homo sapien
attagcagcccatgttcaaaggacc

SEQ ID NO: 1338899 - DNA, 25 bp, Homo sapien
tgtatgggcatattcctaacagacc

SEQ ID NO: 1338900 - DNA, 25 bp, Homo sapien
actaaggccattactggaaatgcgg

SEQ ID NO: 1338901 - DNA, 25 bp, Homo sapien
tcaacaggtgattacaactaaggcc

SEQ ID NO: 1338902 - DNA, 25 bp, Homo sapien
aatatatgggcacagtgagggaaca

SEQ ID NO: 1338903 - DNA, 25 bp, Homo sapien
tactgtcagggtaaagcttcacttg

SEQ ID NO: 1338904 - DNA, 25 bp, Homo sapien
gcagctccggagttaggcaataatg

SEQ ID NO: 1338905 - DNA, 25 bp, Homo sapien
ttcaggtgcgggagaaatgtctatc

SEQ ID NO: 1338906 - DNA, 25 bp, Homo sapien
taaacatcccttgcgggaaactcta

SEQ ID NO: 1338907 - DNA, 25 bp, Homo sapien
gaagatggccttctcatatcagcaa

SEQ ID NO: 1338908 - DNA, 25 bp, Homo sapien
tatcagcaaggaatttgtagagatc

SEQ ID NO: 1338909 - DNA, 25 bp, Homo sapien
ctgtaataggtcttagtcgccgtaa

SEQ ID NO: 1338910 - DNA, 25 bp, Homo sapien
gatcttcatcacttaagcggtctcc

SEQ ID NO: 1338911 - DNA, 25 bp, Homo sapien
cccaaaattcctacatgacagaaca

SEQ ID NO: 1338912 - DNA, 25 bp, Homo sapien
tacatgtatagtacaatcactacct

SEQ ID NO: 1338913 - DNA, 25 bp, Homo sapien
aaattcctacatgacagaacaatac

SEQ ID NO: 1338914 - DNA, 25 bp, Homo sapien
accctcccatacatgtatagtacaa

SEQ ID NO: 1338915 - DNA, 25 bp, Homo sapien
gaaagctcgtcaagttacaagcatc

SEQ ID NO: 1338916 - DNA, 25 bp, Homo sapien
tgtcctttcaagtgatcgtctgcca

SEQ ID NO: 1338917 - DNA, 25 bp, Homo sapien
tttgtcactgtgagagtagctggtc

SEQ ID NO: 1338918 - DNA, 25 bp, Homo sapien
caacaatactagaattcctcctctc

SEQ ID NO: 1338919 - DNA, 25 bp, Homo sapien
tagtggaatttttgaaggtgcagcc

SEQ ID NO: 1338920 - DNA, 25 bp, Homo sapien
tctgtagcagtggttgcagaaccct

SEQ ID NO: 1338921 - DNA, 25 bp, Homo sapien
cagtgtggcagtccttcaaaagatt

SEQ ID NO: 1338922 - DNA, 25 bp, Homo sapien
tgtttagggacaggttgcaagactc

SEQ ID NO: 1338923 - DNA, 25 bp, Homo sapien
atggattgcagtccaagcaaaaggc

SEQ ID NO: 1338924 - DNA, 25 bp, Homo sapien
ccagcactgctaacaatattcatta

SEQ ID NO: 1338925 - DNA, 25 bp, Homo sapien
caaaactgatctgcttgactcttca

SEQ ID NO: 1338926 - DNA, 25 bp, Homo sapien
gcgatatttcccaagtctttggcaa

SEQ ID NO: 1338927 - DNA, 25 bp, Homo sapien
tatggttctgcacactctccaatgt

SEQ ID NO: 1338928 - DNA, 25 bp, Homo sapien
ggttctgcacactctccaatgtctc

SEQ ID NO: 1338929 - DNA, 25 bp, Homo sapien
catatatggttctgcacactctcca

SEQ ID NO: 1338930 - DNA, 25 bp, Homo sapien
atatggttctgcacactctccaatg

SEQ ID NO: 1338931 - DNA, 25 bp, Homo sapien
gaaagttgaaagtctcatacttcct

SEQ ID NO: 1338932 - DNA, 25 bp, Homo sapien
tgacagacaagtatacagacactac

SEQ ID NO: 1338933 - DNA, 25 bp, Homo sapien
ctgtgtatgtccaatattgtgttaa

SEQ ID NO: 1338934 - DNA, 25 bp, Homo sapien
aatatgtaaaggtcaaatctttgcc

SEQ ID NO: 1338935 - DNA, 25 bp, Homo sapien
gtagtaatggcagcaggtggtacat

SEQ ID NO: 1338936 - DNA, 25 bp, Homo sapien
tgctgatcttgccagggtagtaatg

SEQ ID NO: 1338937 - DNA, 25 bp, Homo sapien
tacatgtggacgtaacaaccctttc

SEQ ID NO: 1338938 - DNA, 25 bp, Homo sapien
acatcttgggaaggataagtgatag

SEQ ID NO: 1338939 - DNA, 25 bp, Homo sapien
tgctcagaattaaggtcaaaataaa

SEQ ID NO: 1338940 - DNA, 25 bp, Homo sapien
gctcagaattaaggtcaaaataaaa

SEQ ID NO: 1338941 - DNA, 25 bp, Homo sapien
ctcagaattaaggtcaaaataaaag

SEQ ID NO: 1338942 - DNA, 25 bp, Homo sapien
ctgctcagaattaaggtcaaaataa

SEQ ID NO: 1338943 - DNA, 25 bp, Homo sapien
cccagcagtttcgagttagcaaata

SEQ ID NO: 1338944 - DNA, 25 bp, Homo sapien
taaagtttatatttcactgagacca

SEQ ID NO: 1338945 - DNA, 25 bp, Homo sapien
gagaccaatctttacatacctaaat

SEQ ID NO: 1338946 - DNA, 25 bp, Homo sapien
ttgagatgatggattccaaagtgac

SEQ ID NO: 1338947 - DNA, 25 bp, Homo sapien
tgacatcatataaagccaaacttgc

SEQ ID NO: 1338948 - DNA, 25 bp, Homo sapien
catcattttgatactgtcggtccat

SEQ ID NO: 1338949 - DNA, 25 bp, Homo sapien
tctgcatcattttgatactgtcggt

SEQ ID NO: 1338950 - DNA, 25 bp, Homo sapien
tgcatcattttgatactgtcggtcc

SEQ ID NO: 1338951 - DNA, 25 bp, Homo sapien
gcatcattttgatactgtcggtcca

SEQ ID NO: 1338952 - DNA, 25 bp, Homo sapien
gagccccaggtaggcaaactttctc

SEQ ID NO: 1338953 - DNA, 25 bp, Homo sapien
ttctcacaggcttcaggcacacaac

SEQ ID NO: 1338954 - DNA, 25 bp, Homo sapien
ttccagccaacaccatgagccagga

SEQ ID NO: 1338955 - DNA, 25 bp, Homo sapien
ccagtagtggatcttagctttcttc

SEQ ID NO: 1338956 - DNA, 25 bp, Homo sapien
ggcagcaggaaccacagtccacttt

SEQ ID NO: 1338957 - DNA, 25 bp, Homo sapien
gcagcaggaaccacagtccactttt

SEQ ID NO: 1338958 - DNA, 25 bp, Homo sapien
cagcatgcttcacatggtccaccaa

SEQ ID NO: 1338959 - DNA, 25 bp, Homo sapien
tggatgccctcgcaacacatgatca

SEQ ID NO: 1338960 - DNA, 25 bp, Homo sapien
gaaatggtagggtcctcagaaagga

SEQ ID NO: 1338961 - DNA, 25 bp, Homo sapien
gcttggaaatggtagggtcctcaga

SEQ ID NO: 1338962 - DNA, 25 bp, Homo sapien
gggcaacccggagatggcctcagcc

SEQ ID NO: 1338963 - DNA, 25 bp, Homo sapien
ctgggcaacccggagatggcctcag

SEQ ID NO: 1338964 - DNA, 25 bp, Homo sapien
tgggcaacccggagatggcctcagc

SEQ ID NO: 1338965 - DNA, 25 bp, Homo sapien
gcttagcttcataaatacgttaggc

SEQ ID NO: 1338966 - DNA, 25 bp, Homo sapien
ttaggcttagcacagtaggctcagc

SEQ ID NO: 1338967 - DNA, 25 bp, Homo sapien
ctcagattttgttacatcactacta

SEQ ID NO: 1338968 - DNA, 25 bp, Homo sapien
taggctcagcttcatacatacgttt

SEQ ID NO: 1338969 - DNA, 25 bp, Homo sapien
tctttgggtatatcaggaacactaa

SEQ ID NO: 1338970 - DNA, 25 bp, Homo sapien
aatgttctttgggtatatcaggaac

SEQ ID NO: 1338971 - DNA, 25 bp, Homo sapien
tatatcaggaacactaagccgttct

SEQ ID NO: 1338972 - DNA, 25 bp, Homo sapien
cactaagccgttctattggttcttc

SEQ ID NO: 1338973 - DNA, 25 bp, Homo sapien
tagtaaattcactagtataaaatgt

SEQ ID NO: 1338974 - DNA, 25 bp, Homo sapien
tactaatctaacacttttagtcttc

SEQ ID NO: 1338975 - DNA, 25 bp, Homo sapien
gaatatgcttatcatattccaactc

SEQ ID NO: 1338976 - DNA, 25 bp, Homo sapien
tagtcttcacaatagaacatagaga

SEQ ID NO: 1338977 - DNA, 25 bp, Homo sapien
tcgatcaagtaaattgggaagcaaa

SEQ ID NO: 1338978 - DNA, 25 bp, Homo sapien
caagtcaaagatactacaggcccag

SEQ ID NO: 1338979 - DNA, 25 bp, Homo sapien
gggtatcatctattgacattgaacg

SEQ ID NO: 1338980 - DNA, 25 bp, Homo sapien
acattgaacgtcttttaaggtcatc

SEQ ID NO: 1338981 - DNA, 25 bp, Homo sapien
gatcatcctggtagctgttgccatc

SEQ ID NO: 1338982 - DNA, 25 bp, Homo sapien
ttgatcatcctggtagctgttgcca

SEQ ID NO: 1338983 - DNA, 25 bp, Homo sapien
tcatcctggtagctgttgccatctg

SEQ ID NO: 1338984 - DNA, 25 bp, Homo sapien
tgtttatctaatgtattgggattaa

SEQ ID NO: 1338985 - DNA, 25 bp, Homo sapien
ctgatgacaattgcccagtcttctg

SEQ ID NO: 1338986 - DNA, 25 bp, Homo sapien
gtcttctgtataacttcttatacag

SEQ ID NO: 1338987 - DNA, 25 bp, Homo sapien
tttctgatgacaattgcccagtctt

SEQ ID NO: 1338988 - DNA, 25 bp, Homo sapien
gacaattgcccagtcttctgtataa

SEQ ID NO: 1338989 - DNA, 25 bp, Homo sapien
gaggtaatcttccaaatccactgga

SEQ ID NO: 1338990 - DNA, 25 bp, Homo sapien
caagagttctgcagtcccgaggact

SEQ ID NO: 1338991 - DNA, 25 bp, Homo sapien
cactggatctactgcttcggtaagg

SEQ ID NO: 1338992 - DNA, 25 bp, Homo sapien
caatcaaatcccgtaaaggcccaga

SEQ ID NO: 1338993 - DNA, 25 bp, Homo sapien
gagatctgcttcctaacttcggctg

SEQ ID NO: 1338994 - DNA, 25 bp, Homo sapien
gccaacaatattaaggtttttgagc

SEQ ID NO: 1338995 - DNA, 25 bp, Homo sapien
gggagaaccactatattgtccggag

SEQ ID NO: 1338996 - DNA, 25 bp, Homo sapien
tggtgtgatgggatatattgccaac

SEQ ID NO: 1338997 - DNA, 25 bp, Homo sapien
gtataaatgtcccaaaacaggttca

SEQ ID NO: 1338998 - DNA, 25 bp, Homo sapien
tataaatgtcccaaaacaggttcat

SEQ ID NO: 1338999 - DNA, 25 bp, Homo sapien
cacatatttaagtaattatagtcat

SEQ ID NO: 1339000 - DNA, 25 bp, Homo sapien
taattatagtcatgtggaaccacta

SEQ ID NO: 1339001 - DNA, 25 bp, Homo sapien
gaaccactataaatgactaaaccac

SEQ ID NO: 1339002 - DNA, 25 bp, Homo sapien
gagagctgtctatactgccacatat

SEQ ID NO: 1339003 - DNA, 25 bp, Homo sapien
tacttcaagactgcaatcacttgct

SEQ ID NO: 1339004 - DNA, 25 bp, Homo sapien
catccatcttctcgggtgctctgag

SEQ ID NO: 1339005 - DNA, 25 bp, Homo sapien
tataaagaacactgcctatcatcca

SEQ ID NO: 1339006 - DNA, 25 bp, Homo sapien
ggagaaaggtggcaaccaaccacca

SEQ ID NO: 1339007 - DNA, 25 bp, Homo sapien
tgctgatcttctgggcgaaggcgcg

SEQ ID NO: 1339008 - DNA, 25 bp, Homo sapien
gcgcggcgctcggccatggctgctg

SEQ ID NO: 1339009 - DNA, 25 bp, Homo sapien
ctgatcttctgggcgaaggcgcggc

SEQ ID NO: 1339010 - DNA, 25 bp, Homo sapien
ctgctgatcttctgggcgaaggcgc

SEQ ID NO: 1339011 - DNA, 25 bp, Homo sapien
tcagcatacggcttgctcacgaaaa

SEQ ID NO: 1339012 - DNA, 25 bp, Homo sapien
tgctcacgaaaagataagcaatctt

SEQ ID NO: 1339013 - DNA, 25 bp, Homo sapien
catacggcttgctcacgaaaagata

SEQ ID NO: 1339014 - DNA, 25 bp, Homo sapien
cggcttgctcacgaaaagataagca

SEQ ID NO: 1339015 - DNA, 25 bp, Homo sapien
cacaattgttactgctattcccctg

SEQ ID NO: 1339016 - DNA, 25 bp, Homo sapien
gttactgctattcccctgtccaaag

SEQ ID NO: 1339017 - DNA, 25 bp, Homo sapien
aggattcacaattgttactgctatt

SEQ ID NO: 1339018 - DNA, 25 bp, Homo sapien
aattgttactgctattcccctgtcc

SEQ ID NO: 1339019 - DNA, 25 bp, Homo sapien
atggataaattactggaaaaagata

SEQ ID NO: 1339020 - DNA, 25 bp, Homo sapien
aagataaccctcctagcttaaatca

SEQ ID NO: 1339021 - DNA, 25 bp, Homo sapien
caactgacaccgctgaaatacaaaa

SEQ ID NO: 1339022 - DNA, 25 bp, Homo sapien
aaaagatcattcaaaacttctatga

SEQ ID NO: 1339023 - DNA, 25 bp, Homo sapien
tatcgctactgccaatcgcaaggct

SEQ ID NO: 1339024 - DNA, 25 bp, Homo sapien
tcgcaaggctttcgtatcccggaag

SEQ ID NO: 1339025 - DNA, 25 bp, Homo sapien
gctgatctgttggatttgacgcgga

SEQ ID NO: 1339026 - DNA, 25 bp, Homo sapien
catagcagaggcctttacgccgctg

SEQ ID NO: 1339027 - DNA, 25 bp, Homo sapien
tctggtccccgaatgactgggtttc

SEQ ID NO: 1339028 - DNA, 25 bp, Homo sapien
tctctgagggttttggcgccttcct

SEQ ID NO: 1339029 - DNA, 25 bp, Homo sapien
caagaagtttgggacttagcgtctc

SEQ ID NO: 1339030 - DNA, 25 bp, Homo sapien
tgtggccaaccatctgggttctctg

SEQ ID NO: 1339031 - DNA, 25 bp, Homo sapien
gctgtccctgcgcttgcctgtgtca

SEQ ID NO: 1339032 - DNA, 25 bp, Homo sapien
gtgtcatatgacacataagtttcag

SEQ ID NO: 1339033 - DNA, 25 bp, Homo sapien
tttcagattctgcatagtgtttccc

SEQ ID NO: 1339034 - DNA, 25 bp, Homo sapien
cagattctgcatagtgtttccccat

SEQ ID NO: 1339035 - DNA, 25 bp, Homo sapien
ggatagttaacatcacttgcacact

SEQ ID NO: 1339036 - DNA, 25 bp, Homo sapien
tagttcgactatatgagctcttgta

SEQ ID NO: 1339037 - DNA, 25 bp, Homo sapien
tgtgtagtgaggaaataggatagtt

SEQ ID NO: 1339038 - DNA, 25 bp, Homo sapien
ttggatacaaggatttaagattgtg

SEQ ID NO: 1339039 - DNA, 25 bp, Homo sapien
tattgttattgggtcacttctccaa

SEQ ID NO: 1339040 - DNA, 25 bp, Homo sapien
ccaagaagcataggaaactaggtga

SEQ ID NO: 1339041 - DNA, 25 bp, Homo sapien
cataggaaactaggtgattgccagt

SEQ ID NO: 1339042 - DNA, 25 bp, Homo sapien
tgttattgggtcacttctccaagaa

SEQ ID NO: 1339043 - DNA, 25 bp, Homo sapien
tttgtatctttgcacaatagcttct

SEQ ID NO: 1339044 - DNA, 25 bp, Homo sapien
ctttgtatctttgcacaatagcttc

SEQ ID NO: 1339045 - DNA, 25 bp, Homo sapien
atttatcatagacgatgacattgag

SEQ ID NO: 1339046 - DNA, 25 bp, Homo sapien
acattgaggcaagccttggatatga

SEQ ID NO: 1339047 - DNA, 25 bp, Homo sapien
gacgatgacattgaggcaagccttg

SEQ ID NO: 1339048 - DNA, 25 bp, Homo sapien
catagacgatgacattgaggcaagc

SEQ ID NO: 1339049 - DNA, 25 bp, Homo sapien
taagaggagagtagcctcttttggc

SEQ ID NO: 1339050 - DNA, 25 bp, Homo sapien
ataagaggagagtagcctcttttgg

SEQ ID NO: 1339051 - DNA, 25 bp, Homo sapien
aagaggagagtagcctcttttggca

SEQ ID NO: 1339052 - DNA, 25 bp, Homo sapien
agaggagagtagcctcttttggcat

SEQ ID NO: 1339053 - DNA, 25 bp, Homo sapien
gcaggaaagagagcgtctgtctgtc

SEQ ID NO: 1339054 - DNA, 25 bp, Homo sapien
tctgtctgtctgtacgcgtttaaac

SEQ ID NO: 1339055 - DNA, 25 bp, Homo sapien
aacaaaagggctccccagcgtaatg

SEQ ID NO: 1339056 - DNA, 25 bp, Homo sapien
tgtttacttccatggtctctgagac

SEQ ID NO: 1339057 - DNA, 25 bp, Homo sapien
tatcttgttattggacataaatttt

SEQ ID NO: 1339058 - DNA, 25 bp, Homo sapien
tcccctgaatgaccggcataattca

SEQ ID NO: 1339059 - DNA, 25 bp, Homo sapien
tgtcccctgaatgaccggcataatt

SEQ ID NO: 1339060 - DNA, 25 bp, Homo sapien
tctttgtcccctgaatgaccggcat

SEQ ID NO: 1339061 - DNA, 25 bp, Homo sapien
ttgagagtgcggaaaatcaatacct

SEQ ID NO: 1339062 - DNA, 25 bp, Homo sapien
ctgttgagagtgcggaaaatcaata

SEQ ID NO: 1339063 - DNA, 25 bp, Homo sapien
gttgagagtgcggaaaatcaatacc

SEQ ID NO: 1339064 - DNA, 25 bp, Homo sapien
tgttgagagtgcggaaaatcaatac

SEQ ID NO: 1339065 - DNA, 25 bp, Homo sapien
tttaatgtaataaggtcatttatct

SEQ ID NO: 1339066 - DNA, 25 bp, Homo sapien
tatcctctttacagccacaaagctg

SEQ ID NO: 1339067 - DNA, 25 bp, Homo sapien
ggacactggtaaagaggatatttca

SEQ ID NO: 1339068 - DNA, 25 bp, Homo sapien
catgggcttggtatcctgcaaagaa

SEQ ID NO: 1339069 - DNA, 25 bp, Homo sapien
tcattgcctttcatcatagttagtc

SEQ ID NO: 1339070 - DNA, 25 bp, Homo sapien
ctctttattgtcacaggagggttgt

SEQ ID NO: 1339071 - DNA, 25 bp, Homo sapien
tgagcaaatatggtggaactttttt

SEQ ID NO: 1339072 - DNA, 25 bp, Homo sapien
tcatcatagttagtctgagcaaata

SEQ ID NO: 1339073 - DNA, 25 bp, Homo sapien
tccaactgaatgactctataaaatg

SEQ ID NO: 1339074 - DNA, 25 bp, Homo sapien
caactgaatgactctataaaatgga

SEQ ID NO: 1339075 - DNA, 25 bp, Homo sapien
ttccaactgaatgactctataaaat

SEQ ID NO: 1339076 - DNA, 25 bp, Homo sapien
ccaactgaatgactctataaaatgg

SEQ ID NO: 1339077 - DNA, 25 bp, Homo sapien
tgaaggagctcgaatgtaactgggc

SEQ ID NO: 1339078 - DNA, 25 bp, Homo sapien
cgtcgtgcagtttgaattcgtctcc

SEQ ID NO: 1339079 - DNA, 25 bp, Homo sapien
ggaagctctgtttgccgtcgtgcag

SEQ ID NO: 1339080 - DNA, 25 bp, Homo sapien
gatgagcaatggattcctcctcggg

SEQ ID NO: 1339081 - DNA, 25 bp, Homo sapien
ccaaagaagagattagatctggttt

SEQ ID NO: 1339082 - DNA, 25 bp, Homo sapien
taatcttttgattcttggaaagcat

SEQ ID NO: 1339083 - DNA, 25 bp, Homo sapien
caaagaagagattagatctggtttg

SEQ ID NO: 1339084 - DNA, 25 bp, Homo sapien
gataatcttttgattcttggaaagc

SEQ ID NO: 1339085 - DNA, 25 bp, Homo sapien
atagagtttctcaatgtgtgataag

SEQ ID NO: 1339086 - DNA, 25 bp, Homo sapien
cacttccacgtcttctgactttcaa

SEQ ID NO: 1339087 - DNA, 25 bp, Homo sapien
ctgtctccaagatgagtaaccactt

SEQ ID NO: 1339088 - DNA, 25 bp, Homo sapien
cagtaaaatagagtttctcaatgtg

SEQ ID NO: 1339089 - DNA, 25 bp, Homo sapien
cctttcatggtaactgacagccagt

SEQ ID NO: 1339090 - DNA, 25 bp, Homo sapien
tcttgttcgcttgtgaatgcgtctc

SEQ ID NO: 1339091 - DNA, 25 bp, Homo sapien
gcttgtgaatgcgtctctccctttc

SEQ ID NO: 1339092 - DNA, 25 bp, Homo sapien
cttcgttaacagagcatcaagtaca

SEQ ID NO: 1339093 - DNA, 25 bp, Homo sapien
catgtcatgctgtgatgtatatcca

SEQ ID NO: 1339094 - DNA, 25 bp, Homo sapien
tgcaattcctgacaaggcctcttag

SEQ ID NO: 1339095 - DNA, 25 bp, Homo sapien
gcagcagacgaaccccgagtaaaat

SEQ ID NO: 1339096 - DNA, 25 bp, Homo sapien
ccagattatgagatgattgtgcagc

SEQ ID NO: 1339097 - DNA, 25 bp, Homo sapien
tgagctctgtacgtattgaacatac

SEQ ID NO: 1339098 - DNA, 25 bp, Homo sapien
tggaggtttagtaatttgcgaccaa

SEQ ID NO: 1339099 - DNA, 25 bp, Homo sapien
tcctgtgaaacacaagtttagctca

SEQ ID NO: 1339100 - DNA, 25 bp, Homo sapien
gaatatcaagttattcggctgtgaa

SEQ ID NO: 1339101 - DNA, 25 bp, Homo sapien
agcttggagactccctctttcccac

SEQ ID NO: 1339102 - DNA, 25 bp, Homo sapien
caggggctaagagccccgctctgga

SEQ ID NO: 1339103 - DNA, 25 bp, Homo sapien
aggccctgggggaacgcgactccat

SEQ ID NO: 1339104 - DNA, 25 bp, Homo sapien
agccccgctctggagctttcgggaa

SEQ ID NO: 1339105 - DNA, 25 bp, Homo sapien
tgggggaacgcgactccatttcagg

SEQ ID NO: 1339106 - DNA, 25 bp, Homo sapien
ctgttgcacagtgattttcaatgta

SEQ ID NO: 1339107 - DNA, 25 bp, Homo sapien
taatgacactctgctagtcagcgca

SEQ ID NO: 1339108 - DNA, 25 bp, Homo sapien
ggagcacggatatatttaatgacac

SEQ ID NO: 1339109 - DNA, 25 bp, Homo sapien
gccttagggtgttgtaaaggagcac

SEQ ID NO: 1339110 - DNA, 25 bp, Homo sapien
agttatgtcgtgtcaatgtcagaag

SEQ ID NO: 1339111 - DNA, 25 bp, Homo sapien
aaagttatgtcgtgtcaatgtcaga

SEQ ID NO: 1339112 - DNA, 25 bp, Homo sapien
tgtgaaagttatgtcgtgtcaatgt

SEQ ID NO: 1339113 - DNA, 25 bp, Homo sapien
tatgtcgtgtcaatgtcagaagttc

SEQ ID NO: 1339114 - DNA, 25 bp, Homo sapien
ggacgatggagccaagttcaaaagc

SEQ ID NO: 1339115 - DNA, 25 bp, Homo sapien
gaaaggacgatggagccaagttcaa

SEQ ID NO: 1339116 - DNA, 25 bp, Homo sapien
aaggacgatggagccaagttcaaaa

SEQ ID NO: 1339117 - DNA, 25 bp, Homo sapien
aggaaaggacgatggagccaagttc

SEQ ID NO: 1339118 - DNA, 25 bp, Homo sapien
tccaacaccctgataggaaggcagt

SEQ ID NO: 1339119 - DNA, 25 bp, Homo sapien
gatagtgtgtggtaatccaacccaa

SEQ ID NO: 1339120 - DNA, 25 bp, Homo sapien
ctccattgcaaaagcagggagcctt

SEQ ID NO: 1339121 - DNA, 25 bp, Homo sapien
tacttcgtaacttcaaggaggctcc

SEQ ID NO: 1339122 - DNA, 25 bp, Homo sapien
gcatgatggctaatgtaatcttcac

SEQ ID NO: 1339123 - DNA, 25 bp, Homo sapien
atcttcacacgaggacggcttgtcc

SEQ ID NO: 1339124 - DNA, 25 bp, Homo sapien
ttcacacgaggacggcttgtccttg

SEQ ID NO: 1339125 - DNA, 25 bp, Homo sapien
cacacgaggacggcttgtccttgaa

SEQ ID NO: 1339126 - DNA, 25 bp, Homo sapien
tttaatatacactgctgaccctaat

SEQ ID NO: 1339127 - DNA, 25 bp, Homo sapien
cagctggtgaactgtttgcggtaac

SEQ ID NO: 1339128 - DNA, 25 bp, Homo sapien
tatacactgctgaccctaatgatgg

SEQ ID NO: 1339129 - DNA, 25 bp, Homo sapien
ccagctggtgaactgtttgcggtaa

SEQ ID NO: 1339130 - DNA, 25 bp, Homo sapien
taatcagccagaatgtatgtatagg

SEQ ID NO: 1339131 - DNA, 25 bp, Homo sapien
aaggtgagagccgtcgcaagagtta

SEQ ID NO: 1339132 - DNA, 25 bp, Homo sapien
gagcacattacggtaatcagccaga

SEQ ID NO: 1339133 - DNA, 25 bp, Homo sapien
tgtataggaatcaatcaaggtgaga

SEQ ID NO: 1339134 - DNA, 25 bp, Homo sapien
tctgatggccaactatcccccaagt

SEQ ID NO: 1339135 - DNA, 25 bp, Homo sapien
cagctgtgagttttagcttctgtca

SEQ ID NO: 1339136 - DNA, 25 bp, Homo sapien
caactatcccccaagtcacgaaagg

SEQ ID NO: 1339137 - DNA, 25 bp, Homo sapien
cccagctgtgagttttagcttctgt

SEQ ID NO: 1339138 - DNA, 25 bp, Homo sapien
ttagtaagagcttccagaaccttcc

SEQ ID NO: 1339139 - DNA, 25 bp, Homo sapien
gtacggcacccagatagctccttgg

SEQ ID NO: 1339140 - DNA, 25 bp, Homo sapien
tagcatcccgcaagtccaaagtaat

SEQ ID NO: 1339141 - DNA, 25 bp, Homo sapien
cagccctgctgtgatcactatagta

SEQ ID NO: 1339142 - DNA, 25 bp, Homo sapien
ctatggggcaaagacggtaccatac

SEQ ID NO: 1339143 - DNA, 25 bp, Homo sapien
gcaaagacggtaccatacgtgatat

SEQ ID NO: 1339144 - DNA, 25 bp, Homo sapien
gggcaaagacggtaccatacgtgat

SEQ ID NO: 1339145 - DNA, 25 bp, Homo sapien
gacggtaccatacgtgatatttcat

SEQ ID NO: 1339146 - DNA, 25 bp, Homo sapien
actcgcagcagagaatgttgctgcc

SEQ ID NO: 1339147 - DNA, 25 bp, Homo sapien
gagaatgttgctgccactcaaagtc

SEQ ID NO: 1339148 - DNA, 25 bp, Homo sapien
tactcgcagcagagaatgttgctgc

SEQ ID NO: 1339149 - DNA, 25 bp, Homo sapien
ttactcgcagcagagaatgttgctg

SEQ ID NO: 1339150 - DNA, 25 bp, Homo sapien
tacaattcggtttgggcagcttaag

SEQ ID NO: 1339151 - DNA, 25 bp, Homo sapien
gagtaacagggttggaaacttgagc

SEQ ID NO: 1339152 - DNA, 25 bp, Homo sapien
cacttaggcagatacaattcggttt

SEQ ID NO: 1339153 - DNA, 25 bp, Homo sapien
gaaacttgagcccttggtacgaagc

SEQ ID NO: 1339154 - DNA, 25 bp, Homo sapien
gttgcctttcaaaactatgacttac

SEQ ID NO: 1339155 - DNA, 25 bp, Homo sapien
ttgcctttcaaaactatgacttact

SEQ ID NO: 1339156 - DNA, 25 bp, Homo sapien
tgcctttcaaaactatgacttactc

SEQ ID NO: 1339157 - DNA, 25 bp, Homo sapien
attgacgcaaactgatttgcatcca

SEQ ID NO: 1339158 - DNA, 25 bp, Homo sapien
tcattgacgcaaactgatttgcatc

SEQ ID NO: 1339159 - DNA, 25 bp, Homo sapien
cattgacgcaaactgatttgcatcc

SEQ ID NO: 1339160 - DNA, 25 bp, Homo sapien
tcaggtccctggtaagcagactgtg

SEQ ID NO: 1339161 - DNA, 25 bp, Homo sapien
gactgtcctcttgtacctctctggg

SEQ ID NO: 1339162 - DNA, 25 bp, Homo sapien
taaagtgtggcctcgtgcaaagagg

SEQ ID NO: 1339163 - DNA, 25 bp, Homo sapien
cacaggacaccgctaacaggaatgt

SEQ ID NO: 1339164 - DNA, 25 bp, Homo sapien
atgaagcaaagagggattcgttctc

SEQ ID NO: 1339165 - DNA, 25 bp, Homo sapien
agcacagattgttcagagaaagagc

SEQ ID NO: 1339166 - DNA, 25 bp, Homo sapien
gagaaagagccatgtccatgaagca

SEQ ID NO: 1339167 - DNA, 25 bp, Homo sapien
ccatgaagcaaagagggattcgttc

SEQ ID NO: 1339168 - DNA, 25 bp, Homo sapien
ctggctccacgccacttgtatcctt

SEQ ID NO: 1339169 - DNA, 25 bp, Homo sapien
gctccacgccacttgtatccttcag

SEQ ID NO: 1339170 - DNA, 25 bp, Homo sapien
ggactggctccacgccacttgtatc

SEQ ID NO: 1339171 - DNA, 25 bp, Homo sapien
aggactggctccacgccacttgtat

SEQ ID NO: 1339172 - DNA, 25 bp, Homo sapien
ctctgatgggtgcagtagccttcct

SEQ ID NO: 1339173 - DNA, 25 bp, Homo sapien
gatgggtgcagtagccttcctgtga

SEQ ID NO: 1339174 - DNA, 25 bp, Homo sapien
gagccttccagggtagccttccaag

SEQ ID NO: 1339175 - DNA, 25 bp, Homo sapien
gccttcctgtgaactggtgtccctg

SEQ ID NO: 1339176 - DNA, 25 bp, Homo sapien
gtgacccaaaaggggaggatctgca

SEQ ID NO: 1339177 - DNA, 25 bp, Homo sapien
cgtgacccaaaaggggaggatctgc

SEQ ID NO: 1339178 - DNA, 25 bp, Homo sapien
ccgtgacccaaaaggggaggatctg

SEQ ID NO: 1339179 - DNA, 25 bp, Homo sapien
tgacccaaaaggggaggatctgcat

SEQ ID NO: 1339180 - DNA, 25 bp, Homo sapien
gggcgtggacgataccggtgctcag

SEQ ID NO: 1339181 - DNA, 25 bp, Homo sapien
gggggcgtggacgataccggtgctc

SEQ ID NO: 1339182 - DNA, 25 bp, Homo sapien
ggacgataccggtgctcagagtggg

SEQ ID NO: 1339183 - DNA, 25 bp, Homo sapien
tggacgataccggtgctcagagtgg

SEQ ID NO: 1339184 - DNA, 25 bp, Homo sapien
gaaagctgaagaaagggcatgtgag

SEQ ID NO: 1339185 - DNA, 25 bp, Homo sapien
gggcaagtgctaggacagcaaacaa

SEQ ID NO: 1339186 - DNA, 25 bp, Homo sapien
aactctgctggcgattggtggttga

SEQ ID NO: 1339187 - DNA, 25 bp, Homo sapien
gcaaacaacaggaggttatgagcca

SEQ ID NO: 1339188 - DNA, 25 bp, Homo sapien
aatgcaaggatgcaacctgtttttc

SEQ ID NO: 1339189 - DNA, 25 bp, Homo sapien
tctagcctggttcccattctccttt

SEQ ID NO: 1339190 - DNA, 25 bp, Homo sapien
tttggctctagcctggttcccattc

SEQ ID NO: 1339191 - DNA, 25 bp, Homo sapien
cctttaatgcaaggatgcaacctgt

SEQ ID NO: 1339192 - DNA, 25 bp, Homo sapien
tattttgtaatcctctctccaacca

SEQ ID NO: 1339193 - DNA, 25 bp, Homo sapien
tggcttccgattgtcctccaggagt

SEQ ID NO: 1339194 - DNA, 25 bp, Homo sapien
ctccaggagtttcaagatccctaca

SEQ ID NO: 1339195 - DNA, 25 bp, Homo sapien
ccttgtctctggcttccgattgtcc

SEQ ID NO: 1339196 - DNA, 25 bp, Homo sapien
tactgattcatgaggcacatgtttg

SEQ ID NO: 1339197 - DNA, 25 bp, Homo sapien
ctgcatttactgattcatgaggcac

SEQ ID NO: 1339198 - DNA, 25 bp, Homo sapien
gattcatgaggcacatgtttgttgt

SEQ ID NO: 1339199 - DNA, 25 bp, Homo sapien
catttactgattcatgaggcacatg

SEQ ID NO: 1339200 - DNA, 25 bp, Homo sapien
tttgtcaacctgttcattatagtgg

SEQ ID NO: 1339201 - DNA, 25 bp, Homo sapien
caacctgttcattatagtggtgaat

SEQ ID NO: 1339202 - DNA, 25 bp, Homo sapien
tgaatttgacacatcagaaatgtcc

SEQ ID NO: 1339203 - DNA, 25 bp, Homo sapien
agaaatgtccctttgacaggaaagt

SEQ ID NO: 1339204 - DNA, 25 bp, Homo sapien
cttcttcatttcacaacccagtggg

SEQ ID NO: 1339205 - DNA, 25 bp, Homo sapien
tcttaaaggcaggatatatgtctgc

SEQ ID NO: 1339206 - DNA, 25 bp, Homo sapien
cagacgctgagtcgctgtcactctg

SEQ ID NO: 1339207 - DNA, 25 bp, Homo sapien
taaactccaagaggcgagagactct

SEQ ID NO: 1339208 - DNA, 25 bp, Homo sapien
gaagggcaattccatcaatgctcat

SEQ ID NO: 1339209 - DNA, 25 bp, Homo sapien
taacttatggcaatctgaggaatgc

SEQ ID NO: 1339210 - DNA, 25 bp, Homo sapien
aatgctatgaatccctcaaacatgc

SEQ ID NO: 1339211 - DNA, 25 bp, Homo sapien
gggtcacaatggctggctcatctct

SEQ ID NO: 1339212 - DNA, 25 bp, Homo sapien
taatgggtaccaaagggacactctg

SEQ ID NO: 1339213 - DNA, 25 bp, Homo sapien
gacctctgacattgcctctgacaag

SEQ ID NO: 1339214 - DNA, 25 bp, Homo sapien
tatgaatgcagatctgtagcaaatc

SEQ ID NO: 1339215 - DNA, 25 bp, Homo sapien
ctgacaagaaatccatagagcaaaa

SEQ ID NO: 1339216 - DNA, 25 bp, Homo sapien
tcttcatgtcaccgcaggaacatta

SEQ ID NO: 1339217 - DNA, 25 bp, Homo sapien
ttcatgtcaccgcaggaacattaac

SEQ ID NO: 1339218 - DNA, 25 bp, Homo sapien
cttcatgtcaccgcaggaacattaa

SEQ ID NO: 1339219 - DNA, 25 bp, Homo sapien
ctcttcatgtcaccgcaggaacatt

SEQ ID NO: 1339220 - DNA, 25 bp, Homo sapien
ttatccccctctcatctgtgtaaga

SEQ ID NO: 1339221 - DNA, 25 bp, Homo sapien
cgtattatgatgtcacactccagta

SEQ ID NO: 1339222 - DNA, 25 bp, Homo sapien
ccagtagcgttgctctgaagtccca

SEQ ID NO: 1339223 - DNA, 25 bp, Homo sapien
taagatgaatcactcctggatccag

SEQ ID NO: 1339224 - DNA, 25 bp, Homo sapien
aatggtgcttgatttggaagcgccc

SEQ ID NO: 1339225 - DNA, 25 bp, Homo sapien
gggcttgtcactacgagttggctca

SEQ ID NO: 1339226 - DNA, 25 bp, Homo sapien
gagttggctcatgaagtagtcctgc

SEQ ID NO: 1339227 - DNA, 25 bp, Homo sapien
tttgaggctcttgaaagatcccttc

SEQ ID NO: 1339228 - DNA, 25 bp, Homo sapien
tcaaaaagatgaaggttccacctct

SEQ ID NO: 1339229 - DNA, 25 bp, Homo sapien
caaaggacatctggtgatgcagtgc

SEQ ID NO: 1339230 - DNA, 25 bp, Homo sapien
gccaagagtgggttaagacagtcca

SEQ ID NO: 1339231 - DNA, 25 bp, Homo sapien
taatgtctcccctgtcaccaatgtc

SEQ ID NO: 1339232 - DNA, 25 bp, Homo sapien
acttatcttcagttaccaatttggg

SEQ ID NO: 1339233 - DNA, 25 bp, Homo sapien
ttaccaatttgggaccagtttctga

SEQ ID NO: 1339234 - DNA, 25 bp, Homo sapien
tgagaatctcggaaaattttggctt

SEQ ID NO: 1339235 - DNA, 25 bp, Homo sapien
cagtcttgagaatctcggaaaattt

SEQ ID NO: 1339236 - DNA, 25 bp, Homo sapien
tctctctgggttcagaatgatgggc

SEQ ID NO: 1339237 - DNA, 25 bp, Homo sapien
tctctgggttcagaatgatgggctc

SEQ ID NO: 1339238 - DNA, 25 bp, Homo sapien
gctctctctgggttcagaatgatgg

SEQ ID NO: 1339239 - DNA, 25 bp, Homo sapien
tgctctctctgggttcagaatgatg

SEQ ID NO: 1339240 - DNA, 25 bp, Homo sapien
gctgggaagctgctgtcacaagcca

SEQ ID NO: 1339241 - DNA, 25 bp, Homo sapien
caattaggatcatcttgttgggcag

SEQ ID NO: 1339242 - DNA, 25 bp, Homo sapien
agccagagcctagagcagctgcatg

SEQ ID NO: 1339243 - DNA, 25 bp, Homo sapien
catcttgttgggcagttggctggga

SEQ ID NO: 1339244 - DNA, 25 bp, Homo sapien
tgagaacaaggcatacaggtgaagg

SEQ ID NO: 1339245 - DNA, 25 bp, Homo sapien
aaggcatacaggtgaagggggaggc

SEQ ID NO: 1339246 - DNA, 25 bp, Homo sapien
ctgagaacaaggcatacaggtgaag

SEQ ID NO: 1339247 - DNA, 25 bp, Homo sapien
aacaaggcatacaggtgaaggggga

SEQ ID NO: 1339248 - DNA, 25 bp, Homo sapien
ttctacatatacctgccactgagca

SEQ ID NO: 1339249 - DNA, 25 bp, Homo sapien
ggcattgggacatccccttctttct

SEQ ID NO: 1339250 - DNA, 25 bp, Homo sapien
ctgagctccatgttcacaatttccc

SEQ ID NO: 1339251 - DNA, 25 bp, Homo sapien
gagctccatgttcacaatttcccat

SEQ ID NO: 1339252 - DNA, 25 bp, Homo sapien
ctctgtatctggcattgggacatcc

SEQ ID NO: 1339253 - DNA, 25 bp, Homo sapien
ggacccggagctttgattaaggcgc

SEQ ID NO: 1339254 - DNA, 25 bp, Homo sapien
atggagatgctgagacccgggaccc

SEQ ID NO: 1339255 - DNA, 25 bp, Homo sapien
tatctcaaggtaaatggagatgctg

SEQ ID NO: 1339256 - DNA, 25 bp, Homo sapien
gcgccctttttgtagtgttgataga

SEQ ID NO: 1339257 - DNA, 25 bp, Homo sapien
agagccgaccaactcaggcgcagca

SEQ ID NO: 1339258 - DNA, 25 bp, Homo sapien
aactgagagccgaccaactcaggcg

SEQ ID NO: 1339259 - DNA, 25 bp, Homo sapien
actggctgcttccttaaccacgttc

SEQ ID NO: 1339260 - DNA, 25 bp, Homo sapien
ccagggaactgagagccgaccaact

SEQ ID NO: 1339261 - DNA, 25 bp, Homo sapien
tagatttgaggtgtgcaattcttac

SEQ ID NO: 1339262 - DNA, 25 bp, Homo sapien
gatttgaggtgtgcaattcttacca

SEQ ID NO: 1339263 - DNA, 25 bp, Homo sapien
ggtagatttgaggtgtgcaattctt

SEQ ID NO: 1339264 - DNA, 25 bp, Homo sapien
ttgaggtgtgcaattcttaccacat

SEQ ID NO: 1339265 - DNA, 25 bp, Homo sapien
ctgctaaatagactgaagaggccat

SEQ ID NO: 1339266 - DNA, 25 bp, Homo sapien
acatctcagagcctgctaaatagac

SEQ ID NO: 1339267 - DNA, 25 bp, Homo sapien
tctcagagcctgctaaatagactga

SEQ ID NO: 1339268 - DNA, 25 bp, Homo sapien
gagcctgctaaatagactgaagagg

SEQ ID NO: 1339269 - DNA, 25 bp, Homo sapien
tcatcttgcctgtctaccgagagca

SEQ ID NO: 1339270 - DNA, 25 bp, Homo sapien
catctttggctcttcatcttgcctg

SEQ ID NO: 1339271 - DNA, 25 bp, Homo sapien
tgtcatctttggctcttcatcttgc

SEQ ID NO: 1339272 - DNA, 25 bp, Homo sapien
tggctcttcatcttgcctgtctacc

SEQ ID NO: 1339273 - DNA, 25 bp, Homo sapien
aaattgagctgacccgaaggccaaa

SEQ ID NO: 1339274 - DNA, 25 bp, Homo sapien
tagctgccggcaatgcagtctctca

SEQ ID NO: 1339275 - DNA, 25 bp, Homo sapien
tggcagacttccctagcgctagctg

SEQ ID NO: 1339276 - DNA, 25 bp, Homo sapien
ggcagtaagcggtagaacagcccag

SEQ ID NO: 1339277 - DNA, 25 bp, Homo sapien
tcctgcttggagcttcaggtgattt

SEQ ID NO: 1339278 - DNA, 25 bp, Homo sapien
ttctctaaatgcaggagggaaggcc

SEQ ID NO: 1339279 - DNA, 25 bp, Homo sapien
aacttcctggttgtgaagttcctgc

SEQ ID NO: 1339280 - DNA, 25 bp, Homo sapien
gatttgggtgcctcagcaaagcctt

SEQ ID NO: 1339281 - DNA, 25 bp, Homo sapien
ctgaggaaagcaaagtccttttcca

SEQ ID NO: 1339282 - DNA, 25 bp, Homo sapien
aaagatgtggcatctgggaatccca

SEQ ID NO: 1339283 - DNA, 25 bp, Homo sapien
tttccaaaaaaagatgtggcatctg

SEQ ID NO: 1339284 - DNA, 25 bp, Homo sapien
aaaaaaagatgtggcatctgggaat

SEQ ID NO: 1339285 - DNA, 25 bp, Homo sapien
gagaatcacactgccgagccttcct

SEQ ID NO: 1339286 - DNA, 25 bp, Homo sapien
ttcctgggccgcgtgcattgtctgc

SEQ ID NO: 1339287 - DNA, 25 bp, Homo sapien
aggggccgtactctctcaggtctga

SEQ ID NO: 1339288 - DNA, 25 bp, Homo sapien
tgaagaggggccgtactctctcagg

SEQ ID NO: 1339289 - DNA, 25 bp, Homo sapien
ctggagtaagggagaagtggaaaga

SEQ ID NO: 1339290 - DNA, 25 bp, Homo sapien
tggagtaagggagaagtggaaagat

SEQ ID NO: 1339291 - DNA, 25 bp, Homo sapien
ggagtaagggagaagtggaaagatg

SEQ ID NO: 1339292 - DNA, 25 bp, Homo sapien
cacatgggtgttgggtagaatatac

SEQ ID NO: 1339293 - DNA, 25 bp, Homo sapien
actcttacacatgggtgttgggtag

SEQ ID NO: 1339294 - DNA, 25 bp, Homo sapien
ttttctcctgcctacaaagatctcc

SEQ ID NO: 1339295 - DNA, 25 bp, Homo sapien
ttagcctgttgcaactccccaagtc

SEQ ID NO: 1339296 - DNA, 25 bp, Homo sapien
tgctcaactctgtccgtttccctaa

SEQ ID NO: 1339297 - DNA, 25 bp, Homo sapien
ttctcttctgtgggttgggctccat

SEQ ID NO: 1339298 - DNA, 25 bp, Homo sapien
ctctgtccgtttccctaagttctct

SEQ ID NO: 1339299 - DNA, 25 bp, Homo sapien
ctcaactctgtccgtttccctaagt

SEQ ID NO: 1339300 - DNA, 25 bp, Homo sapien
gattttggttgtacagagcaaacag

SEQ ID NO: 1339301 - DNA, 25 bp, Homo sapien
tgctgtttggacctgacaatggtaa

SEQ ID NO: 1339302 - DNA, 25 bp, Homo sapien
tcagatctgtatgtatcagggagct

SEQ ID NO: 1339303 - DNA, 25 bp, Homo sapien
ttctctcctggctgttttacatagc

SEQ ID NO: 1339304 - DNA, 25 bp, Homo sapien
tcaaagcataattaggatgattatt

SEQ ID NO: 1339305 - DNA, 25 bp, Homo sapien
aaaagcctgaaaggtacataacatg

SEQ ID NO: 1339306 - DNA, 25 bp, Homo sapien
gaaaggtacataacatgcaagctct

SEQ ID NO: 1339307 - DNA, 25 bp, Homo sapien
gcctgaaaggtacataacatgcaag

SEQ ID NO: 1339308 - DNA, 25 bp, Homo sapien
gaagttccagacaaacagccaccat

SEQ ID NO: 1339309 - DNA, 25 bp, Homo sapien
ttctgaagttccagacaaacagcca

SEQ ID NO: 1339310 - DNA, 25 bp, Homo sapien
aaacagccaccatagtatgactcat

SEQ ID NO: 1339311 - DNA, 25 bp, Homo sapien
cagacaaacagccaccatagtatga

SEQ ID NO: 1339312 - DNA, 25 bp, Homo sapien
gggaaattcttgttccaaggacaca

SEQ ID NO: 1339313 - DNA, 25 bp, Homo sapien
ggtatggagcaacttgagggactct

SEQ ID NO: 1339314 - DNA, 25 bp, Homo sapien
gagggactctgtgcagtaaatcacc

SEQ ID NO: 1339315 - DNA, 25 bp, Homo sapien
cagagaacggccttgacagagattc

SEQ ID NO: 1339316 - DNA, 25 bp, Homo sapien
gatttcatggcccaccaacaggtca

SEQ ID NO: 1339317 - DNA, 25 bp, Homo sapien
tgatttcatggcccaccaacaggtc

SEQ ID NO: 1339318 - DNA, 25 bp, Homo sapien
atggcccaccaacaggtcacaatcc

SEQ ID NO: 1339319 - DNA, 25 bp, Homo sapien
tggcccaccaacaggtcacaatcca

SEQ ID NO: 1339320 - DNA, 25 bp, Homo sapien
agtaaccacatcctcttcgacacag

SEQ ID NO: 1339321 - DNA, 25 bp, Homo sapien
aaagctaaatgaaagccctggtatt

SEQ ID NO: 1339322 - DNA, 25 bp, Homo sapien
gacacagaggaacggaaagctaaat

SEQ ID NO: 1339323 - DNA, 25 bp, Homo sapien
tctcaatgcattagtaaaggtaatc

SEQ ID NO: 1339324 - DNA, 25 bp, Homo sapien
agctcctattggcacttctactata

SEQ ID NO: 1339325 - DNA, 25 bp, Homo sapien
aattatttgtgttgcaggctctgtt

SEQ ID NO: 1339326 - DNA, 25 bp, Homo sapien
tgtttcacgcccttcatagagctcc

SEQ ID NO: 1339327 - DNA, 25 bp, Homo sapien
ttatgaatctctatattcctcacac

SEQ ID NO: 1339328 - DNA, 25 bp, Homo sapien
ttgtctcacatattaagactgaggc

SEQ ID NO: 1339329 - DNA, 25 bp, Homo sapien
acaaaatggcttaagctcctcagat

SEQ ID NO: 1339330 - DNA, 25 bp, Homo sapien
gaggcaatacttaatgcctctacaa

SEQ ID NO: 1339331 - DNA, 25 bp, Homo sapien
caaaatggcttaagctcctcagata

SEQ ID NO: 1339332 - DNA, 25 bp, Homo sapien
ctctgtgacatcaaacctcagctct

SEQ ID NO: 1339333 - DNA, 25 bp, Homo sapien
atgactgtatcttgacccctctgtg

SEQ ID NO: 1339334 - DNA, 25 bp, Homo sapien
gactgtatcttgacccctctgtgac

SEQ ID NO: 1339335 - DNA, 25 bp, Homo sapien
ctgctccttgatagttgtgtgactt

SEQ ID NO: 1339336 - DNA, 25 bp, Homo sapien
tcttagtaagaagctaacatatgat

SEQ ID NO: 1339337 - DNA, 25 bp, Homo sapien
cctgtcgtactcttgtttagaaaat

SEQ ID NO: 1339338 - DNA, 25 bp, Homo sapien
acatatgattatggtagaaagtgca

SEQ ID NO: 1339339 - DNA, 25 bp, Homo sapien
ggtaggcagtttacctgtcgtactc

SEQ ID NO: 1339340 - DNA, 25 bp, Homo sapien
cagcatctggagataatctttttat

SEQ ID NO: 1339341 - DNA, 25 bp, Homo sapien
aatctttttattggcagggcgtggt

SEQ ID NO: 1339342 - DNA, 25 bp, Homo sapien
accatctctacaaatgtgtgcctgt

SEQ ID NO: 1339343 - DNA, 25 bp, Homo sapien
gcctggatgacatggggaaacacca

SEQ ID NO: 1339344 - DNA, 25 bp, Homo sapien
catggcaatgagtaacacgcatggc

SEQ ID NO: 1339345 - DNA, 25 bp, Homo sapien
caccatggcaatgagtaacacgcat

SEQ ID NO: 1339346 - DNA, 25 bp, Homo sapien
tggcaatgagtaacacgcatggcag

SEQ ID NO: 1339347 - DNA, 25 bp, Homo sapien
agcaccatggcaatgagtaacacgc

SEQ ID NO: 1339348 - DNA, 25 bp, Homo sapien
agtacagtctgttgaatataaagga

SEQ ID NO: 1339349 - DNA, 25 bp, Homo sapien
gcttcagttcttcgaaattcatgtc

SEQ ID NO: 1339350 - DNA, 25 bp, Homo sapien
aggaaacatccaattgagaagaaca

SEQ ID NO: 1339351 - DNA, 25 bp, Homo sapien
cgaaattcatgtctctattttgaac

SEQ ID NO: 1339352 - DNA, 25 bp, Homo sapien
cacagttcttacatcatgattcata

SEQ ID NO: 1339353 - DNA, 25 bp, Homo sapien
gacaaatgattcttcagtgtattgt

SEQ ID NO: 1339354 - DNA, 25 bp, Homo sapien
ctctttttgactgcccgcaattact

SEQ ID NO: 1339355 - DNA, 25 bp, Homo sapien
tgactgcccgcaattacttgtgaca

SEQ ID NO: 1339356 - DNA, 25 bp, Homo sapien
tggttcacaaataagtcatctggtg

SEQ ID NO: 1339357 - DNA, 25 bp, Homo sapien
catctggtgtatactgtactgtctc

SEQ ID NO: 1339358 - DNA, 25 bp, Homo sapien
tttccaaacgtttccatggttcaca

SEQ ID NO: 1339359 - DNA, 25 bp, Homo sapien
caaacgtttccatggttcacaaata

SEQ ID NO: 1339360 - DNA, 25 bp, Homo sapien
cttaactctgcctcatctccaagat

SEQ ID NO: 1339361 - DNA, 25 bp, Homo sapien
catgagtagggttcctggtcccaga

SEQ ID NO: 1339362 - DNA, 25 bp, Homo sapien
gacagatctaccagacaggtggcag

SEQ ID NO: 1339363 - DNA, 25 bp, Homo sapien
gactgtttaaagttcagggacctca

SEQ ID NO: 1339364 - DNA, 25 bp, Homo sapien
tatagacaattctcctcgggttgag

SEQ ID NO: 1339365 - DNA, 25 bp, Homo sapien
ggatgggtcttttgcaatctcccca

SEQ ID NO: 1339366 - DNA, 25 bp, Homo sapien
tggatgggtcttttgcaatctcccc

SEQ ID NO: 1339367 - DNA, 25 bp, Homo sapien
ctggatgggtcttttgcaatctccc

SEQ ID NO: 1339368 - DNA, 25 bp, Homo sapien
tctgaattaacctttactttgtgcc

SEQ ID NO: 1339369 - DNA, 25 bp, Homo sapien
tcactggacaagcaagcacttgcca

SEQ ID NO: 1339370 - DNA, 25 bp, Homo sapien
caccagtagtctgctggcctgcctg

SEQ ID NO: 1339371 - DNA, 25 bp, Homo sapien
cacttgccaagtggtctgaattaac

SEQ ID NO: 1339372 - DNA, 25 bp, Homo sapien
tgttcatatccatcggctctgtgct

SEQ ID NO: 1339373 - DNA, 25 bp, Homo sapien
gcaccacattggtcattggagttaa

SEQ ID NO: 1339374 - DNA, 25 bp, Homo sapien
caaaagaagacacagaaccgggctc

SEQ ID NO: 1339375 - DNA, 25 bp, Homo sapien
tcagagactgcaccacattggtcat

SEQ ID NO: 1339376 - DNA, 25 bp, Homo sapien
tggtaatccctttgtagcttactgg

SEQ ID NO: 1339377 - DNA, 25 bp, Homo sapien
gaacattcggtcctcagcagacttg

SEQ ID NO: 1339378 - DNA, 25 bp, Homo sapien
caaactgatagagaggatctggcat

SEQ ID NO: 1339379 - DNA, 25 bp, Homo sapien
tagctgctgagaacgctggtaatcc

SEQ ID NO: 1339380 - DNA, 25 bp, Homo sapien
aagactaaggctaaatcatttggga

SEQ ID NO: 1339381 - DNA, 25 bp, Homo sapien
tgggattgagttaatctgcatgtaa

SEQ ID NO: 1339382 - DNA, 25 bp, Homo sapien
ggcagttgaagcaataaggttggct

SEQ ID NO: 1339383 - DNA, 25 bp, Homo sapien
tggcttcatgtctcaaagactaagg

SEQ ID NO: 1339384 - DNA, 25 bp, Homo sapien
tcacttgggtttattgattaacctc

SEQ ID NO: 1339385 - DNA, 25 bp, Homo sapien
ccttgactttgataagaagagctca

SEQ ID NO: 1339386 - DNA, 25 bp, Homo sapien
aaataaagtctctatcagatctctg

SEQ ID NO: 1339387 - DNA, 25 bp, Homo sapien
gaactaaaataaagtctctatcaga

SEQ ID NO: 1339388 - DNA, 25 bp, Homo sapien
catcttccccaatcaggggtcttaa

SEQ ID NO: 1339389 - DNA, 25 bp, Homo sapien
aaatgaatgtgtgttttgaattgtc

SEQ ID NO: 1339390 - DNA, 25 bp, Homo sapien
atgaatgtgtgttttgaattgtctc

SEQ ID NO: 1339391 - DNA, 25 bp, Homo sapien
gaatgtgtgttttgaattgtctcag

SEQ ID NO: 1339392 - DNA, 25 bp, Homo sapien
aatgtgtgttttgaattgtctcagt

SEQ ID NO: 1339393 - DNA, 25 bp, Homo sapien
taagtgagctcttcccagcctgtcc

SEQ ID NO: 1339394 - DNA, 25 bp, Homo sapien
cttcccagcctgtccattctggggg

SEQ ID NO: 1339395 - DNA, 25 bp, Homo sapien
gtgagctcttcccagcctgtccatt

SEQ ID NO: 1339396 - DNA, 25 bp, Homo sapien
actgttaagtgagctcttcccagcc

SEQ ID NO: 1339397 - DNA, 25 bp, Homo sapien
ttccccagtcagagatccatacagc

SEQ ID NO: 1339398 - DNA, 25 bp, Homo sapien
ttcacaatgtttggagccctttatg

SEQ ID NO: 1339399 - DNA, 25 bp, Homo sapien
gcatgtcgtaatttaaagagaaact

SEQ ID NO: 1339400 - DNA, 25 bp, Homo sapien
cacaatgtttggagccctttatgcc

SEQ ID NO: 1339401 - DNA, 25 bp, Homo sapien
cagggctatcgtatgttaaactgac

SEQ ID NO: 1339402 - DNA, 25 bp, Homo sapien
aagaggacctgcaagaagctttggc

SEQ ID NO: 1339403 - DNA, 25 bp, Homo sapien
tggttcctttgctaaccagatccag

SEQ ID NO: 1339404 - DNA, 25 bp, Homo sapien
tctgatggttactgatcccagggct

SEQ ID NO: 1339405 - DNA, 25 bp, Homo sapien
gctgagtattgtgtcatatgcctgt

SEQ ID NO: 1339406 - DNA, 25 bp, Homo sapien
attagctgagtattgtgtcatatgc

SEQ ID NO: 1339407 - DNA, 25 bp, Homo sapien
agtattgtgtcatatgcctgtagtc

SEQ ID NO: 1339408 - DNA, 25 bp, Homo sapien
tattgtgtcatatgcctgtagtcac

SEQ ID NO: 1339409 - DNA, 25 bp, Homo sapien
gctggtggtgctcaacaaacaatag

SEQ ID NO: 1339410 - DNA, 25 bp, Homo sapien
tcagtcatcgtcagtggtaggtatc

SEQ ID NO: 1339411 - DNA, 25 bp, Homo sapien
cctctttgaattgaagggcctgctg

SEQ ID NO: 1339412 - DNA, 25 bp, Homo sapien
taccacacaggagcaacaactggca

SEQ ID NO: 1339413 - DNA, 25 bp, Homo sapien
tcatggtgggaagctcaacagaaat

SEQ ID NO: 1339414 - DNA, 25 bp, Homo sapien
aaatactcggcactattcatggtgg

SEQ ID NO: 1339415 - DNA, 25 bp, Homo sapien
gaagaaatggtactctcatcagctg

SEQ ID NO: 1339416 - DNA, 25 bp, Homo sapien
cctcagaggaggtacagacatagct

SEQ ID NO: 1339417 - DNA, 25 bp, Homo sapien
taataggtggtaaattcatgcttcc

SEQ ID NO: 1339418 - DNA, 25 bp, Homo sapien
gctgcagccatctacaattgcacca

SEQ ID NO: 1339419 - DNA, 25 bp, Homo sapien
ctgcagccatctacaattgcaccac

SEQ ID NO: 1339420 - DNA, 25 bp, Homo sapien
ggacaagccgaacccttcaggaggc

SEQ ID NO: 1339421 - DNA, 25 bp, Homo sapien
cgtctccggagaccgaagcgccgga

SEQ ID NO: 1339422 - DNA, 25 bp, Homo sapien
ctggacgtaacaagacggaagggct

SEQ ID NO: 1339423 - DNA, 25 bp, Homo sapien
ccagagggagctgagcgccagagga

SEQ ID NO: 1339424 - DNA, 25 bp, Homo sapien
gaggcttttgttgctcctcggccgg

SEQ ID NO: 1339425 - DNA, 25 bp, Homo sapien
tctcgcatgatgaagtgtcggctcc

SEQ ID NO: 1339426 - DNA, 25 bp, Homo sapien
tctcctcgtggatgaaaagaacaat

SEQ ID NO: 1339427 - DNA, 25 bp, Homo sapien
gcatcgctccaaacggtgtcagaaa

SEQ ID NO: 1339428 - DNA, 25 bp, Homo sapien
tttatttagcccgacatctagccgg

SEQ ID NO: 1339429 - DNA, 25 bp, Homo sapien
cgtcgggatcggacccttccgctgg

SEQ ID NO: 1339430 - DNA, 25 bp, Homo sapien
gcaggaccctgcaccgcgtcgggat

SEQ ID NO: 1339431 - DNA, 25 bp, Homo sapien
ctacgcggcaaacaatttatttagc

SEQ ID NO: 1339432 - DNA, 25 bp, Homo sapien
gaatggacggatcaggctgggccgt

SEQ ID NO: 1339433 - DNA, 25 bp, Homo sapien
aaaagcgcaacaaatggaaccggca

SEQ ID NO: 1339434 - DNA, 25 bp, Homo sapien
cagcagcgtggagggagtccagaga

SEQ ID NO: 1339435 - DNA, 25 bp, Homo sapien
tattgtgtcgaaggaaaaaagcgca

SEQ ID NO: 1339436 - DNA, 25 bp, Homo sapien
gattgggttccgtgtgcctgccaca

SEQ ID NO: 1339437 - DNA, 25 bp, Homo sapien
ttggtgtgtctaggccaaggaaaga

SEQ ID NO: 1339438 - DNA, 25 bp, Homo sapien
aattaaatccacatcccagcatctt

SEQ ID NO: 1339439 - DNA, 25 bp, Homo sapien
gctcttgcggctcccaactaggcgg

SEQ ID NO: 1339440 - DNA, 25 bp, Homo sapien
ttgcactccgcgtgcattggccaca

SEQ ID NO: 1339441 - DNA, 25 bp, Homo sapien
agttaaatcttggaggatttgtcca

SEQ ID NO: 1339442 - DNA, 25 bp, Homo sapien
gcgtgcattggccacacatcctcgc

SEQ ID NO: 1339443 - DNA, 25 bp, Homo sapien
ttcttggaagttaaatcttggagga

SEQ ID NO: 1339444 - DNA, 25 bp, Homo sapien
aagaaaatccacgttagctggcagc

SEQ ID NO: 1339445 - DNA, 25 bp, Homo sapien
tccacgttagctggcagcaacggag

SEQ ID NO: 1339446 - DNA, 25 bp, Homo sapien
aaatccacgttagctggcagcaacg

SEQ ID NO: 1339447 - DNA, 25 bp, Homo sapien
ttagctggcagcaacggagatccca

SEQ ID NO: 1339448 - DNA, 25 bp, Homo sapien
tatgggaacctcgttctaggtcgcc

SEQ ID NO: 1339449 - DNA, 25 bp, Homo sapien
tgtggccgcacgaaaaaatacatac

SEQ ID NO: 1339450 - DNA, 25 bp, Homo sapien
atctcagcaggtgtcttccccggaa

SEQ ID NO: 1339451 - DNA, 25 bp, Homo sapien
catcaagccgggaaagagcaggtag

SEQ ID NO: 1339452 - DNA, 25 bp, Homo sapien
cggagcggagttgcgcgtctctcgt

SEQ ID NO: 1339453 - DNA, 25 bp, Homo sapien
cccggggatgctggcgcacagtgcg

SEQ ID NO: 1339454 - DNA, 25 bp, Homo sapien
tgcggagcggagttgcgcgtctctc

SEQ ID NO: 1339455 - DNA, 25 bp, Homo sapien
agtgcggagcggagttgcgcgtctc

SEQ ID NO: 1339456 - DNA, 25 bp, Homo sapien
caaccccgaggagggatgaccctct

SEQ ID NO: 1339457 - DNA, 25 bp, Homo sapien
catcgatgtggtgggcgagggcgac

SEQ ID NO: 1339458 - DNA, 25 bp, Homo sapien
acatgtccggccagacggtgctgac

SEQ ID NO: 1339459 - DNA, 25 bp, Homo sapien
gaggacgtggacatcgatgtggtgg

SEQ ID NO: 1339460 - DNA, 25 bp, Homo sapien
ggaagagaaggacagcgacgcaggt

SEQ ID NO: 1339461 - DNA, 25 bp, Homo sapien
gaaggacagcgacgcaggttgcgat

SEQ ID NO: 1339462 - DNA, 25 bp, Homo sapien
gacagcgacgcaggttgcgatagcc

SEQ ID NO: 1339463 - DNA, 25 bp, Homo sapien
agcgacgcaggttgcgatagccccg

SEQ ID NO: 1339464 - DNA, 25 bp, Homo sapien
gcatctgcgagttcatcagcaaccg

SEQ ID NO: 1339465 - DNA, 25 bp, Homo sapien
agaagaagctgaccctgagcggcat

SEQ ID NO: 1339466 - DNA, 25 bp, Homo sapien
gaccctgagcggcatctgcgagttc

SEQ ID NO: 1339467 - DNA, 25 bp, Homo sapien
tctgcgagttcatcagcaaccgctt

SEQ ID NO: 1339468 - DNA, 25 bp, Homo sapien
tcactcaacgactgcttcgtcaaga

SEQ ID NO: 1339469 - DNA, 25 bp, Homo sapien
cgcgagccgggcaacccgggcaagg

SEQ ID NO: 1339470 - DNA, 25 bp, Homo sapien
actcaacgactgcttcgtcaagatc

SEQ ID NO: 1339471 - DNA, 25 bp, Homo sapien
caacccgggcaagggcaactactgg

SEQ ID NO: 1339472 - DNA, 25 bp, Homo sapien
ccgcagtccgaggacatgttcgaca

SEQ ID NO: 1339473 - DNA, 25 bp, Homo sapien
cctgcggcgccggaaacgcttcaag

SEQ ID NO: 1339474 - DNA, 25 bp, Homo sapien
cctggacccgcagtccgaggacatg

SEQ ID NO: 1339475 - DNA, 25 bp, Homo sapien
gaaacgcttcaagcgccaccagcag

SEQ ID NO: 1339476 - DNA, 25 bp, Homo sapien
gatgcagagcttcggcgcttacagc

SEQ ID NO: 1339477 - DNA, 25 bp, Homo sapien
tgcgcgagcagacggcgctcatgat

SEQ ID NO: 1339478 - DNA, 25 bp, Homo sapien
agcagacggcgctcatgatgcagag

SEQ ID NO: 1339479 - DNA, 25 bp, Homo sapien
ggcgctcatgatgcagagcttcggc

SEQ ID NO: 1339480 - DNA, 25 bp, Homo sapien
cagcatcgagaacatcataggtggg

SEQ ID NO: 1339481 - DNA, 25 bp, Homo sapien
tcgctcatcaagtccgagccaagcg

SEQ ID NO: 1339482 - DNA, 25 bp, Homo sapien
ggcagcacggcgcagtcgtttctgc

SEQ ID NO: 1339483 - DNA, 25 bp, Homo sapien
gtgcagtcggcagcgctcatggcca

SEQ ID NO: 1339484 - DNA, 25 bp, Homo sapien
caaccgctgtcgctgagccggacga

SEQ ID NO: 1339485 - DNA, 25 bp, Homo sapien
cgctgagccggacgactgccaccat

SEQ ID NO: 1339486 - DNA, 25 bp, Homo sapien
accgctgtcgctgagccggacgact

SEQ ID NO: 1339487 - DNA, 25 bp, Homo sapien
cgctgtcgctgagccggacgactgc

SEQ ID NO: 1339488 - DNA, 25 bp, Homo sapien
gcggcctcgagcaacaaatgcacct

SEQ ID NO: 1339489 - DNA, 25 bp, Homo sapien
gacggcgcctgctcttagtaccgtg

SEQ ID NO: 1339490 - DNA, 25 bp, Homo sapien
ctaagctggtcgagcaaactcaccg

SEQ ID NO: 1339491 - DNA, 25 bp, Homo sapien
gctcaagccaaatggccggcgcaat

SEQ ID NO: 1339492 - DNA, 25 bp, Homo sapien
ttctgaaggggtcctatagatgctt

SEQ ID NO: 1339493 - DNA, 25 bp, Homo sapien
gggtcctatagatgcttcctctccc

SEQ ID NO: 1339494 - DNA, 25 bp, Homo sapien
aaggggtcctatagatgcttcctct

SEQ ID NO: 1339495 - DNA, 25 bp, Homo sapien
tgaaggggtcctatagatgcttcct

SEQ ID NO: 1339496 - DNA, 25 bp, Homo sapien
gaaatgcgacatcatagggcaggaa

SEQ ID NO: 1339497 - DNA, 25 bp, Homo sapien
agtgtgaaatgcgacatcatagggc

SEQ ID NO: 1339498 - DNA, 25 bp, Homo sapien
atgcgacatcatagggcaggaatgg

SEQ ID NO: 1339499 - DNA, 25 bp, Homo sapien
ggttagtgtgaaatgcgacatcata

SEQ ID NO: 1339500 - DNA, 25 bp, Homo sapien
taaacattccttcgggatcagggtc

SEQ ID NO: 1339501 - DNA, 25 bp, Homo sapien
tttctccgctgtcgacgtgggctgg

SEQ ID NO: 1339502 - DNA, 25 bp, Homo sapien
agacacttccttgcaaatacccaat

SEQ ID NO: 1339503 - DNA, 25 bp, Homo sapien
aacggtaaacattattgtgtcttga

SEQ ID NO: 1339504 - DNA, 25 bp, Homo sapien
acatgatttgtgcaaacacatagag

SEQ ID NO: 1339505 - DNA, 25 bp, Homo sapien
taaatttagctgacagcccctggga

SEQ ID NO: 1339506 - DNA, 25 bp, Homo sapien
gctaatcggtttttacacaaacagc

SEQ ID NO: 1339507 - DNA, 25 bp, Homo sapien
tgtgtgttgcagctataaaagtaac

SEQ ID NO: 1339508 - DNA, 25 bp, Homo sapien
agggctttttccagcgctacattca

SEQ ID NO: 1339509 - DNA, 25 bp, Homo sapien
cctgcgccagcagcgtgacactcag

SEQ ID NO: 1339510 - DNA, 25 bp, Homo sapien
aagccaccgccggagactcgcaggg

SEQ ID NO: 1339511 - DNA, 25 bp, Homo sapien
agcagcgtgacactcagccacaagc

SEQ ID NO: 1339512 - DNA, 25 bp, Homo sapien
cccttcctttatgtcgtggaaggca

SEQ ID NO: 1339513 - DNA, 25 bp, Homo sapien
aagctgccagcggttgtttaaagtc

SEQ ID NO: 1339514 - DNA, 25 bp, Homo sapien
tgaacgacggcctaaagatggtccc

SEQ ID NO: 1339515 - DNA, 25 bp, Homo sapien
aggcaggaaactctcggacccagac

SEQ ID NO: 1339516 - DNA, 25 bp, Homo sapien
cccggccgtcgcaccctcaaaagct

SEQ ID NO: 1339517 - DNA, 25 bp, Homo sapien
gccgtcgcaccctcaaaagctcttt

SEQ ID NO: 1339518 - DNA, 25 bp, Homo sapien
atgggcccggccgtcgcaccctcaa

SEQ ID NO: 1339519 - DNA, 25 bp, Homo sapien
aggaagatgggcccggccgtcgcac

SEQ ID NO: 1339520 - DNA, 25 bp, Homo sapien
caaggtctgagttgggaccgcccgt

SEQ ID NO: 1339521 - DNA, 25 bp, Homo sapien
tagagcgttctcaggaccaaggtct

SEQ ID NO: 1339522 - DNA, 25 bp, Homo sapien
tagagcaaaacatgtgccggctgtt

SEQ ID NO: 1339523 - DNA, 25 bp, Homo sapien
gaccgcccgtatctagttcctcgga

SEQ ID NO: 1339524 - DNA, 25 bp, Homo sapien
tgagtgtgtgagaggtgggtatttt

SEQ ID NO: 1339525 - DNA, 25 bp, Homo sapien
agtgtgtgagaggtgggtattttta

SEQ ID NO: 1339526 - DNA, 25 bp, Homo sapien
tgtgtgagaggtgggtatttttaac

SEQ ID NO: 1339527 - DNA, 25 bp, Homo sapien
atgagtgtgtgagaggtgggtattt

SEQ ID NO: 1339528 - DNA, 25 bp, Homo sapien
agtcccttgagaaactgtcctgagg

SEQ ID NO: 1339529 - DNA, 25 bp, Homo sapien
gtgagtcccttgagaaactgtcctg

SEQ ID NO: 1339530 - DNA, 25 bp, Homo sapien
tcctgaggggtatgtgatctgaaag

SEQ ID NO: 1339531 - DNA, 25 bp, Homo sapien
agaaagtgggttccagagccttgtg

SEQ ID NO: 1339532 - DNA, 25 bp, Homo sapien
tggcagagttacacccagagccaac

SEQ ID NO: 1339533 - DNA, 25 bp, Homo sapien
cagagttacacccagagccaacttc

SEQ ID NO: 1339534 - DNA, 25 bp, Homo sapien
gttggcagagttacacccagagcca

SEQ ID NO: 1339535 - DNA, 25 bp, Homo sapien
agttggcagagttacacccagagcc

SEQ ID NO: 1339536 - DNA, 25 bp, Homo sapien
gtccagggaccggagctgcggtgca

SEQ ID NO: 1339537 - DNA, 25 bp, Homo sapien
ccaggccgcgaaccggcagcgagaa

SEQ ID NO: 1339538 - DNA, 25 bp, Homo sapien
ctgcggtgcacgtcttattgaaggg

SEQ ID NO: 1339539 - DNA, 25 bp, Homo sapien
ggactccgcgtttgccatgctcctt

SEQ ID NO: 1339540 - DNA, 25 bp, Homo sapien
tcttctcaagcaggcttttaaatag

SEQ ID NO: 1339541 - DNA, 25 bp, Homo sapien
caaggcccatttgtgataagctttc

SEQ ID NO: 1339542 - DNA, 25 bp, Homo sapien
aaataggtgtcattgagcttcactg

SEQ ID NO: 1339543 - DNA, 25 bp, Homo sapien
cataattgtgcactgcttcttcata

SEQ ID NO: 1339544 - DNA, 25 bp, Homo sapien
ggatctgcattggtggactccattt

SEQ ID NO: 1339545 - DNA, 25 bp, Homo sapien
gtccatgcagagaacaaccttccta

SEQ ID NO: 1339546 - DNA, 25 bp, Homo sapien
ggataatgacccagcattactaaat

SEQ ID NO: 1339547 - DNA, 25 bp, Homo sapien
gaacaaccttcctaatatcatgctt

SEQ ID NO: 1339548 - DNA, 25 bp, Homo sapien
gaaccttccaagcataatcgatgtg

SEQ ID NO: 1339549 - DNA, 25 bp, Homo sapien
tcctagatgtccctgaacaaaactg

SEQ ID NO: 1339550 - DNA, 25 bp, Homo sapien
atgtggccatggcattctctagaga

SEQ ID NO: 1339551 - DNA, 25 bp, Homo sapien
tctcaatgactggtgtgcatctcca

SEQ ID NO: 1339552 - DNA, 25 bp, Homo sapien
gaaggagagattgataccaacttcc

SEQ ID NO: 1339553 - DNA, 25 bp, Homo sapien
ggtctgccaaacatggttcttgttc

SEQ ID NO: 1339554 - DNA, 25 bp, Homo sapien
catgtaacatccttcaccaatgtgc

SEQ ID NO: 1339555 - DNA, 25 bp, Homo sapien
cagtaattactagcttaaatggtag

SEQ ID NO: 1339556 - DNA, 25 bp, Homo sapien
ggcgcgcgggtggtgcgcgggcaca

SEQ ID NO: 1339557 - DNA, 25 bp, Homo sapien
cgcgcgggtggtgcgcgggcacacg

SEQ ID NO: 1339558 - DNA, 25 bp, Homo sapien
ggcacacggaggcggaaggccggag

SEQ ID NO: 1339559 - DNA, 25 bp, Homo sapien
cacacggaggcggaaggccggaggg

SEQ ID NO: 1339560 - DNA, 25 bp, Homo sapien
gagtgacttacaccaactcagattg

SEQ ID NO: 1339561 - DNA, 25 bp, Homo sapien
ctgtaggcagttgtagcacatggta

SEQ ID NO: 1339562 - DNA, 25 bp, Homo sapien
gagctttgcccattctctcagtgat

SEQ ID NO: 1339563 - DNA, 25 bp, Homo sapien
gtttgatatcaaggttaagctagcc

SEQ ID NO: 1339564 - DNA, 25 bp, Homo sapien
tgttggatctttggttaggaattcc

SEQ ID NO: 1339565 - DNA, 25 bp, Homo sapien
tgttgatgtttggacatcagctgtc

SEQ ID NO: 1339566 - DNA, 25 bp, Homo sapien
ccacagatagtataggccattcact

SEQ ID NO: 1339567 - DNA, 25 bp, Homo sapien
gtgagagtctgttggtggcaaaccc

SEQ ID NO: 1339568 - DNA, 25 bp, Homo sapien
gactcagggcttcacactagcaatg

SEQ ID NO: 1339569 - DNA, 25 bp, Homo sapien
ggagaatgcccaaatctttatagag

SEQ ID NO: 1339570 - DNA, 25 bp, Homo sapien
aagtaaacactagatgatacctgca

SEQ ID NO: 1339571 - DNA, 25 bp, Homo sapien
tgagcattgccacaattgaatccca

SEQ ID NO: 1339572 - DNA, 25 bp, Homo sapien
tgtattggtgtgttttgtatcttgc

SEQ ID NO: 1339573 - DNA, 25 bp, Homo sapien
gaagaaaatcagctagctgtattcc

SEQ ID NO: 1339574 - DNA, 25 bp, Homo sapien
tcttcttggtatactttaacattat

SEQ ID NO: 1339575 - DNA, 25 bp, Homo sapien
gaaaagtcattgttgtctacacaaa

SEQ ID NO: 1339576 - DNA, 25 bp, Homo sapien
ttcagtactctttgtagtttagttc

SEQ ID NO: 1339577 - DNA, 25 bp, Homo sapien
gaaaactggtacttaattccactca

SEQ ID NO: 1339578 - DNA, 25 bp, Homo sapien
tcactcctgagatagaggctacaca

SEQ ID NO: 1339579 - DNA, 25 bp, Homo sapien
tttggaatggatcacatattgcccc

SEQ ID NO: 1339580 - DNA, 25 bp, Homo sapien
tatgatcaggcagatgcagaagttg

SEQ ID NO: 1339581 - DNA, 25 bp, Homo sapien
caaatgctaaaagtccacagaagtg

SEQ ID NO: 1339582 - DNA, 25 bp, Homo sapien
tacgagctggtatttactgggcaga

SEQ ID NO: 1339583 - DNA, 25 bp, Homo sapien
gcacctgccaactgctacgagctgg

SEQ ID NO: 1339584 - DNA, 25 bp, Homo sapien
gttaccccaagcttctactagagag

SEQ ID NO: 1339585 - DNA, 25 bp, Homo sapien
gcattaacagtcacacggacttggg

SEQ ID NO: 1339586 - DNA, 25 bp, Homo sapien
tgtagtagggagaccaacccattct

SEQ ID NO: 1339587 - DNA, 25 bp, Homo sapien
tggccacggtgatatcaggagtact

SEQ ID NO: 1339588 - DNA, 25 bp, Homo sapien
atgtttccacctgaacaaaacacag

SEQ ID NO: 1339589 - DNA, 25 bp, Homo sapien
cgtcgtcagctcaacagttctttcc

SEQ ID NO: 1339590 - DNA, 25 bp, Homo sapien
gatgccctcctgttgttgataagac

SEQ ID NO: 1339591 - DNA, 25 bp, Homo sapien
taaagctccaaagctatatccctat

SEQ ID NO: 1339592 - DNA, 25 bp, Homo sapien
ttaaggaattcatagctgtcaagat

SEQ ID NO: 1339593 - DNA, 25 bp, Homo sapien
aattcatagctgtcaagatgacgtg

SEQ ID NO: 1339594 - DNA, 25 bp, Homo sapien
tcatagctgtcaagatgacgtgatg

SEQ ID NO: 1339595 - DNA, 25 bp, Homo sapien
aatggctttaaggaattcatagctg

SEQ ID NO: 1339596 - DNA, 25 bp, Homo sapien
ccaatgctagaataatgcctggagc

SEQ ID NO: 1339597 - DNA, 25 bp, Homo sapien
tatactaatagcagctctaaggcta

SEQ ID NO: 1339598 - DNA, 25 bp, Homo sapien
tagattctatatccctgagggcagg

SEQ ID NO: 1339599 - DNA, 25 bp, Homo sapien
caacttgccacagtatatgatgcag

SEQ ID NO: 1339600 - DNA, 25 bp, Homo sapien
cacagaggttgtgacatctgaggct

SEQ ID NO: 1339601 - DNA, 25 bp, Homo sapien
agaggttgtgacatctgaggctgac

SEQ ID NO: 1339602 - DNA, 25 bp, Homo sapien
cagaggttgtgacatctgaggctga

SEQ ID NO: 1339603 - DNA, 25 bp, Homo sapien
tcacagaggttgtgacatctgaggc

SEQ ID NO: 1339604 - DNA, 25 bp, Homo sapien
tgagcaggagtttgtaagacagaga

SEQ ID NO: 1339605 - DNA, 25 bp, Homo sapien
agcaggagtttgtaagacagagaaa

SEQ ID NO: 1339606 - DNA, 25 bp, Homo sapien
gagcaggagtttgtaagacagagaa

SEQ ID NO: 1339607 - DNA, 25 bp, Homo sapien
ctataaaatttgttacagctggcaa

SEQ ID NO: 1339608 - DNA, 25 bp, Homo sapien
caatgtctgtgtacacgctgtagaa

SEQ ID NO: 1339609 - DNA, 25 bp, Homo sapien
caaatgtgtatgagtcagtgatagc

SEQ ID NO: 1339610 - DNA, 25 bp, Homo sapien
gaagtgctgcactgatttaatacgc

SEQ ID NO: 1339611 - DNA, 25 bp, Homo sapien
cacctaattgctattaagtgagtcc

SEQ ID NO: 1339612 - DNA, 25 bp, Homo sapien
tgagcacctggatatttgtaatgtc

SEQ ID NO: 1339613 - DNA, 25 bp, Homo sapien
aagtgagtccaaatctatagtttaa

SEQ ID NO: 1339614 - DNA, 25 bp, Homo sapien
tctgatagcaagttatttacacctc

SEQ ID NO: 1339615 - DNA, 25 bp, Homo sapien
cacatatggcatacatgatagctga

SEQ ID NO: 1339616 - DNA, 25 bp, Homo sapien
tgtttctcctaaaagtcgtcacgtc

SEQ ID NO: 1339617 - DNA, 25 bp, Homo sapien
taaacccagaatgttaaagcatagg

SEQ ID NO: 1339618 - DNA, 25 bp, Homo sapien
ccccaaaacaatgacgaatcgtgta

SEQ ID NO: 1339619 - DNA, 25 bp, Homo sapien
tatgcaggaactcggtcctttggga

SEQ ID NO: 1339620 - DNA, 25 bp, Homo sapien
aaatctggtaatgggcaagtcagcc

SEQ ID NO: 1339621 - DNA, 25 bp, Homo sapien
gataacagtctcctctatgcaggaa

SEQ ID NO: 1339622 - DNA, 25 bp, Homo sapien
gctaatgtagctcctgccaagaaac

SEQ ID NO: 1339623 - DNA, 25 bp, Homo sapien
tcttggcatcacagtagacgttagt

SEQ ID NO: 1339624 - DNA, 25 bp, Homo sapien
ttagatctgactggctggcaatccc

SEQ ID NO: 1339625 - DNA, 25 bp, Homo sapien
caaccgatcactggcttattaaagg

SEQ ID NO: 1339626 - DNA, 25 bp, Homo sapien
ccaggctaacataccagattgggtg

SEQ ID NO: 1339627 - DNA, 25 bp, Homo sapien
aaaagttcaatcatcagagaagttg

SEQ ID NO: 1339628 - DNA, 25 bp, Homo sapien
tcttatgttgaagattgcatttcaa

SEQ ID NO: 1339629 - DNA, 25 bp, Homo sapien
tgatctcatcagatatcatcttctg

SEQ ID NO: 1339630 - DNA, 25 bp, Homo sapien
gtgatcttctaaaagaacatacttc

SEQ ID NO: 1339631 - DNA, 25 bp, Homo sapien
gggatgaaagcatctttatgtaata

SEQ ID NO: 1339632 - DNA, 25 bp, Homo sapien
ctaaaaaggattcatgatgattagt

SEQ ID NO: 1339633 - DNA, 25 bp, Homo sapien
taattggcaaaatgggatgaaagca

SEQ ID NO: 1339634 - DNA, 25 bp, Homo sapien
catgatgattagttttaattggcaa

SEQ ID NO: 1339635 - DNA, 25 bp, Homo sapien
tttgtgaggaagtcctgtactcttt

SEQ ID NO: 1339636 - DNA, 25 bp, Homo sapien
cacaggagattccaatgagattttc

SEQ ID NO: 1339637 - DNA, 25 bp, Homo sapien
ttaagaaatgtgatgcacaggagat

SEQ ID NO: 1339638 - DNA, 25 bp, Homo sapien
tgatgcacaggagattccaatgaga

SEQ ID NO: 1339639 - DNA, 25 bp, Homo sapien
gagattttcaagctctctactgccc

SEQ ID NO: 1339640 - DNA, 25 bp, Homo sapien
caacttttgatagcaacatcatgaa

SEQ ID NO: 1339641 - DNA, 25 bp, Homo sapien
ttctcaacttttgatagcaacatca

SEQ ID NO: 1339642 - DNA, 25 bp, Homo sapien
aatttctcaacttttgatagcaaca

SEQ ID NO: 1339643 - DNA, 25 bp, Homo sapien
ctcaacttttgatagcaacatcatg

SEQ ID NO: 1339644 - DNA, 25 bp, Homo sapien
aggctgcacaatattctatttagta

SEQ ID NO: 1339645 - DNA, 25 bp, Homo sapien
ggctgcacaatattctatttagtaa

SEQ ID NO: 1339646 - DNA, 25 bp, Homo sapien
ggccacatattgaaggctgcacaat

SEQ ID NO: 1339647 - DNA, 25 bp, Homo sapien
ttggggggccacatattgaaggctg

SEQ ID NO: 1339648 - DNA, 25 bp, Homo sapien
tgtataatgtagcatccccaaagga

SEQ ID NO: 1339649 - DNA, 25 bp, Homo sapien
tgagtgccctaggagtacaaagtgg

SEQ ID NO: 1339650 - DNA, 25 bp, Homo sapien
gattgcttaacaggagaacctcagt

SEQ ID NO: 1339651 - DNA, 25 bp, Homo sapien
gaaggattaggtcccgcaggactgc

SEQ ID NO: 1339652 - DNA, 25 bp, Homo sapien
gatatgcattgctactgagagccct

SEQ ID NO: 1339653 - DNA, 25 bp, Homo sapien
agtaaaagtatcatcattgggtgcc

SEQ ID NO: 1339654 - DNA, 25 bp, Homo sapien
tataatgaccctttgagccatccag

SEQ ID NO: 1339655 - DNA, 25 bp, Homo sapien
aaatagatttgcctctcgctagact

SEQ ID NO: 1339656 - DNA, 25 bp, Homo sapien
tacatccaggtatccagtgactgtt

SEQ ID NO: 1339657 - DNA, 25 bp, Homo sapien
gaagtcttggtcctccttgaattaa

SEQ ID NO: 1339658 - DNA, 25 bp, Homo sapien
ccagttttacggcatccttacaaga

SEQ ID NO: 1339659 - DNA, 25 bp, Homo sapien
gtagcacaacctaagaaatctgaag

SEQ ID NO: 1339660 - DNA, 25 bp, Homo sapien
agttctgggttcttcctatcttggc

SEQ ID NO: 1339661 - DNA, 25 bp, Homo sapien
gagggagctacatgtcaaaattcag

SEQ ID NO: 1339662 - DNA, 25 bp, Homo sapien
actatcattctgtaccagttctggg

SEQ ID NO: 1339663 - DNA, 25 bp, Homo sapien
tcttcagtctcaagtcaggtgtaac

SEQ ID NO: 1339664 - DNA, 25 bp, Homo sapien
tgttaacgccagtgccatactgttt

SEQ ID NO: 1339665 - DNA, 25 bp, Homo sapien
tagggtctcctgtagcttcatatga

SEQ ID NO: 1339666 - DNA, 25 bp, Homo sapien
tgcatttgttttggacccccaattc

SEQ ID NO: 1339667 - DNA, 25 bp, Homo sapien
tcatatgaatttaaggacaggtttt

SEQ ID NO: 1339668 - DNA, 25 bp, Homo sapien
tttgggtagtagcattaacatctta

SEQ ID NO: 1339669 - DNA, 25 bp, Homo sapien
gaaatataggaattacagtgaatct

SEQ ID NO: 1339670 - DNA, 25 bp, Homo sapien
agaaatataggaattacagtgaatc

SEQ ID NO: 1339671 - DNA, 25 bp, Homo sapien
tgctttgggtagtagcattaacatc

SEQ ID NO: 1339672 - DNA, 25 bp, Homo sapien
ttcagttaaactggggtgattcaat

SEQ ID NO: 1339673 - DNA, 25 bp, Homo sapien
gagctttctggtaaggctccaggga

SEQ ID NO: 1339674 - DNA, 25 bp, Homo sapien
tcataattgtatttgagctttctgg

SEQ ID NO: 1339675 - DNA, 25 bp, Homo sapien
tttctggtaaggctccagggagctc

SEQ ID NO: 1339676 - DNA, 25 bp, Homo sapien
ttgtatttgagctttctggtaaggc

SEQ ID NO: 1339677 - DNA, 25 bp, Homo sapien
caaacatcgtaggtgtgcttataca

SEQ ID NO: 1339678 - DNA, 25 bp, Homo sapien
taccacacacctagtgtatagccta

SEQ ID NO: 1339679 - DNA, 25 bp, Homo sapien
gggtcaactgtaatagtctggagaa

SEQ ID NO: 1339680 - DNA, 25 bp, Homo sapien
gaggagggcagcaaaataatgtaca

SEQ ID NO: 1339681 - DNA, 25 bp, Homo sapien
cttcagaacttgtgggagaagcaaa

SEQ ID NO: 1339682 - DNA, 25 bp, Homo sapien
tcttcagaacttgtgggagaagcaa

SEQ ID NO: 1339683 - DNA, 25 bp, Homo sapien
ttcagaacttgtgggagaagcaaat

SEQ ID NO: 1339684 - DNA, 25 bp, Homo sapien
cttccttgtgatttttgaaggatca

SEQ ID NO: 1339685 - DNA, 25 bp, Homo sapien
tattcggaggttcaaattcttcctg

SEQ ID NO: 1339686 - DNA, 25 bp, Homo sapien
tgggctcataaaatgcatcagggag

SEQ ID NO: 1339687 - DNA, 25 bp, Homo sapien
ttattggtctattcggaggttcaaa

SEQ ID NO: 1339688 - DNA, 25 bp, Homo sapien
gctcataaaatgcatcagggaggat

SEQ ID NO: 1339689 - DNA, 25 bp, Homo sapien
gaaaccatatcaagagccataagca

SEQ ID NO: 1339690 - DNA, 25 bp, Homo sapien
acacaggaaaccatatcaagagcca

SEQ ID NO: 1339691 - DNA, 25 bp, Homo sapien
catttgaaccttgcccaaacatcat

SEQ ID NO: 1339692 - DNA, 25 bp, Homo sapien
ggcatttgaaccttgcccaaacatc

SEQ ID NO: 1339693 - DNA, 25 bp, Homo sapien
tctaacagaccatccaacttcagtg

SEQ ID NO: 1339694 - DNA, 25 bp, Homo sapien
taacagaccatccaacttcagtgat

SEQ ID NO: 1339695 - DNA, 25 bp, Homo sapien
cagaccatccaacttcagtgatctt

SEQ ID NO: 1339696 - DNA, 25 bp, Homo sapien
tttcttctaacagaccatccaactt

SEQ ID NO: 1339697 - DNA, 25 bp, Homo sapien
atgttgcagtgaacggaaatcgtgc

SEQ ID NO: 1339698 - DNA, 25 bp, Homo sapien
cagatgttgcagtgaacggaaatcg

SEQ ID NO: 1339699 - DNA, 25 bp, Homo sapien
taatcccaactactcccaaggctga

SEQ ID NO: 1339700 - DNA, 25 bp, Homo sapien
cgcttgaacgcgggaagcagatgtt

SEQ ID NO: 1339701 - DNA, 25 bp, Homo sapien
caagttcatactccgaaaaaatagg

SEQ ID NO: 1339702 - DNA, 25 bp, Homo sapien
agacgtagagttgagggtaccaagc

SEQ ID NO: 1339703 - DNA, 25 bp, Homo sapien
cagaggagacaagttcatactccga

SEQ ID NO: 1339704 - DNA, 25 bp, Homo sapien
caagcgaagggaattgcctgtggac

SEQ ID NO: 1339705 - DNA, 25 bp, Homo sapien
tctgagattcgggaaagcaccactg

SEQ ID NO: 1339706 - DNA, 25 bp, Homo sapien
tccgccaaaggaaacgccaaggcat

SEQ ID NO: 1339707 - DNA, 25 bp, Homo sapien
cgatagaggagcaacacagctgtct

SEQ ID NO: 1339708 - DNA, 25 bp, Homo sapien
tatttcctgctggtgtaacagagca

SEQ ID NO: 1339709 - DNA, 25 bp, Homo sapien
gtaaccagactgtgacaccacatcc

SEQ ID NO: 1339710 - DNA, 25 bp, Homo sapien
tattaccaatttgcagtaaccagac

SEQ ID NO: 1339711 - DNA, 25 bp, Homo sapien
caggcggcctgcgtattataaatag

SEQ ID NO: 1339712 - DNA, 25 bp, Homo sapien
gggtccttctaaatctggtgtaata

SEQ ID NO: 1339713 - DNA, 25 bp, Homo sapien
caaatttggttctttccaggagtat

SEQ ID NO: 1339714 - DNA, 25 bp, Homo sapien
ttggacatctttagtcatgagagag

SEQ ID NO: 1339715 - DNA, 25 bp, Homo sapien
gtcatgagagagtagtaaacaacag

SEQ ID NO: 1339716 - DNA, 25 bp, Homo sapien
tactagataacactgactactcatg

SEQ ID NO: 1339717 - DNA, 25 bp, Homo sapien
tctacagctacgtgatatttttact

SEQ ID NO: 1339718 - DNA, 25 bp, Homo sapien
gctaagctaccacttgtgagaaaaa

SEQ ID NO: 1339719 - DNA, 25 bp, Homo sapien
gggacatctgcttactgagtacatg

SEQ ID NO: 1339720 - DNA, 25 bp, Homo sapien
tctttgttactaaagatagcagcaa

SEQ ID NO: 1339721 - DNA, 25 bp, Homo sapien
tctcaaaactgaacagaagatataa

SEQ ID NO: 1339722 - DNA, 25 bp, Homo sapien
tttttctcaaaactgaacagaagat

SEQ ID NO: 1339723 - DNA, 25 bp, Homo sapien
ctttcatgtggacttcaaatgctgg

SEQ ID NO: 1339724 - DNA, 25 bp, Homo sapien
ttctttcatgtggacttcaaatgct

SEQ ID NO: 1339725 - DNA, 25 bp, Homo sapien
gggcttttgtcgacatccaaaataa

SEQ ID NO: 1339726 - DNA, 25 bp, Homo sapien
ttgttgctagggcagcatggtaatc

SEQ ID NO: 1339727 - DNA, 25 bp, Homo sapien
gcatggtaatcagggcttttgtcga

SEQ ID NO: 1339728 - DNA, 25 bp, Homo sapien
tagggcagcatggtaatcagggctt

SEQ ID NO: 1339729 - DNA, 25 bp, Homo sapien
ccattttggccaccagagggtgagc

SEQ ID NO: 1339730 - DNA, 25 bp, Homo sapien
gccaccagagggtgagcatattatt

SEQ ID NO: 1339731 - DNA, 25 bp, Homo sapien
tattggacactatggctatatgcat

SEQ ID NO: 1339732 - DNA, 25 bp, Homo sapien
cttttggcaaactgtattggacact

SEQ ID NO: 1339733 - DNA, 25 bp, Homo sapien
tacacagggacatccaattagcatg

SEQ ID NO: 1339734 - DNA, 25 bp, Homo sapien
gaaggcttgaccaatttagaggatg

SEQ ID NO: 1339735 - DNA, 25 bp, Homo sapien
tagactaggctagggaatagtacac

SEQ ID NO: 1339736 - DNA, 25 bp, Homo sapien
tgtcctcaggacaagaaagctaagg

SEQ ID NO: 1339737 - DNA, 25 bp, Homo sapien
catgctgtgatgctaaactgtgaga

SEQ ID NO: 1339738 - DNA, 25 bp, Homo sapien
tgtgagtatccactgaaaacactgc

SEQ ID NO: 1339739 - DNA, 25 bp, Homo sapien
catggtgccattcatagtcgagaca

SEQ ID NO: 1339740 - DNA, 25 bp, Homo sapien
tcctgctgctattgcagtaaactca

SEQ ID NO: 1339741 - DNA, 25 bp, Homo sapien
gacatcccctacaaggcccaatatg

SEQ ID NO: 1339742 - DNA, 25 bp, Homo sapien
tatgataaagatctcaacacctgac

SEQ ID NO: 1339743 - DNA, 25 bp, Homo sapien
tgcagtcatcaaagattgctatcct

SEQ ID NO: 1339744 - DNA, 25 bp, Homo sapien
tcacctggccaggtactattactca

SEQ ID NO: 1339745 - DNA, 25 bp, Homo sapien
gacaggtttcttgaacagaggagac

SEQ ID NO: 1339746 - DNA, 25 bp, Homo sapien
caacctggtgtcacagcgggcaaat

SEQ ID NO: 1339747 - DNA, 25 bp, Homo sapien
ccgcatggacttagctgtgtggcaa

SEQ ID NO: 1339748 - DNA, 25 bp, Homo sapien
gatgcccacggacattaactaactt

SEQ ID NO: 1339749 - DNA, 25 bp, Homo sapien
accatggtgaagatcgtgacagtta

SEQ ID NO: 1339750 - DNA, 25 bp, Homo sapien
tggtgaagatcgtgacagttaagac

SEQ ID NO: 1339751 - DNA, 25 bp, Homo sapien
ggtgaagatcgtgacagttaagacc

SEQ ID NO: 1339752 - DNA, 25 bp, Homo sapien
catggtgaagatcgtgacagttaag

SEQ ID NO: 1339753 - DNA, 25 bp, Homo sapien
ttcgcgctcgctcttctggcctgga

SEQ ID NO: 1339754 - DNA, 25 bp, Homo sapien
catgaaggaggccatccagctcatc

SEQ ID NO: 1339755 - DNA, 25 bp, Homo sapien
aagcgggtgaaggtgttccagagca

SEQ ID NO: 1339756 - DNA, 25 bp, Homo sapien
caactacgcggagaacttcatccag

SEQ ID NO: 1339757 - DNA, 25 bp, Homo sapien
ggccggaatttcttcaccaggtgag

SEQ ID NO: 1339758 - DNA, 25 bp, Homo sapien
gagagaattcttgcgcatccacagc

SEQ ID NO: 1339759 - DNA, 25 bp, Homo sapien
caggttctgaccacatccgtgagaa

SEQ ID NO: 1339760 - DNA, 25 bp, Homo sapien
tagccacccgcaagcagagtgtgga

SEQ ID NO: 1339761 - DNA, 25 bp, Homo sapien
tggaataaccaaaatatggaggttc

SEQ ID NO: 1339762 - DNA, 25 bp, Homo sapien
taaattggtatagctattttggaat

SEQ ID NO: 1339763 - DNA, 25 bp, Homo sapien
gaaccatcagacactattggtggga

SEQ ID NO: 1339764 - DNA, 25 bp, Homo sapien
agggaaccatcagacactattggtg

SEQ ID NO: 1339765 - DNA, 25 bp, Homo sapien
aaccagcctaagtgcccatctacag

SEQ ID NO: 1339766 - DNA, 25 bp, Homo sapien
accagcctaagtgcccatctacaga

SEQ ID NO: 1339767 - DNA, 25 bp, Homo sapien
ccagcctaagtgcccatctacagat

SEQ ID NO: 1339768 - DNA, 25 bp, Homo sapien
tgagtgagacgtacttggctacaga

SEQ ID NO: 1339769 - DNA, 25 bp, Homo sapien
ggtatttgtctccttagccatcagg

SEQ ID NO: 1339770 - DNA, 25 bp, Homo sapien
tgtaagctataggtggagcatcagc

SEQ ID NO: 1339771 - DNA, 25 bp, Homo sapien
gagcatcagcagtgagtgaggccat

SEQ ID NO: 1339772 - DNA, 25 bp, Homo sapien
tgtgcggctggtgcagagattccca

SEQ ID NO: 1339773 - DNA, 25 bp, Homo sapien
tctttatcaggctggcgaagctcgc

SEQ ID NO: 1339774 - DNA, 25 bp, Homo sapien
cagcatgatgcgaaaccgcgtcggg

SEQ ID NO: 1339775 - DNA, 25 bp, Homo sapien
gatgatatttcatgagccagggtgc

SEQ ID NO: 1339776 - DNA, 25 bp, Homo sapien
cagctggttctaattgcacagggca

SEQ ID NO: 1339777 - DNA, 25 bp, Homo sapien
ttgggaaccgttgcgctggaacatg

SEQ ID NO: 1339778 - DNA, 25 bp, Homo sapien
ggctgccttctctgtaaaccgtggg

SEQ ID NO: 1339779 - DNA, 25 bp, Homo sapien
gttgtaacgtatgcatctgtggagc

SEQ ID NO: 1339780 - DNA, 25 bp, Homo sapien
tggtttgcggctttactcatattct

SEQ ID NO: 1339781 - DNA, 25 bp, Homo sapien
cttgatttgtgtctgcgccaccagt

SEQ ID NO: 1339782 - DNA, 25 bp, Homo sapien
tgactttttcgttcacacatctcag

SEQ ID NO: 1339783 - DNA, 25 bp, Homo sapien
ctcataaacattcccatcgctcttg

SEQ ID NO: 1339784 - DNA, 25 bp, Homo sapien
tcagctcgagctcccttgagtggct

SEQ ID NO: 1339785 - DNA, 25 bp, Homo sapien
ctcttcagcaagctccctagcatga

SEQ ID NO: 1339786 - DNA, 25 bp, Homo sapien
gctcgagctcccttgagtggcttgg

SEQ ID NO: 1339787 - DNA, 25 bp, Homo sapien
cactggtgaacttgtgaggagagca

SEQ ID NO: 1339788 - DNA, 25 bp, Homo sapien
tgtctccaggatatcccaagaggct

SEQ ID NO: 1339789 - DNA, 25 bp, Homo sapien
taatgctggaaatataatctgttca

SEQ ID NO: 1339790 - DNA, 25 bp, Homo sapien
ctggcctcaataatggagttgaatt

SEQ ID NO: 1339791 - DNA, 25 bp, Homo sapien
tcctgtctccaggatatcccaagag

SEQ ID NO: 1339792 - DNA, 25 bp, Homo sapien
ctgtgtctcctcacttgtttttgat

SEQ ID NO: 1339793 - DNA, 25 bp, Homo sapien
cctcacttgtttttgatggagataa

SEQ ID NO: 1339794 - DNA, 25 bp, Homo sapien
aatgatggggtgtatgtgcatttgc

SEQ ID NO: 1339795 - DNA, 25 bp, Homo sapien
tctgggtctttcacataacagcagc

SEQ ID NO: 1339796 - DNA, 25 bp, Homo sapien
aaggtttgctctaattttatggatg

SEQ ID NO: 1339797 - DNA, 25 bp, Homo sapien
cttctgggttcattatatttccaga

SEQ ID NO: 1339798 - DNA, 25 bp, Homo sapien
ggtttgctctaattttatggatggg

SEQ ID NO: 1339799 - DNA, 25 bp, Homo sapien
gtttgctctaattttatggatgggg

SEQ ID NO: 1339800 - DNA, 25 bp, Homo sapien
tcgctttccacccaattcccatcat

SEQ ID NO: 1339801 - DNA, 25 bp, Homo sapien
tgtttgcactttggttcgctttcca

SEQ ID NO: 1339802 - DNA, 25 bp, Homo sapien
tgcactttggttcgctttccaccca

SEQ ID NO: 1339803 - DNA, 25 bp, Homo sapien
ttgtgtttgcactttggttcgcttt

SEQ ID NO: 1339804 - DNA, 25 bp, Homo sapien
tcaaacagactctctctgtatctca

SEQ ID NO: 1339805 - DNA, 25 bp, Homo sapien
tctgtatctcagtgggaaactctct

SEQ ID NO: 1339806 - DNA, 25 bp, Homo sapien
caaacagactctctctgtatctcag

SEQ ID NO: 1339807 - DNA, 25 bp, Homo sapien
ctctgtatctcagtgggaaactctc

SEQ ID NO: 1339808 - DNA, 25 bp, Homo sapien
aagctgcttcttctgtaagtcccta

SEQ ID NO: 1339809 - DNA, 25 bp, Homo sapien
tgcttcttctgtaagtccctagagc

SEQ ID NO: 1339810 - DNA, 25 bp, Homo sapien
tcttctgtaagtccctagagcccac

SEQ ID NO: 1339811 - DNA, 25 bp, Homo sapien
gcttcttctgtaagtccctagagcc

SEQ ID NO: 1339812 - DNA, 25 bp, Homo sapien
cccttactgtccagtggttgaccat

SEQ ID NO: 1339813 - DNA, 25 bp, Homo sapien
gatatcggcaaactcccttactgtc

SEQ ID NO: 1339814 - DNA, 25 bp, Homo sapien
actcccttactgtccagtggttgac

SEQ ID NO: 1339815 - DNA, 25 bp, Homo sapien
tctggcgatatcggcaaactccctt

SEQ ID NO: 1339816 - DNA, 25 bp, Homo sapien
caatgaggtctgaaccctttccaag

SEQ ID NO: 1339817 - DNA, 25 bp, Homo sapien
tctccaatgaggtctgaaccctttc

SEQ ID NO: 1339818 - DNA, 25 bp, Homo sapien
gccttctccaatgaggtctgaaccc

SEQ ID NO: 1339819 - DNA, 25 bp, Homo sapien
tccaatgaggtctgaaccctttcca

SEQ ID NO: 1339820 - DNA, 25 bp, Homo sapien
aagcaccttgttggatggcctggat

SEQ ID NO: 1339821 - DNA, 25 bp, Homo sapien
tcaatttcccttcgagtgctggagt

SEQ ID NO: 1339822 - DNA, 25 bp, Homo sapien
aactcagagatagactggaagcacc

SEQ ID NO: 1339823 - DNA, 25 bp, Homo sapien
tgctggagttccctaagacggtctt

SEQ ID NO: 1339824 - DNA, 25 bp, Homo sapien
tgttaccttaactaacatgaggttg

SEQ ID NO: 1339825 - DNA, 25 bp, Homo sapien
taaatcagtgtgtggtgagatcaat

SEQ ID NO: 1339826 - DNA, 25 bp, Homo sapien
tgggttaggaccagcatttttagat

SEQ ID NO: 1339827 - DNA, 25 bp, Homo sapien
tctgaccacttcatgcagacctggg

SEQ ID NO: 1339828 - DNA, 25 bp, Homo sapien
tggaggcactctttatggcgcttgc

SEQ ID NO: 1339829 - DNA, 25 bp, Homo sapien
agcttcatgcgagccttatctgcct

SEQ ID NO: 1339830 - DNA, 25 bp, Homo sapien
caggagcttcatgcgagccttatct

SEQ ID NO: 1339831 - DNA, 25 bp, Homo sapien
ggagcttcatgcgagccttatctgc

SEQ ID NO: 1339832 - DNA, 25 bp, Homo sapien
ccaggagcttcatgcgagccttatc

SEQ ID NO: 1339833 - DNA, 25 bp, Homo sapien
tgttccatgagaatcgcttgttttt

SEQ ID NO: 1339834 - DNA, 25 bp, Homo sapien
catgagaatcgcttgtttttgaaca

SEQ ID NO: 1339835 - DNA, 25 bp, Homo sapien
ggatgtgttccatgagaatcgcttg

SEQ ID NO: 1339836 - DNA, 25 bp, Homo sapien
gatgtgttccatgagaatcgcttgt

SEQ ID NO: 1339837 - DNA, 25 bp, Homo sapien
tcttcttagatatgcggtatcttct

SEQ ID NO: 1339838 - DNA, 25 bp, Homo sapien
gtgaaaggtgagtgatctaatattg

SEQ ID NO: 1339839 - DNA, 25 bp, Homo sapien
gaatggacagtcattggcttgcgga

SEQ ID NO: 1339840 - DNA, 25 bp, Homo sapien
tggacagtcattggcttgcggatca

SEQ ID NO: 1339841 - DNA, 25 bp, Homo sapien
ctaatattgacttgattcctcccat

SEQ ID NO: 1339842 - DNA, 25 bp, Homo sapien
agtgggcaaagccagtgaatgggga

SEQ ID NO: 1339843 - DNA, 25 bp, Homo sapien
gggcaaagccagtgaatggggacac

SEQ ID NO: 1339844 - DNA, 25 bp, Homo sapien
tgagtgggcaaagccagtgaatggg

SEQ ID NO: 1339845 - DNA, 25 bp, Homo sapien
ctgagtgggcaaagccagtgaatgg

SEQ ID NO: 1339846 - DNA, 25 bp, Homo sapien
gcctgctgtcgggactgggcactgc

SEQ ID NO: 1339847 - DNA, 25 bp, Homo sapien
tgcctgctgtcgggactgggcactg

SEQ ID NO: 1339848 - DNA, 25 bp, Homo sapien
agacaatgattacttttgagctttt

SEQ ID NO: 1339849 - DNA, 25 bp, Homo sapien
aagacaatgattacttttgagcttt

SEQ ID NO: 1339850 - DNA, 25 bp, Homo sapien
taagacaatgattacttttgagctt

SEQ ID NO: 1339851 - DNA, 25 bp, Homo sapien
ctaagacaatgattacttttgagct

SEQ ID NO: 1339852 - DNA, 25 bp, Homo sapien
cagccctgtaaaaagtcaatcaggc

SEQ ID NO: 1339853 - DNA, 25 bp, Homo sapien
caatcaggctaaatgacacctgctg

SEQ ID NO: 1339854 - DNA, 25 bp, Homo sapien
taaaaacgcgtcttcgaacaactga

SEQ ID NO: 1339855 - DNA, 25 bp, Homo sapien
ggctatctcttccaacagttgagga

SEQ ID NO: 1339856 - DNA, 25 bp, Homo sapien
aaaacaatgatggtgacacagtgag

SEQ ID NO: 1339857 - DNA, 25 bp, Homo sapien
ggccttgtgggcagcgtgaaaacaa

SEQ ID NO: 1339858 - DNA, 25 bp, Homo sapien
tgggcagcgtgaaaacaatgatggt

SEQ ID NO: 1339859 - DNA, 25 bp, Homo sapien
cttgtgggcagcgtgaaaacaatga

SEQ ID NO: 1339860 - DNA, 25 bp, Homo sapien
tgatcagagccgagccatccagtct

SEQ ID NO: 1339861 - DNA, 25 bp, Homo sapien
cgagccatccagtctgagctttgtt

SEQ ID NO: 1339862 - DNA, 25 bp, Homo sapien
tgtttttcccagtgcagcagtggtt

SEQ ID NO: 1339863 - DNA, 25 bp, Homo sapien
cacatctggtgcctgtgatcagagc

SEQ ID NO: 1339864 - DNA, 25 bp, Homo sapien
tggcatcgaaactggcttccccggc

SEQ ID NO: 1339865 - DNA, 25 bp, Homo sapien
ggcctccagcactaggccacgaagg

SEQ ID NO: 1339866 - DNA, 25 bp, Homo sapien
taggccacgaaggaaccagcttctt

SEQ ID NO: 1339867 - DNA, 25 bp, Homo sapien
cctgagtctggcatcgaaactggct

SEQ ID NO: 1339868 - DNA, 25 bp, Homo sapien
cagctcctcagtatcattgcaaggg

SEQ ID NO: 1339869 - DNA, 25 bp, Homo sapien
tgttttgggccttgacagtgtggta

SEQ ID NO: 1339870 - DNA, 25 bp, Homo sapien
tggaaatggcaatgcaccgagccct

SEQ ID NO: 1339871 - DNA, 25 bp, Homo sapien
acagtgtggtaagggcagcggtgga

SEQ ID NO: 1339872 - DNA, 25 bp, Homo sapien
caatgctagctgtgtcttgttcccc

SEQ ID NO: 1339873 - DNA, 25 bp, Homo sapien
agtgtttaaaaacttctccaatgct

SEQ ID NO: 1339874 - DNA, 25 bp, Homo sapien
tggaacctccttggcgacagaattc

SEQ ID NO: 1339875 - DNA, 25 bp, Homo sapien
ctggaacctccttggcgacagaatt

SEQ ID NO: 1339876 - DNA, 25 bp, Homo sapien
ttagtggatgaaagaaaagggccca

SEQ ID NO: 1339877 - DNA, 25 bp, Homo sapien
ccaaatggagccaaaaaagagtcag

SEQ ID NO: 1339878 - DNA, 25 bp, Homo sapien
aagagtcagcagcattgccacccac

SEQ ID NO: 1339879 - DNA, 25 bp, Homo sapien
tgaaagaaaagggcccaaatggagc

SEQ ID NO: 1339880 - DNA, 25 bp, Homo sapien
tgtactatctggtctcccccaggtt

SEQ ID NO: 1339881 - DNA, 25 bp, Homo sapien
tctgcaaggacatcaaagacctgaa

SEQ ID NO: 1339882 - DNA, 25 bp, Homo sapien
ccccaggttctgcaaggacatcaaa

SEQ ID NO: 1339883 - DNA, 25 bp, Homo sapien
caggttctgcaaggacatcaaagac

SEQ ID NO: 1339884 - DNA, 25 bp, Homo sapien
agctggaattagttctttcatggcc

SEQ ID NO: 1339885 - DNA, 25 bp, Homo sapien
ctgctatatgcagattcaggtttga

SEQ ID NO: 1339886 - DNA, 25 bp, Homo sapien
ccttggggaagatgtggataaaaga

SEQ ID NO: 1339887 - DNA, 25 bp, Homo sapien
agtttagctggaattagttctttca

SEQ ID NO: 1339888 - DNA, 25 bp, Homo sapien
tattacataagctgaataccaggtc

SEQ ID NO: 1339889 - DNA, 25 bp, Homo sapien
gggagccagttattacataagctga

SEQ ID NO: 1339890 - DNA, 25 bp, Homo sapien
gctgaataccaggtccgtgggtttc

SEQ ID NO: 1339891 - DNA, 25 bp, Homo sapien
cagcagggagccagttattacataa

SEQ ID NO: 1339892 - DNA, 25 bp, Homo sapien
tttgcacactggacagcttcatgaa

SEQ ID NO: 1339893 - DNA, 25 bp, Homo sapien
actggacagcttcatgaaaagccat

SEQ ID NO: 1339894 - DNA, 25 bp, Homo sapien
tgcacactggacagcttcatgaaaa

SEQ ID NO: 1339895 - DNA, 25 bp, Homo sapien
acactggacagcttcatgaaaagcc

SEQ ID NO: 1339896 - DNA, 25 bp, Homo sapien
ccaattgcttgtgttctccatttcc

SEQ ID NO: 1339897 - DNA, 25 bp, Homo sapien
tgaaactgaactggtttccaattgc

SEQ ID NO: 1339898 - DNA, 25 bp, Homo sapien
agttccaggttttcctagagtacag

SEQ ID NO: 1339899 - DNA, 25 bp, Homo sapien
ccaggttttcctagagtacagccag

SEQ ID NO: 1339900 - DNA, 25 bp, Homo sapien
cattgctttctctctaacatcctgt

SEQ ID NO: 1339901 - DNA, 25 bp, Homo sapien
ctttctctctaacatcctgtgtagc

SEQ ID NO: 1339902 - DNA, 25 bp, Homo sapien
tttctctctaacatcctgtgtagct

SEQ ID NO: 1339903 - DNA, 25 bp, Homo sapien
aaatggctctaatcaacattcttct

SEQ ID NO: 1339904 - DNA, 25 bp, Homo sapien
atggctctaatcaacattcttctag

SEQ ID NO: 1339905 - DNA, 25 bp, Homo sapien
ctaatcaacattcttctagacctgc

SEQ ID NO: 1339906 - DNA, 25 bp, Homo sapien
ggctctaatcaacattcttctagac

SEQ ID NO: 1339907 - DNA, 25 bp, Homo sapien
cccagcccctctggtctgggaggaa

SEQ ID NO: 1339908 - DNA, 25 bp, Homo sapien
tgggaggaaggggacggcctgcaac

SEQ ID NO: 1339909 - DNA, 25 bp, Homo sapien
agtggggggatctgtttggcaactg

SEQ ID NO: 1339910 - DNA, 25 bp, Homo sapien
caactggagtgaagggattgccctc

SEQ ID NO: 1339911 - DNA, 25 bp, Homo sapien
tgtcctctagggagatgaccgcact

SEQ ID NO: 1339912 - DNA, 25 bp, Homo sapien
tttaaggggagcagactcagggacc

SEQ ID NO: 1339913 - DNA, 25 bp, Homo sapien
tgacctccttgtagcagtttgtgtg

SEQ ID NO: 1339914 - DNA, 25 bp, Homo sapien
gggtcgtcgatggtctggctcacat

SEQ ID NO: 1339915 - DNA, 25 bp, Homo sapien
tggtagaggcttcctgccagaagga

SEQ ID NO: 1339916 - DNA, 25 bp, Homo sapien
aaagagatctttctggtccttccag

SEQ ID NO: 1339917 - DNA, 25 bp, Homo sapien
cagagactcctgtgctctaggtggt

SEQ ID NO: 1339918 - DNA, 25 bp, Homo sapien
tccagtaataaagccccttggacaa

SEQ ID NO: 1339919 - DNA, 25 bp, Homo sapien
tgaggcagaggacgtggatggtgcc

SEQ ID NO: 1339920 - DNA, 25 bp, Homo sapien
gaggcagaggacgtggatggtgcca

SEQ ID NO: 1339921 - DNA, 25 bp, Homo sapien
ctgaggcagaggacgtggatggtgc

SEQ ID NO: 1339922 - DNA, 25 bp, Homo sapien
aggcagaggacgtggatggtgccat

SEQ ID NO: 1339923 - DNA, 25 bp, Homo sapien
ggctgattgcttggcaggaggaggt

SEQ ID NO: 1339924 - DNA, 25 bp, Homo sapien
ttgcttggcaggaggaggttcctgc

SEQ ID NO: 1339925 - DNA, 25 bp, Homo sapien
tgattgcttggcaggaggaggttcc

SEQ ID NO: 1339926 - DNA, 25 bp, Homo sapien
tgtggctgattgcttggcaggagga

SEQ ID NO: 1339927 - DNA, 25 bp, Homo sapien
tgtgtattagtgaattgaaatcaag

SEQ ID NO: 1339928 - DNA, 25 bp, Homo sapien
gtgtattagtgaattgaaatcaagg

SEQ ID NO: 1339929 - DNA, 25 bp, Homo sapien
ctgtgtattagtgaattgaaatcaa

SEQ ID NO: 1339930 - DNA, 25 bp, Homo sapien
caaatatcttggctttgtatttccc

SEQ ID NO: 1339931 - DNA, 25 bp, Homo sapien
ctctgtctgatctccgccaaatatc

SEQ ID NO: 1339932 - DNA, 25 bp, Homo sapien
tctgatctccgccaaatatcttggc

SEQ ID NO: 1339933 - DNA, 25 bp, Homo sapien
tgtatttcccataacccatctgttc

SEQ ID NO: 1339934 - DNA, 25 bp, Homo sapien
tgggcccttgatctactgctgagca

SEQ ID NO: 1339935 - DNA, 25 bp, Homo sapien
agccacatactgcctcttcttgggc

SEQ ID NO: 1339936 - DNA, 25 bp, Homo sapien
gggcccttgatctactgctgagcat

SEQ ID NO: 1339937 - DNA, 25 bp, Homo sapien
tgcatgatagcaggcgactcccttg

SEQ ID NO: 1339938 - DNA, 25 bp, Homo sapien
gactcccttgtcagtaggcagcagg

SEQ ID NO: 1339939 - DNA, 25 bp, Homo sapien
aggcagcaggcctgtgttatgtcag

SEQ ID NO: 1339940 - DNA, 25 bp, Homo sapien
agttatgctgacctcgccgacgaaa

SEQ ID NO: 1339941 - DNA, 25 bp, Homo sapien
cttttcccgattccggctgtctggg

SEQ ID NO: 1339942 - DNA, 25 bp, Homo sapien
gcttctcttttcccgattccggctg

SEQ ID NO: 1339943 - DNA, 25 bp, Homo sapien
tcttttcccgattccggctgtctgg

SEQ ID NO: 1339944 - DNA, 25 bp, Homo sapien
tctcttttcccgattccggctgtct

SEQ ID NO: 1339945 - DNA, 25 bp, Homo sapien
agggttactgccgagcatggccatg

SEQ ID NO: 1339946 - DNA, 25 bp, Homo sapien
gggttactgccgagcatggccatgt

SEQ ID NO: 1339947 - DNA, 25 bp, Homo sapien
agcatggccatgtcgttagttccct

SEQ ID NO: 1339948 - DNA, 25 bp, Homo sapien
gagggttactgccgagcatggccat

SEQ ID NO: 1339949 - DNA, 25 bp, Homo sapien
gagggccacacgccttggcaccaca

SEQ ID NO: 1339950 - DNA, 25 bp, Homo sapien
ctggagggccacacgccttggcacc

SEQ ID NO: 1339951 - DNA, 25 bp, Homo sapien
tggagggccacacgccttggcacca

SEQ ID NO: 1339952 - DNA, 25 bp, Homo sapien
ggagggccacacgccttggcaccac

SEQ ID NO: 1339953 - DNA, 25 bp, Homo sapien
aagagatcccaggcgtggctggagt

SEQ ID NO: 1339954 - DNA, 25 bp, Homo sapien
tgaagagatcccaggcgtggctgga

SEQ ID NO: 1339955 - DNA, 25 bp, Homo sapien
gagatcccaggcgtggctggagtga

SEQ ID NO: 1339956 - DNA, 25 bp, Homo sapien
gaagagatcccaggcgtggctggag

SEQ ID NO: 1339957 - DNA, 25 bp, Homo sapien
tctctcctctttgcactttgcactg

SEQ ID NO: 1339958 - DNA, 25 bp, Homo sapien
tgcactttgcactgaagaatcatcc

SEQ ID NO: 1339959 - DNA, 25 bp, Homo sapien
tttgcactgaagaatcatcctctcc

SEQ ID NO: 1339960 - DNA, 25 bp, Homo sapien
ctgattcacagtactctctcctctt

SEQ ID NO: 1339961 - DNA, 25 bp, Homo sapien
tagttgtaatcttgctggtctttgt

SEQ ID NO: 1339962 - DNA, 25 bp, Homo sapien
gaacccaacttgtatccactgtagt

SEQ ID NO: 1339963 - DNA, 25 bp, Homo sapien
acagaacttagctttgtggtgctgg

SEQ ID NO: 1339964 - DNA, 25 bp, Homo sapien
aaggaacccaacttgtatccactgt

SEQ ID NO: 1339965 - DNA, 25 bp, Homo sapien
tggtctcgtcgctcagagagaacca

SEQ ID NO: 1339966 - DNA, 25 bp, Homo sapien
taagaactggtctcgtcgctcagag

SEQ ID NO: 1339967 - DNA, 25 bp, Homo sapien
gaactggtctcgtcgctcagagaga

SEQ ID NO: 1339968 - DNA, 25 bp, Homo sapien
ctgttaagaactggtctcgtcgctc

SEQ ID NO: 1339969 - DNA, 25 bp, Homo sapien
tgcatcacttgcacacgtttgcaat

SEQ ID NO: 1339970 - DNA, 25 bp, Homo sapien
cacgtttgcaattcatcaactctga

SEQ ID NO: 1339971 - DNA, 25 bp, Homo sapien
cacttgcacacgtttgcaattcatc

SEQ ID NO: 1339972 - DNA, 25 bp, Homo sapien
ttcatcaactctgatttccaaaact

SEQ ID NO: 1339973 - DNA, 25 bp, Homo sapien
tggactcttcgtacccctttgatgt

SEQ ID NO: 1339974 - DNA, 25 bp, Homo sapien
gcatttcggtggctttggtgcagac

SEQ ID NO: 1339975 - DNA, 25 bp, Homo sapien
gagtaatcccttcctgatttacagg

SEQ ID NO: 1339976 - DNA, 25 bp, Homo sapien
ggcttggttgcagtctgccacccca

SEQ ID NO: 1339977 - DNA, 25 bp, Homo sapien
tgttatgtgagggacacatggagac

SEQ ID NO: 1339978 - DNA, 25 bp, Homo sapien
ccagttagcattcccacctgctgtt

SEQ ID NO: 1339979 - DNA, 25 bp, Homo sapien
tgctgttcctggtgactcttggtaa

SEQ ID NO: 1339980 - DNA, 25 bp, Homo sapien
gagaccagtttgctgtagtctcttc

SEQ ID NO: 1339981 - DNA, 25 bp, Homo sapien
ctttgccctactatttcctgttttg

SEQ ID NO: 1339982 - DNA, 25 bp, Homo sapien
ctactatttcctgttttgttttgcg

SEQ ID NO: 1339983 - DNA, 25 bp, Homo sapien
ctgttttgttttgcgttttgggatg

SEQ ID NO: 1339984 - DNA, 25 bp, Homo sapien
cttcctttgccctactatttcctgt

SEQ ID NO: 1339985 - DNA, 25 bp, Homo sapien
agcctacagtttctcaggccaggtt

SEQ ID NO: 1339986 - DNA, 25 bp, Homo sapien
ggacctgcttcttcaagcctacagt

SEQ ID NO: 1339987 - DNA, 25 bp, Homo sapien
gccagaggccctaagaatactctgt

SEQ ID NO: 1339988 - DNA, 25 bp, Homo sapien
cacagttgttcagatctggggtgtg

SEQ ID NO: 1339989 - DNA, 25 bp, Homo sapien
ccctgtgttgggacctttatcctgg

SEQ ID NO: 1339990 - DNA, 25 bp, Homo sapien
ggacctttatcctggtgtgctcctg

SEQ ID NO: 1339991 - DNA, 25 bp, Homo sapien
tcctatgaccccatagccctgtgtt

SEQ ID NO: 1339992 - DNA, 25 bp, Homo sapien
ccatagccctgtgttgggaccttta

SEQ ID NO: 1339993 - DNA, 25 bp, Homo sapien
tggtaaatcccctatggtgaacata

SEQ ID NO: 1339994 - DNA, 25 bp, Homo sapien
gatgataagaacgaggtcaagatcc

SEQ ID NO: 1339995 - DNA, 25 bp, Homo sapien
gtcaagatcctgtaggtgaactcca

SEQ ID NO: 1339996 - DNA, 25 bp, Homo sapien
tgtaggtgaactccactggtatgga

SEQ ID NO: 1339997 - DNA, 25 bp, Homo sapien
ctgagaagatcctgtaagagacagg

SEQ ID NO: 1339998 - DNA, 25 bp, Homo sapien
ggtcaaattggcctttcagactgag

SEQ ID NO: 1339999 - DNA, 25 bp, Homo sapien
gagaagatcctgtaagagacaggtc

SEQ ID NO: 1340000 - DNA, 25 bp, Homo sapien
aaattggcctttcagactgagcctg

SEQ ID NO: 1340001 - DNA, 25 bp, Homo sapien
caaggtcccttgaggcctgagtgtg

SEQ ID NO: 1340002 - DNA, 25 bp, Homo sapien
gccttgcagggggagttgcttcaca

SEQ ID NO: 1340003 - DNA, 25 bp, Homo sapien
tgttcaatgaaatctccgtgaagcc

SEQ ID NO: 1340004 - DNA, 25 bp, Homo sapien
tactgatcggattgctgttcaatga

SEQ ID NO: 1340005 - DNA, 25 bp, Homo sapien
cagactgctgtctcggttccacggt

SEQ ID NO: 1340006 - DNA, 25 bp, Homo sapien
tccacggtgattggcgtcctgagta

SEQ ID NO: 1340007 - DNA, 25 bp, Homo sapien
taaacacacgttgcccatgttggcc

SEQ ID NO: 1340008 - DNA, 25 bp, Homo sapien
ggattcagggagtcctctctcagac

SEQ ID NO: 1340009 - DNA, 25 bp, Homo sapien
tgtctgagcacctggttatgtgggc

SEQ ID NO: 1340010 - DNA, 25 bp, Homo sapien
gttatgtgggccagaggcatgacct

SEQ ID NO: 1340011 - DNA, 25 bp, Homo sapien
atgagtttctaagctgggccttaag

SEQ ID NO: 1340012 - DNA, 25 bp, Homo sapien
cttaagatgcttcgcagttgaaaac

SEQ ID NO: 1340013 - DNA, 25 bp, Homo sapien
actaactggttactacgatgaagag

SEQ ID NO: 1340014 - DNA, 25 bp, Homo sapien
aaactttagtaatagtgtttctgca

SEQ ID NO: 1340015 - DNA, 25 bp, Homo sapien
gatgaagagtgttgtcgttggaaac

SEQ ID NO: 1340016 - DNA, 25 bp, Homo sapien
ggcaaaagttgccagtactaactgg

SEQ ID NO: 1340017 - DNA, 25 bp, Homo sapien
atcccagctcggcatgtcgacatag

SEQ ID NO: 1340018 - DNA, 25 bp, Homo sapien
ggtctcccgcgtggattcctcacag

SEQ ID NO: 1340019 - DNA, 25 bp, Homo sapien
ccttcctggagtgttggctgtgcct

SEQ ID NO: 1340020 - DNA, 25 bp, Homo sapien
tcaaagcgacagtcggaatcccctt

SEQ ID NO: 1340021 - DNA, 25 bp, Homo sapien
gaaaagtactaccattggctttata

SEQ ID NO: 1340022 - DNA, 25 bp, Homo sapien
actaccattggctttatacctatca

SEQ ID NO: 1340023 - DNA, 25 bp, Homo sapien
tatacctatcattagctaaaccttc

SEQ ID NO: 1340024 - DNA, 25 bp, Homo sapien
agctaaaccttctgtaaatggcatc

SEQ ID NO: 1340025 - DNA, 25 bp, Homo sapien
ctctgtatatttaaggcataattgt

SEQ ID NO: 1340026 - DNA, 25 bp, Homo sapien
ttaaggcataattgtttcagggcct

SEQ ID NO: 1340027 - DNA, 25 bp, Homo sapien
atttaaggcataattgtttcagggc

SEQ ID NO: 1340028 - DNA, 25 bp, Homo sapien
gacctctgtatatttaaggcataat

SEQ ID NO: 1340029 - DNA, 25 bp, Homo sapien
ctggctatgggcgtctccattgagg

SEQ ID NO: 1340030 - DNA, 25 bp, Homo sapien
ggctatgggcgtctccattgaggca

SEQ ID NO: 1340031 - DNA, 25 bp, Homo sapien
tggctatgggcgtctccattgaggc

SEQ ID NO: 1340032 - DNA, 25 bp, Homo sapien
taatcttctctttattgttctgatt

SEQ ID NO: 1340033 - DNA, 25 bp, Homo sapien
gaatttgcctgtcatctttgcccag

SEQ ID NO: 1340034 - DNA, 25 bp, Homo sapien
ttgcctgtcatctttgcccaggggc

SEQ ID NO: 1340035 - DNA, 25 bp, Homo sapien
tctctttattgttctgattttagta

SEQ ID NO: 1340036 - DNA, 25 bp, Homo sapien
gccaatgttctgatgtagctgccat

SEQ ID NO: 1340037 - DNA, 25 bp, Homo sapien
ttagccttgctatcctgagtacatt

SEQ ID NO: 1340038 - DNA, 25 bp, Homo sapien
gcaggcagccaatgttctgatgtag

SEQ ID NO: 1340039 - DNA, 25 bp, Homo sapien
cattccatgctgaaggtgggtccca

SEQ ID NO: 1340040 - DNA, 25 bp, Homo sapien
tcctgatctggttcccggcagcttt

SEQ ID NO: 1340041 - DNA, 25 bp, Homo sapien
cgaaacctggccagacatcttgcca

SEQ ID NO: 1340042 - DNA, 25 bp, Homo sapien
cagttcttggttctcgttcctcccg

SEQ ID NO: 1340043 - DNA, 25 bp, Homo sapien
cttgcatcctgtgttaaattcccca

SEQ ID NO: 1340044 - DNA, 25 bp, Homo sapien
tccaagcactctccatgtggtggcc

SEQ ID NO: 1340045 - DNA, 25 bp, Homo sapien
tgcacaagagatgtccaagagcttc

SEQ ID NO: 1340046 - DNA, 25 bp, Homo sapien
cacacaagtgttgtttgcacaagag

SEQ ID NO: 1340047 - DNA, 25 bp, Homo sapien
gactctgaagtctctcacacagtgt

SEQ ID NO: 1340048 - DNA, 25 bp, Homo sapien
gcgatgacctaactgtgtttggcag

SEQ ID NO: 1340049 - DNA, 25 bp, Homo sapien
gcgtgaacagaatgttctctccaag

SEQ ID NO: 1340050 - DNA, 25 bp, Homo sapien
tatttcccgagatagtgagtcagaa

SEQ ID NO: 1340051 - DNA, 25 bp, Homo sapien
gaatgcaggttgatagcgtgaacag

SEQ ID NO: 1340052 - DNA, 25 bp, Homo sapien
gctccagtaaagcagctaacctcca

SEQ ID NO: 1340053 - DNA, 25 bp, Homo sapien
ttcaacacggctactcaagcagttc

SEQ ID NO: 1340054 - DNA, 25 bp, Homo sapien
gaggcatcttgtagagaggagacca

SEQ ID NO: 1340055 - DNA, 25 bp, Homo sapien
tcatcaaaccatcctagactcagca

SEQ ID NO: 1340056 - DNA, 25 bp, Homo sapien
agaaactgtgcctggatggcaacat

SEQ ID NO: 1340057 - DNA, 25 bp, Homo sapien
tgccccagcaccatattgtagacac

SEQ ID NO: 1340058 - DNA, 25 bp, Homo sapien
cttgcattagcccagctctaccttt

SEQ ID NO: 1340059 - DNA, 25 bp, Homo sapien
tgaaaggaacttgcattagcccagc

SEQ ID NO: 1340060 - DNA, 25 bp, Homo sapien
aatttgcaattgcttgtgatcaatc

SEQ ID NO: 1340061 - DNA, 25 bp, Homo sapien
taaacacgatggcacttggactagc

SEQ ID NO: 1340062 - DNA, 25 bp, Homo sapien
aaacacgatggcacttggactagcc

SEQ ID NO: 1340063 - DNA, 25 bp, Homo sapien
ttggtctcttagaatagctatagcc

SEQ ID NO: 1340064 - DNA, 25 bp, Homo sapien
agaatagctatagccttcagcaatg

SEQ ID NO: 1340065 - DNA, 25 bp, Homo sapien
gacagaataagtctaccattttcta

SEQ ID NO: 1340066 - DNA, 25 bp, Homo sapien
tgtgggatgaagcaattagccatgt

SEQ ID NO: 1340067 - DNA, 25 bp, Homo sapien
ttgagtgcttggctctgtaatcttg

SEQ ID NO: 1340068 - DNA, 25 bp, Homo sapien
ccccagctttggtttgagtgcttgg

SEQ ID NO: 1340069 - DNA, 25 bp, Homo sapien
ttccactagaaattccccagctttg

SEQ ID NO: 1340070 - DNA, 25 bp, Homo sapien
agaaattccccagctttggtttgag

SEQ ID NO: 1340071 - DNA, 25 bp, Homo sapien
acaccccacaattaagacatcgcaa

SEQ ID NO: 1340072 - DNA, 25 bp, Homo sapien
taagacatcgcaactccatgcaatg

SEQ ID NO: 1340073 - DNA, 25 bp, Homo sapien
gacatcgcaactccatgcaatgttt

SEQ ID NO: 1340074 - DNA, 25 bp, Homo sapien
ccacaattaagacatcgcaactcca

SEQ ID NO: 1340075 - DNA, 25 bp, Homo sapien
gcaggcacgtcctctgatccttgcc

SEQ ID NO: 1340076 - DNA, 25 bp, Homo sapien
aagcaggcacgtcctctgatccttg

SEQ ID NO: 1340077 - DNA, 25 bp, Homo sapien
aggcacgtcctctgatccttgccca

SEQ ID NO: 1340078 - DNA, 25 bp, Homo sapien
agcaggcacgtcctctgatccttgc

SEQ ID NO: 1340079 - DNA, 25 bp, Homo sapien
acctttagcgtctggcccacagctg

SEQ ID NO: 1340080 - DNA, 25 bp, Homo sapien
cctttagcgtctggcccacagctga

SEQ ID NO: 1340081 - DNA, 25 bp, Homo sapien
ggcaagtccaacaaggagagtgaga

SEQ ID NO: 1340082 - DNA, 25 bp, Homo sapien
aggcaagtccaacaaggagagtgag

SEQ ID NO: 1340083 - DNA, 25 bp, Homo sapien
gcaagtccaacaaggagagtgagag

SEQ ID NO: 1340084 - DNA, 25 bp, Homo sapien
tgaaaggagtaaaagtttggagtca

SEQ ID NO: 1340085 - DNA, 25 bp, Homo sapien
atgaaagatgtttgcgcatctttca

SEQ ID NO: 1340086 - DNA, 25 bp, Homo sapien
ctttcttttcatttgccccctgcat

SEQ ID NO: 1340087 - DNA, 25 bp, Homo sapien
cctttcttttcatttgccccctgca

SEQ ID NO: 1340088 - DNA, 25 bp, Homo sapien
gccctgtacctttcttttcatttgc

SEQ ID NO: 1340089 - DNA, 25 bp, Homo sapien
aaatctcctgttcacatggataagg

SEQ ID NO: 1340090 - DNA, 25 bp, Homo sapien
cctactgactatatcatcaaatcgg

SEQ ID NO: 1340091 - DNA, 25 bp, Homo sapien
tcatacagtgctgccatgattggag

SEQ ID NO: 1340092 - DNA, 25 bp, Homo sapien
gagtcctcagcaatcagttattcca

SEQ ID NO: 1340093 - DNA, 25 bp, Homo sapien
ccccgaggcaggcaagactgttaat

SEQ ID NO: 1340094 - DNA, 25 bp, Homo sapien
cacatcagggatcaggcaattgagc

SEQ ID NO: 1340095 - DNA, 25 bp, Homo sapien
cattagcgtatactcccaccatgga

SEQ ID NO: 1340096 - DNA, 25 bp, Homo sapien
ggtgaagaatcttgccaaagcccca

SEQ ID NO: 1340097 - DNA, 25 bp, Homo sapien
tttttgatgtgcgggtaataaattc

SEQ ID NO: 1340098 - DNA, 25 bp, Homo sapien
ccttgtactagtattcaaagggaat

SEQ ID NO: 1340099 - DNA, 25 bp, Homo sapien
ttaatgaataggagatcatttcccg

SEQ ID NO: 1340100 - DNA, 25 bp, Homo sapien
gccagcttgatcgtgatggataagt

SEQ ID NO: 1340101 - DNA, 25 bp, Homo sapien
cacgggtacagtcttttgtttcact

SEQ ID NO: 1340102 - DNA, 25 bp, Homo sapien
ttagcacacgggtacagtcttttgt

SEQ ID NO: 1340103 - DNA, 25 bp, Homo sapien
ttcctcgttattctgtaaacctgcc

SEQ ID NO: 1340104 - DNA, 25 bp, Homo sapien
tttcctcgttattctgtaaacctgc

SEQ ID NO: 1340105 - DNA, 25 bp, Homo sapien
cagtttcacaagtcgtgttacccca

SEQ ID NO: 1340106 - DNA, 25 bp, Homo sapien
caagtcgtgttaccccaagagcttc

SEQ ID NO: 1340107 - DNA, 25 bp, Homo sapien
ttcacaagtcgtgttaccccaagag

SEQ ID NO: 1340108 - DNA, 25 bp, Homo sapien
gcatgcagtttcacaagtcgtgtta

SEQ ID NO: 1340109 - DNA, 25 bp, Homo sapien
acaccactttactccagcatgggcg

SEQ ID NO: 1340110 - DNA, 25 bp, Homo sapien
agcatgggcgacagagtgagactcc

SEQ ID NO: 1340111 - DNA, 25 bp, Homo sapien
tcacaccactttactccagcatggg

SEQ ID NO: 1340112 - DNA, 25 bp, Homo sapien
catgggcgacagagtgagactccat

SEQ ID NO: 1340113 - DNA, 25 bp, Homo sapien
tgcatattccttgtgagagttaagc

SEQ ID NO: 1340114 - DNA, 25 bp, Homo sapien
catattccttgtgagagttaagctt

SEQ ID NO: 1340115 - DNA, 25 bp, Homo sapien
tattccttgtgagagttaagctttg

SEQ ID NO: 1340116 - DNA, 25 bp, Homo sapien
gcatattccttgtgagagttaagct

SEQ ID NO: 1340117 - DNA, 25 bp, Homo sapien
gaaagctcatgtatcttggaagcag

SEQ ID NO: 1340118 - DNA, 25 bp, Homo sapien
ttcagaaagctcatgtatcttggaa

SEQ ID NO: 1340119 - DNA, 25 bp, Homo sapien
aaagctcatgtatcttggaagcaga

SEQ ID NO: 1340120 - DNA, 25 bp, Homo sapien
cagaaagctcatgtatcttggaagc

SEQ ID NO: 1340121 - DNA, 25 bp, Homo sapien
tgaatttctgatccaaatcttttcc

SEQ ID NO: 1340122 - DNA, 25 bp, Homo sapien
tctgatccaaatcttttcctccaaa

SEQ ID NO: 1340123 - DNA, 25 bp, Homo sapien
cctccaaaatgcctgctaagaaact

SEQ ID NO: 1340124 - DNA, 25 bp, Homo sapien
catatatttgtgagcccaggtaatt

SEQ ID NO: 1340125 - DNA, 25 bp, Homo sapien
ccagacttaagaaagtgcatcagct

SEQ ID NO: 1340126 - DNA, 25 bp, Homo sapien
catttctgccaggataatagctttg

SEQ ID NO: 1340127 - DNA, 25 bp, Homo sapien
tgctccaagtttagctcatccatta

SEQ ID NO: 1340128 - DNA, 25 bp, Homo sapien
tgagatctgcaatagctcgacagca

SEQ ID NO: 1340129 - DNA, 25 bp, Homo sapien
gcctttctaggtgaattggcctgca

SEQ ID NO: 1340130 - DNA, 25 bp, Homo sapien
cgttgggtgccattacaaagccatg

SEQ ID NO: 1340131 - DNA, 25 bp, Homo sapien
attttcatgccagcccagagcgttg

SEQ ID NO: 1340132 - DNA, 25 bp, Homo sapien
caaactagtcagctttgcagcaaca

SEQ ID NO: 1340133 - DNA, 25 bp, Homo sapien
ggtagcttggatgttacaaccactc

SEQ ID NO: 1340134 - DNA, 25 bp, Homo sapien
cctaagagcagctcacttcagaaga

SEQ ID NO: 1340135 - DNA, 25 bp, Homo sapien
gagacccaggtaccaatttattctg

SEQ ID NO: 1340136 - DNA, 25 bp, Homo sapien
gaccctcatttgaagctcctaagag

SEQ ID NO: 1340137 - DNA, 25 bp, Homo sapien
cttgcacaattgctgccctcttaga

SEQ ID NO: 1340138 - DNA, 25 bp, Homo sapien
gggtagagagtagaaagcccaagct

SEQ ID NO: 1340139 - DNA, 25 bp, Homo sapien
aaactgtgagctctttgagcaccag

SEQ ID NO: 1340140 - DNA, 25 bp, Homo sapien
ttgagcaccagaacctgcaccagct

SEQ ID NO: 1340141 - DNA, 25 bp, Homo sapien
tgcaccagctgccacaacctggcca

SEQ ID NO: 1340142 - DNA, 25 bp, Homo sapien
ggccaccaaccaggtgctcaattag

SEQ ID NO: 1340143 - DNA, 25 bp, Homo sapien
caaatgagggcttgctaaaggctga

SEQ ID NO: 1340144 - DNA, 25 bp, Homo sapien
taagaaatagggatggaacttgcct

SEQ ID NO: 1340145 - DNA, 25 bp, Homo sapien
gggagttcgcctagtgcacttaaga

SEQ ID NO: 1340146 - DNA, 25 bp, Homo sapien
taaaggctgaaggtgttggaatctg

SEQ ID NO: 1340147 - DNA, 25 bp, Homo sapien
tggcttgtgaagaacatcagcctca

SEQ ID NO: 1340148 - DNA, 25 bp, Homo sapien
tgtggacccaagaacggccagatgg

SEQ ID NO: 1340149 - DNA, 25 bp, Homo sapien
cccaagaacggccagatggcttgtg

SEQ ID NO: 1340150 - DNA, 25 bp, Homo sapien
gaacggccagatggcttgtgaagaa

SEQ ID NO: 1340151 - DNA, 25 bp, Homo sapien
gctcctgtgggagattagaaactga

SEQ ID NO: 1340152 - DNA, 25 bp, Homo sapien
gctgagccgctaaaattctcctgag

SEQ ID NO: 1340153 - DNA, 25 bp, Homo sapien
agctgccgacagactggctgacgag

SEQ ID NO: 1340154 - DNA, 25 bp, Homo sapien
tacccttgagagaggacaataggga

SEQ ID NO: 1340155 - DNA, 25 bp, Homo sapien
cagacaattcatctctccgttttcc

SEQ ID NO: 1340156 - DNA, 25 bp, Homo sapien
cctttccagccaaagtagttgctga

SEQ ID NO: 1340157 - DNA, 25 bp, Homo sapien
aaagaaagcaagactggcccagctt

SEQ ID NO: 1340158 - DNA, 25 bp, Homo sapien
tggctgatgtaaggaacatcgcagg

SEQ ID NO: 1340159 - DNA, 25 bp, Homo sapien
tccttaaagctattgtctcccaaca

SEQ ID NO: 1340160 - DNA, 25 bp, Homo sapien
agtgacctttgccaagtcttcctcc

SEQ ID NO: 1340161 - DNA, 25 bp, Homo sapien
ggagcctttgatattcttaaccacc

SEQ ID NO: 1340162 - DNA, 25 bp, Homo sapien
cctcttgggaagcaccagtgatgtt

SEQ ID NO: 1340163 - DNA, 25 bp, Homo sapien
agtgatgttatttaatccagtgacc

SEQ ID NO: 1340164 - DNA, 25 bp, Homo sapien
caagtcacatcttacgtggatggca

SEQ ID NO: 1340165 - DNA, 25 bp, Homo sapien
acatggctgggagcgcctcacaatc

SEQ ID NO: 1340166 - DNA, 25 bp, Homo sapien
tgggagcgcctcacaatcatgacgg

SEQ ID NO: 1340167 - DNA, 25 bp, Homo sapien
aaggcaaggaggagcaagtcacatc

SEQ ID NO: 1340168 - DNA, 25 bp, Homo sapien
gctggctacagagcttggaaaagta

SEQ ID NO: 1340169 - DNA, 25 bp, Homo sapien
gtgggtcacctaacacccggctaca

SEQ ID NO: 1340170 - DNA, 25 bp, Homo sapien
gcagtggaagcacagaacaccaaga

SEQ ID NO: 1340171 - DNA, 25 bp, Homo sapien
tccctgagggatgcagcacaggtca

SEQ ID NO: 1340172 - DNA, 25 bp, Homo sapien
catactaatattagcacagggaggg

SEQ ID NO: 1340173 - DNA, 25 bp, Homo sapien
aacaatctttgctctccattaggac

SEQ ID NO: 1340174 - DNA, 25 bp, Homo sapien
cacccaggagtattagaaaagagct

SEQ ID NO: 1340175 - DNA, 25 bp, Homo sapien
cataaggcatattgcactggatgtc

SEQ ID NO: 1340176 - DNA, 25 bp, Homo sapien
tcaagacagaccaaacagcctgaag

SEQ ID NO: 1340177 - DNA, 25 bp, Homo sapien
gatgtttgcttcaccctaggagact

SEQ ID NO: 1340178 - DNA, 25 bp, Homo sapien
gagtcgttaagccagcaataagggc

SEQ ID NO: 1340179 - DNA, 25 bp, Homo sapien
caataagggcaagtgtctccaaaac

SEQ ID NO: 1340180 - DNA, 25 bp, Homo sapien
ttaatgggttcgctctccctctacg

SEQ ID NO: 1340181 - DNA, 25 bp, Homo sapien
aatgggttcgctctccctctacggc

SEQ ID NO: 1340182 - DNA, 25 bp, Homo sapien
ttttaatgggttcgctctccctcta

SEQ ID NO: 1340183 - DNA, 25 bp, Homo sapien
acattttaatgggttcgctctccct

SEQ ID NO: 1340184 - DNA, 25 bp, Homo sapien
ggacattatgcttgggaagttgttc

SEQ ID NO: 1340185 - DNA, 25 bp, Homo sapien
gaggacattatgcttgggaagttgt

SEQ ID NO: 1340186 - DNA, 25 bp, Homo sapien
aggacattatgcttgggaagttgtt

SEQ ID NO: 1340187 - DNA, 25 bp, Homo sapien
ttgggaagttgttcatatcaggcat

SEQ ID NO: 1340188 - DNA, 25 bp, Homo sapien
ggcgggttcctcagatatggcattt

SEQ ID NO: 1340189 - DNA, 25 bp, Homo sapien
gttcctcagatatggcattttcaca

SEQ ID NO: 1340190 - DNA, 25 bp, Homo sapien
cctcagatatggcattttcacacat

SEQ ID NO: 1340191 - DNA, 25 bp, Homo sapien
gcgggttcctcagatatggcatttt

SEQ ID NO: 1340192 - DNA, 25 bp, Homo sapien
caaaatttgtcctggaacccataat

SEQ ID NO: 1340193 - DNA, 25 bp, Homo sapien
aataaacatatgaggcaaacaaaat

SEQ ID NO: 1340194 - DNA, 25 bp, Homo sapien
aaatattacagggtttatttcatgt

SEQ ID NO: 1340195 - DNA, 25 bp, Homo sapien
taatcagcagtgaatccggtgacaa

SEQ ID NO: 1340196 - DNA, 25 bp, Homo sapien
caaatcgtgccatttgataacggag

SEQ ID NO: 1340197 - DNA, 25 bp, Homo sapien
ttaacatggcatgccaaatcgtgcc

SEQ ID NO: 1340198 - DNA, 25 bp, Homo sapien
agtgtgtcatgtatagtaaaactcc

SEQ ID NO: 1340199 - DNA, 25 bp, Homo sapien
tgataacggagtgtgtcatgtatag

SEQ ID NO: 1340200 - DNA, 25 bp, Homo sapien
ggttctataggaacgcgaggcccca

SEQ ID NO: 1340201 - DNA, 25 bp, Homo sapien
cagatctgaagttaaggttctatag

SEQ ID NO: 1340202 - DNA, 25 bp, Homo sapien
cctccactggatatgacgtcagatc

SEQ ID NO: 1340203 - DNA, 25 bp, Homo sapien
cactggatatgacgtcagatctgaa

SEQ ID NO: 1340204 - DNA, 25 bp, Homo sapien
cacacagaaaccaccctcttgtaga

SEQ ID NO: 1340205 - DNA, 25 bp, Homo sapien
gacatcagtgcatccactgagaact

SEQ ID NO: 1340206 - DNA, 25 bp, Homo sapien
tccagacatcagtgcatccactgag

SEQ ID NO: 1340207 - DNA, 25 bp, Homo sapien
tgtagatgagaatgagcctgagttt

SEQ ID NO: 1340208 - DNA, 25 bp, Homo sapien
tggttttagatacacacaaatcctc

SEQ ID NO: 1340209 - DNA, 25 bp, Homo sapien
caagggttctctggttttagataca

SEQ ID NO: 1340210 - DNA, 25 bp, Homo sapien
caatctttctgtgaacaagggttct

SEQ ID NO: 1340211 - DNA, 25 bp, Homo sapien
ttttccccacattcagtttgttcta

SEQ ID NO: 1340212 - DNA, 25 bp, Homo sapien
aattgccaatggataggtgtggcca

SEQ ID NO: 1340213 - DNA, 25 bp, Homo sapien
tcaagggtgccgatccaggtgcact

SEQ ID NO: 1340214 - DNA, 25 bp, Homo sapien
gccaaaaatgagcaatccgtacttg

SEQ ID NO: 1340215 - DNA, 25 bp, Homo sapien
caggtgcactgccacaaaattgcca

SEQ ID NO: 1340216 - DNA, 25 bp, Homo sapien
gataactatcttcaactgtaagctc

SEQ ID NO: 1340217 - DNA, 25 bp, Homo sapien
agagccccaggcagttaccaccctc

SEQ ID NO: 1340218 - DNA, 25 bp, Homo sapien
ttatagagaagtagtgataactatc

SEQ ID NO: 1340219 - DNA, 25 bp, Homo sapien
ctcaggttcgacactgaggccagaa

SEQ ID NO: 1340220 - DNA, 25 bp, Homo sapien
agaggcctgacattcctgccttctt

SEQ ID NO: 1340221 - DNA, 25 bp, Homo sapien
tgaagtgttggcacggcgaaaattt

SEQ ID NO: 1340222 - DNA, 25 bp, Homo sapien
aggcctgacattcctgccttcttat

SEQ ID NO: 1340223 - DNA, 25 bp, Homo sapien
gtgttgaagtgttggcacggcgaaa

SEQ ID NO: 1340224 - DNA, 25 bp, Homo sapien
cacacagatgggatgcggcttagga

SEQ ID NO: 1340225 - DNA, 25 bp, Homo sapien
tcccacacagatgggatgcggctta

SEQ ID NO: 1340226 - DNA, 25 bp, Homo sapien
ccacacagatgggatgcggcttagg

SEQ ID NO: 1340227 - DNA, 25 bp, Homo sapien
ggtcccacacagatgggatgcggct

SEQ ID NO: 1340228 - DNA, 25 bp, Homo sapien
ggtgtagtatcattctcgagatttc

SEQ ID NO: 1340229 - DNA, 25 bp, Homo sapien
tgtagtatcattctcgagatttctt

SEQ ID NO: 1340230 - DNA, 25 bp, Homo sapien
tatcattctcgagatttcttttgaa

SEQ ID NO: 1340231 - DNA, 25 bp, Homo sapien
cgaggtgtagtatcattctcgagat

SEQ ID NO: 1340232 - DNA, 25 bp, Homo sapien
cagaagttctaagtcctgccagaag

SEQ ID NO: 1340233 - DNA, 25 bp, Homo sapien
tgtttcttactgcactcttcctttg

SEQ ID NO: 1340234 - DNA, 25 bp, Homo sapien
tcctttgaggtgtcgatgtaatctt

SEQ ID NO: 1340235 - DNA, 25 bp, Homo sapien
gcctgctgggggaactatctgcctg

SEQ ID NO: 1340236 - DNA, 25 bp, Homo sapien
gcaggagaacttgtgctacaagaag

SEQ ID NO: 1340237 - DNA, 25 bp, Homo sapien
tctgtgatacgtggcaggagaactt

SEQ ID NO: 1340238 - DNA, 25 bp, Homo sapien
tacgtggcaggagaacttgtgctac

SEQ ID NO: 1340239 - DNA, 25 bp, Homo sapien
attgtgatctgtgatacgtggcagg

SEQ ID NO: 1340240 - DNA, 25 bp, Homo sapien
tattcattagcttgatgagctctcc

SEQ ID NO: 1340241 - DNA, 25 bp, Homo sapien
tcttgagaggcctaaccgcttggta

SEQ ID NO: 1340242 - DNA, 25 bp, Homo sapien
ccagattctggtccaagccttgcca

SEQ ID NO: 1340243 - DNA, 25 bp, Homo sapien
ggcctaaccgcttggtattcattag

SEQ ID NO: 1340244 - DNA, 25 bp, Homo sapien
agctctcaggacctgactcacatta

SEQ ID NO: 1340245 - DNA, 25 bp, Homo sapien
ccgatgtgtccccacactgacagat

SEQ ID NO: 1340246 - DNA, 25 bp, Homo sapien
ttacccgatgtgtccccacactgac

SEQ ID NO: 1340247 - DNA, 25 bp, Homo sapien
ggacctgactcacattaactctgct

SEQ ID NO: 1340248 - DNA, 25 bp, Homo sapien
tcaactgcaggcaaatggtttgtta

SEQ ID NO: 1340249 - DNA, 25 bp, Homo sapien
tcctggaatcttgaagaagctcctt

SEQ ID NO: 1340250 - DNA, 25 bp, Homo sapien
tgcaggcaaatggtttgttagaatc

SEQ ID NO: 1340251 - DNA, 25 bp, Homo sapien
tcaaaacagtccgtattctcttcct

SEQ ID NO: 1340252 - DNA, 25 bp, Homo sapien
gggagctgtttagcatttactttta

SEQ ID NO: 1340253 - DNA, 25 bp, Homo sapien
tttaatctccgaccctcctctctct

SEQ ID NO: 1340254 - DNA, 25 bp, Homo sapien
cttttaatctccgaccctcctctct

SEQ ID NO: 1340255 - DNA, 25 bp, Homo sapien
aagtcatttgtaaggggagctgttt

SEQ ID NO: 1340256 - DNA, 25 bp, Homo sapien
gcaaacttgtagatggtcagtttca

SEQ ID NO: 1340257 - DNA, 25 bp, Homo sapien
tagtcgatgttcatgcccatcccaa

SEQ ID NO: 1340258 - DNA, 25 bp, Homo sapien
caacaaaatgtccatcgagatgcta

SEQ ID NO: 1340259 - DNA, 25 bp, Homo sapien
cgagatgctaacaccaatgttcagc

SEQ ID NO: 1340260 - DNA, 25 bp, Homo sapien
ggcctctgagtcatctcctctttca

SEQ ID NO: 1340261 - DNA, 25 bp, Homo sapien
tagaccttccgtagtttctcagtcc

SEQ ID NO: 1340262 - DNA, 25 bp, Homo sapien
cctcctctggtgttcggcctctgag

SEQ ID NO: 1340263 - DNA, 25 bp, Homo sapien
ttcagtcagcatggggccttctcca

SEQ ID NO: 1340264 - DNA, 25 bp, Homo sapien
gttggatcaagatagggtttgcctt

SEQ ID NO: 1340265 - DNA, 25 bp, Homo sapien
gatcaagatagggtttgccttgagt

SEQ ID NO: 1340266 - DNA, 25 bp, Homo sapien
tggatcaagatagggtttgccttga

SEQ ID NO: 1340267 - DNA, 25 bp, Homo sapien
tcaagatagggtttgccttgagtcc

SEQ ID NO: 1340268 - DNA, 25 bp, Homo sapien
agagatgttccttgccacaaagtgt

SEQ ID NO: 1340269 - DNA, 25 bp, Homo sapien
tgaaatatctctgtccccgtctgaa

SEQ ID NO: 1340270 - DNA, 25 bp, Homo sapien
gagccatctggtgttaatttctcat

SEQ ID NO: 1340271 - DNA, 25 bp, Homo sapien
tgtccccgtctgaaagagatgttcc

SEQ ID NO: 1340272 - DNA, 25 bp, Homo sapien
ttcctccactgggtctcctaagaca

SEQ ID NO: 1340273 - DNA, 25 bp, Homo sapien
gttcctccactgggtctcctaagac

SEQ ID NO: 1340274 - DNA, 25 bp, Homo sapien
tcctccactgggtctcctaagacag

SEQ ID NO: 1340275 - DNA, 25 bp, Homo sapien
ctccactgggtctcctaagacagct

SEQ ID NO: 1340276 - DNA, 25 bp, Homo sapien
aggcaccagcccatttacacagggc

SEQ ID NO: 1340277 - DNA, 25 bp, Homo sapien
aaggcaccagcccatttacacaggg

SEQ ID NO: 1340278 - DNA, 25 bp, Homo sapien
tgccttttatgttggtgaaggtgag

SEQ ID NO: 1340279 - DNA, 25 bp, Homo sapien
aagtctgccttttatgttggtgaag

SEQ ID NO: 1340280 - DNA, 25 bp, Homo sapien
ttctctctaagtctgccttttatgt

SEQ ID NO: 1340281 - DNA, 25 bp, Homo sapien
tctctctaagtctgccttttatgtt

SEQ ID NO: 1340282 - DNA, 25 bp, Homo sapien
gatgtgactgctgaggctgcatcta

SEQ ID NO: 1340283 - DNA, 25 bp, Homo sapien
gagcatggatgttacagatgtgact

SEQ ID NO: 1340284 - DNA, 25 bp, Homo sapien
gctgcatctataaggagggcccatc

SEQ ID NO: 1340285 - DNA, 25 bp, Homo sapien
aaccttgagtcagagcagagtacca

SEQ ID NO: 1340286 - DNA, 25 bp, Homo sapien
ggaaaaagaagcctataaggagcag

SEQ ID NO: 1340287 - DNA, 25 bp, Homo sapien
aaccagagccttggatatagggcga

SEQ ID NO: 1340288 - DNA, 25 bp, Homo sapien
gggtggtttagaaaagctgcagcta

SEQ ID NO: 1340289 - DNA, 25 bp, Homo sapien
gcaggccttgccaggaaaaagaagc

SEQ ID NO: 1340290 - DNA, 25 bp, Homo sapien
ggataactcacctatcctcctggtg

SEQ ID NO: 1340291 - DNA, 25 bp, Homo sapien
ttcttccagggttagctggttgaag

SEQ ID NO: 1340292 - DNA, 25 bp, Homo sapien
gctggttgaaggataactcacctat

SEQ ID NO: 1340293 - DNA, 25 bp, Homo sapien
cacctatcctcctggtgatagaggg

SEQ ID NO: 1340294 - DNA, 25 bp, Homo sapien
tgtcctctgggtctttgacagcctc

SEQ ID NO: 1340295 - DNA, 25 bp, Homo sapien
cctctgggtctttgacagcctctga

SEQ ID NO: 1340296 - DNA, 25 bp, Homo sapien
cctgtcctctgggtctttgacagcc

SEQ ID NO: 1340297 - DNA, 25 bp, Homo sapien
ctctgggtctttgacagcctctgac

SEQ ID NO: 1340298 - DNA, 25 bp, Homo sapien
ttttgaagaaggagtgagtcctcca

SEQ ID NO: 1340299 - DNA, 25 bp, Homo sapien
attttgaagaaggagtgagtcctcc

SEQ ID NO: 1340300 - DNA, 25 bp, Homo sapien
gattttgaagaaggagtgagtcctc

SEQ ID NO: 1340301 - DNA, 25 bp, Homo sapien
tttgaagaaggagtgagtcctccaa

SEQ ID NO: 1340302 - DNA, 25 bp, Homo sapien
gcggttactccgctgatcgttagag

SEQ ID NO: 1340303 - DNA, 25 bp, Homo sapien
acggaaacaataagctccaggtgcc

SEQ ID NO: 1340304 - DNA, 25 bp, Homo sapien
gtgtaaaagacagcaccgccactgg

SEQ ID NO: 1340305 - DNA, 25 bp, Homo sapien
tgcccagcagcgctgtgcggttact

SEQ ID NO: 1340306 - DNA, 25 bp, Homo sapien
gatttagcgagctcgtggttctcat

SEQ ID NO: 1340307 - DNA, 25 bp, Homo sapien
ggctgatttagcgagctcgtggttc

SEQ ID NO: 1340308 - DNA, 25 bp, Homo sapien
tgatttagcgagctcgtggttctca

SEQ ID NO: 1340309 - DNA, 25 bp, Homo sapien
gtggggctgatttagcgagctcgtg

SEQ ID NO: 1340310 - DNA, 25 bp, Homo sapien
tctttgcaacttgcagaatggagaa

SEQ ID NO: 1340311 - DNA, 25 bp, Homo sapien
tagtgctgaccagctgcgaactgga

SEQ ID NO: 1340312 - DNA, 25 bp, Homo sapien
tggacagcattctgatacagcggct

SEQ ID NO: 1340313 - DNA, 25 bp, Homo sapien
tagaactgatttcccagttagtttg

SEQ ID NO: 1340314 - DNA, 25 bp, Homo sapien
cagcattttgtacaactgttggttg

SEQ ID NO: 1340315 - DNA, 25 bp, Homo sapien
ttcccagactggatgatgtttatca

SEQ ID NO: 1340316 - DNA, 25 bp, Homo sapien
cagcagcattttgtacaactgttgg

SEQ ID NO: 1340317 - DNA, 25 bp, Homo sapien
tgttggttgtttttcccagactgga

SEQ ID NO: 1340318 - DNA, 25 bp, Homo sapien
ccagtagtgtttggccttgtgtctt

SEQ ID NO: 1340319 - DNA, 25 bp, Homo sapien
catttgccagtagtgtttggccttg

SEQ ID NO: 1340320 - DNA, 25 bp, Homo sapien
tgccagtagtgtttggccttgtgtc

SEQ ID NO: 1340321 - DNA, 25 bp, Homo sapien
ttttcatttgccagtagtgtttggc

SEQ ID NO: 1340322 - DNA, 25 bp, Homo sapien
tagtatacgtttgatctgtagcgag

SEQ ID NO: 1340323 - DNA, 25 bp, Homo sapien
cagtagatcctacctgatttcttct

SEQ ID NO: 1340324 - DNA, 25 bp, Homo sapien
cgagcagttcggagtcagtagatcc

SEQ ID NO: 1340325 - DNA, 25 bp, Homo sapien
aatggttccagacgcttagtatacg

SEQ ID NO: 1340326 - DNA, 25 bp, Homo sapien
gatggcatttgctgcgtttttaggg

SEQ ID NO: 1340327 - DNA, 25 bp, Homo sapien
cttaggtgagacagtaggcgtttct

SEQ ID NO: 1340328 - DNA, 25 bp, Homo sapien
tctcacgcggtcctgttgtgaaatc

SEQ ID NO: 1340329 - DNA, 25 bp, Homo sapien
ttttgtgcggtaacagtgtggacac

SEQ ID NO: 1340330 - DNA, 25 bp, Homo sapien
tatttacctggtcatggtgaagagt

SEQ ID NO: 1340331 - DNA, 25 bp, Homo sapien
gaaggtatcactacaccgtatatta

SEQ ID NO: 1340332 - DNA, 25 bp, Homo sapien
cttctgtaggacgtattagaaggta

SEQ ID NO: 1340333 - DNA, 25 bp, Homo sapien
cactacaccgtatattaaaatatgg

SEQ ID NO: 1340334 - DNA, 25 bp, Homo sapien
tactggaagcttctgtaggacgtat

SEQ ID NO: 1340335 - DNA, 25 bp, Homo sapien
ttacaggcaagggttgttaccatgg

SEQ ID NO: 1340336 - DNA, 25 bp, Homo sapien
cattcgatatgcgtgacaggcaccc

SEQ ID NO: 1340337 - DNA, 25 bp, Homo sapien
tacaggcaagggttgttaccatggc

SEQ ID NO: 1340338 - DNA, 25 bp, Homo sapien
tgttaccatggcattcgatatgcgt

SEQ ID NO: 1340339 - DNA, 25 bp, Homo sapien
aggcaagtccaagtttctcctctgc

SEQ ID NO: 1340340 - DNA, 25 bp, Homo sapien
tgaactctgacagcaccttgggcct

SEQ ID NO: 1340341 - DNA, 25 bp, Homo sapien
ctctgctgaactctgacagcacctt

SEQ ID NO: 1340342 - DNA, 25 bp, Homo sapien
ctcaaaggcaagtccaagtttctcc

SEQ ID NO: 1340343 - DNA, 25 bp, Homo sapien
tgatttttccagatacccgtctttc

SEQ ID NO: 1340344 - DNA, 25 bp, Homo sapien
tacccgtctttcttcatgtgcccca

SEQ ID NO: 1340345 - DNA, 25 bp, Homo sapien
acccgtctttcttcatgtgccccag

SEQ ID NO: 1340346 - DNA, 25 bp, Homo sapien
tttcaactggtgttgctcaaatatt

SEQ ID NO: 1340347 - DNA, 25 bp, Homo sapien
tcatgggtggttaagtggacgataa

SEQ ID NO: 1340348 - DNA, 25 bp, Homo sapien
cttgtttaattcttttcaactggtg

SEQ ID NO: 1340349 - DNA, 25 bp, Homo sapien
ttaattcttttcaactggtgttgct

SEQ ID NO: 1340350 - DNA, 25 bp, Homo sapien
ttctcaaaggcatatgggcataaaa

SEQ ID NO: 1340351 - DNA, 25 bp, Homo sapien
ggcatatgggcataaaatgcattcc

SEQ ID NO: 1340352 - DNA, 25 bp, Homo sapien
ttctccaaatcagggcgaatagcat

SEQ ID NO: 1340353 - DNA, 25 bp, Homo sapien
aatcagggcgaatagcatgtttctt

SEQ ID NO: 1340354 - DNA, 25 bp, Homo sapien
taggcttttcatgctaacttgactg

SEQ ID NO: 1340355 - DNA, 25 bp, Homo sapien
tctgaccggcacatcagtggtagtg

SEQ ID NO: 1340356 - DNA, 25 bp, Homo sapien
ttgactggcgagtgaatgctgcacg

SEQ ID NO: 1340357 - DNA, 25 bp, Homo sapien
ccttctttatctgaccggcacatca

SEQ ID NO: 1340358 - DNA, 25 bp, Homo sapien
ccgctcagtacttctccaggtttta

SEQ ID NO: 1340359 - DNA, 25 bp, Homo sapien
tcctcaccattttccgctcagtact

SEQ ID NO: 1340360 - DNA, 25 bp, Homo sapien
cattttccgctcagtacttctccag

SEQ ID NO: 1340361 - DNA, 25 bp, Homo sapien
tttccgctcagtacttctccaggtt

SEQ ID NO: 1340362 - DNA, 25 bp, Homo sapien
ggctgcagctgacagtcattaaggg

SEQ ID NO: 1340363 - DNA, 25 bp, Homo sapien
cagctgacagtcattaagggagcag

SEQ ID NO: 1340364 - DNA, 25 bp, Homo sapien
gctgcagctgacagtcattaaggga

SEQ ID NO: 1340365 - DNA, 25 bp, Homo sapien
tgcagctgacagtcattaagggagc

SEQ ID NO: 1340366 - DNA, 25 bp, Homo sapien
aaagctgttgcttcagtagagtttt

SEQ ID NO: 1340367 - DNA, 25 bp, Homo sapien
acttctgtaggccacgtttatgcat

SEQ ID NO: 1340368 - DNA, 25 bp, Homo sapien
tcatcagaaacttctgtaggccacg

SEQ ID NO: 1340369 - DNA, 25 bp, Homo sapien
ctgagtagggaccatttgggcagat

SEQ ID NO: 1340370 - DNA, 25 bp, Homo sapien
gcaagaacatgtgaatctgggaagt

SEQ ID NO: 1340371 - DNA, 25 bp, Homo sapien
tttttgtagccagaactagagtaga

SEQ ID NO: 1340372 - DNA, 25 bp, Homo sapien
ttggagagtgctgacccaatgccca

SEQ ID NO: 1340373 - DNA, 25 bp, Homo sapien
gattatctgctcttagttcctggct

SEQ ID NO: 1340374 - DNA, 25 bp, Homo sapien
aacagtcaagttgcaatgactgggc

SEQ ID NO: 1340375 - DNA, 25 bp, Homo sapien
gatgtgtattaatagctctcatgag

SEQ ID NO: 1340376 - DNA, 25 bp, Homo sapien
gacacttaacttgatagctgggaag

SEQ ID NO: 1340377 - DNA, 25 bp, Homo sapien
gaggttaccctgaaagttgctgaaa

SEQ ID NO: 1340378 - DNA, 25 bp, Homo sapien
gttctccgtatacctgactccactg

SEQ ID NO: 1340379 - DNA, 25 bp, Homo sapien
tatttaaagggctacctgctagatg

SEQ ID NO: 1340380 - DNA, 25 bp, Homo sapien
taattggactgatagcagatgagcc

SEQ ID NO: 1340381 - DNA, 25 bp, Homo sapien
agtgcagtcccattttggttctccg

SEQ ID NO: 1340382 - DNA, 25 bp, Homo sapien
tagggaatttgggatctcaatccgg

SEQ ID NO: 1340383 - DNA, 25 bp, Homo sapien
tcattaaatatctcgtcactttggg

SEQ ID NO: 1340384 - DNA, 25 bp, Homo sapien
ttttaactatgatgtggatatcctg

SEQ ID NO: 1340385 - DNA, 25 bp, Homo sapien
gcatatactagcttctgttggaaaa

SEQ ID NO: 1340386 - DNA, 25 bp, Homo sapien
gctggaatagcttgccccaaagtgg

SEQ ID NO: 1340387 - DNA, 25 bp, Homo sapien
tgtgtaatagcatccaggttctggg

SEQ ID NO: 1340388 - DNA, 25 bp, Homo sapien
gaagtccatagtgcctctagccggg

SEQ ID NO: 1340389 - DNA, 25 bp, Homo sapien
tggccacaggtttgacacagagacc

SEQ ID NO: 1340390 - DNA, 25 bp, Homo sapien
gcttgtccgattggatggttggaat

SEQ ID NO: 1340391 - DNA, 25 bp, Homo sapien
aatccttcaataaggttctgaaagc

SEQ ID NO: 1340392 - DNA, 25 bp, Homo sapien
gaaagcttgtccgattggatggttg

SEQ ID NO: 1340393 - DNA, 25 bp, Homo sapien
gttctgaaagcttgtccgattggat

SEQ ID NO: 1340394 - DNA, 25 bp, Homo sapien
tgactgtcatctggccatgggttgg

SEQ ID NO: 1340395 - DNA, 25 bp, Homo sapien
ccatgggttgggcctatcattttca

SEQ ID NO: 1340396 - DNA, 25 bp, Homo sapien
gtgggcacggcaggcgttttccttc

SEQ ID NO: 1340397 - DNA, 25 bp, Homo sapien
taacgtattcacaagtcttgtgact

SEQ ID NO: 1340398 - DNA, 25 bp, Homo sapien
gaatcacagtaagtcagcagctcat

SEQ ID NO: 1340399 - DNA, 25 bp, Homo sapien
agaccagacgtcagaggcaatataa

SEQ ID NO: 1340400 - DNA, 25 bp, Homo sapien
tgaatcacagtaagtcagcagctca

SEQ ID NO: 1340401 - DNA, 25 bp, Homo sapien
gctcatgcagagtgactccaaaaga

SEQ ID NO: 1340402 - DNA, 25 bp, Homo sapien
tctaaccttgagtcaggccagagga

SEQ ID NO: 1340403 - DNA, 25 bp, Homo sapien
gaacctctggtgattcatgagacag

SEQ ID NO: 1340404 - DNA, 25 bp, Homo sapien
cctggacagtgttcccggctgagac

SEQ ID NO: 1340405 - DNA, 25 bp, Homo sapien
gagttccctgaatctgcaatgccca

SEQ ID NO: 1340406 - DNA, 25 bp, Homo sapien
agggctgtcccggtcatccttgacg

SEQ ID NO: 1340407 - DNA, 25 bp, Homo sapien
ttgctgccaagtcccggtgaacgta

SEQ ID NO: 1340408 - DNA, 25 bp, Homo sapien
ggtgaacgtattgccgagaacccaa

SEQ ID NO: 1340409 - DNA, 25 bp, Homo sapien
tggtgttcactctcaacaaggacat

SEQ ID NO: 1340410 - DNA, 25 bp, Homo sapien
aatctgaacggcatattttagctgc

SEQ ID NO: 1340411 - DNA, 25 bp, Homo sapien
gaaattccatgatgagcttaatacc

SEQ ID NO: 1340412 - DNA, 25 bp, Homo sapien
tttggaagatattccttaaggcttc

SEQ ID NO: 1340413 - DNA, 25 bp, Homo sapien
cttacaaatctgaacggcatatttt

SEQ ID NO: 1340414 - DNA, 25 bp, Homo sapien
gcttcagagatttaacagccacctg

SEQ ID NO: 1340415 - DNA, 25 bp, Homo sapien
gtacttcacaatgttctcatgatag

SEQ ID NO: 1340416 - DNA, 25 bp, Homo sapien
gaggttccttaagatctcgatttcc

SEQ ID NO: 1340417 - DNA, 25 bp, Homo sapien
gatttcctttttcagatcagctatg

SEQ ID NO: 1340418 - DNA, 25 bp, Homo sapien
tcctctttaggaagcgcttttcaaa

SEQ ID NO: 1340419 - DNA, 25 bp, Homo sapien
gtcacggatcctctttaggaagcgc

SEQ ID NO: 1340420 - DNA, 25 bp, Homo sapien
cggatcctctttaggaagcgctttt

SEQ ID NO: 1340421 - DNA, 25 bp, Homo sapien
tgtggggtccacttcagttgctggt

SEQ ID NO: 1340422 - DNA, 25 bp, Homo sapien
taatgtctctcatgatggctcggaa

SEQ ID NO: 1340423 - DNA, 25 bp, Homo sapien
gggtcatagttcatgcagcgggtca

SEQ ID NO: 1340424 - DNA, 25 bp, Homo sapien
gcctgcaccggctttcatagaatct

SEQ ID NO: 1340425 - DNA, 25 bp, Homo sapien
ttacatgatggtgtcactggcctgc

SEQ ID NO: 1340426 - DNA, 25 bp, Homo sapien
cagggtacgcagcacgtgctcaata

SEQ ID NO: 1340427 - DNA, 25 bp, Homo sapien
tccctgcgtcagtgcagcctgcaga

SEQ ID NO: 1340428 - DNA, 25 bp, Homo sapien
ggacttaggtggagagagaccccta

SEQ ID NO: 1340429 - DNA, 25 bp, Homo sapien
tgtatgctgttcagcccagggtacg

SEQ ID NO: 1340430 - DNA, 25 bp, Homo sapien
caatcagcgtcttgtctttcaaggg

SEQ ID NO: 1340431 - DNA, 25 bp, Homo sapien
cagatttcccagagcgtggttccaa

SEQ ID NO: 1340432 - DNA, 25 bp, Homo sapien
tcagcagccacactcaggttcttgg

SEQ ID NO: 1340433 - DNA, 25 bp, Homo sapien
aacacactcaggagcaatccatggg

SEQ ID NO: 1340434 - DNA, 25 bp, Homo sapien
cacatttccatggaccaggtcttta

SEQ ID NO: 1340435 - DNA, 25 bp, Homo sapien
gaatgggccacactcactgtcgatg

SEQ ID NO: 1340436 - DNA, 25 bp, Homo sapien
cttgcctagacagcaccgtaatggg

SEQ ID NO: 1340437 - DNA, 25 bp, Homo sapien
caggaggaggtttttagtacacaca

SEQ ID NO: 1340438 - DNA, 25 bp, Homo sapien
cttttccggtgcatgaagagatcca

SEQ ID NO: 1340439 - DNA, 25 bp, Homo sapien
ctggccagctgtttggcaactttga

SEQ ID NO: 1340440 - DNA, 25 bp, Homo sapien
gtttggcaactttgaatttccatgg

SEQ ID NO: 1340441 - DNA, 25 bp, Homo sapien
ttccatggtgtggtaaggacatcgc

SEQ ID NO: 1340442 - DNA, 25 bp, Homo sapien
gtacacgatgtgtttgtgggagacc

SEQ ID NO: 1340443 - DNA, 25 bp, Homo sapien
tttgtgggagacctgtctcatcatg

SEQ ID NO: 1340444 - DNA, 25 bp, Homo sapien
acgtcgcggacacagacgccataga

SEQ ID NO: 1340445 - DNA, 25 bp, Homo sapien
gacgccatagaggtacacgatgtgt

SEQ ID NO: 1340446 - DNA, 25 bp, Homo sapien
tgtgggcgagcaggacataggaatg

SEQ ID NO: 1340447 - DNA, 25 bp, Homo sapien
ctgtgggcgagcaggacataggaat

SEQ ID NO: 1340448 - DNA, 25 bp, Homo sapien
gtgggcgagcaggacataggaatgt

SEQ ID NO: 1340449 - DNA, 25 bp, Homo sapien
agccagtggacccaggaaagctcac

SEQ ID NO: 1340450 - DNA, 25 bp, Homo sapien
gccctgaacatcaatcctctggcct

SEQ ID NO: 1340451 - DNA, 25 bp, Homo sapien
ggccctgaacatcaatcctctggcc

SEQ ID NO: 1340452 - DNA, 25 bp, Homo sapien
ccctgaacatcaatcctctggcctt

SEQ ID NO: 1340453 - DNA, 25 bp, Homo sapien
gctggggtctaagactttgaggatc

SEQ ID NO: 1340454 - DNA, 25 bp, Homo sapien
tcgtgcctctcccaaggtgctcgcc

SEQ ID NO: 1340455 - DNA, 25 bp, Homo sapien
atccttgtaatccatcagggtccca

SEQ ID NO: 1340456 - DNA, 25 bp, Homo sapien
catccttgtaatccatcagggtccc

SEQ ID NO: 1340457 - DNA, 25 bp, Homo sapien
agatgtgtgttctcgtgcctctccc

SEQ ID NO: 1340458 - DNA, 25 bp, Homo sapien
cagagtgtgcatgtcctcttgttcc

SEQ ID NO: 1340459 - DNA, 25 bp, Homo sapien
cctgtagattctgggcaaaaaggcc

SEQ ID NO: 1340460 - DNA, 25 bp, Homo sapien
tctgtttctcaagatagttctcctt

SEQ ID NO: 1340461 - DNA, 25 bp, Homo sapien
tctcaagatagttctccttcaggcc

SEQ ID NO: 1340462 - DNA, 25 bp, Homo sapien
tccttcttgaggatccgatcgaaac

SEQ ID NO: 1340463 - DNA, 25 bp, Homo sapien
agacgggctgccactcctgggcttt

SEQ ID NO: 1340464 - DNA, 25 bp, Homo sapien
gatccgatcgaaactcagctggctc

SEQ ID NO: 1340465 - DNA, 25 bp, Homo sapien
tcttagtagccaccagcaggttgga

SEQ ID NO: 1340466 - DNA, 25 bp, Homo sapien
tgcacctcgatctgaaagttcttga

SEQ ID NO: 1340467 - DNA, 25 bp, Homo sapien
catgaagctgatgttatccgtgcgc

SEQ ID NO: 1340468 - DNA, 25 bp, Homo sapien
ttatccgtgcgcaggatctgcttct

SEQ ID NO: 1340469 - DNA, 25 bp, Homo sapien
aaccgtgcagactgtagcggccctt

SEQ ID NO: 1340470 - DNA, 25 bp, Homo sapien
gatggcacaacttctcaaggaacag

SEQ ID NO: 1340471 - DNA, 25 bp, Homo sapien
tagacggcaagcattctgggaaggc

SEQ ID NO: 1340472 - DNA, 25 bp, Homo sapien
cggacactcttggtactgcacaggc

SEQ ID NO: 1340473 - DNA, 25 bp, Homo sapien
gaaggcaatgaacctgacaggctct

SEQ ID NO: 1340474 - DNA, 25 bp, Homo sapien
tgggtgtgaattggttttctggtca

SEQ ID NO: 1340475 - DNA, 25 bp, Homo sapien
tgaatgctgtagacaggcatagctc

SEQ ID NO: 1340476 - DNA, 25 bp, Homo sapien
tgatggtggcactgagtctaaataa

SEQ ID NO: 1340477 - DNA, 25 bp, Homo sapien
catagctctgggtctgagatgatgg

SEQ ID NO: 1340478 - DNA, 25 bp, Homo sapien
tggctactggggagcagtctccttt

SEQ ID NO: 1340479 - DNA, 25 bp, Homo sapien
catggctgtatggcctggtccaagc

SEQ ID NO: 1340480 - DNA, 25 bp, Homo sapien
gggtctggctactggggagcagtct

SEQ ID NO: 1340481 - DNA, 25 bp, Homo sapien
accctgccaagggtggttctgtctg

SEQ ID NO: 1340482 - DNA, 25 bp, Homo sapien
gtgacggtcatgaggatgttgtcaa

SEQ ID NO: 1340483 - DNA, 25 bp, Homo sapien
ccttcttgccgcaatttattgatgg

SEQ ID NO: 1340484 - DNA, 25 bp, Homo sapien
agctccacctcagcacgtacatccc

SEQ ID NO: 1340485 - DNA, 25 bp, Homo sapien
ctcgcttccttcttgccgcaattta

SEQ ID NO: 1340486 - DNA, 25 bp, Homo sapien
ggaggtaacaactgccactgaagga

SEQ ID NO: 1340487 - DNA, 25 bp, Homo sapien
tctttaggcaaggaatgtcagcatc

SEQ ID NO: 1340488 - DNA, 25 bp, Homo sapien
tatcaccatgggctcacactgagag

SEQ ID NO: 1340489 - DNA, 25 bp, Homo sapien
taagaaagcagtgagcaatgcagcc

SEQ ID NO: 1340490 - DNA, 25 bp, Homo sapien
tacttcttgatcagctatggagagg

SEQ ID NO: 1340491 - DNA, 25 bp, Homo sapien
ggcctgacctaaacaatgatgacat

SEQ ID NO: 1340492 - DNA, 25 bp, Homo sapien
gaattgcccacattgtttgacacag

SEQ ID NO: 1340493 - DNA, 25 bp, Homo sapien
taccaggcagcatggtcaactggcc

SEQ ID NO: 1340494 - DNA, 25 bp, Homo sapien
gcaactgataaggttctaggaccaa

SEQ ID NO: 1340495 - DNA, 25 bp, Homo sapien
aaaggcaactgataaggttctagga

SEQ ID NO: 1340496 - DNA, 25 bp, Homo sapien
aggcaactgataaggttctaggacc

SEQ ID NO: 1340497 - DNA, 25 bp, Homo sapien
caactgataaggttctaggaccaac

SEQ ID NO: 1340498 - DNA, 25 bp, Homo sapien
gccacgtcggtgcagaggtaatgat

SEQ ID NO: 1340499 - DNA, 25 bp, Homo sapien
catctgctgtgagccggaagtagcc

SEQ ID NO: 1340500 - DNA, 25 bp, Homo sapien
agccatctaccagggacacaaagga

SEQ ID NO: 1340501 - DNA, 25 bp, Homo sapien
tcctcgtgggaagagagcttcagtt

SEQ ID NO: 1340502 - DNA, 25 bp, Homo sapien
ggatgtgctccatcaacagcacttc

SEQ ID NO: 1340503 - DNA, 25 bp, Homo sapien
ccaggatgtgctccatcaacagcac

SEQ ID NO: 1340504 - DNA, 25 bp, Homo sapien
tctccctccatttcgcatctttcca

SEQ ID NO: 1340505 - DNA, 25 bp, Homo sapien
tgctccatcaacagcacttcttctt

SEQ ID NO: 1340506 - DNA, 25 bp, Homo sapien
tttctctttaggacaggaactctga

SEQ ID NO: 1340507 - DNA, 25 bp, Homo sapien
gacttaagagcttctgggacaaact

SEQ ID NO: 1340508 - DNA, 25 bp, Homo sapien
aggaactctgaaaatcatgtgctgc

SEQ ID NO: 1340509 - DNA, 25 bp, Homo sapien
gctgcagaacggaactcagcaattc

SEQ ID NO: 1340510 - DNA, 25 bp, Homo sapien
tcctgcttgttaatgctgaccacag

SEQ ID NO: 1340511 - DNA, 25 bp, Homo sapien
gtcctgcttgttaatgctgaccaca

SEQ ID NO: 1340512 - DNA, 25 bp, Homo sapien
cctatcaccaatcgtcttgactttg

SEQ ID NO: 1340513 - DNA, 25 bp, Homo sapien
cagtactcaagtcgggattttccag

SEQ ID NO: 1340514 - DNA, 25 bp, Homo sapien
cactgagctgaacatgagctttctc

SEQ ID NO: 1340515 - DNA, 25 bp, Homo sapien
gagaagacacgaatttcatgcttga

SEQ ID NO: 1340516 - DNA, 25 bp, Homo sapien
tgtcaaagtttccaaggtagccaag

SEQ ID NO: 1340517 - DNA, 25 bp, Homo sapien
tagagaacgtttccaccgtcattcg

SEQ ID NO: 1340518 - DNA, 25 bp, Homo sapien
tatttatccgcatcctggtgagaag

SEQ ID NO: 1340519 - DNA, 25 bp, Homo sapien
caccttcaggtcatgcgtggacacg

SEQ ID NO: 1340520 - DNA, 25 bp, Homo sapien
catcatggcatagtgtgagatggcc

SEQ ID NO: 1340521 - DNA, 25 bp, Homo sapien
gaataggagccaggcatttcaccaa

SEQ ID NO: 1340522 - DNA, 25 bp, Homo sapien
catgtccatcctgctcggtcttggg

SEQ ID NO: 1340523 - DNA, 25 bp, Homo sapien
ctagacactcgttctcaatatcatg

SEQ ID NO: 1340524 - DNA, 25 bp, Homo sapien
caaagcccacaagctggataaccag

SEQ ID NO: 1340525 - DNA, 25 bp, Homo sapien
tggcaagaacttacccagaacaggc

SEQ ID NO: 1340526 - DNA, 25 bp, Homo sapien
gaacaggccttaaagcactctagca

SEQ ID NO: 1340527 - DNA, 25 bp, Homo sapien
ttactacggctgctgagaagtgcct

SEQ ID NO: 1340528 - DNA, 25 bp, Homo sapien
cacactgactgctcattgtcgttgg

SEQ ID NO: 1340529 - DNA, 25 bp, Homo sapien
gcaaacagatactccagtgagctgg

SEQ ID NO: 1340530 - DNA, 25 bp, Homo sapien
tttggagaatgacgccacactgact

SEQ ID NO: 1340531 - DNA, 25 bp, Homo sapien
tccatgccaattggtgaaatagaac

SEQ ID NO: 1340532 - DNA, 25 bp, Homo sapien
acagtggtcagtgccggaggctgaa

SEQ ID NO: 1340533 - DNA, 25 bp, Homo sapien
ggctgaagtgccctgagaagcaggc

SEQ ID NO: 1340534 - DNA, 25 bp, Homo sapien
agtggtcagtgccggaggctgaagt

SEQ ID NO: 1340535 - DNA, 25 bp, Homo sapien
aacagtggtcagtgccggaggctga

SEQ ID NO: 1340536 - DNA, 25 bp, Homo sapien
tacagactcagctgctacctaggtc

SEQ ID NO: 1340537 - DNA, 25 bp, Homo sapien
tgacttgcccatgaactaatgagaa

SEQ ID NO: 1340538 - DNA, 25 bp, Homo sapien
gctgctgctacacttcaacaactgt

SEQ ID NO: 1340539 - DNA, 25 bp, Homo sapien
caggcatgtttctcgtactctgtga

SEQ ID NO: 1340540 - DNA, 25 bp, Homo sapien
gaaggaaggagtgaaccagctacag

SEQ ID NO: 1340541 - DNA, 25 bp, Homo sapien
ttaccctccgctggtgacagtggaa

SEQ ID NO: 1340542 - DNA, 25 bp, Homo sapien
tcaagggtagaacagaacacgtgcc

SEQ ID NO: 1340543 - DNA, 25 bp, Homo sapien
aaagctagggctatcagctggcagg

SEQ ID NO: 1340544 - DNA, 25 bp, Homo sapien
tccccaggccacaaaaagcaagatt

SEQ ID NO: 1340545 - DNA, 25 bp, Homo sapien
gctaaaagtgaagcaaccctgcact

SEQ ID NO: 1340546 - DNA, 25 bp, Homo sapien
catgtcaggtacagagtcaaggtgc

SEQ ID NO: 1340547 - DNA, 25 bp, Homo sapien
gcaatatcctgttgaagcaccatgt

SEQ ID NO: 1340548 - DNA, 25 bp, Homo sapien
cgatttggagcataccagagcttgg

SEQ ID NO: 1340549 - DNA, 25 bp, Homo sapien
catcaacggtgatggtgcgatttgg

SEQ ID NO: 1340550 - DNA, 25 bp, Homo sapien
gagccggagggacatcttgtcatca

SEQ ID NO: 1340551 - DNA, 25 bp, Homo sapien
cagagcttggtgttctcgtcataca

SEQ ID NO: 1340552 - DNA, 25 bp, Homo sapien
tctgagggcaacaggctaactttaa

SEQ ID NO: 1340553 - DNA, 25 bp, Homo sapien
ttctgagggcaacaggctaacttta

SEQ ID NO: 1340554 - DNA, 25 bp, Homo sapien
ctgagggcaacaggctaactttaag

SEQ ID NO: 1340555 - DNA, 25 bp, Homo sapien
cgacagatagaagatcacttccacc

SEQ ID NO: 1340556 - DNA, 25 bp, Homo sapien
ggggctccctgtccgacagatagaa

SEQ ID NO: 1340557 - DNA, 25 bp, Homo sapien
ggctccctgtccgacagatagaaga

SEQ ID NO: 1340558 - DNA, 25 bp, Homo sapien
ctgtccgacagatagaagatcactt

SEQ ID NO: 1340559 - DNA, 25 bp, Homo sapien
cattgcagtcctcttttatatttag

SEQ ID NO: 1340560 - DNA, 25 bp, Homo sapien
ggcattgcagtcctcttttatattt

SEQ ID NO: 1340561 - DNA, 25 bp, Homo sapien
gcattgcagtcctcttttatattta

SEQ ID NO: 1340562 - DNA, 25 bp, Homo sapien
tccagtgttctccaagaagcaaact

SEQ ID NO: 1340563 - DNA, 25 bp, Homo sapien
gtgttctccaagaagcaaactggat

SEQ ID NO: 1340564 - DNA, 25 bp, Homo sapien
gtccagtgttctccaagaagcaaac

SEQ ID NO: 1340565 - DNA, 25 bp, Homo sapien
cagtgttctccaagaagcaaactgg

SEQ ID NO: 1340566 - DNA, 25 bp, Homo sapien
tgtctggagcctgtctaccccaggt

SEQ ID NO: 1340567 - DNA, 25 bp, Homo sapien
cagcactagccagtccataggcagt

SEQ ID NO: 1340568 - DNA, 25 bp, Homo sapien
tgcttgctaactgcatgtctggagc

SEQ ID NO: 1340569 - DNA, 25 bp, Homo sapien
agcataccgttaccagctgccaagg

SEQ ID NO: 1340570 - DNA, 25 bp, Homo sapien
tgaccagaggggagtactgaaaagc

SEQ ID NO: 1340571 - DNA, 25 bp, Homo sapien
accagaggggagtactgaaaagcat

SEQ ID NO: 1340572 - DNA, 25 bp, Homo sapien
ctgaccagaggggagtactgaaaag

SEQ ID NO: 1340573 - DNA, 25 bp, Homo sapien
gaccagaggggagtactgaaaagca

SEQ ID NO: 1340574 - DNA, 25 bp, Homo sapien
tatactagcaagtgtgaccatgagc

SEQ ID NO: 1340575 - DNA, 25 bp, Homo sapien
tcaagaagtatgttcggtaacagct

SEQ ID NO: 1340576 - DNA, 25 bp, Homo sapien
caaggtgtgtaggttcccactaact

SEQ ID NO: 1340577 - DNA, 25 bp, Homo sapien
catcctgcctagagggttggtacaa

SEQ ID NO: 1340578 - DNA, 25 bp, Homo sapien
caggaataccccagaaccgtaagtg

SEQ ID NO: 1340579 - DNA, 25 bp, Homo sapien
ttctaactatagcagcaattccagg

SEQ ID NO: 1340580 - DNA, 25 bp, Homo sapien
taccccagaaccgtaagtgctgctt

SEQ ID NO: 1340581 - DNA, 25 bp, Homo sapien
tatagcagcaattccaggaataccc

SEQ ID NO: 1340582 - DNA, 25 bp, Homo sapien
ccagtgtgctgagagttgcgtaggc

SEQ ID NO: 1340583 - DNA, 25 bp, Homo sapien
ctaaattactaactgggctggaact

SEQ ID NO: 1340584 - DNA, 25 bp, Homo sapien
tgtggtcctggacacttgagcttct

SEQ ID NO: 1340585 - DNA, 25 bp, Homo sapien
aaatctccaagtctcggccaaatga

SEQ ID NO: 1340586 - DNA, 25 bp, Homo sapien
aaacaagctaatcatgaacaccatc

SEQ ID NO: 1340587 - DNA, 25 bp, Homo sapien
taaaccaactctccaacaacctgtc

SEQ ID NO: 1340588 - DNA, 25 bp, Homo sapien
aactctccaacaacctgtcctcttt

SEQ ID NO: 1340589 - DNA, 25 bp, Homo sapien
catctttaaaccaactctccaacaa

SEQ ID NO: 1340590 - DNA, 25 bp, Homo sapien
aattcatctttaaaccaactctcca

SEQ ID NO: 1340591 - DNA, 25 bp, Homo sapien
gatgtgctaccacagaactgcttgc

SEQ ID NO: 1340592 - DNA, 25 bp, Homo sapien
tgctgtgacagaatacttgatgtgc

SEQ ID NO: 1340593 - DNA, 25 bp, Homo sapien
ggcagtcccttgatgtttatccagc

SEQ ID NO: 1340594 - DNA, 25 bp, Homo sapien
tgcttgcaacgctgacgggtcatct

SEQ ID NO: 1340595 - DNA, 25 bp, Homo sapien
cctggagagccaccatattgagtct

SEQ ID NO: 1340596 - DNA, 25 bp, Homo sapien
atttcatctagtggactgtggagcc

SEQ ID NO: 1340597 - DNA, 25 bp, Homo sapien
gagtctttacaatttcatctagtgg

SEQ ID NO: 1340598 - DNA, 25 bp, Homo sapien
gagagccaccatattgagtctttac

SEQ ID NO: 1340599 - DNA, 25 bp, Homo sapien
taagggtgaccatacagctaggaac

SEQ ID NO: 1340600 - DNA, 25 bp, Homo sapien
gaagttcaaacgtctaatcagtgcc

SEQ ID NO: 1340601 - DNA, 25 bp, Homo sapien
tgctgcctagattcaacgaaatggg

SEQ ID NO: 1340602 - DNA, 25 bp, Homo sapien
taagcacaactcatacctctaaggg

SEQ ID NO: 1340603 - DNA, 25 bp, Homo sapien
gaatcacctgaacatgcaaggcagg

SEQ ID NO: 1340604 - DNA, 25 bp, Homo sapien
tgtaacttgcatccacatctgggaa

SEQ ID NO: 1340605 - DNA, 25 bp, Homo sapien
taaattctcaccatctagaaaatgg

SEQ ID NO: 1340606 - DNA, 25 bp, Homo sapien
ctaatggttcaaaagggccaagaat

SEQ ID NO: 1340607 - DNA, 25 bp, Homo sapien
tcctcacacagtggtcgtcttctat

SEQ ID NO: 1340608 - DNA, 25 bp, Homo sapien
ggaggagcatcagagctgaacaata

SEQ ID NO: 1340609 - DNA, 25 bp, Homo sapien
tcacacagtggtcgtcttctattcc

SEQ ID NO: 1340610 - DNA, 25 bp, Homo sapien
ctgaacaatacagagatcctcacac

SEQ ID NO: 1340611 - DNA, 25 bp, Homo sapien
gaactgagatcttcgatgcaatgct

SEQ ID NO: 1340612 - DNA, 25 bp, Homo sapien
ggttcccactaattattggccaggc

SEQ ID NO: 1340613 - DNA, 25 bp, Homo sapien
ccaagaacaggagggtaatacatag

SEQ ID NO: 1340614 - DNA, 25 bp, Homo sapien
aatgctccatttactataggttgcc

SEQ ID NO: 1340615 - DNA, 25 bp, Homo sapien
gagtatccttaacacctggctgggt

SEQ ID NO: 1340616 - DNA, 25 bp, Homo sapien
gaaagagatactagggaacttccag

SEQ ID NO: 1340617 - DNA, 25 bp, Homo sapien
taaaatgaagcaactaacacgggac

SEQ ID NO: 1340618 - DNA, 25 bp, Homo sapien
cgcagatttgggagtctaaaccact

SEQ ID NO: 1340619 - DNA, 25 bp, Homo sapien
atgaacccaactgccctgccccaaa

SEQ ID NO: 1340620 - DNA, 25 bp, Homo sapien
aaatgaacccaactgccctgcccca

SEQ ID NO: 1340621 - DNA, 25 bp, Homo sapien
taaatgaacccaactgccctgcccc

SEQ ID NO: 1340622 - DNA, 25 bp, Homo sapien
tgaacccaactgccctgccccaaaa

SEQ ID NO: 1340623 - DNA, 25 bp, Homo sapien
tgttttcaatgccagagagcctcag

SEQ ID NO: 1340624 - DNA, 25 bp, Homo sapien
gatgccaataagatccaagtctctg

SEQ ID NO: 1340625 - DNA, 25 bp, Homo sapien
taataaatagtctcatgcccgtgcc

SEQ ID NO: 1340626 - DNA, 25 bp, Homo sapien
ccccacgtgggatgatgtgctacaa

SEQ ID NO: 1340627 - DNA, 25 bp, Homo sapien
tgacattacgaagaaagagatggtt

SEQ ID NO: 1340628 - DNA, 25 bp, Homo sapien
caataaacagccgtgtgcctactgg

SEQ ID NO: 1340629 - DNA, 25 bp, Homo sapien
cctcgtgactgcatagtggaggtgt

SEQ ID NO: 1340630 - DNA, 25 bp, Homo sapien
cgtgtgcctactgggaaaggtgaca

SEQ ID NO: 1340631 - DNA, 25 bp, Homo sapien
tactatcttctatgcagacggccgc

SEQ ID NO: 1340632 - DNA, 25 bp, Homo sapien
tcatacagtgtagatccagagcctc

SEQ ID NO: 1340633 - DNA, 25 bp, Homo sapien
caatagcgcttttccaatcacgtgg

SEQ ID NO: 1340634 - DNA, 25 bp, Homo sapien
tctatgattaggaggaagggccaac

SEQ ID NO: 1340635 - DNA, 25 bp, Homo sapien
agagttgcacaatggtcagatgaag

SEQ ID NO: 1340636 - DNA, 25 bp, Homo sapien
cctaacactgctcacaaatttgtgg

SEQ ID NO: 1340637 - DNA, 25 bp, Homo sapien
taacgatgttattcttgagcttgga

SEQ ID NO: 1340638 - DNA, 25 bp, Homo sapien
tttgtggaaagagctacggtcttca

SEQ ID NO: 1340639 - DNA, 25 bp, Homo sapien
gtaaccagagggtttctgagacagg

SEQ ID NO: 1340640 - DNA, 25 bp, Homo sapien
ttcaacatgacagctgtttgaaatc

SEQ ID NO: 1340641 - DNA, 25 bp, Homo sapien
ttgaaatcccatgtaaccagagggt

SEQ ID NO: 1340642 - DNA, 25 bp, Homo sapien
caggaagcaacagtggcacacctag

SEQ ID NO: 1340643 - DNA, 25 bp, Homo sapien
tattagtcctccgatgctcccggtc

SEQ ID NO: 1340644 - DNA, 25 bp, Homo sapien
tcccggtcgccgacgatgcgcggat

SEQ ID NO: 1340645 - DNA, 25 bp, Homo sapien
cctttccagtgggattcgcaattcc

SEQ ID NO: 1340646 - DNA, 25 bp, Homo sapien
gaccagccccagtttcggttaatca

SEQ ID NO: 1340647 - DNA, 25 bp, Homo sapien
taaacaggatgtcagacagcgcgct

SEQ ID NO: 1340648 - DNA, 25 bp, Homo sapien
gtacaaggagctagggacgtcagcc

SEQ ID NO: 1340649 - DNA, 25 bp, Homo sapien
agctggcggtcaagttcgcggtaca

SEQ ID NO: 1340650 - DNA, 25 bp, Homo sapien
tgtttatgaaaacttgccgtgcgcg

SEQ ID NO: 1340651 - DNA, 25 bp, Homo sapien
gcagcgccccgtcgctgcgctggct

SEQ ID NO: 1340652 - DNA, 25 bp, Homo sapien
gaccggcaggctcgctaggcggcca

SEQ ID NO: 1340653 - DNA, 25 bp, Homo sapien
ctgggccaggcagcgccccgtcgct

SEQ ID NO: 1340654 - DNA, 25 bp, Homo sapien
gctggctggggtcgaccggcaggct

SEQ ID NO: 1340655 - DNA, 25 bp, Homo sapien
ctgaggaggggtcgcggcgaggaca

SEQ ID NO: 1340656 - DNA, 25 bp, Homo sapien
gcgcaggcccgcactgtctgcagct

SEQ ID NO: 1340657 - DNA, 25 bp, Homo sapien
gggtcgcggcgaggacagccgggac

SEQ ID NO: 1340658 - DNA, 25 bp, Homo sapien
tgggcgcaggcccgcactgtctgca

SEQ ID NO: 1340659 - DNA, 25 bp, Homo sapien
ggtcccggcggagactctgcgcctc

SEQ ID NO: 1340660 - DNA, 25 bp, Homo sapien
tgcgcctccggcctacccgccccgc

SEQ ID NO: 1340661 - DNA, 25 bp, Homo sapien
ctcgcgacgtcaccagcggcagccc

SEQ ID NO: 1340662 - DNA, 25 bp, Homo sapien
ggtcgcggtcccggcggagactctg

SEQ ID NO: 1340663 - DNA, 25 bp, Homo sapien
gtaacttgccaatactaatctatga

SEQ ID NO: 1340664 - DNA, 25 bp, Homo sapien
gaccctgatagggtgtatgcttttc

SEQ ID NO: 1340665 - DNA, 25 bp, Homo sapien
tgtgttctaaagcagtcgttttaat

SEQ ID NO: 1340666 - DNA, 25 bp, Homo sapien
ggcagtgtagatttgtggaaactga

SEQ ID NO: 1340667 - DNA, 25 bp, Homo sapien
ggtattgtcctaaaatcattgcttg

SEQ ID NO: 1340668 - DNA, 25 bp, Homo sapien
cacacatttggtatgggtatcacac

SEQ ID NO: 1340669 - DNA, 25 bp, Homo sapien
aagtagaacgttggtaactctgtca

SEQ ID NO: 1340670 - DNA, 25 bp, Homo sapien
tcagttaattgtccaaagtagaacg

SEQ ID NO: 1340671 - DNA, 25 bp, Homo sapien
ggaaagcctccagatcatgctgcag

SEQ ID NO: 1340672 - DNA, 25 bp, Homo sapien
catcagacaggattagccaggcaag

SEQ ID NO: 1340673 - DNA, 25 bp, Homo sapien
caggcaagagatgtattgaggaaaa

SEQ ID NO: 1340674 - DNA, 25 bp, Homo sapien
gaagcagaagaaagcgaggaaagcc

SEQ ID NO: 1340675 - DNA, 25 bp, Homo sapien
ccagtgagtcaagggagtaccagga

SEQ ID NO: 1340676 - DNA, 25 bp, Homo sapien
agtaccaggaaacgcccaaggagat

SEQ ID NO: 1340677 - DNA, 25 bp, Homo sapien
tcaggccaggagcactatacacatc

SEQ ID NO: 1340678 - DNA, 25 bp, Homo sapien
tgtcattggtatggaaagcccagct

SEQ ID NO: 1340679 - DNA, 25 bp, Homo sapien
tataggatgtcaatgtagtaatgtc

SEQ ID NO: 1340680 - DNA, 25 bp, Homo sapien
tattgtataggatgtcaatgtagta

SEQ ID NO: 1340681 - DNA, 25 bp, Homo sapien
ggatgtcaatgtagtaatgtccaga

SEQ ID NO: 1340682 - DNA, 25 bp, Homo sapien
caatgtagtaatgtccagaaagata

SEQ ID NO: 1340683 - DNA, 25 bp, Homo sapien
tgtagctgaacaagaactggccagg

SEQ ID NO: 1340684 - DNA, 25 bp, Homo sapien
ggccagtgagcccaaggatgcttta

SEQ ID NO: 1340685 - DNA, 25 bp, Homo sapien
taacaaggcttattctactcctggg

SEQ ID NO: 1340686 - DNA, 25 bp, Homo sapien
cacgtacaggttattggccacgaaa

SEQ ID NO: 1340687 - DNA, 25 bp, Homo sapien
caactgatcagctacatgtataggg

SEQ ID NO: 1340688 - DNA, 25 bp, Homo sapien
cgaaaatccagatagacttcatggg

SEQ ID NO: 1340689 - DNA, 25 bp, Homo sapien
tgtgaaatgtgaaccgaaccgtgaa

SEQ ID NO: 1340690 - DNA, 25 bp, Homo sapien
cctgtagtgtgtagaggaaaaggca

SEQ ID NO: 1340691 - DNA, 25 bp, Homo sapien
gaagggaaagggagatccagcaaca

SEQ ID NO: 1340692 - DNA, 25 bp, Homo sapien
tgtgcatttttattcgacgcctcaa

SEQ ID NO: 1340693 - DNA, 25 bp, Homo sapien
caagcattcagctaaagggtctgag

SEQ ID NO: 1340694 - DNA, 25 bp, Homo sapien
actgtccacccgctgtttgaggagc

SEQ ID NO: 1340695 - DNA, 25 bp, Homo sapien
cacccagagcaaagtgacagtgcac

SEQ ID NO: 1340696 - DNA, 25 bp, Homo sapien
ccacccagagcaaagtgacagtgca

SEQ ID NO: 1340697 - DNA, 25 bp, Homo sapien
acccagagcaaagtgacagtgcaca

SEQ ID NO: 1340698 - DNA, 25 bp, Homo sapien
tcccctagagggcaatattagaacc

SEQ ID NO: 1340699 - DNA, 25 bp, Homo sapien
cttggtctctcctacgcagaagaga

SEQ ID NO: 1340700 - DNA, 25 bp, Homo sapien
cttaagagtttccacctgaaggaca

SEQ ID NO: 1340701 - DNA, 25 bp, Homo sapien
ggcaaagttgtcgtatcccaagtgg

SEQ ID NO: 1340702 - DNA, 25 bp, Homo sapien
gaggtctctccctcattcagggagg

SEQ ID NO: 1340703 - DNA, 25 bp, Homo sapien
tctctccctcattcagggaggtggc

SEQ ID NO: 1340704 - DNA, 25 bp, Homo sapien
atccttatgaggtctctccctcatt

SEQ ID NO: 1340705 - DNA, 25 bp, Homo sapien
ttcatccttatgaggtctctccctc

SEQ ID NO: 1340706 - DNA, 25 bp, Homo sapien
tctatttgcatcgtgtgcctgcccc

SEQ ID NO: 1340707 - DNA, 25 bp, Homo sapien
tttgcatcgtgtgcctgcccctcaa

SEQ ID NO: 1340708 - DNA, 25 bp, Homo sapien
agtccttccagatctatttgcatcg

SEQ ID NO: 1340709 - DNA, 25 bp, Homo sapien
atctccatgacacagtccttccaga

SEQ ID NO: 1340710 - DNA, 25 bp, Homo sapien
ctatgtgatatccttgaaagtcctg

SEQ ID NO: 1340711 - DNA, 25 bp, Homo sapien
tatgtgatatccttgaaagtcctgt

SEQ ID NO: 1340712 - DNA, 25 bp, Homo sapien
agggaatgtggtctggcccaatttc

SEQ ID NO: 1340713 - DNA, 25 bp, Homo sapien
gggaatgtggtctggcccaatttca

SEQ ID NO: 1340714 - DNA, 25 bp, Homo sapien
ggaatgtggtctggcccaatttcaa

SEQ ID NO: 1340715 - DNA, 25 bp, Homo sapien
agacatgaggatggaacaaaaagcc

SEQ ID NO: 1340716 - DNA, 25 bp, Homo sapien
cagacatgaggatggaacaaaaagc

SEQ ID NO: 1340717 - DNA, 25 bp, Homo sapien
aaacagacatgaggatggaacaaaa

SEQ ID NO: 1340718 - DNA, 25 bp, Homo sapien
aacaaacagacatgaggatggaaca

SEQ ID NO: 1340719 - DNA, 25 bp, Homo sapien
ctatcatatgtagagtccttcttac

SEQ ID NO: 1340720 - DNA, 25 bp, Homo sapien
tatagtgaagatagtattaaccaca

SEQ ID NO: 1340721 - DNA, 25 bp, Homo sapien
atagtgaagatagtattaaccacac

SEQ ID NO: 1340722 - DNA, 25 bp, Homo sapien
gccccacaaccactggaggatctcc

SEQ ID NO: 1340723 - DNA, 25 bp, Homo sapien
cacagtattgattacagagagctgc

SEQ ID NO: 1340724 - DNA, 25 bp, Homo sapien
acacagtattgattacagagagctg

SEQ ID NO: 1340725 - DNA, 25 bp, Homo sapien
cagtattgattacagagagctgctg

SEQ ID NO: 1340726 - DNA, 25 bp, Homo sapien
gcactttgtagcatagcaggagaga

SEQ ID NO: 1340727 - DNA, 25 bp, Homo sapien
agatgggaaagcctaatagcacagg

SEQ ID NO: 1340728 - DNA, 25 bp, Homo sapien
acaggccataggtcttcagacccca

SEQ ID NO: 1340729 - DNA, 25 bp, Homo sapien
aggccataggtcttcagaccccagg

SEQ ID NO: 1340730 - DNA, 25 bp, Homo sapien
caggccaataggtgagatgtctccg

SEQ ID NO: 1340731 - DNA, 25 bp, Homo sapien
gatgtctccgatgtacgtgggcaca

SEQ ID NO: 1340732 - DNA, 25 bp, Homo sapien
ttgagagtgccaaagacaccttgca

SEQ ID NO: 1340733 - DNA, 25 bp, Homo sapien
gtaggccaggatcagtatttcaacc

SEQ ID NO: 1340734 - DNA, 25 bp, Homo sapien
tgttgacaaacagtccaacagaaaa

SEQ ID NO: 1340735 - DNA, 25 bp, Homo sapien
aacagtccaacagaaaaggagctaa

SEQ ID NO: 1340736 - DNA, 25 bp, Homo sapien
caaacagtccaacagaaaaggagct

SEQ ID NO: 1340737 - DNA, 25 bp, Homo sapien
agtccaacagaaaaggagctaatca

SEQ ID NO: 1340738 - DNA, 25 bp, Homo sapien
agacaagcaccaaagggacaagcac

SEQ ID NO: 1340739 - DNA, 25 bp, Homo sapien
aagtgttgataaattcccttatgat

SEQ ID NO: 1340740 - DNA, 25 bp, Homo sapien
attgtgatggcgaagatcagagatg

SEQ ID NO: 1340741 - DNA, 25 bp, Homo sapien
ttgtgatggcgaagatcagagatgg

SEQ ID NO: 1340742 - DNA, 25 bp, Homo sapien
aattgtgatggcgaagatcagagat

SEQ ID NO: 1340743 - DNA, 25 bp, Homo sapien
caattgtgatggcgaagatcagaga

SEQ ID NO: 1340744 - DNA, 25 bp, Homo sapien
ccaggctgtgagtttatggacagca

SEQ ID NO: 1340745 - DNA, 25 bp, Homo sapien
gcaggaaccaagcagtcatccttgt

SEQ ID NO: 1340746 - DNA, 25 bp, Homo sapien
caggctgtgagtttatggacagcag

SEQ ID NO: 1340747 - DNA, 25 bp, Homo sapien
accaagcagtcatccttgtatttgc

SEQ ID NO: 1340748 - DNA, 25 bp, Homo sapien
catggctagttggtgactgctgaca

SEQ ID NO: 1340749 - DNA, 25 bp, Homo sapien
caatctacatgtgccttcaagggaa

SEQ ID NO: 1340750 - DNA, 25 bp, Homo sapien
ttggtatcaggcagaacaccttggc

SEQ ID NO: 1340751 - DNA, 25 bp, Homo sapien
tctctaaggctggatctgaacagaa

SEQ ID NO: 1340752 - DNA, 25 bp, Homo sapien
tatttgctgttattccacaccttac

SEQ ID NO: 1340753 - DNA, 25 bp, Homo sapien
ttttatttgctgttattccacacct

SEQ ID NO: 1340754 - DNA, 25 bp, Homo sapien
atttttatttgctgttattccacac

SEQ ID NO: 1340755 - DNA, 25 bp, Homo sapien
ttatttgctgttattccacacctta

SEQ ID NO: 1340756 - DNA, 25 bp, Homo sapien
acagcagcccatactgtcggcatgg

SEQ ID NO: 1340757 - DNA, 25 bp, Homo sapien
agcagcccatactgtcggcatggga

SEQ ID NO: 1340758 - DNA, 25 bp, Homo sapien
cagcccatactgtcggcatgggagt

SEQ ID NO: 1340759 - DNA, 25 bp, Homo sapien
agcccatactgtcggcatgggagtg

SEQ ID NO: 1340760 - DNA, 25 bp, Homo sapien
tgaatgcagggaatttagccagcca

SEQ ID NO: 1340761 - DNA, 25 bp, Homo sapien
gagacatgcaataaaccacctaagg

SEQ ID NO: 1340762 - DNA, 25 bp, Homo sapien
gattcctaagctcagtgaaagcctg

SEQ ID NO: 1340763 - DNA, 25 bp, Homo sapien
tgtctgtacgtgaaggactggcaca

SEQ ID NO: 1340764 - DNA, 25 bp, Homo sapien
tcttgctacctcttcacatggtcgt

SEQ ID NO: 1340765 - DNA, 25 bp, Homo sapien
catggtcgtacttctgtgcatgcac

SEQ ID NO: 1340766 - DNA, 25 bp, Homo sapien
acctcttcacatggtcgtacttctg

SEQ ID NO: 1340767 - DNA, 25 bp, Homo sapien
gtcgtacttctgtgcatgcacactg

SEQ ID NO: 1340768 - DNA, 25 bp, Homo sapien
tagaacatccatgaaccgccaaagg

SEQ ID NO: 1340769 - DNA, 25 bp, Homo sapien
caagaaacaaaggtgtggcatccca

SEQ ID NO: 1340770 - DNA, 25 bp, Homo sapien
tatgagaagtaccagtacagtgccc

SEQ ID NO: 1340771 - DNA, 25 bp, Homo sapien
tagccagagcaagttgacaggaagc

SEQ ID NO: 1340772 - DNA, 25 bp, Homo sapien
agaatccagcaggattgtaccttga

SEQ ID NO: 1340773 - DNA, 25 bp, Homo sapien
attttaggctgttgataaatgttcc

SEQ ID NO: 1340774 - DNA, 25 bp, Homo sapien
ttttaggctgttgataaatgttcca

SEQ ID NO: 1340775 - DNA, 25 bp, Homo sapien
gtaccttgaatctatataagcaacc

SEQ ID NO: 1340776 - DNA, 25 bp, Homo sapien
cacatgggtttgcaggtcaagtcac

SEQ ID NO: 1340777 - DNA, 25 bp, Homo sapien
ggtaacgtcaatctatgcctcaagt

SEQ ID NO: 1340778 - DNA, 25 bp, Homo sapien
gaacaccggatttttagacatcagc

SEQ ID NO: 1340779 - DNA, 25 bp, Homo sapien
caagctgaagctcgcctaagacagg

SEQ ID NO: 1340780 - DNA, 25 bp, Homo sapien
ttcaggtctgtgctataatgtatcc

SEQ ID NO: 1340781 - DNA, 25 bp, Homo sapien
tacggcaccttgaactacagtgtat

SEQ ID NO: 1340782 - DNA, 25 bp, Homo sapien
tctctatattctggcatgtctggca

SEQ ID NO: 1340783 - DNA, 25 bp, Homo sapien
gctttctctaacagtatctacggca

SEQ ID NO: 1340784 - DNA, 25 bp, Homo sapien
tgtacaatggaatacgaagtagtga

SEQ ID NO: 1340785 - DNA, 25 bp, Homo sapien
gtagtgatttaaaaacacgtatgga

SEQ ID NO: 1340786 - DNA, 25 bp, Homo sapien
tgcacactccagtcctgtttaaata

SEQ ID NO: 1340787 - DNA, 25 bp, Homo sapien
ttaaatagcaatacttccggacaca

SEQ ID NO: 1340788 - DNA, 25 bp, Homo sapien
ttggacattccacagcccgacccac

SEQ ID NO: 1340789 - DNA, 25 bp, Homo sapien
ttttggacattccacagcccgaccc

SEQ ID NO: 1340790 - DNA, 25 bp, Homo sapien
attttggacattccacagcccgacc

SEQ ID NO: 1340791 - DNA, 25 bp, Homo sapien
aattttggacattccacagcccgac

SEQ ID NO: 1340792 - DNA, 25 bp, Homo sapien
ggctggcggcgagtgcagtgactga

SEQ ID NO: 1340793 - DNA, 25 bp, Homo sapien
gtccccctctccctgtgcgctggct

SEQ ID NO: 1340794 - DNA, 25 bp, Homo sapien
gcgtttatctttcactgggctgcag

SEQ ID NO: 1340795 - DNA, 25 bp, Homo sapien
gctggcggcgagtgcagtgactgat

SEQ ID NO: 1340796 - DNA, 25 bp, Homo sapien
aaagccatttagtggctgatccaag

SEQ ID NO: 1340797 - DNA, 25 bp, Homo sapien
gagctagtggcatgtcgagacaaac

SEQ ID NO: 1340798 - DNA, 25 bp, Homo sapien
gctcactggagtgaaagccatttag

SEQ ID NO: 1340799 - DNA, 25 bp, Homo sapien
gctgatccaagggaagtatgagcta

SEQ ID NO: 1340800 - DNA, 25 bp, Homo sapien
gactacaagcaagtaacaagctttt

SEQ ID NO: 1340801 - DNA, 25 bp, Homo sapien
ttctgtttgactacaagcaagtaac

SEQ ID NO: 1340802 - DNA, 25 bp, Homo sapien
tctgtttgactacaagcaagtaaca

SEQ ID NO: 1340803 - DNA, 25 bp, Homo sapien
actacaagcaagtaacaagcttttg

SEQ ID NO: 1340804 - DNA, 25 bp, Homo sapien
caattcttaccgtggaacagccgcg

SEQ ID NO: 1340805 - DNA, 25 bp, Homo sapien
gaaagaaaatctcacgagctcgctg

SEQ ID NO: 1340806 - DNA, 25 bp, Homo sapien
tggcgccgggtgactgcaatgaaac

SEQ ID NO: 1340807 - DNA, 25 bp, Homo sapien
cctcagcctagaaaagcgtgggtgg

SEQ ID NO: 1340808 - DNA, 25 bp, Homo sapien
tagacactgagaaaatatcgaacga

SEQ ID NO: 1340809 - DNA, 25 bp, Homo sapien
tatgagatgggtgcgttttcccctc

SEQ ID NO: 1340810 - DNA, 25 bp, Homo sapien
taaatgggtgtctataggccaacgc

SEQ ID NO: 1340811 - DNA, 25 bp, Homo sapien
gaatctgtctcgttttgactccaaa

SEQ ID NO: 1340812 - DNA, 25 bp, Homo sapien
ttatttcactcaggctttgactgga

SEQ ID NO: 1340813 - DNA, 25 bp, Homo sapien
catcagggttgatctaagattgtca

SEQ ID NO: 1340814 - DNA, 25 bp, Homo sapien
tttgtaagtaaggtgtttggtgctc

SEQ ID NO: 1340815 - DNA, 25 bp, Homo sapien
catagaaactgctggactcgtgagt

SEQ ID NO: 1340816 - DNA, 25 bp, Homo sapien
cagccaaataccttctgaaatggag

SEQ ID NO: 1340817 - DNA, 25 bp, Homo sapien
gacttccagtgatgagcagaccaga

SEQ ID NO: 1340818 - DNA, 25 bp, Homo sapien
ccagaagaccaaattgtgaaatgtc

SEQ ID NO: 1340819 - DNA, 25 bp, Homo sapien
tagtttgtcattataccaggctact

SEQ ID NO: 1340820 - DNA, 25 bp, Homo sapien
agtatctgacagaacccaaggcagg

SEQ ID NO: 1340821 - DNA, 25 bp, Homo sapien
caactgagtggacctaatagccaag

SEQ ID NO: 1340822 - DNA, 25 bp, Homo sapien
cgaaaggaagaagatccgggtgcca

SEQ ID NO: 1340823 - DNA, 25 bp, Homo sapien
gatcaaaagtaactggataagcgct

SEQ ID NO: 1340824 - DNA, 25 bp, Homo sapien
gaaaccggctgccacatcatgcaga

SEQ ID NO: 1340825 - DNA, 25 bp, Homo sapien
gagactaagacatacaaggcactgt

SEQ ID NO: 1340826 - DNA, 25 bp, Homo sapien
ccccttgggtatggactggatttag

SEQ ID NO: 1340827 - DNA, 25 bp, Homo sapien
gaacacttgctctgagggaaaccgg

SEQ ID NO: 1340828 - DNA, 25 bp, Homo sapien
ccggaagatcgaagctgtagcagcc

SEQ ID NO: 1340829 - DNA, 25 bp, Homo sapien
tgatgactagaccactgagcttgct

SEQ ID NO: 1340830 - DNA, 25 bp, Homo sapien
ttgatcccaggagtaaatcccaggg

SEQ ID NO: 1340831 - DNA, 25 bp, Homo sapien
tcagactgattgaaggctaaggcct

SEQ ID NO: 1340832 - DNA, 25 bp, Homo sapien
aatggtttaaatgggccgagcatgg

SEQ ID NO: 1340833 - DNA, 25 bp, Homo sapien
cattgtggacctaagtaatgccact

SEQ ID NO: 1340834 - DNA, 25 bp, Homo sapien
cacttcaacctaggaggttgactgc

SEQ ID NO: 1340835 - DNA, 25 bp, Homo sapien
acctaggaggttgactgcaccactg

SEQ ID NO: 1340836 - DNA, 25 bp, Homo sapien
gatttccatagcctttctgaggccc

SEQ ID NO: 1340837 - DNA, 25 bp, Homo sapien
tgctagtgaagcaattaagggctct

SEQ ID NO: 1340838 - DNA, 25 bp, Homo sapien
gaggcccattaaactgatcagtagg

SEQ ID NO: 1340839 - DNA, 25 bp, Homo sapien
ggatattccagtgcacccataggga

SEQ ID NO: 1340840 - DNA, 25 bp, Homo sapien
gagtagaatagctggtaactctatg

SEQ ID NO: 1340841 - DNA, 25 bp, Homo sapien
tatccaatctcctattgctggacat

SEQ ID NO: 1340842 - DNA, 25 bp, Homo sapien
tggctgttatgaatacaagtactat

SEQ ID NO: 1340843 - DNA, 25 bp, Homo sapien
tgtacaaaactttttgcggccatat

SEQ ID NO: 1340844 - DNA, 25 bp, Homo sapien
aactagcaaatgtccactacagtgc

SEQ ID NO: 1340845 - DNA, 25 bp, Homo sapien
ggattcacagatcccattcccgaag

SEQ ID NO: 1340846 - DNA, 25 bp, Homo sapien
aagcaatggttagagcccacccgaa

SEQ ID NO: 1340847 - DNA, 25 bp, Homo sapien
caagagaatagttagccagcagtaa

SEQ ID NO: 1340848 - DNA, 25 bp, Homo sapien
gagcattgttctatcaacaccgaga

SEQ ID NO: 1340849 - DNA, 25 bp, Homo sapien
tataaacctgtaaaagtgcctggca

SEQ ID NO: 1340850 - DNA, 25 bp, Homo sapien
cagtgaaaatgagtgccagcttccc

SEQ ID NO: 1340851 - DNA, 25 bp, Homo sapien
gaatcccacggtttggcttccagca

SEQ ID NO: 1340852 - DNA, 25 bp, Homo sapien
cagcactactcgccatagcaaatac

SEQ ID NO: 1340853 - DNA, 25 bp, Homo sapien
gcctattggagggtagagaaagagg

SEQ ID NO: 1340854 - DNA, 25 bp, Homo sapien
ggtactgggcttaagagtgtgtaat

SEQ ID NO: 1340855 - DNA, 25 bp, Homo sapien
ctgggcttaagagtgtgtaatgaaa

SEQ ID NO: 1340856 - DNA, 25 bp, Homo sapien
taggtttagcgagattatgaggatg

SEQ ID NO: 1340857 - DNA, 25 bp, Homo sapien
gtaattaggtttagcgagattatga

SEQ ID NO: 1340858 - DNA, 25 bp, Homo sapien
tttagcgagattatgaggatggagc

SEQ ID NO: 1340859 - DNA, 25 bp, Homo sapien
attaggtttagcgagattatgagga

SEQ ID NO: 1340860 - DNA, 25 bp, Homo sapien
gagagttccagaatgcacagtgcta

SEQ ID NO: 1340861 - DNA, 25 bp, Homo sapien
tctctatgttagactgcccaccagt

SEQ ID NO: 1340862 - DNA, 25 bp, Homo sapien
tctgaagtggttgtttacagcgagc

SEQ ID NO: 1340863 - DNA, 25 bp, Homo sapien
tacagcgagcccttttgcaaaatgg

SEQ ID NO: 1340864 - DNA, 25 bp, Homo sapien
tgctgtcactcttgcgctctcactg

SEQ ID NO: 1340865 - DNA, 25 bp, Homo sapien
tgagctattagcgagacttccagaa

SEQ ID NO: 1340866 - DNA, 25 bp, Homo sapien
cctcctgggagctagaatgacaggt

SEQ ID NO: 1340867 - DNA, 25 bp, Homo sapien
gaagccatctggttaacacaaggaa

SEQ ID NO: 1340868 - DNA, 25 bp, Homo sapien
cagaatagaaactggcaagctaaac

SEQ ID NO: 1340869 - DNA, 25 bp, Homo sapien
tctgatatagaatgtgtagtaggaa

SEQ ID NO: 1340870 - DNA, 25 bp, Homo sapien
gctaaaccagcttcttgtgacctgt

SEQ ID NO: 1340871 - DNA, 25 bp, Homo sapien
gagttctagtcagagaattcttctc

SEQ ID NO: 1340872 - DNA, 25 bp, Homo sapien
cagggaacaaggtatgggcagcaaa

SEQ ID NO: 1340873 - DNA, 25 bp, Homo sapien
tatcttcgtgactgccctatgtgct

SEQ ID NO: 1340874 - DNA, 25 bp, Homo sapien
tgcaatttgcaaccaagtgagttct

SEQ ID NO: 1340875 - DNA, 25 bp, Homo sapien
tactccaatgagctttgcaatttgc

SEQ ID NO: 1340876 - DNA, 25 bp, Homo sapien
attatgtagccagtcatgaaaatat

SEQ ID NO: 1340877 - DNA, 25 bp, Homo sapien
cacataacttttatgtcaaacctcc

SEQ ID NO: 1340878 - DNA, 25 bp, Homo sapien
cagtggtgatcttactgtcaatgac

SEQ ID NO: 1340879 - DNA, 25 bp, Homo sapien
gactgagcttctccgacacagccat

SEQ ID NO: 1340880 - DNA, 25 bp, Homo sapien
tttgatctagggtgattcagcagga

SEQ ID NO: 1340881 - DNA, 25 bp, Homo sapien
ttttggatgctgactgagcttctcc

SEQ ID NO: 1340882 - DNA, 25 bp, Homo sapien
tcacctacccatagtggcgctctgg

SEQ ID NO: 1340883 - DNA, 25 bp, Homo sapien
gtaatctctcgaccttacaatcggg

SEQ ID NO: 1340884 - DNA, 25 bp, Homo sapien
agaaccctgtgattaccctgaccca

SEQ ID NO: 1340885 - DNA, 25 bp, Homo sapien
tacaatcgggatgagcaaccttcat

SEQ ID NO: 1340886 - DNA, 25 bp, Homo sapien
ctggtgggtccacggtcctcggtca

SEQ ID NO: 1340887 - DNA, 25 bp, Homo sapien
tgtcacactcaccatgagttcttgt

SEQ ID NO: 1340888 - DNA, 25 bp, Homo sapien
gtcctcggtcagcaccgctaaatga

SEQ ID NO: 1340889 - DNA, 25 bp, Homo sapien
ccgctaaatgactgggtcttggcag

SEQ ID NO: 1340890 - DNA, 25 bp, Homo sapien
ccatggctgatctctggcccaaagc

SEQ ID NO: 1340891 - DNA, 25 bp, Homo sapien
tggctgatctctggcccaaagccaa

SEQ ID NO: 1340892 - DNA, 25 bp, Homo sapien
tgatctctggcccaaagccaagcat

SEQ ID NO: 1340893 - DNA, 25 bp, Homo sapien
ctgatctctggcccaaagccaagca

SEQ ID NO: 1340894 - DNA, 25 bp, Homo sapien
ccggatgaggcccttaagtcagaca

SEQ ID NO: 1340895 - DNA, 25 bp, Homo sapien
ggcccttaagtcagacacggacaag

SEQ ID NO: 1340896 - DNA, 25 bp, Homo sapien
ttaagtcagacacggacaagctgga

SEQ ID NO: 1340897 - DNA, 25 bp, Homo sapien
cctgcaggcccggatgaggccctta

SEQ ID NO: 1340898 - DNA, 25 bp, Homo sapien
cccacaggatggaaaacggctggaa

SEQ ID NO: 1340899 - DNA, 25 bp, Homo sapien
gatggaaaacggctggaaagatgcc

SEQ ID NO: 1340900 - DNA, 25 bp, Homo sapien
ccaaagggagcccacaggatggaaa

SEQ ID NO: 1340901 - DNA, 25 bp, Homo sapien
agatgccaagccaggagtgtctgag

SEQ ID NO: 1340902 - DNA, 25 bp, Homo sapien
cgattatgccattgaactctagcct

SEQ ID NO: 1340903 - DNA, 25 bp, Homo sapien
gtcaacagtgacctacgattatgcc

SEQ ID NO: 1340904 - DNA, 25 bp, Homo sapien
tgtttcattctaaccatacagtggg

SEQ ID NO: 1340905 - DNA, 25 bp, Homo sapien
cagtgagatcccatcgctataggaa

SEQ ID NO: 1340906 - DNA, 25 bp, Homo sapien
ggcagcgttaaacacagtaagtata

SEQ ID NO: 1340907 - DNA, 25 bp, Homo sapien
cagcgttaaacacagtaagtatact

SEQ ID NO: 1340908 - DNA, 25 bp, Homo sapien
caggcagcgttaaacacagtaagta

SEQ ID NO: 1340909 - DNA, 25 bp, Homo sapien
tcaggcagcgttaaacacagtaagt

SEQ ID NO: 1340910 - DNA, 25 bp, Homo sapien
gttagtgtggacgtactgtgtgcaa

SEQ ID NO: 1340911 - DNA, 25 bp, Homo sapien
ttactaggagttggactaaggtcgc

SEQ ID NO: 1340912 - DNA, 25 bp, Homo sapien
taaggcagtatttctcaggagggca

SEQ ID NO: 1340913 - DNA, 25 bp, Homo sapien
gaactttttctcatgggagcagctg

SEQ ID NO: 1340914 - DNA, 25 bp, Homo sapien
gcctgcaagtcaaggaggctacctt

SEQ ID NO: 1340915 - DNA, 25 bp, Homo sapien
ctaaggcaacgggatctatttctag

SEQ ID NO: 1340916 - DNA, 25 bp, Homo sapien
gaagtccctcattcactgtcaatag

SEQ ID NO: 1340917 - DNA, 25 bp, Homo sapien
ggaagtccctcattcactgtcaata

SEQ ID NO: 1340918 - DNA, 25 bp, Homo sapien
ttgtccactatccacccctaaggca

SEQ ID NO: 1340919 - DNA, 25 bp, Homo sapien
ccttcctttgggataccatccatat

SEQ ID NO: 1340920 - DNA, 25 bp, Homo sapien
tttctgactggccacgggtccttcc

SEQ ID NO: 1340921 - DNA, 25 bp, Homo sapien
catgtttgttgagaggcactgctgt

SEQ ID NO: 1340922 - DNA, 25 bp, Homo sapien
tccatattctaactcactccttggg

SEQ ID NO: 1340923 - DNA, 25 bp, Homo sapien
tcaactgggtacaagagatgggacc

SEQ ID NO: 1340924 - DNA, 25 bp, Homo sapien
tgtcaaattcgcatgctccgcttcg

SEQ ID NO: 1340925 - DNA, 25 bp, Homo sapien
gaattggttctgctgaaatgacacc

SEQ ID NO: 1340926 - DNA, 25 bp, Homo sapien
gacacagaaaggacttgattccctg

SEQ ID NO: 1340927 - DNA, 25 bp, Homo sapien
cagtggaccccaagatattcctggt

SEQ ID NO: 1340928 - DNA, 25 bp, Homo sapien
gacccagaaaggtggttacagcact

SEQ ID NO: 1340929 - DNA, 25 bp, Homo sapien
cagcaaagtgccctagacagctagc

SEQ ID NO: 1340930 - DNA, 25 bp, Homo sapien
gcacacccgggttgatcacaggtag

SEQ ID NO: 1340931 - DNA, 25 bp, Homo sapien
tacctaactcgttcatgcttcatga

SEQ ID NO: 1340932 - DNA, 25 bp, Homo sapien
tacaaatgatgactaggccgggcat

SEQ ID NO: 1340933 - DNA, 25 bp, Homo sapien
gctggtcttgaccactttggtctcc

SEQ ID NO: 1340934 - DNA, 25 bp, Homo sapien
tgggaatccttacactcatcatgtc

SEQ ID NO: 1340935 - DNA, 25 bp, Homo sapien
tgatgaaacagatacggtccacaaa

SEQ ID NO: 1340936 - DNA, 25 bp, Homo sapien
caaatgaatcctttttacccacagc

SEQ ID NO: 1340937 - DNA, 25 bp, Homo sapien
taaaacatgtgatcccttagggaag

SEQ ID NO: 1340938 - DNA, 25 bp, Homo sapien
ttagggaaggttactgctatttcca

SEQ ID NO: 1340939 - DNA, 25 bp, Homo sapien
tcctggctgtatgaatttaacgact

SEQ ID NO: 1340940 - DNA, 25 bp, Homo sapien
gttgttgtgcaactgccatcatcca

SEQ ID NO: 1340941 - DNA, 25 bp, Homo sapien
tacaatatctgtcagagtgccgcct

SEQ ID NO: 1340942 - DNA, 25 bp, Homo sapien
ttaacgactctaggagcctcatgtg

SEQ ID NO: 1340943 - DNA, 25 bp, Homo sapien
gactctgtccgtagtgcagggtgac

SEQ ID NO: 1340944 - DNA, 25 bp, Homo sapien
gggtgactgcaaatgacacccaaca

SEQ ID NO: 1340945 - DNA, 25 bp, Homo sapien
gaaaggggacccagcatgactctgt

SEQ ID NO: 1340946 - DNA, 25 bp, Homo sapien
tgcagggtgactgcaaatgacaccc

SEQ ID NO: 1340947 - DNA, 25 bp, Homo sapien
aattacttgaggattcaccaatccc

SEQ ID NO: 1340948 - DNA, 25 bp, Homo sapien
aggagtgtttcaaattacttgagga

SEQ ID NO: 1340949 - DNA, 25 bp, Homo sapien
gaggattcaccaatccctaactttc

SEQ ID NO: 1340950 - DNA, 25 bp, Homo sapien
gtttcaaattacttgaggattcacc

SEQ ID NO: 1340951 - DNA, 25 bp, Homo sapien
tttgggttcctacaccagtcagaca

SEQ ID NO: 1340952 - DNA, 25 bp, Homo sapien
tcactgctttgggttcctacaccag

SEQ ID NO: 1340953 - DNA, 25 bp, Homo sapien
cactgctttgggttcctacaccagt

SEQ ID NO: 1340954 - DNA, 25 bp, Homo sapien
tgctttgggttcctacaccagtcag

SEQ ID NO: 1340955 - DNA, 25 bp, Homo sapien
ggtaatatacccgattaggctctga

SEQ ID NO: 1340956 - DNA, 25 bp, Homo sapien
taatatacccgattaggctctgagc

SEQ ID NO: 1340957 - DNA, 25 bp, Homo sapien
ctaggatgaggtaatatacccgatt

SEQ ID NO: 1340958 - DNA, 25 bp, Homo sapien
gatgaggtaatatacccgattaggc

SEQ ID NO: 1340959 - DNA, 25 bp, Homo sapien
tagtagtgtactgacaagtgccaag

SEQ ID NO: 1340960 - DNA, 25 bp, Homo sapien
tatgccccgggagaagtatgacaga

SEQ ID NO: 1340961 - DNA, 25 bp, Homo sapien
cagtaagctggtctacaatgatgga

SEQ ID NO: 1340962 - DNA, 25 bp, Homo sapien
tcttcctgggtacggtgaggctcct

SEQ ID NO: 1340963 - DNA, 25 bp, Homo sapien
catccttcagttatcacagtactgt

SEQ ID NO: 1340964 - DNA, 25 bp, Homo sapien
tgccatccttcagttatcacagtac

SEQ ID NO: 1340965 - DNA, 25 bp, Homo sapien
gccatccttcagttatcacagtact

SEQ ID NO: 1340966 - DNA, 25 bp, Homo sapien
tccttcagttatcacagtactgtac

SEQ ID NO: 1340967 - DNA, 25 bp, Homo sapien
tagacagcatcagcactgtgataac

SEQ ID NO: 1340968 - DNA, 25 bp, Homo sapien
gcctgtcagtcactgtgtcggtcaa

SEQ ID NO: 1340969 - DNA, 25 bp, Homo sapien
tcagtcactgtgtcggtcaacggca

SEQ ID NO: 1340970 - DNA, 25 bp, Homo sapien
cagtcactgtgtcggtcaacggcat

SEQ ID NO: 1340971 - DNA, 25 bp, Homo sapien
tgtcagtcactgtgtcggtcaacgg

SEQ ID NO: 1340972 - DNA, 25 bp, Homo sapien
tctctgaaggctccccatgaagtga

SEQ ID NO: 1340973 - DNA, 25 bp, Homo sapien
tctctctgaaggctccccatgaagt

SEQ ID NO: 1340974 - DNA, 25 bp, Homo sapien
tctgaaggctccccatgaagtgaag

SEQ ID NO: 1340975 - DNA, 25 bp, Homo sapien
tgaaggctccccatgaagtgaagga

SEQ ID NO: 1340976 - DNA, 25 bp, Homo sapien
agaattcctcgcacaggaaggcagg

SEQ ID NO: 1340977 - DNA, 25 bp, Homo sapien
ctggcgtgcgggtagcagagtgagg

SEQ ID NO: 1340978 - DNA, 25 bp, Homo sapien
tccttcaaagcagggataagcacag

SEQ ID NO: 1340979 - DNA, 25 bp, Homo sapien
ggataagcacaggtgtggtctttct

SEQ ID NO: 1340980 - DNA, 25 bp, Homo sapien
ggctcgccctctctccggaccgccg

SEQ ID NO: 1340981 - DNA, 25 bp, Homo sapien
cagcgtcccggcctcgtggtagcgc

SEQ ID NO: 1340982 - DNA, 25 bp, Homo sapien
tccagcgtcccggcctcgtggtagc

SEQ ID NO: 1340983 - DNA, 25 bp, Homo sapien
gcggggctcgccctctctccggacc

SEQ ID NO: 1340984 - DNA, 25 bp, Homo sapien
ccgcctcctcctcttagactcctcc

SEQ ID NO: 1340985 - DNA, 25 bp, Homo sapien
aactggatggatcattgaaacctgc

SEQ ID NO: 1340986 - DNA, 25 bp, Homo sapien
ccacagatgctgctacctttttgcc

SEQ ID NO: 1340987 - DNA, 25 bp, Homo sapien
ttgtgatctaaactggatggatcat

SEQ ID NO: 1340988 - DNA, 25 bp, Homo sapien
tcattgaaacctgccacagatgctg

SEQ ID NO: 1340989 - DNA, 25 bp, Homo sapien
ccttctcatccaagctatgtcttgc

SEQ ID NO: 1340990 - DNA, 25 bp, Homo sapien
catccaagctatgtcttgcaagtct

SEQ ID NO: 1340991 - DNA, 25 bp, Homo sapien
tctcatccaagctatgtcttgcaag

SEQ ID NO: 1340992 - DNA, 25 bp, Homo sapien
taaatcacatcaaagccggttgtct

SEQ ID NO: 1340993 - DNA, 25 bp, Homo sapien
gagaagaacaatccaggtcccctaa

SEQ ID NO: 1340994 - DNA, 25 bp, Homo sapien
tagacccagattaaggggcatcttc

SEQ ID NO: 1340995 - DNA, 25 bp, Homo sapien
agcagagaagaacaatccaggtccc

SEQ ID NO: 1340996 - DNA, 25 bp, Homo sapien
gaacaatccaggtcccctaatttca

SEQ ID NO: 1340997 - DNA, 25 bp, Homo sapien
caatcagcctatccgtagtgaggat

SEQ ID NO: 1340998 - DNA, 25 bp, Homo sapien
tgccctcaatcagcctatccgtagt

SEQ ID NO: 1340999 - DNA, 25 bp, Homo sapien
cctcaatcagcctatccgtagtgag

SEQ ID NO: 1341000 - DNA, 25 bp, Homo sapien
taatgccctcaatcagcctatccgt

SEQ ID NO: 1341001 - DNA, 25 bp, Homo sapien
acagtcctggcgatgaacttcagat

SEQ ID NO: 1341002 - DNA, 25 bp, Homo sapien
atgttcccttcctgtaccatcacag

SEQ ID NO: 1341003 - DNA, 25 bp, Homo sapien
taccatcacagtcctggcgatgaac

SEQ ID NO: 1341004 - DNA, 25 bp, Homo sapien
catcacagtcctggcgatgaacttc

SEQ ID NO: 1341005 - DNA, 25 bp, Homo sapien
attcctccagtaagtcttttgttgc

SEQ ID NO: 1341006 - DNA, 25 bp, Homo sapien
tgggtaggacgtctgcctcagtcct

SEQ ID NO: 1341007 - DNA, 25 bp, Homo sapien
ctggtgggtaggacgtctgcctcag

SEQ ID NO: 1341008 - DNA, 25 bp, Homo sapien
cagtccttggggacactgttttgat

SEQ ID NO: 1341009 - DNA, 25 bp, Homo sapien
tcagtccttggggacactgttttga

SEQ ID NO: 1341010 - DNA, 25 bp, Homo sapien
ccttcttgtgtattccagctcagtg

SEQ ID NO: 1341011 - DNA, 25 bp, Homo sapien
cttgtgtattccagctcagtgtgag

SEQ ID NO: 1341012 - DNA, 25 bp, Homo sapien
tgtgtattccagctcagtgtgaggg

SEQ ID NO: 1341013 - DNA, 25 bp, Homo sapien
tattccagctcagtgtgaggggcca

SEQ ID NO: 1341014 - DNA, 25 bp, Homo sapien
gcggcgccgccctgcaggatccggg

SEQ ID NO: 1341015 - DNA, 25 bp, Homo sapien
aaggcgcgagtcccgcgcggccggc

SEQ ID NO: 1341016 - DNA, 25 bp, Homo sapien
gccggggctccgcgactgggcgggc

SEQ ID NO: 1341017 - DNA, 25 bp, Homo sapien
gtaaggcgcgagtcccgcgcggccg

SEQ ID NO: 1341018 - DNA, 25 bp, Homo sapien
caagggcaccgtgtgccagaggatc

SEQ ID NO: 1341019 - DNA, 25 bp, Homo sapien
ccagcggccacttcttgcgggagaa

SEQ ID NO: 1341020 - DNA, 25 bp, Homo sapien
cagaggatcgcccagaactttggtc

SEQ ID NO: 1341021 - DNA, 25 bp, Homo sapien
cctcctcgcgaaggcaatggcttcc

SEQ ID NO: 1341022 - DNA, 25 bp, Homo sapien
tcctgtcgcgaggaatagcccgagc

SEQ ID NO: 1341023 - DNA, 25 bp, Homo sapien
tgtctgttcgttgtcgccttctaag

SEQ ID NO: 1341024 - DNA, 25 bp, Homo sapien
cttctaaggtaaactctccccagca

SEQ ID NO: 1341025 - DNA, 25 bp, Homo sapien
ccgagggaacgagaactaggcaggg

SEQ ID NO: 1341026 - DNA, 25 bp, Homo sapien
ggaatgaagggcttcacactgtcca

SEQ ID NO: 1341027 - DNA, 25 bp, Homo sapien
tggtgacttgtttccttctggaatg

SEQ ID NO: 1341028 - DNA, 25 bp, Homo sapien
ttggtgacttgtttccttctggaat

SEQ ID NO: 1341029 - DNA, 25 bp, Homo sapien
ccttctggaatgaagggcttcacac

SEQ ID NO: 1341030 - DNA, 25 bp, Homo sapien
tcagtacgcgaacgatatcagtttt

SEQ ID NO: 1341031 - DNA, 25 bp, Homo sapien
gtggcctcaatacgtgctgccagtg

SEQ ID NO: 1341032 - DNA, 25 bp, Homo sapien
tacgcgaacgatatcagttttatta

SEQ ID NO: 1341033 - DNA, 25 bp, Homo sapien
atgtggcctcaatacgtgctgccag

SEQ ID NO: 1341034 - DNA, 25 bp, Homo sapien
tgcttttatggcttggccttacctt

SEQ ID NO: 1341035 - DNA, 25 bp, Homo sapien
ttatggtccacaagaggtccttgct

SEQ ID NO: 1341036 - DNA, 25 bp, Homo sapien
tattatcattttagtccgcatccat

SEQ ID NO: 1341037 - DNA, 25 bp, Homo sapien
cttgtagagtttgtttatggtccac

SEQ ID NO: 1341038 - DNA, 25 bp, Homo sapien
ggcagcaaggagtgctttgttcaca

SEQ ID NO: 1341039 - DNA, 25 bp, Homo sapien
caggtagagcatgggggtcatagac

SEQ ID NO: 1341040 - DNA, 25 bp, Homo sapien
catggcggtgcgcatgcatgcaggt

SEQ ID NO: 1341041 - DNA, 25 bp, Homo sapien
catgggggtcatagacaaggcagca

SEQ ID NO: 1341042 - DNA, 25 bp, Homo sapien
gcctgtaatgcctttcacacttctt

SEQ ID NO: 1341043 - DNA, 25 bp, Homo sapien
cttttgcctgtaatgcctttcacac

SEQ ID NO: 1341044 - DNA, 25 bp, Homo sapien
cacttctttaatctctcgaagtcca

SEQ ID NO: 1341045 - DNA, 25 bp, Homo sapien
ttcacacttctttaatctctcgaag

SEQ ID NO: 1341046 - DNA, 25 bp, Homo sapien
ttaaacaaccaaaatagtggtcatg

SEQ ID NO: 1341047 - DNA, 25 bp, Homo sapien
catgaccttcatttgacaacccctg

SEQ ID NO: 1341048 - DNA, 25 bp, Homo sapien
ttcatttgacaacccctggtccagt

SEQ ID NO: 1341049 - DNA, 25 bp, Homo sapien
aaccaaaatagtggtcatgaccttc

SEQ ID NO: 1341050 - DNA, 25 bp, Homo sapien
ttcccttccggaggttgctgagcag

SEQ ID NO: 1341051 - DNA, 25 bp, Homo sapien
tgttggcccgctcagtggactgctt

SEQ ID NO: 1341052 - DNA, 25 bp, Homo sapien
ccttgctgattgctgaggaggtcct

SEQ ID NO: 1341053 - DNA, 25 bp, Homo sapien
tcctgtcagaagagtgtccgcatca

SEQ ID NO: 1341054 - DNA, 25 bp, Homo sapien
tgggcagcagtagcaatccatcctg

SEQ ID NO: 1341055 - DNA, 25 bp, Homo sapien
catcctgtgtgagcagatggcactg

SEQ ID NO: 1341056 - DNA, 25 bp, Homo sapien
aatccatcctgtgtgagcagatggc

SEQ ID NO: 1341057 - DNA, 25 bp, Homo sapien
agagggaagactctcatgggcagca

SEQ ID NO: 1341058 - DNA, 25 bp, Homo sapien
gccccttgagatgcgtgtatgtgtg

SEQ ID NO: 1341059 - DNA, 25 bp, Homo sapien
ggccccttgagatgcgtgtatgtgt

SEQ ID NO: 1341060 - DNA, 25 bp, Homo sapien
aggccccttgagatgcgtgtatgtg

SEQ ID NO: 1341061 - DNA, 25 bp, Homo sapien
caggccccttgagatgcgtgtatgt

SEQ ID NO: 1341062 - DNA, 25 bp, Homo sapien
caagggaattgagctcatttacagg

SEQ ID NO: 1341063 - DNA, 25 bp, Homo sapien
tacttcagggtagagtggtcttaca

SEQ ID NO: 1341064 - DNA, 25 bp, Homo sapien
gatgttttggcgaagggatgatacc

SEQ ID NO: 1341065 - DNA, 25 bp, Homo sapien
tgagcaaggcttctcctagttctgt

SEQ ID NO: 1341066 - DNA, 25 bp, Homo sapien
ctttggaatcgaggtgatgatctgg

SEQ ID NO: 1341067 - DNA, 25 bp, Homo sapien
gctgacttctggcatgtacttttcc

SEQ ID NO: 1341068 - DNA, 25 bp, Homo sapien
tctctcataggttactgcacagctg

SEQ ID NO: 1341069 - DNA, 25 bp, Homo sapien
gggtgaaacaggagtagctctctca

SEQ ID NO: 1341070 - DNA, 25 bp, Homo sapien
gaattatccagggcttctctttatc

SEQ ID NO: 1341071 - DNA, 25 bp, Homo sapien
ttatccagggcttctctttatcagc

SEQ ID NO: 1341072 - DNA, 25 bp, Homo sapien
attatccagggcttctctttatcag

SEQ ID NO: 1341073 - DNA, 25 bp, Homo sapien
aattatccagggcttctctttatca

SEQ ID NO: 1341074 - DNA, 25 bp, Homo sapien
gaagttgcccttctgaactgccctt

SEQ ID NO: 1341075 - DNA, 25 bp, Homo sapien
tgatgtcgcatagccttttcacaag

SEQ ID NO: 1341076 - DNA, 25 bp, Homo sapien
cccaggcggatgttggaagttgccc

SEQ ID NO: 1341077 - DNA, 25 bp, Homo sapien
tcatttccatcaggcggagggcttg

SEQ ID NO: 1341078 - DNA, 25 bp, Homo sapien
ctgcccttccttgggttcttggcat

SEQ ID NO: 1341079 - DNA, 25 bp, Homo sapien
tgcttcagctgcccttccttgggtt

SEQ ID NO: 1341080 - DNA, 25 bp, Homo sapien
gctgcccttccttgggttcttggca

SEQ ID NO: 1341081 - DNA, 25 bp, Homo sapien
ctcctgcttcagctgcccttccttg

SEQ ID NO: 1341082 - DNA, 25 bp, Homo sapien
gagaagtacacctgaattgctttga

SEQ ID NO: 1341083 - DNA, 25 bp, Homo sapien
ttgctttgatttgtttagcccaact

SEQ ID NO: 1341084 - DNA, 25 bp, Homo sapien
gattggtgtgagaagtacacctgaa

SEQ ID NO: 1341085 - DNA, 25 bp, Homo sapien
tcttggcggctgattggtgtgagaa

SEQ ID NO: 1341086 - DNA, 25 bp, Homo sapien
gatttagatttctcaagtcgttttg

SEQ ID NO: 1341087 - DNA, 25 bp, Homo sapien
tttagatttctcaagtcgttttgta

SEQ ID NO: 1341088 - DNA, 25 bp, Homo sapien
agatttctcaagtcgttttgtaagc

SEQ ID NO: 1341089 - DNA, 25 bp, Homo sapien
aagatttagatttctcaagtcgttt

SEQ ID NO: 1341090 - DNA, 25 bp, Homo sapien
ttgaaaagccttaccactgagttgc

SEQ ID NO: 1341091 - DNA, 25 bp, Homo sapien
cctgctgacgcagagattctcataa

SEQ ID NO: 1341092 - DNA, 25 bp, Homo sapien
ttttgcatttgtccagacctgctga

SEQ ID NO: 1341093 - DNA, 25 bp, Homo sapien
ctgaagtccaacacagacgctttat

SEQ ID NO: 1341094 - DNA, 25 bp, Homo sapien
tctctgtatgcactgagaactgagc

SEQ ID NO: 1341095 - DNA, 25 bp, Homo sapien
ggtggccaccttgaataattcttgc

SEQ ID NO: 1341096 - DNA, 25 bp, Homo sapien
gatgtcccagtgaatcctctgtcaa

SEQ ID NO: 1341097 - DNA, 25 bp, Homo sapien
gattctaataactgagagcgatggg

SEQ ID NO: 1341098 - DNA, 25 bp, Homo sapien
ccagcggttgagcagtttggtctca

SEQ ID NO: 1341099 - DNA, 25 bp, Homo sapien
cgctagttgagaccaaaaagagaca

SEQ ID NO: 1341100 - DNA, 25 bp, Homo sapien
ttggtctcacctccctcgctagttg

SEQ ID NO: 1341101 - DNA, 25 bp, Homo sapien
aattctagccaacattgagtcactc

SEQ ID NO: 1341102 - DNA, 25 bp, Homo sapien
gcttggttctgcttatggcctcaca

SEQ ID NO: 1341103 - DNA, 25 bp, Homo sapien
tctaagatgccaacctgacctcgca

SEQ ID NO: 1341104 - DNA, 25 bp, Homo sapien
ctaattgtgtccaagcaaccaaggg

SEQ ID NO: 1341105 - DNA, 25 bp, Homo sapien
tggtgaccagtgtagccaggactcc

SEQ ID NO: 1341106 - DNA, 25 bp, Homo sapien
gattgtgccccgaagtggcctttac

SEQ ID NO: 1341107 - DNA, 25 bp, Homo sapien
ggattgtgccccgaagtggccttta

SEQ ID NO: 1341108 - DNA, 25 bp, Homo sapien
tccattggattgtgccccgaagtgg

SEQ ID NO: 1341109 - DNA, 25 bp, Homo sapien
tttggtgtccattggattgtgcccc

SEQ ID NO: 1341110 - DNA, 25 bp, Homo sapien
caaatcctcatcaattacatatgta

SEQ ID NO: 1341111 - DNA, 25 bp, Homo sapien
tatgtaataatctaaacttgcctcc

SEQ ID NO: 1341112 - DNA, 25 bp, Homo sapien
catgcattggctaatcaaatcctca

SEQ ID NO: 1341113 - DNA, 25 bp, Homo sapien
catgtacctgtagggattaggaaac

SEQ ID NO: 1341114 - DNA, 25 bp, Homo sapien
gagtcacactggtagttgcacactg

SEQ ID NO: 1341115 - DNA, 25 bp, Homo sapien
cagagggcgtgtctcatctgtactc

SEQ ID NO: 1341116 - DNA, 25 bp, Homo sapien
caggaaatgggcactcagagtcaca

SEQ ID NO: 1341117 - DNA, 25 bp, Homo sapien
tgcacactgtatctacagagggcgt

SEQ ID NO: 1341118 - DNA, 25 bp, Homo sapien
aatgtcagctcaagtttcccagaag

SEQ ID NO: 1341119 - DNA, 25 bp, Homo sapien
gctccaaggatattagggcttaaag

SEQ ID NO: 1341120 - DNA, 25 bp, Homo sapien
agagtgcttttcctcggtgggacag

SEQ ID NO: 1341121 - DNA, 25 bp, Homo sapien
cccagaagtcgtgtgtttatgatga

SEQ ID NO: 1341122 - DNA, 25 bp, Homo sapien
ccgctgataatactttcctgaataa

SEQ ID NO: 1341123 - DNA, 25 bp, Homo sapien
tacgcttatacacgcacatgactgc

SEQ ID NO: 1341124 - DNA, 25 bp, Homo sapien
taatggttttcatatccgctgataa

SEQ ID NO: 1341125 - DNA, 25 bp, Homo sapien
catgactgccctaaaagtaggtttc

SEQ ID NO: 1341126 - DNA, 25 bp, Homo sapien
cagagactgtggcaaaagcctgcca

SEQ ID NO: 1341127 - DNA, 25 bp, Homo sapien
gaccacattcttttcccatggactc

SEQ ID NO: 1341128 - DNA, 25 bp, Homo sapien
gtggcaaaagcctgccactggatct

SEQ ID NO: 1341129 - DNA, 25 bp, Homo sapien
tcagaccacattcttttcccatgga

SEQ ID NO: 1341130 - DNA, 25 bp, Homo sapien
gagcctggatgcctaggcgacgccc

SEQ ID NO: 1341131 - DNA, 25 bp, Homo sapien
ccctgggagcctggatgcctaggcg

SEQ ID NO: 1341132 - DNA, 25 bp, Homo sapien
cctggatgcctaggcgacgcccgaa

SEQ ID NO: 1341133 - DNA, 25 bp, Homo sapien
ctctcgggtcgcgttcccggccctg

SEQ ID NO: 1341134 - DNA, 25 bp, Homo sapien
gctgatgtcggcacagtctcctttc

SEQ ID NO: 1341135 - DNA, 25 bp, Homo sapien
ctgatgtcggcacagtctcctttcc

SEQ ID NO: 1341136 - DNA, 25 bp, Homo sapien
gcgcaggggctgatgtcggcacagt

SEQ ID NO: 1341137 - DNA, 25 bp, Homo sapien
gcaggggctgatgtcggcacagtct

SEQ ID NO: 1341138 - DNA, 25 bp, Homo sapien
ctgtagagcgtttgtcactgttcat

SEQ ID NO: 1341139 - DNA, 25 bp, Homo sapien
agttcagtgtgctctgggaagcaac

SEQ ID NO: 1341140 - DNA, 25 bp, Homo sapien
ttaaaagttcagtgtgctctgggaa

SEQ ID NO: 1341141 - DNA, 25 bp, Homo sapien
aaagttcagtgtgctctgggaagca

SEQ ID NO: 1341142 - DNA, 25 bp, Homo sapien
taaaagttcagtgtgctctgggaag

SEQ ID NO: 1341143 - DNA, 25 bp, Homo sapien
tgaggaagttaacccttctgggtca

SEQ ID NO: 1341144 - DNA, 25 bp, Homo sapien
tctgggtcaaccagaaggtcttctg

SEQ ID NO: 1341145 - DNA, 25 bp, Homo sapien
gctggaggcttctttgaggaagtta

SEQ ID NO: 1341146 - DNA, 25 bp, Homo sapien
tggaggcttctttgaggaagttaac

SEQ ID NO: 1341147 - DNA, 25 bp, Homo sapien
aggaacatagcttctagggactcct

SEQ ID NO: 1341148 - DNA, 25 bp, Homo sapien
ggagaaggaacatagcttctaggga

SEQ ID NO: 1341149 - DNA, 25 bp, Homo sapien
catagcttctagggactcctgtcat

SEQ ID NO: 1341150 - DNA, 25 bp, Homo sapien
gaaggaacatagcttctagggactc

SEQ ID NO: 1341151 - DNA, 25 bp, Homo sapien
taccacctgttctgcatacaggtgc

SEQ ID NO: 1341152 - DNA, 25 bp, Homo sapien
ccacaatctttgggtctgtggctct

SEQ ID NO: 1341153 - DNA, 25 bp, Homo sapien
accacctgttctgcatacaggtgca

SEQ ID NO: 1341154 - DNA, 25 bp, Homo sapien
tcctaccacctgttctgcatacagg

SEQ ID NO: 1341155 - DNA, 25 bp, Homo sapien
tcctggtcgaagagacgtctggctc

SEQ ID NO: 1341156 - DNA, 25 bp, Homo sapien
gagtcttgagatactctccaagtgg

SEQ ID NO: 1341157 - DNA, 25 bp, Homo sapien
taagcaagagcttccaagtaagcac

SEQ ID NO: 1341158 - DNA, 25 bp, Homo sapien
ggagtgagtttcatcatgggcatac

SEQ ID NO: 1341159 - DNA, 25 bp, Homo sapien
ttatggacgagggaattgaagcttg

SEQ ID NO: 1341160 - DNA, 25 bp, Homo sapien
tgttcacgtttcagtatgtctgtta

SEQ ID NO: 1341161 - DNA, 25 bp, Homo sapien
gcttgagaacctctgatcaagttca

SEQ ID NO: 1341162 - DNA, 25 bp, Homo sapien
gttcagcctcttcatgttatggacg

SEQ ID NO: 1341163 - DNA, 25 bp, Homo sapien
cacagcttggaattggtagtgtcat

SEQ ID NO: 1341164 - DNA, 25 bp, Homo sapien
tacattctcaaaggctagatgttgg

SEQ ID NO: 1341165 - DNA, 25 bp, Homo sapien
tattaatgttaagtcagaatgttaa

SEQ ID NO: 1341166 - DNA, 25 bp, Homo sapien
aggctagatgttgggtttccagagt

SEQ ID NO: 1341167 - DNA, 25 bp, Homo sapien
gctcctctttccagtagtagcttcc

SEQ ID NO: 1341168 - DNA, 25 bp, Homo sapien
tgactctaggtctccttcccactcg

SEQ ID NO: 1341169 - DNA, 25 bp, Homo sapien
ttcccactcgctgcctataacaagt

SEQ ID NO: 1341170 - DNA, 25 bp, Homo sapien
caagtttccagagcatcctgtgttt

SEQ ID NO: 1341171 - DNA, 25 bp, Homo sapien
ctcagcttcccaactctcagtggcc

SEQ ID NO: 1341172 - DNA, 25 bp, Homo sapien
tgtgatttccataggcctctatact

SEQ ID NO: 1341173 - DNA, 25 bp, Homo sapien
taggcctctatacttctgacctcct

SEQ ID NO: 1341174 - DNA, 25 bp, Homo sapien
tttccataggcctctatacttctga

SEQ ID NO: 1341175 - DNA, 25 bp, Homo sapien
gagtgagactgttcagtctgaagcc

SEQ ID NO: 1341176 - DNA, 25 bp, Homo sapien
tttctccatctctgcctttctgttt

SEQ ID NO: 1341177 - DNA, 25 bp, Homo sapien
tttctgtttcttgcagaagccaact

SEQ ID NO: 1341178 - DNA, 25 bp, Homo sapien
ctgcctttctgtttcttgcagaagc

SEQ ID NO: 1341179 - DNA, 25 bp, Homo sapien
gcctttctgtttcttgcagaagcca

SEQ ID NO: 1341180 - DNA, 25 bp, Homo sapien
tactctgagagatattagccttcct

SEQ ID NO: 1341181 - DNA, 25 bp, Homo sapien
tgtttcacagatagttcaggaacac

SEQ ID NO: 1341182 - DNA, 25 bp, Homo sapien
caaacttctatgtaattcaacccaa

SEQ ID NO: 1341183 - DNA, 25 bp, Homo sapien
caggaacacaggtacagtgacaaac

SEQ ID NO: 1341184 - DNA, 25 bp, Homo sapien
gaagctaatagtctcagaaccactg

SEQ ID NO: 1341185 - DNA, 25 bp, Homo sapien
gatagctgtactagggagttcactg

SEQ ID NO: 1341186 - DNA, 25 bp, Homo sapien
tagactgagctatgttgaaggacaa

SEQ ID NO: 1341187 - DNA, 25 bp, Homo sapien
ttacacgcaaaggaagggatagctg

SEQ ID NO: 1341188 - DNA, 25 bp, Homo sapien
ccaaaagtgatgtggcatctgctgt

SEQ ID NO: 1341189 - DNA, 25 bp, Homo sapien
ctgtgacaggatagcatttggaatg

SEQ ID NO: 1341190 - DNA, 25 bp, Homo sapien
ttgatctcttagcccaccccaaaag

SEQ ID NO: 1341191 - DNA, 25 bp, Homo sapien
catctgctgtgacaggatagcattt

SEQ ID NO: 1341192 - DNA, 25 bp, Homo sapien
taagacttaccagagtttatccagg

SEQ ID NO: 1341193 - DNA, 25 bp, Homo sapien
tggcggatctgaaaatgcgtcggac

SEQ ID NO: 1341194 - DNA, 25 bp, Homo sapien
tcaaatgactcttgacgggcgcctc

SEQ ID NO: 1341195 - DNA, 25 bp, Homo sapien
tccaggtcctaaggtaaatggtggc

SEQ ID NO: 1341196 - DNA, 25 bp, Homo sapien
ggcccagaggacgcgcgcccccgcc

SEQ ID NO: 1341197 - DNA, 25 bp, Homo sapien
tggcccagaggacgcgcgcccccgc

SEQ ID NO: 1341198 - DNA, 25 bp, Homo sapien
ccagggagctacgaaacgttagatc

SEQ ID NO: 1341199 - DNA, 25 bp, Homo sapien
taccacctgggtgtcgagtctctaa

SEQ ID NO: 1341200 - DNA, 25 bp, Homo sapien
catggacagctcaggtagcgctgcc

SEQ ID NO: 1341201 - DNA, 25 bp, Homo sapien
tatgaatctttgcagctggtggaca

SEQ ID NO: 1341202 - DNA, 25 bp, Homo sapien
cacaaagggacttgacaatgggcag

SEQ ID NO: 1341203 - DNA, 25 bp, Homo sapien
agtttggttcttcgggctcatgctc

SEQ ID NO: 1341204 - DNA, 25 bp, Homo sapien
gcatatttacagtttggttcttcgg

SEQ ID NO: 1341205 - DNA, 25 bp, Homo sapien
acaccacaaagggacttgacaatgg

SEQ ID NO: 1341206 - DNA, 25 bp, Homo sapien
gaggtctgaggagcactcaccttcc

SEQ ID NO: 1341207 - DNA, 25 bp, Homo sapien
tctgactctcttttgatttaggcta

SEQ ID NO: 1341208 - DNA, 25 bp, Homo sapien
ctctgactctcttttgatttaggct

SEQ ID NO: 1341209 - DNA, 25 bp, Homo sapien
tattagccttctttacaataaagcg

SEQ ID NO: 1341210 - DNA, 25 bp, Homo sapien
catgttgtatttcaagaaatctcca

SEQ ID NO: 1341211 - DNA, 25 bp, Homo sapien
taaagcgcatgttgtatttcaagaa

SEQ ID NO: 1341212 - DNA, 25 bp, Homo sapien
tctttacaataaagcgcatgttgta

SEQ ID NO: 1341213 - DNA, 25 bp, Homo sapien
tgcctgccagtgcttagctcccctg

SEQ ID NO: 1341214 - DNA, 25 bp, Homo sapien
cctgccagtgcttagctcccctgga

SEQ ID NO: 1341215 - DNA, 25 bp, Homo sapien
ctctgcctgccagtgcttagctccc

SEQ ID NO: 1341216 - DNA, 25 bp, Homo sapien
tgccagtgcttagctcccctggagc

SEQ ID NO: 1341217 - DNA, 25 bp, Homo sapien
gtggaagtgtttttgtggagtccca

SEQ ID NO: 1341218 - DNA, 25 bp, Homo sapien
cagttggtgccaagtgttggttgaa

SEQ ID NO: 1341219 - DNA, 25 bp, Homo sapien
gctgatgtcccaagaactgcagttg

SEQ ID NO: 1341220 - DNA, 25 bp, Homo sapien
caagaactgcagttggtgccaagtt

SEQ ID NO: 1341221 - DNA, 25 bp, Homo sapien
taaggactgtggaacatcctacaca

SEQ ID NO: 1341222 - DNA, 25 bp, Homo sapien
gaaaggcatctatcagtgtaactaa

SEQ ID NO: 1341223 - DNA, 25 bp, Homo sapien
gactggaggctaagtcagtgccatt

SEQ ID NO: 1341224 - DNA, 25 bp, Homo sapien
tgtgactggacttaagggtttacca

SEQ ID NO: 1341225 - DNA, 25 bp, Homo sapien
tggatacctagaacaacagttcctg

SEQ ID NO: 1341226 - DNA, 25 bp, Homo sapien
caacagttcctgacatagataatca

SEQ ID NO: 1341227 - DNA, 25 bp, Homo sapien
ttttggatacctagaacaacagttc

SEQ ID NO: 1341228 - DNA, 25 bp, Homo sapien
agaacaacagttcctgacatagata

SEQ ID NO: 1341229 - DNA, 25 bp, Homo sapien
catctaattttgctgtaaggcttaa

SEQ ID NO: 1341230 - DNA, 25 bp, Homo sapien
cattcttagttggaaacaggtggta

SEQ ID NO: 1341231 - DNA, 25 bp, Homo sapien
tatcaggaccaatatctagtgtgga

SEQ ID NO: 1341232 - DNA, 25 bp, Homo sapien
ggtaaagtagtttggcctgttcaca

SEQ ID NO: 1341233 - DNA, 25 bp, Homo sapien
tagttcggccatgccttcagagtgc

SEQ ID NO: 1341234 - DNA, 25 bp, Homo sapien
tagacctgcctaacagtagttcggc

SEQ ID NO: 1341235 - DNA, 25 bp, Homo sapien
aaatgggatcatggactcaactctc

SEQ ID NO: 1341236 - DNA, 25 bp, Homo sapien
gcctgtgtctgggacctccatttca

SEQ ID NO: 1341237 - DNA, 25 bp, Homo sapien
gcagataacgctgaagcaggcctct

SEQ ID NO: 1341238 - DNA, 25 bp, Homo sapien
tattaacgcagtcttgtaggcagct

SEQ ID NO: 1341239 - DNA, 25 bp, Homo sapien
catgctattaaaagtgtggcccaca

SEQ ID NO: 1341240 - DNA, 25 bp, Homo sapien
ttcttcccgaagagatataggagcc

SEQ ID NO: 1341241 - DNA, 25 bp, Homo sapien
gaagtaccttattgcaaaaatccca

SEQ ID NO: 1341242 - DNA, 25 bp, Homo sapien
aaaatcccactgagtaatagctcat

SEQ ID NO: 1341243 - DNA, 25 bp, Homo sapien
cagattttgtatcccaatagaacca

SEQ ID NO: 1341244 - DNA, 25 bp, Homo sapien
ccaagcatagtaattagttcacaac

SEQ ID NO: 1341245 - DNA, 25 bp, Homo sapien
tacaggtggtgaccctaggagctga

SEQ ID NO: 1341246 - DNA, 25 bp, Homo sapien
gcactcaggaaatagcttggtccct

SEQ ID NO: 1341247 - DNA, 25 bp, Homo sapien
tagcattgagcttggtgtgccacat

SEQ ID NO: 1341248 - DNA, 25 bp, Homo sapien
aaccacttgagtgtctgtccctggg

SEQ ID NO: 1341249 - DNA, 25 bp, Homo sapien
tttcttcacaactacagccctggtg

SEQ ID NO: 1341250 - DNA, 25 bp, Homo sapien
cgaacaccagcctcccatcacaggt

SEQ ID NO: 1341251 - DNA, 25 bp, Homo sapien
cagcctcccatcacaggtcttgatt

SEQ ID NO: 1341252 - DNA, 25 bp, Homo sapien
atcacaggtcttgattttcttcaca

SEQ ID NO: 1341253 - DNA, 25 bp, Homo sapien
ggtttgagagcagatgttgttttaa

SEQ ID NO: 1341254 - DNA, 25 bp, Homo sapien
agatttctcttgtgacccatgtgtt

SEQ ID NO: 1341255 - DNA, 25 bp, Homo sapien
tattgtggtttgagagcagatgttg

SEQ ID NO: 1341256 - DNA, 25 bp, Homo sapien
gatttctcttgtgacccatgtgtta

SEQ ID NO: 1341257 - DNA, 25 bp, Homo sapien
agtgggtacttaatctgttcagctc

SEQ ID NO: 1341258 - DNA, 25 bp, Homo sapien
ttagtgggtacttaatctgttcagc

SEQ ID NO: 1341259 - DNA, 25 bp, Homo sapien
tagtgggtacttaatctgttcagct

SEQ ID NO: 1341260 - DNA, 25 bp, Homo sapien
gtgggtacttaatctgttcagctca

SEQ ID NO: 1341261 - DNA, 25 bp, Homo sapien
ggtgggccatatggctgtccagata

SEQ ID NO: 1341262 - DNA, 25 bp, Homo sapien
agaacatgaggtgggccatatggct

SEQ ID NO: 1341263 - DNA, 25 bp, Homo sapien
atgaggtgggccatatggctgtcca

SEQ ID NO: 1341264 - DNA, 25 bp, Homo sapien
acatgaggtgggccatatggctgtc

SEQ ID NO: 1341265 - DNA, 25 bp, Homo sapien
ttgagatctctgaatccttacaata

SEQ ID NO: 1341266 - DNA, 25 bp, Homo sapien
tccttacaataatcaccgtcccacc

SEQ ID NO: 1341267 - DNA, 25 bp, Homo sapien
tccatgatggtcagctgttcttcat

SEQ ID NO: 1341268 - DNA, 25 bp, Homo sapien
tgatggctttccagcccgtggctcc

SEQ ID NO: 1341269 - DNA, 25 bp, Homo sapien
tcttttcctgtgagagcaaattccc

SEQ ID NO: 1341270 - DNA, 25 bp, Homo sapien
tggtttcaatctgggctgttgtaag

SEQ ID NO: 1341271 - DNA, 25 bp, Homo sapien
tccccgttcaatcctagtggtttca

SEQ ID NO: 1341272 - DNA, 25 bp, Homo sapien
ggtgtagagactgttttctctaatt

SEQ ID NO: 1341273 - DNA, 25 bp, Homo sapien
gattcctggcctttcgtatagcttc

SEQ ID NO: 1341274 - DNA, 25 bp, Homo sapien
tgttgtatgggaatgctttcctctc

SEQ ID NO: 1341275 - DNA, 25 bp, Homo sapien
cttgttgtatgggaatgctttcctc

SEQ ID NO: 1341276 - DNA, 25 bp, Homo sapien
ctttcgtatagcttcagtggttatg

SEQ ID NO: 1341277 - DNA, 25 bp, Homo sapien
ctgtcttgagctgtccaatagtaac

SEQ ID NO: 1341278 - DNA, 25 bp, Homo sapien
tccaatagtaactttgtcctgcagg

SEQ ID NO: 1341279 - DNA, 25 bp, Homo sapien
gattgcttttacatgaatgtcaggg

SEQ ID NO: 1341280 - DNA, 25 bp, Homo sapien
ctagattgttcaaggctagacaccc

SEQ ID NO: 1341281 - DNA, 25 bp, Homo sapien
tgagtatcattagaacattgtctgg

SEQ ID NO: 1341282 - DNA, 25 bp, Homo sapien
tatcattagaacattgtctggttca

SEQ ID NO: 1341283 - DNA, 25 bp, Homo sapien
attagaacattgtctggttcattca

SEQ ID NO: 1341284 - DNA, 25 bp, Homo sapien
ggaatcaaggcacagttttctttcc

SEQ ID NO: 1341285 - DNA, 25 bp, Homo sapien
taataccgttgaggagcaatgtgct

SEQ ID NO: 1341286 - DNA, 25 bp, Homo sapien
caagacagtcaggtttagggtcacg

SEQ ID NO: 1341287 - DNA, 25 bp, Homo sapien
tgggcaatagctgaacgaacactct

SEQ ID NO: 1341288 - DNA, 25 bp, Homo sapien
tagggtcacgattgtcaggtccatg

SEQ ID NO: 1341289 - DNA, 25 bp, Homo sapien
gaggagccatcacagattgccatag

SEQ ID NO: 1341290 - DNA, 25 bp, Homo sapien
ggaggagccatcacagattgccata

SEQ ID NO: 1341291 - DNA, 25 bp, Homo sapien
tccagctgacgtctggtgtagccaa

SEQ ID NO: 1341292 - DNA, 25 bp, Homo sapien
tggtgtagccaattattttccccaa

SEQ ID NO: 1341293 - DNA, 25 bp, Homo sapien
cactgtccagctgacgtctggtgta

SEQ ID NO: 1341294 - DNA, 25 bp, Homo sapien
gctgacgtctggtgtagccaattat

SEQ ID NO: 1341295 - DNA, 25 bp, Homo sapien
gtgggtctgatgagctagtttctgt

SEQ ID NO: 1341296 - DNA, 25 bp, Homo sapien
tctgatgagctagtttctgtcatac

SEQ ID NO: 1341297 - DNA, 25 bp, Homo sapien
ccatggcactccacgagttgtggtg

SEQ ID NO: 1341298 - DNA, 25 bp, Homo sapien
ctccacgagttgtggtgggtctgat

SEQ ID NO: 1341299 - DNA, 25 bp, Homo sapien
gatttgggtccccatgctcacaagt

SEQ ID NO: 1341300 - DNA, 25 bp, Homo sapien
taagcactagtaggcctcctttcca

SEQ ID NO: 1341301 - DNA, 25 bp, Homo sapien
ccatgctcacaagtcttaagcacta

SEQ ID NO: 1341302 - DNA, 25 bp, Homo sapien
gatctgatttgggtccccatgctca

SEQ ID NO: 1341303 - DNA, 25 bp, Homo sapien
aacatgctcactgatggttccaaag

SEQ ID NO: 1341304 - DNA, 25 bp, Homo sapien
tgggatttgtcatgggtcccagata

SEQ ID NO: 1341305 - DNA, 25 bp, Homo sapien
tgatagagccttccaagttgaagga

SEQ ID NO: 1341306 - DNA, 25 bp, Homo sapien
ggcattttggccctctactgataaa

SEQ ID NO: 1341307 - DNA, 25 bp, Homo sapien
tctccagattaagtcttaaggaaaa

SEQ ID NO: 1341308 - DNA, 25 bp, Homo sapien
taagtcttaaggaaaaatactgcgc

SEQ ID NO: 1341309 - DNA, 25 bp, Homo sapien
ttcctctccagattaagtcttaagg

SEQ ID NO: 1341310 - DNA, 25 bp, Homo sapien
ttttcctctccagattaagtcttaa

SEQ ID NO: 1341311 - DNA, 25 bp, Homo sapien
catgtgccagctgcaaaaagttgtg

SEQ ID NO: 1341312 - DNA, 25 bp, Homo sapien
attcatccagccagacatgtgccag

SEQ ID NO: 1341313 - DNA, 25 bp, Homo sapien
cagacatgtgccagctgcaaaaagt

SEQ ID NO: 1341314 - DNA, 25 bp, Homo sapien
tttattcatccagccagacatgtgc

SEQ ID NO: 1341315 - DNA, 25 bp, Homo sapien
tactgtctgttcctggcaaacaatc

SEQ ID NO: 1341316 - DNA, 25 bp, Homo sapien
agtatcatactgtccaagttcctgg

SEQ ID NO: 1341317 - DNA, 25 bp, Homo sapien
ccagatatccatgccagtatcatac

SEQ ID NO: 1341318 - DNA, 25 bp, Homo sapien
ttttctcctctccagatatccatgc

SEQ ID NO: 1341319 - DNA, 25 bp, Homo sapien
ggtcgctaacaacatccataaagat

SEQ ID NO: 1341320 - DNA, 25 bp, Homo sapien
caagtcatcaaggtcgctaacaaca

SEQ ID NO: 1341321 - DNA, 25 bp, Homo sapien
tgaagcaggtttgctggcatgcaat

SEQ ID NO: 1341322 - DNA, 25 bp, Homo sapien
atattcatctcgtcctcctttcaag

SEQ ID NO: 1341323 - DNA, 25 bp, Homo sapien
tagttctttgtctacccctgcacag

SEQ ID NO: 1341324 - DNA, 25 bp, Homo sapien
taagacttttcatgctcttctgtac

SEQ ID NO: 1341325 - DNA, 25 bp, Homo sapien
tgaccaggctcaggttcttaagact

SEQ ID NO: 1341326 - DNA, 25 bp, Homo sapien
tttctaccaggtgtgtgttataggt

SEQ ID NO: 1341327 - DNA, 25 bp, Homo sapien
gtgaactgggcatgcgctcctcatg

SEQ ID NO: 1341328 - DNA, 25 bp, Homo sapien
atcagcgcagcattagattcttaga

SEQ ID NO: 1341329 - DNA, 25 bp, Homo sapien
cagcgcagcattagattcttagagg

SEQ ID NO: 1341330 - DNA, 25 bp, Homo sapien
ctgggcatgcgctcctcatgagaat

SEQ ID NO: 1341331 - DNA, 25 bp, Homo sapien
cagcctttactgttctgatattcca

SEQ ID NO: 1341332 - DNA, 25 bp, Homo sapien
tgtatactaattgactatttttgta

SEQ ID NO: 1341333 - DNA, 25 bp, Homo sapien
attcatcccatatctgagcccaaag

SEQ ID NO: 1341334 - DNA, 25 bp, Homo sapien
tttaaaggagcagcctttactgttc

SEQ ID NO: 1341335 - DNA, 25 bp, Homo sapien
ctcataatgtcccttgaagcaaagc

SEQ ID NO: 1341336 - DNA, 25 bp, Homo sapien
cataatgtcccttgaagcaaagcta

SEQ ID NO: 1341337 - DNA, 25 bp, Homo sapien
tcataatgtcccttgaagcaaagct

SEQ ID NO: 1341338 - DNA, 25 bp, Homo sapien
tctcataatgtcccttgaagcaaag

SEQ ID NO: 1341339 - DNA, 25 bp, Homo sapien
tctaatagcagctgttctctatagc

SEQ ID NO: 1341340 - DNA, 25 bp, Homo sapien
tgttctaatagcagctgttctctat

SEQ ID NO: 1341341 - DNA, 25 bp, Homo sapien
gcctgttctaatagcagctgttctc

SEQ ID NO: 1341342 - DNA, 25 bp, Homo sapien
gagcctgttctaatagcagctgttc

SEQ ID NO: 1341343 - DNA, 25 bp, Homo sapien
ggcaaatttaccatccaccctatgt

SEQ ID NO: 1341344 - DNA, 25 bp, Homo sapien
catagggctaatagccttatatttt

SEQ ID NO: 1341345 - DNA, 25 bp, Homo sapien
atttcatagggctaatagccttata

SEQ ID NO: 1341346 - DNA, 25 bp, Homo sapien
ttatattactaaacaggaaaaggca

SEQ ID NO: 1341347 - DNA, 25 bp, Homo sapien
aaatccagatctatctgactcaaat

SEQ ID NO: 1341348 - DNA, 25 bp, Homo sapien
tgatacccgtgccatcagttccata

SEQ ID NO: 1341349 - DNA, 25 bp, Homo sapien
gactcaaattgatacccgtgccatc

SEQ ID NO: 1341350 - DNA, 25 bp, Homo sapien
tctatctgactcaaattgatacccg

SEQ ID NO: 1341351 - DNA, 25 bp, Homo sapien
cgaggatttactcccacacattatt

SEQ ID NO: 1341352 - DNA, 25 bp, Homo sapien
gatttctggctacaacgaggattta

SEQ ID NO: 1341353 - DNA, 25 bp, Homo sapien
ccttaagtcagggttgatatgatgt

SEQ ID NO: 1341354 - DNA, 25 bp, Homo sapien
agaccacttcatgaaaaggacagtc

SEQ ID NO: 1341355 - DNA, 25 bp, Homo sapien
tgttgctagaaataccaattcgagg

SEQ ID NO: 1341356 - DNA, 25 bp, Homo sapien
ttaggaatgaaacagtagacaggct

SEQ ID NO: 1341357 - DNA, 25 bp, Homo sapien
gttccttctaggtcgtgtgttcctg

SEQ ID NO: 1341358 - DNA, 25 bp, Homo sapien
tagacaggctgactgggagcccagt

SEQ ID NO: 1341359 - DNA, 25 bp, Homo sapien
ggggtcccacacagatgggacgcgg

SEQ ID NO: 1341360 - DNA, 25 bp, Homo sapien
cccacacagatgggacgcggcttag

SEQ ID NO: 1341361 - DNA, 25 bp, Homo sapien
tcccacacagatgggacgcggctta

SEQ ID NO: 1341362 - DNA, 25 bp, Homo sapien
ggtcccacacagatgggacgcggct

SEQ ID NO: 1341363 - DNA, 25 bp, Homo sapien
tcagagctcaacacagtccttcagc

SEQ ID NO: 1341364 - DNA, 25 bp, Homo sapien
tctgtttctgagactccattgaaaa

SEQ ID NO: 1341365 - DNA, 25 bp, Homo sapien
agtgtgcctttgtgagtagaatcct

SEQ ID NO: 1341366 - DNA, 25 bp, Homo sapien
tctcctataggatcaaggttaaaat

SEQ ID NO: 1341367 - DNA, 25 bp, Homo sapien
tttctctgggtgatggtcacaagtg

SEQ ID NO: 1341368 - DNA, 25 bp, Homo sapien
aagctctgaatcctgcatctgcttt

SEQ ID NO: 1341369 - DNA, 25 bp, Homo sapien
ggtcctgtatttctaaagcatctat

SEQ ID NO: 1341370 - DNA, 25 bp, Homo sapien
gctgtgctggctcttgcagatatct

SEQ ID NO: 1341371 - DNA, 25 bp, Homo sapien
tgctttgtctccgacctctctggct

SEQ ID NO: 1341372 - DNA, 25 bp, Homo sapien
taaaagagctcaaccataaaatcag

SEQ ID NO: 1341373 - DNA, 25 bp, Homo sapien
ccctcaaccgtctcactctcttcat

SEQ ID NO: 1341374 - DNA, 25 bp, Homo sapien
gatagtgcagtaatgaatacctaaa

SEQ ID NO: 1341375 - DNA, 25 bp, Homo sapien
agtgacatgaagccttggcttctaa

SEQ ID NO: 1341376 - DNA, 25 bp, Homo sapien
ggaacagtattgaacagtccctgaa

SEQ ID NO: 1341377 - DNA, 25 bp, Homo sapien
caccacaacgtggaggaatcagtaa

SEQ ID NO: 1341378 - DNA, 25 bp, Homo sapien
tgaacaatactgtagatccggccag

SEQ ID NO: 1341379 - DNA, 25 bp, Homo sapien
tagcagaatgaatgccccatgccct

SEQ ID NO: 1341380 - DNA, 25 bp, Homo sapien
ttttgcataccaggcacgtactctg

SEQ ID NO: 1341381 - DNA, 25 bp, Homo sapien
tgcataccaggcacgtactctgcta

SEQ ID NO: 1341382 - DNA, 25 bp, Homo sapien
caggcacgtactctgctacatgcat

SEQ ID NO: 1341383 - DNA, 25 bp, Homo sapien
tccagttttgcataccaggcacgta

SEQ ID NO: 1341384 - DNA, 25 bp, Homo sapien
atccagcaagctagccacctggcct

SEQ ID NO: 1341385 - DNA, 25 bp, Homo sapien
gccccattgagctggctatccagca

SEQ ID NO: 1341386 - DNA, 25 bp, Homo sapien
gctatccagcaagctagccacctgg

SEQ ID NO: 1341387 - DNA, 25 bp, Homo sapien
tcagccccaagtgcacatacaccaa

SEQ ID NO: 1341388 - DNA, 25 bp, Homo sapien
ttcggtctctccacacgggctggcc

SEQ ID NO: 1341389 - DNA, 25 bp, Homo sapien
tgctgctctttagctcttcggtctc

SEQ ID NO: 1341390 - DNA, 25 bp, Homo sapien
ggtctctccacacgggctggccaga

SEQ ID NO: 1341391 - DNA, 25 bp, Homo sapien
tctctccacacgggctggccagaaa

SEQ ID NO: 1341392 - DNA, 25 bp, Homo sapien
gctctttacttaagtaatagtctcc

SEQ ID NO: 1341393 - DNA, 25 bp, Homo sapien
agctctttacttaagtaatagtctc

SEQ ID NO: 1341394 - DNA, 25 bp, Homo sapien
tgttgcctgttgtataccttatggg

SEQ ID NO: 1341395 - DNA, 25 bp, Homo sapien
tatgggctactaatcccaggtacat

SEQ ID NO: 1341396 - DNA, 25 bp, Homo sapien
acagagataagtaaattgtgttgcc

SEQ ID NO: 1341397 - DNA, 25 bp, Homo sapien
gagataagtaaattgtgttgcctgt

SEQ ID NO: 1341398 - DNA, 25 bp, Homo sapien
tgcagtggccattcataggagtaat

SEQ ID NO: 1341399 - DNA, 25 bp, Homo sapien
cataggagtaatcccacttcaagca

SEQ ID NO: 1341400 - DNA, 25 bp, Homo sapien
ctgtttctaccctgggccaactcac

SEQ ID NO: 1341401 - DNA, 25 bp, Homo sapien
ccttccttaggcaattcgctggtcc

SEQ ID NO: 1341402 - DNA, 25 bp, Homo sapien
tttttcatggatatgtgaggaagtc

SEQ ID NO: 1341403 - DNA, 25 bp, Homo sapien
catggatatgtgaggaagtccattt

SEQ ID NO: 1341404 - DNA, 25 bp, Homo sapien
tgtgaggaagtccattttccttcat

SEQ ID NO: 1341405 - DNA, 25 bp, Homo sapien
ggatatgtgaggaagtccattttcc

SEQ ID NO: 1341406 - DNA, 25 bp, Homo sapien
actctgaagggaattatgtccagaa

SEQ ID NO: 1341407 - DNA, 25 bp, Homo sapien
tgagactctgaagggaattatgtcc

SEQ ID NO: 1341408 - DNA, 25 bp, Homo sapien
agactctgaagggaattatgtccag

SEQ ID NO: 1341409 - DNA, 25 bp, Homo sapien
gactctgaagggaattatgtccaga

SEQ ID NO: 1341410 - DNA, 25 bp, Homo sapien
ctgacctgttggttcaggagcactg

SEQ ID NO: 1341411 - DNA, 25 bp, Homo sapien
tcttgggaggtgatctgacctgttg

SEQ ID NO: 1341412 - DNA, 25 bp, Homo sapien
agcacctcttgggaggtgatctgac

SEQ ID NO: 1341413 - DNA, 25 bp, Homo sapien
gaggtgatctgacctgttggttcag

SEQ ID NO: 1341414 - DNA, 25 bp, Homo sapien
catggcagatgcacagcgagtgact

SEQ ID NO: 1341415 - DNA, 25 bp, Homo sapien
gagtgactgacacgttccagggacg

SEQ ID NO: 1341416 - DNA, 25 bp, Homo sapien
cactctggcgctcctttgtgcaaca

SEQ ID NO: 1341417 - DNA, 25 bp, Homo sapien
cactggctccttccacgtaatgtgc

SEQ ID NO: 1341418 - DNA, 25 bp, Homo sapien
gtctctggctttggataggcacgca

SEQ ID NO: 1341419 - DNA, 25 bp, Homo sapien
aggcacgcagggctgtgcgtaatcc

SEQ ID NO: 1341420 - DNA, 25 bp, Homo sapien
ttcaaaccaggattttcggtctctg

SEQ ID NO: 1341421 - DNA, 25 bp, Homo sapien
gcagggctgtgcgtaatccttcagc

SEQ ID NO: 1341422 - DNA, 25 bp, Homo sapien
ggtaccgtgcccgcggaatattgca

SEQ ID NO: 1341423 - DNA, 25 bp, Homo sapien
ccgtgcccgcggaatattgcaggag

SEQ ID NO: 1341424 - DNA, 25 bp, Homo sapien
gatgcagtgagctcccggctgggag

SEQ ID NO: 1341425 - DNA, 25 bp, Homo sapien
ccctggtaccgtgcccgcggaatat

SEQ ID NO: 1341426 - DNA, 25 bp, Homo sapien
gccaccgtgtctagcctgaaacatt

SEQ ID NO: 1341427 - DNA, 25 bp, Homo sapien
ccgtgtctagcctgaaacatttttt

SEQ ID NO: 1341428 - DNA, 25 bp, Homo sapien
ccaccgtgtctagcctgaaacattt

SEQ ID NO: 1341429 - DNA, 25 bp, Homo sapien
accgtgtctagcctgaaacattttt

SEQ ID NO: 1341430 - DNA, 25 bp, Homo sapien
gctgcccaagtagggttggagtggg

SEQ ID NO: 1341431 - DNA, 25 bp, Homo sapien
aagcagctgcccaagtagggttgga

SEQ ID NO: 1341432 - DNA, 25 bp, Homo sapien
caatgtgatgtggtgtcctctgaga

SEQ ID NO: 1341433 - DNA, 25 bp, Homo sapien
gccccttggttggtgtcagtagaag

SEQ ID NO: 1341434 - DNA, 25 bp, Homo sapien
tttcaggttccacagttattgttac

SEQ ID NO: 1341435 - DNA, 25 bp, Homo sapien
caggttccacagttattgttacttt

SEQ ID NO: 1341436 - DNA, 25 bp, Homo sapien
gcctttcaggttccacagttattgt

SEQ ID NO: 1341437 - DNA, 25 bp, Homo sapien
tgcctttcaggttccacagttattg

SEQ ID NO: 1341438 - DNA, 25 bp, Homo sapien
gtctccttcttagggtatggccctc

SEQ ID NO: 1341439 - DNA, 25 bp, Homo sapien
tggtctccttcttagggtatggccc

SEQ ID NO: 1341440 - DNA, 25 bp, Homo sapien
ctggtctccttcttagggtatggcc

SEQ ID NO: 1341441 - DNA, 25 bp, Homo sapien
tccttcttagggtatggccctccat

SEQ ID NO: 1341442 - DNA, 25 bp, Homo sapien
gcatctcctttctccggatgggtgt

SEQ ID NO: 1341443 - DNA, 25 bp, Homo sapien
tagtatctttaagctgtgcctggct

SEQ ID NO: 1341444 - DNA, 25 bp, Homo sapien
ggtgtctcattacaggaaaccatga

SEQ ID NO: 1341445 - DNA, 25 bp, Homo sapien
attaccatcttgttcttcaaagcca

SEQ ID NO: 1341446 - DNA, 25 bp, Homo sapien
atcaatttttcagaagagggtccca

SEQ ID NO: 1341447 - DNA, 25 bp, Homo sapien
caatttttcagaagagggtcccaat

SEQ ID NO: 1341448 - DNA, 25 bp, Homo sapien
gaaatcaatttttcagaagagggtc

SEQ ID NO: 1341449 - DNA, 25 bp, Homo sapien
cagaaatcaatttttcagaagaggg

SEQ ID NO: 1341450 - DNA, 25 bp, Homo sapien
cttcatgtaagtgttgaacacatag

SEQ ID NO: 1341451 - DNA, 25 bp, Homo sapien
aaggtggcagttctttagtatacta

SEQ ID NO: 1341452 - DNA, 25 bp, Homo sapien
tgaacacatagagaactaagaagca

SEQ ID NO: 1341453 - DNA, 25 bp, Homo sapien
gcagttctttagtatactatcatca

SEQ ID NO: 1341454 - DNA, 25 bp, Homo sapien
ttgtgccttctagactcagtatttc

SEQ ID NO: 1341455 - DNA, 25 bp, Homo sapien
tctctagacttcacataggccacca

SEQ ID NO: 1341456 - DNA, 25 bp, Homo sapien
gattcctgatcttgactcctttttt

SEQ ID NO: 1341457 - DNA, 25 bp, Homo sapien
gcaatgttgtacaagattccagatt

SEQ ID NO: 1341458 - DNA, 25 bp, Homo sapien
gctttatcagtatgaaagatgatat

SEQ ID NO: 1341459 - DNA, 25 bp, Homo sapien
attttgctctccacttgtctctttc

SEQ ID NO: 1341460 - DNA, 25 bp, Homo sapien
tcagtatgaaagatgatattttgct

SEQ ID NO: 1341461 - DNA, 25 bp, Homo sapien
cttcaacagctttatcagtatgaaa

SEQ ID NO: 1341462 - DNA, 25 bp, Homo sapien
cagtctccagtgatgctgggtactc

SEQ ID NO: 1341463 - DNA, 25 bp, Homo sapien
tctccagtgatgctgggtactctga

SEQ ID NO: 1341464 - DNA, 25 bp, Homo sapien
cagtgatgctgggtactctgaacac

SEQ ID NO: 1341465 - DNA, 25 bp, Homo sapien
gatgctgggtactctgaacacctct

SEQ ID NO: 1341466 - DNA, 25 bp, Homo sapien
tgaaaggtgaaattcacacattaac

SEQ ID NO: 1341467 - DNA, 25 bp, Homo sapien
ttcacacattaacacagaagtcagg

SEQ ID NO: 1341468 - DNA, 25 bp, Homo sapien
tgaaattcacacattaacacagaag

SEQ ID NO: 1341469 - DNA, 25 bp, Homo sapien
aggtgaaattcacacattaacacag

SEQ ID NO: 1341470 - DNA, 25 bp, Homo sapien
gctctttgaataatgatatacggca

SEQ ID NO: 1341471 - DNA, 25 bp, Homo sapien
ctctccagggctgatgagtagccca

SEQ ID NO: 1341472 - DNA, 25 bp, Homo sapien
ctctttgaataatgatatacggcat

SEQ ID NO: 1341473 - DNA, 25 bp, Homo sapien
agggctgatgagtagcccagtatgt

SEQ ID NO: 1341474 - DNA, 25 bp, Homo sapien
gatcctgggacagcttcgctctcag

SEQ ID NO: 1341475 - DNA, 25 bp, Homo sapien
gccccaagattaggatcagaatgcc

SEQ ID NO: 1341476 - DNA, 25 bp, Homo sapien
ttgttcactcccaatgctacctctt

SEQ ID NO: 1341477 - DNA, 25 bp, Homo sapien
ccagcagacaggtcctagaggatag

SEQ ID NO: 1341478 - DNA, 25 bp, Homo sapien
cttgaattgccctgaagaatacttg

SEQ ID NO: 1341479 - DNA, 25 bp, Homo sapien
ctatggataaggcactgagaaacag

SEQ ID NO: 1341480 - DNA, 25 bp, Homo sapien
cctgaagaatacttggtccgaacat

SEQ ID NO: 1341481 - DNA, 25 bp, Homo sapien
aacatttacatctatggataaggca

SEQ ID NO: 1341482 - DNA, 25 bp, Homo sapien
tagcctataatccacctgagggaga

SEQ ID NO: 1341483 - DNA, 25 bp, Homo sapien
taataatgtttaggagataaagcct

SEQ ID NO: 1341484 - DNA, 25 bp, Homo sapien
gcagaaaccaacattagatcaacta

SEQ ID NO: 1341485 - DNA, 25 bp, Homo sapien
tatttagggcactcttgatttcagt

SEQ ID NO: 1341486 - DNA, 25 bp, Homo sapien
gtttctccatgactcaattaacttt

SEQ ID NO: 1341487 - DNA, 25 bp, Homo sapien
taagtggagctgcttggcttttgta

SEQ ID NO: 1341488 - DNA, 25 bp, Homo sapien
tgactcaattaactttccatcctct

SEQ ID NO: 1341489 - DNA, 25 bp, Homo sapien
gaccccagaggtagctctttcaaag

SEQ ID NO: 1341490 - DNA, 25 bp, Homo sapien
taaaagaaagtataaggcatggcca

SEQ ID NO: 1341491 - DNA, 25 bp, Homo sapien
tgtggtagtgttgagtcaagcagtc

SEQ ID NO: 1341492 - DNA, 25 bp, Homo sapien
caagcagtctggacttaataagacg

SEQ ID NO: 1341493 - DNA, 25 bp, Homo sapien
gctcggtccagtttccagcatacaa

SEQ ID NO: 1341494 - DNA, 25 bp, Homo sapien
caggaacagatgcagattttgtggg

SEQ ID NO: 1341495 - DNA, 25 bp, Homo sapien
cagcaggaacagatgcagattttgt

SEQ ID NO: 1341496 - DNA, 25 bp, Homo sapien
gcagcaggaacagatgcagattttg

SEQ ID NO: 1341497 - DNA, 25 bp, Homo sapien
cttgagcagcaggaacagatgcaga

SEQ ID NO: 1341498 - DNA, 25 bp, Homo sapien
taatgtatgatattcgcaatgccgt

SEQ ID NO: 1341499 - DNA, 25 bp, Homo sapien
gactttgggaagaatgttaatcttg

SEQ ID NO: 1341500 - DNA, 25 bp, Homo sapien
gcctccagatgtacagcatacttaa

SEQ ID NO: 1341501 - DNA, 25 bp, Homo sapien
ttaatcttgtattgcaaagccatgc

SEQ ID NO: 1341502 - DNA, 25 bp, Homo sapien
tattggagatccgtgaaggagcatc

SEQ ID NO: 1341503 - DNA, 25 bp, Homo sapien
tagaaacaaatgctgcccctgtcat

SEQ ID NO: 1341504 - DNA, 25 bp, Homo sapien
tagaacatcgaggtattggagatcc

SEQ ID NO: 1341505 - DNA, 25 bp, Homo sapien
aaggagcatcatcgttactatagaa

SEQ ID NO: 1341506 - DNA, 25 bp, Homo sapien
cattggctatgatattgctactgtg

SEQ ID NO: 1341507 - DNA, 25 bp, Homo sapien
caattagcaatgactgcgcctcaga

SEQ ID NO: 1341508 - DNA, 25 bp, Homo sapien
agcaatgactgcgcctcagataaac

SEQ ID NO: 1341509 - DNA, 25 bp, Homo sapien
tatgatattgctactgtgcaaagct

SEQ ID NO: 1341510 - DNA, 25 bp, Homo sapien
ctggtgtcttgctaccttctcaata

SEQ ID NO: 1341511 - DNA, 25 bp, Homo sapien
gtgtcttgctaccttctcaatatac

SEQ ID NO: 1341512 - DNA, 25 bp, Homo sapien
gtcttgctaccttctcaatatactt

SEQ ID NO: 1341513 - DNA, 25 bp, Homo sapien
ggtgtcttgctaccttctcaatata

SEQ ID NO: 1341514 - DNA, 25 bp, Homo sapien
gccctgcagttctctgccttttggt

SEQ ID NO: 1341515 - DNA, 25 bp, Homo sapien
acaccagattgcaaagctgctctga

SEQ ID NO: 1341516 - DNA, 25 bp, Homo sapien
tctgaagaagccctgcagttctctg

SEQ ID NO: 1341517 - DNA, 25 bp, Homo sapien
ttccatgacttctcatgccccacac

SEQ ID NO: 1341518 - DNA, 25 bp, Homo sapien
ttgcacatatggctctacccaagtc

SEQ ID NO: 1341519 - DNA, 25 bp, Homo sapien
gcacatatggctctacccaagtctt

SEQ ID NO: 1341520 - DNA, 25 bp, Homo sapien
ttttgcacatatggctctacccaag

SEQ ID NO: 1341521 - DNA, 25 bp, Homo sapien
catatggctctacccaagtcttcat

SEQ ID NO: 1341522 - DNA, 25 bp, Homo sapien
tgctaggcactctcggacctggata

SEQ ID NO: 1341523 - DNA, 25 bp, Homo sapien
ggcactctcggacctggatattttc

SEQ ID NO: 1341524 - DNA, 25 bp, Homo sapien
ggacctggatattttctctcagggt

SEQ ID NO: 1341525 - DNA, 25 bp, Homo sapien
ctgccactgctaggcactctcggac

SEQ ID NO: 1341526 - DNA, 25 bp, Homo sapien
tagtgaccttttagtgcagtgacaa

SEQ ID NO: 1341527 - DNA, 25 bp, Homo sapien
tgccagaccatgtcataagccttag

SEQ ID NO: 1341528 - DNA, 25 bp, Homo sapien
cagggttacgtagctcctaactgga

SEQ ID NO: 1341529 - DNA, 25 bp, Homo sapien
tgaatacttagactcatgccagacc

SEQ ID NO: 1341530 - DNA, 25 bp, Homo sapien
agatggttgtgtctaagaaatttcc

SEQ ID NO: 1341531 - DNA, 25 bp, Homo sapien
gccttcagatggttgtgtctaagaa

SEQ ID NO: 1341532 - DNA, 25 bp, Homo sapien
tcagatggttgtgtctaagaaattt

SEQ ID NO: 1341533 - DNA, 25 bp, Homo sapien
tttttgccttcagatggttgtgtct

SEQ ID NO: 1341534 - DNA, 25 bp, Homo sapien
gaagccggatccctagaatctcaga

SEQ ID NO: 1341535 - DNA, 25 bp, Homo sapien
cagagctggaagtagaagccggatc

SEQ ID NO: 1341536 - DNA, 25 bp, Homo sapien
tgtgctacctctggttgagcctttc

SEQ ID NO: 1341537 - DNA, 25 bp, Homo sapien
aaagcagttttggattactgccatg

SEQ ID NO: 1341538 - DNA, 25 bp, Homo sapien
gcgagtttgtgtaaagatgtgacca

SEQ ID NO: 1341539 - DNA, 25 bp, Homo sapien
agggctggctttgcaaggattcccc

SEQ ID NO: 1341540 - DNA, 25 bp, Homo sapien
caccaggagaataactgtgggccag

SEQ ID NO: 1341541 - DNA, 25 bp, Homo sapien
tgtgggccagagaacgttcctgctc

SEQ ID NO: 1341542 - DNA, 25 bp, Homo sapien
gtcagagccagagattcgcctcaca

SEQ ID NO: 1341543 - DNA, 25 bp, Homo sapien
tcactattgtctgccagtaaggtcg

SEQ ID NO: 1341544 - DNA, 25 bp, Homo sapien
ggttgtcagaaactatcccattggt

SEQ ID NO: 1341545 - DNA, 25 bp, Homo sapien
tagggagacatcttgagcagacaga

SEQ ID NO: 1341546 - DNA, 25 bp, Homo sapien
tgcccccacaactggcgagtggagc

SEQ ID NO: 1341547 - DNA, 25 bp, Homo sapien
caactggcgagtggagcctccatct

SEQ ID NO: 1341548 - DNA, 25 bp, Homo sapien
cgaatccaaacaattcgatctcact

SEQ ID NO: 1341549 - DNA, 25 bp, Homo sapien
gagcctccatcttcgaatccaaaca

SEQ ID NO: 1341550 - DNA, 25 bp, Homo sapien
gaggtccattaggaaggtgactatc

SEQ ID NO: 1341551 - DNA, 25 bp, Homo sapien
tgtgtttttgatttcccagagggtc

SEQ ID NO: 1341552 - DNA, 25 bp, Homo sapien
aaggtgactatctgccagggcagtc

SEQ ID NO: 1341553 - DNA, 25 bp, Homo sapien
tgtttttgatttcccagagggtctg

SEQ ID NO: 1341554 - DNA, 25 bp, Homo sapien
atcaaggcttgctggctgcggctca

SEQ ID NO: 1341555 - DNA, 25 bp, Homo sapien
cagccctgaggtgcaccagtgagtg

SEQ ID NO: 1341556 - DNA, 25 bp, Homo sapien
ctcagaggatctgcgcagaggaagc

SEQ ID NO: 1341557 - DNA, 25 bp, Homo sapien
tacaccataccctcataggtgcaca

SEQ ID NO: 1341558 - DNA, 25 bp, Homo sapien
ggttctatccaaatctatgtgggca

SEQ ID NO: 1341559 - DNA, 25 bp, Homo sapien
gaatgctcccgaactactgactttg

SEQ ID NO: 1341560 - DNA, 25 bp, Homo sapien
tcacttagtagagacatatggcccc

SEQ ID NO: 1341561 - DNA, 25 bp, Homo sapien
gcaaattacgcaaatgtgaagcctc

SEQ ID NO: 1341562 - DNA, 25 bp, Homo sapien
tgtcaggtccccagggacaccagtg

SEQ ID NO: 1341563 - DNA, 25 bp, Homo sapien
gcagctgtgactccttttgcacaca

SEQ ID NO: 1341564 - DNA, 25 bp, Homo sapien
gctgcagctgtgactccttttgcac

SEQ ID NO: 1341565 - DNA, 25 bp, Homo sapien
accagtgcgaacaccagctgcagct

SEQ ID NO: 1341566 - DNA, 25 bp, Homo sapien
agaaggctacgtgaccaccgctcac

SEQ ID NO: 1341567 - DNA, 25 bp, Homo sapien
tcaggaaatagctggattgtgggtg

SEQ ID NO: 1341568 - DNA, 25 bp, Homo sapien
agtaagagaaggctacgtgaccacc

SEQ ID NO: 1341569 - DNA, 25 bp, Homo sapien
aagagaaggctacgtgaccaccgct

SEQ ID NO: 1341570 - DNA, 25 bp, Homo sapien
caccagatggttctgagataatgcc

SEQ ID NO: 1341571 - DNA, 25 bp, Homo sapien
gatggttctgagataatgccacgtc

SEQ ID NO: 1341572 - DNA, 25 bp, Homo sapien
tgctgccaccagatggttctgagat

SEQ ID NO: 1341573 - DNA, 25 bp, Homo sapien
gttctgagataatgccacgtctttc

SEQ ID NO: 1341574 - DNA, 25 bp, Homo sapien
tgcaagaaacaacatttccgagcca

SEQ ID NO: 1341575 - DNA, 25 bp, Homo sapien
gcaagaaacaacatttccgagccat

SEQ ID NO: 1341576 - DNA, 25 bp, Homo sapien
ctgcaagaaacaacatttccgagcc

SEQ ID NO: 1341577 - DNA, 25 bp, Homo sapien
tattctctaatcaaacaagtggagt

SEQ ID NO: 1341578 - DNA, 25 bp, Homo sapien
tcaaacaagtggagttcttagtctc

SEQ ID NO: 1341579 - DNA, 25 bp, Homo sapien
gattcatattctctaatcaaacaag

SEQ ID NO: 1341580 - DNA, 25 bp, Homo sapien
tctctaatcaaacaagtggagttct

SEQ ID NO: 1341581 - DNA, 25 bp, Homo sapien
ctcttgtctgggatccactgaagct

SEQ ID NO: 1341582 - DNA, 25 bp, Homo sapien
cctcttgtctgggatccactgaagc

SEQ ID NO: 1341583 - DNA, 25 bp, Homo sapien
gcttgttcatggtcctgagctgtaa

SEQ ID NO: 1341584 - DNA, 25 bp, Homo sapien
taaccccaaatatgctccacttaat

SEQ ID NO: 1341585 - DNA, 25 bp, Homo sapien
ggcccctactaagaatttgctcatg

SEQ ID NO: 1341586 - DNA, 25 bp, Homo sapien
aatatgctccacttaatccctcctt

SEQ ID NO: 1341587 - DNA, 25 bp, Homo sapien
tcatgaggacgtgcctttggaggcc

SEQ ID NO: 1341588 - DNA, 25 bp, Homo sapien
ttggaggcccatcccacctgttctt

SEQ ID NO: 1341589 - DNA, 25 bp, Homo sapien
ctggctcaggcagtatcgttcatga

SEQ ID NO: 1341590 - DNA, 25 bp, Homo sapien
tatgtgctcgaaagggtctgtgtcc

SEQ ID NO: 1341591 - DNA, 25 bp, Homo sapien
gtaggaaggctgctactgccgacct

SEQ ID NO: 1341592 - DNA, 25 bp, Homo sapien
ggctgagcaggaccatcctgtagga

SEQ ID NO: 1341593 - DNA, 25 bp, Homo sapien
caggaccatcctgtaggaaggctgc

SEQ ID NO: 1341594 - DNA, 25 bp, Homo sapien
gaaggctgctactgccgacctggta

SEQ ID NO: 1341595 - DNA, 25 bp, Homo sapien
tagtagacactcaaagcatgctcgt

SEQ ID NO: 1341596 - DNA, 25 bp, Homo sapien
cactcaaagcatgctcgtggagctg

SEQ ID NO: 1341597 - DNA, 25 bp, Homo sapien
catgctcgtggagctgtttaacttc

SEQ ID NO: 1341598 - DNA, 25 bp, Homo sapien
tgtttccatatccttagagcccagc

SEQ ID NO: 1341599 - DNA, 25 bp, Homo sapien
taacacaatttaggcatgccagctg

SEQ ID NO: 1341600 - DNA, 25 bp, Homo sapien
tatacagcactattagtacccagga

SEQ ID NO: 1341601 - DNA, 25 bp, Homo sapien
caccgtatatctgcctggtaggtaa

SEQ ID NO: 1341602 - DNA, 25 bp, Homo sapien
catggaatcattttatatacagcac

SEQ ID NO: 1341603 - DNA, 25 bp, Homo sapien
ggccccttctggacagttgctgaca

SEQ ID NO: 1341604 - DNA, 25 bp, Homo sapien
gctaaataaagcttcaatccaaact

SEQ ID NO: 1341605 - DNA, 25 bp, Homo sapien
gttgctgacaggcacaaggagctta

SEQ ID NO: 1341606 - DNA, 25 bp, Homo sapien
tgaataggatctgttgacaaggccc

SEQ ID NO: 1341607 - DNA, 25 bp, Homo sapien
aagggtcgtagatcccccagggctg

SEQ ID NO: 1341608 - DNA, 25 bp, Homo sapien
gcccttctgaaaggctccatggtct

SEQ ID NO: 1341609 - DNA, 25 bp, Homo sapien
gctgggcccttctgaaaggctccat

SEQ ID NO: 1341610 - DNA, 25 bp, Homo sapien
tctgagctttcttgaagggaaccaa

SEQ ID NO: 1341611 - DNA, 25 bp, Homo sapien
gaggaggggcgggggaagtgcgtca

SEQ ID NO: 1341612 - DNA, 25 bp, Homo sapien
tattgtgtcaggagatgcaggctgg

SEQ ID NO: 1341613 - DNA, 25 bp, Homo sapien
gggctgtgtatttggtgacaagcgg

SEQ ID NO: 1341614 - DNA, 25 bp, Homo sapien
tatttggtgacaagcgggaggcgat

SEQ ID NO: 1341615 - DNA, 25 bp, Homo sapien
gttctgtgtgctctccgggggtatt

SEQ ID NO: 1341616 - DNA, 25 bp, Homo sapien
aagctgaagggattggccgaggcag

SEQ ID NO: 1341617 - DNA, 25 bp, Homo sapien
catgtgacgcggtccaaagctgaag

SEQ ID NO: 1341618 - DNA, 25 bp, Homo sapien
atgtgacgcggtccaaagctgaagg

SEQ ID NO: 1341619 - DNA, 25 bp, Homo sapien
cagcttgccgttcctctccctttct

SEQ ID NO: 1341620 - DNA, 25 bp, Homo sapien
ctcggccagcttgccgttcctctcc

SEQ ID NO: 1341621 - DNA, 25 bp, Homo sapien
gccagcttgccgttcctctcccttt

SEQ ID NO: 1341622 - DNA, 25 bp, Homo sapien
ggccagcttgccgttcctctccctt

SEQ ID NO: 1341623 - DNA, 25 bp, Homo sapien
tgcatagagaattggatgctctttc

SEQ ID NO: 1341624 - DNA, 25 bp, Homo sapien
gattagatttcagtgttgcatagag

SEQ ID NO: 1341625 - DNA, 25 bp, Homo sapien
tctgattagatttcagtgttgcata

SEQ ID NO: 1341626 - DNA, 25 bp, Homo sapien
tttcagtgttgcatagagaattgga

SEQ ID NO: 1341627 - DNA, 25 bp, Homo sapien
ggttgtaacgttttttgatgctcat

SEQ ID NO: 1341628 - DNA, 25 bp, Homo sapien
ggcactaaagtatcttctttgaagg

SEQ ID NO: 1341629 - DNA, 25 bp, Homo sapien
ctaaagtatcttctttgaaggttgt

SEQ ID NO: 1341630 - DNA, 25 bp, Homo sapien
tgaaggttgtaacgttttttgatgc

SEQ ID NO: 1341631 - DNA, 25 bp, Homo sapien
tagtgtccaacaaacaagaggtgca

SEQ ID NO: 1341632 - DNA, 25 bp, Homo sapien
aataatctgcaagttctctgctggc

SEQ ID NO: 1341633 - DNA, 25 bp, Homo sapien
tgctggctacagaacacaatctaag

SEQ ID NO: 1341634 - DNA, 25 bp, Homo sapien
taattatcaagccaatgtctctctg

SEQ ID NO: 1341635 - DNA, 25 bp, Homo sapien
ggtcttagcaccacaaatatgaatg

SEQ ID NO: 1341636 - DNA, 25 bp, Homo sapien
gtatgaaaacaggtcaggtcttagc

SEQ ID NO: 1341637 - DNA, 25 bp, Homo sapien
tactgtcagcatccctaccagggat

SEQ ID NO: 1341638 - DNA, 25 bp, Homo sapien
gaatggagagtcattgctctctgga

SEQ ID NO: 1341639 - DNA, 25 bp, Homo sapien
tccctctgggtctatctcctgctct

SEQ ID NO: 1341640 - DNA, 25 bp, Homo sapien
tgaactatgttccagtcacatgtgt

SEQ ID NO: 1341641 - DNA, 25 bp, Homo sapien
ctatgttccagtcacatgtgtgttt

SEQ ID NO: 1341642 - DNA, 25 bp, Homo sapien
aactatgttccagtcacatgtgtgt

SEQ ID NO: 1341643 - DNA, 25 bp, Homo sapien
ggctggaggcctttccttattaatc

SEQ ID NO: 1341644 - DNA, 25 bp, Homo sapien
tcttggctggaggcctttccttatt

SEQ ID NO: 1341645 - DNA, 25 bp, Homo sapien
ttcacatgtgcccttctctatggtg

SEQ ID NO: 1341646 - DNA, 25 bp, Homo sapien
cttctctatggtgcttcttgcattc

SEQ ID NO: 1341647 - DNA, 25 bp, Homo sapien
cacagggatgaaggtcacttttgac

SEQ ID NO: 1341648 - DNA, 25 bp, Homo sapien
tgaactaggatcaccaatgggcaca

SEQ ID NO: 1341649 - DNA, 25 bp, Homo sapien
gatgaatgagataaaacgaatgcct

SEQ ID NO: 1341650 - DNA, 25 bp, Homo sapien
ggagccctcttctcagtatggtgaa

SEQ ID NO: 1341651 - DNA, 25 bp, Homo sapien
gatgcaatggactttggaaactcgg

SEQ ID NO: 1341652 - DNA, 25 bp, Homo sapien
atgatgcaatggactttggaaactc

SEQ ID NO: 1341653 - DNA, 25 bp, Homo sapien
caatggactttggaaactcggtggg

SEQ ID NO: 1341654 - DNA, 25 bp, Homo sapien
aagaaatcaacactaaagaatttat

SEQ ID NO: 1341655 - DNA, 25 bp, Homo sapien
tcctagtccttgtcttgtccaagct

SEQ ID NO: 1341656 - DNA, 25 bp, Homo sapien
gttcctagtccttgtcttgtccaag

SEQ ID NO: 1341657 - DNA, 25 bp, Homo sapien
ttgttcctagtccttgtcttgtcca

SEQ ID NO: 1341658 - DNA, 25 bp, Homo sapien
gagctctaggtcactcctagagctg

SEQ ID NO: 1341659 - DNA, 25 bp, Homo sapien
tgaacctcctaagatatacagtggg

SEQ ID NO: 1341660 - DNA, 25 bp, Homo sapien
tgattgaacctcctaagatatacag

SEQ ID NO: 1341661 - DNA, 25 bp, Homo sapien
tggggttaggaccagaatttcctga

SEQ ID NO: 1341662 - DNA, 25 bp, Homo sapien
tatacagtggggttaggaccagaat

SEQ ID NO: 1341663 - DNA, 25 bp, Homo sapien
gcttttgccgcatctatttcttgct

SEQ ID NO: 1341664 - DNA, 25 bp, Homo sapien
ctggattcacagtgagcaacaccac

SEQ ID NO: 1341665 - DNA, 25 bp, Homo sapien
acagccaggccaatctccgagcttt

SEQ ID NO: 1341666 - DNA, 25 bp, Homo sapien
aatctccgagcttttgccgcatcta

SEQ ID NO: 1341667 - DNA, 25 bp, Homo sapien
cacatggatcagtgcctctaaacac

SEQ ID NO: 1341668 - DNA, 25 bp, Homo sapien
catggatcagtgcctctaaacacat

SEQ ID NO: 1341669 - DNA, 25 bp, Homo sapien
ccacatggatcagtgcctctaaaca

SEQ ID NO: 1341670 - DNA, 25 bp, Homo sapien
ctccacatggatcagtgcctctaaa

SEQ ID NO: 1341671 - DNA, 25 bp, Homo sapien
gatacaaatggctgcaatcagagat

SEQ ID NO: 1341672 - DNA, 25 bp, Homo sapien
ttttccgcattggaagaccaacaga

SEQ ID NO: 1341673 - DNA, 25 bp, Homo sapien
cagaaatctaggtattgaacacagt

SEQ ID NO: 1341674 - DNA, 25 bp, Homo sapien
aatcagagatgaattaatctcctgc

SEQ ID NO: 1341675 - DNA, 25 bp, Homo sapien
gagatatggggttcaggccaaccaa

SEQ ID NO: 1341676 - DNA, 25 bp, Homo sapien
aggccaaccaattaatccaagcatg

SEQ ID NO: 1341677 - DNA, 25 bp, Homo sapien
tcagcctgagatatggggttcaggc

SEQ ID NO: 1341678 - DNA, 25 bp, Homo sapien
gggttcaggccaaccaattaatcca

SEQ ID NO: 1341679 - DNA, 25 bp, Homo sapien
tggacatgccctcacctcatgagtg

SEQ ID NO: 1341680 - DNA, 25 bp, Homo sapien
aactgccctcgtttgaaaggcgctg

SEQ ID NO: 1341681 - DNA, 25 bp, Homo sapien
gctgtgaaacgcctgcaggtatggt

SEQ ID NO: 1341682 - DNA, 25 bp, Homo sapien
caggtatggtgctagccaagtgatc

SEQ ID NO: 1341683 - DNA, 25 bp, Homo sapien
aagggcttccaagtagcacgtcttc

SEQ ID NO: 1341684 - DNA, 25 bp, Homo sapien
taaggaggcatgtttccatcctgtg

SEQ ID NO: 1341685 - DNA, 25 bp, Homo sapien
gttcacaagtgaaggaagcaccctt

SEQ ID NO: 1341686 - DNA, 25 bp, Homo sapien
ggagcagggtatcgattttcactca

SEQ ID NO: 1341687 - DNA, 25 bp, Homo sapien
gatgtatatactgaggttaatggag

SEQ ID NO: 1341688 - DNA, 25 bp, Homo sapien
gggctagttgttcccattatataga

SEQ ID NO: 1341689 - DNA, 25 bp, Homo sapien
ctgaggttaatggagtaaatcctac

SEQ ID NO: 1341690 - DNA, 25 bp, Homo sapien
aggacaatgcactagaaatcagaag

SEQ ID NO: 1341691 - DNA, 25 bp, Homo sapien
ccactgtttagatccagaaggagag

SEQ ID NO: 1341692 - DNA, 25 bp, Homo sapien
caagactttccgtagttgaactggt

SEQ ID NO: 1341693 - DNA, 25 bp, Homo sapien
tacccacaggaatcaaaacgctgag

SEQ ID NO: 1341694 - DNA, 25 bp, Homo sapien
tgtatgtcgtttcatcgttgcaagg

SEQ ID NO: 1341695 - DNA, 25 bp, Homo sapien
agataactataataccttggctctg

SEQ ID NO: 1341696 - DNA, 25 bp, Homo sapien
ctgactcctgccgtatgatattgga

SEQ ID NO: 1341697 - DNA, 25 bp, Homo sapien
cctgccgtatgatattggacaaatc

SEQ ID NO: 1341698 - DNA, 25 bp, Homo sapien
taactataataccttggctctgcca

SEQ ID NO: 1341699 - DNA, 25 bp, Homo sapien
gacacggcagctgaaagtaacccag

SEQ ID NO: 1341700 - DNA, 25 bp, Homo sapien
gacagagtgtttaccatgtaccagt

SEQ ID NO: 1341701 - DNA, 25 bp, Homo sapien
tcctggtaggcaaaacagctcaaag

SEQ ID NO: 1341702 - DNA, 25 bp, Homo sapien
tattctgactgcaaaggaaacgcct

SEQ ID NO: 1341703 - DNA, 25 bp, Homo sapien
tatgtaagttgttactgaaatgtga

SEQ ID NO: 1341704 - DNA, 25 bp, Homo sapien
tattatgacacgttactgcaactag

SEQ ID NO: 1341705 - DNA, 25 bp, Homo sapien
tgcaactagggctcccattccagaa

SEQ ID NO: 1341706 - DNA, 25 bp, Homo sapien
gaaatagtatggatatcactctttg

SEQ ID NO: 1341707 - DNA, 25 bp, Homo sapien
ttcttccatcagaatttcgctccat

SEQ ID NO: 1341708 - DNA, 25 bp, Homo sapien
cactgaacagtgtttgaacagatgt

SEQ ID NO: 1341709 - DNA, 25 bp, Homo sapien
ctcagactttggcagacactgaaca

SEQ ID NO: 1341710 - DNA, 25 bp, Homo sapien
tgaacagatgtgcttctctcatttc

SEQ ID NO: 1341711 - DNA, 25 bp, Homo sapien
tcttattggaagctcagactttggc

SEQ ID NO: 1341712 - DNA, 25 bp, Homo sapien
cacaatagcacaaaaagagactgag

SEQ ID NO: 1341713 - DNA, 25 bp, Homo sapien
ttttgaggaacctctcagaatttcc

SEQ ID NO: 1341714 - DNA, 25 bp, Homo sapien
tctttagtctgcacaggaatattcc

SEQ ID NO: 1341715 - DNA, 25 bp, Homo sapien
cattcactcataagccacataggcc

SEQ ID NO: 1341716 - DNA, 25 bp, Homo sapien
tactctgaaactagttttaggagct

SEQ ID NO: 1341717 - DNA, 25 bp, Homo sapien
aatctaagcgaagtatggaaaggac

SEQ ID NO: 1341718 - DNA, 25 bp, Homo sapien
gaaactgaacattgatggatgattc

SEQ ID NO: 1341719 - DNA, 25 bp, Homo sapien
caaaacaggatctggttaatgactt

SEQ ID NO: 1341720 - DNA, 25 bp, Homo sapien
tggtgaacatctcccttcgtggaac

SEQ ID NO: 1341721 - DNA, 25 bp, Homo sapien
aatcgaaactgcaaaacatgacggc

SEQ ID NO: 1341722 - DNA, 25 bp, Homo sapien
caggcagagcatacttattggaagc

SEQ ID NO: 1341723 - DNA, 25 bp, Homo sapien
tcacattggacaactgaacaggcag

SEQ ID NO: 1341724 - DNA, 25 bp, Homo sapien
aattatcacacagaaccttatcatg

SEQ ID NO: 1341725 - DNA, 25 bp, Homo sapien
tttaatgaaattatcacacagaacc

SEQ ID NO: 1341726 - DNA, 25 bp, Homo sapien
tgaaattatcacacagaaccttatc

SEQ ID NO: 1341727 - DNA, 25 bp, Homo sapien
tatcacacagaaccttatcatgaga

SEQ ID NO: 1341728 - DNA, 25 bp, Homo sapien
ttcctctcctaaagtgccatccttc

SEQ ID NO: 1341729 - DNA, 25 bp, Homo sapien
tcctctcctaaagtgccatccttct

SEQ ID NO: 1341730 - DNA, 25 bp, Homo sapien
ctcgtggttgagctcttgattgttc

SEQ ID NO: 1341731 - DNA, 25 bp, Homo sapien
ccactttcttcgcttttcagggtca

SEQ ID NO: 1341732 - DNA, 25 bp, Homo sapien
tcagtccttctctattcactgcttg

SEQ ID NO: 1341733 - DNA, 25 bp, Homo sapien
tctctctcctctgattattctcgtg

SEQ ID NO: 1341734 - DNA, 25 bp, Homo sapien
acataacttgacagtgcctagaaat

SEQ ID NO: 1341735 - DNA, 25 bp, Homo sapien
cataacttgacagtgcctagaaata

SEQ ID NO: 1341736 - DNA, 25 bp, Homo sapien
tgaaaagagaagtacacaagtgacc

SEQ ID NO: 1341737 - DNA, 25 bp, Homo sapien
ccaattaacagaatcaaggaagcct

SEQ ID NO: 1341738 - DNA, 25 bp, Homo sapien
ttcaacccctgaggaactaggatcc

SEQ ID NO: 1341739 - DNA, 25 bp, Homo sapien
gaagcctaggctggataaaacacag

SEQ ID NO: 1341740 - DNA, 25 bp, Homo sapien
tataaatgaacggacgctctaagaa

SEQ ID NO: 1341741 - DNA, 25 bp, Homo sapien
tttcattaggctaacagtataaatg

SEQ ID NO: 1341742 - DNA, 25 bp, Homo sapien
taacagtataaatgaacggacgctc

SEQ ID NO: 1341743 - DNA, 25 bp, Homo sapien
ttaggctaacagtataaatgaacgg

SEQ ID NO: 1341744 - DNA, 25 bp, Homo sapien
ggagaggacagttctatgagacact

SEQ ID NO: 1341745 - DNA, 25 bp, Homo sapien
aggagtcagaagtgaccccaacaca

SEQ ID NO: 1341746 - DNA, 25 bp, Homo sapien
caaggtctacatgagtaggcaaggg

SEQ ID NO: 1341747 - DNA, 25 bp, Homo sapien
ggacagttctatgagacactatggg

SEQ ID NO: 1341748 - DNA, 25 bp, Homo sapien
agacatttgtaggtctgagtcctgc

SEQ ID NO: 1341749 - DNA, 25 bp, Homo sapien
gtatgggtcactagttcaatggacc

SEQ ID NO: 1341750 - DNA, 25 bp, Homo sapien
tagcctccggcagctgagaacatgg

SEQ ID NO: 1341751 - DNA, 25 bp, Homo sapien
tgtcccaggcacaagttaagtgacc

SEQ ID NO: 1341752 - DNA, 25 bp, Homo sapien
ttagctgccacccttactagctgtg

SEQ ID NO: 1341753 - DNA, 25 bp, Homo sapien
cagtcaaagtggtcccccaggacaa

SEQ ID NO: 1341754 - DNA, 25 bp, Homo sapien
caggacaatctgcaaaacatttctc

SEQ ID NO: 1341755 - DNA, 25 bp, Homo sapien
tcacgttgtaatatagatggttagg

SEQ ID NO: 1341756 - DNA, 25 bp, Homo sapien
gaaatagtatcaatcttaaacactc

SEQ ID NO: 1341757 - DNA, 25 bp, Homo sapien
aacactcggagattaaagaaagaag

SEQ ID NO: 1341758 - DNA, 25 bp, Homo sapien
tcattttatggagctagcttaaccc

SEQ ID NO: 1341759 - DNA, 25 bp, Homo sapien
tagcttaaccctgatagcaaaatca

SEQ ID NO: 1341760 - DNA, 25 bp, Homo sapien
tgataaagctctgccacccattggg

SEQ ID NO: 1341761 - DNA, 25 bp, Homo sapien
cagttcattaaccttggcaaaggga

SEQ ID NO: 1341762 - DNA, 25 bp, Homo sapien
gatcactgtggtttcaaccgctcag

SEQ ID NO: 1341763 - DNA, 25 bp, Homo sapien
caatattagtgttctaccaggcagt

SEQ ID NO: 1341764 - DNA, 25 bp, Homo sapien
agaaaactcacgtttatgtgggagc

SEQ ID NO: 1341765 - DNA, 25 bp, Homo sapien
gagctggaaggagtttcctgtctca

SEQ ID NO: 1341766 - DNA, 25 bp, Homo sapien
caccttcggaaggttttgcgctgga

SEQ ID NO: 1341767 - DNA, 25 bp, Homo sapien
agcactcaaatcagtcatggaacag

SEQ ID NO: 1341768 - DNA, 25 bp, Homo sapien
cagatatagatgactgtccgtatgt

SEQ ID NO: 1341769 - DNA, 25 bp, Homo sapien
ccacctggagctagcacagatatag

SEQ ID NO: 1341770 - DNA, 25 bp, Homo sapien
cgtatgtattctagcccacagagtc

SEQ ID NO: 1341771 - DNA, 25 bp, Homo sapien
gagggatcccctcctgatgccttct

SEQ ID NO: 1341772 - DNA, 25 bp, Homo sapien
ctgagatggcaaataggacagagaa

SEQ ID NO: 1341773 - DNA, 25 bp, Homo sapien
ggcaaataggacagagaataaaaac

SEQ ID NO: 1341774 - DNA, 25 bp, Homo sapien
ataggacagagaataaaaacagagt

SEQ ID NO: 1341775 - DNA, 25 bp, Homo sapien
aacagagtgaaaatggagcccttca

SEQ ID NO: 1341776 - DNA, 25 bp, Homo sapien
gactgaatgtgaatctgatatggta

SEQ ID NO: 1341777 - DNA, 25 bp, Homo sapien
ctgaatgtgaatctgatatggtaaa

SEQ ID NO: 1341778 - DNA, 25 bp, Homo sapien
gaatgtgaatctgatatggtaaata

SEQ ID NO: 1341779 - DNA, 25 bp, Homo sapien
tttgctgaggactgaatgtgaatct

SEQ ID NO: 1341780 - DNA, 25 bp, Homo sapien
tgtctggcttcttcggttctagtgg

SEQ ID NO: 1341781 - DNA, 25 bp, Homo sapien
aaggcccttctgtcatcaaagagtt

SEQ ID NO: 1341782 - DNA, 25 bp, Homo sapien
agttggtgcctcctcagttgtctgg

SEQ ID NO: 1341783 - DNA, 25 bp, Homo sapien
tcggttctagtggttctttgctgct

SEQ ID NO: 1341784 - DNA, 25 bp, Homo sapien
gaagagtaccctgttgtgtcccaga

SEQ ID NO: 1341785 - DNA, 25 bp, Homo sapien
gataatcacaatgacataccagtgg

SEQ ID NO: 1341786 - DNA, 25 bp, Homo sapien
taaaaggtagttcccactgttgcac

SEQ ID NO: 1341787 - DNA, 25 bp, Homo sapien
tgtggcctcagtttaacccaggatt

SEQ ID NO: 1341788 - DNA, 25 bp, Homo sapien
tgtaatacagaatattggatgttaa

SEQ ID NO: 1341789 - DNA, 25 bp, Homo sapien
atacagaatattggatgttaattcc

SEQ ID NO: 1341790 - DNA, 25 bp, Homo sapien
agtatgtaatacagaatattggatg

SEQ ID NO: 1341791 - DNA, 25 bp, Homo sapien
taagtggaagttatacatcaaatat

SEQ ID NO: 1341792 - DNA, 25 bp, Homo sapien
tgctgattggtttgacttggatcca

SEQ ID NO: 1341793 - DNA, 25 bp, Homo sapien
gtttgacttggatccaagcaaagta

SEQ ID NO: 1341794 - DNA, 25 bp, Homo sapien
ggtttgacttggatccaagcaaagt

SEQ ID NO: 1341795 - DNA, 25 bp, Homo sapien
tgattggtttgacttggatccaagc

SEQ ID NO: 1341796 - DNA, 25 bp, Homo sapien
aatggttgtgaacttgattccaggg

SEQ ID NO: 1341797 - DNA, 25 bp, Homo sapien
tgtccatcactgtctcctaccagaa

SEQ ID NO: 1341798 - DNA, 25 bp, Homo sapien
gaaggcaatctgtttgtttggcaaa

SEQ ID NO: 1341799 - DNA, 25 bp, Homo sapien
cagtattcacaatcagagggtccaa

SEQ ID NO: 1341800 - DNA, 25 bp, Homo sapien
catataataacaccccaatctgcag

SEQ ID NO: 1341801 - DNA, 25 bp, Homo sapien
gcagctgcaaatatataggatgatt

SEQ ID NO: 1341802 - DNA, 25 bp, Homo sapien
caacagaagtagctggataaaaact

SEQ ID NO: 1341803 - DNA, 25 bp, Homo sapien
caggcaacgtcgtaaacaacagaag

SEQ ID NO: 1341804 - DNA, 25 bp, Homo sapien
tgtgaatatgaccttcttcagtgcc

SEQ ID NO: 1341805 - DNA, 25 bp, Homo sapien
tgccagccaaatagatatttgtgtc

SEQ ID NO: 1341806 - DNA, 25 bp, Homo sapien
gtgccagccaaatagatatttgtgt

SEQ ID NO: 1341807 - DNA, 25 bp, Homo sapien
gtgaatatgaccttcttcagtgcca

SEQ ID NO: 1341808 - DNA, 25 bp, Homo sapien
tgtagttctctttaatcgcatcaaa

SEQ ID NO: 1341809 - DNA, 25 bp, Homo sapien
tccaggagcctgtcgagatatcaaa

SEQ ID NO: 1341810 - DNA, 25 bp, Homo sapien
ccttttttgttactggcagctgtag

SEQ ID NO: 1341811 - DNA, 25 bp, Homo sapien
gcctgtcgagatatcaaagcttcat

SEQ ID NO: 1341812 - DNA, 25 bp, Homo sapien
tgttctatccactgtagttgccata

SEQ ID NO: 1341813 - DNA, 25 bp, Homo sapien
gccatctcctgttgttcctcgatct

SEQ ID NO: 1341814 - DNA, 25 bp, Homo sapien
tgccatacaggtcccaaatgttttt

SEQ ID NO: 1341815 - DNA, 25 bp, Homo sapien
taacagtctagtccttttcgtataa

SEQ ID NO: 1341816 - DNA, 25 bp, Homo sapien
ccatatggactctgataaatacgtt

SEQ ID NO: 1341817 - DNA, 25 bp, Homo sapien
aatccacagcagtaactccatatgg

SEQ ID NO: 1341818 - DNA, 25 bp, Homo sapien
cggctaaaaggttaggtgctccaat

SEQ ID NO: 1341819 - DNA, 25 bp, Homo sapien
gccattgtgatagccaacggctaaa

SEQ ID NO: 1341820 - DNA, 25 bp, Homo sapien
gactttatttaattattacatgtaa

SEQ ID NO: 1341821 - DNA, 25 bp, Homo sapien
ttctagactttatttaattattaca

SEQ ID NO: 1341822 - DNA, 25 bp, Homo sapien
ctagactttatttaattattacatg

SEQ ID NO: 1341823 - DNA, 25 bp, Homo sapien
tagactttatttaattattacatgt

SEQ ID NO: 1341824 - DNA, 25 bp, Homo sapien
gtcaacagccagataaaaatgcttc

SEQ ID NO: 1341825 - DNA, 25 bp, Homo sapien
atccaaagtgcccatagccaacagc

SEQ ID NO: 1341826 - DNA, 25 bp, Homo sapien
tgcccatagccaacagccaaaagat

SEQ ID NO: 1341827 - DNA, 25 bp, Homo sapien
tctttattgaccagcagcaagccag

SEQ ID NO: 1341828 - DNA, 25 bp, Homo sapien
catgggattctttattgaccagcag

SEQ ID NO: 1341829 - DNA, 25 bp, Homo sapien
agaccaaagtcgttccaagttggcg

SEQ ID NO: 1341830 - DNA, 25 bp, Homo sapien
tgctcacattgaggcctttggttaa

SEQ ID NO: 1341831 - DNA, 25 bp, Homo sapien
caagttggcgggtattgttgattct

SEQ ID NO: 1341832 - DNA, 25 bp, Homo sapien
caaggctgctcacattgaggccttt

SEQ ID NO: 1341833 - DNA, 25 bp, Homo sapien
ctacctcttcatgttttgcactttc

SEQ ID NO: 1341834 - DNA, 25 bp, Homo sapien
acctcttcatgttttgcactttcta

SEQ ID NO: 1341835 - DNA, 25 bp, Homo sapien
ctttctaaaacatcttcaggctctt

SEQ ID NO: 1341836 - DNA, 25 bp, Homo sapien
ttgcactttctaaaacatcttcagg

SEQ ID NO: 1341837 - DNA, 25 bp, Homo sapien
gagtttgtctaaacatgatatcttc

SEQ ID NO: 1341838 - DNA, 25 bp, Homo sapien
ttgagtttgtctaaacatgatatct

SEQ ID NO: 1341839 - DNA, 25 bp, Homo sapien
ttgtctaaacatgatatcttctttt

SEQ ID NO: 1341840 - DNA, 25 bp, Homo sapien
gtttgtctaaacatgatatcttctt

SEQ ID NO: 1341841 - DNA, 25 bp, Homo sapien
tgtccattagagaactagtttcact

SEQ ID NO: 1341842 - DNA, 25 bp, Homo sapien
aaataagtcctgatgaaatttgtca

SEQ ID NO: 1341843 - DNA, 25 bp, Homo sapien
attttaatattgcatctgagtggtc

SEQ ID NO: 1341844 - DNA, 25 bp, Homo sapien
aacaggaagctgacgataagctgca

SEQ ID NO: 1341845 - DNA, 25 bp, Homo sapien
aaatattcaaatggatggttcatac

SEQ ID NO: 1341846 - DNA, 25 bp, Homo sapien
ggatggttcatacattctaaagatt

SEQ ID NO: 1341847 - DNA, 25 bp, Homo sapien
tattcaaatggatggttcatacatt

SEQ ID NO: 1341848 - DNA, 25 bp, Homo sapien
caaatggatggttcatacattctaa

SEQ ID NO: 1341849 - DNA, 25 bp, Homo sapien
tgcattcccgctgaccttcttctgt

SEQ ID NO: 1341850 - DNA, 25 bp, Homo sapien
gattagaggcctaacagatgtcact

SEQ ID NO: 1341851 - DNA, 25 bp, Homo sapien
ccaagaagttgatagggctttgttc

SEQ ID NO: 1341852 - DNA, 25 bp, Homo sapien
tcaagttgaaataagatgatcagcc

SEQ ID NO: 1341853 - DNA, 25 bp, Homo sapien
cttaatggtgtggaaaagatcgatc

SEQ ID NO: 1341854 - DNA, 25 bp, Homo sapien
tataaagtcccagtgtaatttccag

SEQ ID NO: 1341855 - DNA, 25 bp, Homo sapien
ccagtctaagattggattgttctga

SEQ ID NO: 1341856 - DNA, 25 bp, Homo sapien
agtttttgatagcttctacaagcaa

SEQ ID NO: 1341857 - DNA, 25 bp, Homo sapien
aaatcccaggcagtggacattatgc

SEQ ID NO: 1341858 - DNA, 25 bp, Homo sapien
tgtaagaatcatacaaatcccaggc

SEQ ID NO: 1341859 - DNA, 25 bp, Homo sapien
ttttactgataaagatacaagttcc

SEQ ID NO: 1341860 - DNA, 25 bp, Homo sapien
tccatagcattgtaagaatcataca

SEQ ID NO: 1341861 - DNA, 25 bp, Homo sapien
tttccctgcctgattttggatgaaa

SEQ ID NO: 1341862 - DNA, 25 bp, Homo sapien
cttttccctgcctgattttggatga

SEQ ID NO: 1341863 - DNA, 25 bp, Homo sapien
ttttccctgcctgattttggatgaa

SEQ ID NO: 1341864 - DNA, 25 bp, Homo sapien
cttgtcgattgacagactcaaaaaa

SEQ ID NO: 1341865 - DNA, 25 bp, Homo sapien
tatagtttatcaagcagaatgatag

SEQ ID NO: 1341866 - DNA, 25 bp, Homo sapien
caatattcacttgtcgattgacaga

SEQ ID NO: 1341867 - DNA, 25 bp, Homo sapien
tagtttatcaagcagaatgatagaa

SEQ ID NO: 1341868 - DNA, 25 bp, Homo sapien
tctttggtgctccattgaaagtctg

SEQ ID NO: 1341869 - DNA, 25 bp, Homo sapien
cttccattatgattttatcacattg

SEQ ID NO: 1341870 - DNA, 25 bp, Homo sapien
ttggtgctccattgaaagtctgcat

SEQ ID NO: 1341871 - DNA, 25 bp, Homo sapien
tttggtgctccattgaaagtctgca

SEQ ID NO: 1341872 - DNA, 25 bp, Homo sapien
cctttcaacatataggtcattgcct

SEQ ID NO: 1341873 - DNA, 25 bp, Homo sapien
tcaacatataggtcattgcctaatc

SEQ ID NO: 1341874 - DNA, 25 bp, Homo sapien
aacatataggtcattgcctaatctg

SEQ ID NO: 1341875 - DNA, 25 bp, Homo sapien
catataggtcattgcctaatctgtt

SEQ ID NO: 1341876 - DNA, 25 bp, Homo sapien
tacaaaggacttcataattcttgtt

SEQ ID NO: 1341877 - DNA, 25 bp, Homo sapien
aaggacttcataattcttgtttctc

SEQ ID NO: 1341878 - DNA, 25 bp, Homo sapien
caaaggacttcataattcttgtttc

SEQ ID NO: 1341879 - DNA, 25 bp, Homo sapien
ctacaaaggacttcataattcttgt

SEQ ID NO: 1341880 - DNA, 25 bp, Homo sapien
ttagatggaggagagcggaacaaga

SEQ ID NO: 1341881 - DNA, 25 bp, Homo sapien
tattagggataaagagggatagtac

SEQ ID NO: 1341882 - DNA, 25 bp, Homo sapien
tgtactatgttttatagtccaaacc

SEQ ID NO: 1341883 - DNA, 25 bp, Homo sapien
aaaggtacgctattcatgatctaac

SEQ ID NO: 1341884 - DNA, 25 bp, Homo sapien
tctgtctctgtgagtattatctcta

SEQ ID NO: 1341885 - DNA, 25 bp, Homo sapien
gattctacagagaccatgactgtgg

SEQ ID NO: 1341886 - DNA, 25 bp, Homo sapien
tgtgggcaagtcaaaaaatctcagt

SEQ ID NO: 1341887 - DNA, 25 bp, Homo sapien
caggtgctgcccttataacttgcaa

SEQ ID NO: 1341888 - DNA, 25 bp, Homo sapien
ttactcatgaatccccttgagaggg

SEQ ID NO: 1341889 - DNA, 25 bp, Homo sapien
tccagcctagtatgacaatcatggc

SEQ ID NO: 1341890 - DNA, 25 bp, Homo sapien
gagggaacatctacactcctaaagg

SEQ ID NO: 1341891 - DNA, 25 bp, Homo sapien
gaagtggtctagaacctttcgtgaa

SEQ ID NO: 1341892 - DNA, 25 bp, Homo sapien
tgaagcgacttcacaagccagcatt

SEQ ID NO: 1341893 - DNA, 25 bp, Homo sapien
gcatattgactaaataacggactgt

SEQ ID NO: 1341894 - DNA, 25 bp, Homo sapien
gccagcatttggaaatcattaccat

SEQ ID NO: 1341895 - DNA, 25 bp, Homo sapien
aacacaaagcgccattggttcctca

SEQ ID NO: 1341896 - DNA, 25 bp, Homo sapien
caatctttcccgtttataggatggt

SEQ ID NO: 1341897 - DNA, 25 bp, Homo sapien
gacttagaaactgtactgcttccta

SEQ ID NO: 1341898 - DNA, 25 bp, Homo sapien
tcacttgctgatacacttgacttag

SEQ ID NO: 1341899 - DNA, 25 bp, Homo sapien
cttctgctattgattcacttgctga

SEQ ID NO: 1341900 - DNA, 25 bp, Homo sapien
aggtactcctatatttttgcaggca

SEQ ID NO: 1341901 - DNA, 25 bp, Homo sapien
taccaggtactcctatatttttgca

SEQ ID NO: 1341902 - DNA, 25 bp, Homo sapien
tcctcctttaccaggtactcctata

SEQ ID NO: 1341903 - DNA, 25 bp, Homo sapien
gaatatcctcctttaccaggtactc

SEQ ID NO: 1341904 - DNA, 25 bp, Homo sapien
caagtgatccttcttgtgatgtcaa

SEQ ID NO: 1341905 - DNA, 25 bp, Homo sapien
tgtaaactgccctaacgtactagga

SEQ ID NO: 1341906 - DNA, 25 bp, Homo sapien
tgtattctgataaaggctataggaa

SEQ ID NO: 1341907 - DNA, 25 bp, Homo sapien
tggttttgctgtaccagtaagtgga

SEQ ID NO: 1341908 - DNA, 25 bp, Homo sapien
caagactatattgctgacaacagtg

SEQ ID NO: 1341909 - DNA, 25 bp, Homo sapien
tcttaaggtcatgaatagacttttc

SEQ ID NO: 1341910 - DNA, 25 bp, Homo sapien
taactagttataggagccaagtgtc

SEQ ID NO: 1341911 - DNA, 25 bp, Homo sapien
aacatttcaattgagtttttcacag

SEQ ID NO: 1341912 - DNA, 25 bp, Homo sapien
tgctttgatttgcaccagtatatcc

SEQ ID NO: 1341913 - DNA, 25 bp, Homo sapien
ggaataagcacggttttggacacag

SEQ ID NO: 1341914 - DNA, 25 bp, Homo sapien
ccagtatatcctttcactgaagttg

SEQ ID NO: 1341915 - DNA, 25 bp, Homo sapien
ttcagttcaggtggaataagcacgg

SEQ ID NO: 1341916 - DNA, 25 bp, Homo sapien
caaaaaagctaatagacttctttgg

SEQ ID NO: 1341917 - DNA, 25 bp, Homo sapien
tgtagcaaaaaagctaatagacttc

SEQ ID NO: 1341918 - DNA, 25 bp, Homo sapien
cttctttggttgtgtggcattgttc

SEQ ID NO: 1341919 - DNA, 25 bp, Homo sapien
aaaagctaatagacttctttggttg

SEQ ID NO: 1341920 - DNA, 25 bp, Homo sapien
gtattatggttagtaagtccctggc

SEQ ID NO: 1341921 - DNA, 25 bp, Homo sapien
catgagtgtgtagtgcagttacata

SEQ ID NO: 1341922 - DNA, 25 bp, Homo sapien
gttacataggcagatttaaacatga

SEQ ID NO: 1341923 - DNA, 25 bp, Homo sapien
gaaagaatagcgtgttccttcctga

SEQ ID NO: 1341924 - DNA, 25 bp, Homo sapien
atgagcctccctgagattataaaaa

SEQ ID NO: 1341925 - DNA, 25 bp, Homo sapien
tgagcctccctgagattataaaaat

SEQ ID NO: 1341926 - DNA, 25 bp, Homo sapien
tttattccttctagtactctgtaat

SEQ ID NO: 1341927 - DNA, 25 bp, Homo sapien
ttccttctagtactctgtaatatgg

SEQ ID NO: 1341928 - DNA, 25 bp, Homo sapien
ccatccataattccaggtctcctat

SEQ ID NO: 1341929 - DNA, 25 bp, Homo sapien
gtcactggtgtctcagggactcttc

SEQ ID NO: 1341930 - DNA, 25 bp, Homo sapien
tgaactctgaaacttgtcactggtg

SEQ ID NO: 1341931 - DNA, 25 bp, Homo sapien
aacttgtcactggtgtctcagggac

SEQ ID NO: 1341932 - DNA, 25 bp, Homo sapien
gcttgcccaggaaatatatataagg

SEQ ID NO: 1341933 - DNA, 25 bp, Homo sapien
tcttaattcggtttgtctgtgtgca

SEQ ID NO: 1341934 - DNA, 25 bp, Homo sapien
tatctgggcaattgtggccctgcag

SEQ ID NO: 1341935 - DNA, 25 bp, Homo sapien
ccctgggacctcgtggaagtatctg

SEQ ID NO: 1341936 - DNA, 25 bp, Homo sapien
agccattcaactcttcaaggtcccg

SEQ ID NO: 1341937 - DNA, 25 bp, Homo sapien
agcaattaaagccttatctccaggc

SEQ ID NO: 1341938 - DNA, 25 bp, Homo sapien
gatgcaagaccagtatatgggcccc

SEQ ID NO: 1341939 - DNA, 25 bp, Homo sapien
caaaataaacggcatccctgagaca

SEQ ID NO: 1341940 - DNA, 25 bp, Homo sapien
catggtatcaagtcttttaaacctt

SEQ ID NO: 1341941 - DNA, 25 bp, Homo sapien
taaaaattagacagggagcattgtc

SEQ ID NO: 1341942 - DNA, 25 bp, Homo sapien
tacaatgacctatgatcctatttca

SEQ ID NO: 1341943 - DNA, 25 bp, Homo sapien
taattctgatttaacttagtgaacg

SEQ ID NO: 1341944 - DNA, 25 bp, Homo sapien
agaagcctcaggtttatcttggaac

SEQ ID NO: 1341945 - DNA, 25 bp, Homo sapien
taaagcaaaccagtcgtaccatgat

SEQ ID NO: 1341946 - DNA, 25 bp, Homo sapien
tcaaacgtgacttatggaaccaata

SEQ ID NO: 1341947 - DNA, 25 bp, Homo sapien
ggtaatacagtcatttgcacaagtg

SEQ ID NO: 1341948 - DNA, 25 bp, Homo sapien
agacatgccctgaccaccttaggca

SEQ ID NO: 1341949 - DNA, 25 bp, Homo sapien
gctgtatcacgggtacacatcctga

SEQ ID NO: 1341950 - DNA, 25 bp, Homo sapien
cctactgggagcagaaaatgccact

SEQ ID NO: 1341951 - DNA, 25 bp, Homo sapien
gcacatgttgccagtacttcctggg

SEQ ID NO: 1341952 - DNA, 25 bp, Homo sapien
gatcacggatcactacaacatcacc

SEQ ID NO: 1341953 - DNA, 25 bp, Homo sapien
gagtactatccttaggtgaagatgg

SEQ ID NO: 1341954 - DNA, 25 bp, Homo sapien
tcaatctaggcaatggatacagtag

SEQ ID NO: 1341955 - DNA, 25 bp, Homo sapien
tgaagatggatgaataagcaggtac

SEQ ID NO: 1341956 - DNA, 25 bp, Homo sapien
catatacaatggtgatctggtagca

SEQ ID NO: 1341957 - DNA, 25 bp, Homo sapien
gaaggtatcaccatcgatgcatgac

SEQ ID NO: 1341958 - DNA, 25 bp, Homo sapien
ggaagagtggtttctcagaacccaa

SEQ ID NO: 1341959 - DNA, 25 bp, Homo sapien
gatcgagaagcgataaacccgaccg

SEQ ID NO: 1341960 - DNA, 25 bp, Homo sapien
catcaagcttgagagactgcaggcc

SEQ ID NO: 1341961 - DNA, 25 bp, Homo sapien
cacagcaatgttcggcctggtggct

SEQ ID NO: 1341962 - DNA, 25 bp, Homo sapien
cagcattacgggcagcgctaaggaa

SEQ ID NO: 1341963 - DNA, 25 bp, Homo sapien
taagatggtattgacgagacgacaa

SEQ ID NO: 1341964 - DNA, 25 bp, Homo sapien
taggagcttcaaggtctacagactg

SEQ ID NO: 1341965 - DNA, 25 bp, Homo sapien
cagactgaacccagttagggtaggg

SEQ ID NO: 1341966 - DNA, 25 bp, Homo sapien
gacattgtggcctaggagcttcaag

SEQ ID NO: 1341967 - DNA, 25 bp, Homo sapien
ctgcggtaggtcgataaaggagaca

SEQ ID NO: 1341968 - DNA, 25 bp, Homo sapien
ctgctgcttgtgactgcctgccgga

SEQ ID NO: 1341969 - DNA, 25 bp, Homo sapien
ctgcttgtgactgcctgccggagag

SEQ ID NO: 1341970 - DNA, 25 bp, Homo sapien
gttctgctgcttgtgactgcctgcc

SEQ ID NO: 1341971 - DNA, 25 bp, Homo sapien
gactgcctgccggagagactggcat

SEQ ID NO: 1341972 - DNA, 25 bp, Homo sapien
gctccggaatgtttgccgggcgtca

SEQ ID NO: 1341973 - DNA, 25 bp, Homo sapien
tttttggccgcctctgaagtccctg

SEQ ID NO: 1341974 - DNA, 25 bp, Homo sapien
gccgaggctccggaatgtttgccgg

SEQ ID NO: 1341975 - DNA, 25 bp, Homo sapien
aagctcctccgttagcggctcgggc

SEQ ID NO: 1341976 - DNA, 25 bp, Homo sapien
ctccggacgacgactggaagaagga

SEQ ID NO: 1341977 - DNA, 25 bp, Homo sapien
tgtaagtgcagcctccacaagccat

SEQ ID NO: 1341978 - DNA, 25 bp, Homo sapien
gacggtggagccctggctcaacaag

SEQ ID NO: 1341979 - DNA, 25 bp, Homo sapien
tgaggtgtcctcagtcccctttctc

SEQ ID NO: 1341980 - DNA, 25 bp, Homo sapien
ggagcttcgcctggaacttagttgg

SEQ ID NO: 1341981 - DNA, 25 bp, Homo sapien
cagtacggcaaatatggcggaggta

SEQ ID NO: 1341982 - DNA, 25 bp, Homo sapien
gctgcccacctgttgtccggaacag

SEQ ID NO: 1341983 - DNA, 25 bp, Homo sapien
gccattctctgggcgggagcttcgc

SEQ ID NO: 1341984 - DNA, 25 bp, Homo sapien
tgtgcctacagttgggaagtataac

SEQ ID NO: 1341985 - DNA, 25 bp, Homo sapien
tataactgcgtgaaacacaagtgga

SEQ ID NO: 1341986 - DNA, 25 bp, Homo sapien
gctcctgaggccttttacaaactga

SEQ ID NO: 1341987 - DNA, 25 bp, Homo sapien
gccttacagagaagattgtgcctac

SEQ ID NO: 1341988 - DNA, 25 bp, Homo sapien
tctgaaatagaagatcttgcaaggg

SEQ ID NO: 1341989 - DNA, 25 bp, Homo sapien
ggtacttttgacttacatccagcat

SEQ ID NO: 1341990 - DNA, 25 bp, Homo sapien
ggttcagcaacatcagatgaccatg

SEQ ID NO: 1341991 - DNA, 25 bp, Homo sapien
catgaatttgatccatcagctgaca

SEQ ID NO: 1341992 - DNA, 25 bp, Homo sapien
tactatctacatccaccaaatggcc

SEQ ID NO: 1341993 - DNA, 25 bp, Homo sapien
gcagtattttgacgtatacacacaa

SEQ ID NO: 1341994 - DNA, 25 bp, Homo sapien
caacaggtgtaagagtactatctac

SEQ ID NO: 1341995 - DNA, 25 bp, Homo sapien
agccccaagagattggttaccttag

SEQ ID NO: 1341996 - DNA, 25 bp, Homo sapien
ggatgctgtatacttaacctgacgt

SEQ ID NO: 1341997 - DNA, 25 bp, Homo sapien
gtcatagctcaagcatccttaactt

SEQ ID NO: 1341998 - DNA, 25 bp, Homo sapien
taacttcctgcgttcatgcctttct

SEQ ID NO: 1341999 - DNA, 25 bp, Homo sapien
tatttcacattgtaacaggatgctg

SEQ ID NO: 1342000 - DNA, 25 bp, Homo sapien
agtactgttcgactacctgaagaag

SEQ ID NO: 1342001 - DNA, 25 bp, Homo sapien
tgatccgagaattcgtaacacagct

SEQ ID NO: 1342002 - DNA, 25 bp, Homo sapien
gatttatttaggaaggcgacatgcc

SEQ ID NO: 1342003 - DNA, 25 bp, Homo sapien
gaatagtccatgttagaccaaggcc

SEQ ID NO: 1342004 - DNA, 25 bp, Homo sapien
ggaattctcacctcggattatctta

SEQ ID NO: 1342005 - DNA, 25 bp, Homo sapien
taagaccagtgcctaccatgaacct

SEQ ID NO: 1342006 - DNA, 25 bp, Homo sapien
aattataggaatctcaagaagccac

SEQ ID NO: 1342007 - DNA, 25 bp, Homo sapien
tagggatactatggccaccaagttt

SEQ ID NO: 1342008 - DNA, 25 bp, Homo sapien
ttaaaatatacagtggaccagagat

SEQ ID NO: 1342009 - DNA, 25 bp, Homo sapien
gagaaaagataaagccggtatcaac

SEQ ID NO: 1342010 - DNA, 25 bp, Homo sapien
tttgaggttcagatagtgtttccgt

SEQ ID NO: 1342011 - DNA, 25 bp, Homo sapien
tgatcagtagtaagagccagagaat

SEQ ID NO: 1342012 - DNA, 25 bp, Homo sapien
cacagtcgtcagctagctttttgga

SEQ ID NO: 1342013 - DNA, 25 bp, Homo sapien
gagactctgaccttgggactaaccg

SEQ ID NO: 1342014 - DNA, 25 bp, Homo sapien
gctgttaggctaggaaagtgttcat

SEQ ID NO: 1342015 - DNA, 25 bp, Homo sapien
ggactaaccgtataggctcaaggga

SEQ ID NO: 1342016 - DNA, 25 bp, Homo sapien
gccaaaaggcgaagggtaaacagca

SEQ ID NO: 1342017 - DNA, 25 bp, Homo sapien
tacacattaatggaccaacaggtgg

SEQ ID NO: 1342018 - DNA, 25 bp, Homo sapien
gacccaaaacttgcccatatgactg

SEQ ID NO: 1342019 - DNA, 25 bp, Homo sapien
gaaaccacttcatgcagatatggat

SEQ ID NO: 1342020 - DNA, 25 bp, Homo sapien
tacttagatattggcacacacaagg

SEQ ID NO: 1342021 - DNA, 25 bp, Homo sapien
ttaacatatgttcggactgcttccc

SEQ ID NO: 1342022 - DNA, 25 bp, Homo sapien
gaaattagcattcaggccttacccc

SEQ ID NO: 1342023 - DNA, 25 bp, Homo sapien
cacacaaggaacaactgttggcagg

SEQ ID NO: 1342024 - DNA, 25 bp, Homo sapien
tataagctttatgaactgctctgct

SEQ ID NO: 1342025 - DNA, 25 bp, Homo sapien
gtcttatgcatttgcctctagtgtt

SEQ ID NO: 1342026 - DNA, 25 bp, Homo sapien
caccatgaacatacgtggactacat

SEQ ID NO: 1342027 - DNA, 25 bp, Homo sapien
gtggcctcctttgttgtcttatgca

SEQ ID NO: 1342028 - DNA, 25 bp, Homo sapien
tactgcatcactggtagagggtacc

SEQ ID NO: 1342029 - DNA, 25 bp, Homo sapien
tgagttgccctttgtaccgctgcca

SEQ ID NO: 1342030 - DNA, 25 bp, Homo sapien
ggtggacttagagtggccagacccc

SEQ ID NO: 1342031 - DNA, 25 bp, Homo sapien
ggtcatatgccaaaagtaacggttg

SEQ ID NO: 1342032 - DNA, 25 bp, Homo sapien
tcccactctaaagcctgttgatttg

SEQ ID NO: 1342033 - DNA, 25 bp, Homo sapien
actctaaagcctgttgatttggggg

SEQ ID NO: 1342034 - DNA, 25 bp, Homo sapien
ccactctaaagcctgttgatttggg

SEQ ID NO: 1342035 - DNA, 25 bp, Homo sapien
tctaaagcctgttgatttgggggag

SEQ ID NO: 1342036 - DNA, 25 bp, Homo sapien
gagtgaaagcccacagtacctggcc

SEQ ID NO: 1342037 - DNA, 25 bp, Homo sapien
tatatccatgctagtcttcacaagg

SEQ ID NO: 1342038 - DNA, 25 bp, Homo sapien
tctaactattccagaacgaggagtg

SEQ ID NO: 1342039 - DNA, 25 bp, Homo sapien
ccatttcaaccaagggatagcctaa

SEQ ID NO: 1342040 - DNA, 25 bp, Homo sapien
tactttgtcactattagcgctgcag

SEQ ID NO: 1342041 - DNA, 25 bp, Homo sapien
gagaactgccagtttgatccagaga

SEQ ID NO: 1342042 - DNA, 25 bp, Homo sapien
gacgactccggtgagatgattagtt

SEQ ID NO: 1342043 - DNA, 25 bp, Homo sapien
gaagtctattcagcatcctacagtg

SEQ ID NO: 1342044 - DNA, 25 bp, Homo sapien
tatgcagttacaaaggaattttaat

SEQ ID NO: 1342045 - DNA, 25 bp, Homo sapien
atgcagttacaaaggaattttaata

SEQ ID NO: 1342046 - DNA, 25 bp, Homo sapien
tgcagttacaaaggaattttaatac

SEQ ID NO: 1342047 - DNA, 25 bp, Homo sapien
tccaggagccatctaaaggtaaaaa

SEQ ID NO: 1342048 - DNA, 25 bp, Homo sapien
ttttcctggccggacatgtggcaca

SEQ ID NO: 1342049 - DNA, 25 bp, Homo sapien
tcatgccatgaagcagcatcctgaa

SEQ ID NO: 1342050 - DNA, 25 bp, Homo sapien
ggtgccagggactcacaatatatga

SEQ ID NO: 1342051 - DNA, 25 bp, Homo sapien
tcgtagctacttagcaggctaaggc

SEQ ID NO: 1342052 - DNA, 25 bp, Homo sapien
gcctatagtcgtagctacttagcag

SEQ ID NO: 1342053 - DNA, 25 bp, Homo sapien
gtggtgagctgctatgattacgcca

SEQ ID NO: 1342054 - DNA, 25 bp, Homo sapien
aaggaagaaacgagccaggcgtaat

SEQ ID NO: 1342055 - DNA, 25 bp, Homo sapien
cagggataattctagggacacagca

SEQ ID NO: 1342056 - DNA, 25 bp, Homo sapien
aaaactcaacgggacatgctggcaa

SEQ ID NO: 1342057 - DNA, 25 bp, Homo sapien
catttggattcacactattgccggg

SEQ ID NO: 1342058 - DNA, 25 bp, Homo sapien
taagtctttgctcactgaacgaggc

SEQ ID NO: 1342059 - DNA, 25 bp, Homo sapien
ttagcctctgactgtttgctcagct

SEQ ID NO: 1342060 - DNA, 25 bp, Homo sapien
aatgtccagcttgttattagcctct

SEQ ID NO: 1342061 - DNA, 25 bp, Homo sapien
tataggaatataccaggctcccagc

SEQ ID NO: 1342062 - DNA, 25 bp, Homo sapien
agtgaaagtgatataggaatatacc

SEQ ID NO: 1342063 - DNA, 25 bp, Homo sapien
catcgcacctaccaccaggaaggat

SEQ ID NO: 1342064 - DNA, 25 bp, Homo sapien
tatgcagaccctaggagattcacag

SEQ ID NO: 1342065 - DNA, 25 bp, Homo sapien
gggaacttatcatctgggccgtcag

SEQ ID NO: 1342066 - DNA, 25 bp, Homo sapien
tatgacaggtggttgctggtacccc

SEQ ID NO: 1342067 - DNA, 25 bp, Homo sapien
taaggttcacatgtacgtccaccca

SEQ ID NO: 1342068 - DNA, 25 bp, Homo sapien
aagtagactacttccctggtagctg

SEQ ID NO: 1342069 - DNA, 25 bp, Homo sapien
ctggtagctggcctggacccaagaa

SEQ ID NO: 1342070 - DNA, 25 bp, Homo sapien
gacccaagaagatggcttactgaag

SEQ ID NO: 1342071 - DNA, 25 bp, Homo sapien
caccaaagaccattccaatataagt

SEQ ID NO: 1342072 - DNA, 25 bp, Homo sapien
tatttaaaccaatgaagtttgtcca

SEQ ID NO: 1342073 - DNA, 25 bp, Homo sapien
ccaaagaccattccaatataagtta

SEQ ID NO: 1342074 - DNA, 25 bp, Homo sapien
ttgtccacgtgaaaatataatctcc

SEQ ID NO: 1342075 - DNA, 25 bp, Homo sapien
cagatgttggcgaggttgagaaaaa

SEQ ID NO: 1342076 - DNA, 25 bp, Homo sapien
caatgaaaacgcaccaaccctaata

SEQ ID NO: 1342077 - DNA, 25 bp, Homo sapien
ttcccaatcgatttctccagaagat

SEQ ID NO: 1342078 - DNA, 25 bp, Homo sapien
tacatgcagcaaacaaatataggaa

SEQ ID NO: 1342079 - DNA, 25 bp, Homo sapien
aggacctcaccagccagcataagga

SEQ ID NO: 1342080 - DNA, 25 bp, Homo sapien
ttttgatgcagtaagcagggtcacc

SEQ ID NO: 1342081 - DNA, 25 bp, Homo sapien
caagaccactttagctagccaagcc

SEQ ID NO: 1342082 - DNA, 25 bp, Homo sapien
taaaaatttcttaccagccaggctc

SEQ ID NO: 1342083 - DNA, 25 bp, Homo sapien
ttcagtagactaaaactctctcaaa

SEQ ID NO: 1342084 - DNA, 25 bp, Homo sapien
tttcagtagactaaaactctctcaa

SEQ ID NO: 1342085 - DNA, 25 bp, Homo sapien
aaagttggccagtcatggtcacaag

SEQ ID NO: 1342086 - DNA, 25 bp, Homo sapien
tggccagtcatggtcacaagtgtct

SEQ ID NO: 1342087 - DNA, 25 bp, Homo sapien
gtcatggtcacaagtgtctgtagtc

SEQ ID NO: 1342088 - DNA, 25 bp, Homo sapien
ctaagatggggggataaattgagcc

SEQ ID NO: 1342089 - DNA, 25 bp, Homo sapien
tgttgtaaggtcacagaactgttac

SEQ ID NO: 1342090 - DNA, 25 bp, Homo sapien
aaataaacaattccatacgcaaagt

SEQ ID NO: 1342091 - DNA, 25 bp, Homo sapien
tcctccaggcattgtgttcacagct

SEQ ID NO: 1342092 - DNA, 25 bp, Homo sapien
tctcttggccatactaaggattaac

SEQ ID NO: 1342093 - DNA, 25 bp, Homo sapien
tagtgtacctacaatgccaccttct

SEQ ID NO: 1342094 - DNA, 25 bp, Homo sapien
tcatcatacacagaggcctagtgta

SEQ ID NO: 1342095 - DNA, 25 bp, Homo sapien
gccactgcaatctgaagatacctca

SEQ ID NO: 1342096 - DNA, 25 bp, Homo sapien
gccaccttctaaaatgggacacaaa

SEQ ID NO: 1342097 - DNA, 25 bp, Homo sapien
taaagcctcttgtaggaggaatggc

SEQ ID NO: 1342098 - DNA, 25 bp, Homo sapien
taactgggatgctaatgacagaagc

SEQ ID NO: 1342099 - DNA, 25 bp, Homo sapien
cagaagctgcactgtatcctgtgag

SEQ ID NO: 1342100 - DNA, 25 bp, Homo sapien
agcacagaaggaagcttaaagcctc

SEQ ID NO: 1342101 - DNA, 25 bp, Homo sapien
agggtatcagcagattcccatctgt

SEQ ID NO: 1342102 - DNA, 25 bp, Homo sapien
tgcaagggtatcagcagattcccat

SEQ ID NO: 1342103 - DNA, 25 bp, Homo sapien
caagggtatcagcagattcccatct

SEQ ID NO: 1342104 - DNA, 25 bp, Homo sapien
ctgcaagggtatcagcagattccca

SEQ ID NO: 1342105 - DNA, 25 bp, Homo sapien
tactgtggcgtacattaagataaac

SEQ ID NO: 1342106 - DNA, 25 bp, Homo sapien
tgtaagagcagaattatactgcgtg

SEQ ID NO: 1342107 - DNA, 25 bp, Homo sapien
gccaactattgtagttgtaagagca

SEQ ID NO: 1342108 - DNA, 25 bp, Homo sapien
tatactgcgtgcagagtactgtggc

SEQ ID NO: 1342109 - DNA, 25 bp, Homo sapien
tcaaaaccctgaaccatctcttaca

SEQ ID NO: 1342110 - DNA, 25 bp, Homo sapien
atcaaaaccctgaaccatctcttac

SEQ ID NO: 1342111 - DNA, 25 bp, Homo sapien
cagcccagccttcaaactccacagc

SEQ ID NO: 1342112 - DNA, 25 bp, Homo sapien
cagaagaaagagggtgtcagcccag

SEQ ID NO: 1342113 - DNA, 25 bp, Homo sapien
tcacacaggagagggtgaactgcag

SEQ ID NO: 1342114 - DNA, 25 bp, Homo sapien
gaaagagggtgtcagcccagccttc

SEQ ID NO: 1342115 - DNA, 25 bp, Homo sapien
ctctgcttcgccacaggaatagatc

SEQ ID NO: 1342116 - DNA, 25 bp, Homo sapien
ttgcattcctctgcttcgccacagg

SEQ ID NO: 1342117 - DNA, 25 bp, Homo sapien
gcttcgccacaggaatagatctttg

SEQ ID NO: 1342118 - DNA, 25 bp, Homo sapien
tgcattcctctgcttcgccacagga

SEQ ID NO: 1342119 - DNA, 25 bp, Homo sapien
tgtattcaaaaatccctcgttatta

SEQ ID NO: 1342120 - DNA, 25 bp, Homo sapien
aatccctcgttattaacttctagct

SEQ ID NO: 1342121 - DNA, 25 bp, Homo sapien
cctcgttattaacttctagctttat

SEQ ID NO: 1342122 - DNA, 25 bp, Homo sapien
ccatgtattcaaaaatccctcgtta

SEQ ID NO: 1342123 - DNA, 25 bp, Homo sapien
gcagaatcatgaacagtgcattgta

SEQ ID NO: 1342124 - DNA, 25 bp, Homo sapien
atctcctgtgaaatacgcaatggcc

SEQ ID NO: 1342125 - DNA, 25 bp, Homo sapien
tgcatctcctgtgaaatacgcaatg

SEQ ID NO: 1342126 - DNA, 25 bp, Homo sapien
atagagcagtccatattttcccagc

SEQ ID NO: 1342127 - DNA, 25 bp, Homo sapien
ctttctcatccccagtaagaacttt

SEQ ID NO: 1342128 - DNA, 25 bp, Homo sapien
tctcatccccagtaagaactttctt

SEQ ID NO: 1342129 - DNA, 25 bp, Homo sapien
tcatccccagtaagaactttcttta

SEQ ID NO: 1342130 - DNA, 25 bp, Homo sapien
tcagagagccactatgtctttctca

SEQ ID NO: 1342131 - DNA, 25 bp, Homo sapien
gctgttaggacatcgtttatcagaa

SEQ ID NO: 1342132 - DNA, 25 bp, Homo sapien
ttccagatcaaatgccaagtcagag

SEQ ID NO: 1342133 - DNA, 25 bp, Homo sapien
tatcagaataaaagcatatccttcc

SEQ ID NO: 1342134 - DNA, 25 bp, Homo sapien
tatgcaccatttgctgctgttagga

SEQ ID NO: 1342135 - DNA, 25 bp, Homo sapien
ggcagctacaaaggctccaataatc

SEQ ID NO: 1342136 - DNA, 25 bp, Homo sapien
ctggcagctacaaaggctccaataa

SEQ ID NO: 1342137 - DNA, 25 bp, Homo sapien
cagctacaaaggctccaataatcat

SEQ ID NO: 1342138 - DNA, 25 bp, Homo sapien
ctacaaaggctccaataatcattgc

SEQ ID NO: 1342139 - DNA, 25 bp, Homo sapien
aactccttcagcaaacattgtaaac

SEQ ID NO: 1342140 - DNA, 25 bp, Homo sapien
ttgagtaaaactccttcagcaaaca

SEQ ID NO: 1342141 - DNA, 25 bp, Homo sapien
tctcagaactgtaaacattggcaag

SEQ ID NO: 1342142 - DNA, 25 bp, Homo sapien
tggagaaccttctcagaactgtaaa

SEQ ID NO: 1342143 - DNA, 25 bp, Homo sapien
tgtgctgaacagtcccgtgatttgg

SEQ ID NO: 1342144 - DNA, 25 bp, Homo sapien
tctttgtgctgaacagtcccgtgat

SEQ ID NO: 1342145 - DNA, 25 bp, Homo sapien
gaacagtcccgtgatttggttccca

SEQ ID NO: 1342146 - DNA, 25 bp, Homo sapien
tttctttgtgctgaacagtcccgtg

SEQ ID NO: 1342147 - DNA, 25 bp, Homo sapien
ctttcgaggtacatttctgtcaagg

SEQ ID NO: 1342148 - DNA, 25 bp, Homo sapien
tcaaggtcaggaaacttgactactc

SEQ ID NO: 1342149 - DNA, 25 bp, Homo sapien
gaggtacatttctgtcaaggtcagg

SEQ ID NO: 1342150 - DNA, 25 bp, Homo sapien
ggaaacttgactactctgagcgcct

SEQ ID NO: 1342151 - DNA, 25 bp, Homo sapien
ggccaagtccaacacatagtgagga

SEQ ID NO: 1342152 - DNA, 25 bp, Homo sapien
gccaagtccaacacatagtgaggag

SEQ ID NO: 1342153 - DNA, 25 bp, Homo sapien
tcgggcggccgcttgtcccatcttg

SEQ ID NO: 1342154 - DNA, 25 bp, Homo sapien
ttgtcccatcttgtccgagtctaca

SEQ ID NO: 1342155 - DNA, 25 bp, Homo sapien
ggccgcttgtcccatcttgtccgag

SEQ ID NO: 1342156 - DNA, 25 bp, Homo sapien
accccgctgatgtagcctcgggcgg

SEQ ID NO: 1342157 - DNA, 25 bp, Homo sapien
gttgaggatgcgtacgtccccagag

SEQ ID NO: 1342158 - DNA, 25 bp, Homo sapien
caggcataacggctcaaaagtcacc

SEQ ID NO: 1342159 - DNA, 25 bp, Homo sapien
cagatctctgcaacgatttcacaca

SEQ ID NO: 1342160 - DNA, 25 bp, Homo sapien
gaataattgtctgctgggttgagga

SEQ ID NO: 1342161 - DNA, 25 bp, Homo sapien
tcctttaacccgagcatgctgacgt

SEQ ID NO: 1342162 - DNA, 25 bp, Homo sapien
catctcggagtgtggaggatttcgc

SEQ ID NO: 1342163 - DNA, 25 bp, Homo sapien
ggaaggagctcacgccgtaaaagcc

SEQ ID NO: 1342164 - DNA, 25 bp, Homo sapien
tgctgacgtctatgaacttccgcca

SEQ ID NO: 1342165 - DNA, 25 bp, Homo sapien
ggggcctagcggctcgggggcctgc

SEQ ID NO: 1342166 - DNA, 25 bp, Homo sapien
caggagttggggaccgcagactagg

SEQ ID NO: 1342167 - DNA, 25 bp, Homo sapien
ggcctagcggctcgggggcctgcag

SEQ ID NO: 1342168 - DNA, 25 bp, Homo sapien
ctggcggcggggcctagcggctcgg

SEQ ID NO: 1342169 - DNA, 25 bp, Homo sapien
caggcccatgctcctaaggcacttg

SEQ ID NO: 1342170 - DNA, 25 bp, Homo sapien
cccatgctcctaaggcacttggttc

SEQ ID NO: 1342171 - DNA, 25 bp, Homo sapien
aggcacttggttcagtaggaatatc

SEQ ID NO: 1342172 - DNA, 25 bp, Homo sapien
ggcacttggttcagtaggaatatca

SEQ ID NO: 1342173 - DNA, 25 bp, Homo sapien
gaaatattgctacaaatctgtgccc

SEQ ID NO: 1342174 - DNA, 25 bp, Homo sapien
cagaagtaactgcataccacctata

SEQ ID NO: 1342175 - DNA, 25 bp, Homo sapien
tgagtatattgccaacaagagagaa

SEQ ID NO: 1342176 - DNA, 25 bp, Homo sapien
ggaagctatccctacattagaacaa

SEQ ID NO: 1342177 - DNA, 25 bp, Homo sapien
aatatttccataagagctgggaaag

SEQ ID NO: 1342178 - DNA, 25 bp, Homo sapien
aaatatttccataagagctgggaaa

SEQ ID NO: 1342179 - DNA, 25 bp, Homo sapien
taaatatttccataagagctgggaa

SEQ ID NO: 1342180 - DNA, 25 bp, Homo sapien
tggaattccgtagatccccagcaac

SEQ ID NO: 1342181 - DNA, 25 bp, Homo sapien
tcctgcttcagccataagtttgttg

SEQ ID NO: 1342182 - DNA, 25 bp, Homo sapien
agagtaagtctagggtcaaatcctg

SEQ ID NO: 1342183 - DNA, 25 bp, Homo sapien
taggctgacacctttactgtgctca

SEQ ID NO: 1342184 - DNA, 25 bp, Homo sapien
tgtttctaagtggaattctgccttt

SEQ ID NO: 1342185 - DNA, 25 bp, Homo sapien
ctgtttgggttaatgagaaacagta

SEQ ID NO: 1342186 - DNA, 25 bp, Homo sapien
gtttaataccttataggatttgcta

SEQ ID NO: 1342187 - DNA, 25 bp, Homo sapien
taccttataggatttgctaccaaaa

SEQ ID NO: 1342188 - DNA, 25 bp, Homo sapien
atataataatgaagttccaacagct

SEQ ID NO: 1342189 - DNA, 25 bp, Homo sapien
aagttccaacagctactaatgacaa

SEQ ID NO: 1342190 - DNA, 25 bp, Homo sapien
gttccaacagctactaatgacaata

SEQ ID NO: 1342191 - DNA, 25 bp, Homo sapien
tccaacagctactaatgacaataaa

SEQ ID NO: 1342192 - DNA, 25 bp, Homo sapien
taaggcactggatgtgggtatgctc

SEQ ID NO: 1342193 - DNA, 25 bp, Homo sapien
ccagtttgggcactcatttcatgaa

SEQ ID NO: 1342194 - DNA, 25 bp, Homo sapien
catctacagttgtgtggcccgcttt

SEQ ID NO: 1342195 - DNA, 25 bp, Homo sapien
tgttcttgaacagaccactgctgac

SEQ ID NO: 1342196 - DNA, 25 bp, Homo sapien
ttcatgccaacatagggtggcccca

SEQ ID NO: 1342197 - DNA, 25 bp, Homo sapien
tattacgtaggttgaggagaacacc

SEQ ID NO: 1342198 - DNA, 25 bp, Homo sapien
tacccttaggtagaggcaagaacca

SEQ ID NO: 1342199 - DNA, 25 bp, Homo sapien
tagacagctttcgagccatattgcc

SEQ ID NO: 1342200 - DNA, 25 bp, Homo sapien
ttctatcaccttctaagagaccaac

SEQ ID NO: 1342201 - DNA, 25 bp, Homo sapien
tatcaccttctaagagaccaacaga

SEQ ID NO: 1342202 - DNA, 25 bp, Homo sapien
ttatttctatcaccttctaagagac

SEQ ID NO: 1342203 - DNA, 25 bp, Homo sapien
cagaatccaatggtttcctaggttt

SEQ ID NO: 1342204 - DNA, 25 bp, Homo sapien
cagacagacagaaaactcgagaata

SEQ ID NO: 1342205 - DNA, 25 bp, Homo sapien
agacagacagaaaactcgagaatat

SEQ ID NO: 1342206 - DNA, 25 bp, Homo sapien
tcctttttatgagcattagactgaa

SEQ ID NO: 1342207 - DNA, 25 bp, Homo sapien
gaaaagtctgtagaacccagtgatc

SEQ ID NO: 1342208 - DNA, 25 bp, Homo sapien
catgcttgtctatgctgtgaatata

SEQ ID NO: 1342209 - DNA, 25 bp, Homo sapien
gcattagactgaatgttgaacatag

SEQ ID NO: 1342210 - DNA, 25 bp, Homo sapien
gggtctaatagatcttgattttaga

SEQ ID NO: 1342211 - DNA, 25 bp, Homo sapien
gtctaatagatcttgattttagatg

SEQ ID NO: 1342212 - DNA, 25 bp, Homo sapien
tagggtctaatagatcttgatttta

SEQ ID NO: 1342213 - DNA, 25 bp, Homo sapien
gatagggtctaatagatcttgattt

SEQ ID NO: 1342214 - DNA, 25 bp, Homo sapien
aagaaacaaacataagtatttccat

SEQ ID NO: 1342215 - DNA, 25 bp, Homo sapien
caggatcagcctacttttaaaagat

SEQ ID NO: 1342216 - DNA, 25 bp, Homo sapien
agaatccgctgaagaggctttaatc

SEQ ID NO: 1342217 - DNA, 25 bp, Homo sapien
agtttcatactaagtacaatgagaa

SEQ ID NO: 1342218 - DNA, 25 bp, Homo sapien
cggccaggtctttgtaagaagtaca

SEQ ID NO: 1342219 - DNA, 25 bp, Homo sapien
caaaattactctttctaggttcagg

SEQ ID NO: 1342220 - DNA, 25 bp, Homo sapien
aaattactctttctaggttcaggct

SEQ ID NO: 1342221 - DNA, 25 bp, Homo sapien
tgttgtcacagtaccaagtgtgaaa

SEQ ID NO: 1342222 - DNA, 25 bp, Homo sapien
acagaaaactacttgctgctgtgat

SEQ ID NO: 1342223 - DNA, 25 bp, Homo sapien
aatgtgaagtcctagttatacagac

SEQ ID NO: 1342224 - DNA, 25 bp, Homo sapien
gctgtgatagcattgagggcactcc

SEQ ID NO: 1342225 - DNA, 25 bp, Homo sapien
tctaatgaattggtaggagctggct

SEQ ID NO: 1342226 - DNA, 25 bp, Homo sapien
tatagggacgggaaagccatgacga

SEQ ID NO: 1342227 - DNA, 25 bp, Homo sapien
ggagttgtgctagaagaaggccata

SEQ ID NO: 1342228 - DNA, 25 bp, Homo sapien
cattagactggcttgtatagggacg

SEQ ID NO: 1342229 - DNA, 25 bp, Homo sapien
ccaagtactcttaaaagttcagtgt

SEQ ID NO: 1342230 - DNA, 25 bp, Homo sapien
catactaagtttcccaagtactctt

SEQ ID NO: 1342231 - DNA, 25 bp, Homo sapien
agttcagtgtgctaggctggatgca

SEQ ID NO: 1342232 - DNA, 25 bp, Homo sapien
tcttgattaccaatattgtgcctta

SEQ ID NO: 1342233 - DNA, 25 bp, Homo sapien
cctggataagggtgttctataactc

SEQ ID NO: 1342234 - DNA, 25 bp, Homo sapien
cacggtttcatcaatggtggcagct

SEQ ID NO: 1342235 - DNA, 25 bp, Homo sapien
tcctaagcttccctagaagtaggtg

SEQ ID NO: 1342236 - DNA, 25 bp, Homo sapien
ccactaagagtctgagatttgaccc

SEQ ID NO: 1342237 - DNA, 25 bp, Homo sapien
ctttgatattgccttagacgcggat

SEQ ID NO: 1342238 - DNA, 25 bp, Homo sapien
tattgccttagacgcggatgtagca

SEQ ID NO: 1342239 - DNA, 25 bp, Homo sapien
caaatgtcaggggtatagccatagt

SEQ ID NO: 1342240 - DNA, 25 bp, Homo sapien
acgcggatgtagcaagagcttcttc

SEQ ID NO: 1342241 - DNA, 25 bp, Homo sapien
gcttgcttatcaaggacatccaact

SEQ ID NO: 1342242 - DNA, 25 bp, Homo sapien
ggccaagattatctctgcttgctta

SEQ ID NO: 1342243 - DNA, 25 bp, Homo sapien
aagattatctctgcttgcttatcaa

SEQ ID NO: 1342244 - DNA, 25 bp, Homo sapien
ggacatccaacttctctaggatttt

SEQ ID NO: 1342245 - DNA, 25 bp, Homo sapien
gaagatgcaaagggttcttccgcga

SEQ ID NO: 1342246 - DNA, 25 bp, Homo sapien
aagatgcaaagggttcttccgcgaa

SEQ ID NO: 1342247 - DNA, 25 bp, Homo sapien
agatgcaaagggttcttccgcgaac

SEQ ID NO: 1342248 - DNA, 25 bp, Homo sapien
ggtccaggccccgctggagaacgtc

SEQ ID NO: 1342249 - DNA, 25 bp, Homo sapien
tatttcgcctcccaccctcatgcaa

SEQ ID NO: 1342250 - DNA, 25 bp, Homo sapien
tcttccaacccttccgcaccctgaa

SEQ ID NO: 1342251 - DNA, 25 bp, Homo sapien
gcggtcccacacttgcctgacctca

SEQ ID NO: 1342252 - DNA, 25 bp, Homo sapien
tcctttcctccctcttctggctccg

SEQ ID NO: 1342253 - DNA, 25 bp, Homo sapien
ctcctttcctccctcttctggctcc

SEQ ID NO: 1342254 - DNA, 25 bp, Homo sapien
ggtgtagtgatgcatatctgcagtc

SEQ ID NO: 1342255 - DNA, 25 bp, Homo sapien
taggttaaggtctattttagtctca

SEQ ID NO: 1342256 - DNA, 25 bp, Homo sapien
taaggagagttagtcgaaaaattgc

SEQ ID NO: 1342257 - DNA, 25 bp, Homo sapien
tgggctcaatcctagaacttctttc

SEQ ID NO: 1342258 - DNA, 25 bp, Homo sapien
ttggctctgagttgctcagctgaaa

SEQ ID NO: 1342259 - DNA, 25 bp, Homo sapien
atgctaagtctcatcctgggagagg

SEQ ID NO: 1342260 - DNA, 25 bp, Homo sapien
aactacatgtcagaactggatggga

SEQ ID NO: 1342261 - DNA, 25 bp, Homo sapien
cctctacctaggtgactttgagcaa

SEQ ID NO: 1342262 - DNA, 25 bp, Homo sapien
taatttaatgagatcagtgaccagc

SEQ ID NO: 1342263 - DNA, 25 bp, Homo sapien
caggtgcattgtataggcgttagca

SEQ ID NO: 1342264 - DNA, 25 bp, Homo sapien
ttgtataggcgttagcaatactgcc

SEQ ID NO: 1342265 - DNA, 25 bp, Homo sapien
cctcattatgcactcattagacagt

SEQ ID NO: 1342266 - DNA, 25 bp, Homo sapien
tagttgatgcaggtgcattgtatag

SEQ ID NO: 1342267 - DNA, 25 bp, Homo sapien
cgttgatatactgtgactaagtgcc

SEQ ID NO: 1342268 - DNA, 25 bp, Homo sapien
taagaaaagctttatccaatccagg

SEQ ID NO: 1342269 - DNA, 25 bp, Homo sapien
gcacctaagttaaaggcttggcaaa

SEQ ID NO: 1342270 - DNA, 25 bp, Homo sapien
tgcctgtgactagtgaccaatgaac

SEQ ID NO: 1342271 - DNA, 25 bp, Homo sapien
caaaggacttacacaaagggatctg

SEQ ID NO: 1342272 - DNA, 25 bp, Homo sapien
ggtatcttatgctgggctgcctaca

SEQ ID NO: 1342273 - DNA, 25 bp, Homo sapien
aaaccattcttaactcagggacacg

SEQ ID NO: 1342274 - DNA, 25 bp, Homo sapien
tcttgtaacccgagagtgacagttc

SEQ ID NO: 1342275 - DNA, 25 bp, Homo sapien
catctcatttaaatggcgctcattt

SEQ ID NO: 1342276 - DNA, 25 bp, Homo sapien
gaaattaccgacttcctcagcctga

SEQ ID NO: 1342277 - DNA, 25 bp, Homo sapien
gaggtaatcccagggcacagcttag

SEQ ID NO: 1342278 - DNA, 25 bp, Homo sapien
ttagttaacctgaagatctcgctgg

SEQ ID NO: 1342279 - DNA, 25 bp, Homo sapien
taaaattgcatgcacctgagatccc

SEQ ID NO: 1342280 - DNA, 25 bp, Homo sapien
aatgccttaaaaatctcaggtctgg

SEQ ID NO: 1342281 - DNA, 25 bp, Homo sapien
gtcattaagataagtacccttccca

SEQ ID NO: 1342282 - DNA, 25 bp, Homo sapien
gatctgctaagaagtgacaatcaga

SEQ ID NO: 1342283 - DNA, 25 bp, Homo sapien
ctaactagatgtatatggtgccaat

SEQ ID NO: 1342284 - DNA, 25 bp, Homo sapien
tacttcacttgacacgatgtgccta

SEQ ID NO: 1342285 - DNA, 25 bp, Homo sapien
gatgtgcctaccaacaataagtagt

SEQ ID NO: 1342286 - DNA, 25 bp, Homo sapien
tgaacctaatgagccatgcaaggag

SEQ ID NO: 1342287 - DNA, 25 bp, Homo sapien
caatgggtcaatagttcatatggac

SEQ ID NO: 1342288 - DNA, 25 bp, Homo sapien
ttaagccagagctgggaatgcctct

SEQ ID NO: 1342289 - DNA, 25 bp, Homo sapien
aatgcctctgggtcatccacatcag

SEQ ID NO: 1342290 - DNA, 25 bp, Homo sapien
gggaatgcctctgggtcatccacat

SEQ ID NO: 1342291 - DNA, 25 bp, Homo sapien
tgcctctgggtcatccacatcagga

SEQ ID NO: 1342292 - DNA, 25 bp, Homo sapien
cattgttagctagtgtctacattaa

SEQ ID NO: 1342293 - DNA, 25 bp, Homo sapien
acattgttagctagtgtctacatta

SEQ ID NO: 1342294 - DNA, 25 bp, Homo sapien
gcaccaatgtgaaagcatgctaagg

SEQ ID NO: 1342295 - DNA, 25 bp, Homo sapien
ggaacaaagtatcattacactggca

SEQ ID NO: 1342296 - DNA, 25 bp, Homo sapien
tacactggcaatggtaagttacccc

SEQ ID NO: 1342297 - DNA, 25 bp, Homo sapien
cacatactgttcaaggcattggaga

SEQ ID NO: 1342298 - DNA, 25 bp, Homo sapien
aaggtctccaaaattgatctccagc

SEQ ID NO: 1342299 - DNA, 25 bp, Homo sapien
ccaaggtctccaaaattgatctcca

SEQ ID NO: 1342300 - DNA, 25 bp, Homo sapien
ggtctccaaaattgatctccagctg

SEQ ID NO: 1342301 - DNA, 25 bp, Homo sapien
caaggtctccaaaattgatctccag

SEQ ID NO: 1342302 - DNA, 25 bp, Homo sapien
aaatatgcccttcagatcaggactg

SEQ ID NO: 1342303 - DNA, 25 bp, Homo sapien
ggactgccatgtgaatccttgatga

SEQ ID NO: 1342304 - DNA, 25 bp, Homo sapien
tctcaaaattgcaggtaataccagc

SEQ ID NO: 1342305 - DNA, 25 bp, Homo sapien
tcacaatcaacccaaacggctgaag

SEQ ID NO: 1342306 - DNA, 25 bp, Homo sapien
ctcaaacttttaactcaacaatctg

SEQ ID NO: 1342307 - DNA, 25 bp, Homo sapien
caaacttttaactcaacaatctgcc

SEQ ID NO: 1342308 - DNA, 25 bp, Homo sapien
acttttaactcaacaatctgcccac

SEQ ID NO: 1342309 - DNA, 25 bp, Homo sapien
ggtgcacgcaaccacatccagataa

SEQ ID NO: 1342310 - DNA, 25 bp, Homo sapien
tgactttctccaatacagttgaccc

SEQ ID NO: 1342311 - DNA, 25 bp, Homo sapien
ccttgaacaacgtggctttgaacat

SEQ ID NO: 1342312 - DNA, 25 bp, Homo sapien
caggaagccgcactgaaacattcct

SEQ ID NO: 1342313 - DNA, 25 bp, Homo sapien
tgtcagtcttgagacaagcaagccc

SEQ ID NO: 1342314 - DNA, 25 bp, Homo sapien
cagccctttaatgatccccagtttg

SEQ ID NO: 1342315 - DNA, 25 bp, Homo sapien
taacaccataataccacagcccttt

SEQ ID NO: 1342316 - DNA, 25 bp, Homo sapien
gagtgtcctggccattatatatggt

SEQ ID NO: 1342317 - DNA, 25 bp, Homo sapien
ttccttagacaaaatgcacattgcc

SEQ ID NO: 1342318 - DNA, 25 bp, Homo sapien
tacaaattgatcaaaggactaaatt

SEQ ID NO: 1342319 - DNA, 25 bp, Homo sapien
aacataattacaaattgatcaaagg

SEQ ID NO: 1342320 - DNA, 25 bp, Homo sapien
taattacaaattgatcaaaggacta

SEQ ID NO: 1342321 - DNA, 25 bp, Homo sapien
tagaatatgtgataatacagtttat

SEQ ID NO: 1342322 - DNA, 25 bp, Homo sapien
gaatagccttccactcatccaaagt

SEQ ID NO: 1342323 - DNA, 25 bp, Homo sapien
tgcccggtccttattttgaatagcc

SEQ ID NO: 1342324 - DNA, 25 bp, Homo sapien
tgcccatcagcaccttcatttggtt

SEQ ID NO: 1342325 - DNA, 25 bp, Homo sapien
tatgaagaacaaatcccttcttcca

SEQ ID NO: 1342326 - DNA, 25 bp, Homo sapien
tctagaactggctttacgaatacta

SEQ ID NO: 1342327 - DNA, 25 bp, Homo sapien
gattattcaaggatgagggtaccct

SEQ ID NO: 1342328 - DNA, 25 bp, Homo sapien
taactaagcaacttggtagagacca

SEQ ID NO: 1342329 - DNA, 25 bp, Homo sapien
tcaagttttatacctggtagagagc

SEQ ID NO: 1342330 - DNA, 25 bp, Homo sapien
tctagcatgggagacaggagactgt

SEQ ID NO: 1342331 - DNA, 25 bp, Homo sapien
gcactctagcatgggagacaggaga

SEQ ID NO: 1342332 - DNA, 25 bp, Homo sapien
actctagcatgggagacaggagact

SEQ ID NO: 1342333 - DNA, 25 bp, Homo sapien
ctctagcatgggagacaggagactg

SEQ ID NO: 1342334 - DNA, 25 bp, Homo sapien
cccatcattaacagtgctcaccata

SEQ ID NO: 1342335 - DNA, 25 bp, Homo sapien
gaatcactgtcctaaataacctgta

SEQ ID NO: 1342336 - DNA, 25 bp, Homo sapien
aaaaagtttaaggtgcggcagctca

SEQ ID NO: 1342337 - DNA, 25 bp, Homo sapien
gctcaccataagagcaaattctttc

SEQ ID NO: 1342338 - DNA, 25 bp, Homo sapien
ctgccactggatgatgttcttcacc

SEQ ID NO: 1342339 - DNA, 25 bp, Homo sapien
gtgtctgccactggatgatgttctt

SEQ ID NO: 1342340 - DNA, 25 bp, Homo sapien
ttcaggtgtttcctcagtcacattt

SEQ ID NO: 1342341 - DNA, 25 bp, Homo sapien
ctcagtcacatttgattgatccaag

SEQ ID NO: 1342342 - DNA, 25 bp, Homo sapien
gtaattataagatatttgtttctga

SEQ ID NO: 1342343 - DNA, 25 bp, Homo sapien
ttgtttctgaatgtatttgggggac

SEQ ID NO: 1342344 - DNA, 25 bp, Homo sapien
ataagatatttgtttctgaatgtat

SEQ ID NO: 1342345 - DNA, 25 bp, Homo sapien
gatatttgtttctgaatgtatttgg

SEQ ID NO: 1342346 - DNA, 25 bp, Homo sapien
tttacatgtagctgaaaagttcttc

SEQ ID NO: 1342347 - DNA, 25 bp, Homo sapien
ctaggtccatttacatgtagctgaa

SEQ ID NO: 1342348 - DNA, 25 bp, Homo sapien
gaaaaagaaaggcatctaggtccat

SEQ ID NO: 1342349 - DNA, 25 bp, Homo sapien
gaaaggcatctaggtccatttacat

SEQ ID NO: 1342350 - DNA, 25 bp, Homo sapien
aggtatggattaacctctagttagg

SEQ ID NO: 1342351 - DNA, 25 bp, Homo sapien
ctagaataggaactattaaggacac

SEQ ID NO: 1342352 - DNA, 25 bp, Homo sapien
cggtcattcaatatactataaccca

SEQ ID NO: 1342353 - DNA, 25 bp, Homo sapien
tctcagagacaagtaaaatttgaca

SEQ ID NO: 1342354 - DNA, 25 bp, Homo sapien
acgtttgtcctcgtgcttcaggcca

SEQ ID NO: 1342355 - DNA, 25 bp, Homo sapien
ttgacagttccccagttgtgagatc

SEQ ID NO: 1342356 - DNA, 25 bp, Homo sapien
ttaattcgtctttgacagttcccca

SEQ ID NO: 1342357 - DNA, 25 bp, Homo sapien
tgagatccgctacctccacgtttgt

SEQ ID NO: 1342358 - DNA, 25 bp, Homo sapien
tcgaataggtcggtcaataatcggt

SEQ ID NO: 1342359 - DNA, 25 bp, Homo sapien
tcctcggcccattccacgtccacgg

SEQ ID NO: 1342360 - DNA, 25 bp, Homo sapien
tcgacctcttccaagaccaccacga

SEQ ID NO: 1342361 - DNA, 25 bp, Homo sapien
tcacgtttgccacgagaatcaaatc

SEQ ID NO: 1342362 - DNA, 25 bp, Homo sapien
ggtcttcttccaactcgtcttattc

SEQ ID NO: 1342363 - DNA, 25 bp, Homo sapien
gtggcttttcgaatcttcgttcacg

SEQ ID NO: 1342364 - DNA, 25 bp, Homo sapien
gcttttcgaatcttcgttcacgagg

SEQ ID NO: 1342365 - DNA, 25 bp, Homo sapien
cttcaagtggcttttcgaatcttcg

SEQ ID NO: 1342366 - DNA, 25 bp, Homo sapien
cacacgtctgatggcctggaacgac

SEQ ID NO: 1342367 - DNA, 25 bp, Homo sapien
tcaaaggagcagctctgcgcagtaa

SEQ ID NO: 1342368 - DNA, 25 bp, Homo sapien
tgcgcagtaagcagcgatggacccc

SEQ ID NO: 1342369 - DNA, 25 bp, Homo sapien
cgtaactacggaaagcttcggtgag

SEQ ID NO: 1342370 - DNA, 25 bp, Homo sapien
caccttcgcaggaccggacttttgt

SEQ ID NO: 1342371 - DNA, 25 bp, Homo sapien
cttttgtcgcgtgaagaaacgtgag

SEQ ID NO: 1342372 - DNA, 25 bp, Homo sapien
aagaaacgtgaggatataggcggca

SEQ ID NO: 1342373 - DNA, 25 bp, Homo sapien
tataggcggcaaagtctcccgcgga

SEQ ID NO: 1342374 - DNA, 25 bp, Homo sapien
gccttcagcacctcgaaggggtccg

SEQ ID NO: 1342375 - DNA, 25 bp, Homo sapien
ataactggtcgaatcggttggtgac

SEQ ID NO: 1342376 - DNA, 25 bp, Homo sapien
caaataactggtcgaatcggttggt

SEQ ID NO: 1342377 - DNA, 25 bp, Homo sapien
taactggtcgaatcggttggtgacc

SEQ ID NO: 1342378 - DNA, 25 bp, Homo sapien
cgccaggcacacatccgggagcggc

SEQ ID NO: 1342379 - DNA, 25 bp, Homo sapien
ggccgtcttctcttccggcgccagg

SEQ ID NO: 1342380 - DNA, 25 bp, Homo sapien
ggggccgtcttctcttccggcgcca

SEQ ID NO: 1342381 - DNA, 25 bp, Homo sapien
ccgtcttctcttccggcgccaggca

SEQ ID NO: 1342382 - DNA, 25 bp, Homo sapien
gactctccgcgtcgggactacaatt

SEQ ID NO: 1342383 - DNA, 25 bp, Homo sapien
gcgactctccgcgtcgggactacaa

SEQ ID NO: 1342384 - DNA, 25 bp, Homo sapien
gaggcgactctccgcgtcgggacta

SEQ ID NO: 1342385 - DNA, 25 bp, Homo sapien
ggcactgtggggtatgtaggccaga

SEQ ID NO: 1342386 - DNA, 25 bp, Homo sapien
ttcgcgcgcgcctgagaggcgagac

SEQ ID NO: 1342387 - DNA, 25 bp, Homo sapien
tgagaggcgagaccccatgagggga

SEQ ID NO: 1342388 - DNA, 25 bp, Homo sapien
acaactcttcgcgcgcgcctgagag

SEQ ID NO: 1342389 - DNA, 25 bp, Homo sapien
gcgcgacaactcttcgcgcgcgcct

SEQ ID NO: 1342390 - DNA, 25 bp, Homo sapien
actgactcgcgaaagtgctctttgg

SEQ ID NO: 1342391 - DNA, 25 bp, Homo sapien
aaccgtgacggcgtaactgactcgc

SEQ ID NO: 1342392 - DNA, 25 bp, Homo sapien
tggtgggcggagtcctgccacctgc

SEQ ID NO: 1342393 - DNA, 25 bp, Homo sapien
taaactctctaggtcttcagctacc

SEQ ID NO: 1342394 - DNA, 25 bp, Homo sapien
cttctctgcaattactgcttgtggg

SEQ ID NO: 1342395 - DNA, 25 bp, Homo sapien
ctttgggctgcgagtcagtctcctc

SEQ ID NO: 1342396 - DNA, 25 bp, Homo sapien
gactctgggattaggccacagcttg

SEQ ID NO: 1342397 - DNA, 25 bp, Homo sapien
ggacctgagcgggtagctttgggct

SEQ ID NO: 1342398 - DNA, 25 bp, Homo sapien
ttttcattgcaaatcagcttgatcc

SEQ ID NO: 1342399 - DNA, 25 bp, Homo sapien
gctccataggtacacgacacaactg

SEQ ID NO: 1342400 - DNA, 25 bp, Homo sapien
tgatccaattgcactgacagcgaca

SEQ ID NO: 1342401 - DNA, 25 bp, Homo sapien
ttcccgcagccaagctccataggta

SEQ ID NO: 1342402 - DNA, 25 bp, Homo sapien
ccaaggactgcctctccggatgctt

SEQ ID NO: 1342403 - DNA, 25 bp, Homo sapien
ggaatgacaatcatttccaaggact

SEQ ID NO: 1342404 - DNA, 25 bp, Homo sapien
gactgcctctccggatgcttgagac

SEQ ID NO: 1342405 - DNA, 25 bp, Homo sapien
aaggactgcctctccggatgcttga

SEQ ID NO: 1342406 - DNA, 25 bp, Homo sapien
aaacacaggtgtacatcatcccaac

SEQ ID NO: 1342407 - DNA, 25 bp, Homo sapien
taagccctgagttgatgatgaaaac

SEQ ID NO: 1342408 - DNA, 25 bp, Homo sapien
tcttgagcagccaataagggaaaac

SEQ ID NO: 1342409 - DNA, 25 bp, Homo sapien
aattgaagggattatagtaagccct

SEQ ID NO: 1342410 - DNA, 25 bp, Homo sapien
ggctacgctgtgctgtgtagaagga

SEQ ID NO: 1342411 - DNA, 25 bp, Homo sapien
ctggatggctacgctgtgctgtgta

SEQ ID NO: 1342412 - DNA, 25 bp, Homo sapien
gatggctacgctgtgctgtgtagaa

SEQ ID NO: 1342413 - DNA, 25 bp, Homo sapien
atggctacgctgtgctgtgtagaag

SEQ ID NO: 1342414 - DNA, 25 bp, Homo sapien
ctgctccttggtgtcctgactcatt

SEQ ID NO: 1342415 - DNA, 25 bp, Homo sapien
ttggtgtcctgactcattttcaccg

SEQ ID NO: 1342416 - DNA, 25 bp, Homo sapien
cctgactcattttcaccggatttca

SEQ ID NO: 1342417 - DNA, 25 bp, Homo sapien
gtgtcctgactcattttcaccggat

SEQ ID NO: 1342418 - DNA, 25 bp, Homo sapien
gtctccatgtgaccacatttcttct

SEQ ID NO: 1342419 - DNA, 25 bp, Homo sapien
gcgtggccagaggtttccctagtct

SEQ ID NO: 1342420 - DNA, 25 bp, Homo sapien
ggccagaggtttccctagtctccat

SEQ ID NO: 1342421 - DNA, 25 bp, Homo sapien
tccagcgtggccagaggtttcccta

SEQ ID NO: 1342422 - DNA, 25 bp, Homo sapien
cacacagagtgtcagttacctaaac

SEQ ID NO: 1342423 - DNA, 25 bp, Homo sapien
gcagagactggagttattcagccaa

SEQ ID NO: 1342424 - DNA, 25 bp, Homo sapien
gtaacttcttacagcaaccctagga

SEQ ID NO: 1342425 - DNA, 25 bp, Homo sapien
tagagcatttggaagagtgtggccc

SEQ ID NO: 1342426 - DNA, 25 bp, Homo sapien
tttgtaagcgaataaatgggcctcc

SEQ ID NO: 1342427 - DNA, 25 bp, Homo sapien
gtagttatatatcggcctctcaggg

SEQ ID NO: 1342428 - DNA, 25 bp, Homo sapien
gaacttccagtactctcgaaagctg

SEQ ID NO: 1342429 - DNA, 25 bp, Homo sapien
gaatggactgatctccgtactagag

SEQ ID NO: 1342430 - DNA, 25 bp, Homo sapien
gaccaggtgagaagtgccaacaaac

SEQ ID NO: 1342431 - DNA, 25 bp, Homo sapien
gaaggaccaggtgagaagtgccaac

SEQ ID NO: 1342432 - DNA, 25 bp, Homo sapien
caggtgagaagtgccaacaaacagg

SEQ ID NO: 1342433 - DNA, 25 bp, Homo sapien
aaggaccaggtgagaagtgccaaca

SEQ ID NO: 1342434 - DNA, 25 bp, Homo sapien
ggatactgggcttcccgctgttggt

SEQ ID NO: 1342435 - DNA, 25 bp, Homo sapien
ggtggcatggctgtttcagcttttc

SEQ ID NO: 1342436 - DNA, 25 bp, Homo sapien
gaatgaaaggatcatgcctaagggc

SEQ ID NO: 1342437 - DNA, 25 bp, Homo sapien
aaaggatcatgcctaagggcttgag

SEQ ID NO: 1342438 - DNA, 25 bp, Homo sapien
ttatcagggcataaacatgcaattc

SEQ ID NO: 1342439 - DNA, 25 bp, Homo sapien
tcctcatggctattgactgatttaa

SEQ ID NO: 1342440 - DNA, 25 bp, Homo sapien
ccaagagaagttcagagttccaata

SEQ ID NO: 1342441 - DNA, 25 bp, Homo sapien
aggctgccttgccaagttgcttggc

SEQ ID NO: 1342442 - DNA, 25 bp, Homo sapien
cccataagcttcaagctccacatgg

SEQ ID NO: 1342443 - DNA, 25 bp, Homo sapien
tccattgcagatcccataagcttca

SEQ ID NO: 1342444 - DNA, 25 bp, Homo sapien
tcccataagcttcaagctccacatg

SEQ ID NO: 1342445 - DNA, 25 bp, Homo sapien
ttcatccattgcagatcccataagc

SEQ ID NO: 1342446 - DNA, 25 bp, Homo sapien
atctgacagtacacatctttcttca

SEQ ID NO: 1342447 - DNA, 25 bp, Homo sapien
ttcttcacctgagcacacattttcc

SEQ ID NO: 1342448 - DNA, 25 bp, Homo sapien
gatattatctgacagtacacatctt

SEQ ID NO: 1342449 - DNA, 25 bp, Homo sapien
ctttcttcacctgagcacacatttt

SEQ ID NO: 1342450 - DNA, 25 bp, Homo sapien
aggaagagcttttcatgccagtgca

SEQ ID NO: 1342451 - DNA, 25 bp, Homo sapien
ccagaaagacataagggcgaaaatg

SEQ ID NO: 1342452 - DNA, 25 bp, Homo sapien
ttcatgccagtgcagggaactggca

SEQ ID NO: 1342453 - DNA, 25 bp, Homo sapien
gaaagacataagggcgaaaatgagc

SEQ ID NO: 1342454 - DNA, 25 bp, Homo sapien
tacaaaatccagtaggccctggtcc

SEQ ID NO: 1342455 - DNA, 25 bp, Homo sapien
ccactctgtaccagtcttaggtaca

SEQ ID NO: 1342456 - DNA, 25 bp, Homo sapien
gtacacattgtgatgggccccagag

SEQ ID NO: 1342457 - DNA, 25 bp, Homo sapien
gagatacaaaatccagtaggccctg

SEQ ID NO: 1342458 - DNA, 25 bp, Homo sapien
ctggactgaagactctgttcccaca

SEQ ID NO: 1342459 - DNA, 25 bp, Homo sapien
tctggactgaagactctgttcccac

SEQ ID NO: 1342460 - DNA, 25 bp, Homo sapien
gtctggactgaagactctgttccca

SEQ ID NO: 1342461 - DNA, 25 bp, Homo sapien
tgcataccacttgccaacgaatcca

SEQ ID NO: 1342462 - DNA, 25 bp, Homo sapien
cttgtatgcggcaaaccccacagct

SEQ ID NO: 1342463 - DNA, 25 bp, Homo sapien
tgggagaaccttgtatgcggcaaac

SEQ ID NO: 1342464 - DNA, 25 bp, Homo sapien
agctgtctatatgccccgccagtgc

SEQ ID NO: 1342465 - DNA, 25 bp, Homo sapien
tctgcagcagatctgacaagttccc

SEQ ID NO: 1342466 - DNA, 25 bp, Homo sapien
cccacacaattccacgggaaaatca

SEQ ID NO: 1342467 - DNA, 25 bp, Homo sapien
tgtagatcatctatccttgggtatc

SEQ ID NO: 1342468 - DNA, 25 bp, Homo sapien
tcatcggctttggattcttgaccct

SEQ ID NO: 1342469 - DNA, 25 bp, Homo sapien
ttgctgcccaacacccttgcagtgg

SEQ ID NO: 1342470 - DNA, 25 bp, Homo sapien
cttgcagtggcttgtttcaacagac

SEQ ID NO: 1342471 - DNA, 25 bp, Homo sapien
ggcactgtctgagctaggatcagct

SEQ ID NO: 1342472 - DNA, 25 bp, Homo sapien
acatggaagggaccagaaccactgc

SEQ ID NO: 1342473 - DNA, 25 bp, Homo sapien
tccaagagagaccaaacgaccaggt

SEQ ID NO: 1342474 - DNA, 25 bp, Homo sapien
aggtacccaggtcaacattcaagtc

SEQ ID NO: 1342475 - DNA, 25 bp, Homo sapien
caggtcttagaccaaattctgccaa

SEQ ID NO: 1342476 - DNA, 25 bp, Homo sapien
ctggaggtatgttgttatgaagtca

SEQ ID NO: 1342477 - DNA, 25 bp, Homo sapien
catttctggcttggtgagcattcct

SEQ ID NO: 1342478 - DNA, 25 bp, Homo sapien
cctggcatttctggcttggtgagca

SEQ ID NO: 1342479 - DNA, 25 bp, Homo sapien
ggcatttctggcttggtgagcattc

SEQ ID NO: 1342480 - DNA, 25 bp, Homo sapien
tctggcttggtgagcattcctgaac

SEQ ID NO: 1342481 - DNA, 25 bp, Homo sapien
tagcaccagtgtccagcagagacat

SEQ ID NO: 1342482 - DNA, 25 bp, Homo sapien
gcaccagtgtccagcagagacataa

SEQ ID NO: 1342483 - DNA, 25 bp, Homo sapien
actagcaccagtgtccagcagagac

SEQ ID NO: 1342484 - DNA, 25 bp, Homo sapien
gcagctgggagcaaactagcaccag

SEQ ID NO: 1342485 - DNA, 25 bp, Homo sapien
ctccgggaacaggacaggttctgcc

SEQ ID NO: 1342486 - DNA, 25 bp, Homo sapien
acaggacaggttctgcccctgtttt

SEQ ID NO: 1342487 - DNA, 25 bp, Homo sapien
agtctccgggaacaggacaggttct

SEQ ID NO: 1342488 - DNA, 25 bp, Homo sapien
caggacaggttctgcccctgttttc

SEQ ID NO: 1342489 - DNA, 25 bp, Homo sapien
tggatccccgctggcagtagctaaa

SEQ ID NO: 1342490 - DNA, 25 bp, Homo sapien
gcagtatcagttctagggcccataa

SEQ ID NO: 1342491 - DNA, 25 bp, Homo sapien
tgtcattgatgctaactgcatctct

SEQ ID NO: 1342492 - DNA, 25 bp, Homo sapien
aacttcttagtggtcgctgcaggcg

SEQ ID NO: 1342493 - DNA, 25 bp, Homo sapien
cagaaacaccccttgtactctcgga

SEQ ID NO: 1342494 - DNA, 25 bp, Homo sapien
tcaagtcagatttactggctccctc

SEQ ID NO: 1342495 - DNA, 25 bp, Homo sapien
gaccccaggaatgtagcttatgctg

SEQ ID NO: 1342496 - DNA, 25 bp, Homo sapien
tgaaatgctctctaccgtctgccaa

SEQ ID NO: 1342497 - DNA, 25 bp, Homo sapien
ttcatccattccatgacacgtcaca

SEQ ID NO: 1342498 - DNA, 25 bp, Homo sapien
gccttcatccattccatgacacgtc

SEQ ID NO: 1342499 - DNA, 25 bp, Homo sapien
atccattccatgacacgtcacacct

SEQ ID NO: 1342500 - DNA, 25 bp, Homo sapien
cattccatgacacgtcacacctttg

SEQ ID NO: 1342501 - DNA, 25 bp, Homo sapien
cacaagggcttgctgggaagcgaca

SEQ ID NO: 1342502 - DNA, 25 bp, Homo sapien
tcagctgcaattggcacaggacaca

SEQ ID NO: 1342503 - DNA, 25 bp, Homo sapien
gcctaatcggtcttgcctgtgtggg

SEQ ID NO: 1342504 - DNA, 25 bp, Homo sapien
ggtctctcgggtcatggctgtgccc

SEQ ID NO: 1342505 - DNA, 25 bp, Homo sapien
tattaataccactctccaagtgttg

SEQ ID NO: 1342506 - DNA, 25 bp, Homo sapien
tgactattaataccactctccaagt

SEQ ID NO: 1342507 - DNA, 25 bp, Homo sapien
taataccactctccaagtgttggcc

SEQ ID NO: 1342508 - DNA, 25 bp, Homo sapien
tccctcaccccaggtatcctttctc

SEQ ID NO: 1342509 - DNA, 25 bp, Homo sapien
caaggaacattaccctgaaaagcag

SEQ ID NO: 1342510 - DNA, 25 bp, Homo sapien
agcaagcaggcagacaaggaacatt

SEQ ID NO: 1342511 - DNA, 25 bp, Homo sapien
gggcccaaggactctagctcttcca

SEQ ID NO: 1342512 - DNA, 25 bp, Homo sapien
ggttctgatgcctgtagaagaagca

SEQ ID NO: 1342513 - DNA, 25 bp, Homo sapien
cagttcaggcaaatgaaggtgttct

SEQ ID NO: 1342514 - DNA, 25 bp, Homo sapien
aacaaatcctgtatgggtccactta

SEQ ID NO: 1342515 - DNA, 25 bp, Homo sapien
gaatgaggagttagtgcttaaagtg

SEQ ID NO: 1342516 - DNA, 25 bp, Homo sapien
tgtccagacttgcagttcaggcaaa

SEQ ID NO: 1342517 - DNA, 25 bp, Homo sapien
tcccattgtgttcagacagcctacg

SEQ ID NO: 1342518 - DNA, 25 bp, Homo sapien
tcagcgggtttagagcaaatcttct

SEQ ID NO: 1342519 - DNA, 25 bp, Homo sapien
tcacaggcccagctggtttcgtgcg

SEQ ID NO: 1342520 - DNA, 25 bp, Homo sapien
caaatcttctggtgtagggtctaac

SEQ ID NO: 1342521 - DNA, 25 bp, Homo sapien
ctggggatagcaagaaatctgtcca

SEQ ID NO: 1342522 - DNA, 25 bp, Homo sapien
aagaaatctgtccagaagtgtaaaa

SEQ ID NO: 1342523 - DNA, 25 bp, Homo sapien
gaaatctgtccagaagtgtaaaacc

SEQ ID NO: 1342524 - DNA, 25 bp, Homo sapien
atctgtccagaagtgtaaaaccacc

SEQ ID NO: 1342525 - DNA, 25 bp, Homo sapien
acaagaacattcaatgcgctgactg

SEQ ID NO: 1342526 - DNA, 25 bp, Homo sapien
aacattcaatgcgctgactggcgat

SEQ ID NO: 1342527 - DNA, 25 bp, Homo sapien
ttatgaaacgagaaagttggaacaa

SEQ ID NO: 1342528 - DNA, 25 bp, Homo sapien
agaacattcaatgcgctgactggcg

SEQ ID NO: 1342529 - DNA, 25 bp, Homo sapien
caggttcctttgaggcccatctctt

SEQ ID NO: 1342530 - DNA, 25 bp, Homo sapien
catctcttccataaaccctctgtga

SEQ ID NO: 1342531 - DNA, 25 bp, Homo sapien
cagcctgcaggggtactccctcttg

SEQ ID NO: 1342532 - DNA, 25 bp, Homo sapien
ctgcaggggtactccctcttgcagg

SEQ ID NO: 1342533 - DNA, 25 bp, Homo sapien
gtttccctaggctgtttgcctgctg

SEQ ID NO: 1342534 - DNA, 25 bp, Homo sapien
taggatggtggtttccctaggctgt

SEQ ID NO: 1342535 - DNA, 25 bp, Homo sapien
tggtggtttccctaggctgtttgcc

SEQ ID NO: 1342536 - DNA, 25 bp, Homo sapien
atgccagtaggatggtggtttccct

SEQ ID NO: 1342537 - DNA, 25 bp, Homo sapien
tgagccctggcctgccacacgtcca

SEQ ID NO: 1342538 - DNA, 25 bp, Homo sapien
gagcctgctaatgatttttcgtcca

SEQ ID NO: 1342539 - DNA, 25 bp, Homo sapien
ctgccacacgtccactgtgaggcct

SEQ ID NO: 1342540 - DNA, 25 bp, Homo sapien
gtgaggcctggacagcctagagcct

SEQ ID NO: 1342541 - DNA, 25 bp, Homo sapien
caatcctgctattaatcagcatcag

SEQ ID NO: 1342542 - DNA, 25 bp, Homo sapien
ccatcctgagataacctggtggttc

SEQ ID NO: 1342543 - DNA, 25 bp, Homo sapien
cacaatcctgctattaatcagcatc

SEQ ID NO: 1342544 - DNA, 25 bp, Homo sapien
acaatcctgctattaatcagcatca

SEQ ID NO: 1342545 - DNA, 25 bp, Homo sapien
tgcagatcatctcacgccggctttt

SEQ ID NO: 1342546 - DNA, 25 bp, Homo sapien
ggtactacagcccaagcactaggag

SEQ ID NO: 1342547 - DNA, 25 bp, Homo sapien
catgctggcgttttgagggtactac

SEQ ID NO: 1342548 - DNA, 25 bp, Homo sapien
gaagcatgtgctggatcacggtgca

SEQ ID NO: 1342549 - DNA, 25 bp, Homo sapien
gtatctaaaacttggccggcaatca

SEQ ID NO: 1342550 - DNA, 25 bp, Homo sapien
cttatgaacagagccacccacagtt

SEQ ID NO: 1342551 - DNA, 25 bp, Homo sapien
caatgaatactctggggttcatgga

SEQ ID NO: 1342552 - DNA, 25 bp, Homo sapien
gattagtatctaaaacttggccggc

SEQ ID NO: 1342553 - DNA, 25 bp, Homo sapien
ttttgccgggaaagtcgctacatgg

SEQ ID NO: 1342554 - DNA, 25 bp, Homo sapien
gggcccggagatagatgactttgca

SEQ ID NO: 1342555 - DNA, 25 bp, Homo sapien
tctccctgaacggtgatggcatctg

SEQ ID NO: 1342556 - DNA, 25 bp, Homo sapien
taaagtttaagtgtgcagccatagt

SEQ ID NO: 1342557 - DNA, 25 bp, Homo sapien
taatgaacaagtccgtcagtgcctg

SEQ ID NO: 1342558 - DNA, 25 bp, Homo sapien
ttatggatccatagtgcccttgtga

SEQ ID NO: 1342559 - DNA, 25 bp, Homo sapien
gactgctttaggcttgccctagtac

SEQ ID NO: 1342560 - DNA, 25 bp, Homo sapien
tgcccacatttgttcagggagtgac

SEQ ID NO: 1342561 - DNA, 25 bp, Homo sapien
catagcctggggcttgttggctgcc

SEQ ID NO: 1342562 - DNA, 25 bp, Homo sapien
ctgcagcgtgtccggttcatagcct

SEQ ID NO: 1342563 - DNA, 25 bp, Homo sapien
aagtgtggagtgctggctctcagaa

SEQ ID NO: 1342564 - DNA, 25 bp, Homo sapien
ttttgtaagtgtggagtgctggctc

SEQ ID NO: 1342565 - DNA, 25 bp, Homo sapien
tattcatttattgagcaaaacacaa

SEQ ID NO: 1342566 - DNA, 25 bp, Homo sapien
ttattcatttattgagcaaaacaca

SEQ ID NO: 1342567 - DNA, 25 bp, Homo sapien
tttattcatttattgagcaaaacac

SEQ ID NO: 1342568 - DNA, 25 bp, Homo sapien
ttttattcatttattgagcaaaaca

SEQ ID NO: 1342569 - DNA, 25 bp, Homo sapien
taggatgatacaatgaggcactgac

SEQ ID NO: 1342570 - DNA, 25 bp, Homo sapien
gatgatacaatgaggcactgacgca

SEQ ID NO: 1342571 - DNA, 25 bp, Homo sapien
ggatgatacaatgaggcactgacgc

SEQ ID NO: 1342572 - DNA, 25 bp, Homo sapien
gtaggatgatacaatgaggcactga

SEQ ID NO: 1342573 - DNA, 25 bp, Homo sapien
ggaactgggcatatcgcagaacgaa

SEQ ID NO: 1342574 - DNA, 25 bp, Homo sapien
ggagtgtaccactgaatccaaggct

SEQ ID NO: 1342575 - DNA, 25 bp, Homo sapien
cccagagagatgaagcgccttgtcc

SEQ ID NO: 1342576 - DNA, 25 bp, Homo sapien
gcagcttatagcaccaacacgttgg

SEQ ID NO: 1342577 - DNA, 25 bp, Homo sapien
caagacagagggctcaatcacaaag

SEQ ID NO: 1342578 - DNA, 25 bp, Homo sapien
cagtagagaacatgagccctgggag

SEQ ID NO: 1342579 - DNA, 25 bp, Homo sapien
tcagcatcattgaagccctaacggg

SEQ ID NO: 1342580 - DNA, 25 bp, Homo sapien
ggtgcctatccctaatccagtagag

SEQ ID NO: 1342581 - DNA, 25 bp, Homo sapien
ggtaaatctcttcaaggagctgctc

SEQ ID NO: 1342582 - DNA, 25 bp, Homo sapien
ttaggtcctgacatatcggaatccc

SEQ ID NO: 1342583 - DNA, 25 bp, Homo sapien
tattgtagcctaagaggtccagcaa

SEQ ID NO: 1342584 - DNA, 25 bp, Homo sapien
taatttgacaggtgcttaggccatt

SEQ ID NO: 1342585 - DNA, 25 bp, Homo sapien
tgaagttggtattcctatcagcaaa

SEQ ID NO: 1342586 - DNA, 25 bp, Homo sapien
atgttcctcacagtaggacatgagg

SEQ ID NO: 1342587 - DNA, 25 bp, Homo sapien
tctgaagttggtattcctatcagca

SEQ ID NO: 1342588 - DNA, 25 bp, Homo sapien
tgaggtccgctgatgccttcgaaac

SEQ ID NO: 1342589 - DNA, 25 bp, Homo sapien
ccttgcctgggctatattgttggtg

SEQ ID NO: 1342590 - DNA, 25 bp, Homo sapien
ttctttcaatggaggcttctaatct

SEQ ID NO: 1342591 - DNA, 25 bp, Homo sapien
cctgggctatattgttggtgcttgc

SEQ ID NO: 1342592 - DNA, 25 bp, Homo sapien
tctttcaatggaggcttctaatctt

SEQ ID NO: 1342593 - DNA, 25 bp, Homo sapien
cattagggaaatatgggtattttca

SEQ ID NO: 1342594 - DNA, 25 bp, Homo sapien
aattcctaggaacatgatggtccat

SEQ ID NO: 1342595 - DNA, 25 bp, Homo sapien
ggaacatgatggtccattagggaaa

SEQ ID NO: 1342596 - DNA, 25 bp, Homo sapien
tttcatctttgtcaagaggggcctg

SEQ ID NO: 1342597 - DNA, 25 bp, Homo sapien
ttgcaggttatgaggccagggtgct

SEQ ID NO: 1342598 - DNA, 25 bp, Homo sapien
tctttctccccaaagttgcaggtta

SEQ ID NO: 1342599 - DNA, 25 bp, Homo sapien
tgccatcattgctggacatcccaaa

SEQ ID NO: 1342600 - DNA, 25 bp, Homo sapien
tgctggacatcccaaactctaaaac

SEQ ID NO: 1342601 - DNA, 25 bp, Homo sapien
ccttgctgctccttcctacaagtat

SEQ ID NO: 1342602 - DNA, 25 bp, Homo sapien
tgctccttcctacaagtatcccgtg

SEQ ID NO: 1342603 - DNA, 25 bp, Homo sapien
caagtatcccgtgaaatactgactg

SEQ ID NO: 1342604 - DNA, 25 bp, Homo sapien
aaatactgactgttctgagcccaca

SEQ ID NO: 1342605 - DNA, 25 bp, Homo sapien
aaataagttttcagctggtgaaggc

SEQ ID NO: 1342606 - DNA, 25 bp, Homo sapien
gattccaagggaccatgcacactca

SEQ ID NO: 1342607 - DNA, 25 bp, Homo sapien
gatggccacttgtgtggcaccaaga

SEQ ID NO: 1342608 - DNA, 25 bp, Homo sapien
ccatgcatttgattagggccagttg

SEQ ID NO: 1342609 - DNA, 25 bp, Homo sapien
cgtgcacgtatatgatgtgcatgca

SEQ ID NO: 1342610 - DNA, 25 bp, Homo sapien
ccttgcccatacagagggttagtgt

SEQ ID NO: 1342611 - DNA, 25 bp, Homo sapien
tatacaatcatatacacgtgcacgt

SEQ ID NO: 1342612 - DNA, 25 bp, Homo sapien
gaatcatatttgcatatggttctgc

SEQ ID NO: 1342613 - DNA, 25 bp, Homo sapien
gactcatacatctgccatttcactt

SEQ ID NO: 1342614 - DNA, 25 bp, Homo sapien
gcttggcatcaacaggatgtcttcc

SEQ ID NO: 1342615 - DNA, 25 bp, Homo sapien
tgttcccatcttatgaagtgactca

SEQ ID NO: 1342616 - DNA, 25 bp, Homo sapien
cctgttcccatcttatgaagtgact

SEQ ID NO: 1342617 - DNA, 25 bp, Homo sapien
cagcctcacgatgccaaccccagga

SEQ ID NO: 1342618 - DNA, 25 bp, Homo sapien
cagggcacacctctgccaggaaaac

SEQ ID NO: 1342619 - DNA, 25 bp, Homo sapien
caggagcagtgaccccctcacaggg

SEQ ID NO: 1342620 - DNA, 25 bp, Homo sapien
gcaggctcagcctcacgatgccaac

SEQ ID NO: 1342621 - DNA, 25 bp, Homo sapien
ggagcctactggttatgaaaataca

SEQ ID NO: 1342622 - DNA, 25 bp, Homo sapien
gggctcaccctttgcaataaactgt

SEQ ID NO: 1342623 - DNA, 25 bp, Homo sapien
catatactttaacaagagtggtgcc

SEQ ID NO: 1342624 - DNA, 25 bp, Homo sapien
tattgtcaatatgtggcccctgtaa

SEQ ID NO: 1342625 - DNA, 25 bp, Homo sapien
caatcactgtgcaacaatagccaca

SEQ ID NO: 1342626 - DNA, 25 bp, Homo sapien
gcttgtcctaggtatatagaggtga

SEQ ID NO: 1342627 - DNA, 25 bp, Homo sapien
gtgcccagccctattagcaaattat

SEQ ID NO: 1342628 - DNA, 25 bp, Homo sapien
gatatacataactgaatgcttgtcc

SEQ ID NO: 1342629 - DNA, 25 bp, Homo sapien
aaggcagaggctacccctggtgttt

SEQ ID NO: 1342630 - DNA, 25 bp, Homo sapien
acatttgtaagaaggagcaccagtt

SEQ ID NO: 1342631 - DNA, 25 bp, Homo sapien
cagcagagtttttgtactgccaact

SEQ ID NO: 1342632 - DNA, 25 bp, Homo sapien
ctgtgctcgggcacttctttaaata

SEQ ID NO: 1342633 - DNA, 25 bp, Homo sapien
ggcccacgtcttagtgcagcgccat

SEQ ID NO: 1342634 - DNA, 25 bp, Homo sapien
gcagagagggcccacgtcttagtgc

SEQ ID NO: 1342635 - DNA, 25 bp, Homo sapien
tcacacatatgtgactgctactcat

SEQ ID NO: 1342636 - DNA, 25 bp, Homo sapien
acaaggcaccggttccagaatcaca

SEQ ID NO: 1342637 - DNA, 25 bp, Homo sapien
atagttaagttgattcctgcaagaa

SEQ ID NO: 1342638 - DNA, 25 bp, Homo sapien
taagttgattcctgcaagaataaag

SEQ ID NO: 1342639 - DNA, 25 bp, Homo sapien
agttgattcctgcaagaataaagaa

SEQ ID NO: 1342640 - DNA, 25 bp, Homo sapien
ttaagttgattcctgcaagaataaa

SEQ ID NO: 1342641 - DNA, 25 bp, Homo sapien
acgcccatctccacaggctatcggc

SEQ ID NO: 1342642 - DNA, 25 bp, Homo sapien
cgcccatctccacaggctatcggca

SEQ ID NO: 1342643 - DNA, 25 bp, Homo sapien
cacgcccatctccacaggctatcgg

SEQ ID NO: 1342644 - DNA, 25 bp, Homo sapien
gcccatctccacaggctatcggcat

SEQ ID NO: 1342645 - DNA, 25 bp, Homo sapien
tcagttgactgtcccacagttaggg

SEQ ID NO: 1342646 - DNA, 25 bp, Homo sapien
aaacaggtcagggttgctgtgtttg

SEQ ID NO: 1342647 - DNA, 25 bp, Homo sapien
cacagttagggtctctgtacccagt

SEQ ID NO: 1342648 - DNA, 25 bp, Homo sapien
cttcagttgactgtcccacagttag

SEQ ID NO: 1342649 - DNA, 25 bp, Homo sapien
cagtggtgaataaagatctttgaag

SEQ ID NO: 1342650 - DNA, 25 bp, Homo sapien
gaaggggtctgtagtaaagacagca

SEQ ID NO: 1342651 - DNA, 25 bp, Homo sapien
cggtcagtggtgaataaagatcttt

SEQ ID NO: 1342652 - DNA, 25 bp, Homo sapien
taaagtgttcggtcagtggtgaata

SEQ ID NO: 1342653 - DNA, 25 bp, Homo sapien
acaagatagggtgtgatggttttaa

SEQ ID NO: 1342654 - DNA, 25 bp, Homo sapien
gggagtgggtttgacttggaggcca

SEQ ID NO: 1342655 - DNA, 25 bp, Homo sapien
cttggaggccacaagatagggtgtg

SEQ ID NO: 1342656 - DNA, 25 bp, Homo sapien
cttctgggttcaggatggggagtgg

SEQ ID NO: 1342657 - DNA, 25 bp, Homo sapien
cttccagctgcatactggaaaggca

SEQ ID NO: 1342658 - DNA, 25 bp, Homo sapien
ctggaaaggcaaccaaagaccgaca

SEQ ID NO: 1342659 - DNA, 25 bp, Homo sapien
tgcttccagctgcatactggaaagg

SEQ ID NO: 1342660 - DNA, 25 bp, Homo sapien
tggaaaggcaaccaaagaccgacat

SEQ ID NO: 1342661 - DNA, 25 bp, Homo sapien
ctggaagatgccaagcagtagggcc

SEQ ID NO: 1342662 - DNA, 25 bp, Homo sapien
agggccaaagggactatcacaaatg

SEQ ID NO: 1342663 - DNA, 25 bp, Homo sapien
ggactatcacaaatgggagcctttc

SEQ ID NO: 1342664 - DNA, 25 bp, Homo sapien
gaagatgccaagcagtagggccaaa

SEQ ID NO: 1342665 - DNA, 25 bp, Homo sapien
cagcttggcattggcctggtgtcag

SEQ ID NO: 1342666 - DNA, 25 bp, Homo sapien
ttcacacagcttggcattggcctgg

SEQ ID NO: 1342667 - DNA, 25 bp, Homo sapien
tctgctcttcacacagcttggcatt

SEQ ID NO: 1342668 - DNA, 25 bp, Homo sapien
gcctggtgtcaggattggggagcat

SEQ ID NO: 1342669 - DNA, 25 bp, Homo sapien
caggggctgagtggctgctatatgc

SEQ ID NO: 1342670 - DNA, 25 bp, Homo sapien
gggctgagtggctgctatatgcaca

SEQ ID NO: 1342671 - DNA, 25 bp, Homo sapien
ctggacaggggctgagtggctgcta

SEQ ID NO: 1342672 - DNA, 25 bp, Homo sapien
gacaggggctgagtggctgctatat

SEQ ID NO: 1342673 - DNA, 25 bp, Homo sapien
cctgagggtatgtgcacaccatccg

SEQ ID NO: 1342674 - DNA, 25 bp, Homo sapien
catccgctttctgtcgggtgaggga

SEQ ID NO: 1342675 - DNA, 25 bp, Homo sapien
ggcaggggcaatcaggaaaactctc

SEQ ID NO: 1342676 - DNA, 25 bp, Homo sapien
ggtatgtgcacaccatccgctttct

SEQ ID NO: 1342677 - DNA, 25 bp, Homo sapien
tatggcatccttctactggaatggg

SEQ ID NO: 1342678 - DNA, 25 bp, Homo sapien
tactcagtacctagctagcacagcc

SEQ ID NO: 1342679 - DNA, 25 bp, Homo sapien
tttatctgcctaccccatggacttg

SEQ ID NO: 1342680 - DNA, 25 bp, Homo sapien
tagcacagcctctggattgaggagg

SEQ ID NO: 1342681 - DNA, 25 bp, Homo sapien
agtctggtgcgtagagaaagacaaa

SEQ ID NO: 1342682 - DNA, 25 bp, Homo sapien
ggaatagtctggtgcgtagagaaag

SEQ ID NO: 1342683 - DNA, 25 bp, Homo sapien
cagtgagctgcagctgggggaccag

SEQ ID NO: 1342684 - DNA, 25 bp, Homo sapien
gagccagtgagctgcagctggggga

SEQ ID NO: 1342685 - DNA, 25 bp, Homo sapien
cggtctcctctgtagggcctccctc

SEQ ID NO: 1342686 - DNA, 25 bp, Homo sapien
ttctgaagccaggtgaagcctcaca

SEQ ID NO: 1342687 - DNA, 25 bp, Homo sapien
ccacccggtctcctctgtagggcct

SEQ ID NO: 1342688 - DNA, 25 bp, Homo sapien
gggaaattctgaagccaggtgaagc

SEQ ID NO: 1342689 - DNA, 25 bp, Homo sapien
agcagttcctcgctgggcctcgctt

SEQ ID NO: 1342690 - DNA, 25 bp, Homo sapien
gatggcatctggtggtcaggaagat

SEQ ID NO: 1342691 - DNA, 25 bp, Homo sapien
gttaggtgtcctcttagggaatgca

SEQ ID NO: 1342692 - DNA, 25 bp, Homo sapien
tagggaatgcaggtctagctacaga

SEQ ID NO: 1342693 - DNA, 25 bp, Homo sapien
tcaaatgtgagttttagcaccctag

SEQ ID NO: 1342694 - DNA, 25 bp, Homo sapien
gcaccctagcaaccatacaaggcag

SEQ ID NO: 1342695 - DNA, 25 bp, Homo sapien
ttttgtgggttctaagccttataca

SEQ ID NO: 1342696 - DNA, 25 bp, Homo sapien
gtgtccctgacccatggatagatcg

SEQ ID NO: 1342697 - DNA, 25 bp, Homo sapien
ctacgttgcggaggctggactcgaa

SEQ ID NO: 1342698 - DNA, 25 bp, Homo sapien
cacccatgggaaggttatgcaaccc

SEQ ID NO: 1342699 - DNA, 25 bp, Homo sapien
tgtgaaagggaacaaactcctctgc

SEQ ID NO: 1342700 - DNA, 25 bp, Homo sapien
gtttgggtcatctcactagttcaga

SEQ ID NO: 1342701 - DNA, 25 bp, Homo sapien
tcttacaaaggaacatgggttgctc

SEQ ID NO: 1342702 - DNA, 25 bp, Homo sapien
taatcatggatctttatcctgccca

SEQ ID NO: 1342703 - DNA, 25 bp, Homo sapien
catcatagcactggtagggaagcat

SEQ ID NO: 1342704 - DNA, 25 bp, Homo sapien
ggcctggaaatagtttcattaccca

SEQ ID NO: 1342705 - DNA, 25 bp, Homo sapien
tgttttcaggttttaagtggaatga

SEQ ID NO: 1342706 - DNA, 25 bp, Homo sapien
cagtaagactttgtgtggtccaatg

SEQ ID NO: 1342707 - DNA, 25 bp, Homo sapien
tgtgtggtccaatgttttcaggttt

SEQ ID NO: 1342708 - DNA, 25 bp, Homo sapien
gactttgtgtggtccaatgttttca

SEQ ID NO: 1342709 - DNA, 25 bp, Homo sapien
atcacatttggaaagggtgtgcttt

SEQ ID NO: 1342710 - DNA, 25 bp, Homo sapien
ttggaaagggtgtgctttcgatccc

SEQ ID NO: 1342711 - DNA, 25 bp, Homo sapien
gctttcgatcccaagtgactgccat

SEQ ID NO: 1342712 - DNA, 25 bp, Homo sapien
aagtgactgccataacgttgagcat

SEQ ID NO: 1342713 - DNA, 25 bp, Homo sapien
ttatagaatgaatgatggtgggacc

SEQ ID NO: 1342714 - DNA, 25 bp, Homo sapien
tggtgggaccatacagaactacgaa

SEQ ID NO: 1342715 - DNA, 25 bp, Homo sapien
tggcctcccgaagcataaggattta

SEQ ID NO: 1342716 - DNA, 25 bp, Homo sapien
tactttgtggcaatatctgacaggc

SEQ ID NO: 1342717 - DNA, 25 bp, Homo sapien
gcgacatggccttcggtctgcagaa

SEQ ID NO: 1342718 - DNA, 25 bp, Homo sapien
taagtcccgattcaaaaggcatccc

SEQ ID NO: 1342719 - DNA, 25 bp, Homo sapien
cttcaatggtaagaccaagggcccg

SEQ ID NO: 1342720 - DNA, 25 bp, Homo sapien
gaagctcaggaaacgtcatccaggc

SEQ ID NO: 1342721 - DNA, 25 bp, Homo sapien
ggactccatcattcatgcccttgtt

SEQ ID NO: 1342722 - DNA, 25 bp, Homo sapien
tgcccttgttcaagtcaaaatcttc

SEQ ID NO: 1342723 - DNA, 25 bp, Homo sapien
tctcaccaactgcatatcccatcaa

SEQ ID NO: 1342724 - DNA, 25 bp, Homo sapien
accagtaggactccatcattcatgc

SEQ ID NO: 1342725 - DNA, 25 bp, Homo sapien
gggtcaagcgttatctcctcagaaa

SEQ ID NO: 1342726 - DNA, 25 bp, Homo sapien
tccttggcccatcagcagctatgag

SEQ ID NO: 1342727 - DNA, 25 bp, Homo sapien
tttgtttaccgttgcactcccagtg

SEQ ID NO: 1342728 - DNA, 25 bp, Homo sapien
cagctatgagaactggccttggctc

SEQ ID NO: 1342729 - DNA, 25 bp, Homo sapien
cctcctagaatgttgtgcttgtgca

SEQ ID NO: 1342730 - DNA, 25 bp, Homo sapien
tttgcaaagcttcactgccagccct

SEQ ID NO: 1342731 - DNA, 25 bp, Homo sapien
tgttgcagctttttagaggcccacc

SEQ ID NO: 1342732 - DNA, 25 bp, Homo sapien
catagagagacataacaggcacaaa

SEQ ID NO: 1342733 - DNA, 25 bp, Homo sapien
taagatggtgaagaacctatcccca

SEQ ID NO: 1342734 - DNA, 25 bp, Homo sapien
tggtgaagaacctatccccaaagcc

SEQ ID NO: 1342735 - DNA, 25 bp, Homo sapien
cacttaagatggtgaagaacctatc

SEQ ID NO: 1342736 - DNA, 25 bp, Homo sapien
aaccacttaagatggtgaagaacct

SEQ ID NO: 1342737 - DNA, 25 bp, Homo sapien
aaagaggtctgtctgctgatcaagc

SEQ ID NO: 1342738 - DNA, 25 bp, Homo sapien
actatactaggcttcgacagactgg

SEQ ID NO: 1342739 - DNA, 25 bp, Homo sapien
gagggaggcgttcctgatgactcaa

SEQ ID NO: 1342740 - DNA, 25 bp, Homo sapien
actgaggatttctgtgtggccggca

SEQ ID NO: 1342741 - DNA, 25 bp, Homo sapien
ttcaaaaataacacagtgtgtatgc

SEQ ID NO: 1342742 - DNA, 25 bp, Homo sapien
cattacagcttatttctgaacaaaa

SEQ ID NO: 1342743 - DNA, 25 bp, Homo sapien
cacagtgtgtatgcaaaatgccaca

SEQ ID NO: 1342744 - DNA, 25 bp, Homo sapien
aacacagtgtgtatgcaaaatgcca

SEQ ID NO: 1342745 - DNA, 25 bp, Homo sapien
ggagtctacccacaacctaaatgag

SEQ ID NO: 1342746 - DNA, 25 bp, Homo sapien
taggtgggcccgatctaatcaaagg

SEQ ID NO: 1342747 - DNA, 25 bp, Homo sapien
tcatggtaggcagaaagctccaagg

SEQ ID NO: 1342748 - DNA, 25 bp, Homo sapien
tgatatgggctcaagggcaaggacc

SEQ ID NO: 1342749 - DNA, 25 bp, Homo sapien
gagaagccccagtttagtaatacca

SEQ ID NO: 1342750 - DNA, 25 bp, Homo sapien
tatggccattggctgtacggaaccg

SEQ ID NO: 1342751 - DNA, 25 bp, Homo sapien
taaattaccgttgtgcagaaaccag

SEQ ID NO: 1342752 - DNA, 25 bp, Homo sapien
gcccacaggaggatcaacattctag

SEQ ID NO: 1342753 - DNA, 25 bp, Homo sapien
tttgtatatggttataatgtttctt

SEQ ID NO: 1342754 - DNA, 25 bp, Homo sapien
ctttgtatatggttataatgtttct

SEQ ID NO: 1342755 - DNA, 25 bp, Homo sapien
cttgtagggaattcttgtaagaaat

SEQ ID NO: 1342756 - DNA, 25 bp, Homo sapien
cctttgtatatggttataatgtttc

SEQ ID NO: 1342757 - DNA, 25 bp, Homo sapien
tctagaacaggatttagcgagtcag

SEQ ID NO: 1342758 - DNA, 25 bp, Homo sapien
aaagaggtaggcttcacagggtcac

SEQ ID NO: 1342759 - DNA, 25 bp, Homo sapien
ggtctcagcagccatttggaagtgt

SEQ ID NO: 1342760 - DNA, 25 bp, Homo sapien
taactgctatggctaaagagtggca

SEQ ID NO: 1342761 - DNA, 25 bp, Homo sapien
ttgaatgtgattgttttggcaatag

SEQ ID NO: 1342762 - DNA, 25 bp, Homo sapien
aatgtgattgttttggcaatagtaa

SEQ ID NO: 1342763 - DNA, 25 bp, Homo sapien
gtgattgttttggcaatagtaaaat

SEQ ID NO: 1342764 - DNA, 25 bp, Homo sapien
gaatgtgattgttttggcaatagta

SEQ ID NO: 1342765 - DNA, 25 bp, Homo sapien
tgcctctgacgacatccaaaagatt

SEQ ID NO: 1342766 - DNA, 25 bp, Homo sapien
ttcgagagctgcgaagcgctggcaa

SEQ ID NO: 1342767 - DNA, 25 bp, Homo sapien
ctggttctcctaggtgagggccgcc

SEQ ID NO: 1342768 - DNA, 25 bp, Homo sapien
gagggccgccatcctgcgataattt

SEQ ID NO: 1342769 - DNA, 25 bp, Homo sapien
ctggagacggctccgacctctcctc

SEQ ID NO: 1342770 - DNA, 25 bp, Homo sapien
gtcgccgccgggactcggtctctaa

SEQ ID NO: 1342771 - DNA, 25 bp, Homo sapien
ctcggtctctaagggctcctggaga

SEQ ID NO: 1342772 - DNA, 25 bp, Homo sapien
cgccgggactcggtctctaagggct

SEQ ID NO: 1342773 - DNA, 25 bp, Homo sapien
aggaagtccttgacaaaataaattg

SEQ ID NO: 1342774 - DNA, 25 bp, Homo sapien
taattgaggaagtccttgacaaaat

SEQ ID NO: 1342775 - DNA, 25 bp, Homo sapien
ttgaggaagtccttgacaaaataaa

SEQ ID NO: 1342776 - DNA, 25 bp, Homo sapien
ctctccaagacagaataattgagga

SEQ ID NO: 1342777 - DNA, 25 bp, Homo sapien
caaggctaactaatggcagtctgag

SEQ ID NO: 1342778 - DNA, 25 bp, Homo sapien
gagcaaggctaactaatggcagtct

SEQ ID NO: 1342779 - DNA, 25 bp, Homo sapien
gcaaggctaactaatggcagtctga

SEQ ID NO: 1342780 - DNA, 25 bp, Homo sapien
atgagcaaggctaactaatggcagt

SEQ ID NO: 1342781 - DNA, 25 bp, Homo sapien
cacaaaaagtatgtgccctgaaaga

SEQ ID NO: 1342782 - DNA, 25 bp, Homo sapien
agtttagcagtatgggtagggccca

SEQ ID NO: 1342783 - DNA, 25 bp, Homo sapien
cacgtgtgaagatcctgaggcagga

SEQ ID NO: 1342784 - DNA, 25 bp, Homo sapien
tgtatataacactctgtgctaggca

SEQ ID NO: 1342785 - DNA, 25 bp, Homo sapien
tttccagattctgcggtgcggacag

SEQ ID NO: 1342786 - DNA, 25 bp, Homo sapien
agattctgcggtgcggacaggcaat

SEQ ID NO: 1342787 - DNA, 25 bp, Homo sapien
tccagattctgcggtgcggacaggc

SEQ ID NO: 1342788 - DNA, 25 bp, Homo sapien
ttttccagattctgcggtgcggaca

SEQ ID NO: 1342789 - DNA, 25 bp, Homo sapien
ctgaattgctactaatacggcactg

SEQ ID NO: 1342790 - DNA, 25 bp, Homo sapien
actggcagaactgaaaaccagaagg

SEQ ID NO: 1342791 - DNA, 25 bp, Homo sapien
tactaatacggcactggcagaactg

SEQ ID NO: 1342792 - DNA, 25 bp, Homo sapien
tacggcactggcagaactgaaaacc

SEQ ID NO: 1342793 - DNA, 25 bp, Homo sapien
ttcttgcttttgctccaggaatttt

SEQ ID NO: 1342794 - DNA, 25 bp, Homo sapien
tgcttttgctccaggaatttttgcc

SEQ ID NO: 1342795 - DNA, 25 bp, Homo sapien
ttttgctccaggaatttttgcccaa

SEQ ID NO: 1342796 - DNA, 25 bp, Homo sapien
gtgggttcttgcttttgctccagga

SEQ ID NO: 1342797 - DNA, 25 bp, Homo sapien
tgtatttcctgtggagtggacatac

SEQ ID NO: 1342798 - DNA, 25 bp, Homo sapien
agatattgccttgtggaatacagaa

SEQ ID NO: 1342799 - DNA, 25 bp, Homo sapien
cagatattgccttgtggaatacaga

SEQ ID NO: 1342800 - DNA, 25 bp, Homo sapien
atattgccttgtggaatacagaatg

SEQ ID NO: 1342801 - DNA, 25 bp, Homo sapien
gatattgccttgtggaatacagaat

SEQ ID NO: 1342802 - DNA, 25 bp, Homo sapien
gtagcttgtcatttatactctgcaa

SEQ ID NO: 1342803 - DNA, 25 bp, Homo sapien
tgcaaacctaacaagagggaccagg

SEQ ID NO: 1342804 - DNA, 25 bp, Homo sapien
tgtagtccctcgaattccactctga

SEQ ID NO: 1342805 - DNA, 25 bp, Homo sapien
tagcatccttctaaaagcctgtagc

SEQ ID NO: 1342806 - DNA, 25 bp, Homo sapien
gcatggcatccaaagccgcttccag

SEQ ID NO: 1342807 - DNA, 25 bp, Homo sapien
tcagcatggcatccaaagccgcttc

SEQ ID NO: 1342808 - DNA, 25 bp, Homo sapien
atggcatccaaagccgcttccaggt

SEQ ID NO: 1342809 - DNA, 25 bp, Homo sapien
agcatggcatccaaagccgcttcca

SEQ ID NO: 1342810 - DNA, 25 bp, Homo sapien
cacttcctgcccgactgcccaccat

SEQ ID NO: 1342811 - DNA, 25 bp, Homo sapien
acacttcctgcccgactgcccacca

SEQ ID NO: 1342812 - DNA, 25 bp, Homo sapien
cacacttcctgcccgactgcccacc

SEQ ID NO: 1342813 - DNA, 25 bp, Homo sapien
atgcaggctcaggacttcaggcatt

SEQ ID NO: 1342814 - DNA, 25 bp, Homo sapien
tcaaagcttgctcctacaatcacca

SEQ ID NO: 1342815 - DNA, 25 bp, Homo sapien
tcttttcagtatgcctgtcctccat

SEQ ID NO: 1342816 - DNA, 25 bp, Homo sapien
ttcaggcattttgtacttgtcacac

SEQ ID NO: 1342817 - DNA, 25 bp, Homo sapien
tcgcttttcttatataccttgcata

SEQ ID NO: 1342818 - DNA, 25 bp, Homo sapien
taatcaaaaacatatctcgcttttc

SEQ ID NO: 1342819 - DNA, 25 bp, Homo sapien
tctagtgacaagctgggaggtaatt

SEQ ID NO: 1342820 - DNA, 25 bp, Homo sapien
ttagtaaccccagtttctagtgaca

SEQ ID NO: 1342821 - DNA, 25 bp, Homo sapien
gcatgaataactggctcattcagca

SEQ ID NO: 1342822 - DNA, 25 bp, Homo sapien
tactgccattggatgcgtagcatga

SEQ ID NO: 1342823 - DNA, 25 bp, Homo sapien
ggaagtaaactctgctggccccagt

SEQ ID NO: 1342824 - DNA, 25 bp, Homo sapien
cccagtcactctgtggtgatactgc

SEQ ID NO: 1342825 - DNA, 25 bp, Homo sapien
gaggatttgaccacaggcatgacac

SEQ ID NO: 1342826 - DNA, 25 bp, Homo sapien
cactgttttaggcattggaggttca

SEQ ID NO: 1342827 - DNA, 25 bp, Homo sapien
cagaggtgaacagggtagacacagc

SEQ ID NO: 1342828 - DNA, 25 bp, Homo sapien
caatagtacttactgaggacaagcc

SEQ ID NO: 1342829 - DNA, 25 bp, Homo sapien
atgaagagtccatgaagggggaaaa

SEQ ID NO: 1342830 - DNA, 25 bp, Homo sapien
caaaggatgaagagtccatgaaggg

SEQ ID NO: 1342831 - DNA, 25 bp, Homo sapien
agcatttatggaatgagcaaaggat

SEQ ID NO: 1342832 - DNA, 25 bp, Homo sapien
agcaaaggatgaagagtccatgaag

SEQ ID NO: 1342833 - DNA, 25 bp, Homo sapien
gctcctcaccttgggagtaatacat

SEQ ID NO: 1342834 - DNA, 25 bp, Homo sapien
cttgctatactctgttctgcacctt

SEQ ID NO: 1342835 - DNA, 25 bp, Homo sapien
gccacaagcacaggcatgctgttgt

SEQ ID NO: 1342836 - DNA, 25 bp, Homo sapien
cctctggctggtgggactatagctc

SEQ ID NO: 1342837 - DNA, 25 bp, Homo sapien
ttcactctccactacttcgctgtca

SEQ ID NO: 1342838 - DNA, 25 bp, Homo sapien
cactacttcgctgtcaccatctcca

SEQ ID NO: 1342839 - DNA, 25 bp, Homo sapien
actccctactttcctgaacctgatg

SEQ ID NO: 1342840 - DNA, 25 bp, Homo sapien
ctttcctgaacctgatggacaatat

SEQ ID NO: 1342841 - DNA, 25 bp, Homo sapien
taacaataaacactctgggccccat

SEQ ID NO: 1342842 - DNA, 25 bp, Homo sapien
ggaggccaccctaagagtcatgaga

SEQ ID NO: 1342843 - DNA, 25 bp, Homo sapien
agttgtacctctaagcctggctcca

SEQ ID NO: 1342844 - DNA, 25 bp, Homo sapien
ggtcacatggcctagtctgcactgg

SEQ ID NO: 1342845 - DNA, 25 bp, Homo sapien
gctgaaagccctggttatctgaatt

SEQ ID NO: 1342846 - DNA, 25 bp, Homo sapien
ccccatgctgaaagccctggttatc

SEQ ID NO: 1342847 - DNA, 25 bp, Homo sapien
ggttatctgaattgccttccattta

SEQ ID NO: 1342848 - DNA, 25 bp, Homo sapien
ctgaattgccttccatttatccttg

SEQ ID NO: 1342849 - DNA, 25 bp, Homo sapien
gagcaccccagaatatgttctgtca

SEQ ID NO: 1342850 - DNA, 25 bp, Homo sapien
ttcagagcaccccagaatatgttct

SEQ ID NO: 1342851 - DNA, 25 bp, Homo sapien
aaccattcagagcaccccagaatat

SEQ ID NO: 1342852 - DNA, 25 bp, Homo sapien
ccattcagagcaccccagaatatgt

SEQ ID NO: 1342853 - DNA, 25 bp, Homo sapien
tataacccagtctggacaatcagag

SEQ ID NO: 1342854 - DNA, 25 bp, Homo sapien
caatcagagaaggtctaaccgaggc

SEQ ID NO: 1342855 - DNA, 25 bp, Homo sapien
taaccgaggcagtgttaacctgagt

SEQ ID NO: 1342856 - DNA, 25 bp, Homo sapien
taacctgagtagcaaagaacagatg

SEQ ID NO: 1342857 - DNA, 25 bp, Homo sapien
gttttctggtgagacaaattcttac

SEQ ID NO: 1342858 - DNA, 25 bp, Homo sapien
tttaatacaatgggcaatgttttgt

SEQ ID NO: 1342859 - DNA, 25 bp, Homo sapien
gaaatgagtccacgttttctacacg

SEQ ID NO: 1342860 - DNA, 25 bp, Homo sapien
tttctacacgctacaggataggaag

SEQ ID NO: 1342861 - DNA, 25 bp, Homo sapien
gaagagctggctcttaaggcccagg

SEQ ID NO: 1342862 - DNA, 25 bp, Homo sapien
gatgttacagtccaaacaacagcac

SEQ ID NO: 1342863 - DNA, 25 bp, Homo sapien
tattttcaatggtcggcaggtactc

SEQ ID NO: 1342864 - DNA, 25 bp, Homo sapien
cacaggtggcaccatcattcagggc

SEQ ID NO: 1342865 - DNA, 25 bp, Homo sapien
tactcatgacggaagttgccgctcg

SEQ ID NO: 1342866 - DNA, 25 bp, Homo sapien
tgcacattcacatcggtcttggctg

SEQ ID NO: 1342867 - DNA, 25 bp, Homo sapien
taccacgacgcggtaatctctgatc

SEQ ID NO: 1342868 - DNA, 25 bp, Homo sapien
cacgacgcggtaatctctgatcttc

SEQ ID NO: 1342869 - DNA, 25 bp, Homo sapien
ccacgacgcggtaatctctgatctt

SEQ ID NO: 1342870 - DNA, 25 bp, Homo sapien
ctaccacgacgcggtaatctctgat

SEQ ID NO: 1342871 - DNA, 25 bp, Homo sapien
tgtggggcttgaaggcgcggaggat

SEQ ID NO: 1342872 - DNA, 25 bp, Homo sapien
tggagccaaagctggcgttacccat

SEQ ID NO: 1342873 - DNA, 25 bp, Homo sapien
gcgcggaggataagcagggcgggca

SEQ ID NO: 1342874 - DNA, 25 bp, Homo sapien
gcagaagccgcaaccgcttcagcag

SEQ ID NO: 1342875 - DNA, 25 bp, Homo sapien
attcggaggggagatacgtgcacaa

SEQ ID NO: 1342876 - DNA, 25 bp, Homo sapien
tacgtgcacaagttctcccacactt

SEQ ID NO: 1342877 - DNA, 25 bp, Homo sapien
gggagatacgtgcacaagttctccc

SEQ ID NO: 1342878 - DNA, 25 bp, Homo sapien
gagatacgtgcacaagttctcccac

SEQ ID NO: 1342879 - DNA, 25 bp, Homo sapien
tttttaccatctagaaagtgcagca

SEQ ID NO: 1342880 - DNA, 25 bp, Homo sapien
tgctccactaggactctgaagagag

SEQ ID NO: 1342881 - DNA, 25 bp, Homo sapien
cagttcagcctgctagaccgaggga

SEQ ID NO: 1342882 - DNA, 25 bp, Homo sapien
gagagtccaccctgtgacgtaaagg

SEQ ID NO: 1342883 - DNA, 25 bp, Homo sapien
ctttctcggaggcacgaaccaagca

SEQ ID NO: 1342884 - DNA, 25 bp, Homo sapien
ttctcggaggcacgaaccaagcagc

SEQ ID NO: 1342885 - DNA, 25 bp, Homo sapien
tttctcggaggcacgaaccaagcag

SEQ ID NO: 1342886 - DNA, 25 bp, Homo sapien
cgcttgcgcaatacgtggtaagaaa

SEQ ID NO: 1342887 - DNA, 25 bp, Homo sapien
tatattccgacttgcgcacaggagc

SEQ ID NO: 1342888 - DNA, 25 bp, Homo sapien
taacaggcatagattccgcttgcgc

SEQ ID NO: 1342889 - DNA, 25 bp, Homo sapien
tagaagacaaatgcgctgctcggag

SEQ ID NO: 1342890 - DNA, 25 bp, Homo sapien
cagagcggcgcgaggtccgcttggc

SEQ ID NO: 1342891 - DNA, 25 bp, Homo sapien
gcagagcggcgcgaggtccgcttgg

SEQ ID NO: 1342892 - DNA, 25 bp, Homo sapien
gcccaacgcagagcggcgcgaggtc

SEQ ID NO: 1342893 - DNA, 25 bp, Homo sapien
ctggcccaacgcagagcggcgcgag

SEQ ID NO: 1342894 - DNA, 25 bp, Homo sapien
gaataagcttcaggcaaaactttgc

SEQ ID NO: 1342895 - DNA, 25 bp, Homo sapien
tgccaacaaaaaccggtccaactga

SEQ ID NO: 1342896 - DNA, 25 bp, Homo sapien
gcagtttaatgcaggacagataatc

SEQ ID NO: 1342897 - DNA, 25 bp, Homo sapien
gattttagacgaaagtccaaaagca

SEQ ID NO: 1342898 - DNA, 25 bp, Homo sapien
tccaattagaaaatagtcagaagac

SEQ ID NO: 1342899 - DNA, 25 bp, Homo sapien
gcatacaaccagtatctagaatatg

SEQ ID NO: 1342900 - DNA, 25 bp, Homo sapien
tatttacaagccatatatctggcat

SEQ ID NO: 1342901 - DNA, 25 bp, Homo sapien
tgaaagaccctgtaacgatactgaa

SEQ ID NO: 1342902 - DNA, 25 bp, Homo sapien
gtctggctccagtagccccgggtgc

SEQ ID NO: 1342903 - DNA, 25 bp, Homo sapien
tacgaggctttcgttgttcttcgcc

SEQ ID NO: 1342904 - DNA, 25 bp, Homo sapien
ttcgcctcccactagggcgggttga

SEQ ID NO: 1342905 - DNA, 25 bp, Homo sapien
cattagagaaatgggaatacgaggc

SEQ ID NO: 1342906 - DNA, 25 bp, Homo sapien
cctggcggcggatgcattgaaagct

SEQ ID NO: 1342907 - DNA, 25 bp, Homo sapien
ttgggcgcaatgctactatcctggc

SEQ ID NO: 1342908 - DNA, 25 bp, Homo sapien
tatgggcctagtcgttgacggtagc

SEQ ID NO: 1342909 - DNA, 25 bp, Homo sapien
ttttgacagcagtaccctatgggcc

SEQ ID NO: 1342910 - DNA, 25 bp, Homo sapien
caacttccacgttatctgaatgagc

SEQ ID NO: 1342911 - DNA, 25 bp, Homo sapien
gaaaaacaatcacaccgaagagggc

SEQ ID NO: 1342912 - DNA, 25 bp, Homo sapien
tactaagaaccatgtagttccctgc

SEQ ID NO: 1342913 - DNA, 25 bp, Homo sapien
tgaaggcgtagaaaagcagcgtttt

SEQ ID NO: 1342914 - DNA, 25 bp, Homo sapien
cagctcctggaccatgcacattctt

SEQ ID NO: 1342915 - DNA, 25 bp, Homo sapien
gctcctggaccatgcacattcttgg

SEQ ID NO: 1342916 - DNA, 25 bp, Homo sapien
tcctggaccatgcacattcttgggc

SEQ ID NO: 1342917 - DNA, 25 bp, Homo sapien
cctggaccatgcacattcttgggca

SEQ ID NO: 1342918 - DNA, 25 bp, Homo sapien
atagtttcaatcttctccatgtagc

SEQ ID NO: 1342919 - DNA, 25 bp, Homo sapien
tctttgccagggcatacgtccaaat

SEQ ID NO: 1342920 - DNA, 25 bp, Homo sapien
gggcatacgtccaaattggtatttc

SEQ ID NO: 1342921 - DNA, 25 bp, Homo sapien
agctagttatcccagggccaatggg

SEQ ID NO: 1342922 - DNA, 25 bp, Homo sapien
gatattcccttcatcatttgtttat

SEQ ID NO: 1342923 - DNA, 25 bp, Homo sapien
ttcccttcatcatttgtttattgca

SEQ ID NO: 1342924 - DNA, 25 bp, Homo sapien
cccttcatcatttgtttattgcatc

SEQ ID NO: 1342925 - DNA, 25 bp, Homo sapien
tattcccttcatcatttgtttattg

SEQ ID NO: 1342926 - DNA, 25 bp, Homo sapien
caagatcgaatgtccaagtatgggt

SEQ ID NO: 1342927 - DNA, 25 bp, Homo sapien
gcacttctgttggtataggcctagg

SEQ ID NO: 1342928 - DNA, 25 bp, Homo sapien
tgctctacagtgctagcttgcaaga

SEQ ID NO: 1342929 - DNA, 25 bp, Homo sapien
tatctgatggagtaagtccttaggc

SEQ ID NO: 1342930 - DNA, 25 bp, Homo sapien
tctcaaatgactgtatgaagctggg

SEQ ID NO: 1342931 - DNA, 25 bp, Homo sapien
ggtcctgcaattcagcactgcctta

SEQ ID NO: 1342932 - DNA, 25 bp, Homo sapien
ggttctcaacctatcagatgcaaca

SEQ ID NO: 1342933 - DNA, 25 bp, Homo sapien
tgggaacatgcacctttgaaggctt

SEQ ID NO: 1342934 - DNA, 25 bp, Homo sapien
ttgagataaaggctaaatgagtgta

SEQ ID NO: 1342935 - DNA, 25 bp, Homo sapien
caatcaatgtgactgtgacaactgc

SEQ ID NO: 1342936 - DNA, 25 bp, Homo sapien
caaagctgataaacatgtgttgcct

SEQ ID NO: 1342937 - DNA, 25 bp, Homo sapien
tttgtgtgcgtatacaagtacaatc

SEQ ID NO: 1342938 - DNA, 25 bp, Homo sapien
ccctcgatttacatgggagttgcat

SEQ ID NO: 1342939 - DNA, 25 bp, Homo sapien
tttcgaagcgctgaacaattcttga

SEQ ID NO: 1342940 - DNA, 25 bp, Homo sapien
ttccgaaacaaacaaagcacaatct

SEQ ID NO: 1342941 - DNA, 25 bp, Homo sapien
tcaaataccagaagctgcgttgtca

SEQ ID NO: 1342942 - DNA, 25 bp, Homo sapien
gaacctgcggatacagaggactgac

SEQ ID NO: 1342943 - DNA, 25 bp, Homo sapien
gaaccgttgaatcgtagcctgggat

SEQ ID NO: 1342944 - DNA, 25 bp, Homo sapien
caatccatggttgggtgcggaacct

SEQ ID NO: 1342945 - DNA, 25 bp, Homo sapien
aagggtcctaaacagcgggctctct

SEQ ID NO: 1342946 - DNA, 25 bp, Homo sapien
gattttggcctcacattaagggagc

SEQ ID NO: 1342947 - DNA, 25 bp, Homo sapien
gatgcaggtagccatgatcgtgcct

SEQ ID NO: 1342948 - DNA, 25 bp, Homo sapien
taaatgatagtgcaaggcagccgga

SEQ ID NO: 1342949 - DNA, 25 bp, Homo sapien
ggcccagaactatccagaccgttga

SEQ ID NO: 1342950 - DNA, 25 bp, Homo sapien
cttgagaaaccagtagtggaccttc

SEQ ID NO: 1342951 - DNA, 25 bp, Homo sapien
tagtggaccttctggcattcccgga

SEQ ID NO: 1342952 - DNA, 25 bp, Homo sapien
gcattcccggattcaactttcttgg

SEQ ID NO: 1342953 - DNA, 25 bp, Homo sapien
gaccttctggcattcccggattcaa

SEQ ID NO: 1342954 - DNA, 25 bp, Homo sapien
tccacaggtgtcaagaatctataat

SEQ ID NO: 1342955 - DNA, 25 bp, Homo sapien
taggagccaatataagcattcctta

SEQ ID NO: 1342956 - DNA, 25 bp, Homo sapien
agatagagggactcggagactgcca

SEQ ID NO: 1342957 - DNA, 25 bp, Homo sapien
gactgccagctactggttaacttgt

SEQ ID NO: 1342958 - DNA, 25 bp, Homo sapien
catttcaacatatattgtaatagtc

SEQ ID NO: 1342959 - DNA, 25 bp, Homo sapien
tcaaactttgcaaaccactgaaatg

SEQ ID NO: 1342960 - DNA, 25 bp, Homo sapien
tgaaaatcatgttatagaagacaac

SEQ ID NO: 1342961 - DNA, 25 bp, Homo sapien
attatgaaccatcctttttagagac

SEQ ID NO: 1342962 - DNA, 25 bp, Homo sapien
caaagttacctgcttggaccccagg

SEQ ID NO: 1342963 - DNA, 25 bp, Homo sapien
ttccaagggcccgatcagctatgag

SEQ ID NO: 1342964 - DNA, 25 bp, Homo sapien
gaagtcagatggttcccggagcact

SEQ ID NO: 1342965 - DNA, 25 bp, Homo sapien
tccaagtagctaagagcctggcggt

SEQ ID NO: 1342966 - DNA, 25 bp, Homo sapien
tattgagtgcacaggatcgtacacc

SEQ ID NO: 1342967 - DNA, 25 bp, Homo sapien
gatctataaggtaggccccaagcag

SEQ ID NO: 1342968 - DNA, 25 bp, Homo sapien
cattctttggagatggacaccgatc

SEQ ID NO: 1342969 - DNA, 25 bp, Homo sapien
tactgctgatccctttgcccgttgg

SEQ ID NO: 1342970 - DNA, 25 bp, Homo sapien
ttcaaagctgaaatacccctggtgg

SEQ ID NO: 1342971 - DNA, 25 bp, Homo sapien
tatgacaccagcctaccttggactg

SEQ ID NO: 1342972 - DNA, 25 bp, Homo sapien
gactgggaccgcaaaggatgttaaa

SEQ ID NO: 1342973 - DNA, 25 bp, Homo sapien
gacaaatgtccatgccgctggtcca

SEQ ID NO: 1342974 - DNA, 25 bp, Homo sapien
tccccactctagttagaggggctgg

SEQ ID NO: 1342975 - DNA, 25 bp, Homo sapien
ggctggggtatggagagaccgtccc

SEQ ID NO: 1342976 - DNA, 25 bp, Homo sapien
atgctccccactctagttagagggg

SEQ ID NO: 1342977 - DNA, 25 bp, Homo sapien
tatggagagaccgtcccagccgggc

SEQ ID NO: 1342978 - DNA, 25 bp, Homo sapien
gcctccttgcgggtcaacttgtaga

SEQ ID NO: 1342979 - DNA, 25 bp, Homo sapien
cagtgggtccgtccacatgggtgat

SEQ ID NO: 1342980 - DNA, 25 bp, Homo sapien
tgtagatctcagtgggtccgtccac

SEQ ID NO: 1342981 - DNA, 25 bp, Homo sapien
ggagttcttccccactatggacacc

SEQ ID NO: 1342982 - DNA, 25 bp, Homo sapien
taagcggctgcttggttgtaactgc

SEQ ID NO: 1342983 - DNA, 25 bp, Homo sapien
tacggcaatgcatccatatgtgtgg

SEQ ID NO: 1342984 - DNA, 25 bp, Homo sapien
gaaagccatatgcactggagacagc

SEQ ID NO: 1342985 - DNA, 25 bp, Homo sapien
gacagcttcttaggaccggcagcat

SEQ ID NO: 1342986 - DNA, 25 bp, Homo sapien
ggtgcctgtcaaccccagaggtcat

SEQ ID NO: 1342987 - DNA, 25 bp, Homo sapien
tctcggaagaaacccacgttggtga

SEQ ID NO: 1342988 - DNA, 25 bp, Homo sapien
tgattttaattgactgggccaggaa

SEQ ID NO: 1342989 - DNA, 25 bp, Homo sapien
tcccaagaaggtaactgagatgtcc

SEQ ID NO: 1342990 - DNA, 25 bp, Homo sapien
tcaggtcactggcacagcaatagcc

SEQ ID NO: 1342991 - DNA, 25 bp, Homo sapien
caatcagggagatggcgtcaataaa

SEQ ID NO: 1342992 - DNA, 25 bp, Homo sapien
gaccaatcccatcagtgctcacaga

SEQ ID NO: 1342993 - DNA, 25 bp, Homo sapien
gtccagcccgtgtgacaagaccaat

SEQ ID NO: 1342994 - DNA, 25 bp, Homo sapien
gacggtccatcagttggttcccacc

SEQ ID NO: 1342995 - DNA, 25 bp, Homo sapien
tccaacgctttaccgaggcaacaaa

SEQ ID NO: 1342996 - DNA, 25 bp, Homo sapien
cttaatccaacgctttaccgaggca

SEQ ID NO: 1342997 - DNA, 25 bp, Homo sapien
acgctttaccgaggcaacaaagcca

SEQ ID NO: 1342998 - DNA, 25 bp, Homo sapien
taatccaacgctttaccgaggcaac

SEQ ID NO: 1342999 - DNA, 25 bp, Homo sapien
tgccaagacgcggaaccagtgttgc

SEQ ID NO: 1343000 - DNA, 25 bp, Homo sapien
cacactgtagctagctgccaagacg

SEQ ID NO: 1343001 - DNA, 25 bp, Homo sapien
ggagtaaaactgacatcacactgta

SEQ ID NO: 1343002 - DNA, 25 bp, Homo sapien
gagacctcagaaacctccaggagta

SEQ ID NO: 1343003 - DNA, 25 bp, Homo sapien
tgctctgagaagaggattcacttta

SEQ ID NO: 1343004 - DNA, 25 bp, Homo sapien
ttcactttagcctgctgcaattcat

SEQ ID NO: 1343005 - DNA, 25 bp, Homo sapien
ctttagcctgctgcaattcatatct

SEQ ID NO: 1343006 - DNA, 25 bp, Homo sapien
agtttttcatgtgtgcagggctttg

SEQ ID NO: 1343007 - DNA, 25 bp, Homo sapien
gaccaggctaaagaccccttgagag

SEQ ID NO: 1343008 - DNA, 25 bp, Homo sapien
ttcaagatggcacaaggctaagtac

SEQ ID NO: 1343009 - DNA, 25 bp, Homo sapien
cctatctgctggtgagaacactcca

SEQ ID NO: 1343010 - DNA, 25 bp, Homo sapien
taagtactgaggtgctccgtggttc

SEQ ID NO: 1343011 - DNA, 25 bp, Homo sapien
tacttcctcctgacacttggcatgt

SEQ ID NO: 1343012 - DNA, 25 bp, Homo sapien
cacttggcatgtccctccaactcac

SEQ ID NO: 1343013 - DNA, 25 bp, Homo sapien
acacttggcatgtccctccaactca

SEQ ID NO: 1343014 - DNA, 25 bp, Homo sapien
ttctacttcctcctgacacttggca

SEQ ID NO: 1343015 - DNA, 25 bp, Homo sapien
ctctgtagcaagatatctgaattcc

SEQ ID NO: 1343016 - DNA, 25 bp, Homo sapien
tgcttgtctgtgctccgtccaggat

SEQ ID NO: 1343017 - DNA, 25 bp, Homo sapien
gatatctgaattcctagctctgaag

SEQ ID NO: 1343018 - DNA, 25 bp, Homo sapien
gatccatctaacaaaggctgaagcc

SEQ ID NO: 1343019 - DNA, 25 bp, Homo sapien
ggcaaatgctccgtaattcctagga

SEQ ID NO: 1343020 - DNA, 25 bp, Homo sapien
gatacatcgtgtgatctggtggcag

SEQ ID NO: 1343021 - DNA, 25 bp, Homo sapien
cagagggtctacttggcatttcaca

SEQ ID NO: 1343022 - DNA, 25 bp, Homo sapien
aagagaccccttccaaatgcacaag

SEQ ID NO: 1343023 - DNA, 25 bp, Homo sapien
tcaaaaggacttttaggagatcact

SEQ ID NO: 1343024 - DNA, 25 bp, Homo sapien
cacagaaattcgtagttcaaaagga

SEQ ID NO: 1343025 - DNA, 25 bp, Homo sapien
acttacatttgggagcagtggtgca

SEQ ID NO: 1343026 - DNA, 25 bp, Homo sapien
tacctactcacatcaaggacaaggc

SEQ ID NO: 1343027 - DNA, 25 bp, Homo sapien
gctgctcgtgttgtggaagcccact

SEQ ID NO: 1343028 - DNA, 25 bp, Homo sapien
tcaagattcttgtccacaagcccag

SEQ ID NO: 1343029 - DNA, 25 bp, Homo sapien
tgtacagtaaaaacaccgagtggtg

SEQ ID NO: 1343030 - DNA, 25 bp, Homo sapien
gaaatcaagattcttgtccacaagc

SEQ ID NO: 1343031 - DNA, 25 bp, Homo sapien
gaaagtagactcatgatcccctagg

SEQ ID NO: 1343032 - DNA, 25 bp, Homo sapien
gagtcgatgatccagcaggagcata

SEQ ID NO: 1343033 - DNA, 25 bp, Homo sapien
catgtctactccaaagaggtcaagg

SEQ ID NO: 1343034 - DNA, 25 bp, Homo sapien
aacagtcagtcaaaccaaagttggg

SEQ ID NO: 1343035 - DNA, 25 bp, Homo sapien
ctaaaggtgaggccaacccttggct

SEQ ID NO: 1343036 - DNA, 25 bp, Homo sapien
tgaggccaacccttggctctggggg

SEQ ID NO: 1343037 - DNA, 25 bp, Homo sapien
taaaggtgaggccaacccttggctc

SEQ ID NO: 1343038 - DNA, 25 bp, Homo sapien
aaggtgaggccaacccttggctctg

SEQ ID NO: 1343039 - DNA, 25 bp, Homo sapien
tgttcacttggactgtgacgccgcc

SEQ ID NO: 1343040 - DNA, 25 bp, Homo sapien
gattccacatcccatagatgcctgt

SEQ ID NO: 1343041 - DNA, 25 bp, Homo sapien
gagcaaagacatacagattccacat

SEQ ID NO: 1343042 - DNA, 25 bp, Homo sapien
tatgggatggtgcatacaagaacat

SEQ ID NO: 1343043 - DNA, 25 bp, Homo sapien
aattaaggtcaactgaaggttctct

SEQ ID NO: 1343044 - DNA, 25 bp, Homo sapien
tgaatcatttcggtgtaaattaagg

SEQ ID NO: 1343045 - DNA, 25 bp, Homo sapien
catcttttaatctgaatcatttcgg

SEQ ID NO: 1343046 - DNA, 25 bp, Homo sapien
ggaaacatgaagggccatgtaagac

SEQ ID NO: 1343047 - DNA, 25 bp, Homo sapien
caacagggctctagaggctccaaac

SEQ ID NO: 1343048 - DNA, 25 bp, Homo sapien
cagcagagctagcaacactaacact

SEQ ID NO: 1343049 - DNA, 25 bp, Homo sapien
cacagcagtgttgtaggtcaaagca

SEQ ID NO: 1343050 - DNA, 25 bp, Homo sapien
cagtggcagagccaacaacagggct

SEQ ID NO: 1343051 - DNA, 25 bp, Homo sapien
agatgacagtcatggcagcgcaggc

SEQ ID NO: 1343052 - DNA, 25 bp, Homo sapien
gcagcgcaggccaaggtgataagca

SEQ ID NO: 1343053 - DNA, 25 bp, Homo sapien
ggccaaggtgataagcatgaggaac

SEQ ID NO: 1343054 - DNA, 25 bp, Homo sapien
gtgataagcatgaggaacttgaacc

SEQ ID NO: 1343055 - DNA, 25 bp, Homo sapien
gccgccggactttgctcatagctgg

SEQ ID NO: 1343056 - DNA, 25 bp, Homo sapien
gctcatagctggcaggctggactgc

SEQ ID NO: 1343057 - DNA, 25 bp, Homo sapien
ctcatagtgtagccgccggactttg

SEQ ID NO: 1343058 - DNA, 25 bp, Homo sapien
gcttcccactgatgttccgaaacac

SEQ ID NO: 1343059 - DNA, 25 bp, Homo sapien
gattccagccacgatgatgaaggcc

SEQ ID NO: 1343060 - DNA, 25 bp, Homo sapien
attccagccacgatgatgaaggcca

SEQ ID NO: 1343061 - DNA, 25 bp, Homo sapien
gaaccactgggctagtccttggagt

SEQ ID NO: 1343062 - DNA, 25 bp, Homo sapien
caggtccctccctagatatatggaa

SEQ ID NO: 1343063 - DNA, 25 bp, Homo sapien
gaagggttcaaatgtagatccccag

SEQ ID NO: 1343064 - DNA, 25 bp, Homo sapien
cagggctaggacatcaagtatgact

SEQ ID NO: 1343065 - DNA, 25 bp, Homo sapien
gggattcaaggacacatggcacagg

SEQ ID NO: 1343066 - DNA, 25 bp, Homo sapien
gggagactgacctgccaattagagc

SEQ ID NO: 1343067 - DNA, 25 bp, Homo sapien
tacttgagacccactagggagactg

SEQ ID NO: 1343068 - DNA, 25 bp, Homo sapien
caagtcttaggatagcgtgagctgc

SEQ ID NO: 1343069 - DNA, 25 bp, Homo sapien
aaaggatattccctagcacgtggca

SEQ ID NO: 1343070 - DNA, 25 bp, Homo sapien
gagtttatgccaaccaaccagaagc

SEQ ID NO: 1343071 - DNA, 25 bp, Homo sapien
gctgcagtaagcctagcaactcgga

SEQ ID NO: 1343072 - DNA, 25 bp, Homo sapien
tagcagcagtgtgatttgccagcac

SEQ ID NO: 1343073 - DNA, 25 bp, Homo sapien
tgtagtccagatactgtagaaggga

SEQ ID NO: 1343074 - DNA, 25 bp, Homo sapien
tagaagggattcgtgagttgtaccc

SEQ ID NO: 1343075 - DNA, 25 bp, Homo sapien
gctctgttccaatgtctgtagtcca

SEQ ID NO: 1343076 - DNA, 25 bp, Homo sapien
ggccagctctgttccaatgtctgta

SEQ ID NO: 1343077 - DNA, 25 bp, Homo sapien
caaacactcctcctaaaatgacagg

SEQ ID NO: 1343078 - DNA, 25 bp, Homo sapien
gaagcttgtagaatacatcggccca

SEQ ID NO: 1343079 - DNA, 25 bp, Homo sapien
ggatgtgaccacgtccagtgcttcc

SEQ ID NO: 1343080 - DNA, 25 bp, Homo sapien
cccagaccttgtctgaggatgtgac

SEQ ID NO: 1343081 - DNA, 25 bp, Homo sapien
tgcgatgtggttccgctcgtgctga

SEQ ID NO: 1343082 - DNA, 25 bp, Homo sapien
caatgggtccgacttgcttccaata

SEQ ID NO: 1343083 - DNA, 25 bp, Homo sapien
aagaggcagaaggagccaacggcaa

SEQ ID NO: 1343084 - DNA, 25 bp, Homo sapien
cttccaataccctgcgatgtggttc

SEQ ID NO: 1343085 - DNA, 25 bp, Homo sapien
accaaattgagaagggagatagagg

SEQ ID NO: 1343086 - DNA, 25 bp, Homo sapien
gaaaaccaaattgagaagggagata

SEQ ID NO: 1343087 - DNA, 25 bp, Homo sapien
aaccaaattgagaagggagatagag

SEQ ID NO: 1343088 - DNA, 25 bp, Homo sapien
tgaggaaaaccaaattgagaaggga

SEQ ID NO: 1343089 - DNA, 25 bp, Homo sapien
catcttagccacaatgtgatgatga

SEQ ID NO: 1343090 - DNA, 25 bp, Homo sapien
tcatcttagccacaatgtgatgatg

SEQ ID NO: 1343091 - DNA, 25 bp, Homo sapien
ccgggaaggtctgtatttcagagta

SEQ ID NO: 1343092 - DNA, 25 bp, Homo sapien
ttcagagtaataggggttactaggc

SEQ ID NO: 1343093 - DNA, 25 bp, Homo sapien
ggagaccgggaaggtctgtatttca

SEQ ID NO: 1343094 - DNA, 25 bp, Homo sapien
gagccaggcccacattctctgatgg

SEQ ID NO: 1343095 - DNA, 25 bp, Homo sapien
catggaaatcccaagggcaaagatg

SEQ ID NO: 1343096 - DNA, 25 bp, Homo sapien
cagaaggacagaagcatcgcataga

SEQ ID NO: 1343097 - DNA, 25 bp, Homo sapien
cagtcaaacccgatggaaaaccatt

SEQ ID NO: 1343098 - DNA, 25 bp, Homo sapien
gatgccctgtcggatgtcaccaaac

SEQ ID NO: 1343099 - DNA, 25 bp, Homo sapien
tgctgggcgtaaggaaggtcttcat

SEQ ID NO: 1343100 - DNA, 25 bp, Homo sapien
ccaataccacaccataatgatgaag

SEQ ID NO: 1343101 - DNA, 25 bp, Homo sapien
tcgggacatcatggtgatcctcctc

SEQ ID NO: 1343102 - DNA, 25 bp, Homo sapien
tcctccaataccacaccataatgat

SEQ ID NO: 1343103 - DNA, 25 bp, Homo sapien
cttggtgaagcctccattttggtgg

SEQ ID NO: 1343104 - DNA, 25 bp, Homo sapien
ggtgaagcctccattttggtggatc

SEQ ID NO: 1343105 - DNA, 25 bp, Homo sapien
caccttggtgaagcctccattttgg

SEQ ID NO: 1343106 - DNA, 25 bp, Homo sapien
tgaagcctccattttggtggatccc

SEQ ID NO: 1343107 - DNA, 25 bp, Homo sapien
cttatgggccacagacccaatttcc

SEQ ID NO: 1343108 - DNA, 25 bp, Homo sapien
cattcatagtaacggccctcatgct

SEQ ID NO: 1343109 - DNA, 25 bp, Homo sapien
gaaaggaaggacatcacattcatag

SEQ ID NO: 1343110 - DNA, 25 bp, Homo sapien
cacaggcagccggatgtttaaaagg

SEQ ID NO: 1343111 - DNA, 25 bp, Homo sapien
gatgtgaaggtgcatttgagtttcc

SEQ ID NO: 1343112 - DNA, 25 bp, Homo sapien
gtttccgtggtactctttcatgggc

SEQ ID NO: 1343113 - DNA, 25 bp, Homo sapien
cacggtaagccagggaaacgtccat

SEQ ID NO: 1343114 - DNA, 25 bp, Homo sapien
tttcagtccactcagcaaacgcgtc

SEQ ID NO: 1343115 - DNA, 25 bp, Homo sapien
atcaatgtctaaaaaagtgggtttg

SEQ ID NO: 1343116 - DNA, 25 bp, Homo sapien
gtgaagaaaagaagactttatcaat

SEQ ID NO: 1343117 - DNA, 25 bp, Homo sapien
agaaaagaagactttatcaatgtct

SEQ ID NO: 1343118 - DNA, 25 bp, Homo sapien
tgaagaaaagaagactttatcaatg

SEQ ID NO: 1343119 - DNA, 25 bp, Homo sapien
cactgttgggaggttgtgagtcact

SEQ ID NO: 1343120 - DNA, 25 bp, Homo sapien
cgcctgggaaggatgtgccactgtt

SEQ ID NO: 1343121 - DNA, 25 bp, Homo sapien
ctattgctcgttggagtgctctcga

SEQ ID NO: 1343122 - DNA, 25 bp, Homo sapien
gggcgcctgggaaggatgtgccact

SEQ ID NO: 1343123 - DNA, 25 bp, Homo sapien
tctgggatgtgacctgtgatggctc

SEQ ID NO: 1343124 - DNA, 25 bp, Homo sapien
ctcggcggatctcagtggcagctgc

SEQ ID NO: 1343125 - DNA, 25 bp, Homo sapien
cacgcccacgatgcctggcggatat

SEQ ID NO: 1343126 - DNA, 25 bp, Homo sapien
tgtggcaccattgagctcaggatga

SEQ ID NO: 1343127 - DNA, 25 bp, Homo sapien
gggctccgactcacgcacatagagg

SEQ ID NO: 1343128 - DNA, 25 bp, Homo sapien
ctaaagggctccgactcacgcacat

SEQ ID NO: 1343129 - DNA, 25 bp, Homo sapien
aaagggctccgactcacgcacatag

SEQ ID NO: 1343130 - DNA, 25 bp, Homo sapien
agggctccgactcacgcacatagag

SEQ ID NO: 1343131 - DNA, 25 bp, Homo sapien
cgttgagattgcagtgcaaggagac

SEQ ID NO: 1343132 - DNA, 25 bp, Homo sapien
tggtggttatgttcgttgagattgc

SEQ ID NO: 1343133 - DNA, 25 bp, Homo sapien
attgcagtgcaaggagacgcagtcg

SEQ ID NO: 1343134 - DNA, 25 bp, Homo sapien
atgttcgttgagattgcagtgcaag

SEQ ID NO: 1343135 - DNA, 25 bp, Homo sapien
cccctgcgatcaaagccgatgaggc

SEQ ID NO: 1343136 - DNA, 25 bp, Homo sapien
catgctctgaacccgtgtgccttac

SEQ ID NO: 1343137 - DNA, 25 bp, Homo sapien
ggatgctggccgatcccgaggccaa

SEQ ID NO: 1343138 - DNA, 25 bp, Homo sapien
ggccaactcgcggttctgctccatg

SEQ ID NO: 1343139 - DNA, 25 bp, Homo sapien
acagcaattccgagctcgctggcag

SEQ ID NO: 1343140 - DNA, 25 bp, Homo sapien
gcagatggtagagtccggtgtctct

SEQ ID NO: 1343141 - DNA, 25 bp, Homo sapien
tcttccacggctgcagacgggatat

SEQ ID NO: 1343142 - DNA, 25 bp, Homo sapien
tgtgttcctctggtacagattgagg

SEQ ID NO: 1343143 - DNA, 25 bp, Homo sapien
cttgatgtccacgttatcgtagcca

SEQ ID NO: 1343144 - DNA, 25 bp, Homo sapien
tgtccacgttatcgtagccactgcc

SEQ ID NO: 1343145 - DNA, 25 bp, Homo sapien
gatgtccacgttatcgtagccactg

SEQ ID NO: 1343146 - DNA, 25 bp, Homo sapien
gtccacgttatcgtagccactgcct

SEQ ID NO: 1343147 - DNA, 25 bp, Homo sapien
taggtcctccctggtgaggatgatg

SEQ ID NO: 1343148 - DNA, 25 bp, Homo sapien
tctaggtcctccctggtgaggatga

SEQ ID NO: 1343149 - DNA, 25 bp, Homo sapien
tcctccctggtgaggatgatggtgt

SEQ ID NO: 1343150 - DNA, 25 bp, Homo sapien
ttttctaggtcctccctggtgagga

SEQ ID NO: 1343151 - DNA, 25 bp, Homo sapien
gaaggccacagtggccaggtctttc

SEQ ID NO: 1343152 - DNA, 25 bp, Homo sapien
ctgcgcgtcacagaaggccacagtg

SEQ ID NO: 1343153 - DNA, 25 bp, Homo sapien
acagtggccaggtctttcaggatgg

SEQ ID NO: 1343154 - DNA, 25 bp, Homo sapien
gccacagtggccaggtctttcagga

SEQ ID NO: 1343155 - DNA, 25 bp, Homo sapien
ctccacagtgcagtcgcggccgtcc

SEQ ID NO: 1343156 - DNA, 25 bp, Homo sapien
caattgctgtctcttgactttgtgc

SEQ ID NO: 1343157 - DNA, 25 bp, Homo sapien
tctgtccaattgctgtctcttgact

SEQ ID NO: 1343158 - DNA, 25 bp, Homo sapien
gtctcttgactttgtgcttatccac

SEQ ID NO: 1343159 - DNA, 25 bp, Homo sapien
tcacaaattctgtccaattgctgtc

SEQ ID NO: 1343160 - DNA, 25 bp, Homo sapien
tagttcacacgatgggctgtccgtc

SEQ ID NO: 1343161 - DNA, 25 bp, Homo sapien
aaagcagtcctctaagaacttaggg

SEQ ID NO: 1343162 - DNA, 25 bp, Homo sapien
tcaaaaccatttaaggtgatgaaac

SEQ ID NO: 1343163 - DNA, 25 bp, Homo sapien
gaactttgcaactctcagatcaaaa

SEQ ID NO: 1343164 - DNA, 25 bp, Homo sapien
atctaactcaacacgttcaccctga

SEQ ID NO: 1343165 - DNA, 25 bp, Homo sapien
ggttggagagtagctctttcctcat

SEQ ID NO: 1343166 - DNA, 25 bp, Homo sapien
tcaacacgttcaccctgaaggattt

SEQ ID NO: 1343167 - DNA, 25 bp, Homo sapien
caccctgaaggatttcatctgctcc

SEQ ID NO: 1343168 - DNA, 25 bp, Homo sapien
gagctctggcagatgaaccgctaca

SEQ ID NO: 1343169 - DNA, 25 bp, Homo sapien
tgtgaaaatctacctgcgtgcccct

SEQ ID NO: 1343170 - DNA, 25 bp, Homo sapien
gggtcgctccatggcagtttattag

SEQ ID NO: 1343171 - DNA, 25 bp, Homo sapien
gctgcattgtcatacagtaaccagg

SEQ ID NO: 1343172 - DNA, 25 bp, Homo sapien
tgctgagttaatcaacccaaactcc

SEQ ID NO: 1343173 - DNA, 25 bp, Homo sapien
gataagggctgtgttactaactgct

SEQ ID NO: 1343174 - DNA, 25 bp, Homo sapien
tctgagtgtgagtaagataagggct

SEQ ID NO: 1343175 - DNA, 25 bp, Homo sapien
tatcatgtaggaagcaagttgggcc

SEQ ID NO: 1343176 - DNA, 25 bp, Homo sapien
cttttcttcgttcccatgaatgagg

SEQ ID NO: 1343177 - DNA, 25 bp, Homo sapien
ccatgaatgaggaggggatacaaat

SEQ ID NO: 1343178 - DNA, 25 bp, Homo sapien
gcagccagggacaaaaataatatgg

SEQ ID NO: 1343179 - DNA, 25 bp, Homo sapien
aataatatggctggtggttcctgac

SEQ ID NO: 1343180 - DNA, 25 bp, Homo sapien
gcctccgaagccagccctgggagca

SEQ ID NO: 1343181 - DNA, 25 bp, Homo sapien
cagccctgggagcacagccctaacc

SEQ ID NO: 1343182 - DNA, 25 bp, Homo sapien
ctgcctccgaagccagccctgggag

SEQ ID NO: 1343183 - DNA, 25 bp, Homo sapien
gccctgggagcacagccctaaccca

SEQ ID NO: 1343184 - DNA, 25 bp, Homo sapien
ggttgtctcccatacacctctgctc

SEQ ID NO: 1343185 - DNA, 25 bp, Homo sapien
gttgtctcccatacacctctgctcc

SEQ ID NO: 1343186 - DNA, 25 bp, Homo sapien
aggttgtctcccatacacctctgct

SEQ ID NO: 1343187 - DNA, 25 bp, Homo sapien
gaggttgtctcccatacacctctgc

SEQ ID NO: 1343188 - DNA, 25 bp, Homo sapien
cctctgaattccatgggtgagcttc

SEQ ID NO: 1343189 - DNA, 25 bp, Homo sapien
tcataaacctctgaattccatgggt

SEQ ID NO: 1343190 - DNA, 25 bp, Homo sapien
cctcatcgggattcataaacctctg

SEQ ID NO: 1343191 - DNA, 25 bp, Homo sapien
ttccatgggtgagcttcagggcttc

SEQ ID NO: 1343192 - DNA, 25 bp, Homo sapien
agagggcaatgctcaaagggaagaa

SEQ ID NO: 1343193 - DNA, 25 bp, Homo sapien
gagggcaatgctcaaagggaagaaa

SEQ ID NO: 1343194 - DNA, 25 bp, Homo sapien
gttgtttagcttgaaggcaatgtcc

SEQ ID NO: 1343195 - DNA, 25 bp, Homo sapien
catgaattggaaccaaggactcatc

SEQ ID NO: 1343196 - DNA, 25 bp, Homo sapien
gtttagcttgaaggcaatgtccagc

SEQ ID NO: 1343197 - DNA, 25 bp, Homo sapien
agcttgaaggcaatgtccagctgca

SEQ ID NO: 1343198 - DNA, 25 bp, Homo sapien
gaaaacacgatgtcattggcttcaa

SEQ ID NO: 1343199 - DNA, 25 bp, Homo sapien
catgtaggacactgccgttgtgggc

SEQ ID NO: 1343200 - DNA, 25 bp, Homo sapien
caatgtctcggatcttgtcacaatg

SEQ ID NO: 1343201 - DNA, 25 bp, Homo sapien
tgtgatggttcttacgggcatccac

SEQ ID NO: 1343202 - DNA, 25 bp, Homo sapien
taagctctagctgaacatccttcat

SEQ ID NO: 1343203 - DNA, 25 bp, Homo sapien
cactactaagctctagctgaacatc

SEQ ID NO: 1343204 - DNA, 25 bp, Homo sapien
tcaacactactaagctctagctgaa

SEQ ID NO: 1343205 - DNA, 25 bp, Homo sapien
cagaaaactcaacactactaagctc

SEQ ID NO: 1343206 - DNA, 25 bp, Homo sapien
ggcagacatttggcacagcttgtgt

SEQ ID NO: 1343207 - DNA, 25 bp, Homo sapien
aatcctgaaggaatgtgcgaatgaa

SEQ ID NO: 1343208 - DNA, 25 bp, Homo sapien
cattcccactcaccagatctataag

SEQ ID NO: 1343209 - DNA, 25 bp, Homo sapien
agcttgtgtgcaggaacctggagga

SEQ ID NO: 1343210 - DNA, 25 bp, Homo sapien
tccacaataggtccaaaatgcaagg

SEQ ID NO: 1343211 - DNA, 25 bp, Homo sapien
cacaataggtccaaaatgcaaggca

SEQ ID NO: 1343212 - DNA, 25 bp, Homo sapien
caataggtccaaaatgcaaggcatt

SEQ ID NO: 1343213 - DNA, 25 bp, Homo sapien
ctccacaataggtccaaaatgcaag

SEQ ID NO: 1343214 - DNA, 25 bp, Homo sapien
ggtaaaagcctggttcacacaagcc

SEQ ID NO: 1343215 - DNA, 25 bp, Homo sapien
catgttcaaagaatagtgccaggga

SEQ ID NO: 1343216 - DNA, 25 bp, Homo sapien
gatattctataagtgacagcaaggc

SEQ ID NO: 1343217 - DNA, 25 bp, Homo sapien
cagggatttaatactggcatgctca

SEQ ID NO: 1343218 - DNA, 25 bp, Homo sapien
tggaatagtctcatttatgggtatg

SEQ ID NO: 1343219 - DNA, 25 bp, Homo sapien
ttggaatagtctcatttatgggtat

SEQ ID NO: 1343220 - DNA, 25 bp, Homo sapien
tttggaatagtctcatttatgggta

SEQ ID NO: 1343221 - DNA, 25 bp, Homo sapien
tcagacagggataataggccaattt

SEQ ID NO: 1343222 - DNA, 25 bp, Homo sapien
cagacagggataataggccaattta

SEQ ID NO: 1343223 - DNA, 25 bp, Homo sapien
tctcctaagcgccaaaagaggacgg

SEQ ID NO: 1343224 - DNA, 25 bp, Homo sapien
acattcacagtcaccggctctcggg

SEQ ID NO: 1343225 - DNA, 25 bp, Homo sapien
aagaggacggggacattcacagtca

SEQ ID NO: 1343226 - DNA, 25 bp, Homo sapien
gagctgagggcgctctcctaagcgc

SEQ ID NO: 1343227 - DNA, 25 bp, Homo sapien
actagactggattgtgccccacgga

SEQ ID NO: 1343228 - DNA, 25 bp, Homo sapien
ttagccactagactggattgtgccc

SEQ ID NO: 1343229 - DNA, 25 bp, Homo sapien
ttagatcatagaagcaaggcagtga

SEQ ID NO: 1343230 - DNA, 25 bp, Homo sapien
ttcttaagcacaatagccggactaa

SEQ ID NO: 1343231 - DNA, 25 bp, Homo sapien
aatcaagcctcccaccagaaaggcg

SEQ ID NO: 1343232 - DNA, 25 bp, Homo sapien
cagaaaggcgatgatttggaacacg

SEQ ID NO: 1343233 - DNA, 25 bp, Homo sapien
tttggaacacgagcagaatcccacc

SEQ ID NO: 1343234 - DNA, 25 bp, Homo sapien
ccaacaatgcacagcttcttggtgc

SEQ ID NO: 1343235 - DNA, 25 bp, Homo sapien
agctgtgattgtggccgctccgccg

SEQ ID NO: 1343236 - DNA, 25 bp, Homo sapien
ccaatgcccggagctgtgattgtgg

SEQ ID NO: 1343237 - DNA, 25 bp, Homo sapien
cgcctgtggacgcttaaaggagcag

SEQ ID NO: 1343238 - DNA, 25 bp, Homo sapien
ttctgggcgctgcaaaacttcagag

SEQ ID NO: 1343239 - DNA, 25 bp, Homo sapien
ctcagagctctggcgggtgctggcg

SEQ ID NO: 1343240 - DNA, 25 bp, Homo sapien
ggctcagagctctggcgggtgctgg

SEQ ID NO: 1343241 - DNA, 25 bp, Homo sapien
cagagctctggcgggtgctggcgcc

SEQ ID NO: 1343242 - DNA, 25 bp, Homo sapien
gctcagagctctggcgggtgctggc

SEQ ID NO: 1343243 - DNA, 25 bp, Homo sapien
gagtaacgggaacaagtattatgat

SEQ ID NO: 1343244 - DNA, 25 bp, Homo sapien
tcagttgagtaacgggaacaagtat

SEQ ID NO: 1343245 - DNA, 25 bp, Homo sapien
ttcagttgagtaacgggaacaagta

SEQ ID NO: 1343246 - DNA, 25 bp, Homo sapien
ttgagtaacgggaacaagtattatg

SEQ ID NO: 1343247 - DNA, 25 bp, Homo sapien
tgactgcctggtatgatttactgag

SEQ ID NO: 1343248 - DNA, 25 bp, Homo sapien
cagtttttgaaagtgccgactgact

SEQ ID NO: 1343249 - DNA, 25 bp, Homo sapien
ggtagactgagggaccagccatctc

SEQ ID NO: 1343250 - DNA, 25 bp, Homo sapien
cagccatctccagattcataactct

SEQ ID NO: 1343251 - DNA, 25 bp, Homo sapien
gaatcagcctgagggcgaatccttc

SEQ ID NO: 1343252 - DNA, 25 bp, Homo sapien
tccagaatcagcctgagggcgaatc

SEQ ID NO: 1343253 - DNA, 25 bp, Homo sapien
aagagtctccttggcacaatagtgc

SEQ ID NO: 1343254 - DNA, 25 bp, Homo sapien
tgccaggtggaatgttctgtttgtt

SEQ ID NO: 1343255 - DNA, 25 bp, Homo sapien
tgggttggtaacttggagaacattc

SEQ ID NO: 1343256 - DNA, 25 bp, Homo sapien
gatcagcaagatcctaaaagtagcc

SEQ ID NO: 1343257 - DNA, 25 bp, Homo sapien
taccaaacagtgttctgtagctagc

SEQ ID NO: 1343258 - DNA, 25 bp, Homo sapien
cagcagcaacaacctgttcgggtcc

SEQ ID NO: 1343259 - DNA, 25 bp, Homo sapien
tcttattattaaccctggcttggag

SEQ ID NO: 1343260 - DNA, 25 bp, Homo sapien
tttgaagcctatacagccatcccag

SEQ ID NO: 1343261 - DNA, 25 bp, Homo sapien
cattgctgtctgtctgaaagaggtc

SEQ ID NO: 1343262 - DNA, 25 bp, Homo sapien
ttgacgtagaacagatgaaccaggc

SEQ ID NO: 1343263 - DNA, 25 bp, Homo sapien
gatggtgatgaacatggccctgagc

SEQ ID NO: 1343264 - DNA, 25 bp, Homo sapien
gccctgagccactgtctaggcatct

SEQ ID NO: 1343265 - DNA, 25 bp, Homo sapien
gatggctagtttgctgcacattcca

SEQ ID NO: 1343266 - DNA, 25 bp, Homo sapien
taggcatctgcggtttctgtgaagt

SEQ ID NO: 1343267 - DNA, 25 bp, Homo sapien
cttcctgtacctgatagccacatct

SEQ ID NO: 1343268 - DNA, 25 bp, Homo sapien
tacctgatagccacatctagcttcc

SEQ ID NO: 1343269 - DNA, 25 bp, Homo sapien
acgtgtactattgcaagggcctcca

SEQ ID NO: 1343270 - DNA, 25 bp, Homo sapien
gggcctccagtgcaaatccttctct

SEQ ID NO: 1343271 - DNA, 25 bp, Homo sapien
cttctggtactttatggaggcttca

SEQ ID NO: 1343272 - DNA, 25 bp, Homo sapien
gcacacagtaagtccccttggcaac

SEQ ID NO: 1343273 - DNA, 25 bp, Homo sapien
catagtctcaggtgtggttgaaagg

SEQ ID NO: 1343274 - DNA, 25 bp, Homo sapien
gggctgtgagtctcaaccctctaag

SEQ ID NO: 1343275 - DNA, 25 bp, Homo sapien
ttaacttgctgtgatgctaatggcc

SEQ ID NO: 1343276 - DNA, 25 bp, Homo sapien
tataatatcacaaatactgtctatg

SEQ ID NO: 1343277 - DNA, 25 bp, Homo sapien
cattgccaaaagctttcgggtggcc

SEQ ID NO: 1343278 - DNA, 25 bp, Homo sapien
tcactatttgtttgaactcaggcct

SEQ ID NO: 1343279 - DNA, 25 bp, Homo sapien
agaggggagcgatggcaccagcagc

SEQ ID NO: 1343280 - DNA, 25 bp, Homo sapien
gagcagaggggagcgatggcaccag

SEQ ID NO: 1343281 - DNA, 25 bp, Homo sapien
acacgctcgcgcctactgctagcat

SEQ ID NO: 1343282 - DNA, 25 bp, Homo sapien
agcagcagccacacgctcgcgccta

SEQ ID NO: 1343283 - DNA, 25 bp, Homo sapien
tttcattctcggcaaattgaccagg

SEQ ID NO: 1343284 - DNA, 25 bp, Homo sapien
gcaaattgaccagggctgttcaaca

SEQ ID NO: 1343285 - DNA, 25 bp, Homo sapien
ttctcggcaaattgaccagggctgt

SEQ ID NO: 1343286 - DNA, 25 bp, Homo sapien
aatttcaggtgtgattgggaattcg

SEQ ID NO: 1343287 - DNA, 25 bp, Homo sapien
gatattaatgcatgttctcttttta

SEQ ID NO: 1343288 - DNA, 25 bp, Homo sapien
ctgatattaatgcatgttctctttt

SEQ ID NO: 1343289 - DNA, 25 bp, Homo sapien
catcagatggtatcaatttgacata

SEQ ID NO: 1343290 - DNA, 25 bp, Homo sapien
caataaattcatggccatcagatgg

SEQ ID NO: 1343291 - DNA, 25 bp, Homo sapien
catggtccacttcaatggaaagaga

SEQ ID NO: 1343292 - DNA, 25 bp, Homo sapien
tggaaagagattttgtagcagtgac

SEQ ID NO: 1343293 - DNA, 25 bp, Homo sapien
ctcacaggcactatactcactgtta

SEQ ID NO: 1343294 - DNA, 25 bp, Homo sapien
tgggtactcctatacccagacctgc

SEQ ID NO: 1343295 - DNA, 25 bp, Homo sapien
tttccatctgagtggtcctccagga

SEQ ID NO: 1343296 - DNA, 25 bp, Homo sapien
ttccatctgagtggtcctccaggac

SEQ ID NO: 1343297 - DNA, 25 bp, Homo sapien
caagggagtggctagccatcgagta

SEQ ID NO: 1343298 - DNA, 25 bp, Homo sapien
gagtggctagccatcgagtaagacc

SEQ ID NO: 1343299 - DNA, 25 bp, Homo sapien
gagggcaagggagtggctagccatc

SEQ ID NO: 1343300 - DNA, 25 bp, Homo sapien
agccatcgagtaagaccatgctttg

SEQ ID NO: 1343301 - DNA, 25 bp, Homo sapien
tgcctgcgtcctcagaataagcctt

SEQ ID NO: 1343302 - DNA, 25 bp, Homo sapien
ggctcaagatagtgcctgcgtcctc

SEQ ID NO: 1343303 - DNA, 25 bp, Homo sapien
gcctgcgtcctcagaataagccttc

SEQ ID NO: 1343304 - DNA, 25 bp, Homo sapien
catcagcaaggctcaagatagtgcc

SEQ ID NO: 1343305 - DNA, 25 bp, Homo sapien
tctgggaatagatatagtcttactc

SEQ ID NO: 1343306 - DNA, 25 bp, Homo sapien
tagttatgactagaacctcttgtcc

SEQ ID NO: 1343307 - DNA, 25 bp, Homo sapien
catttctggtgcagataaatacaac

SEQ ID NO: 1343308 - DNA, 25 bp, Homo sapien
aacctactgagataattgtatgggc

SEQ ID NO: 1343309 - DNA, 25 bp, Homo sapien
cagaatttgattgcagacctgaagc

SEQ ID NO: 1343310 - DNA, 25 bp, Homo sapien
gatgatagtccctggtttgagaaaa

SEQ ID NO: 1343311 - DNA, 25 bp, Homo sapien
aatctttgagcagttacgtatacgc

SEQ ID NO: 1343312 - DNA, 25 bp, Homo sapien
ggaattgcttgctcaactcagtgct

SEQ ID NO: 1343313 - DNA, 25 bp, Homo sapien
tttgaacagtccatgaaaggtgaca

SEQ ID NO: 1343314 - DNA, 25 bp, Homo sapien
aggtgacagggatgttaatctccac

SEQ ID NO: 1343315 - DNA, 25 bp, Homo sapien
ttcagcccgggcaacttcacttaag

SEQ ID NO: 1343316 - DNA, 25 bp, Homo sapien
cttcacttaagtccttggcattcag

SEQ ID NO: 1343317 - DNA, 25 bp, Homo sapien
cagacacaacaattgctttcattac

SEQ ID NO: 1343318 - DNA, 25 bp, Homo sapien
tcagacacaacaattgctttcatta

SEQ ID NO: 1343319 - DNA, 25 bp, Homo sapien
gatgggtatgaatcaggctcttgcc

SEQ ID NO: 1343320 - DNA, 25 bp, Homo sapien
gttctgatgggtatgaatcaggctc

SEQ ID NO: 1343321 - DNA, 25 bp, Homo sapien
tctgatgggtatgaatcaggctctt

SEQ ID NO: 1343322 - DNA, 25 bp, Homo sapien
gggtatgaatcaggctcttgccaaa

SEQ ID NO: 1343323 - DNA, 25 bp, Homo sapien
tgtaaggtttcccacaatacttctg

SEQ ID NO: 1343324 - DNA, 25 bp, Homo sapien
caagccaagtccatacgcatatgtg

SEQ ID NO: 1343325 - DNA, 25 bp, Homo sapien
agtgattcaagccaagtccatacgc

SEQ ID NO: 1343326 - DNA, 25 bp, Homo sapien
tacttctggtaattgatttgaggaa

SEQ ID NO: 1343327 - DNA, 25 bp, Homo sapien
tacgaaatagagcacatgcttagga

SEQ ID NO: 1343328 - DNA, 25 bp, Homo sapien
atagagcacatgcttaggaaaactc

SEQ ID NO: 1343329 - DNA, 25 bp, Homo sapien
aaatagagcacatgcttaggaaaac

SEQ ID NO: 1343330 - DNA, 25 bp, Homo sapien
ctacgaaatagagcacatgcttagg

SEQ ID NO: 1343331 - DNA, 25 bp, Homo sapien
cttgacgaggccctgaaaagagaac

SEQ ID NO: 1343332 - DNA, 25 bp, Homo sapien
gttgtattggggagcgtgactaaat

SEQ ID NO: 1343333 - DNA, 25 bp, Homo sapien
gacgaggccctgaaaagagaacttc

SEQ ID NO: 1343334 - DNA, 25 bp, Homo sapien
gtattggggagcgtgactaaattct

SEQ ID NO: 1343335 - DNA, 25 bp, Homo sapien
gtggatctgcactattcaccgagga

SEQ ID NO: 1343336 - DNA, 25 bp, Homo sapien
aataatgaactggtttccctacaag

SEQ ID NO: 1343337 - DNA, 25 bp, Homo sapien
ctgcagttgcttttgctaagtcaca

SEQ ID NO: 1343338 - DNA, 25 bp, Homo sapien
aagacagtctctaaatacagggaag

SEQ ID NO: 1343339 - DNA, 25 bp, Homo sapien
cccagttctcacgtaaattggctaa

SEQ ID NO: 1343340 - DNA, 25 bp, Homo sapien
cagttctcacgtaaattggctaaat

SEQ ID NO: 1343341 - DNA, 25 bp, Homo sapien
ctcttcccagttctcacgtaaattg

SEQ ID NO: 1343342 - DNA, 25 bp, Homo sapien
ttcccagttctcacgtaaattggct

SEQ ID NO: 1343343 - DNA, 25 bp, Homo sapien
acccattgtcttcataggtgttgat

SEQ ID NO: 1343344 - DNA, 25 bp, Homo sapien
aacccattgtcttcataggtgttga

SEQ ID NO: 1343345 - DNA, 25 bp, Homo sapien
caatccatgtagttggctccccaaa

SEQ ID NO: 1343346 - DNA, 25 bp, Homo sapien
ggtgtctccacaaaaacgatatagt

SEQ ID NO: 1343347 - DNA, 25 bp, Homo sapien
aaaacgatatagttgggagtcagac

SEQ ID NO: 1343348 - DNA, 25 bp, Homo sapien
ccccatggtttcattggactcaaaa

SEQ ID NO: 1343349 - DNA, 25 bp, Homo sapien
agaaacacaaatgggcttgtgaatg

SEQ ID NO: 1343350 - DNA, 25 bp, Homo sapien
acaaatgggcttgtgaatgaaaggg

SEQ ID NO: 1343351 - DNA, 25 bp, Homo sapien
tcagaaacacaaatgggcttgtgaa

SEQ ID NO: 1343352 - DNA, 25 bp, Homo sapien
aacacaaatgggcttgtgaatgaaa

SEQ ID NO: 1343353 - DNA, 25 bp, Homo sapien
ctatgaacgtaagatggcttgaatc

SEQ ID NO: 1343354 - DNA, 25 bp, Homo sapien
gatggcttgaatcggtcactgcagg

SEQ ID NO: 1343355 - DNA, 25 bp, Homo sapien
gggaattgtacaacgatctctgact

SEQ ID NO: 1343356 - DNA, 25 bp, Homo sapien
tgacttgcttattggatcttccttg

SEQ ID NO: 1343357 - DNA, 25 bp, Homo sapien
tcattttcaatgtgggggtgagcag

SEQ ID NO: 1343358 - DNA, 25 bp, Homo sapien
cagtggccccattgacagagacata

SEQ ID NO: 1343359 - DNA, 25 bp, Homo sapien
taccaatattgtaaacggttccatc

SEQ ID NO: 1343360 - DNA, 25 bp, Homo sapien
gacagagacatagttgcaaagatca

SEQ ID NO: 1343361 - DNA, 25 bp, Homo sapien
cactgggtagacattaacaagggca

SEQ ID NO: 1343362 - DNA, 25 bp, Homo sapien
caaggtctctggattaatctttgta

SEQ ID NO: 1343363 - DNA, 25 bp, Homo sapien
tctgtgcaagcgtagtaatcttccc

SEQ ID NO: 1343364 - DNA, 25 bp, Homo sapien
aagggcattgtcagtaacctctact

SEQ ID NO: 1343365 - DNA, 25 bp, Homo sapien
tacgtaagcatcagtgcggatgaac

SEQ ID NO: 1343366 - DNA, 25 bp, Homo sapien
gttatgacgatccttttctcagtca

SEQ ID NO: 1343367 - DNA, 25 bp, Homo sapien
ggtgccaaattctgttatgacgatc

SEQ ID NO: 1343368 - DNA, 25 bp, Homo sapien
ttctcagtcattgcccgtacgtaag

SEQ ID NO: 1343369 - DNA, 25 bp, Homo sapien
cctgctctgtcgaaggtataggaag

SEQ ID NO: 1343370 - DNA, 25 bp, Homo sapien
gaaatctgtggtgatcaacaaagcc

SEQ ID NO: 1343371 - DNA, 25 bp, Homo sapien
tgaactccacagtaagctcttatgg

SEQ ID NO: 1343372 - DNA, 25 bp, Homo sapien
tgcaagttgtcctgcttcaagtccc

SEQ ID NO: 1343373 - DNA, 25 bp, Homo sapien
taaagtcaaacttgtgcaggagggc

SEQ ID NO: 1343374 - DNA, 25 bp, Homo sapien
tcaaacaggtggtaaaatggctcag

SEQ ID NO: 1343375 - DNA, 25 bp, Homo sapien
acatcgaaggagactgccggtgagc

SEQ ID NO: 1343376 - DNA, 25 bp, Homo sapien
ttcaaagagtcctggcccacatcga

SEQ ID NO: 1343377 - DNA, 25 bp, Homo sapien
ctgttacatgagctgtgagcggcga

SEQ ID NO: 1343378 - DNA, 25 bp, Homo sapien
ctgtgagcggcgaggacagttcctc

SEQ ID NO: 1343379 - DNA, 25 bp, Homo sapien
aacagtttcttgtaaccaccagcag

SEQ ID NO: 1343380 - DNA, 25 bp, Homo sapien
acagtttcttgtaaccaccagcagg

SEQ ID NO: 1343381 - DNA, 25 bp, Homo sapien
cagttcaggatccagagttctggca

SEQ ID NO: 1343382 - DNA, 25 bp, Homo sapien
tccagttcaggatccagagttctgg

SEQ ID NO: 1343383 - DNA, 25 bp, Homo sapien
ttccagttcaggatccagagttctg

SEQ ID NO: 1343384 - DNA, 25 bp, Homo sapien
gttcaggatccagagttctggcacc

SEQ ID NO: 1343385 - DNA, 25 bp, Homo sapien
tatgcttcaacgtatagatcctaga

SEQ ID NO: 1343386 - DNA, 25 bp, Homo sapien
atgagaatccggtcttgctggtgcc

SEQ ID NO: 1343387 - DNA, 25 bp, Homo sapien
taagaacagcaactggttttagcac

SEQ ID NO: 1343388 - DNA, 25 bp, Homo sapien
gcattgttttgcgtctgtggtatcc

SEQ ID NO: 1343389 - DNA, 25 bp, Homo sapien
tcttgctccttccccaatagcagcc

SEQ ID NO: 1343390 - DNA, 25 bp, Homo sapien
gctccttccccaatagcagccctca

SEQ ID NO: 1343391 - DNA, 25 bp, Homo sapien
ttgctccttccccaatagcagccct

SEQ ID NO: 1343392 - DNA, 25 bp, Homo sapien
cttgctccttccccaatagcagccc

SEQ ID NO: 1343393 - DNA, 25 bp, Homo sapien
cattaacagtattcatgcgcttctc

SEQ ID NO: 1343394 - DNA, 25 bp, Homo sapien
aacagtattcatgcgcttctcaact

SEQ ID NO: 1343395 - DNA, 25 bp, Homo sapien
gtattcatgcgcttctcaactctct

SEQ ID NO: 1343396 - DNA, 25 bp, Homo sapien
atcattaacagtattcatgcgcttc

SEQ ID NO: 1343397 - DNA, 25 bp, Homo sapien
caagcgtgggcttgctaaattcaag

SEQ ID NO: 1343398 - DNA, 25 bp, Homo sapien
taaaaatcaagcgtgggcttgctaa

SEQ ID NO: 1343399 - DNA, 25 bp, Homo sapien
aactcaatacaaggcaagaggaaag

SEQ ID NO: 1343400 - DNA, 25 bp, Homo sapien
ttaatcagtagagatcttaaactca

SEQ ID NO: 1343401 - DNA, 25 bp, Homo sapien
cagatgagaagattcagagtttaag

SEQ ID NO: 1343402 - DNA, 25 bp, Homo sapien
gttaggtagatactttaattcacat

SEQ ID NO: 1343403 - DNA, 25 bp, Homo sapien
ttacagatgagaagattcagagttt

SEQ ID NO: 1343404 - DNA, 25 bp, Homo sapien
agatgagaagattcagagtttaagc

SEQ ID NO: 1343405 - DNA, 25 bp, Homo sapien
catcatctgatctggtgaaacctgt

SEQ ID NO: 1343406 - DNA, 25 bp, Homo sapien
gaatctatccatgttccagcttagg

SEQ ID NO: 1343407 - DNA, 25 bp, Homo sapien
tagcacagtaggattcaaacctgac

SEQ ID NO: 1343408 - DNA, 25 bp, Homo sapien
ccagcttaggcgaagcccttctgaa

SEQ ID NO: 1343409 - DNA, 25 bp, Homo sapien
cgttttagtattcaaatgccttaga

SEQ ID NO: 1343410 - DNA, 25 bp, Homo sapien
cagtaatgttaaatggaatactatc

SEQ ID NO: 1343411 - DNA, 25 bp, Homo sapien
aatgaaagttgcctgcctttattat

SEQ ID NO: 1343412 - DNA, 25 bp, Homo sapien
aagttgcctgcctttattatttata

SEQ ID NO: 1343413 - DNA, 25 bp, Homo sapien
gcatttaggccattgattctcacag

SEQ ID NO: 1343414 - DNA, 25 bp, Homo sapien
tagcttagagacctgttccatcatc

SEQ ID NO: 1343415 - DNA, 25 bp, Homo sapien
attagtgtaagttaggccctgggca

SEQ ID NO: 1343416 - DNA, 25 bp, Homo sapien
gccctgggcatataggctgttttaa

SEQ ID NO: 1343417 - DNA, 25 bp, Homo sapien
caacgaaaggcacatagcagttgct

SEQ ID NO: 1343418 - DNA, 25 bp, Homo sapien
tctgcatatctggaacaacgaaagg

SEQ ID NO: 1343419 - DNA, 25 bp, Homo sapien
taaaagagtgcaacatttggcagct

SEQ ID NO: 1343420 - DNA, 25 bp, Homo sapien
gcacacatcatgatagccttactgg

SEQ ID NO: 1343421 - DNA, 25 bp, Homo sapien
ttccacaagtattacataattttta

SEQ ID NO: 1343422 - DNA, 25 bp, Homo sapien
tccacaagtattacataatttttaa

SEQ ID NO: 1343423 - DNA, 25 bp, Homo sapien
attacataatttttaattcagttag

SEQ ID NO: 1343424 - DNA, 25 bp, Homo sapien
aaatcagcattggttgcttgattgt

SEQ ID NO: 1343425 - DNA, 25 bp, Homo sapien
cattggttgcttgattgtaggtttg

SEQ ID NO: 1343426 - DNA, 25 bp, Homo sapien
gttgcttgattgtaggtttgtcacc

SEQ ID NO: 1343427 - DNA, 25 bp, Homo sapien
tgattgtaggtttgtcaccaaaaag

SEQ ID NO: 1343428 - DNA, 25 bp, Homo sapien
taattctccccctaaattccagatc

SEQ ID NO: 1343429 - DNA, 25 bp, Homo sapien
aggattctttctcttccgatgttaa

SEQ ID NO: 1343430 - DNA, 25 bp, Homo sapien
gattctttctcttccgatgttaatt

SEQ ID NO: 1343431 - DNA, 25 bp, Homo sapien
tttctcttccgatgttaattctccc

SEQ ID NO: 1343432 - DNA, 25 bp, Homo sapien
aattgcagcttgagaggtagaaact

SEQ ID NO: 1343433 - DNA, 25 bp, Homo sapien
gcttacagtatgagtaagttggcaa

SEQ ID NO: 1343434 - DNA, 25 bp, Homo sapien
actcctgagcactaatctgcttaca

SEQ ID NO: 1343435 - DNA, 25 bp, Homo sapien
ttttctaaaagttctgcaattgcag

SEQ ID NO: 1343436 - DNA, 25 bp, Homo sapien
gagccattgtcaaacacaggatcaa

SEQ ID NO: 1343437 - DNA, 25 bp, Homo sapien
gtgtagaaccaatcagagtaaggcc

SEQ ID NO: 1343438 - DNA, 25 bp, Homo sapien
tatgctaagagtctacatccagagc

SEQ ID NO: 1343439 - DNA, 25 bp, Homo sapien
tttaaattggagacggaggaatggc

SEQ ID NO: 1343440 - DNA, 25 bp, Homo sapien
cacatcgagaaaaggtatgtatcat

SEQ ID NO: 1343441 - DNA, 25 bp, Homo sapien
ccaggtagcattatgtgaagtattg

SEQ ID NO: 1343442 - DNA, 25 bp, Homo sapien
gcatacaaactagaatatcggtaat

SEQ ID NO: 1343443 - DNA, 25 bp, Homo sapien
gaaaaagtggtaagcagccctcagt

SEQ ID NO: 1343444 - DNA, 25 bp, Homo sapien
gaatatcggtaatttccaggtagca

SEQ ID NO: 1343445 - DNA, 25 bp, Homo sapien
atagtgaaaccctatacctatgaag

SEQ ID NO: 1343446 - DNA, 25 bp, Homo sapien
tagtgaaaccctatacctatgaaga

SEQ ID NO: 1343447 - DNA, 25 bp, Homo sapien
agtgaaaccctatacctatgaagaa

SEQ ID NO: 1343448 - DNA, 25 bp, Homo sapien
acataactgtagagcatcgatggca

SEQ ID NO: 1343449 - DNA, 25 bp, Homo sapien
aacataactgtagagcatcgatggc

SEQ ID NO: 1343450 - DNA, 25 bp, Homo sapien
caacataactgtagagcatcgatgg

SEQ ID NO: 1343451 - DNA, 25 bp, Homo sapien
atattgcatgcattgaaagcaacag

SEQ ID NO: 1343452 - DNA, 25 bp, Homo sapien
cctctaaagcatggtaagattctca

SEQ ID NO: 1343453 - DNA, 25 bp, Homo sapien
tcatcaatgacactagttgctttca

SEQ ID NO: 1343454 - DNA, 25 bp, Homo sapien
taaatcttggttatgtcacagacaa

SEQ ID NO: 1343455 - DNA, 25 bp, Homo sapien
caaactctgagacctacaaagctgt

SEQ ID NO: 1343456 - DNA, 25 bp, Homo sapien
ctctgagacctacaaagctgttttg

SEQ ID NO: 1343457 - DNA, 25 bp, Homo sapien
cttcttgtactacttcttaaaagca

SEQ ID NO: 1343458 - DNA, 25 bp, Homo sapien
aaaagcaaactctgagacctacaaa

SEQ ID NO: 1343459 - DNA, 25 bp, Homo sapien
ggaattttgaagactgtggatcatc

SEQ ID NO: 1343460 - DNA, 25 bp, Homo sapien
tatgaagcagactgagaagaaggca

SEQ ID NO: 1343461 - DNA, 25 bp, Homo sapien
gaagaaggcactcagttgatttgaa

SEQ ID NO: 1343462 - DNA, 25 bp, Homo sapien
tcttgaattttatgtatcccactgg

SEQ ID NO: 1343463 - DNA, 25 bp, Homo sapien
ttaagatgcaactgtatgacagtgg

SEQ ID NO: 1343464 - DNA, 25 bp, Homo sapien
aagatgcaactgtatgacagtggac

SEQ ID NO: 1343465 - DNA, 25 bp, Homo sapien
aaaattaagatgcaactgtatgaca

SEQ ID NO: 1343466 - DNA, 25 bp, Homo sapien
aattaagatgcaactgtatgacagt

SEQ ID NO: 1343467 - DNA, 25 bp, Homo sapien
gagctcctaaaatccttgaaatttc

SEQ ID NO: 1343468 - DNA, 25 bp, Homo sapien
ggtatggagctcctaaaatccttga

SEQ ID NO: 1343469 - DNA, 25 bp, Homo sapien
ctggtatggagctcctaaaatcctt

SEQ ID NO: 1343470 - DNA, 25 bp, Homo sapien
atggagctcctaaaatccttgaaat

SEQ ID NO: 1343471 - DNA, 25 bp, Homo sapien
tctgaatacatctcgttcaaatcca

SEQ ID NO: 1343472 - DNA, 25 bp, Homo sapien
tgttctgaatacatctcgttcaaat

SEQ ID NO: 1343473 - DNA, 25 bp, Homo sapien
ttgttctgaatacatctcgttcaaa

SEQ ID NO: 1343474 - DNA, 25 bp, Homo sapien
ttctgaatacatctcgttcaaatcc

SEQ ID NO: 1343475 - DNA, 25 bp, Homo sapien
ctgtggtatgcatctaggttttaga

SEQ ID NO: 1343476 - DNA, 25 bp, Homo sapien
ggtatgcatctaggttttagagcca

SEQ ID NO: 1343477 - DNA, 25 bp, Homo sapien
tctctttagtgactgtggtatgcat

SEQ ID NO: 1343478 - DNA, 25 bp, Homo sapien
gagagtctctttagtgactgtggta

SEQ ID NO: 1343479 - DNA, 25 bp, Homo sapien
gacacccagtggacaacaaaggaat

SEQ ID NO: 1343480 - DNA, 25 bp, Homo sapien
tatcactgatcactacgaaaagctt

SEQ ID NO: 1343481 - DNA, 25 bp, Homo sapien
gaaagcaattaggattttgtactca

SEQ ID NO: 1343482 - DNA, 25 bp, Homo sapien
tagtgactgataaggtttggatctg

SEQ ID NO: 1343483 - DNA, 25 bp, Homo sapien
aggcacttcatggcagataataccc

SEQ ID NO: 1343484 - DNA, 25 bp, Homo sapien
acttcatggcagataatacccagtg

SEQ ID NO: 1343485 - DNA, 25 bp, Homo sapien
ggcacttcatggcagataataccca

SEQ ID NO: 1343486 - DNA, 25 bp, Homo sapien
acttgttttggatttatgacttctt

SEQ ID NO: 1343487 - DNA, 25 bp, Homo sapien
atatattggggaattacttgttttg

SEQ ID NO: 1343488 - DNA, 25 bp, Homo sapien
ttacttgttttggatttatgacttc

SEQ ID NO: 1343489 - DNA, 25 bp, Homo sapien
cattatatattggggaattacttgt

SEQ ID NO: 1343490 - DNA, 25 bp, Homo sapien
gggatggcacacctaaaatggtttg

SEQ ID NO: 1343491 - DNA, 25 bp, Homo sapien
gatggcacacctaaaatggtttgca

SEQ ID NO: 1343492 - DNA, 25 bp, Homo sapien
ctagggatggcacacctaaaatggt

SEQ ID NO: 1343493 - DNA, 25 bp, Homo sapien
tagggatggcacacctaaaatggtt

SEQ ID NO: 1343494 - DNA, 25 bp, Homo sapien
taacatatctccaaacttcttcaac

SEQ ID NO: 1343495 - DNA, 25 bp, Homo sapien
tcttcattgattatttcatgcttta

SEQ ID NO: 1343496 - DNA, 25 bp, Homo sapien
tcctggcttagttctctattatcaa

SEQ ID NO: 1343497 - DNA, 25 bp, Homo sapien
gcttagttctctattatcaattgca

SEQ ID NO: 1343498 - DNA, 25 bp, Homo sapien
taaatgtaatccatgccttttagga

SEQ ID NO: 1343499 - DNA, 25 bp, Homo sapien
ctgagataaatgtaatccatgcctt

SEQ ID NO: 1343500 - DNA, 25 bp, Homo sapien
gataaatgtaatccatgccttttag

SEQ ID NO: 1343501 - DNA, 25 bp, Homo sapien
aatgtaatccatgccttttaggagt

SEQ ID NO: 1343502 - DNA, 25 bp, Homo sapien
atctttggaaaagttctctatgttg

SEQ ID NO: 1343503 - DNA, 25 bp, Homo sapien
aaaaatgctatctttatctttggaa

SEQ ID NO: 1343504 - DNA, 25 bp, Homo sapien
tctttggaaaagttctctatgttgt

SEQ ID NO: 1343505 - DNA, 25 bp, Homo sapien
aatgctatctttatctttggaaaag

SEQ ID NO: 1343506 - DNA, 25 bp, Homo sapien
agttttaagtggcgaagttgcagga

SEQ ID NO: 1343507 - DNA, 25 bp, Homo sapien
tttaagtggcgaagttgcaggaaat

SEQ ID NO: 1343508 - DNA, 25 bp, Homo sapien
tagagttttaagtggcgaagttgca

SEQ ID NO: 1343509 - DNA, 25 bp, Homo sapien
cttcgtggtagagttttaagtggcg

SEQ ID NO: 1343510 - DNA, 25 bp, Homo sapien
tgccttgtaacttcaggaccaaaat

SEQ ID NO: 1343511 - DNA, 25 bp, Homo sapien
tgtaacttcaggaccaaaattgcta

SEQ ID NO: 1343512 - DNA, 25 bp, Homo sapien
cttgtaacttcaggaccaaaattgc

SEQ ID NO: 1343513 - DNA, 25 bp, Homo sapien
gtaacttcaggaccaaaattgctat

SEQ ID NO: 1343514 - DNA, 25 bp, Homo sapien
caaatcggaatattctaagacgccc

SEQ ID NO: 1343515 - DNA, 25 bp, Homo sapien
gagcggccaaatcggaatattctaa

SEQ ID NO: 1343516 - DNA, 25 bp, Homo sapien
ggccaaatcggaatattctaagacg

SEQ ID NO: 1343517 - DNA, 25 bp, Homo sapien
gaggtgagcggccaaatcggaatat

SEQ ID NO: 1343518 - DNA, 25 bp, Homo sapien
gcgcggcgcttcctttcggacctga

SEQ ID NO: 1343519 - DNA, 25 bp, Homo sapien
atagcgagtctggtgcggcctacgc

SEQ ID NO: 1343520 - DNA, 25 bp, Homo sapien
ggcgcttcctttcggacctgaggcc

SEQ ID NO: 1343521 - DNA, 25 bp, Homo sapien
caggcacaggagtcgctcctcatag

SEQ ID NO: 1343522 - DNA, 25 bp, Homo sapien
gtggcccgataaggcccgggaggca

SEQ ID NO: 1343523 - DNA, 25 bp, Homo sapien
agcggccgcggcagtggcgagtctc

SEQ ID NO: 1343524 - DNA, 25 bp, Homo sapien
gccccgccgccgatttgaatagcat

SEQ ID NO: 1343525 - DNA, 25 bp, Homo sapien
gtccatggcggcgaaggcgacactc

SEQ ID NO: 1343526 - DNA, 25 bp, Homo sapien
tcagcgcccggtggcgtccatggcg

SEQ ID NO: 1343527 - DNA, 25 bp, Homo sapien
gaaggagtcggcgagggccgctcgg

SEQ ID NO: 1343528 - DNA, 25 bp, Homo sapien
gggaaggagtcggcgagggccgctc

SEQ ID NO: 1343529 - DNA, 25 bp, Homo sapien
cgggaaggagtcggcgagggccgct

SEQ ID NO: 1343530 - DNA, 25 bp, Homo sapien
aggagtcggcgagggccgctcggct

SEQ ID NO: 1343531 - DNA, 25 bp, Homo sapien
ttatgatacattgtcccaggatttt

SEQ ID NO: 1343532 - DNA, 25 bp, Homo sapien
ctttatgatacattgtcccaggatt

SEQ ID NO: 1343533 - DNA, 25 bp, Homo sapien
ggctttatgatacattgtcccagga

SEQ ID NO: 1343534 - DNA, 25 bp, Homo sapien
ctggctttatgatacattgtcccag

SEQ ID NO: 1343535 - DNA, 25 bp, Homo sapien
ctcaaaaattggcatgcatttaact

SEQ ID NO: 1343536 - DNA, 25 bp, Homo sapien
tcaaaaattggcatgcatttaactt

SEQ ID NO: 1343537 - DNA, 25 bp, Homo sapien
aaaactcaaaaattggcatgcattt

SEQ ID NO: 1343538 - DNA, 25 bp, Homo sapien
aactcaaaaattggcatgcatttaa

SEQ ID NO: 1343539 - DNA, 25 bp, Homo sapien
agggagatgagttttagagaaacgg

SEQ ID NO: 1343540 - DNA, 25 bp, Homo sapien
atgcggaggaactccctagatgcca

SEQ ID NO: 1343541 - DNA, 25 bp, Homo sapien
ttagagaaacggtgaggagaagagc

SEQ ID NO: 1343542 - DNA, 25 bp, Homo sapien
aaatgcggaggaactccctagatgc

SEQ ID NO: 1343543 - DNA, 25 bp, Homo sapien
cactcttggctaggagtctttgaaa

SEQ ID NO: 1343544 - DNA, 25 bp, Homo sapien
cagcagtgtgatgacagatgccagc

SEQ ID NO: 1343545 - DNA, 25 bp, Homo sapien
gatatcctttcataatgtgcccctg

SEQ ID NO: 1343546 - DNA, 25 bp, Homo sapien
caagttactaaagcttccgtagcct

SEQ ID NO: 1343547 - DNA, 25 bp, Homo sapien
atgcaatttcaacttggaggcccat

SEQ ID NO: 1343548 - DNA, 25 bp, Homo sapien
gtgatgcaatttcaacttggaggcc

SEQ ID NO: 1343549 - DNA, 25 bp, Homo sapien
tagcaaggacaaagtgatgcaattt

SEQ ID NO: 1343550 - DNA, 25 bp, Homo sapien
gtagcaaggacaaagtgatgcaatt

SEQ ID NO: 1343551 - DNA, 25 bp, Homo sapien
agaaaagcctggtgtgattccaggg

SEQ ID NO: 1343552 - DNA, 25 bp, Homo sapien
aaaagcctggtgtgattccagggtt

SEQ ID NO: 1343553 - DNA, 25 bp, Homo sapien
agcctggtgtgattccagggtttca

SEQ ID NO: 1343554 - DNA, 25 bp, Homo sapien
ggagaaaagcctggtgtgattccag

SEQ ID NO: 1343555 - DNA, 25 bp, Homo sapien
tcttggtcaagttgcacatcaaact

SEQ ID NO: 1343556 - DNA, 25 bp, Homo sapien
ggtcaagttgcacatcaaacttaat

SEQ ID NO: 1343557 - DNA, 25 bp, Homo sapien
atctgcttctatcttggtcaagttg

SEQ ID NO: 1343558 - DNA, 25 bp, Homo sapien
gcttctatcttggtcaagttgcaca

SEQ ID NO: 1343559 - DNA, 25 bp, Homo sapien
ttcaaagcttccatgatgttggcag

SEQ ID NO: 1343560 - DNA, 25 bp, Homo sapien
tacagactgttctcaatggatttct

SEQ ID NO: 1343561 - DNA, 25 bp, Homo sapien
ttacagactgttctcaatggatttc

SEQ ID NO: 1343562 - DNA, 25 bp, Homo sapien
ctcttctttactgagcttcaaagct

SEQ ID NO: 1343563 - DNA, 25 bp, Homo sapien
gataaaacgggactctcagaccact

SEQ ID NO: 1343564 - DNA, 25 bp, Homo sapien
actctgcatggatcacagcattcat

SEQ ID NO: 1343565 - DNA, 25 bp, Homo sapien
tgttgggcaaccagtgataaaacgg

SEQ ID NO: 1343566 - DNA, 25 bp, Homo sapien
gcaaccagtgataaaacgggactct

SEQ ID NO: 1343567 - DNA, 25 bp, Homo sapien
aaaatatcttatttcccccagtctg

SEQ ID NO: 1343568 - DNA, 25 bp, Homo sapien
tatcttatttcccccagtctgatgc

SEQ ID NO: 1343569 - DNA, 25 bp, Homo sapien
aatatcttatttcccccagtctgat

SEQ ID NO: 1343570 - DNA, 25 bp, Homo sapien
aaatatcttatttcccccagtctga

SEQ ID NO: 1343571 - DNA, 25 bp, Homo sapien
gaggagctatgcaatggaaactcct

SEQ ID NO: 1343572 - DNA, 25 bp, Homo sapien
caaatagcattttcacgaagacaac

SEQ ID NO: 1343573 - DNA, 25 bp, Homo sapien
ctgggatcgagtgcgagatgaaaaa

SEQ ID NO: 1343574 - DNA, 25 bp, Homo sapien
aacaaaaatgctgccgtatgaggag

SEQ ID NO: 1343575 - DNA, 25 bp, Homo sapien
caaattttccctgataatcattgtc

SEQ ID NO: 1343576 - DNA, 25 bp, Homo sapien
gtactgtaccttcagtaatgttgta

SEQ ID NO: 1343577 - DNA, 25 bp, Homo sapien
gtaccttcagtaatgttgtaggcat

SEQ ID NO: 1343578 - DNA, 25 bp, Homo sapien
tccctgataatcattgtcatcatgg

SEQ ID NO: 1343579 - DNA, 25 bp, Homo sapien
aatgtatagaatagcaccacagtgc

SEQ ID NO: 1343580 - DNA, 25 bp, Homo sapien
tagcttgtggctagtggactgaagc

SEQ ID NO: 1343581 - DNA, 25 bp, Homo sapien
gactgaagctaggtcagcccagcaa

SEQ ID NO: 1343582 - DNA, 25 bp, Homo sapien
taagcaccctagagatttttcaaag

SEQ ID NO: 1343583 - DNA, 25 bp, Homo sapien
ctcaagttcattgaagattggggct

SEQ ID NO: 1343584 - DNA, 25 bp, Homo sapien
gattctttggaatagctgaccttta

SEQ ID NO: 1343585 - DNA, 25 bp, Homo sapien
tgacctttaacacgaacctttgcca

SEQ ID NO: 1343586 - DNA, 25 bp, Homo sapien
ctgtctcagattctttggaatagct

SEQ ID NO: 1343587 - DNA, 25 bp, Homo sapien
ggcattctttcggagacagctgaag

SEQ ID NO: 1343588 - DNA, 25 bp, Homo sapien
ttagagggcattctttcggagacag

SEQ ID NO: 1343589 - DNA, 25 bp, Homo sapien
tagagggcattctttcggagacagc

SEQ ID NO: 1343590 - DNA, 25 bp, Homo sapien
gagggcattctttcggagacagctg

SEQ ID NO: 1343591 - DNA, 25 bp, Homo sapien
tgattcaggattcagcaattcagga

SEQ ID NO: 1343592 - DNA, 25 bp, Homo sapien
aattgcttgcttaaatgtaggatga

SEQ ID NO: 1343593 - DNA, 25 bp, Homo sapien
ttaaattgcttgcttaaatgtagga

SEQ ID NO: 1343594 - DNA, 25 bp, Homo sapien
gcttgcttaaatgtaggatgattaa

SEQ ID NO: 1343595 - DNA, 25 bp, Homo sapien
cttttgttggtcttcacaaagaggg

SEQ ID NO: 1343596 - DNA, 25 bp, Homo sapien
ttacaaatggcaaaaagctgttcgt

SEQ ID NO: 1343597 - DNA, 25 bp, Homo sapien
tttcttgcaccttgcatgcccagca

SEQ ID NO: 1343598 - DNA, 25 bp, Homo sapien
tgttcgtggaagtaagtctgctgcc

SEQ ID NO: 1343599 - DNA, 25 bp, Homo sapien
acaaaacagaaacaataagtgagta

SEQ ID NO: 1343600 - DNA, 25 bp, Homo sapien
aaacagaaacaataagtgagtagct

SEQ ID NO: 1343601 - DNA, 25 bp, Homo sapien
acagaaacaataagtgagtagctgt

SEQ ID NO: 1343602 - DNA, 25 bp, Homo sapien
aaaacagaaacaataagtgagtagc

SEQ ID NO: 1343603 - DNA, 25 bp, Homo sapien
gtcacatagttaatcagaaacactc

SEQ ID NO: 1343604 - DNA, 25 bp, Homo sapien
ttcctgggctaaagtcacatagtta

SEQ ID NO: 1343605 - DNA, 25 bp, Homo sapien
tgcttttctgcttggtgattcctgg

SEQ ID NO: 1343606 - DNA, 25 bp, Homo sapien
ggctaaagtcacatagttaatcaga

SEQ ID NO: 1343607 - DNA, 25 bp, Homo sapien
agaaatccaaattcatatagagtcc

SEQ ID NO: 1343608 - DNA, 25 bp, Homo sapien
tagtaagaaatccaaattcatatag

SEQ ID NO: 1343609 - DNA, 25 bp, Homo sapien
atccaaattcatatagagtccctga

SEQ ID NO: 1343610 - DNA, 25 bp, Homo sapien
gtaagaaatccaaattcatatagag

SEQ ID NO: 1343611 - DNA, 25 bp, Homo sapien
tttccctagtgctcgtgggattaac

SEQ ID NO: 1343612 - DNA, 25 bp, Homo sapien
tccctagtgctcgtgggattaacca

SEQ ID NO: 1343613 - DNA, 25 bp, Homo sapien
attttccctagtgctcgtgggatta

SEQ ID NO: 1343614 - DNA, 25 bp, Homo sapien
ccctagtgctcgtgggattaaccat

SEQ ID NO: 1343615 - DNA, 25 bp, Homo sapien
gacaaagaagagccactaagtttta

SEQ ID NO: 1343616 - DNA, 25 bp, Homo sapien
caaaagaggtctaacaaggattcca

SEQ ID NO: 1343617 - DNA, 25 bp, Homo sapien
caaggattccataggacagattaga

SEQ ID NO: 1343618 - DNA, 25 bp, Homo sapien
atgacgatgcccatgtcatcactat

SEQ ID NO: 1343619 - DNA, 25 bp, Homo sapien
ggaccagtttgccataagctagatg

SEQ ID NO: 1343620 - DNA, 25 bp, Homo sapien
taagctagatggtagtggccccatg

SEQ ID NO: 1343621 - DNA, 25 bp, Homo sapien
ctgttccaccatcacgatcctggga

SEQ ID NO: 1343622 - DNA, 25 bp, Homo sapien
catcacgatcctgggaatctgaggg

SEQ ID NO: 1343623 - DNA, 25 bp, Homo sapien
ccttaaaagccaccttgtgaacaat

SEQ ID NO: 1343624 - DNA, 25 bp, Homo sapien
tttaagtactctgtcggaacgatga

SEQ ID NO: 1343625 - DNA, 25 bp, Homo sapien
tgtgaacaattctgtataagcctcg

SEQ ID NO: 1343626 - DNA, 25 bp, Homo sapien
gatgcctaatcgatttttcacagca

SEQ ID NO: 1343627 - DNA, 25 bp, Homo sapien
gttgtaatgcattttagctccctca

SEQ ID NO: 1343628 - DNA, 25 bp, Homo sapien
cacagttcctgtcctaaatagactg

SEQ ID NO: 1343629 - DNA, 25 bp, Homo sapien
agggcagacaacagtggcagttgta

SEQ ID NO: 1343630 - DNA, 25 bp, Homo sapien
tgaacatttgtctcacattgtaaac

SEQ ID NO: 1343631 - DNA, 25 bp, Homo sapien
gaactgtcctttgtcgtttgtttca

SEQ ID NO: 1343632 - DNA, 25 bp, Homo sapien
tcaagttgacaagtagtgatggtta

SEQ ID NO: 1343633 - DNA, 25 bp, Homo sapien
cctttaattagaactgctgtcgctg

SEQ ID NO: 1343634 - DNA, 25 bp, Homo sapien
tcatgttcaattggtgtgtcagaga

SEQ ID NO: 1343635 - DNA, 25 bp, Homo sapien
ctcttctctccaaacggcctttaat

SEQ ID NO: 1343636 - DNA, 25 bp, Homo sapien
tgtgagggactgctctggcaacgct

SEQ ID NO: 1343637 - DNA, 25 bp, Homo sapien
caacagcagaactatttagagagcg

SEQ ID NO: 1343638 - DNA, 25 bp, Homo sapien
ctctggcaacgctttgacatggctg

SEQ ID NO: 1343639 - DNA, 25 bp, Homo sapien
ttcaccagagttgttagcaacagca

SEQ ID NO: 1343640 - DNA, 25 bp, Homo sapien
ctgtaaagtgtctacttgtccttct

SEQ ID NO: 1343641 - DNA, 25 bp, Homo sapien
tcttgcctttgcaaagcaatgccat

SEQ ID NO: 1343642 - DNA, 25 bp, Homo sapien
gttcctagactccagccccagttta

SEQ ID NO: 1343643 - DNA, 25 bp, Homo sapien
tttgctctggctttgggtcccacag

SEQ ID NO: 1343644 - DNA, 25 bp, Homo sapien
gcaagccctgctgccagatatgctg

SEQ ID NO: 1343645 - DNA, 25 bp, Homo sapien
cagcccactgtcattcagggagcca

SEQ ID NO: 1343646 - DNA, 25 bp, Homo sapien
taggctatgggaagtacgtgacaca

SEQ ID NO: 1343647 - DNA, 25 bp, Homo sapien
atcactggcagagatttaatattgc

SEQ ID NO: 1343648 - DNA, 25 bp, Homo sapien
tgtgataataggctatgggaagtac

SEQ ID NO: 1343649 - DNA, 25 bp, Homo sapien
gaagtacgtgacacatcactggcag

SEQ ID NO: 1343650 - DNA, 25 bp, Homo sapien
gggtcgttcatatggcagcagtcac

SEQ ID NO: 1343651 - DNA, 25 bp, Homo sapien
tggggtcgttcatatggcagcagtc

SEQ ID NO: 1343652 - DNA, 25 bp, Homo sapien
ttggggtcgttcatatggcagcagt

SEQ ID NO: 1343653 - DNA, 25 bp, Homo sapien
ggggtcgttcatatggcagcagtca

SEQ ID NO: 1343654 - DNA, 25 bp, Homo sapien
cataactgatgatggttgctggcac

SEQ ID NO: 1343655 - DNA, 25 bp, Homo sapien
tgatgatggttgctggcacacaaca

SEQ ID NO: 1343656 - DNA, 25 bp, Homo sapien
atggttcagttgcagccaggaggcc

SEQ ID NO: 1343657 - DNA, 25 bp, Homo sapien
gaggcctagcacagccttgctctca

SEQ ID NO: 1343658 - DNA, 25 bp, Homo sapien
ccctctggataagaatcagcaacct

SEQ ID NO: 1343659 - DNA, 25 bp, Homo sapien
tctccaatctgttttgttacatgcg

SEQ ID NO: 1343660 - DNA, 25 bp, Homo sapien
tctggataagaatcagcaacctctt

SEQ ID NO: 1343661 - DNA, 25 bp, Homo sapien
tctgttttgttacatgcgttgccat

SEQ ID NO: 1343662 - DNA, 25 bp, Homo sapien
aaaattttgtgatcagcagggccca

SEQ ID NO: 1343663 - DNA, 25 bp, Homo sapien
ttgtgatcagcagggcccaaaaatc

SEQ ID NO: 1343664 - DNA, 25 bp, Homo sapien
tggatagatgttgggaaccttgcag

SEQ ID NO: 1343665 - DNA, 25 bp, Homo sapien
tctctttggatagatgttgggaacc

SEQ ID NO: 1343666 - DNA, 25 bp, Homo sapien
tatcagagctctgcagtttcttgca

SEQ ID NO: 1343667 - DNA, 25 bp, Homo sapien
ccttagcggagacaatgcagctgtt

SEQ ID NO: 1343668 - DNA, 25 bp, Homo sapien
tctgatggtgagaaaccttagcgga

SEQ ID NO: 1343669 - DNA, 25 bp, Homo sapien
tccttattgcctgtatcagagctct

SEQ ID NO: 1343670 - DNA, 25 bp, Homo sapien
tccacctgccagaaactcagggacc

SEQ ID NO: 1343671 - DNA, 25 bp, Homo sapien
cctgccagaaactcagggaccagca

SEQ ID NO: 1343672 - DNA, 25 bp, Homo sapien
cacctgccagaaactcagggaccag

SEQ ID NO: 1343673 - DNA, 25 bp, Homo sapien
ttccacctgccagaaactcagggac

SEQ ID NO: 1343674 - DNA, 25 bp, Homo sapien
gtattatctgctagtaatttagaaa

SEQ ID NO: 1343675 - DNA, 25 bp, Homo sapien
tctgtattatctgctagtaatttag

SEQ ID NO: 1343676 - DNA, 25 bp, Homo sapien
atgtaaggactttctgtattatctg

SEQ ID NO: 1343677 - DNA, 25 bp, Homo sapien
tcatatgtaaggactttctgtatta

SEQ ID NO: 1343678 - DNA, 25 bp, Homo sapien
ttctctcattatctgcctgttggcc

SEQ ID NO: 1343679 - DNA, 25 bp, Homo sapien
ctctcattatctgcctgttggccat

SEQ ID NO: 1343680 - DNA, 25 bp, Homo sapien
cttctctcattatctgcctgttggc

SEQ ID NO: 1343681 - DNA, 25 bp, Homo sapien
tctctcattatctgcctgttggcca

SEQ ID NO: 1343682 - DNA, 25 bp, Homo sapien
aaacaaaagtttcacagagctagtg

SEQ ID NO: 1343683 - DNA, 25 bp, Homo sapien
cttggaaacaaaagtttcacagagc

SEQ ID NO: 1343684 - DNA, 25 bp, Homo sapien
ggaaacaaaagtttcacagagctag

SEQ ID NO: 1343685 - DNA, 25 bp, Homo sapien
caaaagtttcacagagctagtgggc

SEQ ID NO: 1343686 - DNA, 25 bp, Homo sapien
ctgattttggttctgagtcacttgg

SEQ ID NO: 1343687 - DNA, 25 bp, Homo sapien
gccacaagtagttcaagcagttgct

SEQ ID NO: 1343688 - DNA, 25 bp, Homo sapien
gctgtttgttctggctgaaatctga

SEQ ID NO: 1343689 - DNA, 25 bp, Homo sapien
tttgcaccctcttttcaggacatct

SEQ ID NO: 1343690 - DNA, 25 bp, Homo sapien
taaaggtcactataagggattggtc

SEQ ID NO: 1343691 - DNA, 25 bp, Homo sapien
tagatggtgccgtttgctcaaccag

SEQ ID NO: 1343692 - DNA, 25 bp, Homo sapien
gctgctgaattattactccctgagg

SEQ ID NO: 1343693 - DNA, 25 bp, Homo sapien
tgccaaactccaatgcaatagatgg

SEQ ID NO: 1343694 - DNA, 25 bp, Homo sapien
gttgatcgcatgaactggaatgcaa

SEQ ID NO: 1343695 - DNA, 25 bp, Homo sapien
tggaatgcaatcctgaggcttctgc

SEQ ID NO: 1343696 - DNA, 25 bp, Homo sapien
tccagttgatcgcatgaactggaat

SEQ ID NO: 1343697 - DNA, 25 bp, Homo sapien
gatcgcatgaactggaatgcaatcc

SEQ ID NO: 1343698 - DNA, 25 bp, Homo sapien
catttagtgtacagtgtctggcccc

SEQ ID NO: 1343699 - DNA, 25 bp, Homo sapien
tgtcatcaccatcccaaaatgggag

SEQ ID NO: 1343700 - DNA, 25 bp, Homo sapien
catctaatactcagtctgatggtca

SEQ ID NO: 1343701 - DNA, 25 bp, Homo sapien
ttatctggaagttggtgtgatctcc

SEQ ID NO: 1343702 - DNA, 25 bp, Homo sapien
acttgcttggcaatgctctcgttca

SEQ ID NO: 1343703 - DNA, 25 bp, Homo sapien
tagacgcttgtgctctccaaccaca

SEQ ID NO: 1343704 - DNA, 25 bp, Homo sapien
ggcaatgctctcgttcatccctcat

SEQ ID NO: 1343705 - DNA, 25 bp, Homo sapien
aacttggctgaggacacttgcttgg

SEQ ID NO: 1343706 - DNA, 25 bp, Homo sapien
attccttcagtgaggtgtgaattct

SEQ ID NO: 1343707 - DNA, 25 bp, Homo sapien
tctattccttcagtgaggtgtgaat

SEQ ID NO: 1343708 - DNA, 25 bp, Homo sapien
tttctattccttcagtgaggtgtga

SEQ ID NO: 1343709 - DNA, 25 bp, Homo sapien
tattccttcagtgaggtgtgaattc

SEQ ID NO: 1343710 - DNA, 25 bp, Homo sapien
cattgaacagtcacaatcactggct

SEQ ID NO: 1343711 - DNA, 25 bp, Homo sapien
caccattgaacagtcacaatcactg

SEQ ID NO: 1343712 - DNA, 25 bp, Homo sapien
tgaacagtcacaatcactggcttgt

SEQ ID NO: 1343713 - DNA, 25 bp, Homo sapien
ggacacaccattgaacagtcacaat

SEQ ID NO: 1343714 - DNA, 25 bp, Homo sapien
aatctgaagttgacggaagctttgc

SEQ ID NO: 1343715 - DNA, 25 bp, Homo sapien
caccataactcatgtcgcaatctga

SEQ ID NO: 1343716 - DNA, 25 bp, Homo sapien
atgtcgcaatctgaagttgacggaa

SEQ ID NO: 1343717 - DNA, 25 bp, Homo sapien
tcaccataactcatgtcgcaatctg

SEQ ID NO: 1343718 - DNA, 25 bp, Homo sapien
tgtacatggttgcaccagatccacg

SEQ ID NO: 1343719 - DNA, 25 bp, Homo sapien
tgcctgctggtttgaaagagcaccc

SEQ ID NO: 1343720 - DNA, 25 bp, Homo sapien
ggagcccttgaattgccccttggca

SEQ ID NO: 1343721 - DNA, 25 bp, Homo sapien
caacgatctggaagactgtctactg

SEQ ID NO: 1343722 - DNA, 25 bp, Homo sapien
taatttgatgaccatattctgtagc

SEQ ID NO: 1343723 - DNA, 25 bp, Homo sapien
tacaaagatgtagagtcttcttgag

SEQ ID NO: 1343724 - DNA, 25 bp, Homo sapien
tgtggaaattgctaagggaagtaca

SEQ ID NO: 1343725 - DNA, 25 bp, Homo sapien
tattctgtagccagcatctcacaag

SEQ ID NO: 1343726 - DNA, 25 bp, Homo sapien
agattaaaggaatagacaccttcct

SEQ ID NO: 1343727 - DNA, 25 bp, Homo sapien
tcctcagccagaatgacccaggcca

SEQ ID NO: 1343728 - DNA, 25 bp, Homo sapien
gattaaaggaatagacaccttcctc

SEQ ID NO: 1343729 - DNA, 25 bp, Homo sapien
cttcctcagccagaatgacccaggc

SEQ ID NO: 1343730 - DNA, 25 bp, Homo sapien
cattgactacatcatttgggggtgg

SEQ ID NO: 1343731 - DNA, 25 bp, Homo sapien
ttgactacatcatttgggggtggca

SEQ ID NO: 1343732 - DNA, 25 bp, Homo sapien
attgactacatcatttgggggtggc

SEQ ID NO: 1343733 - DNA, 25 bp, Homo sapien
tgactacatcatttgggggtggcat

SEQ ID NO: 1343734 - DNA, 25 bp, Homo sapien
tgcgaaggcagcttaactcctgaaa

SEQ ID NO: 1343735 - DNA, 25 bp, Homo sapien
taaggtagacttggcaattccccat

SEQ ID NO: 1343736 - DNA, 25 bp, Homo sapien
catcgagtctataagctgtaagctg

SEQ ID NO: 1343737 - DNA, 25 bp, Homo sapien
caggtttgatcctcattgcgaaggc

SEQ ID NO: 1343738 - DNA, 25 bp, Homo sapien
ttcctaaatgcctttcatgttgagg

SEQ ID NO: 1343739 - DNA, 25 bp, Homo sapien
tgtatggcagttttgcttagtctct

SEQ ID NO: 1343740 - DNA, 25 bp, Homo sapien
cctgcagtgagttaagaagggtact

SEQ ID NO: 1343741 - DNA, 25 bp, Homo sapien
aagaagggtactgttaaactgtatg

SEQ ID NO: 1343742 - DNA, 25 bp, Homo sapien
tccacccacatgtttgcttcagttt

SEQ ID NO: 1343743 - DNA, 25 bp, Homo sapien
tttgaaactctgctattctttgcat

SEQ ID NO: 1343744 - DNA, 25 bp, Homo sapien
ctgcaaggaatccaaatcaaagctc

SEQ ID NO: 1343745 - DNA, 25 bp, Homo sapien
atccacccacatgtttgcttcagtt

SEQ ID NO: 1343746 - DNA, 25 bp, Homo sapien
ccttttacttgccaattccatggga

SEQ ID NO: 1343747 - DNA, 25 bp, Homo sapien
tccatgggattatcgtgaagatcaa

SEQ ID NO: 1343748 - DNA, 25 bp, Homo sapien
gttcatcccgtcagttaaatagagg

SEQ ID NO: 1343749 - DNA, 25 bp, Homo sapien
tcagcagtagagatcaccaacaaac

SEQ ID NO: 1343750 - DNA, 25 bp, Homo sapien
agaatagagtttacccaggggaatg

SEQ ID NO: 1343751 - DNA, 25 bp, Homo sapien
tgatgattgttgcacagcgttgtga

SEQ ID NO: 1343752 - DNA, 25 bp, Homo sapien
cctttatgagactcttctttgacct

SEQ ID NO: 1343753 - DNA, 25 bp, Homo sapien
tacagtttgcaaagtgaagatgctg

SEQ ID NO: 1343754 - DNA, 25 bp, Homo sapien
actccaagcccaagatcttcacttt

SEQ ID NO: 1343755 - DNA, 25 bp, Homo sapien
gcttcatttagcaagtacagtttgc

SEQ ID NO: 1343756 - DNA, 25 bp, Homo sapien
ctgaatatgacgctttgttattttt

SEQ ID NO: 1343757 - DNA, 25 bp, Homo sapien
tccatgattatttgatccttcagac

SEQ ID NO: 1343758 - DNA, 25 bp, Homo sapien
cagagctctccatgattatttgatc

SEQ ID NO: 1343759 - DNA, 25 bp, Homo sapien
tggcctccacagagctctccatgat

SEQ ID NO: 1343760 - DNA, 25 bp, Homo sapien
gattatttgatccttcagactccat

SEQ ID NO: 1343761 - DNA, 25 bp, Homo sapien
cgctgctccatgtcaaccgctatga

SEQ ID NO: 1343762 - DNA, 25 bp, Homo sapien
catgtcaaccgctatgaaaaacaga

SEQ ID NO: 1343763 - DNA, 25 bp, Homo sapien
tatttcctgtattccgctgctccat

SEQ ID NO: 1343764 - DNA, 25 bp, Homo sapien
atttcctgtattccgctgctccatg

SEQ ID NO: 1343765 - DNA, 25 bp, Homo sapien
tccatgacatggcttttatatacag

SEQ ID NO: 1343766 - DNA, 25 bp, Homo sapien
caagcaagctccaaagtgctttatc

SEQ ID NO: 1343767 - DNA, 25 bp, Homo sapien
ctccaagcaagctccaaagtgcttt

SEQ ID NO: 1343768 - DNA, 25 bp, Homo sapien
cttttatatacagaacctccaagca

SEQ ID NO: 1343769 - DNA, 25 bp, Homo sapien
cagtgctactggtttaattggatta

SEQ ID NO: 1343770 - DNA, 25 bp, Homo sapien
tcaaccagtgctactggtttaattg

SEQ ID NO: 1343771 - DNA, 25 bp, Homo sapien
ctcatcttttcaaccagtgctactg

SEQ ID NO: 1343772 - DNA, 25 bp, Homo sapien
tcatcttttcaaccagtgctactgg

SEQ ID NO: 1343773 - DNA, 25 bp, Homo sapien
caggcacaagggttgaattagtatc

SEQ ID NO: 1343774 - DNA, 25 bp, Homo sapien
cagattttcttgcaatggagacctg

SEQ ID NO: 1343775 - DNA, 25 bp, Homo sapien
gatatcttggtacaggaacacaaat

SEQ ID NO: 1343776 - DNA, 25 bp, Homo sapien
tgtgatagatatcttggtacaggaa

SEQ ID NO: 1343777 - DNA, 25 bp, Homo sapien
gcagaacgtaagtttcatatctcct

SEQ ID NO: 1343778 - DNA, 25 bp, Homo sapien
tttcttcccaactcctaatcactct

SEQ ID NO: 1343779 - DNA, 25 bp, Homo sapien
cacccataccactgagaacttcttt

SEQ ID NO: 1343780 - DNA, 25 bp, Homo sapien
tatttggccacccataccactgaga

SEQ ID NO: 1343781 - DNA, 25 bp, Homo sapien
gcagggagataaggagcatctcact

SEQ ID NO: 1343782 - DNA, 25 bp, Homo sapien
gggagataaggagcatctcactttc

SEQ ID NO: 1343783 - DNA, 25 bp, Homo sapien
agataaggagcatctcactttccct

SEQ ID NO: 1343784 - DNA, 25 bp, Homo sapien
cagggagataaggagcatctcactt

SEQ ID NO: 1343785 - DNA, 25 bp, Homo sapien
tatccagcttcccatactcatgcac

SEQ ID NO: 1343786 - DNA, 25 bp, Homo sapien
caaggcatcagggtagataaagagg

SEQ ID NO: 1343787 - DNA, 25 bp, Homo sapien
tcagggtagataaagaggtaagtca

SEQ ID NO: 1343788 - DNA, 25 bp, Homo sapien
actcatgcaccaaggcatcagggta

SEQ ID NO: 1343789 - DNA, 25 bp, Homo sapien
atgaacagatacttctcaaaagaaa

SEQ ID NO: 1343790 - DNA, 25 bp, Homo sapien
acatttatgcagccaaaagacacat

SEQ ID NO: 1343791 - DNA, 25 bp, Homo sapien
gaaaaaatgctcattatcactggcc

SEQ ID NO: 1343792 - DNA, 25 bp, Homo sapien
ccccatcaagaagttggcaaaggat

SEQ ID NO: 1343793 - DNA, 25 bp, Homo sapien
tggccatttccaagtgcaccatttt

SEQ ID NO: 1343794 - DNA, 25 bp, Homo sapien
ttctttcagagctgattagtgcaaa

SEQ ID NO: 1343795 - DNA, 25 bp, Homo sapien
gtgcaaagcgaatacttgactctac

SEQ ID NO: 1343796 - DNA, 25 bp, Homo sapien
gattagtgcaaagcgaatacttgac

SEQ ID NO: 1343797 - DNA, 25 bp, Homo sapien
cagagctgattagtgcaaagcgaat

SEQ ID NO: 1343798 - DNA, 25 bp, Homo sapien
aaatggagggaatattttctctgga

SEQ ID NO: 1343799 - DNA, 25 bp, Homo sapien
ttagtctagcttcagggaatggaaa

SEQ ID NO: 1343800 - DNA, 25 bp, Homo sapien
tctagcttcagggaatggaaaatgg

SEQ ID NO: 1343801 - DNA, 25 bp, Homo sapien
tagcttcagggaatggaaaatggag

SEQ ID NO: 1343802 - DNA, 25 bp, Homo sapien
tgtgtttggacagaggctaacaaga

SEQ ID NO: 1343803 - DNA, 25 bp, Homo sapien
ttggacagaggctaacaagagttac

SEQ ID NO: 1343804 - DNA, 25 bp, Homo sapien
tcatgtgtttggacagaggctaaca

SEQ ID NO: 1343805 - DNA, 25 bp, Homo sapien
tgtttggacagaggctaacaagagt

SEQ ID NO: 1343806 - DNA, 25 bp, Homo sapien
caggtggccagaagttccaagtggc

SEQ ID NO: 1343807 - DNA, 25 bp, Homo sapien
ggctagcaagcttaccctacgagtt

SEQ ID NO: 1343808 - DNA, 25 bp, Homo sapien
tggccttcgagaggcacgcaaagct

SEQ ID NO: 1343809 - DNA, 25 bp, Homo sapien
ccctacgagttgctgtgactgggaa

SEQ ID NO: 1343810 - DNA, 25 bp, Homo sapien
cctgaatctgcagacagaatgacgt

SEQ ID NO: 1343811 - DNA, 25 bp, Homo sapien
tcaactctggatgtcgttgcctgaa

SEQ ID NO: 1343812 - DNA, 25 bp, Homo sapien
tcttttcaactctggatgtcgttgc

SEQ ID NO: 1343813 - DNA, 25 bp, Homo sapien
ggatgtcgttgcctgaatctgcaga

SEQ ID NO: 1343814 - DNA, 25 bp, Homo sapien
ggcgcttcgggcttcccctcagccg

SEQ ID NO: 1343815 - DNA, 25 bp, Homo sapien
gctgctgctgcggtcgctagcgcgg

SEQ ID NO: 1343816 - DNA, 25 bp, Homo sapien
tccagccgtccacctgaagggcact

SEQ ID NO: 1343817 - DNA, 25 bp, Homo sapien
agcgcggcgcgctgggcaggctgag

SEQ ID NO: 1343818 - DNA, 25 bp, Homo sapien
gaccttaaagggttacatactgcga

SEQ ID NO: 1343819 - DNA, 25 bp, Homo sapien
catgggagcaccgagtagcttgagc

SEQ ID NO: 1343820 - DNA, 25 bp, Homo sapien
acacacacttgtggcaggacgcact

SEQ ID NO: 1343821 - DNA, 25 bp, Homo sapien
gaagcgcgtgtttgatcgtgacaca

SEQ ID NO: 1343822 - DNA, 25 bp, Homo sapien
tcagtttcctgaagaggaacttgta

SEQ ID NO: 1343823 - DNA, 25 bp, Homo sapien
tttcctgaagaggaacttgtataaa

SEQ ID NO: 1343824 - DNA, 25 bp, Homo sapien
ctgaagaggaacttgtataaaccct

SEQ ID NO: 1343825 - DNA, 25 bp, Homo sapien
tcctgaagaggaacttgtataaacc

SEQ ID NO: 1343826 - DNA, 25 bp, Homo sapien
gagttgtcattactgttggagtcca

SEQ ID NO: 1343827 - DNA, 25 bp, Homo sapien
gttttgagcacgatcttctgtttct

SEQ ID NO: 1343828 - DNA, 25 bp, Homo sapien
tgaaatacgtttatcttttgaagca

SEQ ID NO: 1343829 - DNA, 25 bp, Homo sapien
atatttcctggttttgagcacgatc

SEQ ID NO: 1343830 - DNA, 25 bp, Homo sapien
cctttcttagggtactttggacatg

SEQ ID NO: 1343831 - DNA, 25 bp, Homo sapien
tcttagggtactttggacatggcac

SEQ ID NO: 1343832 - DNA, 25 bp, Homo sapien
gagctctggttgtatgtacacaatt

SEQ ID NO: 1343833 - DNA, 25 bp, Homo sapien
gttgtatgtacacaattcctgtgac

SEQ ID NO: 1343834 - DNA, 25 bp, Homo sapien
cccgcaataccagagaagtccttgt

SEQ ID NO: 1343835 - DNA, 25 bp, Homo sapien
tataggatggagaacctaataaggg

SEQ ID NO: 1343836 - DNA, 25 bp, Homo sapien
tgtaaagaggttcgtgcagcacttc

SEQ ID NO: 1343837 - DNA, 25 bp, Homo sapien
tctgattctctcttataggatggag

SEQ ID NO: 1343838 - DNA, 25 bp, Homo sapien
ttctatggaaggtccatagctttgc

SEQ ID NO: 1343839 - DNA, 25 bp, Homo sapien
tatggaaggtccatagctttgctcc

SEQ ID NO: 1343840 - DNA, 25 bp, Homo sapien
agctcttctatggaaggtccatagc

SEQ ID NO: 1343841 - DNA, 25 bp, Homo sapien
gaaggtccatagctttgctccagcc

SEQ ID NO: 1343842 - DNA, 25 bp, Homo sapien
cgtatgaaactgatcaaagggtttg

SEQ ID NO: 1343843 - DNA, 25 bp, Homo sapien
agttggaatctgcatggcatctcgt

SEQ ID NO: 1343844 - DNA, 25 bp, Homo sapien
catggcatctcgtatgaaactgatc

SEQ ID NO: 1343845 - DNA, 25 bp, Homo sapien
gaatctgcatggcatctcgtatgaa

SEQ ID NO: 1343846 - DNA, 25 bp, Homo sapien
ccagagagagactacaaccagcttc

SEQ ID NO: 1343847 - DNA, 25 bp, Homo sapien
cagagagagactacaaccagcttca

SEQ ID NO: 1343848 - DNA, 25 bp, Homo sapien
atggccagagagagactacaaccag

SEQ ID NO: 1343849 - DNA, 25 bp, Homo sapien
ggccagagagagactacaaccagct

SEQ ID NO: 1343850 - DNA, 25 bp, Homo sapien
gggagccccacatgacccagcagct

SEQ ID NO: 1343851 - DNA, 25 bp, Homo sapien
cccacatgacccagcagcttggttt

SEQ ID NO: 1343852 - DNA, 25 bp, Homo sapien
gtgttccgataccaggaaatcaagt

SEQ ID NO: 1343853 - DNA, 25 bp, Homo sapien
tgccctgagtgttccgataccagga

SEQ ID NO: 1343854 - DNA, 25 bp, Homo sapien
tacaactgttttgttaggtgcatac

SEQ ID NO: 1343855 - DNA, 25 bp, Homo sapien
tgtatacctttaagggatacaactg

SEQ ID NO: 1343856 - DNA, 25 bp, Homo sapien
gccatttgtcataaagaagttgcca

SEQ ID NO: 1343857 - DNA, 25 bp, Homo sapien
caatgcatagtggtaaattctgggc

SEQ ID NO: 1343858 - DNA, 25 bp, Homo sapien
ttgtaaaacctatgctatggaactg

SEQ ID NO: 1343859 - DNA, 25 bp, Homo sapien
tgatgcctaatgcagtacagcaaat

SEQ ID NO: 1343860 - DNA, 25 bp, Homo sapien
gcaggacacattgcacttacgggct

SEQ ID NO: 1343861 - DNA, 25 bp, Homo sapien
tatactctatgctaattgacttctg

SEQ ID NO: 1343862 - DNA, 25 bp, Homo sapien
atcgggtggcaacactaagtttggc

SEQ ID NO: 1343863 - DNA, 25 bp, Homo sapien
tctcagcgctggttggaaatactgc

SEQ ID NO: 1343864 - DNA, 25 bp, Homo sapien
tagtgtattatgctgatcgggtggc

SEQ ID NO: 1343865 - DNA, 25 bp, Homo sapien
aaatactgcagaacatccaggcggg

SEQ ID NO: 1343866 - DNA, 25 bp, Homo sapien
gacacagccatgttcaaagcaacta

SEQ ID NO: 1343867 - DNA, 25 bp, Homo sapien
gcttattcttgtcatatataaggaa

SEQ ID NO: 1343868 - DNA, 25 bp, Homo sapien
aaggactttcatcagagtgtagctt

SEQ ID NO: 1343869 - DNA, 25 bp, Homo sapien
gtgaatacgaaggacagggagacca

SEQ ID NO: 1343870 - DNA, 25 bp, Homo sapien
tcctcactgtaggtcctgggagccc

SEQ ID NO: 1343871 - DNA, 25 bp, Homo sapien
gctcttcctcactgtaggtcctggg

SEQ ID NO: 1343872 - DNA, 25 bp, Homo sapien
gccacccactctagttctggactca

SEQ ID NO: 1343873 - DNA, 25 bp, Homo sapien
tgctgccacccactctagttctgga

SEQ ID NO: 1343874 - DNA, 25 bp, Homo sapien
agagcaagtcatgtcaaaccaacct

SEQ ID NO: 1343875 - DNA, 25 bp, Homo sapien
catcaagagcaagtcatgtcaaacc

SEQ ID NO: 1343876 - DNA, 25 bp, Homo sapien
tcaagagcaagtcatgtcaaaccaa

SEQ ID NO: 1343877 - DNA, 25 bp, Homo sapien
atgcatcaagagcaagtcatgtcaa

SEQ ID NO: 1343878 - DNA, 25 bp, Homo sapien
tgacagctttaaccctacactgtgg

SEQ ID NO: 1343879 - DNA, 25 bp, Homo sapien
acttcttcaagtctcatggcggtac

SEQ ID NO: 1343880 - DNA, 25 bp, Homo sapien
tgtagatttccagtcagacagtgac

SEQ ID NO: 1343881 - DNA, 25 bp, Homo sapien
gcagagacaacaacgcatgactgtt

SEQ ID NO: 1343882 - DNA, 25 bp, Homo sapien
agactaatgtcccaaatctgagtga

SEQ ID NO: 1343883 - DNA, 25 bp, Homo sapien
caacagaataactgcatgagagaga

SEQ ID NO: 1343884 - DNA, 25 bp, Homo sapien
gcattggtgtgcttcagaatgagac

SEQ ID NO: 1343885 - DNA, 25 bp, Homo sapien
tctgagtgagcaaatttgaaatgcc

SEQ ID NO: 1343886 - DNA, 25 bp, Homo sapien
tttgtatgttaaatccagaaccaat

SEQ ID NO: 1343887 - DNA, 25 bp, Homo sapien
gatgatgcattctataccggacttc

SEQ ID NO: 1343888 - DNA, 25 bp, Homo sapien
gatgcattctataccggacttctga

SEQ ID NO: 1343889 - DNA, 25 bp, Homo sapien
ttaccaaaaattgcatgcttcttcc

SEQ ID NO: 1343890 - DNA, 25 bp, Homo sapien
tattgacttcagactgtgagtttca

SEQ ID NO: 1343891 - DNA, 25 bp, Homo sapien
tcagactgtgagtttcatgaaggca

SEQ ID NO: 1343892 - DNA, 25 bp, Homo sapien
gacttcagactgtgagtttcatgaa

SEQ ID NO: 1343893 - DNA, 25 bp, Homo sapien
tttgtttattgacttcagactgtga

SEQ ID NO: 1343894 - DNA, 25 bp, Homo sapien
tagattataaactcccagagggcac

SEQ ID NO: 1343895 - DNA, 25 bp, Homo sapien
gacccgacagtgaagtaatgtagct

SEQ ID NO: 1343896 - DNA, 25 bp, Homo sapien
tgctcgttacactcaaagaagggat

SEQ ID NO: 1343897 - DNA, 25 bp, Homo sapien
gagcaggatttataggacccgacag

SEQ ID NO: 1343898 - DNA, 25 bp, Homo sapien
tgaccggctgcccatgagtgatact

SEQ ID NO: 1343899 - DNA, 25 bp, Homo sapien
tgacaactggactgatggctcgcat

SEQ ID NO: 1343900 - DNA, 25 bp, Homo sapien
cagttaaacaaaggatgatggccct

SEQ ID NO: 1343901 - DNA, 25 bp, Homo sapien
ggctcgcattatgacaacacagggt

SEQ ID NO: 1343902 - DNA, 25 bp, Homo sapien
caaatgcattcactgtcagtaagct

SEQ ID NO: 1343903 - DNA, 25 bp, Homo sapien
ctgtggtaacagcatattatgctga

SEQ ID NO: 1343904 - DNA, 25 bp, Homo sapien
aaagtagcttcaagagacagcagcc

SEQ ID NO: 1343905 - DNA, 25 bp, Homo sapien
gctgaggaaaagtagcttcaagaga

SEQ ID NO: 1343906 - DNA, 25 bp, Homo sapien
ctaataccagtacaacaatacaact

SEQ ID NO: 1343907 - DNA, 25 bp, Homo sapien
gtctgcagtattgaaggacatcact

SEQ ID NO: 1343908 - DNA, 25 bp, Homo sapien
catcactgtcacaaaatcggggatt

SEQ ID NO: 1343909 - DNA, 25 bp, Homo sapien
acaactgtctgcagtattgaaggac

SEQ ID NO: 1343910 - DNA, 25 bp, Homo sapien
gagttgtagattgagtttcagactt

SEQ ID NO: 1343911 - DNA, 25 bp, Homo sapien
tatagttggagactcagaaactctc

SEQ ID NO: 1343912 - DNA, 25 bp, Homo sapien
ggctttgctggattaaagaccttga

SEQ ID NO: 1343913 - DNA, 25 bp, Homo sapien
ctgccaataaatgtggtatagttgg

SEQ ID NO: 1343914 - DNA, 25 bp, Homo sapien
tgatatctaagacccccaggttggt

SEQ ID NO: 1343915 - DNA, 25 bp, Homo sapien
ccaggttggtaagctcctaaccaca

SEQ ID NO: 1343916 - DNA, 25 bp, Homo sapien
agctttctcacaaaactatttccca

SEQ ID NO: 1343917 - DNA, 25 bp, Homo sapien
catttctgtcctagctttctcacaa

SEQ ID NO: 1343918 - DNA, 25 bp, Homo sapien
gagagagtgacattatcttaggata

SEQ ID NO: 1343919 - DNA, 25 bp, Homo sapien
gtgtctatacatttacatgggtaaa

SEQ ID NO: 1343920 - DNA, 25 bp, Homo sapien
catgggtaaaagaatgccaatgtct

SEQ ID NO: 1343921 - DNA, 25 bp, Homo sapien
tgctgtctttgatagcatgatgcct

SEQ ID NO: 1343922 - DNA, 25 bp, Homo sapien
gcctaggtggctgtatacaaattcg

SEQ ID NO: 1343923 - DNA, 25 bp, Homo sapien
cacagcagtatagcaaaagaggctt

SEQ ID NO: 1343924 - DNA, 25 bp, Homo sapien
ggccaagtaaccagagctcctttag

SEQ ID NO: 1343925 - DNA, 25 bp, Homo sapien
tatggaagaaccaacaagccacagc

SEQ ID NO: 1343926 - DNA, 25 bp, Homo sapien
cgtagtcagcaacagagatgtaata

SEQ ID NO: 1343927 - DNA, 25 bp, Homo sapien
tatcaaagcagacctcgtagtcagc

SEQ ID NO: 1343928 - DNA, 25 bp, Homo sapien
ttgtttactatcaaagcagacctcg

SEQ ID NO: 1343929 - DNA, 25 bp, Homo sapien
cctcgtagtcagcaacagagatgta

SEQ ID NO: 1343930 - DNA, 25 bp, Homo sapien
taagcatgcctcaatcatccaaaag

SEQ ID NO: 1343931 - DNA, 25 bp, Homo sapien
gattagccatatcacaaaagtccta

SEQ ID NO: 1343932 - DNA, 25 bp, Homo sapien
tcctatcatgggtaatgaaaagtct

SEQ ID NO: 1343933 - DNA, 25 bp, Homo sapien
cactgcaagtttagtcttaccaaga

SEQ ID NO: 1343934 - DNA, 25 bp, Homo sapien
caacaggtaggtgatactgggaaac

SEQ ID NO: 1343935 - DNA, 25 bp, Homo sapien
ggcccaggctaattataccaacagg

SEQ ID NO: 1343936 - DNA, 25 bp, Homo sapien
tactggcagtgaatatggcccaggc

SEQ ID NO: 1343937 - DNA, 25 bp, Homo sapien
tgacaagggttataaagcaactcca

SEQ ID NO: 1343938 - DNA, 25 bp, Homo sapien
ttaagtaggaattcggtctctcaaa

SEQ ID NO: 1343939 - DNA, 25 bp, Homo sapien
tcgaggaactcggaatggatttcca

SEQ ID NO: 1343940 - DNA, 25 bp, Homo sapien
aatattcaagtatagcagctgttcc

SEQ ID NO: 1343941 - DNA, 25 bp, Homo sapien
tcattaatatggctgctcgaggaac

SEQ ID NO: 1343942 - DNA, 25 bp, Homo sapien
gactcttgcaagaacctaacccctg

SEQ ID NO: 1343943 - DNA, 25 bp, Homo sapien
cagggactaattctgcttggaggac

SEQ ID NO: 1343944 - DNA, 25 bp, Homo sapien
aaaattggagtcaccccacgggcat

SEQ ID NO: 1343945 - DNA, 25 bp, Homo sapien
tttaggcactgggacaactcttttc

SEQ ID NO: 1343946 - DNA, 25 bp, Homo sapien
caagtgtgaagatacgatatagaac

SEQ ID NO: 1343947 - DNA, 25 bp, Homo sapien
gagggtccacagatccaacctgatt

SEQ ID NO: 1343948 - DNA, 25 bp, Homo sapien
tattttgaaggtccaacgtggtcag

SEQ ID NO: 1343949 - DNA, 25 bp, Homo sapien
agtttacacaattaccgagctctgg

SEQ ID NO: 1343950 - DNA, 25 bp, Homo sapien
agaatgctctctacctgaatggctg

SEQ ID NO: 1343951 - DNA, 25 bp, Homo sapien
tgttaagagcccaacttctggagcc

SEQ ID NO: 1343952 - DNA, 25 bp, Homo sapien
gcagggcacaaaggctagcacagtt

SEQ ID NO: 1343953 - DNA, 25 bp, Homo sapien
gaagtgtaaactcaaggcagtgctg

SEQ ID NO: 1343954 - DNA, 25 bp, Homo sapien
gcagtcttaccagtgattccatttc

SEQ ID NO: 1343955 - DNA, 25 bp, Homo sapien
ctattaaaggaaagattgatcgttt

SEQ ID NO: 1343956 - DNA, 25 bp, Homo sapien
tgatcgtttgcagtcttaccagtga

SEQ ID NO: 1343957 - DNA, 25 bp, Homo sapien
gaaagattgatcgtttgcagtctta

SEQ ID NO: 1343958 - DNA, 25 bp, Homo sapien
aattattcccaactagatgactacc

SEQ ID NO: 1343959 - DNA, 25 bp, Homo sapien
tgtgttcagaagtcaagcctaatat

SEQ ID NO: 1343960 - DNA, 25 bp, Homo sapien
catttactgttggaaagatctggga

SEQ ID NO: 1343961 - DNA, 25 bp, Homo sapien
tgaattctgtctcgggtttcctaaa

SEQ ID NO: 1343962 - DNA, 25 bp, Homo sapien
gtttattaaaactgagatcgacatc

SEQ ID NO: 1343963 - DNA, 25 bp, Homo sapien
gagatcgacatcagaaaccatttcc

SEQ ID NO: 1343964 - DNA, 25 bp, Homo sapien
agtcaatttctgaagcacacataac

SEQ ID NO: 1343965 - DNA, 25 bp, Homo sapien
cataactccaaggatataaaggaaa

SEQ ID NO: 1343966 - DNA, 25 bp, Homo sapien
tcagtggaaaaattagtggcttggc

SEQ ID NO: 1343967 - DNA, 25 bp, Homo sapien
taagaacagctagttaacctgtcca

SEQ ID NO: 1343968 - DNA, 25 bp, Homo sapien
cacatggacctgatgttagacagtc

SEQ ID NO: 1343969 - DNA, 25 bp, Homo sapien
caaaaactatacagcaggtctggga

SEQ ID NO: 1343970 - DNA, 25 bp, Homo sapien
tcaaacacctcatcaggaatcaaag

SEQ ID NO: 1343971 - DNA, 25 bp, Homo sapien
ttactgcatcaaacacctcatcagg

SEQ ID NO: 1343972 - DNA, 25 bp, Homo sapien
agttaatagaagtgacgatgttgct

SEQ ID NO: 1343973 - DNA, 25 bp, Homo sapien
catagttgattcttactgaagttaa

SEQ ID NO: 1343974 - DNA, 25 bp, Homo sapien
tttaaaagctagttgttgccccatc

SEQ ID NO: 1343975 - DNA, 25 bp, Homo sapien
tcatatagcaaatggagcccattcc

SEQ ID NO: 1343976 - DNA, 25 bp, Homo sapien
taagtgactaaggatgggcagcata

SEQ ID NO: 1343977 - DNA, 25 bp, Homo sapien
gagacatgacaggtcacagagggca

SEQ ID NO: 1343978 - DNA, 25 bp, Homo sapien
tggtagtgtcatggcagtctcagta

SEQ ID NO: 1343979 - DNA, 25 bp, Homo sapien
cagactcactttggctaggtccatc

SEQ ID NO: 1343980 - DNA, 25 bp, Homo sapien
agtctcagtagcagactcactttgg

SEQ ID NO: 1343981 - DNA, 25 bp, Homo sapien
gatggcatgtatattgactctggat

SEQ ID NO: 1343982 - DNA, 25 bp, Homo sapien
ttccaacttctagtagccacctcat

SEQ ID NO: 1343983 - DNA, 25 bp, Homo sapien
gcacgcgccaccatggaactttatc

SEQ ID NO: 1343984 - DNA, 25 bp, Homo sapien
ccatggaactttatcatgcccagct

SEQ ID NO: 1343985 - DNA, 25 bp, Homo sapien
tccaagttaagccagcaacagtggt

SEQ ID NO: 1343986 - DNA, 25 bp, Homo sapien
cttcgtagatattttaggacttctt

SEQ ID NO: 1343987 - DNA, 25 bp, Homo sapien
tagatattttaggacttcttgtgtt

SEQ ID NO: 1343988 - DNA, 25 bp, Homo sapien
cgtagatattttaggacttcttgtg

SEQ ID NO: 1343989 - DNA, 25 bp, Homo sapien
gcttcgtagatattttaggacttct

SEQ ID NO: 1343990 - DNA, 25 bp, Homo sapien
ttctcttcgaattgttctcaaagga

SEQ ID NO: 1343991 - DNA, 25 bp, Homo sapien
cttcgaattgttctcaaaggatttc

SEQ ID NO: 1343992 - DNA, 25 bp, Homo sapien
ctcttcgaattgttctcaaaggatt

SEQ ID NO: 1343993 - DNA, 25 bp, Homo sapien
atttctcttcgaattgttctcaaag

SEQ ID NO: 1343994 - DNA, 25 bp, Homo sapien
taataagacaaatgctaaacaagtc

SEQ ID NO: 1343995 - DNA, 25 bp, Homo sapien
gaaagggttggtatatttatagctc

SEQ ID NO: 1343996 - DNA, 25 bp, Homo sapien
ctatgagagtagaaatatagacact

SEQ ID NO: 1343997 - DNA, 25 bp, Homo sapien
catgttgctatgagagtagaaatat

SEQ ID NO: 1343998 - DNA, 25 bp, Homo sapien
gaatgtcaggctaaaaagtctagag

SEQ ID NO: 1343999 - DNA, 25 bp, Homo sapien
aattaagtctgattgtaaggcaccc

SEQ ID NO: 1344000 - DNA, 25 bp, Homo sapien
tagagtttatcttacaatatggtgg

SEQ ID NO: 1344001 - DNA, 25 bp, Homo sapien
ctgcatgagcgaaagatgacaaatg

SEQ ID NO: 1344002 - DNA, 25 bp, Homo sapien
aatatcattgttgcttaggtcaagc

SEQ ID NO: 1344003 - DNA, 25 bp, Homo sapien
aatctggttttcacctacgtgcaat

SEQ ID NO: 1344004 - DNA, 25 bp, Homo sapien
caaggaccgtagtagtataatttca

SEQ ID NO: 1344005 - DNA, 25 bp, Homo sapien
caggtctagcacaagaattgaattc

SEQ ID NO: 1344006 - DNA, 25 bp, Homo sapien
aattctagtgattccatgccagcca

SEQ ID NO: 1344007 - DNA, 25 bp, Homo sapien
ggtatagtttccaagagatttgaat

SEQ ID NO: 1344008 - DNA, 25 bp, Homo sapien
tattcctccgcaaataaagcaattc

SEQ ID NO: 1344009 - DNA, 25 bp, Homo sapien
catgccagccaattcaggaggtata

SEQ ID NO: 1344010 - DNA, 25 bp, Homo sapien
gaacttatgtggatacccgattggc

SEQ ID NO: 1344011 - DNA, 25 bp, Homo sapien
gctgctgaacttatgtggatacccg

SEQ ID NO: 1344012 - DNA, 25 bp, Homo sapien
cttatgtggatacccgattggcata

SEQ ID NO: 1344013 - DNA, 25 bp, Homo sapien
atgatgctgctgaacttatgtggat

SEQ ID NO: 1344014 - DNA, 25 bp, Homo sapien
cattactagaaagattgagtcgcac

SEQ ID NO: 1344015 - DNA, 25 bp, Homo sapien
ggcaaactcttcagttcattactag

SEQ ID NO: 1344016 - DNA, 25 bp, Homo sapien
gaagaaaaactagcaggaacagttg

SEQ ID NO: 1344017 - DNA, 25 bp, Homo sapien
tcgcaccagactggacagagaagaa

SEQ ID NO: 1344018 - DNA, 25 bp, Homo sapien
gcacttcaggtttcttaggtttgta

SEQ ID NO: 1344019 - DNA, 25 bp, Homo sapien
ttcttcagggagtattttcagttta

SEQ ID NO: 1344020 - DNA, 25 bp, Homo sapien
gatatgcaggttaattcattatgct

SEQ ID NO: 1344021 - DNA, 25 bp, Homo sapien
ttcattatgctggagatacaggcac

SEQ ID NO: 1344022 - DNA, 25 bp, Homo sapien
aggaagggatgtcaactgattatca

SEQ ID NO: 1344023 - DNA, 25 bp, Homo sapien
gctctcttatagcagaaggaaggga

SEQ ID NO: 1344024 - DNA, 25 bp, Homo sapien
ggaagggatgtcaactgattatcat

SEQ ID NO: 1344025 - DNA, 25 bp, Homo sapien
caggtcatctgtaagtgactgaagt

SEQ ID NO: 1344026 - DNA, 25 bp, Homo sapien
aaagattctgattagcttcctcagg

SEQ ID NO: 1344027 - DNA, 25 bp, Homo sapien
acagtcagtgcaggcaagagtcgca

SEQ ID NO: 1344028 - DNA, 25 bp, Homo sapien
gggatatccacatttattctccaga

SEQ ID NO: 1344029 - DNA, 25 bp, Homo sapien
tatcatcacggacctaagagtcaga

SEQ ID NO: 1344030 - DNA, 25 bp, Homo sapien
tcagaatccatgtgctctcttaaag

SEQ ID NO: 1344031 - DNA, 25 bp, Homo sapien
cacctgagtctagtcaataagtaca

SEQ ID NO: 1344032 - DNA, 25 bp, Homo sapien
tttaacagacgaaaccacctgagtc

SEQ ID NO: 1344033 - DNA, 25 bp, Homo sapien
tattccttgtaagtagaactctgca

SEQ ID NO: 1344034 - DNA, 25 bp, Homo sapien
ttattccttgtaagtagaactctgc

SEQ ID NO: 1344035 - DNA, 25 bp, Homo sapien
tccttgtaagtagaactctgcacag

SEQ ID NO: 1344036 - DNA, 25 bp, Homo sapien
ttccttgtaagtagaactctgcaca

SEQ ID NO: 1344037 - DNA, 25 bp, Homo sapien
cttcaacagcccttggggtaccgag

SEQ ID NO: 1344038 - DNA, 25 bp, Homo sapien
ggtaccgaggtaccgcagtctcttc

SEQ ID NO: 1344039 - DNA, 25 bp, Homo sapien
tgctttgaaaccagcgcggagatcc

SEQ ID NO: 1344040 - DNA, 25 bp, Homo sapien
cccgacaggtttaactggccgctct

SEQ ID NO: 1344041 - DNA, 25 bp, Homo sapien
gttcaaagtcctaggtccagaagct

SEQ ID NO: 1344042 - DNA, 25 bp, Homo sapien
ttcaaagtcctaggtccagaagctg

SEQ ID NO: 1344043 - DNA, 25 bp, Homo sapien
caaagtcctaggtccagaagctgca

SEQ ID NO: 1344044 - DNA, 25 bp, Homo sapien
aagtcctaggtccagaagctgcagc

SEQ ID NO: 1344045 - DNA, 25 bp, Homo sapien
gaaaaaggcatgaaccctgaccttc

SEQ ID NO: 1344046 - DNA, 25 bp, Homo sapien
caaatattttagcatgcgtggcata

SEQ ID NO: 1344047 - DNA, 25 bp, Homo sapien
tacttatttatgagtgacgtgcagt

SEQ ID NO: 1344048 - DNA, 25 bp, Homo sapien
acgtgcagttagttatacaatcagc

SEQ ID NO: 1344049 - DNA, 25 bp, Homo sapien
tgtacaaaacgcttattaataagtg

SEQ ID NO: 1344050 - DNA, 25 bp, Homo sapien
gtgaatgaatgtacaaaacgcttat

SEQ ID NO: 1344051 - DNA, 25 bp, Homo sapien
ttctgaaagttttagtgacaaaaca

SEQ ID NO: 1344052 - DNA, 25 bp, Homo sapien
gaatgtacaaaacgcttattaataa

SEQ ID NO: 1344053 - DNA, 25 bp, Homo sapien
tctctcccgcaatccggttcctctt

SEQ ID NO: 1344054 - DNA, 25 bp, Homo sapien
ccaggtgactaatgtctccccgagc

SEQ ID NO: 1344055 - DNA, 25 bp, Homo sapien
gcgccatgagcaacactaccgtcgt

SEQ ID NO: 1344056 - DNA, 25 bp, Homo sapien
gcgagaacccgagcagcgccatgag

SEQ ID NO: 1344057 - DNA, 25 bp, Homo sapien
cttattgaaactttgcagggtggca

SEQ ID NO: 1344058 - DNA, 25 bp, Homo sapien
tgtaccctgggtgcataaaattgtc

SEQ ID NO: 1344059 - DNA, 25 bp, Homo sapien
ttcatgtgaagagtgtggattaccc

SEQ ID NO: 1344060 - DNA, 25 bp, Homo sapien
taacttttggtatgggcttgagcca

SEQ ID NO: 1344061 - DNA, 25 bp, Homo sapien
ccagatgcctgaaaaacagtgggtc

SEQ ID NO: 1344062 - DNA, 25 bp, Homo sapien
tagtttgttcccaatgtactgctac

SEQ ID NO: 1344063 - DNA, 25 bp, Homo sapien
ttaactaaaggccagcaagcactca

SEQ ID NO: 1344064 - DNA, 25 bp, Homo sapien
actcaagtgccccaagtgttttcct

SEQ ID NO: 1344065 - DNA, 25 bp, Homo sapien
tctaaattgatgacagctctgacac

SEQ ID NO: 1344066 - DNA, 25 bp, Homo sapien
tatcggcacttctcagtataggtgg

SEQ ID NO: 1344067 - DNA, 25 bp, Homo sapien
cagatcttctatcaggtgtctcaca

SEQ ID NO: 1344068 - DNA, 25 bp, Homo sapien
tctgacacaagcaagataacagtgc

SEQ ID NO: 1344069 - DNA, 25 bp, Homo sapien
catttttggcttaaggagtttggct

SEQ ID NO: 1344070 - DNA, 25 bp, Homo sapien
tgatgagatgcagtttcttaatatg

SEQ ID NO: 1344071 - DNA, 25 bp, Homo sapien
tagcttttcaactggcactgtatgg

SEQ ID NO: 1344072 - DNA, 25 bp, Homo sapien
cttaagtgccctgtacatattgtat

SEQ ID NO: 1344073 - DNA, 25 bp, Homo sapien
caggagttattcctgatgaagctaa

SEQ ID NO: 1344074 - DNA, 25 bp, Homo sapien
aatcaagctttgtattttagcgaac

SEQ ID NO: 1344075 - DNA, 25 bp, Homo sapien
acattgaagttcattctgacataaa

SEQ ID NO: 1344076 - DNA, 25 bp, Homo sapien
tgttctaatgcaaggatgtttctct

SEQ ID NO: 1344077 - DNA, 25 bp, Homo sapien
tgcgtctggcccctatttaataact

SEQ ID NO: 1344078 - DNA, 25 bp, Homo sapien
cactgcgtctggcccctatttaata

SEQ ID NO: 1344079 - DNA, 25 bp, Homo sapien
cctatttaataacttctaaatgcag

SEQ ID NO: 1344080 - DNA, 25 bp, Homo sapien
tcctggactgaagtgttgctcccac

SEQ ID NO: 1344081 - DNA, 25 bp, Homo sapien
aaacctagatgtatacagctctgag

SEQ ID NO: 1344082 - DNA, 25 bp, Homo sapien
ggtacgaggtaaccaattcttgtca

SEQ ID NO: 1344083 - DNA, 25 bp, Homo sapien
tctgagggagtccaactgtatacct

SEQ ID NO: 1344084 - DNA, 25 bp, Homo sapien
gtgactgaatattgcctctgaggga

SEQ ID NO: 1344085 - DNA, 25 bp, Homo sapien
tacctatcctgagtctatcttaaag

SEQ ID NO: 1344086 - DNA, 25 bp, Homo sapien
cagtagtaatcttatgcacacggtg

SEQ ID NO: 1344087 - DNA, 25 bp, Homo sapien
caaaagtaggctacagtctgtgcca

SEQ ID NO: 1344088 - DNA, 25 bp, Homo sapien
tctttggcagtgagtaaatagcata

SEQ ID NO: 1344089 - DNA, 25 bp, Homo sapien
tgcactgggacacaagccttttaac

SEQ ID NO: 1344090 - DNA, 25 bp, Homo sapien
tagtgccactgacaagatgctacag

SEQ ID NO: 1344091 - DNA, 25 bp, Homo sapien
gcacaaaggtagtgttgcactggga

SEQ ID NO: 1344092 - DNA, 25 bp, Homo sapien
gatgctacagtgaagattatccatt

SEQ ID NO: 1344093 - DNA, 25 bp, Homo sapien
cagagttagttactattgccccaga

SEQ ID NO: 1344094 - DNA, 25 bp, Homo sapien
cagtcctttcatggcctggaaacag

SEQ ID NO: 1344095 - DNA, 25 bp, Homo sapien
caagaactctatgtatgggaggtac

SEQ ID NO: 1344096 - DNA, 25 bp, Homo sapien
caaggtaagctcactctgtaaggat

SEQ ID NO: 1344097 - DNA, 25 bp, Homo sapien
taccagtgggcaagaatattaacca

SEQ ID NO: 1344098 - DNA, 25 bp, Homo sapien
tctactaacatgtatcagcagacag

SEQ ID NO: 1344099 - DNA, 25 bp, Homo sapien
tatgtgaatatctacagagggcaaa

SEQ ID NO: 1344100 - DNA, 25 bp, Homo sapien
tgaagatgactatacgattgtcccc

SEQ ID NO: 1344101 - DNA, 25 bp, Homo sapien
tcaataggtccatgtaacgtagtaa

SEQ ID NO: 1344102 - DNA, 25 bp, Homo sapien
tccagtgtaccccagcaaaatattc

SEQ ID NO: 1344103 - DNA, 25 bp, Homo sapien
caaagtaagggagcctagaagcaac

SEQ ID NO: 1344104 - DNA, 25 bp, Homo sapien
caaagctagtctgggtttactaaca

SEQ ID NO: 1344105 - DNA, 25 bp, Homo sapien
tcagtctaaaaaacttgacagatgc

SEQ ID NO: 1344106 - DNA, 25 bp, Homo sapien
taagctactggtcagtctaaaaaac

SEQ ID NO: 1344107 - DNA, 25 bp, Homo sapien
gacagatgcattcttgagacattca

SEQ ID NO: 1344108 - DNA, 25 bp, Homo sapien
tgagacattcatcaggatacatttt

SEQ ID NO: 1344109 - DNA, 25 bp, Homo sapien
tggaccttcaaaccaccttggaata

SEQ ID NO: 1344110 - DNA, 25 bp, Homo sapien
tatgatgaccataacaaggactcaa

SEQ ID NO: 1344111 - DNA, 25 bp, Homo sapien
cagaccgatgtgtacttattaggaa

SEQ ID NO: 1344112 - DNA, 25 bp, Homo sapien
tattccctgcagagtgaacgctcct

SEQ ID NO: 1344113 - DNA, 25 bp, Homo sapien
tagaggcccatttcactgtatcgta

SEQ ID NO: 1344114 - DNA, 25 bp, Homo sapien
tatttggatccacttctagggtctc

SEQ ID NO: 1344115 - DNA, 25 bp, Homo sapien
aaatggcacatcagaaaactcgctg

SEQ ID NO: 1344116 - DNA, 25 bp, Homo sapien
tcacatacgcaggtcttagggtcat

SEQ ID NO: 1344117 - DNA, 25 bp, Homo sapien
catcaaattcatcgtatcgaaactc

SEQ ID NO: 1344118 - DNA, 25 bp, Homo sapien
gagccatcaaattcatcgtatcgaa

SEQ ID NO: 1344119 - DNA, 25 bp, Homo sapien
tggagccatcaaattcatcgtatcg

SEQ ID NO: 1344120 - DNA, 25 bp, Homo sapien
gccatcaaattcatcgtatcgaaac

SEQ ID NO: 1344121 - DNA, 25 bp, Homo sapien
tggctgtgattgtgggaaacacagg

SEQ ID NO: 1344122 - DNA, 25 bp, Homo sapien
gtggctgtgattgtgggaaacacag

SEQ ID NO: 1344123 - DNA, 25 bp, Homo sapien
gaaaaatatcataccaccacagcct

SEQ ID NO: 1344124 - DNA, 25 bp, Homo sapien
gagcctcagggatttcatatgtaaa

SEQ ID NO: 1344125 - DNA, 25 bp, Homo sapien
catgagtacaaatcataaagcctgg

SEQ ID NO: 1344126 - DNA, 25 bp, Homo sapien
caacctatcacttaaatgtgtggga

SEQ ID NO: 1344127 - DNA, 25 bp, Homo sapien
ttcaaatagcttggctgtgaaaagc

SEQ ID NO: 1344128 - DNA, 25 bp, Homo sapien
gtgtctgtatcacaatttcccggtg

SEQ ID NO: 1344129 - DNA, 25 bp, Homo sapien
gtaaacttatctcccttcatgtccc

SEQ ID NO: 1344130 - DNA, 25 bp, Homo sapien
tctatagtggctgctctaggtatac

SEQ ID NO: 1344131 - DNA, 25 bp, Homo sapien
taatcagcacttaaagctctggctg

SEQ ID NO: 1344132 - DNA, 25 bp, Homo sapien
aatcatctgcgcttaggttgtagga

SEQ ID NO: 1344133 - DNA, 25 bp, Homo sapien
cagagaaaagaccattcataatcag

SEQ ID NO: 1344134 - DNA, 25 bp, Homo sapien
gagggaggtcccatttctgatattc

SEQ ID NO: 1344135 - DNA, 25 bp, Homo sapien
ggagctactacttctaaaacattca

SEQ ID NO: 1344136 - DNA, 25 bp, Homo sapien
tgcttgaagggagctactacttcta

SEQ ID NO: 1344137 - DNA, 25 bp, Homo sapien
gaagggagctactacttctaaaaca

SEQ ID NO: 1344138 - DNA, 25 bp, Homo sapien
tgttaaagtgcttgaagggagctac

SEQ ID NO: 1344139 - DNA, 25 bp, Homo sapien
gctcatggctatcgtagctttaaac

SEQ ID NO: 1344140 - DNA, 25 bp, Homo sapien
ctctatccctaagggaaattcctgg

SEQ ID NO: 1344141 - DNA, 25 bp, Homo sapien
tactctctttgcacaccaattctct

SEQ ID NO: 1344142 - DNA, 25 bp, Homo sapien
catggctatcgtagctttaaacgtt

SEQ ID NO: 1344143 - DNA, 25 bp, Homo sapien
aactacattctggtttggtatggtc

SEQ ID NO: 1344144 - DNA, 25 bp, Homo sapien
cagtttaattatgtagtacttagca

SEQ ID NO: 1344145 - DNA, 25 bp, Homo sapien
tttgtttagcaccataaaatattaa

SEQ ID NO: 1344146 - DNA, 25 bp, Homo sapien
gtacttagcagaagtaactacattc

SEQ ID NO: 1344147 - DNA, 25 bp, Homo sapien
ggtacataatttgggacactttgcc

SEQ ID NO: 1344148 - DNA, 25 bp, Homo sapien
tagaaaagctcatcatacaatggga

SEQ ID NO: 1344149 - DNA, 25 bp, Homo sapien
tcaaataagcaactgtcctgcgcaa

SEQ ID NO: 1344150 - DNA, 25 bp, Homo sapien
attacatcagcaaaggtcctatgga

SEQ ID NO: 1344151 - DNA, 25 bp, Homo sapien
gtgtaagagactgtcttcgaatcgg

SEQ ID NO: 1344152 - DNA, 25 bp, Homo sapien
ggaggtgtaagagactgtcttcgaa

SEQ ID NO: 1344153 - DNA, 25 bp, Homo sapien
ccatgtaatagtgttctgaggagga

SEQ ID NO: 1344154 - DNA, 25 bp, Homo sapien
ccattttcagcagatatatattctt

SEQ ID NO: 1344155 - DNA, 25 bp, Homo sapien
caaaatgggaattgggccactaact

SEQ ID NO: 1344156 - DNA, 25 bp, Homo sapien
tcttactagcccagtgacagcacca

SEQ ID NO: 1344157 - DNA, 25 bp, Homo sapien
tataaaaaacttagtgcaggtcagg

SEQ ID NO: 1344158 - DNA, 25 bp, Homo sapien
ccggcctacaggacagaacatgact

SEQ ID NO: 1344159 - DNA, 25 bp, Homo sapien
tttcttgtgtggtgtgcggcacgca

SEQ ID NO: 1344160 - DNA, 25 bp, Homo sapien
tgtggtgtgcggcacgcattaataa

SEQ ID NO: 1344161 - DNA, 25 bp, Homo sapien
gtgcggcacgcattaataaacttgt

SEQ ID NO: 1344162 - DNA, 25 bp, Homo sapien
tcttgtgtggtgtgcggcacgcatt

SEQ ID NO: 1344163 - DNA, 25 bp, Homo sapien
gatgagcacatgacttcctagaata

SEQ ID NO: 1344164 - DNA, 25 bp, Homo sapien
gagcagagtgatgtgtacaacttca

SEQ ID NO: 1344165 - DNA, 25 bp, Homo sapien
gaatgggctctcaaacagaatagga

SEQ ID NO: 1344166 - DNA, 25 bp, Homo sapien
gagattgctagttgtctccccagta

SEQ ID NO: 1344167 - DNA, 25 bp, Homo sapien
taagattgctgctccaacctagaac

SEQ ID NO: 1344168 - DNA, 25 bp, Homo sapien
taatactatgacatgtagcaatggc

SEQ ID NO: 1344169 - DNA, 25 bp, Homo sapien
tcagtagaatgacgaagaggcttaa

SEQ ID NO: 1344170 - DNA, 25 bp, Homo sapien
taatgaccctcacaaatgctgtggc

SEQ ID NO: 1344171 - DNA, 25 bp, Homo sapien
ttttttaagtattgccaacaactga

SEQ ID NO: 1344172 - DNA, 25 bp, Homo sapien
tttaagtattgccaacaactgaggg

SEQ ID NO: 1344173 - DNA, 25 bp, Homo sapien
ttaagtattgccaacaactgagggg

SEQ ID NO: 1344174 - DNA, 25 bp, Homo sapien
ataggctcatgccactgcgcacagc

SEQ ID NO: 1344175 - DNA, 25 bp, Homo sapien
cttactgaatgccaccaagaatgaa

SEQ ID NO: 1344176 - DNA, 25 bp, Homo sapien
aagctgtgagtacatttatatactt

SEQ ID NO: 1344177 - DNA, 25 bp, Homo sapien
tgacatcaacgaaatgaagattcac

SEQ ID NO: 1344178 - DNA, 25 bp, Homo sapien
aagataaagtacagattcacaaaaa

SEQ ID NO: 1344179 - DNA, 25 bp, Homo sapien
ggccttatttcgaagaatatcctct

SEQ ID NO: 1344180 - DNA, 25 bp, Homo sapien
tgtttccacctttactcaaactctc

SEQ ID NO: 1344181 - DNA, 25 bp, Homo sapien
ctccatgatggccttatttcgaaga

SEQ ID NO: 1344182 - DNA, 25 bp, Homo sapien
caccaggtaaaagtctgccaaaaag

SEQ ID NO: 1344183 - DNA, 25 bp, Homo sapien
attttatgtgtcagcgtggctacgc

SEQ ID NO: 1344184 - DNA, 25 bp, Homo sapien
gctacgctatgatgccaggtgtttg

SEQ ID NO: 1344185 - DNA, 25 bp, Homo sapien
aagcacctgcgactataggcttgtg

SEQ ID NO: 1344186 - DNA, 25 bp, Homo sapien
caatcaacggactttaagtagagct

SEQ ID NO: 1344187 - DNA, 25 bp, Homo sapien
ttgattttgttgataaagttgcaga

SEQ ID NO: 1344188 - DNA, 25 bp, Homo sapien
ttatcttcccgaaaaagccatcctg

SEQ ID NO: 1344189 - DNA, 25 bp, Homo sapien
cctgtctgggcacgcgtgaaagaaa

SEQ ID NO: 1344190 - DNA, 25 bp, Homo sapien
tatcactgctcattaaaatatccac

SEQ ID NO: 1344191 - DNA, 25 bp, Homo sapien
cctctacccctacaagtaaagaatg

SEQ ID NO: 1344192 - DNA, 25 bp, Homo sapien
cccctacaagtaaagaatgcaaaat

SEQ ID NO: 1344193 - DNA, 25 bp, Homo sapien
tacccctacaagtaaagaatgcaaa

SEQ ID NO: 1344194 - DNA, 25 bp, Homo sapien
tctacccctacaagtaaagaatgca

SEQ ID NO: 1344195 - DNA, 25 bp, Homo sapien
tgaagcttagatcccctcgttggca

SEQ ID NO: 1344196 - DNA, 25 bp, Homo sapien
agggcgccgcatccccattgaaaat

SEQ ID NO: 1344197 - DNA, 25 bp, Homo sapien
ctcatgatgtattcgctgataaact

SEQ ID NO: 1344198 - DNA, 25 bp, Homo sapien
ctaatactacaaaagattcagaggg

SEQ ID NO: 1344199 - DNA, 25 bp, Homo sapien
agctcagcagagtatttaagaccag

SEQ ID NO: 1344200 - DNA, 25 bp, Homo sapien
catggtctagcctaatgcgctggtc

SEQ ID NO: 1344201 - DNA, 25 bp, Homo sapien
taagaccagacagcaatggatggac

SEQ ID NO: 1344202 - DNA, 25 bp, Homo sapien
taagaccaggttgctagctcagcag

SEQ ID NO: 1344203 - DNA, 25 bp, Homo sapien
gtttttcagttctcatcacagacaa

SEQ ID NO: 1344204 - DNA, 25 bp, Homo sapien
acagacaaggcaaagtgagttggta

SEQ ID NO: 1344205 - DNA, 25 bp, Homo sapien
ttcagttctcatcacagacaaggca

SEQ ID NO: 1344206 - DNA, 25 bp, Homo sapien
caaagtgagttggtattcttggttt

SEQ ID NO: 1344207 - DNA, 25 bp, Homo sapien
cactggattggatagatcaatgaat

SEQ ID NO: 1344208 - DNA, 25 bp, Homo sapien
caagatcctcactgtttgccttctg

SEQ ID NO: 1344209 - DNA, 25 bp, Homo sapien
cagatgaacggatacacggattagt

SEQ ID NO: 1344210 - DNA, 25 bp, Homo sapien
ggatcaggaaggtaaccactgtaaa

SEQ ID NO: 1344211 - DNA, 25 bp, Homo sapien
catgcatcggaaggcagaattcggg

SEQ ID NO: 1344212 - DNA, 25 bp, Homo sapien
ctgatattgataccttgtttgtata

SEQ ID NO: 1344213 - DNA, 25 bp, Homo sapien
gtatattttacatgcatcggaaggc

SEQ ID NO: 1344214 - DNA, 25 bp, Homo sapien
tcggaaggcagaattcgggaaagta

SEQ ID NO: 1344215 - DNA, 25 bp, Homo sapien
tcccagtgaagttctagataaaagt

SEQ ID NO: 1344216 - DNA, 25 bp, Homo sapien
gaaaatcccagtgaagttctagata

SEQ ID NO: 1344217 - DNA, 25 bp, Homo sapien
ttgaaaatcccagtgaagttctaga

SEQ ID NO: 1344218 - DNA, 25 bp, Homo sapien
ccagtgaagttctagataaaagtca

SEQ ID NO: 1344219 - DNA, 25 bp, Homo sapien
agatgcagtctcactccatcgccca

SEQ ID NO: 1344220 - DNA, 25 bp, Homo sapien
tgagatgcagtctcactccatcgcc

SEQ ID NO: 1344221 - DNA, 25 bp, Homo sapien
tgcagtctcactccatcgcccaggt

SEQ ID NO: 1344222 - DNA, 25 bp, Homo sapien
ttgagatgcagtctcactccatcgc

SEQ ID NO: 1344223 - DNA, 25 bp, Homo sapien
taatagtagatatcattgcaatatg

SEQ ID NO: 1344224 - DNA, 25 bp, Homo sapien
aatagtagatatcattgcaatatga

SEQ ID NO: 1344225 - DNA, 25 bp, Homo sapien
caacactttccctggattgctgctt

SEQ ID NO: 1344226 - DNA, 25 bp, Homo sapien
tttccctggattgctgcttaagctt

SEQ ID NO: 1344227 - DNA, 25 bp, Homo sapien
cagggcttttaataatcgaggtcgt

SEQ ID NO: 1344228 - DNA, 25 bp, Homo sapien
ttcagggcttttaataatcgaggtc

SEQ ID NO: 1344229 - DNA, 25 bp, Homo sapien
aagacactgtgcctgtaattaacta

SEQ ID NO: 1344230 - DNA, 25 bp, Homo sapien
agacactgtgcctgtaattaactaa

SEQ ID NO: 1344231 - DNA, 25 bp, Homo sapien
gcaagacactgtgcctgtaattaac

SEQ ID NO: 1344232 - DNA, 25 bp, Homo sapien
gagcaagacactgtgcctgtaatta

SEQ ID NO: 1344233 - DNA, 25 bp, Homo sapien
tactagctcggtgacctaaatcaat

SEQ ID NO: 1344234 - DNA, 25 bp, Homo sapien
cacagaaatcggaatgcaggaccta

SEQ ID NO: 1344235 - DNA, 25 bp, Homo sapien
gccttcagattgaaatggacctcag

SEQ ID NO: 1344236 - DNA, 25 bp, Homo sapien
tggacctcagttgaatgcagagaat

SEQ ID NO: 1344237 - DNA, 25 bp, Homo sapien
caccttgctaagaacctgaataact

SEQ ID NO: 1344238 - DNA, 25 bp, Homo sapien
tccactctcgcacagtagaatgcct

SEQ ID NO: 1344239 - DNA, 25 bp, Homo sapien
tacactctgcctaaagggaatgggc

SEQ ID NO: 1344240 - DNA, 25 bp, Homo sapien
caaatagacaattcctggcctcata

SEQ ID NO: 1344241 - DNA, 25 bp, Homo sapien
cacctgacccaacagtggttatctt

SEQ ID NO: 1344242 - DNA, 25 bp, Homo sapien
gttttgaaaactcaggagagttgtg

SEQ ID NO: 1344243 - DNA, 25 bp, Homo sapien
taattttctacgatgaatgtcatca

SEQ ID NO: 1344244 - DNA, 25 bp, Homo sapien
tggggccacatacgcacatcaccat

SEQ ID NO: 1344245 - DNA, 25 bp, Homo sapien
catcacttcatatttttagaagata

SEQ ID NO: 1344246 - DNA, 25 bp, Homo sapien
tatggcaagttacaatgaatgaaga

SEQ ID NO: 1344247 - DNA, 25 bp, Homo sapien
gaagatatatcaacaacagtaattc

SEQ ID NO: 1344248 - DNA, 25 bp, Homo sapien
catatttttagaagatatatcaaca

SEQ ID NO: 1344249 - DNA, 25 bp, Homo sapien
tgagcatttttcaccttgactggag

SEQ ID NO: 1344250 - DNA, 25 bp, Homo sapien
atggcttccgccagagggctccatc

SEQ ID NO: 1344251 - DNA, 25 bp, Homo sapien
tctgcctatctccatagctgatggc

SEQ ID NO: 1344252 - DNA, 25 bp, Homo sapien
tttcaccttgactggagcattgtga

SEQ ID NO: 1344253 - DNA, 25 bp, Homo sapien
tgttggccaactttgatacagacca

SEQ ID NO: 1344254 - DNA, 25 bp, Homo sapien
taaaatagattttagagccaggcac

SEQ ID NO: 1344255 - DNA, 25 bp, Homo sapien
gccaggcactcccaagttgaaatta

SEQ ID NO: 1344256 - DNA, 25 bp, Homo sapien
aaacttggctactttactctgggca

SEQ ID NO: 1344257 - DNA, 25 bp, Homo sapien
ttcctaacatcacagcaaggtgtaa

SEQ ID NO: 1344258 - DNA, 25 bp, Homo sapien
taacatcacagcaaggtgtaaagga

SEQ ID NO: 1344259 - DNA, 25 bp, Homo sapien
catcacagcaaggtgtaaaggagta

SEQ ID NO: 1344260 - DNA, 25 bp, Homo sapien
tcacagcaaggtgtaaaggagtatt

SEQ ID NO: 1344261 - DNA, 25 bp, Homo sapien
tacaatgactaccagcccagtttgc

SEQ ID NO: 1344262 - DNA, 25 bp, Homo sapien
caggaaattgcaagtactagtacag

SEQ ID NO: 1344263 - DNA, 25 bp, Homo sapien
cacaacagcccgagtgagcctttta

SEQ ID NO: 1344264 - DNA, 25 bp, Homo sapien
ccagtgcttttgaaccaccaatgaa

SEQ ID NO: 1344265 - DNA, 25 bp, Homo sapien
caagatgggatctgtatgtgagcaa

SEQ ID NO: 1344266 - DNA, 25 bp, Homo sapien
caacctggtggcaggcaaaatcaca

SEQ ID NO: 1344267 - DNA, 25 bp, Homo sapien
taaaaagcctacgatccaatggaat

SEQ ID NO: 1344268 - DNA, 25 bp, Homo sapien
caaaaatcggctgttgagaagtcac

SEQ ID NO: 1344269 - DNA, 25 bp, Homo sapien
gatcatgatttaccgaacggcccgg

SEQ ID NO: 1344270 - DNA, 25 bp, Homo sapien
ggatacattcctttgcacccacaag

SEQ ID NO: 1344271 - DNA, 25 bp, Homo sapien
tgaccactggcacgctattactgag

SEQ ID NO: 1344272 - DNA, 25 bp, Homo sapien
gaatcagcaaatcgaaggcctgtct

SEQ ID NO: 1344273 - DNA, 25 bp, Homo sapien
cctggggaggcacaccctaggctcg

SEQ ID NO: 1344274 - DNA, 25 bp, Homo sapien
gaagcctggggaggcacaccctagg

SEQ ID NO: 1344275 - DNA, 25 bp, Homo sapien
ggaggcacaccctaggctcggggaa

SEQ ID NO: 1344276 - DNA, 25 bp, Homo sapien
gaggcacaccctaggctcggggaag

SEQ ID NO: 1344277 - DNA, 25 bp, Homo sapien
ttggcagtcacggaggaattgtgca

SEQ ID NO: 1344278 - DNA, 25 bp, Homo sapien
tctggtaaaggtaccgccgagggca

SEQ ID NO: 1344279 - DNA, 25 bp, Homo sapien
tctttctgcccgatattgtgcgtgc

SEQ ID NO: 1344280 - DNA, 25 bp, Homo sapien
ttgaagacgcactcgtgcaccgggt

SEQ ID NO: 1344281 - DNA, 25 bp, Homo sapien
gcaagggggggaatcgggaggctca

SEQ ID NO: 1344282 - DNA, 25 bp, Homo sapien
cacaaggcgattagagcggtggcca

SEQ ID NO: 1344283 - DNA, 25 bp, Homo sapien
gctggcgacggagctggcgctgcgg

SEQ ID NO: 1344284 - DNA, 25 bp, Homo sapien
ctgcggcggcacaaggcgattagag

SEQ ID NO: 1344285 - DNA, 25 bp, Homo sapien
gcggtggccaagagcctccagcgca

SEQ ID NO: 1344286 - DNA, 25 bp, Homo sapien
gacaccaggatctcagtctcgccgt

SEQ ID NO: 1344287 - DNA, 25 bp, Homo sapien
gaagctagaactcaggtgcccacga

SEQ ID NO: 1344288 - DNA, 25 bp, Homo sapien
aaaaacagggcacggccatcttcct

SEQ ID NO: 1344289 - DNA, 25 bp, Homo sapien
cgctgccttacaccgaaaaacaggg

SEQ ID NO: 1344290 - DNA, 25 bp, Homo sapien
ccacaccaagacttattttttgttg

SEQ ID NO: 1344291 - DNA, 25 bp, Homo sapien
cactgccaaagagtcaatggcacaa

SEQ ID NO: 1344292 - DNA, 25 bp, Homo sapien
tctttgatgatacctgcccattcgt

SEQ ID NO: 1344293 - DNA, 25 bp, Homo sapien
actgttctgaaaatgggtccctggg

SEQ ID NO: 1344294 - DNA, 25 bp, Homo sapien
cagaagttaggaacttcttcttagg

SEQ ID NO: 1344295 - DNA, 25 bp, Homo sapien
attgtaacttctgcatgcctccttg

SEQ ID NO: 1344296 - DNA, 25 bp, Homo sapien
ttgtctggtctcaactaatccttgg

SEQ ID NO: 1344297 - DNA, 25 bp, Homo sapien
caaacccatcgttctgaattaggtg

SEQ ID NO: 1344298 - DNA, 25 bp, Homo sapien
tgatcattgctgtatgcacagtgcc

SEQ ID NO: 1344299 - DNA, 25 bp, Homo sapien
cagtgaatctctcggtgtttctctc

SEQ ID NO: 1344300 - DNA, 25 bp, Homo sapien
tgcagagataagtcttcaagagtgg

SEQ ID NO: 1344301 - DNA, 25 bp, Homo sapien
ttttcagtgaatctctcggtgtttc

SEQ ID NO: 1344302 - DNA, 25 bp, Homo sapien
gagataagtcttcaagagtggcccc

SEQ ID NO: 1344303 - DNA, 25 bp, Homo sapien
tttttcagctgttggcatgccctgc

SEQ ID NO: 1344304 - DNA, 25 bp, Homo sapien
cccatctcggataactttctcagga

SEQ ID NO: 1344305 - DNA, 25 bp, Homo sapien
ggccaactgagaggataagtgtaat

SEQ ID NO: 1344306 - DNA, 25 bp, Homo sapien
gggatctttccccatctcggataac

SEQ ID NO: 1344307 - DNA, 25 bp, Homo sapien
tacttaggtagtgggttgagttgat

SEQ ID NO: 1344308 - DNA, 25 bp, Homo sapien
cttcagagtacttaggtagtgggtt

SEQ ID NO: 1344309 - DNA, 25 bp, Homo sapien
agtacttaggtagtgggttgagttg

SEQ ID NO: 1344310 - DNA, 25 bp, Homo sapien
tcagagtacttaggtagtgggttga

SEQ ID NO: 1344311 - DNA, 25 bp, Homo sapien
gctcagtggtcttccatctacactg

SEQ ID NO: 1344312 - DNA, 25 bp, Homo sapien
gcccctctatagctcagtggtcttc

SEQ ID NO: 1344313 - DNA, 25 bp, Homo sapien
cagatgcccctctatagctcagtgg

SEQ ID NO: 1344314 - DNA, 25 bp, Homo sapien
ttacagatgcccctctatagctcag

SEQ ID NO: 1344315 - DNA, 25 bp, Homo sapien
caattaggtcggagagttaacaaca

SEQ ID NO: 1344316 - DNA, 25 bp, Homo sapien
tcaattaggtcggagagttaacaac

SEQ ID NO: 1344317 - DNA, 25 bp, Homo sapien
ttgcctgcattttgatacttgatac

SEQ ID NO: 1344318 - DNA, 25 bp, Homo sapien
aattgcctgcattttgatacttgat

SEQ ID NO: 1344319 - DNA, 25 bp, Homo sapien
cctccatttcccaattgcctgcatt

SEQ ID NO: 1344320 - DNA, 25 bp, Homo sapien
tgcctgcattttgatacttgatact

SEQ ID NO: 1344321 - DNA, 25 bp, Homo sapien
ctgagatctcgcctttcacatccca

SEQ ID NO: 1344322 - DNA, 25 bp, Homo sapien
aggctcatccttccatatgctctgc

SEQ ID NO: 1344323 - DNA, 25 bp, Homo sapien
catcccaaggctcatccttccatat

SEQ ID NO: 1344324 - DNA, 25 bp, Homo sapien
caaggctcatccttccatatgctct

SEQ ID NO: 1344325 - DNA, 25 bp, Homo sapien
ttagatctttagcgaatattttgca

SEQ ID NO: 1344326 - DNA, 25 bp, Homo sapien
gatctttagcgaatattttgcaaca

SEQ ID NO: 1344327 - DNA, 25 bp, Homo sapien
atctttagcgaatattttgcaacaa

SEQ ID NO: 1344328 - DNA, 25 bp, Homo sapien
tagatctttagcgaatattttgcaa

SEQ ID NO: 1344329 - DNA, 25 bp, Homo sapien
ggacacccggcttcgactggttata

SEQ ID NO: 1344330 - DNA, 25 bp, Homo sapien
catgcaggaaaaagacgcctcctca

SEQ ID NO: 1344331 - DNA, 25 bp, Homo sapien
gatccagagcaatggacctccaggg

SEQ ID NO: 1344332 - DNA, 25 bp, Homo sapien
tctttcgcggttcagcatgcaggaa

SEQ ID NO: 1344333 - DNA, 25 bp, Homo sapien
ggcagaagccacgtgaatccaaact

SEQ ID NO: 1344334 - DNA, 25 bp, Homo sapien
gctaagaccactaaagggaatttga

SEQ ID NO: 1344335 - DNA, 25 bp, Homo sapien
taaaaatcagctaagaccactaaag

SEQ ID NO: 1344336 - DNA, 25 bp, Homo sapien
gctgaatgagaaacgggaggtacct

SEQ ID NO: 1344337 - DNA, 25 bp, Homo sapien
tcagaagagtttaaaccagatctct

SEQ ID NO: 1344338 - DNA, 25 bp, Homo sapien
gaaagcaaattatgagtacagtaag

SEQ ID NO: 1344339 - DNA, 25 bp, Homo sapien
tatagtgactctaccaacttgaatt

SEQ ID NO: 1344340 - DNA, 25 bp, Homo sapien
tgcccatttaaataacaggtaataa

SEQ ID NO: 1344341 - DNA, 25 bp, Homo sapien
gaaaggtcgaagctgccgttagctg

SEQ ID NO: 1344342 - DNA, 25 bp, Homo sapien
tgaaaggtcgaagctgccgttagct

SEQ ID NO: 1344343 - DNA, 25 bp, Homo sapien
gtctttttgataactatcaagcatc

SEQ ID NO: 1344344 - DNA, 25 bp, Homo sapien
aaagcccatgctcttcaagtcttag

SEQ ID NO: 1344345 - DNA, 25 bp, Homo sapien
gcccatgctcttcaagtcttagata

SEQ ID NO: 1344346 - DNA, 25 bp, Homo sapien
gcatctaccatgtgtctgaattgtg

SEQ ID NO: 1344347 - DNA, 25 bp, Homo sapien
caggttaggtgaggtcaggccttca

SEQ ID NO: 1344348 - DNA, 25 bp, Homo sapien
tcactgagttgctttataaggcaca

SEQ ID NO: 1344349 - DNA, 25 bp, Homo sapien
ggaacataactggacattctggtca

SEQ ID NO: 1344350 - DNA, 25 bp, Homo sapien
ggttatctgcaaccatgtctcccac

SEQ ID NO: 1344351 - DNA, 25 bp, Homo sapien
gtcatcaaggagtaacaaaagtatt

SEQ ID NO: 1344352 - DNA, 25 bp, Homo sapien
caggaaacagtatgaaactacaaat

SEQ ID NO: 1344353 - DNA, 25 bp, Homo sapien
taaatgacctgattccacagaggag

SEQ ID NO: 1344354 - DNA, 25 bp, Homo sapien
aacttctcttaggaattatccaaag

SEQ ID NO: 1344355 - DNA, 25 bp, Homo sapien
tgcagcaggcgattgttgaaaaatg

SEQ ID NO: 1344356 - DNA, 25 bp, Homo sapien
cagtttaaaacccttattgcacttg

SEQ ID NO: 1344357 - DNA, 25 bp, Homo sapien
tgctgttgtgcagcaggcgattgtt

SEQ ID NO: 1344358 - DNA, 25 bp, Homo sapien
gggcaaactgaacttagtatgctgt

SEQ ID NO: 1344359 - DNA, 25 bp, Homo sapien
cagactaaagatcactagcttgtag

SEQ ID NO: 1344360 - DNA, 25 bp, Homo sapien
ccagagcggcagactaaagatcact

SEQ ID NO: 1344361 - DNA, 25 bp, Homo sapien
aagatcactagcttgtagtcagtca

SEQ ID NO: 1344362 - DNA, 25 bp, Homo sapien
cttgctgccagagcggcagactaaa

SEQ ID NO: 1344363 - DNA, 25 bp, Homo sapien
tgaacttgtatgaggcctgtggccc

SEQ ID NO: 1344364 - DNA, 25 bp, Homo sapien
tcggttgcaggagtggagtcatcat

SEQ ID NO: 1344365 - DNA, 25 bp, Homo sapien
tgtgaaaatgcctcgatggccaggc

SEQ ID NO: 1344366 - DNA, 25 bp, Homo sapien
taagatttaatgacttcgcagctgg

SEQ ID NO: 1344367 - DNA, 25 bp, Homo sapien
tatctttcttgtttcggattggaag

SEQ ID NO: 1344368 - DNA, 25 bp, Homo sapien
cctggtagatcaggtgatttgcctc

SEQ ID NO: 1344369 - DNA, 25 bp, Homo sapien
tctgaatatttgtcacctggtagat

SEQ ID NO: 1344370 - DNA, 25 bp, Homo sapien
gatcaggtgatttgcctctgagtac

SEQ ID NO: 1344371 - DNA, 25 bp, Homo sapien
gaagctaatgtatttaagtaaccaa

SEQ ID NO: 1344372 - DNA, 25 bp, Homo sapien
tggaagtgggttatcagctgctgta

SEQ ID NO: 1344373 - DNA, 25 bp, Homo sapien
caacaaggacgatgaagctaatgta

SEQ ID NO: 1344374 - DNA, 25 bp, Homo sapien
ctgtgtcaacaaggacgatgaagct

SEQ ID NO: 1344375 - DNA, 25 bp, Homo sapien
ctgcctctgagtcactgagactggg

SEQ ID NO: 1344376 - DNA, 25 bp, Homo sapien
tgagtcactgagactgggctgtcca

SEQ ID NO: 1344377 - DNA, 25 bp, Homo sapien
cctctgagtcactgagactgggctg

SEQ ID NO: 1344378 - DNA, 25 bp, Homo sapien
tctgagtcactgagactgggctgtc

SEQ ID NO: 1344379 - DNA, 25 bp, Homo sapien
caaagtgcatgggacggtgaagtgg

SEQ ID NO: 1344380 - DNA, 25 bp, Homo sapien
ttagggcaaagtgcatgggacggtg

SEQ ID NO: 1344381 - DNA, 25 bp, Homo sapien
gatggcttgaagatgcaagtgaaga

SEQ ID NO: 1344382 - DNA, 25 bp, Homo sapien
agtggggagtaggaataagttctct

SEQ ID NO: 1344383 - DNA, 25 bp, Homo sapien
ccaagtggcatcatagcactggggg

SEQ ID NO: 1344384 - DNA, 25 bp, Homo sapien
gtggcatcatagcactgggggagaa

SEQ ID NO: 1344385 - DNA, 25 bp, Homo sapien
aaatgcctggtccacaagctgtccc

SEQ ID NO: 1344386 - DNA, 25 bp, Homo sapien
aatgcctggtccacaagctgtccca

SEQ ID NO: 1344387 - DNA, 25 bp, Homo sapien
gcaaactgataggatctctggtgga

SEQ ID NO: 1344388 - DNA, 25 bp, Homo sapien
gatttaatcttctttgaacctctca

SEQ ID NO: 1344389 - DNA, 25 bp, Homo sapien
aacctctcaacatagggcatgtcac

SEQ ID NO: 1344390 - DNA, 25 bp, Homo sapien
tttttgtggtaactcagagatttaa

SEQ ID NO: 1344391 - DNA, 25 bp, Homo sapien
gtcggtatctttactttgattagca

SEQ ID NO: 1344392 - DNA, 25 bp, Homo sapien
gattcgagaattatttgtagccttt

SEQ ID NO: 1344393 - DNA, 25 bp, Homo sapien
cagtaagctgattgtgtggcacctc

SEQ ID NO: 1344394 - DNA, 25 bp, Homo sapien
agttggtctcttttgtcggtatctt

SEQ ID NO: 1344395 - DNA, 25 bp, Homo sapien
ccaactctggaataagtgcaaaatc

SEQ ID NO: 1344396 - DNA, 25 bp, Homo sapien
gcccaactctggaataagtgcaaaa

SEQ ID NO: 1344397 - DNA, 25 bp, Homo sapien
agatgcccaactctggaataagtgc

SEQ ID NO: 1344398 - DNA, 25 bp, Homo sapien
gatgcccaactctggaataagtgca

SEQ ID NO: 1344399 - DNA, 25 bp, Homo sapien
ccctcagctgttggattggcaagat

SEQ ID NO: 1344400 - DNA, 25 bp, Homo sapien
ctgttggattggcaagatggctgtc

SEQ ID NO: 1344401 - DNA, 25 bp, Homo sapien
cctcagctgttggattggcaagatg

SEQ ID NO: 1344402 - DNA, 25 bp, Homo sapien
ttggattggcaagatggctgtccat

SEQ ID NO: 1344403 - DNA, 25 bp, Homo sapien
tcaccgcaagctcccgggtttacgc

SEQ ID NO: 1344404 - DNA, 25 bp, Homo sapien
gctcaccgcaagctcccgggtttac

SEQ ID NO: 1344405 - DNA, 25 bp, Homo sapien
ctcaccgcaagctcccgggtttacg

SEQ ID NO: 1344406 - DNA, 25 bp, Homo sapien
ggctcaccgcaagctcccgggttta

SEQ ID NO: 1344407 - DNA, 25 bp, Homo sapien
tagtctaggatgcatttcaggcaga

SEQ ID NO: 1344408 - DNA, 25 bp, Homo sapien
caggactggtgactggcataggtgg

SEQ ID NO: 1344409 - DNA, 25 bp, Homo sapien
gtacatctggtagggctaggtttac

SEQ ID NO: 1344410 - DNA, 25 bp, Homo sapien
tcaggcagactaggcagtccagctg

SEQ ID NO: 1344411 - DNA, 25 bp, Homo sapien
gggcttccgttttgtgccaccaatc

SEQ ID NO: 1344412 - DNA, 25 bp, Homo sapien
gccaccaatcactaatttgcacttc

SEQ ID NO: 1344413 - DNA, 25 bp, Homo sapien
gtgccaccaatcactaatttgcact

SEQ ID NO: 1344414 - DNA, 25 bp, Homo sapien
caccaatcactaatttgcacttcat

SEQ ID NO: 1344415 - DNA, 25 bp, Homo sapien
gttgatatatttgtgccttatctct

SEQ ID NO: 1344416 - DNA, 25 bp, Homo sapien
tgatatatttgtgccttatctctat

SEQ ID NO: 1344417 - DNA, 25 bp, Homo sapien
atatatttgtgccttatctctatga

SEQ ID NO: 1344418 - DNA, 25 bp, Homo sapien
atatttgtgccttatctctatgaga

SEQ ID NO: 1344419 - DNA, 25 bp, Homo sapien
ttcaagtcaggctcttgtcgtcatt

SEQ ID NO: 1344420 - DNA, 25 bp, Homo sapien
ggtaactagtcctgttgggcctcaa

SEQ ID NO: 1344421 - DNA, 25 bp, Homo sapien
cccatatggatatcgaaggatcaca

SEQ ID NO: 1344422 - DNA, 25 bp, Homo sapien
caggcatatagggtaactagtcctg

SEQ ID NO: 1344423 - DNA, 25 bp, Homo sapien
agttccatgttgctgaggaggcctc

SEQ ID NO: 1344424 - DNA, 25 bp, Homo sapien
gttccatgttgctgaggaggcctca

SEQ ID NO: 1344425 - DNA, 25 bp, Homo sapien
aggcttatctcattgccaattccca

SEQ ID NO: 1344426 - DNA, 25 bp, Homo sapien
gaagtgtggacttgattcggaaagc

SEQ ID NO: 1344427 - DNA, 25 bp, Homo sapien
tagagggccttaaataacaagttca

SEQ ID NO: 1344428 - DNA, 25 bp, Homo sapien
caggagagatttctagagcatactc

SEQ ID NO: 1344429 - DNA, 25 bp, Homo sapien
ggcagtagatgggtcccctgtcagc

SEQ ID NO: 1344430 - DNA, 25 bp, Homo sapien
cttggatgggctccggtggaaaccg

SEQ ID NO: 1344431 - DNA, 25 bp, Homo sapien
gtggaaaccggggtggcagtagatg

SEQ ID NO: 1344432 - DNA, 25 bp, Homo sapien
ctctgctgcttggatgggctccggt

SEQ ID NO: 1344433 - DNA, 25 bp, Homo sapien
catggtcttgaattggcataggaag

SEQ ID NO: 1344434 - DNA, 25 bp, Homo sapien
cttgaattggcataggaagtacctt

SEQ ID NO: 1344435 - DNA, 25 bp, Homo sapien
gtcttgaattggcataggaagtacc

SEQ ID NO: 1344436 - DNA, 25 bp, Homo sapien
ggtccatggtcttgaattggcatag

SEQ ID NO: 1344437 - DNA, 25 bp, Homo sapien
aatagagcgtataaacagcctctgc

SEQ ID NO: 1344438 - DNA, 25 bp, Homo sapien
ttcaatagagcgtataaacagcctc

SEQ ID NO: 1344439 - DNA, 25 bp, Homo sapien
tacattcaatagagcgtataaacag

SEQ ID NO: 1344440 - DNA, 25 bp, Homo sapien
cacttacattcaatagagcgtataa

SEQ ID NO: 1344441 - DNA, 25 bp, Homo sapien
ttggcaaaaggtgccttttcgttca

SEQ ID NO: 1344442 - DNA, 25 bp, Homo sapien
caaaaggtgccttttcgttcatgaa

SEQ ID NO: 1344443 - DNA, 25 bp, Homo sapien
tttcgttcatgaagcttttaaactg

SEQ ID NO: 1344444 - DNA, 25 bp, Homo sapien
ggtgccttttcgttcatgaagcttt

SEQ ID NO: 1344445 - DNA, 25 bp, Homo sapien
cagaatccagttctgtaccatggca

SEQ ID NO: 1344446 - DNA, 25 bp, Homo sapien
atgccagaatccagttctgtaccat

SEQ ID NO: 1344447 - DNA, 25 bp, Homo sapien
gccagaatccagttctgtaccatgg

SEQ ID NO: 1344448 - DNA, 25 bp, Homo sapien
tcagtctcaatgccagaatccagtt

SEQ ID NO: 1344449 - DNA, 25 bp, Homo sapien
cttccacagtctcctcacagccagc

SEQ ID NO: 1344450 - DNA, 25 bp, Homo sapien
ttgctctgcatctgcatggcttcag

SEQ ID NO: 1344451 - DNA, 25 bp, Homo sapien
ccagcagctgcccgctttgctctgc

SEQ ID NO: 1344452 - DNA, 25 bp, Homo sapien
gctttgctctgcatctgcatggctt

SEQ ID NO: 1344453 - DNA, 25 bp, Homo sapien
caaaagtgctaatgtagccattcat

SEQ ID NO: 1344454 - DNA, 25 bp, Homo sapien
aattatagttgtacgccttagggca

SEQ ID NO: 1344455 - DNA, 25 bp, Homo sapien
gcaccagtgcagatcttagagtatt

SEQ ID NO: 1344456 - DNA, 25 bp, Homo sapien
aagaggcagctctaacatagtgtgc

SEQ ID NO: 1344457 - DNA, 25 bp, Homo sapien
tggtggtacctaaatcatcccttcg

SEQ ID NO: 1344458 - DNA, 25 bp, Homo sapien
gataccactgatcagatggaaggct

SEQ ID NO: 1344459 - DNA, 25 bp, Homo sapien
tgctggctggagcaaaagcagcctt

SEQ ID NO: 1344460 - DNA, 25 bp, Homo sapien
tgaacatgggcactccttttgctaa

SEQ ID NO: 1344461 - DNA, 25 bp, Homo sapien
gctgtgtgacaagcaggctgaacat

SEQ ID NO: 1344462 - DNA, 25 bp, Homo sapien
tgggtggtagcacccatccagctct

SEQ ID NO: 1344463 - DNA, 25 bp, Homo sapien
ccactagcatttggccactggcagc

SEQ ID NO: 1344464 - DNA, 25 bp, Homo sapien
tctgccgttcagattgcaaagcttc

SEQ ID NO: 1344465 - DNA, 25 bp, Homo sapien
taatccagcagttctcccactagca

SEQ ID NO: 1344466 - DNA, 25 bp, Homo sapien
ggctggcgtcaatcctcaaactcct

SEQ ID NO: 1344467 - DNA, 25 bp, Homo sapien
aggctggcgtcaatcctcaaactcc

SEQ ID NO: 1344468 - DNA, 25 bp, Homo sapien
caggctggcgtcaatcctcaaactc

SEQ ID NO: 1344469 - DNA, 25 bp, Homo sapien
ccaggctggcgtcaatcctcaaact

SEQ ID NO: 1344470 - DNA, 25 bp, Homo sapien
gctccacacactagttgttgtggtg

SEQ ID NO: 1344471 - DNA, 25 bp, Homo sapien
tagagggtcaggctagttgtgctcc

SEQ ID NO: 1344472 - DNA, 25 bp, Homo sapien
gggtcaggctagttgtgctccacac

SEQ ID NO: 1344473 - DNA, 25 bp, Homo sapien
cacacactagttgttgtggtgacag

SEQ ID NO: 1344474 - DNA, 25 bp, Homo sapien
cctggaacacctgcctattgaggag

SEQ ID NO: 1344475 - DNA, 25 bp, Homo sapien
tgggcccaagtcacaggtttcctgt

SEQ ID NO: 1344476 - DNA, 25 bp, Homo sapien
tagtagtggctataaccaagggtca

SEQ ID NO: 1344477 - DNA, 25 bp, Homo sapien
cattagtctgatggtggcaagggca

SEQ ID NO: 1344478 - DNA, 25 bp, Homo sapien
tactggattgcaattgtgttgggca

SEQ ID NO: 1344479 - DNA, 25 bp, Homo sapien
tgggcatgtacaatggtgttctttt

SEQ ID NO: 1344480 - DNA, 25 bp, Homo sapien
gtgttgggcatgtacaatggtgttc

SEQ ID NO: 1344481 - DNA, 25 bp, Homo sapien
tcaaatccaggggagcctcttatac

SEQ ID NO: 1344482 - DNA, 25 bp, Homo sapien
tcaaatgggacggaagaaagcaggt

SEQ ID NO: 1344483 - DNA, 25 bp, Homo sapien
gaaagcataagtgcccagagattct

SEQ ID NO: 1344484 - DNA, 25 bp, Homo sapien
tatgtgtgctgaagtggtccgctaa

SEQ ID NO: 1344485 - DNA, 25 bp, Homo sapien
tgtgggcctgttacaatgcaagaga

SEQ ID NO: 1344486 - DNA, 25 bp, Homo sapien
ctttagtacacatcacagaactttc

SEQ ID NO: 1344487 - DNA, 25 bp, Homo sapien
cacatcacagaactttcttgaaaca

SEQ ID NO: 1344488 - DNA, 25 bp, Homo sapien
tagtacacatcacagaactttcttg

SEQ ID NO: 1344489 - DNA, 25 bp, Homo sapien
tcacagaactttcttgaaacacaaa

SEQ ID NO: 1344490 - DNA, 25 bp, Homo sapien
tccagttcctaacaccagtggaatg

SEQ ID NO: 1344491 - DNA, 25 bp, Homo sapien
tggtccctctttggtgaatactttc

SEQ ID NO: 1344492 - DNA, 25 bp, Homo sapien
cagctcttggatgtactggtccctc

SEQ ID NO: 1344493 - DNA, 25 bp, Homo sapien
tggccccgactatgtctccagaacc

SEQ ID NO: 1344494 - DNA, 25 bp, Homo sapien
tcagggtaagtaacaccagtagcta

SEQ ID NO: 1344495 - DNA, 25 bp, Homo sapien
taagatgattcaactactttgtcct

SEQ ID NO: 1344496 - DNA, 25 bp, Homo sapien
gacataataaacactggaaaatgac

SEQ ID NO: 1344497 - DNA, 25 bp, Homo sapien
caggagatccctgctctaaacagtc

SEQ ID NO: 1344498 - DNA, 25 bp, Homo sapien
ggcttatctaagttctggcaagacc

SEQ ID NO: 1344499 - DNA, 25 bp, Homo sapien
cgaacacatttgctgccgactgtag

SEQ ID NO: 1344500 - DNA, 25 bp, Homo sapien
tgtacttagtgctaaacctttcagc

SEQ ID NO: 1344501 - DNA, 25 bp, Homo sapien
tccaattcctcagcatgaacagctt

SEQ ID NO: 1344502 - DNA, 25 bp, Homo sapien
aaacagtgtcacattggctactagg

SEQ ID NO: 1344503 - DNA, 25 bp, Homo sapien
gggatagcaaacagtgtcacattgg

SEQ ID NO: 1344504 - DNA, 25 bp, Homo sapien
tccagggatagcaaacagtgtcaca

SEQ ID NO: 1344505 - DNA, 25 bp, Homo sapien
gtcacattggctactaggtccagaa

SEQ ID NO: 1344506 - DNA, 25 bp, Homo sapien
tttatttttgcagtgctccttgtca

SEQ ID NO: 1344507 - DNA, 25 bp, Homo sapien
ccttgtcatgatgagtgtggaaata

SEQ ID NO: 1344508 - DNA, 25 bp, Homo sapien
tgtcatgatgagtgtggaaataatt

SEQ ID NO: 1344509 - DNA, 25 bp, Homo sapien
tcatgatgagtgtggaaataatttt

SEQ ID NO: 1344510 - DNA, 25 bp, Homo sapien
caaattatggaatactctatagcgg

SEQ ID NO: 1344511 - DNA, 25 bp, Homo sapien
tgtgatcctggcagaaaggcaggtt

SEQ ID NO: 1344512 - DNA, 25 bp, Homo sapien
aaaaagagagtcatggagcttccag

SEQ ID NO: 1344513 - DNA, 25 bp, Homo sapien
gaaacaggacataacagcttctgga

SEQ ID NO: 1344514 - DNA, 25 bp, Homo sapien
caagaacgaagttgtgtgacagtaa

SEQ ID NO: 1344515 - DNA, 25 bp, Homo sapien
agaagatcctatattccttgggtgg

SEQ ID NO: 1344516 - DNA, 25 bp, Homo sapien
caggaatggtaaatcacttacagca

SEQ ID NO: 1344517 - DNA, 25 bp, Homo sapien
tagggacaacctatgtatgccacaa

SEQ ID NO: 1344518 - DNA, 25 bp, Homo sapien
caagttacagtaatctaaacggtgt

SEQ ID NO: 1344519 - DNA, 25 bp, Homo sapien
gagaaatccagaatgggaggcattc

SEQ ID NO: 1344520 - DNA, 25 bp, Homo sapien
taatattgtggttttgtagtgggcc

SEQ ID NO: 1344521 - DNA, 25 bp, Homo sapien
taagaccaggtatgagattatgcca

SEQ ID NO: 1344522 - DNA, 25 bp, Homo sapien
gagaatttgaactacattactggtc

SEQ ID NO: 1344523 - DNA, 25 bp, Homo sapien
gtatcacctataggaagtacacaga

SEQ ID NO: 1344524 - DNA, 25 bp, Homo sapien
ttttagcaaacaacctgacatagtg

SEQ ID NO: 1344525 - DNA, 25 bp, Homo sapien
gaaagcagggatcatggaattagga

SEQ ID NO: 1344526 - DNA, 25 bp, Homo sapien
aattgagaatgaggagtgggctgcc

SEQ ID NO: 1344527 - DNA, 25 bp, Homo sapien
catcctcttgctcattacttccata

SEQ ID NO: 1344528 - DNA, 25 bp, Homo sapien
gagatgctcctattctcatgctgaa

SEQ ID NO: 1344529 - DNA, 25 bp, Homo sapien
ctaagggtaagcaccagagttggcc

SEQ ID NO: 1344530 - DNA, 25 bp, Homo sapien
agttcacagatacttcatcccaggg

SEQ ID NO: 1344531 - DNA, 25 bp, Homo sapien
atcccagggttaggcagatttatct

SEQ ID NO: 1344532 - DNA, 25 bp, Homo sapien
gttcacagatacttcatcccagggt

SEQ ID NO: 1344533 - DNA, 25 bp, Homo sapien
tcccagggttaggcagatttatctt

SEQ ID NO: 1344534 - DNA, 25 bp, Homo sapien
cttagctggacactgcagggttctc

SEQ ID NO: 1344535 - DNA, 25 bp, Homo sapien
cagcttagctggacactgcagggtt

SEQ ID NO: 1344536 - DNA, 25 bp, Homo sapien
tcagcttagctggacactgcagggt

SEQ ID NO: 1344537 - DNA, 25 bp, Homo sapien
gcttagctggacactgcagggttct

SEQ ID NO: 1344538 - DNA, 25 bp, Homo sapien
gctcgcaagtgttagtggaagttgt

SEQ ID NO: 1344539 - DNA, 25 bp, Homo sapien
taagaagtttgaagctcgcaagtgt

SEQ ID NO: 1344540 - DNA, 25 bp, Homo sapien
gaagtttgaagctcgcaagtgttag

SEQ ID NO: 1344541 - DNA, 25 bp, Homo sapien
tgaagctcgcaagtgttagtggaag

SEQ ID NO: 1344542 - DNA, 25 bp, Homo sapien
cacagaaccttgaaggatcaatcac

SEQ ID NO: 1344543 - DNA, 25 bp, Homo sapien
aatccaagaaccaacggaagggctg

SEQ ID NO: 1344544 - DNA, 25 bp, Homo sapien
aagaaccaacggaagggctgagcac

SEQ ID NO: 1344545 - DNA, 25 bp, Homo sapien
aacggaagggctgagcacagaacct

SEQ ID NO: 1344546 - DNA, 25 bp, Homo sapien
gaagaggaattagatggtgccttga

SEQ ID NO: 1344547 - DNA, 25 bp, Homo sapien
ggtgccttgatttctggccatcaaa

SEQ ID NO: 1344548 - DNA, 25 bp, Homo sapien
ggcactggcggctctatcaggctga

SEQ ID NO: 1344549 - DNA, 25 bp, Homo sapien
gctgagattgcttgaggtgttccca

SEQ ID NO: 1344550 - DNA, 25 bp, Homo sapien
gggacctgcctccatgcatgacaaa

SEQ ID NO: 1344551 - DNA, 25 bp, Homo sapien
tcatgagaactgcaccaagtcctgg

SEQ ID NO: 1344552 - DNA, 25 bp, Homo sapien
actgcaccaagtcctggggacctgc

SEQ ID NO: 1344553 - DNA, 25 bp, Homo sapien
gcatgacaaaaacaccttccatcag

SEQ ID NO: 1344554 - DNA, 25 bp, Homo sapien
ttttgaagtataccaattaggtgac

SEQ ID NO: 1344555 - DNA, 25 bp, Homo sapien
tcacccattttagcttggaattaca

SEQ ID NO: 1344556 - DNA, 25 bp, Homo sapien
tctgaaattacaagcctaaagcaat

SEQ ID NO: 1344557 - DNA, 25 bp, Homo sapien
tgacctgttattataaaacgtccaa

SEQ ID NO: 1344558 - DNA, 25 bp, Homo sapien
tactaaatgttgctatcattaaacg

SEQ ID NO: 1344559 - DNA, 25 bp, Homo sapien
ttaaacgatcagaacatggccaggc

SEQ ID NO: 1344560 - DNA, 25 bp, Homo sapien
gctatcattaaacgatcagaacatg

SEQ ID NO: 1344561 - DNA, 25 bp, Homo sapien
tgttgctatcattaaacgatcagaa

SEQ ID NO: 1344562 - DNA, 25 bp, Homo sapien
tggaaaccctatacagtctgctata

SEQ ID NO: 1344563 - DNA, 25 bp, Homo sapien
aactgtgttgctttaaatcactaaa

SEQ ID NO: 1344564 - DNA, 25 bp, Homo sapien
gcatacccagattcatgcacagaaa

SEQ ID NO: 1344565 - DNA, 25 bp, Homo sapien
tttctggctgagatatttaggtgtc

SEQ ID NO: 1344566 - DNA, 25 bp, Homo sapien
gatcctgaacttgccggcctccaga

SEQ ID NO: 1344567 - DNA, 25 bp, Homo sapien
ggcaccctgatcctgaacttgccgg

SEQ ID NO: 1344568 - DNA, 25 bp, Homo sapien
gctggcaccctgatcctgaacttgc

SEQ ID NO: 1344569 - DNA, 25 bp, Homo sapien
accctgatcctgaacttgccggcct

SEQ ID NO: 1344570 - DNA, 25 bp, Homo sapien
gacaaagtccaaactcctaaggctg

SEQ ID NO: 1344571 - DNA, 25 bp, Homo sapien
taccactgaaaacactgaggcttat

SEQ ID NO: 1344572 - DNA, 25 bp, Homo sapien
tcagctgcatggttcgtctaacctt

SEQ ID NO: 1344573 - DNA, 25 bp, Homo sapien
tgttatcttggtaaacggcacaatc

SEQ ID NO: 1344574 - DNA, 25 bp, Homo sapien
tgctcatatactccctgccctttgg

SEQ ID NO: 1344575 - DNA, 25 bp, Homo sapien
cctctcgaatgccttccttgaccac

SEQ ID NO: 1344576 - DNA, 25 bp, Homo sapien
tatttacccctctgcactgtaactg

SEQ ID NO: 1344577 - DNA, 25 bp, Homo sapien
gctgctgctacaacttgttaaaata

SEQ ID NO: 1344578 - DNA, 25 bp, Homo sapien
gactattctcatataaaaggaaagg

SEQ ID NO: 1344579 - DNA, 25 bp, Homo sapien
ggactattctcatataaaaggaaag

SEQ ID NO: 1344580 - DNA, 25 bp, Homo sapien
cttagcctgatgcttgaagaatgct

SEQ ID NO: 1344581 - DNA, 25 bp, Homo sapien
agttttagtttcttctccctcatat

SEQ ID NO: 1344582 - DNA, 25 bp, Homo sapien
ctgagttttagtttcttctccctca

SEQ ID NO: 1344583 - DNA, 25 bp, Homo sapien
gagttttagtttcttctccctcata

SEQ ID NO: 1344584 - DNA, 25 bp, Homo sapien
tgagttttagtttcttctccctcat

SEQ ID NO: 1344585 - DNA, 25 bp, Homo sapien
gaagaaggagattgattgggcagca

SEQ ID NO: 1344586 - DNA, 25 bp, Homo sapien
cttcagcagggaaatatacggagta

SEQ ID NO: 1344587 - DNA, 25 bp, Homo sapien
ggaaatatacggagtagaagaagga

SEQ ID NO: 1344588 - DNA, 25 bp, Homo sapien
cagcagggaaatatacggagtagaa

SEQ ID NO: 1344589 - DNA, 25 bp, Homo sapien
ccgagtcaatcaacacatggaaagt

SEQ ID NO: 1344590 - DNA, 25 bp, Homo sapien
tgtttgcccaaatgacctggcttgc

SEQ ID NO: 1344591 - DNA, 25 bp, Homo sapien
taagcagggattagagtcacaaact

SEQ ID NO: 1344592 - DNA, 25 bp, Homo sapien
tctaaattgggtagttcgagtgacc

SEQ ID NO: 1344593 - DNA, 25 bp, Homo sapien
tcttctctgttcagcacacgatagg

SEQ ID NO: 1344594 - DNA, 25 bp, Homo sapien
taatgctgctcacgagtacctccat

SEQ ID NO: 1344595 - DNA, 25 bp, Homo sapien
cacgataggtttgtacttgcccaca

SEQ ID NO: 1344596 - DNA, 25 bp, Homo sapien
tactgttgagattctggtgtacaca

SEQ ID NO: 1344597 - DNA, 25 bp, Homo sapien
ttttttatgacactccaaggatgcc

SEQ ID NO: 1344598 - DNA, 25 bp, Homo sapien
ttttagttccatgctaagcccacag

SEQ ID NO: 1344599 - DNA, 25 bp, Homo sapien
tttttatcactctaactgcgcagct

SEQ ID NO: 1344600 - DNA, 25 bp, Homo sapien
tcatggtgaatcagaaggcctacct

SEQ ID NO: 1344601 - DNA, 25 bp, Homo sapien
gctccacatcaaggttgaggaacac

SEQ ID NO: 1344602 - DNA, 25 bp, Homo sapien
gagctggatgcatagttgtttgtgt

SEQ ID NO: 1344603 - DNA, 25 bp, Homo sapien
gcatagttgtttgtgtggtacctga

SEQ ID NO: 1344604 - DNA, 25 bp, Homo sapien
ctttccaaatggtcgctccacatca

SEQ ID NO: 1344605 - DNA, 25 bp, Homo sapien
catcaaatacgacttgcaggcagag

SEQ ID NO: 1344606 - DNA, 25 bp, Homo sapien
gcatcaaatacgacttgcaggcaga

SEQ ID NO: 1344607 - DNA, 25 bp, Homo sapien
ggctctcagaaccatgaggaaacag

SEQ ID NO: 1344608 - DNA, 25 bp, Homo sapien
tttgttccacacgtagagcctcctg

SEQ ID NO: 1344609 - DNA, 25 bp, Homo sapien
ctgaaaggtcctagtccccagggat

SEQ ID NO: 1344610 - DNA, 25 bp, Homo sapien
aaacagccatatccctggaagtaga

SEQ ID NO: 1344611 - DNA, 25 bp, Homo sapien
ttccagatattctcttatgaacctc

SEQ ID NO: 1344612 - DNA, 25 bp, Homo sapien
ggctctcacagaaggatttcttaac

SEQ ID NO: 1344613 - DNA, 25 bp, Homo sapien
tgcagttccttaaatcatagaggct

SEQ ID NO: 1344614 - DNA, 25 bp, Homo sapien
taaccaaacgtggaaagctttgcag

SEQ ID NO: 1344615 - DNA, 25 bp, Homo sapien
gtaattacattgacttagttccagt

SEQ ID NO: 1344616 - DNA, 25 bp, Homo sapien
gcagggcacagagcgatgtttcgat

SEQ ID NO: 1344617 - DNA, 25 bp, Homo sapien
gatctggtcctaggcctagaacccc

SEQ ID NO: 1344618 - DNA, 25 bp, Homo sapien
caattgtacatattcgcagggcaca

SEQ ID NO: 1344619 - DNA, 25 bp, Homo sapien
ctcaggcacaagtcaattaaagggt

SEQ ID NO: 1344620 - DNA, 25 bp, Homo sapien
tttgttatgcacatgattatggaat

SEQ ID NO: 1344621 - DNA, 25 bp, Homo sapien
catcatgttgaaaatcggaaaagag

SEQ ID NO: 1344622 - DNA, 25 bp, Homo sapien
agagcaactctcatatttatattaa

SEQ ID NO: 1344623 - DNA, 25 bp, Homo sapien
taaagtattcctgacgtgagttgac

SEQ ID NO: 1344624 - DNA, 25 bp, Homo sapien
tcaaagataaatgcagtcggtccct

SEQ ID NO: 1344625 - DNA, 25 bp, Homo sapien
gaatgccagcaaaagtctaacgtac

SEQ ID NO: 1344626 - DNA, 25 bp, Homo sapien
tctccacagtattgaagaccagcct

SEQ ID NO: 1344627 - DNA, 25 bp, Homo sapien
cagactagccatgacttgaatgcca

SEQ ID NO: 1344628 - DNA, 25 bp, Homo sapien
tcttgggatatatacagcactaggt

SEQ ID NO: 1344629 - DNA, 25 bp, Homo sapien
taaattggctcgatcataacctatg

SEQ ID NO: 1344630 - DNA, 25 bp, Homo sapien
tgtcagcactttgttgcaactcaga

SEQ ID NO: 1344631 - DNA, 25 bp, Homo sapien
gaaaagtcttatggactaggccaca

SEQ ID NO: 1344632 - DNA, 25 bp, Homo sapien
tgccttgccaatgtgtactgtcctg

SEQ ID NO: 1344633 - DNA, 25 bp, Homo sapien
gactagaacttagggtcacaggacc

SEQ ID NO: 1344634 - DNA, 25 bp, Homo sapien
tatacccaatgagatgacctacagg

SEQ ID NO: 1344635 - DNA, 25 bp, Homo sapien
tgtgcacaaatacgtcaagcttagc

SEQ ID NO: 1344636 - DNA, 25 bp, Homo sapien
tgacagaaagcgagagaggcaatga

SEQ ID NO: 1344637 - DNA, 25 bp, Homo sapien
tcagctacgaatggcagactcaaca

SEQ ID NO: 1344638 - DNA, 25 bp, Homo sapien
cggtccttacatagcattctgaaaa

SEQ ID NO: 1344639 - DNA, 25 bp, Homo sapien
caatgcataaacagtggcatgccag

SEQ ID NO: 1344640 - DNA, 25 bp, Homo sapien
attagataatgagataggctgccct

SEQ ID NO: 1344641 - DNA, 25 bp, Homo sapien
gtccatcattagagcagctggagac

SEQ ID NO: 1344642 - DNA, 25 bp, Homo sapien
tgtccatcattagagcagctggaga

SEQ ID NO: 1344643 - DNA, 25 bp, Homo sapien
agataatgagataggctgccctttc

SEQ ID NO: 1344644 - DNA, 25 bp, Homo sapien
ggtaaacccaaggatccaagatctg

SEQ ID NO: 1344645 - DNA, 25 bp, Homo sapien
gcttctccgtgtgtgtcttgcagtg

SEQ ID NO: 1344646 - DNA, 25 bp, Homo sapien
tggcaaaactttcgaagaaggatct

SEQ ID NO: 1344647 - DNA, 25 bp, Homo sapien
tcagtgaagccaggcgaacagctat

SEQ ID NO: 1344648 - DNA, 25 bp, Homo sapien
tagactgctccagaagttacagcca

SEQ ID NO: 1344649 - DNA, 25 bp, Homo sapien
ttgcagaatcaacgccacagtctta

SEQ ID NO: 1344650 - DNA, 25 bp, Homo sapien
tgccaccttgagaaaataaaacctg

SEQ ID NO: 1344651 - DNA, 25 bp, Homo sapien
aaacctgtgtggaattctcacctac

SEQ ID NO: 1344652 - DNA, 25 bp, Homo sapien
tgctcatggacatagttattttcac

SEQ ID NO: 1344653 - DNA, 25 bp, Homo sapien
tcatggacatagttattttcactgg

SEQ ID NO: 1344654 - DNA, 25 bp, Homo sapien
gctcatggacatagttattttcact

SEQ ID NO: 1344655 - DNA, 25 bp, Homo sapien
ttattttcactggatcctatgtgct

SEQ ID NO: 1344656 - DNA, 25 bp, Homo sapien
caggactttggctgtgcagcctgaa

SEQ ID NO: 1344657 - DNA, 25 bp, Homo sapien
cacagttggttgtttgcaacccaga

SEQ ID NO: 1344658 - DNA, 25 bp, Homo sapien
ctacatatgctctttgcacttggag

SEQ ID NO: 1344659 - DNA, 25 bp, Homo sapien
gcagcctgaagttcatcatcaagaa

SEQ ID NO: 1344660 - DNA, 25 bp, Homo sapien
cacatctggttcaatattttccgtg

SEQ ID NO: 1344661 - DNA, 25 bp, Homo sapien
tctctcaccgattctaggccaagct

SEQ ID NO: 1344662 - DNA, 25 bp, Homo sapien
cgattctaggccaagctacttccca

SEQ ID NO: 1344663 - DNA, 25 bp, Homo sapien
tttccgtggtgcatctgcacagatc

SEQ ID NO: 1344664 - DNA, 25 bp, Homo sapien
agcagagtggatttggccacattca

SEQ ID NO: 1344665 - DNA, 25 bp, Homo sapien
cccagggacttctggtcaaagagga

SEQ ID NO: 1344666 - DNA, 25 bp, Homo sapien
caacactctgtggtcacttgggaag

SEQ ID NO: 1344667 - DNA, 25 bp, Homo sapien
tctcaagatttgaagccaaaaaact

SEQ ID NO: 1344668 - DNA, 25 bp, Homo sapien
tcctatctcaggattagcgaaccct

SEQ ID NO: 1344669 - DNA, 25 bp, Homo sapien
cctgcttgagtgctacaagggtaag

SEQ ID NO: 1344670 - DNA, 25 bp, Homo sapien
gctgagcttccggatcccactgact

SEQ ID NO: 1344671 - DNA, 25 bp, Homo sapien
ccactgactgtcgttcgggcacttc

SEQ ID NO: 1344672 - DNA, 25 bp, Homo sapien
gaaccttgaaggcacccataggtcg

SEQ ID NO: 1344673 - DNA, 25 bp, Homo sapien
taggtcgcgcagtctttcagaagct

SEQ ID NO: 1344674 - DNA, 25 bp, Homo sapien
ggctgaggaggcaactcgtatcttt

SEQ ID NO: 1344675 - DNA, 25 bp, Homo sapien
tagagggtcaagcaccatggcgaaa

SEQ ID NO: 1344676 - DNA, 25 bp, Homo sapien
tcagcgctctgcggttgcaaacaca

SEQ ID NO: 1344677 - DNA, 25 bp, Homo sapien
cagcgctctgcggttgcaaacacac

SEQ ID NO: 1344678 - DNA, 25 bp, Homo sapien
tagcaaagtcttaggttcccgctta

SEQ ID NO: 1344679 - DNA, 25 bp, Homo sapien
ttaggttcccgcttactcgcacacg

SEQ ID NO: 1344680 - DNA, 25 bp, Homo sapien
tactcgcacacgcatcctgacttcc

SEQ ID NO: 1344681 - DNA, 25 bp, Homo sapien
tgccacttagcaaagtcttaggttc

SEQ ID NO: 1344682 - DNA, 25 bp, Homo sapien
cataagctgaatggccgtctcggtc

SEQ ID NO: 1344683 - DNA, 25 bp, Homo sapien
tcagcccgaaaaaggtgcagagccg

SEQ ID NO: 1344684 - DNA, 25 bp, Homo sapien
tatgcgaagagctagtcccgttgcc

SEQ ID NO: 1344685 - DNA, 25 bp, Homo sapien
cgaaaacagtcatggtcagcccgaa

SEQ ID NO: 1344686 - DNA, 25 bp, Homo sapien
gaggcgggtgcagaagggggcatcc

SEQ ID NO: 1344687 - DNA, 25 bp, Homo sapien
ctcgggcgcccacatgcctgtgtag

SEQ ID NO: 1344688 - DNA, 25 bp, Homo sapien
cgggcgcccacatgcctgtgtagga

SEQ ID NO: 1344689 - DNA, 25 bp, Homo sapien
taggagtggttgaggcgggtgcaga

SEQ ID NO: 1344690 - DNA, 25 bp, Homo sapien
gaggggatggcgtccagagagccgc

SEQ ID NO: 1344691 - DNA, 25 bp, Homo sapien
tgaggaggggatggcgtccagagag

SEQ ID NO: 1344692 - DNA, 25 bp, Homo sapien
cggaggtcggcgtttaccgcggctg

SEQ ID NO: 1344693 - DNA, 25 bp, Homo sapien
gatggcgtccagagagccgcagcgg

SEQ ID NO: 1344694 - DNA, 25 bp, Homo sapien
catggtgcggggcgcagccgccgcc

SEQ ID NO: 1344695 - DNA, 25 bp, Homo sapien
gccccccatggtgcggggcgcagcc

SEQ ID NO: 1344696 - DNA, 25 bp, Homo sapien
ctgccccccatggtgcggggcgcag

SEQ ID NO: 1344697 - DNA, 25 bp, Homo sapien
cccatggtgcggggcgcagccgccg

SEQ ID NO: 1344698 - DNA, 25 bp, Homo sapien
agggctcactggcccgggagggagc

SEQ ID NO: 1344699 - DNA, 25 bp, Homo sapien
ggcgccagggctcactggcccggga

SEQ ID NO: 1344700 - DNA, 25 bp, Homo sapien
gcggcgccagggctcactggcccgg

SEQ ID NO: 1344701 - DNA, 25 bp, Homo sapien
atggccacgggaaggacagcctcag

SEQ ID NO: 1344702 - DNA, 25 bp, Homo sapien
gaggtagatggacaaggaccctcct

SEQ ID NO: 1344703 - DNA, 25 bp, Homo sapien
cactcctgcctaggtggcatggcca

SEQ ID NO: 1344704 - DNA, 25 bp, Homo sapien
tgagtcttaagaagtacaggtttcc

SEQ ID NO: 1344705 - DNA, 25 bp, Homo sapien
tctgcgggaactgatgctgctgaag

SEQ ID NO: 1344706 - DNA, 25 bp, Homo sapien
tccttagggtccctgcactcagcgg

SEQ ID NO: 1344707 - DNA, 25 bp, Homo sapien
atgccggagcccaattcactcgagt

SEQ ID NO: 1344708 - DNA, 25 bp, Homo sapien
aagacaccactgttctcacaaacat

SEQ ID NO: 1344709 - DNA, 25 bp, Homo sapien
gattttagtgccacaggtactatgg

SEQ ID NO: 1344710 - DNA, 25 bp, Homo sapien
gatacgcaatactttatgggaggcc

SEQ ID NO: 1344711 - DNA, 25 bp, Homo sapien
tatgggtgcagcctgagaatactga

SEQ ID NO: 1344712 - DNA, 25 bp, Homo sapien
tagtttttcacggtcaggtacctgc

SEQ ID NO: 1344713 - DNA, 25 bp, Homo sapien
ggtaacagatattgaccctcatcaa

SEQ ID NO: 1344714 - DNA, 25 bp, Homo sapien
gaagaggcatcagggatggcatcct

SEQ ID NO: 1344715 - DNA, 25 bp, Homo sapien
tatcccaggtataagaaacttgtac

SEQ ID NO: 1344716 - DNA, 25 bp, Homo sapien
agctagtgtataggttctgtgcacc

SEQ ID NO: 1344717 - DNA, 25 bp, Homo sapien
tctagtttatttctaacaaacacca

SEQ ID NO: 1344718 - DNA, 25 bp, Homo sapien
atctctagtttatttctaacaaaca

SEQ ID NO: 1344719 - DNA, 25 bp, Homo sapien
tctctagtttatttctaacaaacac

SEQ ID NO: 1344720 - DNA, 25 bp, Homo sapien
gagtaaaagttcttgtgcaacctac

SEQ ID NO: 1344721 - DNA, 25 bp, Homo sapien
gcaacctacataaacgcagcaaaga

SEQ ID NO: 1344722 - DNA, 25 bp, Homo sapien
taaattgcagcagacaatgttacgg

SEQ ID NO: 1344723 - DNA, 25 bp, Homo sapien
agtctgaggcacaattacaagtgag

SEQ ID NO: 1344724 - DNA, 25 bp, Homo sapien
ctggaaatactgttaagagaaacct

SEQ ID NO: 1344725 - DNA, 25 bp, Homo sapien
taaggcacccttagcatagggaatt

SEQ ID NO: 1344726 - DNA, 25 bp, Homo sapien
taggtaatcctgtcttagccaatgg

SEQ ID NO: 1344727 - DNA, 25 bp, Homo sapien
tgccccaaattatgtgtcagaaagg

SEQ ID NO: 1344728 - DNA, 25 bp, Homo sapien
caagcaaccgtatcagcagagaaaa

SEQ ID NO: 1344729 - DNA, 25 bp, Homo sapien
tgatccagatgatgacctgtggcgt

SEQ ID NO: 1344730 - DNA, 25 bp, Homo sapien
ccaatccctgtgacacggtgtagaa

SEQ ID NO: 1344731 - DNA, 25 bp, Homo sapien
gacataatggagagagtaggcattc

SEQ ID NO: 1344732 - DNA, 25 bp, Homo sapien
ggaagtgtgactaaaccaatccctg

SEQ ID NO: 1344733 - DNA, 25 bp, Homo sapien
tctaggtcacacaagatgattgtac

SEQ ID NO: 1344734 - DNA, 25 bp, Homo sapien
tcagggttgtttagtgttttcacca

SEQ ID NO: 1344735 - DNA, 25 bp, Homo sapien
aagacagaaataaccgagagttggc

SEQ ID NO: 1344736 - DNA, 25 bp, Homo sapien
gagataatcctaccactgaacccag

SEQ ID NO: 1344737 - DNA, 25 bp, Homo sapien
gacagatgacagttgcattcttcca

SEQ ID NO: 1344738 - DNA, 25 bp, Homo sapien
aattacttcgacatacagcttctga

SEQ ID NO: 1344739 - DNA, 25 bp, Homo sapien
gaagatgatgaacttgaataagatc

SEQ ID NO: 1344740 - DNA, 25 bp, Homo sapien
gaagaagatctagaacgacttctct

SEQ ID NO: 1344741 - DNA, 25 bp, Homo sapien
tttttgcgatcaccagatgaagaag

SEQ ID NO: 1344742 - DNA, 25 bp, Homo sapien
cgggtgaccgtgatcttgttcgtct

SEQ ID NO: 1344743 - DNA, 25 bp, Homo sapien
ggaactacatccttccatttgagga

SEQ ID NO: 1344744 - DNA, 25 bp, Homo sapien
tatcagatagctccaaaaataaaca

SEQ ID NO: 1344745 - DNA, 25 bp, Homo sapien
gaagacttctggatcaaccatgaaa

SEQ ID NO: 1344746 - DNA, 25 bp, Homo sapien
tactgcttattcaacagaagacttc

SEQ ID NO: 1344747 - DNA, 25 bp, Homo sapien
agaattctttggaaagttacaagca

SEQ ID NO: 1344748 - DNA, 25 bp, Homo sapien
gagaattctttggaaagttacaagc

SEQ ID NO: 1344749 - DNA, 25 bp, Homo sapien
cagaaagcccaaaaggagaattctt

SEQ ID NO: 1344750 - DNA, 25 bp, Homo sapien
ccagaaagcccaaaaggagaattct

SEQ ID NO: 1344751 - DNA, 25 bp, Homo sapien
gatgtgactacatgcaacctgaaac

SEQ ID NO: 1344752 - DNA, 25 bp, Homo sapien
tagagatgtggcgataagacttggc

SEQ ID NO: 1344753 - DNA, 25 bp, Homo sapien
gaaacaactgccgtgcaaaacagga

SEQ ID NO: 1344754 - DNA, 25 bp, Homo sapien
catgggaatgtcttggcacactgct

SEQ ID NO: 1344755 - DNA, 25 bp, Homo sapien
aactggaacgagatcttgactgcga

SEQ ID NO: 1344756 - DNA, 25 bp, Homo sapien
ttgatttcgacccacgagatctcga

SEQ ID NO: 1344757 - DNA, 25 bp, Homo sapien
gatctcgaacgttctctggaactgg

SEQ ID NO: 1344758 - DNA, 25 bp, Homo sapien
tcttgactgcgaactggaagaactt

SEQ ID NO: 1344759 - DNA, 25 bp, Homo sapien
ggaccatttaattgagctttgtgat

SEQ ID NO: 1344760 - DNA, 25 bp, Homo sapien
ctggaacaacatggaacgatttttt

SEQ ID NO: 1344761 - DNA, 25 bp, Homo sapien
ttaattgagctttgtgatatgaaca

SEQ ID NO: 1344762 - DNA, 25 bp, Homo sapien
catttaattgagctttgtgatatga

SEQ ID NO: 1344763 - DNA, 25 bp, Homo sapien
gaagctacccagaatacatccaaga

SEQ ID NO: 1344764 - DNA, 25 bp, Homo sapien
gctttcaggctttgtagtgctcaat

SEQ ID NO: 1344765 - DNA, 25 bp, Homo sapien
tagtttacgcctggacttctcaaaa

SEQ ID NO: 1344766 - DNA, 25 bp, Homo sapien
caagggagacatggttcgtacaaat

SEQ ID NO: 1344767 - DNA, 25 bp, Homo sapien
tgactggtgttacccttgacctgta

SEQ ID NO: 1344768 - DNA, 25 bp, Homo sapien
ttgactggtgttacccttgacctgt

SEQ ID NO: 1344769 - DNA, 25 bp, Homo sapien
gactggtgttacccttgacctgtac

SEQ ID NO: 1344770 - DNA, 25 bp, Homo sapien
tttgactggtgttacccttgacctg

SEQ ID NO: 1344771 - DNA, 25 bp, Homo sapien
gagcgacttcgtctattagatttct

SEQ ID NO: 1344772 - DNA, 25 bp, Homo sapien
tggacctagaccttgaacttgaggg

SEQ ID NO: 1344773 - DNA, 25 bp, Homo sapien
gatcgagactttgagcgacttcgtc

SEQ ID NO: 1344774 - DNA, 25 bp, Homo sapien
tgagcgtgatgaagatcgtgaatgt

SEQ ID NO: 1344775 - DNA, 25 bp, Homo sapien
caacttcctttaatatagatgcagg

SEQ ID NO: 1344776 - DNA, 25 bp, Homo sapien
cctttaatatagatgcaggaccaac

SEQ ID NO: 1344777 - DNA, 25 bp, Homo sapien
taatatagatgcaggaccaactgct

SEQ ID NO: 1344778 - DNA, 25 bp, Homo sapien
cttcaacttcctttaatatagatgc

SEQ ID NO: 1344779 - DNA, 25 bp, Homo sapien
ctcatcatattcaccatcagattct

SEQ ID NO: 1344780 - DNA, 25 bp, Homo sapien
cagattcttctctttctatatattc

SEQ ID NO: 1344781 - DNA, 25 bp, Homo sapien
tcatcatattcaccatcagattctt

SEQ ID NO: 1344782 - DNA, 25 bp, Homo sapien
tctttctatatattcaacattttct

SEQ ID NO: 1344783 - DNA, 25 bp, Homo sapien
ctttcattaaaaccaccaccatatc

SEQ ID NO: 1344784 - DNA, 25 bp, Homo sapien
tacttgtagcaagggaagtgagaaa

SEQ ID NO: 1344785 - DNA, 25 bp, Homo sapien
caaatacttgtagcaagggaagtga

SEQ ID NO: 1344786 - DNA, 25 bp, Homo sapien
tcaactgttaccagcaaagacaaat

SEQ ID NO: 1344787 - DNA, 25 bp, Homo sapien
gagaaaggttcaagacaccagaatg

SEQ ID NO: 1344788 - DNA, 25 bp, Homo sapien
agaagtctgagctggagacataaac

SEQ ID NO: 1344789 - DNA, 25 bp, Homo sapien
cataaacttgggttatcatggcaaa

SEQ ID NO: 1344790 - DNA, 25 bp, Homo sapien
gaatcccaacatcagtggccaaaag

SEQ ID NO: 1344791 - DNA, 25 bp, Homo sapien
ccagggatggctgcgaagaatccca

SEQ ID NO: 1344792 - DNA, 25 bp, Homo sapien
ataaggcaggatttgagggttgaaa

SEQ ID NO: 1344793 - DNA, 25 bp, Homo sapien
caatcggtggaaaggcaaaatcact

SEQ ID NO: 1344794 - DNA, 25 bp, Homo sapien
gaataaggcaggatttgagggttga

SEQ ID NO: 1344795 - DNA, 25 bp, Homo sapien
aataaggcaggatttgagggttgaa

SEQ ID NO: 1344796 - DNA, 25 bp, Homo sapien
ttctaatttagcatactttggagta

SEQ ID NO: 1344797 - DNA, 25 bp, Homo sapien
tagcatactttggagtattacacat

SEQ ID NO: 1344798 - DNA, 25 bp, Homo sapien
ttctggcccaattcacattgctgca

SEQ ID NO: 1344799 - DNA, 25 bp, Homo sapien
tattacactctgatcttctggccca

SEQ ID NO: 1344800 - DNA, 25 bp, Homo sapien
tctgcaagtgtctttcctatttcag

SEQ ID NO: 1344801 - DNA, 25 bp, Homo sapien
ccagtcattagcactaaataggcct

SEQ ID NO: 1344802 - DNA, 25 bp, Homo sapien
cattagcactaaataggcctcggct

SEQ ID NO: 1344803 - DNA, 25 bp, Homo sapien
cactaaataggcctcggctcttttc

SEQ ID NO: 1344804 - DNA, 25 bp, Homo sapien
aacagaaaaatcatgcaatatgaac

SEQ ID NO: 1344805 - DNA, 25 bp, Homo sapien
ctgaaaacagaaaaatcatgcaata

SEQ ID NO: 1344806 - DNA, 25 bp, Homo sapien
gaaaacagaaaaatcatgcaatatg

SEQ ID NO: 1344807 - DNA, 25 bp, Homo sapien
aaaacagaaaaatcatgcaatatga

SEQ ID NO: 1344808 - DNA, 25 bp, Homo sapien
cacatcgattacagctggttcttct

SEQ ID NO: 1344809 - DNA, 25 bp, Homo sapien
cccgaccacatcgattacagctggt

SEQ ID NO: 1344810 - DNA, 25 bp, Homo sapien
gaccacatcgattacagctggttct

SEQ ID NO: 1344811 - DNA, 25 bp, Homo sapien
ccgaccacatcgattacagctggtt

SEQ ID NO: 1344812 - DNA, 25 bp, Homo sapien
ctaacacacgtgcttctctgctgca

SEQ ID NO: 1344813 - DNA, 25 bp, Homo sapien
gcatcttaagggctgagtaggcaaa

SEQ ID NO: 1344814 - DNA, 25 bp, Homo sapien
aagcagagccactaacacacgtgct

SEQ ID NO: 1344815 - DNA, 25 bp, Homo sapien
catcttaagggctgagtaggcaaaa

SEQ ID NO: 1344816 - DNA, 25 bp, Homo sapien
cttgcggaggtaatgtcgaggaaac

SEQ ID NO: 1344817 - DNA, 25 bp, Homo sapien
tcgaggaaacgctgaagacatatct

SEQ ID NO: 1344818 - DNA, 25 bp, Homo sapien
gagattgggagccttcttcccgcca

SEQ ID NO: 1344819 - DNA, 25 bp, Homo sapien
gctcccggaaagacctctctcgtga

SEQ ID NO: 1344820 - DNA, 25 bp, Homo sapien
tgtcagggcaaatccagtccccgtc

SEQ ID NO: 1344821 - DNA, 25 bp, Homo sapien
gggcaaatccagtccccgtcactga

SEQ ID NO: 1344822 - DNA, 25 bp, Homo sapien
tcagggcaaatccagtccccgtcac

SEQ ID NO: 1344823 - DNA, 25 bp, Homo sapien
agggcaaatccagtccccgtcactg

SEQ ID NO: 1344824 - DNA, 25 bp, Homo sapien
actaaactcacaggcgccataagga

SEQ ID NO: 1344825 - DNA, 25 bp, Homo sapien
tcagcttgtacgttgttgtccagac

SEQ ID NO: 1344826 - DNA, 25 bp, Homo sapien
ttgataatgagggaactagccagga

SEQ ID NO: 1344827 - DNA, 25 bp, Homo sapien
gactcgcgcctactactgtgtcagg

SEQ ID NO: 1344828 - DNA, 25 bp, Homo sapien
aattatccacttagcaccaggtaca

SEQ ID NO: 1344829 - DNA, 25 bp, Homo sapien
tcaattatccacttagcaccaggta

SEQ ID NO: 1344830 - DNA, 25 bp, Homo sapien
attcaattatccacttagcaccagg

SEQ ID NO: 1344831 - DNA, 25 bp, Homo sapien
tcattcaattatccacttagcacca

SEQ ID NO: 1344832 - DNA, 25 bp, Homo sapien
tatcaccattttttgcaggcagctg

SEQ ID NO: 1344833 - DNA, 25 bp, Homo sapien
cacctgtctggcaatagaagcagca

SEQ ID NO: 1344834 - DNA, 25 bp, Homo sapien
ggagttacccagagaccaggattgt

SEQ ID NO: 1344835 - DNA, 25 bp, Homo sapien
gctgttgaggttctacttctgctgc

SEQ ID NO: 1344836 - DNA, 25 bp, Homo sapien
gggcccactgccatcaatctgctgg

SEQ ID NO: 1344837 - DNA, 25 bp, Homo sapien
gagagagcaggtctgggcccactgc

SEQ ID NO: 1344838 - DNA, 25 bp, Homo sapien
gtctgggcccactgccatcaatctg

SEQ ID NO: 1344839 - DNA, 25 bp, Homo sapien
cccagggccaaccaagagagagcag

SEQ ID NO: 1344840 - DNA, 25 bp, Homo sapien
tatggttctcttctgtgccaccaaa

SEQ ID NO: 1344841 - DNA, 25 bp, Homo sapien
tgctcccaggagtatggttctcttc

SEQ ID NO: 1344842 - DNA, 25 bp, Homo sapien
tgtatgtgtcttctatgctcccagg

SEQ ID NO: 1344843 - DNA, 25 bp, Homo sapien
tctgtgccaccaaaagctataatga

SEQ ID NO: 1344844 - DNA, 25 bp, Homo sapien
ccttgctggaagagcccttggacag

SEQ ID NO: 1344845 - DNA, 25 bp, Homo sapien
tatttccccctacttccttgctgga

SEQ ID NO: 1344846 - DNA, 25 bp, Homo sapien
ataatcatatttccccctacttcct

SEQ ID NO: 1344847 - DNA, 25 bp, Homo sapien
tccttgctggaagagcccttggaca

SEQ ID NO: 1344848 - DNA, 25 bp, Homo sapien
gtgtatgggtgctgagaacaggaat

SEQ ID NO: 1344849 - DNA, 25 bp, Homo sapien
tgtgtgtatgggtgctgagaacagg

SEQ ID NO: 1344850 - DNA, 25 bp, Homo sapien
gtggtgtagagagcaggctggacac

SEQ ID NO: 1344851 - DNA, 25 bp, Homo sapien
ggtggtgtagagagcaggctggaca

SEQ ID NO: 1344852 - DNA, 25 bp, Homo sapien
cctttacgataaaaatccacagtct

SEQ ID NO: 1344853 - DNA, 25 bp, Homo sapien
tcctttacgataaaaatccacagtc

SEQ ID NO: 1344854 - DNA, 25 bp, Homo sapien
cgctgaattgaagaagtgctgactc

SEQ ID NO: 1344855 - DNA, 25 bp, Homo sapien
tgctgatggtaagggtcactggcat

SEQ ID NO: 1344856 - DNA, 25 bp, Homo sapien
gaagaagtgctgactcttttgctga

SEQ ID NO: 1344857 - DNA, 25 bp, Homo sapien
tcttttccttatgcgctgaattgaa

SEQ ID NO: 1344858 - DNA, 25 bp, Homo sapien
cagcagctggagtgtagggtcccaa

SEQ ID NO: 1344859 - DNA, 25 bp, Homo sapien
ggagtgtagggtcccaaatattcat

SEQ ID NO: 1344860 - DNA, 25 bp, Homo sapien
tgatgtgcagcagctggagtgtagg

SEQ ID NO: 1344861 - DNA, 25 bp, Homo sapien
gggtcccaaatattcatgccgtaaa

SEQ ID NO: 1344862 - DNA, 25 bp, Homo sapien
gtccttcattcgagcacataacaag

SEQ ID NO: 1344863 - DNA, 25 bp, Homo sapien
tcgagcacataacaagttccctact

SEQ ID NO: 1344864 - DNA, 25 bp, Homo sapien
tcctctgtccttcattcgagcacat

SEQ ID NO: 1344865 - DNA, 25 bp, Homo sapien
agttccctacttccttaccagatga

SEQ ID NO: 1344866 - DNA, 25 bp, Homo sapien
tgcagtagtgtgtgcttgtagcccc

SEQ ID NO: 1344867 - DNA, 25 bp, Homo sapien
caggaacttagcactgaactgtctg

SEQ ID NO: 1344868 - DNA, 25 bp, Homo sapien
taaaaccaaattcatggccaagtgc

SEQ ID NO: 1344869 - DNA, 25 bp, Homo sapien
taaaagttcaagtgcaacctggaca

SEQ ID NO: 1344870 - DNA, 25 bp, Homo sapien
cctactgttaggaggaagctcatga

SEQ ID NO: 1344871 - DNA, 25 bp, Homo sapien
gaaaggctggcaatatcaacttatc

SEQ ID NO: 1344872 - DNA, 25 bp, Homo sapien
ttaaggcagtcagatctatgttctc

SEQ ID NO: 1344873 - DNA, 25 bp, Homo sapien
taggaatgtgcaaaggcgataagcc

SEQ ID NO: 1344874 - DNA, 25 bp, Homo sapien
caaatgtgatatatagctgaaaata

SEQ ID NO: 1344875 - DNA, 25 bp, Homo sapien
caggtgctccatgacttaagaattg

SEQ ID NO: 1344876 - DNA, 25 bp, Homo sapien
gaaatatccccaatgttcacagtac

SEQ ID NO: 1344877 - DNA, 25 bp, Homo sapien
gactggtggaatattgatccctaca

SEQ ID NO: 1344878 - DNA, 25 bp, Homo sapien
gaattgcaaggtcaaataccactgg

SEQ ID NO: 1344879 - DNA, 25 bp, Homo sapien
tacatgtatttctgcctaatgaggt

SEQ ID NO: 1344880 - DNA, 25 bp, Homo sapien
tattctatgctttgttgctgctcta

SEQ ID NO: 1344881 - DNA, 25 bp, Homo sapien
tgaggaactgtgtcaaaagtcattc

SEQ ID NO: 1344882 - DNA, 25 bp, Homo sapien
gaaacgttccgaattggacttgcca

SEQ ID NO: 1344883 - DNA, 25 bp, Homo sapien
gaagagattattccacgggaggaga

SEQ ID NO: 1344884 - DNA, 25 bp, Homo sapien
ttagacccaagacatgagaccatcc

SEQ ID NO: 1344885 - DNA, 25 bp, Homo sapien
gggacatgctgaattactgtgacag

SEQ ID NO: 1344886 - DNA, 25 bp, Homo sapien
tgtgaaagcctaaactccttgaaga

SEQ ID NO: 1344887 - DNA, 25 bp, Homo sapien
ttagtggtatgaatcagcttgcttc

SEQ ID NO: 1344888 - DNA, 25 bp, Homo sapien
taatatagtaagtttgctagggctc

SEQ ID NO: 1344889 - DNA, 25 bp, Homo sapien
taggagtcaccataaagcatataga

SEQ ID NO: 1344890 - DNA, 25 bp, Homo sapien
tactcagttactagccatcttgttg

SEQ ID NO: 1344891 - DNA, 25 bp, Homo sapien
cacctgctttggccttccagagtgc

SEQ ID NO: 1344892 - DNA, 25 bp, Homo sapien
ggggttacagatgtctgccaccaca

SEQ ID NO: 1344893 - DNA, 25 bp, Homo sapien
gtgatccacctgctttggccttcca

SEQ ID NO: 1344894 - DNA, 25 bp, Homo sapien
gatccacctgctttggccttccaga

SEQ ID NO: 1344895 - DNA, 25 bp, Homo sapien
agccactgcgcaaagccaggatttc

SEQ ID NO: 1344896 - DNA, 25 bp, Homo sapien
cattatgaaggttaacgttgttggg

SEQ ID NO: 1344897 - DNA, 25 bp, Homo sapien
tgttttctctaccagcgagttggat

SEQ ID NO: 1344898 - DNA, 25 bp, Homo sapien
taagcattcttccataggaccaagc

SEQ ID NO: 1344899 - DNA, 25 bp, Homo sapien
caactataatgtgttgtggaaacct

SEQ ID NO: 1344900 - DNA, 25 bp, Homo sapien
tttctgtggcacgactttagctgta

SEQ ID NO: 1344901 - DNA, 25 bp, Homo sapien
tctgtggcacgactttagctgtaca

SEQ ID NO: 1344902 - DNA, 25 bp, Homo sapien
gtggcacgactttagctgtacattt

SEQ ID NO: 1344903 - DNA, 25 bp, Homo sapien
ctgtttctgtggcacgactttagct

SEQ ID NO: 1344904 - DNA, 25 bp, Homo sapien
cagaggtcacctaaatcatatttta

SEQ ID NO: 1344905 - DNA, 25 bp, Homo sapien
ttttatgatagatccaggcaacagg

SEQ ID NO: 1344906 - DNA, 25 bp, Homo sapien
aaacatccagattaactctaccagg

SEQ ID NO: 1344907 - DNA, 25 bp, Homo sapien
tgatcatagtgtcctaaacatccag

SEQ ID NO: 1344908 - DNA, 25 bp, Homo sapien
tactgggacaccacgtagtggagct

SEQ ID NO: 1344909 - DNA, 25 bp, Homo sapien
tgaggcttggaaaccaccacctaaa

SEQ ID NO: 1344910 - DNA, 25 bp, Homo sapien
gaaggaaaatgtggagtgagcccca

SEQ ID NO: 1344911 - DNA, 25 bp, Homo sapien
cccaggatgatttaaatgaagccaa

SEQ ID NO: 1344912 - DNA, 25 bp, Homo sapien
tgcctggctcttacaagcgtttgag

SEQ ID NO: 1344913 - DNA, 25 bp, Homo sapien
tgaataccttcaggtgcccgttgtt

SEQ ID NO: 1344914 - DNA, 25 bp, Homo sapien
taaaggttctcagccaaataacgtg

SEQ ID NO: 1344915 - DNA, 25 bp, Homo sapien
taagaaattacactctgcctggctc

SEQ ID NO: 1344916 - DNA, 25 bp, Homo sapien
aaaaacgtagttacaccacttgcag

SEQ ID NO: 1344917 - DNA, 25 bp, Homo sapien
cctaaggactaggaatgctgctgtg

SEQ ID NO: 1344918 - DNA, 25 bp, Homo sapien
gatttcactctgtccgagggcctaa

SEQ ID NO: 1344919 - DNA, 25 bp, Homo sapien
ggcaacaaaaggagtcccacaagtg

SEQ ID NO: 1344920 - DNA, 25 bp, Homo sapien
ttctgtcacattctatggtaaaaac

SEQ ID NO: 1344921 - DNA, 25 bp, Homo sapien
acaccagactccacaaatttggaat

SEQ ID NO: 1344922 - DNA, 25 bp, Homo sapien
taaaggcaaatacatatagctactg

SEQ ID NO: 1344923 - DNA, 25 bp, Homo sapien
tgtcactcaagaaagtctcttctaa

SEQ ID NO: 1344924 - DNA, 25 bp, Homo sapien
caaaccccattgtcagtgcaggaag

SEQ ID NO: 1344925 - DNA, 25 bp, Homo sapien
tatgcaaaatgctcctgtccacagg

SEQ ID NO: 1344926 - DNA, 25 bp, Homo sapien
tttaactctaggaaagcggtcactg

SEQ ID NO: 1344927 - DNA, 25 bp, Homo sapien
aattctacagaaggcgatcatcccc

SEQ ID NO: 1344928 - DNA, 25 bp, Homo sapien
taattccatactgggctgtacttgg

SEQ ID NO: 1344929 - DNA, 25 bp, Homo sapien
ttattgtagaatggcattcttcagg

SEQ ID NO: 1344930 - DNA, 25 bp, Homo sapien
gagaaaagaacatcagcgctcccgg

SEQ ID NO: 1344931 - DNA, 25 bp, Homo sapien
cagtgtcaacacaaggtaccagcag

SEQ ID NO: 1344932 - DNA, 25 bp, Homo sapien
tgaagctgcaagagtacctacatac

SEQ ID NO: 1344933 - DNA, 25 bp, Homo sapien
ttgaccagaagacctgtgtgcaccc

SEQ ID NO: 1344934 - DNA, 25 bp, Homo sapien
tacataagagggtccttcaggtcct

SEQ ID NO: 1344935 - DNA, 25 bp, Homo sapien
caatgaataactaatcctgggaagc

SEQ ID NO: 1344936 - DNA, 25 bp, Homo sapien
taaactgcagacacctgagaggaaa

SEQ ID NO: 1344937 - DNA, 25 bp, Homo sapien
cctgaagatacagtaagtgacctgc

SEQ ID NO: 1344938 - DNA, 25 bp, Homo sapien
gctgacttagaaatgatgcctgaag

SEQ ID NO: 1344939 - DNA, 25 bp, Homo sapien
gctgaggaactataaaaggctgact

SEQ ID NO: 1344940 - DNA, 25 bp, Homo sapien
gcaagcaattggcttcctgatggga

SEQ ID NO: 1344941 - DNA, 25 bp, Homo sapien
caagcaattggcttcctgatgggaa

SEQ ID NO: 1344942 - DNA, 25 bp, Homo sapien
cagcaagcaattggcttcctgatgg

SEQ ID NO: 1344943 - DNA, 25 bp, Homo sapien
aagcaattggcttcctgatgggaac

SEQ ID NO: 1344944 - DNA, 25 bp, Homo sapien
gtgatattccggtgctaaagctctg

SEQ ID NO: 1344945 - DNA, 25 bp, Homo sapien
aggacatttagtaaatgctctcttg

SEQ ID NO: 1344946 - DNA, 25 bp, Homo sapien
gttatgtgacctactggacattccc

SEQ ID NO: 1344947 - DNA, 25 bp, Homo sapien
aaggccagcggtcaagtacaattct

SEQ ID NO: 1344948 - DNA, 25 bp, Homo sapien
tcccctgcttaagggctttcaatga

SEQ ID NO: 1344949 - DNA, 25 bp, Homo sapien
cttgtcaatcccctgcttaagggct

SEQ ID NO: 1344950 - DNA, 25 bp, Homo sapien
caatcccctgcttaagggctttcaa

SEQ ID NO: 1344951 - DNA, 25 bp, Homo sapien
tcatcttgtcaatcccctgcttaag

SEQ ID NO: 1344952 - DNA, 25 bp, Homo sapien
cacactcggttccacactatttgtc

SEQ ID NO: 1344953 - DNA, 25 bp, Homo sapien
cataatccaggtctttcaagcctct

SEQ ID NO: 1344954 - DNA, 25 bp, Homo sapien
gcctctttgagtttgcacactcggt

SEQ ID NO: 1344955 - DNA, 25 bp, Homo sapien
tgagtttgcacactcggttccacac

SEQ ID NO: 1344956 - DNA, 25 bp, Homo sapien
taagcccaaatttgtctaactggcc

SEQ ID NO: 1344957 - DNA, 25 bp, Homo sapien
gattacacttgctggagagaaaaaa

SEQ ID NO: 1344958 - DNA, 25 bp, Homo sapien
tccctggagtatatcctggaagttt

SEQ ID NO: 1344959 - DNA, 25 bp, Homo sapien
aggaggaggatttgctacattgttc

SEQ ID NO: 1344960 - DNA, 25 bp, Homo sapien
tccaaagtcgcttcaaaggcaaatc

SEQ ID NO: 1344961 - DNA, 25 bp, Homo sapien
tgtaggggtgcccactacccagctg

SEQ ID NO: 1344962 - DNA, 25 bp, Homo sapien
atctcttggatgcagccagttttat

SEQ ID NO: 1344963 - DNA, 25 bp, Homo sapien
gcctgccaggtctcttggcttccat

SEQ ID NO: 1344964 - DNA, 25 bp, Homo sapien
cattcagcataatatgctctgcaaa

SEQ ID NO: 1344965 - DNA, 25 bp, Homo sapien
gatgtagtctcaagaatccattgct

SEQ ID NO: 1344966 - DNA, 25 bp, Homo sapien
taagcgtggaatcagatgtagtctc

SEQ ID NO: 1344967 - DNA, 25 bp, Homo sapien
cataacgttgctccgtaagcgtgga

SEQ ID NO: 1344968 - DNA, 25 bp, Homo sapien
tcttttcgaagcaaactcagttgca

SEQ ID NO: 1344969 - DNA, 25 bp, Homo sapien
ttaggcattgggctccaatctggat

SEQ ID NO: 1344970 - DNA, 25 bp, Homo sapien
gacgtttgaatcatgtgtcaagatg

SEQ ID NO: 1344971 - DNA, 25 bp, Homo sapien
ggcattgggctccaatctggatttg

SEQ ID NO: 1344972 - DNA, 25 bp, Homo sapien
tcttgacgtttgaatcatgtgtcaa

SEQ ID NO: 1344973 - DNA, 25 bp, Homo sapien
tattatattgcacattggagacatc

SEQ ID NO: 1344974 - DNA, 25 bp, Homo sapien
aatcagacaggtgtcaatcaagtgc

SEQ ID NO: 1344975 - DNA, 25 bp, Homo sapien
tcagacatattagatactagggtaa

SEQ ID NO: 1344976 - DNA, 25 bp, Homo sapien
aactgggcactaaacaagtgtaaat

SEQ ID NO: 1344977 - DNA, 25 bp, Homo sapien
tcggttaccaggatagagaatttct

SEQ ID NO: 1344978 - DNA, 25 bp, Homo sapien
ttaggttgctggaatccgaggtgcc

SEQ ID NO: 1344979 - DNA, 25 bp, Homo sapien
cctgaataggatgtcttcacagaac

SEQ ID NO: 1344980 - DNA, 25 bp, Homo sapien
gccttgcaggtagagccttctggaa

SEQ ID NO: 1344981 - DNA, 25 bp, Homo sapien
cactggtggtatgtaagctggaatc

SEQ ID NO: 1344982 - DNA, 25 bp, Homo sapien
tccaacttgagaagcaggtactttc

SEQ ID NO: 1344983 - DNA, 25 bp, Homo sapien
tggaggcatgaagatccgctaataa

SEQ ID NO: 1344984 - DNA, 25 bp, Homo sapien
tctagtgacaatgtaggtgccaagg

SEQ ID NO: 1344985 - DNA, 25 bp, Homo sapien
tcctttgccctgactataggtgaca

SEQ ID NO: 1344986 - DNA, 25 bp, Homo sapien
ggcattacctgcgagactgttagaa

SEQ ID NO: 1344987 - DNA, 25 bp, Homo sapien
gacaagtaaatggttgctaggccct

SEQ ID NO: 1344988 - DNA, 25 bp, Homo sapien
catgagcctgcagatatgtaagaga

SEQ ID NO: 1344989 - DNA, 25 bp, Homo sapien
gaaagaaatatctcacaggacctcc

SEQ ID NO: 1344990 - DNA, 25 bp, Homo sapien
gctttagagaaagagtggcccactg

SEQ ID NO: 1344991 - DNA, 25 bp, Homo sapien
tattacgtgctcaaaccattggatc

SEQ ID NO: 1344992 - DNA, 25 bp, Homo sapien
ggaaaccctgtccacactgaataga

SEQ ID NO: 1344993 - DNA, 25 bp, Homo sapien
ggatactagctactgacttcttttt

SEQ ID NO: 1344994 - DNA, 25 bp, Homo sapien
tttggatactagctactgacttctt

SEQ ID NO: 1344995 - DNA, 25 bp, Homo sapien
tccttttggatactagctactgact

SEQ ID NO: 1344996 - DNA, 25 bp, Homo sapien
ccatttccttttggatactagctac

SEQ ID NO: 1344997 - DNA, 25 bp, Homo sapien
tacccgatccttgtgtttgtgcttc

SEQ ID NO: 1344998 - DNA, 25 bp, Homo sapien
tataggaggaaacattcatggaggt

SEQ ID NO: 1344999 - DNA, 25 bp, Homo sapien
ttaattataggaggaaacattcatg

SEQ ID NO: 1345000 - DNA, 25 bp, Homo sapien
ttttacccgatccttgtgtttgtgc

SEQ ID NO: 1345001 - DNA, 25 bp, Homo sapien
taagaggcaggctcgcattggttgt

SEQ ID NO: 1345002 - DNA, 25 bp, Homo sapien
taattgccgaagtgctcctgtgtca

SEQ ID NO: 1345003 - DNA, 25 bp, Homo sapien
cattggttgtgcctagcttgttggc

SEQ ID NO: 1345004 - DNA, 25 bp, Homo sapien
cgttggtaacagtgagaatggatct

SEQ ID NO: 1345005 - DNA, 25 bp, Homo sapien
aaatcctacactctaagtcacagga

SEQ ID NO: 1345006 - DNA, 25 bp, Homo sapien
gacaaatcctacactctaagtcaca

SEQ ID NO: 1345007 - DNA, 25 bp, Homo sapien
tttttatgacaaatcctacactcta

SEQ ID NO: 1345008 - DNA, 25 bp, Homo sapien
tatgacaaatcctacactctaagtc

SEQ ID NO: 1345009 - DNA, 25 bp, Homo sapien
tcaggccactgcgtccgggggtcac

SEQ ID NO: 1345010 - DNA, 25 bp, Homo sapien
gcaccttcacatcttatcaggccac

SEQ ID NO: 1345011 - DNA, 25 bp, Homo sapien
gctggaggcggcacacctgcacctt

SEQ ID NO: 1345012 - DNA, 25 bp, Homo sapien
accattcaaaggctggaggcggcac

SEQ ID NO: 1345013 - DNA, 25 bp, Homo sapien
gccctttcagtcaaagtcgccagat

SEQ ID NO: 1345014 - DNA, 25 bp, Homo sapien
caaagtcgccagatcctgtctattt

SEQ ID NO: 1345015 - DNA, 25 bp, Homo sapien
cagaaatgcagctgatactctcctt

SEQ ID NO: 1345016 - DNA, 25 bp, Homo sapien
ctttcagtcaaagtcgccagatcct

SEQ ID NO: 1345017 - DNA, 25 bp, Homo sapien
gatgaggtaggactcttccatattg

SEQ ID NO: 1345018 - DNA, 25 bp, Homo sapien
gaggtaggactcttccatattgtta

SEQ ID NO: 1345019 - DNA, 25 bp, Homo sapien
catagatgaggtaggactcttccat

SEQ ID NO: 1345020 - DNA, 25 bp, Homo sapien
gtaacatagatgaggtaggactctt

SEQ ID NO: 1345021 - DNA, 25 bp, Homo sapien
ggtaaaaactagttcagctgccaca

SEQ ID NO: 1345022 - DNA, 25 bp, Homo sapien
tgttagtgcatcagctttatagaca

SEQ ID NO: 1345023 - DNA, 25 bp, Homo sapien
gattgtttgcgtagcaaagacagca

SEQ ID NO: 1345024 - DNA, 25 bp, Homo sapien
cagcttgacagctttcttgttagtg

SEQ ID NO: 1345025 - DNA, 25 bp, Homo sapien
agaacagattgtttgcgtagcaaag

SEQ ID NO: 1345026 - DNA, 25 bp, Homo sapien
tagctctgtccaagttcccatttgt

SEQ ID NO: 1345027 - DNA, 25 bp, Homo sapien
gatagctctgtccaagttcccattt

SEQ ID NO: 1345028 - DNA, 25 bp, Homo sapien
ctgatagctctgtccaagttcccat

SEQ ID NO: 1345029 - DNA, 25 bp, Homo sapien
gctctgtccaagttcccatttgtca

SEQ ID NO: 1345030 - DNA, 25 bp, Homo sapien
ctttggaatgactatccaaatgtgg

SEQ ID NO: 1345031 - DNA, 25 bp, Homo sapien
taaaccttcctttggaatgactatc

SEQ ID NO: 1345032 - DNA, 25 bp, Homo sapien
tggaaatgacttaagtccaacaata

SEQ ID NO: 1345033 - DNA, 25 bp, Homo sapien
ccaacaatatcaggccaaagtaaaa

SEQ ID NO: 1345034 - DNA, 25 bp, Homo sapien
tcttcgatgtgactcttgtgaatca

SEQ ID NO: 1345035 - DNA, 25 bp, Homo sapien
gaaacacaagagtttagtcttcgat

SEQ ID NO: 1345036 - DNA, 25 bp, Homo sapien
caatgacagtcaaatctggtttctc

SEQ ID NO: 1345037 - DNA, 25 bp, Homo sapien
aatggtaatgaattaagctcttctg

SEQ ID NO: 1345038 - DNA, 25 bp, Homo sapien
ttagtacaacgatgagcaaacagga

SEQ ID NO: 1345039 - DNA, 25 bp, Homo sapien
ttccctgggtagcagtggaagcagc

SEQ ID NO: 1345040 - DNA, 25 bp, Homo sapien
catctttttgttactgccaggctga

SEQ ID NO: 1345041 - DNA, 25 bp, Homo sapien
aattaaagcctgtgccgttccctgg

SEQ ID NO: 1345042 - DNA, 25 bp, Homo sapien
tttttggtgagaatataaggatgga

SEQ ID NO: 1345043 - DNA, 25 bp, Homo sapien
ctgtgatttttggtgagaatataag

SEQ ID NO: 1345044 - DNA, 25 bp, Homo sapien
tgatttttggtgagaatataaggat

SEQ ID NO: 1345045 - DNA, 25 bp, Homo sapien
tttggtgagaatataaggatggaga

SEQ ID NO: 1345046 - DNA, 25 bp, Homo sapien
ggcagtctgcttggcgtgagctaac

SEQ ID NO: 1345047 - DNA, 25 bp, Homo sapien
gttcccaagggcagtctgcttggcg

SEQ ID NO: 1345048 - DNA, 25 bp, Homo sapien
gggcagtctgcttggcgtgagctaa

SEQ ID NO: 1345049 - DNA, 25 bp, Homo sapien
cccaagggcagtctgcttggcgtga

SEQ ID NO: 1345050 - DNA, 25 bp, Homo sapien
ttactggatagtcaagcttgcagcc

SEQ ID NO: 1345051 - DNA, 25 bp, Homo sapien
tgtgtctggacagtcttttaattag

SEQ ID NO: 1345052 - DNA, 25 bp, Homo sapien
tgcaggatcctgctatttaaagtgt

SEQ ID NO: 1345053 - DNA, 25 bp, Homo sapien
tatatattcctagctgtagaccgct

SEQ ID NO: 1345054 - DNA, 25 bp, Homo sapien
tttctttcttggatcgtgaatcttt

SEQ ID NO: 1345055 - DNA, 25 bp, Homo sapien
agtgatcctcgagtcatgaacatgg

SEQ ID NO: 1345056 - DNA, 25 bp, Homo sapien
cttggatcgtgaatctttacacatc

SEQ ID NO: 1345057 - DNA, 25 bp, Homo sapien
tcatgaacatggttgtgtgccaggc

SEQ ID NO: 1345058 - DNA, 25 bp, Homo sapien
aatggtaagagcctctattgaaagg

SEQ ID NO: 1345059 - DNA, 25 bp, Homo sapien
tactacaatggtaagagcctctatt

SEQ ID NO: 1345060 - DNA, 25 bp, Homo sapien
tttttactacaatggtaagagcctc

SEQ ID NO: 1345061 - DNA, 25 bp, Homo sapien
tctcctttttactacaatggtaaga

SEQ ID NO: 1345062 - DNA, 25 bp, Homo sapien
catatttggcaattcctctgaagtt

SEQ ID NO: 1345063 - DNA, 25 bp, Homo sapien
taagcatatttggcaattcctctga

SEQ ID NO: 1345064 - DNA, 25 bp, Homo sapien
agcatatttggcaattcctctgaag

SEQ ID NO: 1345065 - DNA, 25 bp, Homo sapien
tatttggcaattcctctgaagttta

SEQ ID NO: 1345066 - DNA, 25 bp, Homo sapien
gcaaaaggcaccctgcgatgatttt

SEQ ID NO: 1345067 - DNA, 25 bp, Homo sapien
cctgcgatgattttcagggtttggt

SEQ ID NO: 1345068 - DNA, 25 bp, Homo sapien
aaggcaccctgcgatgattttcagg

SEQ ID NO: 1345069 - DNA, 25 bp, Homo sapien
atatttagcaaaaggcaccctgcga

SEQ ID NO: 1345070 - DNA, 25 bp, Homo sapien
taaactccatcagggctaaggccta

SEQ ID NO: 1345071 - DNA, 25 bp, Homo sapien
taaggcctattagaagctttcagtg

SEQ ID NO: 1345072 - DNA, 25 bp, Homo sapien
gcacagcaccttacgattggtttat

SEQ ID NO: 1345073 - DNA, 25 bp, Homo sapien
ccaggctgtagcaccttgattctct

SEQ ID NO: 1345074 - DNA, 25 bp, Homo sapien
ctagagctcttttcaccttagtctg

SEQ ID NO: 1345075 - DNA, 25 bp, Homo sapien
tctctctgagtaaaaacagtatgca

SEQ ID NO: 1345076 - DNA, 25 bp, Homo sapien
tagatctgactttcatgagtaaaaa

SEQ ID NO: 1345077 - DNA, 25 bp, Homo sapien
tctgactttcatgagtaaaaattga

SEQ ID NO: 1345078 - DNA, 25 bp, Homo sapien
tgacacatcattttccgcactgcat

SEQ ID NO: 1345079 - DNA, 25 bp, Homo sapien
ttttccgcactgcattcatattccc

SEQ ID NO: 1345080 - DNA, 25 bp, Homo sapien
gacacatcattttccgcactgcatt

SEQ ID NO: 1345081 - DNA, 25 bp, Homo sapien
tcattttccgcactgcattcatatt

SEQ ID NO: 1345082 - DNA, 25 bp, Homo sapien
ccttgtaattccataaatgtccaaa

SEQ ID NO: 1345083 - DNA, 25 bp, Homo sapien
ccataaatgtccaaatattgtccat

SEQ ID NO: 1345084 - DNA, 25 bp, Homo sapien
taattccataaatgtccaaatattg

SEQ ID NO: 1345085 - DNA, 25 bp, Homo sapien
ttccataaatgtccaaatattgtcc

SEQ ID NO: 1345086 - DNA, 25 bp, Homo sapien
tgtttaattgtagccgcctgaggct

SEQ ID NO: 1345087 - DNA, 25 bp, Homo sapien
gtttaattgtagccgcctgaggctt

SEQ ID NO: 1345088 - DNA, 25 bp, Homo sapien
tttaattgtagccgcctgaggcttc

SEQ ID NO: 1345089 - DNA, 25 bp, Homo sapien
taggaatacacccattgaattatca

SEQ ID NO: 1345090 - DNA, 25 bp, Homo sapien
tgtaagtcctacctccaggcaacta

SEQ ID NO: 1345091 - DNA, 25 bp, Homo sapien
caagatcaggaatatatccatcacc

SEQ ID NO: 1345092 - DNA, 25 bp, Homo sapien
tataagttttaccataggaatacac

SEQ ID NO: 1345093 - DNA, 25 bp, Homo sapien
cattggaaaagatacctgtatttgg

SEQ ID NO: 1345094 - DNA, 25 bp, Homo sapien
tgtggtatctgacactagttgcagg

SEQ ID NO: 1345095 - DNA, 25 bp, Homo sapien
tccttggacacccagacggtgtcag

SEQ ID NO: 1345096 - DNA, 25 bp, Homo sapien
tgtcagttcaagaagtatcattgga

SEQ ID NO: 1345097 - DNA, 25 bp, Homo sapien
ttgtgtaatctctgatgccctctca

SEQ ID NO: 1345098 - DNA, 25 bp, Homo sapien
tgtgtaatctctgatgccctctcac

SEQ ID NO: 1345099 - DNA, 25 bp, Homo sapien
attgtgtaatctctgatgccctctc

SEQ ID NO: 1345100 - DNA, 25 bp, Homo sapien
cattgcagatactcttggattgaac

SEQ ID NO: 1345101 - DNA, 25 bp, Homo sapien
gttatagaacccacaccttgatccg

SEQ ID NO: 1345102 - DNA, 25 bp, Homo sapien
cagatactcttggattgaactttta

SEQ ID NO: 1345103 - DNA, 25 bp, Homo sapien
ccttgatccgtcattgcagatactc

SEQ ID NO: 1345104 - DNA, 25 bp, Homo sapien
atcagttttatgatttttcagtggt

SEQ ID NO: 1345105 - DNA, 25 bp, Homo sapien
tcacatatcagttttatgatttttc

SEQ ID NO: 1345106 - DNA, 25 bp, Homo sapien
acatatcagttttatgatttttcag

SEQ ID NO: 1345107 - DNA, 25 bp, Homo sapien
atatcagttttatgatttttcagtg

SEQ ID NO: 1345108 - DNA, 25 bp, Homo sapien
tgagatgtcatatatcttaggagga

SEQ ID NO: 1345109 - DNA, 25 bp, Homo sapien
acaagtaagagtgacgttggttcct

SEQ ID NO: 1345110 - DNA, 25 bp, Homo sapien
tcattgacggtcatatcatttgaga

SEQ ID NO: 1345111 - DNA, 25 bp, Homo sapien
tgtcgccaagaaatggaaggctctg

SEQ ID NO: 1345112 - DNA, 25 bp, Homo sapien
tattcccataaacctggtggccagc

SEQ ID NO: 1345113 - DNA, 25 bp, Homo sapien
tgtagttactattcccataaacctg

SEQ ID NO: 1345114 - DNA, 25 bp, Homo sapien
ttcccataaacctggtggccagctc

SEQ ID NO: 1345115 - DNA, 25 bp, Homo sapien
agttactattcccataaacctggtg

SEQ ID NO: 1345116 - DNA, 25 bp, Homo sapien
caatcaatggtgctaggcaattgtc

SEQ ID NO: 1345117 - DNA, 25 bp, Homo sapien
gatagcggagtattacaaatcagtg

SEQ ID NO: 1345118 - DNA, 25 bp, Homo sapien
cactcatattgaagagtaaaggacc

SEQ ID NO: 1345119 - DNA, 25 bp, Homo sapien
ggaccaagagtagccaagaacaatc

SEQ ID NO: 1345120 - DNA, 25 bp, Homo sapien
cactgatccagaccatttagagagt

SEQ ID NO: 1345121 - DNA, 25 bp, Homo sapien
tgagagaacgtgctgtagagaagcc

SEQ ID NO: 1345122 - DNA, 25 bp, Homo sapien
taatatcagactcggtggagcagag

SEQ ID NO: 1345123 - DNA, 25 bp, Homo sapien
gcagagagtccctacatttagccta

SEQ ID NO: 1345124 - DNA, 25 bp, Homo sapien
gagacatccattcccttctggagaa

SEQ ID NO: 1345125 - DNA, 25 bp, Homo sapien
taaggtgtgatctaaatatgatccc

SEQ ID NO: 1345126 - DNA, 25 bp, Homo sapien
gaaaacacgctttgcatttccaggt

SEQ ID NO: 1345127 - DNA, 25 bp, Homo sapien
caaatctccactcaataaggtgtga

SEQ ID NO: 1345128 - DNA, 25 bp, Homo sapien
cctcaacttctgtgttgtcacttct

SEQ ID NO: 1345129 - DNA, 25 bp, Homo sapien
gcccctcaacttctgtgttgtcact

SEQ ID NO: 1345130 - DNA, 25 bp, Homo sapien
agcccctcaacttctgtgttgtcac

SEQ ID NO: 1345131 - DNA, 25 bp, Homo sapien
tcaacttctgtgttgtcacttcttc

SEQ ID NO: 1345132 - DNA, 25 bp, Homo sapien
ccaagtgtccaaagggtcagtatca

SEQ ID NO: 1345133 - DNA, 25 bp, Homo sapien
caaagaaaacatggctagtgaagag

SEQ ID NO: 1345134 - DNA, 25 bp, Homo sapien
tcagtatcaatggtcaagggtccac

SEQ ID NO: 1345135 - DNA, 25 bp, Homo sapien
aagggtccactctaaatgccctggc

SEQ ID NO: 1345136 - DNA, 25 bp, Homo sapien
ctgttctggctttgttgacttttga

SEQ ID NO: 1345137 - DNA, 25 bp, Homo sapien
ccctgttctggctttgttgactttt

SEQ ID NO: 1345138 - DNA, 25 bp, Homo sapien
gttctggctttgttgacttttgatg

SEQ ID NO: 1345139 - DNA, 25 bp, Homo sapien
ctggctttgttgacttttgatgtca

SEQ ID NO: 1345140 - DNA, 25 bp, Homo sapien
tgctgccacgtagcagggcatatca

SEQ ID NO: 1345141 - DNA, 25 bp, Homo sapien
gctgccacgtagcagggcatatcag

SEQ ID NO: 1345142 - DNA, 25 bp, Homo sapien
tctgctatgaactcacaaagttcct

SEQ ID NO: 1345143 - DNA, 25 bp, Homo sapien
ttctgctatgaactcacaaagttcc

SEQ ID NO: 1345144 - DNA, 25 bp, Homo sapien
ctgctatgaactcacaaagttcctt

SEQ ID NO: 1345145 - DNA, 25 bp, Homo sapien
ttatggtagaacaggtcgaaatccc

SEQ ID NO: 1345146 - DNA, 25 bp, Homo sapien
tggtctttcaccctgtgatcagtag

SEQ ID NO: 1345147 - DNA, 25 bp, Homo sapien
tattgattagtctgcctgagctcag

SEQ ID NO: 1345148 - DNA, 25 bp, Homo sapien
aatttgtcttccattggacctgcac

SEQ ID NO: 1345149 - DNA, 25 bp, Homo sapien
tggaacagagtgtggtgtccttctc

SEQ ID NO: 1345150 - DNA, 25 bp, Homo sapien
cctattcaacgactaattgggagaa

SEQ ID NO: 1345151 - DNA, 25 bp, Homo sapien
ttgtggccacatagagtaattgctc

SEQ ID NO: 1345152 - DNA, 25 bp, Homo sapien
tgatgctctgagatagctcatggca

SEQ ID NO: 1345153 - DNA, 25 bp, Homo sapien
cttgcacagttagatgcacctgcat

SEQ ID NO: 1345154 - DNA, 25 bp, Homo sapien
tctgaacagaacacgtgtatgggcc

SEQ ID NO: 1345155 - DNA, 25 bp, Homo sapien
aataatacttgaccggttcagccag

SEQ ID NO: 1345156 - DNA, 25 bp, Homo sapien
gaaattgaaactcgaggatccactg

SEQ ID NO: 1345157 - DNA, 25 bp, Homo sapien
cattctgtatctggaggctgtagtc

SEQ ID NO: 1345158 - DNA, 25 bp, Homo sapien
tcatagactcatataagggtgggtt

SEQ ID NO: 1345159 - DNA, 25 bp, Homo sapien
tttgcacagtggtaagcttgtacac

SEQ ID NO: 1345160 - DNA, 25 bp, Homo sapien
actgacctgacccaatctgatactg

SEQ ID NO: 1345161 - DNA, 25 bp, Homo sapien
catgcccggcctataagggtttact

SEQ ID NO: 1345162 - DNA, 25 bp, Homo sapien
gcttgacatgtgtatgctgtattaa

SEQ ID NO: 1345163 - DNA, 25 bp, Homo sapien
ttttgtaaggagggaagctatgtag

SEQ ID NO: 1345164 - DNA, 25 bp, Homo sapien
agagatattgcttgacatgtgtatg

SEQ ID NO: 1345165 - DNA, 25 bp, Homo sapien
taaggagggaagctatgtagggtac

SEQ ID NO: 1345166 - DNA, 25 bp, Homo sapien
gatttcggatttaacctcaattcca

SEQ ID NO: 1345167 - DNA, 25 bp, Homo sapien
tagatttcggatttaacctcaattc

SEQ ID NO: 1345168 - DNA, 25 bp, Homo sapien
tcggatttaacctcaattccaactg

SEQ ID NO: 1345169 - DNA, 25 bp, Homo sapien
catgcagatctattacttgcctcca

SEQ ID NO: 1345170 - DNA, 25 bp, Homo sapien
atgcagatctattacttgcctccat

SEQ ID NO: 1345171 - DNA, 25 bp, Homo sapien
tcctgtaggaacagcgttggctcta

SEQ ID NO: 1345172 - DNA, 25 bp, Homo sapien
ggtctataagtagacaccatgctag

SEQ ID NO: 1345173 - DNA, 25 bp, Homo sapien
ggagtgttgcataccattatctcag

SEQ ID NO: 1345174 - DNA, 25 bp, Homo sapien
gcagtttcagctaatgagtgccaaa

SEQ ID NO: 1345175 - DNA, 25 bp, Homo sapien
gagaagcatttgggaagcggaggag

SEQ ID NO: 1345176 - DNA, 25 bp, Homo sapien
ctcctccgcttcccaaatgcttctc

SEQ ID NO: 1345177 - DNA, 25 bp, Homo sapien
cttgtgtagtagcatctgcagctgg

SEQ ID NO: 1345178 - DNA, 25 bp, Homo sapien
gctggcacttaacatcaaacttcct

SEQ ID NO: 1345179 - DNA, 25 bp, Homo sapien
cttgacttgtgtagtagcatctgca

SEQ ID NO: 1345180 - DNA, 25 bp, Homo sapien
ttaacatcaaacttcctgccaggca

SEQ ID NO: 1345181 - DNA, 25 bp, Homo sapien
tgtgttcccaactaaatatcaaggc

SEQ ID NO: 1345182 - DNA, 25 bp, Homo sapien
tcttcgctgtcaaggctacttcctc

SEQ ID NO: 1345183 - DNA, 25 bp, Homo sapien
tatcccttcagggagctctcttcgc

SEQ ID NO: 1345184 - DNA, 25 bp, Homo sapien
tatatggcccgaaatttcctccagt

SEQ ID NO: 1345185 - DNA, 25 bp, Homo sapien
tagtcttcccccgaatcccgcatcg

SEQ ID NO: 1345186 - DNA, 25 bp, Homo sapien
tcatagtcttcccccgaatcccgca

SEQ ID NO: 1345187 - DNA, 25 bp, Homo sapien
ccgaatcccgcatcgtaacttaaag

SEQ ID NO: 1345188 - DNA, 25 bp, Homo sapien
tcttcccccgaatcccgcatcgtaa

SEQ ID NO: 1345189 - DNA, 25 bp, Homo sapien
ggaaattcagcattacttcataata

SEQ ID NO: 1345190 - DNA, 25 bp, Homo sapien
cttatttcccaccagaaagaataga

SEQ ID NO: 1345191 - DNA, 25 bp, Homo sapien
cataataatacatatccgaggtcat

SEQ ID NO: 1345192 - DNA, 25 bp, Homo sapien
gaatagaggaaattcagcattactt

SEQ ID NO: 1345193 - DNA, 25 bp, Homo sapien
tgaaatcatagcacattagaacctc

SEQ ID NO: 1345194 - DNA, 25 bp, Homo sapien
acattagaacctcgaaatcctgagc

SEQ ID NO: 1345195 - DNA, 25 bp, Homo sapien
tcatagcacattagaacctcgaaat

SEQ ID NO: 1345196 - DNA, 25 bp, Homo sapien
tagcacattagaacctcgaaatcct

SEQ ID NO: 1345197 - DNA, 25 bp, Homo sapien
aataggcccctgatgttttaagcaa

SEQ ID NO: 1345198 - DNA, 25 bp, Homo sapien
tagatagcaagttccatgagggctg

SEQ ID NO: 1345199 - DNA, 25 bp, Homo sapien
tcacataccctaggcacagatgcac

SEQ ID NO: 1345200 - DNA, 25 bp, Homo sapien
tatagagcacatagcctttacagca

SEQ ID NO: 1345201 - DNA, 25 bp, Homo sapien
tcagataacctgttaggcttactgc

SEQ ID NO: 1345202 - DNA, 25 bp, Homo sapien
ggcttactgctatcagcacttgtgc

SEQ ID NO: 1345203 - DNA, 25 bp, Homo sapien
cattttgggatataaggtcgtgtta

SEQ ID NO: 1345204 - DNA, 25 bp, Homo sapien
tcaacaatgtgctggataagctgtg

SEQ ID NO: 1345205 - DNA, 25 bp, Homo sapien
ctggcaaattaggtctctggtgagg

SEQ ID NO: 1345206 - DNA, 25 bp, Homo sapien
tgctggcaaattaggtctctggtga

SEQ ID NO: 1345207 - DNA, 25 bp, Homo sapien
gctggcaaattaggtctctggtgag

SEQ ID NO: 1345208 - DNA, 25 bp, Homo sapien
aatcaagcctgccttacaaagaacg

SEQ ID NO: 1345209 - DNA, 25 bp, Homo sapien
gcagtatttgatcgctagaagagat

SEQ ID NO: 1345210 - DNA, 25 bp, Homo sapien
tatctaatcctaaggctcccacctg

SEQ ID NO: 1345211 - DNA, 25 bp, Homo sapien
acctgaattgttatgctgactctgc

SEQ ID NO: 1345212 - DNA, 25 bp, Homo sapien
agtctgatccatccctagtagggaa

SEQ ID NO: 1345213 - DNA, 25 bp, Homo sapien
cactgtctctggatcgagtagatta

SEQ ID NO: 1345214 - DNA, 25 bp, Homo sapien
actttgaggcttctgactgtgctcc

SEQ ID NO: 1345215 - DNA, 25 bp, Homo sapien
cataaagttttgagtgcagaatgct

SEQ ID NO: 1345216 - DNA, 25 bp, Homo sapien
catgtgataagtacaacggactcat

SEQ ID NO: 1345217 - DNA, 25 bp, Homo sapien
ttgaggctaatggttcagaggaaga

SEQ ID NO: 1345218 - DNA, 25 bp, Homo sapien
ttattccaaagaagattgaggctaa

SEQ ID NO: 1345219 - DNA, 25 bp, Homo sapien
ttctcaatatgacagtagcaagcct

SEQ ID NO: 1345220 - DNA, 25 bp, Homo sapien
cactctagaaagtcatctgcatcac

SEQ ID NO: 1345221 - DNA, 25 bp, Homo sapien
ctctagaaagtcatctgcatcactt

SEQ ID NO: 1345222 - DNA, 25 bp, Homo sapien
ctagaaagtcatctgcatcactttg

SEQ ID NO: 1345223 - DNA, 25 bp, Homo sapien
tcactctagaaagtcatctgcatca

SEQ ID NO: 1345224 - DNA, 25 bp, Homo sapien
aggctttgggacagtttttcaccat

SEQ ID NO: 1345225 - DNA, 25 bp, Homo sapien
cttggttactaaggctttgggacag

SEQ ID NO: 1345226 - DNA, 25 bp, Homo sapien
tcttggttactaaggctttgggaca

SEQ ID NO: 1345227 - DNA, 25 bp, Homo sapien
taaaacatataggtcttgcaggcac

SEQ ID NO: 1345228 - DNA, 25 bp, Homo sapien
gattagccaggtttgtactagacta

SEQ ID NO: 1345229 - DNA, 25 bp, Homo sapien
gaagtattatatccctcaaatgctg

SEQ ID NO: 1345230 - DNA, 25 bp, Homo sapien
tgcaggcactcccaatcattcgttc

SEQ ID NO: 1345231 - DNA, 25 bp, Homo sapien
accattgccctaagttcagagtgac

SEQ ID NO: 1345232 - DNA, 25 bp, Homo sapien
ccattgccctaagttcagagtgaca

SEQ ID NO: 1345233 - DNA, 25 bp, Homo sapien
cattgccctaagttcagagtgacag

SEQ ID NO: 1345234 - DNA, 25 bp, Homo sapien
ttgccctaagttcagagtgacagtc

SEQ ID NO: 1345235 - DNA, 25 bp, Homo sapien
gccctgagagatgttcacttaatat

SEQ ID NO: 1345236 - DNA, 25 bp, Homo sapien
tgtccatgatttccttaagcttacc

SEQ ID NO: 1345237 - DNA, 25 bp, Homo sapien
gatcaatcgctttcttcaactaatg

SEQ ID NO: 1345238 - DNA, 25 bp, Homo sapien
ccttagtttcagatgagatgcaaaa

SEQ ID NO: 1345239 - DNA, 25 bp, Homo sapien
gcttataataatcaaactactttct

SEQ ID NO: 1345240 - DNA, 25 bp, Homo sapien
caatcttctaacatggacatcccaa

SEQ ID NO: 1345241 - DNA, 25 bp, Homo sapien
aataataatgatagtggcaatgcta

SEQ ID NO: 1345242 - DNA, 25 bp, Homo sapien
taaagttgtaacttcctggaatgct

SEQ ID NO: 1345243 - DNA, 25 bp, Homo sapien
tatcaaccggcgaaatgatggtgtt

SEQ ID NO: 1345244 - DNA, 25 bp, Homo sapien
ggtgctgatggtgcaccatgtctga

SEQ ID NO: 1345245 - DNA, 25 bp, Homo sapien
tcagtggtatcaaccggcgaaatga

SEQ ID NO: 1345246 - DNA, 25 bp, Homo sapien
tgtctgatgggaataccttcagtgg

SEQ ID NO: 1345247 - DNA, 25 bp, Homo sapien
tactatgggagtccaaagtaggccc

SEQ ID NO: 1345248 - DNA, 25 bp, Homo sapien
gttctgagctcccaaaattgtgttg

SEQ ID NO: 1345249 - DNA, 25 bp, Homo sapien
tatatgtctttcgtccttgataagg

SEQ ID NO: 1345250 - DNA, 25 bp, Homo sapien
catgctgtggtacctctgttctgag

SEQ ID NO: 1345251 - DNA, 25 bp, Homo sapien
agcccaagcacagtatgtgcacagc

SEQ ID NO: 1345252 - DNA, 25 bp, Homo sapien
acagcccaagcacagtatgtgcaca

SEQ ID NO: 1345253 - DNA, 25 bp, Homo sapien
cagcccaagcacagtatgtgcacag

SEQ ID NO: 1345254 - DNA, 25 bp, Homo sapien
tggtaggcagcaatataactggaac

SEQ ID NO: 1345255 - DNA, 25 bp, Homo sapien
gattcggtgatcaaataacgcttaa

SEQ ID NO: 1345256 - DNA, 25 bp, Homo sapien
taagtggccgtgactataattccac

SEQ ID NO: 1345257 - DNA, 25 bp, Homo sapien
tctgatttgcagaaaagcttagagc

SEQ ID NO: 1345258 - DNA, 25 bp, Homo sapien
tttagagaattagattcactctctg

SEQ ID NO: 1345259 - DNA, 25 bp, Homo sapien
cagagttagtacaatgaacagtgca

SEQ ID NO: 1345260 - DNA, 25 bp, Homo sapien
taagaaaatctgttccaacaagtaa

SEQ ID NO: 1345261 - DNA, 25 bp, Homo sapien
aaagcagagttagtacaatgaacag

SEQ ID NO: 1345262 - DNA, 25 bp, Homo sapien
tagaaaaatatcctcaggtagcaga

SEQ ID NO: 1345263 - DNA, 25 bp, Homo sapien
gcagcagctttgactggtaagttaa

SEQ ID NO: 1345264 - DNA, 25 bp, Homo sapien
caagttagcaactattaccatggac

SEQ ID NO: 1345265 - DNA, 25 bp, Homo sapien
ggtagcagaatgagccaagttagca

SEQ ID NO: 1345266 - DNA, 25 bp, Homo sapien
tgccatcccaaaccgtggactattc

SEQ ID NO: 1345267 - DNA, 25 bp, Homo sapien
cctattgtctggagtttggttagaa

SEQ ID NO: 1345268 - DNA, 25 bp, Homo sapien
atgtgctacactttacccgctttat

SEQ ID NO: 1345269 - DNA, 25 bp, Homo sapien
aaatgactccctattgtctggagtt

SEQ ID NO: 1345270 - DNA, 25 bp, Homo sapien
tatatcttgccaatagaacagttct

SEQ ID NO: 1345271 - DNA, 25 bp, Homo sapien
tgaaaatatcggtaaagttgaactg

SEQ ID NO: 1345272 - DNA, 25 bp, Homo sapien
taaaatagtgccttaatgtcctaaa

SEQ ID NO: 1345273 - DNA, 25 bp, Homo sapien
ccagattgaccattctgataattca

SEQ ID NO: 1345274 - DNA, 25 bp, Homo sapien
catagagaagggctgaataagaaac

SEQ ID NO: 1345275 - DNA, 25 bp, Homo sapien
gggtactgaagcataaccaatgtgg

SEQ ID NO: 1345276 - DNA, 25 bp, Homo sapien
accaatgtggttctagcacttcctg

SEQ ID NO: 1345277 - DNA, 25 bp, Homo sapien
tagagcagagttatattcccctgaa

SEQ ID NO: 1345278 - DNA, 25 bp, Homo sapien
ttaaaaaacgatgcatcacctgagt

SEQ ID NO: 1345279 - DNA, 25 bp, Homo sapien
tctatgatcagaggaaattaccagc

SEQ ID NO: 1345280 - DNA, 25 bp, Homo sapien
gagtcactgactggcatgtttgcac

SEQ ID NO: 1345281 - DNA, 25 bp, Homo sapien
gataacagaatgaatttcccttggg

SEQ ID NO: 1345282 - DNA, 25 bp, Homo sapien
tgaactaaacatgggtctcctggaa

SEQ ID NO: 1345283 - DNA, 25 bp, Homo sapien
ctcataggcatgttccaaaaggtgt

SEQ ID NO: 1345284 - DNA, 25 bp, Homo sapien
tgtgcaagccagacttacaagccaa

SEQ ID NO: 1345285 - DNA, 25 bp, Homo sapien
gttccctcagtatcacaaaatgcgg

SEQ ID NO: 1345286 - DNA, 25 bp, Homo sapien
tacagcatggaagtgccagtgcatg

SEQ ID NO: 1345287 - DNA, 25 bp, Homo sapien
cagggcacaggatagggacattaag

SEQ ID NO: 1345288 - DNA, 25 bp, Homo sapien
ggaacagaaattagagtcgtggaga

SEQ ID NO: 1345289 - DNA, 25 bp, Homo sapien
tctgaatgtggaagtggttcttaca

SEQ ID NO: 1345290 - DNA, 25 bp, Homo sapien
aagaaatcgagcctaagtgtccaag

SEQ ID NO: 1345291 - DNA, 25 bp, Homo sapien
aagtgctttagcatcacgagtccag

SEQ ID NO: 1345292 - DNA, 25 bp, Homo sapien
cgaaacaagtacgaaaagcacgccg

SEQ ID NO: 1345293 - DNA, 25 bp, Homo sapien
gagtttcaaagtggcacctgcccct

SEQ ID NO: 1345294 - DNA, 25 bp, Homo sapien
tgaccatcatgttgtccacggccgc

SEQ ID NO: 1345295 - DNA, 25 bp, Homo sapien
cgccagccactggttcgagcaacaa

SEQ ID NO: 1345296 - DNA, 25 bp, Homo sapien
acactctgtccagccgggaggcagg

SEQ ID NO: 1345297 - DNA, 25 bp, Homo sapien
ctggttcgagcaacaagcaccctgc

SEQ ID NO: 1345298 - DNA, 25 bp, Homo sapien
ccaccccctggtgctggcgagtctt

SEQ ID NO: 1345299 - DNA, 25 bp, Homo sapien
ccccaccccctggtgctggcgagtc

SEQ ID NO: 1345300 - DNA, 25 bp, Homo sapien
aggcggcgcgccacaggattttttt

SEQ ID NO: 1345301 - DNA, 25 bp, Homo sapien
accccctggtgctggcgagtcttcc

SEQ ID NO: 1345302 - DNA, 25 bp, Homo sapien
gtccggagtgtgtctaattctcggg

SEQ ID NO: 1345303 - DNA, 25 bp, Homo sapien
ggccgcgtccggagtgtgtctaatt

SEQ ID NO: 1345304 - DNA, 25 bp, Homo sapien
cttttggccgcgtccggagtgtgtc

SEQ ID NO: 1345305 - DNA, 25 bp, Homo sapien
tctcggttgcttttggccgcgtccg

SEQ ID NO: 1345306 - DNA, 25 bp, Homo sapien
tacgctgcagttagcgagcagccaa

SEQ ID NO: 1345307 - DNA, 25 bp, Homo sapien
tcggcccgtatggattgcaggacgc

SEQ ID NO: 1345308 - DNA, 25 bp, Homo sapien
tgacgccggcgactgtgagttgttt

SEQ ID NO: 1345309 - DNA, 25 bp, Homo sapien
aatcttgcctgggtggctacgctgc

SEQ ID NO: 1345310 - DNA, 25 bp, Homo sapien
caaaaccttgcacaagtgttaatgt

SEQ ID NO: 1345311 - DNA, 25 bp, Homo sapien
atgttcttggaatcgtattccttac

SEQ ID NO: 1345312 - DNA, 25 bp, Homo sapien
gttaatgttcttggaatcgtattcc

SEQ ID NO: 1345313 - DNA, 25 bp, Homo sapien
cacaagtgttaatgttcttggaatc

SEQ ID NO: 1345314 - DNA, 25 bp, Homo sapien
cttcttatatcagcttgctttccta

SEQ ID NO: 1345315 - DNA, 25 bp, Homo sapien
tagaatcccctttatacagctccat

SEQ ID NO: 1345316 - DNA, 25 bp, Homo sapien
ctacatttagaatcccctttataca

SEQ ID NO: 1345317 - DNA, 25 bp, Homo sapien
tacatttagaatcccctttatacag

SEQ ID NO: 1345318 - DNA, 25 bp, Homo sapien
atttagaatcccctttatacagctc

SEQ ID NO: 1345319 - DNA, 25 bp, Homo sapien
tttcttgagctttagagagcacctc

SEQ ID NO: 1345320 - DNA, 25 bp, Homo sapien
aatacccgtaataaccatactgtct

SEQ ID NO: 1345321 - DNA, 25 bp, Homo sapien
gtaataaccatactgtcttcacttt

SEQ ID NO: 1345322 - DNA, 25 bp, Homo sapien
ttcttgagctttagagagcacctcc

SEQ ID NO: 1345323 - DNA, 25 bp, Homo sapien
tccagtaggttctgtgccaggacgc

SEQ ID NO: 1345324 - DNA, 25 bp, Homo sapien
ttcgctgcaaagaaaaacgtgactc

SEQ ID NO: 1345325 - DNA, 25 bp, Homo sapien
tgacagccttgggacggtggacatc

SEQ ID NO: 1345326 - DNA, 25 bp, Homo sapien
gaaggccttcttagccagcgtggag

SEQ ID NO: 1345327 - DNA, 25 bp, Homo sapien
ccagtaatacacaactcatagggag

SEQ ID NO: 1345328 - DNA, 25 bp, Homo sapien
gagtgcaggaaatagacaggatccc

SEQ ID NO: 1345329 - DNA, 25 bp, Homo sapien
cggcagacatttcccgtgatggtca

SEQ ID NO: 1345330 - DNA, 25 bp, Homo sapien
gaatatgcaccaattagctccccaa

SEQ ID NO: 1345331 - DNA, 25 bp, Homo sapien
tcaatccacaataacttcattgaca

SEQ ID NO: 1345332 - DNA, 25 bp, Homo sapien
cacaataacttcattgacagagtgg

SEQ ID NO: 1345333 - DNA, 25 bp, Homo sapien
tccacaataacttcattgacagagt

SEQ ID NO: 1345334 - DNA, 25 bp, Homo sapien
caataacttcattgacagagtggag

SEQ ID NO: 1345335 - DNA, 25 bp, Homo sapien
ccgaccaactccaaacattattact

SEQ ID NO: 1345336 - DNA, 25 bp, Homo sapien
ggtcttctccgaccaactccaaaca

SEQ ID NO: 1345337 - DNA, 25 bp, Homo sapien
ctgtaaaacttgagtggttgcgttt

SEQ ID NO: 1345338 - DNA, 25 bp, Homo sapien
tggttgcgttttgggaaggtctgga

SEQ ID NO: 1345339 - DNA, 25 bp, Homo sapien
caattaatcagtgcactgaacaaca

SEQ ID NO: 1345340 - DNA, 25 bp, Homo sapien
ccaattaatcagtgcactgaacaac

SEQ ID NO: 1345341 - DNA, 25 bp, Homo sapien
aattaatcagtgcactgaacaacat

SEQ ID NO: 1345342 - DNA, 25 bp, Homo sapien
agcaagttttgcatctcctggcccc

SEQ ID NO: 1345343 - DNA, 25 bp, Homo sapien
attaggcttttccaagcaagttttg

SEQ ID NO: 1345344 - DNA, 25 bp, Homo sapien
caagcaagttttgcatctcctggcc

SEQ ID NO: 1345345 - DNA, 25 bp, Homo sapien
tcagaacgctgcaattaggcttttc

SEQ ID NO: 1345346 - DNA, 25 bp, Homo sapien
ggtctgaatgtcagcaagggtgccc

SEQ ID NO: 1345347 - DNA, 25 bp, Homo sapien
tggtctgaatgtcagcaagggtgcc

SEQ ID NO: 1345348 - DNA, 25 bp, Homo sapien
ctgagtattgctcctgttctgtcag

SEQ ID NO: 1345349 - DNA, 25 bp, Homo sapien
tctgagtattgctcctgttctgtca

SEQ ID NO: 1345350 - DNA, 25 bp, Homo sapien
tctgcctattcctgtactggtcact

SEQ ID NO: 1345351 - DNA, 25 bp, Homo sapien
acagcagctctagtccttttgtgga

SEQ ID NO: 1345352 - DNA, 25 bp, Homo sapien
catgcttgccggaatatgcctgcag

SEQ ID NO: 1345353 - DNA, 25 bp, Homo sapien
cccgctgatgtagggttgtatggca

SEQ ID NO: 1345354 - DNA, 25 bp, Homo sapien
ccctgatgtcctgtctttatatgca

SEQ ID NO: 1345355 - DNA, 25 bp, Homo sapien
tgtgggtatccataaggcacaccat

SEQ ID NO: 1345356 - DNA, 25 bp, Homo sapien
tccctgatgtcctgtctttatatgc

SEQ ID NO: 1345357 - DNA, 25 bp, Homo sapien
tagatgcagtgtgggtatccataag

SEQ ID NO: 1345358 - DNA, 25 bp, Homo sapien
gtgtatgattttactcatgtaacat

SEQ ID NO: 1345359 - DNA, 25 bp, Homo sapien
gaggaagaaggcattctgttatttt

SEQ ID NO: 1345360 - DNA, 25 bp, Homo sapien
tagagatggacacagatcagtagtt

SEQ ID NO: 1345361 - DNA, 25 bp, Homo sapien
catctatctagcagttgtagagtaa

SEQ ID NO: 1345362 - DNA, 25 bp, Homo sapien
gactccccaaatgctaaaggtaatg

SEQ ID NO: 1345363 - DNA, 25 bp, Homo sapien
gtttaaagatctgaatgcctctggg

SEQ ID NO: 1345364 - DNA, 25 bp, Homo sapien
aacaaccctgtcaagttttccagtg

SEQ ID NO: 1345365 - DNA, 25 bp, Homo sapien
ccttcattggccttttgagactact

SEQ ID NO: 1345366 - DNA, 25 bp, Homo sapien
caacaactttgggtgccagaaaact

SEQ ID NO: 1345367 - DNA, 25 bp, Homo sapien
tatgacttatttaccgactctgtac

SEQ ID NO: 1345368 - DNA, 25 bp, Homo sapien
cagaaggtaagtacaagaagtggga

SEQ ID NO: 1345369 - DNA, 25 bp, Homo sapien
ggattcttcagtaatgcagtgttga

SEQ ID NO: 1345370 - DNA, 25 bp, Homo sapien
tatcagtggctgttcgtgtccttag

SEQ ID NO: 1345371 - DNA, 25 bp, Homo sapien
tgatgagttggcctgtatcagtggc

SEQ ID NO: 1345372 - DNA, 25 bp, Homo sapien
tgttcgtgtccttagctgcttagct

SEQ ID NO: 1345373 - DNA, 25 bp, Homo sapien
agttggcctgtatcagtggctgttc

SEQ ID NO: 1345374 - DNA, 25 bp, Homo sapien
cagatcttttgacagggtgaactaa

SEQ ID NO: 1345375 - DNA, 25 bp, Homo sapien
gaaggcatgaaatctgttatccagg

SEQ ID NO: 1345376 - DNA, 25 bp, Homo sapien
gggatgcccaaaccctgtgcatatg

SEQ ID NO: 1345377 - DNA, 25 bp, Homo sapien
caggtgctctaaaggaacggctcaa

SEQ ID NO: 1345378 - DNA, 25 bp, Homo sapien
gagttagggaatgctgaggcagctg

SEQ ID NO: 1345379 - DNA, 25 bp, Homo sapien
gaaaagagagccatgtataacagat

SEQ ID NO: 1345380 - DNA, 25 bp, Homo sapien
aatgaatagaggagttagggaatgc

SEQ ID NO: 1345381 - DNA, 25 bp, Homo sapien
aggtaggagccctcaaatgaataga

SEQ ID NO: 1345382 - DNA, 25 bp, Homo sapien
taattcacttaacattgtctataag

SEQ ID NO: 1345383 - DNA, 25 bp, Homo sapien
cttaattcacttaacattgtctata

SEQ ID NO: 1345384 - DNA, 25 bp, Homo sapien
tggcttaattcacttaacattgtct

SEQ ID NO: 1345385 - DNA, 25 bp, Homo sapien
ggcttaattcacttaacattgtcta

SEQ ID NO: 1345386 - DNA, 25 bp, Homo sapien
atgccatcatttcacaggggtcatg

SEQ ID NO: 1345387 - DNA, 25 bp, Homo sapien
gccatcatttcacaggggtcatgct

SEQ ID NO: 1345388 - DNA, 25 bp, Homo sapien
tgccatcatttcacaggggtcatgc

SEQ ID NO: 1345389 - DNA, 25 bp, Homo sapien
tatgccatcatttcacaggggtcat

SEQ ID NO: 1345390 - DNA, 25 bp, Homo sapien
ttactacgtgacagatacaaatcca

SEQ ID NO: 1345391 - DNA, 25 bp, Homo sapien
atcaagcaattactacgtgacagat

SEQ ID NO: 1345392 - DNA, 25 bp, Homo sapien
tacgtgacagatacaaatccagatt

SEQ ID NO: 1345393 - DNA, 25 bp, Homo sapien
gcaattactacgtgacagatacaaa

SEQ ID NO: 1345394 - DNA, 25 bp, Homo sapien
tgtaaagtcattaaaggactcagga

SEQ ID NO: 1345395 - DNA, 25 bp, Homo sapien
gaatggtggcccctatcttcattac

SEQ ID NO: 1345396 - DNA, 25 bp, Homo sapien
gtcattaaaggactcaggactttcc

SEQ ID NO: 1345397 - DNA, 25 bp, Homo sapien
tggtggcccctatcttcattactat

SEQ ID NO: 1345398 - DNA, 25 bp, Homo sapien
cagggaaagcggtgatgtatttcac

SEQ ID NO: 1345399 - DNA, 25 bp, Homo sapien
aacacaattttaatggcggcgggag

SEQ ID NO: 1345400 - DNA, 25 bp, Homo sapien
cacaattttaatggcggcgggagca

SEQ ID NO: 1345401 - DNA, 25 bp, Homo sapien
gtatcttggtggtcagatgccaaac

SEQ ID NO: 1345402 - DNA, 25 bp, Homo sapien
ctagatgtatcaacctgttcaaaac

SEQ ID NO: 1345403 - DNA, 25 bp, Homo sapien
tagatgtatcaacctgttcaaaaca

SEQ ID NO: 1345404 - DNA, 25 bp, Homo sapien
tgaggctgaaatttctatgtattcc

SEQ ID NO: 1345405 - DNA, 25 bp, Homo sapien
ccttttctagggacttatgttcact

SEQ ID NO: 1345406 - DNA, 25 bp, Homo sapien
tttgagtgatgtagacagtccaatt

SEQ ID NO: 1345407 - DNA, 25 bp, Homo sapien
gagttaacataagttttgagccaaa

SEQ ID NO: 1345408 - DNA, 25 bp, Homo sapien
ctgccagcacattgaccttggatgt

SEQ ID NO: 1345409 - DNA, 25 bp, Homo sapien
cagcacattgaccttggatgtccca

SEQ ID NO: 1345410 - DNA, 25 bp, Homo sapien
cattgaccttggatgtcccagtctc

SEQ ID NO: 1345411 - DNA, 25 bp, Homo sapien
gcacattgaccttggatgtcccagt

SEQ ID NO: 1345412 - DNA, 25 bp, Homo sapien
caagggagtgatgagtagtaagcaa

SEQ ID NO: 1345413 - DNA, 25 bp, Homo sapien
ttcctgagcatgataaaagtactta

SEQ ID NO: 1345414 - DNA, 25 bp, Homo sapien
ccagggtgaagcaaccaggagtgaa

SEQ ID NO: 1345415 - DNA, 25 bp, Homo sapien
gaagcaaccaggagtgaaccatgaa

SEQ ID NO: 1345416 - DNA, 25 bp, Homo sapien
atgattgggtgatgtggcattagta

SEQ ID NO: 1345417 - DNA, 25 bp, Homo sapien
ggatgattgggtgatgtggcattag

SEQ ID NO: 1345418 - DNA, 25 bp, Homo sapien
aaattggatgattgggtgatgtggc

SEQ ID NO: 1345419 - DNA, 25 bp, Homo sapien
attgggtgatgtggcattagtagca

SEQ ID NO: 1345420 - DNA, 25 bp, Homo sapien
aaatagttaatctcagggcgtgtac

SEQ ID NO: 1345421 - DNA, 25 bp, Homo sapien
gaatctacttcacatagccatgggt

SEQ ID NO: 1345422 - DNA, 25 bp, Homo sapien
taaagcacctaacatattacccgta

SEQ ID NO: 1345423 - DNA, 25 bp, Homo sapien
gcctgacagactggtaattcattaa

SEQ ID NO: 1345424 - DNA, 25 bp, Homo sapien
tctgccaccctatacaagacatgtg

SEQ ID NO: 1345425 - DNA, 25 bp, Homo sapien
tagagtcatgaccatacggaaggca

SEQ ID NO: 1345426 - DNA, 25 bp, Homo sapien
tagctggttctaggccaaatagcca

SEQ ID NO: 1345427 - DNA, 25 bp, Homo sapien
gaatcggttctaggacaaatagctg

SEQ ID NO: 1345428 - DNA, 25 bp, Homo sapien
tgggcaacaccctaaatagataaag

SEQ ID NO: 1345429 - DNA, 25 bp, Homo sapien
gtcagaggtgcaagacctaagtgcc

SEQ ID NO: 1345430 - DNA, 25 bp, Homo sapien
tacttaaggcgtggtgctgtggctc

SEQ ID NO: 1345431 - DNA, 25 bp, Homo sapien
gataaagtttcagagttccacccag

SEQ ID NO: 1345432 - DNA, 25 bp, Homo sapien
cacaggtgaccaacgacgcattagt

SEQ ID NO: 1345433 - DNA, 25 bp, Homo sapien
tcagcaagcattacgtgagcaagtc

SEQ ID NO: 1345434 - DNA, 25 bp, Homo sapien
gattcgctttcacaagtagactgca

SEQ ID NO: 1345435 - DNA, 25 bp, Homo sapien
catttgtgagtactgaacatgggcc

SEQ ID NO: 1345436 - DNA, 25 bp, Homo sapien
accacgacattatatcgcacctggc

SEQ ID NO: 1345437 - DNA, 25 bp, Homo sapien
gcgcaccacgacattatatcgcacc

SEQ ID NO: 1345438 - DNA, 25 bp, Homo sapien
caccacgacattatatcgcacctgg

SEQ ID NO: 1345439 - DNA, 25 bp, Homo sapien
gcaccacgacattatatcgcacctg

SEQ ID NO: 1345440 - DNA, 25 bp, Homo sapien
catcgttcccgaagagactctacag

SEQ ID NO: 1345441 - DNA, 25 bp, Homo sapien
ggcagtgggtaccacatcgttcccg

SEQ ID NO: 1345442 - DNA, 25 bp, Homo sapien
ctggcaagcttagaagctggctggc

SEQ ID NO: 1345443 - DNA, 25 bp, Homo sapien
cagtcccaacttcccttacgtgtgg

SEQ ID NO: 1345444 - DNA, 25 bp, Homo sapien
gaaccaaaattctagtatgaaccca

SEQ ID NO: 1345445 - DNA, 25 bp, Homo sapien
ccaaaattctagtatgaacccagag

SEQ ID NO: 1345446 - DNA, 25 bp, Homo sapien
gaaccagaaccaaaattctagtatg

SEQ ID NO: 1345447 - DNA, 25 bp, Homo sapien
aaattctagtatgaacccagagccc

SEQ ID NO: 1345448 - DNA, 25 bp, Homo sapien
cctattactctaaaatggctccctt

SEQ ID NO: 1345449 - DNA, 25 bp, Homo sapien
agcacccaacctgtggcctattact

SEQ ID NO: 1345450 - DNA, 25 bp, Homo sapien
cctgtggcctattactctaaaatgg

SEQ ID NO: 1345451 - DNA, 25 bp, Homo sapien
gccaagtgctctaaagagaaagctt

SEQ ID NO: 1345452 - DNA, 25 bp, Homo sapien
aagatgcttgtatggatgaaaggac

SEQ ID NO: 1345453 - DNA, 25 bp, Homo sapien
tgctctactgctcttatgcccacac

SEQ ID NO: 1345454 - DNA, 25 bp, Homo sapien
tactgctcttatgcccacacccaat

SEQ ID NO: 1345455 - DNA, 25 bp, Homo sapien
gcaaagatgcttgtatggatgaaag

SEQ ID NO: 1345456 - DNA, 25 bp, Homo sapien
catttccagagaggcgtttaaaagc

SEQ ID NO: 1345457 - DNA, 25 bp, Homo sapien
ctcatttccagagaggcgtttaaaa

SEQ ID NO: 1345458 - DNA, 25 bp, Homo sapien
gtactcatttccagagaggcgttta

SEQ ID NO: 1345459 - DNA, 25 bp, Homo sapien
ctagtactcatttccagagaggcgt

SEQ ID NO: 1345460 - DNA, 25 bp, Homo sapien
tactctccactcgatttgtcctgaa

SEQ ID NO: 1345461 - DNA, 25 bp, Homo sapien
aactactgtgggctacatcattact

SEQ ID NO: 1345462 - DNA, 25 bp, Homo sapien
tcgatttgtcctgaacgtatagcca

SEQ ID NO: 1345463 - DNA, 25 bp, Homo sapien
gaacgtatagccagaatgatccagg

SEQ ID NO: 1345464 - DNA, 25 bp, Homo sapien
gtcttgacaatgaccgctaagggta

SEQ ID NO: 1345465 - DNA, 25 bp, Homo sapien
aagtcttgacaatgaccgctaaggg

SEQ ID NO: 1345466 - DNA, 25 bp, Homo sapien
tcttgacaatgaccgctaagggtat

SEQ ID NO: 1345467 - DNA, 25 bp, Homo sapien
tcaagtcttgacaatgaccgctaag

SEQ ID NO: 1345468 - DNA, 25 bp, Homo sapien
ggttcatatgccatagaaatcatca

SEQ ID NO: 1345469 - DNA, 25 bp, Homo sapien
cactgcagtaatgagtggttcatat

SEQ ID NO: 1345470 - DNA, 25 bp, Homo sapien
aagatccaattgtccaccactgcag

SEQ ID NO: 1345471 - DNA, 25 bp, Homo sapien
caaatacctatttaagatccaattg

SEQ ID NO: 1345472 - DNA, 25 bp, Homo sapien
gcatgtaaaagtcacagttgagcac

SEQ ID NO: 1345473 - DNA, 25 bp, Homo sapien
taggcatgtaggcataagacttcag

SEQ ID NO: 1345474 - DNA, 25 bp, Homo sapien
cacattagaacatctcacctgagag

SEQ ID NO: 1345475 - DNA, 25 bp, Homo sapien
tgtagaaatctgcaacatgcagggt

SEQ ID NO: 1345476 - DNA, 25 bp, Homo sapien
attgctctcttccaagcattctgct

SEQ ID NO: 1345477 - DNA, 25 bp, Homo sapien
tttccattgctctcttccaagcatt

SEQ ID NO: 1345478 - DNA, 25 bp, Homo sapien
cattgctctcttccaagcattctgc

SEQ ID NO: 1345479 - DNA, 25 bp, Homo sapien
tccattgctctcttccaagcattct

SEQ ID NO: 1345480 - DNA, 25 bp, Homo sapien
tctgaacgtggatatacgggcacat

SEQ ID NO: 1345481 - DNA, 25 bp, Homo sapien
gggagacgtctgaacgtggatatac

SEQ ID NO: 1345482 - DNA, 25 bp, Homo sapien
cgtctgaacgtggatatacgggcac

SEQ ID NO: 1345483 - DNA, 25 bp, Homo sapien
gacgtctgaacgtggatatacgggc

SEQ ID NO: 1345484 - DNA, 25 bp, Homo sapien
gcttcattggagtctgtagaataaa

SEQ ID NO: 1345485 - DNA, 25 bp, Homo sapien
tctgcttcattggagtctgtagaat

SEQ ID NO: 1345486 - DNA, 25 bp, Homo sapien
catctgcttcattggagtctgtaga

SEQ ID NO: 1345487 - DNA, 25 bp, Homo sapien
ttcattggagtctgtagaataaaga

SEQ ID NO: 1345488 - DNA, 25 bp, Homo sapien
catatgctcttgactgaagaaagtc

SEQ ID NO: 1345489 - DNA, 25 bp, Homo sapien
gttactcatatgctcttgactgaag

SEQ ID NO: 1345490 - DNA, 25 bp, Homo sapien
ttctcatcaactgagcacatggagc

SEQ ID NO: 1345491 - DNA, 25 bp, Homo sapien
cacagttactcatatgctcttgact

SEQ ID NO: 1345492 - DNA, 25 bp, Homo sapien
cctccagggttactccaataaagat

SEQ ID NO: 1345493 - DNA, 25 bp, Homo sapien
gtgtggagcctagccatacttccct

SEQ ID NO: 1345494 - DNA, 25 bp, Homo sapien
ccagggttactccaataaagatgta

SEQ ID NO: 1345495 - DNA, 25 bp, Homo sapien
gcctagccatacttccctccagggt

SEQ ID NO: 1345496 - DNA, 25 bp, Homo sapien
aaaatacgtgagtcatttttaattg

SEQ ID NO: 1345497 - DNA, 25 bp, Homo sapien
ctcttggatgttctcagaaacaaaa

SEQ ID NO: 1345498 - DNA, 25 bp, Homo sapien
tctcttggatgttctcagaaacaaa

SEQ ID NO: 1345499 - DNA, 25 bp, Homo sapien
aatacgtgagtcatttttaattgta

SEQ ID NO: 1345500 - DNA, 25 bp, Homo sapien
gataaggcaatgttgtgctcccact

SEQ ID NO: 1345501 - DNA, 25 bp, Homo sapien
tcttcttgtccaaatgagtttgccg

SEQ ID NO: 1345502 - DNA, 25 bp, Homo sapien
tccaaatgagtttgccgataaggca

SEQ ID NO: 1345503 - DNA, 25 bp, Homo sapien
gaaaactgtacaaggtaagtgccat

SEQ ID NO: 1345504 - DNA, 25 bp, Homo sapien
aagtaaagcccctacatatgtcagc

SEQ ID NO: 1345505 - DNA, 25 bp, Homo sapien
taatcactgcttcattaccctagcc

SEQ ID NO: 1345506 - DNA, 25 bp, Homo sapien
cagatccaccttagtaacaacaacg

SEQ ID NO: 1345507 - DNA, 25 bp, Homo sapien
tcagctaattatcggaaacatttca

SEQ ID NO: 1345508 - DNA, 25 bp, Homo sapien
tagttctagactcaagtgcttgcac

SEQ ID NO: 1345509 - DNA, 25 bp, Homo sapien
gtgcttgcacattacccagattttc

SEQ ID NO: 1345510 - DNA, 25 bp, Homo sapien
tgccactaaatttggtccatttgac

SEQ ID NO: 1345511 - DNA, 25 bp, Homo sapien
tatttcctagttctagactcaagtg

SEQ ID NO: 1345512 - DNA, 25 bp, Homo sapien
ctgacctccaatttttcacttgaac

SEQ ID NO: 1345513 - DNA, 25 bp, Homo sapien
gacctccaatttttcacttgaacat

SEQ ID NO: 1345514 - DNA, 25 bp, Homo sapien
tcatgtcacacgtctgacctccaat

SEQ ID NO: 1345515 - DNA, 25 bp, Homo sapien
atgtcacacgtctgacctccaattt

SEQ ID NO: 1345516 - DNA, 25 bp, Homo sapien
tactcctgtgacattgctgctactt

SEQ ID NO: 1345517 - DNA, 25 bp, Homo sapien
gacattgctgctactttttacttgc

SEQ ID NO: 1345518 - DNA, 25 bp, Homo sapien
cattgctgctactttttacttgcat

SEQ ID NO: 1345519 - DNA, 25 bp, Homo sapien
gtgacattgctgctactttttactt

SEQ ID NO: 1345520 - DNA, 25 bp, Homo sapien
cagcatgagcacagaccagtcgcat

SEQ ID NO: 1345521 - DNA, 25 bp, Homo sapien
tcagattgtgccaaacaaccataga

SEQ ID NO: 1345522 - DNA, 25 bp, Homo sapien
cacaatggcgttaaacttatcctga

SEQ ID NO: 1345523 - DNA, 25 bp, Homo sapien
cagtcgcatccttccacaatggcgt

SEQ ID NO: 1345524 - DNA, 25 bp, Homo sapien
cttgctgatccaggcaaaatggcaa

SEQ ID NO: 1345525 - DNA, 25 bp, Homo sapien
tatggtaagggtagaagttcaccag

SEQ ID NO: 1345526 - DNA, 25 bp, Homo sapien
gccatttctggagatctagcctaaa

SEQ ID NO: 1345527 - DNA, 25 bp, Homo sapien
ctgagattgtggatgtcctctgtac

SEQ ID NO: 1345528 - DNA, 25 bp, Homo sapien
taagagtagcaacagtggacctgtc

SEQ ID NO: 1345529 - DNA, 25 bp, Homo sapien
gaggtaggttccgtctatgtctcac

SEQ ID NO: 1345530 - DNA, 25 bp, Homo sapien
tactgaaactgcttaagtctggaag

SEQ ID NO: 1345531 - DNA, 25 bp, Homo sapien
tctggaagtcttctaaaggagtctt

SEQ ID NO: 1345532 - DNA, 25 bp, Homo sapien
aatgacatgctcaggtttccctcct

SEQ ID NO: 1345533 - DNA, 25 bp, Homo sapien
tttccctcctactgaagtggcaccg

SEQ ID NO: 1345534 - DNA, 25 bp, Homo sapien
tcctactgaagtggcaccggatttt

SEQ ID NO: 1345535 - DNA, 25 bp, Homo sapien
aaatgacatgctcaggtttccctcc

SEQ ID NO: 1345536 - DNA, 25 bp, Homo sapien
ccaaggaatgtagagctatggctgc

SEQ ID NO: 1345537 - DNA, 25 bp, Homo sapien
caaggaatgtagagctatggctgcc

SEQ ID NO: 1345538 - DNA, 25 bp, Homo sapien
aaggaatgtagagctatggctgcca

SEQ ID NO: 1345539 - DNA, 25 bp, Homo sapien
tgacagctatcttcttgatctctcc

SEQ ID NO: 1345540 - DNA, 25 bp, Homo sapien
tctttgtaagttattgacagctatc

SEQ ID NO: 1345541 - DNA, 25 bp, Homo sapien
tgatctctccaatttgcctttgttc

SEQ ID NO: 1345542 - DNA, 25 bp, Homo sapien
tatcttcttgatctctccaatttgc

SEQ ID NO: 1345543 - DNA, 25 bp, Homo sapien
caattaaagttgattgttgctctcc

SEQ ID NO: 1345544 - DNA, 25 bp, Homo sapien
cctgggtatcgaggcccactgacat

SEQ ID NO: 1345545 - DNA, 25 bp, Homo sapien
gctctcctacaccaacaaatactga

SEQ ID NO: 1345546 - DNA, 25 bp, Homo sapien
acctgggtatcgaggcccactgaca

SEQ ID NO: 1345547 - DNA, 25 bp, Homo sapien
gcaatgatgatcaaggtatgtccca

SEQ ID NO: 1345548 - DNA, 25 bp, Homo sapien
gagataccacatactgaagccttca

SEQ ID NO: 1345549 - DNA, 25 bp, Homo sapien
caccctctgttcaacgaattaggaa

SEQ ID NO: 1345550 - DNA, 25 bp, Homo sapien
tttcaaggaggttacaggatccagg

SEQ ID NO: 1345551 - DNA, 25 bp, Homo sapien
gcttcaccaagcagcaacatgacgg

SEQ ID NO: 1345552 - DNA, 25 bp, Homo sapien
gctgaccatattactgcttcaccaa

SEQ ID NO: 1345553 - DNA, 25 bp, Homo sapien
aacatgacgggggactggtctttag

SEQ ID NO: 1345554 - DNA, 25 bp, Homo sapien
tgcgctggccagaaaattgattttc

SEQ ID NO: 1345555 - DNA, 25 bp, Homo sapien
gaacttggatctagcaggattcatt

SEQ ID NO: 1345556 - DNA, 25 bp, Homo sapien
gcaggattcattagttttacgatga

SEQ ID NO: 1345557 - DNA, 25 bp, Homo sapien
aaattctgatttggtattacgttga

SEQ ID NO: 1345558 - DNA, 25 bp, Homo sapien
tattacgttgaacttggatctagca

SEQ ID NO: 1345559 - DNA, 25 bp, Homo sapien
ctgtattataaatctccttctcctt

SEQ ID NO: 1345560 - DNA, 25 bp, Homo sapien
tgtattataaatctccttctccttt

SEQ ID NO: 1345561 - DNA, 25 bp, Homo sapien
tctccttctcctttttctgaatagt

SEQ ID NO: 1345562 - DNA, 25 bp, Homo sapien
ccttctcctttttctgaatagtcat

SEQ ID NO: 1345563 - DNA, 25 bp, Homo sapien
caatgctgatcctactttttccttg

SEQ ID NO: 1345564 - DNA, 25 bp, Homo sapien
tgtcccatgatcctgaataccttgt

SEQ ID NO: 1345565 - DNA, 25 bp, Homo sapien
cctgaataccttgttagtgatcaat

SEQ ID NO: 1345566 - DNA, 25 bp, Homo sapien
tagtgatcaatgctgatcctacttt

SEQ ID NO: 1345567 - DNA, 25 bp, Homo sapien
tctccatcagtgaagagtgttatgt

SEQ ID NO: 1345568 - DNA, 25 bp, Homo sapien
taaggaacggcatgtataaagaagt

SEQ ID NO: 1345569 - DNA, 25 bp, Homo sapien
gaatatcctgagaaccatctccatc

SEQ ID NO: 1345570 - DNA, 25 bp, Homo sapien
attctgaaaagtagtggaatatcct

SEQ ID NO: 1345571 - DNA, 25 bp, Homo sapien
gttctaccaaagtgtgccttgacaa

SEQ ID NO: 1345572 - DNA, 25 bp, Homo sapien
ccaaagtgtgccttgacaatagatg

SEQ ID NO: 1345573 - DNA, 25 bp, Homo sapien
ttcttcagctagttctaccaaagtg

SEQ ID NO: 1345574 - DNA, 25 bp, Homo sapien
gccttgacaatagatgaagacccat

SEQ ID NO: 1345575 - DNA, 25 bp, Homo sapien
ttattccacttcaaagaagagaatg

SEQ ID NO: 1345576 - DNA, 25 bp, Homo sapien
attccacttcaaagaagagaatgtt

SEQ ID NO: 1345577 - DNA, 25 bp, Homo sapien
tattccacttcaaagaagagaatgt

SEQ ID NO: 1345578 - DNA, 25 bp, Homo sapien
aattaagcttatctgggcttgcagg

SEQ ID NO: 1345579 - DNA, 25 bp, Homo sapien
cctgtttctcaaaacgttggcattt

SEQ ID NO: 1345580 - DNA, 25 bp, Homo sapien
aaaacgttggcatttggctggtaat

SEQ ID NO: 1345581 - DNA, 25 bp, Homo sapien
ggcactttcctggttctaattgtca

SEQ ID NO: 1345582 - DNA, 25 bp, Homo sapien
tttgtaaaaatagtcatgtcacttg

SEQ ID NO: 1345583 - DNA, 25 bp, Homo sapien
ttgtaaaaatagtcatgtcacttgt

SEQ ID NO: 1345584 - DNA, 25 bp, Homo sapien
tgtaaaaatagtcatgtcacttgtt

SEQ ID NO: 1345585 - DNA, 25 bp, Homo sapien
gtaaaaatagtcatgtcacttgttt

SEQ ID NO: 1345586 - DNA, 25 bp, Homo sapien
ttcagatccaaactcatgaagtgca

SEQ ID NO: 1345587 - DNA, 25 bp, Homo sapien
caaactcatgaagtgcaacttgcaa

SEQ ID NO: 1345588 - DNA, 25 bp, Homo sapien
ccaaactcatgaagtgcaacttgca

SEQ ID NO: 1345589 - DNA, 25 bp, Homo sapien
tgtcattcagatccaaactcatgaa

SEQ ID NO: 1345590 - DNA, 25 bp, Homo sapien
gctcatgttcagtcagtagtggcta

SEQ ID NO: 1345591 - DNA, 25 bp, Homo sapien
gaaaagggtcagagatattgcccaa

SEQ ID NO: 1345592 - DNA, 25 bp, Homo sapien
tagtggctagaggaacctgatgctg

SEQ ID NO: 1345593 - DNA, 25 bp, Homo sapien
acagtttctatgctacctctggagc

SEQ ID NO: 1345594 - DNA, 25 bp, Homo sapien
tatgctccataattagttggtctgg

SEQ ID NO: 1345595 - DNA, 25 bp, Homo sapien
tcttgaaaggttctgccttgcctat

SEQ ID NO: 1345596 - DNA, 25 bp, Homo sapien
gagccccaaaacttaaagcatcttg

SEQ ID NO: 1345597 - DNA, 25 bp, Homo sapien
gaataaagaataccagtagagtcca

SEQ ID NO: 1345598 - DNA, 25 bp, Homo sapien
cagtaacaacaagagctccagatgt

SEQ ID NO: 1345599 - DNA, 25 bp, Homo sapien
atggaaatgggccttgttggaagca

SEQ ID NO: 1345600 - DNA, 25 bp, Homo sapien
tctttgaagtcagcgtagggatgga

SEQ ID NO: 1345601 - DNA, 25 bp, Homo sapien
cagggcaattaatatggatgtgacc

SEQ ID NO: 1345602 - DNA, 25 bp, Homo sapien
gatattttccacatttcaggtctga

SEQ ID NO: 1345603 - DNA, 25 bp, Homo sapien
ctgaaatgagccaaggaggcttttt

SEQ ID NO: 1345604 - DNA, 25 bp, Homo sapien
ggaggctttttgatattttccacat

SEQ ID NO: 1345605 - DNA, 25 bp, Homo sapien
attttccacatttcaggtctgagaa

SEQ ID NO: 1345606 - DNA, 25 bp, Homo sapien
tcagatagagcaagcctattaagtc

SEQ ID NO: 1345607 - DNA, 25 bp, Homo sapien
ctttcacagcagtcaagatcagata

SEQ ID NO: 1345608 - DNA, 25 bp, Homo sapien
gatagagcaagcctattaagtctct

SEQ ID NO: 1345609 - DNA, 25 bp, Homo sapien
cagcagtcaagatcagatagagcaa

SEQ ID NO: 1345610 - DNA, 25 bp, Homo sapien
tttacctgccaactttgaaagaggc

SEQ ID NO: 1345611 - DNA, 25 bp, Homo sapien
ttacctgccaactttgaaagaggca

SEQ ID NO: 1345612 - DNA, 25 bp, Homo sapien
ctgcaagtagaggctcagaaagaaa

SEQ ID NO: 1345613 - DNA, 25 bp, Homo sapien
gatccacacttagttgactcctcag

SEQ ID NO: 1345614 - DNA, 25 bp, Homo sapien
gcaaatgcaatgtaaacggttgttc

SEQ ID NO: 1345615 - DNA, 25 bp, Homo sapien
gactcctcaggtgcagaatccatgg

SEQ ID NO: 1345616 - DNA, 25 bp, Homo sapien
taacctgatgagaatagcacacact

SEQ ID NO: 1345617 - DNA, 25 bp, Homo sapien
gcctgtaaacttgataacccaggtg

SEQ ID NO: 1345618 - DNA, 25 bp, Homo sapien
tagttccttgaaagacaccctctac

SEQ ID NO: 1345619 - DNA, 25 bp, Homo sapien
tatctcccaggaaatataggttgga

SEQ ID NO: 1345620 - DNA, 25 bp, Homo sapien
taaacaggtctatatccattggatc

SEQ ID NO: 1345621 - DNA, 25 bp, Homo sapien
tttgttctgttgattcactcgtact

SEQ ID NO: 1345622 - DNA, 25 bp, Homo sapien
tctgttgattcactcgtactatcaa

SEQ ID NO: 1345623 - DNA, 25 bp, Homo sapien
gattcactcgtactatcaatatgaa

SEQ ID NO: 1345624 - DNA, 25 bp, Homo sapien
tgattcactcgtactatcaatatga

SEQ ID NO: 1345625 - DNA, 25 bp, Homo sapien
gagcaaagcccagcagatgctggct

SEQ ID NO: 1345626 - DNA, 25 bp, Homo sapien
agatgctggctcctcagggccacag

SEQ ID NO: 1345627 - DNA, 25 bp, Homo sapien
cagagcaaagcccagcagatgctgg

SEQ ID NO: 1345628 - DNA, 25 bp, Homo sapien
gcagatgctggctcctcagggccac

SEQ ID NO: 1345629 - DNA, 25 bp, Homo sapien
tttggcatgtgtttttctactttgt

SEQ ID NO: 1345630 - DNA, 25 bp, Homo sapien
tggcatgtgtttttctactttgtgc

SEQ ID NO: 1345631 - DNA, 25 bp, Homo sapien
ctactttgtgcccatcattctgcat

SEQ ID NO: 1345632 - DNA, 25 bp, Homo sapien
tttctactttgtgcccatcattctg

SEQ ID NO: 1345633 - DNA, 25 bp, Homo sapien
acatctagtgcatttcagggtggta

SEQ ID NO: 1345634 - DNA, 25 bp, Homo sapien
tccgagatcagatgacatctagtgc

SEQ ID NO: 1345635 - DNA, 25 bp, Homo sapien
gatcagatgacatctagtgcatttc

SEQ ID NO: 1345636 - DNA, 25 bp, Homo sapien
gatgacatctagtgcatttcagggt

SEQ ID NO: 1345637 - DNA, 25 bp, Homo sapien
gaatttgcctcctcagtttcgaccc

SEQ ID NO: 1345638 - DNA, 25 bp, Homo sapien
agttggcctgagaatttgcctcctc

SEQ ID NO: 1345639 - DNA, 25 bp, Homo sapien
ggcctgagaatttgcctcctcagtt

SEQ ID NO: 1345640 - DNA, 25 bp, Homo sapien
tcctcagtttcgaccctgtcaacta

SEQ ID NO: 1345641 - DNA, 25 bp, Homo sapien
ttggagacctcttctcagtttgacc

SEQ ID NO: 1345642 - DNA, 25 bp, Homo sapien
tggagacctcttctcagtttgacct

SEQ ID NO: 1345643 - DNA, 25 bp, Homo sapien
tggaagccggactgggtatcctgcc

SEQ ID NO: 1345644 - DNA, 25 bp, Homo sapien
gtcaagtgggatgggtcaagaaacc

SEQ ID NO: 1345645 - DNA, 25 bp, Homo sapien
tacatggataaccagagaatggctg

SEQ ID NO: 1345646 - DNA, 25 bp, Homo sapien
cagatgccttgatccaactggaagc

SEQ ID NO: 1345647 - DNA, 25 bp, Homo sapien
tatctacgggctgtaagtttatatc

SEQ ID NO: 1345648 - DNA, 25 bp, Homo sapien
ggaacgtatccactttcatatctac

SEQ ID NO: 1345649 - DNA, 25 bp, Homo sapien
tactctccagacttctttaaataga

SEQ ID NO: 1345650 - DNA, 25 bp, Homo sapien
tacaggaactttctattggaacgta

SEQ ID NO: 1345651 - DNA, 25 bp, Homo sapien
ccttagagactggtatcggttgttg

SEQ ID NO: 1345652 - DNA, 25 bp, Homo sapien
tgtctacttgcaccaatctgttcat

SEQ ID NO: 1345653 - DNA, 25 bp, Homo sapien
gactggtatcggttgttgtctactt

SEQ ID NO: 1345654 - DNA, 25 bp, Homo sapien
aagtccttggcaccttagagactgg

SEQ ID NO: 1345655 - DNA, 25 bp, Homo sapien
tcaagtcgaaagaggaccgattgct

SEQ ID NO: 1345656 - DNA, 25 bp, Homo sapien
gctttacacagccactttcaagtcg

SEQ ID NO: 1345657 - DNA, 25 bp, Homo sapien
gattgctttacctgtcggctttgca

SEQ ID NO: 1345658 - DNA, 25 bp, Homo sapien
agaggaccgattgctttacctgtcg

SEQ ID NO: 1345659 - DNA, 25 bp, Homo sapien
tgtcttgacatagccaagtttctcc

SEQ ID NO: 1345660 - DNA, 25 bp, Homo sapien
gcatttgtcttgacatagccaagtt

SEQ ID NO: 1345661 - DNA, 25 bp, Homo sapien
ctgcatttgtcttgacatagccaag

SEQ ID NO: 1345662 - DNA, 25 bp, Homo sapien
tttgtcttgacatagccaagtttct

SEQ ID NO: 1345663 - DNA, 25 bp, Homo sapien
attcagggaccctgactgtagccat

SEQ ID NO: 1345664 - DNA, 25 bp, Homo sapien
tttccttgggagacgctgtagtgag

SEQ ID NO: 1345665 - DNA, 25 bp, Homo sapien
ttgttgatgctgactcaataagcac

SEQ ID NO: 1345666 - DNA, 25 bp, Homo sapien
tggcaagtgtccaagtttttccttg

SEQ ID NO: 1345667 - DNA, 25 bp, Homo sapien
ctaagtggggctatggcaagtgtcc

SEQ ID NO: 1345668 - DNA, 25 bp, Homo sapien
ggaacctgccaattcatatcgcctt

SEQ ID NO: 1345669 - DNA, 25 bp, Homo sapien
ctgggaacctgccaattcatatcgc

SEQ ID NO: 1345670 - DNA, 25 bp, Homo sapien
cctgccaattcatatcgccttcttt

SEQ ID NO: 1345671 - DNA, 25 bp, Homo sapien
gccaattcatatcgccttctttctg

SEQ ID NO: 1345672 - DNA, 25 bp, Homo sapien
gttccatgggacatacctgtatagg

SEQ ID NO: 1345673 - DNA, 25 bp, Homo sapien
catgggacatacctgtataggttaa

SEQ ID NO: 1345674 - DNA, 25 bp, Homo sapien
tgggttccatgggacatacctgtat

SEQ ID NO: 1345675 - DNA, 25 bp, Homo sapien
catacctgtataggttaacaggcat

SEQ ID NO: 1345676 - DNA, 25 bp, Homo sapien
cagggcaaacccatcaaaagtaaat

SEQ ID NO: 1345677 - DNA, 25 bp, Homo sapien
aacagacttatggttaatatatacc

SEQ ID NO: 1345678 - DNA, 25 bp, Homo sapien
cttcacatgtataccaaacagggca

SEQ ID NO: 1345679 - DNA, 25 bp, Homo sapien
aaattttctaccattggtatgtatt

SEQ ID NO: 1345680 - DNA, 25 bp, Homo sapien
ttttcagaggtgctaagtcaacttt

SEQ ID NO: 1345681 - DNA, 25 bp, Homo sapien
taaaagtcatcaacgtacacagtgt

SEQ ID NO: 1345682 - DNA, 25 bp, Homo sapien
taattgttccttaggcatctgatct

SEQ ID NO: 1345683 - DNA, 25 bp, Homo sapien
gatgatcataggatgtgatctggca

SEQ ID NO: 1345684 - DNA, 25 bp, Homo sapien
tttatcagtccattgggaactttaa

SEQ ID NO: 1345685 - DNA, 25 bp, Homo sapien
caaaggcaatcatatccataacaaa

SEQ ID NO: 1345686 - DNA, 25 bp, Homo sapien
tcattttatcagtccattgggaact

SEQ ID NO: 1345687 - DNA, 25 bp, Homo sapien
ttttcaaaggcaatcatatccataa

SEQ ID NO: 1345688 - DNA, 25 bp, Homo sapien
tgtgccatggctacaactcttactt

SEQ ID NO: 1345689 - DNA, 25 bp, Homo sapien
tagtcctctggtcaaaagagtgcgc

SEQ ID NO: 1345690 - DNA, 25 bp, Homo sapien
tgaactaataaacgctctgaagcct

SEQ ID NO: 1345691 - DNA, 25 bp, Homo sapien
taactctttctcgagcaacttgtgc

SEQ ID NO: 1345692 - DNA, 25 bp, Homo sapien
gctctttgtggtgcaaaaaactctt

SEQ ID NO: 1345693 - DNA, 25 bp, Homo sapien
tctttgtggtgcaaaaaactctttc

SEQ ID NO: 1345694 - DNA, 25 bp, Homo sapien
cagctctttgtggtgcaaaaaactc

SEQ ID NO: 1345695 - DNA, 25 bp, Homo sapien
ctttgtggtgcaaaaaactctttca

SEQ ID NO: 1345696 - DNA, 25 bp, Homo sapien
aatgattggctttggatgagtagta

SEQ ID NO: 1345697 - DNA, 25 bp, Homo sapien
actccgctccaatcgtatgtctttt

SEQ ID NO: 1345698 - DNA, 25 bp, Homo sapien
gctttggatgagtagtatagattgg

SEQ ID NO: 1345699 - DNA, 25 bp, Homo sapien
tccgctccaatcgtatgtctttttt

SEQ ID NO: 1345700 - DNA, 25 bp, Homo sapien
gaaaactgatatcctaaaactggta

SEQ ID NO: 1345701 - DNA, 25 bp, Homo sapien
tgtatatgggtagtttgaaaactga

SEQ ID NO: 1345702 - DNA, 25 bp, Homo sapien
gatatcctaaaactggtatccaatt

SEQ ID NO: 1345703 - DNA, 25 bp, Homo sapien
caatgaacctgaagtgtatatgggt

SEQ ID NO: 1345704 - DNA, 25 bp, Homo sapien
tagtccgatgtccactgaaacagtg

SEQ ID NO: 1345705 - DNA, 25 bp, Homo sapien
aaacagtgctttggatctaactttc

SEQ ID NO: 1345706 - DNA, 25 bp, Homo sapien
ccgatgtccactgaaacagtgcttt

SEQ ID NO: 1345707 - DNA, 25 bp, Homo sapien
acagtgctttggatctaactttctc

SEQ ID NO: 1345708 - DNA, 25 bp, Homo sapien
tttcatgcctagatcttttggtttt

SEQ ID NO: 1345709 - DNA, 25 bp, Homo sapien
ttcatgcctagatcttttggtttta

SEQ ID NO: 1345710 - DNA, 25 bp, Homo sapien
tttgatttcatgcctagatcttttg

SEQ ID NO: 1345711 - DNA, 25 bp, Homo sapien
tgatttcatgcctagatcttttggt

SEQ ID NO: 1345712 - DNA, 25 bp, Homo sapien
tttccagataatactcaaagagatt

SEQ ID NO: 1345713 - DNA, 25 bp, Homo sapien
ccagataatactcaaagagattata

SEQ ID NO: 1345714 - DNA, 25 bp, Homo sapien
cttttccagataatactcaaagaga

SEQ ID NO: 1345715 - DNA, 25 bp, Homo sapien
ttccagataatactcaaagagatta

SEQ ID NO: 1345716 - DNA, 25 bp, Homo sapien
aagtttttgcattagcagtctctgc

SEQ ID NO: 1345717 - DNA, 25 bp, Homo sapien
cctgttgtccaatgaatgatgtgca

SEQ ID NO: 1345718 - DNA, 25 bp, Homo sapien
gcactgatgagagatgaatacacac

SEQ ID NO: 1345719 - DNA, 25 bp, Homo sapien
gatatccctagtgtccaatcagaga

SEQ ID NO: 1345720 - DNA, 25 bp, Homo sapien
cttaagacaatacttcagcatggtg

SEQ ID NO: 1345721 - DNA, 25 bp, Homo sapien
gacagattccattaaccgactttta

SEQ ID NO: 1345722 - DNA, 25 bp, Homo sapien
gatttgatacctgatgacagattcc

SEQ ID NO: 1345723 - DNA, 25 bp, Homo sapien
tatccagtctttagtccgagttttc

SEQ ID NO: 1345724 - DNA, 25 bp, Homo sapien
aagtaaacacaatagctgtgacctc

SEQ ID NO: 1345725 - DNA, 25 bp, Homo sapien
aaagtaaacacaatagctgtgacct

SEQ ID NO: 1345726 - DNA, 25 bp, Homo sapien
gtaaacacaatagctgtgacctctt

SEQ ID NO: 1345727 - DNA, 25 bp, Homo sapien
agtaaacacaatagctgtgacctct

SEQ ID NO: 1345728 - DNA, 25 bp, Homo sapien
tcaggtttgaaaaagagatccttaa

SEQ ID NO: 1345729 - DNA, 25 bp, Homo sapien
tcataccctttggttatgtaaatcc

SEQ ID NO: 1345730 - DNA, 25 bp, Homo sapien
tgtttccaatatgcaagctttcctt

SEQ ID NO: 1345731 - DNA, 25 bp, Homo sapien
ccattttgcttcatatcctctaata

SEQ ID NO: 1345732 - DNA, 25 bp, Homo sapien
atttgggcacctttcagttagtagc

SEQ ID NO: 1345733 - DNA, 25 bp, Homo sapien
gcacctttcagttagtagctcttgt

SEQ ID NO: 1345734 - DNA, 25 bp, Homo sapien
tttgggcacctttcagttagtagct

SEQ ID NO: 1345735 - DNA, 25 bp, Homo sapien
tgggcacctttcagttagtagctct

SEQ ID NO: 1345736 - DNA, 25 bp, Homo sapien
caatagattttatatttcaaggaaa

SEQ ID NO: 1345737 - DNA, 25 bp, Homo sapien
ccttaaattcagaggactgtaacag

SEQ ID NO: 1345738 - DNA, 25 bp, Homo sapien
cgctttcttggacacatcttcaagc

SEQ ID NO: 1345739 - DNA, 25 bp, Homo sapien
tttttctcgctttcttggacacatc

SEQ ID NO: 1345740 - DNA, 25 bp, Homo sapien
atttcttcaccttcttatttcaata

SEQ ID NO: 1345741 - DNA, 25 bp, Homo sapien
cttatttcaatattcaaatggtaaa

SEQ ID NO: 1345742 - DNA, 25 bp, Homo sapien
ttcttcaccttcttatttcaatatt

SEQ ID NO: 1345743 - DNA, 25 bp, Homo sapien
caatattcaaatggtaaagaaaaca

SEQ ID NO: 1345744 - DNA, 25 bp, Homo sapien
ggtgaattatgagccagaattgcat

SEQ ID NO: 1345745 - DNA, 25 bp, Homo sapien
aaaactggtgaattatgagccagaa

SEQ ID NO: 1345746 - DNA, 25 bp, Homo sapien
tggtgaattatgagccagaattgca

SEQ ID NO: 1345747 - DNA, 25 bp, Homo sapien
actggtgaattatgagccagaattg

SEQ ID NO: 1345748 - DNA, 25 bp, Homo sapien
agaacaaatggatgctaaatgctca

SEQ ID NO: 1345749 - DNA, 25 bp, Homo sapien
tgctcaagctaaaaatctctacctt

SEQ ID NO: 1345750 - DNA, 25 bp, Homo sapien
aatatcaaccttgtactgcattatc

SEQ ID NO: 1345751 - DNA, 25 bp, Homo sapien
tactctattgagtgaattataaatt

SEQ ID NO: 1345752 - DNA, 25 bp, Homo sapien
tatgaccccaagcaaatactcctga

SEQ ID NO: 1345753 - DNA, 25 bp, Homo sapien
gaactaggctttaactatgacccca

SEQ ID NO: 1345754 - DNA, 25 bp, Homo sapien
taagttaaagtgaggcaagtaccac

SEQ ID NO: 1345755 - DNA, 25 bp, Homo sapien
gacttgttgaaatcccacctcatga

SEQ ID NO: 1345756 - DNA, 25 bp, Homo sapien
ctaaacctcactatgcttcattttc

SEQ ID NO: 1345757 - DNA, 25 bp, Homo sapien
taaaagggtcatgcctgttgccacc

SEQ ID NO: 1345758 - DNA, 25 bp, Homo sapien
tgtataaagcgcctaccacaatggc

SEQ ID NO: 1345759 - DNA, 25 bp, Homo sapien
gagcacttactatgagggacctacc

SEQ ID NO: 1345760 - DNA, 25 bp, Homo sapien
taagctctttagtaggtcatccaag

SEQ ID NO: 1345761 - DNA, 25 bp, Homo sapien
ttgtttaatgtagttggcatgcaaa

SEQ ID NO: 1345762 - DNA, 25 bp, Homo sapien
aacttttatcaagtttcagatagaa

SEQ ID NO: 1345763 - DNA, 25 bp, Homo sapien
tttaatgtagttggcatgcaaactt

SEQ ID NO: 1345764 - DNA, 25 bp, Homo sapien
tgtttaatgtagttggcatgcaaac

SEQ ID NO: 1345765 - DNA, 25 bp, Homo sapien
caatcaaacatagtgagggcaatga

SEQ ID NO: 1345766 - DNA, 25 bp, Homo sapien
ttaaggcttactggacaatcaaaca

SEQ ID NO: 1345767 - DNA, 25 bp, Homo sapien
gggttggacaggcagataatacaca

SEQ ID NO: 1345768 - DNA, 25 bp, Homo sapien
taaagaaaagtcgatggttacatgc

SEQ ID NO: 1345769 - DNA, 25 bp, Homo sapien
tgcaaatatctgaaatggctattgc

SEQ ID NO: 1345770 - DNA, 25 bp, Homo sapien
ccaatgatggccagttgaaaaccat

SEQ ID NO: 1345771 - DNA, 25 bp, Homo sapien
aaccataatacactgggtatctgag

SEQ ID NO: 1345772 - DNA, 25 bp, Homo sapien
tttcgaatagcacagaaaatggtaa

SEQ ID NO: 1345773 - DNA, 25 bp, Homo sapien
tatacaactttgaagtggatgaata

SEQ ID NO: 1345774 - DNA, 25 bp, Homo sapien
atacaactttgaagtggatgaatat

SEQ ID NO: 1345775 - DNA, 25 bp, Homo sapien
tccatagactttaaatgaaggccat

SEQ ID NO: 1345776 - DNA, 25 bp, Homo sapien
ttccatagactttaaatgaaggcca

SEQ ID NO: 1345777 - DNA, 25 bp, Homo sapien
agatgcatactctaagagagatgca

SEQ ID NO: 1345778 - DNA, 25 bp, Homo sapien
actctaagagagatgcaagactgca

SEQ ID NO: 1345779 - DNA, 25 bp, Homo sapien
actccattcttcatgactggttagc

SEQ ID NO: 1345780 - DNA, 25 bp, Homo sapien
ccattcttcatgactggttagctct

SEQ ID NO: 1345781 - DNA, 25 bp, Homo sapien
tgactccattcttcatgactggtta

SEQ ID NO: 1345782 - DNA, 25 bp, Homo sapien
tccattcttcatgactggttagctc

SEQ ID NO: 1345783 - DNA, 25 bp, Homo sapien
tgtagtttcgccttatccttagcgg

SEQ ID NO: 1345784 - DNA, 25 bp, Homo sapien
gaagctagaatgtagtttcgcctta

SEQ ID NO: 1345785 - DNA, 25 bp, Homo sapien
tatccttagcgggtcggttctaaca

SEQ ID NO: 1345786 - DNA, 25 bp, Homo sapien
ctgggaagctagaatgtagtttcgc

SEQ ID NO: 1345787 - DNA, 25 bp, Homo sapien
cctgagaccgttgctagagaaacaa

SEQ ID NO: 1345788 - DNA, 25 bp, Homo sapien
cagtcagacaaatcgctgggcggcc

SEQ ID NO: 1345789 - DNA, 25 bp, Homo sapien
gcaagcccttatgagttggagacaa

SEQ ID NO: 1345790 - DNA, 25 bp, Homo sapien
agttctccacatcatggttttccgg

SEQ ID NO: 1345791 - DNA, 25 bp, Homo sapien
gaagttctaagtattcactggcact

SEQ ID NO: 1345792 - DNA, 25 bp, Homo sapien
tgctgagaaacaataattggcccaa

SEQ ID NO: 1345793 - DNA, 25 bp, Homo sapien
tttttcagaaacgaatccatagctg

SEQ ID NO: 1345794 - DNA, 25 bp, Homo sapien
tagctgacaaattcactcagtgccc

SEQ ID NO: 1345795 - DNA, 25 bp, Homo sapien
tattattgcccctgttatctttgcc

SEQ ID NO: 1345796 - DNA, 25 bp, Homo sapien
tgtttcatcaatgcggccacctgag

SEQ ID NO: 1345797 - DNA, 25 bp, Homo sapien
ctgagctcccatggaaaggctcagt

SEQ ID NO: 1345798 - DNA, 25 bp, Homo sapien
tatttcctacaatactgctactgtc

SEQ ID NO: 1345799 - DNA, 25 bp, Homo sapien
tttttcaagtagaggcaaatcactt

SEQ ID NO: 1345800 - DNA, 25 bp, Homo sapien
ttttcaagtagaggcaaatcacttt

SEQ ID NO: 1345801 - DNA, 25 bp, Homo sapien
gatttttcaagtagaggcaaatcac

SEQ ID NO: 1345802 - DNA, 25 bp, Homo sapien
ttgatttttcaagtagaggcaaatc

SEQ ID NO: 1345803 - DNA, 25 bp, Homo sapien
gccaagatagattaggccctgcatt

SEQ ID NO: 1345804 - DNA, 25 bp, Homo sapien
tacagataggtatccagaccaggga

SEQ ID NO: 1345805 - DNA, 25 bp, Homo sapien
gcttctgatgccaacaatgcagggc

SEQ ID NO: 1345806 - DNA, 25 bp, Homo sapien
tctcacagtgaggaacaacatccag

SEQ ID NO: 1345807 - DNA, 25 bp, Homo sapien
tgggcagccattcccagtgacaaaa

SEQ ID NO: 1345808 - DNA, 25 bp, Homo sapien
tgcaaggtacataggaaaatgtcac

SEQ ID NO: 1345809 - DNA, 25 bp, Homo sapien
tgtttcttaaggcacagacctggaa

SEQ ID NO: 1345810 - DNA, 25 bp, Homo sapien
tcatgaaaatatgtcgcaaggccac

SEQ ID NO: 1345811 - DNA, 25 bp, Homo sapien
cagactggatgtttatgaggcttgt

SEQ ID NO: 1345812 - DNA, 25 bp, Homo sapien
actggatgtttatgaggcttgtgca

SEQ ID NO: 1345813 - DNA, 25 bp, Homo sapien
tcccagactggatgtttatgaggct

SEQ ID NO: 1345814 - DNA, 25 bp, Homo sapien
cccagactggatgtttatgaggctt

SEQ ID NO: 1345815 - DNA, 25 bp, Homo sapien
gactaggaaggcctggataagctga

SEQ ID NO: 1345816 - DNA, 25 bp, Homo sapien
ggaaggcctggataagctgagagca

SEQ ID NO: 1345817 - DNA, 25 bp, Homo sapien
aggaaggcctggataagctgagagc

SEQ ID NO: 1345818 - DNA, 25 bp, Homo sapien
cctcctaagagctggattgccttca

SEQ ID NO: 1345819 - DNA, 25 bp, Homo sapien
catcttcagctctcagaaattgagt

SEQ ID NO: 1345820 - DNA, 25 bp, Homo sapien
cagagaaggcagatattctcctcct

SEQ ID NO: 1345821 - DNA, 25 bp, Homo sapien
aattgagttccatgagattattggc

SEQ ID NO: 1345822 - DNA, 25 bp, Homo sapien
gactgaaagatctgacttgactcca

SEQ ID NO: 1345823 - DNA, 25 bp, Homo sapien
gactgaaagattagaaacctcccca

SEQ ID NO: 1345824 - DNA, 25 bp, Homo sapien
tacaggatggctcagctgctaccac

SEQ ID NO: 1345825 - DNA, 25 bp, Homo sapien
ttaggaatcacatagctggagactg

SEQ ID NO: 1345826 - DNA, 25 bp, Homo sapien
ttggcattgggtgatacagtcagct

SEQ ID NO: 1345827 - DNA, 25 bp, Homo sapien
cttggtggcaccatatgaggtcctg

SEQ ID NO: 1345828 - DNA, 25 bp, Homo sapien
gggtgatacagtcagctctgtcttg

SEQ ID NO: 1345829 - DNA, 25 bp, Homo sapien
tgacttgacagtgacgctgagggct

SEQ ID NO: 1345830 - DNA, 25 bp, Homo sapien
tctcctatagggcttcctgaactat

SEQ ID NO: 1345831 - DNA, 25 bp, Homo sapien
cagttcctaacgaatgaagtcacca

SEQ ID NO: 1345832 - DNA, 25 bp, Homo sapien
catgaggcagtgcatcagaaagagc

SEQ ID NO: 1345833 - DNA, 25 bp, Homo sapien
gtgattgctagagctcaagcagcca

SEQ ID NO: 1345834 - DNA, 25 bp, Homo sapien
taagccttcaaatatacttctactg

SEQ ID NO: 1345835 - DNA, 25 bp, Homo sapien
ttagaggtaagccttcaaatatact

SEQ ID NO: 1345836 - DNA, 25 bp, Homo sapien
aaatatacttctactgacaggttga

SEQ ID NO: 1345837 - DNA, 25 bp, Homo sapien
tctactgacaggttgaagtttgttt

SEQ ID NO: 1345838 - DNA, 25 bp, Homo sapien
gaaagcgcttcatgtgtctccactg

SEQ ID NO: 1345839 - DNA, 25 bp, Homo sapien
tgttcctcaggctcacaaggcttgg

SEQ ID NO: 1345840 - DNA, 25 bp, Homo sapien
caaacggcttgactactaacaggag

SEQ ID NO: 1345841 - DNA, 25 bp, Homo sapien
tagagctctggttgactacacgcaa

SEQ ID NO: 1345842 - DNA, 25 bp, Homo sapien
aaatgatccgtcaagggttgcagac

SEQ ID NO: 1345843 - DNA, 25 bp, Homo sapien
gcagttgcagtatcccttagtgtgg

SEQ ID NO: 1345844 - DNA, 25 bp, Homo sapien
gaggctctgaacattccgaatgcag

SEQ ID NO: 1345845 - DNA, 25 bp, Homo sapien
taaacctaggcaagtgagaccaaca

SEQ ID NO: 1345846 - DNA, 25 bp, Homo sapien
ttagaaccagagtgaagttgggagc

SEQ ID NO: 1345847 - DNA, 25 bp, Homo sapien
ctgtcctttagaaccagagtgaagt

SEQ ID NO: 1345848 - DNA, 25 bp, Homo sapien
ctgcgaagccaaggacagtcagcag

SEQ ID NO: 1345849 - DNA, 25 bp, Homo sapien
gtcctttagaaccagagtgaagttg

SEQ ID NO: 1345850 - DNA, 25 bp, Homo sapien
agctgccacagctgcggtagatggc

SEQ ID NO: 1345851 - DNA, 25 bp, Homo sapien
ctggcaatttaggtccttggcattc

SEQ ID NO: 1345852 - DNA, 25 bp, Homo sapien
acagctgcggtagatggctggcaat

SEQ ID NO: 1345853 - DNA, 25 bp, Homo sapien
ccacagctgcggtagatggctggca

SEQ ID NO: 1345854 - DNA, 25 bp, Homo sapien
catgtgggctaacctatttcgggaa

SEQ ID NO: 1345855 - DNA, 25 bp, Homo sapien
ggcatctttcccaatgtaggaaata

SEQ ID NO: 1345856 - DNA, 25 bp, Homo sapien
ttcagtggagtaaacacatccggca

SEQ ID NO: 1345857 - DNA, 25 bp, Homo sapien
gagatcacaagtgcagctccactgg

SEQ ID NO: 1345858 - DNA, 25 bp, Homo sapien
gagattagtaatctgattcccatcc

SEQ ID NO: 1345859 - DNA, 25 bp, Homo sapien
ctgagactgtggagattcgtgcctc

SEQ ID NO: 1345860 - DNA, 25 bp, Homo sapien
ggtcaggccgcttgtgtttcggaac

SEQ ID NO: 1345861 - DNA, 25 bp, Homo sapien
tcgtgcctccgaaagaactgtctgt

SEQ ID NO: 1345862 - DNA, 25 bp, Homo sapien
ccctcgtagggtgcggagagcatta

SEQ ID NO: 1345863 - DNA, 25 bp, Homo sapien
tgtgctccagcaacaaggtccgcaa

SEQ ID NO: 1345864 - DNA, 25 bp, Homo sapien
ggtccgcaacatcgtaagcccatgc

SEQ ID NO: 1345865 - DNA, 25 bp, Homo sapien
tattgctcagcaccagtacctgcag

SEQ ID NO: 1345866 - DNA, 25 bp, Homo sapien
ctgaacatcctcgataccatttctg

SEQ ID NO: 1345867 - DNA, 25 bp, Homo sapien
gagagatatccatcggtgatgatta

SEQ ID NO: 1345868 - DNA, 25 bp, Homo sapien
gagagacaggtttgtgctctcaata

SEQ ID NO: 1345869 - DNA, 25 bp, Homo sapien
ggtgatgattaaaaccctcgtggtc

SEQ ID NO: 1345870 - DNA, 25 bp, Homo sapien
gtgctctcaatagaggagagatatc

SEQ ID NO: 1345871 - DNA, 25 bp, Homo sapien
tgtcagtggggttctcattatagtc

SEQ ID NO: 1345872 - DNA, 25 bp, Homo sapien
tggggttctcattatagtctgggcc

SEQ ID NO: 1345873 - DNA, 25 bp, Homo sapien
gggttctcattatagtctgggccat

SEQ ID NO: 1345874 - DNA, 25 bp, Homo sapien
cagtggggttctcattatagtctgg

SEQ ID NO: 1345875 - DNA, 25 bp, Homo sapien
atttatgaaatctaacttcacaaat

SEQ ID NO: 1345876 - DNA, 25 bp, Homo sapien
tttatgaaatctaacttcacaaata

SEQ ID NO: 1345877 - DNA, 25 bp, Homo sapien
tagctggtgacagagggttacatct

SEQ ID NO: 1345878 - DNA, 25 bp, Homo sapien
actcagggcaagctgccaccaaccg

SEQ ID NO: 1345879 - DNA, 25 bp, Homo sapien
ctactatataggttagctggtgaca

SEQ ID NO: 1345880 - DNA, 25 bp, Homo sapien
ggttacatctttggtgcacaccaca

SEQ ID NO: 1345881 - DNA, 25 bp, Homo sapien
tggccggagtcatgtggcagcatta

SEQ ID NO: 1345882 - DNA, 25 bp, Homo sapien
gaagtcgtttcgaattggaatatgc

SEQ ID NO: 1345883 - DNA, 25 bp, Homo sapien
tatgctctaaatgcaaggtcctatg

SEQ ID NO: 1345884 - DNA, 25 bp, Homo sapien
ggcagcattaagaagtcgtttcgaa

SEQ ID NO: 1345885 - DNA, 25 bp, Homo sapien
agcaccttgctcatgaccactgtaa

SEQ ID NO: 1345886 - DNA, 25 bp, Homo sapien
cttgctcatgaccactgtaaatgtt

SEQ ID NO: 1345887 - DNA, 25 bp, Homo sapien
aatttcagcaccttgctcatgacca

SEQ ID NO: 1345888 - DNA, 25 bp, Homo sapien
accttgctcatgaccactgtaaatg

SEQ ID NO: 1345889 - DNA, 25 bp, Homo sapien
tacaagggacaaccagcatgcattt

SEQ ID NO: 1345890 - DNA, 25 bp, Homo sapien
tgcatttcccttgaactcagggtct

SEQ ID NO: 1345891 - DNA, 25 bp, Homo sapien
cactgggttacaagggacaaccagc

SEQ ID NO: 1345892 - DNA, 25 bp, Homo sapien
caggtgcgtgcacactgggttacaa

SEQ ID NO: 1345893 - DNA, 25 bp, Homo sapien
ttaagatatttagtagatagaggat

SEQ ID NO: 1345894 - DNA, 25 bp, Homo sapien
taagatatttagtagatagaggatt

SEQ ID NO: 1345895 - DNA, 25 bp, Homo sapien
tttagtagatagaggattttaattg

SEQ ID NO: 1345896 - DNA, 25 bp, Homo sapien
gatatttagtagatagaggatttta

SEQ ID NO: 1345897 - DNA, 25 bp, Homo sapien
caagttgccatttggaataacttaa

SEQ ID NO: 1345898 - DNA, 25 bp, Homo sapien
tcagtcaagttgccatttggaataa

SEQ ID NO: 1345899 - DNA, 25 bp, Homo sapien
ggtttctggatgttttctacccagc

SEQ ID NO: 1345900 - DNA, 25 bp, Homo sapien
aggtttctggatgttttctacccag

SEQ ID NO: 1345901 - DNA, 25 bp, Homo sapien
agtactgatgtctttaggagcctca

SEQ ID NO: 1345902 - DNA, 25 bp, Homo sapien
gccttcaaggttctgatgtctgact

SEQ ID NO: 1345903 - DNA, 25 bp, Homo sapien
tgtaaatggagagagtagtactgat

SEQ ID NO: 1345904 - DNA, 25 bp, Homo sapien
cttcaaggttctgatgtctgactca

SEQ ID NO: 1345905 - DNA, 25 bp, Homo sapien
gcaaggtactgtgctggtggtacca

SEQ ID NO: 1345906 - DNA, 25 bp, Homo sapien
ttgagcaaggtactgtgctggtggt

SEQ ID NO: 1345907 - DNA, 25 bp, Homo sapien
aaggtactgtgctggtggtaccagg

SEQ ID NO: 1345908 - DNA, 25 bp, Homo sapien
gagcaaggtactgtgctggtggtac

SEQ ID NO: 1345909 - DNA, 25 bp, Homo sapien
tagggccaactggtgactaactgtg

SEQ ID NO: 1345910 - DNA, 25 bp, Homo sapien
tgacactgtgcggactccagggctg

SEQ ID NO: 1345911 - DNA, 25 bp, Homo sapien
gccacagctagagtatgtagggcca

SEQ ID NO: 1345912 - DNA, 25 bp, Homo sapien
gactaactgtggaatctccacacaa

SEQ ID NO: 1345913 - DNA, 25 bp, Homo sapien
tcttgtcaatacagaagccgggagc

SEQ ID NO: 1345914 - DNA, 25 bp, Homo sapien
aatgtcaaaacctgggttgccccag

SEQ ID NO: 1345915 - DNA, 25 bp, Homo sapien
gcatccacagtcatggtcttgtcaa

SEQ ID NO: 1345916 - DNA, 25 bp, Homo sapien
cccaggattcaaagaggcatcacag

SEQ ID NO: 1345917 - DNA, 25 bp, Homo sapien
gaaagagatattttgcactaacctc

SEQ ID NO: 1345918 - DNA, 25 bp, Homo sapien
cattaaatgctttggcacttgccca

SEQ ID NO: 1345919 - DNA, 25 bp, Homo sapien
ttgaaagaaaactgatgggtttgat

SEQ ID NO: 1345920 - DNA, 25 bp, Homo sapien
aaactgatgggtttgatattcctga

SEQ ID NO: 1345921 - DNA, 25 bp, Homo sapien
ggtcctgatgaatcttctaaatccg

SEQ ID NO: 1345922 - DNA, 25 bp, Homo sapien
tgaatcttctaaatccgggcatctg

SEQ ID NO: 1345923 - DNA, 25 bp, Homo sapien
atttcagcaaatagaggtcctgatg

SEQ ID NO: 1345924 - DNA, 25 bp, Homo sapien
ctaaatccgggcatctgtgaaatgc

SEQ ID NO: 1345925 - DNA, 25 bp, Homo sapien
aatgctagcctcaatgccttactga

SEQ ID NO: 1345926 - DNA, 25 bp, Homo sapien
tgacatcaataataaatgctagcct

SEQ ID NO: 1345927 - DNA, 25 bp, Homo sapien
gacatcaataataaatgctagcctc

SEQ ID NO: 1345928 - DNA, 25 bp, Homo sapien
acatcaataataaatgctagcctca

SEQ ID NO: 1345929 - DNA, 25 bp, Homo sapien
catatgtccacaatcaaatttccat

SEQ ID NO: 1345930 - DNA, 25 bp, Homo sapien
gacatatgtccacaatcaaatttcc

SEQ ID NO: 1345931 - DNA, 25 bp, Homo sapien
gggacatatgtccacaatcaaattt

SEQ ID NO: 1345932 - DNA, 25 bp, Homo sapien
tttggggacatatgtccacaatcaa

SEQ ID NO: 1345933 - DNA, 25 bp, Homo sapien
gatgcaggctatgtatccgatccca

SEQ ID NO: 1345934 - DNA, 25 bp, Homo sapien
cattcggcgtatacctaaggagagt

SEQ ID NO: 1345935 - DNA, 25 bp, Homo sapien
cattcttgccgaaatagtagcagct

SEQ ID NO: 1345936 - DNA, 25 bp, Homo sapien
tatccgatcccatgagctcaatgca

SEQ ID NO: 1345937 - DNA, 25 bp, Homo sapien
cttcatgtggacaaaaccgcaccat

SEQ ID NO: 1345938 - DNA, 25 bp, Homo sapien
aacttcatgtggacaaaaccgcacc

SEQ ID NO: 1345939 - DNA, 25 bp, Homo sapien
ctaacttcatgtggacaaaaccgca

SEQ ID NO: 1345940 - DNA, 25 bp, Homo sapien
aactaacttcatgtggacaaaaccg

SEQ ID NO: 1345941 - DNA, 25 bp, Homo sapien
gaccttgagtgtaatgtggccagca

SEQ ID NO: 1345942 - DNA, 25 bp, Homo sapien
tgagctactgaccagggctgacaga

SEQ ID NO: 1345943 - DNA, 25 bp, Homo sapien
cagagggacttcgtgcatgtatcaa

SEQ ID NO: 1345944 - DNA, 25 bp, Homo sapien
gctgatgcttctgatcaagggacca

SEQ ID NO: 1345945 - DNA, 25 bp, Homo sapien
aatatgacttgccacaccgggaaga

SEQ ID NO: 1345946 - DNA, 25 bp, Homo sapien
tcagggagctgccttgcaaagactg

SEQ ID NO: 1345947 - DNA, 25 bp, Homo sapien
accgcagggctgctatttagtccta

SEQ ID NO: 1345948 - DNA, 25 bp, Homo sapien
gaaatgaaagcatagggcccactta

SEQ ID NO: 1345949 - DNA, 25 bp, Homo sapien
gaagtgttgccatcgcctgtagact

SEQ ID NO: 1345950 - DNA, 25 bp, Homo sapien
tcctgcgcaggagtcgtgatctttg

SEQ ID NO: 1345951 - DNA, 25 bp, Homo sapien
tactaactcatcctgttggtgccag

SEQ ID NO: 1345952 - DNA, 25 bp, Homo sapien
gcttcctgggtccttagcacgacat

SEQ ID NO: 1345953 - DNA, 25 bp, Homo sapien
tcagggctgctacttcatgaagatg

SEQ ID NO: 1345954 - DNA, 25 bp, Homo sapien
tgtcctccatgggtcctgtgtcctc

SEQ ID NO: 1345955 - DNA, 25 bp, Homo sapien
gaattgcctcttcagaaccgtcctc

SEQ ID NO: 1345956 - DNA, 25 bp, Homo sapien
tcagagatgtttttggcctctcagc

SEQ ID NO: 1345957 - DNA, 25 bp, Homo sapien
tgctgttggcttccacgccctcaag

SEQ ID NO: 1345958 - DNA, 25 bp, Homo sapien
tccctgtactatgtcagcatctctg

SEQ ID NO: 1345959 - DNA, 25 bp, Homo sapien
tgcaccaattgctgggattccttgt

SEQ ID NO: 1345960 - DNA, 25 bp, Homo sapien
gccctcaagggagcctcatgaacag

SEQ ID NO: 1345961 - DNA, 25 bp, Homo sapien
actttaatccaagcgaacaagggag

SEQ ID NO: 1345962 - DNA, 25 bp, Homo sapien
taggatgctgactataacatgcacc

SEQ ID NO: 1345963 - DNA, 25 bp, Homo sapien
tgtccccatgtcttggaatcagcaa

SEQ ID NO: 1345964 - DNA, 25 bp, Homo sapien
tatatgtgatatcaagaggccattg

SEQ ID NO: 1345965 - DNA, 25 bp, Homo sapien
gacataggctaatggcaatgaatcc

SEQ ID NO: 1345966 - DNA, 25 bp, Homo sapien
gagccaggacataggctaatggcaa

SEQ ID NO: 1345967 - DNA, 25 bp, Homo sapien
ccaggacataggctaatggcaatga

SEQ ID NO: 1345968 - DNA, 25 bp, Homo sapien
taggctaatggcaatgaatcctttc

SEQ ID NO: 1345969 - DNA, 25 bp, Homo sapien
tcaactacttctggccattctattc

SEQ ID NO: 1345970 - DNA, 25 bp, Homo sapien
gggcctgtcaactacttctggccat

SEQ ID NO: 1345971 - DNA, 25 bp, Homo sapien
tctccttagggcctgtcaactactt

SEQ ID NO: 1345972 - DNA, 25 bp, Homo sapien
ttagggcctgtcaactacttctggc

SEQ ID NO: 1345973 - DNA, 25 bp, Homo sapien
caagggttctgttattatctgtcca

SEQ ID NO: 1345974 - DNA, 25 bp, Homo sapien
gactcagcatcacagtggcagtggt

SEQ ID NO: 1345975 - DNA, 25 bp, Homo sapien
agtggcagtggtagcccaatgccaa

SEQ ID NO: 1345976 - DNA, 25 bp, Homo sapien
tcttcactgctgacaccagactcag

SEQ ID NO: 1345977 - DNA, 25 bp, Homo sapien
taagccaacgccttggtttatctgt

SEQ ID NO: 1345978 - DNA, 25 bp, Homo sapien
tatctatccaatggttcttgagagg

SEQ ID NO: 1345979 - DNA, 25 bp, Homo sapien
ttctaagtgtcatcacccagtgtgg

SEQ ID NO: 1345980 - DNA, 25 bp, Homo sapien
cacttattagcaagtatctaggcac

SEQ ID NO: 1345981 - DNA, 25 bp, Homo sapien
ttaaatcccattgggatgcagattt

SEQ ID NO: 1345982 - DNA, 25 bp, Homo sapien
acgttaagctgaaatagtttccaat

SEQ ID NO: 1345983 - DNA, 25 bp, Homo sapien
ttaagctgaaatagtttccaattcc

SEQ ID NO: 1345984 - DNA, 25 bp, Homo sapien
cgttaagctgaaatagtttccaatt

SEQ ID NO: 1345985 - DNA, 25 bp, Homo sapien
ctttaatatctactagtcaagatgc

SEQ ID NO: 1345986 - DNA, 25 bp, Homo sapien
gaatgatgacgatgaaagttgtaat

SEQ ID NO: 1345987 - DNA, 25 bp, Homo sapien
tctactagtcaagatgcaaattgaa

SEQ ID NO: 1345988 - DNA, 25 bp, Homo sapien
aggccaaacatagttgcagggtagc

SEQ ID NO: 1345989 - DNA, 25 bp, Homo sapien
tgtgccaaggcttccactcagcaag

SEQ ID NO: 1345990 - DNA, 25 bp, Homo sapien
tattctagggcagaggtttatgaac

SEQ ID NO: 1345991 - DNA, 25 bp, Homo sapien
gactactaacctttgtctggtggtg

SEQ ID NO: 1345992 - DNA, 25 bp, Homo sapien
caaaatagtagtggtttggcccctg

SEQ ID NO: 1345993 - DNA, 25 bp, Homo sapien
catagtgcaatgaccaaaatcagct

SEQ ID NO: 1345994 - DNA, 25 bp, Homo sapien
atttcattcctgagatggaattccc

SEQ ID NO: 1345995 - DNA, 25 bp, Homo sapien
tgagatggaattcccataggaggga

SEQ ID NO: 1345996 - DNA, 25 bp, Homo sapien
caggctggatagaaattatcgagta

SEQ ID NO: 1345997 - DNA, 25 bp, Homo sapien
caaagctttcgtctattggcatcgg

SEQ ID NO: 1345998 - DNA, 25 bp, Homo sapien
ggcatcggcttggtctccacatctg

SEQ ID NO: 1345999 - DNA, 25 bp, Homo sapien
catgtttcccggacttctcagataa

SEQ ID NO: 1346000 - DNA, 25 bp, Homo sapien
tgctgctgtcagtgtgggcttccct

SEQ ID NO: 1346001 - DNA, 25 bp, Homo sapien
catctttcacattgtcacgggcatc

SEQ ID NO: 1346002 - DNA, 25 bp, Homo sapien
actctcagagcatccatcattctca

SEQ ID NO: 1346003 - DNA, 25 bp, Homo sapien
ggtgactgcggtattccattcattt

SEQ ID NO: 1346004 - DNA, 25 bp, Homo sapien
ttcatttgaacatcagcctgtcctt

SEQ ID NO: 1346005 - DNA, 25 bp, Homo sapien
tttgaaaattttgatcatcacattt

SEQ ID NO: 1346006 - DNA, 25 bp, Homo sapien
catttcaaagacaaacgaaacagcc

SEQ ID NO: 1346007 - DNA, 25 bp, Homo sapien
gacaaacgaaacagccacagctaca

SEQ ID NO: 1346008 - DNA, 25 bp, Homo sapien
caaaagaaacttgtgttgttgatta

SEQ ID NO: 1346009 - DNA, 25 bp, Homo sapien
atttcctccacagcagttaccactt

SEQ ID NO: 1346010 - DNA, 25 bp, Homo sapien
gtcatttcctccacagcagttacca

SEQ ID NO: 1346011 - DNA, 25 bp, Homo sapien
ttttgttctccttgatctcatttct

SEQ ID NO: 1346012 - DNA, 25 bp, Homo sapien
cttgagctgaaaatttggctgaaac

SEQ ID NO: 1346013 - DNA, 25 bp, Homo sapien
ctttcctagatttcggcaaagacgg

SEQ ID NO: 1346014 - DNA, 25 bp, Homo sapien
aaccagtctgactcaacttttacct

SEQ ID NO: 1346015 - DNA, 25 bp, Homo sapien
cagtctgactcaacttttacctgac

SEQ ID NO: 1346016 - DNA, 25 bp, Homo sapien
ccagtctgactcaacttttacctga

SEQ ID NO: 1346017 - DNA, 25 bp, Homo sapien
accagtctgactcaacttttacctg

SEQ ID NO: 1346018 - DNA, 25 bp, Homo sapien
aacctttccgatgcttgtattcaca

SEQ ID NO: 1346019 - DNA, 25 bp, Homo sapien
gcctcgtttgcctccaagcctggaa

SEQ ID NO: 1346020 - DNA, 25 bp, Homo sapien
cacacaaacccaaagtagcctcgtt

SEQ ID NO: 1346021 - DNA, 25 bp, Homo sapien
caggagcttaacctgttcacctgca

SEQ ID NO: 1346022 - DNA, 25 bp, Homo sapien
aatcctgtgtctcatgaatatttct

SEQ ID NO: 1346023 - DNA, 25 bp, Homo sapien
tcatgaatatttcttacgtcacttc

SEQ ID NO: 1346024 - DNA, 25 bp, Homo sapien
gtctcatgaatatttcttacgtcac

SEQ ID NO: 1346025 - DNA, 25 bp, Homo sapien
ctgtgtctcatgaatatttcttacg

SEQ ID NO: 1346026 - DNA, 25 bp, Homo sapien
caggccacaaataaccagccgcttt

SEQ ID NO: 1346027 - DNA, 25 bp, Homo sapien
cttatcacagcagttctaatagggt

SEQ ID NO: 1346028 - DNA, 25 bp, Homo sapien
gacttgatttagagtgcaaggagaa

SEQ ID NO: 1346029 - DNA, 25 bp, Homo sapien
taccgccttatcacagcagttctaa

SEQ ID NO: 1346030 - DNA, 25 bp, Homo sapien
caagtagtttgcctttgtagacaca

SEQ ID NO: 1346031 - DNA, 25 bp, Homo sapien
gaagataggtgcacatttttcccca

SEQ ID NO: 1346032 - DNA, 25 bp, Homo sapien
caccacagtgctgctgataaacttt

SEQ ID NO: 1346033 - DNA, 25 bp, Homo sapien
ccaaatagatcattgtaatagctgc

SEQ ID NO: 1346034 - DNA, 25 bp, Homo sapien
ggagcagtggttggacgaaatcttc

SEQ ID NO: 1346035 - DNA, 25 bp, Homo sapien
ccatttggagcagtggttggacgaa

SEQ ID NO: 1346036 - DNA, 25 bp, Homo sapien
tggttggacgaaatcttctccttct

SEQ ID NO: 1346037 - DNA, 25 bp, Homo sapien
cagtggttggacgaaatcttctcct

SEQ ID NO: 1346038 - DNA, 25 bp, Homo sapien
cctatggagttcctgaacttcatca

SEQ ID NO: 1346039 - DNA, 25 bp, Homo sapien
ggaggaggaataggcatcatgtaac

SEQ ID NO: 1346040 - DNA, 25 bp, Homo sapien
tgtgaattgcctatggagttcctga

SEQ ID NO: 1346041 - DNA, 25 bp, Homo sapien
ctgttaatgtttggaagttgatatg

SEQ ID NO: 1346042 - DNA, 25 bp, Homo sapien
ccaagtactatctaggggagaggaa

SEQ ID NO: 1346043 - DNA, 25 bp, Homo sapien
caaagttactgctggaggatacaga

SEQ ID NO: 1346044 - DNA, 25 bp, Homo sapien
gggagaggaaatcctactcattgga

SEQ ID NO: 1346045 - DNA, 25 bp, Homo sapien
ggtacctttggctagcccattccca

SEQ ID NO: 1346046 - DNA, 25 bp, Homo sapien
caatgaggtttttgatctggacctt

SEQ ID NO: 1346047 - DNA, 25 bp, Homo sapien
tccagcaatgaggtttttgatctgg

SEQ ID NO: 1346048 - DNA, 25 bp, Homo sapien
tcattttccagcaatgaggtttttg

SEQ ID NO: 1346049 - DNA, 25 bp, Homo sapien
cattttccagcaatgaggtttttga

SEQ ID NO: 1346050 - DNA, 25 bp, Homo sapien
tttggaacagtttctactgcaggat

SEQ ID NO: 1346051 - DNA, 25 bp, Homo sapien
ggaacagtttctactgcaggattac

SEQ ID NO: 1346052 - DNA, 25 bp, Homo sapien
ctttggaacagtttctactgcagga

SEQ ID NO: 1346053 - DNA, 25 bp, Homo sapien
tggaacagtttctactgcaggatta

SEQ ID NO: 1346054 - DNA, 25 bp, Homo sapien
gagcagtatatggtcgaggggctgt

SEQ ID NO: 1346055 - DNA, 25 bp, Homo sapien
aggctgtaatcgaattggaggctgc

SEQ ID NO: 1346056 - DNA, 25 bp, Homo sapien
aagaggctgtaatcgaattggaggc

SEQ ID NO: 1346057 - DNA, 25 bp, Homo sapien
gctgtaatcgaattggaggctgcat

SEQ ID NO: 1346058 - DNA, 25 bp, Homo sapien
cacgattactctttgggccaactgg

SEQ ID NO: 1346059 - DNA, 25 bp, Homo sapien
tattttcaacagaccttcttgtgtg

SEQ ID NO: 1346060 - DNA, 25 bp, Homo sapien
cagtgctaacggactggaatgtcct

SEQ ID NO: 1346061 - DNA, 25 bp, Homo sapien
ggaatgtccttcatcaaccagaaca

SEQ ID NO: 1346062 - DNA, 25 bp, Homo sapien
cttaaacctctggattcgctccttc

SEQ ID NO: 1346063 - DNA, 25 bp, Homo sapien
tctggattcgctccttcctagctaa

SEQ ID NO: 1346064 - DNA, 25 bp, Homo sapien
gattcgctccttcctagctaaggtc

SEQ ID NO: 1346065 - DNA, 25 bp, Homo sapien
gctccttcctagctaaggtctccaa

SEQ ID NO: 1346066 - DNA, 25 bp, Homo sapien
ccttcacattcagtcagcttaaatc

SEQ ID NO: 1346067 - DNA, 25 bp, Homo sapien
ctgtagacagctgcgtctcccagca

SEQ ID NO: 1346068 - DNA, 25 bp, Homo sapien
tccttcacattcagtcagcttaaat

SEQ ID NO: 1346069 - DNA, 25 bp, Homo sapien
cttctctgtagacagctgcgtctcc

SEQ ID NO: 1346070 - DNA, 25 bp, Homo sapien
gcattcccggatatatttttgatga

SEQ ID NO: 1346071 - DNA, 25 bp, Homo sapien
gatgatcccgcttcatcatatttag

SEQ ID NO: 1346072 - DNA, 25 bp, Homo sapien
ttgcctgggctaagcattcccggat

SEQ ID NO: 1346073 - DNA, 25 bp, Homo sapien
gatatatttttgatgatcccgcttc

SEQ ID NO: 1346074 - DNA, 25 bp, Homo sapien
gccaggtgtttatccataaggctat

SEQ ID NO: 1346075 - DNA, 25 bp, Homo sapien
gacgccttatccttgtattgttaaa

SEQ ID NO: 1346076 - DNA, 25 bp, Homo sapien
tattgttaaaatacccagccaggtg

SEQ ID NO: 1346077 - DNA, 25 bp, Homo sapien
cagtcctgatcttaagagatgacgc

SEQ ID NO: 1346078 - DNA, 25 bp, Homo sapien
cttcagaatacaacgtagtctccca

SEQ ID NO: 1346079 - DNA, 25 bp, Homo sapien
acgtagtctcccaactgtgaaggcc

SEQ ID NO: 1346080 - DNA, 25 bp, Homo sapien
gaatacaacgtagtctcccaactgt

SEQ ID NO: 1346081 - DNA, 25 bp, Homo sapien
tacaacgtagtctcccaactgtgaa

SEQ ID NO: 1346082 - DNA, 25 bp, Homo sapien
agcaggtccagttgggttgaaacct

SEQ ID NO: 1346083 - DNA, 25 bp, Homo sapien
caagcaggtccagttgggttgaaac

SEQ ID NO: 1346084 - DNA, 25 bp, Homo sapien
tgtacttgatatgcgcttgtagccc

SEQ ID NO: 1346085 - DNA, 25 bp, Homo sapien
ctgtacttgatatgcgcttgtagcc

SEQ ID NO: 1346086 - DNA, 25 bp, Homo sapien
tggctccgcaccgaggtcccctgtg

SEQ ID NO: 1346087 - DNA, 25 bp, Homo sapien
gaggtcccctgtgcgcgggcacctg

SEQ ID NO: 1346088 - DNA, 25 bp, Homo sapien
ctggcgctgcgacagtcgcgctcga

SEQ ID NO: 1346089 - DNA, 25 bp, Homo sapien
ttgcaggatcccttttggaccccgc

SEQ ID NO: 1346090 - DNA, 25 bp, Homo sapien
cttccctgttgctaagggaggagag

SEQ ID NO: 1346091 - DNA, 25 bp, Homo sapien
tactggaaccgagcctgcggaagct

SEQ ID NO: 1346092 - DNA, 25 bp, Homo sapien
cggaggcgctactggaaccgagcct

SEQ ID NO: 1346093 - DNA, 25 bp, Homo sapien
agggtctggagaagcggaggcgcta

SEQ ID NO: 1346094 - DNA, 25 bp, Homo sapien
tctggcaacatcagcccctgtaggt

SEQ ID NO: 1346095 - DNA, 25 bp, Homo sapien
atgagattgctttgcaggacttgaa

SEQ ID NO: 1346096 - DNA, 25 bp, Homo sapien
ctttgcaggacttgaagggccagag

SEQ ID NO: 1346097 - DNA, 25 bp, Homo sapien
gattgctttgcaggacttgaagggc

SEQ ID NO: 1346098 - DNA, 25 bp, Homo sapien
gttgccccaggcaaatcaggcaagc

SEQ ID NO: 1346099 - DNA, 25 bp, Homo sapien
gtctgaataaaactaaggtgatgtt

SEQ ID NO: 1346100 - DNA, 25 bp, Homo sapien
cccaggcaaatcaggcaagcaacca

SEQ ID NO: 1346101 - DNA, 25 bp, Homo sapien
gatgtttttagttgccccaggcaaa

SEQ ID NO: 1346102 - DNA, 25 bp, Homo sapien
gttaaaagccatatccaattcctgc

SEQ ID NO: 1346103 - DNA, 25 bp, Homo sapien
tagtctgctatctaatgacaggtcc

SEQ ID NO: 1346104 - DNA, 25 bp, Homo sapien
tcaatggcatggagttaaaagccat

SEQ ID NO: 1346105 - DNA, 25 bp, Homo sapien
tcctgctgcctatgtagtctgctat

SEQ ID NO: 1346106 - DNA, 25 bp, Homo sapien
tttgagcaaccaccagtagtggagc

SEQ ID NO: 1346107 - DNA, 25 bp, Homo sapien
ctttgagcaaccaccagtagtggag

SEQ ID NO: 1346108 - DNA, 25 bp, Homo sapien
tggaacaaagagtaacaactcgtat

SEQ ID NO: 1346109 - DNA, 25 bp, Homo sapien
gtaacaactcgtattaataaatcca

SEQ ID NO: 1346110 - DNA, 25 bp, Homo sapien
aagtgcaagactgccccgctgtcca

SEQ ID NO: 1346111 - DNA, 25 bp, Homo sapien
gactgccccgctgtccaggcttctt

SEQ ID NO: 1346112 - DNA, 25 bp, Homo sapien
aaagtgcaagactgccccgctgtcc

SEQ ID NO: 1346113 - DNA, 25 bp, Homo sapien
caagactgccccgctgtccaggctt

SEQ ID NO: 1346114 - DNA, 25 bp, Homo sapien
tttagagatgatttatcatctcctg

SEQ ID NO: 1346115 - DNA, 25 bp, Homo sapien
gagatgatttatcatctcctggtgt

SEQ ID NO: 1346116 - DNA, 25 bp, Homo sapien
agatgatttatcatctcctggtgtt

SEQ ID NO: 1346117 - DNA, 25 bp, Homo sapien
tagagatgatttatcatctcctggt

SEQ ID NO: 1346118 - DNA, 25 bp, Homo sapien
tgtcacacatactaaaagagctttg

SEQ ID NO: 1346119 - DNA, 25 bp, Homo sapien
caaaagctactctaggatgaaagaa

SEQ ID NO: 1346120 - DNA, 25 bp, Homo sapien
aagaatagttctcatcacctgaagg

SEQ ID NO: 1346121 - DNA, 25 bp, Homo sapien
cacttagaagctatagtgataggcc

SEQ ID NO: 1346122 - DNA, 25 bp, Homo sapien
gcaagattgctaagaggtcatccct

SEQ ID NO: 1346123 - DNA, 25 bp, Homo sapien
gactatgtagtagccctaaggccac

SEQ ID NO: 1346124 - DNA, 25 bp, Homo sapien
tggtagttaatgcacacagtttggc

SEQ ID NO: 1346125 - DNA, 25 bp, Homo sapien
tacttttcatcaagaatgggcactg

SEQ ID NO: 1346126 - DNA, 25 bp, Homo sapien
caatacagtcatggctaatcagaga

SEQ ID NO: 1346127 - DNA, 25 bp, Homo sapien
cataagaagctcatggaatcgaatg

SEQ ID NO: 1346128 - DNA, 25 bp, Homo sapien
gcttgaaaacccttggaaactgagc

SEQ ID NO: 1346129 - DNA, 25 bp, Homo sapien
gacagtacctctaattacataggaa

SEQ ID NO: 1346130 - DNA, 25 bp, Homo sapien
gaagaatcatttttccagtagcccc

SEQ ID NO: 1346131 - DNA, 25 bp, Homo sapien
aagaatcatttttccagtagcccca

SEQ ID NO: 1346132 - DNA, 25 bp, Homo sapien
gaatcatttttccagtagccccact

SEQ ID NO: 1346133 - DNA, 25 bp, Homo sapien
atcatttttccagtagccccactac

SEQ ID NO: 1346134 - DNA, 25 bp, Homo sapien
tgatattttcatgagcctcggccac

SEQ ID NO: 1346135 - DNA, 25 bp, Homo sapien
aatgatattttcatgagcctcggcc

SEQ ID NO: 1346136 - DNA, 25 bp, Homo sapien
catgaatgatattttcatgagcctc

SEQ ID NO: 1346137 - DNA, 25 bp, Homo sapien
tgaatgatattttcatgagcctcgg

SEQ ID NO: 1346138 - DNA, 25 bp, Homo sapien
gagaacctatcacaggtttcaacca

SEQ ID NO: 1346139 - DNA, 25 bp, Homo sapien
cttctccaatggatattgagaacct

SEQ ID NO: 1346140 - DNA, 25 bp, Homo sapien
tccattccagcttgaagggctgctg

SEQ ID NO: 1346141 - DNA, 25 bp, Homo sapien
ggatattgagaacctatcacaggtt

SEQ ID NO: 1346142 - DNA, 25 bp, Homo sapien
ttatttcaatagtacctctgctgcc

SEQ ID NO: 1346143 - DNA, 25 bp, Homo sapien
catggtgtctcgtgggtttatttca

SEQ ID NO: 1346144 - DNA, 25 bp, Homo sapien
aggaaaagagagtaactccaattat

SEQ ID NO: 1346145 - DNA, 25 bp, Homo sapien
ttatactcgactcctttgccatggt

SEQ ID NO: 1346146 - DNA, 25 bp, Homo sapien
agttaaagattactgtaaaatagtg

SEQ ID NO: 1346147 - DNA, 25 bp, Homo sapien
aacagcaattctacagttaaagatt

SEQ ID NO: 1346148 - DNA, 25 bp, Homo sapien
tgtaaaatagtgttaaattgtggta

SEQ ID NO: 1346149 - DNA, 25 bp, Homo sapien
tgaaaaacagcaattctacagttaa

SEQ ID NO: 1346150 - DNA, 25 bp, Homo sapien
cagaagactcaagtctttactaaga

SEQ ID NO: 1346151 - DNA, 25 bp, Homo sapien
caagtctttactaagatttacatta

SEQ ID NO: 1346152 - DNA, 25 bp, Homo sapien
gactcaagtctttactaagatttac

SEQ ID NO: 1346153 - DNA, 25 bp, Homo sapien
gtgacagaagactcaagtctttact

SEQ ID NO: 1346154 - DNA, 25 bp, Homo sapien
taattatatcaattcctttctcacc

SEQ ID NO: 1346155 - DNA, 25 bp, Homo sapien
ttatatcaattcctttctcaccaac

SEQ ID NO: 1346156 - DNA, 25 bp, Homo sapien
ttcaataattatatcaattcctttc

SEQ ID NO: 1346157 - DNA, 25 bp, Homo sapien
tatatcaattcctttctcaccaaca

SEQ ID NO: 1346158 - DNA, 25 bp, Homo sapien
ctcttggatgttggacgctggctct

SEQ ID NO: 1346159 - DNA, 25 bp, Homo sapien
cacagagacgatgaactgggccctc

SEQ ID NO: 1346160 - DNA, 25 bp, Homo sapien
cccgggattgcactaggtaccagga

SEQ ID NO: 1346161 - DNA, 25 bp, Homo sapien
tcaggatgaaagtctagcaccaggg

SEQ ID NO: 1346162 - DNA, 25 bp, Homo sapien
tgtgattgaacacttcatgggctcc

SEQ ID NO: 1346163 - DNA, 25 bp, Homo sapien
ctctgtgattgaacacttcatgggc

SEQ ID NO: 1346164 - DNA, 25 bp, Homo sapien
gattgaacacttcatgggctccatt

SEQ ID NO: 1346165 - DNA, 25 bp, Homo sapien
tcatgggctccattttgcaaaacaa

SEQ ID NO: 1346166 - DNA, 25 bp, Homo sapien
caatttggcatgctgctaatccaac

SEQ ID NO: 1346167 - DNA, 25 bp, Homo sapien
gctctagcaatttggcatgctgcta

SEQ ID NO: 1346168 - DNA, 25 bp, Homo sapien
aaatctttaagccataagctctagc

SEQ ID NO: 1346169 - DNA, 25 bp, Homo sapien
cataagctctagcaatttggcatgc

SEQ ID NO: 1346170 - DNA, 25 bp, Homo sapien
tagagtgtttacgatgtgctagaca

SEQ ID NO: 1346171 - DNA, 25 bp, Homo sapien
taaggcctccaccatttaagtagaa

SEQ ID NO: 1346172 - DNA, 25 bp, Homo sapien
tggccaagtcatatgcggagatgga

SEQ ID NO: 1346173 - DNA, 25 bp, Homo sapien
atggaaacaggagttagaccagtct

SEQ ID NO: 1346174 - DNA, 25 bp, Homo sapien
acttgccccatgaaccagaacactc

SEQ ID NO: 1346175 - DNA, 25 bp, Homo sapien
cttgccccatgaaccagaacactct

SEQ ID NO: 1346176 - DNA, 25 bp, Homo sapien
tgccccatgaaccagaacactctct

SEQ ID NO: 1346177 - DNA, 25 bp, Homo sapien
ccacttgccccatgaaccagaacac

SEQ ID NO: 1346178 - DNA, 25 bp, Homo sapien
tgctagtgaaaactctgtcaccttt

SEQ ID NO: 1346179 - DNA, 25 bp, Homo sapien
gatcagagctcgataagcagtaaaa

SEQ ID NO: 1346180 - DNA, 25 bp, Homo sapien
tgtaaacagtgtggtctgctgcaag

SEQ ID NO: 1346181 - DNA, 25 bp, Homo sapien
ccccagagatcgtgctgctagtgaa

SEQ ID NO: 1346182 - DNA, 25 bp, Homo sapien
tatgtgaggcacatcaataccactg

SEQ ID NO: 1346183 - DNA, 25 bp, Homo sapien
caaagttggccaaacgatagggaca

SEQ ID NO: 1346184 - DNA, 25 bp, Homo sapien
gaataaatgccacgaaattagcagc

SEQ ID NO: 1346185 - DNA, 25 bp, Homo sapien
caagcatcctagactctcggaggag

SEQ ID NO: 1346186 - DNA, 25 bp, Homo sapien
tgtacaggggcacagtaatcttctc

SEQ ID NO: 1346187 - DNA, 25 bp, Homo sapien
ctgtacaggggcacagtaatcttct

SEQ ID NO: 1346188 - DNA, 25 bp, Homo sapien
tctctgtctcaacctaattttggta

SEQ ID NO: 1346189 - DNA, 25 bp, Homo sapien
ttcctgtacaggggcacagtaatct

SEQ ID NO: 1346190 - DNA, 25 bp, Homo sapien
gcagatgcattatctccaacagctt

SEQ ID NO: 1346191 - DNA, 25 bp, Homo sapien
catctgagccaggagtatagggtaa

SEQ ID NO: 1346192 - DNA, 25 bp, Homo sapien
ctactataagtaccagagcgaatgt

SEQ ID NO: 1346193 - DNA, 25 bp, Homo sapien
gggttgacaccacatgcatggacct

SEQ ID NO: 1346194 - DNA, 25 bp, Homo sapien
tttggaatcggtactgcaatatctg

SEQ ID NO: 1346195 - DNA, 25 bp, Homo sapien
gaatcggtactgcaatatctgatcg

SEQ ID NO: 1346196 - DNA, 25 bp, Homo sapien
tactgcaatatctgatcgcaatttc

SEQ ID NO: 1346197 - DNA, 25 bp, Homo sapien
gctctcatcaacttctgtccagtcg

SEQ ID NO: 1346198 - DNA, 25 bp, Homo sapien
cattgtatctaggatatcaccatgt

SEQ ID NO: 1346199 - DNA, 25 bp, Homo sapien
acattgtatctaggatatcaccatg

SEQ ID NO: 1346200 - DNA, 25 bp, Homo sapien
ggcctacggcataaacactgcactt

SEQ ID NO: 1346201 - DNA, 25 bp, Homo sapien
gcagaagcaggcctacggcataaac

SEQ ID NO: 1346202 - DNA, 25 bp, Homo sapien
tacggcataaacactgcactttaga

SEQ ID NO: 1346203 - DNA, 25 bp, Homo sapien
gaagcaggcctacggcataaacact

SEQ ID NO: 1346204 - DNA, 25 bp, Homo sapien
gactacattatcctatcaggcttga

SEQ ID NO: 1346205 - DNA, 25 bp, Homo sapien
tgttgatcttatctcccactgagcc

SEQ ID NO: 1346206 - DNA, 25 bp, Homo sapien
gattcatcaggctccaacctgcact

SEQ ID NO: 1346207 - DNA, 25 bp, Homo sapien
catcctactggatttggaagactca

SEQ ID NO: 1346208 - DNA, 25 bp, Homo sapien
ctatccacgggatcatcatatgctt

SEQ ID NO: 1346209 - DNA, 25 bp, Homo sapien
catcatatgcttcataacgatgaag

SEQ ID NO: 1346210 - DNA, 25 bp, Homo sapien
gggatcatcatatgcttcataacga

SEQ ID NO: 1346211 - DNA, 25 bp, Homo sapien
tccacgggatcatcatatgcttcat

SEQ ID NO: 1346212 - DNA, 25 bp, Homo sapien
aataacgtggcatactgatggcaaa

SEQ ID NO: 1346213 - DNA, 25 bp, Homo sapien
aagaataaaataacgtggcatactg

SEQ ID NO: 1346214 - DNA, 25 bp, Homo sapien
aatcctgtaataccggatttcttct

SEQ ID NO: 1346215 - DNA, 25 bp, Homo sapien
cgtggcatactgatggcaaatagga

SEQ ID NO: 1346216 - DNA, 25 bp, Homo sapien
ctgatttatggatgggaacttgcag

SEQ ID NO: 1346217 - DNA, 25 bp, Homo sapien
gaaatgaggactgccacaccttctc

SEQ ID NO: 1346218 - DNA, 25 bp, Homo sapien
cagaatctagagtgggaattaaaat

SEQ ID NO: 1346219 - DNA, 25 bp, Homo sapien
gcgtgggcttcttcagattccacag

SEQ ID NO: 1346220 - DNA, 25 bp, Homo sapien
gggaattaaaatctgcgtgggcttc

SEQ ID NO: 1346221 - DNA, 25 bp, Homo sapien
gaaggcactagaatttcccaaatta

SEQ ID NO: 1346222 - DNA, 25 bp, Homo sapien
ctaggcgaaggcactagaatttccc

SEQ ID NO: 1346223 - DNA, 25 bp, Homo sapien
tcggccaccgctcgcttcaatatgg

SEQ ID NO: 1346224 - DNA, 25 bp, Homo sapien
tttcggccaccgctcgcttcaatat

SEQ ID NO: 1346225 - DNA, 25 bp, Homo sapien
gatcgcagcgcggagttcaggaaat

SEQ ID NO: 1346226 - DNA, 25 bp, Homo sapien
gacgaggctaccatgaaggagccga

SEQ ID NO: 1346227 - DNA, 25 bp, Homo sapien
tgtttgagcaaagcggacctcagcc

SEQ ID NO: 1346228 - DNA, 25 bp, Homo sapien
aaatggaaggcgcaatgtttgagca

SEQ ID NO: 1346229 - DNA, 25 bp, Homo sapien
tgtctcgccttgatttttgcaatgg

SEQ ID NO: 1346230 - DNA, 25 bp, Homo sapien
atttccataactctgtctcgccttg

SEQ ID NO: 1346231 - DNA, 25 bp, Homo sapien
agccacttaactattcttctccaaa

SEQ ID NO: 1346232 - DNA, 25 bp, Homo sapien
tgcaatggttctctaacaagccact

SEQ ID NO: 1346233 - DNA, 25 bp, Homo sapien
ctatttgtgagcttactagtgctgc

SEQ ID NO: 1346234 - DNA, 25 bp, Homo sapien
gcactgctatttgtgagcttactag

SEQ ID NO: 1346235 - DNA, 25 bp, Homo sapien
gagcttactagtgctgctggtaagc

SEQ ID NO: 1346236 - DNA, 25 bp, Homo sapien
gagctctttgcatgcactgctattt

SEQ ID NO: 1346237 - DNA, 25 bp, Homo sapien
ccacttgccccatgaaccagaacac

SEQ ID NO: 1346238 - DNA, 25 bp, Homo sapien
cttgccccatgaaccagaacactct

SEQ ID NO: 1346239 - DNA, 25 bp, Homo sapien
acttgccccatgaaccagaacactc

SEQ ID NO: 1346240 - DNA, 25 bp, Homo sapien
tgccccatgaaccagaacactctct

SEQ ID NO: 1346241 - DNA, 25 bp, Homo sapien
ccccagagatcgtgctgctagtgaa

SEQ ID NO: 1346242 - DNA, 25 bp, Homo sapien
tgctagtgaaaactctgtcaccttt

SEQ ID NO: 1346243 - DNA, 25 bp, Homo sapien
tgtaaacagtgtggtctgctgcaag

SEQ ID NO: 1346244 - DNA, 25 bp, Homo sapien
gatcagagctcgataagcagtaaaa

SEQ ID NO: 1346245 - DNA, 25 bp, Homo sapien
ttcctgtacaggggcacagtaatct

SEQ ID NO: 1346246 - DNA, 25 bp, Homo sapien
tgtacaggggcacagtaatcttctc

SEQ ID NO: 1346247 - DNA, 25 bp, Homo sapien
ctgtacaggggcacagtaatcttct

SEQ ID NO: 1346248 - DNA, 25 bp, Homo sapien
tctctgtctcaacctaattttggta

SEQ ID NO: 1346249 - DNA, 25 bp, Homo sapien
gcagatgcattatctccaacagctt

SEQ ID NO: 1346250 - DNA, 25 bp, Homo sapien
gggttgacaccacatgcatggacct

SEQ ID NO: 1346251 - DNA, 25 bp, Homo sapien
ctactataagtaccagagcgaatgt

SEQ ID NO: 1346252 - DNA, 25 bp, Homo sapien
catctgagccaggagtatagggtaa

SEQ ID NO: 1346253 - DNA, 25 bp, Homo sapien
gctctcatcaacttctgtccagtcg

SEQ ID NO: 1346254 - DNA, 25 bp, Homo sapien
gaatcggtactgcaatatctgatcg

SEQ ID NO: 1346255 - DNA, 25 bp, Homo sapien
tactgcaatatctgatcgcaatttc

SEQ ID NO: 1346256 - DNA, 25 bp, Homo sapien
tttggaatcggtactgcaatatctg

SEQ ID NO: 1346257 - DNA, 25 bp, Homo sapien
acattgtatctaggatatcaccatg

SEQ ID NO: 1346258 - DNA, 25 bp, Homo sapien
cattgtatctaggatatcaccatgt

SEQ ID NO: 1346259 - DNA, 25 bp, Homo sapien
gcagaagcaggcctacggcataaac

SEQ ID NO: 1346260 - DNA, 25 bp, Homo sapien
ggcctacggcataaacactgcactt

SEQ ID NO: 1346261 - DNA, 25 bp, Homo sapien
gaagcaggcctacggcataaacact

SEQ ID NO: 1346262 - DNA, 25 bp, Homo sapien
tacggcataaacactgcactttaga

SEQ ID NO: 1346263 - DNA, 25 bp, Homo sapien
tgttgatcttatctcccactgagcc

SEQ ID NO: 1346264 - DNA, 25 bp, Homo sapien
gactacattatcctatcaggcttga

SEQ ID NO: 1346265 - DNA, 25 bp, Homo sapien
gattcatcaggctccaacctgcact

SEQ ID NO: 1346266 - DNA, 25 bp, Homo sapien
catcctactggatttggaagactca

SEQ ID NO: 1346267 - DNA, 25 bp, Homo sapien
gggatcatcatatgcttcataacga

SEQ ID NO: 1346268 - DNA, 25 bp, Homo sapien
ctatccacgggatcatcatatgctt

SEQ ID NO: 1346269 - DNA, 25 bp, Homo sapien
catcatatgcttcataacgatgaag

SEQ ID NO: 1346270 - DNA, 25 bp, Homo sapien
tccacgggatcatcatatgcttcat

SEQ ID NO: 1346271 - DNA, 25 bp, Homo sapien
aatcctgtaataccggatttcttct

SEQ ID NO: 1346272 - DNA, 25 bp, Homo sapien
aataacgtggcatactgatggcaaa

SEQ ID NO: 1346273 - DNA, 25 bp, Homo sapien
aagaataaaataacgtggcatactg

SEQ ID NO: 1346274 - DNA, 25 bp, Homo sapien
cgtggcatactgatggcaaatagga

SEQ ID NO: 1346275 - DNA, 25 bp, Homo sapien
ctgatttatggatgggaacttgcag

SEQ ID NO: 1346276 - DNA, 25 bp, Homo sapien
gcgtgggcttcttcagattccacag

SEQ ID NO: 1346277 - DNA, 25 bp, Homo sapien
cagaatctagagtgggaattaaaat

SEQ ID NO: 1346278 - DNA, 25 bp, Homo sapien
gggaattaaaatctgcgtgggcttc

SEQ ID NO: 1346279 - DNA, 25 bp, Homo sapien
gaaatgaggactgccacaccttctc

SEQ ID NO: 1346280 - DNA, 25 bp, Homo sapien
gaaggcactagaatttcccaaatta

SEQ ID NO: 1346281 - DNA, 25 bp, Homo sapien
ctaggcgaaggcactagaatttccc

SEQ ID NO: 1346282 - DNA, 25 bp, Homo sapien
tttcggccaccgctcgcttcaatat

SEQ ID NO: 1346283 - DNA, 25 bp, Homo sapien
tcggccaccgctcgcttcaatatgg

SEQ ID NO: 1346284 - DNA, 25 bp, Homo sapien
gcactgctatttgtgagcttactag

SEQ ID NO: 1346285 - DNA, 25 bp, Homo sapien
gagctctttgcatgcactgctattt

SEQ ID NO: 1346286 - DNA, 25 bp, Homo sapien
ctatttgtgagcttactagtgctgc

SEQ ID NO: 1346287 - DNA, 25 bp, Homo sapien
gagcttactagtgctgctggtaagc

SEQ ID NO: 1346288 - DNA, 25 bp, Homo sapien
tggcttcatctctcaatccaccctc

SEQ ID NO: 1346289 - DNA, 25 bp, Homo sapien
gtccagctggcttcatctctcaatc

SEQ ID NO: 1346290 - DNA, 25 bp, Homo sapien
gctggcttcatctctcaatccaccc

SEQ ID NO: 1346291 - DNA, 25 bp, Homo sapien
cagctggcttcatctctcaatccac

SEQ ID NO: 1346292 - DNA, 25 bp, Homo sapien
tacccacgtttgtggtgacagtcat

SEQ ID NO: 1346293 - DNA, 25 bp, Homo sapien
ggtgctggccataaacctaagaaga

SEQ ID NO: 1346294 - DNA, 25 bp, Homo sapien
catatacgatatggtggccccataa

SEQ ID NO: 1346295 - DNA, 25 bp, Homo sapien
gatgtggtcattgtaaagctgtagc

SEQ ID NO: 1346296 - DNA, 25 bp, Homo sapien
ctacatatgatcccttaacttggtt

SEQ ID NO: 1346297 - DNA, 25 bp, Homo sapien
tacatatgatcccttaacttggttg

SEQ ID NO: 1346298 - DNA, 25 bp, Homo sapien
atatagaaatgagcatatagcttgc

SEQ ID NO: 1346299 - DNA, 25 bp, Homo sapien
tgatgttgagcgtctaaatatagaa

SEQ ID NO: 1346300 - DNA, 25 bp, Homo sapien
tcagttccagtatcatgccttcttt

SEQ ID NO: 1346301 - DNA, 25 bp, Homo sapien
ctgttgatgttgagcgtctaaatat

SEQ ID NO: 1346302 - DNA, 25 bp, Homo sapien
tgatagagaattgccctttttctaa

SEQ ID NO: 1346303 - DNA, 25 bp, Homo sapien
gacaattggcccgtgtatagctaca

SEQ ID NO: 1346304 - DNA, 25 bp, Homo sapien
ggcccgtgtatagctacagctgcag

SEQ ID NO: 1346305 - DNA, 25 bp, Homo sapien
ttttgcagacatgacaattggcccg

SEQ ID NO: 1346306 - DNA, 25 bp, Homo sapien
tcaggtcttgaaggtaagcggaacc

SEQ ID NO: 1346307 - DNA, 25 bp, Homo sapien
cttgaaggtaagcggaaccattcct

SEQ ID NO: 1346308 - DNA, 25 bp, Homo sapien
aggtcttgaaggtaagcggaaccat

SEQ ID NO: 1346309 - DNA, 25 bp, Homo sapien
gtcttgaaggtaagcggaaccattc

SEQ ID NO: 1346310 - DNA, 25 bp, Homo sapien
taccgacatgtactgtatttccaag

SEQ ID NO: 1346311 - DNA, 25 bp, Homo sapien
caggcctaagggaaatagtttgaag

SEQ ID NO: 1346312 - DNA, 25 bp, Homo sapien
gtcatttaacattattaccgacatg

SEQ ID NO: 1346313 - DNA, 25 bp, Homo sapien
tgaacccacgggtcaaacaggccta

SEQ ID NO: 1346314 - DNA, 25 bp, Homo sapien
gaccacctttgacggatggatatta

SEQ ID NO: 1346315 - DNA, 25 bp, Homo sapien
catggaccacctttgacggatggat

SEQ ID NO: 1346316 - DNA, 25 bp, Homo sapien
atatctcatggaccacctttgacgg

SEQ ID NO: 1346317 - DNA, 25 bp, Homo sapien
cacctttgacggatggatattagag

SEQ ID NO: 1346318 - DNA, 25 bp, Homo sapien
caattcaccaaccagctctaccagg

SEQ ID NO: 1346319 - DNA, 25 bp, Homo sapien
caagtcccatccaattcaccaacca

SEQ ID NO: 1346320 - DNA, 25 bp, Homo sapien
ccatccaattcaccaaccagctcta

SEQ ID NO: 1346321 - DNA, 25 bp, Homo sapien
tcaagtcccatccaattcaccaacc

SEQ ID NO: 1346322 - DNA, 25 bp, Homo sapien
gctttgagatactcacaggcaaatt

SEQ ID NO: 1346323 - DNA, 25 bp, Homo sapien
agctttgagatactcacaggcaaat

SEQ ID NO: 1346324 - DNA, 25 bp, Homo sapien
tccttcaacaggtgcctcttcgaat

SEQ ID NO: 1346325 - DNA, 25 bp, Homo sapien
tcgaatctttgtgatgcctctcaac

SEQ ID NO: 1346326 - DNA, 25 bp, Homo sapien
gcctctcaacttcatcaaaggtcat

SEQ ID NO: 1346327 - DNA, 25 bp, Homo sapien
caggtgcctcttcgaatctttgtga

SEQ ID NO: 1346328 - DNA, 25 bp, Homo sapien
gcacttgtcatgtcagtacctttga

SEQ ID NO: 1346329 - DNA, 25 bp, Homo sapien
ggattccagaaaatagatttccctc

SEQ ID NO: 1346330 - DNA, 25 bp, Homo sapien
agctcaggaagttgacacctagaaa

SEQ ID NO: 1346331 - DNA, 25 bp, Homo sapien
catttcaatgttcatgaggtcataa

SEQ ID NO: 1346332 - DNA, 25 bp, Homo sapien
actgagaagttgctgacatggctgt

SEQ ID NO: 1346333 - DNA, 25 bp, Homo sapien
tggctgttgagtcctgccaagtccc

SEQ ID NO: 1346334 - DNA, 25 bp, Homo sapien
cagcaaagtatccatacttctgggc

SEQ ID NO: 1346335 - DNA, 25 bp, Homo sapien
tgttcagcaaagtatccatacttct

SEQ ID NO: 1346336 - DNA, 25 bp, Homo sapien
ctactctttatagccttcgttgagc

SEQ ID NO: 1346337 - DNA, 25 bp, Homo sapien
ctctttatagccttcgttgagccat

SEQ ID NO: 1346338 - DNA, 25 bp, Homo sapien
actctttatagccttcgttgagcca

SEQ ID NO: 1346339 - DNA, 25 bp, Homo sapien
tctttatagccttcgttgagccata

SEQ ID NO: 1346340 - DNA, 25 bp, Homo sapien
caacattctcgtaaaccttctgatt

SEQ ID NO: 1346341 - DNA, 25 bp, Homo sapien
caagccaacattctcgtaaaccttc

SEQ ID NO: 1346342 - DNA, 25 bp, Homo sapien
aaaggtacaagccaacattctcgta

SEQ ID NO: 1346343 - DNA, 25 bp, Homo sapien
ggtacaagccaacattctcgtaaac

SEQ ID NO: 1346344 - DNA, 25 bp, Homo sapien
caccatattgatcaggctgggcttg

SEQ ID NO: 1346345 - DNA, 25 bp, Homo sapien
tcaccatattgatcaggctgggctt

SEQ ID NO: 1346346 - DNA, 25 bp, Homo sapien
attccttactataaaaaactgtgct

SEQ ID NO: 1346347 - DNA, 25 bp, Homo sapien
ctgtgctttgatttgctaacaggac

SEQ ID NO: 1346348 - DNA, 25 bp, Homo sapien
ccttactataaaaaactgtgctttg

SEQ ID NO: 1346349 - DNA, 25 bp, Homo sapien
ttgctaacaggacaccttctagacc

SEQ ID NO: 1346350 - DNA, 25 bp, Homo sapien
cgtgcctctgggtgtcaaagcagca

SEQ ID NO: 1346351 - DNA, 25 bp, Homo sapien
gtgcctctgggtgtcaaagcagcag

SEQ ID NO: 1346352 - DNA, 25 bp, Homo sapien
ctgggtgtcaaagcagcagtgcatt

SEQ ID NO: 1346353 - DNA, 25 bp, Homo sapien
gccatcgattctgctctacagcctg

SEQ ID NO: 1346354 - DNA, 25 bp, Homo sapien
catctcgtgcaatcagggttgtttc

SEQ ID NO: 1346355 - DNA, 25 bp, Homo sapien
tcatttgatgaagctcttggcaccg

SEQ ID NO: 1346356 - DNA, 25 bp, Homo sapien
ctaaatccgtaggagaagaggcact

SEQ ID NO: 1346357 - DNA, 25 bp, Homo sapien
ttttcatccagaaagttacttagaa

SEQ ID NO: 1346358 - DNA, 25 bp, Homo sapien
ttcttgatgaataccagtttcctgg

SEQ ID NO: 1346359 - DNA, 25 bp, Homo sapien
ccagtttcctggaagtggacaatta

SEQ ID NO: 1346360 - DNA, 25 bp, Homo sapien
tcctggaagtggacaattatgttct

SEQ ID NO: 1346361 - DNA, 25 bp, Homo sapien
ttgtatatctatatcctgcttccct

SEQ ID NO: 1346362 - DNA, 25 bp, Homo sapien
tgtatatctatatcctgcttccctt

SEQ ID NO: 1346363 - DNA, 25 bp, Homo sapien
gtatatctatatcctgcttcccttt

SEQ ID NO: 1346364 - DNA, 25 bp, Homo sapien
ttcttaacatcactactttgggctg

SEQ ID NO: 1346365 - DNA, 25 bp, Homo sapien
tcttaacatcactactttgggctgc

SEQ ID NO: 1346366 - DNA, 25 bp, Homo sapien
ttaacatcactactttgggctgcat

SEQ ID NO: 1346367 - DNA, 25 bp, Homo sapien
ttttcttaacatcactactttgggc

SEQ ID NO: 1346368 - DNA, 25 bp, Homo sapien
cagataccccaatgatgagcaccag

SEQ ID NO: 1346369 - DNA, 25 bp, Homo sapien
gacatttacagttatgcaccagcta

SEQ ID NO: 1346370 - DNA, 25 bp, Homo sapien
tgagcaccagtaccagcgctgatgg

SEQ ID NO: 1346371 - DNA, 25 bp, Homo sapien
ccagacatattagatggagctccat

SEQ ID NO: 1346372 - DNA, 25 bp, Homo sapien
tttggctaaagttcaacagggcatc

SEQ ID NO: 1346373 - DNA, 25 bp, Homo sapien
gacaacctggttttggtagatcgca

SEQ ID NO: 1346374 - DNA, 25 bp, Homo sapien
tgagcaataaaagcagtctgtccag

SEQ ID NO: 1346375 - DNA, 25 bp, Homo sapien
tgcaaaacccctgagtagccacaaa

SEQ ID NO: 1346376 - DNA, 25 bp, Homo sapien
tgctcgaatgtgcacagcgggactt

SEQ ID NO: 1346377 - DNA, 25 bp, Homo sapien
gaagtgttggacaagaattacctac

SEQ ID NO: 1346378 - DNA, 25 bp, Homo sapien
tgcacagcgggacttctgaagtgtt

SEQ ID NO: 1346379 - DNA, 25 bp, Homo sapien
cacagcgttctgtggggtgctcgaa

SEQ ID NO: 1346380 - DNA, 25 bp, Homo sapien
tttgcacaaactgaaccacgcagcg

SEQ ID NO: 1346381 - DNA, 25 bp, Homo sapien
cagtctgtacggagatcgagtcacc

SEQ ID NO: 1346382 - DNA, 25 bp, Homo sapien
caataacaggagttcggtcaaggcc

SEQ ID NO: 1346383 - DNA, 25 bp, Homo sapien
gaagtgagcgcagacctttggacct

SEQ ID NO: 1346384 - DNA, 25 bp, Homo sapien
aaaccacaggcgtgcttaaggcgct

SEQ ID NO: 1346385 - DNA, 25 bp, Homo sapien
ttccgtagcggaccgggagagctta

SEQ ID NO: 1346386 - DNA, 25 bp, Homo sapien
tgtgatggactttagcgtttcgcgc

SEQ ID NO: 1346387 - DNA, 25 bp, Homo sapien
tcgcgccatagcttttagccgggaa

SEQ ID NO: 1346388 - DNA, 25 bp, Homo sapien
catcagaccgcagtgaggaatgccg

SEQ ID NO: 1346389 - DNA, 25 bp, Homo sapien
tattggtcctccagaaccgcttgaa

SEQ ID NO: 1346390 - DNA, 25 bp, Homo sapien
aaggagtcgccaaccagaattctgc

SEQ ID NO: 1346391 - DNA, 25 bp, Homo sapien
tctgcgaaccggctggaaagaaaca

SEQ ID NO: 1346392 - DNA, 25 bp, Homo sapien
agctcgggtccgcaagagcagggct

SEQ ID NO: 1346393 - DNA, 25 bp, Homo sapien
ggagtcctggatgcgcctcctttga

SEQ ID NO: 1346394 - DNA, 25 bp, Homo sapien
tttgaccacgttttctctcaggctc

SEQ ID NO: 1346395 - DNA, 25 bp, Homo sapien
tccacaggtctgacccaggcgagtc

SEQ ID NO: 1346396 - DNA, 25 bp, Homo sapien
gggaatccgagtttccggagattgc

SEQ ID NO: 1346397 - DNA, 25 bp, Homo sapien
cgggaatccgagtttccggagattg

SEQ ID NO: 1346398 - DNA, 25 bp, Homo sapien
gcgggaggagccgtagcaggggcag

SEQ ID NO: 1346399 - DNA, 25 bp, Homo sapien
tagcaggggcagtttcgggaatccg

SEQ ID NO: 1346400 - DNA, 25 bp, Homo sapien
ttgcaaaaagccctgtggtccacgg

SEQ ID NO: 1346401 - DNA, 25 bp, Homo sapien
gattacaaatttcgcagctgctcgc

SEQ ID NO: 1346402 - DNA, 25 bp, Homo sapien
taagaattaccgaggcggaaggctc

SEQ ID NO: 1346403 - DNA, 25 bp, Homo sapien
gatgtttataaacggcgcctgcagt

SEQ ID NO: 1346404 - DNA, 25 bp, Homo sapien
agcgcacccctgtaaagtaggaaga

SEQ ID NO: 1346405 - DNA, 25 bp, Homo sapien
cgcacccctgtaaagtaggaagata

SEQ ID NO: 1346406 - DNA, 25 bp, Homo sapien
gcgcacccctgtaaagtaggaagat

SEQ ID NO: 1346407 - DNA, 25 bp, Homo sapien
tcagccctgggattcatagcaaaca

SEQ ID NO: 1346408 - DNA, 25 bp, Homo sapien
taccgcccaggacatagaaattgac

SEQ ID NO: 1346409 - DNA, 25 bp, Homo sapien
gaagaagctataccttcgtacgccc

SEQ ID NO: 1346410 - DNA, 25 bp, Homo sapien
tcagaaggtcgttggaccccagacc

SEQ ID NO: 1346411 - DNA, 25 bp, Homo sapien
tagtagccagacagtaccccagatt

SEQ ID NO: 1346412 - DNA, 25 bp, Homo sapien
gcgaggccagaccaatctttcacgt

SEQ ID NO: 1346413 - DNA, 25 bp, Homo sapien
gataaattctcctcgatagtagcca

SEQ ID NO: 1346414 - DNA, 25 bp, Homo sapien
tgggtggaaagaccgcataaatgcc

SEQ ID NO: 1346415 - DNA, 25 bp, Homo sapien
acactgtaattaaatatccaaaccg

SEQ ID NO: 1346416 - DNA, 25 bp, Homo sapien
cactgtaattaaatatccaaaccgg

SEQ ID NO: 1346417 - DNA, 25 bp, Homo sapien
tgatggcgccaatgttctgcacgac

SEQ ID NO: 1346418 - DNA, 25 bp, Homo sapien
tttccattcggaagagcggtctcca

SEQ ID NO: 1346419 - DNA, 25 bp, Homo sapien
gaaatcctgctctatacacgacctg

SEQ ID NO: 1346420 - DNA, 25 bp, Homo sapien
tggttcccacgcacaagttagcttt

SEQ ID NO: 1346421 - DNA, 25 bp, Homo sapien
tgctagataagtcagctcccaggct

SEQ ID NO: 1346422 - DNA, 25 bp, Homo sapien
caaatctagtcgcaaatcataagct

SEQ ID NO: 1346423 - DNA, 25 bp, Homo sapien
tgtctttcttgtagccttgatttca

SEQ ID NO: 1346424 - DNA, 25 bp, Homo sapien
ttttcggaaagggagcgcgaactgc

SEQ ID NO: 1346425 - DNA, 25 bp, Homo sapien
gggctccagaaaggcctccgggatc

SEQ ID NO: 1346426 - DNA, 25 bp, Homo sapien
cggagacctggctcgtttcgttcgg

SEQ ID NO: 1346427 - DNA, 25 bp, Homo sapien
gcggacacttgcctgccctgaggca

SEQ ID NO: 1346428 - DNA, 25 bp, Homo sapien
tcaggtccatgtgagtcgtgctttt

SEQ ID NO: 1346429 - DNA, 25 bp, Homo sapien
gcttggtccaagttgtatgtttaga

SEQ ID NO: 1346430 - DNA, 25 bp, Homo sapien
cttggtccaagttgtatgtttagac

SEQ ID NO: 1346431 - DNA, 25 bp, Homo sapien
tggcttggtccaagttgtatgttta

SEQ ID NO: 1346432 - DNA, 25 bp, Homo sapien
ttggtccaagttgtatgtttagaca

SEQ ID NO: 1346433 - DNA, 25 bp, Homo sapien
ctgattgtgagtatgctcaacctgt

SEQ ID NO: 1346434 - DNA, 25 bp, Homo sapien
ggctctgtcattaagtgctgattgt

SEQ ID NO: 1346435 - DNA, 25 bp, Homo sapien
tcaacctgttctgggagtcttttgg

SEQ ID NO: 1346436 - DNA, 25 bp, Homo sapien
agggctctgtcattaagtgctgatt

SEQ ID NO: 1346437 - DNA, 25 bp, Homo sapien
ggtataggagaaggaaatggtttgc

SEQ ID NO: 1346438 - DNA, 25 bp, Homo sapien
agaaggaaatggtttgcgaggacat

SEQ ID NO: 1346439 - DNA, 25 bp, Homo sapien
tataggagaaggaaatggtttgcga

SEQ ID NO: 1346440 - DNA, 25 bp, Homo sapien
ggagaaggaaatggtttgcgaggac

SEQ ID NO: 1346441 - DNA, 25 bp, Homo sapien
tcatgaatgtccactaggcgcaagg

SEQ ID NO: 1346442 - DNA, 25 bp, Homo sapien
caattcccttgcgacttctgatggc

SEQ ID NO: 1346443 - DNA, 25 bp, Homo sapien
gatttactgtccaacgagagtggga

SEQ ID NO: 1346444 - DNA, 25 bp, Homo sapien
tgtgagcaccctttcgaggagtaaa

SEQ ID NO: 1346445 - DNA, 25 bp, Homo sapien
actgtaagagaagtaacaccgccat

SEQ ID NO: 1346446 - DNA, 25 bp, Homo sapien
tggtacagagtaaatatcaaagcag

SEQ ID NO: 1346447 - DNA, 25 bp, Homo sapien
gaagaatggtacagagtaaatatca

SEQ ID NO: 1346448 - DNA, 25 bp, Homo sapien
ctaggaggaagaatggtacagagta

SEQ ID NO: 1346449 - DNA, 25 bp, Homo sapien
tatgcgaaaacaataagcccttgtg

SEQ ID NO: 1346450 - DNA, 25 bp, Homo sapien
tcagttgcatgattgagaaaataac

SEQ ID NO: 1346451 - DNA, 25 bp, Homo sapien
gtgtaacaggtcagattctgccaat

SEQ ID NO: 1346452 - DNA, 25 bp, Homo sapien
caatattgcgtgtctctcagttgca

SEQ ID NO: 1346453 - DNA, 25 bp, Homo sapien
ttttgatctttagctgggaccactg

SEQ ID NO: 1346454 - DNA, 25 bp, Homo sapien
gatggagcgccaacagtatatttcc

SEQ ID NO: 1346455 - DNA, 25 bp, Homo sapien
gagagagttcctaacccacagtatg

SEQ ID NO: 1346456 - DNA, 25 bp, Homo sapien
cagtttagagagttgtccaccagct

SEQ ID NO: 1346457 - DNA, 25 bp, Homo sapien
tttctgtagatccatcatttctttc

SEQ ID NO: 1346458 - DNA, 25 bp, Homo sapien
gcttctggggaactagttgcttctt

SEQ ID NO: 1346459 - DNA, 25 bp, Homo sapien
cttgatcagaattccatgcaggtta

SEQ ID NO: 1346460 - DNA, 25 bp, Homo sapien
gttgcttcttgatcagaattccatg

SEQ ID NO: 1346461 - DNA, 25 bp, Homo sapien
ctgtatatgcagcagccaaagcagg

SEQ ID NO: 1346462 - DNA, 25 bp, Homo sapien
cagccaaagcaggcaaaagcagaag

SEQ ID NO: 1346463 - DNA, 25 bp, Homo sapien
gcagcagccaaagcaggcaaaagca

SEQ ID NO: 1346464 - DNA, 25 bp, Homo sapien
gcagccaaagcaggcaaaagcagaa

SEQ ID NO: 1346465 - DNA, 25 bp, Homo sapien
taatgagacctcaaaccgtcaagct

SEQ ID NO: 1346466 - DNA, 25 bp, Homo sapien
ggatgctcttcccttagtcacttag

SEQ ID NO: 1346467 - DNA, 25 bp, Homo sapien
caaaagagggaacatgatagacgct

SEQ ID NO: 1346468 - DNA, 25 bp, Homo sapien
tagatttctactagcgctcacagtg

SEQ ID NO: 1346469 - DNA, 25 bp, Homo sapien
tatatgtccttgaaaccaccttgtc

SEQ ID NO: 1346470 - DNA, 25 bp, Homo sapien
tagaggcactcctctccgaatccta

SEQ ID NO: 1346471 - DNA, 25 bp, Homo sapien
aattccacatatctagttcccagag

SEQ ID NO: 1346472 - DNA, 25 bp, Homo sapien
gatgcacagtgcgaattggccctat

SEQ ID NO: 1346473 - DNA, 25 bp, Homo sapien
catgtgagtgccataatttattcat

SEQ ID NO: 1346474 - DNA, 25 bp, Homo sapien
ttttactgacccctcaatctctggt

SEQ ID NO: 1346475 - DNA, 25 bp, Homo sapien
gaacatgtccataacctcccatagt

SEQ ID NO: 1346476 - DNA, 25 bp, Homo sapien
tggtgagaatactaacgagcttagc

SEQ ID NO: 1346477 - DNA, 25 bp, Homo sapien
gggaaaacacacatactgaatactc

SEQ ID NO: 1346478 - DNA, 25 bp, Homo sapien
cgaagggggaaaacacacatactga

SEQ ID NO: 1346479 - DNA, 25 bp, Homo sapien
aagggggaaaacacacatactgaat

SEQ ID NO: 1346480 - DNA, 25 bp, Homo sapien
gggggaaaacacacatactgaatac

SEQ ID NO: 1346481 - DNA, 25 bp, Homo sapien
gaacccatgtgcaatcaggtaagac

SEQ ID NO: 1346482 - DNA, 25 bp, Homo sapien
ccatgtgcaatcaggtaagacccaa

SEQ ID NO: 1346483 - DNA, 25 bp, Homo sapien
cgctgaagaacccatgtgcaatcag

SEQ ID NO: 1346484 - DNA, 25 bp, Homo sapien
tgaagaacccatgtgcaatcaggta

SEQ ID NO: 1346485 - DNA, 25 bp, Homo sapien
ctgtaaatggatgaagaagagaacc

SEQ ID NO: 1346486 - DNA, 25 bp, Homo sapien
aagaagagaaccaacatgtcattta

SEQ ID NO: 1346487 - DNA, 25 bp, Homo sapien
gatgaagaagagaaccaacatgtca

SEQ ID NO: 1346488 - DNA, 25 bp, Homo sapien
tggatgaagaagagaaccaacatgt

SEQ ID NO: 1346489 - DNA, 25 bp, Homo sapien
ctttgaccagaagaagaataatgca

SEQ ID NO: 1346490 - DNA, 25 bp, Homo sapien
tttgaccagaagaagaataatgcag

SEQ ID NO: 1346491 - DNA, 25 bp, Homo sapien
aaagccatgatgagaaagttttgaa

SEQ ID NO: 1346492 - DNA, 25 bp, Homo sapien
tgctggtccttgtgcaatcactggc

SEQ ID NO: 1346493 - DNA, 25 bp, Homo sapien
taaagatgctggtccttgtgcaatc

SEQ ID NO: 1346494 - DNA, 25 bp, Homo sapien
aatttaaagatgctggtccttgtgc

SEQ ID NO: 1346495 - DNA, 25 bp, Homo sapien
ggtccttgtgcaatcactggcagtc

SEQ ID NO: 1346496 - DNA, 25 bp, Homo sapien
tccagcaactagaagtttccccagg

SEQ ID NO: 1346497 - DNA, 25 bp, Homo sapien
tagaagtttccccaggaataataca

SEQ ID NO: 1346498 - DNA, 25 bp, Homo sapien
cagcaactagaagtttccccaggaa

SEQ ID NO: 1346499 - DNA, 25 bp, Homo sapien
ccagcaactagaagtttccccagga

SEQ ID NO: 1346500 - DNA, 25 bp, Homo sapien
catcttttgctgacctgcagaagtt

SEQ ID NO: 1346501 - DNA, 25 bp, Homo sapien
agattgaaagcatcttttgctgacc

SEQ ID NO: 1346502 - DNA, 25 bp, Homo sapien
tgcagaagtttctgccatatattgc

SEQ ID NO: 1346503 - DNA, 25 bp, Homo sapien
caaaacatttctcatcagcagattg

SEQ ID NO: 1346504 - DNA, 25 bp, Homo sapien
aatttagacaatgtgttctgggtac

SEQ ID NO: 1346505 - DNA, 25 bp, Homo sapien
ttgtaggaatttagacaatgtgttc

SEQ ID NO: 1346506 - DNA, 25 bp, Homo sapien
taggaatttagacaatgtgttctgg

SEQ ID NO: 1346507 - DNA, 25 bp, Homo sapien
ggaatttagacaatgtgttctgggt

SEQ ID NO: 1346508 - DNA, 25 bp, Homo sapien
taagacggtggtccaagtattctag

SEQ ID NO: 1346509 - DNA, 25 bp, Homo sapien
agacggtggtccaagtattctagta

SEQ ID NO: 1346510 - DNA, 25 bp, Homo sapien
gacggtggtccaagtattctagtac

SEQ ID NO: 1346511 - DNA, 25 bp, Homo sapien
ttaagacggtggtccaagtattcta

SEQ ID NO: 1346512 - DNA, 25 bp, Homo sapien
aaagtggatatcgtgggatgtcatc

SEQ ID NO: 1346513 - DNA, 25 bp, Homo sapien
tttcatggcccagtaataagtagcg

SEQ ID NO: 1346514 - DNA, 25 bp, Homo sapien
cgtatggctcgtccaaatgcagtaa

SEQ ID NO: 1346515 - DNA, 25 bp, Homo sapien
gtagcgaatgcaccagcaagggcgc

SEQ ID NO: 1346516 - DNA, 25 bp, Homo sapien
caatgacgaagtttataagccagag

SEQ ID NO: 1346517 - DNA, 25 bp, Homo sapien
cccagggcaagctttggcaatttca

SEQ ID NO: 1346518 - DNA, 25 bp, Homo sapien
gtactgatggtacaagctctttcca

SEQ ID NO: 1346519 - DNA, 25 bp, Homo sapien
aagcaaagttacacagagccccagg

SEQ ID NO: 1346520 - DNA, 25 bp, Homo sapien
tgactttgtatacaggtacccccga

SEQ ID NO: 1346521 - DNA, 25 bp, Homo sapien
tttcatgtatacaatgcccccctgg

SEQ ID NO: 1346522 - DNA, 25 bp, Homo sapien
caggtacccccgatgtcgccaagaa

SEQ ID NO: 1346523 - DNA, 25 bp, Homo sapien
ttcatgtatacaatgcccccctgga

SEQ ID NO: 1346524 - DNA, 25 bp, Homo sapien
actgctgtcacgacccagtagcaaa

SEQ ID NO: 1346525 - DNA, 25 bp, Homo sapien
aatgaaagttaaagctggatagact

SEQ ID NO: 1346526 - DNA, 25 bp, Homo sapien
tgtactaggaacatatccaatggct

SEQ ID NO: 1346527 - DNA, 25 bp, Homo sapien
ctggatagactaatgtactaggaac

SEQ ID NO: 1346528 - DNA, 25 bp, Homo sapien
ggataatggcgactcggattcgatt

SEQ ID NO: 1346529 - DNA, 25 bp, Homo sapien
cagcaggataatggcgactcggatt

SEQ ID NO: 1346530 - DNA, 25 bp, Homo sapien
caggataatggcgactcggattcga

SEQ ID NO: 1346531 - DNA, 25 bp, Homo sapien
gataatggcgactcggattcgattc

SEQ ID NO: 1346532 - DNA, 25 bp, Homo sapien
aagatcagcatgaggatgacaatca

SEQ ID NO: 1346533 - DNA, 25 bp, Homo sapien
ctgaggaagatcagcatgaggatga

SEQ ID NO: 1346534 - DNA, 25 bp, Homo sapien
aggaagatcagcatgaggatgacaa

SEQ ID NO: 1346535 - DNA, 25 bp, Homo sapien
tgaggaagatcagcatgaggatgac

SEQ ID NO: 1346536 - DNA, 25 bp, Homo sapien
taagacaatatacagaagacacgtt

SEQ ID NO: 1346537 - DNA, 25 bp, Homo sapien
cattattaatttgtgactcttcgca

SEQ ID NO: 1346538 - DNA, 25 bp, Homo sapien
atgccacttaactgtccttgctggc

SEQ ID NO: 1346539 - DNA, 25 bp, Homo sapien
caggttcttggctgtcccattatta

SEQ ID NO: 1346540 - DNA, 25 bp, Homo sapien
tgttagtctgaatcccgatgtcata

SEQ ID NO: 1346541 - DNA, 25 bp, Homo sapien
taatacagaacttgggcgttcctga

SEQ ID NO: 1346542 - DNA, 25 bp, Homo sapien
tggtgtactgctggtaacagtgcca

SEQ ID NO: 1346543 - DNA, 25 bp, Homo sapien
ccatgtttgttgcagttcaaagtac

SEQ ID NO: 1346544 - DNA, 25 bp, Homo sapien
aacacttgcccacaaacagtctggc

SEQ ID NO: 1346545 - DNA, 25 bp, Homo sapien
tctgctcagtatgacacatccacat

SEQ ID NO: 1346546 - DNA, 25 bp, Homo sapien
tatacctcttaacctgttctggcca

SEQ ID NO: 1346547 - DNA, 25 bp, Homo sapien
ttctggccaatgagaattgttccat

SEQ ID NO: 1346548 - DNA, 25 bp, Homo sapien
agaagaggcatccagctatgaacct

SEQ ID NO: 1346549 - DNA, 25 bp, Homo sapien
ctaaggaccatggcaatcgtcaggc

SEQ ID NO: 1346550 - DNA, 25 bp, Homo sapien
cacaccaatcatgaagacccagaag

SEQ ID NO: 1346551 - DNA, 25 bp, Homo sapien
gaacctcagaagtatcaaaaatatc

SEQ ID NO: 1346552 - DNA, 25 bp, Homo sapien
atgagaatccaataccaagttcttg

SEQ ID NO: 1346553 - DNA, 25 bp, Homo sapien
tccaagtgactttgcatcaagaagt

SEQ ID NO: 1346554 - DNA, 25 bp, Homo sapien
tcaatccaagtgactttgcatcaag

SEQ ID NO: 1346555 - DNA, 25 bp, Homo sapien
aataccaagttcttgcatagtcttc

SEQ ID NO: 1346556 - DNA, 25 bp, Homo sapien
ttgcagcaatcccgagttctacaac

SEQ ID NO: 1346557 - DNA, 25 bp, Homo sapien
tttgcagcaatcccgagttctacaa

SEQ ID NO: 1346558 - DNA, 25 bp, Homo sapien
tgcagcaatcccgagttctacaaca

SEQ ID NO: 1346559 - DNA, 25 bp, Homo sapien
agttctacaacacttcttgtccctc

SEQ ID NO: 1346560 - DNA, 25 bp, Homo sapien
ttgttaaagtgccatttttggtaga

SEQ ID NO: 1346561 - DNA, 25 bp, Homo sapien
tcctattgttaaagtgccatttttg

SEQ ID NO: 1346562 - DNA, 25 bp, Homo sapien
cttacttcctattgttaaagtgcca

SEQ ID NO: 1346563 - DNA, 25 bp, Homo sapien
ttggtagagaagtcagggaaacatc

SEQ ID NO: 1346564 - DNA, 25 bp, Homo sapien
acctttctactgctcttcccttcct

SEQ ID NO: 1346565 - DNA, 25 bp, Homo sapien
ctgccccacctttctactgctcttc

SEQ ID NO: 1346566 - DNA, 25 bp, Homo sapien
ccacctttctactgctcttcccttc

SEQ ID NO: 1346567 - DNA, 25 bp, Homo sapien
gccccacctttctactgctcttccc

SEQ ID NO: 1346568 - DNA, 25 bp, Homo sapien
catccagtaaaagctgtgtgagaga

SEQ ID NO: 1346569 - DNA, 25 bp, Homo sapien
gctgggaaaaatcgctgttggacaa

SEQ ID NO: 1346570 - DNA, 25 bp, Homo sapien
tgctgggaaaaatcgctgttggaca

SEQ ID NO: 1346571 - DNA, 25 bp, Homo sapien
ttgctgggaaaaatcgctgttggac

SEQ ID NO: 1346572 - DNA, 25 bp, Homo sapien
tcttcccagtagcttttgtcttttg

SEQ ID NO: 1346573 - DNA, 25 bp, Homo sapien
cagtggtcttacagaactgacggta

SEQ ID NO: 1346574 - DNA, 25 bp, Homo sapien
ttttgtgtacaaaagttgcatttcc

SEQ ID NO: 1346575 - DNA, 25 bp, Homo sapien
cttcacaggcttagcagtggtctta

SEQ ID NO: 1346576 - DNA, 25 bp, Homo sapien
tggtagggcactgtaggtttagcaa

SEQ ID NO: 1346577 - DNA, 25 bp, Homo sapien
gactggtacagcgtaacaggttaaa

SEQ ID NO: 1346578 - DNA, 25 bp, Homo sapien
cactgtaggtttagcaacacggagg

SEQ ID NO: 1346579 - DNA, 25 bp, Homo sapien
ttagcaacacggagggactggtaca

SEQ ID NO: 1346580 - DNA, 25 bp, Homo sapien
agagactgtggaggtgaatcaccag

SEQ ID NO: 1346581 - DNA, 25 bp, Homo sapien
cattaagagactgtggaggtgaatc

SEQ ID NO: 1346582 - DNA, 25 bp, Homo sapien
actgtggaggtgaatcaccagggat

SEQ ID NO: 1346583 - DNA, 25 bp, Homo sapien
ctgacattaagagactgtggaggtg

SEQ ID NO: 1346584 - DNA, 25 bp, Homo sapien
aatcaaatggtagacctacctttag

SEQ ID NO: 1346585 - DNA, 25 bp, Homo sapien
ggccacaaaagtggccctggctgtc

SEQ ID NO: 1346586 - DNA, 25 bp, Homo sapien
tctggccacaaaagtggccctggct

SEQ ID NO: 1346587 - DNA, 25 bp, Homo sapien
tgctcttctggggtccccatgtacc

SEQ ID NO: 1346588 - DNA, 25 bp, Homo sapien
ctgtctgtaggataggctgctcttc

SEQ ID NO: 1346589 - DNA, 25 bp, Homo sapien
ctttctggttttgaactgtggcagg

SEQ ID NO: 1346590 - DNA, 25 bp, Homo sapien
ttgactttctggttttgaactgtgg

SEQ ID NO: 1346591 - DNA, 25 bp, Homo sapien
tgactttctggttttgaactgtggc

SEQ ID NO: 1346592 - DNA, 25 bp, Homo sapien
tttctggttttgaactgtggcaggt

SEQ ID NO: 1346593 - DNA, 25 bp, Homo sapien
tgtgtttgagctgaaacataaagac

SEQ ID NO: 1346594 - DNA, 25 bp, Homo sapien
tgctgcagatggtctgtgtttgagc

SEQ ID NO: 1346595 - DNA, 25 bp, Homo sapien
tgagctgctgctacacctctccaca

SEQ ID NO: 1346596 - DNA, 25 bp, Homo sapien
ctctggcacagaagttgtgctgcag

SEQ ID NO: 1346597 - DNA, 25 bp, Homo sapien
gaagatacacccaaatttcaaggtc

SEQ ID NO: 1346598 - DNA, 25 bp, Homo sapien
tactgctacatgaaacagcaatagc

SEQ ID NO: 1346599 - DNA, 25 bp, Homo sapien
gatgtaaaagatgggacaaagcata

SEQ ID NO: 1346600 - DNA, 25 bp, Homo sapien
tctaagtcaatgctagaccaccact

SEQ ID NO: 1346601 - DNA, 25 bp, Homo sapien
ttgtgcaggtgcacatgtgcttcat

SEQ ID NO: 1346602 - DNA, 25 bp, Homo sapien
gtttgtgcaggtgcacatgtgcttc

SEQ ID NO: 1346603 - DNA, 25 bp, Homo sapien
tttgtgcaggtgcacatgtgcttca

SEQ ID NO: 1346604 - DNA, 25 bp, Homo sapien
ggactacattagactggcttcgaga

SEQ ID NO: 1346605 - DNA, 25 bp, Homo sapien
tccaagtgtggacaaggctcagcag

SEQ ID NO: 1346606 - DNA, 25 bp, Homo sapien
caactgggctgatagtggacactaa

SEQ ID NO: 1346607 - DNA, 25 bp, Homo sapien
tgaagtattaccctagctggccata

SEQ ID NO: 1346608 - DNA, 25 bp, Homo sapien
gtagccaataatacacagtaggaag

SEQ ID NO: 1346609 - DNA, 25 bp, Homo sapien
cacagtaggaagatcatacagcaca

SEQ ID NO: 1346610 - DNA, 25 bp, Homo sapien
gtaggaagatcatacagcacagaac

SEQ ID NO: 1346611 - DNA, 25 bp, Homo sapien
caagtcctaaaacaatgtagccaat

SEQ ID NO: 1346612 - DNA, 25 bp, Homo sapien
cagatgctatgaaacgttggtgaac

SEQ ID NO: 1346613 - DNA, 25 bp, Homo sapien
atgctttctctcacggagttcccag

SEQ ID NO: 1346614 - DNA, 25 bp, Homo sapien
gaaccacacagatgagatgctttct

SEQ ID NO: 1346615 - DNA, 25 bp, Homo sapien
tattttgtgccggatactgtggcag

SEQ ID NO: 1346616 - DNA, 25 bp, Homo sapien
atttttgccagcacaactctttgtg

SEQ ID NO: 1346617 - DNA, 25 bp, Homo sapien
tcttgaataatctactctaagcttc

SEQ ID NO: 1346618 - DNA, 25 bp, Homo sapien
cacaactctttgtggctgccttgtt

SEQ ID NO: 1346619 - DNA, 25 bp, Homo sapien
tagctcttgaataatctactctaag

SEQ ID NO: 1346620 - DNA, 25 bp, Homo sapien
caccagtatttaaagttaatctagc

SEQ ID NO: 1346621 - DNA, 25 bp, Homo sapien
gaataaaatgaagggcaaagccctg

SEQ ID NO: 1346622 - DNA, 25 bp, Homo sapien
agaataaaatgaagggcaaagccct

SEQ ID NO: 1346623 - DNA, 25 bp, Homo sapien
aaaatgaagggcaaagccctgcttc

SEQ ID NO: 1346624 - DNA, 25 bp, Homo sapien
ccccagctgccaattcattaggcag

SEQ ID NO: 1346625 - DNA, 25 bp, Homo sapien
tgtgttctatggcaactacgacttc

SEQ ID NO: 1346626 - DNA, 25 bp, Homo sapien
ctgccaattcattaggcagctgtgt

SEQ ID NO: 1346627 - DNA, 25 bp, Homo sapien
tggcaactacgacttctaagagctt

SEQ ID NO: 1346628 - DNA, 25 bp, Homo sapien
aatgtctgcaagaggttacaaacca

SEQ ID NO: 1346629 - DNA, 25 bp, Homo sapien
tccacagaaagatataggttaacac

SEQ ID NO: 1346630 - DNA, 25 bp, Homo sapien
tattagcgtgactcttttccacaga

SEQ ID NO: 1346631 - DNA, 25 bp, Homo sapien
cattcggaatggagcaaatggccta

SEQ ID NO: 1346632 - DNA, 25 bp, Homo sapien
tatccctggattctatgtcacactg

SEQ ID NO: 1346633 - DNA, 25 bp, Homo sapien
tggccgttactcagccccttttgaa

SEQ ID NO: 1346634 - DNA, 25 bp, Homo sapien
catccttgtatttatccctggattc

SEQ ID NO: 1346635 - DNA, 25 bp, Homo sapien
aagtgtaataatgctatggccgtta

SEQ ID NO: 1346636 - DNA, 25 bp, Homo sapien
tctgggtcatatgtccttggatcac

SEQ ID NO: 1346637 - DNA, 25 bp, Homo sapien
gttggcaacaggccccttgaaatct

SEQ ID NO: 1346638 - DNA, 25 bp, Homo sapien
caacaggccccttgaaatctgggtc

SEQ ID NO: 1346639 - DNA, 25 bp, Homo sapien
ctgttggcaacaggccccttgaaat

SEQ ID NO: 1346640 - DNA, 25 bp, Homo sapien
acagccagccggatttccaacttac

SEQ ID NO: 1346641 - DNA, 25 bp, Homo sapien
cagccagccggatttccaacttact

SEQ ID NO: 1346642 - DNA, 25 bp, Homo sapien
agccagccggatttccaacttactt

SEQ ID NO: 1346643 - DNA, 25 bp, Homo sapien
aacagccagccggatttccaactta

SEQ ID NO: 1346644 - DNA, 25 bp, Homo sapien
tgaactacaaagtcaatctcaaagg

SEQ ID NO: 1346645 - DNA, 25 bp, Homo sapien
gtgaactacaaagtcaatctcaaag

SEQ ID NO: 1346646 - DNA, 25 bp, Homo sapien
cagtgaactacaaagtcaatctcaa

SEQ ID NO: 1346647 - DNA, 25 bp, Homo sapien
tcagtgaactacaaagtcaatctca

SEQ ID NO: 1346648 - DNA, 25 bp, Homo sapien
catttgaattggcaggaggaacttc

SEQ ID NO: 1346649 - DNA, 25 bp, Homo sapien
ggaaaggcctccctcactaacagaa

SEQ ID NO: 1346650 - DNA, 25 bp, Homo sapien
ccaaaaatcgatagggaggtgacag

SEQ ID NO: 1346651 - DNA, 25 bp, Homo sapien
tagagacaagagatcccattacccc

SEQ ID NO: 1346652 - DNA, 25 bp, Homo sapien
cctctgctgagatgcacttttagtg

SEQ ID NO: 1346653 - DNA, 25 bp, Homo sapien
ccctgaatactgagtgcaccccaga

SEQ ID NO: 1346654 - DNA, 25 bp, Homo sapien
gagtgcaccccagatcttaggatct

SEQ ID NO: 1346655 - DNA, 25 bp, Homo sapien
ttagtggatgcaaaaccaacagttc

SEQ ID NO: 1346656 - DNA, 25 bp, Homo sapien
ctcagagggagtatctgctggtttt

SEQ ID NO: 1346657 - DNA, 25 bp, Homo sapien
tcagagggagtatctgctggttttt

SEQ ID NO: 1346658 - DNA, 25 bp, Homo sapien
agctaaatgaagtgcccaaaatata

SEQ ID NO: 1346659 - DNA, 25 bp, Homo sapien
tataaaatggccatcccttgctgat

SEQ ID NO: 1346660 - DNA, 25 bp, Homo sapien
tagtatgtacgtgcaaggattggca

SEQ ID NO: 1346661 - DNA, 25 bp, Homo sapien
aaaatagtatgtacgtgcaaggatt

SEQ ID NO: 1346662 - DNA, 25 bp, Homo sapien
tcagtgccgggtatagcaggaagca

SEQ ID NO: 1346663 - DNA, 25 bp, Homo sapien
ggaagcatgtcagtaatctcagacc

SEQ ID NO: 1346664 - DNA, 25 bp, Homo sapien
gcaggaagcatgtcagtaatctcag

SEQ ID NO: 1346665 - DNA, 25 bp, Homo sapien
cccatttggaatcagtgccgggtat

SEQ ID NO: 1346666 - DNA, 25 bp, Homo sapien
tcttcctgtaaggagtaattgcttc

SEQ ID NO: 1346667 - DNA, 25 bp, Homo sapien
tgtaaggagtaattgcttccctctc

SEQ ID NO: 1346668 - DNA, 25 bp, Homo sapien
attgcttccctctcatgtaccctgg

SEQ ID NO: 1346669 - DNA, 25 bp, Homo sapien
ccaagtcttcctgtaaggagtaatt

SEQ ID NO: 1346670 - DNA, 25 bp, Homo sapien
tctgtaagagcaactaaggaataac

SEQ ID NO: 1346671 - DNA, 25 bp, Homo sapien
tagccttttatctcaatcatggcag

SEQ ID NO: 1346672 - DNA, 25 bp, Homo sapien
ccttttatctcaatcatggcagggg

SEQ ID NO: 1346673 - DNA, 25 bp, Homo sapien
gccttttatctcaatcatggcaggg

SEQ ID NO: 1346674 - DNA, 25 bp, Homo sapien
agccttttatctcaatcatggcagg

SEQ ID NO: 1346675 - DNA, 25 bp, Homo sapien
ggaatgaagcctacgtgatcgtgac

SEQ ID NO: 1346676 - DNA, 25 bp, Homo sapien
tgccaggttttggtactatggcgag

SEQ ID NO: 1346677 - DNA, 25 bp, Homo sapien
gtactatggcgaggctggctttata

SEQ ID NO: 1346678 - DNA, 25 bp, Homo sapien
gcctacgtgatcgtgacaaattaac

SEQ ID NO: 1346679 - DNA, 25 bp, Homo sapien
tcacttgcctacatcctggactcct

SEQ ID NO: 1346680 - DNA, 25 bp, Homo sapien
tcacatgaggcttaatctggaagaa

SEQ ID NO: 1346681 - DNA, 25 bp, Homo sapien
ttgggacagacatcacatgaggctt

SEQ ID NO: 1346682 - DNA, 25 bp, Homo sapien
ctggactcctccacattctaatgag

SEQ ID NO: 1346683 - DNA, 25 bp, Homo sapien
ctgtcacttttaagttctgaacttc

SEQ ID NO: 1346684 - DNA, 25 bp, Homo sapien
tatacgattgcagcacttttagtct

SEQ ID NO: 1346685 - DNA, 25 bp, Homo sapien
gcagcacttttagtcttacatgaaa

SEQ ID NO: 1346686 - DNA, 25 bp, Homo sapien
cttttgtatcacatatacgattgca

SEQ ID NO: 1346687 - DNA, 25 bp, Homo sapien
ctgtctcttcagaagtaggcctgaa

SEQ ID NO: 1346688 - DNA, 25 bp, Homo sapien
aaacttgagttgcttagaaaagagt

SEQ ID NO: 1346689 - DNA, 25 bp, Homo sapien
gcctgaatcactgcaaacttgagtt

SEQ ID NO: 1346690 - DNA, 25 bp, Homo sapien
aggcctgaatcactgcaaacttgag

SEQ ID NO: 1346691 - DNA, 25 bp, Homo sapien
gagaagttaggacccatgatcttta

SEQ ID NO: 1346692 - DNA, 25 bp, Homo sapien
ctgagaagttaggacccatgatctt

SEQ ID NO: 1346693 - DNA, 25 bp, Homo sapien
gttaggacccatgatctttaactcc

SEQ ID NO: 1346694 - DNA, 25 bp, Homo sapien
gaagttaggacccatgatctttaac

SEQ ID NO: 1346695 - DNA, 25 bp, Homo sapien
gaacaggtgagcagtctttggtatc

SEQ ID NO: 1346696 - DNA, 25 bp, Homo sapien
cagcaccagaggttattgagactca

SEQ ID NO: 1346697 - DNA, 25 bp, Homo sapien
gcctccaggagccattatgagaatt

SEQ ID NO: 1346698 - DNA, 25 bp, Homo sapien
tccaggcagtaatgtagaacaggtg

SEQ ID NO: 1346699 - DNA, 25 bp, Homo sapien
caaattatgcatcctctcgaagcct

SEQ ID NO: 1346700 - DNA, 25 bp, Homo sapien
tgtaaagggactgcaaatcactttg

SEQ ID NO: 1346701 - DNA, 25 bp, Homo sapien
tctgaggcaagacctggacaattgc

SEQ ID NO: 1346702 - DNA, 25 bp, Homo sapien
catccaatgccagtaagtatttgct

SEQ ID NO: 1346703 - DNA, 25 bp, Homo sapien
gtcacaactgaagagggtcctaaaa

SEQ ID NO: 1346704 - DNA, 25 bp, Homo sapien
tgagcctagacaagatcacctgtgt

SEQ ID NO: 1346705 - DNA, 25 bp, Homo sapien
taatgtgaacctcgtcagtagctac

SEQ ID NO: 1346706 - DNA, 25 bp, Homo sapien
gctgagctaattaagcaagggtcct

SEQ ID NO: 1346707 - DNA, 25 bp, Homo sapien
gtctttggcagtctttagggattcc

SEQ ID NO: 1346708 - DNA, 25 bp, Homo sapien
tctggcttgcacttccggtactgtg

SEQ ID NO: 1346709 - DNA, 25 bp, Homo sapien
ggattcctaggagagatagtttgac

SEQ ID NO: 1346710 - DNA, 25 bp, Homo sapien
tactgtaaattaggctatgttcttc

SEQ ID NO: 1346711 - DNA, 25 bp, Homo sapien
aactccatcaacactgaaccttcta

SEQ ID NO: 1346712 - DNA, 25 bp, Homo sapien
ccttctaactctaacatgctacgat

SEQ ID NO: 1346713 - DNA, 25 bp, Homo sapien
atttcttcaataactccatcaacac

SEQ ID NO: 1346714 - DNA, 25 bp, Homo sapien
aaccttctaactctaacatgctacg

SEQ ID NO: 1346715 - DNA, 25 bp, Homo sapien
agctagggagccgacaagctgcgac

SEQ ID NO: 1346716 - DNA, 25 bp, Homo sapien
tctccgcgaactttccaactttgga

SEQ ID NO: 1346717 - DNA, 25 bp, Homo sapien
agcccgggttccaaaggagcaacag

SEQ ID NO: 1346718 - DNA, 25 bp, Homo sapien
tctgcgacccctaggcaagacgcag

SEQ ID NO: 1346719 - DNA, 25 bp, Homo sapien
cttgaccgcagggaaaaggagaggc

SEQ ID NO: 1346720 - DNA, 25 bp, Homo sapien
gttggggaaatggatgcagaacttg

SEQ ID NO: 1346721 - DNA, 25 bp, Homo sapien
gctcccaggcgagccctcgccgcgg

SEQ ID NO: 1346722 - DNA, 25 bp, Homo sapien
cggctctcagctcagcgagctcttt

SEQ ID NO: 1346723 - DNA, 25 bp, Homo sapien
cgcggctctcagctcagcgagctct

SEQ ID NO: 1346724 - DNA, 25 bp, Homo sapien
gcttcctccggctgccgcgcagctc

SEQ ID NO: 1346725 - DNA, 25 bp, Homo sapien
ccacagcctcctcgaggatagcgag

SEQ ID NO: 1346726 - DNA, 25 bp, Homo sapien
gcgatgagccccgaagcgcgcggtt

SEQ ID NO: 1346727 - DNA, 25 bp, Homo sapien
gcccgaattccacgcgggcgatgag

SEQ ID NO: 1346728 - DNA, 25 bp, Homo sapien
tctgcccctcccgaaccgagaagga

SEQ ID NO: 1346729 - DNA, 25 bp, Homo sapien
tgtggtataatccattgctcctcag

SEQ ID NO: 1346730 - DNA, 25 bp, Homo sapien
tacaaacctgtgtaagatgttacta

SEQ ID NO: 1346731 - DNA, 25 bp, Homo sapien
tgtgcaaacaccataaagtatactt

SEQ ID NO: 1346732 - DNA, 25 bp, Homo sapien
gcaattagaatgactgcagggaaca

SEQ ID NO: 1346733 - DNA, 25 bp, Homo sapien
gacatggactcgctgtctttcaggt

SEQ ID NO: 1346734 - DNA, 25 bp, Homo sapien
ggttcagaggaattggcaactgccc

SEQ ID NO: 1346735 - DNA, 25 bp, Homo sapien
gaaggcattaagtcgcctatccggg

SEQ ID NO: 1346736 - DNA, 25 bp, Homo sapien
tcaggtccccaactatgtcaatact

SEQ ID NO: 1346737 - DNA, 25 bp, Homo sapien
cagacttgagctctttatggatcat

SEQ ID NO: 1346738 - DNA, 25 bp, Homo sapien
gagcaagtcaatggtcaagcccaga

SEQ ID NO: 1346739 - DNA, 25 bp, Homo sapien
tacatgtctacagtctcagcttgga

SEQ ID NO: 1346740 - DNA, 25 bp, Homo sapien
tgtagtcatccctgtattcagctgg

SEQ ID NO: 1346741 - DNA, 25 bp, Homo sapien
gacagggactacacaagcatatgga

SEQ ID NO: 1346742 - DNA, 25 bp, Homo sapien
tggatcatgaagtagagttgtgcct

SEQ ID NO: 1346743 - DNA, 25 bp, Homo sapien
ccttctgaaagagctttgcttggtt

SEQ ID NO: 1346744 - DNA, 25 bp, Homo sapien
tgtattacaattgtatgcaggctcg

SEQ ID NO: 1346745 - DNA, 25 bp, Homo sapien
tgcaggctcgaatgtccttaaaatg

SEQ ID NO: 1346746 - DNA, 25 bp, Homo sapien
aggattcagagtacatgaatttttt

SEQ ID NO: 1346747 - DNA, 25 bp, Homo sapien
tctttcctcttggaaaatattaata

SEQ ID NO: 1346748 - DNA, 25 bp, Homo sapien
tattctttcctcttggaaaatatta

SEQ ID NO: 1346749 - DNA, 25 bp, Homo sapien
ctaaaggattcagagtacatgaatt

SEQ ID NO: 1346750 - DNA, 25 bp, Homo sapien
gtatatgagcttgatttttgtacat

SEQ ID NO: 1346751 - DNA, 25 bp, Homo sapien
ttagtatcgtctccgggcataaact

SEQ ID NO: 1346752 - DNA, 25 bp, Homo sapien
attagtatcgtctccgggcataaac

SEQ ID NO: 1346753 - DNA, 25 bp, Homo sapien
tcatgtgtatatgagcttgattttt

SEQ ID NO: 1346754 - DNA, 25 bp, Homo sapien
ccagcagaagttgggtaataaatgt

SEQ ID NO: 1346755 - DNA, 25 bp, Homo sapien
cagcagaagttgggtaataaatgta

SEQ ID NO: 1346756 - DNA, 25 bp, Homo sapien
gcagaagttgggtaataaatgtaaa

SEQ ID NO: 1346757 - DNA, 25 bp, Homo sapien
agcagaagttgggtaataaatgtaa

SEQ ID NO: 1346758 - DNA, 25 bp, Homo sapien
aatggcttttgaaaaacttcctcat

SEQ ID NO: 1346759 - DNA, 25 bp, Homo sapien
atggcttttgaaaaacttcctcatt

SEQ ID NO: 1346760 - DNA, 25 bp, Homo sapien
gagatactgcatattcaagtcattg

SEQ ID NO: 1346761 - DNA, 25 bp, Homo sapien
tcacataaaggccagttttccactg

SEQ ID NO: 1346762 - DNA, 25 bp, Homo sapien
tctttgccatggaacatattccaac

SEQ ID NO: 1346763 - DNA, 25 bp, Homo sapien
tcttgtatgagatactgcatattca

SEQ ID NO: 1346764 - DNA, 25 bp, Homo sapien
gaaatgttgataatttccaggattt

SEQ ID NO: 1346765 - DNA, 25 bp, Homo sapien
gttgataatttccaggatttatttc

SEQ ID NO: 1346766 - DNA, 25 bp, Homo sapien
ggaagaaatgttgataatttccagg

SEQ ID NO: 1346767 - DNA, 25 bp, Homo sapien
gcatggtggaagaaatgttgataat

SEQ ID NO: 1346768 - DNA, 25 bp, Homo sapien
catcacgtgagcagctgtgagatgg

SEQ ID NO: 1346769 - DNA, 25 bp, Homo sapien
tgaagtgttcgtcaagatttgtgtc

SEQ ID NO: 1346770 - DNA, 25 bp, Homo sapien
cagggctgaagtgttcgtcaagatt

SEQ ID NO: 1346771 - DNA, 25 bp, Homo sapien
ctgccacgaatatggtcatcacgtg

SEQ ID NO: 1346772 - DNA, 25 bp, Homo sapien
ggagctttactaaattctctatata

SEQ ID NO: 1346773 - DNA, 25 bp, Homo sapien
ctgttttgagggttgaattattagg

SEQ ID NO: 1346774 - DNA, 25 bp, Homo sapien
tactaaattctctatatacatcttt

SEQ ID NO: 1346775 - DNA, 25 bp, Homo sapien
tatctctgttttgagggttgaatta

SEQ ID NO: 1346776 - DNA, 25 bp, Homo sapien
agaaggtgggtaaaccaatctatat

SEQ ID NO: 1346777 - DNA, 25 bp, Homo sapien
gtggaatttaaaatagactgtccca

SEQ ID NO: 1346778 - DNA, 25 bp, Homo sapien
tgtcccaacttctagatcactggag

SEQ ID NO: 1346779 - DNA, 25 bp, Homo sapien
gaaatttgtaatggcttaaagtgga

SEQ ID NO: 1346780 - DNA, 25 bp, Homo sapien
cattttctcaaggaaccagttgtgg

SEQ ID NO: 1346781 - DNA, 25 bp, Homo sapien
caaggaaccagttgtggcaagacac

SEQ ID NO: 1346782 - DNA, 25 bp, Homo sapien
tctcaaggaaccagttgtggcaaga

SEQ ID NO: 1346783 - DNA, 25 bp, Homo sapien
ggaaccagttgtggcaagacactga

SEQ ID NO: 1346784 - DNA, 25 bp, Homo sapien
caggcctatggttcttaagatgtcc

SEQ ID NO: 1346785 - DNA, 25 bp, Homo sapien
tagatattgccctctggaatgccaa

SEQ ID NO: 1346786 - DNA, 25 bp, Homo sapien
tttggacacagcaagataggcctct

SEQ ID NO: 1346787 - DNA, 25 bp, Homo sapien
taagatgtcctttcgaggtccttct

SEQ ID NO: 1346788 - DNA, 25 bp, Homo sapien
tagccagaagtggtagcatatgccc

SEQ ID NO: 1346789 - DNA, 25 bp, Homo sapien
taagagagctgttggccaggtacgg

SEQ ID NO: 1346790 - DNA, 25 bp, Homo sapien
gacagaagcagatcagtggatgcct

SEQ ID NO: 1346791 - DNA, 25 bp, Homo sapien
tacatcagttataccttaagagagc

SEQ ID NO: 1346792 - DNA, 25 bp, Homo sapien
gaacaccagggagacgttcgaatta

SEQ ID NO: 1346793 - DNA, 25 bp, Homo sapien
cttgaaatagatgggttagggagaa

SEQ ID NO: 1346794 - DNA, 25 bp, Homo sapien
caccagggagacgttcgaattattt

SEQ ID NO: 1346795 - DNA, 25 bp, Homo sapien
cagggagacgttcgaattatttcac

SEQ ID NO: 1346796 - DNA, 25 bp, Homo sapien
gcttaattaacattctgccttgtac

SEQ ID NO: 1346797 - DNA, 25 bp, Homo sapien
gacaaactcagctctttatcccttt

SEQ ID NO: 1346798 - DNA, 25 bp, Homo sapien
tcactttgaatatagcgcttaatta

SEQ ID NO: 1346799 - DNA, 25 bp, Homo sapien
gaaggctttcttgcctataccagga

SEQ ID NO: 1346800 - DNA, 25 bp, Homo sapien
aaactcagggtctcactggaagaga

SEQ ID NO: 1346801 - DNA, 25 bp, Homo sapien
catctcaaaactcagggtctcactg

SEQ ID NO: 1346802 - DNA, 25 bp, Homo sapien
tcaaaactcagggtctcactggaag

SEQ ID NO: 1346803 - DNA, 25 bp, Homo sapien
tcagggtctcactggaagagaaagt

SEQ ID NO: 1346804 - DNA, 25 bp, Homo sapien
cctccatacaagtggaatcgagaat

SEQ ID NO: 1346805 - DNA, 25 bp, Homo sapien
caccaagaaaaaagctgtgactgct

SEQ ID NO: 1346806 - DNA, 25 bp, Homo sapien
ttcttcgggactacgcttggttcca

SEQ ID NO: 1346807 - DNA, 25 bp, Homo sapien
tgattacaacacgtgacctcaggga

SEQ ID NO: 1346808 - DNA, 25 bp, Homo sapien
tctgccatcaatcagccggtgatca

SEQ ID NO: 1346809 - DNA, 25 bp, Homo sapien
atcataggtcagtgccacgtacatc

SEQ ID NO: 1346810 - DNA, 25 bp, Homo sapien
ggtcagtgccacgtacatcatgggc

SEQ ID NO: 1346811 - DNA, 25 bp, Homo sapien
cgctgccttgattttgcggaggaaa

SEQ ID NO: 1346812 - DNA, 25 bp, Homo sapien
taatgggtgttcaaagagtgagcca

SEQ ID NO: 1346813 - DNA, 25 bp, Homo sapien
ggtgttcaaagagtgagccaaaaac

SEQ ID NO: 1346814 - DNA, 25 bp, Homo sapien
gatggcagacaggggggttgataat

SEQ ID NO: 1346815 - DNA, 25 bp, Homo sapien
gggttgataatgggtgttcaaagag

SEQ ID NO: 1346816 - DNA, 25 bp, Homo sapien
aatcactgcgtttacaacaggctgt

SEQ ID NO: 1346817 - DNA, 25 bp, Homo sapien
cctatataccacctctttggttata

SEQ ID NO: 1346818 - DNA, 25 bp, Homo sapien
taccacctctttggttatatcatca

SEQ ID NO: 1346819 - DNA, 25 bp, Homo sapien
ggttatatcatcaatcactgcgttt

SEQ ID NO: 1346820 - DNA, 25 bp, Homo sapien
ttcttcaaaaaagcctctttgtgcc

SEQ ID NO: 1346821 - DNA, 25 bp, Homo sapien
aagcctctttgtgccgagccctcat

SEQ ID NO: 1346822 - DNA, 25 bp, Homo sapien
ttcaaaaaagcctctttgtgccgag

SEQ ID NO: 1346823 - DNA, 25 bp, Homo sapien
aaaaagcctctttgtgccgagccct

SEQ ID NO: 1346824 - DNA, 25 bp, Homo sapien
gatgttactcacatcaatctcatta

SEQ ID NO: 1346825 - DNA, 25 bp, Homo sapien
gttactcacatcaatctcattaaaa

SEQ ID NO: 1346826 - DNA, 25 bp, Homo sapien
tgttactcacatcaatctcattaaa

SEQ ID NO: 1346827 - DNA, 25 bp, Homo sapien
ttctggatgttactcacatcaatct

SEQ ID NO: 1346828 - DNA, 25 bp, Homo sapien
ctcctgatgttctgaatgcagacct

SEQ ID NO: 1346829 - DNA, 25 bp, Homo sapien
tcctgatgttctgaatgcagacctt

SEQ ID NO: 1346830 - DNA, 25 bp, Homo sapien
ttctcctgatgttctgaatgcagac

SEQ ID NO: 1346831 - DNA, 25 bp, Homo sapien
tctcctgatgttctgaatgcagacc

SEQ ID NO: 1346832 - DNA, 25 bp, Homo sapien
ggtttgctagaaggaggttgtgagg

SEQ ID NO: 1346833 - DNA, 25 bp, Homo sapien
aggaggttgtgagggcgagggcact

SEQ ID NO: 1346834 - DNA, 25 bp, Homo sapien
gcagacacaggtttgctagaaggag

SEQ ID NO: 1346835 - DNA, 25 bp, Homo sapien
cacaggtttgctagaaggaggttgt

SEQ ID NO: 1346836 - DNA, 25 bp, Homo sapien
ttcagccggcttggccttagcagga

SEQ ID NO: 1346837 - DNA, 25 bp, Homo sapien
cttcagccggcttggccttagcagg

SEQ ID NO: 1346838 - DNA, 25 bp, Homo sapien
agccggcttggccttagcaggagca

SEQ ID NO: 1346839 - DNA, 25 bp, Homo sapien
tcagccggcttggccttagcaggag

SEQ ID NO: 1346840 - DNA, 25 bp, Homo sapien
atggaacctgcaccaatgtcttgtc

SEQ ID NO: 1346841 - DNA, 25 bp, Homo sapien
gatggaacctgcaccaatgtcttgt

SEQ ID NO: 1346842 - DNA, 25 bp, Homo sapien
tggaacctgcaccaatgtcttgtca

SEQ ID NO: 1346843 - DNA, 25 bp, Homo sapien
ctgcaactgtgtctccaacagcttt

SEQ ID NO: 1346844 - DNA, 25 bp, Homo sapien
tgtgtctccaacagctttctcccac

SEQ ID NO: 1346845 - DNA, 25 bp, Homo sapien
aactgtgtctccaacagctttctcc

SEQ ID NO: 1346846 - DNA, 25 bp, Homo sapien
gcaactgtgtctccaacagctttct

SEQ ID NO: 1346847 - DNA, 25 bp, Homo sapien
tctgtgacaggttctgcaaacgctg

SEQ ID NO: 1346848 - DNA, 25 bp, Homo sapien
tgtgacaggttctgcaaacgctggg

SEQ ID NO: 1346849 - DNA, 25 bp, Homo sapien
ccctctgtgacaggttctgcaaacg

SEQ ID NO: 1346850 - DNA, 25 bp, Homo sapien
tccctctgtgacaggttctgcaaac

SEQ ID NO: 1346851 - DNA, 25 bp, Homo sapien
ccaagtcatacttgcatacagttgt

SEQ ID NO: 1346852 - DNA, 25 bp, Homo sapien
ctgtaaccaagtcatacttgcatac

SEQ ID NO: 1346853 - DNA, 25 bp, Homo sapien
aagtcatacttgcatacagttgtag

SEQ ID NO: 1346854 - DNA, 25 bp, Homo sapien
aaccaagtcatacttgcatacagtt

SEQ ID NO: 1346855 - DNA, 25 bp, Homo sapien
gacactgttgttaatgacaaccttc

SEQ ID NO: 1346856 - DNA, 25 bp, Homo sapien
gacaaccttcctgctgttagggtaa

SEQ ID NO: 1346857 - DNA, 25 bp, Homo sapien
aagaagcgaacactgaagacactgt

SEQ ID NO: 1346858 - DNA, 25 bp, Homo sapien
ctgaagaagcgaacactgaagacac

SEQ ID NO: 1346859 - DNA, 25 bp, Homo sapien
ctggtccctggcataaggagacccc

SEQ ID NO: 1346860 - DNA, 25 bp, Homo sapien
cctggcataaggagaccccaggcag

SEQ ID NO: 1346861 - DNA, 25 bp, Homo sapien
cccaggcagggaatgtctccctaga

SEQ ID NO: 1346862 - DNA, 25 bp, Homo sapien
tgtctccctagagggcagttcccct

SEQ ID NO: 1346863 - DNA, 25 bp, Homo sapien
ctgaacgcccgggacacagtgggac

SEQ ID NO: 1346864 - DNA, 25 bp, Homo sapien
gagtggctgaacgcccgggacacag

SEQ ID NO: 1346865 - DNA, 25 bp, Homo sapien
agtggctgaacgcccgggacacagt

SEQ ID NO: 1346866 - DNA, 25 bp, Homo sapien
tggctgaacgcccgggacacagtgg

SEQ ID NO: 1346867 - DNA, 25 bp, Homo sapien
gaaaaagtgccagtttcaacaggca

SEQ ID NO: 1346868 - DNA, 25 bp, Homo sapien
tatattattccttttcacaggcagc

SEQ ID NO: 1346869 - DNA, 25 bp, Homo sapien
gttaaatagcatactatagtccctc

SEQ ID NO: 1346870 - DNA, 25 bp, Homo sapien
tccttttcaagatagcatgcccctt

SEQ ID NO: 1346871 - DNA, 25 bp, Homo sapien
gattgacacctcatacgtccgggtg

SEQ ID NO: 1346872 - DNA, 25 bp, Homo sapien
atttgtcgtacagtgggcgcagccc

SEQ ID NO: 1346873 - DNA, 25 bp, Homo sapien
caatgatctgcccaagggttccaag

SEQ ID NO: 1346874 - DNA, 25 bp, Homo sapien
aaggaggcctgcttgttgctgtaga

SEQ ID NO: 1346875 - DNA, 25 bp, Homo sapien
gatctcttaagattaatgtagcaga

SEQ ID NO: 1346876 - DNA, 25 bp, Homo sapien
tcttatattaaatctaagcaactgc

SEQ ID NO: 1346877 - DNA, 25 bp, Homo sapien
cagaaaagtgggcttagaaagtatt

SEQ ID NO: 1346878 - DNA, 25 bp, Homo sapien
cactttacttgaattacattaacct

SEQ ID NO: 1346879 - DNA, 25 bp, Homo sapien
attattaaagttctttttattgcag

SEQ ID NO: 1346880 - DNA, 25 bp, Homo sapien
acgacgtcggctctgccctgccccg

SEQ ID NO: 1346881 - DNA, 25 bp, Homo sapien
cggggcagggcagagccgacgtcgt

SEQ ID NO: 1346882 - DNA, 25 bp, Homo sapien
gaaagttgcatagtatagttttgcc

SEQ ID NO: 1346883 - DNA, 25 bp, Homo sapien
gttcagcctgagctagtgagctaga

SEQ ID NO: 1346884 - DNA, 25 bp, Homo sapien
tatcgaatctaaaagtgactactgt

SEQ ID NO: 1346885 - DNA, 25 bp, Homo sapien
tcctgtcttttgcatgcctgaagaa

SEQ ID NO: 1346886 - DNA, 25 bp, Homo sapien
tacacacgtctttatgatagcaccc

SEQ ID NO: 1346887 - DNA, 25 bp, Homo sapien
caaaatagaggtcaaggaagtagga

SEQ ID NO: 1346888 - DNA, 25 bp, Homo sapien
gattctgggaattttgtaggcaaag

SEQ ID NO: 1346889 - DNA, 25 bp, Homo sapien
tatgttgggaccacagcagagaata

SEQ ID NO: 1346890 - DNA, 25 bp, Homo sapien
ctttcccataatgtggcatacacgt

SEQ ID NO: 1346891 - DNA, 25 bp, Homo sapien
tattaacttctaagccatacattgg

SEQ ID NO: 1346892 - DNA, 25 bp, Homo sapien
agccatacattggtaagcattgtta

SEQ ID NO: 1346893 - DNA, 25 bp, Homo sapien
attaacttctaagccatacattggt

SEQ ID NO: 1346894 - DNA, 25 bp, Homo sapien
tttattaacttctaagccatacatt

SEQ ID NO: 1346895 - DNA, 25 bp, Homo sapien
catctgggagcatattgttggttaa

SEQ ID NO: 1346896 - DNA, 25 bp, Homo sapien
agatagttttgtagacgagcaggaa

SEQ ID NO: 1346897 - DNA, 25 bp, Homo sapien
gaaataattggatgtcttcctaaac

SEQ ID NO: 1346898 - DNA, 25 bp, Homo sapien
tctgcaaagatgtaatagttcacat

SEQ ID NO: 1346899 - DNA, 25 bp, Homo sapien
ttatagttggctcagacattcatat

SEQ ID NO: 1346900 - DNA, 25 bp, Homo sapien
gctcagacattcatattcactgctg

SEQ ID NO: 1346901 - DNA, 25 bp, Homo sapien
gacattcatattcactgctgaggca

SEQ ID NO: 1346902 - DNA, 25 bp, Homo sapien
gttggctcagacattcatattcact

SEQ ID NO: 1346903 - DNA, 25 bp, Homo sapien
ctctggaacatagtaccaaacatgt

SEQ ID NO: 1346904 - DNA, 25 bp, Homo sapien
tgtcagccaattcacgatcaaccat

SEQ ID NO: 1346905 - DNA, 25 bp, Homo sapien
gaaatgacagaaagcactctggaac

SEQ ID NO: 1346906 - DNA, 25 bp, Homo sapien
tttggcatcttcatggatgtcagcc

SEQ ID NO: 1346907 - DNA, 25 bp, Homo sapien
tgaagatattagactgtcttgtctg

SEQ ID NO: 1346908 - DNA, 25 bp, Homo sapien
tttctctttctaagattccatattg

SEQ ID NO: 1346909 - DNA, 25 bp, Homo sapien
gggtagagtactattgttaagacaa

SEQ ID NO: 1346910 - DNA, 25 bp, Homo sapien
tactcttactctcgaagggtagagt

SEQ ID NO: 1346911 - DNA, 25 bp, Homo sapien
gaggtgtgatgccacttaatgggct

SEQ ID NO: 1346912 - DNA, 25 bp, Homo sapien
tggacagtatactggtgtgaaagtt

SEQ ID NO: 1346913 - DNA, 25 bp, Homo sapien
ctacataaaagagaggtgtgatgcc

SEQ ID NO: 1346914 - DNA, 25 bp, Homo sapien
gatgccacttaatgggcttggacag

SEQ ID NO: 1346915 - DNA, 25 bp, Homo sapien
ttcttgttctatagtgaaaacatat

SEQ ID NO: 1346916 - DNA, 25 bp, Homo sapien
tgttctatagtgaaaacatatgaaa

SEQ ID NO: 1346917 - DNA, 25 bp, Homo sapien
tctatagtgaaaacatatgaaatta

SEQ ID NO: 1346918 - DNA, 25 bp, Homo sapien
attttcttgttctatagtgaaaaca

SEQ ID NO: 1346919 - DNA, 25 bp, Homo sapien
tatcagtgccaggttacaacttctg

SEQ ID NO: 1346920 - DNA, 25 bp, Homo sapien
cccagtacagaattgtattcacaca

SEQ ID NO: 1346921 - DNA, 25 bp, Homo sapien
cacacatatttcagtgaagtcgagg

SEQ ID NO: 1346922 - DNA, 25 bp, Homo sapien
gtcttgaacatagtcttttgtcttc

SEQ ID NO: 1346923 - DNA, 25 bp, Homo sapien
tagtgcgtcaaaaccatccaagtcc

SEQ ID NO: 1346924 - DNA, 25 bp, Homo sapien
caatgtaatctgtgagtagtgcgtc

SEQ ID NO: 1346925 - DNA, 25 bp, Homo sapien
tgtaaatccttggttcgtaacagtg

SEQ ID NO: 1346926 - DNA, 25 bp, Homo sapien
agtgatatccccactgacccaaaaa

SEQ ID NO: 1346927 - DNA, 25 bp, Homo sapien
gaagtcttaccacataatttagtag

SEQ ID NO: 1346928 - DNA, 25 bp, Homo sapien
caattttgtcaaggagattgcagaa

SEQ ID NO: 1346929 - DNA, 25 bp, Homo sapien
cagaatatattgcttcttggacaag

SEQ ID NO: 1346930 - DNA, 25 bp, Homo sapien
ttgtcaaggagattgcagaatatat

SEQ ID NO: 1346931 - DNA, 25 bp, Homo sapien
tgttacttatagcagcactgtagaa

SEQ ID NO: 1346932 - DNA, 25 bp, Homo sapien
taaaatcagaggtaagcatactgta

SEQ ID NO: 1346933 - DNA, 25 bp, Homo sapien
ggcaggctttactccacaaacagaa

SEQ ID NO: 1346934 - DNA, 25 bp, Homo sapien
agcatactgtaatcctccagttaca

SEQ ID NO: 1346935 - DNA, 25 bp, Homo sapien
tttgtcttcttcacgtggtcttttc

SEQ ID NO: 1346936 - DNA, 25 bp, Homo sapien
ttctactccaactaaattaatttgc

SEQ ID NO: 1346937 - DNA, 25 bp, Homo sapien
tgtcttcttcacgtggtcttttcat

SEQ ID NO: 1346938 - DNA, 25 bp, Homo sapien
gctttttgtcttcttcacgtggtct

SEQ ID NO: 1346939 - DNA, 25 bp, Homo sapien
tactgaagctagattggtctgaacc

SEQ ID NO: 1346940 - DNA, 25 bp, Homo sapien
accaacataaaagcaggccagaagg

SEQ ID NO: 1346941 - DNA, 25 bp, Homo sapien
tccaaagctaaccatgccaggaggg

SEQ ID NO: 1346942 - DNA, 25 bp, Homo sapien
ggtctgaaccaacataaaagcaggc

SEQ ID NO: 1346943 - DNA, 25 bp, Homo sapien
ttttgtcaccatattaaattttaga

SEQ ID NO: 1346944 - DNA, 25 bp, Homo sapien
gagtgatggttctcctaagacttcc

SEQ ID NO: 1346945 - DNA, 25 bp, Homo sapien
tctgagtgatggttctcctaagact

SEQ ID NO: 1346946 - DNA, 25 bp, Homo sapien
gatggttctcctaagacttccagct

SEQ ID NO: 1346947 - DNA, 25 bp, Homo sapien
cttggccatgaagtgtgctttgagt

SEQ ID NO: 1346948 - DNA, 25 bp, Homo sapien
atccttggccatgaagtgtgctttg

SEQ ID NO: 1346949 - DNA, 25 bp, Homo sapien
ccatgaagtgtgctttgagtgatgc

SEQ ID NO: 1346950 - DNA, 25 bp, Homo sapien
aagtgtgctttgagtgatgctgcca

SEQ ID NO: 1346951 - DNA, 25 bp, Homo sapien
ctgaaaaatacgggtcagagagttc

SEQ ID NO: 1346952 - DNA, 25 bp, Homo sapien
tgaaaaatacgggtcagagagttca

SEQ ID NO: 1346953 - DNA, 25 bp, Homo sapien
actgaaaaatacgggtcagagagtt

SEQ ID NO: 1346954 - DNA, 25 bp, Homo sapien
ttttgaatactccttgtataaccat

SEQ ID NO: 1346955 - DNA, 25 bp, Homo sapien
cattccaatcgtggcatatcctcta

SEQ ID NO: 1346956 - DNA, 25 bp, Homo sapien
acagttttcctgaacaggttgacta

SEQ ID NO: 1346957 - DNA, 25 bp, Homo sapien
caggtggcgctggacatcagatttg

SEQ ID NO: 1346958 - DNA, 25 bp, Homo sapien
tactcattacattccaatcgtggca

SEQ ID NO: 1346959 - DNA, 25 bp, Homo sapien
gatgctggacaagttaattctgtct

SEQ ID NO: 1346960 - DNA, 25 bp, Homo sapien
taattctgtctaattcagactgcat

SEQ ID NO: 1346961 - DNA, 25 bp, Homo sapien
tccaaggatgctggacaagttaatt

SEQ ID NO: 1346962 - DNA, 25 bp, Homo sapien
caagttaattctgtctaattcagac

SEQ ID NO: 1346963 - DNA, 25 bp, Homo sapien
gtctctgaaatttctgttttgggga

SEQ ID NO: 1346964 - DNA, 25 bp, Homo sapien
ctctgaaatttctgttttggggaca

SEQ ID NO: 1346965 - DNA, 25 bp, Homo sapien
tctgaaatttctgttttggggacat

SEQ ID NO: 1346966 - DNA, 25 bp, Homo sapien
tggtctctgaaatttctgttttggg

SEQ ID NO: 1346967 - DNA, 25 bp, Homo sapien
taaaagtattgttgtgaacacatcc

SEQ ID NO: 1346968 - DNA, 25 bp, Homo sapien
tgacgaagaaagggtagtactacca

SEQ ID NO: 1346969 - DNA, 25 bp, Homo sapien
tcccagtatagttgaatgcagggtt

SEQ ID NO: 1346970 - DNA, 25 bp, Homo sapien
catttcagtagatatgtttgttagc

SEQ ID NO: 1346971 - DNA, 25 bp, Homo sapien
ccccatcaggagaatcaatcatgac

SEQ ID NO: 1346972 - DNA, 25 bp, Homo sapien
aatcatgaccacagccccttgacac

SEQ ID NO: 1346973 - DNA, 25 bp, Homo sapien
agtaagatgtattcctgagggtccc

SEQ ID NO: 1346974 - DNA, 25 bp, Homo sapien
gggatgcactgagtaaccccatctt

SEQ ID NO: 1346975 - DNA, 25 bp, Homo sapien
cttggctacatcgaggctccagcag

SEQ ID NO: 1346976 - DNA, 25 bp, Homo sapien
cctgctcgcgcctgcattgaaggag

SEQ ID NO: 1346977 - DNA, 25 bp, Homo sapien
tcatctcagttgtcttttcctggca

SEQ ID NO: 1346978 - DNA, 25 bp, Homo sapien
cctttggcaaatgcatatggaggga

SEQ ID NO: 1346979 - DNA, 25 bp, Homo sapien
agattctgaaacatgcagctggcac

SEQ ID NO: 1346980 - DNA, 25 bp, Homo sapien
gagtggctaggcgtgagttgctggt

SEQ ID NO: 1346981 - DNA, 25 bp, Homo sapien
gggtggagtggctaggcgtgagttg

SEQ ID NO: 1346982 - DNA, 25 bp, Homo sapien
gtggagtggctaggcgtgagttgct

SEQ ID NO: 1346983 - DNA, 25 bp, Homo sapien
tggctaggcgtgagttgctggtggt

SEQ ID NO: 1346984 - DNA, 25 bp, Homo sapien
ttagctgtgtcgtttttatttgttc

SEQ ID NO: 1346985 - DNA, 25 bp, Homo sapien
tagctgtgtcgtttttatttgttcc

SEQ ID NO: 1346986 - DNA, 25 bp, Homo sapien
agctgtgtcgtttttatttgttcct

SEQ ID NO: 1346987 - DNA, 25 bp, Homo sapien
cacttttagctgtgtcgtttttatt

SEQ ID NO: 1346988 - DNA, 25 bp, Homo sapien
gataatagctggaatcgaggaaacc

SEQ ID NO: 1346989 - DNA, 25 bp, Homo sapien
ttagtactgataatagctggaatcg

SEQ ID NO: 1346990 - DNA, 25 bp, Homo sapien
tagctggaatcgaggaaacctttgt

SEQ ID NO: 1346991 - DNA, 25 bp, Homo sapien
tggaatcgaggaaacctttgttgaa

SEQ ID NO: 1346992 - DNA, 25 bp, Homo sapien
ggatcccattaccaaaagctgcagt

SEQ ID NO: 1346993 - DNA, 25 bp, Homo sapien
gcctccagccattctgatgtacacg

SEQ ID NO: 1346994 - DNA, 25 bp, Homo sapien
tatgccttttactgccaattagcgc

SEQ ID NO: 1346995 - DNA, 25 bp, Homo sapien
tatggattatccagaccccatttgc

SEQ ID NO: 1346996 - DNA, 25 bp, Homo sapien
gagctagaccgactctgagtcccat

SEQ ID NO: 1346997 - DNA, 25 bp, Homo sapien
gaggtcagagctagaccgactctga

SEQ ID NO: 1346998 - DNA, 25 bp, Homo sapien
agagaagagacacgagaactgctct

SEQ ID NO: 1346999 - DNA, 25 bp, Homo sapien
ggtgtgggcagtaagaagactgtgg

SEQ ID NO: 1347000 - DNA, 25 bp, Homo sapien
tattgcccttaaggaggatgctagg

SEQ ID NO: 1347001 - DNA, 25 bp, Homo sapien
ggatgctaggtggtccttccctcag

SEQ ID NO: 1347002 - DNA, 25 bp, Homo sapien
gacattcggttgacagtattgccct

SEQ ID NO: 1347003 - DNA, 25 bp, Homo sapien
cgatacattgtggatttatggctcc

SEQ ID NO: 1347004 - DNA, 25 bp, Homo sapien
gaactgttcctccatgatctatggc

SEQ ID NO: 1347005 - DNA, 25 bp, Homo sapien
gatctatggctagagcctgaaactg

SEQ ID NO: 1347006 - DNA, 25 bp, Homo sapien
gttggcaagaactgttcctccatga

SEQ ID NO: 1347007 - DNA, 25 bp, Homo sapien
catgatctatggctagagcctgaaa

SEQ ID NO: 1347008 - DNA, 25 bp, Homo sapien
ctgatagagtcaggaggagtctaga

SEQ ID NO: 1347009 - DNA, 25 bp, Homo sapien
tcactgcagggcaactgacgttctg

SEQ ID NO: 1347010 - DNA, 25 bp, Homo sapien
catctgccacaggaacacgaggaaa

SEQ ID NO: 1347011 - DNA, 25 bp, Homo sapien
aactgacgttctgacagagggaggc

SEQ ID NO: 1347012 - DNA, 25 bp, Homo sapien
agatcacggtcaagatgaactgcag

SEQ ID NO: 1347013 - DNA, 25 bp, Homo sapien
caaaatcacggaggcgagggagatc

SEQ ID NO: 1347014 - DNA, 25 bp, Homo sapien
cgagggagatcacggtcaagatgaa

SEQ ID NO: 1347015 - DNA, 25 bp, Homo sapien
cagtaaggacaaaatcacggaggcg

SEQ ID NO: 1347016 - DNA, 25 bp, Homo sapien
tagatgcaggtgttaatttctttgg

SEQ ID NO: 1347017 - DNA, 25 bp, Homo sapien
tgcagaagaatattaagtttgcggg

SEQ ID NO: 1347018 - DNA, 25 bp, Homo sapien
cttgaaatgaggtagatgcaggtgt

SEQ ID NO: 1347019 - DNA, 25 bp, Homo sapien
tcactgcctcctgatgcatgcagaa

SEQ ID NO: 1347020 - DNA, 25 bp, Homo sapien
caatgctgctgggactttgagctcg

SEQ ID NO: 1347021 - DNA, 25 bp, Homo sapien
gaattaagcacacggaaaaatccat

SEQ ID NO: 1347022 - DNA, 25 bp, Homo sapien
gaattggatggtgcacccatgctcc

SEQ ID NO: 1347023 - DNA, 25 bp, Homo sapien
tgaagcagtcatgtcacttggtggg

SEQ ID NO: 1347024 - DNA, 25 bp, Homo sapien
tgtctcaataaagcatgtgaagacc

SEQ ID NO: 1347025 - DNA, 25 bp, Homo sapien
tgcgttgcttgctcctggcattgcc

SEQ ID NO: 1347026 - DNA, 25 bp, Homo sapien
ataaagcatgtgaagaccagcttcc

SEQ ID NO: 1347027 - DNA, 25 bp, Homo sapien
tccggtctggcggatctgttctcag

SEQ ID NO: 1347028 - DNA, 25 bp, Homo sapien
taagcaatgatcatttggtaatgta

SEQ ID NO: 1347029 - DNA, 25 bp, Homo sapien
aaagaaccttgatattgtgggattt

SEQ ID NO: 1347030 - DNA, 25 bp, Homo sapien
cttaagcaatgatcatttggtaatg

SEQ ID NO: 1347031 - DNA, 25 bp, Homo sapien
taaaaagaaccttgatattgtggga

SEQ ID NO: 1347032 - DNA, 25 bp, Homo sapien
tgtaacaaagcatcccttatgcctt

SEQ ID NO: 1347033 - DNA, 25 bp, Homo sapien
acaaagcatcccttatgccttcagg

SEQ ID NO: 1347034 - DNA, 25 bp, Homo sapien
gccttcagggctgtccttaccaccc

SEQ ID NO: 1347035 - DNA, 25 bp, Homo sapien
cttcagggctgtccttaccacccat

SEQ ID NO: 1347036 - DNA, 25 bp, Homo sapien
tttaatatgggggtgattatgcttg

SEQ ID NO: 1347037 - DNA, 25 bp, Homo sapien
tgagaatgttcactggaccacaagg

SEQ ID NO: 1347038 - DNA, 25 bp, Homo sapien
gagaatgttcactggaccacaaggc

SEQ ID NO: 1347039 - DNA, 25 bp, Homo sapien
cagactctgttgtgcatatgcggca

SEQ ID NO: 1347040 - DNA, 25 bp, Homo sapien
gactctgttgtgcatatgcggcatg

SEQ ID NO: 1347041 - DNA, 25 bp, Homo sapien
gctgcaaaaggggtacgtgagctcc

SEQ ID NO: 1347042 - DNA, 25 bp, Homo sapien
tgtgtgtgagctgcaaaaggggtac

SEQ ID NO: 1347043 - DNA, 25 bp, Homo sapien
gcaatgtagtctgtccctggttggg

SEQ ID NO: 1347044 - DNA, 25 bp, Homo sapien
gggatgtgccgcactccaccgactg

SEQ ID NO: 1347045 - DNA, 25 bp, Homo sapien
tattgacttattcctaacagggaac

SEQ ID NO: 1347046 - DNA, 25 bp, Homo sapien
ccaccgactgcatattaaaaagctg

SEQ ID NO: 1347047 - DNA, 25 bp, Homo sapien
ggtttgggactcagattcacattga

SEQ ID NO: 1347048 - DNA, 25 bp, Homo sapien
gagtgatcctcacagttctgacccc

SEQ ID NO: 1347049 - DNA, 25 bp, Homo sapien
tctgggtgggctagccctaaatgtg

SEQ ID NO: 1347050 - DNA, 25 bp, Homo sapien
cacattgaaccttttttaactggca

SEQ ID NO: 1347051 - DNA, 25 bp, Homo sapien
tttctttaacaccagatctccttca

SEQ ID NO: 1347052 - DNA, 25 bp, Homo sapien
taacaccagatctccttcatcctga

SEQ ID NO: 1347053 - DNA, 25 bp, Homo sapien
ccagatctccttcatcctgatgcat

SEQ ID NO: 1347054 - DNA, 25 bp, Homo sapien
tctttaacaccagatctccttcatc

SEQ ID NO: 1347055 - DNA, 25 bp, Homo sapien
ggattacacccatggatttggccca

SEQ ID NO: 1347056 - DNA, 25 bp, Homo sapien
cagaagaatccatggccgggtgtta

SEQ ID NO: 1347057 - DNA, 25 bp, Homo sapien
tgctgatacccctcacgataggtca

SEQ ID NO: 1347058 - DNA, 25 bp, Homo sapien
catctgccaaacgagcctgctgata

SEQ ID NO: 1347059 - DNA, 25 bp, Homo sapien
gacccatggacccttgtactctgca

SEQ ID NO: 1347060 - DNA, 25 bp, Homo sapien
ctgacccatggacccttgtactctg

SEQ ID NO: 1347061 - DNA, 25 bp, Homo sapien
tgacccatggacccttgtactctgc

SEQ ID NO: 1347062 - DNA, 25 bp, Homo sapien
ctcattggcacctgatcaagtgcta

SEQ ID NO: 1347063 - DNA, 25 bp, Homo sapien
gatcaagtgctaaggcttcagatga

SEQ ID NO: 1347064 - DNA, 25 bp, Homo sapien
caaagggatcagttagtggaggatt

SEQ ID NO: 1347065 - DNA, 25 bp, Homo sapien
ggcaacagaatctccagggcaaagg

SEQ ID NO: 1347066 - DNA, 25 bp, Homo sapien
gagatgttcttgaagattctgttag

SEQ ID NO: 1347067 - DNA, 25 bp, Homo sapien
tggcatcttggcatgctcctgtcct

SEQ ID NO: 1347068 - DNA, 25 bp, Homo sapien
tgtccacacttccagtcaagtgctt

SEQ ID NO: 1347069 - DNA, 25 bp, Homo sapien
ccagagcctgtcattcagtttcttt

SEQ ID NO: 1347070 - DNA, 25 bp, Homo sapien
tggttgattcctcctaggagggaca

SEQ ID NO: 1347071 - DNA, 25 bp, Homo sapien
ggttgattcctcctaggagggacat

SEQ ID NO: 1347072 - DNA, 25 bp, Homo sapien
ctggttgattcctcctaggagggac

SEQ ID NO: 1347073 - DNA, 25 bp, Homo sapien
tgggcttctagctttttgcttttcc

SEQ ID NO: 1347074 - DNA, 25 bp, Homo sapien
ttgcttttccaaggacactgctgat

SEQ ID NO: 1347075 - DNA, 25 bp, Homo sapien
gcttttccaaggacactgctgatcc

SEQ ID NO: 1347076 - DNA, 25 bp, Homo sapien
ttttccaaggacactgctgatccat

SEQ ID NO: 1347077 - DNA, 25 bp, Homo sapien
gttaatgactgtttacattttcgtg

SEQ ID NO: 1347078 - DNA, 25 bp, Homo sapien
tacattttcgtgaattctttccaat

SEQ ID NO: 1347079 - DNA, 25 bp, Homo sapien
taatgactgtttacattttcgtgaa

SEQ ID NO: 1347080 - DNA, 25 bp, Homo sapien
gactgtttacattttcgtgaattct

SEQ ID NO: 1347081 - DNA, 25 bp, Homo sapien
tcattcagatcgctgtgtacagagg

SEQ ID NO: 1347082 - DNA, 25 bp, Homo sapien
ttttctcacagaatatggaccctcc

SEQ ID NO: 1347083 - DNA, 25 bp, Homo sapien
ccacggatttcatcactcttgagtg

SEQ ID NO: 1347084 - DNA, 25 bp, Homo sapien
tgttggcatctcctaacgggctttg

SEQ ID NO: 1347085 - DNA, 25 bp, Homo sapien
caggaaagtattctgccattgattc

SEQ ID NO: 1347086 - DNA, 25 bp, Homo sapien
cactagacccaagggcatggagtaa

SEQ ID NO: 1347087 - DNA, 25 bp, Homo sapien
gcatggagtaatttctcaggaaagt

SEQ ID NO: 1347088 - DNA, 25 bp, Homo sapien
tgaaataggcttcactagacccaag

SEQ ID NO: 1347089 - DNA, 25 bp, Homo sapien
agcagcagctcccaactaggagtgt

SEQ ID NO: 1347090 - DNA, 25 bp, Homo sapien
tctccatggtaccagaacctttact

SEQ ID NO: 1347091 - DNA, 25 bp, Homo sapien
tacttttcacgtgggctccaaccag

SEQ ID NO: 1347092 - DNA, 25 bp, Homo sapien
cagctcccaactaggagtgtcccag

SEQ ID NO: 1347093 - DNA, 25 bp, Homo sapien
aactctgacttgaccagatgccaca

SEQ ID NO: 1347094 - DNA, 25 bp, Homo sapien
ctcaactctgacttgaccagatgcc

SEQ ID NO: 1347095 - DNA, 25 bp, Homo sapien
ttctccataaagacctcctgccgtg

SEQ ID NO: 1347096 - DNA, 25 bp, Homo sapien
agacctcctgccgtggattctcatc

SEQ ID NO: 1347097 - DNA, 25 bp, Homo sapien
ccacattggtctgggctgaacctga

SEQ ID NO: 1347098 - DNA, 25 bp, Homo sapien
caagggagtgaactatggatgtact

SEQ ID NO: 1347099 - DNA, 25 bp, Homo sapien
cacctctgtatgcagtggctctgga

SEQ ID NO: 1347100 - DNA, 25 bp, Homo sapien
gacttcttggtgtccccacattggt

SEQ ID NO: 1347101 - DNA, 25 bp, Homo sapien
tctctgcctacaggaaggctcagct

SEQ ID NO: 1347102 - DNA, 25 bp, Homo sapien
gcactgccttaactggaatattcac

SEQ ID NO: 1347103 - DNA, 25 bp, Homo sapien
taaaggtctcctcgattgtctctgc

SEQ ID NO: 1347104 - DNA, 25 bp, Homo sapien
ggtatgttcttctcggcactgtgaa

SEQ ID NO: 1347105 - DNA, 25 bp, Homo sapien
ctttgaaggatgaatccaataatat

SEQ ID NO: 1347106 - DNA, 25 bp, Homo sapien
tccaataatatgtgggtacagtgac

SEQ ID NO: 1347107 - DNA, 25 bp, Homo sapien
tatgtgggtacagtgaccactttca

SEQ ID NO: 1347108 - DNA, 25 bp, Homo sapien
ggtacagtgaccactttcaagcttt

SEQ ID NO: 1347109 - DNA, 25 bp, Homo sapien
tggcaggttggtgaatcctttaaga

SEQ ID NO: 1347110 - DNA, 25 bp, Homo sapien
tgtggtcccccggagatttagttgc

SEQ ID NO: 1347111 - DNA, 25 bp, Homo sapien
gatctggtctggagttgtggtcccc

SEQ ID NO: 1347112 - DNA, 25 bp, Homo sapien
ggagatttagttgctattgtgatca

SEQ ID NO: 1347113 - DNA, 25 bp, Homo sapien
tatctcaagtgctgcacaagatttg

SEQ ID NO: 1347114 - DNA, 25 bp, Homo sapien
cttgggaaatattgtgctgagctcc

SEQ ID NO: 1347115 - DNA, 25 bp, Homo sapien
ctgtgactgtatggaaagcttggga

SEQ ID NO: 1347116 - DNA, 25 bp, Homo sapien
tgctctcatgtgaccatatagcatg

SEQ ID NO: 1347117 - DNA, 25 bp, Homo sapien
agggtaacctgtgttgttgaagaag

SEQ ID NO: 1347118 - DNA, 25 bp, Homo sapien
catcagggtaacctgtgttgttgaa

SEQ ID NO: 1347119 - DNA, 25 bp, Homo sapien
ggtaacctgtgttgttgaagaagcc

SEQ ID NO: 1347120 - DNA, 25 bp, Homo sapien
gggtaacctgtgttgttgaagaagc

SEQ ID NO: 1347121 - DNA, 25 bp, Homo sapien
ggcttcagcttctctacagagtcgc

SEQ ID NO: 1347122 - DNA, 25 bp, Homo sapien
aactcaaagtagcagggcctcacat

SEQ ID NO: 1347123 - DNA, 25 bp, Homo sapien
agcttctctacagagtcgctggtgg

SEQ ID NO: 1347124 - DNA, 25 bp, Homo sapien
gtggttaaactcaaagtagcagggc

SEQ ID NO: 1347125 - DNA, 25 bp, Homo sapien
tattatcatcctggtcacatggaga

SEQ ID NO: 1347126 - DNA, 25 bp, Homo sapien
gagaaaagatagaagggtgatgctc

SEQ ID NO: 1347127 - DNA, 25 bp, Homo sapien
tgacaatactcctcttccgtggagg

SEQ ID NO: 1347128 - DNA, 25 bp, Homo sapien
aatctgaagggagtgatccagcctt

SEQ ID NO: 1347129 - DNA, 25 bp, Homo sapien
ggccattaacttcctacaagcaatt

SEQ ID NO: 1347130 - DNA, 25 bp, Homo sapien
tcttggccattaacttcctacaagc

SEQ ID NO: 1347131 - DNA, 25 bp, Homo sapien
gttcatgggtatggaatgtaagtag

SEQ ID NO: 1347132 - DNA, 25 bp, Homo sapien
gttaagtgtggccatcagactaagt

SEQ ID NO: 1347133 - DNA, 25 bp, Homo sapien
tcagctgagtccctgaatgactgtt

SEQ ID NO: 1347134 - DNA, 25 bp, Homo sapien
caattgcctcccacaacatacagat

SEQ ID NO: 1347135 - DNA, 25 bp, Homo sapien
gtccctgaatgactgttgagccaat

SEQ ID NO: 1347136 - DNA, 25 bp, Homo sapien
tacatttgtgagcaggcacgtgcac

SEQ ID NO: 1347137 - DNA, 25 bp, Homo sapien
gttactatttctagatccaagtgga

SEQ ID NO: 1347138 - DNA, 25 bp, Homo sapien
tacagaatttagcacgcgattttcc

SEQ ID NO: 1347139 - DNA, 25 bp, Homo sapien
agtgttaagctggatactggtgtgc

SEQ ID NO: 1347140 - DNA, 25 bp, Homo sapien
tagtgctctaatgctctgagaagga

SEQ ID NO: 1347141 - DNA, 25 bp, Homo sapien
tgggccaagattcacagttgatata

SEQ ID NO: 1347142 - DNA, 25 bp, Homo sapien
gactgacaagttattctgccgaatg

SEQ ID NO: 1347143 - DNA, 25 bp, Homo sapien
gctgagaaagactgacaagttattc

SEQ ID NO: 1347144 - DNA, 25 bp, Homo sapien
tgaaagcccgtagcttctaaaatgg

SEQ ID NO: 1347145 - DNA, 25 bp, Homo sapien
caattttattgctactcgaaggctc

SEQ ID NO: 1347146 - DNA, 25 bp, Homo sapien
gagccatcagggtttcagtttttgc

SEQ ID NO: 1347147 - DNA, 25 bp, Homo sapien
gatgaagcaatattggaggaggcaa

SEQ ID NO: 1347148 - DNA, 25 bp, Homo sapien
cagatgataattccagagccatcag

SEQ ID NO: 1347149 - DNA, 25 bp, Homo sapien
tgtaggtgatctgtgactatggcaa

SEQ ID NO: 1347150 - DNA, 25 bp, Homo sapien
gatctgtgactatggcaagcaggaa

SEQ ID NO: 1347151 - DNA, 25 bp, Homo sapien
ggtgatctgtgactatggcaagcag

SEQ ID NO: 1347152 - DNA, 25 bp, Homo sapien
taggtgatctgtgactatggcaagc

SEQ ID NO: 1347153 - DNA, 25 bp, Homo sapien
tgaaagcttccattgtctgggtctc

SEQ ID NO: 1347154 - DNA, 25 bp, Homo sapien
ttgaaagcttccattgtctgggtct

SEQ ID NO: 1347155 - DNA, 25 bp, Homo sapien
cttcagcataaggatgactctatca

SEQ ID NO: 1347156 - DNA, 25 bp, Homo sapien
tctatcaagtaggtctgtagatact

SEQ ID NO: 1347157 - DNA, 25 bp, Homo sapien
tttactgccgaaactctcgcccttg

SEQ ID NO: 1347158 - DNA, 25 bp, Homo sapien
tctgtagatacttccaagtctttac

SEQ ID NO: 1347159 - DNA, 25 bp, Homo sapien
tttgcatccataccccccaaatagt

SEQ ID NO: 1347160 - DNA, 25 bp, Homo sapien
cccaaatagtggttcctgagaaaat

SEQ ID NO: 1347161 - DNA, 25 bp, Homo sapien
tctggataagggattcatgggcatt

SEQ ID NO: 1347162 - DNA, 25 bp, Homo sapien
ttcatgggcatttgcatccataccc

SEQ ID NO: 1347163 - DNA, 25 bp, Homo sapien
tccctgattcttgttgatttggcaa

SEQ ID NO: 1347164 - DNA, 25 bp, Homo sapien
catgtctttgtgagctgcctttatg

SEQ ID NO: 1347165 - DNA, 25 bp, Homo sapien
gcttccagaagagaatccggtctcc

SEQ ID NO: 1347166 - DNA, 25 bp, Homo sapien
ccggtctccgttttgaaatgccact

SEQ ID NO: 1347167 - DNA, 25 bp, Homo sapien
cactggtgtagcgtgatgggtccat

SEQ ID NO: 1347168 - DNA, 25 bp, Homo sapien
ttttcccactggtgtagcgtgatgg

SEQ ID NO: 1347169 - DNA, 25 bp, Homo sapien
gctgctctgagtggatgccacccat

SEQ ID NO: 1347170 - DNA, 25 bp, Homo sapien
gatgccacccatgtagaatattctt

SEQ ID NO: 1347171 - DNA, 25 bp, Homo sapien
cgggatgcctctggcaggacttcct

SEQ ID NO: 1347172 - DNA, 25 bp, Homo sapien
gagattccagctgatgtcattatca

SEQ ID NO: 1347173 - DNA, 25 bp, Homo sapien
cattttcatcattgtcgggatgcct

SEQ ID NO: 1347174 - DNA, 25 bp, Homo sapien
aaaataagagattccagctgatgtc

SEQ ID NO: 1347175 - DNA, 25 bp, Homo sapien
ggcagtatgtttagaggaatgttct

SEQ ID NO: 1347176 - DNA, 25 bp, Homo sapien
gtatgtttagaggaatgttctgctg

SEQ ID NO: 1347177 - DNA, 25 bp, Homo sapien
atggcagtatgtttagaggaatgtt

SEQ ID NO: 1347178 - DNA, 25 bp, Homo sapien
cagtatgtttagaggaatgttctgc

SEQ ID NO: 1347179 - DNA, 25 bp, Homo sapien
ggcagagtttcctactcatacaggg

SEQ ID NO: 1347180 - DNA, 25 bp, Homo sapien
cagagtttcctactcatacagggtg

SEQ ID NO: 1347181 - DNA, 25 bp, Homo sapien
caggcagagtttcctactcatacag

SEQ ID NO: 1347182 - DNA, 25 bp, Homo sapien
tagcacaggcagagtttcctactca

SEQ ID NO: 1347183 - DNA, 25 bp, Homo sapien
tctgtctgccccggagagcttgctt

SEQ ID NO: 1347184 - DNA, 25 bp, Homo sapien
tctgccccggagagcttgcttgggt

SEQ ID NO: 1347185 - DNA, 25 bp, Homo sapien
tgtctgccccggagagcttgcttgg

SEQ ID NO: 1347186 - DNA, 25 bp, Homo sapien
ctgtctgccccggagagcttgcttg

SEQ ID NO: 1347187 - DNA, 25 bp, Homo sapien
gctgctgcaagtgtcggtctttcca

SEQ ID NO: 1347188 - DNA, 25 bp, Homo sapien
tcaaggtcagataactacaggaggc

SEQ ID NO: 1347189 - DNA, 25 bp, Homo sapien
tatcttagccaaccgttctggagga

SEQ ID NO: 1347190 - DNA, 25 bp, Homo sapien
cccgtgccaggccaagtaatttgtt

SEQ ID NO: 1347191 - DNA, 25 bp, Homo sapien
cacaattctccttacccagagttag

SEQ ID NO: 1347192 - DNA, 25 bp, Homo sapien
gaagtttctcgaaagattgattgga

SEQ ID NO: 1347193 - DNA, 25 bp, Homo sapien
tcagtttgtggcgtcctgttaatca

SEQ ID NO: 1347194 - DNA, 25 bp, Homo sapien
gattggaacacaaggatttcagttt

SEQ ID NO: 1347195 - DNA, 25 bp, Homo sapien
atccaatgacaaatagaccttttga

SEQ ID NO: 1347196 - DNA, 25 bp, Homo sapien
acagcatacaataatccaatgacaa

SEQ ID NO: 1347197 - DNA, 25 bp, Homo sapien
tccaatgacaaatagaccttttgat

SEQ ID NO: 1347198 - DNA, 25 bp, Homo sapien
cttttgcttttgtggaaatcacaac

SEQ ID NO: 1347199 - DNA, 25 bp, Homo sapien
gtgtgaggtgtcccagtgtaccagt

SEQ ID NO: 1347200 - DNA, 25 bp, Homo sapien
taactgaggcagcaaacaaacttct

SEQ ID NO: 1347201 - DNA, 25 bp, Homo sapien
gcttggaatccagggtaactgaggc

SEQ ID NO: 1347202 - DNA, 25 bp, Homo sapien
cagtgtcctccattcgggggtgtct

SEQ ID NO: 1347203 - DNA, 25 bp, Homo sapien
tgcttgttcagcctaggttcacctt

SEQ ID NO: 1347204 - DNA, 25 bp, Homo sapien
taaattggcgtggaggagaccactc

SEQ ID NO: 1347205 - DNA, 25 bp, Homo sapien
agtgtccatgactgttgaacaccag

SEQ ID NO: 1347206 - DNA, 25 bp, Homo sapien
tgaacaccagacttgttgtctaggg

SEQ ID NO: 1347207 - DNA, 25 bp, Homo sapien
ctaagtcctttttgcatgcactgct

SEQ ID NO: 1347208 - DNA, 25 bp, Homo sapien
taagtcctttttgcatgcactgctt

SEQ ID NO: 1347209 - DNA, 25 bp, Homo sapien
tttttgcatgcactgctttccagac

SEQ ID NO: 1347210 - DNA, 25 bp, Homo sapien
gtcctttttgcatgcactgctttcc

SEQ ID NO: 1347211 - DNA, 25 bp, Homo sapien
acatgtttctctgtgttctgggctt

SEQ ID NO: 1347212 - DNA, 25 bp, Homo sapien
tacatgtttctctgtgttctgggct

SEQ ID NO: 1347213 - DNA, 25 bp, Homo sapien
agcctcttagtctggctttttgaat

SEQ ID NO: 1347214 - DNA, 25 bp, Homo sapien
gaaagcctcttagtctggctttttg

SEQ ID NO: 1347215 - DNA, 25 bp, Homo sapien
tctttgacagttggggtgaaagccc

SEQ ID NO: 1347216 - DNA, 25 bp, Homo sapien
ccactaatgccaggatagcatctcc

SEQ ID NO: 1347217 - DNA, 25 bp, Homo sapien
aaacaccactaatgccaggatagca

SEQ ID NO: 1347218 - DNA, 25 bp, Homo sapien
tggcatagttctgtcaggtccacct

SEQ ID NO: 1347219 - DNA, 25 bp, Homo sapien
ttgcattctctataggcgtccacta

SEQ ID NO: 1347220 - DNA, 25 bp, Homo sapien
tacatattgacttacagacttaaac

SEQ ID NO: 1347221 - DNA, 25 bp, Homo sapien
tagatgccattaatgattatttgct

SEQ ID NO: 1347222 - DNA, 25 bp, Homo sapien
ataatgtattaggattgcacaatgg

SEQ ID NO: 1347223 - DNA, 25 bp, Homo sapien
ccatcccatcttaattgggagagaa

SEQ ID NO: 1347224 - DNA, 25 bp, Homo sapien
tgacagctcgccatcccatcttaat

SEQ ID NO: 1347225 - DNA, 25 bp, Homo sapien
ggagagaagacccttccaaaagtga

SEQ ID NO: 1347226 - DNA, 25 bp, Homo sapien
aagtgaaccattggcagttctgtca

SEQ ID NO: 1347227 - DNA, 25 bp, Homo sapien
ggtggcagggcactgaataaaatgc

SEQ ID NO: 1347228 - DNA, 25 bp, Homo sapien
caggtcacccagaaaccaaggtggc

SEQ ID NO: 1347229 - DNA, 25 bp, Homo sapien
cacagaaggcttcgaaaagcaaacc

SEQ ID NO: 1347230 - DNA, 25 bp, Homo sapien
taatcgtaaacatgggttagctcct

SEQ ID NO: 1347231 - DNA, 25 bp, Homo sapien
cctctgagccaaatctggtgtttcc

SEQ ID NO: 1347232 - DNA, 25 bp, Homo sapien
ctctcctctgagccaaatctggtgt

SEQ ID NO: 1347233 - DNA, 25 bp, Homo sapien
tctcctctgagccaaatctggtgtt

SEQ ID NO: 1347234 - DNA, 25 bp, Homo sapien
tccacaaaccctccctgctatgccc

SEQ ID NO: 1347235 - DNA, 25 bp, Homo sapien
cctttacatgtcagacaccattgag

SEQ ID NO: 1347236 - DNA, 25 bp, Homo sapien
tgtcctttacatgtcagacaccatt

SEQ ID NO: 1347237 - DNA, 25 bp, Homo sapien
gtcctttacatgtcagacaccattg

SEQ ID NO: 1347238 - DNA, 25 bp, Homo sapien
ttacatgtcagacaccattgagtac

SEQ ID NO: 1347239 - DNA, 25 bp, Homo sapien
ggagccactgaggtaagcccttctc

SEQ ID NO: 1347240 - DNA, 25 bp, Homo sapien
gagccactgaggtaagcccttctcc

SEQ ID NO: 1347241 - DNA, 25 bp, Homo sapien
tctccactttccatagttgcttctt

SEQ ID NO: 1347242 - DNA, 25 bp, Homo sapien
ctccactttccatagttgcttcttc

SEQ ID NO: 1347243 - DNA, 25 bp, Homo sapien
tggagaaggaaacagaggaacagct

SEQ ID NO: 1347244 - DNA, 25 bp, Homo sapien
ctggagaaggaaacagaggaacagc

SEQ ID NO: 1347245 - DNA, 25 bp, Homo sapien
ggagaaggaaacagaggaacagctt

SEQ ID NO: 1347246 - DNA, 25 bp, Homo sapien
gaatggtgcttcgtgctggagcctt

SEQ ID NO: 1347247 - DNA, 25 bp, Homo sapien
cttcgtgctggagcctttatatcag

SEQ ID NO: 1347248 - DNA, 25 bp, Homo sapien
ggtgcttcgtgctggagcctttata

SEQ ID NO: 1347249 - DNA, 25 bp, Homo sapien
aagaatggtgcttcgtgctggagcc

SEQ ID NO: 1347250 - DNA, 25 bp, Homo sapien
caagctccactcatagaaattgtgt

SEQ ID NO: 1347251 - DNA, 25 bp, Homo sapien
gtgttctctttcacgctggccattg

SEQ ID NO: 1347252 - DNA, 25 bp, Homo sapien
tgtgttctctttcacgctggccatt

SEQ ID NO: 1347253 - DNA, 25 bp, Homo sapien
cccagggcaagctccactcatagaa

SEQ ID NO: 1347254 - DNA, 25 bp, Homo sapien
tttcgatgaccctcttgcatgtccc

SEQ ID NO: 1347255 - DNA, 25 bp, Homo sapien
ctttcgatgaccctcttgcatgtcc

SEQ ID NO: 1347256 - DNA, 25 bp, Homo sapien
gatgaccctcttgcatgtcccctct

SEQ ID NO: 1347257 - DNA, 25 bp, Homo sapien
gaccctcttgcatgtcccctctcca

SEQ ID NO: 1347258 - DNA, 25 bp, Homo sapien
tcttatctttgcctgggcccttagg

SEQ ID NO: 1347259 - DNA, 25 bp, Homo sapien
gggcccttaggagggctttctgcca

SEQ ID NO: 1347260 - DNA, 25 bp, Homo sapien
ttatctttgcctgggcccttaggag

SEQ ID NO: 1347261 - DNA, 25 bp, Homo sapien
tgcctgggcccttaggagggctttc

SEQ ID NO: 1347262 - DNA, 25 bp, Homo sapien
tgcctggttgtatgacaaagctgcc

SEQ ID NO: 1347263 - DNA, 25 bp, Homo sapien
tgctaacatgggattggactgcctg

SEQ ID NO: 1347264 - DNA, 25 bp, Homo sapien
caaagctgccacgtcagttttctga

SEQ ID NO: 1347265 - DNA, 25 bp, Homo sapien
taatgacctttatgccaaagactga

SEQ ID NO: 1347266 - DNA, 25 bp, Homo sapien
tctcagtccggtgtccaacgggagg

SEQ ID NO: 1347267 - DNA, 25 bp, Homo sapien
catttccgtttccaaagatgattgc

SEQ ID NO: 1347268 - DNA, 25 bp, Homo sapien
ggctcccattgggtcagcattaagg

SEQ ID NO: 1347269 - DNA, 25 bp, Homo sapien
ctgtgccttttgctgggctcccatt

SEQ ID NO: 1347270 - DNA, 25 bp, Homo sapien
aaatttgttgcggagacagcaggca

SEQ ID NO: 1347271 - DNA, 25 bp, Homo sapien
tattgttagtctcacagcttggcaa

SEQ ID NO: 1347272 - DNA, 25 bp, Homo sapien
agttctcaagaaggcccaaattagt

SEQ ID NO: 1347273 - DNA, 25 bp, Homo sapien
gaacacttatggaataagccacctg

SEQ ID NO: 1347274 - DNA, 25 bp, Homo sapien
ataagcgatataaacctgctgacag

SEQ ID NO: 1347275 - DNA, 25 bp, Homo sapien
ttacaagcatccagtcacttgctga

SEQ ID NO: 1347276 - DNA, 25 bp, Homo sapien
ctttccggtcctcttacaagcatcc

SEQ ID NO: 1347277 - DNA, 25 bp, Homo sapien
ttgctgaaatgtcataagcgatata

SEQ ID NO: 1347278 - DNA, 25 bp, Homo sapien
tccttccacgtaacaaatctcattg

SEQ ID NO: 1347279 - DNA, 25 bp, Homo sapien
gcctcctccttccacgtaacaaatc

SEQ ID NO: 1347280 - DNA, 25 bp, Homo sapien
ttgttgattggcatatggcagcaag

SEQ ID NO: 1347281 - DNA, 25 bp, Homo sapien
attgttgattggcatatggcagcaa

SEQ ID NO: 1347282 - DNA, 25 bp, Homo sapien
cccaacacccagagtggtgttctta

SEQ ID NO: 1347283 - DNA, 25 bp, Homo sapien
caacacccagagtggtgttcttatt

SEQ ID NO: 1347284 - DNA, 25 bp, Homo sapien
aacacccagagtggtgttcttattt

SEQ ID NO: 1347285 - DNA, 25 bp, Homo sapien
ccaacacccagagtggtgttcttat

SEQ ID NO: 1347286 - DNA, 25 bp, Homo sapien
gaacacaagggatgggtgaatcaaa

SEQ ID NO: 1347287 - DNA, 25 bp, Homo sapien
agtgtctttgtgctacgtagaacac

SEQ ID NO: 1347288 - DNA, 25 bp, Homo sapien
agggatgggtgaatcaaagttgctc

SEQ ID NO: 1347289 - DNA, 25 bp, Homo sapien
ttgtgctacgtagaacacaagggat

SEQ ID NO: 1347290 - DNA, 25 bp, Homo sapien
tactcctaactgcttggctacttga

SEQ ID NO: 1347291 - DNA, 25 bp, Homo sapien
ctactcctaactgcttggctacttg

SEQ ID NO: 1347292 - DNA, 25 bp, Homo sapien
tggctacttgagtaatattaagaga

SEQ ID NO: 1347293 - DNA, 25 bp, Homo sapien
ttggctacttgagtaatattaagag

SEQ ID NO: 1347294 - DNA, 25 bp, Homo sapien
ttctattgtaagactccaagcaccc

SEQ ID NO: 1347295 - DNA, 25 bp, Homo sapien
ttgtaagactccaagcacccacatg

SEQ ID NO: 1347296 - DNA, 25 bp, Homo sapien
tattgtaagactccaagcacccaca

SEQ ID NO: 1347297 - DNA, 25 bp, Homo sapien
gtaagactccaagcacccacatgga

SEQ ID NO: 1347298 - DNA, 25 bp, Homo sapien
aacactaaagtacttcacctggtag

SEQ ID NO: 1347299 - DNA, 25 bp, Homo sapien
caatgtgcccatctagcctttaatg

SEQ ID NO: 1347300 - DNA, 25 bp, Homo sapien
agtagaaggccatcagaagaaaatc

SEQ ID NO: 1347301 - DNA, 25 bp, Homo sapien
aaaatcactgttacttagagaagag

SEQ ID NO: 1347302 - DNA, 25 bp, Homo sapien
tgaccccacctaagtcactggatgt

SEQ ID NO: 1347303 - DNA, 25 bp, Homo sapien
ttctttattatcctcatgggacttc

SEQ ID NO: 1347304 - DNA, 25 bp, Homo sapien
cctgtggggcttattgatgtcacca

SEQ ID NO: 1347305 - DNA, 25 bp, Homo sapien
atcttctttattatcctcatgggac

SEQ ID NO: 1347306 - DNA, 25 bp, Homo sapien
cgacaagctccgaggatggcttaag

SEQ ID NO: 1347307 - DNA, 25 bp, Homo sapien
taagtccaacgtctctgatgcggtg

SEQ ID NO: 1347308 - DNA, 25 bp, Homo sapien
gatggcttaagtccaacgtctctga

SEQ ID NO: 1347309 - DNA, 25 bp, Homo sapien
acaggaccaggaagtacacgacaag

SEQ ID NO: 1347310 - DNA, 25 bp, Homo sapien
tattcccatgggagctacaccatgt

SEQ ID NO: 1347311 - DNA, 25 bp, Homo sapien
ccatgtcctcggcatattttagttt

SEQ ID NO: 1347312 - DNA, 25 bp, Homo sapien
tatatcttagtatccaataaaaccc

SEQ ID NO: 1347313 - DNA, 25 bp, Homo sapien
tcttctgtactatcagctgatagga

SEQ ID NO: 1347314 - DNA, 25 bp, Homo sapien
ttttcatccagtgtggtgtttggcc

SEQ ID NO: 1347315 - DNA, 25 bp, Homo sapien
tgtttggccgactcccagggttctg

SEQ ID NO: 1347316 - DNA, 25 bp, Homo sapien
tccggtgcctgaccctttgtctaga

SEQ ID NO: 1347317 - DNA, 25 bp, Homo sapien
ccagggttctgataactacatttga

SEQ ID NO: 1347318 - DNA, 25 bp, Homo sapien
gattcatcatatctgagttcatatg

SEQ ID NO: 1347319 - DNA, 25 bp, Homo sapien
ctttaaatagtaggattcatcatat

SEQ ID NO: 1347320 - DNA, 25 bp, Homo sapien
tagtaggattcatcatatctgagtt

SEQ ID NO: 1347321 - DNA, 25 bp, Homo sapien
taaatagtaggattcatcatatctg

SEQ ID NO: 1347322 - DNA, 25 bp, Homo sapien
gcatagatgacacagtcacgcacaa

SEQ ID NO: 1347323 - DNA, 25 bp, Homo sapien
aatgacagccatgaagtcgagcaga

SEQ ID NO: 1347324 - DNA, 25 bp, Homo sapien
ctatggtttgtgtgagagcatagat

SEQ ID NO: 1347325 - DNA, 25 bp, Homo sapien
tgaagtcgagcagaaatctagctga

SEQ ID NO: 1347326 - DNA, 25 bp, Homo sapien
gcaaaatgacctcatcaacccgtaa

SEQ ID NO: 1347327 - DNA, 25 bp, Homo sapien
tgacctcatcaacccgtaaactttg

SEQ ID NO: 1347328 - DNA, 25 bp, Homo sapien
ctcatcaacccgtaaactttgaggt

SEQ ID NO: 1347329 - DNA, 25 bp, Homo sapien
tcggcaaaatgacctcatcaacccg

SEQ ID NO: 1347330 - DNA, 25 bp, Homo sapien
cagcaagcctgatgcatatgataca

SEQ ID NO: 1347331 - DNA, 25 bp, Homo sapien
aaagcatgagttgttaactgctcag

SEQ ID NO: 1347332 - DNA, 25 bp, Homo sapien
tttagccatgagagtcagcaagcct

SEQ ID NO: 1347333 - DNA, 25 bp, Homo sapien
gtaccataattatcagctatactga

SEQ ID NO: 1347334 - DNA, 25 bp, Homo sapien
taatctttgattcatgacactgttc

SEQ ID NO: 1347335 - DNA, 25 bp, Homo sapien
gattctagaattaaattcagcatgc

SEQ ID NO: 1347336 - DNA, 25 bp, Homo sapien
ttcagcatgctaagagttcctgtta

SEQ ID NO: 1347337 - DNA, 25 bp, Homo sapien
taactgagagttaattacgtgacct

SEQ ID NO: 1347338 - DNA, 25 bp, Homo sapien
aaatgcactccacgtcctttgagat

SEQ ID NO: 1347339 - DNA, 25 bp, Homo sapien
ttggagttctggttgacaagtcagc

SEQ ID NO: 1347340 - DNA, 25 bp, Homo sapien
tcagcgatgagtccaaggtgagtct

SEQ ID NO: 1347341 - DNA, 25 bp, Homo sapien
gagtctttcgatgtcgttgaaacat

SEQ ID NO: 1347342 - DNA, 25 bp, Homo sapien
tgacaaactcagatattggagttct

SEQ ID NO: 1347343 - DNA, 25 bp, Homo sapien
ggcaggcccttgctttgtagtggga

SEQ ID NO: 1347344 - DNA, 25 bp, Homo sapien
tggcaggcccttgctttgtagtggg

SEQ ID NO: 1347345 - DNA, 25 bp, Homo sapien
tgtggcaggcccttgctttgtagtg

SEQ ID NO: 1347346 - DNA, 25 bp, Homo sapien
gcaggcccttgctttgtagtgggat

SEQ ID NO: 1347347 - DNA, 25 bp, Homo sapien
attcaatcctttgttctctcagagc

SEQ ID NO: 1347348 - DNA, 25 bp, Homo sapien
tcagagctgattcaaaaggtcttaa

SEQ ID NO: 1347349 - DNA, 25 bp, Homo sapien
gattcaaaaggtcttaagaacacca

SEQ ID NO: 1347350 - DNA, 25 bp, Homo sapien
ctctcagagctgattcaaaaggtct

SEQ ID NO: 1347351 - DNA, 25 bp, Homo sapien
gctgctgccgatagtcaaattcaca

SEQ ID NO: 1347352 - DNA, 25 bp, Homo sapien
taaatgaggtcatgcactcgagcgc

SEQ ID NO: 1347353 - DNA, 25 bp, Homo sapien
cctgggcaaatgcatcggccgatct

SEQ ID NO: 1347354 - DNA, 25 bp, Homo sapien
tattgctgataaccggcagcgcagg

SEQ ID NO: 1347355 - DNA, 25 bp, Homo sapien
catgtaaataatgaactagaggaat

SEQ ID NO: 1347356 - DNA, 25 bp, Homo sapien
aagcatgtaaataatgaactagagg

SEQ ID NO: 1347357 - DNA, 25 bp, Homo sapien
cttccttatgacaaaagcatgtaaa

SEQ ID NO: 1347358 - DNA, 25 bp, Homo sapien
gacaaaagcatgtaaataatgaact

SEQ ID NO: 1347359 - DNA, 25 bp, Homo sapien
gacagactcctttcgctttcatggt

SEQ ID NO: 1347360 - DNA, 25 bp, Homo sapien
ctccaccttgttgggacagactcct

SEQ ID NO: 1347361 - DNA, 25 bp, Homo sapien
gttaaatcaagcacggagcaggtac

SEQ ID NO: 1347362 - DNA, 25 bp, Homo sapien
tggttaaatcaagcacggagcaggt

SEQ ID NO: 1347363 - DNA, 25 bp, Homo sapien
cttgtactggatcctggctatcttc

SEQ ID NO: 1347364 - DNA, 25 bp, Homo sapien
actggatcctggctatcttcagcat

SEQ ID NO: 1347365 - DNA, 25 bp, Homo sapien
tgtactggatcctggctatcttcag

SEQ ID NO: 1347366 - DNA, 25 bp, Homo sapien
tggatcctggctatcttcagcataa

SEQ ID NO: 1347367 - DNA, 25 bp, Homo sapien
ggtccatggtaaagagcaaagctgt

SEQ ID NO: 1347368 - DNA, 25 bp, Homo sapien
aaattatctctggtccatggtaaag

SEQ ID NO: 1347369 - DNA, 25 bp, Homo sapien
caaagctgtaaaacgtgcctggcaa

SEQ ID NO: 1347370 - DNA, 25 bp, Homo sapien
aaccgagtgtcaatttccaagctgc

SEQ ID NO: 1347371 - DNA, 25 bp, Homo sapien
gaaaacgattttattaatgcgagga

SEQ ID NO: 1347372 - DNA, 25 bp, Homo sapien
aaatcttgctgttagtattttctat

SEQ ID NO: 1347373 - DNA, 25 bp, Homo sapien
caaaaggacaacgtgaaatgaaatt

SEQ ID NO: 1347374 - DNA, 25 bp, Homo sapien
tattaatgcgaggattcaaaaggac

SEQ ID NO: 1347375 - DNA, 25 bp, Homo sapien
ctttctctaccagagtattggaatt

SEQ ID NO: 1347376 - DNA, 25 bp, Homo sapien
tttctctaccagagtattggaattc

SEQ ID NO: 1347377 - DNA, 25 bp, Homo sapien
ttctctaccagagtattggaattca

SEQ ID NO: 1347378 - DNA, 25 bp, Homo sapien
tctctaccagagtattggaattcat

SEQ ID NO: 1347379 - DNA, 25 bp, Homo sapien
aagacgaggctgaatattggagtcc

SEQ ID NO: 1347380 - DNA, 25 bp, Homo sapien
ctaacgccttgagctggatgtcttc

SEQ ID NO: 1347381 - DNA, 25 bp, Homo sapien
gacttcagtcaaagaggagcctcgc

SEQ ID NO: 1347382 - DNA, 25 bp, Homo sapien
caaatgctgatctgtctgcctgtag

SEQ ID NO: 1347383 - DNA, 25 bp, Homo sapien
aagaaggtcttctacagctgcagaa

SEQ ID NO: 1347384 - DNA, 25 bp, Homo sapien
aaagaaggtcttctacagctgcaga

SEQ ID NO: 1347385 - DNA, 25 bp, Homo sapien
tcctatccctagtgagagaattctt

SEQ ID NO: 1347386 - DNA, 25 bp, Homo sapien
gcttctctagctcctatccctagtg

SEQ ID NO: 1347387 - DNA, 25 bp, Homo sapien
gagagaattcttaagcactctttgt

SEQ ID NO: 1347388 - DNA, 25 bp, Homo sapien
ttcttaagcactctttgttgagcat

SEQ ID NO: 1347389 - DNA, 25 bp, Homo sapien
gacagggccgtgcacatattctata

SEQ ID NO: 1347390 - DNA, 25 bp, Homo sapien
tgactgcctccattgaaagtgtctg

SEQ ID NO: 1347391 - DNA, 25 bp, Homo sapien
aggaaatgaggattggtcagagaac

SEQ ID NO: 1347392 - DNA, 25 bp, Homo sapien
gccagactgagaccgtacattcttc

SEQ ID NO: 1347393 - DNA, 25 bp, Homo sapien
ctccttgtcagtactatgcacatca

SEQ ID NO: 1347394 - DNA, 25 bp, Homo sapien
tccttgtcagtactatgcacatcat

SEQ ID NO: 1347395 - DNA, 25 bp, Homo sapien
tagggtaacagttgccccaggtgtg

SEQ ID NO: 1347396 - DNA, 25 bp, Homo sapien
tctaaaatacccagtgagttttcca

SEQ ID NO: 1347397 - DNA, 25 bp, Homo sapien
gctgtcttttgagccaatgcctctt

SEQ ID NO: 1347398 - DNA, 25 bp, Homo sapien
tgtagggtaacagttgccccaggtg

SEQ ID NO: 1347399 - DNA, 25 bp, Homo sapien
ggccacaccatcttttccaataaca

SEQ ID NO: 1347400 - DNA, 25 bp, Homo sapien
ctctttgaataccaggtctctgaga

SEQ ID NO: 1347401 - DNA, 25 bp, Homo sapien
gatctgtcactctttgaataccagg

SEQ ID NO: 1347402 - DNA, 25 bp, Homo sapien
aggtctgcattgaatactgaatcca

SEQ ID NO: 1347403 - DNA, 25 bp, Homo sapien
ctgcattgaatactgaatccagatc

SEQ ID NO: 1347404 - DNA, 25 bp, Homo sapien
agcctttagaagacaacggatgcat

SEQ ID NO: 1347405 - DNA, 25 bp, Homo sapien
aaagtaaaggactaagaatgtcagg

SEQ ID NO: 1347406 - DNA, 25 bp, Homo sapien
tcagggtgagcaaagcctttagaag

SEQ ID NO: 1347407 - DNA, 25 bp, Homo sapien
gcaaagcctttagaagacaacggat

SEQ ID NO: 1347408 - DNA, 25 bp, Homo sapien
cgcggccggctgctgggcaaaaatc

SEQ ID NO: 1347409 - DNA, 25 bp, Homo sapien
tctttaggacccagcaggcggcggc

SEQ ID NO: 1347410 - DNA, 25 bp, Homo sapien
ggcggcaggcggcagttgtgtagat

SEQ ID NO: 1347411 - DNA, 25 bp, Homo sapien
tgagagactacgagggtccggttca

SEQ ID NO: 1347412 - DNA, 25 bp, Homo sapien
caaaggctagtaggctgaagaccca

SEQ ID NO: 1347413 - DNA, 25 bp, Homo sapien
tcaacagtcagtagtaggtgctccc

SEQ ID NO: 1347414 - DNA, 25 bp, Homo sapien
tatgaggctaagaagtcctaagagc

SEQ ID NO: 1347415 - DNA, 25 bp, Homo sapien
cacattagggagcagagtaagcttt

SEQ ID NO: 1347416 - DNA, 25 bp, Homo sapien
taattgggttgagaataaggcctgc

SEQ ID NO: 1347417 - DNA, 25 bp, Homo sapien
catattgtctgcgataaaatccccg

SEQ ID NO: 1347418 - DNA, 25 bp, Homo sapien
cccgggttctgcagtggctttgtca

SEQ ID NO: 1347419 - DNA, 25 bp, Homo sapien
gctttgtcagtgaggtgcaatttca

SEQ ID NO: 1347420 - DNA, 25 bp, Homo sapien
gttgggacactcgtgccatctctct

SEQ ID NO: 1347421 - DNA, 25 bp, Homo sapien
cattagcattaggaggttgagtgcc

SEQ ID NO: 1347422 - DNA, 25 bp, Homo sapien
ttgagtgccgttgggacactcgtgc

SEQ ID NO: 1347423 - DNA, 25 bp, Homo sapien
cactgtcaactctaatgggatggat

SEQ ID NO: 1347424 - DNA, 25 bp, Homo sapien
caacttgaacttcagaaccagccat

SEQ ID NO: 1347425 - DNA, 25 bp, Homo sapien
gaacaacttgaacttcagaaccagc

SEQ ID NO: 1347426 - DNA, 25 bp, Homo sapien
tgtaacataagaacaacttgaactt

SEQ ID NO: 1347427 - DNA, 25 bp, Homo sapien
ctgtaacataagaacaacttgaact

SEQ ID NO: 1347428 - DNA, 25 bp, Homo sapien
catagtaacgctctgtggaaccctc

SEQ ID NO: 1347429 - DNA, 25 bp, Homo sapien
agtcagtgggtaaaatggctttgga

SEQ ID NO: 1347430 - DNA, 25 bp, Homo sapien
tcttctgggaaatcaggactgagtc

SEQ ID NO: 1347431 - DNA, 25 bp, Homo sapien
agtctgggcaatgctagagtcagtg

SEQ ID NO: 1347432 - DNA, 25 bp, Homo sapien
gctgagctagcctctccaaaatgta

SEQ ID NO: 1347433 - DNA, 25 bp, Homo sapien
gaattacacacctttagagctgcca

SEQ ID NO: 1347434 - DNA, 25 bp, Homo sapien
aaagtacctttgcacctgtcgctga

SEQ ID NO: 1347435 - DNA, 25 bp, Homo sapien
actggaagcccagcttagcatgagg

SEQ ID NO: 1347436 - DNA, 25 bp, Homo sapien
tttaaaattccccagagacttctgc

SEQ ID NO: 1347437 - DNA, 25 bp, Homo sapien
cccagagacttctgcaaaacctgaa

SEQ ID NO: 1347438 - DNA, 25 bp, Homo sapien
aaaattccccagagacttctgcaaa

SEQ ID NO: 1347439 - DNA, 25 bp, Homo sapien
ttccccagagacttctgcaaaacct

SEQ ID NO: 1347440 - DNA, 25 bp, Homo sapien
tcccctgccgtttgggtactgacta

SEQ ID NO: 1347441 - DNA, 25 bp, Homo sapien
gactctggcaagtagatgacccctt

SEQ ID NO: 1347442 - DNA, 25 bp, Homo sapien
cccttgctgggagtaagcttcagcc

SEQ ID NO: 1347443 - DNA, 25 bp, Homo sapien
tgggtactgactaaaaccgttgatc

SEQ ID NO: 1347444 - DNA, 25 bp, Homo sapien
gaagtagatcttggcttcacccaac

SEQ ID NO: 1347445 - DNA, 25 bp, Homo sapien
gctttggctgaattaggcagtactc

SEQ ID NO: 1347446 - DNA, 25 bp, Homo sapien
tcactatgtattctgcactgacagg

SEQ ID NO: 1347447 - DNA, 25 bp, Homo sapien
gacaggtcctaattggatcgactga

SEQ ID NO: 1347448 - DNA, 25 bp, Homo sapien
gacaggattccccatcagggccttt

SEQ ID NO: 1347449 - DNA, 25 bp, Homo sapien
tccacatctattaccattccgtcag

SEQ ID NO: 1347450 - DNA, 25 bp, Homo sapien
taccattccgtcagccaagtgacag

SEQ ID NO: 1347451 - DNA, 25 bp, Homo sapien
tcaactttatgctggcggataggca

SEQ ID NO: 1347452 - DNA, 25 bp, Homo sapien
gaagtgcctggtagaacaggtgaca

SEQ ID NO: 1347453 - DNA, 25 bp, Homo sapien
acaggtgacattgggcaagagaaag

SEQ ID NO: 1347454 - DNA, 25 bp, Homo sapien
catcatattgtggtgtgagactcgc

SEQ ID NO: 1347455 - DNA, 25 bp, Homo sapien
cgcaaaatctcatgcattctcacca

SEQ ID NO: 1347456 - DNA, 25 bp, Homo sapien
cttcttctgtatccttcccccgctc

SEQ ID NO: 1347457 - DNA, 25 bp, Homo sapien
tctctctgtctgtggattctctttg

SEQ ID NO: 1347458 - DNA, 25 bp, Homo sapien
accagacaggtcctctttcttgcct

SEQ ID NO: 1347459 - DNA, 25 bp, Homo sapien
cttccttagtcagcccctcaccaga

SEQ ID NO: 1347460 - DNA, 25 bp, Homo sapien
taaagattccagaaacacaggagtc

SEQ ID NO: 1347461 - DNA, 25 bp, Homo sapien
tgtgacactgaagcaataaggccaa

SEQ ID NO: 1347462 - DNA, 25 bp, Homo sapien
aatgcccttgagtatgagatgtgac

SEQ ID NO: 1347463 - DNA, 25 bp, Homo sapien
taccaccaaggtgtattgtccatga

SEQ ID NO: 1347464 - DNA, 25 bp, Homo sapien
ggtgtccacgaccttgtatgagtgt

SEQ ID NO: 1347465 - DNA, 25 bp, Homo sapien
ccacgaccttgtatgagtgtctgga

SEQ ID NO: 1347466 - DNA, 25 bp, Homo sapien
tgtccacgaccttgtatgagtgtct

SEQ ID NO: 1347467 - DNA, 25 bp, Homo sapien
acgaccttgtatgagtgtctggagg

SEQ ID NO: 1347468 - DNA, 25 bp, Homo sapien
ttgtgtctcagtgctactataatca

SEQ ID NO: 1347469 - DNA, 25 bp, Homo sapien
tgtgtctcagtgctactataatcag

SEQ ID NO: 1347470 - DNA, 25 bp, Homo sapien
caacaaacatataaggtcctggaga

SEQ ID NO: 1347471 - DNA, 25 bp, Homo sapien
aaagtatagatacagccagtgggca

SEQ ID NO: 1347472 - DNA, 25 bp, Homo sapien
ttctaactagggagataacacagtc

SEQ ID NO: 1347473 - DNA, 25 bp, Homo sapien
ggatacatcagccagacatgaaggc

SEQ ID NO: 1347474 - DNA, 25 bp, Homo sapien
ccatgagtgaccagcagtaaaatat

SEQ ID NO: 1347475 - DNA, 25 bp, Homo sapien
tatgtgcataagtcaaaagattggg

SEQ ID NO: 1347476 - DNA, 25 bp, Homo sapien
aattaaagctgcaggattccatgag

SEQ ID NO: 1347477 - DNA, 25 bp, Homo sapien
taagtggtccaacaatagaagactg

SEQ ID NO: 1347478 - DNA, 25 bp, Homo sapien
aacagtcaatgtattctgatctctg

SEQ ID NO: 1347479 - DNA, 25 bp, Homo sapien
gtctcattcgcttttataatacaca

SEQ ID NO: 1347480 - DNA, 25 bp, Homo sapien
taaattattatccaagtttgcagtc

SEQ ID NO: 1347481 - DNA, 25 bp, Homo sapien
gaatatatttagtgccattaagcag

SEQ ID NO: 1347482 - DNA, 25 bp, Homo sapien
ataatcccagaataaagcccccagg

SEQ ID NO: 1347483 - DNA, 25 bp, Homo sapien
gaaaaccatgataataagtgcccat

SEQ ID NO: 1347484 - DNA, 25 bp, Homo sapien
aataaagcccccaggaggatgccag

SEQ ID NO: 1347485 - DNA, 25 bp, Homo sapien
catgataataagtgcccataatccc

SEQ ID NO: 1347486 - DNA, 25 bp, Homo sapien
cagcggtgacaacgtgaagaaaaga

SEQ ID NO: 1347487 - DNA, 25 bp, Homo sapien
tcaaaagttatgaaatacatccaca

SEQ ID NO: 1347488 - DNA, 25 bp, Homo sapien
gaaaaagttcccatctccatacttg

SEQ ID NO: 1347489 - DNA, 25 bp, Homo sapien
aaaaccctgatcctttatcaccata

SEQ ID NO: 1347490 - DNA, 25 bp, Homo sapien
gctctcctttatagtcttccggaaa

SEQ ID NO: 1347491 - DNA, 25 bp, Homo sapien
gctttcaaggaaatgacggtgacac

SEQ ID NO: 1347492 - DNA, 25 bp, Homo sapien
gggaatctagaaactaactcatcta

SEQ ID NO: 1347493 - DNA, 25 bp, Homo sapien
accatgccaggaattgctttcaagg

SEQ ID NO: 1347494 - DNA, 25 bp, Homo sapien
tcctgcacaatgaaagaactgtccc

SEQ ID NO: 1347495 - DNA, 25 bp, Homo sapien
gaactgtcccatccaaatacctaga

SEQ ID NO: 1347496 - DNA, 25 bp, Homo sapien
ggcaaccagtatttggaaggagaag

SEQ ID NO: 1347497 - DNA, 25 bp, Homo sapien
gagaccccagtacttctctccaaga

SEQ ID NO: 1347498 - DNA, 25 bp, Homo sapien
gctacaggaagttgttcagcatatt

SEQ ID NO: 1347499 - DNA, 25 bp, Homo sapien
ttcagaggttccattagtttctcat

SEQ ID NO: 1347500 - DNA, 25 bp, Homo sapien
agcatatttcagaggttccattagt

SEQ ID NO: 1347501 - DNA, 25 bp, Homo sapien
ctggtgtattatctgagctacagga

SEQ ID NO: 1347502 - DNA, 25 bp, Homo sapien
cagtgttgcactataacagcagagc

SEQ ID NO: 1347503 - DNA, 25 bp, Homo sapien
gaagacctgccaagcaactcagtaa

SEQ ID NO: 1347504 - DNA, 25 bp, Homo sapien
tatggcctatgacctacaaatgctt

SEQ ID NO: 1347505 - DNA, 25 bp, Homo sapien
caaatgtgagctcaaatgtgacctg

SEQ ID NO: 1347506 - DNA, 25 bp, Homo sapien
gtgctttggatttgttgaactacct

SEQ ID NO: 1347507 - DNA, 25 bp, Homo sapien
tatcttcatgtctcataacctgtcc

SEQ ID NO: 1347508 - DNA, 25 bp, Homo sapien
taattagacatagctaacagtttcc

SEQ ID NO: 1347509 - DNA, 25 bp, Homo sapien
gaagtatatactccctgtattgtgc

SEQ ID NO: 1347510 - DNA, 25 bp, Homo sapien
taaattaaacgaatcacatctaatt

SEQ ID NO: 1347511 - DNA, 25 bp, Homo sapien
tataaattaaacgaatcacatctaa

SEQ ID NO: 1347512 - DNA, 25 bp, Homo sapien
ttataaattaaacgaatcacatcta

SEQ ID NO: 1347513 - DNA, 25 bp, Homo sapien
ataaattaaacgaatcacatctaat

SEQ ID NO: 1347514 - DNA, 25 bp, Homo sapien
tccctaatgttaccaggaggcctaa

SEQ ID NO: 1347515 - DNA, 25 bp, Homo sapien
tggagctccaacataatcctaacga

SEQ ID NO: 1347516 - DNA, 25 bp, Homo sapien
gaggcctaacagaaaattatggcgc

SEQ ID NO: 1347517 - DNA, 25 bp, Homo sapien
gtatcaaactgaaccactagcaaga

SEQ ID NO: 1347518 - DNA, 25 bp, Homo sapien
tccactttccgtacacttccaaaga

SEQ ID NO: 1347519 - DNA, 25 bp, Homo sapien
tctgaatcctgttgcaatttaatag

SEQ ID NO: 1347520 - DNA, 25 bp, Homo sapien
ttccgtacacttccaaagaaatcag

SEQ ID NO: 1347521 - DNA, 25 bp, Homo sapien
ttatcagtacatttttaggatccct

SEQ ID NO: 1347522 - DNA, 25 bp, Homo sapien
gatgtccaggagtagacacacacag

SEQ ID NO: 1347523 - DNA, 25 bp, Homo sapien
gaaaaagatcagtgcgatgtccagg

SEQ ID NO: 1347524 - DNA, 25 bp, Homo sapien
gatcagtgcgatgtccaggagtaga

SEQ ID NO: 1347525 - DNA, 25 bp, Homo sapien
tgcgatgtccaggagtagacacaca

SEQ ID NO: 1347526 - DNA, 25 bp, Homo sapien
ttcatattagtttggctagctgggt

SEQ ID NO: 1347527 - DNA, 25 bp, Homo sapien
gactccaattgcaggatcaggttga

SEQ ID NO: 1347528 - DNA, 25 bp, Homo sapien
tgtatctatccataagatggactcc

SEQ ID NO: 1347529 - DNA, 25 bp, Homo sapien
tatccataagatggactccaattgc

SEQ ID NO: 1347530 - DNA, 25 bp, Homo sapien
gaatcttctcccacttgactactag

SEQ ID NO: 1347531 - DNA, 25 bp, Homo sapien
tcccacttgactactagctagagcc

SEQ ID NO: 1347532 - DNA, 25 bp, Homo sapien
tgactactagctagagccattatgt

SEQ ID NO: 1347533 - DNA, 25 bp, Homo sapien
cttctcccacttgactactagctag

SEQ ID NO: 1347534 - DNA, 25 bp, Homo sapien
ttggcaagtatcaataataaacagt

SEQ ID NO: 1347535 - DNA, 25 bp, Homo sapien
cttggcaagtatcaataataaacag

SEQ ID NO: 1347536 - DNA, 25 bp, Homo sapien
aataataaacagtagctcattgtag

SEQ ID NO: 1347537 - DNA, 25 bp, Homo sapien
atcaataataaacagtagctcattg

SEQ ID NO: 1347538 - DNA, 25 bp, Homo sapien
gttcaaaagcatccgcgagttctat

SEQ ID NO: 1347539 - DNA, 25 bp, Homo sapien
aaaagcatccgcgagttctatgttg

SEQ ID NO: 1347540 - DNA, 25 bp, Homo sapien
gcatccgcgagttctatgttggtaa

SEQ ID NO: 1347541 - DNA, 25 bp, Homo sapien
ccgcgagttctatgttggtaatttc

SEQ ID NO: 1347542 - DNA, 25 bp, Homo sapien
gaggagtactaggtgggatcctccc

SEQ ID NO: 1347543 - DNA, 25 bp, Homo sapien
ctgtcatcagaaagaagacgttttg

SEQ ID NO: 1347544 - DNA, 25 bp, Homo sapien
agacgttttgaccgaggagtactag

SEQ ID NO: 1347545 - DNA, 25 bp, Homo sapien
tctgtcatcagaaagaagacgtttt

SEQ ID NO: 1347546 - DNA, 25 bp, Homo sapien
tcgtaacttctataatccacttcca

SEQ ID NO: 1347547 - DNA, 25 bp, Homo sapien
acttctataatccacttccacatca

SEQ ID NO: 1347548 - DNA, 25 bp, Homo sapien
gtaacttctataatccacttccaca

SEQ ID NO: 1347549 - DNA, 25 bp, Homo sapien
ctcgtaacttctataatccacttcc

SEQ ID NO: 1347550 - DNA, 25 bp, Homo sapien
taaacactgtagctggtttgggatt

SEQ ID NO: 1347551 - DNA, 25 bp, Homo sapien
tcttgtgactaaacactgtagctgg

SEQ ID NO: 1347552 - DNA, 25 bp, Homo sapien
ttgtgactaaacactgtagctggtt

SEQ ID NO: 1347553 - DNA, 25 bp, Homo sapien
tgactaaacactgtagctggtttgg

SEQ ID NO: 1347554 - DNA, 25 bp, Homo sapien
gctgtgcacactgcccatagcagga

SEQ ID NO: 1347555 - DNA, 25 bp, Homo sapien
tgattcagagttcatgaatatcatt

SEQ ID NO: 1347556 - DNA, 25 bp, Homo sapien
ctgttcttaaccgtgggcgatgaga

SEQ ID NO: 1347557 - DNA, 25 bp, Homo sapien
catagcaggaacaacccagactggt

SEQ ID NO: 1347558 - DNA, 25 bp, Homo sapien
accttggggcccagggtggctgagg

SEQ ID NO: 1347559 - DNA, 25 bp, Homo sapien
ctgtggagaccttggggcccagggt

SEQ ID NO: 1347560 - DNA, 25 bp, Homo sapien
cttggggcccagggtggctgaggtc

SEQ ID NO: 1347561 - DNA, 25 bp, Homo sapien
agaccttggggcccagggtggctga

SEQ ID NO: 1347562 - DNA, 25 bp, Homo sapien
tggattgaatctggacatcagaaaa

SEQ ID NO: 1347563 - DNA, 25 bp, Homo sapien
tcatggattgaatctggacatcaga

SEQ ID NO: 1347564 - DNA, 25 bp, Homo sapien
catggattgaatctggacatcagaa

SEQ ID NO: 1347565 - DNA, 25 bp, Homo sapien
atggattgaatctggacatcagaaa

SEQ ID NO: 1347566 - DNA, 25 bp, Homo sapien
ttaaaccagaatcgggatgtacaca

SEQ ID NO: 1347567 - DNA, 25 bp, Homo sapien
ctgtcaggaatacctagcctcttga

SEQ ID NO: 1347568 - DNA, 25 bp, Homo sapien
cagaaagggtatttgcaacatgtcg

SEQ ID NO: 1347569 - DNA, 25 bp, Homo sapien
gcaacatgtcgataattaaaccaga

SEQ ID NO: 1347570 - DNA, 25 bp, Homo sapien
tccttttccaacatgcattactggc

SEQ ID NO: 1347571 - DNA, 25 bp, Homo sapien
tttccaacatgcattactggctttg

SEQ ID NO: 1347572 - DNA, 25 bp, Homo sapien
tctttgaacctattctctatttccc

SEQ ID NO: 1347573 - DNA, 25 bp, Homo sapien
ttcctgcctctttgaacctattctc

SEQ ID NO: 1347574 - DNA, 25 bp, Homo sapien
cagttgtttgtatggccacttctaa

SEQ ID NO: 1347575 - DNA, 25 bp, Homo sapien
tgtttgtatggccacttctaaagaa

SEQ ID NO: 1347576 - DNA, 25 bp, Homo sapien
gtatggccacttctaaagaattgtt

SEQ ID NO: 1347577 - DNA, 25 bp, Homo sapien
gcccagttgtttgtatggccacttc

SEQ ID NO: 1347578 - DNA, 25 bp, Homo sapien
taacttttctgtgcctccaaatctc

SEQ ID NO: 1347579 - DNA, 25 bp, Homo sapien
cttttctgtgcctccaaatctccat

SEQ ID NO: 1347580 - DNA, 25 bp, Homo sapien
gttctttaacttttctgtgcctcca

SEQ ID NO: 1347581 - DNA, 25 bp, Homo sapien
tttaacttttctgtgcctccaaatc

SEQ ID NO: 1347582 - DNA, 25 bp, Homo sapien
tccagttccgtctgactcctatcaa

SEQ ID NO: 1347583 - DNA, 25 bp, Homo sapien
ttgagtagtaggaaagcagttgctg

SEQ ID NO: 1347584 - DNA, 25 bp, Homo sapien
tcctatcaaaacagagggctgcagt

SEQ ID NO: 1347585 - DNA, 25 bp, Homo sapien
tgcacactgacatttcacgagcctc

SEQ ID NO: 1347586 - DNA, 25 bp, Homo sapien
acagttgccaagacagtcgcagccc

SEQ ID NO: 1347587 - DNA, 25 bp, Homo sapien
caacacagttgccaagacagtcgca

SEQ ID NO: 1347588 - DNA, 25 bp, Homo sapien
ttgccaagacagtcgcagcccggct

SEQ ID NO: 1347589 - DNA, 25 bp, Homo sapien
aagacagtcgcagcccggctgaggc

SEQ ID NO: 1347590 - DNA, 25 bp, Homo sapien
gacttcccgcacctgaaggggcgga

SEQ ID NO: 1347591 - DNA, 25 bp, Homo sapien
ggcggaggcagtgccgtaaagtagc

SEQ ID NO: 1347592 - DNA, 25 bp, Homo sapien
cgtaaagtagcgctgcgggtttttg

SEQ ID NO: 1347593 - DNA, 25 bp, Homo sapien
gtttaccggcttcagacttcccgca

SEQ ID NO: 1347594 - DNA, 25 bp, Homo sapien
tcctaccaaagttaggcctccatat

SEQ ID NO: 1347595 - DNA, 25 bp, Homo sapien
attaaacaaacagttgtgtttcatt

SEQ ID NO: 1347596 - DNA, 25 bp, Homo sapien
ttcctaccaaagttaggcctccata

SEQ ID NO: 1347597 - DNA, 25 bp, Homo sapien
ccattaaacaaacagttgtgtttca

SEQ ID NO: 1347598 - DNA, 25 bp, Homo sapien
ttttaatctgtgtggaacttcttcc

SEQ ID NO: 1347599 - DNA, 25 bp, Homo sapien
tcttccagttggcagtacaaaacaa

SEQ ID NO: 1347600 - DNA, 25 bp, Homo sapien
caaacttcctgtacgtcagtgtcag

SEQ ID NO: 1347601 - DNA, 25 bp, Homo sapien
ggataactgcctactcttttggaat

SEQ ID NO: 1347602 - DNA, 25 bp, Homo sapien
taaccgtgtatgtgcgtgcgagtgt

SEQ ID NO: 1347603 - DNA, 25 bp, Homo sapien
gaaacggtcgcaggttcctacagac

SEQ ID NO: 1347604 - DNA, 25 bp, Homo sapien
tctgtgtgcgtacaaggtccggaga

SEQ ID NO: 1347605 - DNA, 25 bp, Homo sapien
gtatgactacgaccccttgcgcgtg

SEQ ID NO: 1347606 - DNA, 25 bp, Homo sapien
ctgagtgcgcgtgagaaagagggct

SEQ ID NO: 1347607 - DNA, 25 bp, Homo sapien
gggctgcaccgctgctcggcgcgga

SEQ ID NO: 1347608 - DNA, 25 bp, Homo sapien
gcttgcgccccaaggcacgcgcggc

SEQ ID NO: 1347609 - DNA, 25 bp, Homo sapien
tcggcgcggactctgccagccccag

SEQ ID NO: 1347610 - DNA, 25 bp, Homo sapien
tgctcgacaacccacctggagatag

SEQ ID NO: 1347611 - DNA, 25 bp, Homo sapien
tgttgctcagtcttcagaccgcagc

SEQ ID NO: 1347612 - DNA, 25 bp, Homo sapien
cgcaggtttcgccagtgctcgacaa

SEQ ID NO: 1347613 - DNA, 25 bp, Homo sapien
gcgctttcgctgaatgaactcctga

SEQ ID NO: 1347614 - DNA, 25 bp, Homo sapien
ggcttcctaagcgagctctgaaagg

SEQ ID NO: 1347615 - DNA, 25 bp, Homo sapien
tgggttgccataattacaggtcttc

SEQ ID NO: 1347616 - DNA, 25 bp, Homo sapien
tataagccaccgttttcaggtcatc

SEQ ID NO: 1347617 - DNA, 25 bp, Homo sapien
tatcgtaaactaaaggtcatgaggg

SEQ ID NO: 1347618 - DNA, 25 bp, Homo sapien
ctacgccctcagacaaagatgcctg

SEQ ID NO: 1347619 - DNA, 25 bp, Homo sapien
gggtatgtccagtccgtcaagattc

SEQ ID NO: 1347620 - DNA, 25 bp, Homo sapien
gcctgtgcagtcagatcctctccct

SEQ ID NO: 1347621 - DNA, 25 bp, Homo sapien
tctttttcagtacagcctacgccct

SEQ ID NO: 1347622 - DNA, 25 bp, Homo sapien
aatgaagtacagagctggctatttg

SEQ ID NO: 1347623 - DNA, 25 bp, Homo sapien
caatgaagtacagagctggctattt

SEQ ID NO: 1347624 - DNA, 25 bp, Homo sapien
tcaggtgactggtggttcctccctc

SEQ ID NO: 1347625 - DNA, 25 bp, Homo sapien
aggtgactggtggttcctccctctg

SEQ ID NO: 1347626 - DNA, 25 bp, Homo sapien
caggtgactggtggttcctccctct

SEQ ID NO: 1347627 - DNA, 25 bp, Homo sapien
gaccaaagtggaccatgcccttcaa

SEQ ID NO: 1347628 - DNA, 25 bp, Homo sapien
ttcaaacccctgtcgtgaaggatcc

SEQ ID NO: 1347629 - DNA, 25 bp, Homo sapien
tgaaggatccactgtaattcccatc

SEQ ID NO: 1347630 - DNA, 25 bp, Homo sapien
agaggtggaccaaagtggaccatgc

SEQ ID NO: 1347631 - DNA, 25 bp, Homo sapien
gacactctgtgatcagaacaataat

SEQ ID NO: 1347632 - DNA, 25 bp, Homo sapien
catgtttaaggccaaactaattgga

SEQ ID NO: 1347633 - DNA, 25 bp, Homo sapien
tttaaagagacctggcactatagtt

SEQ ID NO: 1347634 - DNA, 25 bp, Homo sapien
tccagacttcagagttaggtcttca

SEQ ID NO: 1347635 - DNA, 25 bp, Homo sapien
gcacttgtcatttgacaggcatctc

SEQ ID NO: 1347636 - DNA, 25 bp, Homo sapien
agtggagtctcaacccagatcacac

SEQ ID NO: 1347637 - DNA, 25 bp, Homo sapien
gtggagtctcaacccagatcacact

SEQ ID NO: 1347638 - DNA, 25 bp, Homo sapien
ctttctccaggcacttgtcatttga

SEQ ID NO: 1347639 - DNA, 25 bp, Homo sapien
tcttgaggagtcaaaaggtccccat

SEQ ID NO: 1347640 - DNA, 25 bp, Homo sapien
aaaaggtccccattgattaagcagc

SEQ ID NO: 1347641 - DNA, 25 bp, Homo sapien
tcatctccatgtcttgaggagtcaa

SEQ ID NO: 1347642 - DNA, 25 bp, Homo sapien
cattgattaagcagctgcagaaccc

SEQ ID NO: 1347643 - DNA, 25 bp, Homo sapien
gatttgtcagttgaatagtaagttt

SEQ ID NO: 1347644 - DNA, 25 bp, Homo sapien
ctgcaataatgtgatttgtcagttg

SEQ ID NO: 1347645 - DNA, 25 bp, Homo sapien
tgtgatttgtcagttgaatagtaag

SEQ ID NO: 1347646 - DNA, 25 bp, Homo sapien
caataatgtgatttgtcagttgaat

SEQ ID NO: 1347647 - DNA, 25 bp, Homo sapien
tgtgagatagcagttatatctgctt

SEQ ID NO: 1347648 - DNA, 25 bp, Homo sapien
gaggaacttttccccgcagctcctg

SEQ ID NO: 1347649 - DNA, 25 bp, Homo sapien
ccttgcagaataagtccaaagtggc

SEQ ID NO: 1347650 - DNA, 25 bp, Homo sapien
gcagcatccagtgttgtagggagga

SEQ ID NO: 1347651 - DNA, 25 bp, Homo sapien
cctgtcccaagccacgggtacacag

SEQ ID NO: 1347652 - DNA, 25 bp, Homo sapien
ctgtcccaagccacgggtacacagc

SEQ ID NO: 1347653 - DNA, 25 bp, Homo sapien
tgtcccaagccacgggtacacagct

SEQ ID NO: 1347654 - DNA, 25 bp, Homo sapien
cagttaaggcacatcccccttgcag

SEQ ID NO: 1347655 - DNA, 25 bp, Homo sapien
tacactccctttccatttgcatgtc

SEQ ID NO: 1347656 - DNA, 25 bp, Homo sapien
ctccatcccatgctgacccagagag

SEQ ID NO: 1347657 - DNA, 25 bp, Homo sapien
cagagaggatgtgggtatgaaagga

SEQ ID NO: 1347658 - DNA, 25 bp, Homo sapien
tcccttgcgatggatgcagttggca

SEQ ID NO: 1347659 - DNA, 25 bp, Homo sapien
cccttgctttgggtaagccctagca

SEQ ID NO: 1347660 - DNA, 25 bp, Homo sapien
cagcggttgaacaggaaggagcact

SEQ ID NO: 1347661 - DNA, 25 bp, Homo sapien
tagcagaaagcttccgatggctgtc

SEQ ID NO: 1347662 - DNA, 25 bp, Homo sapien
ctgcccaggtcaaaggtggttgctg

SEQ ID NO: 1347663 - DNA, 25 bp, Homo sapien
ttgcctggagatctcggacaaccat

SEQ ID NO: 1347664 - DNA, 25 bp, Homo sapien
cccaggtcaaaggtggttgctgcat

SEQ ID NO: 1347665 - DNA, 25 bp, Homo sapien
ctgcattgcctggagatctcggaca

SEQ ID NO: 1347666 - DNA, 25 bp, Homo sapien
caggctttcagggtaccacttagag

SEQ ID NO: 1347667 - DNA, 25 bp, Homo sapien
cacttagagctctgtagcagggaga

SEQ ID NO: 1347668 - DNA, 25 bp, Homo sapien
cactcgagcattaaagagaatggag

SEQ ID NO: 1347669 - DNA, 25 bp, Homo sapien
agggagacactcgagcattaaagag

SEQ ID NO: 1347670 - DNA, 25 bp, Homo sapien
caatgccactactttgtagttttgc

SEQ ID NO: 1347671 - DNA, 25 bp, Homo sapien
actttgtagttttgcaaagcctcaa

SEQ ID NO: 1347672 - DNA, 25 bp, Homo sapien
ggcaaagctttaaatctcaatgcca

SEQ ID NO: 1347673 - DNA, 25 bp, Homo sapien
aaatctcaatgccactactttgtag

SEQ ID NO: 1347674 - DNA, 25 bp, Homo sapien
cccgattaccaccactgacttggat

SEQ ID NO: 1347675 - DNA, 25 bp, Homo sapien
cccttcttattgttagtggtctggc

SEQ ID NO: 1347676 - DNA, 25 bp, Homo sapien
ctgcatggcctgaaaccgagcctct

SEQ ID NO: 1347677 - DNA, 25 bp, Homo sapien
taaaatttagacaatcggccactgc

SEQ ID NO: 1347678 - DNA, 25 bp, Homo sapien
aatcatgtctgtttttagatctgtc

SEQ ID NO: 1347679 - DNA, 25 bp, Homo sapien
tgtctgtttttagatctgtcttctt

SEQ ID NO: 1347680 - DNA, 25 bp, Homo sapien
catgtctgtttttagatctgtcttc

SEQ ID NO: 1347681 - DNA, 25 bp, Homo sapien
caatcatgtctgtttttagatctgt

SEQ ID NO: 1347682 - DNA, 25 bp, Homo sapien
catgcagttattcagctcggacttt

SEQ ID NO: 1347683 - DNA, 25 bp, Homo sapien
ttccatgcagttattcagctcggac

SEQ ID NO: 1347684 - DNA, 25 bp, Homo sapien
ccatgcagttattcagctcggactt

SEQ ID NO: 1347685 - DNA, 25 bp, Homo sapien
gcagttattcagctcggactttgtc

SEQ ID NO: 1347686 - DNA, 25 bp, Homo sapien
gactgacttctgaacaactgagaag

SEQ ID NO: 1347687 - DNA, 25 bp, Homo sapien
tccctgactgacttctgaacaactg

SEQ ID NO: 1347688 - DNA, 25 bp, Homo sapien
taagaagggcccaataacaagcacc

SEQ ID NO: 1347689 - DNA, 25 bp, Homo sapien
ttaagaagggcccaataacaagcac

SEQ ID NO: 1347690 - DNA, 25 bp, Homo sapien
ctgcatactgggctgaatgctagag

SEQ ID NO: 1347691 - DNA, 25 bp, Homo sapien
tactgggctgaatgctagagttgtt

SEQ ID NO: 1347692 - DNA, 25 bp, Homo sapien
ccgggacgtcttattcacctgctgc

SEQ ID NO: 1347693 - DNA, 25 bp, Homo sapien
taaccgggacgtcttattcacctgc

SEQ ID NO: 1347694 - DNA, 25 bp, Homo sapien
agagcctgctgctcagtaataagta

SEQ ID NO: 1347695 - DNA, 25 bp, Homo sapien
acacttcggaaatccaaggctgatg

SEQ ID NO: 1347696 - DNA, 25 bp, Homo sapien
gacttctgttctgcgcagagcctgc

SEQ ID NO: 1347697 - DNA, 25 bp, Homo sapien
tccttccaccccacagacttctgtt

SEQ ID NO: 1347698 - DNA, 25 bp, Homo sapien
aatggatgattcatggggagtttgg

SEQ ID NO: 1347699 - DNA, 25 bp, Homo sapien
ggtgagggtaaagtgactggcaaag

SEQ ID NO: 1347700 - DNA, 25 bp, Homo sapien
aaatggatgattcatggggagtttg

SEQ ID NO: 1347701 - DNA, 25 bp, Homo sapien
gtgagggtaaagtgactggcaaagg

SEQ ID NO: 1347702 - DNA, 25 bp, Homo sapien
gacagtgatgatcaagaagtgcttc

SEQ ID NO: 1347703 - DNA, 25 bp, Homo sapien
tcagactgtaggcttcggagtggtt

SEQ ID NO: 1347704 - DNA, 25 bp, Homo sapien
cacagacattcatgttgaggaataa

SEQ ID NO: 1347705 - DNA, 25 bp, Homo sapien
tggaaaactgttgcttctatgacag

SEQ ID NO: 1347706 - DNA, 25 bp, Homo sapien
agaatctcaactacaagttcctcat

SEQ ID NO: 1347707 - DNA, 25 bp, Homo sapien
agcccaggcacatccccatcctgtg

SEQ ID NO: 1347708 - DNA, 25 bp, Homo sapien
ctcttgtgccatgggaagcccaggc

SEQ ID NO: 1347709 - DNA, 25 bp, Homo sapien
tgtgctccctcagaatctcaactac

SEQ ID NO: 1347710 - DNA, 25 bp, Homo sapien
ttgcagtgagggtccagtgagatca

SEQ ID NO: 1347711 - DNA, 25 bp, Homo sapien
aggttgcagtgagggtccagtgaga

SEQ ID NO: 1347712 - DNA, 25 bp, Homo sapien
gttgcagtgagggtccagtgagatc

SEQ ID NO: 1347713 - DNA, 25 bp, Homo sapien
cccaacccaattcatcatgccccat

SEQ ID NO: 1347714 - DNA, 25 bp, Homo sapien
ccccaacccaattcatcatgcccca

SEQ ID NO: 1347715 - DNA, 25 bp, Homo sapien
tccccaacccaattcatcatgcccc

SEQ ID NO: 1347716 - DNA, 25 bp, Homo sapien
gtccccaacccaattcatcatgccc

SEQ ID NO: 1347717 - DNA, 25 bp, Homo sapien
aagacaaagaggactgtagcaggag

SEQ ID NO: 1347718 - DNA, 25 bp, Homo sapien
agaagacaaagaggactgtagcagg

SEQ ID NO: 1347719 - DNA, 25 bp, Homo sapien
aggtcccaaagcagggggctggatg

SEQ ID NO: 1347720 - DNA, 25 bp, Homo sapien
caaagaggactgtagcaggaggtcc

SEQ ID NO: 1347721 - DNA, 25 bp, Homo sapien
gtttagagagccactctgaatgatc

SEQ ID NO: 1347722 - DNA, 25 bp, Homo sapien
atgctgcaggatctagcaggcccca

SEQ ID NO: 1347723 - DNA, 25 bp, Homo sapien
ttttgcttgtttagagagccactct

SEQ ID NO: 1347724 - DNA, 25 bp, Homo sapien
cactctgaatgatcagggggcagta

SEQ ID NO: 1347725 - DNA, 25 bp, Homo sapien
gaagccagaattcatgcttatgaaa

SEQ ID NO: 1347726 - DNA, 25 bp, Homo sapien
cttatgaaaacttcagagcccatac

SEQ ID NO: 1347727 - DNA, 25 bp, Homo sapien
cccatacagcgcagtgtagaattaa

SEQ ID NO: 1347728 - DNA, 25 bp, Homo sapien
cccagaacctataatctgttcagtg

SEQ ID NO: 1347729 - DNA, 25 bp, Homo sapien
tgtggagtggctgttaccaactatg

SEQ ID NO: 1347730 - DNA, 25 bp, Homo sapien
gagtggctgttaccaactatgtcca

SEQ ID NO: 1347731 - DNA, 25 bp, Homo sapien
tctgtggagtggctgttaccaacta

SEQ ID NO: 1347732 - DNA, 25 bp, Homo sapien
tggagtggctgttaccaactatgtc

SEQ ID NO: 1347733 - DNA, 25 bp, Homo sapien
tttgcacattaccacggcactctga

SEQ ID NO: 1347734 - DNA, 25 bp, Homo sapien
tgacagctttcgcatttgcacatta

SEQ ID NO: 1347735 - DNA, 25 bp, Homo sapien
tcctgagagaaatgatgtggttggc

SEQ ID NO: 1347736 - DNA, 25 bp, Homo sapien
cggcactctgattcccagctccaga

SEQ ID NO: 1347737 - DNA, 25 bp, Homo sapien
cactgggggtgcctatcagtttcaa

SEQ ID NO: 1347738 - DNA, 25 bp, Homo sapien
aagtctgaagcgtccctgcatttca

SEQ ID NO: 1347739 - DNA, 25 bp, Homo sapien
gtttcaagtctgaagcgtccctgca

SEQ ID NO: 1347740 - DNA, 25 bp, Homo sapien
tgggggtgcctatcagtttcaagtc

SEQ ID NO: 1347741 - DNA, 25 bp, Homo sapien
gtatttgagtctgtcctcatggaac

SEQ ID NO: 1347742 - DNA, 25 bp, Homo sapien
gatgcattttccactgatacgatca

SEQ ID NO: 1347743 - DNA, 25 bp, Homo sapien
atgcattttccactgatacgatcat

SEQ ID NO: 1347744 - DNA, 25 bp, Homo sapien
tgatgcattttccactgatacgatc

SEQ ID NO: 1347745 - DNA, 25 bp, Homo sapien
tctttggttacagttacgcctctat

SEQ ID NO: 1347746 - DNA, 25 bp, Homo sapien
cataataagtacctgagcaaactgg

SEQ ID NO: 1347747 - DNA, 25 bp, Homo sapien
tagtcaagatgatttacgatacgct

SEQ ID NO: 1347748 - DNA, 25 bp, Homo sapien
aacagaattagaagcgaacacagaa

SEQ ID NO: 1347749 - DNA, 25 bp, Homo sapien
ccatatactggcagacacagtccat

SEQ ID NO: 1347750 - DNA, 25 bp, Homo sapien
cataccatatactggcagacacagt

SEQ ID NO: 1347751 - DNA, 25 bp, Homo sapien
cttgaaacacataccatatactggc

SEQ ID NO: 1347752 - DNA, 25 bp, Homo sapien
gaaacacataccatatactggcaga

SEQ ID NO: 1347753 - DNA, 25 bp, Homo sapien
tgaagagtatctagaagtgcaaatc

SEQ ID NO: 1347754 - DNA, 25 bp, Homo sapien
tcttctctagaacacattactgatt

SEQ ID NO: 1347755 - DNA, 25 bp, Homo sapien
tctgtctagcgaaagacctgtgtgt

SEQ ID NO: 1347756 - DNA, 25 bp, Homo sapien
gagctggcttgtgccctcttcgacg

SEQ ID NO: 1347757 - DNA, 25 bp, Homo sapien
tgttgccagaacaagccacggtcta

SEQ ID NO: 1347758 - DNA, 25 bp, Homo sapien
gtgtgctactgctatccttctgccc

SEQ ID NO: 1347759 - DNA, 25 bp, Homo sapien
acggtctactggctcagggcccgtg

SEQ ID NO: 1347760 - DNA, 25 bp, Homo sapien
tgccccttcctacagattattcatg

SEQ ID NO: 1347761 - DNA, 25 bp, Homo sapien
ccatctaaaatggcagactattccc

SEQ ID NO: 1347762 - DNA, 25 bp, Homo sapien
tctaaaatggcagactattccccat

SEQ ID NO: 1347763 - DNA, 25 bp, Homo sapien
catctaaaatggcagactattcccc

SEQ ID NO: 1347764 - DNA, 25 bp, Homo sapien
atctaaaatggcagactattcccca

SEQ ID NO: 1347765 - DNA, 25 bp, Homo sapien
gcattagattataacctccataagg

SEQ ID NO: 1347766 - DNA, 25 bp, Homo sapien
tttaacatactctctgcacctccag

SEQ ID NO: 1347767 - DNA, 25 bp, Homo sapien
acggcttggtatctccagtcccaca

SEQ ID NO: 1347768 - DNA, 25 bp, Homo sapien
tccctgcctgaattgaagtaatagt

SEQ ID NO: 1347769 - DNA, 25 bp, Homo sapien
actagctcctaatgtgcaatgaaag

SEQ ID NO: 1347770 - DNA, 25 bp, Homo sapien
tttactagctcctaatgtgcaatga

SEQ ID NO: 1347771 - DNA, 25 bp, Homo sapien
tcatttactagctcctaatgtgcaa

SEQ ID NO: 1347772 - DNA, 25 bp, Homo sapien
aatcatttactagctcctaatgtgc

SEQ ID NO: 1347773 - DNA, 25 bp, Homo sapien
cacttccacaactgggactaagacc

SEQ ID NO: 1347774 - DNA, 25 bp, Homo sapien
cttccacaactgggactaagaccca

SEQ ID NO: 1347775 - DNA, 25 bp, Homo sapien
tcacttccacaactgggactaagac

SEQ ID NO: 1347776 - DNA, 25 bp, Homo sapien
tcataggtggtgtctctcaagttcc

SEQ ID NO: 1347777 - DNA, 25 bp, Homo sapien
ggtaagatagagtccaattcccctg

SEQ ID NO: 1347778 - DNA, 25 bp, Homo sapien
gcaaggcctctaaggatctcacaga

SEQ ID NO: 1347779 - DNA, 25 bp, Homo sapien
gaatctattaaatgccaggccctag

SEQ ID NO: 1347780 - DNA, 25 bp, Homo sapien
gcctgagactttgcaagcctggaca

SEQ ID NO: 1347781 - DNA, 25 bp, Homo sapien
gagaagcacccaacatgcatagaag

SEQ ID NO: 1347782 - DNA, 25 bp, Homo sapien
gatggtagcctaccggcaaatgaca

SEQ ID NO: 1347783 - DNA, 25 bp, Homo sapien
tactaactatacgaccttgggcagg

SEQ ID NO: 1347784 - DNA, 25 bp, Homo sapien
cagggaaacctttgctcaccaggaa

SEQ ID NO: 1347785 - DNA, 25 bp, Homo sapien
taagatcaccacctaaaacgcagtg

SEQ ID NO: 1347786 - DNA, 25 bp, Homo sapien
gaacagtgatctagagccacaacgg

SEQ ID NO: 1347787 - DNA, 25 bp, Homo sapien
gctgtacttgacgagaacactcagg

SEQ ID NO: 1347788 - DNA, 25 bp, Homo sapien
gtttgctggaaagtagtttgggtca

SEQ ID NO: 1347789 - DNA, 25 bp, Homo sapien
cctataaataggttctaattggtga

SEQ ID NO: 1347790 - DNA, 25 bp, Homo sapien
taattgtaactggtgccctgagaca

SEQ ID NO: 1347791 - DNA, 25 bp, Homo sapien
tagtctctgtctaagaatgtctctg

SEQ ID NO: 1347792 - DNA, 25 bp, Homo sapien
cttgtgaatatctgtttcatgtaga

SEQ ID NO: 1347793 - DNA, 25 bp, Homo sapien
tctgaacaagaatcacagaaatcca

SEQ ID NO: 1347794 - DNA, 25 bp, Homo sapien
gaacaagaatcacagaaatccaaag

SEQ ID NO: 1347795 - DNA, 25 bp, Homo sapien
ggcaatgccaccgaacaccctggat

SEQ ID NO: 1347796 - DNA, 25 bp, Homo sapien
cctggatgggttctatgccacagtt

SEQ ID NO: 1347797 - DNA, 25 bp, Homo sapien
tagttctttatattcaggtaaattc

SEQ ID NO: 1347798 - DNA, 25 bp, Homo sapien
tatacatgataggaatactttcgtc

SEQ ID NO: 1347799 - DNA, 25 bp, Homo sapien
cactttcagcttgcatttgctgaag

SEQ ID NO: 1347800 - DNA, 25 bp, Homo sapien
cttaaagcccacatgttgcacaaat

SEQ ID NO: 1347801 - DNA, 25 bp, Homo sapien
tctgtcacacactattgcaaaccca

SEQ ID NO: 1347802 - DNA, 25 bp, Homo sapien
tgctcctgtaaacatgacactttct

SEQ ID NO: 1347803 - DNA, 25 bp, Homo sapien
tgtagcagactacttcaatgcaggt

SEQ ID NO: 1347804 - DNA, 25 bp, Homo sapien
gggaagcacggccatgattaccacc

SEQ ID NO: 1347805 - DNA, 25 bp, Homo sapien
ggtttcctgactatctacagcatca

SEQ ID NO: 1347806 - DNA, 25 bp, Homo sapien
ggcctatcctcagttattcactctg

SEQ ID NO: 1347807 - DNA, 25 bp, Homo sapien
tctacaatcgctttcaaatcggtcc

SEQ ID NO: 1347808 - DNA, 25 bp, Homo sapien
cactctgtcttatatcgaatgtaac

SEQ ID NO: 1347809 - DNA, 25 bp, Homo sapien
taagtgacccgaataattagataat

SEQ ID NO: 1347810 - DNA, 25 bp, Homo sapien
ccatactatgtcaccactgagaaag

SEQ ID NO: 1347811 - DNA, 25 bp, Homo sapien
gacacgtcttaatgaaatttactta

SEQ ID NO: 1347812 - DNA, 25 bp, Homo sapien
catctaggcctcacttattgctggg

SEQ ID NO: 1347813 - DNA, 25 bp, Homo sapien
aaagcagaataatgactgccagagg

SEQ ID NO: 1347814 - DNA, 25 bp, Homo sapien
tgtgactgtacatagcattgctgaa

SEQ ID NO: 1347815 - DNA, 25 bp, Homo sapien
tcagtcatgtaagctgagagctctg

SEQ ID NO: 1347816 - DNA, 25 bp, Homo sapien
gagagctctggaaaccggttgcaca

SEQ ID NO: 1347817 - DNA, 25 bp, Homo sapien
cagtgtgagacaaaggaagtaagta

SEQ ID NO: 1347818 - DNA, 25 bp, Homo sapien
tatgatttttaacccgcagaaagga

SEQ ID NO: 1347819 - DNA, 25 bp, Homo sapien
aaatgtatcatatttcccagctctg

SEQ ID NO: 1347820 - DNA, 25 bp, Homo sapien
gatcgattagggtagataaaagtcc

SEQ ID NO: 1347821 - DNA, 25 bp, Homo sapien
gattacttttagaatagtccagcaa

SEQ ID NO: 1347822 - DNA, 25 bp, Homo sapien
caatttagtcaatgatcagtggctg

SEQ ID NO: 1347823 - DNA, 25 bp, Homo sapien
taaacgtgaagtagtcctgcccacc

SEQ ID NO: 1347824 - DNA, 25 bp, Homo sapien
tctatatgtacctcagagtaaccaa

SEQ ID NO: 1347825 - DNA, 25 bp, Homo sapien
tacactggcggttcatgtgaagtca

SEQ ID NO: 1347826 - DNA, 25 bp, Homo sapien
tatgaaaacaagatcggtcatcatc

SEQ ID NO: 1347827 - DNA, 25 bp, Homo sapien
tattaagagggtgctgtcgtctgct

SEQ ID NO: 1347828 - DNA, 25 bp, Homo sapien
gatgcatcttcaacagcagtgttca

SEQ ID NO: 1347829 - DNA, 25 bp, Homo sapien
aatacttctgtactcggctggcaac

SEQ ID NO: 1347830 - DNA, 25 bp, Homo sapien
tatataagtttggtgttctgcctgg

SEQ ID NO: 1347831 - DNA, 25 bp, Homo sapien
gctttatgaaatacttctgtactcg

SEQ ID NO: 1347832 - DNA, 25 bp, Homo sapien
gtttggtgttctgcctggtactgga

SEQ ID NO: 1347833 - DNA, 25 bp, Homo sapien
caatgtcagctgcattattctcctt

SEQ ID NO: 1347834 - DNA, 25 bp, Homo sapien
tcgcccaatgtcagctgcattattc

SEQ ID NO: 1347835 - DNA, 25 bp, Homo sapien
aaaaactaccaaaagcataccagca

SEQ ID NO: 1347836 - DNA, 25 bp, Homo sapien
gcaatctgcagtcatctcctcaatt

SEQ ID NO: 1347837 - DNA, 25 bp, Homo sapien
gagggtatttgatgagtagctgttc

SEQ ID NO: 1347838 - DNA, 25 bp, Homo sapien
tacttcttcaggagggtatttgatg

SEQ ID NO: 1347839 - DNA, 25 bp, Homo sapien
tctgccagcgtcgagattctacttc

SEQ ID NO: 1347840 - DNA, 25 bp, Homo sapien
caattcatctgctatcttctgccag

SEQ ID NO: 1347841 - DNA, 25 bp, Homo sapien
tggacctggcctcataatactgact

SEQ ID NO: 1347842 - DNA, 25 bp, Homo sapien
tatttaaaactcatggctaacaggc

SEQ ID NO: 1347843 - DNA, 25 bp, Homo sapien
aaagatgtgcctcaaacttcaccca

SEQ ID NO: 1347844 - DNA, 25 bp, Homo sapien
taaactgtatgccaaaactgacttg

SEQ ID NO: 1347845 - DNA, 25 bp, Homo sapien
ctgttcttcaacagtccacaactgg

SEQ ID NO: 1347846 - DNA, 25 bp, Homo sapien
tcaacagtccacaactggttaaatg

SEQ ID NO: 1347847 - DNA, 25 bp, Homo sapien
cagtccacaactggttaaatgtttc

SEQ ID NO: 1347848 - DNA, 25 bp, Homo sapien
tttggtatcatcacacaagcgtcct

SEQ ID NO: 1347849 - DNA, 25 bp, Homo sapien
cttctggaccatcactcaaaggcaa

SEQ ID NO: 1347850 - DNA, 25 bp, Homo sapien
ttctggaccatcactcaaaggcaac

SEQ ID NO: 1347851 - DNA, 25 bp, Homo sapien
ggactctccatccttcttaggatct

SEQ ID NO: 1347852 - DNA, 25 bp, Homo sapien
gggactctccatccttcttaggatc

SEQ ID NO: 1347853 - DNA, 25 bp, Homo sapien
agggactctccatccttcttaggat

SEQ ID NO: 1347854 - DNA, 25 bp, Homo sapien
actctccatccttcttaggatctaa

SEQ ID NO: 1347855 - DNA, 25 bp, Homo sapien
gtatattggtcccatacgatctcag

SEQ ID NO: 1347856 - DNA, 25 bp, Homo sapien
tcaaaaactagcttaactcttctag

SEQ ID NO: 1347857 - DNA, 25 bp, Homo sapien
cgatctcaggcaattgaacaactct

SEQ ID NO: 1347858 - DNA, 25 bp, Homo sapien
tcccaaggctatgggtatattggtc

SEQ ID NO: 1347859 - DNA, 25 bp, Homo sapien
tgtggatatggaagcccaatatcag

SEQ ID NO: 1347860 - DNA, 25 bp, Homo sapien
gtggatatggaagcccaatatcagc

SEQ ID NO: 1347861 - DNA, 25 bp, Homo sapien
ctgtggatatggaagcccaatatca

SEQ ID NO: 1347862 - DNA, 25 bp, Homo sapien
ttgagaacgctgagcctcgagtaca

SEQ ID NO: 1347863 - DNA, 25 bp, Homo sapien
tctctggtgcctgcctaaactttca

SEQ ID NO: 1347864 - DNA, 25 bp, Homo sapien
gtacagcaatcgtctgtaatagtct

SEQ ID NO: 1347865 - DNA, 25 bp, Homo sapien
aaggtcttggactgcttgagaacgc

SEQ ID NO: 1347866 - DNA, 25 bp, Homo sapien
tcttcctgagttacgaagtacctac

SEQ ID NO: 1347867 - DNA, 25 bp, Homo sapien
gaggtcttcctgagttacgaagtac

SEQ ID NO: 1347868 - DNA, 25 bp, Homo sapien
aaacatattactgggaataaatgag

SEQ ID NO: 1347869 - DNA, 25 bp, Homo sapien
taaatgaggtcttcctgagttacga

SEQ ID NO: 1347870 - DNA, 25 bp, Homo sapien
agaaaataagagttagagaaagcaa

SEQ ID NO: 1347871 - DNA, 25 bp, Homo sapien
gaaaataagagttagagaaagcaaa

SEQ ID NO: 1347872 - DNA, 25 bp, Homo sapien
taggaggaatcactcaattcaggca

SEQ ID NO: 1347873 - DNA, 25 bp, Homo sapien
ggcacttggttgtactctgttgaaa

SEQ ID NO: 1347874 - DNA, 25 bp, Homo sapien
gaggtatgttttctcgcccagagac

SEQ ID NO: 1347875 - DNA, 25 bp, Homo sapien
gatcttccaacaatcaaagtcgtta

SEQ ID NO: 1347876 - DNA, 25 bp, Homo sapien
cattaaacccaaagctccgaatgct

SEQ ID NO: 1347877 - DNA, 25 bp, Homo sapien
tgcttgcaaaggtccatttggcaca

SEQ ID NO: 1347878 - DNA, 25 bp, Homo sapien
cctctgtttaaattgtcctgcctct

SEQ ID NO: 1347879 - DNA, 25 bp, Homo sapien
ggcacaacaaacatatagttttacc

SEQ ID NO: 1347880 - DNA, 25 bp, Homo sapien
cacggaggaactagatgaagtacaa

SEQ ID NO: 1347881 - DNA, 25 bp, Homo sapien
gaggatgggtgtatgagggtccacc

SEQ ID NO: 1347882 - DNA, 25 bp, Homo sapien
agatgaagtacaaatacggctggat

SEQ ID NO: 1347883 - DNA, 25 bp, Homo sapien
gtacaaatacggctggattggttgt

SEQ ID NO: 1347884 - DNA, 25 bp, Homo sapien
cagccctttgacccatattaatggg

SEQ ID NO: 1347885 - DNA, 25 bp, Homo sapien
gctactcactgaaccaagcaagaga

SEQ ID NO: 1347886 - DNA, 25 bp, Homo sapien
gatggtaggatagcacccaatcacc

SEQ ID NO: 1347887 - DNA, 25 bp, Homo sapien
gagtataaagggtcaaaccaggagc

SEQ ID NO: 1347888 - DNA, 25 bp, Homo sapien
gcacagattaagtaactccccaaga

SEQ ID NO: 1347889 - DNA, 25 bp, Homo sapien
agagtgacagttgctaaagcatttc

SEQ ID NO: 1347890 - DNA, 25 bp, Homo sapien
tgacagttgctaaagcatttcccat

SEQ ID NO: 1347891 - DNA, 25 bp, Homo sapien
agtgacagttgctaaagcatttccc

SEQ ID NO: 1347892 - DNA, 25 bp, Homo sapien
ttaagagtgacagttgctaaagcat

SEQ ID NO: 1347893 - DNA, 25 bp, Homo sapien
tacatgggggcatgcaaaaggactt

SEQ ID NO: 1347894 - DNA, 25 bp, Homo sapien
aatagtatgcaggaaaccatcccca

SEQ ID NO: 1347895 - DNA, 25 bp, Homo sapien
gggagacttactactacaagaatag

SEQ ID NO: 1347896 - DNA, 25 bp, Homo sapien
tgaatcagagtctgttaatagaaaa

SEQ ID NO: 1347897 - DNA, 25 bp, Homo sapien
aaggccatatacaacaagcccacag

SEQ ID NO: 1347898 - DNA, 25 bp, Homo sapien
tactcaagggtgaaaagttgaatgt

SEQ ID NO: 1347899 - DNA, 25 bp, Homo sapien
ggccaattaggacttatccctggga

SEQ ID NO: 1347900 - DNA, 25 bp, Homo sapien
ggcaaagtttgacatcccttcatga

SEQ ID NO: 1347901 - DNA, 25 bp, Homo sapien
ttctttaaacgccaaatgttcatac

SEQ ID NO: 1347902 - DNA, 25 bp, Homo sapien
taaacgccaaatgttcatacttatt

SEQ ID NO: 1347903 - DNA, 25 bp, Homo sapien
attatcattagtgttattggcttca

SEQ ID NO: 1347904 - DNA, 25 bp, Homo sapien
ttatcattagtgttattggcttcat

SEQ ID NO: 1347905 - DNA, 25 bp, Homo sapien
gatgacagtggcctacattagaaag

SEQ ID NO: 1347906 - DNA, 25 bp, Homo sapien
tctaagacatttactccagctacag

SEQ ID NO: 1347907 - DNA, 25 bp, Homo sapien
aaaaggtagagcaggcagttaggca

SEQ ID NO: 1347908 - DNA, 25 bp, Homo sapien
cacaaggagcaactaataatcaggc

SEQ ID NO: 1347909 - DNA, 25 bp, Homo sapien
cttgacacccaaagttcgtgaccag

SEQ ID NO: 1347910 - DNA, 25 bp, Homo sapien
aaggcagttgtagagttcctcaaat

SEQ ID NO: 1347911 - DNA, 25 bp, Homo sapien
ggatcacttgacacccaaagttcgt

SEQ ID NO: 1347912 - DNA, 25 bp, Homo sapien
caaatctagcccaatcaccttgatt

SEQ ID NO: 1347913 - DNA, 25 bp, Homo sapien
gagttaataatcatgcatgcctgag

SEQ ID NO: 1347914 - DNA, 25 bp, Homo sapien
tgacaggagtgcctgacacagagtt

SEQ ID NO: 1347915 - DNA, 25 bp, Homo sapien
cctggatgataggagacccttttgt

SEQ ID NO: 1347916 - DNA, 25 bp, Homo sapien
taaagtcactctgggtggagtcctg

SEQ ID NO: 1347917 - DNA, 25 bp, Homo sapien
tgtgcttcctagagccagaccttca

SEQ ID NO: 1347918 - DNA, 25 bp, Homo sapien
ttagcaaggtcaattccgaaacaga

SEQ ID NO: 1347919 - DNA, 25 bp, Homo sapien
tcagaggcagctgaccaaagcacat

SEQ ID NO: 1347920 - DNA, 25 bp, Homo sapien
ttgaattggaagaaacgctctgaac

SEQ ID NO: 1347921 - DNA, 25 bp, Homo sapien
gctacttttagcgatggcaacttgg

SEQ ID NO: 1347922 - DNA, 25 bp, Homo sapien
tctcaaaagtgcgatcctagccagg

SEQ ID NO: 1347923 - DNA, 25 bp, Homo sapien
tgagacttgaaagcaccagacaggt

SEQ ID NO: 1347924 - DNA, 25 bp, Homo sapien
gctgggcaatgctcaacctcggttt

SEQ ID NO: 1347925 - DNA, 25 bp, Homo sapien
taaaagtagatgtcaagcctgccag

SEQ ID NO: 1347926 - DNA, 25 bp, Homo sapien
tcagaactggaaagaccatgttgtc

SEQ ID NO: 1347927 - DNA, 25 bp, Homo sapien
caaagcatactgtggtaactcaatg

SEQ ID NO: 1347928 - DNA, 25 bp, Homo sapien
tatctggatgatgtctaagcactca

SEQ ID NO: 1347929 - DNA, 25 bp, Homo sapien
gctgcccttcgtggtgaggttctca

SEQ ID NO: 1347930 - DNA, 25 bp, Homo sapien
tcaggttctccggaggctggcatac

SEQ ID NO: 1347931 - DNA, 25 bp, Homo sapien
tagtcagctgattaacatgttccac

SEQ ID NO: 1347932 - DNA, 25 bp, Homo sapien
tgactggcactctctttggcagatg

SEQ ID NO: 1347933 - DNA, 25 bp, Homo sapien
gtctatataactgtcctccttccta

SEQ ID NO: 1347934 - DNA, 25 bp, Homo sapien
tatggtctatataactgtcctcctt

SEQ ID NO: 1347935 - DNA, 25 bp, Homo sapien
ggcaccttatggtctatataactgt

SEQ ID NO: 1347936 - DNA, 25 bp, Homo sapien
tgtgcaaggcaccttatggtctata

SEQ ID NO: 1347937 - DNA, 25 bp, Homo sapien
tttgtttagtgttcccatcaggctg

SEQ ID NO: 1347938 - DNA, 25 bp, Homo sapien
cagtataagacatcgacaagctcgt

SEQ ID NO: 1347939 - DNA, 25 bp, Homo sapien
taacacgagtagatcgggaagcagc

SEQ ID NO: 1347940 - DNA, 25 bp, Homo sapien
gagatttcttcaggatgcgcaatgc

SEQ ID NO: 1347941 - DNA, 25 bp, Homo sapien
aatacggtcatcatgatccactcat

SEQ ID NO: 1347942 - DNA, 25 bp, Homo sapien
tacaatacggtcatcatgatccact

SEQ ID NO: 1347943 - DNA, 25 bp, Homo sapien
caatacggtcatcatgatccactca

SEQ ID NO: 1347944 - DNA, 25 bp, Homo sapien
ctacaatacggtcatcatgatccac

SEQ ID NO: 1347945 - DNA, 25 bp, Homo sapien
aaagaacacaaactggccaggggca

SEQ ID NO: 1347946 - DNA, 25 bp, Homo sapien
tgagtgtcccataattttccacttt

SEQ ID NO: 1347947 - DNA, 25 bp, Homo sapien
atttatccaggtgtagtgaagcctg

SEQ ID NO: 1347948 - DNA, 25 bp, Homo sapien
gaagtcaagggtgtagtgatgtgac

SEQ ID NO: 1347949 - DNA, 25 bp, Homo sapien
atccaggtgtagtgaagcctgcctg

SEQ ID NO: 1347950 - DNA, 25 bp, Homo sapien
ttatccaggtgtagtgaagcctgcc

SEQ ID NO: 1347951 - DNA, 25 bp, Homo sapien
tccttatatcctgaaggagttggag

SEQ ID NO: 1347952 - DNA, 25 bp, Homo sapien
tcagccatgaagaatactagaacct

SEQ ID NO: 1347953 - DNA, 25 bp, Homo sapien
tagaatggagcttaagcatcagggt

SEQ ID NO: 1347954 - DNA, 25 bp, Homo sapien
gagttggagctatgatctagaatgg

SEQ ID NO: 1347955 - DNA, 25 bp, Homo sapien
catctcgtactcttgtcctagagga

SEQ ID NO: 1347956 - DNA, 25 bp, Homo sapien
gttttagtacccaattagccagaca

SEQ ID NO: 1347957 - DNA, 25 bp, Homo sapien
tctcgacatcaagtatacataacca

SEQ ID NO: 1347958 - DNA, 25 bp, Homo sapien
tagaggacttcccaaattctcgaca

SEQ ID NO: 1347959 - DNA, 25 bp, Homo sapien
tgggttactatgagtgcccatctga

SEQ ID NO: 1347960 - DNA, 25 bp, Homo sapien
aaaatcttgtaattactaggcagac

SEQ ID NO: 1347961 - DNA, 25 bp, Homo sapien
ggaaagcattacaacttaaagactg

SEQ ID NO: 1347962 - DNA, 25 bp, Homo sapien
gactaagaaaacgaccagcagatgt

SEQ ID NO: 1347963 - DNA, 25 bp, Homo sapien
tggtagtagcaatcatcaaaagcaa

SEQ ID NO: 1347964 - DNA, 25 bp, Homo sapien
tctgagcatactggaatgtgcccta

SEQ ID NO: 1347965 - DNA, 25 bp, Homo sapien
tccactacgatatttagcaggcaag

SEQ ID NO: 1347966 - DNA, 25 bp, Homo sapien
gaagctcagcgaaaacatgatccta

SEQ ID NO: 1347967 - DNA, 25 bp, Homo sapien
gcattaagatagacaggatcctgca

SEQ ID NO: 1347968 - DNA, 25 bp, Homo sapien
gctctatcagcattaagatagacag

SEQ ID NO: 1347969 - DNA, 25 bp, Homo sapien
agctgagctctatcagcattaagat

SEQ ID NO: 1347970 - DNA, 25 bp, Homo sapien
gacaggatcctgcagtgtttcttaa

SEQ ID NO: 1347971 - DNA, 25 bp, Homo sapien
tatatggttgtactagaataacttg

SEQ ID NO: 1347972 - DNA, 25 bp, Homo sapien
tttgatccccatgcgtctgtattta

SEQ ID NO: 1347973 - DNA, 25 bp, Homo sapien
ttaattgtccatgttacactgagac

SEQ ID NO: 1347974 - DNA, 25 bp, Homo sapien
aagcgttttgcctagtatttgatcc

SEQ ID NO: 1347975 - DNA, 25 bp, Homo sapien
taaaaagatggttctatagatattt

SEQ ID NO: 1347976 - DNA, 25 bp, Homo sapien
agagatgttgctatagattctatag

SEQ ID NO: 1347977 - DNA, 25 bp, Homo sapien
tagatattttcacaacaagggtacc

SEQ ID NO: 1347978 - DNA, 25 bp, Homo sapien
acaagggtaccaaaacaattcattg

SEQ ID NO: 1347979 - DNA, 25 bp, Homo sapien
gaggcactttattgacccttgtagc

SEQ ID NO: 1347980 - DNA, 25 bp, Homo sapien
gcactttattgacccttgtagccaa

SEQ ID NO: 1347981 - DNA, 25 bp, Homo sapien
aaacttctgtgaggacatctgccag

SEQ ID NO: 1347982 - DNA, 25 bp, Homo sapien
ggaggcactttattgacccttgtag

SEQ ID NO: 1347983 - DNA, 25 bp, Homo sapien
tcaggttactcgtatcagaacagga

SEQ ID NO: 1347984 - DNA, 25 bp, Homo sapien
ccttaggaaaagacacattggccgg

SEQ ID NO: 1347985 - DNA, 25 bp, Homo sapien
cacctagggaccattaatgaccgga

SEQ ID NO: 1347986 - DNA, 25 bp, Homo sapien
tcttagtgacgattacaccagtgtg

SEQ ID NO: 1347987 - DNA, 25 bp, Homo sapien
attaacagctttgtagccatcacaa

SEQ ID NO: 1347988 - DNA, 25 bp, Homo sapien
tttgtagccatcacaatttcaaaat

SEQ ID NO: 1347989 - DNA, 25 bp, Homo sapien
taacagctttgtagccatcacaatt

SEQ ID NO: 1347990 - DNA, 25 bp, Homo sapien
agctttgtagccatcacaatttcaa

SEQ ID NO: 1347991 - DNA, 25 bp, Homo sapien
tattgtgattctgtaacctgagtcc

SEQ ID NO: 1347992 - DNA, 25 bp, Homo sapien
cctgagtcctacagctgttaaatga

SEQ ID NO: 1347993 - DNA, 25 bp, Homo sapien
caagttgtatactgctgtttaacac

SEQ ID NO: 1347994 - DNA, 25 bp, Homo sapien
gataccttcctaaagcttacctgaa

SEQ ID NO: 1347995 - DNA, 25 bp, Homo sapien
tcatttcacaccaatgccagatgag

SEQ ID NO: 1347996 - DNA, 25 bp, Homo sapien
attgtttattacagttctgaaaagg

SEQ ID NO: 1347997 - DNA, 25 bp, Homo sapien
gatggcaacctcagtaacacagtag

SEQ ID NO: 1347998 - DNA, 25 bp, Homo sapien
tgtggtaccgtgaaacaagcactgt

SEQ ID NO: 1347999 - DNA, 25 bp, Homo sapien
gatgcacgtggactattaaaggccc

SEQ ID NO: 1348000 - DNA, 25 bp, Homo sapien
caaaggccattgtagaactgtgacc

SEQ ID NO: 1348001 - DNA, 25 bp, Homo sapien
gacaactgctctgccaacgaggtcc

SEQ ID NO: 1348002 - DNA, 25 bp, Homo sapien
gctccgccatccaggacaactgctc

SEQ ID NO: 1348003 - DNA, 25 bp, Homo sapien
atccaggacaactgctctgccaacg

SEQ ID NO: 1348004 - DNA, 25 bp, Homo sapien
aggacaactgctctgccaacgaggt

SEQ ID NO: 1348005 - DNA, 25 bp, Homo sapien
ctttcacgcggggtcggacgcaacg

SEQ ID NO: 1348006 - DNA, 25 bp, Homo sapien
acttgctcgggtggccaccgctgca

SEQ ID NO: 1348007 - DNA, 25 bp, Homo sapien
gccacggcacttgctcgggtggcca

SEQ ID NO: 1348008 - DNA, 25 bp, Homo sapien
tgcaggaagctcgatagcggcgccg

SEQ ID NO: 1348009 - DNA, 25 bp, Homo sapien
taacattcagaccttgaggaagatc

SEQ ID NO: 1348010 - DNA, 25 bp, Homo sapien
caaatagatcttaaatggctgctta

SEQ ID NO: 1348011 - DNA, 25 bp, Homo sapien
tgagttggagtcctgtatctgccac

SEQ ID NO: 1348012 - DNA, 25 bp, Homo sapien
tacactgattaccagcccaagcaat

SEQ ID NO: 1348013 - DNA, 25 bp, Homo sapien
cctttaacatctatcaaataaattc

SEQ ID NO: 1348014 - DNA, 25 bp, Homo sapien
taacatctatcaaataaattcaaca

SEQ ID NO: 1348015 - DNA, 25 bp, Homo sapien
ttgcaccttttacctttaacatcta

SEQ ID NO: 1348016 - DNA, 25 bp, Homo sapien
cttttacctttaacatctatcaaat

SEQ ID NO: 1348017 - DNA, 25 bp, Homo sapien
tatcaacaatcgtagtgacacattc

SEQ ID NO: 1348018 - DNA, 25 bp, Homo sapien
tgatatctgctgacaaattccactc

SEQ ID NO: 1348019 - DNA, 25 bp, Homo sapien
actacaaaggatactatggatctgc

SEQ ID NO: 1348020 - DNA, 25 bp, Homo sapien
tgtcagggcacatgaaaatgattcc

SEQ ID NO: 1348021 - DNA, 25 bp, Homo sapien
taacttcaggccctccaccataaat

SEQ ID NO: 1348022 - DNA, 25 bp, Homo sapien
ccataaatagactgcagaaaattcc

SEQ ID NO: 1348023 - DNA, 25 bp, Homo sapien
gaagtatatctggatcaacatgaac

SEQ ID NO: 1348024 - DNA, 25 bp, Homo sapien
catgaacaaccggaggtcgcaggat

SEQ ID NO: 1348025 - DNA, 25 bp, Homo sapien
gcaatcttagtattgtcaataggac

SEQ ID NO: 1348026 - DNA, 25 bp, Homo sapien
ccacatttagtgactgcaatcttag

SEQ ID NO: 1348027 - DNA, 25 bp, Homo sapien
gcctaagcatcacattaccacattt

SEQ ID NO: 1348028 - DNA, 25 bp, Homo sapien
acattaccacatttagtgactgcaa

SEQ ID NO: 1348029 - DNA, 25 bp, Homo sapien
aagtcaaaatgtaccactaatgcta

SEQ ID NO: 1348030 - DNA, 25 bp, Homo sapien
ccatttggggattacaagtcaaaat

SEQ ID NO: 1348031 - DNA, 25 bp, Homo sapien
agcaattcctttgtaatttgaaaga

SEQ ID NO: 1348032 - DNA, 25 bp, Homo sapien
taactctccatttggggattacaag

SEQ ID NO: 1348033 - DNA, 25 bp, Homo sapien
taaactagaacgtaagatccctgag

SEQ ID NO: 1348034 - DNA, 25 bp, Homo sapien
ccaagtgcacacagatattcaagaa

SEQ ID NO: 1348035 - DNA, 25 bp, Homo sapien
tcttctgttcaatagtgtaatccca

SEQ ID NO: 1348036 - DNA, 25 bp, Homo sapien
cacagatttactttgttcagtcctc

SEQ ID NO: 1348037 - DNA, 25 bp, Homo sapien
attctctaaaccactgcatactgat

SEQ ID NO: 1348038 - DNA, 25 bp, Homo sapien
ataaaaagtagctggagagtcctct

SEQ ID NO: 1348039 - DNA, 25 bp, Homo sapien
actgcatactgatgcaataaaaagt

SEQ ID NO: 1348040 - DNA, 25 bp, Homo sapien
cattctctaaaccactgcatactga

SEQ ID NO: 1348041 - DNA, 25 bp, Homo sapien
tcatctaatatctaaaacttgcttt

SEQ ID NO: 1348042 - DNA, 25 bp, Homo sapien
gtcatctaatatctaaaacttgctt

SEQ ID NO: 1348043 - DNA, 25 bp, Homo sapien
tgctttatggcaaaacaataccatc

SEQ ID NO: 1348044 - DNA, 25 bp, Homo sapien
tgcctggtacagtgcaacaggcaga

SEQ ID NO: 1348045 - DNA, 25 bp, Homo sapien
ggcagaatgctaaggtcatcatccg

SEQ ID NO: 1348046 - DNA, 25 bp, Homo sapien
tcatccgtatctgtcacttccaaaa

SEQ ID NO: 1348047 - DNA, 25 bp, Homo sapien
ctggtacagtgcaacaggcagaatg

SEQ ID NO: 1348048 - DNA, 25 bp, Homo sapien
atgttgcttcatggatcagtacgcc

SEQ ID NO: 1348049 - DNA, 25 bp, Homo sapien
tgagtcctttgatgacacgtgattt

SEQ ID NO: 1348050 - DNA, 25 bp, Homo sapien
tcttcttaagggtaattcctatcca

SEQ ID NO: 1348051 - DNA, 25 bp, Homo sapien
tctggaatgaatacctaagagtggg

SEQ ID NO: 1348052 - DNA, 25 bp, Homo sapien
agtactggctgcaatgactgacccc

SEQ ID NO: 1348053 - DNA, 25 bp, Homo sapien
caaagtgtcaggagaaccattcacc

SEQ ID NO: 1348054 - DNA, 25 bp, Homo sapien
gggaaaccagattatacccactgtg

SEQ ID NO: 1348055 - DNA, 25 bp, Homo sapien
caagcaaagaggaggttacagtact

SEQ ID NO: 1348056 - DNA, 25 bp, Homo sapien
gtgtgactatactctctgaactaaa

SEQ ID NO: 1348057 - DNA, 25 bp, Homo sapien
tgcaggatccattgccagtagtaca

SEQ ID NO: 1348058 - DNA, 25 bp, Homo sapien
caacacatactggtgcaggagctag

SEQ ID NO: 1348059 - DNA, 25 bp, Homo sapien
gagctagttgtattacatcaggcag

SEQ ID NO: 1348060 - DNA, 25 bp, Homo sapien
tgaggctaggcacagtagtttatgc

SEQ ID NO: 1348061 - DNA, 25 bp, Homo sapien
gatataagcattccaatcctcatcc

SEQ ID NO: 1348062 - DNA, 25 bp, Homo sapien
cagcacacccaactaattgatttgt

SEQ ID NO: 1348063 - DNA, 25 bp, Homo sapien
gaatatctggaacttacacaccagc

SEQ ID NO: 1348064 - DNA, 25 bp, Homo sapien
tgggctctaacacccttgactgggc

SEQ ID NO: 1348065 - DNA, 25 bp, Homo sapien
cactatgctgtacccttgtagccac

SEQ ID NO: 1348066 - DNA, 25 bp, Homo sapien
ggctcatgccactcactatacagaa

SEQ ID NO: 1348067 - DNA, 25 bp, Homo sapien
catatggaaccaatcgctcactgcc

SEQ ID NO: 1348068 - DNA, 25 bp, Homo sapien
tgtcaggtcttcatctttatcctag

SEQ ID NO: 1348069 - DNA, 25 bp, Homo sapien
tataactctgataattgtcaggtct

SEQ ID NO: 1348070 - DNA, 25 bp, Homo sapien
ggtcttcatctttatcctagatcaa

SEQ ID NO: 1348071 - DNA, 25 bp, Homo sapien
tttatcctagatcaatttgaaaagc

SEQ ID NO: 1348072 - DNA, 25 bp, Homo sapien
tccgcctcaatttggcaagtatgac

SEQ ID NO: 1348073 - DNA, 25 bp, Homo sapien
tacagatggttgacagctggtcctc

SEQ ID NO: 1348074 - DNA, 25 bp, Homo sapien
tttggcaagtatgacaaatgtacag

SEQ ID NO: 1348075 - DNA, 25 bp, Homo sapien
tttcaattttctccgcctcaatttg

SEQ ID NO: 1348076 - DNA, 25 bp, Homo sapien
tcagtggccaaatacccagtaaaaa

SEQ ID NO: 1348077 - DNA, 25 bp, Homo sapien
cagtttattgcttaacctgctttat

SEQ ID NO: 1348078 - DNA, 25 bp, Homo sapien
aatcatataaggacttgttattatg

SEQ ID NO: 1348079 - DNA, 25 bp, Homo sapien
tgttctaggaagtttgtttctaaca

SEQ ID NO: 1348080 - DNA, 25 bp, Homo sapien
cacaacactgtatggtctgatttaa

SEQ ID NO: 1348081 - DNA, 25 bp, Homo sapien
agtttaaccgactttcacaacactg

SEQ ID NO: 1348082 - DNA, 25 bp, Homo sapien
gactatgccacagtagctacaaagt

SEQ ID NO: 1348083 - DNA, 25 bp, Homo sapien
gcataccttcacagatagataatta

SEQ ID NO: 1348084 - DNA, 25 bp, Homo sapien
tgaggcagcatcaaaaccaggtctt

SEQ ID NO: 1348085 - DNA, 25 bp, Homo sapien
taggttatcccaaatgttctgaggc

SEQ ID NO: 1348086 - DNA, 25 bp, Homo sapien
aggtcttcaatataaccagcttttc

SEQ ID NO: 1348087 - DNA, 25 bp, Homo sapien
ctgctatataggttatcccaaatgt

SEQ ID NO: 1348088 - DNA, 25 bp, Homo sapien
atgacagatcaatcatcattgtttt

SEQ ID NO: 1348089 - DNA, 25 bp, Homo sapien
aactaaatgacagatcaatcatcat

SEQ ID NO: 1348090 - DNA, 25 bp, Homo sapien
taaatgacagatcaatcatcattgt

SEQ ID NO: 1348091 - DNA, 25 bp, Homo sapien
gtaactaaatgacagatcaatcatc

SEQ ID NO: 1348092 - DNA, 25 bp, Homo sapien
gcacaggaatgcctcaggtaggaaa

SEQ ID NO: 1348093 - DNA, 25 bp, Homo sapien
tagaggagctcactgtaatgtaaac

SEQ ID NO: 1348094 - DNA, 25 bp, Homo sapien
ccaatctcacaagggccaaagttat

SEQ ID NO: 1348095 - DNA, 25 bp, Homo sapien
ctactaccggtttgcattacaggag

SEQ ID NO: 1348096 - DNA, 25 bp, Homo sapien
taaatttattaagccactgtcgaga

SEQ ID NO: 1348097 - DNA, 25 bp, Homo sapien
ggaggcttggttccattatgttcaa

SEQ ID NO: 1348098 - DNA, 25 bp, Homo sapien
tttttgtgcctcttcgctgctcttc

SEQ ID NO: 1348099 - DNA, 25 bp, Homo sapien
atagggccaggttcggcaaaggtct

SEQ ID NO: 1348100 - DNA, 25 bp, Homo sapien
cattactagtagatggatttttctt

SEQ ID NO: 1348101 - DNA, 25 bp, Homo sapien
tttactacattactagtagatggat

SEQ ID NO: 1348102 - DNA, 25 bp, Homo sapien
tacattactagtagatggatttttc

SEQ ID NO: 1348103 - DNA, 25 bp, Homo sapien
ttcaatatgcattttactacattac

SEQ ID NO: 1348104 - DNA, 25 bp, Homo sapien
tatttagattgtttcggcagtaggc

SEQ ID NO: 1348105 - DNA, 25 bp, Homo sapien
cattttgtacagtagattctgaaac

SEQ ID NO: 1348106 - DNA, 25 bp, Homo sapien
cagtgacactctgatcatcaaattc

SEQ ID NO: 1348107 - DNA, 25 bp, Homo sapien
cggcagtaggctatatagtgtccac

SEQ ID NO: 1348108 - DNA, 25 bp, Homo sapien
catcacctgacgacagaacatgtaa

SEQ ID NO: 1348109 - DNA, 25 bp, Homo sapien
ttgccaccattccttcatcacctga

SEQ ID NO: 1348110 - DNA, 25 bp, Homo sapien
cattccttcatcacctgacgacaga

SEQ ID NO: 1348111 - DNA, 25 bp, Homo sapien
tccttcatcacctgacgacagaaca

SEQ ID NO: 1348112 - DNA, 25 bp, Homo sapien
aaatccagtataaaaatcatgttag

SEQ ID NO: 1348113 - DNA, 25 bp, Homo sapien
atccagtataaaaatcatgttaggg

SEQ ID NO: 1348114 - DNA, 25 bp, Homo sapien
cagctagaacacataatcttaaaaa

SEQ ID NO: 1348115 - DNA, 25 bp, Homo sapien
cccagctagaacacataatcttaaa

SEQ ID NO: 1348116 - DNA, 25 bp, Homo sapien
atctaggaacaactgttaaacctat

SEQ ID NO: 1348117 - DNA, 25 bp, Homo sapien
taggaacaactgttaaacctatata

SEQ ID NO: 1348118 - DNA, 25 bp, Homo sapien
attgcataaaattatctgacatgtt

SEQ ID NO: 1348119 - DNA, 25 bp, Homo sapien
tgcataaaattatctgacatgtttt

SEQ ID NO: 1348120 - DNA, 25 bp, Homo sapien
tggactatccttagcaagaaatggc

SEQ ID NO: 1348121 - DNA, 25 bp, Homo sapien
caagaaatggctgaagatccaagcc

SEQ ID NO: 1348122 - DNA, 25 bp, Homo sapien
tcatatgtcacaatttgagctggac

SEQ ID NO: 1348123 - DNA, 25 bp, Homo sapien
actgacagaagatcatatgtcacaa

SEQ ID NO: 1348124 - DNA, 25 bp, Homo sapien
catgggtactgattttggtggaaaa

SEQ ID NO: 1348125 - DNA, 25 bp, Homo sapien
tagcggaaatgaaacatgggtactg

SEQ ID NO: 1348126 - DNA, 25 bp, Homo sapien
ctagcggaaatgaaacatgggtact

SEQ ID NO: 1348127 - DNA, 25 bp, Homo sapien
gcggaaatgaaacatgggtactgat

SEQ ID NO: 1348128 - DNA, 25 bp, Homo sapien
cagcacattgttaaagggcacttac

SEQ ID NO: 1348129 - DNA, 25 bp, Homo sapien
cctggcaagatcctgcaagtatgat

SEQ ID NO: 1348130 - DNA, 25 bp, Homo sapien
gcaatcattcaattcttcaaccaag

SEQ ID NO: 1348131 - DNA, 25 bp, Homo sapien
tatggaaatggtgaaacatggtact

SEQ ID NO: 1348132 - DNA, 25 bp, Homo sapien
ctttacaaaacttcactccatttct

SEQ ID NO: 1348133 - DNA, 25 bp, Homo sapien
acaaaacttcactccatttctcaac

SEQ ID NO: 1348134 - DNA, 25 bp, Homo sapien
ttgtactttacaaaacttcactcca

SEQ ID NO: 1348135 - DNA, 25 bp, Homo sapien
ttacaaaacttcactccatttctca

SEQ ID NO: 1348136 - DNA, 25 bp, Homo sapien
tagtatatttaaatttgcaacaaaa

SEQ ID NO: 1348137 - DNA, 25 bp, Homo sapien
gagaaaatcaattagtctacaaaaa

SEQ ID NO: 1348138 - DNA, 25 bp, Homo sapien
acttagtatatttaaatttgcaaca

SEQ ID NO: 1348139 - DNA, 25 bp, Homo sapien
tttagaaaatgcagagatccagcct

SEQ ID NO: 1348140 - DNA, 25 bp, Homo sapien
ttttcacaactgtacatattgtcac

SEQ ID NO: 1348141 - DNA, 25 bp, Homo sapien
catttttcacaactgtacatattgt

SEQ ID NO: 1348142 - DNA, 25 bp, Homo sapien
tgcatttttcacaactgtacatatt

SEQ ID NO: 1348143 - DNA, 25 bp, Homo sapien
ttgcatttttcacaactgtacatat

SEQ ID NO: 1348144 - DNA, 25 bp, Homo sapien
gagtttgcccttctatggatctcag

SEQ ID NO: 1348145 - DNA, 25 bp, Homo sapien
gactgcctgtcatatgtccaagcaa

SEQ ID NO: 1348146 - DNA, 25 bp, Homo sapien
tccaagcaaggtgctagacacacaa

SEQ ID NO: 1348147 - DNA, 25 bp, Homo sapien
tcaaggtagacactaaccgaatgcc

SEQ ID NO: 1348148 - DNA, 25 bp, Homo sapien
caatcttgcaaggttactactggac

SEQ ID NO: 1348149 - DNA, 25 bp, Homo sapien
atcttgcaaggttactactggaccc

SEQ ID NO: 1348150 - DNA, 25 bp, Homo sapien
cttgcaaggttactactggacccca

SEQ ID NO: 1348151 - DNA, 25 bp, Homo sapien
tgcaaggttactactggaccccaaa

SEQ ID NO: 1348152 - DNA, 25 bp, Homo sapien
catgatcctgctttgactatagaag

SEQ ID NO: 1348153 - DNA, 25 bp, Homo sapien
ccaggaattggcaaggacagatctt

SEQ ID NO: 1348154 - DNA, 25 bp, Homo sapien
ccacccttgtggagcatatgcttcg

SEQ ID NO: 1348155 - DNA, 25 bp, Homo sapien
gactatagaagttggatgacttgat

SEQ ID NO: 1348156 - DNA, 25 bp, Homo sapien
cctgtcacaagtcagacactgcact

SEQ ID NO: 1348157 - DNA, 25 bp, Homo sapien
gaactaatgattgttccatcaaata

SEQ ID NO: 1348158 - DNA, 25 bp, Homo sapien
tgtcacaagtcagacactgcactga

SEQ ID NO: 1348159 - DNA, 25 bp, Homo sapien
gacactgcactgaactaatgattgt

SEQ ID NO: 1348160 - DNA, 25 bp, Homo sapien
cataaagctctatacaagaaaaagt

SEQ ID NO: 1348161 - DNA, 25 bp, Homo sapien
tgctgcaagtgttaaaattcataaa

SEQ ID NO: 1348162 - DNA, 25 bp, Homo sapien
atcatgtctatgtaaaattatgcta

SEQ ID NO: 1348163 - DNA, 25 bp, Homo sapien
aaaattcataaagctctatacaaga

SEQ ID NO: 1348164 - DNA, 25 bp, Homo sapien
ttttgtgtggtggtgccaatcctgg

SEQ ID NO: 1348165 - DNA, 25 bp, Homo sapien
gacaggtcattcgaatggacatcag

SEQ ID NO: 1348166 - DNA, 25 bp, Homo sapien
tgccgataaacgtggattaacacct

SEQ ID NO: 1348167 - DNA, 25 bp, Homo sapien
acaaattgcctgatttaggagggct

SEQ ID NO: 1348168 - DNA, 25 bp, Homo sapien
agatttaaaatttgcattattacct

SEQ ID NO: 1348169 - DNA, 25 bp, Homo sapien
tgtaagatttaaaatttgcattatt

SEQ ID NO: 1348170 - DNA, 25 bp, Homo sapien
taagatttaaaatttgcattattac

SEQ ID NO: 1348171 - DNA, 25 bp, Homo sapien
ctgtaagatttaaaatttgcattat

SEQ ID NO: 1348172 - DNA, 25 bp, Homo sapien
ccattaaacatcgaaggaattcttg

SEQ ID NO: 1348173 - DNA, 25 bp, Homo sapien
tgttgctacaagattcacaagactg

SEQ ID NO: 1348174 - DNA, 25 bp, Homo sapien
tctcctcagtggttatggtttgcgg

SEQ ID NO: 1348175 - DNA, 25 bp, Homo sapien
gactgaaaatctacatccgactggc

SEQ ID NO: 1348176 - DNA, 25 bp, Homo sapien
tgctgagaatacccccgaaatgttg

SEQ ID NO: 1348177 - DNA, 25 bp, Homo sapien
ctgctgagaatacccccgaaatgtt

SEQ ID NO: 1348178 - DNA, 25 bp, Homo sapien
gctgagaatacccccgaaatgttgg

SEQ ID NO: 1348179 - DNA, 25 bp, Homo sapien
tgagaatacccccgaaatgttggat

SEQ ID NO: 1348180 - DNA, 25 bp, Homo sapien
agtagtaggcacaacagatcctggc

SEQ ID NO: 1348181 - DNA, 25 bp, Homo sapien
aacagagtagtaggcacaacagatc

SEQ ID NO: 1348182 - DNA, 25 bp, Homo sapien
gagtagtaggcacaacagatcctgg

SEQ ID NO: 1348183 - DNA, 25 bp, Homo sapien
cagagtagtaggcacaacagatcct

SEQ ID NO: 1348184 - DNA, 25 bp, Homo sapien
gtttcttatctgttcgagctagtcc

SEQ ID NO: 1348185 - DNA, 25 bp, Homo sapien
cttatctgttcgagctagtcctcca

SEQ ID NO: 1348186 - DNA, 25 bp, Homo sapien
ctctgtcattagtttgagataactt

SEQ ID NO: 1348187 - DNA, 25 bp, Homo sapien
ttcttatctgttcgagctagtcctc

SEQ ID NO: 1348188 - DNA, 25 bp, Homo sapien
catagagtaacatcgttgggacaag

SEQ ID NO: 1348189 - DNA, 25 bp, Homo sapien
gttatgtcccaaaccagattcttgc

SEQ ID NO: 1348190 - DNA, 25 bp, Homo sapien
cccagggtttacacaaggaccagca

SEQ ID NO: 1348191 - DNA, 25 bp, Homo sapien
cagcagcctcaagaaactacgggta

SEQ ID NO: 1348192 - DNA, 25 bp, Homo sapien
gcctgcaaagctgcattcatgtaac

SEQ ID NO: 1348193 - DNA, 25 bp, Homo sapien
ttcatgtaacaagtatttccaatat

SEQ ID NO: 1348194 - DNA, 25 bp, Homo sapien
aagagcctgcaaagctgcattcatg

SEQ ID NO: 1348195 - DNA, 25 bp, Homo sapien
tagaaagagcctgcaaagctgcatt

SEQ ID NO: 1348196 - DNA, 25 bp, Homo sapien
caaatacggcaaccagaggagtttt

SEQ ID NO: 1348197 - DNA, 25 bp, Homo sapien
ccagatcatcaaatacggcaaccag

SEQ ID NO: 1348198 - DNA, 25 bp, Homo sapien
tccgcttctatatccagatcatcaa

SEQ ID NO: 1348199 - DNA, 25 bp, Homo sapien
cttcatccgcttctatatccagatc

SEQ ID NO: 1348200 - DNA, 25 bp, Homo sapien
cagttggtatcaatgaacaagtaca

SEQ ID NO: 1348201 - DNA, 25 bp, Homo sapien
tctagccatctttcatgtgtaaggc

SEQ ID NO: 1348202 - DNA, 25 bp, Homo sapien
cgaaacggccattttcatactatct

SEQ ID NO: 1348203 - DNA, 25 bp, Homo sapien
tgtaagaggattcaacgaaacggcc

SEQ ID NO: 1348204 - DNA, 25 bp, Homo sapien
tgtcttacatgaggcaatgaaggct

SEQ ID NO: 1348205 - DNA, 25 bp, Homo sapien
cttgtatttggtgaggttgtcttac

SEQ ID NO: 1348206 - DNA, 25 bp, Homo sapien
tgctgcaagcataacaccatactcg

SEQ ID NO: 1348207 - DNA, 25 bp, Homo sapien
tactcgaagagtggtaaggttcaca

SEQ ID NO: 1348208 - DNA, 25 bp, Homo sapien
ggtgctgtgatctacttgtgattca

SEQ ID NO: 1348209 - DNA, 25 bp, Homo sapien
tgatctacttgtgattcaccacagc

SEQ ID NO: 1348210 - DNA, 25 bp, Homo sapien
tgtatggtgctgtgatctacttgtg

SEQ ID NO: 1348211 - DNA, 25 bp, Homo sapien
gagaatgtatggtgctgtgatctac

SEQ ID NO: 1348212 - DNA, 25 bp, Homo sapien
tgcccaaagatttggtccttggact

SEQ ID NO: 1348213 - DNA, 25 bp, Homo sapien
ggactttacaatcctgacaagtacc

SEQ ID NO: 1348214 - DNA, 25 bp, Homo sapien
tggtccttggactttacaatcctga

SEQ ID NO: 1348215 - DNA, 25 bp, Homo sapien
cagacatgcccaaagatttggtcct

SEQ ID NO: 1348216 - DNA, 25 bp, Homo sapien
aaatgtggacaatgatttcgaaaag

SEQ ID NO: 1348217 - DNA, 25 bp, Homo sapien
gacaatgatttcgaaaagctgacat

SEQ ID NO: 1348218 - DNA, 25 bp, Homo sapien
tgtggacaatgatttcgaaaagctg

SEQ ID NO: 1348219 - DNA, 25 bp, Homo sapien
tggacaatgatttcgaaaagctgac

SEQ ID NO: 1348220 - DNA, 25 bp, Homo sapien
caagactttcaaaatgaggtaacac

SEQ ID NO: 1348221 - DNA, 25 bp, Homo sapien
ccaagactttcaaaatgaggtaaca

SEQ ID NO: 1348222 - DNA, 25 bp, Homo sapien
tgaggcagtttcttcctaacatcga

SEQ ID NO: 1348223 - DNA, 25 bp, Homo sapien
gaggcagtttcttcctaacatcgat

SEQ ID NO: 1348224 - DNA, 25 bp, Homo sapien
ggcagtttcttcctaacatcgatgg

SEQ ID NO: 1348225 - DNA, 25 bp, Homo sapien
gttgaggcagtttcttcctaacatc

SEQ ID NO: 1348226 - DNA, 25 bp, Homo sapien
taactcattttatgaagccagcatc

SEQ ID NO: 1348227 - DNA, 25 bp, Homo sapien
atgaagccagcatcatcctgacacc

SEQ ID NO: 1348228 - DNA, 25 bp, Homo sapien
agccagcatcatcctgacaccaaag

SEQ ID NO: 1348229 - DNA, 25 bp, Homo sapien
caatataaaaagaaggaatcctccg

SEQ ID NO: 1348230 - DNA, 25 bp, Homo sapien
tgcaccaagcctattcctaatctat

SEQ ID NO: 1348231 - DNA, 25 bp, Homo sapien
tgtctgtcttaatgccaatactgtt

SEQ ID NO: 1348232 - DNA, 25 bp, Homo sapien
tagcttgtataactaaacctggaga

SEQ ID NO: 1348233 - DNA, 25 bp, Homo sapien
aactcatagacccaaacaattccac

SEQ ID NO: 1348234 - DNA, 25 bp, Homo sapien
ggaaatcacaaagagtgcacaagat

SEQ ID NO: 1348235 - DNA, 25 bp, Homo sapien
taactggactactggaagttttctc

SEQ ID NO: 1348236 - DNA, 25 bp, Homo sapien
ccttatctttgtaatcttgtatctg

SEQ ID NO: 1348237 - DNA, 25 bp, Homo sapien
tcctctatctgccacactaactgga

SEQ ID NO: 1348238 - DNA, 25 bp, Homo sapien
aaaaatctccaaaggcttaagcagc

SEQ ID NO: 1348239 - DNA, 25 bp, Homo sapien
gagttgatacctggaccatctcctt

SEQ ID NO: 1348240 - DNA, 25 bp, Homo sapien
tgccaagccctacctaaccagtgta

SEQ ID NO: 1348241 - DNA, 25 bp, Homo sapien
gggcagttatacaaaactctgaggc

SEQ ID NO: 1348242 - DNA, 25 bp, Homo sapien
ctcgaccaacaacggcctgcagccg

SEQ ID NO: 1348243 - DNA, 25 bp, Homo sapien
gggacccgccagctcgaccaacaac

SEQ ID NO: 1348244 - DNA, 25 bp, Homo sapien
cgccagctcgaccaacaacggcctg

SEQ ID NO: 1348245 - DNA, 25 bp, Homo sapien
cagctcgaccaacaacggcctgcag

SEQ ID NO: 1348246 - DNA, 25 bp, Homo sapien
tgtcgcgtcaggagggccggaaaac

SEQ ID NO: 1348247 - DNA, 25 bp, Homo sapien
ggtccgcctcctgaactggccactt

SEQ ID NO: 1348248 - DNA, 25 bp, Homo sapien
ctgaactggccacttcccgcagcag

SEQ ID NO: 1348249 - DNA, 25 bp, Homo sapien
ctcggagaggggcagtgtcgcgtca

SEQ ID NO: 1348250 - DNA, 25 bp, Homo sapien
gatcattcaaaataaaacaaaataa

SEQ ID NO: 1348251 - DNA, 25 bp, Homo sapien
gccacaaaggctgatcattcaaaat

SEQ ID NO: 1348252 - DNA, 25 bp, Homo sapien
ccacaaaggctgatcattcaaaata

SEQ ID NO: 1348253 - DNA, 25 bp, Homo sapien
gaggactgggccgttctccttagag

SEQ ID NO: 1348254 - DNA, 25 bp, Homo sapien
tgatagcaatgctgtcacctcccct

SEQ ID NO: 1348255 - DNA, 25 bp, Homo sapien
gagggcaagggacttcctgtaacaa

SEQ ID NO: 1348256 - DNA, 25 bp, Homo sapien
ccctgtgtggactcaggagaggact

SEQ ID NO: 1348257 - DNA, 25 bp, Homo sapien
gagtatctactctcgggaggagcaa

SEQ ID NO: 1348258 - DNA, 25 bp, Homo sapien
ggagccactgatccacatggagtat

SEQ ID NO: 1348259 - DNA, 25 bp, Homo sapien
cactgatccacatggagtatctact

SEQ ID NO: 1348260 - DNA, 25 bp, Homo sapien
cacatggagtatctactctcgggag

SEQ ID NO: 1348261 - DNA, 25 bp, Homo sapien
tggcgtagaggtctttgcatatgtg

SEQ ID NO: 1348262 - DNA, 25 bp, Homo sapien
ggcgtagaggtctttgcatatgtgc

SEQ ID NO: 1348263 - DNA, 25 bp, Homo sapien
gttggcgtagaggtctttgcatatg

SEQ ID NO: 1348264 - DNA, 25 bp, Homo sapien
gtgttggcgtagaggtctttgcata

SEQ ID NO: 1348265 - DNA, 25 bp, Homo sapien
tggaaccgctccttgccgatagtga

SEQ ID NO: 1348266 - DNA, 25 bp, Homo sapien
gactggaagagcaccttggggcagt

SEQ ID NO: 1348267 - DNA, 25 bp, Homo sapien
gcagtggaaccgctccttgccgata

SEQ ID NO: 1348268 - DNA, 25 bp, Homo sapien
gtggaaccgctccttgccgatagtg

SEQ ID NO: 1348269 - DNA, 25 bp, Homo sapien
gctgtagcggcgctccacgaggatc

SEQ ID NO: 1348270 - DNA, 25 bp, Homo sapien
gctccacgaggatctttatgaggta

SEQ ID NO: 1348271 - DNA, 25 bp, Homo sapien
tgatgccatgcacgatttcccactg

SEQ ID NO: 1348272 - DNA, 25 bp, Homo sapien
gatccaagtccagggtgacgtagca

SEQ ID NO: 1348273 - DNA, 25 bp, Homo sapien
cgtagatgggcacagtgtgggtgac

SEQ ID NO: 1348274 - DNA, 25 bp, Homo sapien
tcgtagatgggcacagtgtgggtga

SEQ ID NO: 1348275 - DNA, 25 bp, Homo sapien
ctcgtagatgggcacagtgtgggtg

SEQ ID NO: 1348276 - DNA, 25 bp, Homo sapien
ccctcgtagatgggcacagtgtggg

SEQ ID NO: 1348277 - DNA, 25 bp, Homo sapien
catcacgatgtggccagaagcgtac

SEQ ID NO: 1348278 - DNA, 25 bp, Homo sapien
tcacgatgtggccagaagcgtacag

SEQ ID NO: 1348279 - DNA, 25 bp, Homo sapien
cacgatgtggccagaagcgtacagg

SEQ ID NO: 1348280 - DNA, 25 bp, Homo sapien
tccatcacgatgtggccagaagcgt

SEQ ID NO: 1348281 - DNA, 25 bp, Homo sapien
atcttctcgtgattggccttggagt

SEQ ID NO: 1348282 - DNA, 25 bp, Homo sapien
tgatatgggtcatcttctcgtgatt

SEQ ID NO: 1348283 - DNA, 25 bp, Homo sapien
tcttctcgtgattggccttggagtt

SEQ ID NO: 1348284 - DNA, 25 bp, Homo sapien
catgatatgggtcatcttctcgtga

SEQ ID NO: 1348285 - DNA, 25 bp, Homo sapien
tcggcactacgggtgctccttggag

SEQ ID NO: 1348286 - DNA, 25 bp, Homo sapien
cagtcggcactacgggtgctccttg

SEQ ID NO: 1348287 - DNA, 25 bp, Homo sapien
gtcggcactacgggtgctccttgga

SEQ ID NO: 1348288 - DNA, 25 bp, Homo sapien
ctcagtcggcactacgggtgctcct

SEQ ID NO: 1348289 - DNA, 25 bp, Homo sapien
tgatgctgtgctctatggggtactt

SEQ ID NO: 1348290 - DNA, 25 bp, Homo sapien
atcaccctcgtaggagtccttttga

SEQ ID NO: 1348291 - DNA, 25 bp, Homo sapien
gatgatgctgtgctctatggggtac

SEQ ID NO: 1348292 - DNA, 25 bp, Homo sapien
tctgggcctcatcaccctcgtagga

SEQ ID NO: 1348293 - DNA, 25 bp, Homo sapien
cattactgctattctcattacgttg

SEQ ID NO: 1348294 - DNA, 25 bp, Homo sapien
tattctcattacgttgaatgtttgg

SEQ ID NO: 1348295 - DNA, 25 bp, Homo sapien
tctcattacgttgaatgtttggaag

SEQ ID NO: 1348296 - DNA, 25 bp, Homo sapien
actgctattctcattacgttgaatg

SEQ ID NO: 1348297 - DNA, 25 bp, Homo sapien
accttcgcactcctgaccccggaag

SEQ ID NO: 1348298 - DNA, 25 bp, Homo sapien
cttcgcactcctgaccccggaagga

SEQ ID NO: 1348299 - DNA, 25 bp, Homo sapien
tcgcactcctgaccccggaaggact

SEQ ID NO: 1348300 - DNA, 25 bp, Homo sapien
ttctctccaccttcgcactcctgac

SEQ ID NO: 1348301 - DNA, 25 bp, Homo sapien
cagactgctgctcagcgccaggcat

SEQ ID NO: 1348302 - DNA, 25 bp, Homo sapien
tcagactgctgctcagcgccaggca

SEQ ID NO: 1348303 - DNA, 25 bp, Homo sapien
gtcagactgctgctcagcgccaggc

SEQ ID NO: 1348304 - DNA, 25 bp, Homo sapien
taacatgtgttcaactgggtacagt

SEQ ID NO: 1348305 - DNA, 25 bp, Homo sapien
tgaactctgaggttctagccccaag

SEQ ID NO: 1348306 - DNA, 25 bp, Homo sapien
gacttattagttcagcttcctatgg

SEQ ID NO: 1348307 - DNA, 25 bp, Homo sapien
tctggctctataaagcagagaccca

SEQ ID NO: 1348308 - DNA, 25 bp, Homo sapien
cacaacagtattgttccaggaagca

SEQ ID NO: 1348309 - DNA, 25 bp, Homo sapien
gggatactgatctggccaaggcaca

SEQ ID NO: 1348310 - DNA, 25 bp, Homo sapien
cagacagaccttcttaggcagcaga

SEQ ID NO: 1348311 - DNA, 25 bp, Homo sapien
gaaaaacaatctggtcatctggaaa

SEQ ID NO: 1348312 - DNA, 25 bp, Homo sapien
catctccatgaaagcaaaacacttg

SEQ ID NO: 1348313 - DNA, 25 bp, Homo sapien
taatttttcaacatgcttctggagc

SEQ ID NO: 1348314 - DNA, 25 bp, Homo sapien
attctgatagtgagtaatgtcattc

SEQ ID NO: 1348315 - DNA, 25 bp, Homo sapien
tatcttgcacaggagttaagtctat

SEQ ID NO: 1348316 - DNA, 25 bp, Homo sapien
cgcctctcctaaaactggcgcccca

SEQ ID NO: 1348317 - DNA, 25 bp, Homo sapien
ggcgcctctcctaaaactggcgccc

SEQ ID NO: 1348318 - DNA, 25 bp, Homo sapien
gcgcctctcctaaaactggcgcccc

SEQ ID NO: 1348319 - DNA, 25 bp, Homo sapien
gcctctcctaaaactggcgccccag

SEQ ID NO: 1348320 - DNA, 25 bp, Homo sapien
cccgacattaacagggccaggagga

SEQ ID NO: 1348321 - DNA, 25 bp, Homo sapien
ctaccccagcaaggccgggttctag

SEQ ID NO: 1348322 - DNA, 25 bp, Homo sapien
cggcctggccccgacattaacaggg

SEQ ID NO: 1348323 - DNA, 25 bp, Homo sapien
caggaggaaccgctacggccaccac

SEQ ID NO: 1348324 - DNA, 25 bp, Homo sapien
tgcaggtgcgctggggactacagtc

SEQ ID NO: 1348325 - DNA, 25 bp, Homo sapien
caggtgcgctggggactacagtcgt

SEQ ID NO: 1348326 - DNA, 25 bp, Homo sapien
aggtgcgctggggactacagtcgtg

SEQ ID NO: 1348327 - DNA, 25 bp, Homo sapien
ctgcaggtgcgctggggactacagt

SEQ ID NO: 1348328 - DNA, 25 bp, Homo sapien
ttctatatttggacatttggtttct

SEQ ID NO: 1348329 - DNA, 25 bp, Homo sapien
tatactacggtttgtttattctata

SEQ ID NO: 1348330 - DNA, 25 bp, Homo sapien
gattgatccatgttactgcatgtag

SEQ ID NO: 1348331 - DNA, 25 bp, Homo sapien
cactcagcatattgttagattgatc

SEQ ID NO: 1348332 - DNA, 25 bp, Homo sapien
tttaatcccactctcggccgggtgc

SEQ ID NO: 1348333 - DNA, 25 bp, Homo sapien
gttttgtataaaagctcagtgtgtg

SEQ ID NO: 1348334 - DNA, 25 bp, Homo sapien
taatcccactctgataatgccatga

SEQ ID NO: 1348335 - DNA, 25 bp, Homo sapien
taacgctttgaaggttgtacacgag

SEQ ID NO: 1348336 - DNA, 25 bp, Homo sapien
gaagtacggcatacctacagcctgg

SEQ ID NO: 1348337 - DNA, 25 bp, Homo sapien
tcactgcccattttacgaggaagcc

SEQ ID NO: 1348338 - DNA, 25 bp, Homo sapien
catagaactgaaatgttggagtgcc

SEQ ID NO: 1348339 - DNA, 25 bp, Homo sapien
taacccaccgtgctcttagcttgca

SEQ ID NO: 1348340 - DNA, 25 bp, Homo sapien
tttgactataggtttcaagagttct

SEQ ID NO: 1348341 - DNA, 25 bp, Homo sapien
cttatgttttggggctataggaaat

SEQ ID NO: 1348342 - DNA, 25 bp, Homo sapien
ttttgactataggtttcaagagttc

SEQ ID NO: 1348343 - DNA, 25 bp, Homo sapien
ttgactataggtttcaagagttctt

SEQ ID NO: 1348344 - DNA, 25 bp, Homo sapien
caggatctaccactgatttgagacc

SEQ ID NO: 1348345 - DNA, 25 bp, Homo sapien
gatataaaatccagtgaatcaatga

SEQ ID NO: 1348346 - DNA, 25 bp, Homo sapien
ttcgtatacagtttgcttacagtga

SEQ ID NO: 1348347 - DNA, 25 bp, Homo sapien
tggtgacataatagctgagacttaa

SEQ ID NO: 1348348 - DNA, 25 bp, Homo sapien
acgggctttagtcattttaggagtg

SEQ ID NO: 1348349 - DNA, 25 bp, Homo sapien
tcattttaggagtgagttgcacaaa

SEQ ID NO: 1348350 - DNA, 25 bp, Homo sapien
tagtcattttaggagtgagttgcac

SEQ ID NO: 1348351 - DNA, 25 bp, Homo sapien
taggagtgagttgcacaaaaggacc

SEQ ID NO: 1348352 - DNA, 25 bp, Homo sapien
ctcctcataccagaggcatgtgtca

SEQ ID NO: 1348353 - DNA, 25 bp, Homo sapien
aaagtgggcgggaaaagcataatct

SEQ ID NO: 1348354 - DNA, 25 bp, Homo sapien
caccatgtcttactcctaaaatgca

SEQ ID NO: 1348355 - DNA, 25 bp, Homo sapien
gctgttttgcatgtactttataggt

SEQ ID NO: 1348356 - DNA, 25 bp, Homo sapien
tatattcagcaggttggtttgtcaa

SEQ ID NO: 1348357 - DNA, 25 bp, Homo sapien
agacatatataacaggccaggagca

SEQ ID NO: 1348358 - DNA, 25 bp, Homo sapien
gactgcatgcagaagggtacttaag

SEQ ID NO: 1348359 - DNA, 25 bp, Homo sapien
aagatgtggcctttcacaaaagagg

SEQ ID NO: 1348360 - DNA, 25 bp, Homo sapien
cctaggaaataggaatgccaaagta

SEQ ID NO: 1348361 - DNA, 25 bp, Homo sapien
tcacagtaagctccaaagaactttg

SEQ ID NO: 1348362 - DNA, 25 bp, Homo sapien
actatgattccgttaatttgttgaa

SEQ ID NO: 1348363 - DNA, 25 bp, Homo sapien
tttccaagagagtgattatttgcat

SEQ ID NO: 1348364 - DNA, 25 bp, Homo sapien
tgtgaacaaccatgtattagcttta

SEQ ID NO: 1348365 - DNA, 25 bp, Homo sapien
tcaaaatgattataggaattaagct

SEQ ID NO: 1348366 - DNA, 25 bp, Homo sapien
tagctttacttagctgatgtcagta

SEQ ID NO: 1348367 - DNA, 25 bp, Homo sapien
gattagtggaaataagaacatccct

SEQ ID NO: 1348368 - DNA, 25 bp, Homo sapien
caaagcaactggtacatcaaatatg

SEQ ID NO: 1348369 - DNA, 25 bp, Homo sapien
aataactctgtgtgagaatggtccc

SEQ ID NO: 1348370 - DNA, 25 bp, Homo sapien
tagtacttgaatatagagaagcact

SEQ ID NO: 1348371 - DNA, 25 bp, Homo sapien
tcacagaagcctttcacaaagtaca

SEQ ID NO: 1348372 - DNA, 25 bp, Homo sapien
tcaggaatggcttagtctggtggtt

SEQ ID NO: 1348373 - DNA, 25 bp, Homo sapien
taaggttttctcattcacatgtctg

SEQ ID NO: 1348374 - DNA, 25 bp, Homo sapien
cctaaaattttagcagctcgaaaca

SEQ ID NO: 1348375 - DNA, 25 bp, Homo sapien
gcctcagtcccttgccattggcaag

SEQ ID NO: 1348376 - DNA, 25 bp, Homo sapien
gtattgtctgatgggtttgacaggc

SEQ ID NO: 1348377 - DNA, 25 bp, Homo sapien
ttttcaagtgcagtgaagaattaaa

SEQ ID NO: 1348378 - DNA, 25 bp, Homo sapien
gatctcgtccaccaaaaatactccg

SEQ ID NO: 1348379 - DNA, 25 bp, Homo sapien
aaatactccgagtgtgcatttcggg

SEQ ID NO: 1348380 - DNA, 25 bp, Homo sapien
ctaatagtcaaagatgcctttatga

SEQ ID NO: 1348381 - DNA, 25 bp, Homo sapien
aaagaccagatatggtttgccttca

SEQ ID NO: 1348382 - DNA, 25 bp, Homo sapien
tgaagctttagaaagaccagatatg

SEQ ID NO: 1348383 - DNA, 25 bp, Homo sapien
gatatggtttgccttcaattaagaa

SEQ ID NO: 1348384 - DNA, 25 bp, Homo sapien
agagttaaagactggagctaagaac

SEQ ID NO: 1348385 - DNA, 25 bp, Homo sapien
gattgctgccccacgctctttgtaa

SEQ ID NO: 1348386 - DNA, 25 bp, Homo sapien
agtgttcccggattgctgccccacg

SEQ ID NO: 1348387 - DNA, 25 bp, Homo sapien
agatgaagtgttcccggattgctgc

SEQ ID NO: 1348388 - DNA, 25 bp, Homo sapien
ttgactggaaactaggacgggtaga

SEQ ID NO: 1348389 - DNA, 25 bp, Homo sapien
tcagcccggtaatgaagcccatttc

SEQ ID NO: 1348390 - DNA, 25 bp, Homo sapien
gaagtgggccccagagcaaactggt

SEQ ID NO: 1348391 - DNA, 25 bp, Homo sapien
attcctttcccatggcggaggcagc

SEQ ID NO: 1348392 - DNA, 25 bp, Homo sapien
ttctggcggaaagttggcagccacg

SEQ ID NO: 1348393 - DNA, 25 bp, Homo sapien
ctcgcgcacctagggccgggagaca

SEQ ID NO: 1348394 - DNA, 25 bp, Homo sapien
cccactccgggtgataacggcggag

SEQ ID NO: 1348395 - DNA, 25 bp, Homo sapien
gagacagacaaattctggcggaaag

SEQ ID NO: 1348396 - DNA, 25 bp, Homo sapien
gctggagcagaagtgttagcggcca

SEQ ID NO: 1348397 - DNA, 25 bp, Homo sapien
gcagaagtgttagcggccagagctc

SEQ ID NO: 1348398 - DNA, 25 bp, Homo sapien
gagcagaagtgttagcggccagagc

SEQ ID NO: 1348399 - DNA, 25 bp, Homo sapien
tggagcagaagtgttagcggccaga

SEQ ID NO: 1348400 - DNA, 25 bp, Homo sapien
acagccaggcgggacgcgcacagtc

SEQ ID NO: 1348401 - DNA, 25 bp, Homo sapien
cacagccaggcgggacgcgcacagt

SEQ ID NO: 1348402 - DNA, 25 bp, Homo sapien
cagtccctccacgcggaaagaagta

SEQ ID NO: 1348403 - DNA, 25 bp, Homo sapien
gcgcacagtccctccacgcggaaag

SEQ ID NO: 1348404 - DNA, 25 bp, Homo sapien
gccagcagtgccagttaagaaatcc

SEQ ID NO: 1348405 - DNA, 25 bp, Homo sapien
tgccccagggtctgaaagtgtcggc

SEQ ID NO: 1348406 - DNA, 25 bp, Homo sapien
tcggctgagtttcgggtgcgttccc

SEQ ID NO: 1348407 - DNA, 25 bp, Homo sapien
gccatacagctgtggtccgcgctgg

SEQ ID NO: 1348408 - DNA, 25 bp, Homo sapien
tacgtagtttaagtgagtgaagaat

SEQ ID NO: 1348409 - DNA, 25 bp, Homo sapien
gctgggggttgagcaactagggctg

SEQ ID NO: 1348410 - DNA, 25 bp, Homo sapien
gttgagcaactagggctggaagttt

SEQ ID NO: 1348411 - DNA, 25 bp, Homo sapien
tttacgtagtttaagtgagtgaaga

SEQ ID NO: 1348412 - DNA, 25 bp, Homo sapien
ttgagaactccctttgcctatatgc

SEQ ID NO: 1348413 - DNA, 25 bp, Homo sapien
gagaactccctttgcctatatgctt

SEQ ID NO: 1348414 - DNA, 25 bp, Homo sapien
tatgcttttgaaaacgccaaaccat

SEQ ID NO: 1348415 - DNA, 25 bp, Homo sapien
tgcctatatgcttttgaaaacgcca

SEQ ID NO: 1348416 - DNA, 25 bp, Homo sapien
cacacgttattgagtggaccacata

SEQ ID NO: 1348417 - DNA, 25 bp, Homo sapien
taatgaattcatgtagcagcggccc

SEQ ID NO: 1348418 - DNA, 25 bp, Homo sapien
cattggccttcgagtcacaacataa

SEQ ID NO: 1348419 - DNA, 25 bp, Homo sapien
taaagcacaacgtgaaccaagttgg

SEQ ID NO: 1348420 - DNA, 25 bp, Homo sapien
tggcacaaccttcgatttaaaattc

SEQ ID NO: 1348421 - DNA, 25 bp, Homo sapien
ggcttcaagatctaagtgtatcaga

SEQ ID NO: 1348422 - DNA, 25 bp, Homo sapien
tctattaatagttcacgcaagagaa

SEQ ID NO: 1348423 - DNA, 25 bp, Homo sapien
aacactttcaacatagtcgaaggct

SEQ ID NO: 1348424 - DNA, 25 bp, Homo sapien
gtccaagctgcatctccctaagaca

SEQ ID NO: 1348425 - DNA, 25 bp, Homo sapien
tattgaggaaaccataatgaataca

SEQ ID NO: 1348426 - DNA, 25 bp, Homo sapien
catcacagtagccattttaagccaa

SEQ ID NO: 1348427 - DNA, 25 bp, Homo sapien
aagtattcaatttacctcaagtcca

SEQ ID NO: 1348428 - DNA, 25 bp, Homo sapien
tgagacagaaacaatgccccaatat

SEQ ID NO: 1348429 - DNA, 25 bp, Homo sapien
gatcaaaagcaggtacattacaccc

SEQ ID NO: 1348430 - DNA, 25 bp, Homo sapien
tctcaggacgaaaatgcatcgagca

SEQ ID NO: 1348431 - DNA, 25 bp, Homo sapien
tctaagtatcaccacactaagctgt

SEQ ID NO: 1348432 - DNA, 25 bp, Homo sapien
tgctcatcggctcaccaatggcata

SEQ ID NO: 1348433 - DNA, 25 bp, Homo sapien
caatggcatacactcaaaggattcc

SEQ ID NO: 1348434 - DNA, 25 bp, Homo sapien
tatgggtaactatctcaggacctga

SEQ ID NO: 1348435 - DNA, 25 bp, Homo sapien
cattgagcccttctatggtccatgc

SEQ ID NO: 1348436 - DNA, 25 bp, Homo sapien
cagactttccactaagatggtagca

SEQ ID NO: 1348437 - DNA, 25 bp, Homo sapien
caattactgcagcaatctactcatc

SEQ ID NO: 1348438 - DNA, 25 bp, Homo sapien
gataagatgctgctttcatacattc

SEQ ID NO: 1348439 - DNA, 25 bp, Homo sapien
ggaagcagtagcagattgcctttga

SEQ ID NO: 1348440 - DNA, 25 bp, Homo sapien
atttatatatgtccttaggttgtgc

SEQ ID NO: 1348441 - DNA, 25 bp, Homo sapien
tttatatatgtccttaggttgtgct

SEQ ID NO: 1348442 - DNA, 25 bp, Homo sapien
tatatatgtccttaggttgtgctta

SEQ ID NO: 1348443 - DNA, 25 bp, Homo sapien
atatatgtccttaggttgtgcttac

SEQ ID NO: 1348444 - DNA, 25 bp, Homo sapien
ctttttgcagcagaacctaaggtgg

SEQ ID NO: 1348445 - DNA, 25 bp, Homo sapien
tttgcagcagaacctaaggtggaag

SEQ ID NO: 1348446 - DNA, 25 bp, Homo sapien
ctggtgctttttgcagcagaaccta

SEQ ID NO: 1348447 - DNA, 25 bp, Homo sapien
cagcagaacctaaggtggaaggtct

SEQ ID NO: 1348448 - DNA, 25 bp, Homo sapien
tatggttttccaagatatcagcact

SEQ ID NO: 1348449 - DNA, 25 bp, Homo sapien
ttcaaaacaacaaatggtgctctcc

SEQ ID NO: 1348450 - DNA, 25 bp, Homo sapien
caatattttaggagcaccagtgaat

SEQ ID NO: 1348451 - DNA, 25 bp, Homo sapien
tattcacacaacgtatggcatttgc

SEQ ID NO: 1348452 - DNA, 25 bp, Homo sapien
cacaatcaaggatgatacacagcac

SEQ ID NO: 1348453 - DNA, 25 bp, Homo sapien
caatcaaggatgatacacagcacag

SEQ ID NO: 1348454 - DNA, 25 bp, Homo sapien
acaatcaaggatgatacacagcaca

SEQ ID NO: 1348455 - DNA, 25 bp, Homo sapien
ctacagagctagttctatactggct

SEQ ID NO: 1348456 - DNA, 25 bp, Homo sapien
tacagagctagttctatactggctg

SEQ ID NO: 1348457 - DNA, 25 bp, Homo sapien
cagagctagttctatactggctgga

SEQ ID NO: 1348458 - DNA, 25 bp, Homo sapien
gagctagttctatactggctggatc

SEQ ID NO: 1348459 - DNA, 25 bp, Homo sapien
aagcttgaacgtttccataccccat

SEQ ID NO: 1348460 - DNA, 25 bp, Homo sapien
ggcagatgcaatgtagctatacttt

SEQ ID NO: 1348461 - DNA, 25 bp, Homo sapien
caaagcttatctatactgcataaag

SEQ ID NO: 1348462 - DNA, 25 bp, Homo sapien
cagacaatggcaagacagactgtat

SEQ ID NO: 1348463 - DNA, 25 bp, Homo sapien
aaaattagttatgccgaaacagtct

SEQ ID NO: 1348464 - DNA, 25 bp, Homo sapien
attagttatgccgaaacagtcttgg

SEQ ID NO: 1348465 - DNA, 25 bp, Homo sapien
agttatgccgaaacagtcttggaaa

SEQ ID NO: 1348466 - DNA, 25 bp, Homo sapien
taaaattagttatgccgaaacagtc

SEQ ID NO: 1348467 - DNA, 25 bp, Homo sapien
tacttgtgctgaaagagccaataca

SEQ ID NO: 1348468 - DNA, 25 bp, Homo sapien
actgttaatgcaatggaagtatgcc

SEQ ID NO: 1348469 - DNA, 25 bp, Homo sapien
gccaaaagatcattgtacacacatg

SEQ ID NO: 1348470 - DNA, 25 bp, Homo sapien
gatcctccaatctaccactatactg

SEQ ID NO: 1348471 - DNA, 25 bp, Homo sapien
cccacacaatgaagcaaatactgta

SEQ ID NO: 1348472 - DNA, 25 bp, Homo sapien
catttgctggaatgtgtacatctac

SEQ ID NO: 1348473 - DNA, 25 bp, Homo sapien
gaaatattaacctcctatcagtagt

SEQ ID NO: 1348474 - DNA, 25 bp, Homo sapien
gatcttcatcaagtcgtctgcatcc

SEQ ID NO: 1348475 - DNA, 25 bp, Homo sapien
ggtggcttcttgcatgatttgcaaa

SEQ ID NO: 1348476 - DNA, 25 bp, Homo sapien
ttcttgcatgatttgcaaatccctg

SEQ ID NO: 1348477 - DNA, 25 bp, Homo sapien
ttgaaatggagctaattcaggagtg

SEQ ID NO: 1348478 - DNA, 25 bp, Homo sapien
tggagctaattcaggagtgaatcct

SEQ ID NO: 1348479 - DNA, 25 bp, Homo sapien
caatacaccgtagtacttcatttaa

SEQ ID NO: 1348480 - DNA, 25 bp, Homo sapien
taaaaggcaaacactcccaaacaga

SEQ ID NO: 1348481 - DNA, 25 bp, Homo sapien
ccaaacaatacaccgtagtacttca

SEQ ID NO: 1348482 - DNA, 25 bp, Homo sapien
caacaaattagcaattacattatac

SEQ ID NO: 1348483 - DNA, 25 bp, Homo sapien
gacttgtctgggcataataggctgc

SEQ ID NO: 1348484 - DNA, 25 bp, Homo sapien
gcactataatctggctgaccacctg

SEQ ID NO: 1348485 - DNA, 25 bp, Homo sapien
cccagtcggagcaggaactgcctga

SEQ ID NO: 1348486 - DNA, 25 bp, Homo sapien
ggctgcttgttgtctataatactca

SEQ ID NO: 1348487 - DNA, 25 bp, Homo sapien
ggctttgtgaaataactaccataga

SEQ ID NO: 1348488 - DNA, 25 bp, Homo sapien
tatttcgtttgtaactcgcttggct

SEQ ID NO: 1348489 - DNA, 25 bp, Homo sapien
catacatataaagcgcatacagcaa

SEQ ID NO: 1348490 - DNA, 25 bp, Homo sapien
tgagtgtctgatgccttatttcccc

SEQ ID NO: 1348491 - DNA, 25 bp, Homo sapien
tgaagtcctagcatcatacccctgc

SEQ ID NO: 1348492 - DNA, 25 bp, Homo sapien
gtgaaagcctgcctagtttggcaaa

SEQ ID NO: 1348493 - DNA, 25 bp, Homo sapien
acttaaattaggctccaaaagctgt

SEQ ID NO: 1348494 - DNA, 25 bp, Homo sapien
tacccctgccactggaaaagtcaac

SEQ ID NO: 1348495 - DNA, 25 bp, Homo sapien
aagatcctgatgacaggtaaggtac

SEQ ID NO: 1348496 - DNA, 25 bp, Homo sapien
aaagatcctgatgacaggtaaggta

SEQ ID NO: 1348497 - DNA, 25 bp, Homo sapien
taagatatacacatgtggccaggcg

SEQ ID NO: 1348498 - DNA, 25 bp, Homo sapien
caaattgactccgtatgatgatgac

SEQ ID NO: 1348499 - DNA, 25 bp, Homo sapien
gcaccattgcttggggagtaagacc

SEQ ID NO: 1348500 - DNA, 25 bp, Homo sapien
ttatagaaaaagacaaattgactcc

SEQ ID NO: 1348501 - DNA, 25 bp, Homo sapien
ggtataatcaacctgtccagctggg

SEQ ID NO: 1348502 - DNA, 25 bp, Homo sapien
cattttcttgtagtactcttcccaa

SEQ ID NO: 1348503 - DNA, 25 bp, Homo sapien
tcttcccaagccttggtataatcaa

SEQ ID NO: 1348504 - DNA, 25 bp, Homo sapien
gtagtactcttcccaagccttggta

SEQ ID NO: 1348505 - DNA, 25 bp, Homo sapien
attttggccgtttccttgggtgcag

SEQ ID NO: 1348506 - DNA, 25 bp, Homo sapien
ttggccgtttccttgggtgcaggag

SEQ ID NO: 1348507 - DNA, 25 bp, Homo sapien
tttggccgtttccttgggtgcagga

SEQ ID NO: 1348508 - DNA, 25 bp, Homo sapien
tcaaaaggatataggcaccaccctg

SEQ ID NO: 1348509 - DNA, 25 bp, Homo sapien
gaagctagaagcaattacacctcag

SEQ ID NO: 1348510 - DNA, 25 bp, Homo sapien
ttgaagaaatagctgactcgagggc

SEQ ID NO: 1348511 - DNA, 25 bp, Homo sapien
ggacaccaggtttctcacgtttgta

SEQ ID NO: 1348512 - DNA, 25 bp, Homo sapien
cacatgtatgatatagatggtaaca

SEQ ID NO: 1348513 - DNA, 25 bp, Homo sapien
gatataattagcttccttcagaact

SEQ ID NO: 1348514 - DNA, 25 bp, Homo sapien
ggtgctccgggtattcttcttacaa

SEQ ID NO: 1348515 - DNA, 25 bp, Homo sapien
aacattaacagctgggctatctggg

SEQ ID NO: 1348516 - DNA, 25 bp, Homo sapien
taatagtgagcgtaataagcagccc

SEQ ID NO: 1348517 - DNA, 25 bp, Homo sapien
tgctgaatttggatccgttcctgcc

SEQ ID NO: 1348518 - DNA, 25 bp, Homo sapien
tgagttgtagttggtgcacctgcag

SEQ ID NO: 1348519 - DNA, 25 bp, Homo sapien
gctgtgcttgctgttgataatagtg

SEQ ID NO: 1348520 - DNA, 25 bp, Homo sapien
caggatgttcaaagcttaagtacag

SEQ ID NO: 1348521 - DNA, 25 bp, Homo sapien
ctgaagtgcgaacagtttgagacct

SEQ ID NO: 1348522 - DNA, 25 bp, Homo sapien
catctcccacatcaactgaagtgcg

SEQ ID NO: 1348523 - DNA, 25 bp, Homo sapien
tacttttcagaaatcactatgcccg

SEQ ID NO: 1348524 - DNA, 25 bp, Homo sapien
cagtggagcaattctcaaggagttc

SEQ ID NO: 1348525 - DNA, 25 bp, Homo sapien
gaagtggtatttctactcccaaatg

SEQ ID NO: 1348526 - DNA, 25 bp, Homo sapien
caggttttagccatggcgtctggcc

SEQ ID NO: 1348527 - DNA, 25 bp, Homo sapien
tccgaagtgctagcgtcacaggttt

SEQ ID NO: 1348528 - DNA, 25 bp, Homo sapien
gaggcagtgcctaacactgttgaaa

SEQ ID NO: 1348529 - DNA, 25 bp, Homo sapien
tccaaaacctatgacactgtgctct

SEQ ID NO: 1348530 - DNA, 25 bp, Homo sapien
tatcaactcataagccaaaggcaag

SEQ ID NO: 1348531 - DNA, 25 bp, Homo sapien
catactacacatttgacagcactgg

SEQ ID NO: 1348532 - DNA, 25 bp, Homo sapien
gctgctgccagtgtggatatgcatt

SEQ ID NO: 1348533 - DNA, 25 bp, Homo sapien
cagtgtggatatgcatttccccatc

SEQ ID NO: 1348534 - DNA, 25 bp, Homo sapien
ctggatcaggaggagcctgctgctg

SEQ ID NO: 1348535 - DNA, 25 bp, Homo sapien
ccccatccctggggagcatatgggg

SEQ ID NO: 1348536 - DNA, 25 bp, Homo sapien
gtccaggattataaggtgcagggtt

SEQ ID NO: 1348537 - DNA, 25 bp, Homo sapien
caggattataaggtgcagggttgta

SEQ ID NO: 1348538 - DNA, 25 bp, Homo sapien
ctggtggtccaggattataaggtgc

SEQ ID NO: 1348539 - DNA, 25 bp, Homo sapien
tggtggtccaggattataaggtgca

SEQ ID NO: 1348540 - DNA, 25 bp, Homo sapien
caatagcagtagcaattaaatgcaa

SEQ ID NO: 1348541 - DNA, 25 bp, Homo sapien
aaactatttcatctgccataataat

SEQ ID NO: 1348542 - DNA, 25 bp, Homo sapien
tcctttagcttgtttgcggacagca

SEQ ID NO: 1348543 - DNA, 25 bp, Homo sapien
taaaattcactaaaatcaatagcag

SEQ ID NO: 1348544 - DNA, 25 bp, Homo sapien
aaaccgcttgggtcctgtatcatcg

SEQ ID NO: 1348545 - DNA, 25 bp, Homo sapien
tctatatctacttgcctaacatgag

SEQ ID NO: 1348546 - DNA, 25 bp, Homo sapien
tgacaatatattcccaaaccgcttg

SEQ ID NO: 1348547 - DNA, 25 bp, Homo sapien
tgagacaaccgtcttgacaatatat

SEQ ID NO: 1348548 - DNA, 25 bp, Homo sapien
tctgagtagttaacacaaccaggcg

SEQ ID NO: 1348549 - DNA, 25 bp, Homo sapien
caaccaggcgacatgttggacaaaa

SEQ ID NO: 1348550 - DNA, 25 bp, Homo sapien
taactgtcctaaaatgctccttctg

SEQ ID NO: 1348551 - DNA, 25 bp, Homo sapien
gaattctgaactgaggcaacccgac

SEQ ID NO: 1348552 - DNA, 25 bp, Homo sapien
caaaaaagcagtcaaagcgtttcat

SEQ ID NO: 1348553 - DNA, 25 bp, Homo sapien
tgttaaaaactccagtaagacactg

SEQ ID NO: 1348554 - DNA, 25 bp, Homo sapien
cattttgtaagacgttccttaagcg

SEQ ID NO: 1348555 - DNA, 25 bp, Homo sapien
ccaaatttgtctgtgcaccagaatc

SEQ ID NO: 1348556 - DNA, 25 bp, Homo sapien
caagtatgttccacaatcctacacc

SEQ ID NO: 1348557 - DNA, 25 bp, Homo sapien
taactacagtctaagggtctacact

SEQ ID NO: 1348558 - DNA, 25 bp, Homo sapien
tatctagccacacccaaatgtaagg

SEQ ID NO: 1348559 - DNA, 25 bp, Homo sapien
tatcatgcctacaggtaacactacc

SEQ ID NO: 1348560 - DNA, 25 bp, Homo sapien
catagtctatctgttgtggagtgcc

SEQ ID NO: 1348561 - DNA, 25 bp, Homo sapien
gagttgccgagcatagtctatctgt

SEQ ID NO: 1348562 - DNA, 25 bp, Homo sapien
tatctgttgtggagtgccacgaatt

SEQ ID NO: 1348563 - DNA, 25 bp, Homo sapien
tttcttctatgagttgccgagcata

SEQ ID NO: 1348564 - DNA, 25 bp, Homo sapien
ttaggatctgcatttggtggaggat

SEQ ID NO: 1348565 - DNA, 25 bp, Homo sapien
gatctgcatttggtggaggatttct

SEQ ID NO: 1348566 - DNA, 25 bp, Homo sapien
ctattcttgcaccagactgctggct

SEQ ID NO: 1348567 - DNA, 25 bp, Homo sapien
tattcttgcaccagactgctggctt

SEQ ID NO: 1348568 - DNA, 25 bp, Homo sapien
cagttttcccagttggcacaataaa

SEQ ID NO: 1348569 - DNA, 25 bp, Homo sapien
ggtcccatgttccagttgccttgac

SEQ ID NO: 1348570 - DNA, 25 bp, Homo sapien
ttcctgtagtccaccaggtggtccc

SEQ ID NO: 1348571 - DNA, 25 bp, Homo sapien
aaattcctgtagtccaccaggtggt

SEQ ID NO: 1348572 - DNA, 25 bp, Homo sapien
gtccaggtccaccaggattaccagc

SEQ ID NO: 1348573 - DNA, 25 bp, Homo sapien
aggtccaggtccaccaggattacca

SEQ ID NO: 1348574 - DNA, 25 bp, Homo sapien
ctcttcctcgaccaccaggtccagg

SEQ ID NO: 1348575 - DNA, 25 bp, Homo sapien
cttcctcgaccaccaggtccaggtc

SEQ ID NO: 1348576 - DNA, 25 bp, Homo sapien
tctggaggtcctgttatttgtgcta

SEQ ID NO: 1348577 - DNA, 25 bp, Homo sapien
gaaggtctgtaataatttctgcagc

SEQ ID NO: 1348578 - DNA, 25 bp, Homo sapien
tatcctttcgggtgttgtcccatca

SEQ ID NO: 1348579 - DNA, 25 bp, Homo sapien
tgcagcatgttgacatcggtctgga

SEQ ID NO: 1348580 - DNA, 25 bp, Homo sapien
cttaaactgaatgcgaacaccagca

SEQ ID NO: 1348581 - DNA, 25 bp, Homo sapien
caatgccaacagcaaatcttggaat

SEQ ID NO: 1348582 - DNA, 25 bp, Homo sapien
tgccaacagcaaatcttggaatggg

SEQ ID NO: 1348583 - DNA, 25 bp, Homo sapien
ctggcttaaactgaatgcgaacacc

SEQ ID NO: 1348584 - DNA, 25 bp, Homo sapien
gaaaccgccttgatcacgaattaac

SEQ ID NO: 1348585 - DNA, 25 bp, Homo sapien
tattcttgacccatactcattccga

SEQ ID NO: 1348586 - DNA, 25 bp, Homo sapien
tactcattccgaacttctctgaaac

SEQ ID NO: 1348587 - DNA, 25 bp, Homo sapien
gatcacgaattaactctaacaccat

SEQ ID NO: 1348588 - DNA, 25 bp, Homo sapien
aactttatatgggtctcctgtaatc

SEQ ID NO: 1348589 - DNA, 25 bp, Homo sapien
ttgaactttatatgggtctcctgta

SEQ ID NO: 1348590 - DNA, 25 bp, Homo sapien
tatgggtctcctgtaatcctaagag

SEQ ID NO: 1348591 - DNA, 25 bp, Homo sapien
atgggtctcctgtaatcctaagagg

SEQ ID NO: 1348592 - DNA, 25 bp, Homo sapien
tttgtcagcaccagtgttctgcggc

SEQ ID NO: 1348593 - DNA, 25 bp, Homo sapien
gttctgcggcccgtcttgaatcata

SEQ ID NO: 1348594 - DNA, 25 bp, Homo sapien
caccagtgttctgcggcccgtcttg

SEQ ID NO: 1348595 - DNA, 25 bp, Homo sapien
ggcccgtcttgaatcataaccattt

SEQ ID NO: 1348596 - DNA, 25 bp, Homo sapien
tcaaaagtagccatttcacaaaaat

SEQ ID NO: 1348597 - DNA, 25 bp, Homo sapien
acagatcaaaagtagccatttcaca

SEQ ID NO: 1348598 - DNA, 25 bp, Homo sapien
taatatatattaacaaaagaagtgg

SEQ ID NO: 1348599 - DNA, 25 bp, Homo sapien
agatcaaaagtagccatttcacaaa

SEQ ID NO: 1348600 - DNA, 25 bp, Homo sapien
tctcccccttttccaatgactaatc

SEQ ID NO: 1348601 - DNA, 25 bp, Homo sapien
tgaagctgtttaatagtttctcccc

SEQ ID NO: 1348602 - DNA, 25 bp, Homo sapien
cctgccttgctagctggaatcatga

SEQ ID NO: 1348603 - DNA, 25 bp, Homo sapien
ccttgctagctggaatcatgatttc

SEQ ID NO: 1348604 - DNA, 25 bp, Homo sapien
ctggtccagtaaccgttttgctgac

SEQ ID NO: 1348605 - DNA, 25 bp, Homo sapien
tcaacaatctggtccagtaaccgtt

SEQ ID NO: 1348606 - DNA, 25 bp, Homo sapien
ggtccatcgccatgatggaagccag

SEQ ID NO: 1348607 - DNA, 25 bp, Homo sapien
tgcatttcccggtccatcgccatga

SEQ ID NO: 1348608 - DNA, 25 bp, Homo sapien
atacaggacctttctggaaggccac

SEQ ID NO: 1348609 - DNA, 25 bp, Homo sapien
cagattcaggtgttccagttaacat

SEQ ID NO: 1348610 - DNA, 25 bp, Homo sapien
tacaggacctttctggaaggccacc

SEQ ID NO: 1348611 - DNA, 25 bp, Homo sapien
tggacagattcaggtgttccagtta

SEQ ID NO: 1348612 - DNA, 25 bp, Homo sapien
gattcctgttgtatgcgtgagatct

SEQ ID NO: 1348613 - DNA, 25 bp, Homo sapien
ttcctgttgtatgcgtgagatctgt

SEQ ID NO: 1348614 - DNA, 25 bp, Homo sapien
cctgttgtatgcgtgagatctgttc

SEQ ID NO: 1348615 - DNA, 25 bp, Homo sapien
gttgtatgcgtgagatctgttcacc

SEQ ID NO: 1348616 - DNA, 25 bp, Homo sapien
tgaatccaaccattccatctggaac

SEQ ID NO: 1348617 - DNA, 25 bp, Homo sapien
attccatctggaactttgtattctt

SEQ ID NO: 1348618 - DNA, 25 bp, Homo sapien
ccattccatctggaactttgtattc

SEQ ID NO: 1348619 - DNA, 25 bp, Homo sapien
aaccattccatctggaactttgtat

SEQ ID NO: 1348620 - DNA, 25 bp, Homo sapien
ctttgctgctgatgcatcggtggta

SEQ ID NO: 1348621 - DNA, 25 bp, Homo sapien
gatgcatcggtggtaactgtgttcc

SEQ ID NO: 1348622 - DNA, 25 bp, Homo sapien
catcggtggtaactgtgttccaaaa

SEQ ID NO: 1348623 - DNA, 25 bp, Homo sapien
gctgctgatgcatcggtggtaactg

SEQ ID NO: 1348624 - DNA, 25 bp, Homo sapien
ggagcaactttcttagcatctggtt

SEQ ID NO: 1348625 - DNA, 25 bp, Homo sapien
attttgaggagcaactttcttagca

SEQ ID NO: 1348626 - DNA, 25 bp, Homo sapien
ttgaggagcaactttcttagcatct

SEQ ID NO: 1348627 - DNA, 25 bp, Homo sapien
aggagcaactttcttagcatctggt

SEQ ID NO: 1348628 - DNA, 25 bp, Homo sapien
tacttcattctcttcacgttcaaaa

SEQ ID NO: 1348629 - DNA, 25 bp, Homo sapien
aattcaaccccaactcagtaatcta

SEQ ID NO: 1348630 - DNA, 25 bp, Homo sapien
tgccaattaagtacaaagcttctcc

SEQ ID NO: 1348631 - DNA, 25 bp, Homo sapien
gaaggtatggtttatcatttgaacc

SEQ ID NO: 1348632 - DNA, 25 bp, Homo sapien
tgcataccttggaacagacaaccta

SEQ ID NO: 1348633 - DNA, 25 bp, Homo sapien
ttagaatgacacaagacaacgtact

SEQ ID NO: 1348634 - DNA, 25 bp, Homo sapien
tattaaagtgtatctgacagtgacc

SEQ ID NO: 1348635 - DNA, 25 bp, Homo sapien
ggctaatgatgcttccacctcagga

SEQ ID NO: 1348636 - DNA, 25 bp, Homo sapien
aaatatgcgcagacacataatccaa

SEQ ID NO: 1348637 - DNA, 25 bp, Homo sapien
atactgaacacaggtaataaataaa

SEQ ID NO: 1348638 - DNA, 25 bp, Homo sapien
tactgaacacaggtaataaataaaa

SEQ ID NO: 1348639 - DNA, 25 bp, Homo sapien
cacaggtaataaataaaaattcctg

SEQ ID NO: 1348640 - DNA, 25 bp, Homo sapien
ctgaacacaggtaataaataaaaat

SEQ ID NO: 1348641 - DNA, 25 bp, Homo sapien
tgtgttgtactgctcggacttgtcc

SEQ ID NO: 1348642 - DNA, 25 bp, Homo sapien
gagggcattccctcccagtgtgttg

SEQ ID NO: 1348643 - DNA, 25 bp, Homo sapien
tgtactgctcggacttgtccaagag

SEQ ID NO: 1348644 - DNA, 25 bp, Homo sapien
cctcccagtgtgttgtactgctcgg

SEQ ID NO: 1348645 - DNA, 25 bp, Homo sapien
ggtataacctgcaacacactagagt

SEQ ID NO: 1348646 - DNA, 25 bp, Homo sapien
tccattcacgtatgagtaaaaccag

SEQ ID NO: 1348647 - DNA, 25 bp, Homo sapien
cccttttaggccaatatacagctta

SEQ ID NO: 1348648 - DNA, 25 bp, Homo sapien
tctggcacaatcctaaaagagggaa

SEQ ID NO: 1348649 - DNA, 25 bp, Homo sapien
tcccccataaccatagtcatttgaa

SEQ ID NO: 1348650 - DNA, 25 bp, Homo sapien
tgtcccccataaccatagtcatttg

SEQ ID NO: 1348651 - DNA, 25 bp, Homo sapien
ccataaccatagtcatttgaattca

SEQ ID NO: 1348652 - DNA, 25 bp, Homo sapien
ccccataaccatagtcatttgaatt

SEQ ID NO: 1348653 - DNA, 25 bp, Homo sapien
caggtggtatgatcaactatagtcc

SEQ ID NO: 1348654 - DNA, 25 bp, Homo sapien
ggaatgtatcctccgaggttaagaa

SEQ ID NO: 1348655 - DNA, 25 bp, Homo sapien
tattggattcaatactatctgtggt

SEQ ID NO: 1348656 - DNA, 25 bp, Homo sapien
atataacctacgcaaatccttcagt

SEQ ID NO: 1348657 - DNA, 25 bp, Homo sapien
tgtgaagaaacgtggacactagaaa

SEQ ID NO: 1348658 - DNA, 25 bp, Homo sapien
tagtagttcccatacaccagacatg

SEQ ID NO: 1348659 - DNA, 25 bp, Homo sapien
gtacctactataggcaaggtcctga

SEQ ID NO: 1348660 - DNA, 25 bp, Homo sapien
taacttgcttatcacaagccttgct

SEQ ID NO: 1348661 - DNA, 25 bp, Homo sapien
gaaagcgtcgttaactcctccacca

SEQ ID NO: 1348662 - DNA, 25 bp, Homo sapien
tctttgaaagcgtcgttaactcctc

SEQ ID NO: 1348663 - DNA, 25 bp, Homo sapien
tttgaaagcgtcgttaactcctcca

SEQ ID NO: 1348664 - DNA, 25 bp, Homo sapien
tgcatctttgaaagcgtcgttaact

SEQ ID NO: 1348665 - DNA, 25 bp, Homo sapien
tgccgcctgttcagagacttcctct

SEQ ID NO: 1348666 - DNA, 25 bp, Homo sapien
tattacattcttgcgcgaccatcgt

SEQ ID NO: 1348667 - DNA, 25 bp, Homo sapien
ggttgcactataagagccgctgccg

SEQ ID NO: 1348668 - DNA, 25 bp, Homo sapien
aaaatggcggccgtcgaagctctat

SEQ ID NO: 1348669 - DNA, 25 bp, Homo sapien
gaggtagtgcggtagaattttccgc

SEQ ID NO: 1348670 - DNA, 25 bp, Homo sapien
aattttccgctatgggtcattctcg

SEQ ID NO: 1348671 - DNA, 25 bp, Homo sapien
gcaacagtgtctcgagagcgctgcc

SEQ ID NO: 1348672 - DNA, 25 bp, Homo sapien
ctcctgaaaacgtctgcccggcgta

SEQ ID NO: 1348673 - DNA, 25 bp, Homo sapien
tcatagttgattctactcatcaaga

SEQ ID NO: 1348674 - DNA, 25 bp, Homo sapien
tgtagtaaatgttatgaatacagaa

SEQ ID NO: 1348675 - DNA, 25 bp, Homo sapien
catcaagatttgaaaactacccttt

SEQ ID NO: 1348676 - DNA, 25 bp, Homo sapien
ttccctggctagattgtagtaaatg

SEQ ID NO: 1348677 - DNA, 25 bp, Homo sapien
ttcttccgttcctctagtctcttga

SEQ ID NO: 1348678 - DNA, 25 bp, Homo sapien
gttcctctagtctcttgacacttct

SEQ ID NO: 1348679 - DNA, 25 bp, Homo sapien
tccttctttgccattcacgtcagta

SEQ ID NO: 1348680 - DNA, 25 bp, Homo sapien
gccattcacgtcagtaattctcaac

SEQ ID NO: 1348681 - DNA, 25 bp, Homo sapien
ctattactactgaagccaaaatcat

SEQ ID NO: 1348682 - DNA, 25 bp, Homo sapien
actattactactgaagccaaaatca

SEQ ID NO: 1348683 - DNA, 25 bp, Homo sapien
cccaggaattttgaagacgacataa

SEQ ID NO: 1348684 - DNA, 25 bp, Homo sapien
gaagacgacataaattacttggaaa

SEQ ID NO: 1348685 - DNA, 25 bp, Homo sapien
aacaatgtgaaactagtacacaaac

SEQ ID NO: 1348686 - DNA, 25 bp, Homo sapien
aactttctggcgtttctgattgata

SEQ ID NO: 1348687 - DNA, 25 bp, Homo sapien
taaagaggtcgcagaagcttatgaa

SEQ ID NO: 1348688 - DNA, 25 bp, Homo sapien
caagccctcaaatttcatccggaca

SEQ ID NO: 1348689 - DNA, 25 bp, Homo sapien
gcttatgaagtattgagtgatccta

SEQ ID NO: 1348690 - DNA, 25 bp, Homo sapien
caagaacaaatctcctcaggcagag

SEQ ID NO: 1348691 - DNA, 25 bp, Homo sapien
tacacctttcatggcgatcctcatg

SEQ ID NO: 1348692 - DNA, 25 bp, Homo sapien
actgatggacaaggaggtaccttcc

SEQ ID NO: 1348693 - DNA, 25 bp, Homo sapien
taccttccggtacacctttcatggc

SEQ ID NO: 1348694 - DNA, 25 bp, Homo sapien
tgatggacaaggaggtaccttccgg

SEQ ID NO: 1348695 - DNA, 25 bp, Homo sapien
cgtgcctgacctctgaaggaatttt

SEQ ID NO: 1348696 - DNA, 25 bp, Homo sapien
gacctctgaaggaattttctaatga

SEQ ID NO: 1348697 - DNA, 25 bp, Homo sapien
tgtgcttagatttttgagttttgaa

SEQ ID NO: 1348698 - DNA, 25 bp, Homo sapien
ctttaccatctggtaaaatttgtgc

SEQ ID NO: 1348699 - DNA, 25 bp, Homo sapien
tatatatatactggatcctatcgcc

SEQ ID NO: 1348700 - DNA, 25 bp, Homo sapien
agttaaaactccctacagaagtgtg

SEQ ID NO: 1348701 - DNA, 25 bp, Homo sapien
gtgtggcacgtcatatggatatacc

SEQ ID NO: 1348702 - DNA, 25 bp, Homo sapien
gaaaagcatcagtcaacgtggtgaa

SEQ ID NO: 1348703 - DNA, 25 bp, Homo sapien
gagcctgaagcaattcccagtgggc

SEQ ID NO: 1348704 - DNA, 25 bp, Homo sapien
ctttgtcatcttgggcaggagaatg

SEQ ID NO: 1348705 - DNA, 25 bp, Homo sapien
tagcagcaaaggttcactacagtgc

SEQ ID NO: 1348706 - DNA, 25 bp, Homo sapien
tcttccttgagagccctagcagcaa

SEQ ID NO: 1348707 - DNA, 25 bp, Homo sapien
tcctcttcagggatggaacctctag

SEQ ID NO: 1348708 - DNA, 25 bp, Homo sapien
agctggcagcctttccgtgtgtaga

SEQ ID NO: 1348709 - DNA, 25 bp, Homo sapien
tgtctcccggacaaggctacaagct

SEQ ID NO: 1348710 - DNA, 25 bp, Homo sapien
caagtggaaagttgccctggctctc

SEQ ID NO: 1348711 - DNA, 25 bp, Homo sapien
gtgcaggtgtccctgtattactttt

SEQ ID NO: 1348712 - DNA, 25 bp, Homo sapien
tgagtgcaggtgtccctgtattact

SEQ ID NO: 1348713 - DNA, 25 bp, Homo sapien
gctgagtgcaggtgtccctgtatta

SEQ ID NO: 1348714 - DNA, 25 bp, Homo sapien
agcactggctgagtgcaggtgtccc

SEQ ID NO: 1348715 - DNA, 25 bp, Homo sapien
taggatgagggactacgtaactttc

SEQ ID NO: 1348716 - DNA, 25 bp, Homo sapien
tattgttctgtagcgtcggcatcct

SEQ ID NO: 1348717 - DNA, 25 bp, Homo sapien
tcctcaggcgttcacgtaaatagag

SEQ ID NO: 1348718 - DNA, 25 bp, Homo sapien
gccagcgtgtttgccttctaaggcg

SEQ ID NO: 1348719 - DNA, 25 bp, Homo sapien
ctgacccgacgcagccaggcggaag

SEQ ID NO: 1348720 - DNA, 25 bp, Homo sapien
aggtcggggccctgacccgacgcag

SEQ ID NO: 1348721 - DNA, 25 bp, Homo sapien
gaggtcggggccctgacccgacgca

SEQ ID NO: 1348722 - DNA, 25 bp, Homo sapien
gggccctgacccgacgcagccaggc

SEQ ID NO: 1348723 - DNA, 25 bp, Homo sapien
agcgcaggtgggcccgcgctctcgg

SEQ ID NO: 1348724 - DNA, 25 bp, Homo sapien
cagcgcaggtgggcccgcgctctcg

SEQ ID NO: 1348725 - DNA, 25 bp, Homo sapien
gcgcaggtgggcccgcgctctcggc

SEQ ID NO: 1348726 - DNA, 25 bp, Homo sapien
agaaggccaagtccaaggagaccgc

SEQ ID NO: 1348727 - DNA, 25 bp, Homo sapien
caaggagaccgccgggctggtggag

SEQ ID NO: 1348728 - DNA, 25 bp, Homo sapien
ggcgggagcctctcagcgtcccggg

SEQ ID NO: 1348729 - DNA, 25 bp, Homo sapien
ctggtggagggcgagccgacgggcg

SEQ ID NO: 1348730 - DNA, 25 bp, Homo sapien
atccaggagctctacgcccagatcg

SEQ ID NO: 1348731 - DNA, 25 bp, Homo sapien
tctcgccgtcggaggtaaggcgcca

SEQ ID NO: 1348732 - DNA, 25 bp, Homo sapien
gatcgcgggcgcgtttgaaatctcg

SEQ ID NO: 1348733 - DNA, 25 bp, Homo sapien
agtggagggcttctccagcatccag

SEQ ID NO: 1348734 - DNA, 25 bp, Homo sapien
gaaagtgagtgtgccttccctggaa

SEQ ID NO: 1348735 - DNA, 25 bp, Homo sapien
gaaaatttaacttggcaggaccgca

SEQ ID NO: 1348736 - DNA, 25 bp, Homo sapien
aatccgatgccgtgttgagtccgcc

SEQ ID NO: 1348737 - DNA, 25 bp, Homo sapien
aatgtgtttgctccagatgtcccgg

SEQ ID NO: 1348738 - DNA, 25 bp, Homo sapien
aggagattccattttcatagcccat

SEQ ID NO: 1348739 - DNA, 25 bp, Homo sapien
aaggagattccattttcatagccca

SEQ ID NO: 1348740 - DNA, 25 bp, Homo sapien
caaggagattccattttcatagccc

SEQ ID NO: 1348741 - DNA, 25 bp, Homo sapien
tacatgaaactctcgagctatggtc

SEQ ID NO: 1348742 - DNA, 25 bp, Homo sapien
taaaatatccaggttacatgaaact

SEQ ID NO: 1348743 - DNA, 25 bp, Homo sapien
caggttacatgaaactctcgagcta

SEQ ID NO: 1348744 - DNA, 25 bp, Homo sapien
gaaactctcgagctatggtcataca

SEQ ID NO: 1348745 - DNA, 25 bp, Homo sapien
ggccctcactgaaactttgaactcc

SEQ ID NO: 1348746 - DNA, 25 bp, Homo sapien
gactcacgtaactaaacattctggg

SEQ ID NO: 1348747 - DNA, 25 bp, Homo sapien
cattctgggataggactgtgtatca

SEQ ID NO: 1348748 - DNA, 25 bp, Homo sapien
ttaggatgccataatacctcagcgt

SEQ ID NO: 1348749 - DNA, 25 bp, Homo sapien
gaggatcgcttaggcccacaagttt

SEQ ID NO: 1348750 - DNA, 25 bp, Homo sapien
tgatgaccctagaaagcacatattt

SEQ ID NO: 1348751 - DNA, 25 bp, Homo sapien
cagaagagggaggatactgtttcca

SEQ ID NO: 1348752 - DNA, 25 bp, Homo sapien
cacatatttggtagcctttgcatac

SEQ ID NO: 1348753 - DNA, 25 bp, Homo sapien
tgttctcaagcacaaagtagcacag

SEQ ID NO: 1348754 - DNA, 25 bp, Homo sapien
taaacctgtagcatctgatattccc

SEQ ID NO: 1348755 - DNA, 25 bp, Homo sapien
acctgtagcatctgatattcccagg

SEQ ID NO: 1348756 - DNA, 25 bp, Homo sapien
agatcagatgagattggtgcattca

SEQ ID NO: 1348757 - DNA, 25 bp, Homo sapien
aagatcagatgagattggtgcattc

SEQ ID NO: 1348758 - DNA, 25 bp, Homo sapien
cagatctgattagcatgaaatataa

SEQ ID NO: 1348759 - DNA, 25 bp, Homo sapien
tctcagtatttcttagctttcagaa

SEQ ID NO: 1348760 - DNA, 25 bp, Homo sapien
tcttaatgcaaattacactgacatc

SEQ ID NO: 1348761 - DNA, 25 bp, Homo sapien
atcacaagtgtgatactgatttaac

SEQ ID NO: 1348762 - DNA, 25 bp, Homo sapien
gaaaatgctgtgtgctgccatggta

SEQ ID NO: 1348763 - DNA, 25 bp, Homo sapien
gcatggcatgaccaagcatctttgt

SEQ ID NO: 1348764 - DNA, 25 bp, Homo sapien
gaaatagatttccttccagtggaaa

SEQ ID NO: 1348765 - DNA, 25 bp, Homo sapien
aaactttagttgtattgccatccac

SEQ ID NO: 1348766 - DNA, 25 bp, Homo sapien
gctgccacttcaagtcttctgtccg

SEQ ID NO: 1348767 - DNA, 25 bp, Homo sapien
tgaatagccagtcaagcatttgtta

SEQ ID NO: 1348768 - DNA, 25 bp, Homo sapien
ttggctgaccagtaggtggcattgc

SEQ ID NO: 1348769 - DNA, 25 bp, Homo sapien
tgtccgcttgggaacctgaatagcc

SEQ ID NO: 1348770 - DNA, 25 bp, Homo sapien
agacaatttcccgtgactaactttg

SEQ ID NO: 1348771 - DNA, 25 bp, Homo sapien
aaaacctggatagtacaattgtgag

SEQ ID NO: 1348772 - DNA, 25 bp, Homo sapien
tccggccatatcaaaatggaggcaa

SEQ ID NO: 1348773 - DNA, 25 bp, Homo sapien
ccttgtgcctttgtctatttttgaa

SEQ ID NO: 1348774 - DNA, 25 bp, Homo sapien
gaaggatctccacagagtgagatca

SEQ ID NO: 1348775 - DNA, 25 bp, Homo sapien
catgtctcttaaacaacagctgggc

SEQ ID NO: 1348776 - DNA, 25 bp, Homo sapien
cagaaggatctccacagagtgagat

SEQ ID NO: 1348777 - DNA, 25 bp, Homo sapien
taaacaacagctgggcttggtagct

SEQ ID NO: 1348778 - DNA, 25 bp, Homo sapien
cctggtcagaaagaagttcacctgt

SEQ ID NO: 1348779 - DNA, 25 bp, Homo sapien
tgcagattctcacctggtcagaaag

SEQ ID NO: 1348780 - DNA, 25 bp, Homo sapien
gaagttcacctgtgggcccaaagga

SEQ ID NO: 1348781 - DNA, 25 bp, Homo sapien
ctttgcagattctcacctggtcaga

SEQ ID NO: 1348782 - DNA, 25 bp, Homo sapien
aggcttaactctcagattagcatca

SEQ ID NO: 1348783 - DNA, 25 bp, Homo sapien
agaagttctcctcctatgtagagaa

SEQ ID NO: 1348784 - DNA, 25 bp, Homo sapien
tgcatagtaaggcttaactctcaga

SEQ ID NO: 1348785 - DNA, 25 bp, Homo sapien
tgtagagaagacacccctgtgcata

SEQ ID NO: 1348786 - DNA, 25 bp, Homo sapien
cattgtcctggtgaccggtagtaac

SEQ ID NO: 1348787 - DNA, 25 bp, Homo sapien
attgtcctggtgaccggtagtaact

SEQ ID NO: 1348788 - DNA, 25 bp, Homo sapien
tcattgtcctggtgaccggtagtaa

SEQ ID NO: 1348789 - DNA, 25 bp, Homo sapien
gtcattgtcctggtgaccggtagta

SEQ ID NO: 1348790 - DNA, 25 bp, Homo sapien
gtgacctctgttatggtcattaagg

SEQ ID NO: 1348791 - DNA, 25 bp, Homo sapien
tctgttatggtcattaaggaaaact

SEQ ID NO: 1348792 - DNA, 25 bp, Homo sapien
tctgggtagtgacctctgttatggt

SEQ ID NO: 1348793 - DNA, 25 bp, Homo sapien
gggtcattctgggtagtgacctctg

SEQ ID NO: 1348794 - DNA, 25 bp, Homo sapien
gtttttcatgacgttttacatcgtg

SEQ ID NO: 1348795 - DNA, 25 bp, Homo sapien
gaaaagatctgtgaacaaatggttg

SEQ ID NO: 1348796 - DNA, 25 bp, Homo sapien
taccctttggtctttttgcctgcat

SEQ ID NO: 1348797 - DNA, 25 bp, Homo sapien
caaatggttgactcatgctttttat

SEQ ID NO: 1348798 - DNA, 25 bp, Homo sapien
ttattttgtgcactgttaccctttg

SEQ ID NO: 1348799 - DNA, 25 bp, Homo sapien
actgggagacaccttctagcagagg

SEQ ID NO: 1348800 - DNA, 25 bp, Homo sapien
ttctagcagaggctgacagacacat

SEQ ID NO: 1348801 - DNA, 25 bp, Homo sapien
gactgggagacaccttctagcagag

SEQ ID NO: 1348802 - DNA, 25 bp, Homo sapien
gaagaatgggttctgagccactgtg

SEQ ID NO: 1348803 - DNA, 25 bp, Homo sapien
gaatgtgctgtcttgctgagccttg

SEQ ID NO: 1348804 - DNA, 25 bp, Homo sapien
taggtgggagattcccatatctcct

SEQ ID NO: 1348805 - DNA, 25 bp, Homo sapien
tgagccttgagtgtctcacccaagc

SEQ ID NO: 1348806 - DNA, 25 bp, Homo sapien
aatgccatctcagataggtgggaga

SEQ ID NO: 1348807 - DNA, 25 bp, Homo sapien
aagatggtttattctttggattttg

SEQ ID NO: 1348808 - DNA, 25 bp, Homo sapien
attttgccctccttttcttgactct

SEQ ID NO: 1348809 - DNA, 25 bp, Homo sapien
tgaagatggtttattctttggattt

SEQ ID NO: 1348810 - DNA, 25 bp, Homo sapien
tggattttgccctccttttcttgac

SEQ ID NO: 1348811 - DNA, 25 bp, Homo sapien
tcagaagatagaaggaagagcagct

SEQ ID NO: 1348812 - DNA, 25 bp, Homo sapien
ttgcacctcccctttttgcacaggg

SEQ ID NO: 1348813 - DNA, 25 bp, Homo sapien
agctgccggccctctttgggttgca

SEQ ID NO: 1348814 - DNA, 25 bp, Homo sapien
catctgcccgtagcttgccaggtct

SEQ ID NO: 1348815 - DNA, 25 bp, Homo sapien
gcaaaagcccatgggttggttgact

SEQ ID NO: 1348816 - DNA, 25 bp, Homo sapien
gggtgtctgattgtctcctccacag

SEQ ID NO: 1348817 - DNA, 25 bp, Homo sapien
ggtgtctgattgtctcctccacagc

SEQ ID NO: 1348818 - DNA, 25 bp, Homo sapien
catgggttggttgactggtgttctt

SEQ ID NO: 1348819 - DNA, 25 bp, Homo sapien
tggaaggtaagcaacaagctgctgg

SEQ ID NO: 1348820 - DNA, 25 bp, Homo sapien
tttaggcacctcaccttccgcgtca

SEQ ID NO: 1348821 - DNA, 25 bp, Homo sapien
gagcgatgacgagctcatcccttcc

SEQ ID NO: 1348822 - DNA, 25 bp, Homo sapien
ctgtgagtggctgagagcgatgacg

SEQ ID NO: 1348823 - DNA, 25 bp, Homo sapien
aactgtgactcaattaagcatcctt

SEQ ID NO: 1348824 - DNA, 25 bp, Homo sapien
ctgtgactcaattaagcatcctttc

SEQ ID NO: 1348825 - DNA, 25 bp, Homo sapien
gtgactcaattaagcatcctttctt

SEQ ID NO: 1348826 - DNA, 25 bp, Homo sapien
caggtagcatatttatagcagtgaa

SEQ ID NO: 1348827 - DNA, 25 bp, Homo sapien
ttccaaccagctggcacctatgctc

SEQ ID NO: 1348828 - DNA, 25 bp, Homo sapien
tccaaccagctggcacctatgctca

SEQ ID NO: 1348829 - DNA, 25 bp, Homo sapien
ggcacctatgctcatcctgcctgct

SEQ ID NO: 1348830 - DNA, 25 bp, Homo sapien
tagttctgtgccagtccacgagtgt

SEQ ID NO: 1348831 - DNA, 25 bp, Homo sapien
ttccctattaaggatatgcttatgc

SEQ ID NO: 1348832 - DNA, 25 bp, Homo sapien
tgcttatgcttgtcccataaaagga

SEQ ID NO: 1348833 - DNA, 25 bp, Homo sapien
ggtcccatagcatgagcatagctct

SEQ ID NO: 1348834 - DNA, 25 bp, Homo sapien
aaaggagaacttgagactccactga

SEQ ID NO: 1348835 - DNA, 25 bp, Homo sapien
aaggagaacttgagactccactgac

SEQ ID NO: 1348836 - DNA, 25 bp, Homo sapien
gagaacttgagactccactgaccct

SEQ ID NO: 1348837 - DNA, 25 bp, Homo sapien
ggagaacttgagactccactgaccc

SEQ ID NO: 1348838 - DNA, 25 bp, Homo sapien
tggaatgggcccgtttgtcactaaa

SEQ ID NO: 1348839 - DNA, 25 bp, Homo sapien
gaagtcatctatgtccatggaatgg

SEQ ID NO: 1348840 - DNA, 25 bp, Homo sapien
ctgctatactgaaatcttctggcaa

SEQ ID NO: 1348841 - DNA, 25 bp, Homo sapien
tgctatactgaaatcttctggcaat

SEQ ID NO: 1348842 - DNA, 25 bp, Homo sapien
ccgaactgaggcttgctgctttctg

SEQ ID NO: 1348843 - DNA, 25 bp, Homo sapien
cccacaaagatagggctttccatgg

SEQ ID NO: 1348844 - DNA, 25 bp, Homo sapien
ccatggactgtgttggataacaagc

SEQ ID NO: 1348845 - DNA, 25 bp, Homo sapien
ataacaagccttaggtcccacgccg

SEQ ID NO: 1348846 - DNA, 25 bp, Homo sapien
ggaccaggaagctctagactcaagg

SEQ ID NO: 1348847 - DNA, 25 bp, Homo sapien
catccacatagccatgagggatggt

SEQ ID NO: 1348848 - DNA, 25 bp, Homo sapien
gcccttaaatgtacttccaggaatg

SEQ ID NO: 1348849 - DNA, 25 bp, Homo sapien
ggagcactagcttcaaggaatcaat

SEQ ID NO: 1348850 - DNA, 25 bp, Homo sapien
ctcctctaggtgcatcccctcctca

SEQ ID NO: 1348851 - DNA, 25 bp, Homo sapien
acactgggtgagctctgatagtctg

SEQ ID NO: 1348852 - DNA, 25 bp, Homo sapien
gggtgagctctgatagtctgctcaa

SEQ ID NO: 1348853 - DNA, 25 bp, Homo sapien
agctctgatagtctgctcaaggtca

SEQ ID NO: 1348854 - DNA, 25 bp, Homo sapien
ggcttggcttgtgttcactagggca

SEQ ID NO: 1348855 - DNA, 25 bp, Homo sapien
tagttgtaactggtatgtcccttgc

SEQ ID NO: 1348856 - DNA, 25 bp, Homo sapien
tcatctatggctgcctgtcaaagga

SEQ ID NO: 1348857 - DNA, 25 bp, Homo sapien
tgtcaaaggaagctaccttcagtga

SEQ ID NO: 1348858 - DNA, 25 bp, Homo sapien
cccatctatttcccagtaatactgg

SEQ ID NO: 1348859 - DNA, 25 bp, Homo sapien
taaatctccggatttgtcacacttt

SEQ ID NO: 1348860 - DNA, 25 bp, Homo sapien
tctccggatttgtcacactttccca

SEQ ID NO: 1348861 - DNA, 25 bp, Homo sapien
cccagtaatactgggctaagacagg

SEQ ID NO: 1348862 - DNA, 25 bp, Homo sapien
tccatcagttggataagctcttcca

SEQ ID NO: 1348863 - DNA, 25 bp, Homo sapien
ccaacaactagctcctgagaggaag

SEQ ID NO: 1348864 - DNA, 25 bp, Homo sapien
gcagagaatgcccaattattaccaa

SEQ ID NO: 1348865 - DNA, 25 bp, Homo sapien
agaaaatgcagagaatgcccaatta

SEQ ID NO: 1348866 - DNA, 25 bp, Homo sapien
ccgaccacttaactgctttgtccat

SEQ ID NO: 1348867 - DNA, 25 bp, Homo sapien
ccacataaggagaggtggccccgac

SEQ ID NO: 1348868 - DNA, 25 bp, Homo sapien
agaggtggccccgaccacttaactg

SEQ ID NO: 1348869 - DNA, 25 bp, Homo sapien
tggccccgaccacttaactgctttg

SEQ ID NO: 1348870 - DNA, 25 bp, Homo sapien
gaaagtcacaattggtgcaagtgag

SEQ ID NO: 1348871 - DNA, 25 bp, Homo sapien
catcaaattgaccacatccatggat

SEQ ID NO: 1348872 - DNA, 25 bp, Homo sapien
caagtgagtgctgaggtggtccaat

SEQ ID NO: 1348873 - DNA, 25 bp, Homo sapien
ccttgaatttcgatgtgaaagtcac

SEQ ID NO: 1348874 - DNA, 25 bp, Homo sapien
agggtcagtggtccagttctcaaac

SEQ ID NO: 1348875 - DNA, 25 bp, Homo sapien
ccagggtataagactttgggcctat

SEQ ID NO: 1348876 - DNA, 25 bp, Homo sapien
gttctcaaactgacaaatattcttc

SEQ ID NO: 1348877 - DNA, 25 bp, Homo sapien
ccactgctctggtagcagggtcagt

SEQ ID NO: 1348878 - DNA, 25 bp, Homo sapien
ggcgttggcacctgttgtttattta

SEQ ID NO: 1348879 - DNA, 25 bp, Homo sapien
cattcaaatggtgtgatttaacctt

SEQ ID NO: 1348880 - DNA, 25 bp, Homo sapien
tcttgccatagtctggcgttggcac

SEQ ID NO: 1348881 - DNA, 25 bp, Homo sapien
ttgtttatttagatcattcaaatgg

SEQ ID NO: 1348882 - DNA, 25 bp, Homo sapien
tatatgtttccatagacccacccga

SEQ ID NO: 1348883 - DNA, 25 bp, Homo sapien
tccatagacccacccgaaagcttta

SEQ ID NO: 1348884 - DNA, 25 bp, Homo sapien
ggtatatgtttccatagacccaccc

SEQ ID NO: 1348885 - DNA, 25 bp, Homo sapien
tgtttccatagacccacccgaaagc

SEQ ID NO: 1348886 - DNA, 25 bp, Homo sapien
gcagagggatcccaggagccgcgcg

SEQ ID NO: 1348887 - DNA, 25 bp, Homo sapien
ggcgcccgatcaggatctccgcgct

SEQ ID NO: 1348888 - DNA, 25 bp, Homo sapien
tttccgcgctaagggaacgagtgcg

SEQ ID NO: 1348889 - DNA, 25 bp, Homo sapien
ctccgcgctgggatcggtggaactt

SEQ ID NO: 1348890 - DNA, 25 bp, Homo sapien
gctgctcgggaaacgccaatcgaat

SEQ ID NO: 1348891 - DNA, 25 bp, Homo sapien
gtaagacctggagaaggcgaccgtc

SEQ ID NO: 1348892 - DNA, 25 bp, Homo sapien
tccagaggctgatcccaatgcatcg

SEQ ID NO: 1348893 - DNA, 25 bp, Homo sapien
ggctgagcctgacactgagtttgga

SEQ ID NO: 1348894 - DNA, 25 bp, Homo sapien
gtaaacgactgctttctgagatctt

SEQ ID NO: 1348895 - DNA, 25 bp, Homo sapien
tagacaatgattgatggcctctctt

SEQ ID NO: 1348896 - DNA, 25 bp, Homo sapien
tcttaaacaaaaggacttactgcaa

SEQ ID NO: 1348897 - DNA, 25 bp, Homo sapien
cattatcagtgttatgcaaatatac

SEQ ID NO: 1348898 - DNA, 25 bp, Homo sapien
ccaagttaaggctaaggctaagaga

SEQ ID NO: 1348899 - DNA, 25 bp, Homo sapien
tcttcaaaatcatgggtggtcagga

SEQ ID NO: 1348900 - DNA, 25 bp, Homo sapien
taagtcacaactgtggtgtagagag

SEQ ID NO: 1348901 - DNA, 25 bp, Homo sapien
ggacaatttatagaactgattccat

SEQ ID NO: 1348902 - DNA, 25 bp, Homo sapien
tgttgcatgtagcttggcgatttac

SEQ ID NO: 1348903 - DNA, 25 bp, Homo sapien
caatgtgcacatctgacttaagagt

SEQ ID NO: 1348904 - DNA, 25 bp, Homo sapien
gaataatagactggaacatctacca

SEQ ID NO: 1348905 - DNA, 25 bp, Homo sapien
ttttgaactgggtaaggcattatcc

SEQ ID NO: 1348906 - DNA, 25 bp, Homo sapien
ggacttcaacttgttactggcacat

SEQ ID NO: 1348907 - DNA, 25 bp, Homo sapien
tattgctagcttcacctgtatacca

SEQ ID NO: 1348908 - DNA, 25 bp, Homo sapien
ttgggtcagaatataaatgctggga

SEQ ID NO: 1348909 - DNA, 25 bp, Homo sapien
gcctactctgagtttagaacccaaa

SEQ ID NO: 1348910 - DNA, 25 bp, Homo sapien
gctcctcttgagatgtggtgttctg

SEQ ID NO: 1348911 - DNA, 25 bp, Homo sapien
ctcctcttgagatgtggtgttctgc

SEQ ID NO: 1348912 - DNA, 25 bp, Homo sapien
tcctcttgagatgtggtgttctgca

SEQ ID NO: 1348913 - DNA, 25 bp, Homo sapien
cctcttgagatgtggtgttctgcat

SEQ ID NO: 1348914 - DNA, 25 bp, Homo sapien
gttaaactgttgtgctatgaacaca

SEQ ID NO: 1348915 - DNA, 25 bp, Homo sapien
ccaaatcaggatcattgggaaatcc

SEQ ID NO: 1348916 - DNA, 25 bp, Homo sapien
aagcctgatctaacccctagaaaca

SEQ ID NO: 1348917 - DNA, 25 bp, Homo sapien
accgtggctgctcgataaatcagac

SEQ ID NO: 1348918 - DNA, 25 bp, Homo sapien
cctggtaatgagcaagcatacttgc

SEQ ID NO: 1348919 - DNA, 25 bp, Homo sapien
gttctttgagaaacagcgtggattt

SEQ ID NO: 1348920 - DNA, 25 bp, Homo sapien
caggatgattgattgagccttggag

SEQ ID NO: 1348921 - DNA, 25 bp, Homo sapien
tagagctatgtgagtactaatcaca

SEQ ID NO: 1348922 - DNA, 25 bp, Homo sapien
catttgacccaacatcctttaggag

SEQ ID NO: 1348923 - DNA, 25 bp, Homo sapien
cctttaggagcataaatgttgacac

SEQ ID NO: 1348924 - DNA, 25 bp, Homo sapien
tgtgctaaaatggacagtattggca

SEQ ID NO: 1348925 - DNA, 25 bp, Homo sapien
tacggttaagcaagatgtacagctc

SEQ ID NO: 1348926 - DNA, 25 bp, Homo sapien
tgggttgtaaccctcatgcttggcc

SEQ ID NO: 1348927 - DNA, 25 bp, Homo sapien
ttgttcccgactagctgccttgcac

SEQ ID NO: 1348928 - DNA, 25 bp, Homo sapien
gatacagagagcaatttatagccaa

SEQ ID NO: 1348929 - DNA, 25 bp, Homo sapien
gagttctatgaggtatgcaggccca

SEQ ID NO: 1348930 - DNA, 25 bp, Homo sapien
tctgtattgcagctagaggaagtcc

SEQ ID NO: 1348931 - DNA, 25 bp, Homo sapien
gatctattaaatacctggcagctct

SEQ ID NO: 1348932 - DNA, 25 bp, Homo sapien
ctctgagacgaatgctatgggctgc

SEQ ID NO: 1348933 - DNA, 25 bp, Homo sapien
tctttctgacatctcggtggttagc

SEQ ID NO: 1348934 - DNA, 25 bp, Homo sapien
cagcgttcaacatgtctaagcaagg

SEQ ID NO: 1348935 - DNA, 25 bp, Homo sapien
ggttttctgataggagccaagatca

SEQ ID NO: 1348936 - DNA, 25 bp, Homo sapien
tgggttttctgataggagccaagat

SEQ ID NO: 1348937 - DNA, 25 bp, Homo sapien
aatctctatatcatgtctgtgaagg

SEQ ID NO: 1348938 - DNA, 25 bp, Homo sapien
atttcattacttcaactcggttagg

SEQ ID NO: 1348939 - DNA, 25 bp, Homo sapien
ctgtatgtccagagacgacgtgaga

SEQ ID NO: 1348940 - DNA, 25 bp, Homo sapien
cagtttatcatttgtggactcaaat

SEQ ID NO: 1348941 - DNA, 25 bp, Homo sapien
tgtggactcaaatgacaagactgta

SEQ ID NO: 1348942 - DNA, 25 bp, Homo sapien
agaggcaagcttgtaattggcaatg

SEQ ID NO: 1348943 - DNA, 25 bp, Homo sapien
tgaccaagaagaggcaagcttgtaa

SEQ ID NO: 1348944 - DNA, 25 bp, Homo sapien
gaagaggcaagcttgtaattggcaa

SEQ ID NO: 1348945 - DNA, 25 bp, Homo sapien
gcaagcttgtaattggcaatgagac

SEQ ID NO: 1348946 - DNA, 25 bp, Homo sapien
catgagcagtgctacacgtggccaa

SEQ ID NO: 1348947 - DNA, 25 bp, Homo sapien
tttagagacccacatatggcatatg

SEQ ID NO: 1348948 - DNA, 25 bp, Homo sapien
tctgggacctgatcaatgcattctt

SEQ ID NO: 1348949 - DNA, 25 bp, Homo sapien
gatccttgagcacagtagctttgcc

SEQ ID NO: 1348950 - DNA, 25 bp, Homo sapien
gactcaatcactgcctaaaggtcag

SEQ ID NO: 1348951 - DNA, 25 bp, Homo sapien
ccacagcagtaggttaagtacacaa

SEQ ID NO: 1348952 - DNA, 25 bp, Homo sapien
cccattcatgaaggtagagtcatta

SEQ ID NO: 1348953 - DNA, 25 bp, Homo sapien
tccaagaccagggagttggcagatt

SEQ ID NO: 1348954 - DNA, 25 bp, Homo sapien
tatagactcgggcacttacacccct

SEQ ID NO: 1348955 - DNA, 25 bp, Homo sapien
ttgctcccctgccagatatagactc

SEQ ID NO: 1348956 - DNA, 25 bp, Homo sapien
cagatatagactcgggcacttacac

SEQ ID NO: 1348957 - DNA, 25 bp, Homo sapien
cctgccagatatagactcgggcact

SEQ ID NO: 1348958 - DNA, 25 bp, Homo sapien
caagctgagggctgagaatcaccat

SEQ ID NO: 1348959 - DNA, 25 bp, Homo sapien
aaaagtcactgactattacaagctg

SEQ ID NO: 1348960 - DNA, 25 bp, Homo sapien
cccaaccactctgggaaaagtcact

SEQ ID NO: 1348961 - DNA, 25 bp, Homo sapien
taaatgtagtaacccaaccactctg

SEQ ID NO: 1348962 - DNA, 25 bp, Homo sapien
atacaaggattcttagaattccaca

SEQ ID NO: 1348963 - DNA, 25 bp, Homo sapien
catacaaggattcttagaattccac

SEQ ID NO: 1348964 - DNA, 25 bp, Homo sapien
tcatacaaggattcttagaattcca

SEQ ID NO: 1348965 - DNA, 25 bp, Homo sapien
tgaatgaacgggaacttctcttaga

SEQ ID NO: 1348966 - DNA, 25 bp, Homo sapien
gtgctgaatgaacgggaacttctct

SEQ ID NO: 1348967 - DNA, 25 bp, Homo sapien
cgggaacttctcttagagctcagct

SEQ ID NO: 1348968 - DNA, 25 bp, Homo sapien
gaacgggaacttctcttagagctca

SEQ ID NO: 1348969 - DNA, 25 bp, Homo sapien
caacacaggtgacacatgtcgatac

SEQ ID NO: 1348970 - DNA, 25 bp, Homo sapien
gactgcaacacaggtgacacatgtc

SEQ ID NO: 1348971 - DNA, 25 bp, Homo sapien
aaatgtgactgcaacacaggtgaca

SEQ ID NO: 1348972 - DNA, 25 bp, Homo sapien
tgcaacacaggtgacacatgtcgat

SEQ ID NO: 1348973 - DNA, 25 bp, Homo sapien
tatactgctgactcttaatgacttt

SEQ ID NO: 1348974 - DNA, 25 bp, Homo sapien
cttaatgactttcttgactgttaaa

SEQ ID NO: 1348975 - DNA, 25 bp, Homo sapien
aactatactgctgactcttaatgac

SEQ ID NO: 1348976 - DNA, 25 bp, Homo sapien
ctgcaaaactatactgctgactctt

SEQ ID NO: 1348977 - DNA, 25 bp, Homo sapien
tccatttgtcttcattacttaattc

SEQ ID NO: 1348978 - DNA, 25 bp, Homo sapien
gagtttcccacacttatgattgccc

SEQ ID NO: 1348979 - DNA, 25 bp, Homo sapien
cctaagaagtctaagctcatttata

SEQ ID NO: 1348980 - DNA, 25 bp, Homo sapien
ttcaagctcccatattccaattgtc

SEQ ID NO: 1348981 - DNA, 25 bp, Homo sapien
aggactcagggacacacgcgctcat

SEQ ID NO: 1348982 - DNA, 25 bp, Homo sapien
ctcagggacacacgcgctcatcctg

SEQ ID NO: 1348983 - DNA, 25 bp, Homo sapien
gccagggcagatttgaaggactcag

SEQ ID NO: 1348984 - DNA, 25 bp, Homo sapien
cagccagggcagatttgaaggactc

SEQ ID NO: 1348985 - DNA, 25 bp, Homo sapien
tcagtttttgctgagtgcctctcac

SEQ ID NO: 1348986 - DNA, 25 bp, Homo sapien
ttcagtttttgctgagtgcctctca

SEQ ID NO: 1348987 - DNA, 25 bp, Homo sapien
caaaactttactggatttccacatg

SEQ ID NO: 1348988 - DNA, 25 bp, Homo sapien
accaaggcatgaggtgctacaaaac

SEQ ID NO: 1348989 - DNA, 25 bp, Homo sapien
tttccacatgtgagcaattttgtga

SEQ ID NO: 1348990 - DNA, 25 bp, Homo sapien
gagaatgtaatgatcttgattcttc

SEQ ID NO: 1348991 - DNA, 25 bp, Homo sapien
agttgcccatttgtcattattactg

SEQ ID NO: 1348992 - DNA, 25 bp, Homo sapien
ccatttgtcattattactggggaca

SEQ ID NO: 1348993 - DNA, 25 bp, Homo sapien
ttgcccatttgtcattattactggg

SEQ ID NO: 1348994 - DNA, 25 bp, Homo sapien
gcccatttgtcattattactgggga

SEQ ID NO: 1348995 - DNA, 25 bp, Homo sapien
atacactctgcccttcttactttct

SEQ ID NO: 1348996 - DNA, 25 bp, Homo sapien
aattctgagaaactaagcaagactt

SEQ ID NO: 1348997 - DNA, 25 bp, Homo sapien
atctttgacattatacactctgccc

SEQ ID NO: 1348998 - DNA, 25 bp, Homo sapien
gaaactaagcaagactttgtaaata

SEQ ID NO: 1348999 - DNA, 25 bp, Homo sapien
gaatggaaaactgtaacactagtac

SEQ ID NO: 1349000 - DNA, 25 bp, Homo sapien
tcatttcaggacagaatggaaaact

SEQ ID NO: 1349001 - DNA, 25 bp, Homo sapien
cagaatggaaaactgtaacactagt

SEQ ID NO: 1349002 - DNA, 25 bp, Homo sapien
ggacagaatggaaaactgtaacact

SEQ ID NO: 1349003 - DNA, 25 bp, Homo sapien
aatggttgactgaagccgacatagc

SEQ ID NO: 1349004 - DNA, 25 bp, Homo sapien
agagaaaattggctgttgacaatgg

SEQ ID NO: 1349005 - DNA, 25 bp, Homo sapien
gacaatggttgactgaagccgacat

SEQ ID NO: 1349006 - DNA, 25 bp, Homo sapien
aattggctgttgacaatggttgact

SEQ ID NO: 1349007 - DNA, 25 bp, Homo sapien
gcttcaattaccttcatatagatgc

SEQ ID NO: 1349008 - DNA, 25 bp, Homo sapien
tttcacaagaatcagcttcaattac

SEQ ID NO: 1349009 - DNA, 25 bp, Homo sapien
tagatgctccaaggatttcgtccca

SEQ ID NO: 1349010 - DNA, 25 bp, Homo sapien
ttaccttcatatagatgctccaagg

SEQ ID NO: 1349011 - DNA, 25 bp, Homo sapien
taagtaacatcgattcaggaaaccc

SEQ ID NO: 1349012 - DNA, 25 bp, Homo sapien
aaggccagattgttcagagggtgca

SEQ ID NO: 1349013 - DNA, 25 bp, Homo sapien
gctaagtgggcttccagaacggaat

SEQ ID NO: 1349014 - DNA, 25 bp, Homo sapien
cagtgaatgtcctgagctgggctga

SEQ ID NO: 1349015 - DNA, 25 bp, Homo sapien
tattcacaaactcggcttaagacac

SEQ ID NO: 1349016 - DNA, 25 bp, Homo sapien
agcaatggctggtagagtctgcgcc

SEQ ID NO: 1349017 - DNA, 25 bp, Homo sapien
aagacagttgggtgagtgcttgccc

SEQ ID NO: 1349018 - DNA, 25 bp, Homo sapien
taaaagacccttggcaggtagctca

SEQ ID NO: 1349019 - DNA, 25 bp, Homo sapien
gatttggcagacttcatttcaacag

SEQ ID NO: 1349020 - DNA, 25 bp, Homo sapien
acattttatttgttagagcaagatt

SEQ ID NO: 1349021 - DNA, 25 bp, Homo sapien
ttagagcaagatttggcagacttca

SEQ ID NO: 1349022 - DNA, 25 bp, Homo sapien
tatttgttagagcaagatttggcag

SEQ ID NO: 1349023 - DNA, 25 bp, Homo sapien
acaaatttagtgtattggcacactt

SEQ ID NO: 1349024 - DNA, 25 bp, Homo sapien
atttagtgtattggcacacttttac

SEQ ID NO: 1349025 - DNA, 25 bp, Homo sapien
tttttgagatcaaaatcactgctta

SEQ ID NO: 1349026 - DNA, 25 bp, Homo sapien
cacacttttacaggtcggcaaagaa

SEQ ID NO: 1349027 - DNA, 25 bp, Homo sapien
tagtggacatttaagttcagaacaa

SEQ ID NO: 1349028 - DNA, 25 bp, Homo sapien
ctgtcagaaaatggatccactgtga

SEQ ID NO: 1349029 - DNA, 25 bp, Homo sapien
taatagatagtagaaaactgtcaga

SEQ ID NO: 1349030 - DNA, 25 bp, Homo sapien
tactgattaactatccaaagtcaca

SEQ ID NO: 1349031 - DNA, 25 bp, Homo sapien
tatacattggtcatccacagcttgg

SEQ ID NO: 1349032 - DNA, 25 bp, Homo sapien
taatggagctcattaccgaggtggt

SEQ ID NO: 1349033 - DNA, 25 bp, Homo sapien
tttcaaaggcaacacgagtcacaga

SEQ ID NO: 1349034 - DNA, 25 bp, Homo sapien
tcaggacattcatatacttctcgtg

SEQ ID NO: 1349035 - DNA, 25 bp, Homo sapien
aaacatccaaaacaacaggggacat

SEQ ID NO: 1349036 - DNA, 25 bp, Homo sapien
ttttgaacaatctgtaatattcttc

SEQ ID NO: 1349037 - DNA, 25 bp, Homo sapien
catttttgaacaatctgtaatattc

SEQ ID NO: 1349038 - DNA, 25 bp, Homo sapien
gacatttttgaacaatctgtaatat

SEQ ID NO: 1349039 - DNA, 25 bp, Homo sapien
tgtgaagaggtaagctgtaaccact

SEQ ID NO: 1349040 - DNA, 25 bp, Homo sapien
tgtaaccactgatgcgtgcacaaca

SEQ ID NO: 1349041 - DNA, 25 bp, Homo sapien
caacatggagaaccccaaagatcca

SEQ ID NO: 1349042 - DNA, 25 bp, Homo sapien
acatcccctggaaagcattgctgac

SEQ ID NO: 1349043 - DNA, 25 bp, Homo sapien
gatgactccaaaagccaagagatta

SEQ ID NO: 1349044 - DNA, 25 bp, Homo sapien
atgatgactccaaaagccaagagat

SEQ ID NO: 1349045 - DNA, 25 bp, Homo sapien
aaccctgcagtgtgacgaaaaactt

SEQ ID NO: 1349046 - DNA, 25 bp, Homo sapien
gcagtgtgacgaaaaactttgtata

SEQ ID NO: 1349047 - DNA, 25 bp, Homo sapien
aaattatcagtacaagtggtaccga

SEQ ID NO: 1349048 - DNA, 25 bp, Homo sapien
caacctgtttatgaaacttcttcag

SEQ ID NO: 1349049 - DNA, 25 bp, Homo sapien
catcatacctaaagattgatgagta

SEQ ID NO: 1349050 - DNA, 25 bp, Homo sapien
cttcttcagatgttatcatcatacc

SEQ ID NO: 1349051 - DNA, 25 bp, Homo sapien
catatttgcagtgttagaaggctaa

SEQ ID NO: 1349052 - DNA, 25 bp, Homo sapien
aatagaattggagagttgtcaccct

SEQ ID NO: 1349053 - DNA, 25 bp, Homo sapien
tatagttttgaagacctccaagtca

SEQ ID NO: 1349054 - DNA, 25 bp, Homo sapien
aatgggcctgagaatttcatgttgc

SEQ ID NO: 1349055 - DNA, 25 bp, Homo sapien
tcattttggatatgctcttctacat

SEQ ID NO: 1349056 - DNA, 25 bp, Homo sapien
ttttggatatgctcttctacatcac

SEQ ID NO: 1349057 - DNA, 25 bp, Homo sapien
ttcattttggatatgctcttctaca

SEQ ID NO: 1349058 - DNA, 25 bp, Homo sapien
ttggatatgctcttctacatcacat

SEQ ID NO: 1349059 - DNA, 25 bp, Homo sapien
gatgtggatagacacaatggacaac

SEQ ID NO: 1349060 - DNA, 25 bp, Homo sapien
tctccaggaataactctgagtaggg

SEQ ID NO: 1349061 - DNA, 25 bp, Homo sapien
tggtaggccacaactaaattcttag

SEQ ID NO: 1349062 - DNA, 25 bp, Homo sapien
cttagtcaactagttggcaggatac

SEQ ID NO: 1349063 - DNA, 25 bp, Homo sapien
taaagttgttttcggtgctaagcca

SEQ ID NO: 1349064 - DNA, 25 bp, Homo sapien
cgaaaatccaactaccacggctggg

SEQ ID NO: 1349065 - DNA, 25 bp, Homo sapien
tgtatgccttcaatgcacatccatg

SEQ ID NO: 1349066 - DNA, 25 bp, Homo sapien
taatatctgtatcctagtgctgccg

SEQ ID NO: 1349067 - DNA, 25 bp, Homo sapien
aaaagaagtagtgtagcagtccggc

SEQ ID NO: 1349068 - DNA, 25 bp, Homo sapien
cctagttgagtgatccttgtaagaa

SEQ ID NO: 1349069 - DNA, 25 bp, Homo sapien
gcaagaaataggctacagcaaagat

SEQ ID NO: 1349070 - DNA, 25 bp, Homo sapien
atgcatatggcaagacaaatcagtg

SEQ ID NO: 1349071 - DNA, 25 bp, Homo sapien
cctggtgctttgaatttcactgaag

SEQ ID NO: 1349072 - DNA, 25 bp, Homo sapien
catttgagtatgtcagctcacagcc

SEQ ID NO: 1349073 - DNA, 25 bp, Homo sapien
accagctgccattcatggtatcagg

SEQ ID NO: 1349074 - DNA, 25 bp, Homo sapien
aggaccagaggacatcaaaattgca

SEQ ID NO: 1349075 - DNA, 25 bp, Homo sapien
tgtgtcaggtgattacagcggcatg

SEQ ID NO: 1349076 - DNA, 25 bp, Homo sapien
taatgggatagatgctaaatacaac

SEQ ID NO: 1349077 - DNA, 25 bp, Homo sapien
taggtcaacagttggagcactgaaa

SEQ ID NO: 1349078 - DNA, 25 bp, Homo sapien
gtaaggattatcagtcaaaaagata

SEQ ID NO: 1349079 - DNA, 25 bp, Homo sapien
atgtcctgagtgacaaatgtataat

SEQ ID NO: 1349080 - DNA, 25 bp, Homo sapien
tgtcagatgatgaaagcaaaggacc

SEQ ID NO: 1349081 - DNA, 25 bp, Homo sapien
gaagttgtcagatgatgaaagcaaa

SEQ ID NO: 1349082 - DNA, 25 bp, Homo sapien
tgaagatatgactctttcctcctct

SEQ ID NO: 1349083 - DNA, 25 bp, Homo sapien
gggtttgagctcattgagactgaaa

SEQ ID NO: 1349084 - DNA, 25 bp, Homo sapien
cttataatatacaaatgcaactgca

SEQ ID NO: 1349085 - DNA, 25 bp, Homo sapien
tataatatacaaatgcaactgcaac

SEQ ID NO: 1349086 - DNA, 25 bp, Homo sapien
tatacaaatgcaactgcaacattgc

SEQ ID NO: 1349087 - DNA, 25 bp, Homo sapien
taatatacaaatgcaactgcaacat

SEQ ID NO: 1349088 - DNA, 25 bp, Homo sapien
tttatgtagtctccatccatattca

SEQ ID NO: 1349089 - DNA, 25 bp, Homo sapien
ggatatccttaaagtagcttgttca

SEQ ID NO: 1349090 - DNA, 25 bp, Homo sapien
catgagttttgtaagatgtgttctc

SEQ ID NO: 1349091 - DNA, 25 bp, Homo sapien
tagcttgttcaacagtgtgcatgag

SEQ ID NO: 1349092 - DNA, 25 bp, Homo sapien
cttttggaagctctgggatatcctt

SEQ ID NO: 1349093 - DNA, 25 bp, Homo sapien
tcacagataacttgtcccaaactac

SEQ ID NO: 1349094 - DNA, 25 bp, Homo sapien
atccctttgaacaaaattattcacg

SEQ ID NO: 1349095 - DNA, 25 bp, Homo sapien
aactacaaatgtatccctttgaaca

SEQ ID NO: 1349096 - DNA, 25 bp, Homo sapien
tgtcccaaactacaaatgtatccct

SEQ ID NO: 1349097 - DNA, 25 bp, Homo sapien
tccttggctgagatagtgttgttct

SEQ ID NO: 1349098 - DNA, 25 bp, Homo sapien
agagttgagttagaaagggtgtcct

SEQ ID NO: 1349099 - DNA, 25 bp, Homo sapien
gccacaggttcttttatggatctga

SEQ ID NO: 1349100 - DNA, 25 bp, Homo sapien
tctgttggtgaaagatctgtcacag

SEQ ID NO: 1349101 - DNA, 25 bp, Homo sapien
gacattatctaaatggcagtttgca

SEQ ID NO: 1349102 - DNA, 25 bp, Homo sapien
gctatacagacattatctaaatggc

SEQ ID NO: 1349103 - DNA, 25 bp, Homo sapien
tttgcagctatacagacattatcta

SEQ ID NO: 1349104 - DNA, 25 bp, Homo sapien
tatacagacattatctaaatggcag

SEQ ID NO: 1349105 - DNA, 25 bp, Homo sapien
attttcctgtggatgtctgataacc

SEQ ID NO: 1349106 - DNA, 25 bp, Homo sapien
gatgtctgataaccttctttgcagg

SEQ ID NO: 1349107 - DNA, 25 bp, Homo sapien
gcagtaagcgccatcattatgtgtg

SEQ ID NO: 1349108 - DNA, 25 bp, Homo sapien
tctttgcaggagcagttatacccac

SEQ ID NO: 1349109 - DNA, 25 bp, Homo sapien
atcacaggcaactgactcactgcac

SEQ ID NO: 1349110 - DNA, 25 bp, Homo sapien
aatgatcatcacaggcaactgactc

SEQ ID NO: 1349111 - DNA, 25 bp, Homo sapien
tggaatgatcatcacaggcaactga

SEQ ID NO: 1349112 - DNA, 25 bp, Homo sapien
gatcatcacaggcaactgactcact

SEQ ID NO: 1349113 - DNA, 25 bp, Homo sapien
tagcagaacgtgtgattgaattccc

SEQ ID NO: 1349114 - DNA, 25 bp, Homo sapien
catatgcctgctaccttgttgaaaa

SEQ ID NO: 1349115 - DNA, 25 bp, Homo sapien
caacaactcagtgtaatctggagga

SEQ ID NO: 1349116 - DNA, 25 bp, Homo sapien
gaggataaaagagcgacctgatttc

SEQ ID NO: 1349117 - DNA, 25 bp, Homo sapien
tcattagtgataaacctgtcttggt

SEQ ID NO: 1349118 - DNA, 25 bp, Homo sapien
cagacggttccatcattagtgataa

SEQ ID NO: 1349119 - DNA, 25 bp, Homo sapien
tccatcattagtgataaacctgtct

SEQ ID NO: 1349120 - DNA, 25 bp, Homo sapien
ctatacagacggttccatcattagt

SEQ ID NO: 1349121 - DNA, 25 bp, Homo sapien
caggactgagttaaatttccacatt

SEQ ID NO: 1349122 - DNA, 25 bp, Homo sapien
tccttctgtgttagtgcaattagca

SEQ ID NO: 1349123 - DNA, 25 bp, Homo sapien
caattagcattttcgccacaggact

SEQ ID NO: 1349124 - DNA, 25 bp, Homo sapien
ggactgagttaaatttccacattca

SEQ ID NO: 1349125 - DNA, 25 bp, Homo sapien
tcagctcctgagaaaaggggcaagc

SEQ ID NO: 1349126 - DNA, 25 bp, Homo sapien
tttgctctccttctaactccccagg

SEQ ID NO: 1349127 - DNA, 25 bp, Homo sapien
cagagcatgagtcagattcaagagc

SEQ ID NO: 1349128 - DNA, 25 bp, Homo sapien
tctttgtgcttcatctctaaatgga

SEQ ID NO: 1349129 - DNA, 25 bp, Homo sapien
catttgccaggccaatagtttttaa

SEQ ID NO: 1349130 - DNA, 25 bp, Homo sapien
cttgctctctcaaggatagacactt

SEQ ID NO: 1349131 - DNA, 25 bp, Homo sapien
tctctcaaggatagacacttttaca

SEQ ID NO: 1349132 - DNA, 25 bp, Homo sapien
tctcaaggatagacacttttacatc

SEQ ID NO: 1349133 - DNA, 25 bp, Homo sapien
gctctctcaaggatagacactttta

SEQ ID NO: 1349134 - DNA, 25 bp, Homo sapien
ggactgatttcggttgcaaagcaca

SEQ ID NO: 1349135 - DNA, 25 bp, Homo sapien
gactgatttcggttgcaaagcacat

SEQ ID NO: 1349136 - DNA, 25 bp, Homo sapien
aggactgatttcggttgcaaagcac

SEQ ID NO: 1349137 - DNA, 25 bp, Homo sapien
cacattttgcatttgggagacaagg

SEQ ID NO: 1349138 - DNA, 25 bp, Homo sapien
gaaaatcccatgttgcaatagcagg

SEQ ID NO: 1349139 - DNA, 25 bp, Homo sapien
caaggtgtcttggtgcaattttgag

SEQ ID NO: 1349140 - DNA, 25 bp, Homo sapien
taggaacaattcaacaaagtggaaa

SEQ ID NO: 1349141 - DNA, 25 bp, Homo sapien
gattggtccctccgacgacctcggc

SEQ ID NO: 1349142 - DNA, 25 bp, Homo sapien
ttggtccctccgacgacctcggcga

SEQ ID NO: 1349143 - DNA, 25 bp, Homo sapien
acctcggcgaccaggggcgctgagc

SEQ ID NO: 1349144 - DNA, 25 bp, Homo sapien
cctccgacgacctcggcgaccaggg

SEQ ID NO: 1349145 - DNA, 25 bp, Homo sapien
ggaatcagtttatccccaggcgcag

SEQ ID NO: 1349146 - DNA, 25 bp, Homo sapien
ctagtgaccactgaccctgagcaat

SEQ ID NO: 1349147 - DNA, 25 bp, Homo sapien
gagcaatgttacagccccactgagg

SEQ ID NO: 1349148 - DNA, 25 bp, Homo sapien
tgagtcaagccctgaatccgctggc

SEQ ID NO: 1349149 - DNA, 25 bp, Homo sapien
ggtttgcaatatcacaatacactgc

SEQ ID NO: 1349150 - DNA, 25 bp, Homo sapien
caacagaatggtgcagagacaggct

SEQ ID NO: 1349151 - DNA, 25 bp, Homo sapien
tattgtcaacgttaactcatgagtg

SEQ ID NO: 1349152 - DNA, 25 bp, Homo sapien
cagattattacctgctgatgaagaa

SEQ ID NO: 1349153 - DNA, 25 bp, Homo sapien
ctcctttttagcttgtatcctaaca

SEQ ID NO: 1349154 - DNA, 25 bp, Homo sapien
tcctttttagcttgtatcctaacaa

SEQ ID NO: 1349155 - DNA, 25 bp, Homo sapien
cctttttagcttgtatcctaacaat

SEQ ID NO: 1349156 - DNA, 25 bp, Homo sapien
ctttttagcttgtatcctaacaatt

SEQ ID NO: 1349157 - DNA, 25 bp, Homo sapien
gtgcttcctctggtgggacgatgta

SEQ ID NO: 1349158 - DNA, 25 bp, Homo sapien
gcttcctctggtgggacgatgtaac

SEQ ID NO: 1349159 - DNA, 25 bp, Homo sapien
tctggtgggacgatgtaactattca

SEQ ID NO: 1349160 - DNA, 25 bp, Homo sapien
cctctggtgggacgatgtaactatt

SEQ ID NO: 1349161 - DNA, 25 bp, Homo sapien
gtatcaatgataaccgtattattag

SEQ ID NO: 1349162 - DNA, 25 bp, Homo sapien
gtgtctacatgtatcaatgataacc

SEQ ID NO: 1349163 - DNA, 25 bp, Homo sapien
gaacttcgagatgtttttcataaaa

SEQ ID NO: 1349164 - DNA, 25 bp, Homo sapien
tgaatcaagaacttcgagatgtttt

SEQ ID NO: 1349165 - DNA, 25 bp, Homo sapien
tagcagcaaaggctaaacaagcggg

SEQ ID NO: 1349166 - DNA, 25 bp, Homo sapien
cagaattaaggtgaacattagttcc

SEQ ID NO: 1349167 - DNA, 25 bp, Homo sapien
caaaggctaaacaagcgggaatttg

SEQ ID NO: 1349168 - DNA, 25 bp, Homo sapien
taattaattgcaacttgcagtatga

SEQ ID NO: 1349169 - DNA, 25 bp, Homo sapien
tcatagctgatgcatctccaaaaaa

SEQ ID NO: 1349170 - DNA, 25 bp, Homo sapien
gagaggcccggatgcctcccacaga

SEQ ID NO: 1349171 - DNA, 25 bp, Homo sapien
tctgaacatcttcaatagtgacagc

SEQ ID NO: 1349172 - DNA, 25 bp, Homo sapien
gacagcattatacagagaggcccgg

SEQ ID NO: 1349173 - DNA, 25 bp, Homo sapien
ataccctttcaagggcaacatatta

SEQ ID NO: 1349174 - DNA, 25 bp, Homo sapien
tccaccggacatacgtagaatcctt

SEQ ID NO: 1349175 - DNA, 25 bp, Homo sapien
attttggggctccaccggacatacg

SEQ ID NO: 1349176 - DNA, 25 bp, Homo sapien
gggctccaccggacatacgtagaat

SEQ ID NO: 1349177 - DNA, 25 bp, Homo sapien
ggcgtgttgtacaaggagctgtttc

SEQ ID NO: 1349178 - DNA, 25 bp, Homo sapien
gagctgtttccagcctgtacctcgt

SEQ ID NO: 1349179 - DNA, 25 bp, Homo sapien
ctgaaacatggaggcgtgttgtaca

SEQ ID NO: 1349180 - DNA, 25 bp, Homo sapien
ctgtttccagcctgtacctcgtatt

SEQ ID NO: 1349181 - DNA, 25 bp, Homo sapien
ctaggaccaaggggcactctcagag

SEQ ID NO: 1349182 - DNA, 25 bp, Homo sapien
tctcagagggcaaaccccagcaggt

SEQ ID NO: 1349183 - DNA, 25 bp, Homo sapien
taggaccaaggggcactctcagagg

SEQ ID NO: 1349184 - DNA, 25 bp, Homo sapien
ccagcaggtcatcacagacaatcac

SEQ ID NO: 1349185 - DNA, 25 bp, Homo sapien
aaagccaacattcgtctgggcacca

SEQ ID NO: 1349186 - DNA, 25 bp, Homo sapien
tcgtctgggcaccagcaaaaatcac

SEQ ID NO: 1349187 - DNA, 25 bp, Homo sapien
caacattcgtctgggcaccagcaaa

SEQ ID NO: 1349188 - DNA, 25 bp, Homo sapien
ccagcaaagccaacattcgtctggg

SEQ ID NO: 1349189 - DNA, 25 bp, Homo sapien
tggacatccactggcttggacagga

SEQ ID NO: 1349190 - DNA, 25 bp, Homo sapien
ggaagtttgaggacatgtcacaaac

SEQ ID NO: 1349191 - DNA, 25 bp, Homo sapien
acttggacatccactggcttggaca

SEQ ID NO: 1349192 - DNA, 25 bp, Homo sapien
caaacttggacatccactggcttgg

SEQ ID NO: 1349193 - DNA, 25 bp, Homo sapien
tcatttgcgcaataatacacatagg

SEQ ID NO: 1349194 - DNA, 25 bp, Homo sapien
catgcaccacctcatttgcgcaata

SEQ ID NO: 1349195 - DNA, 25 bp, Homo sapien
atagggtataaagtcaaactccaca

SEQ ID NO: 1349196 - DNA, 25 bp, Homo sapien
acacataggaggcatccgggttgag

SEQ ID NO: 1349197 - DNA, 25 bp, Homo sapien
tggcttcttctgcggccttagctga

SEQ ID NO: 1349198 - DNA, 25 bp, Homo sapien
gaatgatatttatagtcccaaactt

SEQ ID NO: 1349199 - DNA, 25 bp, Homo sapien
ccaagtttagggtgaatgatattta

SEQ ID NO: 1349200 - DNA, 25 bp, Homo sapien
tgtataactcccaagtttagggtga

SEQ ID NO: 1349201 - DNA, 25 bp, Homo sapien
caaaaatcaccttacagctgtctgg

SEQ ID NO: 1349202 - DNA, 25 bp, Homo sapien
ccttacagctgtctggaacggctag

SEQ ID NO: 1349203 - DNA, 25 bp, Homo sapien
aatcaccttacagctgtctggaacg

SEQ ID NO: 1349204 - DNA, 25 bp, Homo sapien
agctgtctggaacggctagcaattc

SEQ ID NO: 1349205 - DNA, 25 bp, Homo sapien
gagggcggcgagtcagctaaggagg

SEQ ID NO: 1349206 - DNA, 25 bp, Homo sapien
gcgagggcggcgagtcagctaagga

SEQ ID NO: 1349207 - DNA, 25 bp, Homo sapien
cccgaagttgaccacgtgcctcggg

SEQ ID NO: 1349208 - DNA, 25 bp, Homo sapien
aggcccgaagttgaccacgtgcctc

SEQ ID NO: 1349209 - DNA, 25 bp, Homo sapien
tatttaacgtcacagtgaacgggta

SEQ ID NO: 1349210 - DNA, 25 bp, Homo sapien
gaagatccaggtagtatagctattc

SEQ ID NO: 1349211 - DNA, 25 bp, Homo sapien
gaagagtccattatcttcctggaag

SEQ ID NO: 1349212 - DNA, 25 bp, Homo sapien
ttgccggatgcaacaggcattatct

SEQ ID NO: 1349213 - DNA, 25 bp, Homo sapien
aaaccaattccggtattgccggatg

SEQ ID NO: 1349214 - DNA, 25 bp, Homo sapien
cttctagtacctcccctaacgccag

SEQ ID NO: 1349215 - DNA, 25 bp, Homo sapien
tgagtgagcttcacggttctatagg

SEQ ID NO: 1349216 - DNA, 25 bp, Homo sapien
gagtgagcttcacggttctataggt

SEQ ID NO: 1349217 - DNA, 25 bp, Homo sapien
ctgtgggaattaggtcttggtgctt

SEQ ID NO: 1349218 - DNA, 25 bp, Homo sapien
tcctcctttgacaagagacagatgt

SEQ ID NO: 1349219 - DNA, 25 bp, Homo sapien
gcatattttgtctcaacttcttgga

SEQ ID NO: 1349220 - DNA, 25 bp, Homo sapien
cagatgtttgggtagaggaacttat

SEQ ID NO: 1349221 - DNA, 25 bp, Homo sapien
ttcctttccagattgcatcatgagc

SEQ ID NO: 1349222 - DNA, 25 bp, Homo sapien
catgagccacgactttaatctgttg

SEQ ID NO: 1349223 - DNA, 25 bp, Homo sapien
gattgcatcatgagccacgacttta

SEQ ID NO: 1349224 - DNA, 25 bp, Homo sapien
taatctgttgaagtcgtactcagca

SEQ ID NO: 1349225 - DNA, 25 bp, Homo sapien
tttgcaggaataagtgagacttcat

SEQ ID NO: 1349226 - DNA, 25 bp, Homo sapien
caaacaagttatagatcgaaaagca

SEQ ID NO: 1349227 - DNA, 25 bp, Homo sapien
tgtacatttaacctgacaactgagt

SEQ ID NO: 1349228 - DNA, 25 bp, Homo sapien
taaatgactcatagcttctctgaga

SEQ ID NO: 1349229 - DNA, 25 bp, Homo sapien
taccctctgtctaacggaaattgtg

SEQ ID NO: 1349230 - DNA, 25 bp, Homo sapien
tcactatgcattaggcagtcagcag

SEQ ID NO: 1349231 - DNA, 25 bp, Homo sapien
gatgccaagctggtaatgcttccag

SEQ ID NO: 1349232 - DNA, 25 bp, Homo sapien
aactcaagaagtgcataaggaccag

SEQ ID NO: 1349233 - DNA, 25 bp, Homo sapien
tttcctttactaccaatccctgtga

SEQ ID NO: 1349234 - DNA, 25 bp, Homo sapien
tgagcagactgctatcaccctcctg

SEQ ID NO: 1349235 - DNA, 25 bp, Homo sapien
tacaactatatggtgtgagaaccct

SEQ ID NO: 1349236 - DNA, 25 bp, Homo sapien
taaatacttggcttggaaaatctga

SEQ ID NO: 1349237 - DNA, 25 bp, Homo sapien
tccagaataaactgggttgattatt

SEQ ID NO: 1349238 - DNA, 25 bp, Homo sapien
tgtggtcaggaactgatagagtcca

SEQ ID NO: 1349239 - DNA, 25 bp, Homo sapien
caaatgcctgagtttacggaatgtg

SEQ ID NO: 1349240 - DNA, 25 bp, Homo sapien
tttggtcagtacacaagctagcagg

SEQ ID NO: 1349241 - DNA, 25 bp, Homo sapien
tcaggaactacacccaggtcacagc

SEQ ID NO: 1349242 - DNA, 25 bp, Homo sapien
tcaattcaggaactacacccaggtc

SEQ ID NO: 1349243 - DNA, 25 bp, Homo sapien
aattcaggaactacacccaggtcac

SEQ ID NO: 1349244 - DNA, 25 bp, Homo sapien
aatcaattcaggaactacacccagg

SEQ ID NO: 1349245 - DNA, 25 bp, Homo sapien
tgacttgggcctgaatcacattgtc

SEQ ID NO: 1349246 - DNA, 25 bp, Homo sapien
cacaaccaataagattgacttgggc

SEQ ID NO: 1349247 - DNA, 25 bp, Homo sapien
taagattgacttgggcctgaatcac

SEQ ID NO: 1349248 - DNA, 25 bp, Homo sapien
gattgacttgggcctgaatcacatt

SEQ ID NO: 1349249 - DNA, 25 bp, Homo sapien
gaacatttagatctgccacaactga

SEQ ID NO: 1349250 - DNA, 25 bp, Homo sapien
tattaccaagtcttgttccatgtgg

SEQ ID NO: 1349251 - DNA, 25 bp, Homo sapien
tatttgacgccttcaacaccaagtt

SEQ ID NO: 1349252 - DNA, 25 bp, Homo sapien
ctgggccactgaggaacaatttgga

SEQ ID NO: 1349253 - DNA, 25 bp, Homo sapien
taggtcaaattgcatcaaggagggc

SEQ ID NO: 1349254 - DNA, 25 bp, Homo sapien
gaacacgctgtgagattgaacttgt

SEQ ID NO: 1349255 - DNA, 25 bp, Homo sapien
ttcaatcaggtttcagaacacgctg

SEQ ID NO: 1349256 - DNA, 25 bp, Homo sapien
gactttctgcccttagcacacctgg

SEQ ID NO: 1349257 - DNA, 25 bp, Homo sapien
gctcattgtgacaatcatagccttc

SEQ ID NO: 1349258 - DNA, 25 bp, Homo sapien
tgctcattgtgacaatcatagcctt

SEQ ID NO: 1349259 - DNA, 25 bp, Homo sapien
ttttccatggactgcccttctcctt

SEQ ID NO: 1349260 - DNA, 25 bp, Homo sapien
tttccatggactgcccttctccttc

SEQ ID NO: 1349261 - DNA, 25 bp, Homo sapien
tgtcttttccatggactgcccttct

SEQ ID NO: 1349262 - DNA, 25 bp, Homo sapien
tcttttccatggactgcccttctcc

SEQ ID NO: 1349263 - DNA, 25 bp, Homo sapien
cagatggccctgatttacctagagc

SEQ ID NO: 1349264 - DNA, 25 bp, Homo sapien
tcaaccccagatggccctgatttac

SEQ ID NO: 1349265 - DNA, 25 bp, Homo sapien
cctgatttacctagagccaaagcag

SEQ ID NO: 1349266 - DNA, 25 bp, Homo sapien
tacctagagccaaagcagtatgctg

SEQ ID NO: 1349267 - DNA, 25 bp, Homo sapien
tagtctgatgactccttgataggca

SEQ ID NO: 1349268 - DNA, 25 bp, Homo sapien
ttgcttcttgaccacatagtctgat

SEQ ID NO: 1349269 - DNA, 25 bp, Homo sapien
tcttgaccacatagtctgatgactc

SEQ ID NO: 1349270 - DNA, 25 bp, Homo sapien
gaccacatagtctgatgactccttg

SEQ ID NO: 1349271 - DNA, 25 bp, Homo sapien
taaaatcgcctttatatacagttta

SEQ ID NO: 1349272 - DNA, 25 bp, Homo sapien
gattaaaatcgcctttatatacagt

SEQ ID NO: 1349273 - DNA, 25 bp, Homo sapien
ctctctgattaaaatcgcctttata

SEQ ID NO: 1349274 - DNA, 25 bp, Homo sapien
tctgattaaaatcgcctttatatac

SEQ ID NO: 1349275 - DNA, 25 bp, Homo sapien
tgataggctggtaagaaagtccctg

SEQ ID NO: 1349276 - DNA, 25 bp, Homo sapien
caaagattgacatagccatttttca

SEQ ID NO: 1349277 - DNA, 25 bp, Homo sapien
gaaagccagagtcttaggagattgg

SEQ ID NO: 1349278 - DNA, 25 bp, Homo sapien
tatcttaagaacaatgggaggacat

SEQ ID NO: 1349279 - DNA, 25 bp, Homo sapien
tgtttactgaacatgttaatctgtc

SEQ ID NO: 1349280 - DNA, 25 bp, Homo sapien
ttgtttactgaacatgttaatctgt

SEQ ID NO: 1349281 - DNA, 25 bp, Homo sapien
atgtctacattgtttacactaaaat

SEQ ID NO: 1349282 - DNA, 25 bp, Homo sapien
tttgtttactgaacatgttaatctg

SEQ ID NO: 1349283 - DNA, 25 bp, Homo sapien
tcttccttgtactcagaaaactgct

SEQ ID NO: 1349284 - DNA, 25 bp, Homo sapien
gaatgtagaattcatccgaccaggg

SEQ ID NO: 1349285 - DNA, 25 bp, Homo sapien
ctttgaatgtagaattcatccgacc

SEQ ID NO: 1349286 - DNA, 25 bp, Homo sapien
ttcatccgaccagggtcatagtttt

SEQ ID NO: 1349287 - DNA, 25 bp, Homo sapien
tgtagaattcatccgaccagggtca

SEQ ID NO: 1349288 - DNA, 25 bp, Homo sapien
gctgggtagatcagttacaataatc

SEQ ID NO: 1349289 - DNA, 25 bp, Homo sapien
tcttgggcatgcaattgtgaaatca

SEQ ID NO: 1349290 - DNA, 25 bp, Homo sapien
tctattactctttttgcgctgggta

SEQ ID NO: 1349291 - DNA, 25 bp, Homo sapien
tattcccccatgattctgtgtagaa

SEQ ID NO: 1349292 - DNA, 25 bp, Homo sapien
agttgtcagctttagacacttcttc

SEQ ID NO: 1349293 - DNA, 25 bp, Homo sapien
gaagttgtcagctttagacacttct

SEQ ID NO: 1349294 - DNA, 25 bp, Homo sapien
gacacttcttcatgttagatggcag

SEQ ID NO: 1349295 - DNA, 25 bp, Homo sapien
acacttcttcatgttagatggcagc

SEQ ID NO: 1349296 - DNA, 25 bp, Homo sapien
gctggacacaatggctcattcctct

SEQ ID NO: 1349297 - DNA, 25 bp, Homo sapien
ggctggacacaatggctcattcctc

SEQ ID NO: 1349298 - DNA, 25 bp, Homo sapien
tttattttggctggacacaatggct

SEQ ID NO: 1349299 - DNA, 25 bp, Homo sapien
aatatttattttggctggacacaat

SEQ ID NO: 1349300 - DNA, 25 bp, Homo sapien
tagtagatacgaggcctgcaacacc

SEQ ID NO: 1349301 - DNA, 25 bp, Homo sapien
tgcaacaccacatgggagatggagt

SEQ ID NO: 1349302 - DNA, 25 bp, Homo sapien
ggttcttcctgacttgtaataagga

SEQ ID NO: 1349303 - DNA, 25 bp, Homo sapien
tcctatatttcagtatagtaaagta

SEQ ID NO: 1349304 - DNA, 25 bp, Homo sapien
tagttaaggttgagtaagctggcct

SEQ ID NO: 1349305 - DNA, 25 bp, Homo sapien
tatcgccagctgtagttaaggttga

SEQ ID NO: 1349306 - DNA, 25 bp, Homo sapien
tgatccttatatcgccagctgtagt

SEQ ID NO: 1349307 - DNA, 25 bp, Homo sapien
ccagctgtagttaaggttgagtaag

SEQ ID NO: 1349308 - DNA, 25 bp, Homo sapien
ctgttgtcttgggttccaaagacat

SEQ ID NO: 1349309 - DNA, 25 bp, Homo sapien
cgagggcatttacagcaggaaaaat

SEQ ID NO: 1349310 - DNA, 25 bp, Homo sapien
tgttgtcttgggttccaaagacatt

SEQ ID NO: 1349311 - DNA, 25 bp, Homo sapien
caccgagggcatttacagcaggaaa

SEQ ID NO: 1349312 - DNA, 25 bp, Homo sapien
acataggcaatgacatgcaggcaat

SEQ ID NO: 1349313 - DNA, 25 bp, Homo sapien
cacataggcaatgacatgcaggcaa

SEQ ID NO: 1349314 - DNA, 25 bp, Homo sapien
cataggcaatgacatgcaggcaatg

SEQ ID NO: 1349315 - DNA, 25 bp, Homo sapien
taggcaatgacatgcaggcaatggc

SEQ ID NO: 1349316 - DNA, 25 bp, Homo sapien
ttgggttcatacaactgctcacaaa

SEQ ID NO: 1349317 - DNA, 25 bp, Homo sapien
tgctccaatctgtctaagtccagct

SEQ ID NO: 1349318 - DNA, 25 bp, Homo sapien
cttgactccattttgggttcataca

SEQ ID NO: 1349319 - DNA, 25 bp, Homo sapien
aatctgtctaagtccagctcttgac

SEQ ID NO: 1349320 - DNA, 25 bp, Homo sapien
ccgatcgaatcgaataatgtaattc

SEQ ID NO: 1349321 - DNA, 25 bp, Homo sapien
gacaaaatatagtcccccgatcgaa

SEQ ID NO: 1349322 - DNA, 25 bp, Homo sapien
cagacaaaatatagtcccccgatcg

SEQ ID NO: 1349323 - DNA, 25 bp, Homo sapien
tatagtcccccgatcgaatcgaata

SEQ ID NO: 1349324 - DNA, 25 bp, Homo sapien
cttgcaacaatagccgaacacagag

SEQ ID NO: 1349325 - DNA, 25 bp, Homo sapien
cacagtggcttgcaacaatagccga

SEQ ID NO: 1349326 - DNA, 25 bp, Homo sapien
cctgtagcacagtggcttgcaacaa

SEQ ID NO: 1349327 - DNA, 25 bp, Homo sapien
gaggccctgtagcacagtggcttgc

SEQ ID NO: 1349328 - DNA, 25 bp, Homo sapien
tccccactttcagcacaattaagcg

SEQ ID NO: 1349329 - DNA, 25 bp, Homo sapien
tatagaaatccaccttcgatgtggg

SEQ ID NO: 1349330 - DNA, 25 bp, Homo sapien
cagcacaattaagcgcatgcacacc

SEQ ID NO: 1349331 - DNA, 25 bp, Homo sapien
ctatagaaatccaccttcgatgtgg

SEQ ID NO: 1349332 - DNA, 25 bp, Homo sapien
ctgtttcttggagcaatcgacaaca

SEQ ID NO: 1349333 - DNA, 25 bp, Homo sapien
tcgacaacaccttgtaagcctgttg

SEQ ID NO: 1349334 - DNA, 25 bp, Homo sapien
tcttggagcaatcgacaacaccttg

SEQ ID NO: 1349335 - DNA, 25 bp, Homo sapien
ggagcaatcgacaacaccttgtaag

SEQ ID NO: 1349336 - DNA, 25 bp, Homo sapien
tttacacatttttttgactccctga

SEQ ID NO: 1349337 - DNA, 25 bp, Homo sapien
cactctcagattctttgcttatcat

SEQ ID NO: 1349338 - DNA, 25 bp, Homo sapien
tacacatttttttgactccctgacc

SEQ ID NO: 1349339 - DNA, 25 bp, Homo sapien
ccccactctcagattctttgcttat

SEQ ID NO: 1349340 - DNA, 25 bp, Homo sapien
tttgatatccaaggtgcggagtacc

SEQ ID NO: 1349341 - DNA, 25 bp, Homo sapien
caccctgtggtcaaacgatgtagca

SEQ ID NO: 1349342 - DNA, 25 bp, Homo sapien
taggctgataggctttggaaaggcc

SEQ ID NO: 1349343 - DNA, 25 bp, Homo sapien
gaagtaacgtactaatggcacatga

SEQ ID NO: 1349344 - DNA, 25 bp, Homo sapien
ttcttatttgatcttgccgaaaggg

SEQ ID NO: 1349345 - DNA, 25 bp, Homo sapien
aattcagaggcttggcaaaggcatg

SEQ ID NO: 1349346 - DNA, 25 bp, Homo sapien
gatcttgccgaaaggggtgattctt

SEQ ID NO: 1349347 - DNA, 25 bp, Homo sapien
aaggcatgcttatctgatgctttct

SEQ ID NO: 1349348 - DNA, 25 bp, Homo sapien
atgtcagtttagtaacaatttgtac

SEQ ID NO: 1349349 - DNA, 25 bp, Homo sapien
tgtcagtttagtaacaatttgtaca

SEQ ID NO: 1349350 - DNA, 25 bp, Homo sapien
gaatcattggagtggtccactttca

SEQ ID NO: 1349351 - DNA, 25 bp, Homo sapien
caaccaaatagtcctgcgtagtacc

SEQ ID NO: 1349352 - DNA, 25 bp, Homo sapien
tagtagttcttccagggtgaaagaa

SEQ ID NO: 1349353 - DNA, 25 bp, Homo sapien
tcccacctgggaatcattggagtgg

SEQ ID NO: 1349354 - DNA, 25 bp, Homo sapien
gaggcacaagtcaactaactaaaag

SEQ ID NO: 1349355 - DNA, 25 bp, Homo sapien
tctcagcaacccatagaaaggattc

SEQ ID NO: 1349356 - DNA, 25 bp, Homo sapien
cacaggtgcctggtaacagcaattc

SEQ ID NO: 1349357 - DNA, 25 bp, Homo sapien
gggtccaccttgaattagcaaaaca

SEQ ID NO: 1349358 - DNA, 25 bp, Homo sapien
tcctgcctgggtggaagtgacaatt

SEQ ID NO: 1349359 - DNA, 25 bp, Homo sapien
tttttctcggactgctttctcagac

SEQ ID NO: 1349360 - DNA, 25 bp, Homo sapien
ttttctcggactgctttctcagact

SEQ ID NO: 1349361 - DNA, 25 bp, Homo sapien
ttttttctcggactgctttctcaga

SEQ ID NO: 1349362 - DNA, 25 bp, Homo sapien
aagtgaagatttaccaagtacatta

SEQ ID NO: 1349363 - DNA, 25 bp, Homo sapien
acattatagtagttgctgccacaca

SEQ ID NO: 1349364 - DNA, 25 bp, Homo sapien
tgtaagaatatcatgtgcttgcagt

SEQ ID NO: 1349365 - DNA, 25 bp, Homo sapien
tcatgtgcttgcagtactgagagca

SEQ ID NO: 1349366 - DNA, 25 bp, Homo sapien
ctcagaaccactaagagcttttctg

SEQ ID NO: 1349367 - DNA, 25 bp, Homo sapien
actcagaaccactaagagcttttct

SEQ ID NO: 1349368 - DNA, 25 bp, Homo sapien
cttcaccctgcacatccaatgctgc

SEQ ID NO: 1349369 - DNA, 25 bp, Homo sapien
ttcaccctgcacatccaatgctgcc

SEQ ID NO: 1349370 - DNA, 25 bp, Homo sapien
gaaccattctatcttgacatctgcc

SEQ ID NO: 1349371 - DNA, 25 bp, Homo sapien
gcttatctggagcatatgatgaggt

SEQ ID NO: 1349372 - DNA, 25 bp, Homo sapien
catatgatgaggttgttgggtgaac

SEQ ID NO: 1349373 - DNA, 25 bp, Homo sapien
tcctctaagtgttttactgtcgttg

SEQ ID NO: 1349374 - DNA, 25 bp, Homo sapien
taaggatgtttgatctctgacctgt

SEQ ID NO: 1349375 - DNA, 25 bp, Homo sapien
cccagggttaattgtggccagaagg

SEQ ID NO: 1349376 - DNA, 25 bp, Homo sapien
ctagtaaggatgtttgatctctgac

SEQ ID NO: 1349377 - DNA, 25 bp, Homo sapien
gtggccccagggttaattgtggcca

SEQ ID NO: 1349378 - DNA, 25 bp, Homo sapien
cctctctcaagcagttggactgaac

SEQ ID NO: 1349379 - DNA, 25 bp, Homo sapien
tacctcctctctcaagcagttggac

SEQ ID NO: 1349380 - DNA, 25 bp, Homo sapien
ctcctctctcaagcagttggactga

SEQ ID NO: 1349381 - DNA, 25 bp, Homo sapien
ttacctcctctctcaagcagttgga

SEQ ID NO: 1349382 - DNA, 25 bp, Homo sapien
aatatggtccctttccatagacgtg

SEQ ID NO: 1349383 - DNA, 25 bp, Homo sapien
tccatagacgtgcagctggcttcac

SEQ ID NO: 1349384 - DNA, 25 bp, Homo sapien
ggtttctatagcagcctagaggaaa

SEQ ID NO: 1349385 - DNA, 25 bp, Homo sapien
ttctatagcagcctagaggaaatat

SEQ ID NO: 1349386 - DNA, 25 bp, Homo sapien
agccaccacactttgtgatccacaa

SEQ ID NO: 1349387 - DNA, 25 bp, Homo sapien
gccaccacactttgtgatccacaaa

SEQ ID NO: 1349388 - DNA, 25 bp, Homo sapien
agtattacaacctctctcctttaca

SEQ ID NO: 1349389 - DNA, 25 bp, Homo sapien
cggtcatcacagcaagtattacaac

SEQ ID NO: 1349390 - DNA, 25 bp, Homo sapien
cagtgacaacactagcgttgtgcag

SEQ ID NO: 1349391 - DNA, 25 bp, Homo sapien
cccagtggccctaagattgaagttt

SEQ ID NO: 1349392 - DNA, 25 bp, Homo sapien
gtctgacttccggttgccccagtgg

SEQ ID NO: 1349393 - DNA, 25 bp, Homo sapien
ttgattctgacaatgcagtgacaac

SEQ ID NO: 1349394 - DNA, 25 bp, Homo sapien
ggcattgtgtaagtgtaggtctttc

SEQ ID NO: 1349395 - DNA, 25 bp, Homo sapien
gtctttctttgccagccaagttccc

SEQ ID NO: 1349396 - DNA, 25 bp, Homo sapien
taagtgtaggtctttctttgccagc

SEQ ID NO: 1349397 - DNA, 25 bp, Homo sapien
tggttattttggcattgtgtaagtg

SEQ ID NO: 1349398 - DNA, 25 bp, Homo sapien
aagaagattttccatgtccatgcca

SEQ ID NO: 1349399 - DNA, 25 bp, Homo sapien
tatctgggcagccacattagctgtc

SEQ ID NO: 1349400 - DNA, 25 bp, Homo sapien
cagccgatagcacagtctgccaaaa

SEQ ID NO: 1349401 - DNA, 25 bp, Homo sapien
ggtgcagccaaagaactatctgggc

SEQ ID NO: 1349402 - DNA, 25 bp, Homo sapien
ttaaccagagcacaggtcttcaagg

SEQ ID NO: 1349403 - DNA, 25 bp, Homo sapien
tttaaccagagcacaggtcttcaag

SEQ ID NO: 1349404 - DNA, 25 bp, Homo sapien
gaggaatcagcaatgggtacagcca

SEQ ID NO: 1349405 - DNA, 25 bp, Homo sapien
tatagacggctttgttgagagggct

SEQ ID NO: 1349406 - DNA, 25 bp, Homo sapien
tgagagggctgactatgttagaacc

SEQ ID NO: 1349407 - DNA, 25 bp, Homo sapien
tcaaagagtaatcccacataggacc

SEQ ID NO: 1349408 - DNA, 25 bp, Homo sapien
tataagatgatgggcctgaaattgc

SEQ ID NO: 1349409 - DNA, 25 bp, Homo sapien
agatgatgggcctgaaattgcacat

SEQ ID NO: 1349410 - DNA, 25 bp, Homo sapien
taagatgatgggcctgaaattgcac

SEQ ID NO: 1349411 - DNA, 25 bp, Homo sapien
ctataagatgatgggcctgaaattg

SEQ ID NO: 1349412 - DNA, 25 bp, Homo sapien
gcaacagtcgtttcatacagtaggt

SEQ ID NO: 1349413 - DNA, 25 bp, Homo sapien
ttagcataagcaacagtcgtttcat

SEQ ID NO: 1349414 - DNA, 25 bp, Homo sapien
cagtaggtacatggccaaaacatca

SEQ ID NO: 1349415 - DNA, 25 bp, Homo sapien
cgtttcatacagtaggtacatggcc

SEQ ID NO: 1349416 - DNA, 25 bp, Homo sapien
gggattcggcatttaggaatctcct

SEQ ID NO: 1349417 - DNA, 25 bp, Homo sapien
ttggggattcggcatttaggaatct

SEQ ID NO: 1349418 - DNA, 25 bp, Homo sapien
tctagtttcattatggatgaagatc

SEQ ID NO: 1349419 - DNA, 25 bp, Homo sapien
tttttgttattcactgttttgtcaa

SEQ ID NO: 1349420 - DNA, 25 bp, Homo sapien
tcccattgaaggaatccattattaa

SEQ ID NO: 1349421 - DNA, 25 bp, Homo sapien
ggtgatgctcccattgaaggaatcc

SEQ ID NO: 1349422 - DNA, 25 bp, Homo sapien
taataagtggtgatgctcccattga

SEQ ID NO: 1349423 - DNA, 25 bp, Homo sapien
tgaaggaatccattattaacctaat

SEQ ID NO: 1349424 - DNA, 25 bp, Homo sapien
ctgctgccacagttcagacgtctgc

SEQ ID NO: 1349425 - DNA, 25 bp, Homo sapien
agttcagacgtctgccacacccacg

SEQ ID NO: 1349426 - DNA, 25 bp, Homo sapien
gttcagacgtctgccacacccacgt

SEQ ID NO: 1349427 - DNA, 25 bp, Homo sapien
tgccacagttcagacgtctgccaca

SEQ ID NO: 1349428 - DNA, 25 bp, Homo sapien
gccaagttctccaaaattaatcttc

SEQ ID NO: 1349429 - DNA, 25 bp, Homo sapien
aatcttcaactgagacattacatca

SEQ ID NO: 1349430 - DNA, 25 bp, Homo sapien
tcatgttctgggcagccaagttctc

SEQ ID NO: 1349431 - DNA, 25 bp, Homo sapien
gtcctccctcgccatcatgttctgg

SEQ ID NO: 1349432 - DNA, 25 bp, Homo sapien
ggaaaagatggtccataacagagtc

SEQ ID NO: 1349433 - DNA, 25 bp, Homo sapien
gaaaagatggtccataacagagtct

SEQ ID NO: 1349434 - DNA, 25 bp, Homo sapien
aaaagatggtccataacagagtctg

SEQ ID NO: 1349435 - DNA, 25 bp, Homo sapien
ctggaaaagatggtccataacagag

SEQ ID NO: 1349436 - DNA, 25 bp, Homo sapien
aaatcatctctttaggaccctcttt

SEQ ID NO: 1349437 - DNA, 25 bp, Homo sapien
catctctttaggaccctctttcttt

SEQ ID NO: 1349438 - DNA, 25 bp, Homo sapien
tcagatattaaattccactttgccc

SEQ ID NO: 1349439 - DNA, 25 bp, Homo sapien
tcaatagccttcaactcatccaaaa

SEQ ID NO: 1349440 - DNA, 25 bp, Homo sapien
ctcttcaacttcactctccttattt

SEQ ID NO: 1349441 - DNA, 25 bp, Homo sapien
tcttcaacttcactctccttatttt

SEQ ID NO: 1349442 - DNA, 25 bp, Homo sapien
cagtgtctgccactggatgttcttc

SEQ ID NO: 1349443 - DNA, 25 bp, Homo sapien
ttttcagtgtctgccactggatgtt

SEQ ID NO: 1349444 - DNA, 25 bp, Homo sapien
ccagtagtgaggtctattacctcca

SEQ ID NO: 1349445 - DNA, 25 bp, Homo sapien
tgaggtctattacctccatgtttgt

SEQ ID NO: 1349446 - DNA, 25 bp, Homo sapien
ttccccagtagtgaggtctattacc

SEQ ID NO: 1349447 - DNA, 25 bp, Homo sapien
taacagttccccagtagtgaggtct

SEQ ID NO: 1349448 - DNA, 25 bp, Homo sapien
ttctttcttaagcacgatgagcacc

SEQ ID NO: 1349449 - DNA, 25 bp, Homo sapien
tctttctgggactctatacacaact

SEQ ID NO: 1349450 - DNA, 25 bp, Homo sapien
tctttcttaagcacgatgagcacct

SEQ ID NO: 1349451 - DNA, 25 bp, Homo sapien
tgggactctatacacaactgtttgc

SEQ ID NO: 1349452 - DNA, 25 bp, Homo sapien
gctgccatttatttttttgttctcc

SEQ ID NO: 1349453 - DNA, 25 bp, Homo sapien
ccgctgccatttatttttttgttct

SEQ ID NO: 1349454 - DNA, 25 bp, Homo sapien
ttttgttctcccctgccttcagcac

SEQ ID NO: 1349455 - DNA, 25 bp, Homo sapien
ttttttgttctcccctgccttcagc

SEQ ID NO: 1349456 - DNA, 25 bp, Homo sapien
aaagaggtccacttcatcatcaaac

SEQ ID NO: 1349457 - DNA, 25 bp, Homo sapien
caaagaggtccacttcatcatcaaa

SEQ ID NO: 1349458 - DNA, 25 bp, Homo sapien
aagaggtccacttcatcatcaaaca

SEQ ID NO: 1349459 - DNA, 25 bp, Homo sapien
ctccaccaggcttgatgccttgata

SEQ ID NO: 1349460 - DNA, 25 bp, Homo sapien
ttcctggagagggacgcagctgaga

SEQ ID NO: 1349461 - DNA, 25 bp, Homo sapien
gagagtgcttcgaccaccagtacat

SEQ ID NO: 1349462 - DNA, 25 bp, Homo sapien
aagtcttggacaggatactttggcc

SEQ ID NO: 1349463 - DNA, 25 bp, Homo sapien
tgaccagtccaatcagcttcaacca

SEQ ID NO: 1349464 - DNA, 25 bp, Homo sapien
cttgaccagtccaatcagcttcaac

SEQ ID NO: 1349465 - DNA, 25 bp, Homo sapien
gaccagtccaatcagcttcaaccat

SEQ ID NO: 1349466 - DNA, 25 bp, Homo sapien
ttgaccagtccaatcagcttcaacc

SEQ ID NO: 1349467 - DNA, 25 bp, Homo sapien
tcagatcacccctgcttccataggg

SEQ ID NO: 1349468 - DNA, 25 bp, Homo sapien
tccataggggtgtatgggatacatg

SEQ ID NO: 1349469 - DNA, 25 bp, Homo sapien
aaaattgcagtcagatcacccctgc

SEQ ID NO: 1349470 - DNA, 25 bp, Homo sapien
agataacaggaaatcagaaatgttg

SEQ ID NO: 1349471 - DNA, 25 bp, Homo sapien
gaatgctatttctgctagaatcaaa

SEQ ID NO: 1349472 - DNA, 25 bp, Homo sapien
gtaagtcttagaaccatgccactga

SEQ ID NO: 1349473 - DNA, 25 bp, Homo sapien
gaagtaagtcaagagactctactag

SEQ ID NO: 1349474 - DNA, 25 bp, Homo sapien
tgaaactgttcatcaggaatgctat

SEQ ID NO: 1349475 - DNA, 25 bp, Homo sapien
tgctgctgcagagatacagcatcca

SEQ ID NO: 1349476 - DNA, 25 bp, Homo sapien
gctgcagagatacagcatccataat

SEQ ID NO: 1349477 - DNA, 25 bp, Homo sapien
gagatacagcatccataatcggtgc

SEQ ID NO: 1349478 - DNA, 25 bp, Homo sapien
cagcatccataatcggtgcatccat

SEQ ID NO: 1349479 - DNA, 25 bp, Homo sapien
tcctcctgctccctttatgataaat

SEQ ID NO: 1349480 - DNA, 25 bp, Homo sapien
ttattcaccttcatcaagtcctcct

SEQ ID NO: 1349481 - DNA, 25 bp, Homo sapien
cctgctccctttatgataaatgcta

SEQ ID NO: 1349482 - DNA, 25 bp, Homo sapien
ctcctgctccctttatgataaatgc

SEQ ID NO: 1349483 - DNA, 25 bp, Homo sapien
cagcaagacctgcatattctcttag

SEQ ID NO: 1349484 - DNA, 25 bp, Homo sapien
gctcgtacacagtactatcgttggc

SEQ ID NO: 1349485 - DNA, 25 bp, Homo sapien
tactatcgttggctctttcagcaag

SEQ ID NO: 1349486 - DNA, 25 bp, Homo sapien
tctcttagatgttttgagctcagag

SEQ ID NO: 1349487 - DNA, 25 bp, Homo sapien
cgggtattcgtattgctgccagttg

SEQ ID NO: 1349488 - DNA, 25 bp, Homo sapien
cagaaaaccgggtattcgtattgct

SEQ ID NO: 1349489 - DNA, 25 bp, Homo sapien
ttgctgccagttgattttagccatt

SEQ ID NO: 1349490 - DNA, 25 bp, Homo sapien
gattttagccatttcaacatagcca

SEQ ID NO: 1349491 - DNA, 25 bp, Homo sapien
cccagtggaaaaagacaacagtatg

SEQ ID NO: 1349492 - DNA, 25 bp, Homo sapien
actcattgataagttgccccagtgg

SEQ ID NO: 1349493 - DNA, 25 bp, Homo sapien
cagggatggtcacatgatgaagaga

SEQ ID NO: 1349494 - DNA, 25 bp, Homo sapien
tacacagacagagggttacccctag

SEQ ID NO: 1349495 - DNA, 25 bp, Homo sapien
tcattactaacattctccctttaac

SEQ ID NO: 1349496 - DNA, 25 bp, Homo sapien
gtcttcttcattactaacattctcc

SEQ ID NO: 1349497 - DNA, 25 bp, Homo sapien
cttatgttccctttcttctgtcttc

SEQ ID NO: 1349498 - DNA, 25 bp, Homo sapien
tctgtcttcttcattactaacattc

SEQ ID NO: 1349499 - DNA, 25 bp, Homo sapien
agaggtatgggggagacacttctcc

SEQ ID NO: 1349500 - DNA, 25 bp, Homo sapien
catttaagtgatatattctggagag

SEQ ID NO: 1349501 - DNA, 25 bp, Homo sapien
taattccattagtattttgcttaca

SEQ ID NO: 1349502 - DNA, 25 bp, Homo sapien
agtgatatattctggagaggtatgg

SEQ ID NO: 1349503 - DNA, 25 bp, Homo sapien
cagaggtagatgacggtaggccaac

SEQ ID NO: 1349504 - DNA, 25 bp, Homo sapien
ggtagatgacggtaggccaacattg

SEQ ID NO: 1349505 - DNA, 25 bp, Homo sapien
agagatcagaggtagatgacggtag

SEQ ID NO: 1349506 - DNA, 25 bp, Homo sapien
tagatgacggtaggccaacattgtt

SEQ ID NO: 1349507 - DNA, 25 bp, Homo sapien
gaaaagcgtacttatggctcttaat

SEQ ID NO: 1349508 - DNA, 25 bp, Homo sapien
ctttaaatccaggacagtattctgt

SEQ ID NO: 1349509 - DNA, 25 bp, Homo sapien
gaaaagaaaagcgtacttatggctc

SEQ ID NO: 1349510 - DNA, 25 bp, Homo sapien
ccacagcagcgaagaatagaatact

SEQ ID NO: 1349511 - DNA, 25 bp, Homo sapien
ggtaagcttcacgattttgcctgga

SEQ ID NO: 1349512 - DNA, 25 bp, Homo sapien
caggaacctggtaagcttcacgatt

SEQ ID NO: 1349513 - DNA, 25 bp, Homo sapien
cctggtaagcttcacgattttgcct

SEQ ID NO: 1349514 - DNA, 25 bp, Homo sapien
gcttcacgattttgcctggacacat

SEQ ID NO: 1349515 - DNA, 25 bp, Homo sapien
gggattgtagcttttcaacttcagt

SEQ ID NO: 1349516 - DNA, 25 bp, Homo sapien
cactggccttgcctagtaaattggc

SEQ ID NO: 1349517 - DNA, 25 bp, Homo sapien
tatatgggttatggggattgtagct

SEQ ID NO: 1349518 - DNA, 25 bp, Homo sapien
aatttaaagtaggttcttgatggca

SEQ ID NO: 1349519 - DNA, 25 bp, Homo sapien
ggctctctcatgtgtctgggccttc

SEQ ID NO: 1349520 - DNA, 25 bp, Homo sapien
ctgtgttgtgctggcacaaaatgga

SEQ ID NO: 1349521 - DNA, 25 bp, Homo sapien
ggtgggttgctcttttctctggtgt

SEQ ID NO: 1349522 - DNA, 25 bp, Homo sapien
aaatggatgtaagctggcttgcaca

SEQ ID NO: 1349523 - DNA, 25 bp, Homo sapien
gtcaggcactcggaaaactccatga

SEQ ID NO: 1349524 - DNA, 25 bp, Homo sapien
tgtaagtcaggcactcggaaaactc

SEQ ID NO: 1349525 - DNA, 25 bp, Homo sapien
ctgtgaagaggcatgtgtaagtcag

SEQ ID NO: 1349526 - DNA, 25 bp, Homo sapien
cccaggaggatatggtgatgacaac

SEQ ID NO: 1349527 - DNA, 25 bp, Homo sapien
taaaaccagcaagaagaccatttgc

SEQ ID NO: 1349528 - DNA, 25 bp, Homo sapien
atttgctacaacagctttctctcac

SEQ ID NO: 1349529 - DNA, 25 bp, Homo sapien
catttgctacaacagctttctctca

SEQ ID NO: 1349530 - DNA, 25 bp, Homo sapien
cagcaagaagaccatttgctacaac

SEQ ID NO: 1349531 - DNA, 25 bp, Homo sapien
tgagctgatgcaagcatggaattcc

SEQ ID NO: 1349532 - DNA, 25 bp, Homo sapien
ccttagctgatttcttgtcggcaac

SEQ ID NO: 1349533 - DNA, 25 bp, Homo sapien
gaaatgatactgcacaatctgctca

SEQ ID NO: 1349534 - DNA, 25 bp, Homo sapien
gcctgtttctcaccttgctctggat

SEQ ID NO: 1349535 - DNA, 25 bp, Homo sapien
aacgaataggacagtgacagtacat

SEQ ID NO: 1349536 - DNA, 25 bp, Homo sapien
tcatgcaagtgttgcactctgagtg

SEQ ID NO: 1349537 - DNA, 25 bp, Homo sapien
tctgagtgtggaatgtgagatgact

SEQ ID NO: 1349538 - DNA, 25 bp, Homo sapien
gatgtctagtcacaaaacccttatg

SEQ ID NO: 1349539 - DNA, 25 bp, Homo sapien
ctggaatatcactgtctaatagaac

SEQ ID NO: 1349540 - DNA, 25 bp, Homo sapien
tggctttgcattacaataaactgta

SEQ ID NO: 1349541 - DNA, 25 bp, Homo sapien
caaatatctgtgctatccaatgcag

SEQ ID NO: 1349542 - DNA, 25 bp, Homo sapien
gatggttcagccctggaatataagt

SEQ ID NO: 1349543 - DNA, 25 bp, Homo sapien
tataatttggcttgtaatcagttac

SEQ ID NO: 1349544 - DNA, 25 bp, Homo sapien
ttgaaaactggtttaagcctggatg

SEQ ID NO: 1349545 - DNA, 25 bp, Homo sapien
actggtttaagcctggatgcttcca

SEQ ID NO: 1349546 - DNA, 25 bp, Homo sapien
cattttataatttggcttgtaatca

SEQ ID NO: 1349547 - DNA, 25 bp, Homo sapien
tggtcgacatcagttttggccccaa

SEQ ID NO: 1349548 - DNA, 25 bp, Homo sapien
cacactgactagcagatgtgccata

SEQ ID NO: 1349549 - DNA, 25 bp, Homo sapien
gagaaagctgcatggacagtaagga

SEQ ID NO: 1349550 - DNA, 25 bp, Homo sapien
acagtaaggaggcagatggtcgaca

SEQ ID NO: 1349551 - DNA, 25 bp, Homo sapien
taatgcagcctatcacttatccagc

SEQ ID NO: 1349552 - DNA, 25 bp, Homo sapien
taatgcccagtttatgaaagtccaa

SEQ ID NO: 1349553 - DNA, 25 bp, Homo sapien
tttggcttctggactagcccctagc

SEQ ID NO: 1349554 - DNA, 25 bp, Homo sapien
tcaaaaactgatctgggctaggact

SEQ ID NO: 1349555 - DNA, 25 bp, Homo sapien
agggtattctcagtcattgctattg

SEQ ID NO: 1349556 - DNA, 25 bp, Homo sapien
cagaccactttggtttgcacccagc

SEQ ID NO: 1349557 - DNA, 25 bp, Homo sapien
gccttcaacttggtactgtttttca

SEQ ID NO: 1349558 - DNA, 25 bp, Homo sapien
gctctgccagttactagatcattga

SEQ ID NO: 1349559 - DNA, 25 bp, Homo sapien
agtgtggtggtcttcgcttatagtc

SEQ ID NO: 1349560 - DNA, 25 bp, Homo sapien
caagtgtggtggtcttcgcttatag

SEQ ID NO: 1349561 - DNA, 25 bp, Homo sapien
gccaagtgtggtggtcttcgcttat

SEQ ID NO: 1349562 - DNA, 25 bp, Homo sapien
ccaagtgtggtggtcttcgcttata

SEQ ID NO: 1349563 - DNA, 25 bp, Homo sapien
cccgcaactttccttgcaactagaa

SEQ ID NO: 1349564 - DNA, 25 bp, Homo sapien
tctcaacaaatttgcagagttccct

SEQ ID NO: 1349565 - DNA, 25 bp, Homo sapien
ggtctgcatgcctctcagtaaactc

SEQ ID NO: 1349566 - DNA, 25 bp, Homo sapien
tctgtgccgatttataactttgtga

SEQ ID NO: 1349567 - DNA, 25 bp, Homo sapien
acttcactcctatgaattgcatatg

SEQ ID NO: 1349568 - DNA, 25 bp, Homo sapien
gtttttcagagctatccgttaggct

SEQ ID NO: 1349569 - DNA, 25 bp, Homo sapien
tatccgttaggctagtttcaacttc

SEQ ID NO: 1349570 - DNA, 25 bp, Homo sapien
ctgcagcagccaagtaaattccttt

SEQ ID NO: 1349571 - DNA, 25 bp, Homo sapien
cattttccatgcaataattggattt

SEQ ID NO: 1349572 - DNA, 25 bp, Homo sapien
ccatgcaataattggatttctgtag

SEQ ID NO: 1349573 - DNA, 25 bp, Homo sapien
tctgtagtactttccttcgtgcagg

SEQ ID NO: 1349574 - DNA, 25 bp, Homo sapien
ttcgtgcaggcttatagctctttca

SEQ ID NO: 1349575 - DNA, 25 bp, Homo sapien
ccatgtcgataatatctagtatttc

SEQ ID NO: 1349576 - DNA, 25 bp, Homo sapien
ctttgtgtactgataattatcttta

SEQ ID NO: 1349577 - DNA, 25 bp, Homo sapien
actgtaagttttactggactctttg

SEQ ID NO: 1349578 - DNA, 25 bp, Homo sapien
tcacaacacttccatgtcgataata

SEQ ID NO: 1349579 - DNA, 25 bp, Homo sapien
gatgaagtatctcagagcaggtctg

SEQ ID NO: 1349580 - DNA, 25 bp, Homo sapien
ggtcccaagtatctatcaacacaga

SEQ ID NO: 1349581 - DNA, 25 bp, Homo sapien
tctgtgaccccaaacaagagcactg

SEQ ID NO: 1349582 - DNA, 25 bp, Homo sapien
ttattggtcccgagaacaggccaca

SEQ ID NO: 1349583 - DNA, 25 bp, Homo sapien
ctccctctctatctttctctttgtg

SEQ ID NO: 1349584 - DNA, 25 bp, Homo sapien
ctatctttctctttgtgccttcgat

SEQ ID NO: 1349585 - DNA, 25 bp, Homo sapien
tctttctctttgtgccttcgattgc

SEQ ID NO: 1349586 - DNA, 25 bp, Homo sapien
tccctctctatctttctctttgtgc

SEQ ID NO: 1349587 - DNA, 25 bp, Homo sapien
gtggtaacctattgcttccctgtcg

SEQ ID NO: 1349588 - DNA, 25 bp, Homo sapien
ggtaacctattgcttccctgtcgct

SEQ ID NO: 1349589 - DNA, 25 bp, Homo sapien
tggtaacctattgcttccctgtcgc

SEQ ID NO: 1349590 - DNA, 25 bp, Homo sapien
tcttctgccacttccatagttattg

SEQ ID NO: 1349591 - DNA, 25 bp, Homo sapien
tctgccacttccatagttattgctg

SEQ ID NO: 1349592 - DNA, 25 bp, Homo sapien
aatcttctgccacttccatagttat

SEQ ID NO: 1349593 - DNA, 25 bp, Homo sapien
ctgccacttccatagttattgctgc

SEQ ID NO: 1349594 - DNA, 25 bp, Homo sapien
atactggctccaaagtttcttccct

SEQ ID NO: 1349595 - DNA, 25 bp, Homo sapien
tgtgataattgccaaaatcattgta

SEQ ID NO: 1349596 - DNA, 25 bp, Homo sapien
ctgattgtgataattgccaaaatca

SEQ ID NO: 1349597 - DNA, 25 bp, Homo sapien
gtgataattgccaaaatcattgtag

SEQ ID NO: 1349598 - DNA, 25 bp, Homo sapien
gattgtgataattgccaaaatcatt

SEQ ID NO: 1349599 - DNA, 25 bp, Homo sapien
tctcttgtttggcagggctttccta

SEQ ID NO: 1349600 - DNA, 25 bp, Homo sapien
actagccatctcttgtttggcaggg

SEQ ID NO: 1349601 - DNA, 25 bp, Homo sapien
tcttgtttggcagggctttcctaac

SEQ ID NO: 1349602 - DNA, 25 bp, Homo sapien
tagccatctcttgtttggcagggct

SEQ ID NO: 1349603 - DNA, 25 bp, Homo sapien
tttctatattgttcagaataatttc

SEQ ID NO: 1349604 - DNA, 25 bp, Homo sapien
cttgacactgcctctgtcagtcgta

SEQ ID NO: 1349605 - DNA, 25 bp, Homo sapien
gacactgcctctgtcagtcgtaatt

SEQ ID NO: 1349606 - DNA, 25 bp, Homo sapien
cctctgtcagtcgtaatttcaatca

SEQ ID NO: 1349607 - DNA, 25 bp, Homo sapien
aaatatctttttcacagttaagcgg

SEQ ID NO: 1349608 - DNA, 25 bp, Homo sapien
atctttttcacagttaagcgggcac

SEQ ID NO: 1349609 - DNA, 25 bp, Homo sapien
atatctttttcacagttaagcgggc

SEQ ID NO: 1349610 - DNA, 25 bp, Homo sapien
tatctttttcacagttaagcgggca

SEQ ID NO: 1349611 - DNA, 25 bp, Homo sapien
atcttctcttgagacagctctcttt

SEQ ID NO: 1349612 - DNA, 25 bp, Homo sapien
tctctttggttccacaactcttcca

SEQ ID NO: 1349613 - DNA, 25 bp, Homo sapien
ttctcttgagacagctctctttggt

SEQ ID NO: 1349614 - DNA, 25 bp, Homo sapien
tttggttccacaactcttccatcca

SEQ ID NO: 1349615 - DNA, 25 bp, Homo sapien
acagtggcataagtgacaaacccaa

SEQ ID NO: 1349616 - DNA, 25 bp, Homo sapien
tcctccacagtggcataagtgacaa

SEQ ID NO: 1349617 - DNA, 25 bp, Homo sapien
tccacagtggcataagtgacaaacc

SEQ ID NO: 1349618 - DNA, 25 bp, Homo sapien
ccacagtggcataagtgacaaaccc

SEQ ID NO: 1349619 - DNA, 25 bp, Homo sapien
catggctcaaatggtccctcaggct

SEQ ID NO: 1349620 - DNA, 25 bp, Homo sapien
tattccccatggctcaaatggtccc

SEQ ID NO: 1349621 - DNA, 25 bp, Homo sapien
tcaaagcccagccatccaatgaaaa

SEQ ID NO: 1349622 - DNA, 25 bp, Homo sapien
ttcagtattccccatggctcaaatg

SEQ ID NO: 1349623 - DNA, 25 bp, Homo sapien
aattgataagatagtttttcctcag

SEQ ID NO: 1349624 - DNA, 25 bp, Homo sapien
atttagctggaaattgataagatag

SEQ ID NO: 1349625 - DNA, 25 bp, Homo sapien
aagagggtaccgcatgtttaagtat

SEQ ID NO: 1349626 - DNA, 25 bp, Homo sapien
gccatcaaggagttcataaacataa

SEQ ID NO: 1349627 - DNA, 25 bp, Homo sapien
tagcagagatcatggtcctgaaatt

SEQ ID NO: 1349628 - DNA, 25 bp, Homo sapien
cagcttttgaggctttaaactgaat

SEQ ID NO: 1349629 - DNA, 25 bp, Homo sapien
gctttaaactgaatttgtaaatcca

SEQ ID NO: 1349630 - DNA, 25 bp, Homo sapien
ctgaatttgtaaatccatagcagag

SEQ ID NO: 1349631 - DNA, 25 bp, Homo sapien
agttgcagagtccaggtcgaaaatg

SEQ ID NO: 1349632 - DNA, 25 bp, Homo sapien
cagagtccaggtcgaaaatggaggc

SEQ ID NO: 1349633 - DNA, 25 bp, Homo sapien
gtccaggtcgaaaatggaggcagct

SEQ ID NO: 1349634 - DNA, 25 bp, Homo sapien
ttggctgctgggtcggtcccgccca

SEQ ID NO: 1349635 - DNA, 25 bp, Homo sapien
gagagcactagggacacgagttcat

SEQ ID NO: 1349636 - DNA, 25 bp, Homo sapien
cactagggacacgagttcatcccct

SEQ ID NO: 1349637 - DNA, 25 bp, Homo sapien
tcgtgctccccggagtagcatacag

SEQ ID NO: 1349638 - DNA, 25 bp, Homo sapien
cccggagtagcatacagcatgctga

SEQ ID NO: 1349639 - DNA, 25 bp, Homo sapien
ggttgcctgatagtatagtcactgt

SEQ ID NO: 1349640 - DNA, 25 bp, Homo sapien
ttttgggtccagaatgaagcattca

SEQ ID NO: 1349641 - DNA, 25 bp, Homo sapien
tcccaatctgtaggttgcctgatag

SEQ ID NO: 1349642 - DNA, 25 bp, Homo sapien
tcaaacgaacatctcatctcttgcc

SEQ ID NO: 1349643 - DNA, 25 bp, Homo sapien
tcttgcacagtgcacagttttttgc

SEQ ID NO: 1349644 - DNA, 25 bp, Homo sapien
ctctgaagtcaccaggagttctata

SEQ ID NO: 1349645 - DNA, 25 bp, Homo sapien
gttttttgcgtcctctgaagtcacc

SEQ ID NO: 1349646 - DNA, 25 bp, Homo sapien
catttctctttagctcccaagagca

SEQ ID NO: 1349647 - DNA, 25 bp, Homo sapien
cttctttcagaatacatgggtataa

SEQ ID NO: 1349648 - DNA, 25 bp, Homo sapien
ctttcagaatacatgggtataattt

SEQ ID NO: 1349649 - DNA, 25 bp, Homo sapien
ttctttcagaatacatgggtataat

SEQ ID NO: 1349650 - DNA, 25 bp, Homo sapien
ccttctttcagaatacatgggtata

SEQ ID NO: 1349651 - DNA, 25 bp, Homo sapien
tgttgaatatgatttcaattgtcat

SEQ ID NO: 1349652 - DNA, 25 bp, Homo sapien
tttgttgaatatgatttcaattgtc

SEQ ID NO: 1349653 - DNA, 25 bp, Homo sapien
ttgttgaatatgatttcaattgtca

SEQ ID NO: 1349654 - DNA, 25 bp, Homo sapien
acagaacatttgaaggcagacccca

SEQ ID NO: 1349655 - DNA, 25 bp, Homo sapien
catcttgtgaggctatttagggaat

SEQ ID NO: 1349656 - DNA, 25 bp, Homo sapien
aatgacaaagtgtgttggacacgac

SEQ ID NO: 1349657 - DNA, 25 bp, Homo sapien
gactcacagaagagtcagatctttg

SEQ ID NO: 1349658 - DNA, 25 bp, Homo sapien
tgcgagggtatgcggcttcactcct

SEQ ID NO: 1349659 - DNA, 25 bp, Homo sapien
aagtcagcaagactacgaatccacc

SEQ ID NO: 1349660 - DNA, 25 bp, Homo sapien
ctgaagtcagcaagactacgaatcc

SEQ ID NO: 1349661 - DNA, 25 bp, Homo sapien
tcagcaagactacgaatccaccaga

SEQ ID NO: 1349662 - DNA, 25 bp, Homo sapien
ttcaatctcagatttccgcaaatgt

SEQ ID NO: 1349663 - DNA, 25 bp, Homo sapien
ttctcttcaggtttgaattcaactg

SEQ ID NO: 1349664 - DNA, 25 bp, Homo sapien
gccacaaccagcatattctgtttct

SEQ ID NO: 1349665 - DNA, 25 bp, Homo sapien
attattccctttagccacaaccagc

SEQ ID NO: 1349666 - DNA, 25 bp, Homo sapien
tccctttagccacaaccagcatatt

SEQ ID NO: 1349667 - DNA, 25 bp, Homo sapien
ctgcttttgtgatcttccacagata

SEQ ID NO: 1349668 - DNA, 25 bp, Homo sapien
tttgtgatcttccacagatatgtgc

SEQ ID NO: 1349669 - DNA, 25 bp, Homo sapien
tctcaaataagacggggtccttgct

SEQ ID NO: 1349670 - DNA, 25 bp, Homo sapien
agccgagcccctgaaggtgtctcaa

SEQ ID NO: 1349671 - DNA, 25 bp, Homo sapien
caaatagtcatagcacttccctggc

SEQ ID NO: 1349672 - DNA, 25 bp, Homo sapien
atctgcttagttgcataaaagaaac

SEQ ID NO: 1349673 - DNA, 25 bp, Homo sapien
gaaactatagactgggaaaataggc

SEQ ID NO: 1349674 - DNA, 25 bp, Homo sapien
tccaggaattacagtgatccaaata

SEQ ID NO: 1349675 - DNA, 25 bp, Homo sapien
ggacatttctaggacctggagcata

SEQ ID NO: 1349676 - DNA, 25 bp, Homo sapien
tttctaggacctggagcatagtgga

SEQ ID NO: 1349677 - DNA, 25 bp, Homo sapien
tcagaagcagttcaggacatttcta

SEQ ID NO: 1349678 - DNA, 25 bp, Homo sapien
gcagttcaggacatttctaggacct

SEQ ID NO: 1349679 - DNA, 25 bp, Homo sapien
taatttagatgagcctactctcccc

SEQ ID NO: 1349680 - DNA, 25 bp, Homo sapien
gcagagcagctgaacaatgaatagg

SEQ ID NO: 1349681 - DNA, 25 bp, Homo sapien
cagctttaactatgccacagatttt

SEQ ID NO: 1349682 - DNA, 25 bp, Homo sapien
ttgtggatgaggtttatgttaacca

SEQ ID NO: 1349683 - DNA, 25 bp, Homo sapien
gaactagccagtgccctagtggcca

SEQ ID NO: 1349684 - DNA, 25 bp, Homo sapien
ggaactagccagtgccctagtggcc

SEQ ID NO: 1349685 - DNA, 25 bp, Homo sapien
caggaactagccagtgccctagtgg

SEQ ID NO: 1349686 - DNA, 25 bp, Homo sapien
aactagccagtgccctagtggccat

SEQ ID NO: 1349687 - DNA, 25 bp, Homo sapien
tggaaaacccaaagtgtgagtgtga

SEQ ID NO: 1349688 - DNA, 25 bp, Homo sapien
tctgtggttgggctaagtgactgtc

SEQ ID NO: 1349689 - DNA, 25 bp, Homo sapien
gctgaggtattggaattctgtggtt

SEQ ID NO: 1349690 - DNA, 25 bp, Homo sapien
cagatgaatacagatgaagagtgag

SEQ ID NO: 1349691 - DNA, 25 bp, Homo sapien
gctgattcagcaatagctttacaat

SEQ ID NO: 1349692 - DNA, 25 bp, Homo sapien
gcaatagctttacaatctgtcagtt

SEQ ID NO: 1349693 - DNA, 25 bp, Homo sapien
gattcagcaatagctttacaatctg

SEQ ID NO: 1349694 - DNA, 25 bp, Homo sapien
gctttacaatctgtcagtttagtct

SEQ ID NO: 1349695 - DNA, 25 bp, Homo sapien
tcacagggtgttgtttcgatgggca

SEQ ID NO: 1349696 - DNA, 25 bp, Homo sapien
aaagaggagagttacgtctagctta

SEQ ID NO: 1349697 - DNA, 25 bp, Homo sapien
tacgtctagcttaggcttacaggga

SEQ ID NO: 1349698 - DNA, 25 bp, Homo sapien
gagctgccctataacagcagtaaga

SEQ ID NO: 1349699 - DNA, 25 bp, Homo sapien
ttctgagtttaagagctgtttcctg

SEQ ID NO: 1349700 - DNA, 25 bp, Homo sapien
tgaataaagtctgaagcttgaccac

SEQ ID NO: 1349701 - DNA, 25 bp, Homo sapien
gaataaagtctgaagcttgaccaca

SEQ ID NO: 1349702 - DNA, 25 bp, Homo sapien
aataaagtctgaagcttgaccacat

SEQ ID NO: 1349703 - DNA, 25 bp, Homo sapien
ctaaacatatcacagagaatatttt

SEQ ID NO: 1349704 - DNA, 25 bp, Homo sapien
aacatatcacagagaatattttata

SEQ ID NO: 1349705 - DNA, 25 bp, Homo sapien
catatcacagagaatattttatatt

SEQ ID NO: 1349706 - DNA, 25 bp, Homo sapien
taaacatatcacagagaatatttta

SEQ ID NO: 1349707 - DNA, 25 bp, Homo sapien
aaaatcctgtgtatgaaacttaggc

SEQ ID NO: 1349708 - DNA, 25 bp, Homo sapien
gtcatggtcaaaatcctgtgtatga

SEQ ID NO: 1349709 - DNA, 25 bp, Homo sapien
tcccattccgctagatgacatttct

SEQ ID NO: 1349710 - DNA, 25 bp, Homo sapien
ttctaaaacacaatttgcaacactg

SEQ ID NO: 1349711 - DNA, 25 bp, Homo sapien
aacaattcattagtcgctaacggtt

SEQ ID NO: 1349712 - DNA, 25 bp, Homo sapien
tagggacatctgttgatgacactga

SEQ ID NO: 1349713 - DNA, 25 bp, Homo sapien
gggaaattcaaccaccaaatcattc

SEQ ID NO: 1349714 - DNA, 25 bp, Homo sapien
taggtgcaactttactgttgggaaa

SEQ ID NO: 1349715 - DNA, 25 bp, Homo sapien
tggaataacgtatccacatttgaaa

SEQ ID NO: 1349716 - DNA, 25 bp, Homo sapien
ataacgtatccacatttgaaacaag

SEQ ID NO: 1349717 - DNA, 25 bp, Homo sapien
gaataacgtatccacatttgaaaca

SEQ ID NO: 1349718 - DNA, 25 bp, Homo sapien
cttggaataacgtatccacatttga

SEQ ID NO: 1349719 - DNA, 25 bp, Homo sapien
tggtatataattagtcaagtcctgc

SEQ ID NO: 1349720 - DNA, 25 bp, Homo sapien
tctgtctcagactgcagactgcttg

SEQ ID NO: 1349721 - DNA, 25 bp, Homo sapien
agactgcttgcaagactgttgccca

SEQ ID NO: 1349722 - DNA, 25 bp, Homo sapien
ttctccactgtaacttgctccatca

SEQ ID NO: 1349723 - DNA, 25 bp, Homo sapien
tgcttgcacatactgcaaaattata

SEQ ID NO: 1349724 - DNA, 25 bp, Homo sapien
tctgcttgcacatactgcaaaatta

SEQ ID NO: 1349725 - DNA, 25 bp, Homo sapien
ccatctgcttgcacatactgcaaaa

SEQ ID NO: 1349726 - DNA, 25 bp, Homo sapien
catccataatttgtgataaattcct

SEQ ID NO: 1349727 - DNA, 25 bp, Homo sapien
ttctttttctatattgtgtccatac

SEQ ID NO: 1349728 - DNA, 25 bp, Homo sapien
attgtgtccatacaaatccttatcc

SEQ ID NO: 1349729 - DNA, 25 bp, Homo sapien
tgtccatacaaatccttatcctctt

SEQ ID NO: 1349730 - DNA, 25 bp, Homo sapien
tgtgtccatacaaatccttatcctc

SEQ ID NO: 1349731 - DNA, 25 bp, Homo sapien
tcaagtaaggtaacgcaggttggac

SEQ ID NO: 1349732 - DNA, 25 bp, Homo sapien
agaatgccgaaatccagccccaaat

SEQ ID NO: 1349733 - DNA, 25 bp, Homo sapien
tactggggacagaatgccgaaatcc

SEQ ID NO: 1349734 - DNA, 25 bp, Homo sapien
ggactttctataaggctgccttccg

SEQ ID NO: 1349735 - DNA, 25 bp, Homo sapien
atcttctctgatggcatgctgtacc

SEQ ID NO: 1349736 - DNA, 25 bp, Homo sapien
catcttctctgatggcatgctgtac

SEQ ID NO: 1349737 - DNA, 25 bp, Homo sapien
ttcatctcatcttctctgatggcat

SEQ ID NO: 1349738 - DNA, 25 bp, Homo sapien
ctcatcttctctgatggcatgctgt

SEQ ID NO: 1349739 - DNA, 25 bp, Homo sapien
taaaggcatgcatacagctgcctcc

SEQ ID NO: 1349740 - DNA, 25 bp, Homo sapien
gctcccaacttcagcgtaatagcta

SEQ ID NO: 1349741 - DNA, 25 bp, Homo sapien
caacttcagcgtaatagctaaaggc

SEQ ID NO: 1349742 - DNA, 25 bp, Homo sapien
gcgtaatagctaaaggcatgcatac

SEQ ID NO: 1349743 - DNA, 25 bp, Homo sapien
tacacagttcctccagtagtacttt

SEQ ID NO: 1349744 - DNA, 25 bp, Homo sapien
gaaactcgaatacaattttactgac

SEQ ID NO: 1349745 - DNA, 25 bp, Homo sapien
caaggtgaattgactgaaactcgaa

SEQ ID NO: 1349746 - DNA, 25 bp, Homo sapien
taactcagtacaaaatggggccttc

SEQ ID NO: 1349747 - DNA, 25 bp, Homo sapien
ctgacagccacataactcagtacaa

SEQ ID NO: 1349748 - DNA, 25 bp, Homo sapien
ttcgtctgcgccaaactgcttcttc

SEQ ID NO: 1349749 - DNA, 25 bp, Homo sapien
cttcgtctgcgccaaactgcttctt

SEQ ID NO: 1349750 - DNA, 25 bp, Homo sapien
ttatagctatcttgccccacaggct

SEQ ID NO: 1349751 - DNA, 25 bp, Homo sapien
atgggaattttatagctatcttgcc

SEQ ID NO: 1349752 - DNA, 25 bp, Homo sapien
tcatacaatgtcgttattttcaagc

SEQ ID NO: 1349753 - DNA, 25 bp, Homo sapien
acaatgtcgttattttcaagctggg

SEQ ID NO: 1349754 - DNA, 25 bp, Homo sapien
gctggggttgctggttccatgactc

SEQ ID NO: 1349755 - DNA, 25 bp, Homo sapien
gggttgctggttccatgactcaatc

SEQ ID NO: 1349756 - DNA, 25 bp, Homo sapien
acacacactggcctgcgcccactgt

SEQ ID NO: 1349757 - DNA, 25 bp, Homo sapien
tcgttgctgccttgcagtttggtct

SEQ ID NO: 1349758 - DNA, 25 bp, Homo sapien
gcctcgttgctgccttgcagtttgg

SEQ ID NO: 1349759 - DNA, 25 bp, Homo sapien
gcgcacggtgcgcacacacactggc

SEQ ID NO: 1349760 - DNA, 25 bp, Homo sapien
gacccctcagaaataacaccgcata

SEQ ID NO: 1349761 - DNA, 25 bp, Homo sapien
aacagacccctcagaaataacaccg

SEQ ID NO: 1349762 - DNA, 25 bp, Homo sapien
agacccctcagaaataacaccgcat

SEQ ID NO: 1349763 - DNA, 25 bp, Homo sapien
caccgcatatctacaactatgtgat

SEQ ID NO: 1349764 - DNA, 25 bp, Homo sapien
gctgaagtactacattcagcactga

SEQ ID NO: 1349765 - DNA, 25 bp, Homo sapien
ggcagagagagtgctgaagtactac

SEQ ID NO: 1349766 - DNA, 25 bp, Homo sapien
gagagcatgtacatccttcaggcag

SEQ ID NO: 1349767 - DNA, 25 bp, Homo sapien
cattcagcactgagagcatgtacat

SEQ ID NO: 1349768 - DNA, 25 bp, Homo sapien
tcatcaaagcatgacatagctgtgt

SEQ ID NO: 1349769 - DNA, 25 bp, Homo sapien
accatcatcaaagcatgacatagct

SEQ ID NO: 1349770 - DNA, 25 bp, Homo sapien
ccatcatcaaagcatgacatagctg

SEQ ID NO: 1349771 - DNA, 25 bp, Homo sapien
catcatcaaagcatgacatagctgt

SEQ ID NO: 1349772 - DNA, 25 bp, Homo sapien
caattgcaatgtgctgtttgccaca

SEQ ID NO: 1349773 - DNA, 25 bp, Homo sapien
cccaattgcaatgtgctgtttgcca

SEQ ID NO: 1349774 - DNA, 25 bp, Homo sapien
aattgcaatgtgctgtttgccacag

SEQ ID NO: 1349775 - DNA, 25 bp, Homo sapien
ccaattgcaatgtgctgtttgccac

SEQ ID NO: 1349776 - DNA, 25 bp, Homo sapien
aatgtgaaagctcctagtttagccc

SEQ ID NO: 1349777 - DNA, 25 bp, Homo sapien
tgtagaagggtgtgccaaacagcag

SEQ ID NO: 1349778 - DNA, 25 bp, Homo sapien
aacagaggcttacatattggcagag

SEQ ID NO: 1349779 - DNA, 25 bp, Homo sapien
tgccataccgtagctgatcagcata

SEQ ID NO: 1349780 - DNA, 25 bp, Homo sapien
ggtaggttcccacgtgtttgcgcat

SEQ ID NO: 1349781 - DNA, 25 bp, Homo sapien
cacttgggtaggcattgtgactgaa

SEQ ID NO: 1349782 - DNA, 25 bp, Homo sapien
tacacgtgcacaagaagataacttc

SEQ ID NO: 1349783 - DNA, 25 bp, Homo sapien
tgtatctttggctcagctcagcaga

SEQ ID NO: 1349784 - DNA, 25 bp, Homo sapien
taagcattttactgtcctgcaagtg

SEQ ID NO: 1349785 - DNA, 25 bp, Homo sapien
gcattaatctctgtaggactcgtgt

SEQ ID NO: 1349786 - DNA, 25 bp, Homo sapien
gcaagtggttttctagcttcctccc

SEQ ID NO: 1349787 - DNA, 25 bp, Homo sapien
tcagtgctctaaatgggaaagacct

SEQ ID NO: 1349788 - DNA, 25 bp, Homo sapien
cctggcagccagccgtttgaaacat

SEQ ID NO: 1349789 - DNA, 25 bp, Homo sapien
gcctggcagccagccgtttgaaaca

SEQ ID NO: 1349790 - DNA, 25 bp, Homo sapien
ggcctggcagccagccgtttgaaac

SEQ ID NO: 1349791 - DNA, 25 bp, Homo sapien
attgtgcttgtgcttgaatatctct

SEQ ID NO: 1349792 - DNA, 25 bp, Homo sapien
aattagcataacttagtggattaca

SEQ ID NO: 1349793 - DNA, 25 bp, Homo sapien
ggttgactgacagtcattgtgcttg

SEQ ID NO: 1349794 - DNA, 25 bp, Homo sapien
gcttgaatatctctgacagatcatc

SEQ ID NO: 1349795 - DNA, 25 bp, Homo sapien
tattaaagtaactacctcctgagcc

SEQ ID NO: 1349796 - DNA, 25 bp, Homo sapien
cctgagccaatttgcgaacgagaca

SEQ ID NO: 1349797 - DNA, 25 bp, Homo sapien
tgtcatgtcacttgtgtgcagttca

SEQ ID NO: 1349798 - DNA, 25 bp, Homo sapien
cacaaagcggcagtgctttgtactg

SEQ ID NO: 1349799 - DNA, 25 bp, Homo sapien
gaacgtatcactaatggcatttctc

SEQ ID NO: 1349800 - DNA, 25 bp, Homo sapien
gcaatcagatctttagcaagtctag

SEQ ID NO: 1349801 - DNA, 25 bp, Homo sapien
taaagacattcatgaacgtatcact

SEQ ID NO: 1349802 - DNA, 25 bp, Homo sapien
gggatcattgccacagacatcaata

SEQ ID NO: 1349803 - DNA, 25 bp, Homo sapien
ttttgcggagattcatctacactgt

SEQ ID NO: 1349804 - DNA, 25 bp, Homo sapien
cattttgcggagattcatctacact

SEQ ID NO: 1349805 - DNA, 25 bp, Homo sapien
ccattttgcggagattcatctacac

SEQ ID NO: 1349806 - DNA, 25 bp, Homo sapien
attttgcggagattcatctacactg

SEQ ID NO: 1349807 - DNA, 25 bp, Homo sapien
tgtttagggtcagatttaccaacca

SEQ ID NO: 1349808 - DNA, 25 bp, Homo sapien
caaaataatcttagtagtaaacaat

SEQ ID NO: 1349809 - DNA, 25 bp, Homo sapien
cagatttaccaaccaaaataatctt

SEQ ID NO: 1349810 - DNA, 25 bp, Homo sapien
acaatttatttttgtaatcaaccat

SEQ ID NO: 1349811 - DNA, 25 bp, Homo sapien
aggtactgtttattatatgaccagc

SEQ ID NO: 1349812 - DNA, 25 bp, Homo sapien
tttattatatgaccagcttagaaaa

SEQ ID NO: 1349813 - DNA, 25 bp, Homo sapien
tttttcaatttgagagcaggtactg

SEQ ID NO: 1349814 - DNA, 25 bp, Homo sapien
gagagcaggtactgtttattatatg

SEQ ID NO: 1349815 - DNA, 25 bp, Homo sapien
ttccgcctcgtggagaagataattc

SEQ ID NO: 1349816 - DNA, 25 bp, Homo sapien
cgtggagaagataattcaaagggcc

SEQ ID NO: 1349817 - DNA, 25 bp, Homo sapien
aagcgttgtctgtcaaagcaattat

SEQ ID NO: 1349818 - DNA, 25 bp, Homo sapien
cgcctcgtggagaagataattcaaa

SEQ ID NO: 1349819 - DNA, 25 bp, Homo sapien
gacgaaggtgaagaagccgcaacac

SEQ ID NO: 1349820 - DNA, 25 bp, Homo sapien
tgacgaaggtgaagaagccgcaaca

SEQ ID NO: 1349821 - DNA, 25 bp, Homo sapien
tttgacgaaggtgaagaagccgcaa

SEQ ID NO: 1349822 - DNA, 25 bp, Homo sapien
cgaaggtgaagaagccgcaacacct

SEQ ID NO: 1349823 - DNA, 25 bp, Homo sapien
tggccacaccattgatacccctgat

SEQ ID NO: 1349824 - DNA, 25 bp, Homo sapien
ttttggccacaccattgatacccct

SEQ ID NO: 1349825 - DNA, 25 bp, Homo sapien
ttggccacaccattgatacccctga

SEQ ID NO: 1349826 - DNA, 25 bp, Homo sapien
ggccacaccattgatacccctgatc

SEQ ID NO: 1349827 - DNA, 25 bp, Homo sapien
gccttcctcaccattcgaatttcag

SEQ ID NO: 1349828 - DNA, 25 bp, Homo sapien
ttgccttcctcaccattcgaatttc

SEQ ID NO: 1349829 - DNA, 25 bp, Homo sapien
tttcttgccttcctcaccattcgaa

SEQ ID NO: 1349830 - DNA, 25 bp, Homo sapien
tcttgccttcctcaccattcgaatt

SEQ ID NO: 1349831 - DNA, 25 bp, Homo sapien
tgatagtgctttgctttttcacaga

SEQ ID NO: 1349832 - DNA, 25 bp, Homo sapien
gtgctttgctttttcacagataagc

SEQ ID NO: 1349833 - DNA, 25 bp, Homo sapien
ctttgctttttcacagataagcttc

SEQ ID NO: 1349834 - DNA, 25 bp, Homo sapien
tagtgctttgctttttcacagataa

SEQ ID NO: 1349835 - DNA, 25 bp, Homo sapien
tcttcagctctgcgaaattctttcg

SEQ ID NO: 1349836 - DNA, 25 bp, Homo sapien
agctctgcgaaattctttcgctttt

SEQ ID NO: 1349837 - DNA, 25 bp, Homo sapien
tcagctctgcgaaattctttcgctt

SEQ ID NO: 1349838 - DNA, 25 bp, Homo sapien
cttcagctctgcgaaattctttcgc

SEQ ID NO: 1349839 - DNA, 25 bp, Homo sapien
cacagcaggaaccttctttttcttc

SEQ ID NO: 1349840 - DNA, 25 bp, Homo sapien
cttctttttcttctcttcaacacct

SEQ ID NO: 1349841 - DNA, 25 bp, Homo sapien
ggcacagcaggaaccttctttttct

SEQ ID NO: 1349842 - DNA, 25 bp, Homo sapien
ctggcacagcaggaaccttcttttt

SEQ ID NO: 1349843 - DNA, 25 bp, Homo sapien
ggtccacatgacgatatcctctaac

SEQ ID NO: 1349844 - DNA, 25 bp, Homo sapien
tcaggtgagaggagtctggtccaca

SEQ ID NO: 1349845 - DNA, 25 bp, Homo sapien
tctggtccacatgacgatatcctct

SEQ ID NO: 1349846 - DNA, 25 bp, Homo sapien
tgagaggagtctggtccacatgacg

SEQ ID NO: 1349847 - DNA, 25 bp, Homo sapien
ttgctgctctccactgttgtcaaca

SEQ ID NO: 1349848 - DNA, 25 bp, Homo sapien
acctccatagaacatgtgcataaat

SEQ ID NO: 1349849 - DNA, 25 bp, Homo sapien
aagtactatatctggtgaggctggc

SEQ ID NO: 1349850 - DNA, 25 bp, Homo sapien
catgtgcataaatgaataagtacta

SEQ ID NO: 1349851 - DNA, 25 bp, Homo sapien
tcaatttctcttccgccaacatcac

SEQ ID NO: 1349852 - DNA, 25 bp, Homo sapien
tcttctctaggagctactatccttg

SEQ ID NO: 1349853 - DNA, 25 bp, Homo sapien
taagcagccaatatcatctttgtgc

SEQ ID NO: 1349854 - DNA, 25 bp, Homo sapien
gcaatctatggcttctatggctgaa

SEQ ID NO: 1349855 - DNA, 25 bp, Homo sapien
caaatcttaggtctagaacaatgca

SEQ ID NO: 1349856 - DNA, 25 bp, Homo sapien
tctaaatcctggatctctaagtcat

SEQ ID NO: 1349857 - DNA, 25 bp, Homo sapien
tccaccttagcgtctctatgagaaa

SEQ ID NO: 1349858 - DNA, 25 bp, Homo sapien
cttagcgtctctatgagaaaaagag

SEQ ID NO: 1349859 - DNA, 25 bp, Homo sapien
ttccttccaccttagcgtctctatg

SEQ ID NO: 1349860 - DNA, 25 bp, Homo sapien
caccttagcgtctctatgagaaaaa

SEQ ID NO: 1349861 - DNA, 25 bp, Homo sapien
aaactggtggttaatggatcctcaa

SEQ ID NO: 1349862 - DNA, 25 bp, Homo sapien
caaagccagccatgtaagggtcaca

SEQ ID NO: 1349863 - DNA, 25 bp, Homo sapien
aacacttcacgtggaaaactggtgg

SEQ ID NO: 1349864 - DNA, 25 bp, Homo sapien
gaaatagtgatgtcttgtgcctgga

SEQ ID NO: 1349865 - DNA, 25 bp, Homo sapien
aagtgatgagatgtcccgtatggcc

SEQ ID NO: 1349866 - DNA, 25 bp, Homo sapien
gaagtgttctatcaatccctgagtg

SEQ ID NO: 1349867 - DNA, 25 bp, Homo sapien
cagacacattccttgaatgatgaga

SEQ ID NO: 1349868 - DNA, 25 bp, Homo sapien
gacaggtctccaacaatagtgaagt

SEQ ID NO: 1349869 - DNA, 25 bp, Homo sapien
ctgtgctgtgaatgatatgtaagct

SEQ ID NO: 1349870 - DNA, 25 bp, Homo sapien
cttcaactggctttacatcaagcat

SEQ ID NO: 1349871 - DNA, 25 bp, Homo sapien
gctgcaatttaaccatacatgtgta

SEQ ID NO: 1349872 - DNA, 25 bp, Homo sapien
gtgatgacataaatcagaggctctt

SEQ ID NO: 1349873 - DNA, 25 bp, Homo sapien
taagagtggagatagacacattctt

SEQ ID NO: 1349874 - DNA, 25 bp, Homo sapien
tccaacagaggctgagcttctgggc

SEQ ID NO: 1349875 - DNA, 25 bp, Homo sapien
tctgggcttgaggagtaagagtgga

SEQ ID NO: 1349876 - DNA, 25 bp, Homo sapien
tcatatatctgtttcacagatctct

SEQ ID NO: 1349877 - DNA, 25 bp, Homo sapien
catcagaccctcaccagctctaatg

SEQ ID NO: 1349878 - DNA, 25 bp, Homo sapien
tgggcagaacataaataagttgccc

SEQ ID NO: 1349879 - DNA, 25 bp, Homo sapien
ttcagtcagtctgaaggcaatttcc

SEQ ID NO: 1349880 - DNA, 25 bp, Homo sapien
tcctcctttatactagtcatcactg

SEQ ID NO: 1349881 - DNA, 25 bp, Homo sapien
ataggacaaacagacttctcagcaa

SEQ ID NO: 1349882 - DNA, 25 bp, Homo sapien
gataataggacaaacagacttctca

SEQ ID NO: 1349883 - DNA, 25 bp, Homo sapien
atgataataggacaaacagacttct

SEQ ID NO: 1349884 - DNA, 25 bp, Homo sapien
taataggacaaacagacttctcagc

SEQ ID NO: 1349885 - DNA, 25 bp, Homo sapien
tgtttttctgcagggtctaagaatt

SEQ ID NO: 1349886 - DNA, 25 bp, Homo sapien
ttgtttttctgcagggtctaagaat

SEQ ID NO: 1349887 - DNA, 25 bp, Homo sapien
gaaagctctccttagtttgcatttc

SEQ ID NO: 1349888 - DNA, 25 bp, Homo sapien
acgttcgaaagctctccttagtttg

SEQ ID NO: 1349889 - DNA, 25 bp, Homo sapien
tgaggagtcagattggaactgctga

SEQ ID NO: 1349890 - DNA, 25 bp, Homo sapien
tcagattggaactgctgactgctgc

SEQ ID NO: 1349891 - DNA, 25 bp, Homo sapien
tgctgcctttcttagcagccggtga

SEQ ID NO: 1349892 - DNA, 25 bp, Homo sapien
tagcagccggtgaactgcacatttc

SEQ ID NO: 1349893 - DNA, 25 bp, Homo sapien
ccagtgccttgatagatagaatttg

SEQ ID NO: 1349894 - DNA, 25 bp, Homo sapien
agaatttgaatcactttccttgctg

SEQ ID NO: 1349895 - DNA, 25 bp, Homo sapien
tctctctctccaaagtgtaaggatg

SEQ ID NO: 1349896 - DNA, 25 bp, Homo sapien
tgtttgcatgtgaatttccctccct

SEQ ID NO: 1349897 - DNA, 25 bp, Homo sapien
tcttcttcatagaagtcagttgaaa

SEQ ID NO: 1349898 - DNA, 25 bp, Homo sapien
gctcgtagtaatcgtattgaattta

SEQ ID NO: 1349899 - DNA, 25 bp, Homo sapien
gaaattatgctcgtagtaatcgtat

SEQ ID NO: 1349900 - DNA, 25 bp, Homo sapien
tagaagtcagttgaaattatgctcg

SEQ ID NO: 1349901 - DNA, 25 bp, Homo sapien
tcttccgttagattgaatgatcaag

SEQ ID NO: 1349902 - DNA, 25 bp, Homo sapien
tcaaaaaattggtgttgtgacatca

SEQ ID NO: 1349903 - DNA, 25 bp, Homo sapien
gcctattatagtaacttcaaggagt

SEQ ID NO: 1349904 - DNA, 25 bp, Homo sapien
gaattgtctcctgatgcgttttctg

SEQ ID NO: 1349905 - DNA, 25 bp, Homo sapien
tcaaaaagctacgtctgctgaaacc

SEQ ID NO: 1349906 - DNA, 25 bp, Homo sapien
aaaaagctacgtctgctgaaaccac

SEQ ID NO: 1349907 - DNA, 25 bp, Homo sapien
aaagctacgtctgctgaaaccacaa

SEQ ID NO: 1349908 - DNA, 25 bp, Homo sapien
gctacgtctgctgaaaccacaattg

SEQ ID NO: 1349909 - DNA, 25 bp, Homo sapien
tggaatttcaatactctagacatag

SEQ ID NO: 1349910 - DNA, 25 bp, Homo sapien
gaatttcaatactctagacatagct

SEQ ID NO: 1349911 - DNA, 25 bp, Homo sapien
atttcaatactctagacatagctgt

SEQ ID NO: 1349912 - DNA, 25 bp, Homo sapien
gccctggaatttcaatactctagac

SEQ ID NO: 1349913 - DNA, 25 bp, Homo sapien
ggccaaggtagataccttcttcgca

SEQ ID NO: 1349914 - DNA, 25 bp, Homo sapien
aaggtagataccttcttcgcataag

SEQ ID NO: 1349915 - DNA, 25 bp, Homo sapien
ccggccaaggtagataccttcttcg

SEQ ID NO: 1349916 - DNA, 25 bp, Homo sapien
gcgcccggccaaggtagataccttc

SEQ ID NO: 1349917 - DNA, 25 bp, Homo sapien
tcttgcaggcgccaaagtttttcaa

SEQ ID NO: 1349918 - DNA, 25 bp, Homo sapien
ttgcaggcgccaaagtttttcaaaa

SEQ ID NO: 1349919 - DNA, 25 bp, Homo sapien
ggaatgtcttgcaggcgccaaagtt

SEQ ID NO: 1349920 - DNA, 25 bp, Homo sapien
tttcctccttattgatgttcatctt

SEQ ID NO: 1349921 - DNA, 25 bp, Homo sapien
tacaaatggaatacaacggcaagtt

SEQ ID NO: 1349922 - DNA, 25 bp, Homo sapien
agtgatatgcctttattgttaagca

SEQ ID NO: 1349923 - DNA, 25 bp, Homo sapien
tctgagaaacaggtagtgttttaca

SEQ ID NO: 1349924 - DNA, 25 bp, Homo sapien
tgtcattgtctgagaaacaggtagt

SEQ ID NO: 1349925 - DNA, 25 bp, Homo sapien
taggaataaaagctgcccatgagag

SEQ ID NO: 1349926 - DNA, 25 bp, Homo sapien
cttgtgtctgctgggaaacaaacac

SEQ ID NO: 1349927 - DNA, 25 bp, Homo sapien
gacagtcttgaccaacccaaaggga

SEQ ID NO: 1349928 - DNA, 25 bp, Homo sapien
gagacaggcctaaagaaacccacta

SEQ ID NO: 1349929 - DNA, 25 bp, Homo sapien
ctgtttccatcacttccgctaaaaa

SEQ ID NO: 1349930 - DNA, 25 bp, Homo sapien
tggaccagagtgcttctgggtgccc

SEQ ID NO: 1349931 - DNA, 25 bp, Homo sapien
tcctgtacagaaggttggatctgct

SEQ ID NO: 1349932 - DNA, 25 bp, Homo sapien
ccattcctgtacagaaggttggatc

SEQ ID NO: 1349933 - DNA, 25 bp, Homo sapien
acagatgggaagatatttctggacc

SEQ ID NO: 1349934 - DNA, 25 bp, Homo sapien
cagttctgcaagaaccagcttatcc

SEQ ID NO: 1349935 - DNA, 25 bp, Homo sapien
tgtgacatgaagagggagctgtagc

SEQ ID NO: 1349936 - DNA, 25 bp, Homo sapien
ttatccacgctctccgatctcgtgt

SEQ ID NO: 1349937 - DNA, 25 bp, Homo sapien
tcttgcgctgtccctcattcatgca

SEQ ID NO: 1349938 - DNA, 25 bp, Homo sapien
tctctcatcagcacgtccatgcttg

SEQ ID NO: 1349939 - DNA, 25 bp, Homo sapien
ttctctcatcagcacgtccatgctt

SEQ ID NO: 1349940 - DNA, 25 bp, Homo sapien
ctctcatcagcacgtccatgcttga

SEQ ID NO: 1349941 - DNA, 25 bp, Homo sapien
attcaggggctccactacggctgca

SEQ ID NO: 1349942 - DNA, 25 bp, Homo sapien
tcagagcacaccagaacctagaaaa

SEQ ID NO: 1349943 - DNA, 25 bp, Homo sapien
gctccactacggctgcaaatgagaa

SEQ ID NO: 1349944 - DNA, 25 bp, Homo sapien
cagagcacaccagaacctagaaaag

SEQ ID NO: 1349945 - DNA, 25 bp, Homo sapien
aagatgaaatggtggttgagacagt

SEQ ID NO: 1349946 - DNA, 25 bp, Homo sapien
taagtcacactgaaccaaggtagaa

SEQ ID NO: 1349947 - DNA, 25 bp, Homo sapien
tgaaccaaggtagaaaccaaagcga

SEQ ID NO: 1349948 - DNA, 25 bp, Homo sapien
ggtggttgagacagtaagtcacact

SEQ ID NO: 1349949 - DNA, 25 bp, Homo sapien
ggctgactgtcccactacctctgtg

SEQ ID NO: 1349950 - DNA, 25 bp, Homo sapien
gctgactgtcccactacctctgtgc

SEQ ID NO: 1349951 - DNA, 25 bp, Homo sapien
tggctgactgtcccactacctctgt

SEQ ID NO: 1349952 - DNA, 25 bp, Homo sapien
aaggagaacgtacttgccgacgaca

SEQ ID NO: 1349953 - DNA, 25 bp, Homo sapien
tgtcaggtagacagtataacatata

SEQ ID NO: 1349954 - DNA, 25 bp, Homo sapien
cctccaaagtgaaggagaacgtact

SEQ ID NO: 1349955 - DNA, 25 bp, Homo sapien
tattcagcactgaagttgcatattg

SEQ ID NO: 1349956 - DNA, 25 bp, Homo sapien
cacggtagagcatggtaaaatttgt

SEQ ID NO: 1349957 - DNA, 25 bp, Homo sapien
tgcacatagttgtttgcttaatatc

SEQ ID NO: 1349958 - DNA, 25 bp, Homo sapien
cacatagttgtttgcttaatatcaa

SEQ ID NO: 1349959 - DNA, 25 bp, Homo sapien
agagaaccttttgtacttgtcaaag

SEQ ID NO: 1349960 - DNA, 25 bp, Homo sapien
ccagagaaccttttgtacttgtcaa

SEQ ID NO: 1349961 - DNA, 25 bp, Homo sapien
gagcaccattgagaaggagcatgag

SEQ ID NO: 1349962 - DNA, 25 bp, Homo sapien
gaaacctaaagtatgagcaccattg

SEQ ID NO: 1349963 - DNA, 25 bp, Homo sapien
gagtatattcatgcatcagtcgagt

SEQ ID NO: 1349964 - DNA, 25 bp, Homo sapien
tagaactattggaaaaccgctgagt

SEQ ID NO: 1349965 - DNA, 25 bp, Homo sapien
aaggtttcctcttggaatcagccag

SEQ ID NO: 1349966 - DNA, 25 bp, Homo sapien
tggaatcagccaggaaaaatttagc

SEQ ID NO: 1349967 - DNA, 25 bp, Homo sapien
caggaaaaatttagcacttcgttga

SEQ ID NO: 1349968 - DNA, 25 bp, Homo sapien
tcctcttggaatcagccaggaaaaa

SEQ ID NO: 1349969 - DNA, 25 bp, Homo sapien
cttttaccgtggttaattgatacag

SEQ ID NO: 1349970 - DNA, 25 bp, Homo sapien
ttgatacagttactccagaacaagt

SEQ ID NO: 1349971 - DNA, 25 bp, Homo sapien
ccatctgagttagggcttttaccgt

SEQ ID NO: 1349972 - DNA, 25 bp, Homo sapien
cactggtagacatgctgtgtgcagt

SEQ ID NO: 1349973 - DNA, 25 bp, Homo sapien
tattctttaatgatagtgccgtctt

SEQ ID NO: 1349974 - DNA, 25 bp, Homo sapien
agctgccacctctaagaaagcaaat

SEQ ID NO: 1349975 - DNA, 25 bp, Homo sapien
ttattctttaatgatagtgccgtct

SEQ ID NO: 1349976 - DNA, 25 bp, Homo sapien
tccatcttgcggttgatttcaggga

SEQ ID NO: 1349977 - DNA, 25 bp, Homo sapien
cagggacacggctccttgatctgct

SEQ ID NO: 1349978 - DNA, 25 bp, Homo sapien
taaagtcgcttacagactcacatcc

SEQ ID NO: 1349979 - DNA, 25 bp, Homo sapien
gaagcgtcacatcaacatacccagt

SEQ ID NO: 1349980 - DNA, 25 bp, Homo sapien
catttcccttcccaacagattctac

SEQ ID NO: 1349981 - DNA, 25 bp, Homo sapien
ttccctttcttgttcgcatgccctt

SEQ ID NO: 1349982 - DNA, 25 bp, Homo sapien
catttgctaggtcaccaccttgaat

SEQ ID NO: 1349983 - DNA, 25 bp, Homo sapien
tcctcttgtaaatttacttcttgcc

SEQ ID NO: 1349984 - DNA, 25 bp, Homo sapien
attttcatttgctaggtcaccacct

SEQ ID NO: 1349985 - DNA, 25 bp, Homo sapien
tcacccagctggctacagctagacg

SEQ ID NO: 1349986 - DNA, 25 bp, Homo sapien
cttggagcttatcgagacatgtggt

SEQ ID NO: 1349987 - DNA, 25 bp, Homo sapien
ctagacgacacctccagcttgaact

SEQ ID NO: 1349988 - DNA, 25 bp, Homo sapien
catgtggtgcttgctttaagtgcag

SEQ ID NO: 1349989 - DNA, 25 bp, Homo sapien
gtgccttttatatgagtcttactta

SEQ ID NO: 1349990 - DNA, 25 bp, Homo sapien
tcatggacacttttttaaagttcca

SEQ ID NO: 1349991 - DNA, 25 bp, Homo sapien
aaagttccagttttagagcgacaag

SEQ ID NO: 1349992 - DNA, 25 bp, Homo sapien
tatgagtcttacttaagccatttaa

SEQ ID NO: 1349993 - DNA, 25 bp, Homo sapien
ttgagcttaaacaaggtgttttcaa

SEQ ID NO: 1349994 - DNA, 25 bp, Homo sapien
tctgtgtttgagcttaaacaaggtg

SEQ ID NO: 1349995 - DNA, 25 bp, Homo sapien
tgtgtttgagcttaaacaaggtgtt

SEQ ID NO: 1349996 - DNA, 25 bp, Homo sapien
tttgagcttaaacaaggtgttttca

SEQ ID NO: 1349997 - DNA, 25 bp, Homo sapien
ggcacaggataataaagacagtttg

SEQ ID NO: 1349998 - DNA, 25 bp, Homo sapien
caggataataaagacagtttgttac

SEQ ID NO: 1349999 - DNA, 25 bp, Homo sapien
gatttgtggcagcttaccaaaggca

SEQ ID NO: 1350000 - DNA, 25 bp, Homo sapien
gtttctgtgatttgtggcagcttac

SEQ ID NO: 1350001 - DNA, 25 bp, Homo sapien
gcctaaacctgcccacatccatcac

SEQ ID NO: 1350002 - DNA, 25 bp, Homo sapien
aaggcctaaacctgcccacatccat

SEQ ID NO: 1350003 - DNA, 25 bp, Homo sapien
ggcctaaacctgcccacatccatca

SEQ ID NO: 1350004 - DNA, 25 bp, Homo sapien
aggcctaaacctgcccacatccatc

SEQ ID NO: 1350005 - DNA, 25 bp, Homo sapien
cactgggcccatttgaaggtgtctc

SEQ ID NO: 1350006 - DNA, 25 bp, Homo sapien
tggccacaccgttggagtgaaccct

SEQ ID NO: 1350007 - DNA, 25 bp, Homo sapien
tttggtcacaaaggatggactcttc

SEQ ID NO: 1350008 - DNA, 25 bp, Homo sapien
gcacactgtgtctttccggtcattg

SEQ ID NO: 1350009 - DNA, 25 bp, Homo sapien
tactgtaaaccttgtgcctgcctgc

SEQ ID NO: 1350010 - DNA, 25 bp, Homo sapien
ctgtaaaccttgtgcctgcctgcat

SEQ ID NO: 1350011 - DNA, 25 bp, Homo sapien
actgtaaaccttgtgcctgcctgca

SEQ ID NO: 1350012 - DNA, 25 bp, Homo sapien
caggtgtgaactgttgagacacagg

SEQ ID NO: 1350013 - DNA, 25 bp, Homo sapien
caacccagtggagtaaacggcaggt

SEQ ID NO: 1350014 - DNA, 25 bp, Homo sapien
gagggttgggaagtaatccagtcaa

SEQ ID NO: 1350015 - DNA, 25 bp, Homo sapien
tgaactgttgagacacaggctccca

SEQ ID NO: 1350016 - DNA, 25 bp, Homo sapien
cttgtgttgcaattgacatttgatg

SEQ ID NO: 1350017 - DNA, 25 bp, Homo sapien
tcttgtgttgcaattgacatttgat

SEQ ID NO: 1350018 - DNA, 25 bp, Homo sapien
gttgcaattgacatttgatgttcat

SEQ ID NO: 1350019 - DNA, 25 bp, Homo sapien
gtgttgcaattgacatttgatgttc

SEQ ID NO: 1350020 - DNA, 25 bp, Homo sapien
aaatatgtgcactgacagcctatat

SEQ ID NO: 1350021 - DNA, 25 bp, Homo sapien
cctgatgacatggagtacaaagaca

SEQ ID NO: 1350022 - DNA, 25 bp, Homo sapien
tgcagataggcatatgcctgatgac

SEQ ID NO: 1350023 - DNA, 25 bp, Homo sapien
catctctgcagtgttgtgtacttgc

SEQ ID NO: 1350024 - DNA, 25 bp, Homo sapien
tacttggcagctcttcctttcctgc

SEQ ID NO: 1350025 - DNA, 25 bp, Homo sapien
tagattctggttggtacttggcagc

SEQ ID NO: 1350026 - DNA, 25 bp, Homo sapien
ccatccttcaacaatctccgtttag

SEQ ID NO: 1350027 - DNA, 25 bp, Homo sapien
tctccgtttagattctggttggtac

SEQ ID NO: 1350028 - DNA, 25 bp, Homo sapien
tggtaacgtgtatatctctccaagt

SEQ ID NO: 1350029 - DNA, 25 bp, Homo sapien
ggtttgaacaccatcagacttgcac

SEQ ID NO: 1350030 - DNA, 25 bp, Homo sapien
cagtaaccccagttcttgtggatgg

SEQ ID NO: 1350031 - DNA, 25 bp, Homo sapien
ttctcgccccgtaccacaggtttga

SEQ ID NO: 1350032 - DNA, 25 bp, Homo sapien
ctccaagagcctgggtatacgacaa

SEQ ID NO: 1350033 - DNA, 25 bp, Homo sapien
aagacccaggtcacgagacatccct

SEQ ID NO: 1350034 - DNA, 25 bp, Homo sapien
gacaaagacccaggtcacgagacat

SEQ ID NO: 1350035 - DNA, 25 bp, Homo sapien
tgggtatacgacaaagacccaggtc

SEQ ID NO: 1350036 - DNA, 25 bp, Homo sapien
tggatcagctgtttatcctgccact

SEQ ID NO: 1350037 - DNA, 25 bp, Homo sapien
cctggatcagctgtttatcctgcca

SEQ ID NO: 1350038 - DNA, 25 bp, Homo sapien
gcaggcctggatcagctgtttatcc

SEQ ID NO: 1350039 - DNA, 25 bp, Homo sapien
ggcctggatcagctgtttatcctgc

SEQ ID NO: 1350040 - DNA, 25 bp, Homo sapien
taacaatttatatcccgtccaccac

SEQ ID NO: 1350041 - DNA, 25 bp, Homo sapien
caatacttgaggttcttgggtaaag

SEQ ID NO: 1350042 - DNA, 25 bp, Homo sapien
gcccagcactatgggttacacgtga

SEQ ID NO: 1350043 - DNA, 25 bp, Homo sapien
tgggaacgcaaagtccggcttactc

SEQ ID NO: 1350044 - DNA, 25 bp, Homo sapien
taggccaaggagtcccgagggatac

SEQ ID NO: 1350045 - DNA, 25 bp, Homo sapien
agggatgttggcagacgcctcctca

SEQ ID NO: 1350046 - DNA, 25 bp, Homo sapien
cggcttttcaagctgaacgttgatg

SEQ ID NO: 1350047 - DNA, 25 bp, Homo sapien
gataccgatgctggccggcttttca

SEQ ID NO: 1350048 - DNA, 25 bp, Homo sapien
gacatcatatagtccaaagcacagg

SEQ ID NO: 1350049 - DNA, 25 bp, Homo sapien
ggataatcgggccaattcttctatt

SEQ ID NO: 1350050 - DNA, 25 bp, Homo sapien
tagaggatgagcaaaaaggtcagga

SEQ ID NO: 1350051 - DNA, 25 bp, Homo sapien
aatctatatattagccagggtagag

SEQ ID NO: 1350052 - DNA, 25 bp, Homo sapien
aacttcaggattctggttagtcaca

SEQ ID NO: 1350053 - DNA, 25 bp, Homo sapien
ctccattcaggcacaacaacttcag

SEQ ID NO: 1350054 - DNA, 25 bp, Homo sapien
ggccaccccttgcactcctcagaac

SEQ ID NO: 1350055 - DNA, 25 bp, Homo sapien
tctggttagtcacatgtcctgggct

SEQ ID NO: 1350056 - DNA, 25 bp, Homo sapien
tggtaggaccaatgaactccacgag

SEQ ID NO: 1350057 - DNA, 25 bp, Homo sapien
gctggagaactcacataaccctggg

SEQ ID NO: 1350058 - DNA, 25 bp, Homo sapien
taactgggctagcatgtggtaggac

SEQ ID NO: 1350059 - DNA, 25 bp, Homo sapien
tctaagctggtgctgtaactgggct

SEQ ID NO: 1350060 - DNA, 25 bp, Homo sapien
gctccaagggtgtttttcctgtatc

SEQ ID NO: 1350061 - DNA, 25 bp, Homo sapien
tcatagatcaagctttgtgttccag

SEQ ID NO: 1350062 - DNA, 25 bp, Homo sapien
ccaatgtctgcatatggaagattca

SEQ ID NO: 1350063 - DNA, 25 bp, Homo sapien
tcatgtctggttgggagatataacc

SEQ ID NO: 1350064 - DNA, 25 bp, Homo sapien
gacattcgctatgctaattagtgca

SEQ ID NO: 1350065 - DNA, 25 bp, Homo sapien
gacagtgggacagcgatacctaaag

SEQ ID NO: 1350066 - DNA, 25 bp, Homo sapien
ccagtgtgactagtgcagtgagaca

SEQ ID NO: 1350067 - DNA, 25 bp, Homo sapien
tgttcaaggaatcggcacaagtcca

SEQ ID NO: 1350068 - DNA, 25 bp, Homo sapien
tgagacaccatcagaaggagggcag

SEQ ID NO: 1350069 - DNA, 25 bp, Homo sapien
ccagccataccaaattatgagtcaa

SEQ ID NO: 1350070 - DNA, 25 bp, Homo sapien
gaaccagagtccttgtgaataggac

SEQ ID NO: 1350071 - DNA, 25 bp, Homo sapien
tcctaggccttaccctagacctgct

SEQ ID NO: 1350072 - DNA, 25 bp, Homo sapien
gtcctgggagagtttcccctatgct

SEQ ID NO: 1350073 - DNA, 25 bp, Homo sapien
attttctcaagcttgccaatcaccc

SEQ ID NO: 1350074 - DNA, 25 bp, Homo sapien
ggctcatgggcgtattggaatgaca

SEQ ID NO: 1350075 - DNA, 25 bp, Homo sapien
tcatgggcgtattggaatgacatgt

SEQ ID NO: 1350076 - DNA, 25 bp, Homo sapien
gccagggctcatgggcgtattggaa

SEQ ID NO: 1350077 - DNA, 25 bp, Homo sapien
ggcctgaaacggagtcagcctcatt

SEQ ID NO: 1350078 - DNA, 25 bp, Homo sapien
tgaaacggagtcagcctcattcgct

SEQ ID NO: 1350079 - DNA, 25 bp, Homo sapien
acatcaaggcctgaaacggagtcag

SEQ ID NO: 1350080 - DNA, 25 bp, Homo sapien
gagtcagcctcattcgctggcacca

SEQ ID NO: 1350081 - DNA, 25 bp, Homo sapien
tatcactgtttatgggtggaacacc

SEQ ID NO: 1350082 - DNA, 25 bp, Homo sapien
gaaaggagctggaacgtatcactgt

SEQ ID NO: 1350083 - DNA, 25 bp, Homo sapien
ccttgatatacatgcagagactgag

SEQ ID NO: 1350084 - DNA, 25 bp, Homo sapien
gaccacacagtgatgtaccagctga

SEQ ID NO: 1350085 - DNA, 25 bp, Homo sapien
tggaactttacctagtacttgataa

SEQ ID NO: 1350086 - DNA, 25 bp, Homo sapien
aattaagtctggtgctaaaagaggg

SEQ ID NO: 1350087 - DNA, 25 bp, Homo sapien
tcataataccaggttagaccaggga

SEQ ID NO: 1350088 - DNA, 25 bp, Homo sapien
tgatccttgtttaccaggtgtgtga

SEQ ID NO: 1350089 - DNA, 25 bp, Homo sapien
ttaggaagtaccgagcagctcatca

SEQ ID NO: 1350090 - DNA, 25 bp, Homo sapien
ctttggccatctagatgagcagccc

SEQ ID NO: 1350091 - DNA, 25 bp, Homo sapien
ggaaatgccaaggttgtactccaga

SEQ ID NO: 1350092 - DNA, 25 bp, Homo sapien
tcaactttgaaataacggaaatgcc

SEQ ID NO: 1350093 - DNA, 25 bp, Homo sapien
tcatgtcgtgagagttgagcctcat

SEQ ID NO: 1350094 - DNA, 25 bp, Homo sapien
aactgcaaggctgccaaattcatgt

SEQ ID NO: 1350095 - DNA, 25 bp, Homo sapien
aaattcatgtcgtgagagttgagcc

SEQ ID NO: 1350096 - DNA, 25 bp, Homo sapien
ccaaattcatgtcgtgagagttgag

SEQ ID NO: 1350097 - DNA, 25 bp, Homo sapien
catttccaatatgcttcaacaaagt

SEQ ID NO: 1350098 - DNA, 25 bp, Homo sapien
aagagacatttccaatatgcttcaa

SEQ ID NO: 1350099 - DNA, 25 bp, Homo sapien
gacatttccaatatgcttcaacaaa

SEQ ID NO: 1350100 - DNA, 25 bp, Homo sapien
gagacatttccaatatgcttcaaca

SEQ ID NO: 1350101 - DNA, 25 bp, Homo sapien
gatttatccaactaacttgctgccc

SEQ ID NO: 1350102 - DNA, 25 bp, Homo sapien
actgcagacactttgtaaaaggttc

SEQ ID NO: 1350103 - DNA, 25 bp, Homo sapien
taacaaatgcgtgtataaaggccca

SEQ ID NO: 1350104 - DNA, 25 bp, Homo sapien
gccccagaatagttgtgcagcgtca

SEQ ID NO: 1350105 - DNA, 25 bp, Homo sapien
gcacatttccaggtcagatatcctg

SEQ ID NO: 1350106 - DNA, 25 bp, Homo sapien
catttccaggtcagatatcctgcaa

SEQ ID NO: 1350107 - DNA, 25 bp, Homo sapien
ctaagcacatttccaggtcagatat

SEQ ID NO: 1350108 - DNA, 25 bp, Homo sapien
caggtcagatatcctgcaaagtgct

SEQ ID NO: 1350109 - DNA, 25 bp, Homo sapien
agcaaatgcactaagctctgttctg

SEQ ID NO: 1350110 - DNA, 25 bp, Homo sapien
aaatgcactaagctctgttctgaaa

SEQ ID NO: 1350111 - DNA, 25 bp, Homo sapien
gcaaatgcactaagctctgttctga

SEQ ID NO: 1350112 - DNA, 25 bp, Homo sapien
caaatgcactaagctctgttctgaa

SEQ ID NO: 1350113 - DNA, 25 bp, Homo sapien
aggaagttgctattccatgcagttt

SEQ ID NO: 1350114 - DNA, 25 bp, Homo sapien
aaatggatggtagaactgactaaac

SEQ ID NO: 1350115 - DNA, 25 bp, Homo sapien
gactaaacaggaagttgctattcca

SEQ ID NO: 1350116 - DNA, 25 bp, Homo sapien
tagaactgactaaacaggaagttgc

SEQ ID NO: 1350117 - DNA, 25 bp, Homo sapien
gaaaagacatatctttcttctccca

SEQ ID NO: 1350118 - DNA, 25 bp, Homo sapien
tgttggagcctaaatataaatcctc

SEQ ID NO: 1350119 - DNA, 25 bp, Homo sapien
ctgagtgcattgacatgttggagcc

SEQ ID NO: 1350120 - DNA, 25 bp, Homo sapien
cgggcacaagatcatgcccagatgc

SEQ ID NO: 1350121 - DNA, 25 bp, Homo sapien
aggaaggcttcccatttaaactgag

SEQ ID NO: 1350122 - DNA, 25 bp, Homo sapien
ctaggaaggcttcccatttaaactg

SEQ ID NO: 1350123 - DNA, 25 bp, Homo sapien
ctaatctaggaaggcttcccattta

SEQ ID NO: 1350124 - DNA, 25 bp, Homo sapien
gaaggcttcccatttaaactgagac

SEQ ID NO: 1350125 - DNA, 25 bp, Homo sapien
attgacggactcctctggcacgaag

SEQ ID NO: 1350126 - DNA, 25 bp, Homo sapien
tggcacgaagcctagaagtctgagt

SEQ ID NO: 1350127 - DNA, 25 bp, Homo sapien
gtatatgtaggaaagtacactgccc

SEQ ID NO: 1350128 - DNA, 25 bp, Homo sapien
cactgccctctgtgtcattgacgga

SEQ ID NO: 1350129 - DNA, 25 bp, Homo sapien
ttaaattggtcctaacacctactga

SEQ ID NO: 1350130 - DNA, 25 bp, Homo sapien
gatttcacgcaaaatgaaggtttta

SEQ ID NO: 1350131 - DNA, 25 bp, Homo sapien
gaaaatgatttcacgcaaaatgaag

SEQ ID NO: 1350132 - DNA, 25 bp, Homo sapien
taacacctactgatcaaatttatgg

SEQ ID NO: 1350133 - DNA, 25 bp, Homo sapien
cagtttgggaactaggcaaagagct

SEQ ID NO: 1350134 - DNA, 25 bp, Homo sapien
actaggcaaagagctaacaagtttg

SEQ ID NO: 1350135 - DNA, 25 bp, Homo sapien
ggaatgcagctgtgtaagttttcat

SEQ ID NO: 1350136 - DNA, 25 bp, Homo sapien
gctaacaagtttgcttttacacaga

SEQ ID NO: 1350137 - DNA, 25 bp, Homo sapien
gccaagaaaagaactcaactaaatg

SEQ ID NO: 1350138 - DNA, 25 bp, Homo sapien
tctctctccttaagaaggacccaag

SEQ ID NO: 1350139 - DNA, 25 bp, Homo sapien
tcgacatagatctgttaagcacctg

SEQ ID NO: 1350140 - DNA, 25 bp, Homo sapien
gatttgttcctttattcgacataga

SEQ ID NO: 1350141 - DNA, 25 bp, Homo sapien
ctggctgatgcatgaggtagtatct

SEQ ID NO: 1350142 - DNA, 25 bp, Homo sapien
ttgacattgtaaggtcactgcaacc

SEQ ID NO: 1350143 - DNA, 25 bp, Homo sapien
agtatctgagctcccttgacattgt

SEQ ID NO: 1350144 - DNA, 25 bp, Homo sapien
tgcaaccaagggttcattaccacat

SEQ ID NO: 1350145 - DNA, 25 bp, Homo sapien
gaaagacctctctcgaagagcggcg

SEQ ID NO: 1350146 - DNA, 25 bp, Homo sapien
gtgtgtgaaagacctctctcgaaga

SEQ ID NO: 1350147 - DNA, 25 bp, Homo sapien
acctctctcgaagagcggcgtgtgg

SEQ ID NO: 1350148 - DNA, 25 bp, Homo sapien
tgtgaaagacctctctcgaagagcg

SEQ ID NO: 1350149 - DNA, 25 bp, Homo sapien
tcctcttggaaatcgatccgcagaa

SEQ ID NO: 1350150 - DNA, 25 bp, Homo sapien
gagccattgtaacgctctccaggca

SEQ ID NO: 1350151 - DNA, 25 bp, Homo sapien
agccggcttctccttttctcgtgga

SEQ ID NO: 1350152 - DNA, 25 bp, Homo sapien
agaactctcagtccggtccagccgg

SEQ ID NO: 1350153 - DNA, 25 bp, Homo sapien
tcataaaagcttggggtcgcaaggt

SEQ ID NO: 1350154 - DNA, 25 bp, Homo sapien
gggttaggatgaggctcccgtagcc

SEQ ID NO: 1350155 - DNA, 25 bp, Homo sapien
gggcgctggcaagggggttaggatg

SEQ ID NO: 1350156 - DNA, 25 bp, Homo sapien
gaggctcccgtagccatgcattttt

SEQ ID NO: 1350157 - DNA, 25 bp, Homo sapien
cgtcctcggcggagcttatttgctc

SEQ ID NO: 1350158 - DNA, 25 bp, Homo sapien
gtgtgaagcgcgtcctcggcggagc

SEQ ID NO: 1350159 - DNA, 25 bp, Homo sapien
gaggagtgtgaagcgcgtcctcggc

SEQ ID NO: 1350160 - DNA, 25 bp, Homo sapien
gggaggaggagtgtgaagcgcgtcc

SEQ ID NO: 1350161 - DNA, 25 bp, Homo sapien
cttggacgagtttttgagggttgct

SEQ ID NO: 1350162 - DNA, 25 bp, Homo sapien
ccttctcgtcagtggttaggtggtg

SEQ ID NO: 1350163 - DNA, 25 bp, Homo sapien
cgaggatgacagtaaagcgcagcca

SEQ ID NO: 1350164 - DNA, 25 bp, Homo sapien
tccggtcccgcactgtaagtggagc

SEQ ID NO: 1350165 - DNA, 25 bp, Homo sapien
agggcagcagcgggccgcgttgggc

SEQ ID NO: 1350166 - DNA, 25 bp, Homo sapien
tgagagggcagcagcgggccgcgtt

SEQ ID NO: 1350167 - DNA, 25 bp, Homo sapien
ctcccggagccgcagtgagagggca

SEQ ID NO: 1350168 - DNA, 25 bp, Homo sapien
gggagggcagagagcctcccggagc

SEQ ID NO: 1350169 - DNA, 25 bp, Homo sapien
tttgtaggaactcgccagcagtgtc

SEQ ID NO: 1350170 - DNA, 25 bp, Homo sapien
ctcgccagcagtgtctacattgctt

SEQ ID NO: 1350171 - DNA, 25 bp, Homo sapien
taggaactcgccagcagtgtctaca

SEQ ID NO: 1350172 - DNA, 25 bp, Homo sapien
ttggtttgtaggaactcgccagcag

SEQ ID NO: 1350173 - DNA, 25 bp, Homo sapien
atgattttaaaggcttcacataatt

SEQ ID NO: 1350174 - DNA, 25 bp, Homo sapien
tgattttaaaggcttcacataattt

SEQ ID NO: 1350175 - DNA, 25 bp, Homo sapien
tttgtttatccacagtcttcgttga

SEQ ID NO: 1350176 - DNA, 25 bp, Homo sapien
gtttatccacagtcttcgttgattc

SEQ ID NO: 1350177 - DNA, 25 bp, Homo sapien
tccacagtcttcgttgattcaccag

SEQ ID NO: 1350178 - DNA, 25 bp, Homo sapien
cagtcttcgttgattcaccagtagg

SEQ ID NO: 1350179 - DNA, 25 bp, Homo sapien
cagtatttgacttggtgttatttct

SEQ ID NO: 1350180 - DNA, 25 bp, Homo sapien
gaattggggttgagtacttccgtca

SEQ ID NO: 1350181 - DNA, 25 bp, Homo sapien
ctctttagatgttcagcttccaccg

SEQ ID NO: 1350182 - DNA, 25 bp, Homo sapien
ttccaccgactgcacagggtcagta

SEQ ID NO: 1350183 - DNA, 25 bp, Homo sapien
ctaccagtgtctcccatgcactgaa

SEQ ID NO: 1350184 - DNA, 25 bp, Homo sapien
ccagtgtctcccatgcactgaaaca

SEQ ID NO: 1350185 - DNA, 25 bp, Homo sapien
agtgtctcccatgcactgaaacaca

SEQ ID NO: 1350186 - DNA, 25 bp, Homo sapien
gtgtctcccatgcactgaaacacat

SEQ ID NO: 1350187 - DNA, 25 bp, Homo sapien
aataagtgaatgattcctaccccat

SEQ ID NO: 1350188 - DNA, 25 bp, Homo sapien
gaatgattcctaccccattcacact

SEQ ID NO: 1350189 - DNA, 25 bp, Homo sapien
gattcctaccccattcacactattg

SEQ ID NO: 1350190 - DNA, 25 bp, Homo sapien
cacactattgtaaacaagaaaagct

SEQ ID NO: 1350191 - DNA, 25 bp, Homo sapien
tggaatgtgtaatgtggatattcat

SEQ ID NO: 1350192 - DNA, 25 bp, Homo sapien
ggtaggatactgtccgtatttagta

SEQ ID NO: 1350193 - DNA, 25 bp, Homo sapien
taaccaaagatgcattggaatgtgt

SEQ ID NO: 1350194 - DNA, 25 bp, Homo sapien
tgtccgtatttagtaaccaaagatg

SEQ ID NO: 1350195 - DNA, 25 bp, Homo sapien
ttcttggtacctcagggttggcagc

SEQ ID NO: 1350196 - DNA, 25 bp, Homo sapien
tcttggtacctcagggttggcagcc

SEQ ID NO: 1350197 - DNA, 25 bp, Homo sapien
tttgtcagaatctgtgtatccagaa

SEQ ID NO: 1350198 - DNA, 25 bp, Homo sapien
tctgtttcctctgcattgttggtac

SEQ ID NO: 1350199 - DNA, 25 bp, Homo sapien
tcaagcaggattcctatgagccttt

SEQ ID NO: 1350200 - DNA, 25 bp, Homo sapien
tcagaatctgtgtatccagaagttg

SEQ ID NO: 1350201 - DNA, 25 bp, Homo sapien
actggatatgggaacaaatagctca

SEQ ID NO: 1350202 - DNA, 25 bp, Homo sapien
cactggatatgggaacaaatagctc

SEQ ID NO: 1350203 - DNA, 25 bp, Homo sapien
tcactggatatgggaacaaatagct

SEQ ID NO: 1350204 - DNA, 25 bp, Homo sapien
ctggatatgggaacaaatagctcat

SEQ ID NO: 1350205 - DNA, 25 bp, Homo sapien
atgatgaaattgtcgtttacttatt

SEQ ID NO: 1350206 - DNA, 25 bp, Homo sapien
tgatgaaattgtcgtttacttattc

SEQ ID NO: 1350207 - DNA, 25 bp, Homo sapien
gatgaaattgtcgtttacttattct

SEQ ID NO: 1350208 - DNA, 25 bp, Homo sapien
tgaaattgtcgtttacttattctgt

SEQ ID NO: 1350209 - DNA, 25 bp, Homo sapien
taacgatgttctttacaactctgtc

SEQ ID NO: 1350210 - DNA, 25 bp, Homo sapien
acgatgttctttacaactctgtccc

SEQ ID NO: 1350211 - DNA, 25 bp, Homo sapien
cataacgatgttctttacaactctg

SEQ ID NO: 1350212 - DNA, 25 bp, Homo sapien
tgttctttacaactctgtccccaaa

SEQ ID NO: 1350213 - DNA, 25 bp, Homo sapien
aatgagactgtacctttgaaaatgt

SEQ ID NO: 1350214 - DNA, 25 bp, Homo sapien
tatctaataagttggttcaaggcac

SEQ ID NO: 1350215 - DNA, 25 bp, Homo sapien
caaaagcaggtatgttagatagata

SEQ ID NO: 1350216 - DNA, 25 bp, Homo sapien
gatgagtagacctttattaagctgt

SEQ ID NO: 1350217 - DNA, 25 bp, Homo sapien
caatgatagttctaagagcactccc

SEQ ID NO: 1350218 - DNA, 25 bp, Homo sapien
cagtgaatcccaatgaatgccagag

SEQ ID NO: 1350219 - DNA, 25 bp, Homo sapien
gctgggcttttgttgcgactgcact

SEQ ID NO: 1350220 - DNA, 25 bp, Homo sapien
aataagcctctgagagatctctgcc

SEQ ID NO: 1350221 - DNA, 25 bp, Homo sapien
tgtcattatacagaggttacccgca

SEQ ID NO: 1350222 - DNA, 25 bp, Homo sapien
tctgtattgacctacctaagaggac

SEQ ID NO: 1350223 - DNA, 25 bp, Homo sapien
gaaaattgcataaatagttcccttg

SEQ ID NO: 1350224 - DNA, 25 bp, Homo sapien
ctatgcaatccagcaaaagaggttt

SEQ ID NO: 1350225 - DNA, 25 bp, Homo sapien
tccaagggccacatgcgagtattaa

SEQ ID NO: 1350226 - DNA, 25 bp, Homo sapien
ccaaatcttggagctggccatcagc

SEQ ID NO: 1350227 - DNA, 25 bp, Homo sapien
cagatgtgctaccagatcagcaggg

SEQ ID NO: 1350228 - DNA, 25 bp, Homo sapien
tcacaaagaactcgaggcaccactt

SEQ ID NO: 1350229 - DNA, 25 bp, Homo sapien
tctagaaaagattgtgtgtcacccc

SEQ ID NO: 1350230 - DNA, 25 bp, Homo sapien
gaagccagttatgtcatgccttgca

SEQ ID NO: 1350231 - DNA, 25 bp, Homo sapien
gggcactgggcacttctcacaaact

SEQ ID NO: 1350232 - DNA, 25 bp, Homo sapien
taaacctgttaataatgagcccatc

SEQ ID NO: 1350233 - DNA, 25 bp, Homo sapien
gatggtagcattgaaaaagagtctc

SEQ ID NO: 1350234 - DNA, 25 bp, Homo sapien
tagtcagtctgaggtatggccataa

SEQ ID NO: 1350235 - DNA, 25 bp, Homo sapien
cgcatttcagtcctgcatgtagtgc

SEQ ID NO: 1350236 - DNA, 25 bp, Homo sapien
gcaagtgtcatgcaagccaggagcc

SEQ ID NO: 1350237 - DNA, 25 bp, Homo sapien
cctgggtatagcatgaccctgccca

SEQ ID NO: 1350238 - DNA, 25 bp, Homo sapien
tccacagttatgtaatcagtttaca

SEQ ID NO: 1350239 - DNA, 25 bp, Homo sapien
tatagcatgaccctgcccatagata

SEQ ID NO: 1350240 - DNA, 25 bp, Homo sapien
ttagcattttatccctattaggtct

SEQ ID NO: 1350241 - DNA, 25 bp, Homo sapien
gcactgatgcatagccttcgcttgt

SEQ ID NO: 1350242 - DNA, 25 bp, Homo sapien
tcacttcagcactgatgcatagcct

SEQ ID NO: 1350243 - DNA, 25 bp, Homo sapien
ccttcgcttgtaatgcaactttgac

SEQ ID NO: 1350244 - DNA, 25 bp, Homo sapien
ttgcattcagattcgttaatcaatg

SEQ ID NO: 1350245 - DNA, 25 bp, Homo sapien
ttccctgtgtctagagtgtttcccc

SEQ ID NO: 1350246 - DNA, 25 bp, Homo sapien
ttctttccctgtgtctagagtgttt

SEQ ID NO: 1350247 - DNA, 25 bp, Homo sapien
cctttctttccctgtgtctagagtg

SEQ ID NO: 1350248 - DNA, 25 bp, Homo sapien
ctttccctgtgtctagagtgtttcc

SEQ ID NO: 1350249 - DNA, 25 bp, Homo sapien
tcccttatagcctttaaagatctct

SEQ ID NO: 1350250 - DNA, 25 bp, Homo sapien
cccttatagcctttaaagatctctt

SEQ ID NO: 1350251 - DNA, 25 bp, Homo sapien
tatagcctttaaagatctcttttat

SEQ ID NO: 1350252 - DNA, 25 bp, Homo sapien
cttatagcctttaaagatctctttt

SEQ ID NO: 1350253 - DNA, 25 bp, Homo sapien
tgggcttactgtgcctgcagtactg

SEQ ID NO: 1350254 - DNA, 25 bp, Homo sapien
cagttctgacataggaataagcggt

SEQ ID NO: 1350255 - DNA, 25 bp, Homo sapien
aataagcggtatcctctggttcaaa

SEQ ID NO: 1350256 - DNA, 25 bp, Homo sapien
tcaggcaggtgcgacctcagcaacc

SEQ ID NO: 1350257 - DNA, 25 bp, Homo sapien
gattttgtcagcagaaaccatcaac

SEQ ID NO: 1350258 - DNA, 25 bp, Homo sapien
agattttgtcagcagaaaccatcaa

SEQ ID NO: 1350259 - DNA, 25 bp, Homo sapien
aagattttgtcagcagaaaccatca

SEQ ID NO: 1350260 - DNA, 25 bp, Homo sapien
attttgtcagcagaaaccatcaacc

SEQ ID NO: 1350261 - DNA, 25 bp, Homo sapien
tagttgtccaatggctcaaatggtg

SEQ ID NO: 1350262 - DNA, 25 bp, Homo sapien
gatttaggaacagggacacttcggc

SEQ ID NO: 1350263 - DNA, 25 bp, Homo sapien
tgtatggtgaaatgacagtagtagt

SEQ ID NO: 1350264 - DNA, 25 bp, Homo sapien
tggttaaaacctttctgtatggtga

SEQ ID NO: 1350265 - DNA, 25 bp, Homo sapien
taagaatagaaaaaatgtgatagca

SEQ ID NO: 1350266 - DNA, 25 bp, Homo sapien
ctaagaatagaaaaaatgtgatagc

SEQ ID NO: 1350267 - DNA, 25 bp, Homo sapien
ttcatcctcaagtgtgatgtctttc

SEQ ID NO: 1350268 - DNA, 25 bp, Homo sapien
tcatcctcaagtgtgatgtctttca

SEQ ID NO: 1350269 - DNA, 25 bp, Homo sapien
catcctcaagtgtgatgtctttcat

SEQ ID NO: 1350270 - DNA, 25 bp, Homo sapien
taaaatcgcagggtacactggtgct

SEQ ID NO: 1350271 - DNA, 25 bp, Homo sapien
cacagactgtgtaagtagaataagt

SEQ ID NO: 1350272 - DNA, 25 bp, Homo sapien
tcccaaagctaactcaactcttgct

SEQ ID NO: 1350273 - DNA, 25 bp, Homo sapien
tcactatgaggaggtcagtctgctc

SEQ ID NO: 1350274 - DNA, 25 bp, Homo sapien
tcaaagtctttagctttatgcagca

SEQ ID NO: 1350275 - DNA, 25 bp, Homo sapien
tttatgcagcatatccaataatgca

SEQ ID NO: 1350276 - DNA, 25 bp, Homo sapien
gtgtagtcgtatcctgtggcaacta

SEQ ID NO: 1350277 - DNA, 25 bp, Homo sapien
tggcaactaggtctctattaatttc

SEQ ID NO: 1350278 - DNA, 25 bp, Homo sapien
gaagccagctactaaaataggcaac

SEQ ID NO: 1350279 - DNA, 25 bp, Homo sapien
caataagcaataagaagaagccagc

SEQ ID NO: 1350280 - DNA, 25 bp, Homo sapien
tgaaatacataaaagaccacatctg

SEQ ID NO: 1350281 - DNA, 25 bp, Homo sapien
gaaatactcatcaacaggtgactaa

SEQ ID NO: 1350282 - DNA, 25 bp, Homo sapien
cttatgaaaagaggactttctctcc

SEQ ID NO: 1350283 - DNA, 25 bp, Homo sapien
cttctaataggggacaaattgcttt

SEQ ID NO: 1350284 - DNA, 25 bp, Homo sapien
atcttttcctgccttatgaaaagag

SEQ ID NO: 1350285 - DNA, 25 bp, Homo sapien
tgtttgctgacatttgaaattcttc

SEQ ID NO: 1350286 - DNA, 25 bp, Homo sapien
cattaggtctgcattaagggacatg

SEQ ID NO: 1350287 - DNA, 25 bp, Homo sapien
ggtctgcattaagggacatgcacac

SEQ ID NO: 1350288 - DNA, 25 bp, Homo sapien
ccttcccccattaggtctgcattaa

SEQ ID NO: 1350289 - DNA, 25 bp, Homo sapien
ccccattaggtctgcattaagggac

SEQ ID NO: 1350290 - DNA, 25 bp, Homo sapien
ctctggtgggcaggggtgggggtca

SEQ ID NO: 1350291 - DNA, 25 bp, Homo sapien
ggggtcacaaggtgctcagtggggg

SEQ ID NO: 1350292 - DNA, 25 bp, Homo sapien
ggttgttctctggtgggcaggggtg

SEQ ID NO: 1350293 - DNA, 25 bp, Homo sapien
gagtccgaaaagagtcagcgaaggg

SEQ ID NO: 1350294 - DNA, 25 bp, Homo sapien
tctgctacttgtgggtttgcaaaca

SEQ ID NO: 1350295 - DNA, 25 bp, Homo sapien
tgacatctgcttcaagccactgctt

SEQ ID NO: 1350296 - DNA, 25 bp, Homo sapien
tcattgaagctagggttttttcaca

SEQ ID NO: 1350297 - DNA, 25 bp, Homo sapien
gctctgagccagtaaagaagactca

SEQ ID NO: 1350298 - DNA, 25 bp, Homo sapien
tcagcatattttctgcagtcgtgac

SEQ ID NO: 1350299 - DNA, 25 bp, Homo sapien
cagggtggccctgtgctcttgatat

SEQ ID NO: 1350300 - DNA, 25 bp, Homo sapien
catgtttgtgccatagctctctctg

SEQ ID NO: 1350301 - DNA, 25 bp, Homo sapien
tggaagtcttctcgtgccagcctgt

SEQ ID NO: 1350302 - DNA, 25 bp, Homo sapien
ctttgtcattctgttggcatctgag

SEQ ID NO: 1350303 - DNA, 25 bp, Homo sapien
gaggacaccacagatcctgtcccta

SEQ ID NO: 1350304 - DNA, 25 bp, Homo sapien
gagaggacaccacagatcctgtccc

SEQ ID NO: 1350305 - DNA, 25 bp, Homo sapien
gctttgtcattctgttggcatctga

SEQ ID NO: 1350306 - DNA, 25 bp, Homo sapien
gcttctggttataaagataggattg

SEQ ID NO: 1350307 - DNA, 25 bp, Homo sapien
aaggcatgaaaggataccgcccctt

SEQ ID NO: 1350308 - DNA, 25 bp, Homo sapien
ctacactgatcaatgggcttctggt

SEQ ID NO: 1350309 - DNA, 25 bp, Homo sapien
catgaaaggataccgccccttttgt

SEQ ID NO: 1350310 - DNA, 25 bp, Homo sapien
tccactgtcttcataggcagcattg

SEQ ID NO: 1350311 - DNA, 25 bp, Homo sapien
ctggtccactgtcttcataggcagc

SEQ ID NO: 1350312 - DNA, 25 bp, Homo sapien
ggtccactgtcttcataggcagcat

SEQ ID NO: 1350313 - DNA, 25 bp, Homo sapien
ccactgtcttcataggcagcattgc

SEQ ID NO: 1350314 - DNA, 25 bp, Homo sapien
tgttggctcctctgcacatctcact

SEQ ID NO: 1350315 - DNA, 25 bp, Homo sapien
aatcctcttcaaacggctgctgact

SEQ ID NO: 1350316 - DNA, 25 bp, Homo sapien
ctcactcacaatcctcttcaaacgg

SEQ ID NO: 1350317 - DNA, 25 bp, Homo sapien
ttaatgggtgttggctcctctgcac

SEQ ID NO: 1350318 - DNA, 25 bp, Homo sapien
gcacacagaagattatctcttcctt

SEQ ID NO: 1350319 - DNA, 25 bp, Homo sapien
cactaaggcacacagaagattatct

SEQ ID NO: 1350320 - DNA, 25 bp, Homo sapien
cagaagattatctcttccttgaatt

SEQ ID NO: 1350321 - DNA, 25 bp, Homo sapien
taaggcacacagaagattatctctt

SEQ ID NO: 1350322 - DNA, 25 bp, Homo sapien
caggcacaagaagcacctgttggtg

SEQ ID NO: 1350323 - DNA, 25 bp, Homo sapien
agagcccctggtactgactgaagca

SEQ ID NO: 1350324 - DNA, 25 bp, Homo sapien
tccctgtaatgaaggccatctggat

SEQ ID NO: 1350325 - DNA, 25 bp, Homo sapien
tctggataggagacaaaagtagggc

SEQ ID NO: 1350326 - DNA, 25 bp, Homo sapien
gcgtgaggactctggtaagtggaga

SEQ ID NO: 1350327 - DNA, 25 bp, Homo sapien
tgccaaggcgaattcgtgacacaaa

SEQ ID NO: 1350328 - DNA, 25 bp, Homo sapien
tcgtgacacaaatctttcaaatgca

SEQ ID NO: 1350329 - DNA, 25 bp, Homo sapien
tatatagatgatgaattccaatatt

SEQ ID NO: 1350330 - DNA, 25 bp, Homo sapien
gttggttctgccaaggcgaattcgt

SEQ ID NO: 1350331 - DNA, 25 bp, Homo sapien
cacagtgtggctccacgtttgggca

SEQ ID NO: 1350332 - DNA, 25 bp, Homo sapien
taatctgctgcccatacggaaaagc

SEQ ID NO: 1350333 - DNA, 25 bp, Homo sapien
gcaatgcatatgatgccgccaataa

SEQ ID NO: 1350334 - DNA, 25 bp, Homo sapien
cctctgagcagccagtctattaaga

SEQ ID NO: 1350335 - DNA, 25 bp, Homo sapien
tttcccatccatcctaagctgctgt

SEQ ID NO: 1350336 - DNA, 25 bp, Homo sapien
aaagtctccaggcttaatctcagct

SEQ ID NO: 1350337 - DNA, 25 bp, Homo sapien
gctgttctcattgccatcttctgct

SEQ ID NO: 1350338 - DNA, 25 bp, Homo sapien
gaaaataaggttgccttctggtctg

SEQ ID NO: 1350339 - DNA, 25 bp, Homo sapien
ggattaagttcaggaggagcccaaa

SEQ ID NO: 1350340 - DNA, 25 bp, Homo sapien
tattagagtggctacaatccatgct

SEQ ID NO: 1350341 - DNA, 25 bp, Homo sapien
tgccatggcaggatccgaggaagcc

SEQ ID NO: 1350342 - DNA, 25 bp, Homo sapien
gctaggctgataaccgtcattgctt

SEQ ID NO: 1350343 - DNA, 25 bp, Homo sapien
gagttctctagtggatccttctaca

SEQ ID NO: 1350344 - DNA, 25 bp, Homo sapien
ccttctacataatggagccgtatgg

SEQ ID NO: 1350345 - DNA, 25 bp, Homo sapien
ggaatattgcctgcataaaagaggc

SEQ ID NO: 1350346 - DNA, 25 bp, Homo sapien
tttgctacataacaggagttctcta

SEQ ID NO: 1350347 - DNA, 25 bp, Homo sapien
gccagcctgacatacactgaggagg

SEQ ID NO: 1350348 - DNA, 25 bp, Homo sapien
cagcctgacatacactgaggaggca

SEQ ID NO: 1350349 - DNA, 25 bp, Homo sapien
aagccagcctgacatacactgagga

SEQ ID NO: 1350350 - DNA, 25 bp, Homo sapien
agccagcctgacatacactgaggag

SEQ ID NO: 1350351 - DNA, 25 bp, Homo sapien
tgcaaaggccacacataactgcctg

SEQ ID NO: 1350352 - DNA, 25 bp, Homo sapien
caactggttataattggagaggatc

SEQ ID NO: 1350353 - DNA, 25 bp, Homo sapien
tgaagaacgatagcagagaactgca

SEQ ID NO: 1350354 - DNA, 25 bp, Homo sapien
tataattggagaggatctgaagaac

SEQ ID NO: 1350355 - DNA, 25 bp, Homo sapien
aagacacggtaggtgatttcatggc

SEQ ID NO: 1350356 - DNA, 25 bp, Homo sapien
tgcgaagacacggtaggtgatttca

SEQ ID NO: 1350357 - DNA, 25 bp, Homo sapien
acacggtaggtgatttcatggcctc

SEQ ID NO: 1350358 - DNA, 25 bp, Homo sapien
taggtgatttcatggcctcagtcat

SEQ ID NO: 1350359 - DNA, 25 bp, Homo sapien
gaaacccagactctattggcctgca

SEQ ID NO: 1350360 - DNA, 25 bp, Homo sapien
caaaaggacctctattcttgggcca

SEQ ID NO: 1350361 - DNA, 25 bp, Homo sapien
tctgactgacgtggagcaaatgcat

SEQ ID NO: 1350362 - DNA, 25 bp, Homo sapien
tcatatgcaccatcgtaaaggccag

SEQ ID NO: 1350363 - DNA, 25 bp, Homo sapien
aagacagtgacagacaattaggcac

SEQ ID NO: 1350364 - DNA, 25 bp, Homo sapien
gacagtgacagacaattaggcactg

SEQ ID NO: 1350365 - DNA, 25 bp, Homo sapien
tggaagacagtgacagacaattagg

SEQ ID NO: 1350366 - DNA, 25 bp, Homo sapien
gaagacagtgacagacaattaggca

SEQ ID NO: 1350367 - DNA, 25 bp, Homo sapien
tatttataaggagctatccctatat

SEQ ID NO: 1350368 - DNA, 25 bp, Homo sapien
tatgcaacaccagattgcaaaaaga

SEQ ID NO: 1350369 - DNA, 25 bp, Homo sapien
gcttgagcagccaaactagaatcat

SEQ ID NO: 1350370 - DNA, 25 bp, Homo sapien
ttatgacactcatcactgtgacact

SEQ ID NO: 1350371 - DNA, 25 bp, Homo sapien
ctccatgaggtagtgcttaacagcc

SEQ ID NO: 1350372 - DNA, 25 bp, Homo sapien
ggaaaagccctccatgaggtagtgc

SEQ ID NO: 1350373 - DNA, 25 bp, Homo sapien
gccctccatgaggtagtgcttaaca

SEQ ID NO: 1350374 - DNA, 25 bp, Homo sapien
gaaaagccctccatgaggtagtgct

SEQ ID NO: 1350375 - DNA, 25 bp, Homo sapien
tgacctcccaagatagcttcaaaga

SEQ ID NO: 1350376 - DNA, 25 bp, Homo sapien
cccaagcaagggtatgcataatgac

SEQ ID NO: 1350377 - DNA, 25 bp, Homo sapien
agtgttcccagcatggtcacccaag

SEQ ID NO: 1350378 - DNA, 25 bp, Homo sapien
gggttgctcatgtaggacccaagca

SEQ ID NO: 1350379 - DNA, 25 bp, Homo sapien
catttgagctcttatgaatgactaa

SEQ ID NO: 1350380 - DNA, 25 bp, Homo sapien
tcatttgtcatttgagctcttatga

SEQ ID NO: 1350381 - DNA, 25 bp, Homo sapien
ttgagctcttatgaatgactaagag

SEQ ID NO: 1350382 - DNA, 25 bp, Homo sapien
atgaatgactaagagaaatatgttc

SEQ ID NO: 1350383 - DNA, 25 bp, Homo sapien
gcaagaaccaaaagatgtacagctg

SEQ ID NO: 1350384 - DNA, 25 bp, Homo sapien
caaaagatgtacagctgttgatgaa

SEQ ID NO: 1350385 - DNA, 25 bp, Homo sapien
gggaatgctgtttagtgtgggtgga

SEQ ID NO: 1350386 - DNA, 25 bp, Homo sapien
tgcaggaagagtgggaggcacgtgg

SEQ ID NO: 1350387 - DNA, 25 bp, Homo sapien
agatttccaatctcatccagctcac

SEQ ID NO: 1350388 - DNA, 25 bp, Homo sapien
ggactggatgcccatgtatcatcat

SEQ ID NO: 1350389 - DNA, 25 bp, Homo sapien
caagatgtaccaaattgaactcaag

SEQ ID NO: 1350390 - DNA, 25 bp, Homo sapien
tttgtcttcagtgtccgcatcccat

SEQ ID NO: 1350391 - DNA, 25 bp, Homo sapien
tgcaaaatgccagaggtgaaggaat

SEQ ID NO: 1350392 - DNA, 25 bp, Homo sapien
tttgcttgatgcagctccctttggg

SEQ ID NO: 1350393 - DNA, 25 bp, Homo sapien
tattctggcaacgtcagtctcccac

SEQ ID NO: 1350394 - DNA, 25 bp, Homo sapien
gccattatggtagtagcgatagaga

SEQ ID NO: 1350395 - DNA, 25 bp, Homo sapien
caagcagcaggagaagctggtttga

SEQ ID NO: 1350396 - DNA, 25 bp, Homo sapien
ggtttgagaccaaataagctcttat

SEQ ID NO: 1350397 - DNA, 25 bp, Homo sapien
ccatggtagcaaattgggaggtcac

SEQ ID NO: 1350398 - DNA, 25 bp, Homo sapien
aaactgtcgaaaaacactgccaagg

SEQ ID NO: 1350399 - DNA, 25 bp, Homo sapien
gtcccaaatcttgtctcacagtcgg

SEQ ID NO: 1350400 - DNA, 25 bp, Homo sapien
tctcacagtcgggtaagtattggcc

SEQ ID NO: 1350401 - DNA, 25 bp, Homo sapien
tcgggtaagtattggcctggaccaa

SEQ ID NO: 1350402 - DNA, 25 bp, Homo sapien
tattggcctggaccaacatcagcca

SEQ ID NO: 1350403 - DNA, 25 bp, Homo sapien
accaccacacgactgatgccatgaa

SEQ ID NO: 1350404 - DNA, 25 bp, Homo sapien
acgactgatgccatgaacccatcat

SEQ ID NO: 1350405 - DNA, 25 bp, Homo sapien
tcaccaccacacgactgatgccatg

SEQ ID NO: 1350406 - DNA, 25 bp, Homo sapien
cacacgactgatgccatgaacccat

SEQ ID NO: 1350407 - DNA, 25 bp, Homo sapien
agctgcattgctgtgatactcttct

SEQ ID NO: 1350408 - DNA, 25 bp, Homo sapien
gctgagctgcattgctgtgatactc

SEQ ID NO: 1350409 - DNA, 25 bp, Homo sapien
ctagtttttgctgagctgcattgct

SEQ ID NO: 1350410 - DNA, 25 bp, Homo sapien
gctgtgatactcttctaactgcttt

SEQ ID NO: 1350411 - DNA, 25 bp, Homo sapien
agaaggaatttcacacggtaatgtc

SEQ ID NO: 1350412 - DNA, 25 bp, Homo sapien
aggcaggaacaggccattttcactt

SEQ ID NO: 1350413 - DNA, 25 bp, Homo sapien
agttaaggcaggaacaggccatttt

SEQ ID NO: 1350414 - DNA, 25 bp, Homo sapien
atcagttaaggcaggaacaggccat

SEQ ID NO: 1350415 - DNA, 25 bp, Homo sapien
ctcaggtgatcggacagtgtcagtc

SEQ ID NO: 1350416 - DNA, 25 bp, Homo sapien
caggaggcttctcaggtgatcggac

SEQ ID NO: 1350417 - DNA, 25 bp, Homo sapien
gagttacccaaagcttggtgtctgt

SEQ ID NO: 1350418 - DNA, 25 bp, Homo sapien
ttacccaaagcttggtgtctgtgat

SEQ ID NO: 1350419 - DNA, 25 bp, Homo sapien
tggaaagttgcctacagtgaaggag

SEQ ID NO: 1350420 - DNA, 25 bp, Homo sapien
gaccaaggtaggtgatcagacaaca

SEQ ID NO: 1350421 - DNA, 25 bp, Homo sapien
atgaataatcagtcaggcatccccg

SEQ ID NO: 1350422 - DNA, 25 bp, Homo sapien
gcatccccgcgtgattaaacaccaa

SEQ ID NO: 1350423 - DNA, 25 bp, Homo sapien
aaatttcactcgcgtccgtatgagg

SEQ ID NO: 1350424 - DNA, 25 bp, Homo sapien
aatttcactcgcgtccgtatgagga

SEQ ID NO: 1350425 - DNA, 25 bp, Homo sapien
tttcactcgcgtccgtatgaggaga

SEQ ID NO: 1350426 - DNA, 25 bp, Homo sapien
ccaaatttcactcgcgtccgtatga

SEQ ID NO: 1350427 - DNA, 25 bp, Homo sapien
gagcttgtaacaacacactgaatac

SEQ ID NO: 1350428 - DNA, 25 bp, Homo sapien
tcctcgactgtatttgcatctccag

SEQ ID NO: 1350429 - DNA, 25 bp, Homo sapien
aagttatgtgacctttcagctccag

SEQ ID NO: 1350430 - DNA, 25 bp, Homo sapien
tctcaggagaggaatctgactgggc

SEQ ID NO: 1350431 - DNA, 25 bp, Homo sapien
ttgccattgtagttcttattactca

SEQ ID NO: 1350432 - DNA, 25 bp, Homo sapien
tgccttctttacagttgccattgta

SEQ ID NO: 1350433 - DNA, 25 bp, Homo sapien
tggtataatggactagaaagcatgc

SEQ ID NO: 1350434 - DNA, 25 bp, Homo sapien
attactcagacagccacacttgtag

SEQ ID NO: 1350435 - DNA, 25 bp, Homo sapien
tgaaatcgttctgaacctccaacaa

SEQ ID NO: 1350436 - DNA, 25 bp, Homo sapien
ggaggcgaggtccatatgaaatcgt

SEQ ID NO: 1350437 - DNA, 25 bp, Homo sapien
cagagtgtggtgcaaatgaagtgat

SEQ ID NO: 1350438 - DNA, 25 bp, Homo sapien
gttctgaacctccaacaacgcagtc

SEQ ID NO: 1350439 - DNA, 25 bp, Homo sapien
tgtttgatagcctgataagctgcca

SEQ ID NO: 1350440 - DNA, 25 bp, Homo sapien
atttagcagcaatgactcccaacaa

SEQ ID NO: 1350441 - DNA, 25 bp, Homo sapien
cccaacaagtgtttgatagcctgat

SEQ ID NO: 1350442 - DNA, 25 bp, Homo sapien
agagatgacttgccctgggaccttg

SEQ ID NO: 1350443 - DNA, 25 bp, Homo sapien
catcggcatttgcagcacaacgggc

SEQ ID NO: 1350444 - DNA, 25 bp, Homo sapien
cacaacgggcctgactgttcttttg

SEQ ID NO: 1350445 - DNA, 25 bp, Homo sapien
catggtatctggcagactcattggc

SEQ ID NO: 1350446 - DNA, 25 bp, Homo sapien
tttgcctggcagactcatggtatct

SEQ ID NO: 1350447 - DNA, 25 bp, Homo sapien
tcaagatgggaatgtaatttatact

SEQ ID NO: 1350448 - DNA, 25 bp, Homo sapien
gttcaccatttgtcgggctactgac

SEQ ID NO: 1350449 - DNA, 25 bp, Homo sapien
ctgagttcaccatttgtcgggctac

SEQ ID NO: 1350450 - DNA, 25 bp, Homo sapien
tttgtcgggctactgacaaagcatt

SEQ ID NO: 1350451 - DNA, 25 bp, Homo sapien
tcttccagaatccaccactgtttct

SEQ ID NO: 1350452 - DNA, 25 bp, Homo sapien
cttccagaatccaccactgtttctt

SEQ ID NO: 1350453 - DNA, 25 bp, Homo sapien
taattagtgagttaggtccctgaga

SEQ ID NO: 1350454 - DNA, 25 bp, Homo sapien
cactgataaggaactctgagcttgg

SEQ ID NO: 1350455 - DNA, 25 bp, Homo sapien
tcccttaagggtagccaggcttgac

SEQ ID NO: 1350456 - DNA, 25 bp, Homo sapien
cagcctgacaactgatggtggaagt

SEQ ID NO: 1350457 - DNA, 25 bp, Homo sapien
tcaaggctctgctctcatttctctt

SEQ ID NO: 1350458 - DNA, 25 bp, Homo sapien
aaggctctgctctcatttctcttct

SEQ ID NO: 1350459 - DNA, 25 bp, Homo sapien
caaggctctgctctcatttctcttc

SEQ ID NO: 1350460 - DNA, 25 bp, Homo sapien
tttgctgttcagagggctgatgtcc

SEQ ID NO: 1350461 - DNA, 25 bp, Homo sapien
ttttgctgttcagagggctgatgtc

SEQ ID NO: 1350462 - DNA, 25 bp, Homo sapien
tcactagatactgcaagtatacatc

SEQ ID NO: 1350463 - DNA, 25 bp, Homo sapien
atgctttacaggtctcactagatac

SEQ ID NO: 1350464 - DNA, 25 bp, Homo sapien
caagtatacatctgaattggtataa

SEQ ID NO: 1350465 - DNA, 25 bp, Homo sapien
tctcactagatactgcaagtataca

SEQ ID NO: 1350466 - DNA, 25 bp, Homo sapien
tgcattgcatcagaagtcccaaacg

SEQ ID NO: 1350467 - DNA, 25 bp, Homo sapien
catcagaagtcccaaacgctttggt

SEQ ID NO: 1350468 - DNA, 25 bp, Homo sapien
tgcatcagaagtcccaaacgctttg

SEQ ID NO: 1350469 - DNA, 25 bp, Homo sapien
cattgcatcagaagtcccaaacgct

SEQ ID NO: 1350470 - DNA, 25 bp, Homo sapien
ttccctgcctgaagtgagacataag

SEQ ID NO: 1350471 - DNA, 25 bp, Homo sapien
ctttgtggggcaaagagcaaagaag

SEQ ID NO: 1350472 - DNA, 25 bp, Homo sapien
gtgagacataagaaggtaaactctt

SEQ ID NO: 1350473 - DNA, 25 bp, Homo sapien
aagagtcactaacattccctgcctg

SEQ ID NO: 1350474 - DNA, 25 bp, Homo sapien
ttgcactgtattaatctgatggcct

SEQ ID NO: 1350475 - DNA, 25 bp, Homo sapien
tatataacggtgaaatcctcaatgg

SEQ ID NO: 1350476 - DNA, 25 bp, Homo sapien
tcatattgaaaggaaccctgggctt

SEQ ID NO: 1350477 - DNA, 25 bp, Homo sapien
ggtgaaatcctcaatggtcatattg

SEQ ID NO: 1350478 - DNA, 25 bp, Homo sapien
tcttcatctctattgtccatttcca

SEQ ID NO: 1350479 - DNA, 25 bp, Homo sapien
gagctttcttcatctctattgtcca

SEQ ID NO: 1350480 - DNA, 25 bp, Homo sapien
ttgagctttcttcatctctattgtc

SEQ ID NO: 1350481 - DNA, 25 bp, Homo sapien
tttcttcatctctattgtccatttc

SEQ ID NO: 1350482 - DNA, 25 bp, Homo sapien
tccacttgctctgttatcaattttt

SEQ ID NO: 1350483 - DNA, 25 bp, Homo sapien
ccacttgctctgttatcaatttttg

SEQ ID NO: 1350484 - DNA, 25 bp, Homo sapien
ctccacttgctctgttatcaatttt

SEQ ID NO: 1350485 - DNA, 25 bp, Homo sapien
gctatgttgcagggtatgtgtttta

SEQ ID NO: 1350486 - DNA, 25 bp, Homo sapien
ccattccatgctgttttgccagagt

SEQ ID NO: 1350487 - DNA, 25 bp, Homo sapien
gataatgggtgaaggatcaggcaga

SEQ ID NO: 1350488 - DNA, 25 bp, Homo sapien
gcttggtccaaggataatgggtgaa

SEQ ID NO: 1350489 - DNA, 25 bp, Homo sapien
gcacactaagaacagtttcttgctg

SEQ ID NO: 1350490 - DNA, 25 bp, Homo sapien
tgctttgatgggcacactaagaaca

SEQ ID NO: 1350491 - DNA, 25 bp, Homo sapien
cagtgctttgatgggcacactaaga

SEQ ID NO: 1350492 - DNA, 25 bp, Homo sapien
agtgctttgatgggcacactaagaa

SEQ ID NO: 1350493 - DNA, 25 bp, Homo sapien
aagcctgctggtttgaggattcacc

SEQ ID NO: 1350494 - DNA, 25 bp, Homo sapien
agcggagatcatagccaaggctgca

SEQ ID NO: 1350495 - DNA, 25 bp, Homo sapien
agaaggagatctgctacacactggc

SEQ ID NO: 1350496 - DNA, 25 bp, Homo sapien
gaaaaaggtctgctctgaaccctaa

SEQ ID NO: 1350497 - DNA, 25 bp, Homo sapien
aaaaggcagtcccttcctggcagga

SEQ ID NO: 1350498 - DNA, 25 bp, Homo sapien
cagtcagccaaattgtgacaaaagg

SEQ ID NO: 1350499 - DNA, 25 bp, Homo sapien
gtgacaaaaggcagtcccttcctgg

SEQ ID NO: 1350500 - DNA, 25 bp, Homo sapien
gtcagccaaattgtgacaaaaggca

SEQ ID NO: 1350501 - DNA, 25 bp, Homo sapien
tatacaatgcgtactgctctaagag

SEQ ID NO: 1350502 - DNA, 25 bp, Homo sapien
ggtctccagtctggttgggcgtctc

SEQ ID NO: 1350503 - DNA, 25 bp, Homo sapien
gcaagttctctgtacatgcacacag

SEQ ID NO: 1350504 - DNA, 25 bp, Homo sapien
ggcttttggccaccataggactcag

SEQ ID NO: 1350505 - DNA, 25 bp, Homo sapien
ttatagtctggatctggaacagcag

SEQ ID NO: 1350506 - DNA, 25 bp, Homo sapien
tggaacagcagattgacaggcgaac

SEQ ID NO: 1350507 - DNA, 25 bp, Homo sapien
caggcgaacacttgggccagagaaa

SEQ ID NO: 1350508 - DNA, 25 bp, Homo sapien
tgttcttcttagcttggcttatatc

SEQ ID NO: 1350509 - DNA, 25 bp, Homo sapien
ttgtgccccttaataataaggacca

SEQ ID NO: 1350510 - DNA, 25 bp, Homo sapien
tcacactagccttgtgccccttaat

SEQ ID NO: 1350511 - DNA, 25 bp, Homo sapien
attcttcacactagccttgtgcccc

SEQ ID NO: 1350512 - DNA, 25 bp, Homo sapien
agccttgtgccccttaataataagg

SEQ ID NO: 1350513 - DNA, 25 bp, Homo sapien
ttcaatccttgagggttttgggtgc

SEQ ID NO: 1350514 - DNA, 25 bp, Homo sapien
ggtgcctttggctttactgctgctg

SEQ ID NO: 1350515 - DNA, 25 bp, Homo sapien
gctcccagcaacgtgaattcctgtc

SEQ ID NO: 1350516 - DNA, 25 bp, Homo sapien
ctagggatagtctttcttcaatcct

SEQ ID NO: 1350517 - DNA, 25 bp, Homo sapien
tatttctgcatttgcacgtagccag

SEQ ID NO: 1350518 - DNA, 25 bp, Homo sapien
cagcagacccataaagtatgtgttc

SEQ ID NO: 1350519 - DNA, 25 bp, Homo sapien
gattgccactcaaaatcatcagcag

SEQ ID NO: 1350520 - DNA, 25 bp, Homo sapien
cacgtagccagaagattgattgcca

SEQ ID NO: 1350521 - DNA, 25 bp, Homo sapien
caaaatataaatcaggacataaagc

SEQ ID NO: 1350522 - DNA, 25 bp, Homo sapien
ggacataaagcgagagccatctgct

SEQ ID NO: 1350523 - DNA, 25 bp, Homo sapien
taaatcaggacataaagcgagagcc

SEQ ID NO: 1350524 - DNA, 25 bp, Homo sapien
tcaggacataaagcgagagccatct

SEQ ID NO: 1350525 - DNA, 25 bp, Homo sapien
gtcattgagctgctgactggagcaa

SEQ ID NO: 1350526 - DNA, 25 bp, Homo sapien
ttgagctgctgactggagcaatccc

SEQ ID NO: 1350527 - DNA, 25 bp, Homo sapien
gctgctgactggagcaatcccacag

SEQ ID NO: 1350528 - DNA, 25 bp, Homo sapien
gactggagcaatcccacagcctcat

SEQ ID NO: 1350529 - DNA, 25 bp, Homo sapien
caccattcccatgtgtatgtttgga

SEQ ID NO: 1350530 - DNA, 25 bp, Homo sapien
gagaagttgaccatatctgtgaaat

SEQ ID NO: 1350531 - DNA, 25 bp, Homo sapien
tgatttgcatgtgctcaagttaaga

SEQ ID NO: 1350532 - DNA, 25 bp, Homo sapien
ccttggttctccagtagattgtcaa

SEQ ID NO: 1350533 - DNA, 25 bp, Homo sapien
gaaagtgagttgtgctccaggataa

SEQ ID NO: 1350534 - DNA, 25 bp, Homo sapien
cttgcaaatagtcattcaaatagtt

SEQ ID NO: 1350535 - DNA, 25 bp, Homo sapien
ttgcaaatagtcattcaaatagttt

SEQ ID NO: 1350536 - DNA, 25 bp, Homo sapien
ttcttttggaccctcggcacatggg

SEQ ID NO: 1350537 - DNA, 25 bp, Homo sapien
ctgattcttattaggcctgatgcct

SEQ ID NO: 1350538 - DNA, 25 bp, Homo sapien
tgatttcttttggaccctcggcaca

SEQ ID NO: 1350539 - DNA, 25 bp, Homo sapien
cacatggggccagcacttattgtca

SEQ ID NO: 1350540 - DNA, 25 bp, Homo sapien
gcagcaatgaaagactttcggggga

SEQ ID NO: 1350541 - DNA, 25 bp, Homo sapien
atgaaagactttcgggggaatacag

SEQ ID NO: 1350542 - DNA, 25 bp, Homo sapien
tcccggagagattcatagcccagga

SEQ ID NO: 1350543 - DNA, 25 bp, Homo sapien
cagcagagctgtcccggagagattc

SEQ ID NO: 1350544 - DNA, 25 bp, Homo sapien
aatctcatgcactttcgatgtatca

SEQ ID NO: 1350545 - DNA, 25 bp, Homo sapien
ttactaatctcatgcactttcgatg

SEQ ID NO: 1350546 - DNA, 25 bp, Homo sapien
gtgttgtccgttttcatcatctatt

SEQ ID NO: 1350547 - DNA, 25 bp, Homo sapien
tttgattagctttgtgttgtccgtt

SEQ ID NO: 1350548 - DNA, 25 bp, Homo sapien
gagacactcattggcaaatacttgg

SEQ ID NO: 1350549 - DNA, 25 bp, Homo sapien
agtcatgttgttccgtggccccagc

SEQ ID NO: 1350550 - DNA, 25 bp, Homo sapien
gatactccagggttttaggcatttg

SEQ ID NO: 1350551 - DNA, 25 bp, Homo sapien
acattggttggaccgtggatactcc

SEQ ID NO: 1350552 - DNA, 25 bp, Homo sapien
gacaaaagtcctgctgtgtttcaga

SEQ ID NO: 1350553 - DNA, 25 bp, Homo sapien
caatctacccctgatgttgggagga

SEQ ID NO: 1350554 - DNA, 25 bp, Homo sapien
ggcctttggacttacaacaatagag

SEQ ID NO: 1350555 - DNA, 25 bp, Homo sapien
gactccctggaagggcaaactctcc

SEQ ID NO: 1350556 - DNA, 25 bp, Homo sapien
agcaaggagtacttcattttggagg

SEQ ID NO: 1350557 - DNA, 25 bp, Homo sapien
taaaagttggccagcaaagcagccc

SEQ ID NO: 1350558 - DNA, 25 bp, Homo sapien
tgttcgtagacacattaatcctgtg

SEQ ID NO: 1350559 - DNA, 25 bp, Homo sapien
ttttggaggcataagaggtctgttc

SEQ ID NO: 1350560 - DNA, 25 bp, Homo sapien
ttgctggtttctgagaattgccgag

SEQ ID NO: 1350561 - DNA, 25 bp, Homo sapien
gaattgccgagattggaaattctct

SEQ ID NO: 1350562 - DNA, 25 bp, Homo sapien
tggaggattgttggttctctggaaa

SEQ ID NO: 1350563 - DNA, 25 bp, Homo sapien
gattgttggttctctggaaatgagg

SEQ ID NO: 1350564 - DNA, 25 bp, Homo sapien
catcagaagaattgggagatgcatt

SEQ ID NO: 1350565 - DNA, 25 bp, Homo sapien
gttacacaagccagccgcagggatc

SEQ ID NO: 1350566 - DNA, 25 bp, Homo sapien
cagccgcagggatccaaggcatttc

SEQ ID NO: 1350567 - DNA, 25 bp, Homo sapien
aaattagcccagtttattccaacat

SEQ ID NO: 1350568 - DNA, 25 bp, Homo sapien
tgcctttgaactacagggaactaca

SEQ ID NO: 1350569 - DNA, 25 bp, Homo sapien
ttaggattataacccttcagccaaa

SEQ ID NO: 1350570 - DNA, 25 bp, Homo sapien
tagctctcagctgaaattgccaatg

SEQ ID NO: 1350571 - DNA, 25 bp, Homo sapien
tcagccaaatcccattatgtcccat

SEQ ID NO: 1350572 - DNA, 25 bp, Homo sapien
gatgattgccctcatcggatgtgga

SEQ ID NO: 1350573 - DNA, 25 bp, Homo sapien
gagttctgccctcataagtggaata

SEQ ID NO: 1350574 - DNA, 25 bp, Homo sapien
cataggatgatgcaggatgattgcc

SEQ ID NO: 1350575 - DNA, 25 bp, Homo sapien
cagaggtgattaagacatgagagtt

SEQ ID NO: 1350576 - DNA, 25 bp, Homo sapien
tacctcgtgggtcaatccaagcctg

SEQ ID NO: 1350577 - DNA, 25 bp, Homo sapien
cctgtgggtctttcttgcggttcct

SEQ ID NO: 1350578 - DNA, 25 bp, Homo sapien
gaatgaacagtagcctccatcgtgc

SEQ ID NO: 1350579 - DNA, 25 bp, Homo sapien
tatcaggacatcttgcaggcttacc

SEQ ID NO: 1350580 - DNA, 25 bp, Homo sapien
ttggttcccagatacaaagaagtcc

SEQ ID NO: 1350581 - DNA, 25 bp, Homo sapien
gactcttattttcagctgttggttc

SEQ ID NO: 1350582 - DNA, 25 bp, Homo sapien
gctgttcacagttgattcttcctat

SEQ ID NO: 1350583 - DNA, 25 bp, Homo sapien
cttcctatcaggatgatgatgactc

SEQ ID NO: 1350584 - DNA, 25 bp, Homo sapien
ttattaggaggtaaacacacttgcc

SEQ ID NO: 1350585 - DNA, 25 bp, Homo sapien
gagattcgtagtgaagatcttaaca

SEQ ID NO: 1350586 - DNA, 25 bp, Homo sapien
tgtcttagttggagaagtagccact

SEQ ID NO: 1350587 - DNA, 25 bp, Homo sapien
cattagaccttaatgtatctgtgtg

SEQ ID NO: 1350588 - DNA, 25 bp, Homo sapien
gtgcctgagtgcgtgtgcacacatg

SEQ ID NO: 1350589 - DNA, 25 bp, Homo sapien
gaatgtgtgcctgagtgcgtgtgca

SEQ ID NO: 1350590 - DNA, 25 bp, Homo sapien
tgtgcgatcatgcattgtcgtggag

SEQ ID NO: 1350591 - DNA, 25 bp, Homo sapien
ctgttgaccattgctgactgcaggg

SEQ ID NO: 1350592 - DNA, 25 bp, Homo sapien
cattgaacgtcacaaactgattgag

SEQ ID NO: 1350593 - DNA, 25 bp, Homo sapien
tgaaagactctagaatgctcaacgc

SEQ ID NO: 1350594 - DNA, 25 bp, Homo sapien
cggaatgttcttatctcatccacca

SEQ ID NO: 1350595 - DNA, 25 bp, Homo sapien
ttcatttaagctctggaaagagaca

SEQ ID NO: 1350596 - DNA, 25 bp, Homo sapien
cacagatacttctccggaatgttct

SEQ ID NO: 1350597 - DNA, 25 bp, Homo sapien
cacacagatacttctccggaatgtt

SEQ ID NO: 1350598 - DNA, 25 bp, Homo sapien
tccaaggtaaattggcgccttggaa

SEQ ID NO: 1350599 - DNA, 25 bp, Homo sapien
gccttggaatcctgcattcctgtgg

SEQ ID NO: 1350600 - DNA, 25 bp, Homo sapien
tgatatgcaagtacagcaggaagat

SEQ ID NO: 1350601 - DNA, 25 bp, Homo sapien
aaccatagttcaggcgacaagaagc

SEQ ID NO: 1350602 - DNA, 25 bp, Homo sapien
tgaaatttaccatcacttgggaaaa

SEQ ID NO: 1350603 - DNA, 25 bp, Homo sapien
tcttatgcgagagagaaaatcaaca

SEQ ID NO: 1350604 - DNA, 25 bp, Homo sapien
ggcctcaatctgtgcacctgttgtt

SEQ ID NO: 1350605 - DNA, 25 bp, Homo sapien
tgcaaagtgggttattagacgtggt

SEQ ID NO: 1350606 - DNA, 25 bp, Homo sapien
gaaaatatttagtgaggcctcaatc

SEQ ID NO: 1350607 - DNA, 25 bp, Homo sapien
ataagcctttcgtgtcttctcagcc

SEQ ID NO: 1350608 - DNA, 25 bp, Homo sapien
tcgtgtcttctcagcctcatctctt

SEQ ID NO: 1350609 - DNA, 25 bp, Homo sapien
gcctttcgtgtcttctcagcctcat

SEQ ID NO: 1350610 - DNA, 25 bp, Homo sapien
cataagcctttcgtgtcttctcagc

SEQ ID NO: 1350611 - DNA, 25 bp, Homo sapien
cttgacaataggagagccggagccc

SEQ ID NO: 1350612 - DNA, 25 bp, Homo sapien
tcttaggttccacagggactccctg

SEQ ID NO: 1350613 - DNA, 25 bp, Homo sapien
accatttgcctatagtggtggccga

SEQ ID NO: 1350614 - DNA, 25 bp, Homo sapien
taagcctccttagaaagtctggcag

SEQ ID NO: 1350615 - DNA, 25 bp, Homo sapien
cctggaggtgaaaagttctatatca

SEQ ID NO: 1350616 - DNA, 25 bp, Homo sapien
aagttctatatcaaattactcacag

SEQ ID NO: 1350617 - DNA, 25 bp, Homo sapien
tatatcaaattactcacagcctgag

SEQ ID NO: 1350618 - DNA, 25 bp, Homo sapien
gacctggaggtgaaaagttctatat

SEQ ID NO: 1350619 - DNA, 25 bp, Homo sapien
ctaagagaggtaaggaactaagcct

SEQ ID NO: 1350620 - DNA, 25 bp, Homo sapien
cgtactctagtgagaacatgacaac

SEQ ID NO: 1350621 - DNA, 25 bp, Homo sapien
taaaaggagatgtctggataaggcc

SEQ ID NO: 1350622 - DNA, 25 bp, Homo sapien
caactacttccacgtgtcaggcact

SEQ ID NO: 1350623 - DNA, 25 bp, Homo sapien
tctccaatcaatccaaattgcccta

SEQ ID NO: 1350624 - DNA, 25 bp, Homo sapien
caaattgccctattcatgtcatctc

SEQ ID NO: 1350625 - DNA, 25 bp, Homo sapien
tctcctcctcatgctcgtctgctct

SEQ ID NO: 1350626 - DNA, 25 bp, Homo sapien
tcaatccaaattgccctattcatgt

SEQ ID NO: 1350627 - DNA, 25 bp, Homo sapien
agtcattgagatgtacaaaggagtc

SEQ ID NO: 1350628 - DNA, 25 bp, Homo sapien
ggtgccctcagtgttaagaatgaca

SEQ ID NO: 1350629 - DNA, 25 bp, Homo sapien
ctcagtgttaagaatgacaggagtc

SEQ ID NO: 1350630 - DNA, 25 bp, Homo sapien
gacaggagtcattgagatgtacaaa

SEQ ID NO: 1350631 - DNA, 25 bp, Homo sapien
aatagctttcaaccctactttccat

SEQ ID NO: 1350632 - DNA, 25 bp, Homo sapien
caatagctttcaaccctactttcca

SEQ ID NO: 1350633 - DNA, 25 bp, Homo sapien
agctttcaaccctactttccatcct

SEQ ID NO: 1350634 - DNA, 25 bp, Homo sapien
tagctttcaaccctactttccatcc

SEQ ID NO: 1350635 - DNA, 25 bp, Homo sapien
tacagtatgggctaagtagacattg

SEQ ID NO: 1350636 - DNA, 25 bp, Homo sapien
tagctacagtatgggctaagtagac

SEQ ID NO: 1350637 - DNA, 25 bp, Homo sapien
tttgatagctacagtatgggctaag

SEQ ID NO: 1350638 - DNA, 25 bp, Homo sapien
tgttgtttgatagctacagtatggg

SEQ ID NO: 1350639 - DNA, 25 bp, Homo sapien
tcacaatgactgctagacctttctc

SEQ ID NO: 1350640 - DNA, 25 bp, Homo sapien
tgaacagatcctttattgagatgtt

SEQ ID NO: 1350641 - DNA, 25 bp, Homo sapien
gagaaggaagttgaaccccatgtgg

SEQ ID NO: 1350642 - DNA, 25 bp, Homo sapien
catgtggctcagacaaaggatctta

SEQ ID NO: 1350643 - DNA, 25 bp, Homo sapien
agagcatggtgaacacttcattaag

SEQ ID NO: 1350644 - DNA, 25 bp, Homo sapien
aaaatgcattaactcttggcagagg

SEQ ID NO: 1350645 - DNA, 25 bp, Homo sapien
taaacaggagcgctttcatcaggct

SEQ ID NO: 1350646 - DNA, 25 bp, Homo sapien
tgtatatttccgtcagagctcttgg

SEQ ID NO: 1350647 - DNA, 25 bp, Homo sapien
aaatgtcactatggcagttgtagcc

SEQ ID NO: 1350648 - DNA, 25 bp, Homo sapien
gattcagttatgtactcaggctcca

SEQ ID NO: 1350649 - DNA, 25 bp, Homo sapien
gaactttcctctgaattaggctttg

SEQ ID NO: 1350650 - DNA, 25 bp, Homo sapien
tcaatacagttgtgtcccaaggaat

SEQ ID NO: 1350651 - DNA, 25 bp, Homo sapien
caccacagttagctgatgcaagagg

SEQ ID NO: 1350652 - DNA, 25 bp, Homo sapien
tttctacagacctttctcactaagc

SEQ ID NO: 1350653 - DNA, 25 bp, Homo sapien
catgctgtactttgatgatgccaat

SEQ ID NO: 1350654 - DNA, 25 bp, Homo sapien
gctgtactttgatgatgccaatttg

SEQ ID NO: 1350655 - DNA, 25 bp, Homo sapien
tacatgctgtactttgatgatgcca

SEQ ID NO: 1350656 - DNA, 25 bp, Homo sapien
aaggtacatgctgtactttgatgat

SEQ ID NO: 1350657 - DNA, 25 bp, Homo sapien
cactagggaaatcaacaaccccttg

SEQ ID NO: 1350658 - DNA, 25 bp, Homo sapien
ttggtgtgcctacttccagctctga

SEQ ID NO: 1350659 - DNA, 25 bp, Homo sapien
gggttgcccaaattgatcgttataa

SEQ ID NO: 1350660 - DNA, 25 bp, Homo sapien
gctctgattacaagttcaggttctg

SEQ ID NO: 1350661 - DNA, 25 bp, Homo sapien
cggtagttgactgatttagaagttc

SEQ ID NO: 1350662 - DNA, 25 bp, Homo sapien
ttctgtacggtagttgactgattta

SEQ ID NO: 1350663 - DNA, 25 bp, Homo sapien
tgtacggtagttgactgatttagaa

SEQ ID NO: 1350664 - DNA, 25 bp, Homo sapien
catttctgtacggtagttgactgat

SEQ ID NO: 1350665 - DNA, 25 bp, Homo sapien
ctggcagttttgaaaggtaatcttt

SEQ ID NO: 1350666 - DNA, 25 bp, Homo sapien
tctaccagaaaatgcgaagcatctg

SEQ ID NO: 1350667 - DNA, 25 bp, Homo sapien
ttactttcacataaactgtactcca

SEQ ID NO: 1350668 - DNA, 25 bp, Homo sapien
gcaggaaatatcattacagacctgg

SEQ ID NO: 1350669 - DNA, 25 bp, Homo sapien
ttggatagtcttaaggcatttccca

SEQ ID NO: 1350670 - DNA, 25 bp, Homo sapien
tggatagtcttaaggcatttcccag

SEQ ID NO: 1350671 - DNA, 25 bp, Homo sapien
tctgtggggtgcctcttttctgaag

SEQ ID NO: 1350672 - DNA, 25 bp, Homo sapien
cagttcagttgttcttcacattcca

SEQ ID NO: 1350673 - DNA, 25 bp, Homo sapien
gcaaattctgaaggaatgactaaca

SEQ ID NO: 1350674 - DNA, 25 bp, Homo sapien
gaagaacctgttccaattgtcaaga

SEQ ID NO: 1350675 - DNA, 25 bp, Homo sapien
gggttccaacgtacagataatcagt

SEQ ID NO: 1350676 - DNA, 25 bp, Homo sapien
tctgcagcactcttcagtgcacttg

SEQ ID NO: 1350677 - DNA, 25 bp, Homo sapien
ggtagcaccacctctgaatacctgg

SEQ ID NO: 1350678 - DNA, 25 bp, Homo sapien
tcataaacagtaacaggtagcacca

SEQ ID NO: 1350679 - DNA, 25 bp, Homo sapien
tgaatacctggtaaaagcaactctt

SEQ ID NO: 1350680 - DNA, 25 bp, Homo sapien
tccttgcacactctttaggtgcttt

SEQ ID NO: 1350681 - DNA, 25 bp, Homo sapien
ccacctctccatgagcagcttctcc

SEQ ID NO: 1350682 - DNA, 25 bp, Homo sapien
taggtgcttttgaggcatggtgcct

SEQ ID NO: 1350683 - DNA, 25 bp, Homo sapien
cactctttaggtgcttttgaggcat

SEQ ID NO: 1350684 - DNA, 25 bp, Homo sapien
aagatcagggcactggcatttgtat

SEQ ID NO: 1350685 - DNA, 25 bp, Homo sapien
cagggcactggcatttgtatctggt

SEQ ID NO: 1350686 - DNA, 25 bp, Homo sapien
tgtatctggtgagggtcccattccc

SEQ ID NO: 1350687 - DNA, 25 bp, Homo sapien
gatcagggcactggcatttgtatct

SEQ ID NO: 1350688 - DNA, 25 bp, Homo sapien
taaacacgtaatggaaaggagcttc

SEQ ID NO: 1350689 - DNA, 25 bp, Homo sapien
aaacacgtaatggaaaggagcttct

SEQ ID NO: 1350690 - DNA, 25 bp, Homo sapien
ctaaacacgtaatggaaaggagctt

SEQ ID NO: 1350691 - DNA, 25 bp, Homo sapien
ctgctggtcaaggtattcaatgggc

SEQ ID NO: 1350692 - DNA, 25 bp, Homo sapien
gtcacagtgttgctcttccagtcca

SEQ ID NO: 1350693 - DNA, 25 bp, Homo sapien
aactgttctgggctaaagtgctgcc

SEQ ID NO: 1350694 - DNA, 25 bp, Homo sapien
caatgggctaccgtgctctgtaaca

SEQ ID NO: 1350695 - DNA, 25 bp, Homo sapien
taagtatgcccaagatatgtcatgg

SEQ ID NO: 1350696 - DNA, 25 bp, Homo sapien
tgtcatgggacatactcagataact

SEQ ID NO: 1350697 - DNA, 25 bp, Homo sapien
tgtaaccaccaacgccctggaatta

SEQ ID NO: 1350698 - DNA, 25 bp, Homo sapien
catgccaaaggaatagcacaaatcc

SEQ ID NO: 1350699 - DNA, 25 bp, Homo sapien
ttgccgcttaagacccacactttgc

SEQ ID NO: 1350700 - DNA, 25 bp, Homo sapien
cccacactttgctctaaagggactg

SEQ ID NO: 1350701 - DNA, 25 bp, Homo sapien
aaagggactgcccaatacttggcat

SEQ ID NO: 1350702 - DNA, 25 bp, Homo sapien
ttattgccgcttaagacccacactt

SEQ ID NO: 1350703 - DNA, 25 bp, Homo sapien
cccagattccaagccaaatagaggt

SEQ ID NO: 1350704 - DNA, 25 bp, Homo sapien
tgtgctttcatcaggtagctccttt

SEQ ID NO: 1350705 - DNA, 25 bp, Homo sapien
ctgagccctaatgacacaacccaga

SEQ ID NO: 1350706 - DNA, 25 bp, Homo sapien
caaatagaggtctgtgctttcatca

SEQ ID NO: 1350707 - DNA, 25 bp, Homo sapien
gggttgaatacagcatatgacatca

SEQ ID NO: 1350708 - DNA, 25 bp, Homo sapien
aacatttccttcttcgcatgcagat

SEQ ID NO: 1350709 - DNA, 25 bp, Homo sapien
ttgtagaagacaaccataaagtcct

SEQ ID NO: 1350710 - DNA, 25 bp, Homo sapien
cagaggttggatgggctgtcataca

SEQ ID NO: 1350711 - DNA, 25 bp, Homo sapien
gatctgggctggattaaggctaggg

SEQ ID NO: 1350712 - DNA, 25 bp, Homo sapien
atttgagcctctgctgcaattccag

SEQ ID NO: 1350713 - DNA, 25 bp, Homo sapien
agggtcaccagagtggtgttaagtt

SEQ ID NO: 1350714 - DNA, 25 bp, Homo sapien
agagtggtgttaagtttctgctgag

SEQ ID NO: 1350715 - DNA, 25 bp, Homo sapien
acagaaattgaagttgcgttggcca

SEQ ID NO: 1350716 - DNA, 25 bp, Homo sapien
cagaaattgaagttgcgttggccat

SEQ ID NO: 1350717 - DNA, 25 bp, Homo sapien
taattgcctgccagtatcccttttt

SEQ ID NO: 1350718 - DNA, 25 bp, Homo sapien
caaatcattcagtactgaaggtatc

SEQ ID NO: 1350719 - DNA, 25 bp, Homo sapien
agagtaattgcctgccagtatccct

SEQ ID NO: 1350720 - DNA, 25 bp, Homo sapien
ttttaattctcttgaacgccaaatc

SEQ ID NO: 1350721 - DNA, 25 bp, Homo sapien
aaagtgcttacacatcaccattggt

SEQ ID NO: 1350722 - DNA, 25 bp, Homo sapien
ggactctactgcttagatcatctaa

SEQ ID NO: 1350723 - DNA, 25 bp, Homo sapien
cttgatttaagggactctactgctt

SEQ ID NO: 1350724 - DNA, 25 bp, Homo sapien
caccattggtagtagggttagtgat

SEQ ID NO: 1350725 - DNA, 25 bp, Homo sapien
aatctccatgtatggtgggagtgac

SEQ ID NO: 1350726 - DNA, 25 bp, Homo sapien
ataatctccatgtatggtgggagtg

SEQ ID NO: 1350727 - DNA, 25 bp, Homo sapien
tctccatgtatggtgggagtgacct

SEQ ID NO: 1350728 - DNA, 25 bp, Homo sapien
tccatgtatggtgggagtgacctag

SEQ ID NO: 1350729 - DNA, 25 bp, Homo sapien
tcaggatagaaacaacaagcacaaa

SEQ ID NO: 1350730 - DNA, 25 bp, Homo sapien
tgattagggcctgtcttactgaaaa

SEQ ID NO: 1350731 - DNA, 25 bp, Homo sapien
caaagtaaatgggtgcagaagtgta

SEQ ID NO: 1350732 - DNA, 25 bp, Homo sapien
tctcaaaatgtaatgaccgggatag

SEQ ID NO: 1350733 - DNA, 25 bp, Homo sapien
ggattcaaagtaggttaagctatca

SEQ ID NO: 1350734 - DNA, 25 bp, Homo sapien
taaaaagacacctgctttctcatgg

SEQ ID NO: 1350735 - DNA, 25 bp, Homo sapien
gcgacttaagcatctacactctaaa

SEQ ID NO: 1350736 - DNA, 25 bp, Homo sapien
gcaaaatctactaataaaaacagac

SEQ ID NO: 1350737 - DNA, 25 bp, Homo sapien
atgagcgacgcagaagacggtgatt

SEQ ID NO: 1350738 - DNA, 25 bp, Homo sapien
tcccagcatgagcgacgcagaagac

SEQ ID NO: 1350739 - DNA, 25 bp, Homo sapien
ctgctgggaggagccaagatggccg

SEQ ID NO: 1350740 - DNA, 25 bp, Homo sapien
aataggaacagctccggtctacagc

SEQ ID NO: 1350741 - DNA, 25 bp, Homo sapien
gactctgaagtcaaccctaatcaca

SEQ ID NO: 1350742 - DNA, 25 bp, Homo sapien
attggtatgaatagttccattttgc

SEQ ID NO: 1350743 - DNA, 25 bp, Homo sapien
tgctttgtggcaatagttctgactc

SEQ ID NO: 1350744 - DNA, 25 bp, Homo sapien
cctgaagaattggtatgaatagttc

SEQ ID NO: 1350745 - DNA, 25 bp, Homo sapien
tcagcgcagtttataccagaatcca

SEQ ID NO: 1350746 - DNA, 25 bp, Homo sapien
ccgggagagataagaagaagactac

SEQ ID NO: 1350747 - DNA, 25 bp, Homo sapien
gaagactactactgaggcttaggac

SEQ ID NO: 1350748 - DNA, 25 bp, Homo sapien
gtagaggaatgaggaaaagcgacct

SEQ ID NO: 1350749 - DNA, 25 bp, Homo sapien
tgtggctccagcctctggagcttat

SEQ ID NO: 1350750 - DNA, 25 bp, Homo sapien
tggctccagcctctggagcttatcc

SEQ ID NO: 1350751 - DNA, 25 bp, Homo sapien
gctccagcctctggagcttatccat

SEQ ID NO: 1350752 - DNA, 25 bp, Homo sapien
ctgtggctccagcctctggagctta

SEQ ID NO: 1350753 - DNA, 25 bp, Homo sapien
ggcagccaggtttatagacttcaaa

SEQ ID NO: 1350754 - DNA, 25 bp, Homo sapien
aattttaagacgcaagtaatggcaa

SEQ ID NO: 1350755 - DNA, 25 bp, Homo sapien
gcagcctggatcttgcatcaggcaa

SEQ ID NO: 1350756 - DNA, 25 bp, Homo sapien
tataagcggtgatgttggtccttgg

SEQ ID NO: 1350757 - DNA, 25 bp, Homo sapien
tggtccttggatataaccacatgtc

SEQ ID NO: 1350758 - DNA, 25 bp, Homo sapien
ggtcaattcagcaattttgtcctgc

SEQ ID NO: 1350759 - DNA, 25 bp, Homo sapien
tcaattcagcaattttgtcctgctt

SEQ ID NO: 1350760 - DNA, 25 bp, Homo sapien
gggtcaattcagcaattttgtcctg

SEQ ID NO: 1350761 - DNA, 25 bp, Homo sapien
gtcaattcagcaattttgtcctgct

SEQ ID NO: 1350762 - DNA, 25 bp, Homo sapien
ctacagagtcagttgcatctgcaaa

SEQ ID NO: 1350763 - DNA, 25 bp, Homo sapien
gtagtatccacatttccacgtaagg

SEQ ID NO: 1350764 - DNA, 25 bp, Homo sapien
tcctcctcttcgtccatcatagaag

SEQ ID NO: 1350765 - DNA, 25 bp, Homo sapien
tcgtccatcatagaagtagtatcca

SEQ ID NO: 1350766 - DNA, 25 bp, Homo sapien
ccactccaccaaataatgccagatt

SEQ ID NO: 1350767 - DNA, 25 bp, Homo sapien
gtcccactccaccaaataatgccag

SEQ ID NO: 1350768 - DNA, 25 bp, Homo sapien
cttgtcccactccaccaaataatgc

SEQ ID NO: 1350769 - DNA, 25 bp, Homo sapien
cactccaccaaataatgccagattc

SEQ ID NO: 1350770 - DNA, 25 bp, Homo sapien
cacctcttctttatacattgggaga

SEQ ID NO: 1350771 - DNA, 25 bp, Homo sapien
caatggaggtcatatatttccaaga

SEQ ID NO: 1350772 - DNA, 25 bp, Homo sapien
ttctagttggtatgctttttattac

SEQ ID NO: 1350773 - DNA, 25 bp, Homo sapien
atttcagaactgattattgatctct

SEQ ID NO: 1350774 - DNA, 25 bp, Homo sapien
cactatagaagctgggacagattgc

SEQ ID NO: 1350775 - DNA, 25 bp, Homo sapien
ccaagagctgggttcaagggtagcc

SEQ ID NO: 1350776 - DNA, 25 bp, Homo sapien
gggtagccaacactcatcctagaga

SEQ ID NO: 1350777 - DNA, 25 bp, Homo sapien
ggtatccaaagaagcccactataga

SEQ ID NO: 1350778 - DNA, 25 bp, Homo sapien
tgtgagaaataacatcagtagacct

SEQ ID NO: 1350779 - DNA, 25 bp, Homo sapien
tgaactctttgctagtaggtattcc

SEQ ID NO: 1350780 - DNA, 25 bp, Homo sapien
ttgtgtttctttgagagcattctcc

SEQ ID NO: 1350781 - DNA, 25 bp, Homo sapien
ggaaggtgtacactgatggtctggc

SEQ ID NO: 1350782 - DNA, 25 bp, Homo sapien
aaatgtgagcttgccaaagtatgaa

SEQ ID NO: 1350783 - DNA, 25 bp, Homo sapien
tcttaaatgtgagcttgccaaagta

SEQ ID NO: 1350784 - DNA, 25 bp, Homo sapien
gatcagctgggttcccattaagagc

SEQ ID NO: 1350785 - DNA, 25 bp, Homo sapien
tatgttgaatcccttataagattac

SEQ ID NO: 1350786 - DNA, 25 bp, Homo sapien
agagttctctacacttccagaaaat

SEQ ID NO: 1350787 - DNA, 25 bp, Homo sapien
ttatactttggtaaataatagtcac

SEQ ID NO: 1350788 - DNA, 25 bp, Homo sapien
ggcctggctttattatactttggta

SEQ ID NO: 1350789 - DNA, 25 bp, Homo sapien
tgtcatcagagttctctacacttcc

SEQ ID NO: 1350790 - DNA, 25 bp, Homo sapien
tgcacatgcctataccatttagaaa

SEQ ID NO: 1350791 - DNA, 25 bp, Homo sapien
tagctgcagcttcctactgcgttag

SEQ ID NO: 1350792 - DNA, 25 bp, Homo sapien
cataatgtgtcagaagatagctgca

SEQ ID NO: 1350793 - DNA, 25 bp, Homo sapien
caggtttagatctactgagccatca

SEQ ID NO: 1350794 - DNA, 25 bp, Homo sapien
ttttttgcagacatgccggatatct

SEQ ID NO: 1350795 - DNA, 25 bp, Homo sapien
ccacatgtcttaagaactggtgcct

SEQ ID NO: 1350796 - DNA, 25 bp, Homo sapien
gcagacatgccggatatctacgcag

SEQ ID NO: 1350797 - DNA, 25 bp, Homo sapien
gatatctacgcagtaagtgctctga

SEQ ID NO: 1350798 - DNA, 25 bp, Homo sapien
ttataaattgtatagcagtctgtgc

SEQ ID NO: 1350799 - DNA, 25 bp, Homo sapien
atatgaaaggaagtatggccgaggg

SEQ ID NO: 1350800 - DNA, 25 bp, Homo sapien
gacagtggtctcacacaattatggt

SEQ ID NO: 1350801 - DNA, 25 bp, Homo sapien
aattgtatagcagtctgtgctcaga

SEQ ID NO: 1350802 - DNA, 25 bp, Homo sapien
taccagtcagaggatggggagcaca

SEQ ID NO: 1350803 - DNA, 25 bp, Homo sapien
accagtcagaggatggggagcacac

SEQ ID NO: 1350804 - DNA, 25 bp, Homo sapien
ttaccagtcagaggatggggagcac

SEQ ID NO: 1350805 - DNA, 25 bp, Homo sapien
tgagacaacagctctgctaagtgcc

SEQ ID NO: 1350806 - DNA, 25 bp, Homo sapien
gacaacagctctgctaagtgccctt

SEQ ID NO: 1350807 - DNA, 25 bp, Homo sapien
acagctctgctaagtgcccttgaga

SEQ ID NO: 1350808 - DNA, 25 bp, Homo sapien
agcctgagacaacagctctgctaag

SEQ ID NO: 1350809 - DNA, 25 bp, Homo sapien
ttattggtgtctttatttaggctgt

SEQ ID NO: 1350810 - DNA, 25 bp, Homo sapien
tgcaagctgttattggtgtctttat

SEQ ID NO: 1350811 - DNA, 25 bp, Homo sapien
gcaagctgttattggtgtctttatt

SEQ ID NO: 1350812 - DNA, 25 bp, Homo sapien
gctgttattggtgtctttatttagg

SEQ ID NO: 1350813 - DNA, 25 bp, Homo sapien
cattttatctccaaattccacaaat

SEQ ID NO: 1350814 - DNA, 25 bp, Homo sapien
ttatctccaaattccacaaatgaag

SEQ ID NO: 1350815 - DNA, 25 bp, Homo sapien
caaacaccaaccattttatctccaa

SEQ ID NO: 1350816 - DNA, 25 bp, Homo sapien
ttttatctccaaattccacaaatga

SEQ ID NO: 1350817 - DNA, 25 bp, Homo sapien
tcaaccatggctgtactgtgaactg

SEQ ID NO: 1350818 - DNA, 25 bp, Homo sapien
atccagtatctttctctcaacacct

SEQ ID NO: 1350819 - DNA, 25 bp, Homo sapien
gctaagatattgaagatgctctgct

SEQ ID NO: 1350820 - DNA, 25 bp, Homo sapien
ttctcagctaagatattgaagatgc

SEQ ID NO: 1350821 - DNA, 25 bp, Homo sapien
tcacttctgatttccaaatctctta

SEQ ID NO: 1350822 - DNA, 25 bp, Homo sapien
cacttctgatttccaaatctcttac

SEQ ID NO: 1350823 - DNA, 25 bp, Homo sapien
ccaataggaggatcaaatggagatt

SEQ ID NO: 1350824 - DNA, 25 bp, Homo sapien
cttcagaagattgactaaggcttct

SEQ ID NO: 1350825 - DNA, 25 bp, Homo sapien
tcaaatggagattggtaagacttct

SEQ ID NO: 1350826 - DNA, 25 bp, Homo sapien
gaagattgactaaggcttcttccta

SEQ ID NO: 1350827 - DNA, 25 bp, Homo sapien
tctgaaagcctgactgtgcaccatc

SEQ ID NO: 1350828 - DNA, 25 bp, Homo sapien
cccactgagcaagcctgcggtaggt

SEQ ID NO: 1350829 - DNA, 25 bp, Homo sapien
cagcagaatgcttgtgccatcctga

SEQ ID NO: 1350830 - DNA, 25 bp, Homo sapien
tgataacaactaccacccactgagc

SEQ ID NO: 1350831 - DNA, 25 bp, Homo sapien
tctgggtagaaaatttagggatcat

SEQ ID NO: 1350832 - DNA, 25 bp, Homo sapien
tagggatcatattctttacaggttg

SEQ ID NO: 1350833 - DNA, 25 bp, Homo sapien
tatttcaagtccagtagtgttaaca

SEQ ID NO: 1350834 - DNA, 25 bp, Homo sapien
aagcaaaagtagtattcccttacag

SEQ ID NO: 1350835 - DNA, 25 bp, Homo sapien
ggcctttagggctgcttcagaaatc

SEQ ID NO: 1350836 - DNA, 25 bp, Homo sapien
aatcaatccaggagtcccaaccctg

SEQ ID NO: 1350837 - DNA, 25 bp, Homo sapien
gaaggataaaaggtcactgccgtgg

SEQ ID NO: 1350838 - DNA, 25 bp, Homo sapien
ggaacacatgcctcaaattgccagc

SEQ ID NO: 1350839 - DNA, 25 bp, Homo sapien
cttcatttcaagtctaggtgggtca

SEQ ID NO: 1350840 - DNA, 25 bp, Homo sapien
cgtaggttagaaggatttctctaca

SEQ ID NO: 1350841 - DNA, 25 bp, Homo sapien
gtttcttcgtctcaaactacacaga

SEQ ID NO: 1350842 - DNA, 25 bp, Homo sapien
caaatgtaaggacttcaagagggca

SEQ ID NO: 1350843 - DNA, 25 bp, Homo sapien
gagagcataggcacaaggtgttttc

SEQ ID NO: 1350844 - DNA, 25 bp, Homo sapien
cataggcacaaggtgttttcccatt

SEQ ID NO: 1350845 - DNA, 25 bp, Homo sapien
agcataggcacaaggtgttttccca

SEQ ID NO: 1350846 - DNA, 25 bp, Homo sapien
gagcataggcacaaggtgttttccc

SEQ ID NO: 1350847 - DNA, 25 bp, Homo sapien
cagtcccctttcaccttctgttgtt

SEQ ID NO: 1350848 - DNA, 25 bp, Homo sapien
ccttttcatcagtgccaaaggctga

SEQ ID NO: 1350849 - DNA, 25 bp, Homo sapien
cccttttcatcagtgccaaaggctg

SEQ ID NO: 1350850 - DNA, 25 bp, Homo sapien
cctatcgcataaccatatctcagtc

SEQ ID NO: 1350851 - DNA, 25 bp, Homo sapien
taggtgcccttaagcatttggtaca

SEQ ID NO: 1350852 - DNA, 25 bp, Homo sapien
ctttgtacatgagcttaggtgccct

SEQ ID NO: 1350853 - DNA, 25 bp, Homo sapien
gttactcagactcttcaataggaag

SEQ ID NO: 1350854 - DNA, 25 bp, Homo sapien
gaatcaggatattactttccacggt

SEQ ID NO: 1350855 - DNA, 25 bp, Homo sapien
tcatttcgtatttcttgatctgttt

SEQ ID NO: 1350856 - DNA, 25 bp, Homo sapien
aaattagttcatattgcccctttgt

SEQ ID NO: 1350857 - DNA, 25 bp, Homo sapien
ttgtagccaacctcttctctgactc

SEQ ID NO: 1350858 - DNA, 25 bp, Homo sapien
tattgcccctttgtagccaacctct

SEQ ID NO: 1350859 - DNA, 25 bp, Homo sapien
tccaatacccaaaaattagttcata

SEQ ID NO: 1350860 - DNA, 25 bp, Homo sapien
ttgaagccatctctagggcctatag

SEQ ID NO: 1350861 - DNA, 25 bp, Homo sapien
gatctctgattctatgttcaccaag

SEQ ID NO: 1350862 - DNA, 25 bp, Homo sapien
tctgggcatccttgctagagcttct

SEQ ID NO: 1350863 - DNA, 25 bp, Homo sapien
tatagctgtctgatctctgattcta

SEQ ID NO: 1350864 - DNA, 25 bp, Homo sapien
tttgccaagtttcagtttagagtga

SEQ ID NO: 1350865 - DNA, 25 bp, Homo sapien
gggacttagaatggaaaagctcaga

SEQ ID NO: 1350866 - DNA, 25 bp, Homo sapien
gagaactccaatatatctgatgata

SEQ ID NO: 1350867 - DNA, 25 bp, Homo sapien
cctgaaaataccatggggacttaga

SEQ ID NO: 1350868 - DNA, 25 bp, Homo sapien
gaccaatatctcttatgagcagaaa

SEQ ID NO: 1350869 - DNA, 25 bp, Homo sapien
gacaaaatctaatgcccactcttga

SEQ ID NO: 1350870 - DNA, 25 bp, Homo sapien
cattatgtgaggctaacaataccct

SEQ ID NO: 1350871 - DNA, 25 bp, Homo sapien
tacacagcatgaactagtgggattt

SEQ ID NO: 1350872 - DNA, 25 bp, Homo sapien
gaatcaagagttctggcccatgagg

SEQ ID NO: 1350873 - DNA, 25 bp, Homo sapien
tgtgataattctcggcaagcctgtg

SEQ ID NO: 1350874 - DNA, 25 bp, Homo sapien
tagccaagtgggaggatctaagcca

SEQ ID NO: 1350875 - DNA, 25 bp, Homo sapien
tgaggtaatcctggctaaagcaagt

SEQ ID NO: 1350876 - DNA, 25 bp, Homo sapien
aggaaaatgacatggttagtttctg

SEQ ID NO: 1350877 - DNA, 25 bp, Homo sapien
atgacatggttagtttctggtggtg

SEQ ID NO: 1350878 - DNA, 25 bp, Homo sapien
aaaatgacatggttagtttctggtg

SEQ ID NO: 1350879 - DNA, 25 bp, Homo sapien
aaatgacatggttagtttctggtgg

SEQ ID NO: 1350880 - DNA, 25 bp, Homo sapien
tagcctgtaaaccatgagcattgaa

SEQ ID NO: 1350881 - DNA, 25 bp, Homo sapien
agtttgcaagccaactcaaattgtc

SEQ ID NO: 1350882 - DNA, 25 bp, Homo sapien
taaaagtgacaattctgaccctggg

SEQ ID NO: 1350883 - DNA, 25 bp, Homo sapien
tgggctatacccattactctaaggt

SEQ ID NO: 1350884 - DNA, 25 bp, Homo sapien
ctggtaacattaatgacatcccata

SEQ ID NO: 1350885 - DNA, 25 bp, Homo sapien
tcccatatactcaaagagatgagag

SEQ ID NO: 1350886 - DNA, 25 bp, Homo sapien
gattagttttgcatttggacacagt

SEQ ID NO: 1350887 - DNA, 25 bp, Homo sapien
caaacaaagttgtaatgggcataac

SEQ ID NO: 1350888 - DNA, 25 bp, Homo sapien
ttcctacagccacagtttcaacccc

SEQ ID NO: 1350889 - DNA, 25 bp, Homo sapien
aagtgtctggtagcctgacatgttt

SEQ ID NO: 1350890 - DNA, 25 bp, Homo sapien
gtctggtagcctgacatgtttttcc

SEQ ID NO: 1350891 - DNA, 25 bp, Homo sapien
ccacactcaccccttcctacagcca

SEQ ID NO: 1350892 - DNA, 25 bp, Homo sapien
tactagacagtaggcctctcactcc

SEQ ID NO: 1350893 - DNA, 25 bp, Homo sapien
tgtttgcagcaatgtccctggaccc

SEQ ID NO: 1350894 - DNA, 25 bp, Homo sapien
taaagtcatgtctgccaaaagcctc

SEQ ID NO: 1350895 - DNA, 25 bp, Homo sapien
tggaccctctggctgtcattctgaa

SEQ ID NO: 1350896 - DNA, 25 bp, Homo sapien
taagtgtgttgcaaccgtaccagag

SEQ ID NO: 1350897 - DNA, 25 bp, Homo sapien
tactggtgcagttcctgagagtgct

SEQ ID NO: 1350898 - DNA, 25 bp, Homo sapien
cactaagagtatctgagagctccag

SEQ ID NO: 1350899 - DNA, 25 bp, Homo sapien
gagagtgctccccaataaagttctt

SEQ ID NO: 1350900 - DNA, 25 bp, Homo sapien
catttagtggtaccccagaaattct

SEQ ID NO: 1350901 - DNA, 25 bp, Homo sapien
ccagctaggcagaggtttattaatt

SEQ ID NO: 1350902 - DNA, 25 bp, Homo sapien
tctaatccttaaagtgggagctgag

SEQ ID NO: 1350903 - DNA, 25 bp, Homo sapien
gagagagtgatctgtcaatgtcaac

SEQ ID NO: 1350904 - DNA, 25 bp, Homo sapien
ggcatcttaaccttgattgtataaa

SEQ ID NO: 1350905 - DNA, 25 bp, Homo sapien
ttgtataaacaacgaacaaaccagc

SEQ ID NO: 1350906 - DNA, 25 bp, Homo sapien
taacctattgctttaagctgatggc

SEQ ID NO: 1350907 - DNA, 25 bp, Homo sapien
taagctgatggcatcttaaccttga

SEQ ID NO: 1350908 - DNA, 25 bp, Homo sapien
cctggttgctacagcctgaaactga

SEQ ID NO: 1350909 - DNA, 25 bp, Homo sapien
tatgaattgttaagtattggagctc

SEQ ID NO: 1350910 - DNA, 25 bp, Homo sapien
gctctaagtgtttagttatggttaa

SEQ ID NO: 1350911 - DNA, 25 bp, Homo sapien
tggagctctaagtgtttagttatgg

SEQ ID NO: 1350912 - DNA, 25 bp, Homo sapien
aaaatcaccggagacatgtagctca

SEQ ID NO: 1350913 - DNA, 25 bp, Homo sapien
catgtgcaatgttagggttcttagt

SEQ ID NO: 1350914 - DNA, 25 bp, Homo sapien
tattcagtgccgttggagtcatccc

SEQ ID NO: 1350915 - DNA, 25 bp, Homo sapien
cctttttggagagtagatcagaagc

SEQ ID NO: 1350916 - DNA, 25 bp, Homo sapien
catcaatcacgtctttaaccacaaa

SEQ ID NO: 1350917 - DNA, 25 bp, Homo sapien
ttgactctcggagaggaaatagaat

SEQ ID NO: 1350918 - DNA, 25 bp, Homo sapien
atcaatcacgtctttaaccacaaaa

SEQ ID NO: 1350919 - DNA, 25 bp, Homo sapien
actctcggagaggaaatagaatcat

SEQ ID NO: 1350920 - DNA, 25 bp, Homo sapien
tctgtttccatcatactgttcagcc

SEQ ID NO: 1350921 - DNA, 25 bp, Homo sapien
tgtttccatcatactgttcagccag

SEQ ID NO: 1350922 - DNA, 25 bp, Homo sapien
gtttccatcatactgttcagccagt

SEQ ID NO: 1350923 - DNA, 25 bp, Homo sapien
ctctgtttccatcatactgttcagc

SEQ ID NO: 1350924 - DNA, 25 bp, Homo sapien
ctggtttctgtctatacgaagctat

SEQ ID NO: 1350925 - DNA, 25 bp, Homo sapien
cattgactgtgttcataatcaccac

SEQ ID NO: 1350926 - DNA, 25 bp, Homo sapien
cagcctgactcttaaccaaggtagt

SEQ ID NO: 1350927 - DNA, 25 bp, Homo sapien
aaggactttgtatagagggaaccag

SEQ ID NO: 1350928 - DNA, 25 bp, Homo sapien
tctagctcttaatgtgttgactttc

SEQ ID NO: 1350929 - DNA, 25 bp, Homo sapien
agaattccacttcacatagcaccat

SEQ ID NO: 1350930 - DNA, 25 bp, Homo sapien
cagaattccacttcacatagcacca

SEQ ID NO: 1350931 - DNA, 25 bp, Homo sapien
gatttctagctcttaatgtgttgac

SEQ ID NO: 1350932 - DNA, 25 bp, Homo sapien
caactttgtgtgtcagatagatgtc

SEQ ID NO: 1350933 - DNA, 25 bp, Homo sapien
ggctgtgtgcccctttttgtcagat

SEQ ID NO: 1350934 - DNA, 25 bp, Homo sapien
acatggctagcaggcaggtgatcta

SEQ ID NO: 1350935 - DNA, 25 bp, Homo sapien
tcagatcatatctcctatccagtgg

SEQ ID NO: 1350936 - DNA, 25 bp, Homo sapien
cactaagatgaaactatagccctat

SEQ ID NO: 1350937 - DNA, 25 bp, Homo sapien
gagataaatgggtcatacatgagat

SEQ ID NO: 1350938 - DNA, 25 bp, Homo sapien
gtctctctaacaaggcaaaccaggt

SEQ ID NO: 1350939 - DNA, 25 bp, Homo sapien
ttccactcagtacaaaaatccaagt

SEQ ID NO: 1350940 - DNA, 25 bp, Homo sapien
gactggccaagagtgaatcagcaac

SEQ ID NO: 1350941 - DNA, 25 bp, Homo sapien
gggcactgtcttggactggccaaga

SEQ ID NO: 1350942 - DNA, 25 bp, Homo sapien
gctgctgccaagatctccatgagcc

SEQ ID NO: 1350943 - DNA, 25 bp, Homo sapien
tcttcaaggaatggctgctgccaag

SEQ ID NO: 1350944 - DNA, 25 bp, Homo sapien
aaaaatgtgggctctctcaatcagc

SEQ ID NO: 1350945 - DNA, 25 bp, Homo sapien
ttatgaatcaagctaggcaaccgtt

SEQ ID NO: 1350946 - DNA, 25 bp, Homo sapien
taatacggaggtaccctcttgctgg

SEQ ID NO: 1350947 - DNA, 25 bp, Homo sapien
gattaacatggcatctattcggcag

SEQ ID NO: 1350948 - DNA, 25 bp, Homo sapien
tgcctgcacagggctaccagagaag

SEQ ID NO: 1350949 - DNA, 25 bp, Homo sapien
gggtgtagcatccacagggctattc

SEQ ID NO: 1350950 - DNA, 25 bp, Homo sapien
agggctattcagctcagtggagcca

SEQ ID NO: 1350951 - DNA, 25 bp, Homo sapien
tccacagggctattcagctcagtgg

SEQ ID NO: 1350952 - DNA, 25 bp, Homo sapien
ggtgtttgcttaaccagcactggtt

SEQ ID NO: 1350953 - DNA, 25 bp, Homo sapien
catcaaaagttagagttgctgaaac

SEQ ID NO: 1350954 - DNA, 25 bp, Homo sapien
aacaccatcaaaagttagagttgct

SEQ ID NO: 1350955 - DNA, 25 bp, Homo sapien
tcccggtgtttgcttaaccagcact

SEQ ID NO: 1350956 - DNA, 25 bp, Homo sapien
ggagactgggccttgcagccctcac

SEQ ID NO: 1350957 - DNA, 25 bp, Homo sapien
tggagactgggccttgcagccctca

SEQ ID NO: 1350958 - DNA, 25 bp, Homo sapien
gttggagactgggccttgcagccct

SEQ ID NO: 1350959 - DNA, 25 bp, Homo sapien
ctggttggagactgggccttgcagc

SEQ ID NO: 1350960 - DNA, 25 bp, Homo sapien
agaacatgttttccccggtgactcg

SEQ ID NO: 1350961 - DNA, 25 bp, Homo sapien
cggtgactcgctatcgggaattttt

SEQ ID NO: 1350962 - DNA, 25 bp, Homo sapien
tacctaagcatagccttgagcagaa

SEQ ID NO: 1350963 - DNA, 25 bp, Homo sapien
tctggctgccagtagcaattatctg

SEQ ID NO: 1350964 - DNA, 25 bp, Homo sapien
agttgctttccttaaatcagtgtcc

SEQ ID NO: 1350965 - DNA, 25 bp, Homo sapien
gttgctttccttaaatcagtgtcct

SEQ ID NO: 1350966 - DNA, 25 bp, Homo sapien
tccatttttggagttgctttcctta

SEQ ID NO: 1350967 - DNA, 25 bp, Homo sapien
ctattccatttttggagttgctttc

SEQ ID NO: 1350968 - DNA, 25 bp, Homo sapien
ccgtgtcttagctgtggcatggctc

SEQ ID NO: 1350969 - DNA, 25 bp, Homo sapien
agtctgagggcctgccgtgtcttag

SEQ ID NO: 1350970 - DNA, 25 bp, Homo sapien
tgagtctgagggcctgccgtgtctt

SEQ ID NO: 1350971 - DNA, 25 bp, Homo sapien
gagtctgagggcctgccgtgtctta

SEQ ID NO: 1350972 - DNA, 25 bp, Homo sapien
gcatggataacaccacgctcaaagt

SEQ ID NO: 1350973 - DNA, 25 bp, Homo sapien
gattatctttctgcgcctttgttga

SEQ ID NO: 1350974 - DNA, 25 bp, Homo sapien
taagtagcagggtgtatgctgcccc

SEQ ID NO: 1350975 - DNA, 25 bp, Homo sapien
gatcaggtggccatatatgtacagg

SEQ ID NO: 1350976 - DNA, 25 bp, Homo sapien
taaggagcacatggatcagggtcaa

SEQ ID NO: 1350977 - DNA, 25 bp, Homo sapien
ggaacttcgggctcagaaacattgc

SEQ ID NO: 1350978 - DNA, 25 bp, Homo sapien
tcaaccaaaggccttgttgctgcac

SEQ ID NO: 1350979 - DNA, 25 bp, Homo sapien
gggagctagagaacacctggcttct

SEQ ID NO: 1350980 - DNA, 25 bp, Homo sapien
tatatgatcacctccctaccggagt

SEQ ID NO: 1350981 - DNA, 25 bp, Homo sapien
gatacagcaccatgagaggtctcta

SEQ ID NO: 1350982 - DNA, 25 bp, Homo sapien
ggagtggcccacctgaagatttatt

SEQ ID NO: 1350983 - DNA, 25 bp, Homo sapien
gaattgcaggatctgggcatgccta

SEQ ID NO: 1350984 - DNA, 25 bp, Homo sapien
ccaaaaatctgagaggccatcatta

SEQ ID NO: 1350985 - DNA, 25 bp, Homo sapien
aggactaggggagtccaaaaatctg

SEQ ID NO: 1350986 - DNA, 25 bp, Homo sapien
gccatcattattagccaagcacaca

SEQ ID NO: 1350987 - DNA, 25 bp, Homo sapien
ttattagccaagcacacaggataaa

SEQ ID NO: 1350988 - DNA, 25 bp, Homo sapien
cactcgatgggaggcaatgaagatt

SEQ ID NO: 1350989 - DNA, 25 bp, Homo sapien
ggcatcactgggtaaagctttgaaa

SEQ ID NO: 1350990 - DNA, 25 bp, Homo sapien
ggttactaagcccaaattcagatac

SEQ ID NO: 1350991 - DNA, 25 bp, Homo sapien
gatacagacccacgcactcgatggg

SEQ ID NO: 1350992 - DNA, 25 bp, Homo sapien
gccatgactgttgtctaccaatgat

SEQ ID NO: 1350993 - DNA, 25 bp, Homo sapien
gacacaatcccaagctgccatgact

SEQ ID NO: 1350994 - DNA, 25 bp, Homo sapien
gatagcaaaccatcccattagaaga

SEQ ID NO: 1350995 - DNA, 25 bp, Homo sapien
catcccctttactgagcaggacaca

SEQ ID NO: 1350996 - DNA, 25 bp, Homo sapien
cataagaagtgattctagcccacat

SEQ ID NO: 1350997 - DNA, 25 bp, Homo sapien
tcaccataagaagtgattctagccc

SEQ ID NO: 1350998 - DNA, 25 bp, Homo sapien
tgtgggaaatcaccataagaagtga

SEQ ID NO: 1350999 - DNA, 25 bp, Homo sapien
tggcttaggtcctgtgggaaatcac

SEQ ID NO: 1351000 - DNA, 25 bp, Homo sapien
gttgtaccaatcttccccaggttca

SEQ ID NO: 1351001 - DNA, 25 bp, Homo sapien
tccagaggtaatctaagagttgtac

SEQ ID NO: 1351002 - DNA, 25 bp, Homo sapien
tctccagttaaatgatccagaggta

SEQ ID NO: 1351003 - DNA, 25 bp, Homo sapien
ccacatcagtgcttccgaaggataa

SEQ ID NO: 1351004 - DNA, 25 bp, Homo sapien
tactgcgatgactaatgacagaatt

SEQ ID NO: 1351005 - DNA, 25 bp, Homo sapien
gggaaaaagttactgcgatgactaa

SEQ ID NO: 1351006 - DNA, 25 bp, Homo sapien
gatgactaatgacagaattgacagc

SEQ ID NO: 1351007 - DNA, 25 bp, Homo sapien
aagttactgcgatgactaatgacag

SEQ ID NO: 1351008 - DNA, 25 bp, Homo sapien
atccatagatggctggcaactctgc

SEQ ID NO: 1351009 - DNA, 25 bp, Homo sapien
cactgtttagaggtttttcaatatc

SEQ ID NO: 1351010 - DNA, 25 bp, Homo sapien
tacaaggaccaatttagttaggatc

SEQ ID NO: 1351011 - DNA, 25 bp, Homo sapien
ttggcaaataataccgagtattaca

SEQ ID NO: 1351012 - DNA, 25 bp, Homo sapien
ctattatgtagcctctttgccacca

SEQ ID NO: 1351013 - DNA, 25 bp, Homo sapien
tctcgtggcttactgcttaatgata

SEQ ID NO: 1351014 - DNA, 25 bp, Homo sapien
ttgggacaccaaccgagacatactg

SEQ ID NO: 1351015 - DNA, 25 bp, Homo sapien
cacagctgcaatagactgtctctcg

SEQ ID NO: 1351016 - DNA, 25 bp, Homo sapien
gctgttgcaccttagagctttgcat

SEQ ID NO: 1351017 - DNA, 25 bp, Homo sapien
cttgtcatgaaagggctgcagctgc

SEQ ID NO: 1351018 - DNA, 25 bp, Homo sapien
tccccagctgttgcaccttagagct

SEQ ID NO: 1351019 - DNA, 25 bp, Homo sapien
aacctgcaaacttctcacttccatg

SEQ ID NO: 1351020 - DNA, 25 bp, Homo sapien
gacaagagcttctgaggatcaaaac

SEQ ID NO: 1351021 - DNA, 25 bp, Homo sapien
taggcacccctatgtctgcagtgaa

SEQ ID NO: 1351022 - DNA, 25 bp, Homo sapien
gacagacagtctcagtcaggccttt

SEQ ID NO: 1351023 - DNA, 25 bp, Homo sapien
gaaaatagcgcttgtctctgtgacc

SEQ ID NO: 1351024 - DNA, 25 bp, Homo sapien
attgatcaattccatgccagccatt

SEQ ID NO: 1351025 - DNA, 25 bp, Homo sapien
tgatcaattccatgccagccattcc

SEQ ID NO: 1351026 - DNA, 25 bp, Homo sapien
ttgatcaattccatgccagccattc

SEQ ID NO: 1351027 - DNA, 25 bp, Homo sapien
caatatggtactggcataggatgtc

SEQ ID NO: 1351028 - DNA, 25 bp, Homo sapien
gaataagtcgaaggacttacactac

SEQ ID NO: 1351029 - DNA, 25 bp, Homo sapien
gtttgtttaacaaacagcgctgcaa

SEQ ID NO: 1351030 - DNA, 25 bp, Homo sapien
taaatagaccctgatatataaggaa

SEQ ID NO: 1351031 - DNA, 25 bp, Homo sapien
tcagccattgttgcctacagaagag

SEQ ID NO: 1351032 - DNA, 25 bp, Homo sapien
tactcacccgaatatctgctgactc

SEQ ID NO: 1351033 - DNA, 25 bp, Homo sapien
cctggcaatgctactcacccgaata

SEQ ID NO: 1351034 - DNA, 25 bp, Homo sapien
gatgtgcctgcaagttgaatattcc

SEQ ID NO: 1351035 - DNA, 25 bp, Homo sapien
tatacctgtatattgctcaccatcc

SEQ ID NO: 1351036 - DNA, 25 bp, Homo sapien
tatgagagggacttcatctacttca

SEQ ID NO: 1351037 - DNA, 25 bp, Homo sapien
gctacagaatattcaactgcagctc

SEQ ID NO: 1351038 - DNA, 25 bp, Homo sapien
tgcagctcctagaatgtttccaacc

SEQ ID NO: 1351039 - DNA, 25 bp, Homo sapien
cgacatggacgctcagaggagcaga

SEQ ID NO: 1351040 - DNA, 25 bp, Homo sapien
cttctccagtagaaacgacatggac

SEQ ID NO: 1351041 - DNA, 25 bp, Homo sapien
tccagtagaaacgacatggacgctc

SEQ ID NO: 1351042 - DNA, 25 bp, Homo sapien
tagaaacgacatggacgctcagagg

SEQ ID NO: 1351043 - DNA, 25 bp, Homo sapien
taaacacgtacaacctagcagtggg

SEQ ID NO: 1351044 - DNA, 25 bp, Homo sapien
gcaagaaacctagctgtagtggcag

SEQ ID NO: 1351045 - DNA, 25 bp, Homo sapien
gaagtagtcagctggacctcacaga

SEQ ID NO: 1351046 - DNA, 25 bp, Homo sapien
ggttgcagggccactcaagatgaca

SEQ ID NO: 1351047 - DNA, 25 bp, Homo sapien
ctgaatgtttttgtgaattggagga

SEQ ID NO: 1351048 - DNA, 25 bp, Homo sapien
tgaatgtttttgtgaattggaggac

SEQ ID NO: 1351049 - DNA, 25 bp, Homo sapien
gactatgaaaacacgcactgagctg

SEQ ID NO: 1351050 - DNA, 25 bp, Homo sapien
gatgaggaaacacttagacgagccc

SEQ ID NO: 1351051 - DNA, 25 bp, Homo sapien
tagcagacatcagtgccagtgcggg

SEQ ID NO: 1351052 - DNA, 25 bp, Homo sapien
tggctgggaaacaactgaccgctga

SEQ ID NO: 1351053 - DNA, 25 bp, Homo sapien
ctgtcgatggaggagcagcattaga

SEQ ID NO: 1351054 - DNA, 25 bp, Homo sapien
gaggtcacacaagtcactgctcaag

SEQ ID NO: 1351055 - DNA, 25 bp, Homo sapien
gattcagatggtgaaccaattgcca

SEQ ID NO: 1351056 - DNA, 25 bp, Homo sapien
gcatggcttccataggtgattcaac

SEQ ID NO: 1351057 - DNA, 25 bp, Homo sapien
ttccactgtcagtcatgctcagaca

SEQ ID NO: 1351058 - DNA, 25 bp, Homo sapien
tgtcagtcatgctcagacaggaaac

SEQ ID NO: 1351059 - DNA, 25 bp, Homo sapien
ctctgggtgggttaggagcatcccc

SEQ ID NO: 1351060 - DNA, 25 bp, Homo sapien
gagcatcccctgaagaaaataagtt

SEQ ID NO: 1351061 - DNA, 25 bp, Homo sapien
tggcagcccatagagagcaaagcaa

SEQ ID NO: 1351062 - DNA, 25 bp, Homo sapien
tccgctgcttggcagcccatagaga

SEQ ID NO: 1351063 - DNA, 25 bp, Homo sapien
cactgtgggagccagagattcccat

SEQ ID NO: 1351064 - DNA, 25 bp, Homo sapien
catgagaagtgggacctccgctgct

SEQ ID NO: 1351065 - DNA, 25 bp, Homo sapien
cccagtgcccacacccccatctctg

SEQ ID NO: 1351066 - DNA, 25 bp, Homo sapien
gcccacacccccatctctgcacata

SEQ ID NO: 1351067 - DNA, 25 bp, Homo sapien
ccacacccccatctctgcacataca

SEQ ID NO: 1351068 - DNA, 25 bp, Homo sapien
cacccccatctctgcacatacacac

SEQ ID NO: 1351069 - DNA, 25 bp, Homo sapien
tgacatttcctatataagatttgcc

SEQ ID NO: 1351070 - DNA, 25 bp, Homo sapien
ccagattatagaggtgggatctgga

SEQ ID NO: 1351071 - DNA, 25 bp, Homo sapien
tgccagattatagaggtgggatctg

SEQ ID NO: 1351072 - DNA, 25 bp, Homo sapien
cagattatagaggtgggatctggag

SEQ ID NO: 1351073 - DNA, 25 bp, Homo sapien
ctgccagattatagaggtgggatct

SEQ ID NO: 1351074 - DNA, 25 bp, Homo sapien
ctggacactttcctcggtggcagcc

SEQ ID NO: 1351075 - DNA, 25 bp, Homo sapien
tgcctcacttaggctccaacactcc

SEQ ID NO: 1351076 - DNA, 25 bp, Homo sapien
cctcacttaggctccaacactccat

SEQ ID NO: 1351077 - DNA, 25 bp, Homo sapien
ctttcctcggtggcagcctttcttg

SEQ ID NO: 1351078 - DNA, 25 bp, Homo sapien
tgtttacccaatgcttgtacaacca

SEQ ID NO: 1351079 - DNA, 25 bp, Homo sapien
tacccaatgcttgtacaaccattgt

SEQ ID NO: 1351080 - DNA, 25 bp, Homo sapien
gctggatttcaaacttacgtggaac

SEQ ID NO: 1351081 - DNA, 25 bp, Homo sapien
aagatttaatatctaccctgctgga

SEQ ID NO: 1351082 - DNA, 25 bp, Homo sapien
tgtgcctttatagcagcatgttttc

SEQ ID NO: 1351083 - DNA, 25 bp, Homo sapien
gtacatctcctaatgcttttcctcc

SEQ ID NO: 1351084 - DNA, 25 bp, Homo sapien
taggtacatctcctaatgcttttcc

SEQ ID NO: 1351085 - DNA, 25 bp, Homo sapien
ctcctaatgcttttcctcccctctt

SEQ ID NO: 1351086 - DNA, 25 bp, Homo sapien
cccactccatgccattcagaggcat

SEQ ID NO: 1351087 - DNA, 25 bp, Homo sapien
cagggatcaaaggctttattacaga

SEQ ID NO: 1351088 - DNA, 25 bp, Homo sapien
agggatcaaaggctttattacagat

SEQ ID NO: 1351089 - DNA, 25 bp, Homo sapien
gggagacaagtctaagctaactaaa

SEQ ID NO: 1351090 - DNA, 25 bp, Homo sapien
tgtttcagtttctcgatactttctg

SEQ ID NO: 1351091 - DNA, 25 bp, Homo sapien
tgatggtcaggttcctgagaaagga

SEQ ID NO: 1351092 - DNA, 25 bp, Homo sapien
agatgtttcagtttctcgatacttt

SEQ ID NO: 1351093 - DNA, 25 bp, Homo sapien
aaataacgtgtatggttgttagcaa

SEQ ID NO: 1351094 - DNA, 25 bp, Homo sapien
gcaataacctgtagccatcggcatt

SEQ ID NO: 1351095 - DNA, 25 bp, Homo sapien
cgtgtatggttgttagcaataacct

SEQ ID NO: 1351096 - DNA, 25 bp, Homo sapien
tggttgttagcaataacctgtagcc

SEQ ID NO: 1351097 - DNA, 25 bp, Homo sapien
agtcagccaggtcttatttgcaaga

SEQ ID NO: 1351098 - DNA, 25 bp, Homo sapien
tatacactgcaaaagctgatgggct

SEQ ID NO: 1351099 - DNA, 25 bp, Homo sapien
tctatgagtgggtgccaataccaag

SEQ ID NO: 1351100 - DNA, 25 bp, Homo sapien
tagcatcacctgcaagaattatttg

SEQ ID NO: 1351101 - DNA, 25 bp, Homo sapien
ggtctgatgagggaaacaggccatc

SEQ ID NO: 1351102 - DNA, 25 bp, Homo sapien
catgctccaagcacggtaactgggt

SEQ ID NO: 1351103 - DNA, 25 bp, Homo sapien
taagatccctaaaatgtccaggagg

SEQ ID NO: 1351104 - DNA, 25 bp, Homo sapien
gacactgtacaagatggagatgatg

SEQ ID NO: 1351105 - DNA, 25 bp, Homo sapien
taagaaggtgaggtcaaacacttaa

SEQ ID NO: 1351106 - DNA, 25 bp, Homo sapien
ctaagaaggtgaggtcaaacactta

SEQ ID NO: 1351107 - DNA, 25 bp, Homo sapien
tcttggtccaatcgaggttcagggc

SEQ ID NO: 1351108 - DNA, 25 bp, Homo sapien
tgctacaaatatcctaaactgcctg

SEQ ID NO: 1351109 - DNA, 25 bp, Homo sapien
tcaggatttaggagggcaggaacct

SEQ ID NO: 1351110 - DNA, 25 bp, Homo sapien
tacccacagcttgagattaatagtc

SEQ ID NO: 1351111 - DNA, 25 bp, Homo sapien
tgatatcgtttctttttctgagatt

SEQ ID NO: 1351112 - DNA, 25 bp, Homo sapien
tatcgtttctttttctgagattctc

SEQ ID NO: 1351113 - DNA, 25 bp, Homo sapien
gatatcgtttctttttctgagattc

SEQ ID NO: 1351114 - DNA, 25 bp, Homo sapien
tcgtttctttttctgagattctccc

SEQ ID NO: 1351115 - DNA, 25 bp, Homo sapien
cctctggctttcctagtcagaccag

SEQ ID NO: 1351116 - DNA, 25 bp, Homo sapien
ctagtcagaccagaagggaagaaga

SEQ ID NO: 1351117 - DNA, 25 bp, Homo sapien
tggctttcctagtcagaccagaagg

SEQ ID NO: 1351118 - DNA, 25 bp, Homo sapien
gctttcctagtcagaccagaaggga

SEQ ID NO: 1351119 - DNA, 25 bp, Homo sapien
aaaagtctgaacgatcctttctcag

SEQ ID NO: 1351120 - DNA, 25 bp, Homo sapien
taggctctggtcctaaccggcctgg

SEQ ID NO: 1351121 - DNA, 25 bp, Homo sapien
gacatgtctcctgaatctggatcat

SEQ ID NO: 1351122 - DNA, 25 bp, Homo sapien
tctgagcaacggtgtcctgactgct

SEQ ID NO: 1351123 - DNA, 25 bp, Homo sapien
cagatcccgccagggcccactcggg

SEQ ID NO: 1351124 - DNA, 25 bp, Homo sapien
cgccagggcccactcgggctccagc

SEQ ID NO: 1351125 - DNA, 25 bp, Homo sapien
cctccccgtcccagatcccgccagg

SEQ ID NO: 1351126 - DNA, 25 bp, Homo sapien
ctcctggctgcgccgcagaccctcc

SEQ ID NO: 1351127 - DNA, 25 bp, Homo sapien
aaggaccactgtccgagcggcttcc

SEQ ID NO: 1351128 - DNA, 25 bp, Homo sapien
ccaaggaccactgtccgagcggctt

SEQ ID NO: 1351129 - DNA, 25 bp, Homo sapien
ttctactcgggaagcctgttttatg

SEQ ID NO: 1351130 - DNA, 25 bp, Homo sapien
gggtggcaggttctactcgggaagc

SEQ ID NO: 1351131 - DNA, 25 bp, Homo sapien
atcacaccgacaagggtgaagctgt

SEQ ID NO: 1351132 - DNA, 25 bp, Homo sapien
cacaccgacaagggtgaagctgtgg

SEQ ID NO: 1351133 - DNA, 25 bp, Homo sapien
tcacaccgacaagggtgaagctgtg

SEQ ID NO: 1351134 - DNA, 25 bp, Homo sapien
ctgggccccgccgccaactcctagg

SEQ ID NO: 1351135 - DNA, 25 bp, Homo sapien
gccccgccgccaactcctagggcac

SEQ ID NO: 1351136 - DNA, 25 bp, Homo sapien
cggctgggccccgccgccaactcct

SEQ ID NO: 1351137 - DNA, 25 bp, Homo sapien
ctcggctgggccccgccgccaactc

SEQ ID NO: 1351138 - DNA, 25 bp, Homo sapien
gatacatccctttatgacgaggtcc

SEQ ID NO: 1351139 - DNA, 25 bp, Homo sapien
tgtaacgctcaaaataaggccagac

SEQ ID NO: 1351140 - DNA, 25 bp, Homo sapien
aaatgagtggccgagaaactgggct

SEQ ID NO: 1351141 - DNA, 25 bp, Homo sapien
gacacagtccatagcataccaggta

SEQ ID NO: 1351142 - DNA, 25 bp, Homo sapien
cagcacttaatggtcatgttctttg

SEQ ID NO: 1351143 - DNA, 25 bp, Homo sapien
aaatgaattgctgttatgtataacc

SEQ ID NO: 1351144 - DNA, 25 bp, Homo sapien
cagaaaggttaagtcttatattcca

SEQ ID NO: 1351145 - DNA, 25 bp, Homo sapien
catggtttattacgtttccagaaag

SEQ ID NO: 1351146 - DNA, 25 bp, Homo sapien
gaattgggtgctccctggtagtaaa

SEQ ID NO: 1351147 - DNA, 25 bp, Homo sapien
tcaagttgtaggttggtgttctcaa

SEQ ID NO: 1351148 - DNA, 25 bp, Homo sapien
tccaggtgaattgtacttcaagttg

SEQ ID NO: 1351149 - DNA, 25 bp, Homo sapien
cattggagcgagtcattccaggtga

SEQ ID NO: 1351150 - DNA, 25 bp, Homo sapien
tatattctttgaccatagagtgctc

SEQ ID NO: 1351151 - DNA, 25 bp, Homo sapien
tgatgttagcatcccaagacatccc

SEQ ID NO: 1351152 - DNA, 25 bp, Homo sapien
caagggaggcggaaccactgattat

SEQ ID NO: 1351153 - DNA, 25 bp, Homo sapien
tgtaagtaatatgtggagccagtca

SEQ ID NO: 1351154 - DNA, 25 bp, Homo sapien
ttggctcacagctacaccatgtccc

SEQ ID NO: 1351155 - DNA, 25 bp, Homo sapien
aatgtaacttttatcagcaatagca

SEQ ID NO: 1351156 - DNA, 25 bp, Homo sapien
cagctacaccatgtcccctaatgta

SEQ ID NO: 1351157 - DNA, 25 bp, Homo sapien
caccatgtcccctaatgtaactttt

SEQ ID NO: 1351158 - DNA, 25 bp, Homo sapien
cctccaacgtaaccaagaagactcg

SEQ ID NO: 1351159 - DNA, 25 bp, Homo sapien
caaaagctacaagatccatcaacag

SEQ ID NO: 1351160 - DNA, 25 bp, Homo sapien
tcgtcctactttgtgtacccacaaa

SEQ ID NO: 1351161 - DNA, 25 bp, Homo sapien
caagatccatcaacagaaattagtt

SEQ ID NO: 1351162 - DNA, 25 bp, Homo sapien
accactgctattattgtgatcaacc

SEQ ID NO: 1351163 - DNA, 25 bp, Homo sapien
tgctattattgtgatcaaccagctt

SEQ ID NO: 1351164 - DNA, 25 bp, Homo sapien
ctttaccactgctattattgtgatc

SEQ ID NO: 1351165 - DNA, 25 bp, Homo sapien
cactgctattattgtgatcaaccag

SEQ ID NO: 1351166 - DNA, 25 bp, Homo sapien
ctatttctaatgagaactacagttg

SEQ ID NO: 1351167 - DNA, 25 bp, Homo sapien
ctctatttctaatgagaactacagt

SEQ ID NO: 1351168 - DNA, 25 bp, Homo sapien
tatttctaatgagaactacagttgt

SEQ ID NO: 1351169 - DNA, 25 bp, Homo sapien
tctatttctaatgagaactacagtt

SEQ ID NO: 1351170 - DNA, 25 bp, Homo sapien
tgaaagtgaaggtatataagtcaaa

SEQ ID NO: 1351171 - DNA, 25 bp, Homo sapien
ttggatgctcttgctctggactttt

SEQ ID NO: 1351172 - DNA, 25 bp, Homo sapien
cgtgattgctgtccttgttcagtcc

SEQ ID NO: 1351173 - DNA, 25 bp, Homo sapien
gaaggtatataagtcaaataacttc

SEQ ID NO: 1351174 - DNA, 25 bp, Homo sapien
gtactaattaaaaatattttgcaga

SEQ ID NO: 1351175 - DNA, 25 bp, Homo sapien
ctgtactaattaaaaatattttgca

SEQ ID NO: 1351176 - DNA, 25 bp, Homo sapien
tgtactaattaaaaatattttgcag

SEQ ID NO: 1351177 - DNA, 25 bp, Homo sapien
agggttagagaatgtgaacaagtac

SEQ ID NO: 1351178 - DNA, 25 bp, Homo sapien
tcaagggttagagaatgtgaacaag

SEQ ID NO: 1351179 - DNA, 25 bp, Homo sapien
caagggttagagaatgtgaacaagt

SEQ ID NO: 1351180 - DNA, 25 bp, Homo sapien
aagggttagagaatgtgaacaagta

SEQ ID NO: 1351181 - DNA, 25 bp, Homo sapien
ggcactgtttacaaagctccactag

SEQ ID NO: 1351182 - DNA, 25 bp, Homo sapien
ctaggcgctggcaacactggagctg

SEQ ID NO: 1351183 - DNA, 25 bp, Homo sapien
gaccaatgcctgaaagtgatcctct

SEQ ID NO: 1351184 - DNA, 25 bp, Homo sapien
tttgtaaaccactagcaggcactgt

SEQ ID NO: 1351185 - DNA, 25 bp, Homo sapien
gccttggattcttggatataatcaa

SEQ ID NO: 1351186 - DNA, 25 bp, Homo sapien
tgggaatgttgacaggcaaaggcaa

SEQ ID NO: 1351187 - DNA, 25 bp, Homo sapien
tattattgggaatgttgacaggcaa

SEQ ID NO: 1351188 - DNA, 25 bp, Homo sapien
gatataatcaaacacttggattata

SEQ ID NO: 1351189 - DNA, 25 bp, Homo sapien
tggccacgactccagagtaagcgat

SEQ ID NO: 1351190 - DNA, 25 bp, Homo sapien
gaactgtacgaatacttgttttcac

SEQ ID NO: 1351191 - DNA, 25 bp, Homo sapien
cagatgcgtggaagaactgtacgaa

SEQ ID NO: 1351192 - DNA, 25 bp, Homo sapien
cgactccagagtaagcgattaaaaa

SEQ ID NO: 1351193 - DNA, 25 bp, Homo sapien
tgatgggggcagtaatacaaatcct

SEQ ID NO: 1351194 - DNA, 25 bp, Homo sapien
atcctactgtaggtcagggtgtgtc

SEQ ID NO: 1351195 - DNA, 25 bp, Homo sapien
actgtgatgggggcagtaatacaaa

SEQ ID NO: 1351196 - DNA, 25 bp, Homo sapien
aatcctactgtaggtcagggtgtgt

SEQ ID NO: 1351197 - DNA, 25 bp, Homo sapien
ttagggatggggaatgcttctgctc

SEQ ID NO: 1351198 - DNA, 25 bp, Homo sapien
aatggagccggggagttagggatgg

SEQ ID NO: 1351199 - DNA, 25 bp, Homo sapien
cagaatggagccggggagttaggga

SEQ ID NO: 1351200 - DNA, 25 bp, Homo sapien
agggatggggaatgcttctgctcca

SEQ ID NO: 1351201 - DNA, 25 bp, Homo sapien
gcaatttcccagattggtgagactg

SEQ ID NO: 1351202 - DNA, 25 bp, Homo sapien
gtgagactgacatggtctgggcaaa

SEQ ID NO: 1351203 - DNA, 25 bp, Homo sapien
tttcccagattggtgagactgacat

SEQ ID NO: 1351204 - DNA, 25 bp, Homo sapien
agactgacatggtctgggcaaacta

SEQ ID NO: 1351205 - DNA, 25 bp, Homo sapien
aggagcctccgcaagaaggcaagct

SEQ ID NO: 1351206 - DNA, 25 bp, Homo sapien
cctccgcaagaaggcaagctttggt

SEQ ID NO: 1351207 - DNA, 25 bp, Homo sapien
aaggcaagctttggtcctcggagac

SEQ ID NO: 1351208 - DNA, 25 bp, Homo sapien
caagaaggcaagctttggtcctcgg

SEQ ID NO: 1351209 - DNA, 25 bp, Homo sapien
ctccctccacataacggtgtatgat

SEQ ID NO: 1351210 - DNA, 25 bp, Homo sapien
tatgattaatacttaaaggtggttg

SEQ ID NO: 1351211 - DNA, 25 bp, Homo sapien
ttaaaggtggttgtacatctgagaa

SEQ ID NO: 1351212 - DNA, 25 bp, Homo sapien
ccacataacggtgtatgattaatac

SEQ ID NO: 1351213 - DNA, 25 bp, Homo sapien
cttcccccctgttagaataaatgct

SEQ ID NO: 1351214 - DNA, 25 bp, Homo sapien
tagaataaatgctcttgattaggaa

SEQ ID NO: 1351215 - DNA, 25 bp, Homo sapien
gttagaataaatgctcttgattagg

SEQ ID NO: 1351216 - DNA, 25 bp, Homo sapien
ccctgttagaataaatgctcttgat

SEQ ID NO: 1351217 - DNA, 25 bp, Homo sapien
tctcatcatcatacaaactgaaaac

SEQ ID NO: 1351218 - DNA, 25 bp, Homo sapien
ttaacacctctctttcctgggccat

SEQ ID NO: 1351219 - DNA, 25 bp, Homo sapien
attctcatcatcatacaaactgaaa

SEQ ID NO: 1351220 - DNA, 25 bp, Homo sapien
cctctcttctaaatcattctcatca

SEQ ID NO: 1351221 - DNA, 25 bp, Homo sapien
tatgatacttccagttatcaatgat

SEQ ID NO: 1351222 - DNA, 25 bp, Homo sapien
tatgagccaatatgaagccactttg

SEQ ID NO: 1351223 - DNA, 25 bp, Homo sapien
tggttttatgatacttccagttatc

SEQ ID NO: 1351224 - DNA, 25 bp, Homo sapien
tttacagagtccaattttatgagcc

SEQ ID NO: 1351225 - DNA, 25 bp, Homo sapien
tgcatctgactttcctggaaaccgg

SEQ ID NO: 1351226 - DNA, 25 bp, Homo sapien
ataaggtctgacttgttagatcatc

SEQ ID NO: 1351227 - DNA, 25 bp, Homo sapien
ttgttttcagttgccgcaaagactc

SEQ ID NO: 1351228 - DNA, 25 bp, Homo sapien
tcttctatcagaagttctgattctg

SEQ ID NO: 1351229 - DNA, 25 bp, Homo sapien
acagatatttggagggggtcttatt

SEQ ID NO: 1351230 - DNA, 25 bp, Homo sapien
tgaaagaatacagatatttggaggg

SEQ ID NO: 1351231 - DNA, 25 bp, Homo sapien
agaatacagatatttggagggggtc

SEQ ID NO: 1351232 - DNA, 25 bp, Homo sapien
cttaaatttgaaagaatacagatat

SEQ ID NO: 1351233 - DNA, 25 bp, Homo sapien
tgtgaccgagatgcagaagttggcc

SEQ ID NO: 1351234 - DNA, 25 bp, Homo sapien
cgggtgtccccactggaaggtgatt

SEQ ID NO: 1351235 - DNA, 25 bp, Homo sapien
gcagctgactgaacgtcttatggag

SEQ ID NO: 1351236 - DNA, 25 bp, Homo sapien
gaagttggccgtgacacagatatca

SEQ ID NO: 1351237 - DNA, 25 bp, Homo sapien
taaaccctggaagatatgaagtagt

SEQ ID NO: 1351238 - DNA, 25 bp, Homo sapien
gaaaaactaagtagctagacatgcc

SEQ ID NO: 1351239 - DNA, 25 bp, Homo sapien
gcttctaaaaccaacacagagccat

SEQ ID NO: 1351240 - DNA, 25 bp, Homo sapien
gttcatgccattagggaggtacaca

SEQ ID NO: 1351241 - DNA, 25 bp, Homo sapien
ctttatataacatctaaattagaag

SEQ ID NO: 1351242 - DNA, 25 bp, Homo sapien
cttttactgagtttaataatttcag

SEQ ID NO: 1351243 - DNA, 25 bp, Homo sapien
ataatttcagttccataattcttta

SEQ ID NO: 1351244 - DNA, 25 bp, Homo sapien
catctaaattagaagaaattgactt

SEQ ID NO: 1351245 - DNA, 25 bp, Homo sapien
ctttttcattttcgtcagattctga

SEQ ID NO: 1351246 - DNA, 25 bp, Homo sapien
tactctcaggcatagaacacagagg

SEQ ID NO: 1351247 - DNA, 25 bp, Homo sapien
gagctgctgctactatcataactgc

SEQ ID NO: 1351248 - DNA, 25 bp, Homo sapien
cactgctgcagtactttggtctttt

SEQ ID NO: 1351249 - DNA, 25 bp, Homo sapien
tccttcagttgtatactagttgctt

SEQ ID NO: 1351250 - DNA, 25 bp, Homo sapien
ccttcagttgtatactagttgcttg

SEQ ID NO: 1351251 - DNA, 25 bp, Homo sapien
cttcagttgtatactagttgcttgt

SEQ ID NO: 1351252 - DNA, 25 bp, Homo sapien
aacacaatcatcaaacattttgaca

SEQ ID NO: 1351253 - DNA, 25 bp, Homo sapien
gtaacacaatcatcaaacattttga

SEQ ID NO: 1351254 - DNA, 25 bp, Homo sapien
cacaatcatcaaacattttgacaat

SEQ ID NO: 1351255 - DNA, 25 bp, Homo sapien
cagtaacacaatcatcaaacatttt

SEQ ID NO: 1351256 - DNA, 25 bp, Homo sapien
tcaggcttgctagtagtgccttcct

SEQ ID NO: 1351257 - DNA, 25 bp, Homo sapien
gcacaatcaggcttgctagtagtgc

SEQ ID NO: 1351258 - DNA, 25 bp, Homo sapien
caatcaggcttgctagtagtgcctt

SEQ ID NO: 1351259 - DNA, 25 bp, Homo sapien
cttgctagtagtgccttccttcatg

SEQ ID NO: 1351260 - DNA, 25 bp, Homo sapien
tcttaaagagcttgactacataatg

SEQ ID NO: 1351261 - DNA, 25 bp, Homo sapien
tgactacataatgagttattcgacc

SEQ ID NO: 1351262 - DNA, 25 bp, Homo sapien
aagagcttgactacataatgagtta

SEQ ID NO: 1351263 - DNA, 25 bp, Homo sapien
gcttgactacataatgagttattcg

SEQ ID NO: 1351264 - DNA, 25 bp, Homo sapien
ctttggtcctcgagtcttggtagtt

SEQ ID NO: 1351265 - DNA, 25 bp, Homo sapien
caactctcgctggaatgaagctgct

SEQ ID NO: 1351266 - DNA, 25 bp, Homo sapien
caagtaatgctttatcttcaggagg

SEQ ID NO: 1351267 - DNA, 25 bp, Homo sapien
ggcaacagctaacaaattttcatac

SEQ ID NO: 1351268 - DNA, 25 bp, Homo sapien
tgaaaggaaggtctgaaaggcaaca

SEQ ID NO: 1351269 - DNA, 25 bp, Homo sapien
gcaagaacgccctcacacattcctt

SEQ ID NO: 1351270 - DNA, 25 bp, Homo sapien
tgagtgcaagaacgccctcacacat

SEQ ID NO: 1351271 - DNA, 25 bp, Homo sapien
agtgcaagaacgccctcacacattc

SEQ ID NO: 1351272 - DNA, 25 bp, Homo sapien
catgagtgcaagaacgccctcacac

SEQ ID NO: 1351273 - DNA, 25 bp, Homo sapien
gctttcgtacttgagcgagtctctc

SEQ ID NO: 1351274 - DNA, 25 bp, Homo sapien
tataattccccatatgtcgattttc

SEQ ID NO: 1351275 - DNA, 25 bp, Homo sapien
tgttcttctcgtgagatctgctttc

SEQ ID NO: 1351276 - DNA, 25 bp, Homo sapien
ccccatatgtcgattttcatgttct

SEQ ID NO: 1351277 - DNA, 25 bp, Homo sapien
gaattttgaccatagagcctccttt

SEQ ID NO: 1351278 - DNA, 25 bp, Homo sapien
tgaattttgaccatagagcctcctt

SEQ ID NO: 1351279 - DNA, 25 bp, Homo sapien
ttgaattttgaccatagagcctcct

SEQ ID NO: 1351280 - DNA, 25 bp, Homo sapien
tattctagaactcgaacaagttctg

SEQ ID NO: 1351281 - DNA, 25 bp, Homo sapien
gaactcgaacaagttctgatcttat

SEQ ID NO: 1351282 - DNA, 25 bp, Homo sapien
tctagaactcgaacaagttctgatc

SEQ ID NO: 1351283 - DNA, 25 bp, Homo sapien
actcgaacaagttctgatcttatcc

SEQ ID NO: 1351284 - DNA, 25 bp, Homo sapien
aacctcatttactgcaggtacagac

SEQ ID NO: 1351285 - DNA, 25 bp, Homo sapien
aatttaacctcatttactgcaggta

SEQ ID NO: 1351286 - DNA, 25 bp, Homo sapien
ttaacctcatttactgcaggtacag

SEQ ID NO: 1351287 - DNA, 25 bp, Homo sapien
tacattgaaatttaacctcatttac

SEQ ID NO: 1351288 - DNA, 25 bp, Homo sapien
cttatgtttagtagcttcaacgcat

SEQ ID NO: 1351289 - DNA, 25 bp, Homo sapien
tagcttcaacgcatttagcagcact

SEQ ID NO: 1351290 - DNA, 25 bp, Homo sapien
catagtctattttctgatcagttcc

SEQ ID NO: 1351291 - DNA, 25 bp, Homo sapien
tgtttagtagcttcaacgcatttag

SEQ ID NO: 1351292 - DNA, 25 bp, Homo sapien
gcttgaaaacggcaataacatccat

SEQ ID NO: 1351293 - DNA, 25 bp, Homo sapien
tttcagtgtggaattgtgccaggca

SEQ ID NO: 1351294 - DNA, 25 bp, Homo sapien
taagcatttccctttgcaagtgcaa

SEQ ID NO: 1351295 - DNA, 25 bp, Homo sapien
ctgatgagtcagtggtccattggca

SEQ ID NO: 1351296 - DNA, 25 bp, Homo sapien
agggaagccccaggtatataacatg

SEQ ID NO: 1351297 - DNA, 25 bp, Homo sapien
ctgaaggcatacagttgacagtctc

SEQ ID NO: 1351298 - DNA, 25 bp, Homo sapien
ggaagccccaggtatataacatggc

SEQ ID NO: 1351299 - DNA, 25 bp, Homo sapien
ggtatataacatggccttaaaggag

SEQ ID NO: 1351300 - DNA, 25 bp, Homo sapien
cacctggggtatcgaatactgaata

SEQ ID NO: 1351301 - DNA, 25 bp, Homo sapien
gaaccaattggagcctctcggagag

SEQ ID NO: 1351302 - DNA, 25 bp, Homo sapien
gattaatgaaccaattggagcctct

SEQ ID NO: 1351303 - DNA, 25 bp, Homo sapien
gggtatcgaatactgaatactgatt

SEQ ID NO: 1351304 - DNA, 25 bp, Homo sapien
tcctggaggttgaccaggtctacac

SEQ ID NO: 1351305 - DNA, 25 bp, Homo sapien
ctggaggttgaccaggtctacacat

SEQ ID NO: 1351306 - DNA, 25 bp, Homo sapien
aaagcagacactttcgcttcctgga

SEQ ID NO: 1351307 - DNA, 25 bp, Homo sapien
ttcctggaggttgaccaggtctaca

SEQ ID NO: 1351308 - DNA, 25 bp, Homo sapien
gctacaatcagggtctttaccacca

SEQ ID NO: 1351309 - DNA, 25 bp, Homo sapien
ggacatgaggttctgctacaatcag
